United States Patent Application Publication US 2005/0287570 A1 - sequence listing, part 11

SEQ ID NO: 245315 - DNA, 25 bp, Artificial
  Probe
ctgaccaaaggaaaagcttgagaca

SEQ ID NO: 245316 - DNA, 25 bp, Artificial
  Probe
gctgaaagagcctgaggccatgcag

SEQ ID NO: 245317 - DNA, 25 bp, Artificial
  Probe
gcatattgaccgtggttgcagctaa

SEQ ID NO: 245318 - DNA, 25 bp, Artificial
  Probe
ttgtgtttgctcaaatgctctcttc

SEQ ID NO: 245319 - DNA, 25 bp, Artificial
  Probe
ctgtatctacatggttggctataat

SEQ ID NO: 245320 - DNA, 25 bp, Artificial
  Probe
gcctatgttattgtcctacaagcat

SEQ ID NO: 245321 - DNA, 25 bp, Artificial
  Probe
gcatctgactcattatccgccagac

SEQ ID NO: 245322 - DNA, 25 bp, Artificial
  Probe
cgaatcttgaactgcctatgttatt

SEQ ID NO: 245323 - DNA, 25 bp, Artificial
  Probe
ctcaggatactcaatgtgaaacaga

SEQ ID NO: 245324 - DNA, 25 bp, Artificial
  Probe
taacagaatccgaatcttgaactgc

SEQ ID NO: 245325 - DNA, 25 bp, Artificial
  Probe
ttccccgagattctcctaatagtag

SEQ ID NO: 245326 - DNA, 25 bp, Artificial
  Probe
gaaatctgagctgtagaagggcatc

SEQ ID NO: 245327 - DNA, 25 bp, Artificial
  Probe
acaagcatattgaccgtggttgcag

SEQ ID NO: 245328 - DNA, 25 bp, Artificial
  Probe
gtattttgtgtttgctcaaatgctc

SEQ ID NO: 245329 - DNA, 25 bp, Artificial
  Probe
tatctacatggttggctataattct

SEQ ID NO: 245330 - DNA, 25 bp, Artificial
  Probe
atgtgaaacagaaaccactctcatg

SEQ ID NO: 245331 - DNA, 25 bp, Artificial
  Probe
cgagattctcctaatagtagtaaag

SEQ ID NO: 245332 - DNA, 25 bp, Artificial
  Probe
attttgtgtttgctcaaatgctctc

SEQ ID NO: 245333 - DNA, 25 bp, Artificial
  Probe
atgttattgtcctacaagcatattg

SEQ ID NO: 245334 - DNA, 25 bp, Artificial
  Probe
gaaacagaaaccactctcatgtgta

SEQ ID NO: 245335 - DNA, 25 bp, Artificial
  Probe
gatattaactcaggatactcaatgt

SEQ ID NO: 245336 - DNA, 25 bp, Artificial
  Probe
ggatactcaatgtgaaacagaaacc

SEQ ID NO: 245337 - DNA, 25 bp, Artificial
  Probe
tgctctcttctgtatctacatggtt

SEQ ID NO: 245338 - DNA, 25 bp, Artificial
  Probe
ccgtggttgcagctaaagaaagaaa

SEQ ID NO: 245339 - DNA, 25 bp, Artificial
  Probe
gtttgctcaaatgctctcttctgta

SEQ ID NO: 245340 - DNA, 25 bp, Artificial
  Probe
gttattgtcctacaagcatattgac

SEQ ID NO: 245341 - DNA, 25 bp, Artificial
  Probe
actgcctatgttattgtcctacaag

SEQ ID NO: 245342 - DNA, 25 bp, Artificial
  Probe
attgtaacagaatccgaatcttgaa

SEQ ID NO: 245343 - DNA, 25 bp, Artificial
  Probe
actctcatgtgtaggcttcagaatg

SEQ ID NO: 245344 - DNA, 25 bp, Artificial
  Probe
gatactcaatgtgaaacagaaacca

SEQ ID NO: 245345 - DNA, 25 bp, Artificial
  Probe
ctgcctatgttattgtcctacaagc

SEQ ID NO: 245346 - DNA, 25 bp, Artificial
  Probe
tcatgtgtaggcttcagaatgcctc

SEQ ID NO: 245347 - DNA, 25 bp, Artificial
  Probe
gaaaccactctcatgtgtaggcttc

SEQ ID NO: 245348 - DNA, 25 bp, Artificial
  Probe
tagaagggcatctgactcattatcc

SEQ ID NO: 245349 - DNA, 25 bp, Artificial
  Probe
gtatctacatggttggctataattc

SEQ ID NO: 245350 - DNA, 25 bp, Artificial
  Probe
tcttgaactgcctatgttattgtcc

SEQ ID NO: 245351 - DNA, 25 bp, Artificial
  Probe
cagaatccgaatcttgaactgccta

SEQ ID NO: 245352 - DNA, 25 bp, Artificial
  Probe
cagaaaccactctcatgtgtaggct

SEQ ID NO: 245353 - DNA, 25 bp, Artificial
  Probe
aacagaaaccactctcatgtgtagg

SEQ ID NO: 245354 - DNA, 25 bp, Artificial
  Probe
atattgtaacagaatccgaatcttg

SEQ ID NO: 245355 - DNA, 25 bp, Artificial
  Probe
cttttctgaaacaacagagaatgta

SEQ ID NO: 245356 - DNA, 25 bp, Artificial
  Probe
ttatccgccagaccttcagtcagac

SEQ ID NO: 245357 - DNA, 25 bp, Artificial
  Probe
tattgtcctacaagcatattgaccg

SEQ ID NO: 245358 - DNA, 25 bp, Artificial
  Probe
atctgagctgtagaagggcatctga

SEQ ID NO: 245359 - DNA, 25 bp, Artificial
  Probe
ttaactcaggatactcaatgtgaaa

SEQ ID NO: 245360 - DNA, 25 bp, Artificial
  Probe
cattatccgccagaccttcagtcag

SEQ ID NO: 245361 - DNA, 25 bp, Artificial
  Probe
tgaactgcctatgttattgtcctac

SEQ ID NO: 245362 - DNA, 25 bp, Artificial
  Probe
gtgtttgctcaaatgctctcttctg

SEQ ID NO: 245363 - DNA, 25 bp, Artificial
  Probe
ggcagttacaacatcaagtcccgct

SEQ ID NO: 245364 - DNA, 25 bp, Artificial
  Probe
ctctttccgggtgaacagagagatc

SEQ ID NO: 245365 - DNA, 25 bp, Artificial
  Probe
ctgactacatggtcgggagctatgg

SEQ ID NO: 245366 - DNA, 25 bp, Artificial
  Probe
atctggagagcttcaagaaacagtc

SEQ ID NO: 245367 - DNA, 25 bp, Artificial
  Probe
gcccccaaaggcatgcttgctcggg

SEQ ID NO: 245368 - DNA, 25 bp, Artificial
  Probe
agagatcgtgtcaggcatgaagtac

SEQ ID NO: 245369 - DNA, 25 bp, Artificial
  Probe
ttggtgtgcagcactgccccaggcc

SEQ ID NO: 245370 - DNA, 25 bp, Artificial
  Probe
cagagagatcgtgtcaggcatgaag

SEQ ID NO: 245371 - DNA, 25 bp, Artificial
  Probe
cacccatggaagaggcccccaaagg

SEQ ID NO: 245372 - DNA, 25 bp, Artificial
  Probe
attgtgacccgcttgaccttggtgt

SEQ ID NO: 245373 - DNA, 25 bp, Artificial
  Probe
cctgctgggccgagtagctgtctct

SEQ ID NO: 245374 - DNA, 25 bp, Artificial
  Probe
caccatcaaaaaggaatggaaggac

SEQ ID NO: 245375 - DNA, 25 bp, Artificial
  Probe
agctgtctctgcagaccccaatgtc

SEQ ID NO: 245376 - DNA, 25 bp, Artificial
  Probe
cttgctcggggcagttacaacatca

SEQ ID NO: 245377 - DNA, 25 bp, Artificial
  Probe
tcgtgtcaggcatgaagtacatcca

SEQ ID NO: 245378 - DNA, 25 bp, Artificial
  Probe
aacagagagatcgtgtcaggcatga

SEQ ID NO: 245379 - DNA, 25 bp, Artificial
  Probe
gccttcgaaagtacaaggaggccct

SEQ ID NO: 245380 - DNA, 25 bp, Artificial
  Probe
gacaaaactgaccacctgtcctggg

SEQ ID NO: 245381 - DNA, 25 bp, Artificial
  Probe
gcatgaagtacatccagcacacata

SEQ ID NO: 245382 - DNA, 25 bp, Artificial
  Probe
tgaagtacatccagcacacatacag

SEQ ID NO: 245383 - DNA, 25 bp, Artificial
  Probe
ccttcgaaagtacaaggaggccctg

SEQ ID NO: 245384 - DNA, 25 bp, Artificial
  Probe
gctcggggcagttacaacatcaagt

SEQ ID NO: 245385 - DNA, 25 bp, Artificial
  Probe
aaactgaccacctgtcctgggagtg

SEQ ID NO: 245386 - DNA, 25 bp, Artificial
  Probe
ttcctgacacccatggaagaggccc

SEQ ID NO: 245387 - DNA, 25 bp, Artificial
  Probe
ccaggccctctggaactggacctga

SEQ ID NO: 245388 - DNA, 25 bp, Artificial
  Probe
gatgacaaaactgaccacctgtcct

SEQ ID NO: 245389 - DNA, 25 bp, Artificial
  Probe
agaggcccccaaaggcatgcttgct

SEQ ID NO: 245390 - DNA, 25 bp, Artificial
  Probe
aggcatgcttgctcggggcagttac

SEQ ID NO: 245391 - DNA, 25 bp, Artificial
  Probe
ttccgggtgaacagagagatcgtgt

SEQ ID NO: 245392 - DNA, 25 bp, Artificial
  Probe
gaaagccttcgaaagtacaaggagg

SEQ ID NO: 245393 - DNA, 25 bp, Artificial
  Probe
tacatggtcgggagctatgggccaa

SEQ ID NO: 245394 - DNA, 25 bp, Artificial
  Probe
agagcttcaagaaacagtcatttgt

SEQ ID NO: 245395 - DNA, 25 bp, Artificial
  Probe
atcgtgtcaggcatgaagtacatcc

SEQ ID NO: 245396 - DNA, 25 bp, Artificial
  Probe
cttcaagaaacagtcatttgtgttg

SEQ ID NO: 245397 - DNA, 25 bp, Artificial
  Probe
gccctctggaactggacctgacagg

SEQ ID NO: 245398 - DNA, 25 bp, Artificial
  Probe
gaagaggcccccaaaggcatgcttg

SEQ ID NO: 245399 - DNA, 25 bp, Artificial
  Probe
agtatgagttcctgacacccatgga

SEQ ID NO: 245400 - DNA, 25 bp, Artificial
  Probe
cacacatacaggaaaggggtcaaaa

SEQ ID NO: 245401 - DNA, 25 bp, Artificial
  Probe
tgacacccatggaagaggcccccaa

SEQ ID NO: 245402 - DNA, 25 bp, Artificial
  Probe
caccccaaaccaaagtgcttgacag

SEQ ID NO: 245403 - DNA, 25 bp, Artificial
  Probe
aattgacaagactgactacatggtc

SEQ ID NO: 245404 - DNA, 25 bp, Artificial
  Probe
cccaaaggcatgcttgctcggggca

SEQ ID NO: 245405 - DNA, 25 bp, Artificial
  Probe
gatctggagagcttcaagaaacagt

SEQ ID NO: 245406 - DNA, 25 bp, Artificial
  Probe
tgagttcctgacacccatggaagag

SEQ ID NO: 245407 - DNA, 25 bp, Artificial
  Probe
gagtggaatctcaccatcaaaaagg

SEQ ID NO: 245408 - DNA, 25 bp, Artificial
  Probe
gaccttggtgtgcagcactgcccca

SEQ ID NO: 245409 - DNA, 25 bp, Artificial
  Probe
tccgctgccagagcatagaaagaag

SEQ ID NO: 245410 - DNA, 25 bp, Artificial
  Probe
agtccggatcctcaggccacctgga

SEQ ID NO: 245411 - DNA, 25 bp, Artificial
  Probe
gtaggagtcaactccggcctttcgg

SEQ ID NO: 245412 - DNA, 25 bp, Artificial
  Probe
agaagcaacaaaactctgtgggcag

SEQ ID NO: 245413 - DNA, 25 bp, Artificial
  Probe
tttctgcctgccagtcagagttgtc

SEQ ID NO: 245414 - DNA, 25 bp, Artificial
  Probe
cctgcctgcccgtcaatgtcaataa

SEQ ID NO: 245415 - DNA, 25 bp, Artificial
  Probe
tcaactccggcctttcggaactgaa

SEQ ID NO: 245416 - DNA, 25 bp, Artificial
  Probe
ctctgtgggcagagatggcaaaaac

SEQ ID NO: 245417 - DNA, 25 bp, Artificial
  Probe
ttcgagactgggtgacctcaaccaa

SEQ ID NO: 245418 - DNA, 25 bp, Artificial
  Probe
ggtcacttccgctgccagagcatag

SEQ ID NO: 245419 - DNA, 25 bp, Artificial
  Probe
tctgtgggcagagatggcaaaaaca

SEQ ID NO: 245420 - DNA, 25 bp, Artificial
  Probe
agggattctctttctgcctgccagt

SEQ ID NO: 245421 - DNA, 25 bp, Artificial
  Probe
caagagccaggctccaagaagcctt

SEQ ID NO: 245422 - DNA, 25 bp, Artificial
  Probe
atgtgctctggtcacttccgctgcc

SEQ ID NO: 245423 - DNA, 25 bp, Artificial
  Probe
gccttcttgcttgcttctctgcggc

SEQ ID NO: 245424 - DNA, 25 bp, Artificial
  Probe
aggaagcctgcctgcccgtcaatgt

SEQ ID NO: 245425 - DNA, 25 bp, Artificial
  Probe
tgcagcgggtgtaggagtcaactcc

SEQ ID NO: 245426 - DNA, 25 bp, Artificial
  Probe
accaggctgtgaaagcaggaagcct

SEQ ID NO: 245427 - DNA, 25 bp, Artificial
  Probe
caggcaagagccaggctccaagaag

SEQ ID NO: 245428 - DNA, 25 bp, Artificial
  Probe
cgcctgaaggccagcctcgtgattc

SEQ ID NO: 245429 - DNA, 25 bp, Artificial
  Probe
tcgtgattccagtccggatcctcag

SEQ ID NO: 245430 - DNA, 25 bp, Artificial
  Probe
cataggtgagccaccaggctgtgaa

SEQ ID NO: 245431 - DNA, 25 bp, Artificial
  Probe
catgagcctctctgcttccttcgag

SEQ ID NO: 245432 - DNA, 25 bp, Artificial
  Probe
tgaaggccagcctcgtgattccagt

SEQ ID NO: 245433 - DNA, 25 bp, Artificial
  Probe
gcctgccagtcagagttgtcccctg

SEQ ID NO: 245434 - DNA, 25 bp, Artificial
  Probe
acccctctgctttggctagatgtat

SEQ ID NO: 245435 - DNA, 25 bp, Artificial
  Probe
aagcaggaagcctgcctgcccgtca

SEQ ID NO: 245436 - DNA, 25 bp, Artificial
  Probe
ttctctgactgcagcgggtgtagga

SEQ ID NO: 245437 - DNA, 25 bp, Artificial
  Probe
tggctagatgtattggctgtccctc

SEQ ID NO: 245438 - DNA, 25 bp, Artificial
  Probe
ttccttcgagactgggtgacctcaa

SEQ ID NO: 245439 - DNA, 25 bp, Artificial
  Probe
gtgtaggagtcaactccggcctttc

SEQ ID NO: 245440 - DNA, 25 bp, Artificial
  Probe
gagccaccaggctgtgaaagcagga

SEQ ID NO: 245441 - DNA, 25 bp, Artificial
  Probe
ctccaagaagccttcttgcttgctt

SEQ ID NO: 245442 - DNA, 25 bp, Artificial
  Probe
actgcagcgggtgtaggagtcaact

SEQ ID NO: 245443 - DNA, 25 bp, Artificial
  Probe
tgtctcgcctgaaggccagcctcgt

SEQ ID NO: 245444 - DNA, 25 bp, Artificial
  Probe
aagccatgcctcttctctgactgca

SEQ ID NO: 245445 - DNA, 25 bp, Artificial
  Probe
gccccggtgtgtctcgcctgaaggc

SEQ ID NO: 245446 - DNA, 25 bp, Artificial
  Probe
gtccggatcctcaggccacctggaa

SEQ ID NO: 245447 - DNA, 25 bp, Artificial
  Probe
ccggcctttcggaactgaagcagtc

SEQ ID NO: 245448 - DNA, 25 bp, Artificial
  Probe
gggtgacctcaaccaagccatgcct

SEQ ID NO: 245449 - DNA, 25 bp, Artificial
  Probe
caactccggcctttcggaactgaag

SEQ ID NO: 245450 - DNA, 25 bp, Artificial
  Probe
gtgtgtctcgcctgaaggccagcct

SEQ ID NO: 245451 - DNA, 25 bp, Artificial
  Probe
caacaaaactctgtgggcagagatg

SEQ ID NO: 245452 - DNA, 25 bp, Artificial
  Probe
gatcctcaggccacctggaagcagc

SEQ ID NO: 245453 - DNA, 25 bp, Artificial
  Probe
ttttagggattctctttctgcctgc

SEQ ID NO: 245454 - DNA, 25 bp, Artificial
  Probe
agtggctccataggtgagccaccag

SEQ ID NO: 245455 - DNA, 25 bp, Artificial
  Probe
ttggtcttaggtcttcccatggctc

SEQ ID NO: 245456 - DNA, 25 bp, Artificial
  Probe
attcttgttattattgttaataata

SEQ ID NO: 245457 - DNA, 25 bp, Artificial
  Probe
aattcgcatgtttaatgtgacttcc

SEQ ID NO: 245458 - DNA, 25 bp, Artificial
  Probe
ccctctctcctggactggttattct

SEQ ID NO: 245459 - DNA, 25 bp, Artificial
  Probe
ggtcttaggtcttcccatggctccc

SEQ ID NO: 245460 - DNA, 25 bp, Artificial
  Probe
tctcctggactggttattcttgtta

SEQ ID NO: 245461 - DNA, 25 bp, Artificial
  Probe
attcgcatgtttaatgtgacttccc

SEQ ID NO: 245462 - DNA, 25 bp, Artificial
  Probe
tggtcttaggtcttcccatggctcc

SEQ ID NO: 245463 - DNA, 25 bp, Artificial
  Probe
ccttccaatcttccctgcactgccg

SEQ ID NO: 245464 - DNA, 25 bp, Artificial
  Probe
ctctcctggactggttattcttgtt

SEQ ID NO: 245465 - DNA, 25 bp, Artificial
  Probe
tcgtttggtcttaggtcttcccatg

SEQ ID NO: 245466 - DNA, 25 bp, Artificial
  Probe
tcttcccatggctccctctctcctg

SEQ ID NO: 245467 - DNA, 25 bp, Artificial
  Probe
ttgccagtgtttctgaatgtcctcg

SEQ ID NO: 245468 - DNA, 25 bp, Artificial
  Probe
gtttctgaatgtcctcgtgtctgtg

SEQ ID NO: 245469 - DNA, 25 bp, Artificial
  Probe
tcctggactggttattcttgttatt

SEQ ID NO: 245470 - DNA, 25 bp, Artificial
  Probe
ggcccaagagcccgcaccacgccca

SEQ ID NO: 245471 - DNA, 25 bp, Artificial
  Probe
ggaccagttcccacgcgcctgtccc

SEQ ID NO: 245472 - DNA, 25 bp, Artificial
  Probe
tgccagtgtttctgaatgtcctcgt

SEQ ID NO: 245473 - DNA, 25 bp, Artificial
  Probe
gccagtgtttctgaatgtcctcgtg

SEQ ID NO: 245474 - DNA, 25 bp, Artificial
  Probe
gtgtttctgaatgtcctcgtgtctg

SEQ ID NO: 245475 - DNA, 25 bp, Artificial
  Probe
agttgccagtgtttctgaatgtcct

SEQ ID NO: 245476 - DNA, 25 bp, Artificial
  Probe
gctcgcccccaagttgccagtgttt

SEQ ID NO: 245477 - DNA, 25 bp, Artificial
  Probe
gtttggtcttaggtcttcccatggc

SEQ ID NO: 245478 - DNA, 25 bp, Artificial
  Probe
tctctcctggactggttattcttgt

SEQ ID NO: 245479 - DNA, 25 bp, Artificial
  Probe
cctctctcctggactggttattctt

SEQ ID NO: 245480 - DNA, 25 bp, Artificial
  Probe
aaattcgcatgtttaatgtgacttc

SEQ ID NO: 245481 - DNA, 25 bp, Artificial
  Probe
ctctctcctggactggttattcttg

SEQ ID NO: 245482 - DNA, 25 bp, Artificial
  Probe
cagtgtttctgaatgtcctcgtgtc

SEQ ID NO: 245483 - DNA, 25 bp, Artificial
  Probe
ccagtgtttctgaatgtcctcgtgt

SEQ ID NO: 245484 - DNA, 25 bp, Artificial
  Probe
gttgccagtgtttctgaatgtcctc

SEQ ID NO: 245485 - DNA, 25 bp, Artificial
  Probe
ttcgtttggtcttaggtcttcccat

SEQ ID NO: 245486 - DNA, 25 bp, Artificial
  Probe
aagttgccagtgtttctgaatgtcc

SEQ ID NO: 245487 - DNA, 25 bp, Artificial
  Probe
cctggactggttattcttgttatta

SEQ ID NO: 245488 - DNA, 25 bp, Artificial
  Probe
ctcctggactggttattcttgttat

SEQ ID NO: 245489 - DNA, 25 bp, Artificial
  Probe
atgtttaatgtgacttcccactccc

SEQ ID NO: 245490 - DNA, 25 bp, Artificial
  Probe
ccaagttgccagtgtttctgaatgt

SEQ ID NO: 245491 - DNA, 25 bp, Artificial
  Probe
ccccaagttgccagtgtttctgaat

SEQ ID NO: 245492 - DNA, 25 bp, Artificial
  Probe
caagttgccagtgtttctgaatgtc

SEQ ID NO: 245493 - DNA, 25 bp, Artificial
  Probe
cccccaagttgccagtgtttctgaa

SEQ ID NO: 245494 - DNA, 25 bp, Artificial
  Probe
tgtttctgaatgtcctcgtgtctgt

SEQ ID NO: 245495 - DNA, 25 bp, Artificial
  Probe
tttggtcttaggtcttcccatggct

SEQ ID NO: 245496 - DNA, 25 bp, Artificial
  Probe
tccctctctcctggactggttattc

SEQ ID NO: 245497 - DNA, 25 bp, Artificial
  Probe
cgtttggtcttaggtcttcccatgg

SEQ ID NO: 245498 - DNA, 25 bp, Artificial
  Probe
agtgtttctgaatgtcctcgtgtct

SEQ ID NO: 245499 - DNA, 25 bp, Artificial
  Probe
cccaagttgccagtgtttctgaatg

SEQ ID NO: 245500 - DNA, 25 bp, Artificial
  Probe
gtcttaggtcttcccatggctccct

SEQ ID NO: 245501 - DNA, 25 bp, Artificial
  Probe
aggagtgaactctcagacccttgaa

SEQ ID NO: 245502 - DNA, 25 bp, Artificial
  Probe
gatgctcctgtcagtgtcctcaagg

SEQ ID NO: 245503 - DNA, 25 bp, Artificial
  Probe
tcctgtcagtgtcctcaaggctcca

SEQ ID NO: 245504 - DNA, 25 bp, Artificial
  Probe
tgtcagtgtcctcaaggctccacca

SEQ ID NO: 245505 - DNA, 25 bp, Artificial
  Probe
ctcctttcggcctagtcagatgggt

SEQ ID NO: 245506 - DNA, 25 bp, Artificial
  Probe
agagatgctcctgtcagtgtcctca

SEQ ID NO: 245507 - DNA, 25 bp, Artificial
  Probe
gtcatgtgacctattactctgacat

SEQ ID NO: 245508 - DNA, 25 bp, Artificial
  Probe
cgggctaccacatggtccctgtcat

SEQ ID NO: 245509 - DNA, 25 bp, Artificial
  Probe
gacaaaccgaccacaattagagaag

SEQ ID NO: 245510 - DNA, 25 bp, Artificial
  Probe
gtccctgtcatgtgacctattactc

SEQ ID NO: 245511 - DNA, 25 bp, Artificial
  Probe
acttaagtggctgcagaaccagcaa

SEQ ID NO: 245512 - DNA, 25 bp, Artificial
  Probe
caagacaaaccgaccacaattagag

SEQ ID NO: 245513 - DNA, 25 bp, Artificial
  Probe
gaagatgtagcttccggatttgaac

SEQ ID NO: 245514 - DNA, 25 bp, Artificial
  Probe
aacttaagtggctgcagaaccagca

SEQ ID NO: 245515 - DNA, 25 bp, Artificial
  Probe
actctcagacccttgaagatgtagc

SEQ ID NO: 245516 - DNA, 25 bp, Artificial
  Probe
tagcttccggatttgaaccgattaa

SEQ ID NO: 245517 - DNA, 25 bp, Artificial
  Probe
ccttgaagatgtagcttccggattt

SEQ ID NO: 245518 - DNA, 25 bp, Artificial
  Probe
gtagcttccggatttgaaccgatta

SEQ ID NO: 245519 - DNA, 25 bp, Artificial
  Probe
ccacatggtccctgtcatgtgacct

SEQ ID NO: 245520 - DNA, 25 bp, Artificial
  Probe
tgtagcttccggatttgaaccgatt

SEQ ID NO: 245521 - DNA, 25 bp, Artificial
  Probe
aaacggcacctagagatgctcctgt

SEQ ID NO: 245522 - DNA, 25 bp, Artificial
  Probe
tccctaaagtgtaacttaagtggct

SEQ ID NO: 245523 - DNA, 25 bp, Artificial
  Probe
gtgaactctcagacccttgaagatg

SEQ ID NO: 245524 - DNA, 25 bp, Artificial
  Probe
gctgcagaaccagcaacctgtaacc

SEQ ID NO: 245525 - DNA, 25 bp, Artificial
  Probe
cctagagatgctcctgtcagtgtcc

SEQ ID NO: 245526 - DNA, 25 bp, Artificial
  Probe
cttgaagatgtagcttccggatttg

SEQ ID NO: 245527 - DNA, 25 bp, Artificial
  Probe
tcagtgtcctcaaggctccaccaag

SEQ ID NO: 245528 - DNA, 25 bp, Artificial
  Probe
gtctacctgctcctttcggcctagt

SEQ ID NO: 245529 - DNA, 25 bp, Artificial
  Probe
ccgcccttcaaatggcatgaggagg

SEQ ID NO: 245530 - DNA, 25 bp, Artificial
  Probe
tacctgctcctttcggcctagtcag

SEQ ID NO: 245531 - DNA, 25 bp, Artificial
  Probe
tgtcatgtgacctattactctgaca

SEQ ID NO: 245532 - DNA, 25 bp, Artificial
  Probe
gctcctgtcagtgtcctcaaggctc

SEQ ID NO: 245533 - DNA, 25 bp, Artificial
  Probe
gctaccacatggtccctgtcatgtg

SEQ ID NO: 245534 - DNA, 25 bp, Artificial
  Probe
acccttgaagatgtagcttccggat

SEQ ID NO: 245535 - DNA, 25 bp, Artificial
  Probe
caaaccgaccacaattagagaagcc

SEQ ID NO: 245536 - DNA, 25 bp, Artificial
  Probe
tagagaagcctttccctaaagtgta

SEQ ID NO: 245537 - DNA, 25 bp, Artificial
  Probe
tgcagaaccagcaacctgtaaccgc

SEQ ID NO: 245538 - DNA, 25 bp, Artificial
  Probe
ccgaccacaattagagaagcctttc

SEQ ID NO: 245539 - DNA, 25 bp, Artificial
  Probe
ccctgtcatgtgacctattactctg

SEQ ID NO: 245540 - DNA, 25 bp, Artificial
  Probe
gcttccggatttgaaccgattaaat

SEQ ID NO: 245541 - DNA, 25 bp, Artificial
  Probe
ctctcagacccttgaagatgtagct

SEQ ID NO: 245542 - DNA, 25 bp, Artificial
  Probe
tgtaaccgcccttcaaatggcatga

SEQ ID NO: 245543 - DNA, 25 bp, Artificial
  Probe
ctttcggcctagtcagatgggtgta

SEQ ID NO: 245544 - DNA, 25 bp, Artificial
  Probe
ttccggatttgaaccgattaaatgg

SEQ ID NO: 245545 - DNA, 25 bp, Artificial
  Probe
ggatttgaaccgattaaatggcacc

SEQ ID NO: 245546 - DNA, 25 bp, Artificial
  Probe
attagagaagcctttccctaaagtg

SEQ ID NO: 245547 - DNA, 25 bp, Artificial
  Probe
aggcaagggccctcaggcttcacag

SEQ ID NO: 245548 - DNA, 25 bp, Artificial
  Probe
ggacaaatattctgaactgggacgg

SEQ ID NO: 245549 - DNA, 25 bp, Artificial
  Probe
gaccaggccgaagcaggccttcctg

SEQ ID NO: 245550 - DNA, 25 bp, Artificial
  Probe
caacttgattgcaggctccacttcc

SEQ ID NO: 245551 - DNA, 25 bp, Artificial
  Probe
tgattgcaggctccacttccattcc

SEQ ID NO: 245552 - DNA, 25 bp, Artificial
  Probe
ccaggcgtctgtggagctgactgcc

SEQ ID NO: 245553 - DNA, 25 bp, Artificial
  Probe
ccaggctctcggagacatcagccag

SEQ ID NO: 245554 - DNA, 25 bp, Artificial
  Probe
gggccctcaggcttcacagcaagaa

SEQ ID NO: 245555 - DNA, 25 bp, Artificial
  Probe
ggcacgaggaggaccccaggctctc

SEQ ID NO: 245556 - DNA, 25 bp, Artificial
  Probe
atcagccaggcgtctgtggagctga

SEQ ID NO: 245557 - DNA, 25 bp, Artificial
  Probe
caagcaactagacattggagagata

SEQ ID NO: 245558 - DNA, 25 bp, Artificial
  Probe
gactgccttcaattcaagcaactag

SEQ ID NO: 245559 - DNA, 25 bp, Artificial
  Probe
gagctatgtccctcttcttaggacc

SEQ ID NO: 245560 - DNA, 25 bp, Artificial
  Probe
gtcacctcgtcaagggtggcatcgg

SEQ ID NO: 245561 - DNA, 25 bp, Artificial
  Probe
tctgcctgtgtcagggacaaatatt

SEQ ID NO: 245562 - DNA, 25 bp, Artificial
  Probe
ccaggccgaagcaggccttcctgtg

SEQ ID NO: 245563 - DNA, 25 bp, Artificial
  Probe
tcaagggtggcatcggctccatctc

SEQ ID NO: 245564 - DNA, 25 bp, Artificial
  Probe
cttcttaggaccaggccgaagcagg

SEQ ID NO: 245565 - DNA, 25 bp, Artificial
  Probe
ttgattgcaggctccacttccattc

SEQ ID NO: 245566 - DNA, 25 bp, Artificial
  Probe
cttcctgtggcctgtggtaggcttg

SEQ ID NO: 245567 - DNA, 25 bp, Artificial
  Probe
gcaagggccctcaggcttcacagca

SEQ ID NO: 245568 - DNA, 25 bp, Artificial
  Probe
gagctgactgccttcaattcaagca

SEQ ID NO: 245569 - DNA, 25 bp, Artificial
  Probe
caggccttcctgtggcctgtggtag

SEQ ID NO: 245570 - DNA, 25 bp, Artificial
  Probe
ccctgtccccgaagcagaagagggg

SEQ ID NO: 245571 - DNA, 25 bp, Artificial
  Probe
cccctgtccccgaagcagaagaggg

SEQ ID NO: 245572 - DNA, 25 bp, Artificial
  Probe
ttcacagcaagaagaaacaacttga

SEQ ID NO: 245573 - DNA, 25 bp, Artificial
  Probe
ttcaattcaagcaactagacattgg

SEQ ID NO: 245574 - DNA, 25 bp, Artificial
  Probe
tgtggagctgactgccttcaattca

SEQ ID NO: 245575 - DNA, 25 bp, Artificial
  Probe
aggaccccaggctctcggagacatc

SEQ ID NO: 245576 - DNA, 25 bp, Artificial
  Probe
aatcaccctggtcacctcgtcaagg

SEQ ID NO: 245577 - DNA, 25 bp, Artificial
  Probe
gtcttcagattcaaagggcccaaat

SEQ ID NO: 245578 - DNA, 25 bp, Artificial
  Probe
tagaatgtctacaggacagagctat

SEQ ID NO: 245579 - DNA, 25 bp, Artificial
  Probe
caaatattctgaactgggacggaaa

SEQ ID NO: 245580 - DNA, 25 bp, Artificial
  Probe
gagacatcagccaggcgtctgtgga

SEQ ID NO: 245581 - DNA, 25 bp, Artificial
  Probe
gaccccaggctctcggagacatcag

SEQ ID NO: 245582 - DNA, 25 bp, Artificial
  Probe
ctcggagacatcagccaggcgtctg

SEQ ID NO: 245583 - DNA, 25 bp, Artificial
  Probe
ccgagtctgcctgtgtcagggacaa

SEQ ID NO: 245584 - DNA, 25 bp, Artificial
  Probe
gaaacaacttgattgcaggctccac

SEQ ID NO: 245585 - DNA, 25 bp, Artificial
  Probe
gtaggcttggagactggagtcttca

SEQ ID NO: 245586 - DNA, 25 bp, Artificial
  Probe
gacagagctatgtccctcttcttag

SEQ ID NO: 245587 - DNA, 25 bp, Artificial
  Probe
gtcaagggtggcatcggctccatct

SEQ ID NO: 245588 - DNA, 25 bp, Artificial
  Probe
caaagggcccaaatcaccctggtca

SEQ ID NO: 245589 - DNA, 25 bp, Artificial
  Probe
cctcgtcaagggtggcatcggctcc

SEQ ID NO: 245590 - DNA, 25 bp, Artificial
  Probe
aggagctgacggacttgaaaaggcc

SEQ ID NO: 245591 - DNA, 25 bp, Artificial
  Probe
ccgaagcaggccttcctgtggcctg

SEQ ID NO: 245592 - DNA, 25 bp, Artificial
  Probe
ttcaaagggcccaaatcaccctggt

SEQ ID NO: 245593 - DNA, 25 bp, Artificial
  Probe
cttctgaagaactatggtgacacgg

SEQ ID NO: 245594 - DNA, 25 bp, Artificial
  Probe
aactagtgggagtgccaagggtaca

SEQ ID NO: 245595 - DNA, 25 bp, Artificial
  Probe
aactatggtgacacggtcatcttta

SEQ ID NO: 245596 - DNA, 25 bp, Artificial
  Probe
ggtcttacactgacgcaccaggtag

SEQ ID NO: 245597 - DNA, 25 bp, Artificial
  Probe
ttccattcagccaagcatctggact

SEQ ID NO: 245598 - DNA, 25 bp, Artificial
  Probe
tgctgtgtgacatgttcaaaaacta

SEQ ID NO: 245599 - DNA, 25 bp, Artificial
  Probe
gagctcctcttcttccgaaagacca

SEQ ID NO: 245600 - DNA, 25 bp, Artificial
  Probe
tttgggaaattgcttctcctgctcc

SEQ ID NO: 245601 - DNA, 25 bp, Artificial
  Probe
aagggtacaggctcctgggcaacac

SEQ ID NO: 245602 - DNA, 25 bp, Artificial
  Probe
acctctcaggtttgggaaattgctt

SEQ ID NO: 245603 - DNA, 25 bp, Artificial
  Probe
aggtagtttattccattcagccaag

SEQ ID NO: 245604 - DNA, 25 bp, Artificial
  Probe
ggtgtaggtcccaacgtagtctagc

SEQ ID NO: 245605 - DNA, 25 bp, Artificial
  Probe
tgccaagggtacaggctcctgggca

SEQ ID NO: 245606 - DNA, 25 bp, Artificial
  Probe
agaactatggtgacacggtcatctt

SEQ ID NO: 245607 - DNA, 25 bp, Artificial
  Probe
gacataggtgtaggtcccaacgtag

SEQ ID NO: 245608 - DNA, 25 bp, Artificial
  Probe
ctgctcccatccttgaggttcatca

SEQ ID NO: 245609 - DNA, 25 bp, Artificial
  Probe
catgttcaaaaactagtgggagtgc

SEQ ID NO: 245610 - DNA, 25 bp, Artificial
  Probe
gcatcgagctcctcttcttccgaaa

SEQ ID NO: 245611 - DNA, 25 bp, Artificial
  Probe
ccacatgcaggtatttgtaccttgc

SEQ ID NO: 245612 - DNA, 25 bp, Artificial
  Probe
gtagtttattccattcagccaagca

SEQ ID NO: 245613 - DNA, 25 bp, Artificial
  Probe
ttcaaaaactagtgggagtgccaag

SEQ ID NO: 245614 - DNA, 25 bp, Artificial
  Probe
gggaaattgcttctcctgctcccat

SEQ ID NO: 245615 - DNA, 25 bp, Artificial
  Probe
ggagaagctgctgtgtgacatgttc

SEQ ID NO: 245616 - DNA, 25 bp, Artificial
  Probe
gtggcagacataggtgtaggtccca

SEQ ID NO: 245617 - DNA, 25 bp, Artificial
  Probe
cctcttcttccgaaagaccataggg

SEQ ID NO: 245618 - DNA, 25 bp, Artificial
  Probe
acactgtctgccatcttctgaagaa

SEQ ID NO: 245619 - DNA, 25 bp, Artificial
  Probe
gaccacactgtctgccatcttctga

SEQ ID NO: 245620 - DNA, 25 bp, Artificial
  Probe
atagctatggccaactggtgcaggc

SEQ ID NO: 245621 - DNA, 25 bp, Artificial
  Probe
aggctcctgggcaacacatcttcga

SEQ ID NO: 245622 - DNA, 25 bp, Artificial
  Probe
agaccacactgtctgccatcttctg

SEQ ID NO: 245623 - DNA, 25 bp, Artificial
  Probe
cataggtgtaggtcccaacgtagtc

SEQ ID NO: 245624 - DNA, 25 bp, Artificial
  Probe
acagctgagcgcatcgagctcctct

SEQ ID NO: 245625 - DNA, 25 bp, Artificial
  Probe
atggtgacacggtcatctttagtca

SEQ ID NO: 245626 - DNA, 25 bp, Artificial
  Probe
ctcatccagtaattccacatgcagg

SEQ ID NO: 245627 - DNA, 25 bp, Artificial
  Probe
gaaacatagctatggccaactggtg

SEQ ID NO: 245628 - DNA, 25 bp, Artificial
  Probe
atgcaggtatttgtaccttgcagaa

SEQ ID NO: 245629 - DNA, 25 bp, Artificial
  Probe
caatggagaagctgctgtgtgacat

SEQ ID NO: 245630 - DNA, 25 bp, Artificial
  Probe
gactcttctagaccacactgtctgc

SEQ ID NO: 245631 - DNA, 25 bp, Artificial
  Probe
tcatcacagctgagcgcatcgagct

SEQ ID NO: 245632 - DNA, 25 bp, Artificial
  Probe
tatggccaactggtgcaggctgtgc

SEQ ID NO: 245633 - DNA, 25 bp, Artificial
  Probe
ggtacaggctcctgggcaacacatc

SEQ ID NO: 245634 - DNA, 25 bp, Artificial
  Probe
aagaccatagggaacactccaatgg

SEQ ID NO: 245635 - DNA, 25 bp, Artificial
  Probe
ttacactgacgcaccaggtagttta

SEQ ID NO: 245636 - DNA, 25 bp, Artificial
  Probe
tgagcgcatcgagctcctcttcttc

SEQ ID NO: 245637 - DNA, 25 bp, Artificial
  Probe
ttccgaaagaccatagggaacactc

SEQ ID NO: 245638 - DNA, 25 bp, Artificial
  Probe
ggcaacacatcttcgaagctaaata

SEQ ID NO: 245639 - DNA, 25 bp, Artificial
  Probe
accttcaggtagcagtggtcctggc

SEQ ID NO: 245640 - DNA, 25 bp, Artificial
  Probe
agctgggacgatccttgcaggagcc

SEQ ID NO: 245641 - DNA, 25 bp, Artificial
  Probe
tggacggcagcctccactctcaggt

SEQ ID NO: 245642 - DNA, 25 bp, Artificial
  Probe
agcaggttcagatggcaggtgctcc

SEQ ID NO: 245643 - DNA, 25 bp, Artificial
  Probe
atggcaggtgctccaaaccagcagc

SEQ ID NO: 245644 - DNA, 25 bp, Artificial
  Probe
ttctaattggcgaccttcaggtagc

SEQ ID NO: 245645 - DNA, 25 bp, Artificial
  Probe
agtccagatggctcaagcaggccag

SEQ ID NO: 245646 - DNA, 25 bp, Artificial
  Probe
ggagcctcaggattgcagcaggttc

SEQ ID NO: 245647 - DNA, 25 bp, Artificial
  Probe
caggtagcagtggtcctggccaacc

SEQ ID NO: 245648 - DNA, 25 bp, Artificial
  Probe
agatggcaggtgctccaaaccagca

SEQ ID NO: 245649 - DNA, 25 bp, Artificial
  Probe
gacgatccttgcaggagcctcagga

SEQ ID NO: 245650 - DNA, 25 bp, Artificial
  Probe
ccaggagctgggacgatccttgcag

SEQ ID NO: 245651 - DNA, 25 bp, Artificial
  Probe
cttgcaggagcctcaggattgcagc

SEQ ID NO: 245652 - DNA, 25 bp, Artificial
  Probe
cagcctccactctcaggtgatctgt

SEQ ID NO: 245653 - DNA, 25 bp, Artificial
  Probe
agcagcagccgatgctcagtggagt

SEQ ID NO: 245654 - DNA, 25 bp, Artificial
  Probe
gggctttctaattggcgaccttcag

SEQ ID NO: 245655 - DNA, 25 bp, Artificial
  Probe
agatggctcaagcaggccagccagg

SEQ ID NO: 245656 - DNA, 25 bp, Artificial
  Probe
ctcaagcaggccagccagggaaaat

SEQ ID NO: 245657 - DNA, 25 bp, Artificial
  Probe
caggattgcagcaggttcagatggc

SEQ ID NO: 245658 - DNA, 25 bp, Artificial
  Probe
tgctcagtggagtccagatggctca

SEQ ID NO: 245659 - DNA, 25 bp, Artificial
  Probe
gccgatgctcagtggagtccagatg

SEQ ID NO: 245660 - DNA, 25 bp, Artificial
  Probe
tgcaggagcctcaggattgcagcag

SEQ ID NO: 245661 - DNA, 25 bp, Artificial
  Probe
ggggctttctaattggcgaccttca

SEQ ID NO: 245662 - DNA, 25 bp, Artificial
  Probe
agccgatgctcagtggagtccagat

SEQ ID NO: 245663 - DNA, 25 bp, Artificial
  Probe
aggattgcagcaggttcagatggca

SEQ ID NO: 245664 - DNA, 25 bp, Artificial
  Probe
tgctccaaaccagcagcagccgatg

SEQ ID NO: 245665 - DNA, 25 bp, Artificial
  Probe
gcaggtgctccaaaccagcagcagc

SEQ ID NO: 245666 - DNA, 25 bp, Artificial
  Probe
cagcaggttcagatggcaggtgctc

SEQ ID NO: 245667 - DNA, 25 bp, Artificial
  Probe
agcaggccagccagggaaaatgcca

SEQ ID NO: 245668 - DNA, 25 bp, Artificial
  Probe
caggagcctcaggattgcagcaggt

SEQ ID NO: 245669 - DNA, 25 bp, Artificial
  Probe
gccagccaggagctgggacgatcct

SEQ ID NO: 245670 - DNA, 25 bp, Artificial
  Probe
gggacgatccttgcaggagcctcag

SEQ ID NO: 245671 - DNA, 25 bp, Artificial
  Probe
caaaccagcagcagccgatgctcag

SEQ ID NO: 245672 - DNA, 25 bp, Artificial
  Probe
agtggagtccagatggctcaagcag

SEQ ID NO: 245673 - DNA, 25 bp, Artificial
  Probe
gtccagatggctcaagcaggccagc

SEQ ID NO: 245674 - DNA, 25 bp, Artificial
  Probe
ccagccaggagctgggacgatcctt

SEQ ID NO: 245675 - DNA, 25 bp, Artificial
  Probe
aggtgctccaaaccagcagcagccg

SEQ ID NO: 245676 - DNA, 25 bp, Artificial
  Probe
ggttcagatggcaggtgctccaaac

SEQ ID NO: 245677 - DNA, 25 bp, Artificial
  Probe
ttgcaggagcctcaggattgcagca

SEQ ID NO: 245678 - DNA, 25 bp, Artificial
  Probe
ggtagcagtggtcctggccaacctg

SEQ ID NO: 245679 - DNA, 25 bp, Artificial
  Probe
cagcagcagccgatgctcagtggag

SEQ ID NO: 245680 - DNA, 25 bp, Artificial
  Probe
tggcaggtgctccaaaccagcagca

SEQ ID NO: 245681 - DNA, 25 bp, Artificial
  Probe
attgcagcaggttcagatggcaggt

SEQ ID NO: 245682 - DNA, 25 bp, Artificial
  Probe
ttggcgaccttcaggtagcagtggt

SEQ ID NO: 245683 - DNA, 25 bp, Artificial
  Probe
gcctccactctcaggtgatctgtgc

SEQ ID NO: 245684 - DNA, 25 bp, Artificial
  Probe
ctgggacgatccttgcaggagcctc

SEQ ID NO: 245685 - DNA, 25 bp, Artificial
  Probe
cccggggaactggagctgcccagct

SEQ ID NO: 245686 - DNA, 25 bp, Artificial
  Probe
tcacctcaacctagtgcgagcacag

SEQ ID NO: 245687 - DNA, 25 bp, Artificial
  Probe
ctgactgtcaacagtgagaagatgg

SEQ ID NO: 245688 - DNA, 25 bp, Artificial
  Probe
agtctggtcctgctgactctggatg

SEQ ID NO: 245689 - DNA, 25 bp, Artificial
  Probe
ctatgggtcccttagtgacttccca

SEQ ID NO: 245690 - DNA, 25 bp, Artificial
  Probe
gaagacagaagctgctccttcatca

SEQ ID NO: 245691 - DNA, 25 bp, Artificial
  Probe
gtatgtacttacgtagcaaatctca

SEQ ID NO: 245692 - DNA, 25 bp, Artificial
  Probe
ctggagctgcccagctgactgtcaa

SEQ ID NO: 245693 - DNA, 25 bp, Artificial
  Probe
gctgactctggatgcccggggaact

SEQ ID NO: 245694 - DNA, 25 bp, Artificial
  Probe
tggtgattggcaccatgctggtgaa

SEQ ID NO: 245695 - DNA, 25 bp, Artificial
  Probe
gcttcctatgggtcccttagtgact

SEQ ID NO: 245696 - DNA, 25 bp, Artificial
  Probe
ccctgtgacatctgctcacagatct

SEQ ID NO: 245697 - DNA, 25 bp, Artificial
  Probe
actagtgggagtctggtcctgctga

SEQ ID NO: 245698 - DNA, 25 bp, Artificial
  Probe
gctgactgtcaacagtgagaagatg

SEQ ID NO: 245699 - DNA, 25 bp, Artificial
  Probe
gcaccatgctggtgaaggatgtgat

SEQ ID NO: 245700 - DNA, 25 bp, Artificial
  Probe
ccatgctggtgaaggatgtgataca

SEQ ID NO: 245701 - DNA, 25 bp, Artificial
  Probe
tgattggcaccatgctggtgaagga

SEQ ID NO: 245702 - DNA, 25 bp, Artificial
  Probe
acgtagcaaatctcaataaaatgcg

SEQ ID NO: 245703 - DNA, 25 bp, Artificial
  Probe
ggagtctggtcctgctgactctgga

SEQ ID NO: 245704 - DNA, 25 bp, Artificial
  Probe
ttctgtatgtacttacgtagcaaat

SEQ ID NO: 245705 - DNA, 25 bp, Artificial
  Probe
tgtgatacaggctctgacacagtga

SEQ ID NO: 245706 - DNA, 25 bp, Artificial
  Probe
tctgacacagtgactgctcagcact

SEQ ID NO: 245707 - DNA, 25 bp, Artificial
  Probe
aggtcgtgttccttgtggggcatct

SEQ ID NO: 245708 - DNA, 25 bp, Artificial
  Probe
tcgtgttccttgtggggcatctgat

SEQ ID NO: 245709 - DNA, 25 bp, Artificial
  Probe
cctcagttttctgtatgtacttacg

SEQ ID NO: 245710 - DNA, 25 bp, Artificial
  Probe
tagtgacttcccagaggaagacaga

SEQ ID NO: 245711 - DNA, 25 bp, Artificial
  Probe
ttcccagaggaagacagaagctgct

SEQ ID NO: 245712 - DNA, 25 bp, Artificial
  Probe
gctcagcactgttacccactgatct

SEQ ID NO: 245713 - DNA, 25 bp, Artificial
  Probe
tgactagtgggagtctggtcctgct

SEQ ID NO: 245714 - DNA, 25 bp, Artificial
  Probe
acctcaacctagtgcgagcacagtc

SEQ ID NO: 245715 - DNA, 25 bp, Artificial
  Probe
cagtgactgctcagcactgttaccc

SEQ ID NO: 245716 - DNA, 25 bp, Artificial
  Probe
cagttttctgtatgtacttacgtag

SEQ ID NO: 245717 - DNA, 25 bp, Artificial
  Probe
ttggcaccatgctggtgaaggatgt

SEQ ID NO: 245718 - DNA, 25 bp, Artificial
  Probe
gtcgtgttccttgtggggcatctga

SEQ ID NO: 245719 - DNA, 25 bp, Artificial
  Probe
tggtcctgctgactctggatgcccg

SEQ ID NO: 245720 - DNA, 25 bp, Artificial
  Probe
tgggagtctggtcctgctgactctg

SEQ ID NO: 245721 - DNA, 25 bp, Artificial
  Probe
ttttctgtatgtacttacgtagcaa

SEQ ID NO: 245722 - DNA, 25 bp, Artificial
  Probe
atgcccggggaactggagctgccca

SEQ ID NO: 245723 - DNA, 25 bp, Artificial
  Probe
ctgctcagcactgttacccactgat

SEQ ID NO: 245724 - DNA, 25 bp, Artificial
  Probe
gacagaagctgctccttcatcaacc

SEQ ID NO: 245725 - DNA, 25 bp, Artificial
  Probe
tgcccagctgactgtcaacagtgag

SEQ ID NO: 245726 - DNA, 25 bp, Artificial
  Probe
cccttagtgacttcccagaggaaga

SEQ ID NO: 245727 - DNA, 25 bp, Artificial
  Probe
agtgggagtctggtcctgctgactc

SEQ ID NO: 245728 - DNA, 25 bp, Artificial
  Probe
aacctagtgcgagcacagtctccct

SEQ ID NO: 245729 - DNA, 25 bp, Artificial
  Probe
gtgacatctgctcacagatctctcc

SEQ ID NO: 245730 - DNA, 25 bp, Artificial
  Probe
atggtgattggcaccatgctggtga

SEQ ID NO: 245731 - DNA, 25 bp, Artificial
  Probe
cacttttggatcaaatccggcaagg

SEQ ID NO: 245732 - DNA, 25 bp, Artificial
  Probe
aaattcatctgtggtgaattcattc

SEQ ID NO: 245733 - DNA, 25 bp, Artificial
  Probe
cgcacttttggatcaaatccggcaa

SEQ ID NO: 245734 - DNA, 25 bp, Artificial
  Probe
attcatctgtggtgaattcattcaa

SEQ ID NO: 245735 - DNA, 25 bp, Artificial
  Probe
acaagacccctggagctatggagaa

SEQ ID NO: 245736 - DNA, 25 bp, Artificial
  Probe
ggggcgcacttttggatcaaatccg

SEQ ID NO: 245737 - DNA, 25 bp, Artificial
  Probe
aattcagctgaacaagacccctgga

SEQ ID NO: 245738 - DNA, 25 bp, Artificial
  Probe
aatccggcaaggaattcagctgaac

SEQ ID NO: 245739 - DNA, 25 bp, Artificial
  Probe
tcagcagtcagaaggcctagtgggt

SEQ ID NO: 245740 - DNA, 25 bp, Artificial
  Probe
cggggcgcacttttggatcaaatcc

SEQ ID NO: 245741 - DNA, 25 bp, Artificial
  Probe
ggcgcacttttggatcaaatccggc

SEQ ID NO: 245742 - DNA, 25 bp, Artificial
  Probe
gaattcagctgaacaagacccctgg

SEQ ID NO: 245743 - DNA, 25 bp, Artificial
  Probe
tccaaattcatctgtggtgaattca

SEQ ID NO: 245744 - DNA, 25 bp, Artificial
  Probe
caaattcatctgtggtgaattcatt

SEQ ID NO: 245745 - DNA, 25 bp, Artificial
  Probe
ttttggatcaaatccggcaaggaat

SEQ ID NO: 245746 - DNA, 25 bp, Artificial
  Probe
tcaaatccggcaaggaattcagctg

SEQ ID NO: 245747 - DNA, 25 bp, Artificial
  Probe
atcaaatccggcaaggaattcagct

SEQ ID NO: 245748 - DNA, 25 bp, Artificial
  Probe
gcttccaaattcatctgtggtgaat

SEQ ID NO: 245749 - DNA, 25 bp, Artificial
  Probe
aaatccggcaaggaattcagctgaa

SEQ ID NO: 245750 - DNA, 25 bp, Artificial
  Probe
aaggaattcagctgaacaagacccc

SEQ ID NO: 245751 - DNA, 25 bp, Artificial
  Probe
aggaattcagctgaacaagacccct

SEQ ID NO: 245752 - DNA, 25 bp, Artificial
  Probe
agcttccaaattcatctgtggtgaa

SEQ ID NO: 245753 - DNA, 25 bp, Artificial
  Probe
tcagcttccaaattcatctgtggtg

SEQ ID NO: 245754 - DNA, 25 bp, Artificial
  Probe
ttccaaattcatctgtggtgaattc

SEQ ID NO: 245755 - DNA, 25 bp, Artificial
  Probe
cttccaaattcatctgtggtgaatt

SEQ ID NO: 245756 - DNA, 25 bp, Artificial
  Probe
tcagctgaacaagacccctggagct

SEQ ID NO: 245757 - DNA, 25 bp, Artificial
  Probe
caaatccggcaaggaattcagctga

SEQ ID NO: 245758 - DNA, 25 bp, Artificial
  Probe
tgtcagcttccaaattcatctgtgg

SEQ ID NO: 245759 - DNA, 25 bp, Artificial
  Probe
ttacttcttcccacgcagggattaa

SEQ ID NO: 245760 - DNA, 25 bp, Artificial
  Probe
tcatccactcctcagatgaagggga

SEQ ID NO: 245761 - DNA, 25 bp, Artificial
  Probe
ttcatctgtggtgaattcattcaac

SEQ ID NO: 245762 - DNA, 25 bp, Artificial
  Probe
attcagctgaacaagacccctggag

SEQ ID NO: 245763 - DNA, 25 bp, Artificial
  Probe
gcacttttggatcaaatccggcaag

SEQ ID NO: 245764 - DNA, 25 bp, Artificial
  Probe
tcatcttccttcctgcaggccagtt

SEQ ID NO: 245765 - DNA, 25 bp, Artificial
  Probe
gcgcacttttggatcaaatccggca

SEQ ID NO: 245766 - DNA, 25 bp, Artificial
  Probe
acttttggatcaaatccggcaagga

SEQ ID NO: 245767 - DNA, 25 bp, Artificial
  Probe
ctgtcagcttccaaattcatctgtg

SEQ ID NO: 245768 - DNA, 25 bp, Artificial
  Probe
catccactcctcagatgaaggggag

SEQ ID NO: 245769 - DNA, 25 bp, Artificial
  Probe
ttcttcccacgcagggattaaacag

SEQ ID NO: 245770 - DNA, 25 bp, Artificial
  Probe
cagcttccaaattcatctgtggtga

SEQ ID NO: 245771 - DNA, 25 bp, Artificial
  Probe
ccaaattcatctgtggtgaattcat

SEQ ID NO: 245772 - DNA, 25 bp, Artificial
  Probe
gggcgcacttttggatcaaatccgg

SEQ ID NO: 245773 - DNA, 25 bp, Artificial
  Probe
ccggggcgcacttttggatcaaatc

SEQ ID NO: 245774 - DNA, 25 bp, Artificial
  Probe
gccggggcgcacttttggatcaaat

SEQ ID NO: 245775 - DNA, 25 bp, Artificial
  Probe
cagctgaacaagacccctggagcta

SEQ ID NO: 245776 - DNA, 25 bp, Artificial
  Probe
ttcagctgaacaagacccctggagc

SEQ ID NO: 245777 - DNA, 25 bp, Artificial
  Probe
actcagagagccagagacgtgtgtg

SEQ ID NO: 245778 - DNA, 25 bp, Artificial
  Probe
gagactgactcagagagccagagac

SEQ ID NO: 245779 - DNA, 25 bp, Artificial
  Probe
aggctgagaagcagcctgtgcctcc

SEQ ID NO: 245780 - DNA, 25 bp, Artificial
  Probe
gtatgcgtgtgttgtgcacatgctt

SEQ ID NO: 245781 - DNA, 25 bp, Artificial
  Probe
agtgtgtacaagcttagccctgtgc

SEQ ID NO: 245782 - DNA, 25 bp, Artificial
  Probe
agccctgtgccctgtagtggggcca

SEQ ID NO: 245783 - DNA, 25 bp, Artificial
  Probe
atgtatgcgtgtgttgtgcacatgc

SEQ ID NO: 245784 - DNA, 25 bp, Artificial
  Probe
gcctacccttggtgctgtcataaaa

SEQ ID NO: 245785 - DNA, 25 bp, Artificial
  Probe
tgcctcccagagactgactcagaga

SEQ ID NO: 245786 - DNA, 25 bp, Artificial
  Probe
ggccagctgggcagacagcgaaata

SEQ ID NO: 245787 - DNA, 25 bp, Artificial
  Probe
aagcttagccctgtgccctgtagtg

SEQ ID NO: 245788 - DNA, 25 bp, Artificial
  Probe
cctgtgccctgtagtggggccagct

SEQ ID NO: 245789 - DNA, 25 bp, Artificial
  Probe
cgtgtgttgtgcacatgcttgcctg

SEQ ID NO: 245790 - DNA, 25 bp, Artificial
  Probe
gtgtacaagcttagccctgtgccct

SEQ ID NO: 245791 - DNA, 25 bp, Artificial
  Probe
gcctgcacagagagcatgagtgtgt

SEQ ID NO: 245792 - DNA, 25 bp, Artificial
  Probe
ctcagagagccagagacgtgtgtgt

SEQ ID NO: 245793 - DNA, 25 bp, Artificial
  Probe
ccagagactgactcagagagccaga

SEQ ID NO: 245794 - DNA, 25 bp, Artificial
  Probe
tgtgcacatgcttgcctgcacagag

SEQ ID NO: 245795 - DNA, 25 bp, Artificial
  Probe
gtgcctcccagagactgactcagag

SEQ ID NO: 245796 - DNA, 25 bp, Artificial
  Probe
ccagctggtacctccagtttgcaca

SEQ ID NO: 245797 - DNA, 25 bp, Artificial
  Probe
gtgtgttgtgcacatgcttgcctgc

SEQ ID NO: 245798 - DNA, 25 bp, Artificial
  Probe
tgcttgcctgcacagagagcatgag

SEQ ID NO: 245799 - DNA, 25 bp, Artificial
  Probe
gcaggctgagaagcagcctgtgcct

SEQ ID NO: 245800 - DNA, 25 bp, Artificial
  Probe
ccctgtgccctgtagtggggccagc

SEQ ID NO: 245801 - DNA, 25 bp, Artificial
  Probe
ggtacctccagtttgcacagggact

SEQ ID NO: 245802 - DNA, 25 bp, Artificial
  Probe
gttgtgcacatgcttgcctgcacag

SEQ ID NO: 245803 - DNA, 25 bp, Artificial
  Probe
tcccagagactgactcagagagcca

SEQ ID NO: 245804 - DNA, 25 bp, Artificial
  Probe
actgactcagagagccagagacgtg

SEQ ID NO: 245805 - DNA, 25 bp, Artificial
  Probe
cttgcctgcacagagagcatgagtg

SEQ ID NO: 245806 - DNA, 25 bp, Artificial
  Probe
agcttagccctgtgccctgtagtgg

SEQ ID NO: 245807 - DNA, 25 bp, Artificial
  Probe
cctgcctacccttggtgctgtcata

SEQ ID NO: 245808 - DNA, 25 bp, Artificial
  Probe
acccttggtgctgtcataaaagggc

SEQ ID NO: 245809 - DNA, 25 bp, Artificial
  Probe
caagcttagccctgtgccctgtagt

SEQ ID NO: 245810 - DNA, 25 bp, Artificial
  Probe
tccagtttgcacagggacttgttgg

SEQ ID NO: 245811 - DNA, 25 bp, Artificial
  Probe
gcagcctgtgcctcccagagactga

SEQ ID NO: 245812 - DNA, 25 bp, Artificial
  Probe
ttggtgctgtcataaaagggcaggc

SEQ ID NO: 245813 - DNA, 25 bp, Artificial
  Probe
gcacagagagcatgagtgtgtacaa

SEQ ID NO: 245814 - DNA, 25 bp, Artificial
  Probe
gtacctccagtttgcacagggactt

SEQ ID NO: 245815 - DNA, 25 bp, Artificial
  Probe
ctgcacagagagcatgagtgtgtac

SEQ ID NO: 245816 - DNA, 25 bp, Artificial
  Probe
agccagctggtacctccagtttgca

SEQ ID NO: 245817 - DNA, 25 bp, Artificial
  Probe
gctggtacctccagtttgcacaggg

SEQ ID NO: 245818 - DNA, 25 bp, Artificial
  Probe
gcgtgtgttgtgcacatgcttgcct

SEQ ID NO: 245819 - DNA, 25 bp, Artificial
  Probe
cacatgcttgcctgcacagagagca

SEQ ID NO: 245820 - DNA, 25 bp, Artificial
  Probe
ctgtgcctcccagagactgactcag

SEQ ID NO: 245821 - DNA, 25 bp, Artificial
  Probe
ctgaagccagctggtacctccagtt

SEQ ID NO: 245822 - DNA, 25 bp, Artificial
  Probe
tgagaagcagcctgtgcctcccaga

SEQ ID NO: 245823 - DNA, 25 bp, Artificial
  Probe
ttccagaaccttactgggaaagtca

SEQ ID NO: 245824 - DNA, 25 bp, Artificial
  Probe
gggaaaccttcactcagagctgcag

SEQ ID NO: 245825 - DNA, 25 bp, Artificial
  Probe
agcctttaggcgtagctcacatctc

SEQ ID NO: 245826 - DNA, 25 bp, Artificial
  Probe
agagttgtctgcaagagttctaacc

SEQ ID NO: 245827 - DNA, 25 bp, Artificial
  Probe
caagagttctaacctattggaatta

SEQ ID NO: 245828 - DNA, 25 bp, Artificial
  Probe
ataatgtacatcctcagatattagg

SEQ ID NO: 245829 - DNA, 25 bp, Artificial
  Probe
catctcctgagacatcagaggaccc

SEQ ID NO: 245830 - DNA, 25 bp, Artificial
  Probe
gcttcctgactgtcaaattgccttc

SEQ ID NO: 245831 - DNA, 25 bp, Artificial
  Probe
ctaacctattggaattaaatgggct

SEQ ID NO: 245832 - DNA, 25 bp, Artificial
  Probe
ctacattctagaaggtgactataaa

SEQ ID NO: 245833 - DNA, 25 bp, Artificial
  Probe
gactcctgtgtcttatcaatgcaat

SEQ ID NO: 245834 - DNA, 25 bp, Artificial
  Probe
ggaaaaggcttcacccgaccttcat

SEQ ID NO: 245835 - DNA, 25 bp, Artificial
  Probe
aattgccttcccttggcctgcactt

SEQ ID NO: 245836 - DNA, 25 bp, Artificial
  Probe
ctgactgtcaaattgccttcccttg

SEQ ID NO: 245837 - DNA, 25 bp, Artificial
  Probe
agtttcagtaggattacaagcctta

SEQ ID NO: 245838 - DNA, 25 bp, Artificial
  Probe
cctttgaatgccagacctgtggaaa

SEQ ID NO: 245839 - DNA, 25 bp, Artificial
  Probe
acagtgacccctgctgtacattccg

SEQ ID NO: 245840 - DNA, 25 bp, Artificial
  Probe
aattaaatgggcttcctgactgtca

SEQ ID NO: 245841 - DNA, 25 bp, Artificial
  Probe
acaccaaaaagtacacactggtgag

SEQ ID NO: 245842 - DNA, 25 bp, Artificial
  Probe
tgagaagccctttgaatgccagacc

SEQ ID NO: 245843 - DNA, 25 bp, Artificial
  Probe
tcattgaactgaagccgctctggag

SEQ ID NO: 245844 - DNA, 25 bp, Artificial
  Probe
aagtcataggctagggctctattta

SEQ ID NO: 245845 - DNA, 25 bp, Artificial
  Probe
aaacttctgtcacagtgacccctgc

SEQ ID NO: 245846 - DNA, 25 bp, Artificial
  Probe
attatcttctacattctagaaggtg

SEQ ID NO: 245847 - DNA, 25 bp, Artificial
  Probe
ccagacctgtggaaaaggcttcacc

SEQ ID NO: 245848 - DNA, 25 bp, Artificial
  Probe
tctaacctattggaattaaatgggc

SEQ ID NO: 245849 - DNA, 25 bp, Artificial
  Probe
gtcaaattgccttcccttggcctgc

SEQ ID NO: 245850 - DNA, 25 bp, Artificial
  Probe
aacatgtgtcccaaagcctttaggc

SEQ ID NO: 245851 - DNA, 25 bp, Artificial
  Probe
tctgtcacagtgacccctgctgtac

SEQ ID NO: 245852 - DNA, 25 bp, Artificial
  Probe
ttgaacaccaaaaagtacacactgg

SEQ ID NO: 245853 - DNA, 25 bp, Artificial
  Probe
ctgtgtcttatcaatgcaatgattg

SEQ ID NO: 245854 - DNA, 25 bp, Artificial
  Probe
gaaaccttcactcagagctgcagcc

SEQ ID NO: 245855 - DNA, 25 bp, Artificial
  Probe
agtgcaacatgtgtcccaaagcctt

SEQ ID NO: 245856 - DNA, 25 bp, Artificial
  Probe
cttggcctgcacttcctgtctcttg

SEQ ID NO: 245857 - DNA, 25 bp, Artificial
  Probe
ggattacaagccttattgaacacca

SEQ ID NO: 245858 - DNA, 25 bp, Artificial
  Probe
ttgaatgccagacctgtggaaaagg

SEQ ID NO: 245859 - DNA, 25 bp, Artificial
  Probe
ccttactgggaaagtcagagtaggg

SEQ ID NO: 245860 - DNA, 25 bp, Artificial
  Probe
gcagcctccttgaacatcacagaat

SEQ ID NO: 245861 - DNA, 25 bp, Artificial
  Probe
cccaaagcctttaggcgtagctcac

SEQ ID NO: 245862 - DNA, 25 bp, Artificial
  Probe
tgtggaaaaggcttcacccgacctt

SEQ ID NO: 245863 - DNA, 25 bp, Artificial
  Probe
gaagaaaacttctgtcacagtgacc

SEQ ID NO: 245864 - DNA, 25 bp, Artificial
  Probe
aagccataccagtgcaacatgtgtc

SEQ ID NO: 245865 - DNA, 25 bp, Artificial
  Probe
aactgaagccgctctggagctctta

SEQ ID NO: 245866 - DNA, 25 bp, Artificial
  Probe
ttcactcagagctgcagcctccttg

SEQ ID NO: 245867 - DNA, 25 bp, Artificial
  Probe
gtcacagctcagatctcatcaagca

SEQ ID NO: 245868 - DNA, 25 bp, Artificial
  Probe
catcctcagatattaggaatctgac

SEQ ID NO: 245869 - DNA, 25 bp, Artificial
  Probe
tagcctcttggacgacatgaaccac

SEQ ID NO: 245870 - DNA, 25 bp, Artificial
  Probe
accttcaagtggttctggcagagcc

SEQ ID NO: 245871 - DNA, 25 bp, Artificial
  Probe
gtgatctccaaggacaagaggagtt

SEQ ID NO: 245872 - DNA, 25 bp, Artificial
  Probe
caggtggaaatcctgcagcgtgtca

SEQ ID NO: 245873 - DNA, 25 bp, Artificial
  Probe
ccttcaagtggttctggcagagccc

SEQ ID NO: 245874 - DNA, 25 bp, Artificial
  Probe
gactttctgtaaccatgtgatgtat

SEQ ID NO: 245875 - DNA, 25 bp, Artificial
  Probe
tagccaggtggaaatcctgcagcgt

SEQ ID NO: 245876 - DNA, 25 bp, Artificial
  Probe
ttagccaggtggaaatcctgcagcg

SEQ ID NO: 245877 - DNA, 25 bp, Artificial
  Probe
aacttgtgatctccaaggacaagag

SEQ ID NO: 245878 - DNA, 25 bp, Artificial
  Probe
aatcctgcagcgtgtcatagactac

SEQ ID NO: 245879 - DNA, 25 bp, Artificial
  Probe
cactccggaacttgtgatctccaag

SEQ ID NO: 245880 - DNA, 25 bp, Artificial
  Probe
ggcactcagcttagccaggtggaaa

SEQ ID NO: 245881 - DNA, 25 bp, Artificial
  Probe
actccggaacttgtgatctccaagg

SEQ ID NO: 245882 - DNA, 25 bp, Artificial
  Probe
ccggaacttgtgatctccaaggaca

SEQ ID NO: 245883 - DNA, 25 bp, Artificial
  Probe
agcctcttggacgacatgaaccact

SEQ ID NO: 245884 - DNA, 25 bp, Artificial
  Probe
tcctgcagcgtgtcatagactacat

SEQ ID NO: 245885 - DNA, 25 bp, Artificial
  Probe
ttagcctcttggacgacatgaacca

SEQ ID NO: 245886 - DNA, 25 bp, Artificial
  Probe
tctccaaggacaagaggagtttttg

SEQ ID NO: 245887 - DNA, 25 bp, Artificial
  Probe
gtggaaatcctgcagcgtgtcatag

SEQ ID NO: 245888 - DNA, 25 bp, Artificial
  Probe
gggcactcagcttagccaggtggaa

SEQ ID NO: 245889 - DNA, 25 bp, Artificial
  Probe
atctccaaggacaagaggagttttt

SEQ ID NO: 245890 - DNA, 25 bp, Artificial
  Probe
ctcagcttagccaggtggaaatcct

SEQ ID NO: 245891 - DNA, 25 bp, Artificial
  Probe
agctcactccggaacttgtgatctc

SEQ ID NO: 245892 - DNA, 25 bp, Artificial
  Probe
cgcggggcactcagcttagccaggt

SEQ ID NO: 245893 - DNA, 25 bp, Artificial
  Probe
aagaggagtttttgccactgacccg

SEQ ID NO: 245894 - DNA, 25 bp, Artificial
  Probe
ttcaagtggttctggcagagcccgc

SEQ ID NO: 245895 - DNA, 25 bp, Artificial
  Probe
gctcactccggaacttgtgatctcc

SEQ ID NO: 245896 - DNA, 25 bp, Artificial
  Probe
ccgcggggcactcagcttagccagg

SEQ ID NO: 245897 - DNA, 25 bp, Artificial
  Probe
cgaccttcaagtggttctggcagag

SEQ ID NO: 245898 - DNA, 25 bp, Artificial
  Probe
gcttagccaggtggaaatcctgcag

SEQ ID NO: 245899 - DNA, 25 bp, Artificial
  Probe
gaacttgtgatctccaaggacaaga

SEQ ID NO: 245900 - DNA, 25 bp, Artificial
  Probe
cttgtgatctccaaggacaagagga

SEQ ID NO: 245901 - DNA, 25 bp, Artificial
  Probe
tccggaacttgtgatctccaaggac

SEQ ID NO: 245902 - DNA, 25 bp, Artificial
  Probe
ttgtgatctccaaggacaagaggag

SEQ ID NO: 245903 - DNA, 25 bp, Artificial
  Probe
ctcactccggaacttgtgatctcca

SEQ ID NO: 245904 - DNA, 25 bp, Artificial
  Probe
cttagccaggtggaaatcctgcagc

SEQ ID NO: 245905 - DNA, 25 bp, Artificial
  Probe
aggtggaaatcctgcagcgtgtcat

SEQ ID NO: 245906 - DNA, 25 bp, Artificial
  Probe
atcctgcagcgtgtcatagactaca

SEQ ID NO: 245907 - DNA, 25 bp, Artificial
  Probe
cggaacttgtgatctccaaggacaa

SEQ ID NO: 245908 - DNA, 25 bp, Artificial
  Probe
tgatctccaaggacaagaggagttt

SEQ ID NO: 245909 - DNA, 25 bp, Artificial
  Probe
tcgaccttcaagtggttctggcaga

SEQ ID NO: 245910 - DNA, 25 bp, Artificial
  Probe
gcctcttggacgacatgaaccactg

SEQ ID NO: 245911 - DNA, 25 bp, Artificial
  Probe
gagtttttgccactgacccggtcgt

SEQ ID NO: 245912 - DNA, 25 bp, Artificial
  Probe
ggagtttttgccactgacccggtcg

SEQ ID NO: 245913 - DNA, 25 bp, Artificial
  Probe
tggaaatcctgcagcgtgtcataga

SEQ ID NO: 245914 - DNA, 25 bp, Artificial
  Probe
ctcgaccttcaagtggttctggcag

SEQ ID NO: 245915 - DNA, 25 bp, Artificial
  Probe
tcggctgctgatgcacggaaaggaa

SEQ ID NO: 245916 - DNA, 25 bp, Artificial
  Probe
actgaaagcggactcaacgtgactc

SEQ ID NO: 245917 - DNA, 25 bp, Artificial
  Probe
aagcggactcaacgtgactctcacc

SEQ ID NO: 245918 - DNA, 25 bp, Artificial
  Probe
tgactctcaccattcggctgctgat

SEQ ID NO: 245919 - DNA, 25 bp, Artificial
  Probe
ctgaaagcggactcaacgtgactct

SEQ ID NO: 245920 - DNA, 25 bp, Artificial
  Probe
actcaacgtgactctcaccattcgg

SEQ ID NO: 245921 - DNA, 25 bp, Artificial
  Probe
acgccggtgtgactgaaagcggact

SEQ ID NO: 245922 - DNA, 25 bp, Artificial
  Probe
cattcggctgctgatgcacggaaag

SEQ ID NO: 245923 - DNA, 25 bp, Artificial
  Probe
actctcaccattcggctgctgatgc

SEQ ID NO: 245924 - DNA, 25 bp, Artificial
  Probe
ctcaacgtgactctcaccattcggc

SEQ ID NO: 245925 - DNA, 25 bp, Artificial
  Probe
caccattcggctgctgatgcacgga

SEQ ID NO: 245926 - DNA, 25 bp, Artificial
  Probe
gactgaaagcggactcaacgtgact

SEQ ID NO: 245927 - DNA, 25 bp, Artificial
  Probe
accattcggctgctgatgcacggaa

SEQ ID NO: 245928 - DNA, 25 bp, Artificial
  Probe
gccggtgtgactgaaagcggactca

SEQ ID NO: 245929 - DNA, 25 bp, Artificial
  Probe
ccggtgtgactgaaagcggactcaa

SEQ ID NO: 245930 - DNA, 25 bp, Artificial
  Probe
acgtgactctcaccattcggctgct

SEQ ID NO: 245931 - DNA, 25 bp, Artificial
  Probe
tcaccattcggctgctgatgcacgg

SEQ ID NO: 245932 - DNA, 25 bp, Artificial
  Probe
caacgtgactctcaccattcggctg

SEQ ID NO: 245933 - DNA, 25 bp, Artificial
  Probe
ccgctcgccatggacgccggtgtga

SEQ ID NO: 245934 - DNA, 25 bp, Artificial
  Probe
gccgctcgccatggacgccggtgtg

SEQ ID NO: 245935 - DNA, 25 bp, Artificial
  Probe
ggactcaacgtgactctcaccattc

SEQ ID NO: 245936 - DNA, 25 bp, Artificial
  Probe
gactctcaccattcggctgctgatg

SEQ ID NO: 245937 - DNA, 25 bp, Artificial
  Probe
attcggctgctgatgcacggaaagg

SEQ ID NO: 245938 - DNA, 25 bp, Artificial
  Probe
agcggactcaacgtgactctcacca

SEQ ID NO: 245939 - DNA, 25 bp, Artificial
  Probe
ccattcggctgctgatgcacggaaa

SEQ ID NO: 245940 - DNA, 25 bp, Artificial
  Probe
cgctcgccatggacgccggtgtgac

SEQ ID NO: 245941 - DNA, 25 bp, Artificial
  Probe
gactcaacgtgactctcaccattcg

SEQ ID NO: 245942 - DNA, 25 bp, Artificial
  Probe
aacgtgactctcaccattcggctgc

SEQ ID NO: 245943 - DNA, 25 bp, Artificial
  Probe
aaagcggactcaacgtgactctcac

SEQ ID NO: 245944 - DNA, 25 bp, Artificial
  Probe
tcaacgtgactctcaccattcggct

SEQ ID NO: 245945 - DNA, 25 bp, Artificial
  Probe
ccgccgctcgccatggacgccggtg

SEQ ID NO: 245946 - DNA, 25 bp, Artificial
  Probe
ctgatgcacggaaaggaagtaggca

SEQ ID NO: 245947 - DNA, 25 bp, Artificial
  Probe
ttcggctgctgatgcacggaaagga

SEQ ID NO: 245948 - DNA, 25 bp, Artificial
  Probe
gcggactcaacgtgactctcaccat

SEQ ID NO: 245949 - DNA, 25 bp, Artificial
  Probe
tgaaagcggactcaacgtgactctc

SEQ ID NO: 245950 - DNA, 25 bp, Artificial
  Probe
gtgactctcaccattcggctgctga

SEQ ID NO: 245951 - DNA, 25 bp, Artificial
  Probe
cgtgactctcaccattcggctgctg

SEQ ID NO: 245952 - DNA, 25 bp, Artificial
  Probe
cgccggtgtgactgaaagcggactc

SEQ ID NO: 245953 - DNA, 25 bp, Artificial
  Probe
gctcgccatggacgccggtgtgact

SEQ ID NO: 245954 - DNA, 25 bp, Artificial
  Probe
gacgccggtgtgactgaaagcggac

SEQ ID NO: 245955 - DNA, 25 bp, Artificial
  Probe
gaaagcggactcaacgtgactctca

SEQ ID NO: 245956 - DNA, 25 bp, Artificial
  Probe
cggactcaacgtgactctcaccatt

SEQ ID NO: 245957 - DNA, 25 bp, Artificial
  Probe
cggctgctgatgcacggaaaggaag

SEQ ID NO: 245958 - DNA, 25 bp, Artificial
  Probe
catggacgccggtgtgactgaaagc

SEQ ID NO: 245959 - DNA, 25 bp, Artificial
  Probe
tgactgaaagcggactcaacgtgac

SEQ ID NO: 245960 - DNA, 25 bp, Artificial
  Probe
ctcaccattcggctgctgatgcacg

SEQ ID NO: 245961 - DNA, 25 bp, Artificial
  Probe
acgacgacacggacgagtcccattg

SEQ ID NO: 245962 - DNA, 25 bp, Artificial
  Probe
gaatgtgcacagtgctaaccagaaa

SEQ ID NO: 245963 - DNA, 25 bp, Artificial
  Probe
gaattcgccaggaagaatgtgcaca

SEQ ID NO: 245964 - DNA, 25 bp, Artificial
  Probe
atactctgtctatggcccgcaacct

SEQ ID NO: 245965 - DNA, 25 bp, Artificial
  Probe
atcgtcggctacgacgacacggacg

SEQ ID NO: 245966 - DNA, 25 bp, Artificial
  Probe
attgaattcgccaggaagaatgtgc

SEQ ID NO: 245967 - DNA, 25 bp, Artificial
  Probe
acatactctgtctatggcccgcaac

SEQ ID NO: 245968 - DNA, 25 bp, Artificial
  Probe
aaagggccaggagaccatttcccag

SEQ ID NO: 245969 - DNA, 25 bp, Artificial
  Probe
cgggcctatcatcaggctctcggca

SEQ ID NO: 245970 - DNA, 25 bp, Artificial
  Probe
tctcggcaggatcaaagacgccaaa

SEQ ID NO: 245971 - DNA, 25 bp, Artificial
  Probe
cgagtcccattgtgctgagcacatc

SEQ ID NO: 245972 - DNA, 25 bp, Artificial
  Probe
gtgctgagcacatcgagtcacatac

SEQ ID NO: 245973 - DNA, 25 bp, Artificial
  Probe
gggcctatcatcaggctctcggcag

SEQ ID NO: 245974 - DNA, 25 bp, Artificial
  Probe
agaatcgtcggctacgacgacacgg

SEQ ID NO: 245975 - DNA, 25 bp, Artificial
  Probe
ttcgccaggaagaatgtgcacagtg

SEQ ID NO: 245976 - DNA, 25 bp, Artificial
  Probe
caggctctcggcaggatcaaagacg

SEQ ID NO: 245977 - DNA, 25 bp, Artificial
  Probe
acaagctctctgtctcatgggtgga

SEQ ID NO: 245978 - DNA, 25 bp, Artificial
  Probe
gtcggctacgacgacacggacgagt

SEQ ID NO: 245979 - DNA, 25 bp, Artificial
  Probe
gacacggacgagtcccattgtgctg

SEQ ID NO: 245980 - DNA, 25 bp, Artificial
  Probe
cacagtgctaaccagaaaattcagg

SEQ ID NO: 245981 - DNA, 25 bp, Artificial
  Probe
aattcaggacaagctctctgtctca

SEQ ID NO: 245982 - DNA, 25 bp, Artificial
  Probe
ctgtctaccaagatctgcacccggg

SEQ ID NO: 245983 - DNA, 25 bp, Artificial
  Probe
atctgattgaattcgccaggaagaa

SEQ ID NO: 245984 - DNA, 25 bp, Artificial
  Probe
gcacatcgagtcacatactctgtct

SEQ ID NO: 245985 - DNA, 25 bp, Artificial
  Probe
atcatcaggctctcggcaggatcaa

SEQ ID NO: 245986 - DNA, 25 bp, Artificial
  Probe
gaacggctggagtccctgtctacca

SEQ ID NO: 245987 - DNA, 25 bp, Artificial
  Probe
atcgagtcacatactctgtctatgg

SEQ ID NO: 245988 - DNA, 25 bp, Artificial
  Probe
tgtctaccaagatctgcacccgggc

SEQ ID NO: 245989 - DNA, 25 bp, Artificial
  Probe
gagcacatcgagtcacatactctgt

SEQ ID NO: 245990 - DNA, 25 bp, Artificial
  Probe
ctatgaacggctggagtccctgtct

SEQ ID NO: 245991 - DNA, 25 bp, Artificial
  Probe
agaatgtgcacagtgctaaccagaa

SEQ ID NO: 245992 - DNA, 25 bp, Artificial
  Probe
cgtcggctacgacgacacggacgag

SEQ ID NO: 245993 - DNA, 25 bp, Artificial
  Probe
aggacaagctctctgtctcatgggt

SEQ ID NO: 245994 - DNA, 25 bp, Artificial
  Probe
gctaaccagaaaattcaggacaagc

SEQ ID NO: 245995 - DNA, 25 bp, Artificial
  Probe
cattgtgctgagcacatcgagtcac

SEQ ID NO: 245996 - DNA, 25 bp, Artificial
  Probe
tccactgtccatctgattgaattcg

SEQ ID NO: 245997 - DNA, 25 bp, Artificial
  Probe
ggctacgacgacacggacgagtccc

SEQ ID NO: 245998 - DNA, 25 bp, Artificial
  Probe
agtccctgtctaccaagatctgcac

SEQ ID NO: 245999 - DNA, 25 bp, Artificial
  Probe
atgaacggctggagtccctgtctac

SEQ ID NO: 246000 - DNA, 25 bp, Artificial
  Probe
tggagtccctgtctaccaagatctg

SEQ ID NO: 246001 - DNA, 25 bp, Artificial
  Probe
atgtgcacagtgctaaccagaaaat

SEQ ID NO: 246002 - DNA, 25 bp, Artificial
  Probe
ggctggagtccctgtctaccaagat

SEQ ID NO: 246003 - DNA, 25 bp, Artificial
  Probe
ctatcatcaggctctcggcaggatc

SEQ ID NO: 246004 - DNA, 25 bp, Artificial
  Probe
cggacgagtcccattgtgctgagca

SEQ ID NO: 246005 - DNA, 25 bp, Artificial
  Probe
taccaagatctgcacccgggcctat

SEQ ID NO: 246006 - DNA, 25 bp, Artificial
  Probe
aaattcaggacaagctctctgtctc

SEQ ID NO: 246007 - DNA, 25 bp, Artificial
  Probe
cggcagcttgtgagctcaccggttc

SEQ ID NO: 246008 - DNA, 25 bp, Artificial
  Probe
gagtttccccaacatcggcagcttg

SEQ ID NO: 246009 - DNA, 25 bp, Artificial
  Probe
agagtttccccaacatcggcagctt

SEQ ID NO: 246010 - DNA, 25 bp, Artificial
  Probe
ttccctgagaaactgaagagtttcc

SEQ ID NO: 246011 - DNA, 25 bp, Artificial
  Probe
cttccctgagaaactgaagagtttc

SEQ ID NO: 246012 - DNA, 25 bp, Artificial
  Probe
atcggcagcttgtgagctcaccggt

SEQ ID NO: 246013 - DNA, 25 bp, Artificial
  Probe
tcacggtgggggtgaggaggccagc

SEQ ID NO: 246014 - DNA, 25 bp, Artificial
  Probe
cacactggagcctcttgagctatga

SEQ ID NO: 246015 - DNA, 25 bp, Artificial
  Probe
acaaagatgacttccctgagaaact

SEQ ID NO: 246016 - DNA, 25 bp, Artificial
  Probe
tcggcagcttgtgagctcaccggtt

SEQ ID NO: 246017 - DNA, 25 bp, Artificial
  Probe
gacttccctgagaaactgaagagtt

SEQ ID NO: 246018 - DNA, 25 bp, Artificial
  Probe
agcttgtgagctcaccggttcccag

SEQ ID NO: 246019 - DNA, 25 bp, Artificial
  Probe
gtttccccaacatcggcagcttgtg

SEQ ID NO: 246020 - DNA, 25 bp, Artificial
  Probe
caaacacactggagcctcttgagct

SEQ ID NO: 246021 - DNA, 25 bp, Artificial
  Probe
tgacttccctgagaaactgaagagt

SEQ ID NO: 246022 - DNA, 25 bp, Artificial
  Probe
ccccaaacacactggagcctcttga

SEQ ID NO: 246023 - DNA, 25 bp, Artificial
  Probe
caacatcggcagcttgtgagctcac

SEQ ID NO: 246024 - DNA, 25 bp, Artificial
  Probe
aaactgaagagtttccccaacatcg

SEQ ID NO: 246025 - DNA, 25 bp, Artificial
  Probe
aactgaagagtttccccaacatcgg

SEQ ID NO: 246026 - DNA, 25 bp, Artificial
  Probe
gaaactgaagagtttccccaacatc

SEQ ID NO: 246027 - DNA, 25 bp, Artificial
  Probe
ggcagcttgtgagctcaccggttcc

SEQ ID NO: 246028 - DNA, 25 bp, Artificial
  Probe
cccaaacacactggagcctcttgag

SEQ ID NO: 246029 - DNA, 25 bp, Artificial
  Probe
aacatcggcagcttgtgagctcacc

SEQ ID NO: 246030 - DNA, 25 bp, Artificial
  Probe
agtttccccaacatcggcagcttgt

SEQ ID NO: 246031 - DNA, 25 bp, Artificial
  Probe
acatcggcagcttgtgagctcaccg

SEQ ID NO: 246032 - DNA, 25 bp, Artificial
  Probe
tccctgagaaactgaagagtttccc

SEQ ID NO: 246033 - DNA, 25 bp, Artificial
  Probe
cccaacatcggcagcttgtgagctc

SEQ ID NO: 246034 - DNA, 25 bp, Artificial
  Probe
cagcttgtgagctcaccggttccca

SEQ ID NO: 246035 - DNA, 25 bp, Artificial
  Probe
gcagcttgtgagctcaccggttccc

SEQ ID NO: 246036 - DNA, 25 bp, Artificial
  Probe
gtactctacaaagatgacttccctg

SEQ ID NO: 246037 - DNA, 25 bp, Artificial
  Probe
aagagtttccccaacatcggcagct

SEQ ID NO: 246038 - DNA, 25 bp, Artificial
  Probe
actgaagagtttccccaacatcggc

SEQ ID NO: 246039 - DNA, 25 bp, Artificial
  Probe
cttgtgagctcaccggttcccaggg

SEQ ID NO: 246040 - DNA, 25 bp, Artificial
  Probe
catcggcagcttgtgagctcaccgg

SEQ ID NO: 246041 - DNA, 25 bp, Artificial
  Probe
gcttgtgagctcaccggttcccagg

SEQ ID NO: 246042 - DNA, 25 bp, Artificial
  Probe
cactggagcctcttgagctatgagc

SEQ ID NO: 246043 - DNA, 25 bp, Artificial
  Probe
tacaacattcacggtgggggtgagg

SEQ ID NO: 246044 - DNA, 25 bp, Artificial
  Probe
acactggagcctcttgagctatgag

SEQ ID NO: 246045 - DNA, 25 bp, Artificial
  Probe
gagctcaccggttcccagggctgtg

SEQ ID NO: 246046 - DNA, 25 bp, Artificial
  Probe
ccaacatcggcagcttgtgagctca

SEQ ID NO: 246047 - DNA, 25 bp, Artificial
  Probe
atgacttccctgagaaactgaagag

SEQ ID NO: 246048 - DNA, 25 bp, Artificial
  Probe
tgagctcaccggttcccagggctgt

SEQ ID NO: 246049 - DNA, 25 bp, Artificial
  Probe
tacaaagatgacttccctgagaaac

SEQ ID NO: 246050 - DNA, 25 bp, Artificial
  Probe
actggagcctcttgagctatgagcc

SEQ ID NO: 246051 - DNA, 25 bp, Artificial
  Probe
cggttcccagggctgtggaggagcc

SEQ ID NO: 246052 - DNA, 25 bp, Artificial
  Probe
ccaaacacactggagcctcttgagc

SEQ ID NO: 246053 - DNA, 25 bp, Artificial
  Probe
gctcttcggtgttcaacgtggggcc

SEQ ID NO: 246054 - DNA, 25 bp, Artificial
  Probe
tattggggtcttttgtgccggaaca

SEQ ID NO: 246055 - DNA, 25 bp, Artificial
  Probe
ctaaaacacgcttctgttggcataa

SEQ ID NO: 246056 - DNA, 25 bp, Artificial
  Probe
ctgttggcataacaaaccctcaagg

SEQ ID NO: 246057 - DNA, 25 bp, Artificial
  Probe
gaaatatggcctcatattgcgttac

SEQ ID NO: 246058 - DNA, 25 bp, Artificial
  Probe
gataattacgttgtgtgggctcttc

SEQ ID NO: 246059 - DNA, 25 bp, Artificial
  Probe
ttggcataacaaaccctcaaggctt

SEQ ID NO: 246060 - DNA, 25 bp, Artificial
  Probe
gaagacctacacttggcttaaccca

SEQ ID NO: 246061 - DNA, 25 bp, Artificial
  Probe
gcttctgttggcataacaaaccctc

SEQ ID NO: 246062 - DNA, 25 bp, Artificial
  Probe
aatatggcctcatattgcgttacta

SEQ ID NO: 246063 - DNA, 25 bp, Artificial
  Probe
tcttcggtgttcaacgtggggcccg

SEQ ID NO: 246064 - DNA, 25 bp, Artificial
  Probe
ctcgtgtttacagtatactatttgc

SEQ ID NO: 246065 - DNA, 25 bp, Artificial
  Probe
atgccaagtgagtaatggggacgct

SEQ ID NO: 246066 - DNA, 25 bp, Artificial
  Probe
gacgctcgtgtttacagtatactat

SEQ ID NO: 246067 - DNA, 25 bp, Artificial
  Probe
taccacaggtggtaactaaaacacg

SEQ ID NO: 246068 - DNA, 25 bp, Artificial
  Probe
catattgcgttactactgactaatg

SEQ ID NO: 246069 - DNA, 25 bp, Artificial
  Probe
cctcaaggctttctatatcaagttg

SEQ ID NO: 246070 - DNA, 25 bp, Artificial
  Probe
gtggtaactaaaacacgcttctgtt

SEQ ID NO: 246071 - DNA, 25 bp, Artificial
  Probe
tggggtcttttgtgccggaacaacg

SEQ ID NO: 246072 - DNA, 25 bp, Artificial
  Probe
cgctcgtgtttacagtatactattt

SEQ ID NO: 246073 - DNA, 25 bp, Artificial
  Probe
tatggcctcatattgcgttactact

SEQ ID NO: 246074 - DNA, 25 bp, Artificial
  Probe
aatggggacgctcgtgtttacagta

SEQ ID NO: 246075 - DNA, 25 bp, Artificial
  Probe
tgtcttaagaaatcggctttcattt

SEQ ID NO: 246076 - DNA, 25 bp, Artificial
  Probe
taatggggacgctcgtgtttacagt

SEQ ID NO: 246077 - DNA, 25 bp, Artificial
  Probe
gttggcctttcttctacctttactg

SEQ ID NO: 246078 - DNA, 25 bp, Artificial
  Probe
cttttgtgccggaacaacggatatc

SEQ ID NO: 246079 - DNA, 25 bp, Artificial
  Probe
aagctacctgcgtaccacaggtggt

SEQ ID NO: 246080 - DNA, 25 bp, Artificial
  Probe
gttactactgactaatgaaaatgcc

SEQ ID NO: 246081 - DNA, 25 bp, Artificial
  Probe
gctttctatatcaagttggcctttc

SEQ ID NO: 246082 - DNA, 25 bp, Artificial
  Probe
ggtaactaaaacacgcttctgttgg

SEQ ID NO: 246083 - DNA, 25 bp, Artificial
  Probe
cgttgtgtgggctcttcggtgttca

SEQ ID NO: 246084 - DNA, 25 bp, Artificial
  Probe
atgcaagctacctgcgtaccacagg

SEQ ID NO: 246085 - DNA, 25 bp, Artificial
  Probe
aatgccaagtgagtaatggggacgc

SEQ ID NO: 246086 - DNA, 25 bp, Artificial
  Probe
tgcgtaccacaggtggtaactaaaa

SEQ ID NO: 246087 - DNA, 25 bp, Artificial
  Probe
atgtcttaagaaatcggctttcatt

SEQ ID NO: 246088 - DNA, 25 bp, Artificial
  Probe
cctgcgtaccacaggtggtaactaa

SEQ ID NO: 246089 - DNA, 25 bp, Artificial
  Probe
actaaaacacgcttctgttggcata

SEQ ID NO: 246090 - DNA, 25 bp, Artificial
  Probe
ggaaatatggcctcatattgcgtta

SEQ ID NO: 246091 - DNA, 25 bp, Artificial
  Probe
actactgactaatgaaaatgccaag

SEQ ID NO: 246092 - DNA, 25 bp, Artificial
  Probe
atattgtgaagacctacacttggct

SEQ ID NO: 246093 - DNA, 25 bp, Artificial
  Probe
aacacgcttctgttggcataacaaa

SEQ ID NO: 246094 - DNA, 25 bp, Artificial
  Probe
ataattacgttgtgtgggctcttcg

SEQ ID NO: 246095 - DNA, 25 bp, Artificial
  Probe
atggcctcatattgcgttactactg

SEQ ID NO: 246096 - DNA, 25 bp, Artificial
  Probe
tacctgcgtaccacaggtggtaact

SEQ ID NO: 246097 - DNA, 25 bp, Artificial
  Probe
aattacgttgtgtgggctcttcggt

SEQ ID NO: 246098 - DNA, 25 bp, Artificial
  Probe
tggcctttcttctacctttactggt

SEQ ID NO: 246099 - DNA, 25 bp, Artificial
  Probe
gcccggcctgtaagggaaagagcta

SEQ ID NO: 246100 - DNA, 25 bp, Artificial
  Probe
aagtgagtgccgtttcataccgtgt

SEQ ID NO: 246101 - DNA, 25 bp, Artificial
  Probe
gttgttatccccagtttccaggatc

SEQ ID NO: 246102 - DNA, 25 bp, Artificial
  Probe
aagagctacagtgaatcaagcttta

SEQ ID NO: 246103 - DNA, 25 bp, Artificial
  Probe
gagctccatggcagagctcttaaaa

SEQ ID NO: 246104 - DNA, 25 bp, Artificial
  Probe
agctacagtgaatcaagctttaaag

SEQ ID NO: 246105 - DNA, 25 bp, Artificial
  Probe
ctggcaggatctggtttgcataatt

SEQ ID NO: 246106 - DNA, 25 bp, Artificial
  Probe
cagtttccaggatctgagggtgaga

SEQ ID NO: 246107 - DNA, 25 bp, Artificial
  Probe
caggatgttttctggttggccaaga

SEQ ID NO: 246108 - DNA, 25 bp, Artificial
  Probe
tccagataagtgagtgccgtttcat

SEQ ID NO: 246109 - DNA, 25 bp, Artificial
  Probe
taatttgtgttgttgttatccccag

SEQ ID NO: 246110 - DNA, 25 bp, Artificial
  Probe
gaagctttactaatattcctgagca

SEQ ID NO: 246111 - DNA, 25 bp, Artificial
  Probe
tttcataccgtgtagaaaaagagac

SEQ ID NO: 246112 - DNA, 25 bp, Artificial
  Probe
tgaatcaagctttaaagggccccgt

SEQ ID NO: 246113 - DNA, 25 bp, Artificial
  Probe
gtgttgttgttatccccagtttcca

SEQ ID NO: 246114 - DNA, 25 bp, Artificial
  Probe
gtgaatcaagctttaaagggccccg

SEQ ID NO: 246115 - DNA, 25 bp, Artificial
  Probe
gatgttttctggttggccaagatgc

SEQ ID NO: 246116 - DNA, 25 bp, Artificial
  Probe
ggcaggatctggtttgcataattgc

SEQ ID NO: 246117 - DNA, 25 bp, Artificial
  Probe
tctatcaggatgttttctggttggc

SEQ ID NO: 246118 - DNA, 25 bp, Artificial
  Probe
gctcttaaaatctatcaggatgttt

SEQ ID NO: 246119 - DNA, 25 bp, Artificial
  Probe
ttattttagagctccatggcagagc

SEQ ID NO: 246120 - DNA, 25 bp, Artificial
  Probe
gtaacaactggcaggatctggtttg

SEQ ID NO: 246121 - DNA, 25 bp, Artificial
  Probe
tttagagctccatggcagagctctt

SEQ ID NO: 246122 - DNA, 25 bp, Artificial
  Probe
ctggttggccaagatgcttaatttg

SEQ ID NO: 246123 - DNA, 25 bp, Artificial
  Probe
aagtatatgggctttaagagcctgc

SEQ ID NO: 246124 - DNA, 25 bp, Artificial
  Probe
gtgccgtttcataccgtgtagaaaa

SEQ ID NO: 246125 - DNA, 25 bp, Artificial
  Probe
catttaaccttaaagcttaagtgtg

SEQ ID NO: 246126 - DNA, 25 bp, Artificial
  Probe
cgtttcataccgtgtagaaaaagag

SEQ ID NO: 246127 - DNA, 25 bp, Artificial
  Probe
agaagtaacaactggcaggatctgg

SEQ ID NO: 246128 - DNA, 25 bp, Artificial
  Probe
acaactggcaggatctggtttgcat

SEQ ID NO: 246129 - DNA, 25 bp, Artificial
  Probe
tcataccgtgtagaaaaagagacgt

SEQ ID NO: 246130 - DNA, 25 bp, Artificial
  Probe
aaagcttaagtgtgcccggcctgta

SEQ ID NO: 246131 - DNA, 25 bp, Artificial
  Probe
acatatggtccagataagtgagtgc

SEQ ID NO: 246132 - DNA, 25 bp, Artificial
  Probe
tgcccggcctgtaagggaaagagct

SEQ ID NO: 246133 - DNA, 25 bp, Artificial
  Probe
taaccttaaagcttaagtgtgcccg

SEQ ID NO: 246134 - DNA, 25 bp, Artificial
  Probe
atgttttctggttggccaagatgct

SEQ ID NO: 246135 - DNA, 25 bp, Artificial
  Probe
atggtccagataagtgagtgccgtt

SEQ ID NO: 246136 - DNA, 25 bp, Artificial
  Probe
catggcagagctcttaaaatctatc

SEQ ID NO: 246137 - DNA, 25 bp, Artificial
  Probe
tatgggctttaagagcctgctgtaa

SEQ ID NO: 246138 - DNA, 25 bp, Artificial
  Probe
tgtgttgttgttatccccagtttcc

SEQ ID NO: 246139 - DNA, 25 bp, Artificial
  Probe
aatttgtgttgttgttatccccagt

SEQ ID NO: 246140 - DNA, 25 bp, Artificial
  Probe
tattcctgagcatgggcgaagttgt

SEQ ID NO: 246141 - DNA, 25 bp, Artificial
  Probe
agcatgggcgaagttgtttaacatc

SEQ ID NO: 246142 - DNA, 25 bp, Artificial
  Probe
ttctggttggccaagatgcttaatt

SEQ ID NO: 246143 - DNA, 25 bp, Artificial
  Probe
cagagctcttaaaatctatcaggat

SEQ ID NO: 246144 - DNA, 25 bp, Artificial
  Probe
ttaaagcttaagtgtgcccggcctg

SEQ ID NO: 246145 - DNA, 25 bp, Artificial
  Probe
tgctattccttgttctctggacaag

SEQ ID NO: 246146 - DNA, 25 bp, Artificial
  Probe
tcagagagcagtctgacagatagga

SEQ ID NO: 246147 - DNA, 25 bp, Artificial
  Probe
attctggcctgaatcagagagcagt

SEQ ID NO: 246148 - DNA, 25 bp, Artificial
  Probe
aacgggacctgtattctggcctgaa

SEQ ID NO: 246149 - DNA, 25 bp, Artificial
  Probe
aaggccaacgggacctgtattctgg

SEQ ID NO: 246150 - DNA, 25 bp, Artificial
  Probe
atcagagagcagtctgacagatagg

SEQ ID NO: 246151 - DNA, 25 bp, Artificial
  Probe
ataggagggacacttccttctgtgg

SEQ ID NO: 246152 - DNA, 25 bp, Artificial
  Probe
ttccttctgtggacccatgctattc

SEQ ID NO: 246153 - DNA, 25 bp, Artificial
  Probe
cccatgctattccttgttctctgga

SEQ ID NO: 246154 - DNA, 25 bp, Artificial
  Probe
tggcctgaatcagagagcagtctga

SEQ ID NO: 246155 - DNA, 25 bp, Artificial
  Probe
catgctattccttgttctctggaca

SEQ ID NO: 246156 - DNA, 25 bp, Artificial
  Probe
cgggacctgtattctggcctgaatc

SEQ ID NO: 246157 - DNA, 25 bp, Artificial
  Probe
ctattccttgttctctggacaagcg

SEQ ID NO: 246158 - DNA, 25 bp, Artificial
  Probe
gacacttccttctgtggacccatgc

SEQ ID NO: 246159 - DNA, 25 bp, Artificial
  Probe
tcccacttcctttgctagaagccag

SEQ ID NO: 246160 - DNA, 25 bp, Artificial
  Probe
ggacctgtattctggcctgaatcag

SEQ ID NO: 246161 - DNA, 25 bp, Artificial
  Probe
ttctgtggacccatgctattccttg

SEQ ID NO: 246162 - DNA, 25 bp, Artificial
  Probe
actatgagcccatccgaaaaggcca

SEQ ID NO: 246163 - DNA, 25 bp, Artificial
  Probe
tgaatcagagagcagtctgacagat

SEQ ID NO: 246164 - DNA, 25 bp, Artificial
  Probe
cttccttctgtggacccatgctatt

SEQ ID NO: 246165 - DNA, 25 bp, Artificial
  Probe
gacccatgctattccttgttctctg

SEQ ID NO: 246166 - DNA, 25 bp, Artificial
  Probe
tgagcccatccgaaaaggccaacgg

SEQ ID NO: 246167 - DNA, 25 bp, Artificial
  Probe
gactatgagcccatccgaaaaggcc

SEQ ID NO: 246168 - DNA, 25 bp, Artificial
  Probe
aggagggacacttccttctgtggac

SEQ ID NO: 246169 - DNA, 25 bp, Artificial
  Probe
acttcctttgctagaagccagtact

SEQ ID NO: 246170 - DNA, 25 bp, Artificial
  Probe
tctggcctgaatcagagagcagtct

SEQ ID NO: 246171 - DNA, 25 bp, Artificial
  Probe
gagggacacttccttctgtggaccc

SEQ ID NO: 246172 - DNA, 25 bp, Artificial
  Probe
ggacccatgctattccttgttctct

SEQ ID NO: 246173 - DNA, 25 bp, Artificial
  Probe
ccacttcctttgctagaagccagta

SEQ ID NO: 246174 - DNA, 25 bp, Artificial
  Probe
gggacacttccttctgtggacccat

SEQ ID NO: 246175 - DNA, 25 bp, Artificial
  Probe
cacttccttctgtggacccatgcta

SEQ ID NO: 246176 - DNA, 25 bp, Artificial
  Probe
gccttattcttcagcctcctggtga

SEQ ID NO: 246177 - DNA, 25 bp, Artificial
  Probe
tctgtggacccatgctattccttgt

SEQ ID NO: 246178 - DNA, 25 bp, Artificial
  Probe
agtctgacagataggagggacactt

SEQ ID NO: 246179 - DNA, 25 bp, Artificial
  Probe
ttccttgttctctggacaagcggca

SEQ ID NO: 246180 - DNA, 25 bp, Artificial
  Probe
ccaacgggacctgtattctggcctg

SEQ ID NO: 246181 - DNA, 25 bp, Artificial
  Probe
gccaacgggacctgtattctggcct

SEQ ID NO: 246182 - DNA, 25 bp, Artificial
  Probe
gtggacccatgctattccttgttct

SEQ ID NO: 246183 - DNA, 25 bp, Artificial
  Probe
agcagtctgacagataggagggaca

SEQ ID NO: 246184 - DNA, 25 bp, Artificial
  Probe
acccagactatgagcccatccgaaa

SEQ ID NO: 246185 - DNA, 25 bp, Artificial
  Probe
aatcagagagcagtctgacagatag

SEQ ID NO: 246186 - DNA, 25 bp, Artificial
  Probe
gagcccatccgaaaaggccaacggg

SEQ ID NO: 246187 - DNA, 25 bp, Artificial
  Probe
tgtattctggcctgaatcagagagc

SEQ ID NO: 246188 - DNA, 25 bp, Artificial
  Probe
ggcctgaatcagagagcagtctgac

SEQ ID NO: 246189 - DNA, 25 bp, Artificial
  Probe
aggccaacgggacctgtattctggc

SEQ ID NO: 246190 - DNA, 25 bp, Artificial
  Probe
tattctggcctgaatcagagagcag

SEQ ID NO: 246191 - DNA, 25 bp, Artificial
  Probe
atggagctccacctgatccactgga

SEQ ID NO: 246192 - DNA, 25 bp, Artificial
  Probe
tgtgactgagatacttcaggatatc

SEQ ID NO: 246193 - DNA, 25 bp, Artificial
  Probe
accttgcagtgaaggagttacctgg

SEQ ID NO: 246194 - DNA, 25 bp, Artificial
  Probe
actgaggacacatgttaagggggca

SEQ ID NO: 246195 - DNA, 25 bp, Artificial
  Probe
ctgcgggattactgggtctatgaag

SEQ ID NO: 246196 - DNA, 25 bp, Artificial
  Probe
gatatccaatacaagggaaaatcca

SEQ ID NO: 246197 - DNA, 25 bp, Artificial
  Probe
tccagagaagccagatacgacccct

SEQ ID NO: 246198 - DNA, 25 bp, Artificial
  Probe
gcacacggtcaatttcaaagccttc

SEQ ID NO: 246199 - DNA, 25 bp, Artificial
  Probe
gattactgggtctatgaaggatctc

SEQ ID NO: 246200 - DNA, 25 bp, Artificial
  Probe
tggatgtccgcctgtctccaaatta

SEQ ID NO: 246201 - DNA, 25 bp, Artificial
  Probe
cgctgtttggcagcatcgatgaggc

SEQ ID NO: 246202 - DNA, 25 bp, Artificial
  Probe
tactgggtctatgaaggatctctta

SEQ ID NO: 246203 - DNA, 25 bp, Artificial
  Probe
cttactattccaccttgcagtgaag

SEQ ID NO: 246204 - DNA, 25 bp, Artificial
  Probe
atttcactggggaagagaaaaccag

SEQ ID NO: 246205 - DNA, 25 bp, Artificial
  Probe
agttacctggatattattccgatac

SEQ ID NO: 246206 - DNA, 25 bp, Artificial
  Probe
tttgtcaggaggaccgctgcctcag

SEQ ID NO: 246207 - DNA, 25 bp, Artificial
  Probe
caggaggaccgctgcctcagggaca

SEQ ID NO: 246208 - DNA, 25 bp, Artificial
  Probe
catgttggcttgaaggctgtgactg

SEQ ID NO: 246209 - DNA, 25 bp, Artificial
  Probe
agcatgttggcttgaaggctgtgac

SEQ ID NO: 246210 - DNA, 25 bp, Artificial
  Probe
agaatttcgaagactgaggacacat

SEQ ID NO: 246211 - DNA, 25 bp, Artificial
  Probe
attaccagaccctcttctgcgggat

SEQ ID NO: 246212 - DNA, 25 bp, Artificial
  Probe
gttcgtccagatagggaaggagcat

SEQ ID NO: 246213 - DNA, 25 bp, Artificial
  Probe
cagaccctcttctgcgggattactg

SEQ ID NO: 246214 - DNA, 25 bp, Artificial
  Probe
agctccacctgatccactggaattc

SEQ ID NO: 246215 - DNA, 25 bp, Artificial
  Probe
ggcttgaaggctgtgactgagatac

SEQ ID NO: 246216 - DNA, 25 bp, Artificial
  Probe
tcgaaatcagttttgtcaggaggac

SEQ ID NO: 246217 - DNA, 25 bp, Artificial
  Probe
ctcagggacaggagtttgaactgta

SEQ ID NO: 246218 - DNA, 25 bp, Artificial
  Probe
caaattacgtggtgtgcagggactg

SEQ ID NO: 246219 - DNA, 25 bp, Artificial
  Probe
acctgatccactggaattccacgct

SEQ ID NO: 246220 - DNA, 25 bp, Artificial
  Probe
gttacctggatattattccgatacc

SEQ ID NO: 246221 - DNA, 25 bp, Artificial
  Probe
tgaaggctgtgactgagatacttca

SEQ ID NO: 246222 - DNA, 25 bp, Artificial
  Probe
aaaccagcgtggttctgagcacacg

SEQ ID NO: 246223 - DNA, 25 bp, Artificial
  Probe
ggcattgtcatcattgcactgttcg

SEQ ID NO: 246224 - DNA, 25 bp, Artificial
  Probe
taactatatcccagctgcagataga

SEQ ID NO: 246225 - DNA, 25 bp, Artificial
  Probe
ggacacaccattcaagtcatcctga

SEQ ID NO: 246226 - DNA, 25 bp, Artificial
  Probe
gaccgctgcctcagggacaggagtt

SEQ ID NO: 246227 - DNA, 25 bp, Artificial
  Probe
gtgtgcagggactgtgaagtcacca

SEQ ID NO: 246228 - DNA, 25 bp, Artificial
  Probe
tttcactggggaagagaaaaccagc

SEQ ID NO: 246229 - DNA, 25 bp, Artificial
  Probe
tgtgcagggactgtgaagtcaccaa

SEQ ID NO: 246230 - DNA, 25 bp, Artificial
  Probe
ctcttctgcgggattactgggtcta

SEQ ID NO: 246231 - DNA, 25 bp, Artificial
  Probe
ggactgtgaagtcaccaacgatgga

SEQ ID NO: 246232 - DNA, 25 bp, Artificial
  Probe
tgagtgacagagtcatccgagcagc

SEQ ID NO: 246233 - DNA, 25 bp, Artificial
  Probe
gggaaaatccaaaacaattccatgc

SEQ ID NO: 246234 - DNA, 25 bp, Artificial
  Probe
tttcgaagactgaggacacatgtta

SEQ ID NO: 246235 - DNA, 25 bp, Artificial
  Probe
atcctgaagtcgaaatcagttttgt

SEQ ID NO: 246236 - DNA, 25 bp, Artificial
  Probe
cccagctgcagatagaagaatttcg

SEQ ID NO: 246237 - DNA, 25 bp, Artificial
  Probe
gtgaatgcccttctttccatagaac

SEQ ID NO: 246238 - DNA, 25 bp, Artificial
  Probe
tcatgcttacctcaggattctttag

SEQ ID NO: 246239 - DNA, 25 bp, Artificial
  Probe
gctgtctcggcctgtatgggactgc

SEQ ID NO: 246240 - DNA, 25 bp, Artificial
  Probe
gatgaagccctcgatattctgtaaa

SEQ ID NO: 246241 - DNA, 25 bp, Artificial
  Probe
tgtatagctcatgcttacctcagga

SEQ ID NO: 246242 - DNA, 25 bp, Artificial
  Probe
tctttagtttgcttgaatgcccttc

SEQ ID NO: 246243 - DNA, 25 bp, Artificial
  Probe
cttggttgtggcttgctgaattcaa

SEQ ID NO: 246244 - DNA, 25 bp, Artificial
  Probe
atcaagtcttggttgtggcttgctg

SEQ ID NO: 246245 - DNA, 25 bp, Artificial
  Probe
gctcatgcttacctcaggattcttt

SEQ ID NO: 246246 - DNA, 25 bp, Artificial
  Probe
tacctcaggattctttagtttgctt

SEQ ID NO: 246247 - DNA, 25 bp, Artificial
  Probe
tgcttacctcaggattctttagttt

SEQ ID NO: 246248 - DNA, 25 bp, Artificial
  Probe
ttgtatagctcatgcttacctcagg

SEQ ID NO: 246249 - DNA, 25 bp, Artificial
  Probe
agctcatgcttacctcaggattctt

SEQ ID NO: 246250 - DNA, 25 bp, Artificial
  Probe
gtatagctcatgcttacctcaggat

SEQ ID NO: 246251 - DNA, 25 bp, Artificial
  Probe
cgtgaatgcccttctttccatagaa

SEQ ID NO: 246252 - DNA, 25 bp, Artificial
  Probe
ctttagtttgcgtgaatgcccttct

SEQ ID NO: 246253 - DNA, 25 bp, Artificial
  Probe
gcttgaatgcccttctttccataga

SEQ ID NO: 246254 - DNA, 25 bp, Artificial
  Probe
agtttgcgtgaatgcccttctttcc

SEQ ID NO: 246255 - DNA, 25 bp, Artificial
  Probe
agtttgcttgaatgcccttctttcc

SEQ ID NO: 246256 - DNA, 25 bp, Artificial
  Probe
tgaagccctcgatattctgtaaaaa

SEQ ID NO: 246257 - DNA, 25 bp, Artificial
  Probe
acctcaggattctttagtttgcttg

SEQ ID NO: 246258 - DNA, 25 bp, Artificial
  Probe
gaagccctcgatattctgtaaaaaa

SEQ ID NO: 246259 - DNA, 25 bp, Artificial
  Probe
ctcaggattctttagtttgcttgaa

SEQ ID NO: 246260 - DNA, 25 bp, Artificial
  Probe
gcttacctcaggattctttagtttg

SEQ ID NO: 246261 - DNA, 25 bp, Artificial
  Probe
aatcaagtcttggttgtggcttgct

SEQ ID NO: 246262 - DNA, 25 bp, Artificial
  Probe
ggattctttagtttgcttgaatgcc

SEQ ID NO: 246263 - DNA, 25 bp, Artificial
  Probe
tatagctcatgcttacctcaggatt

SEQ ID NO: 246264 - DNA, 25 bp, Artificial
  Probe
gattctttagtttgcgtgaatgccc

SEQ ID NO: 246265 - DNA, 25 bp, Artificial
  Probe
gattctttagtttgcttgaatgccc

SEQ ID NO: 246266 - DNA, 25 bp, Artificial
  Probe
ttacctcaggattctttagtttgct

SEQ ID NO: 246267 - DNA, 25 bp, Artificial
  Probe
tttgtatagctcatgcttacctcag

SEQ ID NO: 246268 - DNA, 25 bp, Artificial
  Probe
aaatcaagtcttggttgtggcttgc

SEQ ID NO: 246269 - DNA, 25 bp, Artificial
  Probe
tagtttgcgtgaatgcccttctttc

SEQ ID NO: 246270 - DNA, 25 bp, Artificial
  Probe
tagtttgcttgaatgcccttctttc

SEQ ID NO: 246271 - DNA, 25 bp, Artificial
  Probe
ccatagaacattcttaatttggcag

SEQ ID NO: 246272 - DNA, 25 bp, Artificial
  Probe
tttagtttgcgtgaatgcccttctt

SEQ ID NO: 246273 - DNA, 25 bp, Artificial
  Probe
ctttagtttgcttgaatgcccttct

SEQ ID NO: 246274 - DNA, 25 bp, Artificial
  Probe
attctttagtttgcttgaatgccct

SEQ ID NO: 246275 - DNA, 25 bp, Artificial
  Probe
atgaagccctcgatattctgtaaaa

SEQ ID NO: 246276 - DNA, 25 bp, Artificial
  Probe
catagaacattcttaatttggcagt

SEQ ID NO: 246277 - DNA, 25 bp, Artificial
  Probe
atagctcatgcttacctcaggattc

SEQ ID NO: 246278 - DNA, 25 bp, Artificial
  Probe
acattcttaatttggcagtgaatac

SEQ ID NO: 246279 - DNA, 25 bp, Artificial
  Probe
gcgtgaatgcccttctttccataga

SEQ ID NO: 246280 - DNA, 25 bp, Artificial
  Probe
ctgtctcggcctgtatgggactgca

SEQ ID NO: 246281 - DNA, 25 bp, Artificial
  Probe
catgcttacctcaggattctttagt

SEQ ID NO: 246282 - DNA, 25 bp, Artificial
  Probe
caagtcttggttgtggcttgctgaa

SEQ ID NO: 246283 - DNA, 25 bp, Artificial
  Probe
gagacacttggctctgtgtggagtt

SEQ ID NO: 246284 - DNA, 25 bp, Artificial
  Probe
actattaggcccttatgtttggctg

SEQ ID NO: 246285 - DNA, 25 bp, Artificial
  Probe
aaatgagaaccaactggaacatcat

SEQ ID NO: 246286 - DNA, 25 bp, Artificial
  Probe
gctatgcctccttgcctgttttgtg

SEQ ID NO: 246287 - DNA, 25 bp, Artificial
  Probe
gtgttctcttcctggtacaatgggc

SEQ ID NO: 246288 - DNA, 25 bp, Artificial
  Probe
gccctaggcacattccaatatcagc

SEQ ID NO: 246289 - DNA, 25 bp, Artificial
  Probe
ctcatctgccaataagatgcaccag

SEQ ID NO: 246290 - DNA, 25 bp, Artificial
  Probe
ccagtgtaagattctgcagaacctg

SEQ ID NO: 246291 - DNA, 25 bp, Artificial
  Probe
tgccctaggcacattccaatatcag

SEQ ID NO: 246292 - DNA, 25 bp, Artificial
  Probe
cttatgtttggctgaaatcttacta

SEQ ID NO: 246293 - DNA, 25 bp, Artificial
  Probe
caacttcagcccttggtaaacttgc

SEQ ID NO: 246294 - DNA, 25 bp, Artificial
  Probe
ctaattatgtcaacccaggcaggga

SEQ ID NO: 246295 - DNA, 25 bp, Artificial
  Probe
ccttgcctcaaattgtgcttaatga

SEQ ID NO: 246296 - DNA, 25 bp, Artificial
  Probe
agccatttcaagagaaaggagctct

SEQ ID NO: 246297 - DNA, 25 bp, Artificial
  Probe
cttggctctgtgtggagttgctgct

SEQ ID NO: 246298 - DNA, 25 bp, Artificial
  Probe
aagaccctaattatgtcaacccagg

SEQ ID NO: 246299 - DNA, 25 bp, Artificial
  Probe
tctaggccaacttcagcccttggta

SEQ ID NO: 246300 - DNA, 25 bp, Artificial
  Probe
cttgcctgttttgtgatacaaaata

SEQ ID NO: 246301 - DNA, 25 bp, Artificial
  Probe
gcctcaaattgtgcttaatgacacc

SEQ ID NO: 246302 - DNA, 25 bp, Artificial
  Probe
aggagctctgcctttccccatcagt

SEQ ID NO: 246303 - DNA, 25 bp, Artificial
  Probe
gttgctcttcatgcacatacataga

SEQ ID NO: 246304 - DNA, 25 bp, Artificial
  Probe
agtgggagcttccaaccactgaatc

SEQ ID NO: 246305 - DNA, 25 bp, Artificial
  Probe
attagtcacacagagccatttcaag

SEQ ID NO: 246306 - DNA, 25 bp, Artificial
  Probe
acctgctatgcctccttgcctgttt

SEQ ID NO: 246307 - DNA, 25 bp, Artificial
  Probe
acagatacaggctacttacagccac

SEQ ID NO: 246308 - DNA, 25 bp, Artificial
  Probe
gtaaacttgcggactgttcctgatg

SEQ ID NO: 246309 - DNA, 25 bp, Artificial
  Probe
ccacacaggttgtgaaatgagaacc

SEQ ID NO: 246310 - DNA, 25 bp, Artificial
  Probe
atgtgcactggtcttttctacagct

SEQ ID NO: 246311 - DNA, 25 bp, Artificial
  Probe
gagaaaggagctctgcctttcccca

SEQ ID NO: 246312 - DNA, 25 bp, Artificial
  Probe
tgccttttgccaagagcacagcact

SEQ ID NO: 246313 - DNA, 25 bp, Artificial
  Probe
ggcaacccacactattaggccctta

SEQ ID NO: 246314 - DNA, 25 bp, Artificial
  Probe
acttgcggactgttcctgatgttaa

SEQ ID NO: 246315 - DNA, 25 bp, Artificial
  Probe
ttcctggtacaatgggcaacccaca

SEQ ID NO: 246316 - DNA, 25 bp, Artificial
  Probe
gatataccaaaaacagatacaggct

SEQ ID NO: 246317 - DNA, 25 bp, Artificial
  Probe
ggtacaatgggcaacccacactatt

SEQ ID NO: 246318 - DNA, 25 bp, Artificial
  Probe
gcccttggtaaacttgcggactgtt

SEQ ID NO: 246319 - DNA, 25 bp, Artificial
  Probe
ggagctctgcctttccccatcagtt

SEQ ID NO: 246320 - DNA, 25 bp, Artificial
  Probe
tatgtttggctgaaatcttactagc

SEQ ID NO: 246321 - DNA, 25 bp, Artificial
  Probe
taagattctgcagaacctgtgacca

SEQ ID NO: 246322 - DNA, 25 bp, Artificial
  Probe
aacattagcagtgtcttctatgctg

SEQ ID NO: 246323 - DNA, 25 bp, Artificial
  Probe
ttggctgaaatcttactagccatgt

SEQ ID NO: 246324 - DNA, 25 bp, Artificial
  Probe
caactggaacatcatttggattgtt

SEQ ID NO: 246325 - DNA, 25 bp, Artificial
  Probe
gtgaccacttgactttacacctgct

SEQ ID NO: 246326 - DNA, 25 bp, Artificial
  Probe
tgccaacattttgtggaaactaaaa

SEQ ID NO: 246327 - DNA, 25 bp, Artificial
  Probe
taggccaacttcagcccttggtaaa

SEQ ID NO: 246328 - DNA, 25 bp, Artificial
  Probe
tttgccaagagcacagcactactcc

SEQ ID NO: 246329 - DNA, 25 bp, Artificial
  Probe
tgaatctctcagagggaatgcaact

SEQ ID NO: 246330 - DNA, 25 bp, Artificial
  Probe
ggtccctgtgatcttttcaccttca

SEQ ID NO: 246331 - DNA, 25 bp, Artificial
  Probe
atcaacagtctgaaaacctaagcag

SEQ ID NO: 246332 - DNA, 25 bp, Artificial
  Probe
tctggaagctgctgctggagagctc

SEQ ID NO: 246333 - DNA, 25 bp, Artificial
  Probe
tgggaatttcacctgtcaaaccaaa

SEQ ID NO: 246334 - DNA, 25 bp, Artificial
  Probe
gaatgcaactggtccctgtgatctt

SEQ ID NO: 246335 - DNA, 25 bp, Artificial
  Probe
tgaaaacctaagcagacacggggca

SEQ ID NO: 246336 - DNA, 25 bp, Artificial
  Probe
attaccaggatcagccacacacgtg

SEQ ID NO: 246337 - DNA, 25 bp, Artificial
  Probe
agttcgtgtgaatctctcagaggga

SEQ ID NO: 246338 - DNA, 25 bp, Artificial
  Probe
agagctccggccagcagttcgtgtg

SEQ ID NO: 246339 - DNA, 25 bp, Artificial
  Probe
taacgagtgtgcagagcagactgac

SEQ ID NO: 246340 - DNA, 25 bp, Artificial
  Probe
gattcgtcacaatgcctattgtccc

SEQ ID NO: 246341 - DNA, 25 bp, Artificial
  Probe
cccagattcgtcacaatgcctattg

SEQ ID NO: 246342 - DNA, 25 bp, Artificial
  Probe
tattgacatctcaaagaacaaggaa

SEQ ID NO: 246343 - DNA, 25 bp, Artificial
  Probe
tttaggctgaattctctatcaaaag

SEQ ID NO: 246344 - DNA, 25 bp, Artificial
  Probe
aagctgctgctggagagctccggcc

SEQ ID NO: 246345 - DNA, 25 bp, Artificial
  Probe
atgtattgacatctcaaagaacaag

SEQ ID NO: 246346 - DNA, 25 bp, Artificial
  Probe
ttgacatctcaaagaacaaggaaat

SEQ ID NO: 246347 - DNA, 25 bp, Artificial
  Probe
ccaggatcagccacacacgtgtttc

SEQ ID NO: 246348 - DNA, 25 bp, Artificial
  Probe
gggaatgcaactggtccctgtgatc

SEQ ID NO: 246349 - DNA, 25 bp, Artificial
  Probe
tgtgggaatttcacctgtcaaacca

SEQ ID NO: 246350 - DNA, 25 bp, Artificial
  Probe
tccctctctgatgtgcactttgttt

SEQ ID NO: 246351 - DNA, 25 bp, Artificial
  Probe
acctaagcagacacggggcattacc

SEQ ID NO: 246352 - DNA, 25 bp, Artificial
  Probe
gtatgtattgacatctcaaagaaca

SEQ ID NO: 246353 - DNA, 25 bp, Artificial
  Probe
ggaggatcgcttcatgcattattta

SEQ ID NO: 246354 - DNA, 25 bp, Artificial
  Probe
cagacacggggcattaccaggatca

SEQ ID NO: 246355 - DNA, 25 bp, Artificial
  Probe
tctctcagagggaatgcaactggtc

SEQ ID NO: 246356 - DNA, 25 bp, Artificial
  Probe
agctgctgctggagagctccggcca

SEQ ID NO: 246357 - DNA, 25 bp, Artificial
  Probe
gcaactggtccctgtgatcttttca

SEQ ID NO: 246358 - DNA, 25 bp, Artificial
  Probe
attgctgttcgcaggctgtgggaat

SEQ ID NO: 246359 - DNA, 25 bp, Artificial
  Probe
ctttccctctctgatgtgcactttg

SEQ ID NO: 246360 - DNA, 25 bp, Artificial
  Probe
ggatcagccacacacgtgtttcctt

SEQ ID NO: 246361 - DNA, 25 bp, Artificial
  Probe
gttcgcaggctgtgggaatttcacc

SEQ ID NO: 246362 - DNA, 25 bp, Artificial
  Probe
cgagtgtgcagagcagactgacgat

SEQ ID NO: 246363 - DNA, 25 bp, Artificial
  Probe
ccctctctggaagctgctgctggag

SEQ ID NO: 246364 - DNA, 25 bp, Artificial
  Probe
cagagcagactgacgatcttcccct

SEQ ID NO: 246365 - DNA, 25 bp, Artificial
  Probe
aaacctaagcagacacggggcatta

SEQ ID NO: 246366 - DNA, 25 bp, Artificial
  Probe
catctgtctcttatgatttataagg

SEQ ID NO: 246367 - DNA, 25 bp, Artificial
  Probe
gcagttcgtgtgaatctctcagagg

SEQ ID NO: 246368 - DNA, 25 bp, Artificial
  Probe
gagcagactgacgatcttcccctct

SEQ ID NO: 246369 - DNA, 25 bp, Artificial
  Probe
attatccacacatttgcaatggctg

SEQ ID NO: 246370 - DNA, 25 bp, Artificial
  Probe
taggctgaattctctatcaaaagaa

SEQ ID NO: 246371 - DNA, 25 bp, Artificial
  Probe
acacatttgcaatggctggcatctg

SEQ ID NO: 246372 - DNA, 25 bp, Artificial
  Probe
gatcagccacacacgtgtttccttc

SEQ ID NO: 246373 - DNA, 25 bp, Artificial
  Probe
ctgttcgcaggctgtgggaatttca

SEQ ID NO: 246374 - DNA, 25 bp, Artificial
  Probe
gggaggatcgcttcatgcattattt

SEQ ID NO: 246375 - DNA, 25 bp, Artificial
  Probe
attcaatgaggctactttacaagga

SEQ ID NO: 246376 - DNA, 25 bp, Artificial
  Probe
ggctgctgcggctgccaagaactta

SEQ ID NO: 246377 - DNA, 25 bp, Artificial
  Probe
tgaggctactttacaaggattagtc

SEQ ID NO: 246378 - DNA, 25 bp, Artificial
  Probe
caatacgaggtttttctgatcccgt

SEQ ID NO: 246379 - DNA, 25 bp, Artificial
  Probe
ggattagtccagaacagattagccg

SEQ ID NO: 246380 - DNA, 25 bp, Artificial
  Probe
ttacgctcaggctgctgcggctgcc

SEQ ID NO: 246381 - DNA, 25 bp, Artificial
  Probe
ccgaccaaggtaactggatgcttcc

SEQ ID NO: 246382 - DNA, 25 bp, Artificial
  Probe
aatttgcaagcctcttttgagggag

SEQ ID NO: 246383 - DNA, 25 bp, Artificial
  Probe
ctcttttgagggagttccgaccaag

SEQ ID NO: 246384 - DNA, 25 bp, Artificial
  Probe
gcttcctgttctgactagaaacttc

SEQ ID NO: 246385 - DNA, 25 bp, Artificial
  Probe
tccagaacagattagccgtaaggca

SEQ ID NO: 246386 - DNA, 25 bp, Artificial
  Probe
ccagagcaggcaattcaatgaggct

SEQ ID NO: 246387 - DNA, 25 bp, Artificial
  Probe
cttaaatttgcaagcctcttttgag

SEQ ID NO: 246388 - DNA, 25 bp, Artificial
  Probe
gaggtttttctgatcccgttacgct

SEQ ID NO: 246389 - DNA, 25 bp, Artificial
  Probe
tctgatcccgttacgctcaggctgc

SEQ ID NO: 246390 - DNA, 25 bp, Artificial
  Probe
tcttttgagggagttccgaccaagg

SEQ ID NO: 246391 - DNA, 25 bp, Artificial
  Probe
tcccgttacgctcaggctgctgcgg

SEQ ID NO: 246392 - DNA, 25 bp, Artificial
  Probe
cgctcaggctgctgcggctgccaag

SEQ ID NO: 246393 - DNA, 25 bp, Artificial
  Probe
ggtcaaggtccgtgccggctcactg

SEQ ID NO: 246394 - DNA, 25 bp, Artificial
  Probe
cggctcactggcactcaactctgag

SEQ ID NO: 246395 - DNA, 25 bp, Artificial
  Probe
tttgggggcacagtttggtcagcac

SEQ ID NO: 246396 - DNA, 25 bp, Artificial
  Probe
agattagccgtaaggcagctaacca

SEQ ID NO: 246397 - DNA, 25 bp, Artificial
  Probe
tttctgatcccgttacgctcaggct

SEQ ID NO: 246398 - DNA, 25 bp, Artificial
  Probe
aggtaactggatgcttcctgttctg

SEQ ID NO: 246399 - DNA, 25 bp, Artificial
  Probe
gaggcttttccaggactggagagaa

SEQ ID NO: 246400 - DNA, 25 bp, Artificial
  Probe
gtcaatacgaggtttttctgatccc

SEQ ID NO: 246401 - DNA, 25 bp, Artificial
  Probe
ggagttccgaccaaggtaactggat

SEQ ID NO: 246402 - DNA, 25 bp, Artificial
  Probe
gaaacttcctgtctgcaaagtaaac

SEQ ID NO: 246403 - DNA, 25 bp, Artificial
  Probe
cttctgtgaactagggacttgttat

SEQ ID NO: 246404 - DNA, 25 bp, Artificial
  Probe
tcctgttctgactagaaacttcctg

SEQ ID NO: 246405 - DNA, 25 bp, Artificial
  Probe
ctgccaagaacttaaatttgcaagc

SEQ ID NO: 246406 - DNA, 25 bp, Artificial
  Probe
attttccagagcaggcaattcaatg

SEQ ID NO: 246407 - DNA, 25 bp, Artificial
  Probe
tagccgtaaggcagctaaccaggaa

SEQ ID NO: 246408 - DNA, 25 bp, Artificial
  Probe
gagggagttccgaccaaggtaactg

SEQ ID NO: 246409 - DNA, 25 bp, Artificial
  Probe
acagattagccgtaaggcagctaac

SEQ ID NO: 246410 - DNA, 25 bp, Artificial
  Probe
tttacaaggattagtccagaacaga

SEQ ID NO: 246411 - DNA, 25 bp, Artificial
  Probe
ttattaaggtcattttccagagcag

SEQ ID NO: 246412 - DNA, 25 bp, Artificial
  Probe
tcactggcactcaactctgagggag

SEQ ID NO: 246413 - DNA, 25 bp, Artificial
  Probe
caatgaggctactttacaaggatta

SEQ ID NO: 246414 - DNA, 25 bp, Artificial
  Probe
ttccaggactggagagaaccaaaag

SEQ ID NO: 246415 - DNA, 25 bp, Artificial
  Probe
ccatggtcaaggtccgtgccggctc

SEQ ID NO: 246416 - DNA, 25 bp, Artificial
  Probe
gctgcggctgccaagaacttaaatt

SEQ ID NO: 246417 - DNA, 25 bp, Artificial
  Probe
atcccgttacgctcaggctgctgcg

SEQ ID NO: 246418 - DNA, 25 bp, Artificial
  Probe
caagcctcttttgagggagttccga

SEQ ID NO: 246419 - DNA, 25 bp, Artificial
  Probe
tccagagcaggcaattcaatgaggc

SEQ ID NO: 246420 - DNA, 25 bp, Artificial
  Probe
ctaaccaggaaaacaggtcaatacg

SEQ ID NO: 246421 - DNA, 25 bp, Artificial
  Probe
cagccagtgcaggcagcaggtgtgg

SEQ ID NO: 246422 - DNA, 25 bp, Artificial
  Probe
agccagtgcaggcagcaggtgtggt

SEQ ID NO: 246423 - DNA, 25 bp, Artificial
  Probe
cagagtctgatggcagtgactggtc

SEQ ID NO: 246424 - DNA, 25 bp, Artificial
  Probe
acagccagtgcaggcagcaggtgtg

SEQ ID NO: 246425 - DNA, 25 bp, Artificial
  Probe
ccagagtctgatggcagtgactggt

SEQ ID NO: 246426 - DNA, 25 bp, Artificial
  Probe
tcccacagccagtgcaggcagcagg

SEQ ID NO: 246427 - DNA, 25 bp, Artificial
  Probe
gtgcaggcagcaggtgtggtccagg

SEQ ID NO: 246428 - DNA, 25 bp, Artificial
  Probe
cagcaggtgtggtccaggccctacc

SEQ ID NO: 246429 - DNA, 25 bp, Artificial
  Probe
aggcagcaggtgtggtccaggccct

SEQ ID NO: 246430 - DNA, 25 bp, Artificial
  Probe
tcctcccacagccagtgcaggcagc

SEQ ID NO: 246431 - DNA, 25 bp, Artificial
  Probe
agagtctgatggcagtgactggtcc

SEQ ID NO: 246432 - DNA, 25 bp, Artificial
  Probe
cagtgcaggcagcaggtgtggtcca

SEQ ID NO: 246433 - DNA, 25 bp, Artificial
  Probe
cacagccagtgcaggcagcaggtgt

SEQ ID NO: 246434 - DNA, 25 bp, Artificial
  Probe
caggcagcaggtgtggtccaggccc

SEQ ID NO: 246435 - DNA, 25 bp, Artificial
  Probe
agcaggtgtggtccaggccctaccc

SEQ ID NO: 246436 - DNA, 25 bp, Artificial
  Probe
gcaggtgtggtccaggccctacccc

SEQ ID NO: 246437 - DNA, 25 bp, Artificial
  Probe
tcccagagtctgatggcagtgactg

SEQ ID NO: 246438 - DNA, 25 bp, Artificial
  Probe
tgcaggcagcaggtgtggtccaggc

SEQ ID NO: 246439 - DNA, 25 bp, Artificial
  Probe
gccagtgcaggcagcaggtgtggtc

SEQ ID NO: 246440 - DNA, 25 bp, Artificial
  Probe
ccagtgcaggcagcaggtgtggtcc

SEQ ID NO: 246441 - DNA, 25 bp, Artificial
  Probe
ggcagcaggtgtggtccaggcccta

SEQ ID NO: 246442 - DNA, 25 bp, Artificial
  Probe
gagtctgatggcagtgactggtcca

SEQ ID NO: 246443 - DNA, 25 bp, Artificial
  Probe
caggtgtggtccaggccctacccca

SEQ ID NO: 246444 - DNA, 25 bp, Artificial
  Probe
agtgcaggcagcaggtgtggtccag

SEQ ID NO: 246445 - DNA, 25 bp, Artificial
  Probe
ttcccagagtctgatggcagtgact

SEQ ID NO: 246446 - DNA, 25 bp, Artificial
  Probe
gcagcaggtgtggtccaggccctac

SEQ ID NO: 246447 - DNA, 25 bp, Artificial
  Probe
ctcccacagccagtgcaggcagcag

SEQ ID NO: 246448 - DNA, 25 bp, Artificial
  Probe
ccacagccagtgcaggcagcaggtg

SEQ ID NO: 246449 - DNA, 25 bp, Artificial
  Probe
cccacagccagtgcaggcagcaggt

SEQ ID NO: 246450 - DNA, 25 bp, Artificial
  Probe
cctcccacagccagtgcaggcagca

SEQ ID NO: 246451 - DNA, 25 bp, Artificial
  Probe
gcaggcagcaggtgtggtccaggcc

SEQ ID NO: 246452 - DNA, 25 bp, Artificial
  Probe
cccagagtctgatggcagtgactgg

SEQ ID NO: 246453 - DNA, 25 bp, Artificial
  Probe
cgcctcatctcctgacagcattatg

SEQ ID NO: 246454 - DNA, 25 bp, Artificial
  Probe
cacccaagcagagtatatgatcatt

SEQ ID NO: 246455 - DNA, 25 bp, Artificial
  Probe
aaactgagacagtgtgagtcattgc

SEQ ID NO: 246456 - DNA, 25 bp, Artificial
  Probe
tagtaagtaaccttcaaaggcaaat

SEQ ID NO: 246457 - DNA, 25 bp, Artificial
  Probe
ctctgctccgactgaggaagtcgga

SEQ ID NO: 246458 - DNA, 25 bp, Artificial
  Probe
aaatgcagacagctgcagactgttc

SEQ ID NO: 246459 - DNA, 25 bp, Artificial
  Probe
cagtccaagtgatcgtgaccagtga

SEQ ID NO: 246460 - DNA, 25 bp, Artificial
  Probe
tgctcttctaagaaactgagacagt

SEQ ID NO: 246461 - DNA, 25 bp, Artificial
  Probe
ccccagcacccaagcagagtatatg

SEQ ID NO: 246462 - DNA, 25 bp, Artificial
  Probe
ctcatttgaccgtgtttttaatctg

SEQ ID NO: 246463 - DNA, 25 bp, Artificial
  Probe
aggagtcagcagcacgcctcatctc

SEQ ID NO: 246464 - DNA, 25 bp, Artificial
  Probe
ctcactgtggaaaggaggttacaag

SEQ ID NO: 246465 - DNA, 25 bp, Artificial
  Probe
tcgattctgtttactgtgtgttaca

SEQ ID NO: 246466 - DNA, 25 bp, Artificial
  Probe
ccaaagaaggccaatctctcatttg

SEQ ID NO: 246467 - DNA, 25 bp, Artificial
  Probe
gaccgtgtttttaatctgcctgttt

SEQ ID NO: 246468 - DNA, 25 bp, Artificial
  Probe
tccccaaaacctggacatgtcctag

SEQ ID NO: 246469 - DNA, 25 bp, Artificial
  Probe
cgattctgtttactgtgtgttacat

SEQ ID NO: 246470 - DNA, 25 bp, Artificial
  Probe
tcactgtgccactccatagtcagtc

SEQ ID NO: 246471 - DNA, 25 bp, Artificial
  Probe
agtaaccttcaaaggcaaataaatg

SEQ ID NO: 246472 - DNA, 25 bp, Artificial
  Probe
acagtgtgagtcattgcccagcaat

SEQ ID NO: 246473 - DNA, 25 bp, Artificial
  Probe
gccaatctctcatttgaccgtgttt

SEQ ID NO: 246474 - DNA, 25 bp, Artificial
  Probe
ctccatagtcagtccccttagtaag

SEQ ID NO: 246475 - DNA, 25 bp, Artificial
  Probe
gactgttctagagttccgttctttt

SEQ ID NO: 246476 - DNA, 25 bp, Artificial
  Probe
ccagggtcactgtgccactccatag

SEQ ID NO: 246477 - DNA, 25 bp, Artificial
  Probe
agtaaatgcagacagctgcagactg

SEQ ID NO: 246478 - DNA, 25 bp, Artificial
  Probe
cttctaagaaactgagacagtgtga

SEQ ID NO: 246479 - DNA, 25 bp, Artificial
  Probe
ccccatcttgacagtccaagtgatc

SEQ ID NO: 246480 - DNA, 25 bp, Artificial
  Probe
gcacatctcttgtgttcagttatta

SEQ ID NO: 246481 - DNA, 25 bp, Artificial
  Probe
ccgactgaggaagtcggagtaaatg

SEQ ID NO: 246482 - DNA, 25 bp, Artificial
  Probe
tactaagcaggcaggcaggctgcat

SEQ ID NO: 246483 - DNA, 25 bp, Artificial
  Probe
actgctgctgccatgagcactgtgg

SEQ ID NO: 246484 - DNA, 25 bp, Artificial
  Probe
gttcttttctctgatggcacatctc

SEQ ID NO: 246485 - DNA, 25 bp, Artificial
  Probe
ctgccatgagcactgtgggatctgg

SEQ ID NO: 246486 - DNA, 25 bp, Artificial
  Probe
aactgagacagtgtgagtcattgcc

SEQ ID NO: 246487 - DNA, 25 bp, Artificial
  Probe
acaagcccagggtcactgtgccact

SEQ ID NO: 246488 - DNA, 25 bp, Artificial
  Probe
tgaatgagcccatgggggtctgatc

SEQ ID NO: 246489 - DNA, 25 bp, Artificial
  Probe
gtgaccgctggcaagtgacccagcc

SEQ ID NO: 246490 - DNA, 25 bp, Artificial
  Probe
ccgtctgtagtaaccgctcgctgtg

SEQ ID NO: 246491 - DNA, 25 bp, Artificial
  Probe
ggttacaagcccagggtcactgtgc

SEQ ID NO: 246492 - DNA, 25 bp, Artificial
  Probe
tgaggtcttgcgatgtttctgttct

SEQ ID NO: 246493 - DNA, 25 bp, Artificial
  Probe
cccttgcaccccatgtctggaattt

SEQ ID NO: 246494 - DNA, 25 bp, Artificial
  Probe
aggcaggctgcatggcaatgaccca

SEQ ID NO: 246495 - DNA, 25 bp, Artificial
  Probe
gcaggcaggctgcatggcaatgacc

SEQ ID NO: 246496 - DNA, 25 bp, Artificial
  Probe
ctggtgtctgcctgggcaccaatac

SEQ ID NO: 246497 - DNA, 25 bp, Artificial
  Probe
tgaggtgaccgctggcaagtgaccc

SEQ ID NO: 246498 - DNA, 25 bp, Artificial
  Probe
acagcattatgatgtttcgattctg

SEQ ID NO: 246499 - DNA, 25 bp, Artificial
  Probe
gcaggggtcaccgctggagaagaac

SEQ ID NO: 246500 - DNA, 25 bp, Artificial
  Probe
agactctgggcttccctttgcctag

SEQ ID NO: 246501 - DNA, 25 bp, Artificial
  Probe
ccactagactctgggcttccctttg

SEQ ID NO: 246502 - DNA, 25 bp, Artificial
  Probe
ttgcctagtgcaggggtcaccgctg

SEQ ID NO: 246503 - DNA, 25 bp, Artificial
  Probe
gactctgggcttccctttgcctagt

SEQ ID NO: 246504 - DNA, 25 bp, Artificial
  Probe
gtctccactagactctgggcttccc

SEQ ID NO: 246505 - DNA, 25 bp, Artificial
  Probe
gcctagtgcaggggtcaccgctgga

SEQ ID NO: 246506 - DNA, 25 bp, Artificial
  Probe
cctttgcctagtgcaggggtcaccg

SEQ ID NO: 246507 - DNA, 25 bp, Artificial
  Probe
cctagtgcaggggtcaccgctggag

SEQ ID NO: 246508 - DNA, 25 bp, Artificial
  Probe
tgaaggtctccactagactctgggc

SEQ ID NO: 246509 - DNA, 25 bp, Artificial
  Probe
cactagactctgggcttccctttgc

SEQ ID NO: 246510 - DNA, 25 bp, Artificial
  Probe
ctagactctgggcttccctttgcct

SEQ ID NO: 246511 - DNA, 25 bp, Artificial
  Probe
actagactctgggcttccctttgcc

SEQ ID NO: 246512 - DNA, 25 bp, Artificial
  Probe
ctagtgcaggggtcaccgctggaga

SEQ ID NO: 246513 - DNA, 25 bp, Artificial
  Probe
aaggtctccactagactctgggctt

SEQ ID NO: 246514 - DNA, 25 bp, Artificial
  Probe
tttgcctagtgcaggggtcaccgct

SEQ ID NO: 246515 - DNA, 25 bp, Artificial
  Probe
aggtctccactagactctgggcttc

SEQ ID NO: 246516 - DNA, 25 bp, Artificial
  Probe
ctccactagactctgggcttccctt

SEQ ID NO: 246517 - DNA, 25 bp, Artificial
  Probe
gaaggtctccactagactctgggct

SEQ ID NO: 246518 - DNA, 25 bp, Artificial
  Probe
ccctttgcctagtgcaggggtcacc

SEQ ID NO: 246519 - DNA, 25 bp, Artificial
  Probe
tctccactagactctgggcttccct

SEQ ID NO: 246520 - DNA, 25 bp, Artificial
  Probe
gtgcaggggtcaccgctggagaaga

SEQ ID NO: 246521 - DNA, 25 bp, Artificial
  Probe
tgcctagtgcaggggtcaccgctgg

SEQ ID NO: 246522 - DNA, 25 bp, Artificial
  Probe
ctgggcttccctttgcctagtgcag

SEQ ID NO: 246523 - DNA, 25 bp, Artificial
  Probe
tagtgcaggggtcaccgctggagaa

SEQ ID NO: 246524 - DNA, 25 bp, Artificial
  Probe
caggggtcaccgctggagaagaacc

SEQ ID NO: 246525 - DNA, 25 bp, Artificial
  Probe
ctttgcctagtgcaggggtcaccgc

SEQ ID NO: 246526 - DNA, 25 bp, Artificial
  Probe
ggtctccactagactctgggcttcc

SEQ ID NO: 246527 - DNA, 25 bp, Artificial
  Probe
tagactctgggcttccctttgccta

SEQ ID NO: 246528 - DNA, 25 bp, Artificial
  Probe
tctgggcttccctttgcctagtgca

SEQ ID NO: 246529 - DNA, 25 bp, Artificial
  Probe
tccactagactctgggcttcccttt

SEQ ID NO: 246530 - DNA, 25 bp, Artificial
  Probe
tgcaggggtcaccgctggagaagaa

SEQ ID NO: 246531 - DNA, 25 bp, Artificial
  Probe
agtgcaggggtcaccgctggagaag

SEQ ID NO: 246532 - DNA, 25 bp, Artificial
  Probe
ctctgggcttccctttgcctagtgc

SEQ ID NO: 246533 - DNA, 25 bp, Artificial
  Probe
actctgggcttccctttgcctagtg

SEQ ID NO: 246534 - DNA, 25 bp, Artificial
  Probe
caaataattgcactcgcctgacgga

SEQ ID NO: 246535 - DNA, 25 bp, Artificial
  Probe
acattggaacggagtttgactcagg

SEQ ID NO: 246536 - DNA, 25 bp, Artificial
  Probe
agagctgcagtaccaaataattgca

SEQ ID NO: 246537 - DNA, 25 bp, Artificial
  Probe
tgcactcgcctgacggaaagttgaa

SEQ ID NO: 246538 - DNA, 25 bp, Artificial
  Probe
gtaaagctgactactgtaaaatttc

SEQ ID NO: 246539 - DNA, 25 bp, Artificial
  Probe
aaggcacaccaagaaggggatgttt

SEQ ID NO: 246540 - DNA, 25 bp, Artificial
  Probe
tctatgaacactaaggagtgcagct

SEQ ID NO: 246541 - DNA, 25 bp, Artificial
  Probe
gtcttaagcttattatacacatgtg

SEQ ID NO: 246542 - DNA, 25 bp, Artificial
  Probe
tgccgtatgtatctacatgtgtatg

SEQ ID NO: 246543 - DNA, 25 bp, Artificial
  Probe
gtatctacatgtgtatgtcttaagc

SEQ ID NO: 246544 - DNA, 25 bp, Artificial
  Probe
cgtatgtatctacatgtgtatgtct

SEQ ID NO: 246545 - DNA, 25 bp, Artificial
  Probe
attatatagcgcagagattctccac

SEQ ID NO: 246546 - DNA, 25 bp, Artificial
  Probe
acccttctcagatgacattggaacg

SEQ ID NO: 246547 - DNA, 25 bp, Artificial
  Probe
tcgcctgacggaaagttgaattgtt

SEQ ID NO: 246548 - DNA, 25 bp, Artificial
  Probe
tgcagtaccaaataattgcactcgc

SEQ ID NO: 246549 - DNA, 25 bp, Artificial
  Probe
tatagatgccgtatgtatctacatg

SEQ ID NO: 246550 - DNA, 25 bp, Artificial
  Probe
agctgcagtaccaaataattgcact

SEQ ID NO: 246551 - DNA, 25 bp, Artificial
  Probe
attatacacatgtgcatacataagg

SEQ ID NO: 246552 - DNA, 25 bp, Artificial
  Probe
ctgcagtaccaaataattgcactcg

SEQ ID NO: 246553 - DNA, 25 bp, Artificial
  Probe
cattggaacggagtttgactcaggt

SEQ ID NO: 246554 - DNA, 25 bp, Artificial
  Probe
gtaccaaataattgcactcgcctga

SEQ ID NO: 246555 - DNA, 25 bp, Artificial
  Probe
cttctcagatgacattggaacggag

SEQ ID NO: 246556 - DNA, 25 bp, Artificial
  Probe
ctcagatgacattggaacggagttt

SEQ ID NO: 246557 - DNA, 25 bp, Artificial
  Probe
ggcacaccaagaaggggatgtttgt

SEQ ID NO: 246558 - DNA, 25 bp, Artificial
  Probe
agtaccaaataattgcactcgcctg

SEQ ID NO: 246559 - DNA, 25 bp, Artificial
  Probe
ctcaggtttgctaacataagttccc

SEQ ID NO: 246560 - DNA, 25 bp, Artificial
  Probe
tttacccttctcagatgacattgga

SEQ ID NO: 246561 - DNA, 25 bp, Artificial
  Probe
attgcactcgcctgacggaaagttg

SEQ ID NO: 246562 - DNA, 25 bp, Artificial
  Probe
accaaataattgcactcgcctgacg

SEQ ID NO: 246563 - DNA, 25 bp, Artificial
  Probe
ctacatgtgtatgtcttaagcttat

SEQ ID NO: 246564 - DNA, 25 bp, Artificial
  Probe
acatgtgcatacataaggcacacca

SEQ ID NO: 246565 - DNA, 25 bp, Artificial
  Probe
ggaacggagtttgactcaggtttgc

SEQ ID NO: 246566 - DNA, 25 bp, Artificial
  Probe
ctaaggagtgcagctactaaaatga

SEQ ID NO: 246567 - DNA, 25 bp, Artificial
  Probe
gatgccgtatgtatctacatgtgta

SEQ ID NO: 246568 - DNA, 25 bp, Artificial
  Probe
tgtgcatacataaggcacaccaaga

SEQ ID NO: 246569 - DNA, 25 bp, Artificial
  Probe
acactaaggagtgcagctactaaaa

SEQ ID NO: 246570 - DNA, 25 bp, Artificial
  Probe
tatgaacactaaggagtgcagctac

SEQ ID NO: 246571 - DNA, 25 bp, Artificial
  Probe
catacataaggcacaccaagaaggg

SEQ ID NO: 246572 - DNA, 25 bp, Artificial
  Probe
ttgttctatgaacactaaggagtgc

SEQ ID NO: 246573 - DNA, 25 bp, Artificial
  Probe
acataaggcacaccaagaaggggat

SEQ ID NO: 246574 - DNA, 25 bp, Artificial
  Probe
ctcgcctgacggaaagttgaattgt

SEQ ID NO: 246575 - DNA, 25 bp, Artificial
  Probe
acataagttcccagagctgcagtac

SEQ ID NO: 246576 - DNA, 25 bp, Artificial
  Probe
gctaacataagttcccagagctgca

SEQ ID NO: 246577 - DNA, 25 bp, Artificial
  Probe
tttgctaacataagttcccagagct

SEQ ID NO: 246578 - DNA, 25 bp, Artificial
  Probe
aacactaaggagtgcagctactaaa

SEQ ID NO: 246579 - DNA, 25 bp, Artificial
  Probe
atgtgcatacataaggcacaccaag

SEQ ID NO: 246580 - DNA, 25 bp, Artificial
  Probe
aagcaaagccatgaagtgcctgctg

SEQ ID NO: 246581 - DNA, 25 bp, Artificial
  Probe
gaaccacacagaaaagggcctctct

SEQ ID NO: 246582 - DNA, 25 bp, Artificial
  Probe
gctcagcgagacacagcgcagaggc

SEQ ID NO: 246583 - DNA, 25 bp, Artificial
  Probe
aaagccatgaagtgcctgctgatct

SEQ ID NO: 246584 - DNA, 25 bp, Artificial
  Probe
gaagtgcctgctgatctccctggcc

SEQ ID NO: 246585 - DNA, 25 bp, Artificial
  Probe
agagcttgagctcagcgagacacag

SEQ ID NO: 246586 - DNA, 25 bp, Artificial
  Probe
atgaagtgcctgctgatctccctgg

SEQ ID NO: 246587 - DNA, 25 bp, Artificial
  Probe
ggacagagcttgagctcagcgagac

SEQ ID NO: 246588 - DNA, 25 bp, Artificial
  Probe
acagagcttgagctcagcgagacac

SEQ ID NO: 246589 - DNA, 25 bp, Artificial
  Probe
gagctcagcgagacacagcgcagag

SEQ ID NO: 246590 - DNA, 25 bp, Artificial
  Probe
tccctggccctatggctgggcacag

SEQ ID NO: 246591 - DNA, 25 bp, Artificial
  Probe
tgagctcagcgagacacagcgcaga

SEQ ID NO: 246592 - DNA, 25 bp, Artificial
  Probe
atggctgggcacagcggacatacac

SEQ ID NO: 246593 - DNA, 25 bp, Artificial
  Probe
gagcttgagctcagcgagacacagc

SEQ ID NO: 246594 - DNA, 25 bp, Artificial
  Probe
aggaaccacacagaaaagggcctct

SEQ ID NO: 246595 - DNA, 25 bp, Artificial
  Probe
gacatacacgggacagagcttgagc

SEQ ID NO: 246596 - DNA, 25 bp, Artificial
  Probe
ccatgaagtgcctgctgatctccct

SEQ ID NO: 246597 - DNA, 25 bp, Artificial
  Probe
ttcgaggaaccacacagaaaagggc

SEQ ID NO: 246598 - DNA, 25 bp, Artificial
  Probe
ttgagctcagcgagacacagcgcag

SEQ ID NO: 246599 - DNA, 25 bp, Artificial
  Probe
tgctgatctccctggccctatggct

SEQ ID NO: 246600 - DNA, 25 bp, Artificial
  Probe
ggactaaagcaaagccatgaagtgc

SEQ ID NO: 246601 - DNA, 25 bp, Artificial
  Probe
ggcacagcggacatacacgggacag

SEQ ID NO: 246602 - DNA, 25 bp, Artificial
  Probe
cagaaaagggcctctctaaagcaac

SEQ ID NO: 246603 - DNA, 25 bp, Artificial
  Probe
gcaaagccatgaagtgcctgctgat

SEQ ID NO: 246604 - DNA, 25 bp, Artificial
  Probe
tgggcacagcggacatacacgggac

SEQ ID NO: 246605 - DNA, 25 bp, Artificial
  Probe
tacacgggacagagcttgagctcag

SEQ ID NO: 246606 - DNA, 25 bp, Artificial
  Probe
accacacagaaaagggcctctctaa

SEQ ID NO: 246607 - DNA, 25 bp, Artificial
  Probe
ctatggctgggcacagcggacatac

SEQ ID NO: 246608 - DNA, 25 bp, Artificial
  Probe
taaagcaaagccatgaagtgcctgc

SEQ ID NO: 246609 - DNA, 25 bp, Artificial
  Probe
cacagcggacatacacgggacagag

SEQ ID NO: 246610 - DNA, 25 bp, Artificial
  Probe
tatggctgggcacagcggacataca

SEQ ID NO: 246611 - DNA, 25 bp, Artificial
  Probe
agcaaagccatgaagtgcctgctga

SEQ ID NO: 246612 - DNA, 25 bp, Artificial
  Probe
ctcagcgagacacagcgcagaggcc

SEQ ID NO: 246613 - DNA, 25 bp, Artificial
  Probe
catgaagtgcctgctgatctccctg

SEQ ID NO: 246614 - DNA, 25 bp, Artificial
  Probe
gacagagcttgagctcagcgagaca

SEQ ID NO: 246615 - DNA, 25 bp, Artificial
  Probe
cacgggacagagcttgagctcagcg

SEQ ID NO: 246616 - DNA, 25 bp, Artificial
  Probe
ggaaccacacagaaaagggcctctc

SEQ ID NO: 246617 - DNA, 25 bp, Artificial
  Probe
gcacagcggacatacacgggacaga

SEQ ID NO: 246618 - DNA, 25 bp, Artificial
  Probe
acatacacgggacagagcttgagct

SEQ ID NO: 246619 - DNA, 25 bp, Artificial
  Probe
aggactaaagcaaagccatgaagtg

SEQ ID NO: 246620 - DNA, 25 bp, Artificial
  Probe
aaagcaaagccatgaagtgcctgct

SEQ ID NO: 246621 - DNA, 25 bp, Artificial
  Probe
gttcgaggaaccacacagaaaaggg

SEQ ID NO: 246622 - DNA, 25 bp, Artificial
  Probe
cagcggacatacacgggacagagct

SEQ ID NO: 246623 - DNA, 25 bp, Artificial
  Probe
catacacgggacagagcttgagctc

SEQ ID NO: 246624 - DNA, 25 bp, Artificial
  Probe
gaggaaccacacagaaaagggcctc

SEQ ID NO: 246625 - DNA, 25 bp, Artificial
  Probe
gggcacagcggacatacacgggaca

SEQ ID NO: 246626 - DNA, 25 bp, Artificial
  Probe
cctggggcacagtgaagtccaggaa

SEQ ID NO: 246627 - DNA, 25 bp, Artificial
  Probe
caaacatcaaacatgtgacctcgga

SEQ ID NO: 246628 - DNA, 25 bp, Artificial
  Probe
gtgacttgctgaacggcactgacgt

SEQ ID NO: 246629 - DNA, 25 bp, Artificial
  Probe
gttgcctggggcacagtgaagtcca

SEQ ID NO: 246630 - DNA, 25 bp, Artificial
  Probe
atgtgacctcggagagtccttttct

SEQ ID NO: 246631 - DNA, 25 bp, Artificial
  Probe
acagtgaagtccaggaaaggctttg

SEQ ID NO: 246632 - DNA, 25 bp, Artificial
  Probe
tgtgaaaagacttcgcctatgcagc

SEQ ID NO: 246633 - DNA, 25 bp, Artificial
  Probe
cctgcaaatgcagtacaacttactg

SEQ ID NO: 246634 - DNA, 25 bp, Artificial
  Probe
accattgcagaaagagcctctgcat

SEQ ID NO: 246635 - DNA, 25 bp, Artificial
  Probe
cggagagtccttttctgtgagaatg

SEQ ID NO: 246636 - DNA, 25 bp, Artificial
  Probe
cttcgcctatgcagccttgtttgat

SEQ ID NO: 246637 - DNA, 25 bp, Artificial
  Probe
gcctcctgcaaatgcagtacaactt

SEQ ID NO: 246638 - DNA, 25 bp, Artificial
  Probe
ccttccttcggaagctgtaaattca

SEQ ID NO: 246639 - DNA, 25 bp, Artificial
  Probe
ccaagcaaagcctcctgcaaatgca

SEQ ID NO: 246640 - DNA, 25 bp, Artificial
  Probe
tccagccctgatcagtgacttgctg

SEQ ID NO: 246641 - DNA, 25 bp, Artificial
  Probe
gcacagtgaagtccaggaaaggctt

SEQ ID NO: 246642 - DNA, 25 bp, Artificial
  Probe
gtggcccttccttcggaagctgtaa

SEQ ID NO: 246643 - DNA, 25 bp, Artificial
  Probe
aatcatgggtagttgcctggggcac

SEQ ID NO: 246644 - DNA, 25 bp, Artificial
  Probe
caaacatgtgacctcggagagtcct

SEQ ID NO: 246645 - DNA, 25 bp, Artificial
  Probe
gtccttttctgtgagaatgttcact

SEQ ID NO: 246646 - DNA, 25 bp, Artificial
  Probe
atcatgggtagttgcctggggcaca

SEQ ID NO: 246647 - DNA, 25 bp, Artificial
  Probe
gaccacgtttatttgggcactccaa

SEQ ID NO: 246648 - DNA, 25 bp, Artificial
  Probe
ccgaattccttagtgttaagatcct

SEQ ID NO: 246649 - DNA, 25 bp, Artificial
  Probe
gaaagagcctctgcatgtaatcgtt

SEQ ID NO: 246650 - DNA, 25 bp, Artificial
  Probe
ctgctcctctgaccacgtttatttg

SEQ ID NO: 246651 - DNA, 25 bp, Artificial
  Probe
tccaggaaaggctttgtgtctgttt

SEQ ID NO: 246652 - DNA, 25 bp, Artificial
  Probe
tgccatttcataccattgcagaaag

SEQ ID NO: 246653 - DNA, 25 bp, Artificial
  Probe
gcctatgcagccttgtttgatttta

SEQ ID NO: 246654 - DNA, 25 bp, Artificial
  Probe
agaactcaggtctccctttctgcct

SEQ ID NO: 246655 - DNA, 25 bp, Artificial
  Probe
ccttcggaagctgtaaattcagccc

SEQ ID NO: 246656 - DNA, 25 bp, Artificial
  Probe
tgctctgtgaaaagacttcgcctat

SEQ ID NO: 246657 - DNA, 25 bp, Artificial
  Probe
tttctgtgagaatgttcactttcta

SEQ ID NO: 246658 - DNA, 25 bp, Artificial
  Probe
gtattgaactactgctcctctgacc

SEQ ID NO: 246659 - DNA, 25 bp, Artificial
  Probe
tgaagtccaggaaaggctttgtgtc

SEQ ID NO: 246660 - DNA, 25 bp, Artificial
  Probe
ccttagtgttaagatcctagagtga

SEQ ID NO: 246661 - DNA, 25 bp, Artificial
  Probe
aggtggcccttccttcggaagctgt

SEQ ID NO: 246662 - DNA, 25 bp, Artificial
  Probe
ctgtgaaaagacttcgcctatgcag

SEQ ID NO: 246663 - DNA, 25 bp, Artificial
  Probe
gcactccaaaacagggcttatttta

SEQ ID NO: 246664 - DNA, 25 bp, Artificial
  Probe
gcagaaagagcctctgcatgtaatc

SEQ ID NO: 246665 - DNA, 25 bp, Artificial
  Probe
tgcaaatgcagtacaacttactggt

SEQ ID NO: 246666 - DNA, 25 bp, Artificial
  Probe
ctagtatattactgtacatgattgc

SEQ ID NO: 246667 - DNA, 25 bp, Artificial
  Probe
gagcctctgcatgtaatcgttcaac

SEQ ID NO: 246668 - DNA, 25 bp, Artificial
  Probe
aagacttcgcctatgcagccttgtt

SEQ ID NO: 246669 - DNA, 25 bp, Artificial
  Probe
gtttatttgggcactccaaaacagg

SEQ ID NO: 246670 - DNA, 25 bp, Artificial
  Probe
gaactactgctcctctgaccacgtt

SEQ ID NO: 246671 - DNA, 25 bp, Artificial
  Probe
gaagtccaggaaaggctttgtgtct

SEQ ID NO: 246672 - DNA, 25 bp, Artificial
  Probe
gatcattgcctgctgaatcggccag

SEQ ID NO: 246673 - DNA, 25 bp, Artificial
  Probe
caagggcgccattgggaaagtctac

SEQ ID NO: 246674 - DNA, 25 bp, Artificial
  Probe
aagacatttcaagtgcctgtaactg

SEQ ID NO: 246675 - DNA, 25 bp, Artificial
  Probe
acagctccccattttctgagagacc

SEQ ID NO: 246676 - DNA, 25 bp, Artificial
  Probe
agacatttcaagtgcctgtaactga

SEQ ID NO: 246677 - DNA, 25 bp, Artificial
  Probe
tttcaagtgcctgtaactgatctgt

SEQ ID NO: 246678 - DNA, 25 bp, Artificial
  Probe
ttgggttattccagccaaagacatt

SEQ ID NO: 246679 - DNA, 25 bp, Artificial
  Probe
tgggaaagtctaccacgctttaaat

SEQ ID NO: 246680 - DNA, 25 bp, Artificial
  Probe
tcattgtcccagatgacgaccgctc

SEQ ID NO: 246681 - DNA, 25 bp, Artificial
  Probe
acacgatcttgcaatgttgggttat

SEQ ID NO: 246682 - DNA, 25 bp, Artificial
  Probe
ggagtcttccctgtcaccgttcagc

SEQ ID NO: 246683 - DNA, 25 bp, Artificial
  Probe
tcattgcctgctgaatcggccaggg

SEQ ID NO: 246684 - DNA, 25 bp, Artificial
  Probe
gttacttccttttcgtgatggtgat

SEQ ID NO: 246685 - DNA, 25 bp, Artificial
  Probe
ccaaagacatttcaagtgcctgtaa

SEQ ID NO: 246686 - DNA, 25 bp, Artificial
  Probe
tcggccagggcctggccactctgtg

SEQ ID NO: 246687 - DNA, 25 bp, Artificial
  Probe
cgtcattgtcccagatgacgaccgc

SEQ ID NO: 246688 - DNA, 25 bp, Artificial
  Probe
ttcacagcatgcatgaccctcacag

SEQ ID NO: 246689 - DNA, 25 bp, Artificial
  Probe
ttgcctgctgaatcggccagggcct

SEQ ID NO: 246690 - DNA, 25 bp, Artificial
  Probe
cattgggaaagtctaccacgcttta

SEQ ID NO: 246691 - DNA, 25 bp, Artificial
  Probe
ctcaccgtcattgtcccagatgacg

SEQ ID NO: 246692 - DNA, 25 bp, Artificial
  Probe
acaagggcgccattgggaaagtcta

SEQ ID NO: 246693 - DNA, 25 bp, Artificial
  Probe
cacgatcttgcaatgttgggttatt

SEQ ID NO: 246694 - DNA, 25 bp, Artificial
  Probe
attccagccaaagacatttcaagtg

SEQ ID NO: 246695 - DNA, 25 bp, Artificial
  Probe
agtgcctgtaactgatctgtacata

SEQ ID NO: 246696 - DNA, 25 bp, Artificial
  Probe
caccagttacttccttttcgtgatg

SEQ ID NO: 246697 - DNA, 25 bp, Artificial
  Probe
gttgggttattccagccaaagacat

SEQ ID NO: 246698 - DNA, 25 bp, Artificial
  Probe
actgtgtccccgacacatacagcaa

SEQ ID NO: 246699 - DNA, 25 bp, Artificial
  Probe
tcccagatgacgaccgctccttaat

SEQ ID NO: 246700 - DNA, 25 bp, Artificial
  Probe
tggtacaagatcttcacaactgcca

SEQ ID NO: 246701 - DNA, 25 bp, Artificial
  Probe
atgttgggttattccagccaaagac

SEQ ID NO: 246702 - DNA, 25 bp, Artificial
  Probe
atgatcattgcctgctgaatcggcc

SEQ ID NO: 246703 - DNA, 25 bp, Artificial
  Probe
atttcaagtgcctgtaactgatctg

SEQ ID NO: 246704 - DNA, 25 bp, Artificial
  Probe
cagccaaagacatttcaagtgcctg

SEQ ID NO: 246705 - DNA, 25 bp, Artificial
  Probe
tgtgtccccgacacatacagcaacg

SEQ ID NO: 246706 - DNA, 25 bp, Artificial
  Probe
caaagacatttcaagtgcctgtaac

SEQ ID NO: 246707 - DNA, 25 bp, Artificial
  Probe
caatgttgggttattccagccaaag

SEQ ID NO: 246708 - DNA, 25 bp, Artificial
  Probe
gcacaccagttacttccttttcgtg

SEQ ID NO: 246709 - DNA, 25 bp, Artificial
  Probe
gtcccagatgacgaccgctccttaa

SEQ ID NO: 246710 - DNA, 25 bp, Artificial
  Probe
aagtgcctgtaactgatctgtacat

SEQ ID NO: 246711 - DNA, 25 bp, Artificial
  Probe
tggagtcttccctgtcaccgttcag

SEQ ID NO: 246712 - DNA, 25 bp, Artificial
  Probe
attgtcccagatgacgaccgctcct

SEQ ID NO: 246713 - DNA, 25 bp, Artificial
  Probe
gcaatgttgggttattccagccaaa

SEQ ID NO: 246714 - DNA, 25 bp, Artificial
  Probe
gctccccattttctgagagaccaag

SEQ ID NO: 246715 - DNA, 25 bp, Artificial
  Probe
ccttttcgtgatggtgataacgatg

SEQ ID NO: 246716 - DNA, 25 bp, Artificial
  Probe
atcttgcaatgttgggttattccag

SEQ ID NO: 246717 - DNA, 25 bp, Artificial
  Probe
gctgaatcggccagggcctggccac

SEQ ID NO: 246718 - DNA, 25 bp, Artificial
  Probe
gagtacaccgccagggcgatgagca

SEQ ID NO: 246719 - DNA, 25 bp, Artificial
  Probe
tcctgataaggtgactcagtctcag

SEQ ID NO: 246720 - DNA, 25 bp, Artificial
  Probe
aggtcagatatctcccagagggcac

SEQ ID NO: 246721 - DNA, 25 bp, Artificial
  Probe
ctcccagagggcactctgtggatat

SEQ ID NO: 246722 - DNA, 25 bp, Artificial
  Probe
ataaggtgactcagtctcagccatg

SEQ ID NO: 246723 - DNA, 25 bp, Artificial
  Probe
tattccagcgggagtcctgatccca

SEQ ID NO: 246724 - DNA, 25 bp, Artificial
  Probe
gcctgtacgggacttaatcctccca

SEQ ID NO: 246725 - DNA, 25 bp, Artificial
  Probe
tctggaatgagtggatccgggcatc

SEQ ID NO: 246726 - DNA, 25 bp, Artificial
  Probe
taagcgtctggaatgagtggatccg

SEQ ID NO: 246727 - DNA, 25 bp, Artificial
  Probe
actgtatacttctggcctctgaccc

SEQ ID NO: 246728 - DNA, 25 bp, Artificial
  Probe
cagagggcactctgtggatatttat

SEQ ID NO: 246729 - DNA, 25 bp, Artificial
  Probe
gctgtttccgggtcccgtctgcagt

SEQ ID NO: 246730 - DNA, 25 bp, Artificial
  Probe
acagaaagcaccaggagggctctgg

SEQ ID NO: 246731 - DNA, 25 bp, Artificial
  Probe
atacttctggcctctgaccctgaag

SEQ ID NO: 246732 - DNA, 25 bp, Artificial
  Probe
gtctgcagtccctcggcctcgagag

SEQ ID NO: 246733 - DNA, 25 bp, Artificial
  Probe
acattcgcatcctgggtaattgtca

SEQ ID NO: 246734 - DNA, 25 bp, Artificial
  Probe
accgccagggcgatgagcagagtca

SEQ ID NO: 246735 - DNA, 25 bp, Artificial
  Probe
aaacggtacaaggtcagatatctcc

SEQ ID NO: 246736 - DNA, 25 bp, Artificial
  Probe
tcagtctcagccatgtgctgtttcc

SEQ ID NO: 246737 - DNA, 25 bp, Artificial
  Probe
gtacacccgggctcacagaggaaca

SEQ ID NO: 246738 - DNA, 25 bp, Artificial
  Probe
aggaacattcgcatcctgggtaatt

SEQ ID NO: 246739 - DNA, 25 bp, Artificial
  Probe
ctctgggcctgtacgggacttaatc

SEQ ID NO: 246740 - DNA, 25 bp, Artificial
  Probe
tgtaatactgcctctgtgtgttgag

SEQ ID NO: 246741 - DNA, 25 bp, Artificial
  Probe
taattgtcactctgggcctgtacgg

SEQ ID NO: 246742 - DNA, 25 bp, Artificial
  Probe
agagtcagcaccaagtcgcccagca

SEQ ID NO: 246743 - DNA, 25 bp, Artificial
  Probe
ctggaatgagtggatccgggcatca

SEQ ID NO: 246744 - DNA, 25 bp, Artificial
  Probe
agtccctcggcctcgagagaccagg

SEQ ID NO: 246745 - DNA, 25 bp, Artificial
  Probe
cccagagagtacaccgccagggcga

SEQ ID NO: 246746 - DNA, 25 bp, Artificial
  Probe
ctcacagaggaacattcgcatcctg

SEQ ID NO: 246747 - DNA, 25 bp, Artificial
  Probe
ggttcatctgtaatactgcctctgt

SEQ ID NO: 246748 - DNA, 25 bp, Artificial
  Probe
atgagcagagtcagcaccaagtcgc

SEQ ID NO: 246749 - DNA, 25 bp, Artificial
  Probe
gtaagcgtctggaatgagtggatcc

SEQ ID NO: 246750 - DNA, 25 bp, Artificial
  Probe
acttctggcctctgaccctgaagct

SEQ ID NO: 246751 - DNA, 25 bp, Artificial
  Probe
tgactcagtctcagccatgtgctgt

SEQ ID NO: 246752 - DNA, 25 bp, Artificial
  Probe
acaaggtcagatatctcccagaggg

SEQ ID NO: 246753 - DNA, 25 bp, Artificial
  Probe
cagatatctcccagagggcactctg

SEQ ID NO: 246754 - DNA, 25 bp, Artificial
  Probe
gatatctcccagagggcactctgtg

SEQ ID NO: 246755 - DNA, 25 bp, Artificial
  Probe
tgtgttgaggtcactgtatacttct

SEQ ID NO: 246756 - DNA, 25 bp, Artificial
  Probe
accaggcggcccagagagtacaccg

SEQ ID NO: 246757 - DNA, 25 bp, Artificial
  Probe
ccatgtgctgtttccgggtcccgtc

SEQ ID NO: 246758 - DNA, 25 bp, Artificial
  Probe
accaggagggctctggggcccccat

SEQ ID NO: 246759 - DNA, 25 bp, Artificial
  Probe
tcactctgggcctgtacgggactta

SEQ ID NO: 246760 - DNA, 25 bp, Artificial
  Probe
acagtcaggaggacaggaaggaaca

SEQ ID NO: 246761 - DNA, 25 bp, Artificial
  Probe
ggaacagaaagcaccaggagggctc

SEQ ID NO: 246762 - DNA, 25 bp, Artificial
  Probe
ggcctctgaccctgaagctcctgat

SEQ ID NO: 246763 - DNA, 25 bp, Artificial
  Probe
ttccagcgggagtcctgatcccagg

SEQ ID NO: 246764 - DNA, 25 bp, Artificial
  Probe
aatgtggactaaactgctttcaggg

SEQ ID NO: 246765 - DNA, 25 bp, Artificial
  Probe
agcgctgctggattcgtttggcata

SEQ ID NO: 246766 - DNA, 25 bp, Artificial
  Probe
tggcatagctttgtgccatggagtt

SEQ ID NO: 246767 - DNA, 25 bp, Artificial
  Probe
ttaacatacgtcagaaggttctgtg

SEQ ID NO: 246768 - DNA, 25 bp, Artificial
  Probe
ggactaaactgctttcagggagaaa

SEQ ID NO: 246769 - DNA, 25 bp, Artificial
  Probe
ctaaactgctttcagggagaaatgt

SEQ ID NO: 246770 - DNA, 25 bp, Artificial
  Probe
caagcgctgctggattcgtttggca

SEQ ID NO: 246771 - DNA, 25 bp, Artificial
  Probe
cgctgctggattcgtttggcatagc

SEQ ID NO: 246772 - DNA, 25 bp, Artificial
  Probe
gctggattcgtttggcatagctttg

SEQ ID NO: 246773 - DNA, 25 bp, Artificial
  Probe
cgtttggcatagctttgtgccatgg

SEQ ID NO: 246774 - DNA, 25 bp, Artificial
  Probe
actaaactgctttcagggagaaatg

SEQ ID NO: 246775 - DNA, 25 bp, Artificial
  Probe
ttcaagcgctgctggattcgtttgg

SEQ ID NO: 246776 - DNA, 25 bp, Artificial
  Probe
tgtaaggcaggctccaccacgctaa

SEQ ID NO: 246777 - DNA, 25 bp, Artificial
  Probe
acatacgtcagaaggttctgtgtgg

SEQ ID NO: 246778 - DNA, 25 bp, Artificial
  Probe
cctctgagttcaagcgctgctggat

SEQ ID NO: 246779 - DNA, 25 bp, Artificial
  Probe
aacatacgtcagaaggttctgtgtg

SEQ ID NO: 246780 - DNA, 25 bp, Artificial
  Probe
tttggcatagctttgtgccatggag

SEQ ID NO: 246781 - DNA, 25 bp, Artificial
  Probe
ttggcatagctttgtgccatggagt

SEQ ID NO: 246782 - DNA, 25 bp, Artificial
  Probe
tgtggactaaactgctttcagggag

SEQ ID NO: 246783 - DNA, 25 bp, Artificial
  Probe
aaggcaggctccaccacgctaactt

SEQ ID NO: 246784 - DNA, 25 bp, Artificial
  Probe
gcgctgctggattcgtttggcatag

SEQ ID NO: 246785 - DNA, 25 bp, Artificial
  Probe
gtggactaaactgctttcagggaga

SEQ ID NO: 246786 - DNA, 25 bp, Artificial
  Probe
gctgctggattcgtttggcatagct

SEQ ID NO: 246787 - DNA, 25 bp, Artificial
  Probe
gtttggcatagctttgtgccatgga

SEQ ID NO: 246788 - DNA, 25 bp, Artificial
  Probe
ccgatgtaaggcaggctccaccacg

SEQ ID NO: 246789 - DNA, 25 bp, Artificial
  Probe
ctgctggattcgtttggcatagctt

SEQ ID NO: 246790 - DNA, 25 bp, Artificial
  Probe
taacatacgtcagaaggttctgtgt

SEQ ID NO: 246791 - DNA, 25 bp, Artificial
  Probe
gtaaggcaggctccaccacgctaac

SEQ ID NO: 246792 - DNA, 25 bp, Artificial
  Probe
gaccatgtggccctgtgaaagtgtc

SEQ ID NO: 246793 - DNA, 25 bp, Artificial
  Probe
gttcaagcgctgctggattcgtttg

SEQ ID NO: 246794 - DNA, 25 bp, Artificial
  Probe
aagcgctgctggattcgtttggcat

SEQ ID NO: 246795 - DNA, 25 bp, Artificial
  Probe
accatgtggccctgtgaaagtgtca

SEQ ID NO: 246796 - DNA, 25 bp, Artificial
  Probe
taaggcaggctccaccacgctaact

SEQ ID NO: 246797 - DNA, 25 bp, Artificial
  Probe
agttcaagcgctgctggattcgttt

SEQ ID NO: 246798 - DNA, 25 bp, Artificial
  Probe
gactaaactgctttcagggagaaat

SEQ ID NO: 246799 - DNA, 25 bp, Artificial
  Probe
tggactaaactgctttcagggagaa

SEQ ID NO: 246800 - DNA, 25 bp, Artificial
  Probe
gagttcaagcgctgctggattcgtt

SEQ ID NO: 246801 - DNA, 25 bp, Artificial
  Probe
gattcgtttggcatagctttgtgcc

SEQ ID NO: 246802 - DNA, 25 bp, Artificial
  Probe
tcaagcgctgctggattcgtttggc

SEQ ID NO: 246803 - DNA, 25 bp, Artificial
  Probe
tgctggattcgtttggcatagcttt

SEQ ID NO: 246804 - DNA, 25 bp, Artificial
  Probe
tcgtttggcatagctttgtgccatg

SEQ ID NO: 246805 - DNA, 25 bp, Artificial
  Probe
attcgtttggcatagctttgtgcca

SEQ ID NO: 246806 - DNA, 25 bp, Artificial
  Probe
tcctctgagttcaagcgctgctgga

SEQ ID NO: 246807 - DNA, 25 bp, Artificial
  Probe
ttcgtttggcatagctttgtgccat

SEQ ID NO: 246808 - DNA, 25 bp, Artificial
  Probe
tttaacatacgtcagaaggttctgt

SEQ ID NO: 246809 - DNA, 25 bp, Artificial
  Probe
ggcatagctttgtgccatggagtta

SEQ ID NO: 246810 - DNA, 25 bp, Artificial
  Probe
agagctttccgtcctgggggcctca

SEQ ID NO: 246811 - DNA, 25 bp, Artificial
  Probe
gagctttccgtcctgggggcctcag

SEQ ID NO: 246812 - DNA, 25 bp, Artificial
  Probe
tgattttctatctataaagatttta

SEQ ID NO: 246813 - DNA, 25 bp, Artificial
  Probe
cttccaagcattggcagtgagagag

SEQ ID NO: 246814 - DNA, 25 bp, Artificial
  Probe
tttccgtcctgggggcctcagctcg

SEQ ID NO: 246815 - DNA, 25 bp, Artificial
  Probe
ccttccaagcattggcagtgagaga

SEQ ID NO: 246816 - DNA, 25 bp, Artificial
  Probe
ttccgtcctgggggcctcagctcgg

SEQ ID NO: 246817 - DNA, 25 bp, Artificial
  Probe
gtgagagagctttccgtcctggggg

SEQ ID NO: 246818 - DNA, 25 bp, Artificial
  Probe
gagagctttccgtcctgggggcctc

SEQ ID NO: 246819 - DNA, 25 bp, Artificial
  Probe
ctttccgtcctgggggcctcagctc

SEQ ID NO: 246820 - DNA, 25 bp, Artificial
  Probe
tccttccaagcattggcagtgagag

SEQ ID NO: 246821 - DNA, 25 bp, Artificial
  Probe
tccaagcattggcagtgagagagct

SEQ ID NO: 246822 - DNA, 25 bp, Artificial
  Probe
gagagagctttccgtcctgggggcc

SEQ ID NO: 246823 - DNA, 25 bp, Artificial
  Probe
ttccaagcattggcagtgagagagc

SEQ ID NO: 246824 - DNA, 25 bp, Artificial
  Probe
aagcattggcagtgagagagctttc

SEQ ID NO: 246825 - DNA, 25 bp, Artificial
  Probe
agcattggcagtgagagagctttcc

SEQ ID NO: 246826 - DNA, 25 bp, Artificial
  Probe
agagagctttccgtcctgggggcct

SEQ ID NO: 246827 - DNA, 25 bp, Artificial
  Probe
agtgagagagctttccgtcctgggg

SEQ ID NO: 246828 - DNA, 25 bp, Artificial
  Probe
gcattggcagtgagagagctttccg

SEQ ID NO: 246829 - DNA, 25 bp, Artificial
  Probe
gctttccgtcctgggggcctcagct

SEQ ID NO: 246830 - DNA, 25 bp, Artificial
  Probe
caagcattggcagtgagagagcttt

SEQ ID NO: 246831 - DNA, 25 bp, Artificial
  Probe
ccaagcattggcagtgagagagctt

SEQ ID NO: 246832 - DNA, 25 bp, Artificial
  Probe
ttccttccaagcattggcagtgaga

SEQ ID NO: 246833 - DNA, 25 bp, Artificial
  Probe
tgagagagctttccgtcctgggggc

SEQ ID NO: 246834 - DNA, 25 bp, Artificial
  Probe
gattttctatctataaagattttac

SEQ ID NO: 246835 - DNA, 25 bp, Artificial
  Probe
tccgtcctgggggcctcagctcggg

SEQ ID NO: 246836 - DNA, 25 bp, Artificial
  Probe
tcttcaggtgtgtatggagagcagg

SEQ ID NO: 246837 - DNA, 25 bp, Artificial
  Probe
agctttccgtcctgggggcctcagc

SEQ ID NO: 246838 - DNA, 25 bp, Artificial
  Probe
gtcttcaggtgtgtatggagagcag

SEQ ID NO: 246839 - DNA, 25 bp, Artificial
  Probe
gtactgagctctcaaggctatgctg

SEQ ID NO: 246840 - DNA, 25 bp, Artificial
  Probe
gctgcttctcccaggcaaggctatg

SEQ ID NO: 246841 - DNA, 25 bp, Artificial
  Probe
gtgaagttgctgcttctcccaggca

SEQ ID NO: 246842 - DNA, 25 bp, Artificial
  Probe
aaggctatggaccagtggagtgtcc

SEQ ID NO: 246843 - DNA, 25 bp, Artificial
  Probe
tgccagctgccacctgctgagcagg

SEQ ID NO: 246844 - DNA, 25 bp, Artificial
  Probe
tttgcacagctagtgtactgagctc

SEQ ID NO: 246845 - DNA, 25 bp, Artificial
  Probe
cacagctagtgtactgagctctcaa

SEQ ID NO: 246846 - DNA, 25 bp, Artificial
  Probe
gctatggaccagtggagtgtcccag

SEQ ID NO: 246847 - DNA, 25 bp, Artificial
  Probe
tggaccagtggagtgtcccagccat

SEQ ID NO: 246848 - DNA, 25 bp, Artificial
  Probe
gtccggcgcagtgaagttgctgctt

SEQ ID NO: 246849 - DNA, 25 bp, Artificial
  Probe
cagctagtgtactgagctctcaagg

SEQ ID NO: 246850 - DNA, 25 bp, Artificial
  Probe
gtgtactgagctctcaaggctatgc

SEQ ID NO: 246851 - DNA, 25 bp, Artificial
  Probe
actttgcacagctagtgtactgagc

SEQ ID NO: 246852 - DNA, 25 bp, Artificial
  Probe
actgagctctcaaggctatgctgct

SEQ ID NO: 246853 - DNA, 25 bp, Artificial
  Probe
cactttgcacagctagtgtactgag

SEQ ID NO: 246854 - DNA, 25 bp, Artificial
  Probe
ccactttgcacagctagtgtactga

SEQ ID NO: 246855 - DNA, 25 bp, Artificial
  Probe
tccggcgcagtgaagttgctgcttc

SEQ ID NO: 246856 - DNA, 25 bp, Artificial
  Probe
ccggcgcagtgaagttgctgcttct

SEQ ID NO: 246857 - DNA, 25 bp, Artificial
  Probe
cttctcccaggcaaggctatggacc

SEQ ID NO: 246858 - DNA, 25 bp, Artificial
  Probe
tgaagttgctgcttctcccaggcaa

SEQ ID NO: 246859 - DNA, 25 bp, Artificial
  Probe
agctgccacctgctgagcaggcgag

SEQ ID NO: 246860 - DNA, 25 bp, Artificial
  Probe
agtgtactgagctctcaaggctatg

SEQ ID NO: 246861 - DNA, 25 bp, Artificial
  Probe
gctagtgtactgagctctcaaggct

SEQ ID NO: 246862 - DNA, 25 bp, Artificial
  Probe
agctctcaaggctatgctgctgcca

SEQ ID NO: 246863 - DNA, 25 bp, Artificial
  Probe
tgtccggcgcagtgaagttgctgct

SEQ ID NO: 246864 - DNA, 25 bp, Artificial
  Probe
cggcgcagtgaagttgctgcttctc

SEQ ID NO: 246865 - DNA, 25 bp, Artificial
  Probe
ctagtgtactgagctctcaaggcta

SEQ ID NO: 246866 - DNA, 25 bp, Artificial
  Probe
tactgagctctcaaggctatgctgc

SEQ ID NO: 246867 - DNA, 25 bp, Artificial
  Probe
cgcagtgaagttgctgcttctccca

SEQ ID NO: 246868 - DNA, 25 bp, Artificial
  Probe
ccaggcaaggctatggaccagtgga

SEQ ID NO: 246869 - DNA, 25 bp, Artificial
  Probe
tagtgtactgagctctcaaggctat

SEQ ID NO: 246870 - DNA, 25 bp, Artificial
  Probe
ttctcccaggcaaggctatggacca

SEQ ID NO: 246871 - DNA, 25 bp, Artificial
  Probe
ctatggaccagtggagtgtcccagc

SEQ ID NO: 246872 - DNA, 25 bp, Artificial
  Probe
caaggctatggaccagtggagtgtc

SEQ ID NO: 246873 - DNA, 25 bp, Artificial
  Probe
aagttgctgcttctcccaggcaagg

SEQ ID NO: 246874 - DNA, 25 bp, Artificial
  Probe
ctttgcacagctagtgtactgagct

SEQ ID NO: 246875 - DNA, 25 bp, Artificial
  Probe
aggctatggaccagtggagtgtccc

SEQ ID NO: 246876 - DNA, 25 bp, Artificial
  Probe
ttgcacagctagtgtactgagctct

SEQ ID NO: 246877 - DNA, 25 bp, Artificial
  Probe
cccaggcaaggctatggaccagtgg

SEQ ID NO: 246878 - DNA, 25 bp, Artificial
  Probe
ctgtccggcgcagtgaagttgctgc

SEQ ID NO: 246879 - DNA, 25 bp, Artificial
  Probe
cagtgaagttgctgcttctcccagg

SEQ ID NO: 246880 - DNA, 25 bp, Artificial
  Probe
gaagttgctgcttctcccaggcaag

SEQ ID NO: 246881 - DNA, 25 bp, Artificial
  Probe
agttgctgcttctcccaggcaaggc

SEQ ID NO: 246882 - DNA, 25 bp, Artificial
  Probe
ggctatggaccagtggagtgtccca

SEQ ID NO: 246883 - DNA, 25 bp, Artificial
  Probe
ctctcaaggctatgctgctgccagc

SEQ ID NO: 246884 - DNA, 25 bp, Artificial
  Probe
tatggaccagtggagtgtcccagcc

SEQ ID NO: 246885 - DNA, 25 bp, Artificial
  Probe
gcccttttcaatgaccagactttga

SEQ ID NO: 246886 - DNA, 25 bp, Artificial
  Probe
ttttcaatgaccagactttgaaggc

SEQ ID NO: 246887 - DNA, 25 bp, Artificial
  Probe
tttcaatgaccagactttgaaggcc

SEQ ID NO: 246888 - DNA, 25 bp, Artificial
  Probe
agctgcttctctctcacaacctgag

SEQ ID NO: 246889 - DNA, 25 bp, Artificial
  Probe
actttgaaggccaaggtgggacagc

SEQ ID NO: 246890 - DNA, 25 bp, Artificial
  Probe
gtctttaaggccatcctgaagaagc

SEQ ID NO: 246891 - DNA, 25 bp, Artificial
  Probe
agctttgtgatcatggtaccccaga

SEQ ID NO: 246892 - DNA, 25 bp, Artificial
  Probe
gtgggacagctgcttctctctcaca

SEQ ID NO: 246893 - DNA, 25 bp, Artificial
  Probe
ccaaggtgggacagctgcttctctc

SEQ ID NO: 246894 - DNA, 25 bp, Artificial
  Probe
ctttgaaggccaaggtgggacagct

SEQ ID NO: 246895 - DNA, 25 bp, Artificial
  Probe
tgagctttgtgatcatggtacccca

SEQ ID NO: 246896 - DNA, 25 bp, Artificial
  Probe
cccgacacaccaacttgaagacatg

SEQ ID NO: 246897 - DNA, 25 bp, Artificial
  Probe
ctctcacaacctgagctttgtgatc

SEQ ID NO: 246898 - DNA, 25 bp, Artificial
  Probe
ggccaaggtgggacagctgcttctc

SEQ ID NO: 246899 - DNA, 25 bp, Artificial
  Probe
agcccgacacaccaacttgaagaca

SEQ ID NO: 246900 - DNA, 25 bp, Artificial
  Probe
ctttgtgatcatggtaccccagagc

SEQ ID NO: 246901 - DNA, 25 bp, Artificial
  Probe
cgacacaccaacttgaagacatgga

SEQ ID NO: 246902 - DNA, 25 bp, Artificial
  Probe
ctgagctttgtgatcatggtacccc

SEQ ID NO: 246903 - DNA, 25 bp, Artificial
  Probe
tttgtgatcatggtaccccagagcc

SEQ ID NO: 246904 - DNA, 25 bp, Artificial
  Probe
gggacagctgcttctctctcacaac

SEQ ID NO: 246905 - DNA, 25 bp, Artificial
  Probe
ggaaaaggcactcaaccccactgtc

SEQ ID NO: 246906 - DNA, 25 bp, Artificial
  Probe
ggcccttttcaatgaccagactttg

SEQ ID NO: 246907 - DNA, 25 bp, Artificial
  Probe
caatgaccagactttgaaggccaag

SEQ ID NO: 246908 - DNA, 25 bp, Artificial
  Probe
tggaaaaggcactcaaccccactgt

SEQ ID NO: 246909 - DNA, 25 bp, Artificial
  Probe
acctgagctttgtgatcatggtacc

SEQ ID NO: 246910 - DNA, 25 bp, Artificial
  Probe
cacaacctgagctttgtgatcatgg

SEQ ID NO: 246911 - DNA, 25 bp, Artificial
  Probe
tctctcacaacctgagctttgtgat

SEQ ID NO: 246912 - DNA, 25 bp, Artificial
  Probe
ctctggcccttttcaatgaccagac

SEQ ID NO: 246913 - DNA, 25 bp, Artificial
  Probe
tgggacagctgcttctctctcacaa

SEQ ID NO: 246914 - DNA, 25 bp, Artificial
  Probe
accagactttgaaggccaaggtggg

SEQ ID NO: 246915 - DNA, 25 bp, Artificial
  Probe
agagcccgacacaccaacttgaaga

SEQ ID NO: 246916 - DNA, 25 bp, Artificial
  Probe
cacaccaacttgaagacatggaaaa

SEQ ID NO: 246917 - DNA, 25 bp, Artificial
  Probe
gacacaccaacttgaagacatggaa

SEQ ID NO: 246918 - DNA, 25 bp, Artificial
  Probe
cttttcaatgaccagactttgaagg

SEQ ID NO: 246919 - DNA, 25 bp, Artificial
  Probe
aggtgggacagctgcttctctctca

SEQ ID NO: 246920 - DNA, 25 bp, Artificial
  Probe
cccactgtctttaaggccatcctga

SEQ ID NO: 246921 - DNA, 25 bp, Artificial
  Probe
tggcccttttcaatgaccagacttt

SEQ ID NO: 246922 - DNA, 25 bp, Artificial
  Probe
tctctctcacaacctgagctttgtg

SEQ ID NO: 246923 - DNA, 25 bp, Artificial
  Probe
ccttttcaatgaccagactttgaag

SEQ ID NO: 246924 - DNA, 25 bp, Artificial
  Probe
tgaccagactttgaaggccaaggtg

SEQ ID NO: 246925 - DNA, 25 bp, Artificial
  Probe
ctcacaacctgagctttgtgatcat

SEQ ID NO: 246926 - DNA, 25 bp, Artificial
  Probe
ccactgtctttaaggccatcctgaa

SEQ ID NO: 246927 - DNA, 25 bp, Artificial
  Probe
tgtgatcatggtaccccagagcccg

SEQ ID NO: 246928 - DNA, 25 bp, Artificial
  Probe
ccgacacaccaacttgaagacatgg

SEQ ID NO: 246929 - DNA, 25 bp, Artificial
  Probe
caaggtgggacagctgcttctctct

SEQ ID NO: 246930 - DNA, 25 bp, Artificial
  Probe
gaccagactttgaaggccaaggtgg

SEQ ID NO: 246931 - DNA, 25 bp, Artificial
  Probe
tccaagcccgactgtgagactggag

SEQ ID NO: 246932 - DNA, 25 bp, Artificial
  Probe
gatttcagtggcagagaccctctca

SEQ ID NO: 246933 - DNA, 25 bp, Artificial
  Probe
gagcatacccatggtgatttcagtg

SEQ ID NO: 246934 - DNA, 25 bp, Artificial
  Probe
aatgacaccatgtcaccttgtatag

SEQ ID NO: 246935 - DNA, 25 bp, Artificial
  Probe
ctgagtctgtacgtgcttactggct

SEQ ID NO: 246936 - DNA, 25 bp, Artificial
  Probe
gtgcttactggctctaacaggtatt

SEQ ID NO: 246937 - DNA, 25 bp, Artificial
  Probe
cttactggctctaacaggtatttcc

SEQ ID NO: 246938 - DNA, 25 bp, Artificial
  Probe
gcagagaccctctcactgagtctgt

SEQ ID NO: 246939 - DNA, 25 bp, Artificial
  Probe
tgagactggagcatacccatggtga

SEQ ID NO: 246940 - DNA, 25 bp, Artificial
  Probe
tacccatggtgatttcagtggcaga

SEQ ID NO: 246941 - DNA, 25 bp, Artificial
  Probe
tggcagagaccctctcactgagtct

SEQ ID NO: 246942 - DNA, 25 bp, Artificial
  Probe
ctctcactgagtctgtacgtgctta

SEQ ID NO: 246943 - DNA, 25 bp, Artificial
  Probe
cccatggtgatttcagtggcagaga

SEQ ID NO: 246944 - DNA, 25 bp, Artificial
  Probe
ggcagagaccctctcactgagtctg

SEQ ID NO: 246945 - DNA, 25 bp, Artificial
  Probe
cactgagtctgtacgtgcttactgg

SEQ ID NO: 246946 - DNA, 25 bp, Artificial
  Probe
caagcccgactgtgagactggagca

SEQ ID NO: 246947 - DNA, 25 bp, Artificial
  Probe
cctctcactgagtctgtacgtgctt

SEQ ID NO: 246948 - DNA, 25 bp, Artificial
  Probe
tctgtacgtgcttactggctctaac

SEQ ID NO: 246949 - DNA, 25 bp, Artificial
  Probe
accctctcactgagtctgtacgtgc

SEQ ID NO: 246950 - DNA, 25 bp, Artificial
  Probe
gaccctctcactgagtctgtacgtg

SEQ ID NO: 246951 - DNA, 25 bp, Artificial
  Probe
agagaccctctcactgagtctgtac

SEQ ID NO: 246952 - DNA, 25 bp, Artificial
  Probe
tggtgatttcagtggcagagaccct

SEQ ID NO: 246953 - DNA, 25 bp, Artificial
  Probe
agactggagcatacccatggtgatt

SEQ ID NO: 246954 - DNA, 25 bp, Artificial
  Probe
ctcactgagtctgtacgtgcttact

SEQ ID NO: 246955 - DNA, 25 bp, Artificial
  Probe
tttcagtggcagagaccctctcact

SEQ ID NO: 246956 - DNA, 25 bp, Artificial
  Probe
tggagcatacccatggtgatttcag

SEQ ID NO: 246957 - DNA, 25 bp, Artificial
  Probe
agcatacccatggtgatttcagtgg

SEQ ID NO: 246958 - DNA, 25 bp, Artificial
  Probe
gtacgtgcttactggctctaacagg

SEQ ID NO: 246959 - DNA, 25 bp, Artificial
  Probe
catggtgatttcagtggcagagacc

SEQ ID NO: 246960 - DNA, 25 bp, Artificial
  Probe
cccgactgtgagactggagcatacc

SEQ ID NO: 246961 - DNA, 25 bp, Artificial
  Probe
gcatacccatggtgatttcagtggc

SEQ ID NO: 246962 - DNA, 25 bp, Artificial
  Probe
gacaccatgtcaccttgtatagtta

SEQ ID NO: 246963 - DNA, 25 bp, Artificial
  Probe
tactggctctaacaggtatttccta

SEQ ID NO: 246964 - DNA, 25 bp, Artificial
  Probe
atggtgatttcagtggcagagaccc

SEQ ID NO: 246965 - DNA, 25 bp, Artificial
  Probe
agcccgactgtgagactggagcata

SEQ ID NO: 246966 - DNA, 25 bp, Artificial
  Probe
ctggctctaacaggtatttcctatt

SEQ ID NO: 246967 - DNA, 25 bp, Artificial
  Probe
ctgtacgtgcttactggctctaaca

SEQ ID NO: 246968 - DNA, 25 bp, Artificial
  Probe
ggctctaacaggtatttcctatttc

SEQ ID NO: 246969 - DNA, 25 bp, Artificial
  Probe
gcccgactgtgagactggagcatac

SEQ ID NO: 246970 - DNA, 25 bp, Artificial
  Probe
ttccaagcccgactgtgagactgga

SEQ ID NO: 246971 - DNA, 25 bp, Artificial
  Probe
cgactgtgagactggagcataccca

SEQ ID NO: 246972 - DNA, 25 bp, Artificial
  Probe
gactgtgagactggagcatacccat

SEQ ID NO: 246973 - DNA, 25 bp, Artificial
  Probe
agtctgtacgtgcttactggctcta

SEQ ID NO: 246974 - DNA, 25 bp, Artificial
  Probe
tggctctaacaggtatttcctattt

SEQ ID NO: 246975 - DNA, 25 bp, Artificial
  Probe
agaccctctcactgagtctgtacgt

SEQ ID NO: 246976 - DNA, 25 bp, Artificial
  Probe
tgcttactggctctaacaggtattt

SEQ ID NO: 246977 - DNA, 25 bp, Artificial
  Probe
ttaactggaagcaggggaaagctcc

SEQ ID NO: 246978 - DNA, 25 bp, Artificial
  Probe
tagcccaggtctttgagtaacctga

SEQ ID NO: 246979 - DNA, 25 bp, Artificial
  Probe
tctggtctcatgactttacagaaac

SEQ ID NO: 246980 - DNA, 25 bp, Artificial
  Probe
ccatagcccaggtctttgagtaacc

SEQ ID NO: 246981 - DNA, 25 bp, Artificial
  Probe
gttcctgagaccatcgagagcttaa

SEQ ID NO: 246982 - DNA, 25 bp, Artificial
  Probe
ctagccactcagtgctggcatcgga

SEQ ID NO: 246983 - DNA, 25 bp, Artificial
  Probe
gcatcggaacccaggtcctctgttt

SEQ ID NO: 246984 - DNA, 25 bp, Artificial
  Probe
atgtttaaacagtctggtctcatga

SEQ ID NO: 246985 - DNA, 25 bp, Artificial
  Probe
tcagtgctggcatcggaacccaggt

SEQ ID NO: 246986 - DNA, 25 bp, Artificial
  Probe
tgattacttctgtgttcctacccag

SEQ ID NO: 246987 - DNA, 25 bp, Artificial
  Probe
gtgttcctacccagttccagtgaat

SEQ ID NO: 246988 - DNA, 25 bp, Artificial
  Probe
taaatgtttaaacagtctggtctca

SEQ ID NO: 246989 - DNA, 25 bp, Artificial
  Probe
agcttaactggaagcaggggaaagc

SEQ ID NO: 246990 - DNA, 25 bp, Artificial
  Probe
acagtctggtctcatgactttacag

SEQ ID NO: 246991 - DNA, 25 bp, Artificial
  Probe
aactagccactcagtgctggcatcg

SEQ ID NO: 246992 - DNA, 25 bp, Artificial
  Probe
atcgagagcttaactggaagcaggg

SEQ ID NO: 246993 - DNA, 25 bp, Artificial
  Probe
ttaaacagtctggtctcatgacttt

SEQ ID NO: 246994 - DNA, 25 bp, Artificial
  Probe
gtctttgagtaacctgattacttct

SEQ ID NO: 246995 - DNA, 25 bp, Artificial
  Probe
ccccatagcccaggtctttgagtaa

SEQ ID NO: 246996 - DNA, 25 bp, Artificial
  Probe
tgtttgcctgcgtacatgcacatgc

SEQ ID NO: 246997 - DNA, 25 bp, Artificial
  Probe
aacagtctggtctcatgactttaca

SEQ ID NO: 246998 - DNA, 25 bp, Artificial
  Probe
gaccatcgagagcttaactggaagc

SEQ ID NO: 246999 - DNA, 25 bp, Artificial
  Probe
tcacttggtgttcctgagaccatcg

SEQ ID NO: 247000 - DNA, 25 bp, Artificial
  Probe
atcggaacccaggtcctctgtttgg

SEQ ID NO: 247001 - DNA, 25 bp, Artificial
  Probe
gtaacctgattacttctgtgttcct

SEQ ID NO: 247002 - DNA, 25 bp, Artificial
  Probe
tggtctcatgactttacagaaacaa

SEQ ID NO: 247003 - DNA, 25 bp, Artificial
  Probe
cgagtgtttgcctgcgtacatgcac

SEQ ID NO: 247004 - DNA, 25 bp, Artificial
  Probe
ctttgagtaacctgattacttctgt

SEQ ID NO: 247005 - DNA, 25 bp, Artificial
  Probe
ctcggaggttctggaaatgtcactt

SEQ ID NO: 247006 - DNA, 25 bp, Artificial
  Probe
tattttcctgaggaggccaggagag

SEQ ID NO: 247007 - DNA, 25 bp, Artificial
  Probe
gccactcagtgctggcatcggaacc

SEQ ID NO: 247008 - DNA, 25 bp, Artificial
  Probe
gattacttctgtgttcctacccagt

SEQ ID NO: 247009 - DNA, 25 bp, Artificial
  Probe
ctcagtgctggcatcggaacccagg

SEQ ID NO: 247010 - DNA, 25 bp, Artificial
  Probe
gagaccatcgagagcttaactggaa

SEQ ID NO: 247011 - DNA, 25 bp, Artificial
  Probe
cttctgtgttcctacccagttccag

SEQ ID NO: 247012 - DNA, 25 bp, Artificial
  Probe
cctgagaccatcgagagcttaactg

SEQ ID NO: 247013 - DNA, 25 bp, Artificial
  Probe
agcccaggtctttgagtaacctgat

SEQ ID NO: 247014 - DNA, 25 bp, Artificial
  Probe
ttctgtgttcctacccagttccagt

SEQ ID NO: 247015 - DNA, 25 bp, Artificial
  Probe
tcggaacccaggtcctctgtttggt

SEQ ID NO: 247016 - DNA, 25 bp, Artificial
  Probe
gttctggaaatgtcacttggtgttc

SEQ ID NO: 247017 - DNA, 25 bp, Artificial
  Probe
acttggtgttcctgagaccatcgag

SEQ ID NO: 247018 - DNA, 25 bp, Artificial
  Probe
tggaaatgtcacttggtgttcctga

SEQ ID NO: 247019 - DNA, 25 bp, Artificial
  Probe
ggtgttcctgagaccatcgagagct

SEQ ID NO: 247020 - DNA, 25 bp, Artificial
  Probe
ttgagtaacctgattacttctgtgt

SEQ ID NO: 247021 - DNA, 25 bp, Artificial
  Probe
cccccatagcccaggtctttgagta

SEQ ID NO: 247022 - DNA, 25 bp, Artificial
  Probe
ttgcctgcgtacatgcacatgcacc

SEQ ID NO: 247023 - DNA, 25 bp, Artificial
  Probe
tcagcaatactgtgggattctgtca

SEQ ID NO: 247024 - DNA, 25 bp, Artificial
  Probe
gtctacgagacaaacccaaagtcat

SEQ ID NO: 247025 - DNA, 25 bp, Artificial
  Probe
tatatacctgcaattccaggattag

SEQ ID NO: 247026 - DNA, 25 bp, Artificial
  Probe
tgcaacaatcatttgaaaaggcaag

SEQ ID NO: 247027 - DNA, 25 bp, Artificial
  Probe
aaacccaaagtcatcattgtgcagg

SEQ ID NO: 247028 - DNA, 25 bp, Artificial
  Probe
tcatttcctgcttccggatacatgc

SEQ ID NO: 247029 - DNA, 25 bp, Artificial
  Probe
ctcatttcctgcttccggatacatg

SEQ ID NO: 247030 - DNA, 25 bp, Artificial
  Probe
tcagagagtcttcaggagcccactc

SEQ ID NO: 247031 - DNA, 25 bp, Artificial
  Probe
caaacccaaagtcatcattgtgcag

SEQ ID NO: 247032 - DNA, 25 bp, Artificial
  Probe
aatatggaagctgatgctgtccgca

SEQ ID NO: 247033 - DNA, 25 bp, Artificial
  Probe
caatactgtgggattctgtcacata

SEQ ID NO: 247034 - DNA, 25 bp, Artificial
  Probe
ctcagcaatactgtgggattctgtc

SEQ ID NO: 247035 - DNA, 25 bp, Artificial
  Probe
aagctgatgctgtccgcatgagcca

SEQ ID NO: 247036 - DNA, 25 bp, Artificial
  Probe
agatctacctaggaatatggaagct

SEQ ID NO: 247037 - DNA, 25 bp, Artificial
  Probe
ccagatgcccaccattgatcgggca

SEQ ID NO: 247038 - DNA, 25 bp, Artificial
  Probe
gcaacaatcatttgaaaaggcaagt

SEQ ID NO: 247039 - DNA, 25 bp, Artificial
  Probe
tgtgggattctgtcacataaacaag

SEQ ID NO: 247040 - DNA, 25 bp, Artificial
  Probe
atcgggcaaccttgacaagatattt

SEQ ID NO: 247041 - DNA, 25 bp, Artificial
  Probe
ccactcctacagagctgtagatcta

SEQ ID NO: 247042 - DNA, 25 bp, Artificial
  Probe
tgggattctgtcacataaacaagca

SEQ ID NO: 247043 - DNA, 25 bp, Artificial
  Probe
gacaaacccaaagtcatcattgtgc

SEQ ID NO: 247044 - DNA, 25 bp, Artificial
  Probe
ctgtagatctacctaggaatatgga

SEQ ID NO: 247045 - DNA, 25 bp, Artificial
  Probe
cgagacaaacccaaagtcatcattg

SEQ ID NO: 247046 - DNA, 25 bp, Artificial
  Probe
gatatatacctgcaattccaggatt

SEQ ID NO: 247047 - DNA, 25 bp, Artificial
  Probe
tctacctaggaatatggaagctgat

SEQ ID NO: 247048 - DNA, 25 bp, Artificial
  Probe
atggaagctgatgctgtccgcatga

SEQ ID NO: 247049 - DNA, 25 bp, Artificial
  Probe
gcccaccattgatcgggcaaccttg

SEQ ID NO: 247050 - DNA, 25 bp, Artificial
  Probe
tacctgcaattccaggattagggaa

SEQ ID NO: 247051 - DNA, 25 bp, Artificial
  Probe
tcccagatgcccaccattgatcggg

SEQ ID NO: 247052 - DNA, 25 bp, Artificial
  Probe
agacaaaacaagaggctcttacttc

SEQ ID NO: 247053 - DNA, 25 bp, Artificial
  Probe
catgatatatacctgcaattccagg

SEQ ID NO: 247054 - DNA, 25 bp, Artificial
  Probe
cctcagcaatactgtgggattctgt

SEQ ID NO: 247055 - DNA, 25 bp, Artificial
  Probe
tagatctacctaggaatatggaagc

SEQ ID NO: 247056 - DNA, 25 bp, Artificial
  Probe
atacctgcaattccaggattaggga

SEQ ID NO: 247057 - DNA, 25 bp, Artificial
  Probe
atatggaagctgatgctgtccgcat

SEQ ID NO: 247058 - DNA, 25 bp, Artificial
  Probe
ggaagctgatgctgtccgcatgagc

SEQ ID NO: 247059 - DNA, 25 bp, Artificial
  Probe
tcatcattgtgcaggcctgcagagg

SEQ ID NO: 247060 - DNA, 25 bp, Artificial
  Probe
gatgctgtccgcatgagccatgtgg

SEQ ID NO: 247061 - DNA, 25 bp, Artificial
  Probe
ggcaagtattaattcccagatgccc

SEQ ID NO: 247062 - DNA, 25 bp, Artificial
  Probe
tggatcagagagtcttcaggagccc

SEQ ID NO: 247063 - DNA, 25 bp, Artificial
  Probe
cagagctgtagatctacctaggaat

SEQ ID NO: 247064 - DNA, 25 bp, Artificial
  Probe
cattgatcgggcaaccttgacaaga

SEQ ID NO: 247065 - DNA, 25 bp, Artificial
  Probe
atatacctgcaattccaggattagg

SEQ ID NO: 247066 - DNA, 25 bp, Artificial
  Probe
gctgtccgcatgagccatgtggaga

SEQ ID NO: 247067 - DNA, 25 bp, Artificial
  Probe
tgatatatacctgcaattccaggat

SEQ ID NO: 247068 - DNA, 25 bp, Artificial
  Probe
ctacagagctgtagatctacctagg

SEQ ID NO: 247069 - DNA, 25 bp, Artificial
  Probe
ttcaaaactgcctaagtggaaatct

SEQ ID NO: 247070 - DNA, 25 bp, Artificial
  Probe
atccttcaaaactgcctaagtggaa

SEQ ID NO: 247071 - DNA, 25 bp, Artificial
  Probe
aaatccttcaaaactgcctaagtgg

SEQ ID NO: 247072 - DNA, 25 bp, Artificial
  Probe
aatccttcaaaactgcctaagtgga

SEQ ID NO: 247073 - DNA, 25 bp, Artificial
  Probe
cgccttctctttgtcccttagttgg

SEQ ID NO: 247074 - DNA, 25 bp, Artificial
  Probe
cttggctgccaaagaaggccacctc

SEQ ID NO: 247075 - DNA, 25 bp, Artificial
  Probe
cagcctgcaatgttgggcatcggaa

SEQ ID NO: 247076 - DNA, 25 bp, Artificial
  Probe
tttgccattctcaatgtctgacttg

SEQ ID NO: 247077 - DNA, 25 bp, Artificial
  Probe
cattctcaatgtctgacttggagac

SEQ ID NO: 247078 - DNA, 25 bp, Artificial
  Probe
gctatctgtgcctttcttctggata

SEQ ID NO: 247079 - DNA, 25 bp, Artificial
  Probe
ttgccattctcaatgtctgacttgg

SEQ ID NO: 247080 - DNA, 25 bp, Artificial
  Probe
gacaccgccttcgacttggccaggt

SEQ ID NO: 247081 - DNA, 25 bp, Artificial
  Probe
cctgcagtgagtgtggtggtctttt

SEQ ID NO: 247082 - DNA, 25 bp, Artificial
  Probe
caatgttgggcatcggaaccataag

SEQ ID NO: 247083 - DNA, 25 bp, Artificial
  Probe
ggcatcggaaccataagggggacac

SEQ ID NO: 247084 - DNA, 25 bp, Artificial
  Probe
ggacaccgccttcgacttggccagg

SEQ ID NO: 247085 - DNA, 25 bp, Artificial
  Probe
gccttctctttgtcccttagttggc

SEQ ID NO: 247086 - DNA, 25 bp, Artificial
  Probe
catcggaaccataagggggacaccg

SEQ ID NO: 247087 - DNA, 25 bp, Artificial
  Probe
agcctgcaatgttgggcatcggaac

SEQ ID NO: 247088 - DNA, 25 bp, Artificial
  Probe
taatgaagcacacagcctgcaatgt

SEQ ID NO: 247089 - DNA, 25 bp, Artificial
  Probe
gcacacagcctgcaatgttgggcat

SEQ ID NO: 247090 - DNA, 25 bp, Artificial
  Probe
atttgtcctgatgcatcttttgcct

SEQ ID NO: 247091 - DNA, 25 bp, Artificial
  Probe
gcatcggaaccataagggggacacc

SEQ ID NO: 247092 - DNA, 25 bp, Artificial
  Probe
gccattctcaatgtctgacttggag

SEQ ID NO: 247093 - DNA, 25 bp, Artificial
  Probe
ggggacaccgccttcgacttggcca

SEQ ID NO: 247094 - DNA, 25 bp, Artificial
  Probe
cacacagcctgcaatgttgggcatc

SEQ ID NO: 247095 - DNA, 25 bp, Artificial
  Probe
tcaaaactgcctaagtggaaatctt

SEQ ID NO: 247096 - DNA, 25 bp, Artificial
  Probe
agcacacagcctgcaatgttgggca

SEQ ID NO: 247097 - DNA, 25 bp, Artificial
  Probe
gtcctgatgcatcttttgcctaatt

SEQ ID NO: 247098 - DNA, 25 bp, Artificial
  Probe
ctatctgtgcctttcttctggatat

SEQ ID NO: 247099 - DNA, 25 bp, Artificial
  Probe
tttgtcctgatgcatcttttgccta

SEQ ID NO: 247100 - DNA, 25 bp, Artificial
  Probe
ctgcagtgagtgtggtggtcttttc

SEQ ID NO: 247101 - DNA, 25 bp, Artificial
  Probe
acttggctgccaaagaaggccacct

SEQ ID NO: 247102 - DNA, 25 bp, Artificial
  Probe
acagcctgcaatgttgggcatcgga

SEQ ID NO: 247103 - DNA, 25 bp, Artificial
  Probe
tgtcctgatgcatcttttgcctaat

SEQ ID NO: 247104 - DNA, 25 bp, Artificial
  Probe
cacttggctgccaaagaaggccacc

SEQ ID NO: 247105 - DNA, 25 bp, Artificial
  Probe
cataagggggacaccgccttcgact

SEQ ID NO: 247106 - DNA, 25 bp, Artificial
  Probe
aatgaagcacacagcctgcaatgtt

SEQ ID NO: 247107 - DNA, 25 bp, Artificial
  Probe
tatttgtcctgatgcatcttttgcc

SEQ ID NO: 247108 - DNA, 25 bp, Artificial
  Probe
ccattctcaatgtctgacttggaga

SEQ ID NO: 247109 - DNA, 25 bp, Artificial
  Probe
aagcacacagcctgcaatgttgggc

SEQ ID NO: 247110 - DNA, 25 bp, Artificial
  Probe
attctcaatgtctgacttggagact

SEQ ID NO: 247111 - DNA, 25 bp, Artificial
  Probe
acaccgccttcgacttggccaggtt

SEQ ID NO: 247112 - DNA, 25 bp, Artificial
  Probe
acacagcctgcaatgttgggcatcg

SEQ ID NO: 247113 - DNA, 25 bp, Artificial
  Probe
ttgtcctgatgcatcttttgcctaa

SEQ ID NO: 247114 - DNA, 25 bp, Artificial
  Probe
tgcagtgagtgtggtggtcttttcc

SEQ ID NO: 247115 - DNA, 25 bp, Artificial
  Probe
aatcagcctggcatgcctgcgagtg

SEQ ID NO: 247116 - DNA, 25 bp, Artificial
  Probe
cgagtgtgagacctggtaagaaaac

SEQ ID NO: 247117 - DNA, 25 bp, Artificial
  Probe
catcacagtagaagttcagcatcac

SEQ ID NO: 247118 - DNA, 25 bp, Artificial
  Probe
agaagctctgctttccttctctgcc

SEQ ID NO: 247119 - DNA, 25 bp, Artificial
  Probe
gctaccctctaaaacagccactgtg

SEQ ID NO: 247120 - DNA, 25 bp, Artificial
  Probe
tgactggcaggcagcactgaatcct

SEQ ID NO: 247121 - DNA, 25 bp, Artificial
  Probe
aaagcttggttgtgggaccgtgctc

SEQ ID NO: 247122 - DNA, 25 bp, Artificial
  Probe
tacaaatcagcctggcatgcctgcg

SEQ ID NO: 247123 - DNA, 25 bp, Artificial
  Probe
atcagcctggcatgcctgcgagtgt

SEQ ID NO: 247124 - DNA, 25 bp, Artificial
  Probe
gtagaagttcagcatcacctgaaga

SEQ ID NO: 247125 - DNA, 25 bp, Artificial
  Probe
catgcctgcgagtgtgagacctggt

SEQ ID NO: 247126 - DNA, 25 bp, Artificial
  Probe
gctaagcaaagcttggttgtgggac

SEQ ID NO: 247127 - DNA, 25 bp, Artificial
  Probe
ctaaaacagccactgtgctaagttt

SEQ ID NO: 247128 - DNA, 25 bp, Artificial
  Probe
tgacaacagtgatggcgtgtttcct

SEQ ID NO: 247129 - DNA, 25 bp, Artificial
  Probe
ttctaactctggaggccacctggtg

SEQ ID NO: 247130 - DNA, 25 bp, Artificial
  Probe
ctgagtttgcctttgtgaggcatta

SEQ ID NO: 247131 - DNA, 25 bp, Artificial
  Probe
aggaccaagccgaaatgctaccacc

SEQ ID NO: 247132 - DNA, 25 bp, Artificial
  Probe
tgcacaattatagtaccaagagttt

SEQ ID NO: 247133 - DNA, 25 bp, Artificial
  Probe
aaactcccacaaggatcctgcagtg

SEQ ID NO: 247134 - DNA, 25 bp, Artificial
  Probe
accacctgagtttgcctttgtgagg

SEQ ID NO: 247135 - DNA, 25 bp, Artificial
  Probe
gcagtggaacgcaggcgcatcacag

SEQ ID NO: 247136 - DNA, 25 bp, Artificial
  Probe
aacagccactgtgctaagtttcaga

SEQ ID NO: 247137 - DNA, 25 bp, Artificial
  Probe
ctggtaagaaaactcccacaaggat

SEQ ID NO: 247138 - DNA, 25 bp, Artificial
  Probe
tgccaccttctaactctggaggcca

SEQ ID NO: 247139 - DNA, 25 bp, Artificial
  Probe
ctgtgctaagtttcagattatttgc

SEQ ID NO: 247140 - DNA, 25 bp, Artificial
  Probe
gaacgcaggcgcatcacagtagaag

SEQ ID NO: 247141 - DNA, 25 bp, Artificial
  Probe
gatcctgcagtggaacgcaggcgca

SEQ ID NO: 247142 - DNA, 25 bp, Artificial
  Probe
acagtgatggcgtgtttcctttcta

SEQ ID NO: 247143 - DNA, 25 bp, Artificial
  Probe
gtttctgccaccttctaactctgga

SEQ ID NO: 247144 - DNA, 25 bp, Artificial
  Probe
ttgtgggaccgtgctctgaggacca

SEQ ID NO: 247145 - DNA, 25 bp, Artificial
  Probe
accttctaactctggaggccacctg

SEQ ID NO: 247146 - DNA, 25 bp, Artificial
  Probe
gtgatgcgcatctccataacatcac

SEQ ID NO: 247147 - DNA, 25 bp, Artificial
  Probe
gggaagctaccctctaaaacagcca

SEQ ID NO: 247148 - DNA, 25 bp, Artificial
  Probe
catcacctgaagactgactggcagg

SEQ ID NO: 247149 - DNA, 25 bp, Artificial
  Probe
tctaaaacagccactgtgctaagtt

SEQ ID NO: 247150 - DNA, 25 bp, Artificial
  Probe
atttgcacaattatagtaccaagag

SEQ ID NO: 247151 - DNA, 25 bp, Artificial
  Probe
tcctgcagtggaacgcaggcgcatc

SEQ ID NO: 247152 - DNA, 25 bp, Artificial
  Probe
ctttgtgaggcattagtgtagacca

SEQ ID NO: 247153 - DNA, 25 bp, Artificial
  Probe
agagggctgtgatgcgcatctccat

SEQ ID NO: 247154 - DNA, 25 bp, Artificial
  Probe
ctcactagagagctaagcaaagctt

SEQ ID NO: 247155 - DNA, 25 bp, Artificial
  Probe
catcacaagtcctgacaacagtgat

SEQ ID NO: 247156 - DNA, 25 bp, Artificial
  Probe
gctgtgatgcgcatctccataacat

SEQ ID NO: 247157 - DNA, 25 bp, Artificial
  Probe
ctctgaggaccaagccgaaatgcta

SEQ ID NO: 247158 - DNA, 25 bp, Artificial
  Probe
tggtaagaaaactcccacaaggatc

SEQ ID NO: 247159 - DNA, 25 bp, Artificial
  Probe
gtgtgagacctggtaagaaaactcc

SEQ ID NO: 247160 - DNA, 25 bp, Artificial
  Probe
cctttgtgaggcattagtgtagacc

SEQ ID NO: 247161 - DNA, 25 bp, Artificial
  Probe
atgctgttcctagcagtggggtagt

SEQ ID NO: 247162 - DNA, 25 bp, Artificial
  Probe
cttgtgggattcttgggcatctcct

SEQ ID NO: 247163 - DNA, 25 bp, Artificial
  Probe
ggattcttgggcatctcctgcctcc

SEQ ID NO: 247164 - DNA, 25 bp, Artificial
  Probe
tgaggtgcccaggtggctatttgcc

SEQ ID NO: 247165 - DNA, 25 bp, Artificial
  Probe
acaatgctgttcctagcagtggggt

SEQ ID NO: 247166 - DNA, 25 bp, Artificial
  Probe
ctatttgccctgcagagctgggagt

SEQ ID NO: 247167 - DNA, 25 bp, Artificial
  Probe
gaggtgcccaggtggctatttgccc

SEQ ID NO: 247168 - DNA, 25 bp, Artificial
  Probe
gattcttgggcatctcctgcctcct

SEQ ID NO: 247169 - DNA, 25 bp, Artificial
  Probe
gcccaggtggctatttgccctgcag

SEQ ID NO: 247170 - DNA, 25 bp, Artificial
  Probe
tgctgcaggcagatgacctcatggg

SEQ ID NO: 247171 - DNA, 25 bp, Artificial
  Probe
cttccttgtgggattcttgggcatc

SEQ ID NO: 247172 - DNA, 25 bp, Artificial
  Probe
tgttcctagcagtggggtagtgtct

SEQ ID NO: 247173 - DNA, 25 bp, Artificial
  Probe
attcttgggcatctcctgcctcctt

SEQ ID NO: 247174 - DNA, 25 bp, Artificial
  Probe
gctatttgccctgcagagctgggag

SEQ ID NO: 247175 - DNA, 25 bp, Artificial
  Probe
taatgtcttaattggctgttgcctg

SEQ ID NO: 247176 - DNA, 25 bp, Artificial
  Probe
tccttgtgggattcttgggcatctc

SEQ ID NO: 247177 - DNA, 25 bp, Artificial
  Probe
atacaatgctgttcctagcagtggg

SEQ ID NO: 247178 - DNA, 25 bp, Artificial
  Probe
ttgtgggattcttgggcatctcctg

SEQ ID NO: 247179 - DNA, 25 bp, Artificial
  Probe
gtcttaattggctgttgcctgggga

SEQ ID NO: 247180 - DNA, 25 bp, Artificial
  Probe
tatttgccctgcagagctgggagtt

SEQ ID NO: 247181 - DNA, 25 bp, Artificial
  Probe
atttgccctgcagagctgggagttc

SEQ ID NO: 247182 - DNA, 25 bp, Artificial
  Probe
caggtggctatttgccctgcagagc

SEQ ID NO: 247183 - DNA, 25 bp, Artificial
  Probe
aaatcccttccttgtgggattcttg

SEQ ID NO: 247184 - DNA, 25 bp, Artificial
  Probe
aatcccttccttgtgggattcttgg

SEQ ID NO: 247185 - DNA, 25 bp, Artificial
  Probe
aacaggagagctgctgcaggcagat

SEQ ID NO: 247186 - DNA, 25 bp, Artificial
  Probe
aatgctgttcctagcagtggggtag

SEQ ID NO: 247187 - DNA, 25 bp, Artificial
  Probe
cttaattggctgttgcctggggaac

SEQ ID NO: 247188 - DNA, 25 bp, Artificial
  Probe
ttaattggctgttgcctggggaaca

SEQ ID NO: 247189 - DNA, 25 bp, Artificial
  Probe
tttgccctgcagagctgggagttcc

SEQ ID NO: 247190 - DNA, 25 bp, Artificial
  Probe
caatgctgttcctagcagtggggta

SEQ ID NO: 247191 - DNA, 25 bp, Artificial
  Probe
ccttgtgggattcttgggcatctcc

SEQ ID NO: 247192 - DNA, 25 bp, Artificial
  Probe
atcccttccttgtgggattcttggg

SEQ ID NO: 247193 - DNA, 25 bp, Artificial
  Probe
tgccctgcagagctgggagttcccc

SEQ ID NO: 247194 - DNA, 25 bp, Artificial
  Probe
ctgctgcaggcagatgacctcatgg

SEQ ID NO: 247195 - DNA, 25 bp, Artificial
  Probe
ttaatgtcttaattggctgttgcct

SEQ ID NO: 247196 - DNA, 25 bp, Artificial
  Probe
tagcagtggggtagtgtctaccacc

SEQ ID NO: 247197 - DNA, 25 bp, Artificial
  Probe
ttccttgtgggattcttgggcatct

SEQ ID NO: 247198 - DNA, 25 bp, Artificial
  Probe
ggatacaatgctgttcctagcagtg

SEQ ID NO: 247199 - DNA, 25 bp, Artificial
  Probe
gctgctgcaggcagatgacctcatg

SEQ ID NO: 247200 - DNA, 25 bp, Artificial
  Probe
ctagcagtggggtagtgtctaccac

SEQ ID NO: 247201 - DNA, 25 bp, Artificial
  Probe
tacaatgctgttcctagcagtgggg

SEQ ID NO: 247202 - DNA, 25 bp, Artificial
  Probe
attaatgtcttaattggctgttgcc

SEQ ID NO: 247203 - DNA, 25 bp, Artificial
  Probe
ggctatttgccctgcagagctggga

SEQ ID NO: 247204 - DNA, 25 bp, Artificial
  Probe
ggtagtgtctaccacccttctacca

SEQ ID NO: 247205 - DNA, 25 bp, Artificial
  Probe
ctgttcctagcagtggggtagtgtc

SEQ ID NO: 247206 - DNA, 25 bp, Artificial
  Probe
ccaggtggctatttgccctgcagag

SEQ ID NO: 247207 - DNA, 25 bp, Artificial
  Probe
gaaggaccgcacatggaaacgggaa

SEQ ID NO: 247208 - DNA, 25 bp, Artificial
  Probe
tagttccttgcctaggaagggcagg

SEQ ID NO: 247209 - DNA, 25 bp, Artificial
  Probe
ctgcaagagccagaagcgaaatgcg

SEQ ID NO: 247210 - DNA, 25 bp, Artificial
  Probe
aacatgtccgactccctggtggtgt

SEQ ID NO: 247211 - DNA, 25 bp, Artificial
  Probe
aagatacggccgataaaagcaagtc

SEQ ID NO: 247212 - DNA, 25 bp, Artificial
  Probe
atacggccgataaaagcaagtcaag

SEQ ID NO: 247213 - DNA, 25 bp, Artificial
  Probe
gctgcaagagccagaagcgaaatgc

SEQ ID NO: 247214 - DNA, 25 bp, Artificial
  Probe
ctccgaggaagatacggccgataaa

SEQ ID NO: 247215 - DNA, 25 bp, Artificial
  Probe
taaagctgcaagagccagaagcgaa

SEQ ID NO: 247216 - DNA, 25 bp, Artificial
  Probe
ggaattggaacacctcaccagcgag

SEQ ID NO: 247217 - DNA, 25 bp, Artificial
  Probe
gaattggaacacctcaccagcgagg

SEQ ID NO: 247218 - DNA, 25 bp, Artificial
  Probe
aatcgcggagaaagtccccttcgca

SEQ ID NO: 247219 - DNA, 25 bp, Artificial
  Probe
gataaagctgcaagagccagaagcg

SEQ ID NO: 247220 - DNA, 25 bp, Artificial
  Probe
agactagttccttgcctaggaaggg

SEQ ID NO: 247221 - DNA, 25 bp, Artificial
  Probe
atgcgagactagttccttgcctagg

SEQ ID NO: 247222 - DNA, 25 bp, Artificial
  Probe
ctccagctccgaggaagatacggcc

SEQ ID NO: 247223 - DNA, 25 bp, Artificial
  Probe
tgcgattacaattcaggggccgcgt

SEQ ID NO: 247224 - DNA, 25 bp, Artificial
  Probe
gagaaagtccccttcgcaaagagta

SEQ ID NO: 247225 - DNA, 25 bp, Artificial
  Probe
gatcccttccaatgggcgcgaagga

SEQ ID NO: 247226 - DNA, 25 bp, Artificial
  Probe
gtgcgattacaattcaggggccgcg

SEQ ID NO: 247227 - DNA, 25 bp, Artificial
  Probe
gttcaggctccagctccgaggaaga

SEQ ID NO: 247228 - DNA, 25 bp, Artificial
  Probe
ccgactccctggtggtgtgtgacgt

SEQ ID NO: 247229 - DNA, 25 bp, Artificial
  Probe
acaacagataaagctgcaagagcca

SEQ ID NO: 247230 - DNA, 25 bp, Artificial
  Probe
aggtagccaataaatcgcggagaaa

SEQ ID NO: 247231 - DNA, 25 bp, Artificial
  Probe
gtagccaataaatcgcggagaaagt

SEQ ID NO: 247232 - DNA, 25 bp, Artificial
  Probe
tgtccgactccctggtggtgtgtga

SEQ ID NO: 247233 - DNA, 25 bp, Artificial
  Probe
cgagactagttccttgcctaggaag

SEQ ID NO: 247234 - DNA, 25 bp, Artificial
  Probe
ccgatcccttccaatgggcgcgaag

SEQ ID NO: 247235 - DNA, 25 bp, Artificial
  Probe
tccgactccctggtggtgtgtgacg

SEQ ID NO: 247236 - DNA, 25 bp, Artificial
  Probe
cgattacaattcaggggccgcgtgt

SEQ ID NO: 247237 - DNA, 25 bp, Artificial
  Probe
ttcaggctccagctccgaggaagat

SEQ ID NO: 247238 - DNA, 25 bp, Artificial
  Probe
tcaggctccagctccgaggaagata

SEQ ID NO: 247239 - DNA, 25 bp, Artificial
  Probe
tcgcggagaaagtccccttcgcaaa

SEQ ID NO: 247240 - DNA, 25 bp, Artificial
  Probe
agctccgaggaagatacggccgata

SEQ ID NO: 247241 - DNA, 25 bp, Artificial
  Probe
agccagaagcgaaatgcgagactag

SEQ ID NO: 247242 - DNA, 25 bp, Artificial
  Probe
gctccagctccgaggaagatacggc

SEQ ID NO: 247243 - DNA, 25 bp, Artificial
  Probe
atcgcggagaaagtccccttcgcaa

SEQ ID NO: 247244 - DNA, 25 bp, Artificial
  Probe
ggttcaggctccagctccgaggaag

SEQ ID NO: 247245 - DNA, 25 bp, Artificial
  Probe
aaatgcgagactagttccttgccta

SEQ ID NO: 247246 - DNA, 25 bp, Artificial
  Probe
tgtgtgacgtggacccggagctaaa

SEQ ID NO: 247247 - DNA, 25 bp, Artificial
  Probe
gaccgcacatggaaacgggaattgg

SEQ ID NO: 247248 - DNA, 25 bp, Artificial
  Probe
ggaaaggccccgatcccttccaatg

SEQ ID NO: 247249 - DNA, 25 bp, Artificial
  Probe
accgcacatggaaacgggaattgga

SEQ ID NO: 247250 - DNA, 25 bp, Artificial
  Probe
agtgcgattacaattcaggggccgc

SEQ ID NO: 247251 - DNA, 25 bp, Artificial
  Probe
agggttcaggctccagctccgagga

SEQ ID NO: 247252 - DNA, 25 bp, Artificial
  Probe
gaacccggaggtagccaataaatcg

SEQ ID NO: 247253 - DNA, 25 bp, Artificial
  Probe
agctctgatatgcaaagcatatgat

SEQ ID NO: 247254 - DNA, 25 bp, Artificial
  Probe
gtgtaacgtctcactggaccacttt

SEQ ID NO: 247255 - DNA, 25 bp, Artificial
  Probe
taacccacagactgagagccgtgta

SEQ ID NO: 247256 - DNA, 25 bp, Artificial
  Probe
attgctcagcatattaatcctgatg

SEQ ID NO: 247257 - DNA, 25 bp, Artificial
  Probe
ttaatttcaggcagcattccctatg

SEQ ID NO: 247258 - DNA, 25 bp, Artificial
  Probe
ttcaggcagcattccctatgggaaa

SEQ ID NO: 247259 - DNA, 25 bp, Artificial
  Probe
ttccctatgggaaaggtgataccag

SEQ ID NO: 247260 - DNA, 25 bp, Artificial
  Probe
gctctgatatgcaaagcatatgata

SEQ ID NO: 247261 - DNA, 25 bp, Artificial
  Probe
aacactagcagagtttctccctcgg

SEQ ID NO: 247262 - DNA, 25 bp, Artificial
  Probe
acctggagtctaacccacagactga

SEQ ID NO: 247263 - DNA, 25 bp, Artificial
  Probe
acagcattgcttacgcaggaaagta

SEQ ID NO: 247264 - DNA, 25 bp, Artificial
  Probe
gtaaacactagcagagtttctccct

SEQ ID NO: 247265 - DNA, 25 bp, Artificial
  Probe
agagtttctccctcggtacaaggtg

SEQ ID NO: 247266 - DNA, 25 bp, Artificial
  Probe
caggaaccctttagctgacagcatt

SEQ ID NO: 247267 - DNA, 25 bp, Artificial
  Probe
gtaacgtctcactggaccactttag

SEQ ID NO: 247268 - DNA, 25 bp, Artificial
  Probe
tttaacctggagtctaacccacaga

SEQ ID NO: 247269 - DNA, 25 bp, Artificial
  Probe
aaaggtgataccagctctgatatgc

SEQ ID NO: 247270 - DNA, 25 bp, Artificial
  Probe
tatgttaatttcaggcagcattccc

SEQ ID NO: 247271 - DNA, 25 bp, Artificial
  Probe
cagcattccctatgggaaaggtgat

SEQ ID NO: 247272 - DNA, 25 bp, Artificial
  Probe
aaccaggaaccctttagctgacagc

SEQ ID NO: 247273 - DNA, 25 bp, Artificial
  Probe
atgcatctcagagaatatgcatttt

SEQ ID NO: 247274 - DNA, 25 bp, Artificial
  Probe
tggaccactttagtctaaccaggaa

SEQ ID NO: 247275 - DNA, 25 bp, Artificial
  Probe
tgctcagcatattaatcctgatgga

SEQ ID NO: 247276 - DNA, 25 bp, Artificial
  Probe
gccgtgtagcagtgtctgtggtttt

SEQ ID NO: 247277 - DNA, 25 bp, Artificial
  Probe
gcatctcagagaatatgcattttac

SEQ ID NO: 247278 - DNA, 25 bp, Artificial
  Probe
agccgtgtagcagtgtctgtggttt

SEQ ID NO: 247279 - DNA, 25 bp, Artificial
  Probe
ccgtgtagcagtgtctgtggttttg

SEQ ID NO: 247280 - DNA, 25 bp, Artificial
  Probe
ggagtctaacccacagactgagagc

SEQ ID NO: 247281 - DNA, 25 bp, Artificial
  Probe
gtctaaccaggaaccctttagctga

SEQ ID NO: 247282 - DNA, 25 bp, Artificial
  Probe
gactgagagccgtgtagcagtgtct

SEQ ID NO: 247283 - DNA, 25 bp, Artificial
  Probe
tagcagagtttctccctcggtacaa

SEQ ID NO: 247284 - DNA, 25 bp, Artificial
  Probe
ttttaacctggagtctaacccacag

SEQ ID NO: 247285 - DNA, 25 bp, Artificial
  Probe
ggcagcattccctatgggaaaggtg

SEQ ID NO: 247286 - DNA, 25 bp, Artificial
  Probe
aatatgttaatttcaggcagcattc

SEQ ID NO: 247287 - DNA, 25 bp, Artificial
  Probe
cactggaccactttagtctaaccag

SEQ ID NO: 247288 - DNA, 25 bp, Artificial
  Probe
tgcttacgcaggaaagtagctggca

SEQ ID NO: 247289 - DNA, 25 bp, Artificial
  Probe
gataccagctctgatatgcaaagca

SEQ ID NO: 247290 - DNA, 25 bp, Artificial
  Probe
ccacagactgagagccgtgtagcag

SEQ ID NO: 247291 - DNA, 25 bp, Artificial
  Probe
attgcttacgcaggaaagtagctgg

SEQ ID NO: 247292 - DNA, 25 bp, Artificial
  Probe
attccctatgggaaaggtgatacca

SEQ ID NO: 247293 - DNA, 25 bp, Artificial
  Probe
gtctcactggaccactttagtctaa

SEQ ID NO: 247294 - DNA, 25 bp, Artificial
  Probe
ccaggaaccctttagctgacagcat

SEQ ID NO: 247295 - DNA, 25 bp, Artificial
  Probe
tattgtaaacactagcagagtttct

SEQ ID NO: 247296 - DNA, 25 bp, Artificial
  Probe
cattgcttacgcaggaaagtagctg

SEQ ID NO: 247297 - DNA, 25 bp, Artificial
  Probe
tagtctaaccaggaaccctttagct

SEQ ID NO: 247298 - DNA, 25 bp, Artificial
  Probe
ctgagagccgtgtagcagtgtctgt

SEQ ID NO: 247299 - DNA, 25 bp, Artificial
  Probe
tcacagaaggagagcctctggcctt

SEQ ID NO: 247300 - DNA, 25 bp, Artificial
  Probe
ctggaccttagcagcctgaaccact

SEQ ID NO: 247301 - DNA, 25 bp, Artificial
  Probe
aatgtttttggtgaacacagttctc

SEQ ID NO: 247302 - DNA, 25 bp, Artificial
  Probe
cagtaccgtggcacaaacttcccaa

SEQ ID NO: 247303 - DNA, 25 bp, Artificial
  Probe
atggagaatcccttgacttttctca

SEQ ID NO: 247304 - DNA, 25 bp, Artificial
  Probe
ctcccacagagtcctcacagaagga

SEQ ID NO: 247305 - DNA, 25 bp, Artificial
  Probe
aggggagtctggtcatcctgaactg

SEQ ID NO: 247306 - DNA, 25 bp, Artificial
  Probe
caccccaaaagaagctcctgaagga

SEQ ID NO: 247307 - DNA, 25 bp, Artificial
  Probe
cacatcctattttatctgtcagtgg

SEQ ID NO: 247308 - DNA, 25 bp, Artificial
  Probe
tcctgaactgtgagacaagattgtt

SEQ ID NO: 247309 - DNA, 25 bp, Artificial
  Probe
gagacaagattgttcctgcagagtc

SEQ ID NO: 247310 - DNA, 25 bp, Artificial
  Probe
gctatttgccacaccagtgctgaga

SEQ ID NO: 247311 - DNA, 25 bp, Artificial
  Probe
gaggacggccgtgtccttaagcgca

SEQ ID NO: 247312 - DNA, 25 bp, Artificial
  Probe
accctgtgcagttagaaatctacag

SEQ ID NO: 247313 - DNA, 25 bp, Artificial
  Probe
acagagattggctgctactccagac

SEQ ID NO: 247314 - DNA, 25 bp, Artificial
  Probe
aggtgtcacccgtggcagaataaga

SEQ ID NO: 247315 - DNA, 25 bp, Artificial
  Probe
tcaccgtgaaagagctatttgccac

SEQ ID NO: 247316 - DNA, 25 bp, Artificial
  Probe
ttgttcctgcagagtcctggcttac

SEQ ID NO: 247317 - DNA, 25 bp, Artificial
  Probe
ggcatctatcactgctcagccatgg

SEQ ID NO: 247318 - DNA, 25 bp, Artificial
  Probe
gaagaaagcaacttcctttcagcaa

SEQ ID NO: 247319 - DNA, 25 bp, Artificial
  Probe
cctattttatctgtcagtgggaata

SEQ ID NO: 247320 - DNA, 25 bp, Artificial
  Probe
agcctgaaccacttcctctctgtgg

SEQ ID NO: 247321 - DNA, 25 bp, Artificial
  Probe
ggtcaccattctgaaaaccaacctg

SEQ ID NO: 247322 - DNA, 25 bp, Artificial
  Probe
ttagaaatctacagagattggctgc

SEQ ID NO: 247323 - DNA, 25 bp, Artificial
  Probe
ctttctatcgaaatggagaatccct

SEQ ID NO: 247324 - DNA, 25 bp, Artificial
  Probe
aggagcacatcctccgagtaccaca

SEQ ID NO: 247325 - DNA, 25 bp, Artificial
  Probe
atcctccgagtaccacataccaagg

SEQ ID NO: 247326 - DNA, 25 bp, Artificial
  Probe
gaagtccctttggtttctgagaagg

SEQ ID NO: 247327 - DNA, 25 bp, Artificial
  Probe
gagcctctggccttgaggtgtcacc

SEQ ID NO: 247328 - DNA, 25 bp, Artificial
  Probe
cataccaagggctgaaagggaagat

SEQ ID NO: 247329 - DNA, 25 bp, Artificial
  Probe
agagtgtccttgtcatctcccttcc

SEQ ID NO: 247330 - DNA, 25 bp, Artificial
  Probe
ggagctatttggtccccagtcatca

SEQ ID NO: 247331 - DNA, 25 bp, Artificial
  Probe
agttctctatgtgaaaatacacagg

SEQ ID NO: 247332 - DNA, 25 bp, Artificial
  Probe
cacccgtggcagaataagaaagtgt

SEQ ID NO: 247333 - DNA, 25 bp, Artificial
  Probe
aactcttcaagtctgcaggagtgtc

SEQ ID NO: 247334 - DNA, 25 bp, Artificial
  Probe
acagccactgtaagataggccaccc

SEQ ID NO: 247335 - DNA, 25 bp, Artificial
  Probe
gaaagcaacttcctttcagcaagtt

SEQ ID NO: 247336 - DNA, 25 bp, Artificial
  Probe
tacacaggctgcagagagagaaaaa

SEQ ID NO: 247337 - DNA, 25 bp, Artificial
  Probe
ttcagaggtcaccattctgaaaacc

SEQ ID NO: 247338 - DNA, 25 bp, Artificial
  Probe
cagtaagatcctggaggacaggagc

SEQ ID NO: 247339 - DNA, 25 bp, Artificial
  Probe
cagagtcctggcttacggctttact

SEQ ID NO: 247340 - DNA, 25 bp, Artificial
  Probe
aaagtgtacaatgtggctttctatc

SEQ ID NO: 247341 - DNA, 25 bp, Artificial
  Probe
tctatgtgggcagtaagatcctgga

SEQ ID NO: 247342 - DNA, 25 bp, Artificial
  Probe
ttctcaaggttcagaggtcaccatt

SEQ ID NO: 247343 - DNA, 25 bp, Artificial
  Probe
agtaacagccactgtaagataggcc

SEQ ID NO: 247344 - DNA, 25 bp, Artificial
  Probe
aatacacaggctgcagagagagaaa

SEQ ID NO: 247345 - DNA, 25 bp, Artificial
  Probe
tcacagccacagagggccagtacca

SEQ ID NO: 247346 - DNA, 25 bp, Artificial
  Probe
tacacacatccgtagttatgtgggt

SEQ ID NO: 247347 - DNA, 25 bp, Artificial
  Probe
acaggcccacgtttgactaccttcg

SEQ ID NO: 247348 - DNA, 25 bp, Artificial
  Probe
caggcccacgtttgactaccttcgg

SEQ ID NO: 247349 - DNA, 25 bp, Artificial
  Probe
gaccacctaaggtgtctctttccat

SEQ ID NO: 247350 - DNA, 25 bp, Artificial
  Probe
agccttgaggccttgcggtcccaag

SEQ ID NO: 247351 - DNA, 25 bp, Artificial
  Probe
acgtggactccgactcggcacgtga

SEQ ID NO: 247352 - DNA, 25 bp, Artificial
  Probe
tgtgcgtgtgccatacatagccgtt

SEQ ID NO: 247353 - DNA, 25 bp, Artificial
  Probe
gtggactccgactcggcacgtgaag

SEQ ID NO: 247354 - DNA, 25 bp, Artificial
  Probe
gagcgcccagaggacaggcccacgt

SEQ ID NO: 247355 - DNA, 25 bp, Artificial
  Probe
tacacatgtgccttatacccatgga

SEQ ID NO: 247356 - DNA, 25 bp, Artificial
  Probe
tgccttatacccatggaacatgtga

SEQ ID NO: 247357 - DNA, 25 bp, Artificial
  Probe
ggcccacgtttgactaccttcggag

SEQ ID NO: 247358 - DNA, 25 bp, Artificial
  Probe
tgtgcacacgtggactccgactcgg

SEQ ID NO: 247359 - DNA, 25 bp, Artificial
  Probe
tccgtagttatgtgggttctacaca

SEQ ID NO: 247360 - DNA, 25 bp, Artificial
  Probe
cttcacagccacagagggccagtac

SEQ ID NO: 247361 - DNA, 25 bp, Artificial
  Probe
gaaggccctccttgtgggctgccat

SEQ ID NO: 247362 - DNA, 25 bp, Artificial
  Probe
tgtgccatacatagccgtttttgtc

SEQ ID NO: 247363 - DNA, 25 bp, Artificial
  Probe
aaaccacagagaggagaaggcttgt

SEQ ID NO: 247364 - DNA, 25 bp, Artificial
  Probe
agttatgtgggttctacacatgtgc

SEQ ID NO: 247365 - DNA, 25 bp, Artificial
  Probe
agcctgtgcgtgtgccatacatagc

SEQ ID NO: 247366 - DNA, 25 bp, Artificial
  Probe
ccaggaaggccctccttgtgggctg

SEQ ID NO: 247367 - DNA, 25 bp, Artificial
  Probe
gtttgactaccttcggagcgttctg

SEQ ID NO: 247368 - DNA, 25 bp, Artificial
  Probe
ctggagttcttgtgccctatccatg

SEQ ID NO: 247369 - DNA, 25 bp, Artificial
  Probe
acgtgaagcctgtgcgtgtgccata

SEQ ID NO: 247370 - DNA, 25 bp, Artificial
  Probe
gactaccttcggagcgttctggatg

SEQ ID NO: 247371 - DNA, 25 bp, Artificial
  Probe
tgaaaccacagagaggagaaggctt

SEQ ID NO: 247372 - DNA, 25 bp, Artificial
  Probe
ggttctacacatgtgccttataccc

SEQ ID NO: 247373 - DNA, 25 bp, Artificial
  Probe
gcacgtgaagcctgtgcgtgtgcca

SEQ ID NO: 247374 - DNA, 25 bp, Artificial
  Probe
cacgtttgactaccttcggagcgtt

SEQ ID NO: 247375 - DNA, 25 bp, Artificial
  Probe
ggggcctccaggaaggccctccttg

SEQ ID NO: 247376 - DNA, 25 bp, Artificial
  Probe
ccttatacccatggaacatgtgagt

SEQ ID NO: 247377 - DNA, 25 bp, Artificial
  Probe
ctcggcacgtgaagcctgtgcgtgt

SEQ ID NO: 247378 - DNA, 25 bp, Artificial
  Probe
gggcctccaggaaggccctccttgt

SEQ ID NO: 247379 - DNA, 25 bp, Artificial
  Probe
gaagcctgtgcgtgtgccatacata

SEQ ID NO: 247380 - DNA, 25 bp, Artificial
  Probe
cgcccagaggacaggcccacgtttg

SEQ ID NO: 247381 - DNA, 25 bp, Artificial
  Probe
cccctatccctctggagttcttgtg

SEQ ID NO: 247382 - DNA, 25 bp, Artificial
  Probe
cgtttgactaccttcggagcgttct

SEQ ID NO: 247383 - DNA, 25 bp, Artificial
  Probe
taagtcttagagaccacctaaggtg

SEQ ID NO: 247384 - DNA, 25 bp, Artificial
  Probe
ttccattttctgaaaccacagagag

SEQ ID NO: 247385 - DNA, 25 bp, Artificial
  Probe
taccacctcatgatgctgtgctgga

SEQ ID NO: 247386 - DNA, 25 bp, Artificial
  Probe
ctccgactcggcacgtgaagcctgt

SEQ ID NO: 247387 - DNA, 25 bp, Artificial
  Probe
aggaaggccctccttgtgggctgcc

SEQ ID NO: 247388 - DNA, 25 bp, Artificial
  Probe
catgtgccttatacccatggaacat

SEQ ID NO: 247389 - DNA, 25 bp, Artificial
  Probe
tgcacacgtggactccgactcggca

SEQ ID NO: 247390 - DNA, 25 bp, Artificial
  Probe
ccattttctgaaaccacagagagga

SEQ ID NO: 247391 - DNA, 25 bp, Artificial
  Probe
tcatgagtcagagtaacatggtcaa

SEQ ID NO: 247392 - DNA, 25 bp, Artificial
  Probe
agtaacatggtcaactacagccttt

SEQ ID NO: 247393 - DNA, 25 bp, Artificial
  Probe
gagggaatactttactcctgagctg

SEQ ID NO: 247394 - DNA, 25 bp, Artificial
  Probe
caaccattcggaagttaagtgaatt

SEQ ID NO: 247395 - DNA, 25 bp, Artificial
  Probe
aactttgcttttcgtcacctacgag

SEQ ID NO: 247396 - DNA, 25 bp, Artificial
  Probe
aggagctgcatcaggaacctcgctc

SEQ ID NO: 247397 - DNA, 25 bp, Artificial
  Probe
aactgggcccgcatgccctggatgg

SEQ ID NO: 247398 - DNA, 25 bp, Artificial
  Probe
tagcctgtcctcttactgtgctctg

SEQ ID NO: 247399 - DNA, 25 bp, Artificial
  Probe
tctgtgagggccacttgtggcccat

SEQ ID NO: 247400 - DNA, 25 bp, Artificial
  Probe
caactacagccttttatccaaggag

SEQ ID NO: 247401 - DNA, 25 bp, Artificial
  Probe
gcccgcatgccctggatggagcaag

SEQ ID NO: 247402 - DNA, 25 bp, Artificial
  Probe
tcgctcaaccattcggaagttaagt

SEQ ID NO: 247403 - DNA, 25 bp, Artificial
  Probe
tactgtgctctgtccctggtctagc

SEQ ID NO: 247404 - DNA, 25 bp, Artificial
  Probe
tcacatgggtcactatgctcctggt

SEQ ID NO: 247405 - DNA, 25 bp, Artificial
  Probe
gtccaagatgggtgactctggtctt

SEQ ID NO: 247406 - DNA, 25 bp, Artificial
  Probe
aaagttcaacgctgtctaccagtcc

SEQ ID NO: 247407 - DNA, 25 bp, Artificial
  Probe
gcttttcgtcacctacgaggagctg

SEQ ID NO: 247408 - DNA, 25 bp, Artificial
  Probe
ccacctggatgcagcaggttctgag

SEQ ID NO: 247409 - DNA, 25 bp, Artificial
  Probe
accagtccaagatgggtgactctgg

SEQ ID NO: 247410 - DNA, 25 bp, Artificial
  Probe
tagaccagagtcagggcaagttcct

SEQ ID NO: 247411 - DNA, 25 bp, Artificial
  Probe
aacacagcagcttctccttcatgag

SEQ ID NO: 247412 - DNA, 25 bp, Artificial
  Probe
tttctttggctcctggtttgaccat

SEQ ID NO: 247413 - DNA, 25 bp, Artificial
  Probe
gttaagtgaattcctggggcgcacc

SEQ ID NO: 247414 - DNA, 25 bp, Artificial
  Probe
ttatcttctgtgagggccacttgtg

SEQ ID NO: 247415 - DNA, 25 bp, Artificial
  Probe
tggagcaagcctcctttagcagcct

SEQ ID NO: 247416 - DNA, 25 bp, Artificial
  Probe
agcctagtcacatgggtcactatgc

SEQ ID NO: 247417 - DNA, 25 bp, Artificial
  Probe
cccatctagcctagtcacatgggtc

SEQ ID NO: 247418 - DNA, 25 bp, Artificial
  Probe
ctgtgagggccacttgtggcccatt

SEQ ID NO: 247419 - DNA, 25 bp, Artificial
  Probe
agagtcagggcaagttcctccggaa

SEQ ID NO: 247420 - DNA, 25 bp, Artificial
  Probe
actgggcccgcatgccctggatgga

SEQ ID NO: 247421 - DNA, 25 bp, Artificial
  Probe
agatcatagaccagagtcagggcaa

SEQ ID NO: 247422 - DNA, 25 bp, Artificial
  Probe
atgggtgactctggtctttccctcc

SEQ ID NO: 247423 - DNA, 25 bp, Artificial
  Probe
cagggcaagttcctccggaaaggtg

SEQ ID NO: 247424 - DNA, 25 bp, Artificial
  Probe
aacctgtaccacctggatgcagcag

SEQ ID NO: 247425 - DNA, 25 bp, Artificial
  Probe
ccctggatggagcaagcctccttta

SEQ ID NO: 247426 - DNA, 25 bp, Artificial
  Probe
cagaaggacctaactttgcttttcg

SEQ ID NO: 247427 - DNA, 25 bp, Artificial
  Probe
gagatcatactggaacacagcagct

SEQ ID NO: 247428 - DNA, 25 bp, Artificial
  Probe
tagtcacatgggtcactatgctcct

SEQ ID NO: 247429 - DNA, 25 bp, Artificial
  Probe
ttatccaaggagatcatagaccaga

SEQ ID NO: 247430 - DNA, 25 bp, Artificial
  Probe
ctcctgagctgaatgaaaagttcaa

SEQ ID NO: 247431 - DNA, 25 bp, Artificial
  Probe
atggagcaagcctcctttagcagcc

SEQ ID NO: 247432 - DNA, 25 bp, Artificial
  Probe
ttctttggctcctggtttgaccatg

SEQ ID NO: 247433 - DNA, 25 bp, Artificial
  Probe
atcatactggaacacagcagcttct

SEQ ID NO: 247434 - DNA, 25 bp, Artificial
  Probe
gtaacatggtcaactacagcctttt

SEQ ID NO: 247435 - DNA, 25 bp, Artificial
  Probe
aagttaagtgaattcctggggcgca

SEQ ID NO: 247436 - DNA, 25 bp, Artificial
  Probe
gtggctgggcctccagaaggaccta

SEQ ID NO: 247437 - DNA, 25 bp, Artificial
  Probe
ttggaccagtcaacatctctgtcgt

SEQ ID NO: 247438 - DNA, 25 bp, Artificial
  Probe
tggaccagtcaacatctctgtcgtc

SEQ ID NO: 247439 - DNA, 25 bp, Artificial
  Probe
aacattggctatggctctggcttgg

SEQ ID NO: 247440 - DNA, 25 bp, Artificial
  Probe
gcaacattggctatggctctggctt

SEQ ID NO: 247441 - DNA, 25 bp, Artificial
  Probe
catctctgtcgtcactaacagcctc

SEQ ID NO: 247442 - DNA, 25 bp, Artificial
  Probe
gagtgcaggctgagtggagaaggag

SEQ ID NO: 247443 - DNA, 25 bp, Artificial
  Probe
agaggagtgcaggctgagtggagaa

SEQ ID NO: 247444 - DNA, 25 bp, Artificial
  Probe
cactaacagcctctcttctggctat

SEQ ID NO: 247445 - DNA, 25 bp, Artificial
  Probe
ggtagtgggctcagtgtggggggct

SEQ ID NO: 247446 - DNA, 25 bp, Artificial
  Probe
attggctatggctctggcttgggca

SEQ ID NO: 247447 - DNA, 25 bp, Artificial
  Probe
tctctgtcgtcactaacagcctctc

SEQ ID NO: 247448 - DNA, 25 bp, Artificial
  Probe
ggctatggctctggcttgggcagtg

SEQ ID NO: 247449 - DNA, 25 bp, Artificial
  Probe
ggcttgggcagtggcattggcggtt

SEQ ID NO: 247450 - DNA, 25 bp, Artificial
  Probe
gggcagtggcattggcggttttgcc

SEQ ID NO: 247451 - DNA, 25 bp, Artificial
  Probe
ttgggtagtgggctcagtgtggggg

SEQ ID NO: 247452 - DNA, 25 bp, Artificial
  Probe
ttgggcagtggcattggcggttttg

SEQ ID NO: 247453 - DNA, 25 bp, Artificial
  Probe
cagcctctcttctggctatggagga

SEQ ID NO: 247454 - DNA, 25 bp, Artificial
  Probe
cagtggcattggcggttttgcctca

SEQ ID NO: 247455 - DNA, 25 bp, Artificial
  Probe
gttggaccagtcaacatctctgtcg

SEQ ID NO: 247456 - DNA, 25 bp, Artificial
  Probe
actaacagcctctcttctggctatg

SEQ ID NO: 247457 - DNA, 25 bp, Artificial
  Probe
tgcaggctgagtggagaaggagttg

SEQ ID NO: 247458 - DNA, 25 bp, Artificial
  Probe
agttggaccagtcaacatctctgtc

SEQ ID NO: 247459 - DNA, 25 bp, Artificial
  Probe
taacagcctctcttctggctatgga

SEQ ID NO: 247460 - DNA, 25 bp, Artificial
  Probe
agcaacattggctatggctctggct

SEQ ID NO: 247461 - DNA, 25 bp, Artificial
  Probe
ctaacagcctctcttctggctatgg

SEQ ID NO: 247462 - DNA, 25 bp, Artificial
  Probe
caacattggctatggctctggcttg

SEQ ID NO: 247463 - DNA, 25 bp, Artificial
  Probe
aagaagcaacattggctatggctct

SEQ ID NO: 247464 - DNA, 25 bp, Artificial
  Probe
cctctcttctggctatggaggaaga

SEQ ID NO: 247465 - DNA, 25 bp, Artificial
  Probe
gtcgtcactaacagcctctcttctg

SEQ ID NO: 247466 - DNA, 25 bp, Artificial
  Probe
tctcttctggctatggaggaagaag

SEQ ID NO: 247467 - DNA, 25 bp, Artificial
  Probe
agcctctcttctggctatggaggaa

SEQ ID NO: 247468 - DNA, 25 bp, Artificial
  Probe
ctatggctctggcttgggcagtggc

SEQ ID NO: 247469 - DNA, 25 bp, Artificial
  Probe
aggagtgcaggctgagtggagaagg

SEQ ID NO: 247470 - DNA, 25 bp, Artificial
  Probe
ggaccagtcaacatctctgtcgtca

SEQ ID NO: 247471 - DNA, 25 bp, Artificial
  Probe
accagtcaacatctctgtcgtcact

SEQ ID NO: 247472 - DNA, 25 bp, Artificial
  Probe
tgtcgtcactaacagcctctcttct

SEQ ID NO: 247473 - DNA, 25 bp, Artificial
  Probe
acagcctctcttctggctatggagg

SEQ ID NO: 247474 - DNA, 25 bp, Artificial
  Probe
ctcttctggctatggaggaagaagc

SEQ ID NO: 247475 - DNA, 25 bp, Artificial
  Probe
gagttggaccagtcaacatctctgt

SEQ ID NO: 247476 - DNA, 25 bp, Artificial
  Probe
gtcaacatctctgtcgtcactaaca

SEQ ID NO: 247477 - DNA, 25 bp, Artificial
  Probe
aacatctctgtcgtcactaacagcc

SEQ ID NO: 247478 - DNA, 25 bp, Artificial
  Probe
gaccagtcaacatctctgtcgtcac

SEQ ID NO: 247479 - DNA, 25 bp, Artificial
  Probe
ctctcttctggctatggaggaagaa

SEQ ID NO: 247480 - DNA, 25 bp, Artificial
  Probe
aacagcctctcttctggctatggag

SEQ ID NO: 247481 - DNA, 25 bp, Artificial
  Probe
ggtttgggtagtgggctcagtgtgg

SEQ ID NO: 247482 - DNA, 25 bp, Artificial
  Probe
aagcaacattggctatggctctggc

SEQ ID NO: 247483 - DNA, 25 bp, Artificial
  Probe
tatgcaaggtgtctacgttaagagc

SEQ ID NO: 247484 - DNA, 25 bp, Artificial
  Probe
gtctacgttaagagccctatgcgga

SEQ ID NO: 247485 - DNA, 25 bp, Artificial
  Probe
tagcgcccgggcacttctagaacat

SEQ ID NO: 247486 - DNA, 25 bp, Artificial
  Probe
gcatttgtactgatgtcagcagatc

SEQ ID NO: 247487 - DNA, 25 bp, Artificial
  Probe
ttaagagccctatgcggacgacata

SEQ ID NO: 247488 - DNA, 25 bp, Artificial
  Probe
ctggagcgccaacacactgcacaga

SEQ ID NO: 247489 - DNA, 25 bp, Artificial
  Probe
cgttaagagccctatgcggacgaca

SEQ ID NO: 247490 - DNA, 25 bp, Artificial
  Probe
atcgctcctggcttcaggaaaaggt

SEQ ID NO: 247491 - DNA, 25 bp, Artificial
  Probe
caaggaattgttcacttcagaattt

SEQ ID NO: 247492 - DNA, 25 bp, Artificial
  Probe
ctaacaaagctaatatgcaaggtgt

SEQ ID NO: 247493 - DNA, 25 bp, Artificial
  Probe
cgaagacaaatttacctgagacact

SEQ ID NO: 247494 - DNA, 25 bp, Artificial
  Probe
agcaatatacccagacattgtgcga

SEQ ID NO: 247495 - DNA, 25 bp, Artificial
  Probe
gaattgttcacttcagaatttgagc

SEQ ID NO: 247496 - DNA, 25 bp, Artificial
  Probe
gctcctggcttcaggaaaaggtaaa

SEQ ID NO: 247497 - DNA, 25 bp, Artificial
  Probe
aactgcaacagaaaattcagctagc

SEQ ID NO: 247498 - DNA, 25 bp, Artificial
  Probe
catctgactgaagacgaaatcgcat

SEQ ID NO: 247499 - DNA, 25 bp, Artificial
  Probe
atcgcattgttttctgcatttgtac

SEQ ID NO: 247500 - DNA, 25 bp, Artificial
  Probe
acgacatacagaaaagctaatggca

SEQ ID NO: 247501 - DNA, 25 bp, Artificial
  Probe
cgcattgttttctgcatttgtactg

SEQ ID NO: 247502 - DNA, 25 bp, Artificial
  Probe
acccagacattgtgcgactccattt

SEQ ID NO: 247503 - DNA, 25 bp, Artificial
  Probe
tctatggccctgcacagccctggag

SEQ ID NO: 247504 - DNA, 25 bp, Artificial
  Probe
gtaacaacgaagacaaatttacctg

SEQ ID NO: 247505 - DNA, 25 bp, Artificial
  Probe
aatttacctgagacactttctatgg

SEQ ID NO: 247506 - DNA, 25 bp, Artificial
  Probe
aacgaagacaaatttacctgagaca

SEQ ID NO: 247507 - DNA, 25 bp, Artificial
  Probe
gcagatcgctcctggcttcaggaaa

SEQ ID NO: 247508 - DNA, 25 bp, Artificial
  Probe
aaactgcaacagaaaattcagctag

SEQ ID NO: 247509 - DNA, 25 bp, Artificial
  Probe
agacactttctatggccctgcacag

SEQ ID NO: 247510 - DNA, 25 bp, Artificial
  Probe
gatgtcagcagatcgctcctggctt

SEQ ID NO: 247511 - DNA, 25 bp, Artificial
  Probe
aatttgagccagcaatgcaaatcga

SEQ ID NO: 247512 - DNA, 25 bp, Artificial
  Probe
gctagcccttcaacatgtccttcag

SEQ ID NO: 247513 - DNA, 25 bp, Artificial
  Probe
acatgtccttcagaagaaccaccga

SEQ ID NO: 247514 - DNA, 25 bp, Artificial
  Probe
tatggccctgcacagccctggagcg

SEQ ID NO: 247515 - DNA, 25 bp, Artificial
  Probe
tttctatggccctgcacagccctgg

SEQ ID NO: 247516 - DNA, 25 bp, Artificial
  Probe
tcagcagatcgctcctggcttcagg

SEQ ID NO: 247517 - DNA, 25 bp, Artificial
  Probe
agacgaaatcgcattgttttctgca

SEQ ID NO: 247518 - DNA, 25 bp, Artificial
  Probe
agccctatgcggacgacatacagaa

SEQ ID NO: 247519 - DNA, 25 bp, Artificial
  Probe
cagcaatgcaaatcgatgggtaaat

SEQ ID NO: 247520 - DNA, 25 bp, Artificial
  Probe
attctaacaaagctaatatgcaagg

SEQ ID NO: 247521 - DNA, 25 bp, Artificial
  Probe
gcattgttttctgcatttgtactga

SEQ ID NO: 247522 - DNA, 25 bp, Artificial
  Probe
tggaattctaacaaagctaatatgc

SEQ ID NO: 247523 - DNA, 25 bp, Artificial
  Probe
atgcggacgacatacagaaaagcta

SEQ ID NO: 247524 - DNA, 25 bp, Artificial
  Probe
tgtccttcagaagaaccaccgagaa

SEQ ID NO: 247525 - DNA, 25 bp, Artificial
  Probe
ctaatatgcaaggtgtctacgttaa

SEQ ID NO: 247526 - DNA, 25 bp, Artificial
  Probe
atttgtactgatgtcagcagatcgc

SEQ ID NO: 247527 - DNA, 25 bp, Artificial
  Probe
cttcagaatttgagccagcaatgca

SEQ ID NO: 247528 - DNA, 25 bp, Artificial
  Probe
gttttctgcatttgtactgatgtca

SEQ ID NO: 247529 - DNA, 25 bp, Artificial
  Probe
tgtcatcttgtgacagcctgaagcc

SEQ ID NO: 247530 - DNA, 25 bp, Artificial
  Probe
tgcttctcccatggagacatggaga

SEQ ID NO: 247531 - DNA, 25 bp, Artificial
  Probe
acagcccttggctctggactgggca

SEQ ID NO: 247532 - DNA, 25 bp, Artificial
  Probe
aaccacagcccttggctctggactg

SEQ ID NO: 247533 - DNA, 25 bp, Artificial
  Probe
agccctgggcatagcaaccgtgaac

SEQ ID NO: 247534 - DNA, 25 bp, Artificial
  Probe
cccttggctctggactgggcacagg

SEQ ID NO: 247535 - DNA, 25 bp, Artificial
  Probe
gggctggctttgctgcttctcccat

SEQ ID NO: 247536 - DNA, 25 bp, Artificial
  Probe
aagccatgagcaagcttcctccctg

SEQ ID NO: 247537 - DNA, 25 bp, Artificial
  Probe
accagacaagccatgagcaagcttc

SEQ ID NO: 247538 - DNA, 25 bp, Artificial
  Probe
ttgttgttgattgagcccagttccc

SEQ ID NO: 247539 - DNA, 25 bp, Artificial
  Probe
tctcccatggagacatggagacagc

SEQ ID NO: 247540 - DNA, 25 bp, Artificial
  Probe
actacagtgtgtcatcttgtgacag

SEQ ID NO: 247541 - DNA, 25 bp, Artificial
  Probe
ccttggctctggactgggcacagga

SEQ ID NO: 247542 - DNA, 25 bp, Artificial
  Probe
tcccatggagacatggagacagctt

SEQ ID NO: 247543 - DNA, 25 bp, Artificial
  Probe
ggcactcacaaactacagtgtgtca

SEQ ID NO: 247544 - DNA, 25 bp, Artificial
  Probe
gcttctcccatggagacatggagac

SEQ ID NO: 247545 - DNA, 25 bp, Artificial
  Probe
ctgggcatagcaaccgtgaactgcc

SEQ ID NO: 247546 - DNA, 25 bp, Artificial
  Probe
atggagacagcttccaaacccttgt

SEQ ID NO: 247547 - DNA, 25 bp, Artificial
  Probe
gcaaccgtgaactgccagccctggg

SEQ ID NO: 247548 - DNA, 25 bp, Artificial
  Probe
ggagacagcttccaaacccttgttg

SEQ ID NO: 247549 - DNA, 25 bp, Artificial
  Probe
gtgacagcctgaagccctgggcata

SEQ ID NO: 247550 - DNA, 25 bp, Artificial
  Probe
tccaaacccttgttgttgattgagc

SEQ ID NO: 247551 - DNA, 25 bp, Artificial
  Probe
agacatggagacagcttccaaaccc

SEQ ID NO: 247552 - DNA, 25 bp, Artificial
  Probe
aacgcaccagacaagccatgagcaa

SEQ ID NO: 247553 - DNA, 25 bp, Artificial
  Probe
cttgtgacagcctgaagccctgggc

SEQ ID NO: 247554 - DNA, 25 bp, Artificial
  Probe
caaactacagtgtgtcatcttgtga

SEQ ID NO: 247555 - DNA, 25 bp, Artificial
  Probe
gaagccctgggcatagcaaccgtga

SEQ ID NO: 247556 - DNA, 25 bp, Artificial
  Probe
tctggactgggcacaggaagagaac

SEQ ID NO: 247557 - DNA, 25 bp, Artificial
  Probe
gcttccaaacccttgttgttgattg

SEQ ID NO: 247558 - DNA, 25 bp, Artificial
  Probe
acagtgtgtcatcttgtgacagcct

SEQ ID NO: 247559 - DNA, 25 bp, Artificial
  Probe
gcactcacaaactacagtgtgtcat

SEQ ID NO: 247560 - DNA, 25 bp, Artificial
  Probe
acgcaccagacaagccatgagcaag

SEQ ID NO: 247561 - DNA, 25 bp, Artificial
  Probe
agcctgaagccctgggcatagcaac

SEQ ID NO: 247562 - DNA, 25 bp, Artificial
  Probe
ctttgctgcttctcccatggagaca

SEQ ID NO: 247563 - DNA, 25 bp, Artificial
  Probe
gctttgctgcttctcccatggagac

SEQ ID NO: 247564 - DNA, 25 bp, Artificial
  Probe
aacccttgttgttgattgagcccag

SEQ ID NO: 247565 - DNA, 25 bp, Artificial
  Probe
agtgtgtcatcttgtgacagcctga

SEQ ID NO: 247566 - DNA, 25 bp, Artificial
  Probe
atagcaaccgtgaactgccagccct

SEQ ID NO: 247567 - DNA, 25 bp, Artificial
  Probe
tcatcttgtgacagcctgaagccct

SEQ ID NO: 247568 - DNA, 25 bp, Artificial
  Probe
gacaagccatgagcaagcttcctcc

SEQ ID NO: 247569 - DNA, 25 bp, Artificial
  Probe
cttggctctggactgggcacaggaa

SEQ ID NO: 247570 - DNA, 25 bp, Artificial
  Probe
tcacaaactacagtgtgtcatcttg

SEQ ID NO: 247571 - DNA, 25 bp, Artificial
  Probe
gacagcttccaaacccttgttgttg

SEQ ID NO: 247572 - DNA, 25 bp, Artificial
  Probe
tgttgttgattgagcccagttccca

SEQ ID NO: 247573 - DNA, 25 bp, Artificial
  Probe
gctgcttctcccatggagacatgga

SEQ ID NO: 247574 - DNA, 25 bp, Artificial
  Probe
gcatagcaaccgtgaactgccagcc

SEQ ID NO: 247575 - DNA, 25 bp, Artificial
  Probe
cttgaagggccgttcaccggtatga

SEQ ID NO: 247576 - DNA, 25 bp, Artificial
  Probe
gcttagatttctcactgaagctctt

SEQ ID NO: 247577 - DNA, 25 bp, Artificial
  Probe
agctcttgccgcactcagggcaggc

SEQ ID NO: 247578 - DNA, 25 bp, Artificial
  Probe
agcttagatttctcactgaagctct

SEQ ID NO: 247579 - DNA, 25 bp, Artificial
  Probe
gccgttcaccggtatgagtccgctg

SEQ ID NO: 247580 - DNA, 25 bp, Artificial
  Probe
gaagcgcttgccacactcagcgcag

SEQ ID NO: 247581 - DNA, 25 bp, Artificial
  Probe
gaagggccgttcaccggtatgagtc

SEQ ID NO: 247582 - DNA, 25 bp, Artificial
  Probe
agctcttgccgcacaggctgcaaat

SEQ ID NO: 247583 - DNA, 25 bp, Artificial
  Probe
tgcgctcgctggtgctccagcaggt

SEQ ID NO: 247584 - DNA, 25 bp, Artificial
  Probe
tgtttgtagcggaagcacttagcac

SEQ ID NO: 247585 - DNA, 25 bp, Artificial
  Probe
tccgggcacttgaagggccgttcac

SEQ ID NO: 247586 - DNA, 25 bp, Artificial
  Probe
gtgtgcgctcgctggtgctccagca

SEQ ID NO: 247587 - DNA, 25 bp, Artificial
  Probe
gggactgtttgtagcggaagcactt

SEQ ID NO: 247588 - DNA, 25 bp, Artificial
  Probe
ctggtgctccagcaggtggtgcttc

SEQ ID NO: 247589 - DNA, 25 bp, Artificial
  Probe
cgctcacccgtatggatgcgccggt

SEQ ID NO: 247590 - DNA, 25 bp, Artificial
  Probe
tgccgcacaggctgcaaatgaagga

SEQ ID NO: 247591 - DNA, 25 bp, Artificial
  Probe
ggaagcacttagcacagtgcgtgca

SEQ ID NO: 247592 - DNA, 25 bp, Artificial
  Probe
tgaagctcttctcacactccgggca

SEQ ID NO: 247593 - DNA, 25 bp, Artificial
  Probe
cttgccacactcagcgcagtggtag

SEQ ID NO: 247594 - DNA, 25 bp, Artificial
  Probe
tccagcaggtggtgcttctgtgtga

SEQ ID NO: 247595 - DNA, 25 bp, Artificial
  Probe
cacactcagcgcagtggtagggccg

SEQ ID NO: 247596 - DNA, 25 bp, Artificial
  Probe
tagcggaagcacttagcacagtgcg

SEQ ID NO: 247597 - DNA, 25 bp, Artificial
  Probe
cacccgtatggatgcgccggtgctc

SEQ ID NO: 247598 - DNA, 25 bp, Artificial
  Probe
ctcttgccgcacaggctgcaaatga

SEQ ID NO: 247599 - DNA, 25 bp, Artificial
  Probe
actgaagctcttctcacactccggg

SEQ ID NO: 247600 - DNA, 25 bp, Artificial
  Probe
gcttctgtgtgaagcgcttgccaca

SEQ ID NO: 247601 - DNA, 25 bp, Artificial
  Probe
ctcagcgcagtggtagggccgctca

SEQ ID NO: 247602 - DNA, 25 bp, Artificial
  Probe
atgaaggagacttcgtgcttgccag

SEQ ID NO: 247603 - DNA, 25 bp, Artificial
  Probe
agacttcgtgcttgccagcatgcac

SEQ ID NO: 247604 - DNA, 25 bp, Artificial
  Probe
acgggcggctgaagctcttgccgca

SEQ ID NO: 247605 - DNA, 25 bp, Artificial
  Probe
ttcgtgcttgccagcatgcacgcgc

SEQ ID NO: 247606 - DNA, 25 bp, Artificial
  Probe
tcaccggtatgagtccgctggtggc

SEQ ID NO: 247607 - DNA, 25 bp, Artificial
  Probe
acactcagcgcagtggtagggccgc

SEQ ID NO: 247608 - DNA, 25 bp, Artificial
  Probe
cagcgcagtggtagggccgctcacc

SEQ ID NO: 247609 - DNA, 25 bp, Artificial
  Probe
cacactccgggcacttgaagggccg

SEQ ID NO: 247610 - DNA, 25 bp, Artificial
  Probe
ttgccagcatgcacgcgctggtcct

SEQ ID NO: 247611 - DNA, 25 bp, Artificial
  Probe
gtgtgaagcgcttgccacactcagc

SEQ ID NO: 247612 - DNA, 25 bp, Artificial
  Probe
ggatgaagctcttgccgcactcagg

SEQ ID NO: 247613 - DNA, 25 bp, Artificial
  Probe
cttgccgcactcagggcaggcgtgc

SEQ ID NO: 247614 - DNA, 25 bp, Artificial
  Probe
tgtagcggaagcacttagcacagtg

SEQ ID NO: 247615 - DNA, 25 bp, Artificial
  Probe
cacaggctgcaaatgaaggagactt

SEQ ID NO: 247616 - DNA, 25 bp, Artificial
  Probe
gcggctgaagctcttgccgcacagg

SEQ ID NO: 247617 - DNA, 25 bp, Artificial
  Probe
ggctgaagctcttgccgcacaggct

SEQ ID NO: 247618 - DNA, 25 bp, Artificial
  Probe
tgtgcgctcgctggtgctccagcag

SEQ ID NO: 247619 - DNA, 25 bp, Artificial
  Probe
tggtgcttctgtgtgaagcgcttgc

SEQ ID NO: 247620 - DNA, 25 bp, Artificial
  Probe
tggtgcttgcggatgaagctcttgc

SEQ ID NO: 247621 - DNA, 25 bp, Artificial
  Probe
cagacgcttgtctgtcttttgatgt

SEQ ID NO: 247622 - DNA, 25 bp, Artificial
  Probe
tctgctgcattttgttgctgcactt

SEQ ID NO: 247623 - DNA, 25 bp, Artificial
  Probe
aagcagctttgtagcaccttggttt

SEQ ID NO: 247624 - DNA, 25 bp, Artificial
  Probe
agaagcagctttgtagcaccttggt

SEQ ID NO: 247625 - DNA, 25 bp, Artificial
  Probe
cattttgttgctgcacttggttcat

SEQ ID NO: 247626 - DNA, 25 bp, Artificial
  Probe
gtctgtcttttgatgtagaagcagc

SEQ ID NO: 247627 - DNA, 25 bp, Artificial
  Probe
ctgtcttttgatgtagaagcagctt

SEQ ID NO: 247628 - DNA, 25 bp, Artificial
  Probe
gtctgtctttctttaggatagctgt

SEQ ID NO: 247629 - DNA, 25 bp, Artificial
  Probe
gcattttgttgctgcacttggttca

SEQ ID NO: 247630 - DNA, 25 bp, Artificial
  Probe
tctgtcttttgatgtagaagcagct

SEQ ID NO: 247631 - DNA, 25 bp, Artificial
  Probe
tcctctgcagatagagctgctttcc

SEQ ID NO: 247632 - DNA, 25 bp, Artificial
  Probe
atcactctatcagacgcttgtctgt

SEQ ID NO: 247633 - DNA, 25 bp, Artificial
  Probe
tatcagacgcttgtctgtcttttga

SEQ ID NO: 247634 - DNA, 25 bp, Artificial
  Probe
ctgcacttggttcattctgaatata

SEQ ID NO: 247635 - DNA, 25 bp, Artificial
  Probe
gctgctttcctaaatctgtctgtct

SEQ ID NO: 247636 - DNA, 25 bp, Artificial
  Probe
tagaagcagctttgtagcaccttgg

SEQ ID NO: 247637 - DNA, 25 bp, Artificial
  Probe
accttggtttaggtctgctgcattt

SEQ ID NO: 247638 - DNA, 25 bp, Artificial
  Probe
tctatcagacgcttgtctgtctttt

SEQ ID NO: 247639 - DNA, 25 bp, Artificial
  Probe
agacgcttgtctgtcttttgatgta

SEQ ID NO: 247640 - DNA, 25 bp, Artificial
  Probe
ttcctctgcagatagagctgctttc

SEQ ID NO: 247641 - DNA, 25 bp, Artificial
  Probe
aatcactctatcagacgcttgtctg

SEQ ID NO: 247642 - DNA, 25 bp, Artificial
  Probe
ataattgactgtctgtaacatgctg

SEQ ID NO: 247643 - DNA, 25 bp, Artificial
  Probe
cttgtctgtcttttgatgtagaagc

SEQ ID NO: 247644 - DNA, 25 bp, Artificial
  Probe
gctgcattttgttgctgcacttggt

SEQ ID NO: 247645 - DNA, 25 bp, Artificial
  Probe
ctgtctgtctttctttaggatagct

SEQ ID NO: 247646 - DNA, 25 bp, Artificial
  Probe
atgtagaagcagctttgtagcacct

SEQ ID NO: 247647 - DNA, 25 bp, Artificial
  Probe
ctgtctttctttaggatagctgtat

SEQ ID NO: 247648 - DNA, 25 bp, Artificial
  Probe
agctttgtagcaccttggtttaggt

SEQ ID NO: 247649 - DNA, 25 bp, Artificial
  Probe
atctgtctgtctttctttaggatag

SEQ ID NO: 247650 - DNA, 25 bp, Artificial
  Probe
agagctgctttcctaaatctgtctg

SEQ ID NO: 247651 - DNA, 25 bp, Artificial
  Probe
gtttaggtctgctgcattttgttgc

SEQ ID NO: 247652 - DNA, 25 bp, Artificial
  Probe
tcagacgcttgtctgtcttttgatg

SEQ ID NO: 247653 - DNA, 25 bp, Artificial
  Probe
tcactctatcagacgcttgtctgtc

SEQ ID NO: 247654 - DNA, 25 bp, Artificial
  Probe
cttggtttaggtctgctgcattttg

SEQ ID NO: 247655 - DNA, 25 bp, Artificial
  Probe
tagcaccttggtttaggtctgctgc

SEQ ID NO: 247656 - DNA, 25 bp, Artificial
  Probe
gctgcacttggttcattctgaatat

SEQ ID NO: 247657 - DNA, 25 bp, Artificial
  Probe
tctgcagatagagctgctttcctaa

SEQ ID NO: 247658 - DNA, 25 bp, Artificial
  Probe
ctaaatctgtctgtctttctttagg

SEQ ID NO: 247659 - DNA, 25 bp, Artificial
  Probe
ttaggtctgctgcattttgttgctg

SEQ ID NO: 247660 - DNA, 25 bp, Artificial
  Probe
gcagatagagctgctttcctaaatc

SEQ ID NO: 247661 - DNA, 25 bp, Artificial
  Probe
ctttctttaggatagctgtatgtct

SEQ ID NO: 247662 - DNA, 25 bp, Artificial
  Probe
tctttctttaggatagctgtatgtc

SEQ ID NO: 247663 - DNA, 25 bp, Artificial
  Probe
tgctgcacttggttcattctgaata

SEQ ID NO: 247664 - DNA, 25 bp, Artificial
  Probe
gcaccttggtttaggtctgctgcat

SEQ ID NO: 247665 - DNA, 25 bp, Artificial
  Probe
cgcttgtctgtcttttgatgtagaa

SEQ ID NO: 247666 - DNA, 25 bp, Artificial
  Probe
cagatagagctgctttcctaaatct

SEQ ID NO: 247667 - DNA, 25 bp, Artificial
  Probe
accaatctgagcacccagctgttcg

SEQ ID NO: 247668 - DNA, 25 bp, Artificial
  Probe
ccctctcatgtagtggaagacctac

SEQ ID NO: 247669 - DNA, 25 bp, Artificial
  Probe
tgccctggcagctcaagaaattaaa

SEQ ID NO: 247670 - DNA, 25 bp, Artificial
  Probe
gaactccagctatcaaaaggtcaat

SEQ ID NO: 247671 - DNA, 25 bp, Artificial
  Probe
tgagaatggaccaccgttactgaag

SEQ ID NO: 247672 - DNA, 25 bp, Artificial
  Probe
atggaccaccgttactgaagaaaat

SEQ ID NO: 247673 - DNA, 25 bp, Artificial
  Probe
tggaagacctacaagatgtgatcaa

SEQ ID NO: 247674 - DNA, 25 bp, Artificial
  Probe
ggcagatgccccaaatattcttacg

SEQ ID NO: 247675 - DNA, 25 bp, Artificial
  Probe
ccaccgttactgaagaaaatcaagc

SEQ ID NO: 247676 - DNA, 25 bp, Artificial
  Probe
aatacggtcccctgaagatgctacc

SEQ ID NO: 247677 - DNA, 25 bp, Artificial
  Probe
tgctcaaaccactgggaagagacca

SEQ ID NO: 247678 - DNA, 25 bp, Artificial
  Probe
acaccattcaaacatgccctggcag

SEQ ID NO: 247679 - DNA, 25 bp, Artificial
  Probe
tcctgtggcagatgccccaaatatt

SEQ ID NO: 247680 - DNA, 25 bp, Artificial
  Probe
tcaaacatgccctggcagctcaaga

SEQ ID NO: 247681 - DNA, 25 bp, Artificial
  Probe
atctgagcacccagctgttcgctca

SEQ ID NO: 247682 - DNA, 25 bp, Artificial
  Probe
accattcaaacatgccctggcagct

SEQ ID NO: 247683 - DNA, 25 bp, Artificial
  Probe
ctttagaactccagctatcaaaagg

SEQ ID NO: 247684 - DNA, 25 bp, Artificial
  Probe
cggaattgttgctgcgtttcatgag

SEQ ID NO: 247685 - DNA, 25 bp, Artificial
  Probe
tctcatgtagtggaagacctacaag

SEQ ID NO: 247686 - DNA, 25 bp, Artificial
  Probe
caaaccactgggaagagaccaatct

SEQ ID NO: 247687 - DNA, 25 bp, Artificial
  Probe
gtcaatcctcgaaagctctcccaga

SEQ ID NO: 247688 - DNA, 25 bp, Artificial
  Probe
agctgttcgctcaggcgtctcctgt

SEQ ID NO: 247689 - DNA, 25 bp, Artificial
  Probe
ctgcgtttcatgagaatggaccacc

SEQ ID NO: 247690 - DNA, 25 bp, Artificial
  Probe
tattcttacgagctctgttttaatg

SEQ ID NO: 247691 - DNA, 25 bp, Artificial
  Probe
ttcatgagaatggaccaccgttact

SEQ ID NO: 247692 - DNA, 25 bp, Artificial
  Probe
acctacaagatgtgatcaagcagga

SEQ ID NO: 247693 - DNA, 25 bp, Artificial
  Probe
aaccatgaaaactcgggcttagata

SEQ ID NO: 247694 - DNA, 25 bp, Artificial
  Probe
tgatgaatccggaattgttgctgcg

SEQ ID NO: 247695 - DNA, 25 bp, Artificial
  Probe
aaactcgggcttagatacgcctact

SEQ ID NO: 247696 - DNA, 25 bp, Artificial
  Probe
cgggaaatttcttctgctcaaacca

SEQ ID NO: 247697 - DNA, 25 bp, Artificial
  Probe
cagctgttcgctcaggcgtctcctg

SEQ ID NO: 247698 - DNA, 25 bp, Artificial
  Probe
cacccactgagaaagcgggaaattt

SEQ ID NO: 247699 - DNA, 25 bp, Artificial
  Probe
gtggactcacccactgagaaagcgg

SEQ ID NO: 247700 - DNA, 25 bp, Artificial
  Probe
gttgctgcgtttcatgagaatggac

SEQ ID NO: 247701 - DNA, 25 bp, Artificial
  Probe
ttcgctcaggcgtctcctgtggcag

SEQ ID NO: 247702 - DNA, 25 bp, Artificial
  Probe
aagagaccaatctgagcacccagct

SEQ ID NO: 247703 - DNA, 25 bp, Artificial
  Probe
aaccactgggaagagaccaatctga

SEQ ID NO: 247704 - DNA, 25 bp, Artificial
  Probe
agcacccagctgttcgctcaggcgt

SEQ ID NO: 247705 - DNA, 25 bp, Artificial
  Probe
tcgggcttagatacgcctactttac

SEQ ID NO: 247706 - DNA, 25 bp, Artificial
  Probe
gtcccctgaagatgctacctcagac

SEQ ID NO: 247707 - DNA, 25 bp, Artificial
  Probe
ccagctatcaaaaggtcaatcctcg

SEQ ID NO: 247708 - DNA, 25 bp, Artificial
  Probe
tgatcaagcaggaatctgatgaatc

SEQ ID NO: 247709 - DNA, 25 bp, Artificial
  Probe
atcaagcaggaatctgatgaatccg

SEQ ID NO: 247710 - DNA, 25 bp, Artificial
  Probe
gccccaaatattcttacgagctctg

SEQ ID NO: 247711 - DNA, 25 bp, Artificial
  Probe
cacgcctctcattggtcacaaactg

SEQ ID NO: 247712 - DNA, 25 bp, Artificial
  Probe
gaccagactgtgaaaactcaaaagg

SEQ ID NO: 247713 - DNA, 25 bp, Artificial
  Probe
ctctgtatcagcagggtcagaaatc

SEQ ID NO: 247714 - DNA, 25 bp, Artificial
  Probe
tgtctccatgcctctgtatcagcag

SEQ ID NO: 247715 - DNA, 25 bp, Artificial
  Probe
ttcaaaggacggacttcagttagct

SEQ ID NO: 247716 - DNA, 25 bp, Artificial
  Probe
tggatcagatgtgttgctactagtc

SEQ ID NO: 247717 - DNA, 25 bp, Artificial
  Probe
tatcagcagggtcagaaatccagac

SEQ ID NO: 247718 - DNA, 25 bp, Artificial
  Probe
gggcctttcagatttcctaaccatc

SEQ ID NO: 247719 - DNA, 25 bp, Artificial
  Probe
cagaaagggcctttcagatttccta

SEQ ID NO: 247720 - DNA, 25 bp, Artificial
  Probe
acttggtgccgcacacctatttcct

SEQ ID NO: 247721 - DNA, 25 bp, Artificial
  Probe
ctgcctcccttcaaaggacggactt

SEQ ID NO: 247722 - DNA, 25 bp, Artificial
  Probe
agggcctttcagatttcctaaccat

SEQ ID NO: 247723 - DNA, 25 bp, Artificial
  Probe
cagaccagaggctcgaagaagtgca

SEQ ID NO: 247724 - DNA, 25 bp, Artificial
  Probe
agagccacttggtgccgcacaccta

SEQ ID NO: 247725 - DNA, 25 bp, Artificial
  Probe
acagaaagggcctttcagatttcct

SEQ ID NO: 247726 - DNA, 25 bp, Artificial
  Probe
tctgacggatgtgtgcagagccgcc

SEQ ID NO: 247727 - DNA, 25 bp, Artificial
  Probe
tggttcagggccttcctcagatgca

SEQ ID NO: 247728 - DNA, 25 bp, Artificial
  Probe
agcccaatctagactcctgtgcact

SEQ ID NO: 247729 - DNA, 25 bp, Artificial
  Probe
ccagaggctcgaagaagtgcagaca

SEQ ID NO: 247730 - DNA, 25 bp, Artificial
  Probe
acagcaggttcagcagagggacgaa

SEQ ID NO: 247731 - DNA, 25 bp, Artificial
  Probe
tggtgccgcacacctatttcctcat

SEQ ID NO: 247732 - DNA, 25 bp, Artificial
  Probe
ggccttcctcagatgcacacaaaca

SEQ ID NO: 247733 - DNA, 25 bp, Artificial
  Probe
tctgttccacacagctgtctccatg

SEQ ID NO: 247734 - DNA, 25 bp, Artificial
  Probe
caggttcagcagagggacgaactcc

SEQ ID NO: 247735 - DNA, 25 bp, Artificial
  Probe
tgcctttctagaactagagccactt

SEQ ID NO: 247736 - DNA, 25 bp, Artificial
  Probe
ttctagaactagagccacttggtgc

SEQ ID NO: 247737 - DNA, 25 bp, Artificial
  Probe
aggaagcccaatctagactcctgtg

SEQ ID NO: 247738 - DNA, 25 bp, Artificial
  Probe
cacagtctcaaggatcatgtgaggg

SEQ ID NO: 247739 - DNA, 25 bp, Artificial
  Probe
gacacggtgacagcaggttcagcag

SEQ ID NO: 247740 - DNA, 25 bp, Artificial
  Probe
tttcctcatctgacggatgtgtgca

SEQ ID NO: 247741 - DNA, 25 bp, Artificial
  Probe
gtttgaacaggaagcccaatctaga

SEQ ID NO: 247742 - DNA, 25 bp, Artificial
  Probe
cacggtgacagcaggttcagcagag

SEQ ID NO: 247743 - DNA, 25 bp, Artificial
  Probe
agcagagggacgaactccagtctcc

SEQ ID NO: 247744 - DNA, 25 bp, Artificial
  Probe
agaagtgcagacagcacagtctcaa

SEQ ID NO: 247745 - DNA, 25 bp, Artificial
  Probe
tcagcggggcacaggctcatgaact

SEQ ID NO: 247746 - DNA, 25 bp, Artificial
  Probe
cagaaatccagaccagaggctcgaa

SEQ ID NO: 247747 - DNA, 25 bp, Artificial
  Probe
tctccaggaacagaaagggcctttc

SEQ ID NO: 247748 - DNA, 25 bp, Artificial
  Probe
cttcagcggggcacaggctcatgaa

SEQ ID NO: 247749 - DNA, 25 bp, Artificial
  Probe
agttagctcttcagcggggcacagg

SEQ ID NO: 247750 - DNA, 25 bp, Artificial
  Probe
ctaagaggtgcctttctagaactag

SEQ ID NO: 247751 - DNA, 25 bp, Artificial
  Probe
aatccagaccagaggctcgaagaag

SEQ ID NO: 247752 - DNA, 25 bp, Artificial
  Probe
gctggctggttcagggccttcctca

SEQ ID NO: 247753 - DNA, 25 bp, Artificial
  Probe
acacagctgtctccatgcctctgta

SEQ ID NO: 247754 - DNA, 25 bp, Artificial
  Probe
gggtcagaaatccagaccagaggct

SEQ ID NO: 247755 - DNA, 25 bp, Artificial
  Probe
ctactagtctgctggctggttcagg

SEQ ID NO: 247756 - DNA, 25 bp, Artificial
  Probe
gcacacctatttcctcatctgacgg

SEQ ID NO: 247757 - DNA, 25 bp, Artificial
  Probe
agaggtgcctttctagaactagagc

SEQ ID NO: 247758 - DNA, 25 bp, Artificial
  Probe
cctcgccatggtctgaatgggctgt

SEQ ID NO: 247759 - DNA, 25 bp, Artificial
  Probe
atattggcatacagagtccagaagg

SEQ ID NO: 247760 - DNA, 25 bp, Artificial
  Probe
ctagaacacaagcaaagcctttgct

SEQ ID NO: 247761 - DNA, 25 bp, Artificial
  Probe
ttgacaacatccacagggcattgtc

SEQ ID NO: 247762 - DNA, 25 bp, Artificial
  Probe
ggaccaggtacatgcctctagatat

SEQ ID NO: 247763 - DNA, 25 bp, Artificial
  Probe
caggccatatgcaggccatttttta

SEQ ID NO: 247764 - DNA, 25 bp, Artificial
  Probe
catccacagggcattgtccagtcat

SEQ ID NO: 247765 - DNA, 25 bp, Artificial
  Probe
catgcctctagatattggcatacag

SEQ ID NO: 247766 - DNA, 25 bp, Artificial
  Probe
taaagagtttccaacttcttgagaa

SEQ ID NO: 247767 - DNA, 25 bp, Artificial
  Probe
ttctctgcatagctttgctttctgg

SEQ ID NO: 247768 - DNA, 25 bp, Artificial
  Probe
ttcataagaagctgcattttgacaa

SEQ ID NO: 247769 - DNA, 25 bp, Artificial
  Probe
gaacacaagcaaagcctttgcttat

SEQ ID NO: 247770 - DNA, 25 bp, Artificial
  Probe
tgttttgtaggctcagcatatctgt

SEQ ID NO: 247771 - DNA, 25 bp, Artificial
  Probe
gcctctagatattggcatacagagt

SEQ ID NO: 247772 - DNA, 25 bp, Artificial
  Probe
cataagaagctgcattttgacaaca

SEQ ID NO: 247773 - DNA, 25 bp, Artificial
  Probe
ccagttcataagaagctgcattttg

SEQ ID NO: 247774 - DNA, 25 bp, Artificial
  Probe
tttagctagaacacaagcaaagcct

SEQ ID NO: 247775 - DNA, 25 bp, Artificial
  Probe
atccacagggcattgtccagtcatt

SEQ ID NO: 247776 - DNA, 25 bp, Artificial
  Probe
agctagaacacaagcaaagcctttg

SEQ ID NO: 247777 - DNA, 25 bp, Artificial
  Probe
agaagctgcattttgacaacatcca

SEQ ID NO: 247778 - DNA, 25 bp, Artificial
  Probe
gaattttctctgcatagctttgctt

SEQ ID NO: 247779 - DNA, 25 bp, Artificial
  Probe
gcatacagagtccagaagggttttg

SEQ ID NO: 247780 - DNA, 25 bp, Artificial
  Probe
ttactgttttgtaggctcagcatat

SEQ ID NO: 247781 - DNA, 25 bp, Artificial
  Probe
agctgcattttgacaacatccacag

SEQ ID NO: 247782 - DNA, 25 bp, Artificial
  Probe
agttcataagaagctgcattttgac

SEQ ID NO: 247783 - DNA, 25 bp, Artificial
  Probe
ccacagggcattgtccagtcatttc

SEQ ID NO: 247784 - DNA, 25 bp, Artificial
  Probe
aagagtttccaacttcttgagaaca

SEQ ID NO: 247785 - DNA, 25 bp, Artificial
  Probe
ggtacatgcctctagatattggcat

SEQ ID NO: 247786 - DNA, 25 bp, Artificial
  Probe
gacaacatccacagggcattgtcca

SEQ ID NO: 247787 - DNA, 25 bp, Artificial
  Probe
ttagctagaacacaagcaaagcctt

SEQ ID NO: 247788 - DNA, 25 bp, Artificial
  Probe
ctgaggaattttctctgcatagctt

SEQ ID NO: 247789 - DNA, 25 bp, Artificial
  Probe
agcaggccatatgcaggccattttt

SEQ ID NO: 247790 - DNA, 25 bp, Artificial
  Probe
acaagcaaagcctttgcttatgacg

SEQ ID NO: 247791 - DNA, 25 bp, Artificial
  Probe
gaagctgcattttgacaacatccac

SEQ ID NO: 247792 - DNA, 25 bp, Artificial
  Probe
ctagatattggcatacagagtccag

SEQ ID NO: 247793 - DNA, 25 bp, Artificial
  Probe
aaaggaccaggtacatgcctctaga

SEQ ID NO: 247794 - DNA, 25 bp, Artificial
  Probe
agtttagctagaacacaagcaaagc

SEQ ID NO: 247795 - DNA, 25 bp, Artificial
  Probe
taagaagctgcattttgacaacatc

SEQ ID NO: 247796 - DNA, 25 bp, Artificial
  Probe
gcatagctttgctttctggataaaa

SEQ ID NO: 247797 - DNA, 25 bp, Artificial
  Probe
gtaggctcagcatatctgtacatat

SEQ ID NO: 247798 - DNA, 25 bp, Artificial
  Probe
ttctttactgttttgtaggctcagc

SEQ ID NO: 247799 - DNA, 25 bp, Artificial
  Probe
agccagttcataagaagctgcattt

SEQ ID NO: 247800 - DNA, 25 bp, Artificial
  Probe
catagctttgctttctggataaaat

SEQ ID NO: 247801 - DNA, 25 bp, Artificial
  Probe
caggtacatgcctctagatattggc

SEQ ID NO: 247802 - DNA, 25 bp, Artificial
  Probe
ctttgcttatgacgtcacgtgtata

SEQ ID NO: 247803 - DNA, 25 bp, Artificial
  Probe
gtccagtcatttcaggacaactggt

SEQ ID NO: 247804 - DNA, 25 bp, Artificial
  Probe
tgagccagttcataagaagctgcat

SEQ ID NO: 247805 - DNA, 25 bp, Artificial
  Probe
aaatgaccagggattacctcagtgg

SEQ ID NO: 247806 - DNA, 25 bp, Artificial
  Probe
atgaccagggattacctcagtgggc

SEQ ID NO: 247807 - DNA, 25 bp, Artificial
  Probe
aacgttttattactggtcatcaagc

SEQ ID NO: 247808 - DNA, 25 bp, Artificial
  Probe
gggtctgttcccagcaacaataaac

SEQ ID NO: 247809 - DNA, 25 bp, Artificial
  Probe
gagaggacatccaaaacactgttct

SEQ ID NO: 247810 - DNA, 25 bp, Artificial
  Probe
caacgttttattactggtcatcaag

SEQ ID NO: 247811 - DNA, 25 bp, Artificial
  Probe
tttaaagcaaatgaccagggattac

SEQ ID NO: 247812 - DNA, 25 bp, Artificial
  Probe
cattcgagaggacatccaaaacact

SEQ ID NO: 247813 - DNA, 25 bp, Artificial
  Probe
ctttttaaagcaaatgaccagggat

SEQ ID NO: 247814 - DNA, 25 bp, Artificial
  Probe
ctttagctgtattgatgacaaatcg

SEQ ID NO: 247815 - DNA, 25 bp, Artificial
  Probe
tcaagctttagctgtattgatgaca

SEQ ID NO: 247816 - DNA, 25 bp, Artificial
  Probe
tcaccgtggtagttaaatgtttaca

SEQ ID NO: 247817 - DNA, 25 bp, Artificial
  Probe
gctttagctgtattgatgacaaatc

SEQ ID NO: 247818 - DNA, 25 bp, Artificial
  Probe
catgtaagggcctggggtctgttcc

SEQ ID NO: 247819 - DNA, 25 bp, Artificial
  Probe
gcttatgcttagcatgtaagggcct

SEQ ID NO: 247820 - DNA, 25 bp, Artificial
  Probe
acattcgagaggacatccaaaacac

SEQ ID NO: 247821 - DNA, 25 bp, Artificial
  Probe
tatgcttagcatgtaagggcctggg

SEQ ID NO: 247822 - DNA, 25 bp, Artificial
  Probe
tactggtcatcaagctttagctgta

SEQ ID NO: 247823 - DNA, 25 bp, Artificial
  Probe
aagcaaatgaccagggattacctca

SEQ ID NO: 247824 - DNA, 25 bp, Artificial
  Probe
cagtagtaattcaccgtggtagtta

SEQ ID NO: 247825 - DNA, 25 bp, Artificial
  Probe
ttattactggtcatcaagctttagc

SEQ ID NO: 247826 - DNA, 25 bp, Artificial
  Probe
ttactggtcatcaagctttagctgt

SEQ ID NO: 247827 - DNA, 25 bp, Artificial
  Probe
taaagcaaatgaccagggattacct

SEQ ID NO: 247828 - DNA, 25 bp, Artificial
  Probe
ggtctgttcccagcaacaataaacg

SEQ ID NO: 247829 - DNA, 25 bp, Artificial
  Probe
tttattactggtcatcaagctttag

SEQ ID NO: 247830 - DNA, 25 bp, Artificial
  Probe
acgttttattactggtcatcaagct

SEQ ID NO: 247831 - DNA, 25 bp, Artificial
  Probe
atcaagctttagctgtattgatgac

SEQ ID NO: 247832 - DNA, 25 bp, Artificial
  Probe
ctgttcccagcaacaataaacgagt

SEQ ID NO: 247833 - DNA, 25 bp, Artificial
  Probe
acacagtagtaattcaccgtggtag

SEQ ID NO: 247834 - DNA, 25 bp, Artificial
  Probe
cacagtagtaattcaccgtggtagt

SEQ ID NO: 247835 - DNA, 25 bp, Artificial
  Probe
gttcccagcaacaataaacgagtaa

SEQ ID NO: 247836 - DNA, 25 bp, Artificial
  Probe
gaggacatccaaaacactgttctta

SEQ ID NO: 247837 - DNA, 25 bp, Artificial
  Probe
tattactggtcatcaagctttagct

SEQ ID NO: 247838 - DNA, 25 bp, Artificial
  Probe
tgctcacaacgttttattactggtc

SEQ ID NO: 247839 - DNA, 25 bp, Artificial
  Probe
cctggggtctgttcccagcaacaat

SEQ ID NO: 247840 - DNA, 25 bp, Artificial
  Probe
gctcacaacgttttattactggtca

SEQ ID NO: 247841 - DNA, 25 bp, Artificial
  Probe
tggtcatcaagctttagctgtattg

SEQ ID NO: 247842 - DNA, 25 bp, Artificial
  Probe
ctggtcatcaagctttagctgtatt

SEQ ID NO: 247843 - DNA, 25 bp, Artificial
  Probe
cttatgcttagcatgtaagggcctg

SEQ ID NO: 247844 - DNA, 25 bp, Artificial
  Probe
taaacattcgagaggacatccaaaa

SEQ ID NO: 247845 - DNA, 25 bp, Artificial
  Probe
agcttatgcttagcatgtaagggcc

SEQ ID NO: 247846 - DNA, 25 bp, Artificial
  Probe
aacacagtagtaattcaccgtggta

SEQ ID NO: 247847 - DNA, 25 bp, Artificial
  Probe
attcgagaggacatccaaaacactg

SEQ ID NO: 247848 - DNA, 25 bp, Artificial
  Probe
gttttattactggtcatcaagcttt

SEQ ID NO: 247849 - DNA, 25 bp, Artificial
  Probe
caagctttagctgtattgatgacaa

SEQ ID NO: 247850 - DNA, 25 bp, Artificial
  Probe
aacattcgagaggacatccaaaaca

SEQ ID NO: 247851 - DNA, 25 bp, Artificial
  Probe
cactaagcaattttatttcagcctt

SEQ ID NO: 247852 - DNA, 25 bp, Artificial
  Probe
agcaattttatttcagcctttcagc

SEQ ID NO: 247853 - DNA, 25 bp, Artificial
  Probe
cagcctttcagctgtcgctgtgagt

SEQ ID NO: 247854 - DNA, 25 bp, Artificial
  Probe
atctttttagcactaagcaatttta

SEQ ID NO: 247855 - DNA, 25 bp, Artificial
  Probe
gcctttcagctgtcgctgtgagttg

SEQ ID NO: 247856 - DNA, 25 bp, Artificial
  Probe
ttttagcactaagcaattttatttc

SEQ ID NO: 247857 - DNA, 25 bp, Artificial
  Probe
aagcaattttatttcagcctttcag

SEQ ID NO: 247858 - DNA, 25 bp, Artificial
  Probe
caattttatttcagcctttcagctg

SEQ ID NO: 247859 - DNA, 25 bp, Artificial
  Probe
tttcagcctttcagctgtcgctgtg

SEQ ID NO: 247860 - DNA, 25 bp, Artificial
  Probe
tttttagcactaagcaattttattt

SEQ ID NO: 247861 - DNA, 25 bp, Artificial
  Probe
ttttatttcagcctttcagctgtcg

SEQ ID NO: 247862 - DNA, 25 bp, Artificial
  Probe
ctttttagcactaagcaattttatt

SEQ ID NO: 247863 - DNA, 25 bp, Artificial
  Probe
atttcagcctttcagctgtcgctgt

SEQ ID NO: 247864 - DNA, 25 bp, Artificial
  Probe
tttatttcagcctttcagctgtcgc

SEQ ID NO: 247865 - DNA, 25 bp, Artificial
  Probe
ctaagcaattttatttcagcctttc

SEQ ID NO: 247866 - DNA, 25 bp, Artificial
  Probe
tagcactaagcaattttatttcagc

SEQ ID NO: 247867 - DNA, 25 bp, Artificial
  Probe
tttagcactaagcaattttatttca

SEQ ID NO: 247868 - DNA, 25 bp, Artificial
  Probe
agcctttcagctgtcgctgtgagtt

SEQ ID NO: 247869 - DNA, 25 bp, Artificial
  Probe
ttagcactaagcaattttatttcag

SEQ ID NO: 247870 - DNA, 25 bp, Artificial
  Probe
tctttttagcactaagcaattttat

SEQ ID NO: 247871 - DNA, 25 bp, Artificial
  Probe
attttatttcagcctttcagctgtc

SEQ ID NO: 247872 - DNA, 25 bp, Artificial
  Probe
ttcagcctttcagctgtcgctgtga

SEQ ID NO: 247873 - DNA, 25 bp, Artificial
  Probe
gcaattttatttcagcctttcagct

SEQ ID NO: 247874 - DNA, 25 bp, Artificial
  Probe
aattttatttcagcctttcagctgt

SEQ ID NO: 247875 - DNA, 25 bp, Artificial
  Probe
actaagcaattttatttcagccttt

SEQ ID NO: 247876 - DNA, 25 bp, Artificial
  Probe
tcagcctttcagctgtcgctgtgag

SEQ ID NO: 247877 - DNA, 25 bp, Artificial
  Probe
agcactaagcaattttatttcagcc

SEQ ID NO: 247878 - DNA, 25 bp, Artificial
  Probe
ggcgctcaccgtgaaggccctgcag

SEQ ID NO: 247879 - DNA, 25 bp, Artificial
  Probe
tggcgctcaccgtgaaggccctgca

SEQ ID NO: 247880 - DNA, 25 bp, Artificial
  Probe
tggttcgtaggcttctgtttcctca

SEQ ID NO: 247881 - DNA, 25 bp, Artificial
  Probe
ttagtaggtgttaggctctggccag

SEQ ID NO: 247882 - DNA, 25 bp, Artificial
  Probe
gccctgcagcggttccgtctaggca

SEQ ID NO: 247883 - DNA, 25 bp, Artificial
  Probe
cctgtccactctagggtcagtagtc

SEQ ID NO: 247884 - DNA, 25 bp, Artificial
  Probe
gttcccagtcccatgtccctgtggg

SEQ ID NO: 247885 - DNA, 25 bp, Artificial
  Probe
cccaggctacccagtgggcagtggt

SEQ ID NO: 247886 - DNA, 25 bp, Artificial
  Probe
taagtcttaaggtctcacctcatag

SEQ ID NO: 247887 - DNA, 25 bp, Artificial
  Probe
ccactgtgggcctctgggaccaagg

SEQ ID NO: 247888 - DNA, 25 bp, Artificial
  Probe
ttccgtctaggcaccgatatgtctc

SEQ ID NO: 247889 - DNA, 25 bp, Artificial
  Probe
ccctggggtgcctggactgtccgca

SEQ ID NO: 247890 - DNA, 25 bp, Artificial
  Probe
ggcacagaaacataccagagcccgc

SEQ ID NO: 247891 - DNA, 25 bp, Artificial
  Probe
tccagggcaggatgcaagggcttct

SEQ ID NO: 247892 - DNA, 25 bp, Artificial
  Probe
agggcacagaaacataccagagccc

SEQ ID NO: 247893 - DNA, 25 bp, Artificial
  Probe
gtgcctggactgtccgcacaaagtt

SEQ ID NO: 247894 - DNA, 25 bp, Artificial
  Probe
ccctgtcggtgttgtgattgtgatt

SEQ ID NO: 247895 - DNA, 25 bp, Artificial
  Probe
ttaaggtctcacctcatagtgcccc

SEQ ID NO: 247896 - DNA, 25 bp, Artificial
  Probe
gcatttctttcatgggccagccaac

SEQ ID NO: 247897 - DNA, 25 bp, Artificial
  Probe
cagtgactgccgtggctcctgtcat

SEQ ID NO: 247898 - DNA, 25 bp, Artificial
  Probe
ctttcatgggccagccaaccagggg

SEQ ID NO: 247899 - DNA, 25 bp, Artificial
  Probe
gtaccaggtgcctgcctattagtag

SEQ ID NO: 247900 - DNA, 25 bp, Artificial
  Probe
tctctgtgtggctcctgcccaggcg

SEQ ID NO: 247901 - DNA, 25 bp, Artificial
  Probe
tcagctaggtactggggctgcccag

SEQ ID NO: 247902 - DNA, 25 bp, Artificial
  Probe
atgggccagccaaccaggggctcac

SEQ ID NO: 247903 - DNA, 25 bp, Artificial
  Probe
tctggccagggctggaaggccacct

SEQ ID NO: 247904 - DNA, 25 bp, Artificial
  Probe
tggaaggccacctcaccatcttagg

SEQ ID NO: 247905 - DNA, 25 bp, Artificial
  Probe
gcttctcaggggtctggtccttcct

SEQ ID NO: 247906 - DNA, 25 bp, Artificial
  Probe
ggcctcaaggcctcctgagaccttt

SEQ ID NO: 247907 - DNA, 25 bp, Artificial
  Probe
tcccagtcccatgtccctgtgggtg

SEQ ID NO: 247908 - DNA, 25 bp, Artificial
  Probe
ggggctcacctgtccactctagggt

SEQ ID NO: 247909 - DNA, 25 bp, Artificial
  Probe
tgagacctttcctgggtcctaccgt

SEQ ID NO: 247910 - DNA, 25 bp, Artificial
  Probe
ccgtgaaggccctgcagcggttccg

SEQ ID NO: 247911 - DNA, 25 bp, Artificial
  Probe
gggtctggtccttcctgtggttcgt

SEQ ID NO: 247912 - DNA, 25 bp, Artificial
  Probe
gtgaaggccctgcagcggttccgtc

SEQ ID NO: 247913 - DNA, 25 bp, Artificial
  Probe
aacgtacagcaccagggccaggcac

SEQ ID NO: 247914 - DNA, 25 bp, Artificial
  Probe
ggtggtccaccctgtccagaggctc

SEQ ID NO: 247915 - DNA, 25 bp, Artificial
  Probe
aggtactggggctgcccaggcctac

SEQ ID NO: 247916 - DNA, 25 bp, Artificial
  Probe
agccccaaagggtaccaggtgcctg

SEQ ID NO: 247917 - DNA, 25 bp, Artificial
  Probe
gactggcctgggaggcatttctttc

SEQ ID NO: 247918 - DNA, 25 bp, Artificial
  Probe
gaagactaattgtacccttaggtgg

SEQ ID NO: 247919 - DNA, 25 bp, Artificial
  Probe
ggtctggtccttcctgtggttcgta

SEQ ID NO: 247920 - DNA, 25 bp, Artificial
  Probe
ctggatctgggcttctcaggggtct

SEQ ID NO: 247921 - DNA, 25 bp, Artificial
  Probe
ggctggaaggccacctcaccatctt

SEQ ID NO: 247922 - DNA, 25 bp, Artificial
  Probe
catcttaggcctcaaggcctcctga

SEQ ID NO: 247923 - DNA, 25 bp, Artificial
  Probe
cactcctcttgcaggatccctagag

SEQ ID NO: 247924 - DNA, 25 bp, Artificial
  Probe
tctctgggcgttccactattggccc

SEQ ID NO: 247925 - DNA, 25 bp, Artificial
  Probe
ttgctgtccctactgaggtggacag

SEQ ID NO: 247926 - DNA, 25 bp, Artificial
  Probe
gacacatttatcaccccgagaaggg

SEQ ID NO: 247927 - DNA, 25 bp, Artificial
  Probe
tgcacaaccttaacaaacggatcag

SEQ ID NO: 247928 - DNA, 25 bp, Artificial
  Probe
gctccccatttttccgcctggtttg

SEQ ID NO: 247929 - DNA, 25 bp, Artificial
  Probe
gacctgcacaaccttaacaaacgga

SEQ ID NO: 247930 - DNA, 25 bp, Artificial
  Probe
gtcttgtctttgaaattcacacctg

SEQ ID NO: 247931 - DNA, 25 bp, Artificial
  Probe
actgaggtggacagcctagagtaat

SEQ ID NO: 247932 - DNA, 25 bp, Artificial
  Probe
tctctgtaataaagcggggcctctt

SEQ ID NO: 247933 - DNA, 25 bp, Artificial
  Probe
cccttgggcggcaagtcggagacta

SEQ ID NO: 247934 - DNA, 25 bp, Artificial
  Probe
gcacaaccttaacaaacggatcagc

SEQ ID NO: 247935 - DNA, 25 bp, Artificial
  Probe
ttggcccgcgtaaggcttactcttc

SEQ ID NO: 247936 - DNA, 25 bp, Artificial
  Probe
taaccgacatggaaagtacagatag

SEQ ID NO: 247937 - DNA, 25 bp, Artificial
  Probe
cactttaaccgacatggaaagtaca

SEQ ID NO: 247938 - DNA, 25 bp, Artificial
  Probe
acagcctagagtaatggcagggagt

SEQ ID NO: 247939 - DNA, 25 bp, Artificial
  Probe
aggacttagcccagtagggaaagag

SEQ ID NO: 247940 - DNA, 25 bp, Artificial
  Probe
tgaggacctgcacaaccttaacaaa

SEQ ID NO: 247941 - DNA, 25 bp, Artificial
  Probe
ttttccgcctggtttgctgtcccta

SEQ ID NO: 247942 - DNA, 25 bp, Artificial
  Probe
gtgtcttgtctttgaaattcacacc

SEQ ID NO: 247943 - DNA, 25 bp, Artificial
  Probe
tttatcaccccgagaaggggaacag

SEQ ID NO: 247944 - DNA, 25 bp, Artificial
  Probe
gagagacacatttatcaccccgaga

SEQ ID NO: 247945 - DNA, 25 bp, Artificial
  Probe
gtttgctgtccctactgaggtggac

SEQ ID NO: 247946 - DNA, 25 bp, Artificial
  Probe
taaagcggggcctctttggaacctg

SEQ ID NO: 247947 - DNA, 25 bp, Artificial
  Probe
tccctactgaggtggacagcctaga

SEQ ID NO: 247948 - DNA, 25 bp, Artificial
  Probe
tattggcccgcgtaaggcttactct

SEQ ID NO: 247949 - DNA, 25 bp, Artificial
  Probe
gaatcctgggggatttcgaaaagca

SEQ ID NO: 247950 - DNA, 25 bp, Artificial
  Probe
aatcctgggggatttcgaaaagcat

SEQ ID NO: 247951 - DNA, 25 bp, Artificial
  Probe
ggaacaggacttagcccagtaggga

SEQ ID NO: 247952 - DNA, 25 bp, Artificial
  Probe
ccagagtgattgatcgctggaatga

SEQ ID NO: 247953 - DNA, 25 bp, Artificial
  Probe
gcgttccactattggcccgcgtaag

SEQ ID NO: 247954 - DNA, 25 bp, Artificial
  Probe
caagtcggagactatggggctcgat

SEQ ID NO: 247955 - DNA, 25 bp, Artificial
  Probe
gaaagagcttttcgtgctctctgta

SEQ ID NO: 247956 - DNA, 25 bp, Artificial
  Probe
cctggtttgctgtccctactgaggt

SEQ ID NO: 247957 - DNA, 25 bp, Artificial
  Probe
gaagcttctctctgggcgttccact

SEQ ID NO: 247958 - DNA, 25 bp, Artificial
  Probe
acctcccagagtgattgatcgctgg

SEQ ID NO: 247959 - DNA, 25 bp, Artificial
  Probe
ctgtccctactgaggtggacagcct

SEQ ID NO: 247960 - DNA, 25 bp, Artificial
  Probe
ccttgggcggcaagtcggagactat

SEQ ID NO: 247961 - DNA, 25 bp, Artificial
  Probe
agactatggggctcgatgctctcgg

SEQ ID NO: 247962 - DNA, 25 bp, Artificial
  Probe
catgcagaagcttctctctgggcgt

SEQ ID NO: 247963 - DNA, 25 bp, Artificial
  Probe
ggctcgatgctctcggcatgcagaa

SEQ ID NO: 247964 - DNA, 25 bp, Artificial
  Probe
acattggaatcctgggggatttcga

SEQ ID NO: 247965 - DNA, 25 bp, Artificial
  Probe
acttagcccagtagggaaagagctt

SEQ ID NO: 247966 - DNA, 25 bp, Artificial
  Probe
aggtggacagcctagagtaatggca

SEQ ID NO: 247967 - DNA, 25 bp, Artificial
  Probe
gatgctctcggcatgcagaagcttc

SEQ ID NO: 247968 - DNA, 25 bp, Artificial
  Probe
tatcaccccgagaaggggaacagga

SEQ ID NO: 247969 - DNA, 25 bp, Artificial
  Probe
tgctccccatttttccgcctggttt

SEQ ID NO: 247970 - DNA, 25 bp, Artificial
  Probe
ttgctttgcttttaaggccattggg

SEQ ID NO: 247971 - DNA, 25 bp, Artificial
  Probe
ctggagagcctctgggagctgttca

SEQ ID NO: 247972 - DNA, 25 bp, Artificial
  Probe
tctggagagcctctgggagctgttc

SEQ ID NO: 247973 - DNA, 25 bp, Artificial
  Probe
tttcagttcagagaggcagtctata

SEQ ID NO: 247974 - DNA, 25 bp, Artificial
  Probe
agagcctctgggagctgttcagttt

SEQ ID NO: 247975 - DNA, 25 bp, Artificial
  Probe
gagcctctgggagctgttcagtttg

SEQ ID NO: 247976 - DNA, 25 bp, Artificial
  Probe
gcctctgggagctgttcagtttgag

SEQ ID NO: 247977 - DNA, 25 bp, Artificial
  Probe
ggccttttgcattgaaaatgcacca

SEQ ID NO: 247978 - DNA, 25 bp, Artificial
  Probe
ctctgggagctgttcagtttgagga

SEQ ID NO: 247979 - DNA, 25 bp, Artificial
  Probe
aaatgaactttcagttcagagaggc

SEQ ID NO: 247980 - DNA, 25 bp, Artificial
  Probe
gccttttgcattgaaaatgcaccag

SEQ ID NO: 247981 - DNA, 25 bp, Artificial
  Probe
cctctgggagctgttcagtttgagg

SEQ ID NO: 247982 - DNA, 25 bp, Artificial
  Probe
ccttaggccttttgcattgaaaatg

SEQ ID NO: 247983 - DNA, 25 bp, Artificial
  Probe
gctttgcttttaaggccattggggg

SEQ ID NO: 247984 - DNA, 25 bp, Artificial
  Probe
tccttaggccttttgcattgaaaat

SEQ ID NO: 247985 - DNA, 25 bp, Artificial
  Probe
cttaggccttttgcattgaaaatgc

SEQ ID NO: 247986 - DNA, 25 bp, Artificial
  Probe
tttccttaggccttttgcattgaaa

SEQ ID NO: 247987 - DNA, 25 bp, Artificial
  Probe
ctgttcagtttgaggagccaaaaaa

SEQ ID NO: 247988 - DNA, 25 bp, Artificial
  Probe
gctgttcagtttgaggagccaaaaa

SEQ ID NO: 247989 - DNA, 25 bp, Artificial
  Probe
aatgaactttcagttcagagaggca

SEQ ID NO: 247990 - DNA, 25 bp, Artificial
  Probe
agctgttcagtttgaggagccaaaa

SEQ ID NO: 247991 - DNA, 25 bp, Artificial
  Probe
tgcttttaaggccattggggggtat

SEQ ID NO: 247992 - DNA, 25 bp, Artificial
  Probe
agcctctgggagctgttcagtttga

SEQ ID NO: 247993 - DNA, 25 bp, Artificial
  Probe
ctttgctttgcttttaaggccattg

SEQ ID NO: 247994 - DNA, 25 bp, Artificial
  Probe
gaaatgcccccgtgatcaataataa

SEQ ID NO: 247995 - DNA, 25 bp, Artificial
  Probe
aaattatatattgcaaggtgtgatg

SEQ ID NO: 247996 - DNA, 25 bp, Artificial
  Probe
tttgctttgcttttaaggccattgg

SEQ ID NO: 247997 - DNA, 25 bp, Artificial
  Probe
taggccttttgcattgaaaatgcac

SEQ ID NO: 247998 - DNA, 25 bp, Artificial
  Probe
ctttcagttcagagaggcagtctat

SEQ ID NO: 247999 - DNA, 25 bp, Artificial
  Probe
ttcagttcagagaggcagtctatag

SEQ ID NO: 248000 - DNA, 25 bp, Artificial
  Probe
gctttgctttgcttttaaggccatt

SEQ ID NO: 248001 - DNA, 25 bp, Artificial
  Probe
tgtaagtggattctcatcctctctc

SEQ ID NO: 248002 - DNA, 25 bp, Artificial
  Probe
atgaactttcagttcagagaggcag

SEQ ID NO: 248003 - DNA, 25 bp, Artificial
  Probe
ttaggccttttgcattgaaaatgca

SEQ ID NO: 248004 - DNA, 25 bp, Artificial
  Probe
tgaactttcagttcagagaggcagt

SEQ ID NO: 248005 - DNA, 25 bp, Artificial
  Probe
actttcagttcagagaggcagtcta

SEQ ID NO: 248006 - DNA, 25 bp, Artificial
  Probe
ccccatcgtggttattgtgtttttg

SEQ ID NO: 248007 - DNA, 25 bp, Artificial
  Probe
cccatcgtggttattgtgtttttgg

SEQ ID NO: 248008 - DNA, 25 bp, Artificial
  Probe
aactttcagttcagagaggcagtct

SEQ ID NO: 248009 - DNA, 25 bp, Artificial
  Probe
gagctgttcagtttgaggagccaaa

SEQ ID NO: 248010 - DNA, 25 bp, Artificial
  Probe
ggagctgttcagtttgaggagccaa

SEQ ID NO: 248011 - DNA, 25 bp, Artificial
  Probe
tgctttgcttttaaggccattgggg

SEQ ID NO: 248012 - DNA, 25 bp, Artificial
  Probe
gtaagtggattctcatcctctctcc

SEQ ID NO: 248013 - DNA, 25 bp, Artificial
  Probe
gaactttcagttcagagaggcagtc

SEQ ID NO: 248014 - DNA, 25 bp, Artificial
  Probe
aggccttttgcattgaaaatgcacc

SEQ ID NO: 248015 - DNA, 25 bp, Artificial
  Probe
tattcttgtgggggggtggtaggag

SEQ ID NO: 248016 - DNA, 25 bp, Artificial
  Probe
actgcccattggtggctgagatagt

SEQ ID NO: 248017 - DNA, 25 bp, Artificial
  Probe
gctgtattggccttcatcaattcta

SEQ ID NO: 248018 - DNA, 25 bp, Artificial
  Probe
acctctataccagcactgtgtgtgc

SEQ ID NO: 248019 - DNA, 25 bp, Artificial
  Probe
tgtctcagtacaagaacaaacgtct

SEQ ID NO: 248020 - DNA, 25 bp, Artificial
  Probe
ggcctatcaacaactgtctcagtac

SEQ ID NO: 248021 - DNA, 25 bp, Artificial
  Probe
tcttacttccatagggatcacactg

SEQ ID NO: 248022 - DNA, 25 bp, Artificial
  Probe
gatcacactgggaggcttgacatcc

SEQ ID NO: 248023 - DNA, 25 bp, Artificial
  Probe
tgtacagtgggcagactgcccattg

SEQ ID NO: 248024 - DNA, 25 bp, Artificial
  Probe
gtacttaggcttattctctgagaac

SEQ ID NO: 248025 - DNA, 25 bp, Artificial
  Probe
tcttcataaatgaatttgtggccta

SEQ ID NO: 248026 - DNA, 25 bp, Artificial
  Probe
ctaaggccaatggttttcatgatgg

SEQ ID NO: 248027 - DNA, 25 bp, Artificial
  Probe
gacatccatggttccccaacggaag

SEQ ID NO: 248028 - DNA, 25 bp, Artificial
  Probe
acctatgagacatatgtgtgctgca

SEQ ID NO: 248029 - DNA, 25 bp, Artificial
  Probe
ccaatggttttcatgatgggtgtac

SEQ ID NO: 248030 - DNA, 25 bp, Artificial
  Probe
aacctgattgcctttctggctgtat

SEQ ID NO: 248031 - DNA, 25 bp, Artificial
  Probe
gtgctgcagagagctcttccagagt

SEQ ID NO: 248032 - DNA, 25 bp, Artificial
  Probe
gctgaaactgactgtgtctcattct

SEQ ID NO: 248033 - DNA, 25 bp, Artificial
  Probe
tgtcctaaggccaatggttttcatg

SEQ ID NO: 248034 - DNA, 25 bp, Artificial
  Probe
ccagcactgtgtgtgcctgaggctg

SEQ ID NO: 248035 - DNA, 25 bp, Artificial
  Probe
tcattgcaacattttctctctgtgg

SEQ ID NO: 248036 - DNA, 25 bp, Artificial
  Probe
aaatgaaagtcctgatctcactgtg

SEQ ID NO: 248037 - DNA, 25 bp, Artificial
  Probe
gtggatatccatggactcactttcc

SEQ ID NO: 248038 - DNA, 25 bp, Artificial
  Probe
ctctggagtcgaagagtggatcaat

SEQ ID NO: 248039 - DNA, 25 bp, Artificial
  Probe
attcttcataaatgaatttgtggcc

SEQ ID NO: 248040 - DNA, 25 bp, Artificial
  Probe
ttccttcatcagtgcctgtatggca

SEQ ID NO: 248041 - DNA, 25 bp, Artificial
  Probe
aagcttgtggtcagggccctcttca

SEQ ID NO: 248042 - DNA, 25 bp, Artificial
  Probe
gaaactgactgtgtctcattcttaa

SEQ ID NO: 248043 - DNA, 25 bp, Artificial
  Probe
agtacaagaacaaacgtctctctgg

SEQ ID NO: 248044 - DNA, 25 bp, Artificial
  Probe
ttctggctgtattggccttcatcaa

SEQ ID NO: 248045 - DNA, 25 bp, Artificial
  Probe
aactgtctcagtacaagaacaaacg

SEQ ID NO: 248046 - DNA, 25 bp, Artificial
  Probe
gaatttgtggcctatcaacaactgt

SEQ ID NO: 248047 - DNA, 25 bp, Artificial
  Probe
caagacaaggagtccagcctcagga

SEQ ID NO: 248048 - DNA, 25 bp, Artificial
  Probe
tggtcagggccctcttcacaggtgc

SEQ ID NO: 248049 - DNA, 25 bp, Artificial
  Probe
tactttgctgaatggcaccaacatg

SEQ ID NO: 248050 - DNA, 25 bp, Artificial
  Probe
tcaattctaccctttcctggctggg

SEQ ID NO: 248051 - DNA, 25 bp, Artificial
  Probe
tctcactgtggctctgtataaaaac

SEQ ID NO: 248052 - DNA, 25 bp, Artificial
  Probe
cccaacggaagagtgacttgtgcaa

SEQ ID NO: 248053 - DNA, 25 bp, Artificial
  Probe
gaacctatgagacatatgtgtgctg

SEQ ID NO: 248054 - DNA, 25 bp, Artificial
  Probe
gagtgacttgtgcaagcttgtggtc

SEQ ID NO: 248055 - DNA, 25 bp, Artificial
  Probe
gcagccaacctgattgcctttctgg

SEQ ID NO: 248056 - DNA, 25 bp, Artificial
  Probe
atgtacttaggcttattctctgaga

SEQ ID NO: 248057 - DNA, 25 bp, Artificial
  Probe
gcagactgcccattggtggctgaga

SEQ ID NO: 248058 - DNA, 25 bp, Artificial
  Probe
agtccagcctcaggaatcttgctaa

SEQ ID NO: 248059 - DNA, 25 bp, Artificial
  Probe
gtacagtgggcagactgcccattgg

SEQ ID NO: 248060 - DNA, 25 bp, Artificial
  Probe
actttccaggtcatctgctcctatg

SEQ ID NO: 248061 - DNA, 25 bp, Artificial
  Probe
gcttagatttaacttggtggtacac

SEQ ID NO: 248062 - DNA, 25 bp, Artificial
  Probe
tgactatggacatggggagcttcaa

SEQ ID NO: 248063 - DNA, 25 bp, Artificial
  Probe
actggaatgggaccaggccatcact

SEQ ID NO: 248064 - DNA, 25 bp, Artificial
  Probe
aaggctcctccagctaggccagtga

SEQ ID NO: 248065 - DNA, 25 bp, Artificial
  Probe
acagccagagtcaaggggagtcaga

SEQ ID NO: 248066 - DNA, 25 bp, Artificial
  Probe
tgattcatacgcagaacagagctac

SEQ ID NO: 248067 - DNA, 25 bp, Artificial
  Probe
tgggaccaggccatcactgaaggct

SEQ ID NO: 248068 - DNA, 25 bp, Artificial
  Probe
actgaaggctcctccagctaggcca

SEQ ID NO: 248069 - DNA, 25 bp, Artificial
  Probe
atgatgattcatacgcagaacagag

SEQ ID NO: 248070 - DNA, 25 bp, Artificial
  Probe
atgaaggctattacagccagagtca

SEQ ID NO: 248071 - DNA, 25 bp, Artificial
  Probe
gattcatacgcagaacagagctacg

SEQ ID NO: 248072 - DNA, 25 bp, Artificial
  Probe
tattacagccagagtcaaggggagt

SEQ ID NO: 248073 - DNA, 25 bp, Artificial
  Probe
ttacagccagagtcaaggggagtca

SEQ ID NO: 248074 - DNA, 25 bp, Artificial
  Probe
gaaggctattacagccagagtcaag

SEQ ID NO: 248075 - DNA, 25 bp, Artificial
  Probe
agaacagagctacgaaggctatgaa

SEQ ID NO: 248076 - DNA, 25 bp, Artificial
  Probe
acgcagaacagagctacgaaggcta

SEQ ID NO: 248077 - DNA, 25 bp, Artificial
  Probe
agattcttatgaagcctatggacaa

SEQ ID NO: 248078 - DNA, 25 bp, Artificial
  Probe
acatggggagcttcaagattcttat

SEQ ID NO: 248079 - DNA, 25 bp, Artificial
  Probe
tctgaattatgcattctggcttctg

SEQ ID NO: 248080 - DNA, 25 bp, Artificial
  Probe
tcactgaaggctcctccagctaggc

SEQ ID NO: 248081 - DNA, 25 bp, Artificial
  Probe
atatgatgattcatacgcagaacag

SEQ ID NO: 248082 - DNA, 25 bp, Artificial
  Probe
acacctgcaccagaaacatacgaag

SEQ ID NO: 248083 - DNA, 25 bp, Artificial
  Probe
aattatgcattctggcttctgtatg

SEQ ID NO: 248084 - DNA, 25 bp, Artificial
  Probe
caagattcttatgaagcctatggac

SEQ ID NO: 248085 - DNA, 25 bp, Artificial
  Probe
gctcctccagctaggccagtgaagg

SEQ ID NO: 248086 - DNA, 25 bp, Artificial
  Probe
tatgactatggacatggggagcttc

SEQ ID NO: 248087 - DNA, 25 bp, Artificial
  Probe
gcagaacagagctacgaaggctatg

SEQ ID NO: 248088 - DNA, 25 bp, Artificial
  Probe
ggacatggggagcttcaagattctt

SEQ ID NO: 248089 - DNA, 25 bp, Artificial
  Probe
ttcatacgcagaacagagctacgaa

SEQ ID NO: 248090 - DNA, 25 bp, Artificial
  Probe
cttcaagattcttatgaagcctatg

SEQ ID NO: 248091 - DNA, 25 bp, Artificial
  Probe
gggaccaggccatcactgaaggctc

SEQ ID NO: 248092 - DNA, 25 bp, Artificial
  Probe
agctacgaaggctatgaaggctatt

SEQ ID NO: 248093 - DNA, 25 bp, Artificial
  Probe
tggaatgggaccaggccatcactga

SEQ ID NO: 248094 - DNA, 25 bp, Artificial
  Probe
atcactgaaggctcctccagctagg

SEQ ID NO: 248095 - DNA, 25 bp, Artificial
  Probe
tggacatggggagcttcaagattct

SEQ ID NO: 248096 - DNA, 25 bp, Artificial
  Probe
cctatggacaagatgactggaatgg

SEQ ID NO: 248097 - DNA, 25 bp, Artificial
  Probe
gaagcctatggacaagatgactgga

SEQ ID NO: 248098 - DNA, 25 bp, Artificial
  Probe
ctccattctgaattatgcattctgg

SEQ ID NO: 248099 - DNA, 25 bp, Artificial
  Probe
atgcattctggcttctgtatgtagt

SEQ ID NO: 248100 - DNA, 25 bp, Artificial
  Probe
gaccaggccatcactgaaggctcct

SEQ ID NO: 248101 - DNA, 25 bp, Artificial
  Probe
acagagctacgaaggctatgaaggc

SEQ ID NO: 248102 - DNA, 25 bp, Artificial
  Probe
tcttatgaagcctatggacaagatg

SEQ ID NO: 248103 - DNA, 25 bp, Artificial
  Probe
aggccatcactgaaggctcctccag

SEQ ID NO: 248104 - DNA, 25 bp, Artificial
  Probe
gctattacagccagagtcaagggga

SEQ ID NO: 248105 - DNA, 25 bp, Artificial
  Probe
ccattctgaattatgcattctggct

SEQ ID NO: 248106 - DNA, 25 bp, Artificial
  Probe
gcaccagaaacatacgaagattatg

SEQ ID NO: 248107 - DNA, 25 bp, Artificial
  Probe
gcttcaagattcttatgaagcctat

SEQ ID NO: 248108 - DNA, 25 bp, Artificial
  Probe
gcttatttgagacaacctctgataa

SEQ ID NO: 248109 - DNA, 25 bp, Artificial
  Probe
gatctaactcattggaggctagcta

SEQ ID NO: 248110 - DNA, 25 bp, Artificial
  Probe
tccaacagtttcaatgtccttgttg

SEQ ID NO: 248111 - DNA, 25 bp, Artificial
  Probe
ctaactcattggaggctagctaaaa

SEQ ID NO: 248112 - DNA, 25 bp, Artificial
  Probe
tcaatgtccttgttgaactatcctg

SEQ ID NO: 248113 - DNA, 25 bp, Artificial
  Probe
agtgctgagtccatccctgtgtgat

SEQ ID NO: 248114 - DNA, 25 bp, Artificial
  Probe
gtttcaatgtccttgttgaactatc

SEQ ID NO: 248115 - DNA, 25 bp, Artificial
  Probe
ttgctttgatctaactcattggagg

SEQ ID NO: 248116 - DNA, 25 bp, Artificial
  Probe
tgaacctgtggcttatttgagacaa

SEQ ID NO: 248117 - DNA, 25 bp, Artificial
  Probe
attccaaattggttttacgtgcatt

SEQ ID NO: 248118 - DNA, 25 bp, Artificial
  Probe
aaagtgttgaaccagtgctgagtcc

SEQ ID NO: 248119 - DNA, 25 bp, Artificial
  Probe
gaaacaaatctacctattggtagaa

SEQ ID NO: 248120 - DNA, 25 bp, Artificial
  Probe
gtccatccctgtgtgatatactatt

SEQ ID NO: 248121 - DNA, 25 bp, Artificial
  Probe
ttgaaacaaatctacctattggtag

SEQ ID NO: 248122 - DNA, 25 bp, Artificial
  Probe
atgtccttgttgaactatcctggta

SEQ ID NO: 248123 - DNA, 25 bp, Artificial
  Probe
gctgtgaacctgtggcttatttgag

SEQ ID NO: 248124 - DNA, 25 bp, Artificial
  Probe
gaaccagtgctgagtccatccctgt

SEQ ID NO: 248125 - DNA, 25 bp, Artificial
  Probe
agctgtgaacctgtggcttatttga

SEQ ID NO: 248126 - DNA, 25 bp, Artificial
  Probe
tccaaattggttttacgtgcatttt

SEQ ID NO: 248127 - DNA, 25 bp, Artificial
  Probe
gccttgctttgatctaactcattgg

SEQ ID NO: 248128 - DNA, 25 bp, Artificial
  Probe
caacagtttcaatgtccttgttgaa

SEQ ID NO: 248129 - DNA, 25 bp, Artificial
  Probe
ctacctattggtagaatcaaagctg

SEQ ID NO: 248130 - DNA, 25 bp, Artificial
  Probe
tttctcgtgaataggaagttcattc

SEQ ID NO: 248131 - DNA, 25 bp, Artificial
  Probe
aaccagtgctgagtccatccctgtg

SEQ ID NO: 248132 - DNA, 25 bp, Artificial
  Probe
ctgtggcttatttgagacaacctct

SEQ ID NO: 248133 - DNA, 25 bp, Artificial
  Probe
tacctttctcgtgaataggaagttc

SEQ ID NO: 248134 - DNA, 25 bp, Artificial
  Probe
caatgtccttgttgaactatcctgg

SEQ ID NO: 248135 - DNA, 25 bp, Artificial
  Probe
taatgcatgtggtgccatgcttgtc

SEQ ID NO: 248136 - DNA, 25 bp, Artificial
  Probe
gccatgcttgtcttcaaatatagaa

SEQ ID NO: 248137 - DNA, 25 bp, Artificial
  Probe
tattactaatgcatgtggtgccatg

SEQ ID NO: 248138 - DNA, 25 bp, Artificial
  Probe
aatctacctattggtagaatcaaag

SEQ ID NO: 248139 - DNA, 25 bp, Artificial
  Probe
gagtccatccctgtgtgatatacta

SEQ ID NO: 248140 - DNA, 25 bp, Artificial
  Probe
tcctggtacctttctcgtgaatagg

SEQ ID NO: 248141 - DNA, 25 bp, Artificial
  Probe
tgttgaaccagtgctgagtccatcc

SEQ ID NO: 248142 - DNA, 25 bp, Artificial
  Probe
tactaatgcatgtggtgccatgctt

SEQ ID NO: 248143 - DNA, 25 bp, Artificial
  Probe
ccagtgctgagtccatccctgtgtg

SEQ ID NO: 248144 - DNA, 25 bp, Artificial
  Probe
agaatcaaagctgtgaacctgtggc

SEQ ID NO: 248145 - DNA, 25 bp, Artificial
  Probe
aactatcctggtacctttctcgtga

SEQ ID NO: 248146 - DNA, 25 bp, Artificial
  Probe
agtgttgaaccagtgctgagtccat

SEQ ID NO: 248147 - DNA, 25 bp, Artificial
  Probe
gcatgtggtgccatgcttgtcttca

SEQ ID NO: 248148 - DNA, 25 bp, Artificial
  Probe
atactattactaatgcatgtggtgc

SEQ ID NO: 248149 - DNA, 25 bp, Artificial
  Probe
gaattccaaattggttttacgtgca

SEQ ID NO: 248150 - DNA, 25 bp, Artificial
  Probe
tggtacctttctcgtgaataggaag

SEQ ID NO: 248151 - DNA, 25 bp, Artificial
  Probe
atcaaagctgtgaacctgtggctta

SEQ ID NO: 248152 - DNA, 25 bp, Artificial
  Probe
ctcattggaggctagctaaaattga

SEQ ID NO: 248153 - DNA, 25 bp, Artificial
  Probe
tgtggtgccatgcttgtcttcaaat

SEQ ID NO: 248154 - DNA, 25 bp, Artificial
  Probe
tcctgatctcaggattggttgagaa

SEQ ID NO: 248155 - DNA, 25 bp, Artificial
  Probe
gaatcacaggccaatgaccgctgtt

SEQ ID NO: 248156 - DNA, 25 bp, Artificial
  Probe
ttatgacacagctggccaggttgtt

SEQ ID NO: 248157 - DNA, 25 bp, Artificial
  Probe
tggacgttcagagaactgtttattc

SEQ ID NO: 248158 - DNA, 25 bp, Artificial
  Probe
gagaactgtttattcggcctgaccc

SEQ ID NO: 248159 - DNA, 25 bp, Artificial
  Probe
cctgcaggtccagaggatgagcaga

SEQ ID NO: 248160 - DNA, 25 bp, Artificial
  Probe
atcgaaaactccatgtaagaaccag

SEQ ID NO: 248161 - DNA, 25 bp, Artificial
  Probe
cgaaaactccatgtaagaaccagag

SEQ ID NO: 248162 - DNA, 25 bp, Artificial
  Probe
ccatttcctggacgttcagagaact

SEQ ID NO: 248163 - DNA, 25 bp, Artificial
  Probe
aatcacaggccaatgaccgctgttg

SEQ ID NO: 248164 - DNA, 25 bp, Artificial
  Probe
atttcctggacgttcagagaactgt

SEQ ID NO: 248165 - DNA, 25 bp, Artificial
  Probe
atagcgccgggcagcagaacttgaa

SEQ ID NO: 248166 - DNA, 25 bp, Artificial
  Probe
cgccgggcagcagaacttgaacgcc

SEQ ID NO: 248167 - DNA, 25 bp, Artificial
  Probe
cagcatcctgcctgcaggtccagag

SEQ ID NO: 248168 - DNA, 25 bp, Artificial
  Probe
ctgctgaatcacaggccaatgaccg

SEQ ID NO: 248169 - DNA, 25 bp, Artificial
  Probe
gccgggcagcagaacttgaacgcca

SEQ ID NO: 248170 - DNA, 25 bp, Artificial
  Probe
aacttgaacgccatcacctacgaga

SEQ ID NO: 248171 - DNA, 25 bp, Artificial
  Probe
tcagagaactgtttattcggcctga

SEQ ID NO: 248172 - DNA, 25 bp, Artificial
  Probe
caaagccacaacagccatttcctgg

SEQ ID NO: 248173 - DNA, 25 bp, Artificial
  Probe
catctgtggccattatgacacagct

SEQ ID NO: 248174 - DNA, 25 bp, Artificial
  Probe
cctgcctgcaggtccagaggatgag

SEQ ID NO: 248175 - DNA, 25 bp, Artificial
  Probe
agcagaacttgaacgccatcaccta

SEQ ID NO: 248176 - DNA, 25 bp, Artificial
  Probe
ctcacggaggagcagattgaagctc

SEQ ID NO: 248177 - DNA, 25 bp, Artificial
  Probe
agctgctgaatcacaggccaatgac

SEQ ID NO: 248178 - DNA, 25 bp, Artificial
  Probe
aatattcctgatctcaggattggtt

SEQ ID NO: 248179 - DNA, 25 bp, Artificial
  Probe
gagaagcttcagctgctgaatcaca

SEQ ID NO: 248180 - DNA, 25 bp, Artificial
  Probe
gccacaacagccatttcctggacgt

SEQ ID NO: 248181 - DNA, 25 bp, Artificial
  Probe
tcctgcctgcaggtccagaggatga

SEQ ID NO: 248182 - DNA, 25 bp, Artificial
  Probe
acatctgtggccattatgacacagc

SEQ ID NO: 248183 - DNA, 25 bp, Artificial
  Probe
agccgagaagcttcagctgctgaat

SEQ ID NO: 248184 - DNA, 25 bp, Artificial
  Probe
agcactagcaatgacgcggcaatgg

SEQ ID NO: 248185 - DNA, 25 bp, Artificial
  Probe
aagcactagcaatgacgcggcaatg

SEQ ID NO: 248186 - DNA, 25 bp, Artificial
  Probe
ttcagagaactgtttattcggcctg

SEQ ID NO: 248187 - DNA, 25 bp, Artificial
  Probe
atattcctgatctcaggattggttg

SEQ ID NO: 248188 - DNA, 25 bp, Artificial
  Probe
attcctgatctcaggattggttgag

SEQ ID NO: 248189 - DNA, 25 bp, Artificial
  Probe
gcatcctgcctgcaggtccagagga

SEQ ID NO: 248190 - DNA, 25 bp, Artificial
  Probe
gaacgccatcacctacgagacatta

SEQ ID NO: 248191 - DNA, 25 bp, Artificial
  Probe
ttcctggacgttcagagaactgttt

SEQ ID NO: 248192 - DNA, 25 bp, Artificial
  Probe
catagacatctgtggccattatgac

SEQ ID NO: 248193 - DNA, 25 bp, Artificial
  Probe
caacagccatttcctggacgttcag

SEQ ID NO: 248194 - DNA, 25 bp, Artificial
  Probe
ctgcctgcaggtccagaggatgagc

SEQ ID NO: 248195 - DNA, 25 bp, Artificial
  Probe
gcagcagaacttgaacgccatcacc

SEQ ID NO: 248196 - DNA, 25 bp, Artificial
  Probe
tgtcaccagcatcctgcctgcaggt

SEQ ID NO: 248197 - DNA, 25 bp, Artificial
  Probe
aggaggagcctgcatagacatctgt

SEQ ID NO: 248198 - DNA, 25 bp, Artificial
  Probe
ccgagaagcttcagctgctgaatca

SEQ ID NO: 248199 - DNA, 25 bp, Artificial
  Probe
gctcacggaggagcagattgaagct

SEQ ID NO: 248200 - DNA, 25 bp, Artificial
  Probe
ctgacatcattgtgcatgtcaacta

SEQ ID NO: 248201 - DNA, 25 bp, Artificial
  Probe
tcagaaatctaccaaggagcttcga

SEQ ID NO: 248202 - DNA, 25 bp, Artificial
  Probe
gacatgtccaaaaacagagagattg

SEQ ID NO: 248203 - DNA, 25 bp, Artificial
  Probe
ccaaggagcttcgagacatgtccaa

SEQ ID NO: 248204 - DNA, 25 bp, Artificial
  Probe
tgagctttcctgacatcattgtgca

SEQ ID NO: 248205 - DNA, 25 bp, Artificial
  Probe
agagagattgcatggcccctgtcaa

SEQ ID NO: 248206 - DNA, 25 bp, Artificial
  Probe
gagctttcctgacatcattgtgcat

SEQ ID NO: 248207 - DNA, 25 bp, Artificial
  Probe
ggagcttcgagacatgtccaaaaac

SEQ ID NO: 248208 - DNA, 25 bp, Artificial
  Probe
agcttcgagacatgtccaaaaacag

SEQ ID NO: 248209 - DNA, 25 bp, Artificial
  Probe
tctaccaaggagcttcgagacatgt

SEQ ID NO: 248210 - DNA, 25 bp, Artificial
  Probe
cctgacatcattgtgcatgtcaact

SEQ ID NO: 248211 - DNA, 25 bp, Artificial
  Probe
taccaaggagcttcgagacatgtcc

SEQ ID NO: 248212 - DNA, 25 bp, Artificial
  Probe
aatctaccaaggagcttcgagacat

SEQ ID NO: 248213 - DNA, 25 bp, Artificial
  Probe
ctaccaaggagcttcgagacatgtc

SEQ ID NO: 248214 - DNA, 25 bp, Artificial
  Probe
aggagcttcgagacatgtccaaaaa

SEQ ID NO: 248215 - DNA, 25 bp, Artificial
  Probe
catgtccaaaaacagagagattgca

SEQ ID NO: 248216 - DNA, 25 bp, Artificial
  Probe
gacatcattgtgcatgtcaactata

SEQ ID NO: 248217 - DNA, 25 bp, Artificial
  Probe
cgaacttgccacaccagactcagat

SEQ ID NO: 248218 - DNA, 25 bp, Artificial
  Probe
gagaaacatgcaaaccccagatatc

SEQ ID NO: 248219 - DNA, 25 bp, Artificial
  Probe
aaggagcttcgagacatgtccaaaa

SEQ ID NO: 248220 - DNA, 25 bp, Artificial
  Probe
aaatctaccaaggagcttcgagaca

SEQ ID NO: 248221 - DNA, 25 bp, Artificial
  Probe
gagacatgtccaaaaacagagagat

SEQ ID NO: 248222 - DNA, 25 bp, Artificial
  Probe
cgagacatgtccaaaaacagagaga

SEQ ID NO: 248223 - DNA, 25 bp, Artificial
  Probe
ttcagaaatctaccaaggagcttcg

SEQ ID NO: 248224 - DNA, 25 bp, Artificial
  Probe
gaaatctaccaaggagcttcgagac

SEQ ID NO: 248225 - DNA, 25 bp, Artificial
  Probe
tcgagacatgtccaaaaacagagag

SEQ ID NO: 248226 - DNA, 25 bp, Artificial
  Probe
ctttcctgacatcattgtgcatgtc

SEQ ID NO: 248227 - DNA, 25 bp, Artificial
  Probe
agctttcctgacatcattgtgcatg

SEQ ID NO: 248228 - DNA, 25 bp, Artificial
  Probe
tattcagaaatctaccaaggagctt

SEQ ID NO: 248229 - DNA, 25 bp, Artificial
  Probe
tttcctgacatcattgtgcatgtca

SEQ ID NO: 248230 - DNA, 25 bp, Artificial
  Probe
tcgcttatatcatgtgctgccgacg

SEQ ID NO: 248231 - DNA, 25 bp, Artificial
  Probe
agacatgtccaaaaacagagagatt

SEQ ID NO: 248232 - DNA, 25 bp, Artificial
  Probe
gctttcctgacatcattgtgcatgt

SEQ ID NO: 248233 - DNA, 25 bp, Artificial
  Probe
cagaaatctaccaaggagcttcgag

SEQ ID NO: 248234 - DNA, 25 bp, Artificial
  Probe
acatgtccaaaaacagagagattgc

SEQ ID NO: 248235 - DNA, 25 bp, Artificial
  Probe
tgacatcattgtgcatgtcaactat

SEQ ID NO: 248236 - DNA, 25 bp, Artificial
  Probe
gagcttcgagacatgtccaaaaaca

SEQ ID NO: 248237 - DNA, 25 bp, Artificial
  Probe
ttcgagacatgtccaaaaacagaga

SEQ ID NO: 248238 - DNA, 25 bp, Artificial
  Probe
atgtccaaaaacagagagattgcat

SEQ ID NO: 248239 - DNA, 25 bp, Artificial
  Probe
attcagaaatctaccaaggagcttc

SEQ ID NO: 248240 - DNA, 25 bp, Artificial
  Probe
caaggagcttcgagacatgtccaaa

SEQ ID NO: 248241 - DNA, 25 bp, Artificial
  Probe
atctaccaaggagcttcgagacatg

SEQ ID NO: 248242 - DNA, 25 bp, Artificial
  Probe
gcttcgagacatgtccaaaaacaga

SEQ ID NO: 248243 - DNA, 25 bp, Artificial
  Probe
cttcgagacatgtccaaaaacagag

SEQ ID NO: 248244 - DNA, 25 bp, Artificial
  Probe
accaaggagcttcgagacatgtcca

SEQ ID NO: 248245 - DNA, 25 bp, Artificial
  Probe
ttggcgacgatccagagctcctgga

SEQ ID NO: 248246 - DNA, 25 bp, Artificial
  Probe
acgatccagagctcctggaagcttt

SEQ ID NO: 248247 - DNA, 25 bp, Artificial
  Probe
ccagagctcctggaagctttgtacc

SEQ ID NO: 248248 - DNA, 25 bp, Artificial
  Probe
gatccagagctcctggaagctttgt

SEQ ID NO: 248249 - DNA, 25 bp, Artificial
  Probe
tggcgacgatccagagctcctggaa

SEQ ID NO: 248250 - DNA, 25 bp, Artificial
  Probe
tcctggaagctttgtacccgaaact

SEQ ID NO: 248251 - DNA, 25 bp, Artificial
  Probe
gtctccctgggagcaggccattggc

SEQ ID NO: 248252 - DNA, 25 bp, Artificial
  Probe
ttttcaagcctgaaggaaaggcaga

SEQ ID NO: 248253 - DNA, 25 bp, Artificial
  Probe
gagctcctggaagctttgtacccga

SEQ ID NO: 248254 - DNA, 25 bp, Artificial
  Probe
gccattggcgacgatccagagctcc

SEQ ID NO: 248255 - DNA, 25 bp, Artificial
  Probe
acttttcaagcctgaaggaaaggca

SEQ ID NO: 248256 - DNA, 25 bp, Artificial
  Probe
attggcgacgatccagagctcctgg

SEQ ID NO: 248257 - DNA, 25 bp, Artificial
  Probe
cagaactgccagattacaggagctt

SEQ ID NO: 248258 - DNA, 25 bp, Artificial
  Probe
tacccgaaacttttcaagcctgaag

SEQ ID NO: 248259 - DNA, 25 bp, Artificial
  Probe
tttgagtgcctcgtcactgtggtca

SEQ ID NO: 248260 - DNA, 25 bp, Artificial
  Probe
tctccctgggagcaggccattggcg

SEQ ID NO: 248261 - DNA, 25 bp, Artificial
  Probe
ggccattggcgacgatccagagctc

SEQ ID NO: 248262 - DNA, 25 bp, Artificial
  Probe
catttgagtgcctcgtcactgtggt

SEQ ID NO: 248263 - DNA, 25 bp, Artificial
  Probe
gctcctggaagctttgtacccgaaa

SEQ ID NO: 248264 - DNA, 25 bp, Artificial
  Probe
gccgcaagcttattccctttagtga

SEQ ID NO: 248265 - DNA, 25 bp, Artificial
  Probe
tttcaagcctgaaggaaaggcagaa

SEQ ID NO: 248266 - DNA, 25 bp, Artificial
  Probe
caagcctgaaggaaaggcagaactg

SEQ ID NO: 248267 - DNA, 25 bp, Artificial
  Probe
agtctccctgggagcaggccattgg

SEQ ID NO: 248268 - DNA, 25 bp, Artificial
  Probe
ctccctgggagcaggccattggcga

SEQ ID NO: 248269 - DNA, 25 bp, Artificial
  Probe
atccagagctcctggaagctttgta

SEQ ID NO: 248270 - DNA, 25 bp, Artificial
  Probe
gacgatccagagctcctggaagctt

SEQ ID NO: 248271 - DNA, 25 bp, Artificial
  Probe
cggccgcaagcttattccctttagt

SEQ ID NO: 248272 - DNA, 25 bp, Artificial
  Probe
cgatccagagctcctggaagctttg

SEQ ID NO: 248273 - DNA, 25 bp, Artificial
  Probe
ggccgcaagcttattccctttagtg

SEQ ID NO: 248274 - DNA, 25 bp, Artificial
  Probe
cgacgatccagagctcctggaagct

SEQ ID NO: 248275 - DNA, 25 bp, Artificial
  Probe
ccattggcgacgatccagagctcct

SEQ ID NO: 248276 - DNA, 25 bp, Artificial
  Probe
tgtacccgaaacttttcaagcctga

SEQ ID NO: 248277 - DNA, 25 bp, Artificial
  Probe
agctcctggaagctttgtacccgaa

SEQ ID NO: 248278 - DNA, 25 bp, Artificial
  Probe
ttcaagcctgaaggaaaggcagaac

SEQ ID NO: 248279 - DNA, 25 bp, Artificial
  Probe
agaactgccagattacaggagcttt

SEQ ID NO: 248280 - DNA, 25 bp, Artificial
  Probe
ggcagaactgccagattacaggagc

SEQ ID NO: 248281 - DNA, 25 bp, Artificial
  Probe
aggccattggcgacgatccagagct

SEQ ID NO: 248282 - DNA, 25 bp, Artificial
  Probe
agagctcctggaagctttgtacccg

SEQ ID NO: 248283 - DNA, 25 bp, Artificial
  Probe
ggagcaggccattggcgacgatcca

SEQ ID NO: 248284 - DNA, 25 bp, Artificial
  Probe
taccagtctccctgggagcaggcca

SEQ ID NO: 248285 - DNA, 25 bp, Artificial
  Probe
gcgacgatccagagctcctggaagc

SEQ ID NO: 248286 - DNA, 25 bp, Artificial
  Probe
gcggccgcaagcttattccctttag

SEQ ID NO: 248287 - DNA, 25 bp, Artificial
  Probe
ttgtacccgaaacttttcaagcctg

SEQ ID NO: 248288 - DNA, 25 bp, Artificial
  Probe
ccgcaagcttattccctttagtgag

SEQ ID NO: 248289 - DNA, 25 bp, Artificial
  Probe
gcagaactgccagattacaggagct

SEQ ID NO: 248290 - DNA, 25 bp, Artificial
  Probe
cttttcaagcctgaaggaaaggcag

SEQ ID NO: 248291 - DNA, 25 bp, Artificial
  Probe
cctgctgatcaaagtggagaatgag

SEQ ID NO: 248292 - DNA, 25 bp, Artificial
  Probe
gaaagagtttcaagccacagtggag

SEQ ID NO: 248293 - DNA, 25 bp, Artificial
  Probe
aggcacggccacagccaccattgtg

SEQ ID NO: 248294 - DNA, 25 bp, Artificial
  Probe
caacgagggcatgctctctgtggtc

SEQ ID NO: 248295 - DNA, 25 bp, Artificial
  Probe
tgggagtcattgtcaacttgacagt

SEQ ID NO: 248296 - DNA, 25 bp, Artificial
  Probe
cagagctttgagatccacaccaacc

SEQ ID NO: 248297 - DNA, 25 bp, Artificial
  Probe
acaccatcatcaatggaaatcctgg

SEQ ID NO: 248298 - DNA, 25 bp, Artificial
  Probe
acgttggattgacaggcacggccac

SEQ ID NO: 248299 - DNA, 25 bp, Artificial
  Probe
aagacaaagatgaccccgcgacagg

SEQ ID NO: 248300 - DNA, 25 bp, Artificial
  Probe
agtcttttacccagaccccatgatg

SEQ ID NO: 248301 - DNA, 25 bp, Artificial
  Probe
agccgtgggagtcattgtcaacttg

SEQ ID NO: 248302 - DNA, 25 bp, Artificial
  Probe
aaattcaccaagaaagagtttcaag

SEQ ID NO: 248303 - DNA, 25 bp, Artificial
  Probe
actggacgttggattgacaggcacg

SEQ ID NO: 248304 - DNA, 25 bp, Artificial
  Probe
caagatatggcaggactggacgttg

SEQ ID NO: 248305 - DNA, 25 bp, Artificial
  Probe
tgtcacctgcgctgctggaccggga

SEQ ID NO: 248306 - DNA, 25 bp, Artificial
  Probe
tttcacaccctgctgatcaaagtgg

SEQ ID NO: 248307 - DNA, 25 bp, Artificial
  Probe
atgaccccgcgacaggagcatggag

SEQ ID NO: 248308 - DNA, 25 bp, Artificial
  Probe
ggattgacaggcacggccacagcca

SEQ ID NO: 248309 - DNA, 25 bp, Artificial
  Probe
caacttgacagtggaagacaaagat

SEQ ID NO: 248310 - DNA, 25 bp, Artificial
  Probe
agggcggcatacaccatcatcaatg

SEQ ID NO: 248311 - DNA, 25 bp, Artificial
  Probe
gactggacgttggattgacaggcac

SEQ ID NO: 248312 - DNA, 25 bp, Artificial
  Probe
cattggtacccgacgtctcctatgg

SEQ ID NO: 248313 - DNA, 25 bp, Artificial
  Probe
attcaccaagaaagagtttcaagcc

SEQ ID NO: 248314 - DNA, 25 bp, Artificial
  Probe
tctctgtggtcaagcccctggacta

SEQ ID NO: 248315 - DNA, 25 bp, Artificial
  Probe
ggccactgtccacatcacggtcttg

SEQ ID NO: 248316 - DNA, 25 bp, Artificial
  Probe
ctggaaaaccccaagtatgaactga

SEQ ID NO: 248317 - DNA, 25 bp, Artificial
  Probe
tgtcaacgagggaccagtcttttac

SEQ ID NO: 248318 - DNA, 25 bp, Artificial
  Probe
ttggtacccgacgtctcctatggcc

SEQ ID NO: 248319 - DNA, 25 bp, Artificial
  Probe
cacagaccaacgagggcatgctctc

SEQ ID NO: 248320 - DNA, 25 bp, Artificial
  Probe
gatgaccccgcgacaggagcatgga

SEQ ID NO: 248321 - DNA, 25 bp, Artificial
  Probe
gactatgagatctctgcctttcaca

SEQ ID NO: 248322 - DNA, 25 bp, Artificial
  Probe
cgatcccgagaaaggagacattgtc

SEQ ID NO: 248323 - DNA, 25 bp, Artificial
  Probe
caggaaaatatctctgtgggcagtg

SEQ ID NO: 248324 - DNA, 25 bp, Artificial
  Probe
ggagccgtgggagtcattgtcaact

SEQ ID NO: 248325 - DNA, 25 bp, Artificial
  Probe
gagctttgagatccacaccaaccca

SEQ ID NO: 248326 - DNA, 25 bp, Artificial
  Probe
gaatgaggacccattggtacccgac

SEQ ID NO: 248327 - DNA, 25 bp, Artificial
  Probe
aaaggagacattgtcaccgtggtgt

SEQ ID NO: 248328 - DNA, 25 bp, Artificial
  Probe
ccccaagtatgaactgatcatcgaa

SEQ ID NO: 248329 - DNA, 25 bp, Artificial
  Probe
caacccacagaccaacgagggcatg

SEQ ID NO: 248330 - DNA, 25 bp, Artificial
  Probe
cctgggcagagctttgagatccaca

SEQ ID NO: 248331 - DNA, 25 bp, Artificial
  Probe
gaggacccattggtacccgacgtct

SEQ ID NO: 248332 - DNA, 25 bp, Artificial
  Probe
tacccagaccccatgatggtgacca

SEQ ID NO: 248333 - DNA, 25 bp, Artificial
  Probe
tggtcaagcccctggactatgagat

SEQ ID NO: 248334 - DNA, 25 bp, Artificial
  Probe
catgatggtgaccaaacaggaaaat

SEQ ID NO: 248335 - DNA, 25 bp, Artificial
  Probe
gttctacatcgatcccgagaaagga

SEQ ID NO: 248336 - DNA, 25 bp, Artificial
  Probe
ccattgtgatcgatgacaaaaatga

SEQ ID NO: 248337 - DNA, 25 bp, Artificial
  Probe
agctactgttctggaagcttgcttg

SEQ ID NO: 248338 - DNA, 25 bp, Artificial
  Probe
aaagctactgttctggaagcttgct

SEQ ID NO: 248339 - DNA, 25 bp, Artificial
  Probe
gaaggtcatgctatcttcatccctc

SEQ ID NO: 248340 - DNA, 25 bp, Artificial
  Probe
cacaaggacacatatgtgtggtttt

SEQ ID NO: 248341 - DNA, 25 bp, Artificial
  Probe
ataattctcagagcagagaaatcaa

SEQ ID NO: 248342 - DNA, 25 bp, Artificial
  Probe
gtccacttggccttcgttgtgttct

SEQ ID NO: 248343 - DNA, 25 bp, Artificial
  Probe
ggaaggtcatgctatcttcatccct

SEQ ID NO: 248344 - DNA, 25 bp, Artificial
  Probe
agtccctctagtagccctagcaaca

SEQ ID NO: 248345 - DNA, 25 bp, Artificial
  Probe
tactgttctggaagcttgcttgaaa

SEQ ID NO: 248346 - DNA, 25 bp, Artificial
  Probe
caaagctactgttctggaagcttgc

SEQ ID NO: 248347 - DNA, 25 bp, Artificial
  Probe
ttgtgatggccaacattcctagtgg

SEQ ID NO: 248348 - DNA, 25 bp, Artificial
  Probe
ctctagtagccctagcaacacaggc

SEQ ID NO: 248349 - DNA, 25 bp, Artificial
  Probe
cacttcatgccctagaaccagatag

SEQ ID NO: 248350 - DNA, 25 bp, Artificial
  Probe
tattaatgtcaatcccagagagagt

SEQ ID NO: 248351 - DNA, 25 bp, Artificial
  Probe
gagggtctagcttggcttgcttgct

SEQ ID NO: 248352 - DNA, 25 bp, Artificial
  Probe
tctagtagccctagcaacacaggcc

SEQ ID NO: 248353 - DNA, 25 bp, Artificial
  Probe
atagtagcttccaagcacccaatcg

SEQ ID NO: 248354 - DNA, 25 bp, Artificial
  Probe
aatgtcaatcccagagagagtgttt

SEQ ID NO: 248355 - DNA, 25 bp, Artificial
  Probe
cttggccttcgttgtgttctgtctg

SEQ ID NO: 248356 - DNA, 25 bp, Artificial
  Probe
aaatgttaacaaagctactgttctg

SEQ ID NO: 248357 - DNA, 25 bp, Artificial
  Probe
tcctacatctcaatatctgctgagg

SEQ ID NO: 248358 - DNA, 25 bp, Artificial
  Probe
cctagaaccagatagtgcccccaaa

SEQ ID NO: 248359 - DNA, 25 bp, Artificial
  Probe
ttctcagagcagagaaatcaacttc

SEQ ID NO: 248360 - DNA, 25 bp, Artificial
  Probe
tacctcatcctgttcttcaagagtg

SEQ ID NO: 248361 - DNA, 25 bp, Artificial
  Probe
aaggatatgctgcagcttcaagtca

SEQ ID NO: 248362 - DNA, 25 bp, Artificial
  Probe
cgttgtgttctgtctgttcagaaga

SEQ ID NO: 248363 - DNA, 25 bp, Artificial
  Probe
tagtagccctagcaacacaggccca

SEQ ID NO: 248364 - DNA, 25 bp, Artificial
  Probe
tcagtccctctagtagccctagcaa

SEQ ID NO: 248365 - DNA, 25 bp, Artificial
  Probe
gagcgctttcacaactattaatgtc

SEQ ID NO: 248366 - DNA, 25 bp, Artificial
  Probe
atgccctagaaccagatagtgcccc

SEQ ID NO: 248367 - DNA, 25 bp, Artificial
  Probe
taacaaagctactgttctggaagct

SEQ ID NO: 248368 - DNA, 25 bp, Artificial
  Probe
cattactataattctcagagcagag

SEQ ID NO: 248369 - DNA, 25 bp, Artificial
  Probe
cattcctagtggatgatgaaacagg

SEQ ID NO: 248370 - DNA, 25 bp, Artificial
  Probe
tgcttgctgactttgatgtccacaa

SEQ ID NO: 248371 - DNA, 25 bp, Artificial
  Probe
atctgctgagggtctagcttggctt

SEQ ID NO: 248372 - DNA, 25 bp, Artificial
  Probe
tatgctgcagcttcaagtcaccacc

SEQ ID NO: 248373 - DNA, 25 bp, Artificial
  Probe
ccctagcaacacaggcccaatgtat

SEQ ID NO: 248374 - DNA, 25 bp, Artificial
  Probe
ctataattctcagagcagagaaatc

SEQ ID NO: 248375 - DNA, 25 bp, Artificial
  Probe
gtgtggtccacttggccttcgttgt

SEQ ID NO: 248376 - DNA, 25 bp, Artificial
  Probe
agtagcttccaagcacccaatcgtc

SEQ ID NO: 248377 - DNA, 25 bp, Artificial
  Probe
gtctagcttggcttgcttgctgact

SEQ ID NO: 248378 - DNA, 25 bp, Artificial
  Probe
atcccagagagagtgttttcagaca

SEQ ID NO: 248379 - DNA, 25 bp, Artificial
  Probe
ttgctgactttgatgtccacaagga

SEQ ID NO: 248380 - DNA, 25 bp, Artificial
  Probe
aactattaatgtcaatcccagagag

SEQ ID NO: 248381 - DNA, 25 bp, Artificial
  Probe
caatatctgctgagggtctagcttg

SEQ ID NO: 248382 - DNA, 25 bp, Artificial
  Probe
ggccttcgttgtgttctgtctgttc

SEQ ID NO: 248383 - DNA, 25 bp, Artificial
  Probe
gccagggccttttgaacagtagtgt

SEQ ID NO: 248384 - DNA, 25 bp, Artificial
  Probe
tactttgtaactgcatggcttaacc

SEQ ID NO: 248385 - DNA, 25 bp, Artificial
  Probe
cagtccaaagaatgcagtcactttt

SEQ ID NO: 248386 - DNA, 25 bp, Artificial
  Probe
gctgaaaacatccttgggttgagtg

SEQ ID NO: 248387 - DNA, 25 bp, Artificial
  Probe
agccctgtggataattaagttatct

SEQ ID NO: 248388 - DNA, 25 bp, Artificial
  Probe
tgatacagtccaaagaatgcagtca

SEQ ID NO: 248389 - DNA, 25 bp, Artificial
  Probe
ccagcttacattaaaagccctgtgg

SEQ ID NO: 248390 - DNA, 25 bp, Artificial
  Probe
ggctgaaaacatccttgggttgagt

SEQ ID NO: 248391 - DNA, 25 bp, Artificial
  Probe
acatccttgggttgagtgtttcatt

SEQ ID NO: 248392 - DNA, 25 bp, Artificial
  Probe
gtccagcttacattaaaagccctgt

SEQ ID NO: 248393 - DNA, 25 bp, Artificial
  Probe
atcttcatacctgcaaaatggtgga

SEQ ID NO: 248394 - DNA, 25 bp, Artificial
  Probe
aagccctgtggataattaagttatc

SEQ ID NO: 248395 - DNA, 25 bp, Artificial
  Probe
agaatgcagtcactttttatcatgt

SEQ ID NO: 248396 - DNA, 25 bp, Artificial
  Probe
tcttcatacctgcaaaatggtggag

SEQ ID NO: 248397 - DNA, 25 bp, Artificial
  Probe
attatgatacagtccaaagaatgca

SEQ ID NO: 248398 - DNA, 25 bp, Artificial
  Probe
ggccagggccttttgaacagtagtg

SEQ ID NO: 248399 - DNA, 25 bp, Artificial
  Probe
ggctattttcattaaaactgtcaga

SEQ ID NO: 248400 - DNA, 25 bp, Artificial
  Probe
cattaaaagccctgtggataattaa

SEQ ID NO: 248401 - DNA, 25 bp, Artificial
  Probe
ctactttgtaactgcatggcttaac

SEQ ID NO: 248402 - DNA, 25 bp, Artificial
  Probe
gatacagtccaaagaatgcagtcac

SEQ ID NO: 248403 - DNA, 25 bp, Artificial
  Probe
ctttgtaactgcatggcttaacctg

SEQ ID NO: 248404 - DNA, 25 bp, Artificial
  Probe
gcttatcattcatgtattgtccagc

SEQ ID NO: 248405 - DNA, 25 bp, Artificial
  Probe
ttatcttcatacctgcaaaatggtg

SEQ ID NO: 248406 - DNA, 25 bp, Artificial
  Probe
ccagggccttttgaacagtagtgtc

SEQ ID NO: 248407 - DNA, 25 bp, Artificial
  Probe
atgatacagtccaaagaatgcagtc

SEQ ID NO: 248408 - DNA, 25 bp, Artificial
  Probe
aacatccttgggttgagtgtttcat

SEQ ID NO: 248409 - DNA, 25 bp, Artificial
  Probe
cagggccttttgaacagtagtgtcc

SEQ ID NO: 248410 - DNA, 25 bp, Artificial
  Probe
tctcttttgaagatctatggttgac

SEQ ID NO: 248411 - DNA, 25 bp, Artificial
  Probe
tgtccagcttacattaaaagccctg

SEQ ID NO: 248412 - DNA, 25 bp, Artificial
  Probe
ctgaaaacatccttgggttgagtgt

SEQ ID NO: 248413 - DNA, 25 bp, Artificial
  Probe
tatcttcatacctgcaaaatggtgg

SEQ ID NO: 248414 - DNA, 25 bp, Artificial
  Probe
tacagtccaaagaatgcagtcactt

SEQ ID NO: 248415 - DNA, 25 bp, Artificial
  Probe
gttatcttcatacctgcaaaatggt

SEQ ID NO: 248416 - DNA, 25 bp, Artificial
  Probe
gggctgaaaacatccttgggttgag

SEQ ID NO: 248417 - DNA, 25 bp, Artificial
  Probe
catccttgggttgagtgtttcattt

SEQ ID NO: 248418 - DNA, 25 bp, Artificial
  Probe
actttgtaactgcatggcttaacct

SEQ ID NO: 248419 - DNA, 25 bp, Artificial
  Probe
ctcttttgaagatctatggttgact

SEQ ID NO: 248420 - DNA, 25 bp, Artificial
  Probe
gtattgtccagcttacattaaaagc

SEQ ID NO: 248421 - DNA, 25 bp, Artificial
  Probe
tgggctgaaaacatccttgggttga

SEQ ID NO: 248422 - DNA, 25 bp, Artificial
  Probe
tccagcttacattaaaagccctgtg

SEQ ID NO: 248423 - DNA, 25 bp, Artificial
  Probe
agttatcttcatacctgcaaaatgg

SEQ ID NO: 248424 - DNA, 25 bp, Artificial
  Probe
cagcttacattaaaagccctgtgga

SEQ ID NO: 248425 - DNA, 25 bp, Artificial
  Probe
gcttacattaaaagccctgtggata

SEQ ID NO: 248426 - DNA, 25 bp, Artificial
  Probe
ttggccagggccttttgaacagtag

SEQ ID NO: 248427 - DNA, 25 bp, Artificial
  Probe
tttgtaactgcatggcttaacctgg

SEQ ID NO: 248428 - DNA, 25 bp, Artificial
  Probe
ctaacagtgggctgaaaacatcctt

SEQ ID NO: 248429 - DNA, 25 bp, Artificial
  Probe
agcacagatttcttccccaggaaaa

SEQ ID NO: 248430 - DNA, 25 bp, Artificial
  Probe
aagctgtagatcgtagatggaacct

SEQ ID NO: 248431 - DNA, 25 bp, Artificial
  Probe
acctagcacagatttcttccccagg

SEQ ID NO: 248432 - DNA, 25 bp, Artificial
  Probe
aaacctgtgcatgaggagaggtctg

SEQ ID NO: 248433 - DNA, 25 bp, Artificial
  Probe
gagaggtctgctgattgccttggtc

SEQ ID NO: 248434 - DNA, 25 bp, Artificial
  Probe
gaggtctgctgattgccttggtcat

SEQ ID NO: 248435 - DNA, 25 bp, Artificial
  Probe
cagttgataccttgttggataaaac

SEQ ID NO: 248436 - DNA, 25 bp, Artificial
  Probe
atcccacatactattgcgaagctgt

SEQ ID NO: 248437 - DNA, 25 bp, Artificial
  Probe
ctattgcgaagctgtagatcgtaga

SEQ ID NO: 248438 - DNA, 25 bp, Artificial
  Probe
gcacagatttcttccccaggaaaaa

SEQ ID NO: 248439 - DNA, 25 bp, Artificial
  Probe
tgctgattgccttggtcatgcccag

SEQ ID NO: 248440 - DNA, 25 bp, Artificial
  Probe
tcttccccaggaaaaatcactgatg

SEQ ID NO: 248441 - DNA, 25 bp, Artificial
  Probe
tggaacctagcacagatttcttccc

SEQ ID NO: 248442 - DNA, 25 bp, Artificial
  Probe
cctagcacagatttcttccccagga

SEQ ID NO: 248443 - DNA, 25 bp, Artificial
  Probe
ctgattgccttggtcatgcccaggg

SEQ ID NO: 248444 - DNA, 25 bp, Artificial
  Probe
ataccttgttggataaaacctgtgc

SEQ ID NO: 248445 - DNA, 25 bp, Artificial
  Probe
tgcccagggaactgtcgggaatgat

SEQ ID NO: 248446 - DNA, 25 bp, Artificial
  Probe
ttgataccttgttggataaaacctg

SEQ ID NO: 248447 - DNA, 25 bp, Artificial
  Probe
actattgcgaagctgtagatcgtag

SEQ ID NO: 248448 - DNA, 25 bp, Artificial
  Probe
tagatggaacctagcacagatttct

SEQ ID NO: 248449 - DNA, 25 bp, Artificial
  Probe
cccacatactattgcgaagctgtag

SEQ ID NO: 248450 - DNA, 25 bp, Artificial
  Probe
ttggtcatgcccagggaactgtcgg

SEQ ID NO: 248451 - DNA, 25 bp, Artificial
  Probe
tcccacatactattgcgaagctgta

SEQ ID NO: 248452 - DNA, 25 bp, Artificial
  Probe
agatggaacctagcacagatttctt

SEQ ID NO: 248453 - DNA, 25 bp, Artificial
  Probe
tgattgccttggtcatgcccaggga

SEQ ID NO: 248454 - DNA, 25 bp, Artificial
  Probe
agctgtagatcgtagatggaaccta

SEQ ID NO: 248455 - DNA, 25 bp, Artificial
  Probe
atgcccagggaactgtcgggaatga

SEQ ID NO: 248456 - DNA, 25 bp, Artificial
  Probe
aggtctgctgattgccttggtcatg

SEQ ID NO: 248457 - DNA, 25 bp, Artificial
  Probe
tcatgcccagggaactgtcgggaat

SEQ ID NO: 248458 - DNA, 25 bp, Artificial
  Probe
catgaggagaggtctgctgattgcc

SEQ ID NO: 248459 - DNA, 25 bp, Artificial
  Probe
acctgtgcatgaggagaggtctgct

SEQ ID NO: 248460 - DNA, 25 bp, Artificial
  Probe
agatcgtagatggaacctagcacag

SEQ ID NO: 248461 - DNA, 25 bp, Artificial
  Probe
catactattgcgaagctgtagatcg

SEQ ID NO: 248462 - DNA, 25 bp, Artificial
  Probe
actgtcgggaatgatttcagtggca

SEQ ID NO: 248463 - DNA, 25 bp, Artificial
  Probe
attgccttggtcatgcccagggaac

SEQ ID NO: 248464 - DNA, 25 bp, Artificial
  Probe
ggaacctagcacagatttcttcccc

SEQ ID NO: 248465 - DNA, 25 bp, Artificial
  Probe
tgataccttgttggataaaacctgt

SEQ ID NO: 248466 - DNA, 25 bp, Artificial
  Probe
aacctgtgcatgaggagaggtctgc

SEQ ID NO: 248467 - DNA, 25 bp, Artificial
  Probe
atactattgcgaagctgtagatcgt

SEQ ID NO: 248468 - DNA, 25 bp, Artificial
  Probe
ctgctgattgccttggtcatgccca

SEQ ID NO: 248469 - DNA, 25 bp, Artificial
  Probe
tagcacagatttcttccccaggaaa

SEQ ID NO: 248470 - DNA, 25 bp, Artificial
  Probe
tatcccacatactattgcgaagctg

SEQ ID NO: 248471 - DNA, 25 bp, Artificial
  Probe
cccagggaactgtcgggaatgattt

SEQ ID NO: 248472 - DNA, 25 bp, Artificial
  Probe
aacatacaaggctggatgggaaaca

SEQ ID NO: 248473 - DNA, 25 bp, Artificial
  Probe
catacaaggctggatgggaaacatt

SEQ ID NO: 248474 - DNA, 25 bp, Artificial
  Probe
gttgataccttgttggataaaacct

SEQ ID NO: 248475 - DNA, 25 bp, Artificial
  Probe
agacagatgtccttcaagccctagt

SEQ ID NO: 248476 - DNA, 25 bp, Artificial
  Probe
cttgtgtgtcagtgccaccactgcc

SEQ ID NO: 248477 - DNA, 25 bp, Artificial
  Probe
aggagacagatgtccttcaagccct

SEQ ID NO: 248478 - DNA, 25 bp, Artificial
  Probe
tgtcagtgccaccactgccaggctg

SEQ ID NO: 248479 - DNA, 25 bp, Artificial
  Probe
tcaagccctagtggaagttggtgag

SEQ ID NO: 248480 - DNA, 25 bp, Artificial
  Probe
cttgggtcccctcatgtcttaaggt

SEQ ID NO: 248481 - DNA, 25 bp, Artificial
  Probe
ggagacagatgtccttcaagcccta

SEQ ID NO: 248482 - DNA, 25 bp, Artificial
  Probe
acagatgtccttcaagccctagtgg

SEQ ID NO: 248483 - DNA, 25 bp, Artificial
  Probe
gggcttgtgtgtcagtgccaccact

SEQ ID NO: 248484 - DNA, 25 bp, Artificial
  Probe
tttgatgggcttgtgtgtcagtgcc

SEQ ID NO: 248485 - DNA, 25 bp, Artificial
  Probe
gccctagtggaagttggtgagatct

SEQ ID NO: 248486 - DNA, 25 bp, Artificial
  Probe
ggcttgtgtgtcagtgccaccactg

SEQ ID NO: 248487 - DNA, 25 bp, Artificial
  Probe
tgatgggcttgtgtgtcagtgccac

SEQ ID NO: 248488 - DNA, 25 bp, Artificial
  Probe
tgtgtcagtgccaccactgccaggc

SEQ ID NO: 248489 - DNA, 25 bp, Artificial
  Probe
caagccctagtggaagttggtgaga

SEQ ID NO: 248490 - DNA, 25 bp, Artificial
  Probe
gatgggcttgtgtgtcagtgccacc

SEQ ID NO: 248491 - DNA, 25 bp, Artificial
  Probe
gacagatgtccttcaagccctagtg

SEQ ID NO: 248492 - DNA, 25 bp, Artificial
  Probe
cagatgtccttcaagccctagtgga

SEQ ID NO: 248493 - DNA, 25 bp, Artificial
  Probe
gcttgtgtgtcagtgccaccactgc

SEQ ID NO: 248494 - DNA, 25 bp, Artificial
  Probe
atgggcttgtgtgtcagtgccacca

SEQ ID NO: 248495 - DNA, 25 bp, Artificial
  Probe
tccttcaagccctagtggaagttgg

SEQ ID NO: 248496 - DNA, 25 bp, Artificial
  Probe
ccttcaagccctagtggaagttggt

SEQ ID NO: 248497 - DNA, 25 bp, Artificial
  Probe
agatgtccttcaagccctagtggaa

SEQ ID NO: 248498 - DNA, 25 bp, Artificial
  Probe
atctggatgacttgggtcccctcat

SEQ ID NO: 248499 - DNA, 25 bp, Artificial
  Probe
gggtcccctcatgtcttaaggtact

SEQ ID NO: 248500 - DNA, 25 bp, Artificial
  Probe
ggtcccctcatgtcttaaggtactt

SEQ ID NO: 248501 - DNA, 25 bp, Artificial
  Probe
gtgagatctggatgacttgggtccc

SEQ ID NO: 248502 - DNA, 25 bp, Artificial
  Probe
gatctggatgacttgggtcccctca

SEQ ID NO: 248503 - DNA, 25 bp, Artificial
  Probe
ggatgacttgggtcccctcatgtct

SEQ ID NO: 248504 - DNA, 25 bp, Artificial
  Probe
agccctagtggaagttggtgagatc

SEQ ID NO: 248505 - DNA, 25 bp, Artificial
  Probe
gtgtcagtgccaccactgccaggct

SEQ ID NO: 248506 - DNA, 25 bp, Artificial
  Probe
tgggcttgtgtgtcagtgccaccac

SEQ ID NO: 248507 - DNA, 25 bp, Artificial
  Probe
agatctggatgacttgggtcccctc

SEQ ID NO: 248508 - DNA, 25 bp, Artificial
  Probe
ccctagtggaagttggtgagatctg

SEQ ID NO: 248509 - DNA, 25 bp, Artificial
  Probe
ttgggtcccctcatgtcttaaggta

SEQ ID NO: 248510 - DNA, 25 bp, Artificial
  Probe
gagatctggatgacttgggtcccct

SEQ ID NO: 248511 - DNA, 25 bp, Artificial
  Probe
tgagatctggatgacttgggtcccc

SEQ ID NO: 248512 - DNA, 25 bp, Artificial
  Probe
acttgggtcccctcatgtcttaagg

SEQ ID NO: 248513 - DNA, 25 bp, Artificial
  Probe
ttcaagccctagtggaagttggtga

SEQ ID NO: 248514 - DNA, 25 bp, Artificial
  Probe
ctcctgagatgcgataggagacaga

SEQ ID NO: 248515 - DNA, 25 bp, Artificial
  Probe
tgggtcccctcatgtcttaaggtac

SEQ ID NO: 248516 - DNA, 25 bp, Artificial
  Probe
gagacagatgtccttcaagccctag

SEQ ID NO: 248517 - DNA, 25 bp, Artificial
  Probe
tcctgagatgcgataggagacagat

SEQ ID NO: 248518 - DNA, 25 bp, Artificial
  Probe
ttgatgggcttgtgtgtcagtgcca

SEQ ID NO: 248519 - DNA, 25 bp, Artificial
  Probe
gtcccctcatgtcttaaggtacttt

SEQ ID NO: 248520 - DNA, 25 bp, Artificial
  Probe
cttcaagccctagtggaagttggtg

SEQ ID NO: 248521 - DNA, 25 bp, Artificial
  Probe
cagccacatctgtctctgaccactc

SEQ ID NO: 248522 - DNA, 25 bp, Artificial
  Probe
gtctatggctggcgaggccaccact

SEQ ID NO: 248523 - DNA, 25 bp, Artificial
  Probe
tctgtctctgaccactccctcttct

SEQ ID NO: 248524 - DNA, 25 bp, Artificial
  Probe
ccacatctgtctctgaccactccct

SEQ ID NO: 248525 - DNA, 25 bp, Artificial
  Probe
catctgtctctgaccactccctctt

SEQ ID NO: 248526 - DNA, 25 bp, Artificial
  Probe
accacttgcgaggaacacagccaca

SEQ ID NO: 248527 - DNA, 25 bp, Artificial
  Probe
accacagctgtgtcccacagctgga

SEQ ID NO: 248528 - DNA, 25 bp, Artificial
  Probe
ttgcgaggaacacagccacatctgt

SEQ ID NO: 248529 - DNA, 25 bp, Artificial
  Probe
ctatggctggcgaggccaccacttg

SEQ ID NO: 248530 - DNA, 25 bp, Artificial
  Probe
acttgcgaggaacacagccacatct

SEQ ID NO: 248531 - DNA, 25 bp, Artificial
  Probe
agccacatctgtctctgaccactcc

SEQ ID NO: 248532 - DNA, 25 bp, Artificial
  Probe
tggctggcgaggccaccacttgcga

SEQ ID NO: 248533 - DNA, 25 bp, Artificial
  Probe
gcgaggccaccacttgcgaggaaca

SEQ ID NO: 248534 - DNA, 25 bp, Artificial
  Probe
ggctggcgaggccaccacttgcgag

SEQ ID NO: 248535 - DNA, 25 bp, Artificial
  Probe
ggccaccacttgcgaggaacacagc

SEQ ID NO: 248536 - DNA, 25 bp, Artificial
  Probe
cgaggaacacagccacatctgtctc

SEQ ID NO: 248537 - DNA, 25 bp, Artificial
  Probe
gcgaggaacacagccacatctgtct

SEQ ID NO: 248538 - DNA, 25 bp, Artificial
  Probe
gctggcgaggccaccacttgcgagg

SEQ ID NO: 248539 - DNA, 25 bp, Artificial
  Probe
tatggctggcgaggccaccacttgc

SEQ ID NO: 248540 - DNA, 25 bp, Artificial
  Probe
atctgtctctgaccactccctcttc

SEQ ID NO: 248541 - DNA, 25 bp, Artificial
  Probe
cacatctgtctctgaccactccctc

SEQ ID NO: 248542 - DNA, 25 bp, Artificial
  Probe
cacttgcgaggaacacagccacatc

SEQ ID NO: 248543 - DNA, 25 bp, Artificial
  Probe
aggaacacagccacatctgtctctg

SEQ ID NO: 248544 - DNA, 25 bp, Artificial
  Probe
ccacttgcgaggaacacagccacat

SEQ ID NO: 248545 - DNA, 25 bp, Artificial
  Probe
acacagccacatctgtctctgacca

SEQ ID NO: 248546 - DNA, 25 bp, Artificial
  Probe
atggctggcgaggccaccacttgcg

SEQ ID NO: 248547 - DNA, 25 bp, Artificial
  Probe
agaccacagctgtgtcccacagctg

SEQ ID NO: 248548 - DNA, 25 bp, Artificial
  Probe
acatctgtctctgaccactccctct

SEQ ID NO: 248549 - DNA, 25 bp, Artificial
  Probe
tgtctctgaccactccctcttctgc

SEQ ID NO: 248550 - DNA, 25 bp, Artificial
  Probe
gaggccaccacttgcgaggaacaca

SEQ ID NO: 248551 - DNA, 25 bp, Artificial
  Probe
tgcgaggaacacagccacatctgtc

SEQ ID NO: 248552 - DNA, 25 bp, Artificial
  Probe
gaggaacacagccacatctgtctct

SEQ ID NO: 248553 - DNA, 25 bp, Artificial
  Probe
tggcgaggccaccacttgcgaggaa

SEQ ID NO: 248554 - DNA, 25 bp, Artificial
  Probe
ccacagctgtgtcccacagctggat

SEQ ID NO: 248555 - DNA, 25 bp, Artificial
  Probe
gaacacagccacatctgtctctgac

SEQ ID NO: 248556 - DNA, 25 bp, Artificial
  Probe
acagccacatctgtctctgaccact

SEQ ID NO: 248557 - DNA, 25 bp, Artificial
  Probe
caccacttgcgaggaacacagccac

SEQ ID NO: 248558 - DNA, 25 bp, Artificial
  Probe
aggccaccacttgcgaggaacacag

SEQ ID NO: 248559 - DNA, 25 bp, Artificial
  Probe
gccaccacttgcgaggaacacagcc

SEQ ID NO: 248560 - DNA, 25 bp, Artificial
  Probe
ccaccacttgcgaggaacacagcca

SEQ ID NO: 248561 - DNA, 25 bp, Artificial
  Probe
ctggcgaggccaccacttgcgagga

SEQ ID NO: 248562 - DNA, 25 bp, Artificial
  Probe
cgaggccaccacttgcgaggaacac

SEQ ID NO: 248563 - DNA, 25 bp, Artificial
  Probe
cttgcgaggaacacagccacatctg

SEQ ID NO: 248564 - DNA, 25 bp, Artificial
  Probe
gaccacagctgtgtcccacagctgg

SEQ ID NO: 248565 - DNA, 25 bp, Artificial
  Probe
ggcgaggccaccacttgcgaggaac

SEQ ID NO: 248566 - DNA, 25 bp, Artificial
  Probe
ggaacacagccacatctgtctctga

SEQ ID NO: 248567 - DNA, 25 bp, Artificial
  Probe
gggccccagactgaagatgacctca

SEQ ID NO: 248568 - DNA, 25 bp, Artificial
  Probe
catgtgctgtttttgcttcaagctc

SEQ ID NO: 248569 - DNA, 25 bp, Artificial
  Probe
ggccccagactgaagatgacctcag

SEQ ID NO: 248570 - DNA, 25 bp, Artificial
  Probe
agaacaacgggatggcctgatgctg

SEQ ID NO: 248571 - DNA, 25 bp, Artificial
  Probe
tgtgctgtttttgcttcaagctcag

SEQ ID NO: 248572 - DNA, 25 bp, Artificial
  Probe
ggaatgaaggccacaccagccaggt

SEQ ID NO: 248573 - DNA, 25 bp, Artificial
  Probe
acgggatggcctgatgctgtcatgc

SEQ ID NO: 248574 - DNA, 25 bp, Artificial
  Probe
tgtgcatgtgctgtttttgcttcaa

SEQ ID NO: 248575 - DNA, 25 bp, Artificial
  Probe
aacgggatggcctgatgctgtcatg

SEQ ID NO: 248576 - DNA, 25 bp, Artificial
  Probe
gccccagactgaagatgacctcagc

SEQ ID NO: 248577 - DNA, 25 bp, Artificial
  Probe
atgtgctgtttttgcttcaagctca

SEQ ID NO: 248578 - DNA, 25 bp, Artificial
  Probe
ctgtttttgcttcaagctcagtagc

SEQ ID NO: 248579 - DNA, 25 bp, Artificial
  Probe
cgggatggcctgatgctgtcatgct

SEQ ID NO: 248580 - DNA, 25 bp, Artificial
  Probe
gtgcatgtgctgtttttgcttcaag

SEQ ID NO: 248581 - DNA, 25 bp, Artificial
  Probe
tgctgtttttgcttcaagctcagta

SEQ ID NO: 248582 - DNA, 25 bp, Artificial
  Probe
cactggcttccatcctaagagtggg

SEQ ID NO: 248583 - DNA, 25 bp, Artificial
  Probe
tgcatgtgctgtttttgcttcaagc

SEQ ID NO: 248584 - DNA, 25 bp, Artificial
  Probe
aagggccccagactgaagatgacct

SEQ ID NO: 248585 - DNA, 25 bp, Artificial
  Probe
gtgtgcatgtgctgtttttgcttca

SEQ ID NO: 248586 - DNA, 25 bp, Artificial
  Probe
gctgtttttgcttcaagctcagtag

SEQ ID NO: 248587 - DNA, 25 bp, Artificial
  Probe
gagaacaacgggatggcctgatgct

SEQ ID NO: 248588 - DNA, 25 bp, Artificial
  Probe
gcatgtgctgtttttgcttcaagct

SEQ ID NO: 248589 - DNA, 25 bp, Artificial
  Probe
taaagggccccagactgaagatgac

SEQ ID NO: 248590 - DNA, 25 bp, Artificial
  Probe
tggttccaggctctccagagaccac

SEQ ID NO: 248591 - DNA, 25 bp, Artificial
  Probe
ggttccaggctctccagagaccaca

SEQ ID NO: 248592 - DNA, 25 bp, Artificial
  Probe
atcttggacataaatccaacttgag

SEQ ID NO: 248593 - DNA, 25 bp, Artificial
  Probe
agggccccagactgaagatgacctc

SEQ ID NO: 248594 - DNA, 25 bp, Artificial
  Probe
ttggttccaggctctccagagacca

SEQ ID NO: 248595 - DNA, 25 bp, Artificial
  Probe
aaagggccccagactgaagatgacc

SEQ ID NO: 248596 - DNA, 25 bp, Artificial
  Probe
tgtttttgcttcaagctcagtagca

SEQ ID NO: 248597 - DNA, 25 bp, Artificial
  Probe
gtgctgtttttgcttcaagctcagt

SEQ ID NO: 248598 - DNA, 25 bp, Artificial
  Probe
tcttggacataaatccaacttgagg

SEQ ID NO: 248599 - DNA, 25 bp, Artificial
  Probe
aatttactgtgtactttacagtcag

SEQ ID NO: 248600 - DNA, 25 bp, Artificial
  Probe
cccaggcgctgttgaagcatttggg

SEQ ID NO: 248601 - DNA, 25 bp, Artificial
  Probe
acagagactgtcaggccatgtgtgg

SEQ ID NO: 248602 - DNA, 25 bp, Artificial
  Probe
tacatatctccctggtaatgataga

SEQ ID NO: 248603 - DNA, 25 bp, Artificial
  Probe
tcatctgtgcctcagtttccccggg

SEQ ID NO: 248604 - DNA, 25 bp, Artificial
  Probe
tctgcctgttgttgcccagaaaatg

SEQ ID NO: 248605 - DNA, 25 bp, Artificial
  Probe
tgagtatcgaaaataccctgtttga

SEQ ID NO: 248606 - DNA, 25 bp, Artificial
  Probe
ctgttgttgcccagaaaatgggacg

SEQ ID NO: 248607 - DNA, 25 bp, Artificial
  Probe
caaagcttgcactgagtggtggtgt

SEQ ID NO: 248608 - DNA, 25 bp, Artificial
  Probe
tttttgtgcacaaaatcacctgtgt

SEQ ID NO: 248609 - DNA, 25 bp, Artificial
  Probe
tttttctcagcttaaacgtgtcttg

SEQ ID NO: 248610 - DNA, 25 bp, Artificial
  Probe
ttctgagtccccatgcgttgtctcc

SEQ ID NO: 248611 - DNA, 25 bp, Artificial
  Probe
gactgtcaggccatgtgtgggactt

SEQ ID NO: 248612 - DNA, 25 bp, Artificial
  Probe
ctccctggtaatgatagataagata

SEQ ID NO: 248613 - DNA, 25 bp, Artificial
  Probe
gttacctgaaaatacagttctgtaa

SEQ ID NO: 248614 - DNA, 25 bp, Artificial
  Probe
gtgcacctcatctgtgcctcagttt

SEQ ID NO: 248615 - DNA, 25 bp, Artificial
  Probe
tcttgtcagccagttaatctactag

SEQ ID NO: 248616 - DNA, 25 bp, Artificial
  Probe
tgttgcccagaaaatgggacggtga

SEQ ID NO: 248617 - DNA, 25 bp, Artificial
  Probe
atgtgtgggacttggcaaacaaagc

SEQ ID NO: 248618 - DNA, 25 bp, Artificial
  Probe
cttaaacgtgtcttgtaacatttga

SEQ ID NO: 248619 - DNA, 25 bp, Artificial
  Probe
gataagatagttaccacccaggcgc

SEQ ID NO: 248620 - DNA, 25 bp, Artificial
  Probe
tctccttctgagtccccatgcgttg

SEQ ID NO: 248621 - DNA, 25 bp, Artificial
  Probe
tcgaaaataccctgtttgaagcttt

SEQ ID NO: 248622 - DNA, 25 bp, Artificial
  Probe
caagtagtagcttgcttttgacttc

SEQ ID NO: 248623 - DNA, 25 bp, Artificial
  Probe
tagcactgaagtcagtgtttgtgca

SEQ ID NO: 248624 - DNA, 25 bp, Artificial
  Probe
tgcacctcatctgtgcctcagtttc

SEQ ID NO: 248625 - DNA, 25 bp, Artificial
  Probe
ccacccaggcgctgttgaagcattt

SEQ ID NO: 248626 - DNA, 25 bp, Artificial
  Probe
gcgttgtctccctctgcctgttgtt

SEQ ID NO: 248627 - DNA, 25 bp, Artificial
  Probe
ggcattcttgtcagccagttaatct

SEQ ID NO: 248628 - DNA, 25 bp, Artificial
  Probe
tgcaagtagtagcttgcttttgact

SEQ ID NO: 248629 - DNA, 25 bp, Artificial
  Probe
tactgtcttgtttaaaagtcttctg

SEQ ID NO: 248630 - DNA, 25 bp, Artificial
  Probe
gacttggcaaacaaagcttgcactg

SEQ ID NO: 248631 - DNA, 25 bp, Artificial
  Probe
gccacagttctccacagttcatgtt

SEQ ID NO: 248632 - DNA, 25 bp, Artificial
  Probe
aagccacagttctccacagttcatg

SEQ ID NO: 248633 - DNA, 25 bp, Artificial
  Probe
tagttaccacccaggcgctgttgaa

SEQ ID NO: 248634 - DNA, 25 bp, Artificial
  Probe
agcttttttccctttagcttgatgc

SEQ ID NO: 248635 - DNA, 25 bp, Artificial
  Probe
tccctctgcctgttgttgcccagaa

SEQ ID NO: 248636 - DNA, 25 bp, Artificial
  Probe
tgtgcctcagtttccccggggcatt

SEQ ID NO: 248637 - DNA, 25 bp, Artificial
  Probe
gcttttttccctttagcttgatgcc

SEQ ID NO: 248638 - DNA, 25 bp, Artificial
  Probe
ctcttaggcagtaaatgcaatggtt

SEQ ID NO: 248639 - DNA, 25 bp, Artificial
  Probe
tggcaatattactgtgccaaaaata

SEQ ID NO: 248640 - DNA, 25 bp, Artificial
  Probe
cacaaaatcacctgtgtagcactga

SEQ ID NO: 248641 - DNA, 25 bp, Artificial
  Probe
tttccccggggcattcttgtcagcc

SEQ ID NO: 248642 - DNA, 25 bp, Artificial
  Probe
aggagatgcttgttgcacagagact

SEQ ID NO: 248643 - DNA, 25 bp, Artificial
  Probe
tcaggccatgtgtgggacttggcaa

SEQ ID NO: 248644 - DNA, 25 bp, Artificial
  Probe
tgttacctgaaaatacagttctgta

SEQ ID NO: 248645 - DNA, 25 bp, Artificial
  Probe
atgagcggcagctccctcccccccc

SEQ ID NO: 248646 - DNA, 25 bp, Artificial
  Probe
gtagtgtatgactgtggctgtactg

SEQ ID NO: 248647 - DNA, 25 bp, Artificial
  Probe
catagttggcatatctttgtttgaa

SEQ ID NO: 248648 - DNA, 25 bp, Artificial
  Probe
ccccccccgctgtgggtagtgtatg

SEQ ID NO: 248649 - DNA, 25 bp, Artificial
  Probe
tggcatatctttgtttgaagtttgt

SEQ ID NO: 248650 - DNA, 25 bp, Artificial
  Probe
aacatagttggcatatctttgtttg

SEQ ID NO: 248651 - DNA, 25 bp, Artificial
  Probe
tctcctcatgagcggcagctccctc

SEQ ID NO: 248652 - DNA, 25 bp, Artificial
  Probe
cctcatgagcggcagctccctcccc

SEQ ID NO: 248653 - DNA, 25 bp, Artificial
  Probe
tgagcggcagctccctccccccccc

SEQ ID NO: 248654 - DNA, 25 bp, Artificial
  Probe
atggtgtgaccgtctcctcatgagc

SEQ ID NO: 248655 - DNA, 25 bp, Artificial
  Probe
tcatgagcggcagctccctcccccc

SEQ ID NO: 248656 - DNA, 25 bp, Artificial
  Probe
gtgtatgactgtggctgtactgtat

SEQ ID NO: 248657 - DNA, 25 bp, Artificial
  Probe
aaatggtgtgaccgtctcctcatga

SEQ ID NO: 248658 - DNA, 25 bp, Artificial
  Probe
aatggtgtgaccgtctcctcatgag

SEQ ID NO: 248659 - DNA, 25 bp, Artificial
  Probe
ctgtggctgtactgtatagtgaaca

SEQ ID NO: 248660 - DNA, 25 bp, Artificial
  Probe
ccgtctcctcatgagcggcagctcc

SEQ ID NO: 248661 - DNA, 25 bp, Artificial
  Probe
actgtggctgtactgtatagtgaac

SEQ ID NO: 248662 - DNA, 25 bp, Artificial
  Probe
atgactgtggctgtactgtatagtg

SEQ ID NO: 248663 - DNA, 25 bp, Artificial
  Probe
ttggcatatctttgtttgaagtttg

SEQ ID NO: 248664 - DNA, 25 bp, Artificial
  Probe
cccgctgtgggtagtgtatgactgt

SEQ ID NO: 248665 - DNA, 25 bp, Artificial
  Probe
gtatgactgtggctgtactgtatag

SEQ ID NO: 248666 - DNA, 25 bp, Artificial
  Probe
atagttggcatatctttgtttgaag

SEQ ID NO: 248667 - DNA, 25 bp, Artificial
  Probe
agttggcatatctttgtttgaagtt

SEQ ID NO: 248668 - DNA, 25 bp, Artificial
  Probe
gactgtggctgtactgtatagtgaa

SEQ ID NO: 248669 - DNA, 25 bp, Artificial
  Probe
tatgactgtggctgtactgtatagt

SEQ ID NO: 248670 - DNA, 25 bp, Artificial
  Probe
acatagttggcatatctttgtttga

SEQ ID NO: 248671 - DNA, 25 bp, Artificial
  Probe
cccccgctgtgggtagtgtatgact

SEQ ID NO: 248672 - DNA, 25 bp, Artificial
  Probe
tcctcatgagcggcagctccctccc

SEQ ID NO: 248673 - DNA, 25 bp, Artificial
  Probe
ccgctgtgggtagtgtatgactgtg

SEQ ID NO: 248674 - DNA, 25 bp, Artificial
  Probe
cgtctcctcatgagcggcagctccc

SEQ ID NO: 248675 - DNA, 25 bp, Artificial
  Probe
tgtatgactgtggctgtactgtata

SEQ ID NO: 248676 - DNA, 25 bp, Artificial
  Probe
ccccgctgtgggtagtgtatgactg

SEQ ID NO: 248677 - DNA, 25 bp, Artificial
  Probe
caaatggtgtgaccgtctcctcatg

SEQ ID NO: 248678 - DNA, 25 bp, Artificial
  Probe
tgtggctgtactgtatagtgaacat

SEQ ID NO: 248679 - DNA, 25 bp, Artificial
  Probe
gttggcatatctttgtttgaagttt

SEQ ID NO: 248680 - DNA, 25 bp, Artificial
  Probe
gtgtgaccgtctcctcatgagcggc

SEQ ID NO: 248681 - DNA, 25 bp, Artificial
  Probe
tagttggcatatctttgtttgaagt

SEQ ID NO: 248682 - DNA, 25 bp, Artificial
  Probe
tagtgtatgactgtggctgtactgt

SEQ ID NO: 248683 - DNA, 25 bp, Artificial
  Probe
ctcctcatgagcggcagctccctcc

SEQ ID NO: 248684 - DNA, 25 bp, Artificial
  Probe
tggtgtgaccgtctcctcatgagcg

SEQ ID NO: 248685 - DNA, 25 bp, Artificial
  Probe
tggctgtactgtatagtgaacatag

SEQ ID NO: 248686 - DNA, 25 bp, Artificial
  Probe
ccccccgctgtgggtagtgtatgac

SEQ ID NO: 248687 - DNA, 25 bp, Artificial
  Probe
cccccccgctgtgggtagtgtatga

SEQ ID NO: 248688 - DNA, 25 bp, Artificial
  Probe
tgactgtggctgtactgtatagtga

SEQ ID NO: 248689 - DNA, 25 bp, Artificial
  Probe
ggtgtgaccgtctcctcatgagcgg

SEQ ID NO: 248690 - DNA, 25 bp, Artificial
  Probe
ctcatgagcggcagctccctccccc

SEQ ID NO: 248691 - DNA, 25 bp, Artificial
  Probe
gtccagtgcgcgtttaggctgttga

SEQ ID NO: 248692 - DNA, 25 bp, Artificial
  Probe
tctgcagtgatctatttgctatttc

SEQ ID NO: 248693 - DNA, 25 bp, Artificial
  Probe
gggacagcctctgtccagtgcgcgt

SEQ ID NO: 248694 - DNA, 25 bp, Artificial
  Probe
taggttcttctgtcgcatttgaaaa

SEQ ID NO: 248695 - DNA, 25 bp, Artificial
  Probe
ggaaatgggacttgcttgagctgcc

SEQ ID NO: 248696 - DNA, 25 bp, Artificial
  Probe
ttcccaggtccctaggttcttctgt

SEQ ID NO: 248697 - DNA, 25 bp, Artificial
  Probe
tatagccaggtgtgcgtgtgtttcc

SEQ ID NO: 248698 - DNA, 25 bp, Artificial
  Probe
cagtgcgcgtttaggctgttgagtt

SEQ ID NO: 248699 - DNA, 25 bp, Artificial
  Probe
ttatagccaggtgtgcgtgtgtttc

SEQ ID NO: 248700 - DNA, 25 bp, Artificial
  Probe
cgggacagcctctgtccagtgcgcg

SEQ ID NO: 248701 - DNA, 25 bp, Artificial
  Probe
cgcgacagcgaaagccaatgttaat

SEQ ID NO: 248702 - DNA, 25 bp, Artificial
  Probe
gctgtcggagtttgtacaaaagcaa

SEQ ID NO: 248703 - DNA, 25 bp, Artificial
  Probe
ccaattggcgcgacagcgaaagcca

SEQ ID NO: 248704 - DNA, 25 bp, Artificial
  Probe
ctatttgctatttcgtgtacgcatt

SEQ ID NO: 248705 - DNA, 25 bp, Artificial
  Probe
cgtagctgtcggagtttgtacaaaa

SEQ ID NO: 248706 - DNA, 25 bp, Artificial
  Probe
gtgatttctgcagtgatctatttgc

SEQ ID NO: 248707 - DNA, 25 bp, Artificial
  Probe
caagaagtccggagcagcggaaatg

SEQ ID NO: 248708 - DNA, 25 bp, Artificial
  Probe
ttcttctgtcgcatttgaaaatgtt

SEQ ID NO: 248709 - DNA, 25 bp, Artificial
  Probe
cgtattgcttctattttcctctggc

SEQ ID NO: 248710 - DNA, 25 bp, Artificial
  Probe
tagctgtcggagtttgtacaaaagc

SEQ ID NO: 248711 - DNA, 25 bp, Artificial
  Probe
gccaggtgtgcgtgtgtttcccgcc

SEQ ID NO: 248712 - DNA, 25 bp, Artificial
  Probe
tacaaaagcaagaagtccggagcag

SEQ ID NO: 248713 - DNA, 25 bp, Artificial
  Probe
atcgctgtggtgtttgcggagaaac

SEQ ID NO: 248714 - DNA, 25 bp, Artificial
  Probe
gtgatctatttgctatttcgtgtac

SEQ ID NO: 248715 - DNA, 25 bp, Artificial
  Probe
ttctgtcgcatttgaaaatgttgtc

SEQ ID NO: 248716 - DNA, 25 bp, Artificial
  Probe
aatcgaggactgagtgaagttgacc

SEQ ID NO: 248717 - DNA, 25 bp, Artificial
  Probe
tttactcttaattcctaagtgagag

SEQ ID NO: 248718 - DNA, 25 bp, Artificial
  Probe
ggcgcgacagcgaaagccaatgtta

SEQ ID NO: 248719 - DNA, 25 bp, Artificial
  Probe
gttttactcttaattcctaagtgag

SEQ ID NO: 248720 - DNA, 25 bp, Artificial
  Probe
atttgctatttcgtgtacgcatttc

SEQ ID NO: 248721 - DNA, 25 bp, Artificial
  Probe
cagtgatctatttgctatttcgtgt

SEQ ID NO: 248722 - DNA, 25 bp, Artificial
  Probe
atttctgcagtgatctatttgctat

SEQ ID NO: 248723 - DNA, 25 bp, Artificial
  Probe
gaccgaaagttttgccgtagctgtc

SEQ ID NO: 248724 - DNA, 25 bp, Artificial
  Probe
tggccgcgggacagcctctgtccag

SEQ ID NO: 248725 - DNA, 25 bp, Artificial
  Probe
cgtgtacgcatttcgttcgggtggt

SEQ ID NO: 248726 - DNA, 25 bp, Artificial
  Probe
tctatttgctatttcgtgtacgcat

SEQ ID NO: 248727 - DNA, 25 bp, Artificial
  Probe
aaatgggacttgcttgagctgcccg

SEQ ID NO: 248728 - DNA, 25 bp, Artificial
  Probe
gctatttcgtgtacgcatttcgttc

SEQ ID NO: 248729 - DNA, 25 bp, Artificial
  Probe
ctgtcgcatttgaaaatgttgtctt

SEQ ID NO: 248730 - DNA, 25 bp, Artificial
  Probe
ttgccgtagctgtcggagtttgtac

SEQ ID NO: 248731 - DNA, 25 bp, Artificial
  Probe
aattggcgcgacagcgaaagccaat

SEQ ID NO: 248732 - DNA, 25 bp, Artificial
  Probe
ccaggtgtgcgtgtgtttcccgcct

SEQ ID NO: 248733 - DNA, 25 bp, Artificial
  Probe
gcctctgtccagtgcgcgtttaggc

SEQ ID NO: 248734 - DNA, 25 bp, Artificial
  Probe
aaagttttgccgtagctgtcggagt

SEQ ID NO: 248735 - DNA, 25 bp, Artificial
  Probe
tttcgtgtacgcatttcgttcgggt

SEQ ID NO: 248736 - DNA, 25 bp, Artificial
  Probe
tgcagtgatctatttgctatttcgt

SEQ ID NO: 248737 - DNA, 25 bp, Artificial
  Probe
gtctgggaaccctgcgctctcgagg

SEQ ID NO: 248738 - DNA, 25 bp, Artificial
  Probe
ggccggcaaacctgagagtgaccta

SEQ ID NO: 248739 - DNA, 25 bp, Artificial
  Probe
tgtgagtctgggaaccctgcgctct

SEQ ID NO: 248740 - DNA, 25 bp, Artificial
  Probe
ccggcaaacctgagagtgacctaaa

SEQ ID NO: 248741 - DNA, 25 bp, Artificial
  Probe
acttgattaacttctgccctgaatg

SEQ ID NO: 248742 - DNA, 25 bp, Artificial
  Probe
cctgaatgactgtgagcctggctgg

SEQ ID NO: 248743 - DNA, 25 bp, Artificial
  Probe
tggctggtccaagtgcaatatgtaa

SEQ ID NO: 248744 - DNA, 25 bp, Artificial
  Probe
taataagagcctatcaatgtgtatc

SEQ ID NO: 248745 - DNA, 25 bp, Artificial
  Probe
agctgactttgacagtcacatttat

SEQ ID NO: 248746 - DNA, 25 bp, Artificial
  Probe
tctgccctgaatgactgtgagcctg

SEQ ID NO: 248747 - DNA, 25 bp, Artificial
  Probe
tgccctgaatgactgtgagcctggc

SEQ ID NO: 248748 - DNA, 25 bp, Artificial
  Probe
ttctgccctgaatgactgtgagcct

SEQ ID NO: 248749 - DNA, 25 bp, Artificial
  Probe
tgagcctggctggtccaagtgcaat

SEQ ID NO: 248750 - DNA, 25 bp, Artificial
  Probe
agccgcttgtgtggaaccaccgcat

SEQ ID NO: 248751 - DNA, 25 bp, Artificial
  Probe
agagcctatcaatgtgtatcttttg

SEQ ID NO: 248752 - DNA, 25 bp, Artificial
  Probe
ttgtgtggaaccaccgcatcctgac

SEQ ID NO: 248753 - DNA, 25 bp, Artificial
  Probe
cctggctggtccaagtgcaatatgt

SEQ ID NO: 248754 - DNA, 25 bp, Artificial
  Probe
gaaccctgcgctctcgagggcagtg

SEQ ID NO: 248755 - DNA, 25 bp, Artificial
  Probe
gtgagtctgggaaccctgcgctctc

SEQ ID NO: 248756 - DNA, 25 bp, Artificial
  Probe
gcctggctggtccaagtgcaatatg

SEQ ID NO: 248757 - DNA, 25 bp, Artificial
  Probe
gctgactttgacagtcacatttata

SEQ ID NO: 248758 - DNA, 25 bp, Artificial
  Probe
tcatagaatagctgactttgacagt

SEQ ID NO: 248759 - DNA, 25 bp, Artificial
  Probe
aaacctgagagtgacctaaaggaag

SEQ ID NO: 248760 - DNA, 25 bp, Artificial
  Probe
agaatagctgactttgacagtcaca

SEQ ID NO: 248761 - DNA, 25 bp, Artificial
  Probe
acctgagagtgacctaaaggaagtg

SEQ ID NO: 248762 - DNA, 25 bp, Artificial
  Probe
gcaaacctgagagtgacctaaagga

SEQ ID NO: 248763 - DNA, 25 bp, Artificial
  Probe
ttgattaacttctgccctgaatgac

SEQ ID NO: 248764 - DNA, 25 bp, Artificial
  Probe
cttgattaacttctgccctgaatga

SEQ ID NO: 248765 - DNA, 25 bp, Artificial
  Probe
cgcttgtgtggaaccaccgcatcct

SEQ ID NO: 248766 - DNA, 25 bp, Artificial
  Probe
ggaaccctgcgctctcgagggcagt

SEQ ID NO: 248767 - DNA, 25 bp, Artificial
  Probe
tagaatagctgactttgacagtcac

SEQ ID NO: 248768 - DNA, 25 bp, Artificial
  Probe
tgtgagcctggctggtccaagtgca

SEQ ID NO: 248769 - DNA, 25 bp, Artificial
  Probe
gtggccggcaaacctgagagtgacc

SEQ ID NO: 248770 - DNA, 25 bp, Artificial
  Probe
taacttctgccctgaatgactgtga

SEQ ID NO: 248771 - DNA, 25 bp, Artificial
  Probe
ctggtccaagtgcaatatgtaatta

SEQ ID NO: 248772 - DNA, 25 bp, Artificial
  Probe
ataagagcctatcaatgtgtatctt

SEQ ID NO: 248773 - DNA, 25 bp, Artificial
  Probe
cggcaaacctgagagtgacctaaag

SEQ ID NO: 248774 - DNA, 25 bp, Artificial
  Probe
gcttgtgtggaaccaccgcatcctg

SEQ ID NO: 248775 - DNA, 25 bp, Artificial
  Probe
tgactgtgagcctggctggtccaag

SEQ ID NO: 248776 - DNA, 25 bp, Artificial
  Probe
gaatggttacattcacccagtcaac

SEQ ID NO: 248777 - DNA, 25 bp, Artificial
  Probe
tggccctttatggtggccggcaaac

SEQ ID NO: 248778 - DNA, 25 bp, Artificial
  Probe
tgaatgactgtgagcctggctggtc

SEQ ID NO: 248779 - DNA, 25 bp, Artificial
  Probe
ttggccctttatggtggccggcaaa

SEQ ID NO: 248780 - DNA, 25 bp, Artificial
  Probe
gccgcttgtgtggaaccaccgcatc

SEQ ID NO: 248781 - DNA, 25 bp, Artificial
  Probe
ggctggtccaagtgcaatatgtaat

SEQ ID NO: 248782 - DNA, 25 bp, Artificial
  Probe
ctgaatgactgtgagcctggctggt

SEQ ID NO: 248783 - DNA, 25 bp, Artificial
  Probe
ctggcctaggccacatagtaagcaa

SEQ ID NO: 248784 - DNA, 25 bp, Artificial
  Probe
gtctgaaactagtgtccattactac

SEQ ID NO: 248785 - DNA, 25 bp, Artificial
  Probe
gtgatatgggcctagggtgcacact

SEQ ID NO: 248786 - DNA, 25 bp, Artificial
  Probe
tagactggatggtgccttttgtcag

SEQ ID NO: 248787 - DNA, 25 bp, Artificial
  Probe
ggacagacacaatatccagacacac

SEQ ID NO: 248788 - DNA, 25 bp, Artificial
  Probe
tagctaaggtctgaaactagtgtcc

SEQ ID NO: 248789 - DNA, 25 bp, Artificial
  Probe
ctagtgtccattactacttagacag

SEQ ID NO: 248790 - DNA, 25 bp, Artificial
  Probe
gtgtaagtccagtgaagctgaagac

SEQ ID NO: 248791 - DNA, 25 bp, Artificial
  Probe
aatcttgctatttagttaagtcctg

SEQ ID NO: 248792 - DNA, 25 bp, Artificial
  Probe
gaaactagtgtccattactacttag

SEQ ID NO: 248793 - DNA, 25 bp, Artificial
  Probe
ctggatggtgccttttgtcagtgtt

SEQ ID NO: 248794 - DNA, 25 bp, Artificial
  Probe
tcctgaaactaatggagctgaagtt

SEQ ID NO: 248795 - DNA, 25 bp, Artificial
  Probe
aggtctgaaactagtgtccattact

SEQ ID NO: 248796 - DNA, 25 bp, Artificial
  Probe
cacagtttgattaacgctgtattaa

SEQ ID NO: 248797 - DNA, 25 bp, Artificial
  Probe
tagtgtccattactacttagacagt

SEQ ID NO: 248798 - DNA, 25 bp, Artificial
  Probe
gacacacacaaattacttggctttg

SEQ ID NO: 248799 - DNA, 25 bp, Artificial
  Probe
cctgaaactaatggagctgaagtta

SEQ ID NO: 248800 - DNA, 25 bp, Artificial
  Probe
atgggcctagggtgcacactaacta

SEQ ID NO: 248801 - DNA, 25 bp, Artificial
  Probe
agtccagtgaagctgaagactttta

SEQ ID NO: 248802 - DNA, 25 bp, Artificial
  Probe
tgatatgggcctagggtgcacacta

SEQ ID NO: 248803 - DNA, 25 bp, Artificial
  Probe
tcttgctatttagttaagtcctgaa

SEQ ID NO: 248804 - DNA, 25 bp, Artificial
  Probe
aggcagaaggatccacactggccta

SEQ ID NO: 248805 - DNA, 25 bp, Artificial
  Probe
acctgggctacagaataagccttga

SEQ ID NO: 248806 - DNA, 25 bp, Artificial
  Probe
tccacactggcctaggccacatagt

SEQ ID NO: 248807 - DNA, 25 bp, Artificial
  Probe
agaaggatccacactggcctaggcc

SEQ ID NO: 248808 - DNA, 25 bp, Artificial
  Probe
tgctatttagttaagtcctgaaact

SEQ ID NO: 248809 - DNA, 25 bp, Artificial
  Probe
agtcctgaaactaatggagctgaag

SEQ ID NO: 248810 - DNA, 25 bp, Artificial
  Probe
ttagctaaggtctgaaactagtgtc

SEQ ID NO: 248811 - DNA, 25 bp, Artificial
  Probe
acatctcagaatgtgtagactggat

SEQ ID NO: 248812 - DNA, 25 bp, Artificial
  Probe
aaggatccacactggcctaggccac

SEQ ID NO: 248813 - DNA, 25 bp, Artificial
  Probe
ggctacagaataagccttgagaaaa

SEQ ID NO: 248814 - DNA, 25 bp, Artificial
  Probe
cgcagtcttggtgatatgggcctag

SEQ ID NO: 248815 - DNA, 25 bp, Artificial
  Probe
caaagtttagctaaggtctgaaact

SEQ ID NO: 248816 - DNA, 25 bp, Artificial
  Probe
tgcacactaactagcggtagagagg

SEQ ID NO: 248817 - DNA, 25 bp, Artificial
  Probe
ggatgacatctcagaatgtgtagac

SEQ ID NO: 248818 - DNA, 25 bp, Artificial
  Probe
acacaaattacttggctttgctggt

SEQ ID NO: 248819 - DNA, 25 bp, Artificial
  Probe
tgtagactggatggtgccttttgtc

SEQ ID NO: 248820 - DNA, 25 bp, Artificial
  Probe
gtgtccattactacttagacagtta

SEQ ID NO: 248821 - DNA, 25 bp, Artificial
  Probe
ccacactggcctaggccacatagta

SEQ ID NO: 248822 - DNA, 25 bp, Artificial
  Probe
aacacagtttgattaacgctgtatt

SEQ ID NO: 248823 - DNA, 25 bp, Artificial
  Probe
agttaagtcctgaaactaatggagc

SEQ ID NO: 248824 - DNA, 25 bp, Artificial
  Probe
ttaacgcagtcttggtgatatgggc

SEQ ID NO: 248825 - DNA, 25 bp, Artificial
  Probe
cctagggtgcacactaactagcggt

SEQ ID NO: 248826 - DNA, 25 bp, Artificial
  Probe
tgtaagtccagtgaagctgaagact

SEQ ID NO: 248827 - DNA, 25 bp, Artificial
  Probe
gctatttagttaagtcctgaaacta

SEQ ID NO: 248828 - DNA, 25 bp, Artificial
  Probe
acacacaaattacttggctttgctg

SEQ ID NO: 248829 - DNA, 25 bp, Artificial
  Probe
gttggcagctggtcagagctcaata

SEQ ID NO: 248830 - DNA, 25 bp, Artificial
  Probe
tactccttaggctggatgaggctgt

SEQ ID NO: 248831 - DNA, 25 bp, Artificial
  Probe
tagacctcaaactggatggtctgtg

SEQ ID NO: 248832 - DNA, 25 bp, Artificial
  Probe
actccagaagatgaggttggcagct

SEQ ID NO: 248833 - DNA, 25 bp, Artificial
  Probe
ggctgttccttgtaatccctggtcc

SEQ ID NO: 248834 - DNA, 25 bp, Artificial
  Probe
ctgccagatcctagacctcaaactg

SEQ ID NO: 248835 - DNA, 25 bp, Artificial
  Probe
atcttcccttactccagaagatgag

SEQ ID NO: 248836 - DNA, 25 bp, Artificial
  Probe
tgctagcctgccagatcctagacct

SEQ ID NO: 248837 - DNA, 25 bp, Artificial
  Probe
attataaagcatactccttaggctg

SEQ ID NO: 248838 - DNA, 25 bp, Artificial
  Probe
tagcctgccagatcctagacctcaa

SEQ ID NO: 248839 - DNA, 25 bp, Artificial
  Probe
caaactggatggtctgtgtcattat

SEQ ID NO: 248840 - DNA, 25 bp, Artificial
  Probe
agcctgccagatcctagacctcaaa

SEQ ID NO: 248841 - DNA, 25 bp, Artificial
  Probe
ccccagtctgattcgccaggaatcg

SEQ ID NO: 248842 - DNA, 25 bp, Artificial
  Probe
atcgaatcaagagttcccaacactg

SEQ ID NO: 248843 - DNA, 25 bp, Artificial
  Probe
tgttccttgtaatccctggtcccct

SEQ ID NO: 248844 - DNA, 25 bp, Artificial
  Probe
tgattcgccaggaatcgaatcaaga

SEQ ID NO: 248845 - DNA, 25 bp, Artificial
  Probe
acctgccatgaaattcccttcttgg

SEQ ID NO: 248846 - DNA, 25 bp, Artificial
  Probe
atgcaactcttccttgtctactgag

SEQ ID NO: 248847 - DNA, 25 bp, Artificial
  Probe
ctgccatgaaattcccttcttggga

SEQ ID NO: 248848 - DNA, 25 bp, Artificial
  Probe
tcctagacctcaaactggatggtct

SEQ ID NO: 248849 - DNA, 25 bp, Artificial
  Probe
tgaaattcccttcttgggaggacaa

SEQ ID NO: 248850 - DNA, 25 bp, Artificial
  Probe
tggtctgtgtcattataaagcatac

SEQ ID NO: 248851 - DNA, 25 bp, Artificial
  Probe
ggaacctgccatgaaattcccttct

SEQ ID NO: 248852 - DNA, 25 bp, Artificial
  Probe
acaagaggaacctgccatgaaattc

SEQ ID NO: 248853 - DNA, 25 bp, Artificial
  Probe
catgaaattcccttcttgggaggac

SEQ ID NO: 248854 - DNA, 25 bp, Artificial
  Probe
taaagcatactccttaggctggatg

SEQ ID NO: 248855 - DNA, 25 bp, Artificial
  Probe
ccttaggctggatgaggctgttcct

SEQ ID NO: 248856 - DNA, 25 bp, Artificial
  Probe
tcaagagttcccaacactgtgttcc

SEQ ID NO: 248857 - DNA, 25 bp, Artificial
  Probe
ctccttaggctggatgaggctgttc

SEQ ID NO: 248858 - DNA, 25 bp, Artificial
  Probe
gctggatgaggctgttccttgtaat

SEQ ID NO: 248859 - DNA, 25 bp, Artificial
  Probe
ctttccccagtctgattcgccagga

SEQ ID NO: 248860 - DNA, 25 bp, Artificial
  Probe
cgaatcaagagttcccaacactgtg

SEQ ID NO: 248861 - DNA, 25 bp, Artificial
  Probe
ctttgtatttaacatcaatggactg

SEQ ID NO: 248862 - DNA, 25 bp, Artificial
  Probe
tcgccaggaatcgaatcaagagttc

SEQ ID NO: 248863 - DNA, 25 bp, Artificial
  Probe
acatcaatggactgagtcagattca

SEQ ID NO: 248864 - DNA, 25 bp, Artificial
  Probe
tataaagcatactccttaggctgga

SEQ ID NO: 248865 - DNA, 25 bp, Artificial
  Probe
tgtctactgagatgcccagctctcc

SEQ ID NO: 248866 - DNA, 25 bp, Artificial
  Probe
tgcctgctagcctgccagatcctag

SEQ ID NO: 248867 - DNA, 25 bp, Artificial
  Probe
atgaggctgttccttgtaatccctg

SEQ ID NO: 248868 - DNA, 25 bp, Artificial
  Probe
agcatactccttaggctggatgagg

SEQ ID NO: 248869 - DNA, 25 bp, Artificial
  Probe
gtatttaacatcaatggactgagtc

SEQ ID NO: 248870 - DNA, 25 bp, Artificial
  Probe
gcagctggtcagagctcaataattt

SEQ ID NO: 248871 - DNA, 25 bp, Artificial
  Probe
gaggaacctgccatgaaattccctt

SEQ ID NO: 248872 - DNA, 25 bp, Artificial
  Probe
gagttcccaacactgtgttcccaca

SEQ ID NO: 248873 - DNA, 25 bp, Artificial
  Probe
tgaacaagaggaacctgccatgaaa

SEQ ID NO: 248874 - DNA, 25 bp, Artificial
  Probe
aggttggcagctggtcagagctcaa

SEQ ID NO: 248875 - DNA, 25 bp, Artificial
  Probe
ttcttgagctggcaataatcaacat

SEQ ID NO: 248876 - DNA, 25 bp, Artificial
  Probe
aataatcaacatttggttcagatag

SEQ ID NO: 248877 - DNA, 25 bp, Artificial
  Probe
tggcaataatcaacatttggttcag

SEQ ID NO: 248878 - DNA, 25 bp, Artificial
  Probe
atcaacatttggttcagatagagag

SEQ ID NO: 248879 - DNA, 25 bp, Artificial
  Probe
tggtccacacctcactgtgttgtaa

SEQ ID NO: 248880 - DNA, 25 bp, Artificial
  Probe
taatcaacatttggttcagatagag

SEQ ID NO: 248881 - DNA, 25 bp, Artificial
  Probe
caataatcaacatttggttcagata

SEQ ID NO: 248882 - DNA, 25 bp, Artificial
  Probe
cacacctcactgtgttgtaacggat

SEQ ID NO: 248883 - DNA, 25 bp, Artificial
  Probe
acatttggttcagatagagagagag

SEQ ID NO: 248884 - DNA, 25 bp, Artificial
  Probe
ccacacctcactgtgttgtaacgga

SEQ ID NO: 248885 - DNA, 25 bp, Artificial
  Probe
ttggtccacacctcactgtgttgta

SEQ ID NO: 248886 - DNA, 25 bp, Artificial
  Probe
agattttggtccacacctcactgtg

SEQ ID NO: 248887 - DNA, 25 bp, Artificial
  Probe
catttggttcagatagagagagaga

SEQ ID NO: 248888 - DNA, 25 bp, Artificial
  Probe
aatcaacatttggttcagatagaga

SEQ ID NO: 248889 - DNA, 25 bp, Artificial
  Probe
catttatttctgcatatttaaaaaa

SEQ ID NO: 248890 - DNA, 25 bp, Artificial
  Probe
tttcttgagctggcaataatcaaca

SEQ ID NO: 248891 - DNA, 25 bp, Artificial
  Probe
tcttgagctggcaataatcaacatt

SEQ ID NO: 248892 - DNA, 25 bp, Artificial
  Probe
tgcatatttaaaaaacccatttagg

SEQ ID NO: 248893 - DNA, 25 bp, Artificial
  Probe
tattttttcatgaagattttggtcc

SEQ ID NO: 248894 - DNA, 25 bp, Artificial
  Probe
cagtttcttgagctggcaataatca

SEQ ID NO: 248895 - DNA, 25 bp, Artificial
  Probe
tgaagattttggtccacacctcact

SEQ ID NO: 248896 - DNA, 25 bp, Artificial
  Probe
atttctgcatatttaaaaaacccat

SEQ ID NO: 248897 - DNA, 25 bp, Artificial
  Probe
ccagtttcttgagctggcaataatc

SEQ ID NO: 248898 - DNA, 25 bp, Artificial
  Probe
atttggttcagatagagagagagag

SEQ ID NO: 248899 - DNA, 25 bp, Artificial
  Probe
tttggtccacacctcactgtgttgt

SEQ ID NO: 248900 - DNA, 25 bp, Artificial
  Probe
ctggcaataatcaacatttggttca

SEQ ID NO: 248901 - DNA, 25 bp, Artificial
  Probe
acacctcactgtgttgtaacggatt

SEQ ID NO: 248902 - DNA, 25 bp, Artificial
  Probe
ataatcaacatttggttcagataga

SEQ ID NO: 248903 - DNA, 25 bp, Artificial
  Probe
attattttttcatgaagattttggt

SEQ ID NO: 248904 - DNA, 25 bp, Artificial
  Probe
agtttcttgagctggcaataatcaa

SEQ ID NO: 248905 - DNA, 25 bp, Artificial
  Probe
aaattattttttcatgaagattttg

SEQ ID NO: 248906 - DNA, 25 bp, Artificial
  Probe
attttggtccacacctcactgtgtt

SEQ ID NO: 248907 - DNA, 25 bp, Artificial
  Probe
tccacacctcactgtgttgtaacgg

SEQ ID NO: 248908 - DNA, 25 bp, Artificial
  Probe
cacctcactgtgttgtaacggattc

SEQ ID NO: 248909 - DNA, 25 bp, Artificial
  Probe
tatttctgcatatttaaaaaaccca

SEQ ID NO: 248910 - DNA, 25 bp, Artificial
  Probe
aagattttggtccacacctcactgt

SEQ ID NO: 248911 - DNA, 25 bp, Artificial
  Probe
ttattttttcatgaagattttggtc

SEQ ID NO: 248912 - DNA, 25 bp, Artificial
  Probe
gcaataatcaacatttggttcagat

SEQ ID NO: 248913 - DNA, 25 bp, Artificial
  Probe
gattttggtccacacctcactgtgt

SEQ ID NO: 248914 - DNA, 25 bp, Artificial
  Probe
gtttcttgagctggcaataatcaac

SEQ ID NO: 248915 - DNA, 25 bp, Artificial
  Probe
aattattttttcatgaagattttgg

SEQ ID NO: 248916 - DNA, 25 bp, Artificial
  Probe
tcaacatttggttcagatagagaga

SEQ ID NO: 248917 - DNA, 25 bp, Artificial
  Probe
gtccacacctcactgtgttgtaacg

SEQ ID NO: 248918 - DNA, 25 bp, Artificial
  Probe
gaagattttggtccacacctcactg

SEQ ID NO: 248919 - DNA, 25 bp, Artificial
  Probe
caacatttggttcagatagagagag

SEQ ID NO: 248920 - DNA, 25 bp, Artificial
  Probe
ttttggtccacacctcactgtgttg

SEQ ID NO: 248921 - DNA, 25 bp, Artificial
  Probe
agcatccagccctggaacaggagga

SEQ ID NO: 248922 - DNA, 25 bp, Artificial
  Probe
aggatcctacccagttggcagaaat

SEQ ID NO: 248923 - DNA, 25 bp, Artificial
  Probe
gcgcagcaggatgactggagcacca

SEQ ID NO: 248924 - DNA, 25 bp, Artificial
  Probe
ggtgtcatctctcacctccaagctg

SEQ ID NO: 248925 - DNA, 25 bp, Artificial
  Probe
caccgggaaacacaggaagaagaca

SEQ ID NO: 248926 - DNA, 25 bp, Artificial
  Probe
aggtcttggtgctgccgtcccaacc

SEQ ID NO: 248927 - DNA, 25 bp, Artificial
  Probe
ctgcctgtgctctgcggccttactg

SEQ ID NO: 248928 - DNA, 25 bp, Artificial
  Probe
aaggacgtccatgcagcatccagcc

SEQ ID NO: 248929 - DNA, 25 bp, Artificial
  Probe
actggagcaccaagggcctaacctg

SEQ ID NO: 248930 - DNA, 25 bp, Artificial
  Probe
ctgaaaaatctgtgcgggaccaggc

SEQ ID NO: 248931 - DNA, 25 bp, Artificial
  Probe
aagccgagtctgtgttggcgcagca

SEQ ID NO: 248932 - DNA, 25 bp, Artificial
  Probe
cactgccgacagatgggatgatgag

SEQ ID NO: 248933 - DNA, 25 bp, Artificial
  Probe
cgcagcaggatgactggagcaccaa

SEQ ID NO: 248934 - DNA, 25 bp, Artificial
  Probe
acacctgtgccgtctgaggccgctg

SEQ ID NO: 248935 - DNA, 25 bp, Artificial
  Probe
ctgtgcgggaccaggcctttaagac

SEQ ID NO: 248936 - DNA, 25 bp, Artificial
  Probe
cagcttggagcaggaagccgagtct

SEQ ID NO: 248937 - DNA, 25 bp, Artificial
  Probe
ctgtgaccggggtgtcatctctcac

SEQ ID NO: 248938 - DNA, 25 bp, Artificial
  Probe
ccctggaacaggaggagctgcagcc

SEQ ID NO: 248939 - DNA, 25 bp, Artificial
  Probe
aagggcctaacctgcccaagcagta

SEQ ID NO: 248940 - DNA, 25 bp, Artificial
  Probe
acccagttggcagaaatagagaagg

SEQ ID NO: 248941 - DNA, 25 bp, Artificial
  Probe
atgactgtgcccataagatcctgcc

SEQ ID NO: 248942 - DNA, 25 bp, Artificial
  Probe
tctgaggccgctgtgccccagagac

SEQ ID NO: 248943 - DNA, 25 bp, Artificial
  Probe
gctgtgccccagagaccagtgccag

SEQ ID NO: 248944 - DNA, 25 bp, Artificial
  Probe
caggccaccgggaaacacaggaaga

SEQ ID NO: 248945 - DNA, 25 bp, Artificial
  Probe
tgtgaccggggtgtcatctctcacc

SEQ ID NO: 248946 - DNA, 25 bp, Artificial
  Probe
tgctctgcggccttactgtagaccc

SEQ ID NO: 248947 - DNA, 25 bp, Artificial
  Probe
agagggagaccctgctccagctcca

SEQ ID NO: 248948 - DNA, 25 bp, Artificial
  Probe
agacaaggacgctgcagaagacagc

SEQ ID NO: 248949 - DNA, 25 bp, Artificial
  Probe
agacagcgccactgccgacagatgg

SEQ ID NO: 248950 - DNA, 25 bp, Artificial
  Probe
gcgccactgccgacagatgggatga

SEQ ID NO: 248951 - DNA, 25 bp, Artificial
  Probe
aatctgtgcgggaccaggcctttaa

SEQ ID NO: 248952 - DNA, 25 bp, Artificial
  Probe
aattagagtctgtgtcggaggatcc

SEQ ID NO: 248953 - DNA, 25 bp, Artificial
  Probe
gggaccaggcctttaagaccattcg

SEQ ID NO: 248954 - DNA, 25 bp, Artificial
  Probe
caagggcctaacctgcccaagcagt

SEQ ID NO: 248955 - DNA, 25 bp, Artificial
  Probe
gtccaaattagagtctgtgtcggag

SEQ ID NO: 248956 - DNA, 25 bp, Artificial
  Probe
catgcagcatccagccctggaacag

SEQ ID NO: 248957 - DNA, 25 bp, Artificial
  Probe
ttggtgctgccgtcccaaccagctt

SEQ ID NO: 248958 - DNA, 25 bp, Artificial
  Probe
caggatgactggagcaccaagggcc

SEQ ID NO: 248959 - DNA, 25 bp, Artificial
  Probe
ctgtgccgtctgaggccgctgtgcc

SEQ ID NO: 248960 - DNA, 25 bp, Artificial
  Probe
gctgcagaagacagcgccactgccg

SEQ ID NO: 248961 - DNA, 25 bp, Artificial
  Probe
cggggtgtcatctctcacctccaag

SEQ ID NO: 248962 - DNA, 25 bp, Artificial
  Probe
agagaaggacgtccatgcagcatcc

SEQ ID NO: 248963 - DNA, 25 bp, Artificial
  Probe
gaagacagcgccactgccgacagat

SEQ ID NO: 248964 - DNA, 25 bp, Artificial
  Probe
cctaacctgcccaagcagtaggtct

SEQ ID NO: 248965 - DNA, 25 bp, Artificial
  Probe
gccgtcccaaccagctttggatgtg

SEQ ID NO: 248966 - DNA, 25 bp, Artificial
  Probe
aatggatgactgtgcccataagatc

SEQ ID NO: 248967 - DNA, 25 bp, Artificial
  Probe
tggcacacgccagtttgccaacgtc

SEQ ID NO: 248968 - DNA, 25 bp, Artificial
  Probe
gttccagtcctctctacgagtacat

SEQ ID NO: 248969 - DNA, 25 bp, Artificial
  Probe
actggggtatccagcgataactcac

SEQ ID NO: 248970 - DNA, 25 bp, Artificial
  Probe
tctttagtgcagatatgatgtgcac

SEQ ID NO: 248971 - DNA, 25 bp, Artificial
  Probe
aagatgctgcgaaaatcctggcacc

SEQ ID NO: 248972 - DNA, 25 bp, Artificial
  Probe
ggaacaaagacgtcgccaagagcgg

SEQ ID NO: 248973 - DNA, 25 bp, Artificial
  Probe
ctcacgtgtttctggttgtgggaaa

SEQ ID NO: 248974 - DNA, 25 bp, Artificial
  Probe
ctgcgaaaatcctggcaccagccaa

SEQ ID NO: 248975 - DNA, 25 bp, Artificial
  Probe
gaatgtgtcttttcttacagaatct

SEQ ID NO: 248976 - DNA, 25 bp, Artificial
  Probe
tcttcctcaggtagtccttttttgc

SEQ ID NO: 248977 - DNA, 25 bp, Artificial
  Probe
aggaacaaagacgtcgccaagagcg

SEQ ID NO: 248978 - DNA, 25 bp, Artificial
  Probe
ggcaccagccaaaccttcaagcaaa

SEQ ID NO: 248979 - DNA, 25 bp, Artificial
  Probe
agaatgtgtcttttcttacagaatc

SEQ ID NO: 248980 - DNA, 25 bp, Artificial
  Probe
tgccaacgtcccagtgcgttccagt

SEQ ID NO: 248981 - DNA, 25 bp, Artificial
  Probe
ggaaaactctctgatcttagaatgt

SEQ ID NO: 248982 - DNA, 25 bp, Artificial
  Probe
cagtgcgttccagtcctctctacga

SEQ ID NO: 248983 - DNA, 25 bp, Artificial
  Probe
aaactctctgatcttagaatgtgtc

SEQ ID NO: 248984 - DNA, 25 bp, Artificial
  Probe
gaacaagaactacgtcaagaagagg

SEQ ID NO: 248985 - DNA, 25 bp, Artificial
  Probe
caagaactacgtcaagaagaggaac

SEQ ID NO: 248986 - DNA, 25 bp, Artificial
  Probe
agcagatccgtcgtaggcaagagga

SEQ ID NO: 248987 - DNA, 25 bp, Artificial
  Probe
agagcagatccgtcgtaggcaagag

SEQ ID NO: 248988 - DNA, 25 bp, Artificial
  Probe
agtttgccaacgtcccagtgcgttc

SEQ ID NO: 248989 - DNA, 25 bp, Artificial
  Probe
ctctgatcttagaatgtgtcttttc

SEQ ID NO: 248990 - DNA, 25 bp, Artificial
  Probe
caagatgtcattgttctttagtgca

SEQ ID NO: 248991 - DNA, 25 bp, Artificial
  Probe
ctgtctttcattcttcctcaggtag

SEQ ID NO: 248992 - DNA, 25 bp, Artificial
  Probe
cccttaaaagatgctgcgaaaatcc

SEQ ID NO: 248993 - DNA, 25 bp, Artificial
  Probe
gccagtttgccaacgtcccagtgcg

SEQ ID NO: 248994 - DNA, 25 bp, Artificial
  Probe
tcttagaatgtgtcttttcttacag

SEQ ID NO: 248995 - DNA, 25 bp, Artificial
  Probe
ctagagcctggcacacgccagtttg

SEQ ID NO: 248996 - DNA, 25 bp, Artificial
  Probe
agtcctctctacgagtacatccaag

SEQ ID NO: 248997 - DNA, 25 bp, Artificial
  Probe
tgtttctggttgtgggaaaactctc

SEQ ID NO: 248998 - DNA, 25 bp, Artificial
  Probe
ccttttttgcaagatgtcattgttc

SEQ ID NO: 248999 - DNA, 25 bp, Artificial
  Probe
gtctttcattcttcctcaggtagtc

SEQ ID NO: 249000 - DNA, 25 bp, Artificial
  Probe
cagaggtctcaataccgcccttaaa

SEQ ID NO: 249001 - DNA, 25 bp, Artificial
  Probe
ctggcacacgccagtttgccaacgt

SEQ ID NO: 249002 - DNA, 25 bp, Artificial
  Probe
gaaacactggggtatccagcgataa

SEQ ID NO: 249003 - DNA, 25 bp, Artificial
  Probe
cagatccgtcgtaggcaagaggagc

SEQ ID NO: 249004 - DNA, 25 bp, Artificial
  Probe
tggcaccagccaaaccttcaagcaa

SEQ ID NO: 249005 - DNA, 25 bp, Artificial
  Probe
agcagaggtctcaataccgccctta

SEQ ID NO: 249006 - DNA, 25 bp, Artificial
  Probe
tccaagagcagaggtctcaataccg

SEQ ID NO: 249007 - DNA, 25 bp, Artificial
  Probe
agagcctggcacacgccagtttgcc

SEQ ID NO: 249008 - DNA, 25 bp, Artificial
  Probe
tgggaaaactctctgatcttagaat

SEQ ID NO: 249009 - DNA, 25 bp, Artificial
  Probe
tcaataccgcccttaaaagatgctg

SEQ ID NO: 249010 - DNA, 25 bp, Artificial
  Probe
aaattccaagaagagcagatccgtc

SEQ ID NO: 249011 - DNA, 25 bp, Artificial
  Probe
gggtatccagcgataactcacgtgt

SEQ ID NO: 249012 - DNA, 25 bp, Artificial
  Probe
aatcctagagcctggcacacgccag

SEQ ID NO: 249013 - DNA, 25 bp, Artificial
  Probe
ctgggacctctggagacttccccag

SEQ ID NO: 249014 - DNA, 25 bp, Artificial
  Probe
ggtcagcatcaaatccgaacgtctg

SEQ ID NO: 249015 - DNA, 25 bp, Artificial
  Probe
ccagtcactgggacctctggagact

SEQ ID NO: 249016 - DNA, 25 bp, Artificial
  Probe
gaacgtctgtctccagtcactggga

SEQ ID NO: 249017 - DNA, 25 bp, Artificial
  Probe
gcgagggcacccaaggtgcatcact

SEQ ID NO: 249018 - DNA, 25 bp, Artificial
  Probe
tctcagctttcctgcaagaccagga

SEQ ID NO: 249019 - DNA, 25 bp, Artificial
  Probe
gcgctctaagaggatcctctagcct

SEQ ID NO: 249020 - DNA, 25 bp, Artificial
  Probe
ggacctctggagacttccccaggtc

SEQ ID NO: 249021 - DNA, 25 bp, Artificial
  Probe
agccgctgtatcaataaagctcaag

SEQ ID NO: 249022 - DNA, 25 bp, Artificial
  Probe
ctgtatcaataaagctcaaggattt

SEQ ID NO: 249023 - DNA, 25 bp, Artificial
  Probe
gctggccacggtagcgctctaagag

SEQ ID NO: 249024 - DNA, 25 bp, Artificial
  Probe
acctccggtcagcatcaaatccgaa

SEQ ID NO: 249025 - DNA, 25 bp, Artificial
  Probe
ccagctgcccgcagtctgtgcgagg

SEQ ID NO: 249026 - DNA, 25 bp, Artificial
  Probe
gtctcagctttcctgcaagaccagg

SEQ ID NO: 249027 - DNA, 25 bp, Artificial
  Probe
gcatcaaatccgaacgtctgtctcc

SEQ ID NO: 249028 - DNA, 25 bp, Artificial
  Probe
gtcagcatcaaatccgaacgtctgt

SEQ ID NO: 249029 - DNA, 25 bp, Artificial
  Probe
atcaaatccgaacgtctgtctccag

SEQ ID NO: 249030 - DNA, 25 bp, Artificial
  Probe
cctggccaccaacgagggacgcggt

SEQ ID NO: 249031 - DNA, 25 bp, Artificial
  Probe
gactcccgacagctggccacggtag

SEQ ID NO: 249032 - DNA, 25 bp, Artificial
  Probe
cgctgtatcaataaagctcaaggat

SEQ ID NO: 249033 - DNA, 25 bp, Artificial
  Probe
agttcccgcagtctcagctttcctg

SEQ ID NO: 249034 - DNA, 25 bp, Artificial
  Probe
cctgggagccgctgtatcaataaag

SEQ ID NO: 249035 - DNA, 25 bp, Artificial
  Probe
cgacagctggccacggtagcgctct

SEQ ID NO: 249036 - DNA, 25 bp, Artificial
  Probe
ggtgcatcactaatgaggccctgcc

SEQ ID NO: 249037 - DNA, 25 bp, Artificial
  Probe
actgggacctctggagacttcccca

SEQ ID NO: 249038 - DNA, 25 bp, Artificial
  Probe
taagaggatcctctagcctccgcag

SEQ ID NO: 249039 - DNA, 25 bp, Artificial
  Probe
gagggcacccaaggtgcatcactaa

SEQ ID NO: 249040 - DNA, 25 bp, Artificial
  Probe
gagttcccgcagtctcagctttcct

SEQ ID NO: 249041 - DNA, 25 bp, Artificial
  Probe
aatccgaacgtctgtctccagtcac

SEQ ID NO: 249042 - DNA, 25 bp, Artificial
  Probe
cacggtagcgctctaagaggatcct

SEQ ID NO: 249043 - DNA, 25 bp, Artificial
  Probe
agaggatcctctagcctccgcagag

SEQ ID NO: 249044 - DNA, 25 bp, Artificial
  Probe
agctggccacggtagcgctctaaga

SEQ ID NO: 249045 - DNA, 25 bp, Artificial
  Probe
gggcacccaaggtgcatcactaatg

SEQ ID NO: 249046 - DNA, 25 bp, Artificial
  Probe
tcactgggacctctggagacttccc

SEQ ID NO: 249047 - DNA, 25 bp, Artificial
  Probe
tctgtctccagtcactgggacctct

SEQ ID NO: 249048 - DNA, 25 bp, Artificial
  Probe
gtctccagtcactgggacctctgga

SEQ ID NO: 249049 - DNA, 25 bp, Artificial
  Probe
gcagtctcagctttcctgcaagacc

SEQ ID NO: 249050 - DNA, 25 bp, Artificial
  Probe
ccacggtagcgctctaagaggatcc

SEQ ID NO: 249051 - DNA, 25 bp, Artificial
  Probe
ctccggtcagcatcaaatccgaacg

SEQ ID NO: 249052 - DNA, 25 bp, Artificial
  Probe
aggtgcatcactaatgaggccctgc

SEQ ID NO: 249053 - DNA, 25 bp, Artificial
  Probe
gagccgctgtatcaataaagctcaa

SEQ ID NO: 249054 - DNA, 25 bp, Artificial
  Probe
cagctgcccgcagtctgtgcgagga

SEQ ID NO: 249055 - DNA, 25 bp, Artificial
  Probe
ccgcagtctcagctttcctgcaaga

SEQ ID NO: 249056 - DNA, 25 bp, Artificial
  Probe
ctgtctccagtcactgggacctctg

SEQ ID NO: 249057 - DNA, 25 bp, Artificial
  Probe
ttgactcccgacagctggccacggt

SEQ ID NO: 249058 - DNA, 25 bp, Artificial
  Probe
cagagttcccgcagtctcagctttc

SEQ ID NO: 249059 - DNA, 25 bp, Artificial
  Probe
gatgaagcttcaacttgtgcccaaa

SEQ ID NO: 249060 - DNA, 25 bp, Artificial
  Probe
ggctgcccagtgttacatcaaatac

SEQ ID NO: 249061 - DNA, 25 bp, Artificial
  Probe
agcaggctgcccagtgttacatcaa

SEQ ID NO: 249062 - DNA, 25 bp, Artificial
  Probe
caacttgtgcccaaaaatgttgtgc

SEQ ID NO: 249063 - DNA, 25 bp, Artificial
  Probe
agtcggatctgacaagactccaggt

SEQ ID NO: 249064 - DNA, 25 bp, Artificial
  Probe
gacacgcctgttcagctttaacttc

SEQ ID NO: 249065 - DNA, 25 bp, Artificial
  Probe
gagagcacagccttccgctacctgg

SEQ ID NO: 249066 - DNA, 25 bp, Artificial
  Probe
atccaagatatctattcctgtgggg

SEQ ID NO: 249067 - DNA, 25 bp, Artificial
  Probe
tgcccaaaaatgttgtgcattcaat

SEQ ID NO: 249068 - DNA, 25 bp, Artificial
  Probe
ggatgaagcttcaacttgtgcccaa

SEQ ID NO: 249069 - DNA, 25 bp, Artificial
  Probe
ctacagctgaggaaccaaggggaga

SEQ ID NO: 249070 - DNA, 25 bp, Artificial
  Probe
ttgctccgccagatcctacagctga

SEQ ID NO: 249071 - DNA, 25 bp, Artificial
  Probe
agtggagcacttagaggagagcaca

SEQ ID NO: 249072 - DNA, 25 bp, Artificial
  Probe
tgcattcaatgatacccgggaagaa

SEQ ID NO: 249073 - DNA, 25 bp, Artificial
  Probe
gactgagtcagagcaggctgcccag

SEQ ID NO: 249074 - DNA, 25 bp, Artificial
  Probe
cttgtgcccaaaaatgttgtgcatt

SEQ ID NO: 249075 - DNA, 25 bp, Artificial
  Probe
ttgtgcattcaatgatacccgggaa

SEQ ID NO: 249076 - DNA, 25 bp, Artificial
  Probe
agctgaggaaccaaggggagacacc

SEQ ID NO: 249077 - DNA, 25 bp, Artificial
  Probe
gcaggctgcccagtgttacatcaaa

SEQ ID NO: 249078 - DNA, 25 bp, Artificial
  Probe
atgttgtgcattcaatgatacccgg

SEQ ID NO: 249079 - DNA, 25 bp, Artificial
  Probe
aagcttcaacttgtgcccaaaaatg

SEQ ID NO: 249080 - DNA, 25 bp, Artificial
  Probe
agcacttagaggagagcacagcctt

SEQ ID NO: 249081 - DNA, 25 bp, Artificial
  Probe
ctctgacacgcctgttcagctttaa

SEQ ID NO: 249082 - DNA, 25 bp, Artificial
  Probe
acagtggagcacttagaggagagca

SEQ ID NO: 249083 - DNA, 25 bp, Artificial
  Probe
acgtaaacacaacagtcggatctga

SEQ ID NO: 249084 - DNA, 25 bp, Artificial
  Probe
acagctgaggaaccaaggggagaca

SEQ ID NO: 249085 - DNA, 25 bp, Artificial
  Probe
agcttcaacttgtgcccaaaaatgt

SEQ ID NO: 249086 - DNA, 25 bp, Artificial
  Probe
atatctattcctgtggggaaacagt

SEQ ID NO: 249087 - DNA, 25 bp, Artificial
  Probe
ttccatacgtaaacacaacagtcgg

SEQ ID NO: 249088 - DNA, 25 bp, Artificial
  Probe
cacaacagtcggatctgacaagact

SEQ ID NO: 249089 - DNA, 25 bp, Artificial
  Probe
ctgagtcagagcaggctgcccagtg

SEQ ID NO: 249090 - DNA, 25 bp, Artificial
  Probe
ccaagatatctattcctgtggggaa

SEQ ID NO: 249091 - DNA, 25 bp, Artificial
  Probe
gctccgccagatcctacagctgagg

SEQ ID NO: 249092 - DNA, 25 bp, Artificial
  Probe
caagatatctattcctgtggggaaa

SEQ ID NO: 249093 - DNA, 25 bp, Artificial
  Probe
gatcctacagctgaggaaccaaggg

SEQ ID NO: 249094 - DNA, 25 bp, Artificial
  Probe
taaacacaacagtcggatctgacaa

SEQ ID NO: 249095 - DNA, 25 bp, Artificial
  Probe
attcctgtggggaaacagtggagca

SEQ ID NO: 249096 - DNA, 25 bp, Artificial
  Probe
gatatctattcctgtggggaaacag

SEQ ID NO: 249097 - DNA, 25 bp, Artificial
  Probe
gctgcccagtgttacatcaaataca

SEQ ID NO: 249098 - DNA, 25 bp, Artificial
  Probe
aacagtggagcacttagaggagagc

SEQ ID NO: 249099 - DNA, 25 bp, Artificial
  Probe
acatccaagatatctattcctgtgg

SEQ ID NO: 249100 - DNA, 25 bp, Artificial
  Probe
gctacctggcccagtactattttaa

SEQ ID NO: 249101 - DNA, 25 bp, Artificial
  Probe
cgccagatcctacagctgaggaacc

SEQ ID NO: 249102 - DNA, 25 bp, Artificial
  Probe
aaatgttgtgcattcaatgataccc

SEQ ID NO: 249103 - DNA, 25 bp, Artificial
  Probe
tcctgtggggaaacagtggagcact

SEQ ID NO: 249104 - DNA, 25 bp, Artificial
  Probe
gcattcaatgatacccgggaagaag

SEQ ID NO: 249105 - DNA, 25 bp, Artificial
  Probe
gcaagactccactttggatccagac

SEQ ID NO: 249106 - DNA, 25 bp, Artificial
  Probe
aactttgcagcaagactccactttg

SEQ ID NO: 249107 - DNA, 25 bp, Artificial
  Probe
agcaggaactttgcagcaagactcc

SEQ ID NO: 249108 - DNA, 25 bp, Artificial
  Probe
caagcaggaactttgcagcaagact

SEQ ID NO: 249109 - DNA, 25 bp, Artificial
  Probe
actttggatccagacaaagcaagcc

SEQ ID NO: 249110 - DNA, 25 bp, Artificial
  Probe
ctactatgattggggacaacaaaat

SEQ ID NO: 249111 - DNA, 25 bp, Artificial
  Probe
cactttggatccagacaaagcaagc

SEQ ID NO: 249112 - DNA, 25 bp, Artificial
  Probe
tccactttggatccagacaaagcaa

SEQ ID NO: 249113 - DNA, 25 bp, Artificial
  Probe
ggcacaagcaggaactttgcagcaa

SEQ ID NO: 249114 - DNA, 25 bp, Artificial
  Probe
caagactccactttggatccagaca

SEQ ID NO: 249115 - DNA, 25 bp, Artificial
  Probe
agcaagactccactttggatccaga

SEQ ID NO: 249116 - DNA, 25 bp, Artificial
  Probe
gactccactttggatccagacaaag

SEQ ID NO: 249117 - DNA, 25 bp, Artificial
  Probe
acaagcaggaactttgcagcaagac

SEQ ID NO: 249118 - DNA, 25 bp, Artificial
  Probe
ggaactttgcagcaagactccactt

SEQ ID NO: 249119 - DNA, 25 bp, Artificial
  Probe
aagactccactttggatccagacaa

SEQ ID NO: 249120 - DNA, 25 bp, Artificial
  Probe
ctccactttggatccagacaaagca

SEQ ID NO: 249121 - DNA, 25 bp, Artificial
  Probe
tggcacaagcaggaactttgcagca

SEQ ID NO: 249122 - DNA, 25 bp, Artificial
  Probe
actccactttggatccagacaaagc

SEQ ID NO: 249123 - DNA, 25 bp, Artificial
  Probe
aggaactttgcagcaagactccact

SEQ ID NO: 249124 - DNA, 25 bp, Artificial
  Probe
ctggcacaagcaggaactttgcagc

SEQ ID NO: 249125 - DNA, 25 bp, Artificial
  Probe
caggaactttgcagcaagactccac

SEQ ID NO: 249126 - DNA, 25 bp, Artificial
  Probe
gcacaagcaggaactttgcagcaag

SEQ ID NO: 249127 - DNA, 25 bp, Artificial
  Probe
ttgcagcaagactccactttggatc

SEQ ID NO: 249128 - DNA, 25 bp, Artificial
  Probe
cacaagcaggaactttgcagcaaga

SEQ ID NO: 249129 - DNA, 25 bp, Artificial
  Probe
tgcagcaagactccactttggatcc

SEQ ID NO: 249130 - DNA, 25 bp, Artificial
  Probe
ctttgcagcaagactccactttgga

SEQ ID NO: 249131 - DNA, 25 bp, Artificial
  Probe
tactatgattggggacaacaaaata

SEQ ID NO: 249132 - DNA, 25 bp, Artificial
  Probe
ccactttggatccagacaaagcaag

SEQ ID NO: 249133 - DNA, 25 bp, Artificial
  Probe
gcaggaactttgcagcaagactcca

SEQ ID NO: 249134 - DNA, 25 bp, Artificial
  Probe
gaactttgcagcaagactccacttt

SEQ ID NO: 249135 - DNA, 25 bp, Artificial
  Probe
aagcaggaactttgcagcaagactc

SEQ ID NO: 249136 - DNA, 25 bp, Artificial
  Probe
agactccactttggatccagacaaa

SEQ ID NO: 249137 - DNA, 25 bp, Artificial
  Probe
cagcaagactccactttggatccag

SEQ ID NO: 249138 - DNA, 25 bp, Artificial
  Probe
actttgcagcaagactccactttgg

SEQ ID NO: 249139 - DNA, 25 bp, Artificial
  Probe
gcagcaagactccactttggatcca

SEQ ID NO: 249140 - DNA, 25 bp, Artificial
  Probe
actactatgattggggacaacaaaa

SEQ ID NO: 249141 - DNA, 25 bp, Artificial
  Probe
tttgcagcaagactccactttggat

SEQ ID NO: 249142 - DNA, 25 bp, Artificial
  Probe
gaaagactagcatgcccaaggtcgc

SEQ ID NO: 249143 - DNA, 25 bp, Artificial
  Probe
cgcctgggtatttatgagtttcaaa

SEQ ID NO: 249144 - DNA, 25 bp, Artificial
  Probe
ggtcttcaccattgcatactgctca

SEQ ID NO: 249145 - DNA, 25 bp, Artificial
  Probe
cccaaggtcgcctgggtatttatga

SEQ ID NO: 249146 - DNA, 25 bp, Artificial
  Probe
gcaggggccactcaaggcctggctc

SEQ ID NO: 249147 - DNA, 25 bp, Artificial
  Probe
agtatgcccgcctggagaacggccg

SEQ ID NO: 249148 - DNA, 25 bp, Artificial
  Probe
tgatgaacagcgtgctggagaactt

SEQ ID NO: 249149 - DNA, 25 bp, Artificial
  Probe
gcatgcccaaggtcgcctgggtatt

SEQ ID NO: 249150 - DNA, 25 bp, Artificial
  Probe
acgagtcgggactcgcaggagaccc

SEQ ID NO: 249151 - DNA, 25 bp, Artificial
  Probe
ctggtcattgcttttgtctttgaag

SEQ ID NO: 249152 - DNA, 25 bp, Artificial
  Probe
accctgctggtcattgcttttgtct

SEQ ID NO: 249153 - DNA, 25 bp, Artificial
  Probe
ggagaccctgctggtcattgctttt

SEQ ID NO: 249154 - DNA, 25 bp, Artificial
  Probe
gctgtgacgggctatatcgtaaatg

SEQ ID NO: 249155 - DNA, 25 bp, Artificial
  Probe
gtatgcccgcctggagaacggccgc

SEQ ID NO: 249156 - DNA, 25 bp, Artificial
  Probe
tttaaaatccagctgtgacgggcta

SEQ ID NO: 249157 - DNA, 25 bp, Artificial
  Probe
aaagcaggggccactcaaggcctgg

SEQ ID NO: 249158 - DNA, 25 bp, Artificial
  Probe
caccagtgagcatggggcacagcat

SEQ ID NO: 249159 - DNA, 25 bp, Artificial
  Probe
catcctgcaggtggtcacgagtcgg

SEQ ID NO: 249160 - DNA, 25 bp, Artificial
  Probe
actagcatgcccaaggtcgcctggg

SEQ ID NO: 249161 - DNA, 25 bp, Artificial
  Probe
cacccatgtgcgagtacatgatcaa

SEQ ID NO: 249162 - DNA, 25 bp, Artificial
  Probe
ggtcgcctgggtatttatgagtttc

SEQ ID NO: 249163 - DNA, 25 bp, Artificial
  Probe
gctcacagtacagctcggcggacag

SEQ ID NO: 249164 - DNA, 25 bp, Artificial
  Probe
aggtgtgttccttcggcaagcaggt

SEQ ID NO: 249165 - DNA, 25 bp, Artificial
  Probe
cattgcttttgtctttgaagtgtcc

SEQ ID NO: 249166 - DNA, 25 bp, Artificial
  Probe
tggctctaaagcaggggccactcaa

SEQ ID NO: 249167 - DNA, 25 bp, Artificial
  Probe
aatccagctgtgacgggctatatcg

SEQ ID NO: 249168 - DNA, 25 bp, Artificial
  Probe
tcacgagtcgggactcgcaggagac

SEQ ID NO: 249169 - DNA, 25 bp, Artificial
  Probe
gctggtcattgcttttgtctttgaa

SEQ ID NO: 249170 - DNA, 25 bp, Artificial
  Probe
gagaacggccgctttgtgtaccgca

SEQ ID NO: 249171 - DNA, 25 bp, Artificial
  Probe
acgggctatatcgtaaatggctcta

SEQ ID NO: 249172 - DNA, 25 bp, Artificial
  Probe
acagctcggcggacagcatgaccat

SEQ ID NO: 249173 - DNA, 25 bp, Artificial
  Probe
tcgggactcgcaggagaccctgctg

SEQ ID NO: 249174 - DNA, 25 bp, Artificial
  Probe
acggccgctttgtgtaccgcatcca

SEQ ID NO: 249175 - DNA, 25 bp, Artificial
  Probe
cgagctccctgaaggtcttcaccat

SEQ ID NO: 249176 - DNA, 25 bp, Artificial
  Probe
tgttccttcggcaagcaggtggtag

SEQ ID NO: 249177 - DNA, 25 bp, Artificial
  Probe
ccatgtgcgagtacatgatcaactt

SEQ ID NO: 249178 - DNA, 25 bp, Artificial
  Probe
tctacaagcttgtgaaagactagca

SEQ ID NO: 249179 - DNA, 25 bp, Artificial
  Probe
cccgcctggagaacggccgctttgt

SEQ ID NO: 249180 - DNA, 25 bp, Artificial
  Probe
cttcggcaagcaggtggtagagaaa

SEQ ID NO: 249181 - DNA, 25 bp, Artificial
  Probe
atcgtaaatggctctaaagcagggg

SEQ ID NO: 249182 - DNA, 25 bp, Artificial
  Probe
tgagcatggggcacagcatcacgtc

SEQ ID NO: 249183 - DNA, 25 bp, Artificial
  Probe
gtcgggactcgcaggagaccctgct

SEQ ID NO: 249184 - DNA, 25 bp, Artificial
  Probe
ctatatcgtaaatggctctaaagca

SEQ ID NO: 249185 - DNA, 25 bp, Artificial
  Probe
aaggtgtgttccttcggcaagcagg

SEQ ID NO: 249186 - DNA, 25 bp, Artificial
  Probe
gtgaaagactagcatgcccaaggtc

SEQ ID NO: 249187 - DNA, 25 bp, Artificial
  Probe
acagcatgaccatcagtgtctccac

SEQ ID NO: 249188 - DNA, 25 bp, Artificial
  Probe
ccacaagggacagacagtgatggga

SEQ ID NO: 249189 - DNA, 25 bp, Artificial
  Probe
cttactctgaaatctggagatccca

SEQ ID NO: 249190 - DNA, 25 bp, Artificial
  Probe
agagctggtctgaatacattctggc

SEQ ID NO: 249191 - DNA, 25 bp, Artificial
  Probe
ccctgcacaaactgggaaaccctgt

SEQ ID NO: 249192 - DNA, 25 bp, Artificial
  Probe
ccccatcttactctgaaatctggag

SEQ ID NO: 249193 - DNA, 25 bp, Artificial
  Probe
tggcacccctgcacaaactgggaaa

SEQ ID NO: 249194 - DNA, 25 bp, Artificial
  Probe
agcctggacttccttaggtcccgag

SEQ ID NO: 249195 - DNA, 25 bp, Artificial
  Probe
tctgggctagcaagtcagtacccct

SEQ ID NO: 249196 - DNA, 25 bp, Artificial
  Probe
acccagagccagcatgggcaggaga

SEQ ID NO: 249197 - DNA, 25 bp, Artificial
  Probe
cttaaccctggctgctctgggctag

SEQ ID NO: 249198 - DNA, 25 bp, Artificial
  Probe
agccactcaaatactctgaagcatg

SEQ ID NO: 249199 - DNA, 25 bp, Artificial
  Probe
catccaatgatgcaaatatgttcag

SEQ ID NO: 249200 - DNA, 25 bp, Artificial
  Probe
ggcacccctgcacaaactgggaaac

SEQ ID NO: 249201 - DNA, 25 bp, Artificial
  Probe
tcccaggtgactagcctggacttcc

SEQ ID NO: 249202 - DNA, 25 bp, Artificial
  Probe
ctgaatacattctggccctagcatg

SEQ ID NO: 249203 - DNA, 25 bp, Artificial
  Probe
aggtgactagcctggacttccttag

SEQ ID NO: 249204 - DNA, 25 bp, Artificial
  Probe
gtgccacgtgactcccaggtgacta

SEQ ID NO: 249205 - DNA, 25 bp, Artificial
  Probe
atccaatgatgcaaatatgttcagc

SEQ ID NO: 249206 - DNA, 25 bp, Artificial
  Probe
gataaatctgacgacccagagccag

SEQ ID NO: 249207 - DNA, 25 bp, Artificial
  Probe
ggctagcaagtcagtacccctcatc

SEQ ID NO: 249208 - DNA, 25 bp, Artificial
  Probe
tactctgaagcatgcccttgtgtgg

SEQ ID NO: 249209 - DNA, 25 bp, Artificial
  Probe
tcaaatactctgaagcatgcccttg

SEQ ID NO: 249210 - DNA, 25 bp, Artificial
  Probe
cactcatatgcatgtacaagcaaag

SEQ ID NO: 249211 - DNA, 25 bp, Artificial
  Probe
tgaagcatgcccttgtgtgggagaa

SEQ ID NO: 249212 - DNA, 25 bp, Artificial
  Probe
ctgacgacccagagccagcatgggc

SEQ ID NO: 249213 - DNA, 25 bp, Artificial
  Probe
atctgacgacccagagccagcatgg

SEQ ID NO: 249214 - DNA, 25 bp, Artificial
  Probe
atatgttcagccattattccatggt

SEQ ID NO: 249215 - DNA, 25 bp, Artificial
  Probe
ttggggtgccacgtgactcccaggt

SEQ ID NO: 249216 - DNA, 25 bp, Artificial
  Probe
tgggaaaccctgtctgcccttcttt

SEQ ID NO: 249217 - DNA, 25 bp, Artificial
  Probe
cacccagaggaaggagagctggtct

SEQ ID NO: 249218 - DNA, 25 bp, Artificial
  Probe
ctggtctgaatacattctggcccta

SEQ ID NO: 249219 - DNA, 25 bp, Artificial
  Probe
gccactcaaatactctgaagcatgc

SEQ ID NO: 249220 - DNA, 25 bp, Artificial
  Probe
gctgctctgggctagcaagtcagta

SEQ ID NO: 249221 - DNA, 25 bp, Artificial
  Probe
ccctggctgctctgggctagcaagt

SEQ ID NO: 249222 - DNA, 25 bp, Artificial
  Probe
cgacccagagccagcatgggcagga

SEQ ID NO: 249223 - DNA, 25 bp, Artificial
  Probe
gccctagcatgatatttagccacta

SEQ ID NO: 249224 - DNA, 25 bp, Artificial
  Probe
tttccttaaccctggctgctctggg

SEQ ID NO: 249225 - DNA, 25 bp, Artificial
  Probe
actgggaaaccctgtctgcccttct

SEQ ID NO: 249226 - DNA, 25 bp, Artificial
  Probe
tggtgtgccacaagggacagacagt

SEQ ID NO: 249227 - DNA, 25 bp, Artificial
  Probe
tattccatggtgtgccacaagggac

SEQ ID NO: 249228 - DNA, 25 bp, Artificial
  Probe
acattctggccctagcatgatattt

SEQ ID NO: 249229 - DNA, 25 bp, Artificial
  Probe
cacgtgactcccaggtgactagcct

SEQ ID NO: 249230 - DNA, 25 bp, Artificial
  Probe
gatggtgtcagtcagtgaaataacc

SEQ ID NO: 249231 - DNA, 25 bp, Artificial
  Probe
gtacaagcaaagcttccttttgact

SEQ ID NO: 249232 - DNA, 25 bp, Artificial
  Probe
agcatgcccttgtgtgggagaagaa

SEQ ID NO: 249233 - DNA, 25 bp, Artificial
  Probe
atgaggctgaatccagctctgaatc

SEQ ID NO: 249234 - DNA, 25 bp, Artificial
  Probe
gttttgatcactttgtggatttaaa

SEQ ID NO: 249235 - DNA, 25 bp, Artificial
  Probe
ctctttgaatagcaattgcatagtt

SEQ ID NO: 249236 - DNA, 25 bp, Artificial
  Probe
aactctttgaatagcaattgcatag

SEQ ID NO: 249237 - DNA, 25 bp, Artificial
  Probe
tttgatcactttgtggatttaaatc

SEQ ID NO: 249238 - DNA, 25 bp, Artificial
  Probe
caatcttcgttttgatcactttgtg

SEQ ID NO: 249239 - DNA, 25 bp, Artificial
  Probe
cttgttgaatcattgaatggcagag

SEQ ID NO: 249240 - DNA, 25 bp, Artificial
  Probe
gtgataccttgttgaatcattgaat

SEQ ID NO: 249241 - DNA, 25 bp, Artificial
  Probe
tcttcgttttgatcactttgtggat

SEQ ID NO: 249242 - DNA, 25 bp, Artificial
  Probe
ctttggtaaactttggctcttatgg

SEQ ID NO: 249243 - DNA, 25 bp, Artificial
  Probe
tcaatcttcgttttgatcactttgt

SEQ ID NO: 249244 - DNA, 25 bp, Artificial
  Probe
ggtaaactttggctcttatggataa

SEQ ID NO: 249245 - DNA, 25 bp, Artificial
  Probe
tgaactaatcaatcttcgttttgat

SEQ ID NO: 249246 - DNA, 25 bp, Artificial
  Probe
ttggactttggtaaactttggctct

SEQ ID NO: 249247 - DNA, 25 bp, Artificial
  Probe
aatcttcgttttgatcactttgtgg

SEQ ID NO: 249248 - DNA, 25 bp, Artificial
  Probe
aggtgataccttgttgaatcattga

SEQ ID NO: 249249 - DNA, 25 bp, Artificial
  Probe
ttaattgattgtgtggagtaaatta

SEQ ID NO: 249250 - DNA, 25 bp, Artificial
  Probe
tattttgaaatttcaactctttgaa

SEQ ID NO: 249251 - DNA, 25 bp, Artificial
  Probe
tttggtaaactttggctcttatgga

SEQ ID NO: 249252 - DNA, 25 bp, Artificial
  Probe
ggtgaactaatcaatcttcgttttg

SEQ ID NO: 249253 - DNA, 25 bp, Artificial
  Probe
ttaggtgataccttgttgaatcatt

SEQ ID NO: 249254 - DNA, 25 bp, Artificial
  Probe
atagttaattgattgtgtggagtaa

SEQ ID NO: 249255 - DNA, 25 bp, Artificial
  Probe
gtgaactaatcaatcttcgttttga

SEQ ID NO: 249256 - DNA, 25 bp, Artificial
  Probe
agttaattgattgtgtggagtaaat

SEQ ID NO: 249257 - DNA, 25 bp, Artificial
  Probe
tactacatttgaagaaagggatttg

SEQ ID NO: 249258 - DNA, 25 bp, Artificial
  Probe
caactctttgaatagcaattgcata

SEQ ID NO: 249259 - DNA, 25 bp, Artificial
  Probe
agtttaggtgataccttgttgaatc

SEQ ID NO: 249260 - DNA, 25 bp, Artificial
  Probe
aaactttggctcttatggataaaat

SEQ ID NO: 249261 - DNA, 25 bp, Artificial
  Probe
gaaatttcaactctttgaatagcaa

SEQ ID NO: 249262 - DNA, 25 bp, Artificial
  Probe
taattgattgtgtggagtaaattag

SEQ ID NO: 249263 - DNA, 25 bp, Artificial
  Probe
ttgatcactttgtggatttaaatca

SEQ ID NO: 249264 - DNA, 25 bp, Artificial
  Probe
tttcaactctttgaatagcaattgc

SEQ ID NO: 249265 - DNA, 25 bp, Artificial
  Probe
tttattttcagtttaggtgatacct

SEQ ID NO: 249266 - DNA, 25 bp, Artificial
  Probe
actttggctcttatggataaaatat

SEQ ID NO: 249267 - DNA, 25 bp, Artificial
  Probe
attttcagtttaggtgataccttgt

SEQ ID NO: 249268 - DNA, 25 bp, Artificial
  Probe
aatttcaactctttgaatagcaatt

SEQ ID NO: 249269 - DNA, 25 bp, Artificial
  Probe
ttattttcagtttaggtgatacctt

SEQ ID NO: 249270 - DNA, 25 bp, Artificial
  Probe
ttcgttttgatcactttgtggattt

SEQ ID NO: 249271 - DNA, 25 bp, Artificial
  Probe
ttgaatcattgaatggcagagcact

SEQ ID NO: 249272 - DNA, 25 bp, Artificial
  Probe
actctttgaatagcaattgcatagt

SEQ ID NO: 249273 - DNA, 25 bp, Artificial
  Probe
ttttcagtttaggtgataccttgtt

SEQ ID NO: 249274 - DNA, 25 bp, Artificial
  Probe
actttggtaaactttggctcttatg

SEQ ID NO: 249275 - DNA, 25 bp, Artificial
  Probe
atcaatcttcgttttgatcactttg

SEQ ID NO: 249276 - DNA, 25 bp, Artificial
  Probe
atcttcgttttgatcactttgtgga

SEQ ID NO: 249277 - DNA, 25 bp, Artificial
  Probe
tcagtttaggtgataccttgttgaa

SEQ ID NO: 249278 - DNA, 25 bp, Artificial
  Probe
tggtaaactttggctcttatggata

SEQ ID NO: 249279 - DNA, 25 bp, Artificial
  Probe
taaactttggctcttatggataaaa

SEQ ID NO: 249280 - DNA, 25 bp, Artificial
  Probe
tgctttcacacgtgtctagcactcc

SEQ ID NO: 249281 - DNA, 25 bp, Artificial
  Probe
aatggaagcctctccggtcacatgg

SEQ ID NO: 249282 - DNA, 25 bp, Artificial
  Probe
atggctgacctactgtcatgcatca

SEQ ID NO: 249283 - DNA, 25 bp, Artificial
  Probe
cagctgcagaacttgagcagtggag

SEQ ID NO: 249284 - DNA, 25 bp, Artificial
  Probe
cggtcacatggctgacctactgtca

SEQ ID NO: 249285 - DNA, 25 bp, Artificial
  Probe
ggaccagctttgctcagagtgacgt

SEQ ID NO: 249286 - DNA, 25 bp, Artificial
  Probe
tgacctactgtcatgcatcaggctg

SEQ ID NO: 249287 - DNA, 25 bp, Artificial
  Probe
tggaagacactgtgaacttgtcagc

SEQ ID NO: 249288 - DNA, 25 bp, Artificial
  Probe
cagaacttgagcagtggagacaatg

SEQ ID NO: 249289 - DNA, 25 bp, Artificial
  Probe
tgttctttcctgtcccattatggag

SEQ ID NO: 249290 - DNA, 25 bp, Artificial
  Probe
gtccttccagtctcctctgtgtgtc

SEQ ID NO: 249291 - DNA, 25 bp, Artificial
  Probe
gtcacatggctgacctactgtcatg

SEQ ID NO: 249292 - DNA, 25 bp, Artificial
  Probe
acttgtcagctgcagaacttgagca

SEQ ID NO: 249293 - DNA, 25 bp, Artificial
  Probe
tgtgaacttgtcagctgcagaactt

SEQ ID NO: 249294 - DNA, 25 bp, Artificial
  Probe
tgaacttgtcagctgcagaacttga

SEQ ID NO: 249295 - DNA, 25 bp, Artificial
  Probe
accagctttgctcagagtgacgtct

SEQ ID NO: 249296 - DNA, 25 bp, Artificial
  Probe
gctcagagtgacgtctgcagtgacc

SEQ ID NO: 249297 - DNA, 25 bp, Artificial
  Probe
gctgcagaacttgagcagtggagac

SEQ ID NO: 249298 - DNA, 25 bp, Artificial
  Probe
gcccgtgtggtgtgagatacctttc

SEQ ID NO: 249299 - DNA, 25 bp, Artificial
  Probe
ctttctgcggaccagctttgctcag

SEQ ID NO: 249300 - DNA, 25 bp, Artificial
  Probe
cctctgcccgtgtggtgtgagatac

SEQ ID NO: 249301 - DNA, 25 bp, Artificial
  Probe
gaagacactgtgaacttgtcagctg

SEQ ID NO: 249302 - DNA, 25 bp, Artificial
  Probe
actgtgaacttgtcagctgcagaac

SEQ ID NO: 249303 - DNA, 25 bp, Artificial
  Probe
gatacctttcttgttatgtatgtac

SEQ ID NO: 249304 - DNA, 25 bp, Artificial
  Probe
tgaatgtgtgtgttttcgcaccacc

SEQ ID NO: 249305 - DNA, 25 bp, Artificial
  Probe
cactttctgcggaccagctttgctc

SEQ ID NO: 249306 - DNA, 25 bp, Artificial
  Probe
gtgttctttcctgtcccattatgga

SEQ ID NO: 249307 - DNA, 25 bp, Artificial
  Probe
aagcctctccggtcacatggctgac

SEQ ID NO: 249308 - DNA, 25 bp, Artificial
  Probe
gtcagctgcagaacttgagcagtgg

SEQ ID NO: 249309 - DNA, 25 bp, Artificial
  Probe
agctttgctcagagtgacgtctgca

SEQ ID NO: 249310 - DNA, 25 bp, Artificial
  Probe
gtgtgttctttcctgtcccattatg

SEQ ID NO: 249311 - DNA, 25 bp, Artificial
  Probe
cctactgtcatgcatcaggctgctg

SEQ ID NO: 249312 - DNA, 25 bp, Artificial
  Probe
gctttcactttctgcggaccagctt

SEQ ID NO: 249313 - DNA, 25 bp, Artificial
  Probe
cgtctgcagtgacctctgcccgtgt

SEQ ID NO: 249314 - DNA, 25 bp, Artificial
  Probe
ctgtccttccagtctcctctgtgtg

SEQ ID NO: 249315 - DNA, 25 bp, Artificial
  Probe
gacctctgcccgtgtggtgtgagat

SEQ ID NO: 249316 - DNA, 25 bp, Artificial
  Probe
tctccggtcacatggctgacctact

SEQ ID NO: 249317 - DNA, 25 bp, Artificial
  Probe
acaatatcacagacttaacggtggg

SEQ ID NO: 249318 - DNA, 25 bp, Artificial
  Probe
agtctcctctgtgtgtctttgtgtg

SEQ ID NO: 249319 - DNA, 25 bp, Artificial
  Probe
agtctgtccttccagtctcctctgt

SEQ ID NO: 249320 - DNA, 25 bp, Artificial
  Probe
gagtgacgtctgcagtgacctctgc

SEQ ID NO: 249321 - DNA, 25 bp, Artificial
  Probe
ttgtcagctgcagaacttgagcagt

SEQ ID NO: 249322 - DNA, 25 bp, Artificial
  Probe
gtgacgctttcactttctgcggacc

SEQ ID NO: 249323 - DNA, 25 bp, Artificial
  Probe
tgacgctttcactttctgcggacca

SEQ ID NO: 249324 - DNA, 25 bp, Artificial
  Probe
acaatggaagcctctccggtcacat

SEQ ID NO: 249325 - DNA, 25 bp, Artificial
  Probe
acctactgtcatgcatcaggctgct

SEQ ID NO: 249326 - DNA, 25 bp, Artificial
  Probe
tctgccaaacctttcatcgagacag

SEQ ID NO: 249327 - DNA, 25 bp, Artificial
  Probe
cgctatgaggtctggcggtccaatc

SEQ ID NO: 249328 - DNA, 25 bp, Artificial
  Probe
gagacacttactgctattctcagcc

SEQ ID NO: 249329 - DNA, 25 bp, Artificial
  Probe
gaagccacgccgagaatctgcagcg

SEQ ID NO: 249330 - DNA, 25 bp, Artificial
  Probe
agatggcaggccaccttggacaaac

SEQ ID NO: 249331 - DNA, 25 bp, Artificial
  Probe
taaccagaagccacgccgagaatct

SEQ ID NO: 249332 - DNA, 25 bp, Artificial
  Probe
gccaaacctttcatcgagacagtcc

SEQ ID NO: 249333 - DNA, 25 bp, Artificial
  Probe
gaacccaagcccaattctgaactgt

SEQ ID NO: 249334 - DNA, 25 bp, Artificial
  Probe
caggggcactggatatgacgagaaa

SEQ ID NO: 249335 - DNA, 25 bp, Artificial
  Probe
tccataaccagaagccacgccgaga

SEQ ID NO: 249336 - DNA, 25 bp, Artificial
  Probe
tcacgagtcagtggaagaactccgg

SEQ ID NO: 249337 - DNA, 25 bp, Artificial
  Probe
agatgggaggcatccccaggacttt

SEQ ID NO: 249338 - DNA, 25 bp, Artificial
  Probe
tgtgccttatgctggcagatgagtc

SEQ ID NO: 249339 - DNA, 25 bp, Artificial
  Probe
agaaggcttggaagcttctggctca

SEQ ID NO: 249340 - DNA, 25 bp, Artificial
  Probe
aatcccaatgcctctaaagaggaaa

SEQ ID NO: 249341 - DNA, 25 bp, Artificial
  Probe
tcactgtgacattggaaatgcagct

SEQ ID NO: 249342 - DNA, 25 bp, Artificial
  Probe
aggtctggcggtccaatccctatca

SEQ ID NO: 249343 - DNA, 25 bp, Artificial
  Probe
ctataagattttccagctggagata

SEQ ID NO: 249344 - DNA, 25 bp, Artificial
  Probe
ctttgtgatgccacccgtctggaag

SEQ ID NO: 249345 - DNA, 25 bp, Artificial
  Probe
ccgagaatctgcagcgctatgaggt

SEQ ID NO: 249346 - DNA, 25 bp, Artificial
  Probe
atctgcagcgctatgaggtctggcg

SEQ ID NO: 249347 - DNA, 25 bp, Artificial
  Probe
cgagacagtcccttccatagatgcg

SEQ ID NO: 249348 - DNA, 25 bp, Artificial
  Probe
ggaagcctcccaaaatcttgtcttc

SEQ ID NO: 249349 - DNA, 25 bp, Artificial
  Probe
aaatttatcttcaggggcactggat

SEQ ID NO: 249350 - DNA, 25 bp, Artificial
  Probe
cccttccatagatgcgcttcactgt

SEQ ID NO: 249351 - DNA, 25 bp, Artificial
  Probe
tggaagcctcccaaaatcttgtctt

SEQ ID NO: 249352 - DNA, 25 bp, Artificial
  Probe
gtgttgcaagccactgtgccttatg

SEQ ID NO: 249353 - DNA, 25 bp, Artificial
  Probe
tgaaaggagtctctgccaaaccttt

SEQ ID NO: 249354 - DNA, 25 bp, Artificial
  Probe
aatctgcagcgctatgaggtctggc

SEQ ID NO: 249355 - DNA, 25 bp, Artificial
  Probe
ccatagatgcgcttcactgtgacat

SEQ ID NO: 249356 - DNA, 25 bp, Artificial
  Probe
ttgaggaacccaagcccaattctga

SEQ ID NO: 249357 - DNA, 25 bp, Artificial
  Probe
acgagacacttactgctattctcag

SEQ ID NO: 249358 - DNA, 25 bp, Artificial
  Probe
ttcatcgagacagtcccttccatag

SEQ ID NO: 249359 - DNA, 25 bp, Artificial
  Probe
caatgcctctaaagaggaaaggaag

SEQ ID NO: 249360 - DNA, 25 bp, Artificial
  Probe
agtctctgccaaacctttcatcgag

SEQ ID NO: 249361 - DNA, 25 bp, Artificial
  Probe
tacactttgtgatgccacccgtctg

SEQ ID NO: 249362 - DNA, 25 bp, Artificial
  Probe
cggtccaatccctatcacgagtcag

SEQ ID NO: 249363 - DNA, 25 bp, Artificial
  Probe
cttggaagcttctggctcagtctac

SEQ ID NO: 249364 - DNA, 25 bp, Artificial
  Probe
aattctataagattttccagctgga

SEQ ID NO: 249365 - DNA, 25 bp, Artificial
  Probe
cagcgctatgaggtctggcggtcca

SEQ ID NO: 249366 - DNA, 25 bp, Artificial
  Probe
ggcagatgagtctgaccacgagaca

SEQ ID NO: 249367 - DNA, 25 bp, Artificial
  Probe
cgtctggaagcctcccaaaatcttg

SEQ ID NO: 249368 - DNA, 25 bp, Artificial
  Probe
ggagtctctgccaaacctttcatcg

SEQ ID NO: 249369 - DNA, 25 bp, Artificial
  Probe
atcttcaggggcactggatatgacg

SEQ ID NO: 249370 - DNA, 25 bp, Artificial
  Probe
tgcagctgaattctataagattttc

SEQ ID NO: 249371 - DNA, 25 bp, Artificial
  Probe
atgctggcagatgagtctgaccacg

SEQ ID NO: 249372 - DNA, 25 bp, Artificial
  Probe
ttaacagacccctgactatgaagaa

SEQ ID NO: 249373 - DNA, 25 bp, Artificial
  Probe
aaaccgtaagatgtctagcaaatcg

SEQ ID NO: 249374 - DNA, 25 bp, Artificial
  Probe
aagtcgaggcccaaggcacgatcca

SEQ ID NO: 249375 - DNA, 25 bp, Artificial
  Probe
caagcccaagcgaaggctgtcagca

SEQ ID NO: 249376 - DNA, 25 bp, Artificial
  Probe
aagcccaagcgaaggctgtcagcag

SEQ ID NO: 249377 - DNA, 25 bp, Artificial
  Probe
tgcctgtgggctgtactacaaactc

SEQ ID NO: 249378 - DNA, 25 bp, Artificial
  Probe
aggagggcatccagacccgaaaccg

SEQ ID NO: 249379 - DNA, 25 bp, Artificial
  Probe
tgcatgatgcgctggaggacttccc

SEQ ID NO: 249380 - DNA, 25 bp, Artificial
  Probe
tccagcatggtcaccgccatgggtt

SEQ ID NO: 249381 - DNA, 25 bp, Artificial
  Probe
gggctgtactacaaactccacaata

SEQ ID NO: 249382 - DNA, 25 bp, Artificial
  Probe
cttatcaagcccaagcgaaggctgt

SEQ ID NO: 249383 - DNA, 25 bp, Artificial
  Probe
acttcctgtgcgaactgtcagacca

SEQ ID NO: 249384 - DNA, 25 bp, Artificial
  Probe
gaggacttccccaagagcagctcct

SEQ ID NO: 249385 - DNA, 25 bp, Artificial
  Probe
gctgctctctccagacacatgtcgt

SEQ ID NO: 249386 - DNA, 25 bp, Artificial
  Probe
aggacttccccaagagcagctcctt

SEQ ID NO: 249387 - DNA, 25 bp, Artificial
  Probe
ggccccttatcaagcccaagcgaag

SEQ ID NO: 249388 - DNA, 25 bp, Artificial
  Probe
atgatgcgctggaggacttccccaa

SEQ ID NO: 249389 - DNA, 25 bp, Artificial
  Probe
taacagacccctgactatgaagaag

SEQ ID NO: 249390 - DNA, 25 bp, Artificial
  Probe
atgtctagcaaatcgaaaaagtgca

SEQ ID NO: 249391 - DNA, 25 bp, Artificial
  Probe
atccagcacagaaggcagggagtgt

SEQ ID NO: 249392 - DNA, 25 bp, Artificial
  Probe
cgatccagcacagaaggcagggagt

SEQ ID NO: 249393 - DNA, 25 bp, Artificial
  Probe
ctgtgggctgtactacaaactccac

SEQ ID NO: 249394 - DNA, 25 bp, Artificial
  Probe
ccctgactatgaagaaggagggcat

SEQ ID NO: 249395 - DNA, 25 bp, Artificial
  Probe
tctaccataaaatgaatgggcagaa

SEQ ID NO: 249396 - DNA, 25 bp, Artificial
  Probe
ccccgtctgcaatgcctgtgggctg

SEQ ID NO: 249397 - DNA, 25 bp, Artificial
  Probe
tgggctgtactacaaactccacaat

SEQ ID NO: 249398 - DNA, 25 bp, Artificial
  Probe
agacacatgtcgtccctgagccaca

SEQ ID NO: 249399 - DNA, 25 bp, Artificial
  Probe
accgtaagatgtctagcaaatcgaa

SEQ ID NO: 249400 - DNA, 25 bp, Artificial
  Probe
ggttcggatgtaagtcgaggcccaa

SEQ ID NO: 249401 - DNA, 25 bp, Artificial
  Probe
agggacttcctgtgcgaactgtcag

SEQ ID NO: 249402 - DNA, 25 bp, Artificial
  Probe
gacccgaaaccgtaagatgtctagc

SEQ ID NO: 249403 - DNA, 25 bp, Artificial
  Probe
cggactctaccataaaatgaatggg

SEQ ID NO: 249404 - DNA, 25 bp, Artificial
  Probe
ttatcaagcccaagcgaaggctgtc

SEQ ID NO: 249405 - DNA, 25 bp, Artificial
  Probe
gaacgctaacggagaccccgtctgc

SEQ ID NO: 249406 - DNA, 25 bp, Artificial
  Probe
agtcgaggcccaaggcacgatccag

SEQ ID NO: 249407 - DNA, 25 bp, Artificial
  Probe
gaggcccaaggcacgatccagcaca

SEQ ID NO: 249408 - DNA, 25 bp, Artificial
  Probe
aacgctaacggagaccccgtctgca

SEQ ID NO: 249409 - DNA, 25 bp, Artificial
  Probe
ccaagcgaaggctgtcagcagcgag

SEQ ID NO: 249410 - DNA, 25 bp, Artificial
  Probe
aagagcagctccttcaacccggctg

SEQ ID NO: 249411 - DNA, 25 bp, Artificial
  Probe
catccagacccgaaaccgtaagatg

SEQ ID NO: 249412 - DNA, 25 bp, Artificial
  Probe
cgaaaccgtaagatgtctagcaaat

SEQ ID NO: 249413 - DNA, 25 bp, Artificial
  Probe
catccagcatggtcaccgccatggg

SEQ ID NO: 249414 - DNA, 25 bp, Artificial
  Probe
acgctaacggagaccccgtctgcaa

SEQ ID NO: 249415 - DNA, 25 bp, Artificial
  Probe
gagggcatccagacccgaaaccgta

SEQ ID NO: 249416 - DNA, 25 bp, Artificial
  Probe
tccagacccgaaaccgtaagatgtc

SEQ ID NO: 249417 - DNA, 25 bp, Artificial
  Probe
gagagcagggacttcctgtgcgaac

SEQ ID NO: 249418 - DNA, 25 bp, Artificial
  Probe
gcaaggcttccaaaggaaaactgaa

SEQ ID NO: 249419 - DNA, 25 bp, Artificial
  Probe
tgaggactcgcctgaccagagtggc

SEQ ID NO: 249420 - DNA, 25 bp, Artificial
  Probe
actcctactgcaaggcttccaaagg

SEQ ID NO: 249421 - DNA, 25 bp, Artificial
  Probe
ggcttccaaaggaaaactgaagatg

SEQ ID NO: 249422 - DNA, 25 bp, Artificial
  Probe
acatcatctccgtgtacaagcaggg

SEQ ID NO: 249423 - DNA, 25 bp, Artificial
  Probe
gaagttcacagtgaacatcatctcc

SEQ ID NO: 249424 - DNA, 25 bp, Artificial
  Probe
agagtttgtggatccgttcgcgaga

SEQ ID NO: 249425 - DNA, 25 bp, Artificial
  Probe
aatgctgaggactcgcctgaccaga

SEQ ID NO: 249426 - DNA, 25 bp, Artificial
  Probe
ccgtggtgaccagagtttgtggatc

SEQ ID NO: 249427 - DNA, 25 bp, Artificial
  Probe
accactgcagccagcagcatggaag

SEQ ID NO: 249428 - DNA, 25 bp, Artificial
  Probe
agccagcagcatggaagaacctgaa

SEQ ID NO: 249429 - DNA, 25 bp, Artificial
  Probe
agaacctgaagactgtgactcctac

SEQ ID NO: 249430 - DNA, 25 bp, Artificial
  Probe
actggtggaagttcacagtgaacat

SEQ ID NO: 249431 - DNA, 25 bp, Artificial
  Probe
gaccagagtggcatcgtggcagaca

SEQ ID NO: 249432 - DNA, 25 bp, Artificial
  Probe
ctgctgggcaatgctgaggactcgc

SEQ ID NO: 249433 - DNA, 25 bp, Artificial
  Probe
ggaaggactatgctgtccagatcca

SEQ ID NO: 249434 - DNA, 25 bp, Artificial
  Probe
gatccacattctgaaggcggacaaa

SEQ ID NO: 249435 - DNA, 25 bp, Artificial
  Probe
tcgccccttgcattaagattcctgt

SEQ ID NO: 249436 - DNA, 25 bp, Artificial
  Probe
tttgtggatccgttcgcgagacatc

SEQ ID NO: 249437 - DNA, 25 bp, Artificial
  Probe
gtgaacatcatctccgtgtacaagc

SEQ ID NO: 249438 - DNA, 25 bp, Artificial
  Probe
ttgtggatccgttcgcgagacatcg

SEQ ID NO: 249439 - DNA, 25 bp, Artificial
  Probe
tcgtatacgccgtggtgaccagagt

SEQ ID NO: 249440 - DNA, 25 bp, Artificial
  Probe
aatactgcaggaaggactatgctgt

SEQ ID NO: 249441 - DNA, 25 bp, Artificial
  Probe
tgggcaatgctgaggactcgcctga

SEQ ID NO: 249442 - DNA, 25 bp, Artificial
  Probe
atactgcaggaaggactatgctgtc

SEQ ID NO: 249443 - DNA, 25 bp, Artificial
  Probe
ccgtgtacaagcagggcacaagtcg

SEQ ID NO: 249444 - DNA, 25 bp, Artificial
  Probe
tgcgcaagttccagcagcgggagaa

SEQ ID NO: 249445 - DNA, 25 bp, Artificial
  Probe
ccagatccacattctgaaggcggac

SEQ ID NO: 249446 - DNA, 25 bp, Artificial
  Probe
tacaagcagggcacaagtcgtatac

SEQ ID NO: 249447 - DNA, 25 bp, Artificial
  Probe
tgcaatcaaaccaccggccagtgtc

SEQ ID NO: 249448 - DNA, 25 bp, Artificial
  Probe
accgctgtgccaaaggctaccagca

SEQ ID NO: 249449 - DNA, 25 bp, Artificial
  Probe
gcaatgctgaggactcgcctgacca

SEQ ID NO: 249450 - DNA, 25 bp, Artificial
  Probe
gcattaagattcctgtagcgccacc

SEQ ID NO: 249451 - DNA, 25 bp, Artificial
  Probe
gcttccaaaggaaaactgaagatga

SEQ ID NO: 249452 - DNA, 25 bp, Artificial
  Probe
tacgccgtggtgaccagagtttgtg

SEQ ID NO: 249453 - DNA, 25 bp, Artificial
  Probe
ggtgaccagagtttgtggatccgtt

SEQ ID NO: 249454 - DNA, 25 bp, Artificial
  Probe
cacaagtcgtatacgccgtggtgac

SEQ ID NO: 249455 - DNA, 25 bp, Artificial
  Probe
gccaaaggctaccagcagagccgct

SEQ ID NO: 249456 - DNA, 25 bp, Artificial
  Probe
aaccgctgtgccaaaggctaccagc

SEQ ID NO: 249457 - DNA, 25 bp, Artificial
  Probe
aagtacctgctgctgggcaatgctg

SEQ ID NO: 249458 - DNA, 25 bp, Artificial
  Probe
cagcagcatggaagaacctgaagac

SEQ ID NO: 249459 - DNA, 25 bp, Artificial
  Probe
cgtggtgaccagagtttgtggatcc

SEQ ID NO: 249460 - DNA, 25 bp, Artificial
  Probe
ctgcaaggcttccaaaggaaaactg

SEQ ID NO: 249461 - DNA, 25 bp, Artificial
  Probe
cagagtggcatcgtggcagacaaga

SEQ ID NO: 249462 - DNA, 25 bp, Artificial
  Probe
gcctgaccagagtggcatcgtggca

SEQ ID NO: 249463 - DNA, 25 bp, Artificial
  Probe
tgtgccaaaggctaccagcagagcc

SEQ ID NO: 249464 - DNA, 25 bp, Artificial
  Probe
tggtccagggccagaagccctctgt

SEQ ID NO: 249465 - DNA, 25 bp, Artificial
  Probe
tccagggccagaagccctctgtttc

SEQ ID NO: 249466 - DNA, 25 bp, Artificial
  Probe
agcatggtacagagggccctgattg

SEQ ID NO: 249467 - DNA, 25 bp, Artificial
  Probe
actcacaaggcctgccattcaggga

SEQ ID NO: 249468 - DNA, 25 bp, Artificial
  Probe
agggcctggacctggacaacagccc

SEQ ID NO: 249469 - DNA, 25 bp, Artificial
  Probe
ttgcttgctcctgcaatggccacgc

SEQ ID NO: 249470 - DNA, 25 bp, Artificial
  Probe
gatggcagcccacagggcctggacc

SEQ ID NO: 249471 - DNA, 25 bp, Artificial
  Probe
ctggtctgcgactgccagcatggta

SEQ ID NO: 249472 - DNA, 25 bp, Artificial
  Probe
acgcttgccttgcttgctcctgcaa

SEQ ID NO: 249473 - DNA, 25 bp, Artificial
  Probe
gctgcaagcccttctactgcgacag

SEQ ID NO: 249474 - DNA, 25 bp, Artificial
  Probe
gaagcccacgcttgccttgcttgct

SEQ ID NO: 249475 - DNA, 25 bp, Artificial
  Probe
gcccacagggcctggacctggacaa

SEQ ID NO: 249476 - DNA, 25 bp, Artificial
  Probe
gactatggccgtctgcctgctcctg

SEQ ID NO: 249477 - DNA, 25 bp, Artificial
  Probe
ggccctgattgcagccgctgcaagc

SEQ ID NO: 249478 - DNA, 25 bp, Artificial
  Probe
gattgcagccgctgcaagcccttct

SEQ ID NO: 249479 - DNA, 25 bp, Artificial
  Probe
tacagagggccctgattgcagccgc

SEQ ID NO: 249480 - DNA, 25 bp, Artificial
  Probe
gatggacacccatggccacctggtc

SEQ ID NO: 249481 - DNA, 25 bp, Artificial
  Probe
cagtgcgcaggatggcagcccacag

SEQ ID NO: 249482 - DNA, 25 bp, Artificial
  Probe
ggaagcccacgcttgccttgcttgc

SEQ ID NO: 249483 - DNA, 25 bp, Artificial
  Probe
gccgcagctgggtccccctgggttt

SEQ ID NO: 249484 - DNA, 25 bp, Artificial
  Probe
cgaagatgccgcttcaacatggagc

SEQ ID NO: 249485 - DNA, 25 bp, Artificial
  Probe
ctcagccactgagcttcaggtggga

SEQ ID NO: 249486 - DNA, 25 bp, Artificial
  Probe
atggccacctggtctgcgactgcca

SEQ ID NO: 249487 - DNA, 25 bp, Artificial
  Probe
attgcagccgctgcaagcccttcta

SEQ ID NO: 249488 - DNA, 25 bp, Artificial
  Probe
ctgatggccctgctggtccagggcc

SEQ ID NO: 249489 - DNA, 25 bp, Artificial
  Probe
ttctactgcgacaggccatggcagc

SEQ ID NO: 249490 - DNA, 25 bp, Artificial
  Probe
aggtcgatgcaagtgcaatgggcat

SEQ ID NO: 249491 - DNA, 25 bp, Artificial
  Probe
gtggggtcacagtcccctactccta

SEQ ID NO: 249492 - DNA, 25 bp, Artificial
  Probe
tacagggcaggaagcccacgcttgc

SEQ ID NO: 249493 - DNA, 25 bp, Artificial
  Probe
cattcagggagacaccagggacggt

SEQ ID NO: 249494 - DNA, 25 bp, Artificial
  Probe
ctactcagccactgagcttcaggtg

SEQ ID NO: 249495 - DNA, 25 bp, Artificial
  Probe
cgatgcaagtgcaatgggcattcct

SEQ ID NO: 249496 - DNA, 25 bp, Artificial
  Probe
ccttcagtgcgcaggatggcagccc

SEQ ID NO: 249497 - DNA, 25 bp, Artificial
  Probe
ccctgggtttcttctcttccagctg

SEQ ID NO: 249498 - DNA, 25 bp, Artificial
  Probe
tggccgtctgcctgctcctgctgat

SEQ ID NO: 249499 - DNA, 25 bp, Artificial
  Probe
agtgcaatgggcattcctcacggtg

SEQ ID NO: 249500 - DNA, 25 bp, Artificial
  Probe
ctcttccagctgtagcctggactat

SEQ ID NO: 249501 - DNA, 25 bp, Artificial
  Probe
gtctcaggaccatggccgcagctgg

SEQ ID NO: 249502 - DNA, 25 bp, Artificial
  Probe
acagccccgtgctccaagactgggt

SEQ ID NO: 249503 - DNA, 25 bp, Artificial
  Probe
ggccttctggccttcagtgcgcagg

SEQ ID NO: 249504 - DNA, 25 bp, Artificial
  Probe
ggactatggccgtctgcctgctcct

SEQ ID NO: 249505 - DNA, 25 bp, Artificial
  Probe
ggctacagggcaggaagcccacgct

SEQ ID NO: 249506 - DNA, 25 bp, Artificial
  Probe
gccgtctgcctgctcctgctgatgg

SEQ ID NO: 249507 - DNA, 25 bp, Artificial
  Probe
tagcctggactatggccgtctgcct

SEQ ID NO: 249508 - DNA, 25 bp, Artificial
  Probe
aagcccttctactgcgacaggccat

SEQ ID NO: 249509 - DNA, 25 bp, Artificial
  Probe
tggacctggacaacagccccgtgct

SEQ ID NO: 249510 - DNA, 25 bp, Artificial
  Probe
agcaacagcgcttgcctaaccgagt

SEQ ID NO: 249511 - DNA, 25 bp, Artificial
  Probe
agcgcttgcctaaccgagtcttcca

SEQ ID NO: 249512 - DNA, 25 bp, Artificial
  Probe
acagcgcttgcctaaccgagtcttc

SEQ ID NO: 249513 - DNA, 25 bp, Artificial
  Probe
actacatctctgagccctatctggc

SEQ ID NO: 249514 - DNA, 25 bp, Artificial
  Probe
gcagatgcctaatgggcactatcgg

SEQ ID NO: 249515 - DNA, 25 bp, Artificial
  Probe
tgcctaatgggcactatcggcggcg

SEQ ID NO: 249516 - DNA, 25 bp, Artificial
  Probe
aagcaacagcgcttgcctaaccgag

SEQ ID NO: 249517 - DNA, 25 bp, Artificial
  Probe
ggtggatccccactggcctctcaag

SEQ ID NO: 249518 - DNA, 25 bp, Artificial
  Probe
cctggccatgatgtgtggagctgtc

SEQ ID NO: 249519 - DNA, 25 bp, Artificial
  Probe
aagacgaagtcgtcgccagctccca

SEQ ID NO: 249520 - DNA, 25 bp, Artificial
  Probe
tagctactagcttgggccggtccaa

SEQ ID NO: 249521 - DNA, 25 bp, Artificial
  Probe
gcactacatctctgagccctatctg

SEQ ID NO: 249522 - DNA, 25 bp, Artificial
  Probe
accaaattgggaagccagtgcggcc

SEQ ID NO: 249523 - DNA, 25 bp, Artificial
  Probe
caagctctggaaagcaacagcgctt

SEQ ID NO: 249524 - DNA, 25 bp, Artificial
  Probe
ggagacactcacctttgaggcagct

SEQ ID NO: 249525 - DNA, 25 bp, Artificial
  Probe
gcctctcaagctctggaaagcaaca

SEQ ID NO: 249526 - DNA, 25 bp, Artificial
  Probe
ctctcacagggagaaaaccaagacc

SEQ ID NO: 249527 - DNA, 25 bp, Artificial
  Probe
ggcacagctggcagatgcctaatgg

SEQ ID NO: 249528 - DNA, 25 bp, Artificial
  Probe
cacctttgaggcagctgtagctact

SEQ ID NO: 249529 - DNA, 25 bp, Artificial
  Probe
aaccaagaccaaattgggaagccag

SEQ ID NO: 249530 - DNA, 25 bp, Artificial
  Probe
actgtggcgaggaggagacactcac

SEQ ID NO: 249531 - DNA, 25 bp, Artificial
  Probe
cctacggcacagctggcagatgcct

SEQ ID NO: 249532 - DNA, 25 bp, Artificial
  Probe
aagacgataagtgctagaggctgcc

SEQ ID NO: 249533 - DNA, 25 bp, Artificial
  Probe
ctacagctccctgatgagacacact

SEQ ID NO: 249534 - DNA, 25 bp, Artificial
  Probe
tctctcacagggagaaaaccaagac

SEQ ID NO: 249535 - DNA, 25 bp, Artificial
  Probe
acagctggcagatgcctaatgggca

SEQ ID NO: 249536 - DNA, 25 bp, Artificial
  Probe
accaagaccaaattgggaagccagt

SEQ ID NO: 249537 - DNA, 25 bp, Artificial
  Probe
aggaggagacactcacctttgaggc

SEQ ID NO: 249538 - DNA, 25 bp, Artificial
  Probe
ccacgcctcagactgtggcgaggag

SEQ ID NO: 249539 - DNA, 25 bp, Artificial
  Probe
ctggcagatgcctaatgggcactat

SEQ ID NO: 249540 - DNA, 25 bp, Artificial
  Probe
agcttgggccggtccaataccattg

SEQ ID NO: 249541 - DNA, 25 bp, Artificial
  Probe
gggtggatccccactggcctctcaa

SEQ ID NO: 249542 - DNA, 25 bp, Artificial
  Probe
acccctacggcacagctggcagatg

SEQ ID NO: 249543 - DNA, 25 bp, Artificial
  Probe
ctcttctctcacagggagaaaacca

SEQ ID NO: 249544 - DNA, 25 bp, Artificial
  Probe
ccatgatgtgtggagctgtcagtga

SEQ ID NO: 249545 - DNA, 25 bp, Artificial
  Probe
ctggaaagcaacagcgcttgcctaa

SEQ ID NO: 249546 - DNA, 25 bp, Artificial
  Probe
cagctgtagctactagcttgggccg

SEQ ID NO: 249547 - DNA, 25 bp, Artificial
  Probe
ctggccatgatgtgtggagctgtca

SEQ ID NO: 249548 - DNA, 25 bp, Artificial
  Probe
tccgatgcatgctcttctctcacag

SEQ ID NO: 249549 - DNA, 25 bp, Artificial
  Probe
ggccggtccaataccattggctctg

SEQ ID NO: 249550 - DNA, 25 bp, Artificial
  Probe
cgataagtgctagaggctgccatcc

SEQ ID NO: 249551 - DNA, 25 bp, Artificial
  Probe
ctctcaagctctggaaagcaacagc

SEQ ID NO: 249552 - DNA, 25 bp, Artificial
  Probe
gtgacctcctgagtgacacggaaga

SEQ ID NO: 249553 - DNA, 25 bp, Artificial
  Probe
gatgagacacactggcggcatctct

SEQ ID NO: 249554 - DNA, 25 bp, Artificial
  Probe
ccactggcctctcaagctctggaaa

SEQ ID NO: 249555 - DNA, 25 bp, Artificial
  Probe
cactcacctttgaggcagctgtagc

SEQ ID NO: 249556 - DNA, 25 bp, Artificial
  Probe
agctacagtatttcacattctgttg

SEQ ID NO: 249557 - DNA, 25 bp, Artificial
  Probe
tcgcccttactgttactctagacag

SEQ ID NO: 249558 - DNA, 25 bp, Artificial
  Probe
gtgtgtcactcctggcttctgcatc

SEQ ID NO: 249559 - DNA, 25 bp, Artificial
  Probe
agcagtgtgaactcagcaagtgccc

SEQ ID NO: 249560 - DNA, 25 bp, Artificial
  Probe
ctcccttttaggtttcctaagcatg

SEQ ID NO: 249561 - DNA, 25 bp, Artificial
  Probe
ggagtctttgccttggatggaagca

SEQ ID NO: 249562 - DNA, 25 bp, Artificial
  Probe
gcttttgtaacgaaaggcgggtctg

SEQ ID NO: 249563 - DNA, 25 bp, Artificial
  Probe
agcaagtctgtctgcgagcctggct

SEQ ID NO: 249564 - DNA, 25 bp, Artificial
  Probe
actttagagtactggcctgaatttt

SEQ ID NO: 249565 - DNA, 25 bp, Artificial
  Probe
acttgagggagagcagtgtgaactc

SEQ ID NO: 249566 - DNA, 25 bp, Artificial
  Probe
ctaagcatgtctagcatgatggtat

SEQ ID NO: 249567 - DNA, 25 bp, Artificial
  Probe
tgatgttcattacactttagagtac

SEQ ID NO: 249568 - DNA, 25 bp, Artificial
  Probe
gccttcacttaaaaaggctgagggg

SEQ ID NO: 249569 - DNA, 25 bp, Artificial
  Probe
agttgacagatacttgcaaaatcac

SEQ ID NO: 249570 - DNA, 25 bp, Artificial
  Probe
gtaaaagcaagtctgtctgcgagcc

SEQ ID NO: 249571 - DNA, 25 bp, Artificial
  Probe
gcatacctcgatgtatgaacggtgg

SEQ ID NO: 249572 - DNA, 25 bp, Artificial
  Probe
gctacagtatttcacattctgttgt

SEQ ID NO: 249573 - DNA, 25 bp, Artificial
  Probe
ctctagacagttcagttttgagggg

SEQ ID NO: 249574 - DNA, 25 bp, Artificial
  Probe
taaaggtgctgctttctctctctga

SEQ ID NO: 249575 - DNA, 25 bp, Artificial
  Probe
cacttgtgttagtggcatttaaaca

SEQ ID NO: 249576 - DNA, 25 bp, Artificial
  Probe
atgtatttgccctccaggacttgag

SEQ ID NO: 249577 - DNA, 25 bp, Artificial
  Probe
gtgtgaactcagcaagtgcccccaa

SEQ ID NO: 249578 - DNA, 25 bp, Artificial
  Probe
ctttcatgtcagttgatcaggttaa

SEQ ID NO: 249579 - DNA, 25 bp, Artificial
  Probe
tgaaacggttcgagttacgccgagt

SEQ ID NO: 249580 - DNA, 25 bp, Artificial
  Probe
gtcaaatatttggacacttgtctaa

SEQ ID NO: 249581 - DNA, 25 bp, Artificial
  Probe
ggcttctgcatctgcccgcctggat

SEQ ID NO: 249582 - DNA, 25 bp, Artificial
  Probe
aagggaaaacatcacacttgtgtta

SEQ ID NO: 249583 - DNA, 25 bp, Artificial
  Probe
aaatctgtctcttcagtatgtagtt

SEQ ID NO: 249584 - DNA, 25 bp, Artificial
  Probe
tgccgaaacggaggtaaatgcattg

SEQ ID NO: 249585 - DNA, 25 bp, Artificial
  Probe
cggagggatccacctgaatccaatt

SEQ ID NO: 249586 - DNA, 25 bp, Artificial
  Probe
caacaagctgagtgcccaggagggt

SEQ ID NO: 249587 - DNA, 25 bp, Artificial
  Probe
atgcatgccccgaggccagcaggcg

SEQ ID NO: 249588 - DNA, 25 bp, Artificial
  Probe
ctgccgaaacggaggtaaatgcatt

SEQ ID NO: 249589 - DNA, 25 bp, Artificial
  Probe
tggtatagattttcttccttcagtc

SEQ ID NO: 249590 - DNA, 25 bp, Artificial
  Probe
cacgacacatttgtggtattgggat

SEQ ID NO: 249591 - DNA, 25 bp, Artificial
  Probe
cctagagaggcgaaactgggcaaag

SEQ ID NO: 249592 - DNA, 25 bp, Artificial
  Probe
gcctggctgcggtgcccatggaacc

SEQ ID NO: 249593 - DNA, 25 bp, Artificial
  Probe
ctttgccttggatggaagcaatata

SEQ ID NO: 249594 - DNA, 25 bp, Artificial
  Probe
cctttcgtgtgttggatgttcaaat

SEQ ID NO: 249595 - DNA, 25 bp, Artificial
  Probe
tattagcttcattatgaatcactgg

SEQ ID NO: 249596 - DNA, 25 bp, Artificial
  Probe
gctgatatttactctcccttttagg

SEQ ID NO: 249597 - DNA, 25 bp, Artificial
  Probe
ttttgtaacgaaaggcgggtctgcg

SEQ ID NO: 249598 - DNA, 25 bp, Artificial
  Probe
ctgctttaatggagggacctgtttt

SEQ ID NO: 249599 - DNA, 25 bp, Artificial
  Probe
caacaaatgccagtgtcgagagggc

SEQ ID NO: 249600 - DNA, 25 bp, Artificial
  Probe
ggctggagcggcacacgccttcact

SEQ ID NO: 249601 - DNA, 25 bp, Artificial
  Probe
aggtacggagccagcctcatgcatg

SEQ ID NO: 249602 - DNA, 25 bp, Artificial
  Probe
gacgcagccccagagggcagagaca

SEQ ID NO: 249603 - DNA, 25 bp, Artificial
  Probe
gctgggtcacaggaaggaagcattc

SEQ ID NO: 249604 - DNA, 25 bp, Artificial
  Probe
ggggcagcttacaggtcctcaggct

SEQ ID NO: 249605 - DNA, 25 bp, Artificial
  Probe
tctccttggaggactcccagccttg

SEQ ID NO: 249606 - DNA, 25 bp, Artificial
  Probe
tgaatatttctaagtgggctgcagc

SEQ ID NO: 249607 - DNA, 25 bp, Artificial
  Probe
tcacagttctttaaatggttcttgg

SEQ ID NO: 249608 - DNA, 25 bp, Artificial
  Probe
gccaagcttcacagttctttaaatg

SEQ ID NO: 249609 - DNA, 25 bp, Artificial
  Probe
cattctctggaaaggggaaatgtct

SEQ ID NO: 249610 - DNA, 25 bp, Artificial
  Probe
ggctgaagccacctctccttggagg

SEQ ID NO: 249611 - DNA, 25 bp, Artificial
  Probe
attcccctggcttccagaggccaaa

SEQ ID NO: 249612 - DNA, 25 bp, Artificial
  Probe
aaggggaaatgtctcccagatcatt

SEQ ID NO: 249613 - DNA, 25 bp, Artificial
  Probe
agactggggacaaggggcaatcttc

SEQ ID NO: 249614 - DNA, 25 bp, Artificial
  Probe
tgctcttatttcttacaagaacgtg

SEQ ID NO: 249615 - DNA, 25 bp, Artificial
  Probe
cagtggccctgtggtcccaggcttc

SEQ ID NO: 249616 - DNA, 25 bp, Artificial
  Probe
gggtccagtccgttgtacgtcgcca

SEQ ID NO: 249617 - DNA, 25 bp, Artificial
  Probe
aatgtctcccagatcattcccctgg

SEQ ID NO: 249618 - DNA, 25 bp, Artificial
  Probe
cgccattactgtgaatatttctaag

SEQ ID NO: 249619 - DNA, 25 bp, Artificial
  Probe
gtaacttattttgtgctagtacccg

SEQ ID NO: 249620 - DNA, 25 bp, Artificial
  Probe
ccttgtgccgccattactgtgaata

SEQ ID NO: 249621 - DNA, 25 bp, Artificial
  Probe
gcagagcgccccaacagaaagtaac

SEQ ID NO: 249622 - DNA, 25 bp, Artificial
  Probe
tctaagtgggctgcagcttgtgtgt

SEQ ID NO: 249623 - DNA, 25 bp, Artificial
  Probe
tccacggccctagcaggagactggg

SEQ ID NO: 249624 - DNA, 25 bp, Artificial
  Probe
ttccttgggacctactgccaccagt

SEQ ID NO: 249625 - DNA, 25 bp, Artificial
  Probe
cacggacagtgtttgtttggagagc

SEQ ID NO: 249626 - DNA, 25 bp, Artificial
  Probe
tggaggactcccagccttgtgccgc

SEQ ID NO: 249627 - DNA, 25 bp, Artificial
  Probe
caaggtacagctgtacataaaaatg

SEQ ID NO: 249628 - DNA, 25 bp, Artificial
  Probe
cccgctgatgagtggttttactttg

SEQ ID NO: 249629 - DNA, 25 bp, Artificial
  Probe
aggtcctcaggctgagcctgctcct

SEQ ID NO: 249630 - DNA, 25 bp, Artificial
  Probe
acgcagccccagagggcagagacaa

SEQ ID NO: 249631 - DNA, 25 bp, Artificial
  Probe
tgaaactcgttttgggtccagtccg

SEQ ID NO: 249632 - DNA, 25 bp, Artificial
  Probe
ttcttacaagaacgtgaagacacag

SEQ ID NO: 249633 - DNA, 25 bp, Artificial
  Probe
gcattctctggaaaggggaaatgtc

SEQ ID NO: 249634 - DNA, 25 bp, Artificial
  Probe
caggcggtcctgtgcggattcccag

SEQ ID NO: 249635 - DNA, 25 bp, Artificial
  Probe
cccagaagtgttttcacggacagtg

SEQ ID NO: 249636 - DNA, 25 bp, Artificial
  Probe
gagggtagcccttgccctgacgcag

SEQ ID NO: 249637 - DNA, 25 bp, Artificial
  Probe
atcggtgcccactgctgcagagcgc

SEQ ID NO: 249638 - DNA, 25 bp, Artificial
  Probe
tggttcttgggttccacggccctag

SEQ ID NO: 249639 - DNA, 25 bp, Artificial
  Probe
aatgggccaagctgtagcctgtgct

SEQ ID NO: 249640 - DNA, 25 bp, Artificial
  Probe
cccagggagacgattgtgcggacta

SEQ ID NO: 249641 - DNA, 25 bp, Artificial
  Probe
ttgtgtgtgccctgggtgctgccca

SEQ ID NO: 249642 - DNA, 25 bp, Artificial
  Probe
gtccgttgtacgtcgccacagaagc

SEQ ID NO: 249643 - DNA, 25 bp, Artificial
  Probe
agacacagaggcatgggctgtttgt

SEQ ID NO: 249644 - DNA, 25 bp, Artificial
  Probe
caaactgcataagcttaacccgctg

SEQ ID NO: 249645 - DNA, 25 bp, Artificial
  Probe
gcgccccaacagaaagtaacttatt

SEQ ID NO: 249646 - DNA, 25 bp, Artificial
  Probe
tagtacccgcctaagaaaagaatcg

SEQ ID NO: 249647 - DNA, 25 bp, Artificial
  Probe
atcttctgctcttggtttctggggg

SEQ ID NO: 249648 - DNA, 25 bp, Artificial
  Probe
atcaacgctgtgatccaggtcactt

SEQ ID NO: 249649 - DNA, 25 bp, Artificial
  Probe
caaagtatccagagatcaagtcctt

SEQ ID NO: 249650 - DNA, 25 bp, Artificial
  Probe
tcgatgtggatatccctactgattt

SEQ ID NO: 249651 - DNA, 25 bp, Artificial
  Probe
gcctgggcttgcacccaatttcggg

SEQ ID NO: 249652 - DNA, 25 bp, Artificial
  Probe
gcggacggcatcgatgtggatatcc

SEQ ID NO: 249653 - DNA, 25 bp, Artificial
  Probe
gatttcgagggctggttcttctgca

SEQ ID NO: 249654 - DNA, 25 bp, Artificial
  Probe
cttagcaaagtatccagagatcaag

SEQ ID NO: 249655 - DNA, 25 bp, Artificial
  Probe
accacaaggccctgtggaaccgctg

SEQ ID NO: 249656 - DNA, 25 bp, Artificial
  Probe
ctcgtctactatgtttttggagtga

SEQ ID NO: 249657 - DNA, 25 bp, Artificial
  Probe
ctttggccaccacaaggccctgtgg

SEQ ID NO: 249658 - DNA, 25 bp, Artificial
  Probe
ttcagcctctcttctatgcgtttag

SEQ ID NO: 249659 - DNA, 25 bp, Artificial
  Probe
gtagccatgatgcttctcgtccagc

SEQ ID NO: 249660 - DNA, 25 bp, Artificial
  Probe
agccgaacattacatgttcctaaag

SEQ ID NO: 249661 - DNA, 25 bp, Artificial
  Probe
ccgctggtttggaatgtttgctaac

SEQ ID NO: 249662 - DNA, 25 bp, Artificial
  Probe
ctactgatttcgagggctggttctt

SEQ ID NO: 249663 - DNA, 25 bp, Artificial
  Probe
ctaacctctctctcggagtgccata

SEQ ID NO: 249664 - DNA, 25 bp, Artificial
  Probe
gggttatccttcagcctctcttcta

SEQ ID NO: 249665 - DNA, 25 bp, Artificial
  Probe
atgatgcttctcgtccagctggctt

SEQ ID NO: 249666 - DNA, 25 bp, Artificial
  Probe
tttaagagataccacatggatcatc

SEQ ID NO: 249667 - DNA, 25 bp, Artificial
  Probe
aaggccctgtggaaccgctggtttg

SEQ ID NO: 249668 - DNA, 25 bp, Artificial
  Probe
tgccttaaccactccatgactctgg

SEQ ID NO: 249669 - DNA, 25 bp, Artificial
  Probe
gccatactcgatttcctttaagaga

SEQ ID NO: 249670 - DNA, 25 bp, Artificial
  Probe
ggggcatttcatagccgaacattac

SEQ ID NO: 249671 - DNA, 25 bp, Artificial
  Probe
ctcggcctgggcttgcacccaattt

SEQ ID NO: 249672 - DNA, 25 bp, Artificial
  Probe
ctggaagtcatcaacgctgtgatcc

SEQ ID NO: 249673 - DNA, 25 bp, Artificial
  Probe
tgaagtctctagtgtacatgttggc

SEQ ID NO: 249674 - DNA, 25 bp, Artificial
  Probe
ggcttcattttacttagtcaaagat

SEQ ID NO: 249675 - DNA, 25 bp, Artificial
  Probe
gcatcgatgtggatatccctactga

SEQ ID NO: 249676 - DNA, 25 bp, Artificial
  Probe
ctcttctatgcgtttagacccctgt

SEQ ID NO: 249677 - DNA, 25 bp, Artificial
  Probe
ggctatccatgagatttcccacaat

SEQ ID NO: 249678 - DNA, 25 bp, Artificial
  Probe
tggaatgtttgctaacctctctctc

SEQ ID NO: 249679 - DNA, 25 bp, Artificial
  Probe
cactccatgactctggctatccatg

SEQ ID NO: 249680 - DNA, 25 bp, Artificial
  Probe
ctgtggaaccgctggtttggaatgt

SEQ ID NO: 249681 - DNA, 25 bp, Artificial
  Probe
tgggtcatattttggtcctatgtct

SEQ ID NO: 249682 - DNA, 25 bp, Artificial
  Probe
ttggccaccacaaggccctgtggaa

SEQ ID NO: 249683 - DNA, 25 bp, Artificial
  Probe
tatccagagatcaagtccttgatga

SEQ ID NO: 249684 - DNA, 25 bp, Artificial
  Probe
atttcgagggctggttcttctgcac

SEQ ID NO: 249685 - DNA, 25 bp, Artificial
  Probe
ggcagctgccttaaccactccatga

SEQ ID NO: 249686 - DNA, 25 bp, Artificial
  Probe
ccatctggaagtcatcaacgctgtg

SEQ ID NO: 249687 - DNA, 25 bp, Artificial
  Probe
agggctggttcttctgcaccactct

SEQ ID NO: 249688 - DNA, 25 bp, Artificial
  Probe
agagatcaagtccttgatgaaacct

SEQ ID NO: 249689 - DNA, 25 bp, Artificial
  Probe
gatttcctttaagagataccacatg

SEQ ID NO: 249690 - DNA, 25 bp, Artificial
  Probe
ttgcacccaatttcggggcatttca

SEQ ID NO: 249691 - DNA, 25 bp, Artificial
  Probe
gtacatgttggcagcctccctgctc

SEQ ID NO: 249692 - DNA, 25 bp, Artificial
  Probe
ctctctctcggagtgccatactcga

SEQ ID NO: 249693 - DNA, 25 bp, Artificial
  Probe
caatttcggggcatttcatagccga

SEQ ID NO: 249694 - DNA, 25 bp, Artificial
  Probe
agtccaccgcttgcaagaagggaga

SEQ ID NO: 249695 - DNA, 25 bp, Artificial
  Probe
gagtacaacgtccaggaggctgaga

SEQ ID NO: 249696 - DNA, 25 bp, Artificial
  Probe
agcctgtatccagctcccccaaggg

SEQ ID NO: 249697 - DNA, 25 bp, Artificial
  Probe
ccgagtcacctgcagatggcgaggt

SEQ ID NO: 249698 - DNA, 25 bp, Artificial
  Probe
cctacaggtccatggctgtgggtcg

SEQ ID NO: 249699 - DNA, 25 bp, Artificial
  Probe
accgggtgcagaaggcggagcagag

SEQ ID NO: 249700 - DNA, 25 bp, Artificial
  Probe
tacaacgtccaggaggctgagagct

SEQ ID NO: 249701 - DNA, 25 bp, Artificial
  Probe
tgacatcttcctgagcctgtatcca

SEQ ID NO: 249702 - DNA, 25 bp, Artificial
  Probe
caccgcttgcaagaagggagagtac

SEQ ID NO: 249703 - DNA, 25 bp, Artificial
  Probe
gacatcttcctgagcctgtatccag

SEQ ID NO: 249704 - DNA, 25 bp, Artificial
  Probe
cgagtcacctgcagatggcgaggtt

SEQ ID NO: 249705 - DNA, 25 bp, Artificial
  Probe
ccatccagctgacatcttcctgagc

SEQ ID NO: 249706 - DNA, 25 bp, Artificial
  Probe
acaacgtccaggaggctgagagctc

SEQ ID NO: 249707 - DNA, 25 bp, Artificial
  Probe
ccaccgcttgcaagaagggagagta

SEQ ID NO: 249708 - DNA, 25 bp, Artificial
  Probe
tattcaactcccaggggcgtcgtcc

SEQ ID NO: 249709 - DNA, 25 bp, Artificial
  Probe
gctgacatcttcctgagcctgtatc

SEQ ID NO: 249710 - DNA, 25 bp, Artificial
  Probe
agctgacatcttcctgagcctgtat

SEQ ID NO: 249711 - DNA, 25 bp, Artificial
  Probe
tccaccgcttgcaagaagggagagt

SEQ ID NO: 249712 - DNA, 25 bp, Artificial
  Probe
gggtctgcgcctacaggtccatggc

SEQ ID NO: 249713 - DNA, 25 bp, Artificial
  Probe
cagtccaccgcttgcaagaagggag

SEQ ID NO: 249714 - DNA, 25 bp, Artificial
  Probe
tgcgcctacaggtccatggctgtgg

SEQ ID NO: 249715 - DNA, 25 bp, Artificial
  Probe
gagagtacaacgtccaggaggctga

SEQ ID NO: 249716 - DNA, 25 bp, Artificial
  Probe
ctgcgcctacaggtccatggctgtg

SEQ ID NO: 249717 - DNA, 25 bp, Artificial
  Probe
gtacaacgtccaggaggctgagagc

SEQ ID NO: 249718 - DNA, 25 bp, Artificial
  Probe
agggtctgcgcctacaggtccatgg

SEQ ID NO: 249719 - DNA, 25 bp, Artificial
  Probe
ctgacatcttcctgagcctgtatcc

SEQ ID NO: 249720 - DNA, 25 bp, Artificial
  Probe
gtctgcgcctacaggtccatggctg

SEQ ID NO: 249721 - DNA, 25 bp, Artificial
  Probe
agagtacaacgtccaggaggctgag

SEQ ID NO: 249722 - DNA, 25 bp, Artificial
  Probe
gtccaccgcttgcaagaagggagag

SEQ ID NO: 249723 - DNA, 25 bp, Artificial
  Probe
gcacaaggggtggacgtatgtattg

SEQ ID NO: 249724 - DNA, 25 bp, Artificial
  Probe
acgtgcagtccaccgcttgcaagaa

SEQ ID NO: 249725 - DNA, 25 bp, Artificial
  Probe
ccagctgacatcttcctgagcctgt

SEQ ID NO: 249726 - DNA, 25 bp, Artificial
  Probe
atccagctgacatcttcctgagcct

SEQ ID NO: 249727 - DNA, 25 bp, Artificial
  Probe
accgcttgcaagaagggagagtaca

SEQ ID NO: 249728 - DNA, 25 bp, Artificial
  Probe
tggccgcaggggccggcctggcctt

SEQ ID NO: 249729 - DNA, 25 bp, Artificial
  Probe
cctcgaaagcacaaggggtggacgt

SEQ ID NO: 249730 - DNA, 25 bp, Artificial
  Probe
tacgtgcagtccaccgcttgcaaga

SEQ ID NO: 249731 - DNA, 25 bp, Artificial
  Probe
tatttattcaactcccaggggcgtc

SEQ ID NO: 249732 - DNA, 25 bp, Artificial
  Probe
atttattcaactcccaggggcgtcg

SEQ ID NO: 249733 - DNA, 25 bp, Artificial
  Probe
ggtctgcgcctacaggtccatggct

SEQ ID NO: 249734 - DNA, 25 bp, Artificial
  Probe
ccgcttgcaagaagggagagtacaa

SEQ ID NO: 249735 - DNA, 25 bp, Artificial
  Probe
tccagctgacatcttcctgagcctg

SEQ ID NO: 249736 - DNA, 25 bp, Artificial
  Probe
cagctgacatcttcctgagcctgta

SEQ ID NO: 249737 - DNA, 25 bp, Artificial
  Probe
tctgcgcctacaggtccatggctgt

SEQ ID NO: 249738 - DNA, 25 bp, Artificial
  Probe
gcagtccaccgcttgcaagaaggga

SEQ ID NO: 249739 - DNA, 25 bp, Artificial
  Probe
agtacaacgtccaggaggctgagag

SEQ ID NO: 249740 - DNA, 25 bp, Artificial
  Probe
ctctccagctggaggccgagtttct

SEQ ID NO: 249741 - DNA, 25 bp, Artificial
  Probe
cgttgccgagtggaagaaccatgac

SEQ ID NO: 249742 - DNA, 25 bp, Artificial
  Probe
aggcctggcctgtcgctctcacttg

SEQ ID NO: 249743 - DNA, 25 bp, Artificial
  Probe
ctaagcctttcgtgtttttccacag

SEQ ID NO: 249744 - DNA, 25 bp, Artificial
  Probe
tccacaggtgtttaagcttctctgt

SEQ ID NO: 249745 - DNA, 25 bp, Artificial
  Probe
ttccaaggtgctagggaagtttcag

SEQ ID NO: 249746 - DNA, 25 bp, Artificial
  Probe
aagagacaactaagcctttcgtgtt

SEQ ID NO: 249747 - DNA, 25 bp, Artificial
  Probe
tgatcgattcaatgcccgatgcttc

SEQ ID NO: 249748 - DNA, 25 bp, Artificial
  Probe
gaagaaccatgacctccacttgctt

SEQ ID NO: 249749 - DNA, 25 bp, Artificial
  Probe
tgtttttccacaggtgtttaagctt

SEQ ID NO: 249750 - DNA, 25 bp, Artificial
  Probe
taagcctttcgtgtttttccacagg

SEQ ID NO: 249751 - DNA, 25 bp, Artificial
  Probe
cctctccagctggaggccgagtttc

SEQ ID NO: 249752 - DNA, 25 bp, Artificial
  Probe
gctctcacttgtcttccagcgggga

SEQ ID NO: 249753 - DNA, 25 bp, Artificial
  Probe
ttaagcttctctgtacagttgaaat

SEQ ID NO: 249754 - DNA, 25 bp, Artificial
  Probe
cttgcttccaaggtgctagggaagt

SEQ ID NO: 249755 - DNA, 25 bp, Artificial
  Probe
caggtgtttaagcttctctgtacag

SEQ ID NO: 249756 - DNA, 25 bp, Artificial
  Probe
gcttctctgtacagttgaaataaac

SEQ ID NO: 249757 - DNA, 25 bp, Artificial
  Probe
tgctagggaagtttcagggtacgct

SEQ ID NO: 249758 - DNA, 25 bp, Artificial
  Probe
agatttcggcacgagccctgtgcag

SEQ ID NO: 249759 - DNA, 25 bp, Artificial
  Probe
tgacctccacttgcttccaaggtgc

SEQ ID NO: 249760 - DNA, 25 bp, Artificial
  Probe
ttctctgtacagttgaaataaacag

SEQ ID NO: 249761 - DNA, 25 bp, Artificial
  Probe
tttttccacaggtgtttaagcttct

SEQ ID NO: 249762 - DNA, 25 bp, Artificial
  Probe
gatttttctactctgtgatcgattc

SEQ ID NO: 249763 - DNA, 25 bp, Artificial
  Probe
tcgtgtttttccacaggtgtttaag

SEQ ID NO: 249764 - DNA, 25 bp, Artificial
  Probe
ctatgcattttccttttatcaggtg

SEQ ID NO: 249765 - DNA, 25 bp, Artificial
  Probe
gcctttcgtgtttttccacaggtgt

SEQ ID NO: 249766 - DNA, 25 bp, Artificial
  Probe
aggtggacacacaggcctggcctgt

SEQ ID NO: 249767 - DNA, 25 bp, Artificial
  Probe
ccacttgcttccaaggtgctaggga

SEQ ID NO: 249768 - DNA, 25 bp, Artificial
  Probe
ctgtgcaggtggacacacaggcctg

SEQ ID NO: 249769 - DNA, 25 bp, Artificial
  Probe
tggcctgtcgctctcacttgtcttc

SEQ ID NO: 249770 - DNA, 25 bp, Artificial
  Probe
gcattttccttttatcaggtgtata

SEQ ID NO: 249771 - DNA, 25 bp, Artificial
  Probe
ctggcctgtcgctctcacttgtctt

SEQ ID NO: 249772 - DNA, 25 bp, Artificial
  Probe
atgcattttccttttatcaggtgta

SEQ ID NO: 249773 - DNA, 25 bp, Artificial
  Probe
ggactgcagatttttctactctgtg

SEQ ID NO: 249774 - DNA, 25 bp, Artificial
  Probe
attcaatgcccgatgcttctgtttc

SEQ ID NO: 249775 - DNA, 25 bp, Artificial
  Probe
tgtcgctctcacttgtcttccagcg

SEQ ID NO: 249776 - DNA, 25 bp, Artificial
  Probe
cgatgcttctgtttcattcccgacc

SEQ ID NO: 249777 - DNA, 25 bp, Artificial
  Probe
gcacgagccctgtgcaggtggacac

SEQ ID NO: 249778 - DNA, 25 bp, Artificial
  Probe
tggaagaaccatgacctccacttgc

SEQ ID NO: 249779 - DNA, 25 bp, Artificial
  Probe
agccctgtgcaggtggacacacagg

SEQ ID NO: 249780 - DNA, 25 bp, Artificial
  Probe
agcctttcgtgtttttccacaggtg

SEQ ID NO: 249781 - DNA, 25 bp, Artificial
  Probe
caggtggacacacaggcctggcctg

SEQ ID NO: 249782 - DNA, 25 bp, Artificial
  Probe
catgacctccacttgcttccaaggt

SEQ ID NO: 249783 - DNA, 25 bp, Artificial
  Probe
ttcacgttgccgagtggaagaacca

SEQ ID NO: 249784 - DNA, 25 bp, Artificial
  Probe
ttaagagacaactaagcctttcgtg

SEQ ID NO: 249785 - DNA, 25 bp, Artificial
  Probe
tttctactctgtgatcgattcaatg

SEQ ID NO: 249786 - DNA, 25 bp, Artificial
  Probe
gctgccagagtgatggagcctctgc

SEQ ID NO: 249787 - DNA, 25 bp, Artificial
  Probe
ttaccaaggatccaagtaaaaggct

SEQ ID NO: 249788 - DNA, 25 bp, Artificial
  Probe
agggtgtgtcaccattccctggcag

SEQ ID NO: 249789 - DNA, 25 bp, Artificial
  Probe
aaaggagtcaacctggacaccaatg

SEQ ID NO: 249790 - DNA, 25 bp, Artificial
  Probe
gatcctgaggccatttattgtaagg

SEQ ID NO: 249791 - DNA, 25 bp, Artificial
  Probe
tggatgtttcaaggacctcaatgaa

SEQ ID NO: 249792 - DNA, 25 bp, Artificial
  Probe
gcagcacccaatattcaaggatatt

SEQ ID NO: 249793 - DNA, 25 bp, Artificial
  Probe
caacctggacaccaatgatgagatc

SEQ ID NO: 249794 - DNA, 25 bp, Artificial
  Probe
ttcagcagactggaagcaaatatgt

SEQ ID NO: 249795 - DNA, 25 bp, Artificial
  Probe
gctgtaaagcagcacccaatattca

SEQ ID NO: 249796 - DNA, 25 bp, Artificial
  Probe
agtgatggagcctctgctgtaaagc

SEQ ID NO: 249797 - DNA, 25 bp, Artificial
  Probe
attgaatctggatgtttcaaggacc

SEQ ID NO: 249798 - DNA, 25 bp, Artificial
  Probe
ccagagtgatggagcctctgctgta

SEQ ID NO: 249799 - DNA, 25 bp, Artificial
  Probe
gatattaacttcagcagactggaag

SEQ ID NO: 249800 - DNA, 25 bp, Artificial
  Probe
acagttctctgtggtgaaaggagtc

SEQ ID NO: 249801 - DNA, 25 bp, Artificial
  Probe
ctggacaccaatgatgagatcttct

SEQ ID NO: 249802 - DNA, 25 bp, Artificial
  Probe
aaagcagcacccaatattcaaggat

SEQ ID NO: 249803 - DNA, 25 bp, Artificial
  Probe
atcatggacacatccgaatttcaga

SEQ ID NO: 249804 - DNA, 25 bp, Artificial
  Probe
accaaggatccaagtaaaaggctgg

SEQ ID NO: 249805 - DNA, 25 bp, Artificial
  Probe
gagatcttctacactcaatttgcga

SEQ ID NO: 249806 - DNA, 25 bp, Artificial
  Probe
ccgaatttcagatcttggtctagct

SEQ ID NO: 249807 - DNA, 25 bp, Artificial
  Probe
tctggaaatcccagaaggggagatg

SEQ ID NO: 249808 - DNA, 25 bp, Artificial
  Probe
cgacagggtgtgtcaccattccctg

SEQ ID NO: 249809 - DNA, 25 bp, Artificial
  Probe
gatgagatcttctacactcaatttg

SEQ ID NO: 249810 - DNA, 25 bp, Artificial
  Probe
atcttggatattggacagttctctg

SEQ ID NO: 249811 - DNA, 25 bp, Artificial
  Probe
gatccaagtaaaaggctgggctgcc

SEQ ID NO: 249812 - DNA, 25 bp, Artificial
  Probe
aatctggatgtttcaaggacctcaa

SEQ ID NO: 249813 - DNA, 25 bp, Artificial
  Probe
acctttctgtcctgatcctgaggcc

SEQ ID NO: 249814 - DNA, 25 bp, Artificial
  Probe
tgatcatggacacatccgaatttca

SEQ ID NO: 249815 - DNA, 25 bp, Artificial
  Probe
tgatgatcatggacacatccgaatt

SEQ ID NO: 249816 - DNA, 25 bp, Artificial
  Probe
tcttctacactcaatttgcgacagg

SEQ ID NO: 249817 - DNA, 25 bp, Artificial
  Probe
tcaatttgcgacagggtgtgtcacc

SEQ ID NO: 249818 - DNA, 25 bp, Artificial
  Probe
actcaatttgcgacagggtgtgtca

SEQ ID NO: 249819 - DNA, 25 bp, Artificial
  Probe
aggatattaacttcagcagactgga

SEQ ID NO: 249820 - DNA, 25 bp, Artificial
  Probe
tacttaccaaggatccaagtaaaag

SEQ ID NO: 249821 - DNA, 25 bp, Artificial
  Probe
gtcctgatcctgaggccatttattg

SEQ ID NO: 249822 - DNA, 25 bp, Artificial
  Probe
caagtaaaaggctgggctgccagag

SEQ ID NO: 249823 - DNA, 25 bp, Artificial
  Probe
tgttagacccacctttctgtcctga

SEQ ID NO: 249824 - DNA, 25 bp, Artificial
  Probe
cctgaggccatttattgtaaggata

SEQ ID NO: 249825 - DNA, 25 bp, Artificial
  Probe
ttctctgtggtgaaaggagtcaacc

SEQ ID NO: 249826 - DNA, 25 bp, Artificial
  Probe
ctacactcaatttgcgacagggtgt

SEQ ID NO: 249827 - DNA, 25 bp, Artificial
  Probe
tttgcgacagggtgtgtcaccattc

SEQ ID NO: 249828 - DNA, 25 bp, Artificial
  Probe
atgttagacccacctttctgtcctg

SEQ ID NO: 249829 - DNA, 25 bp, Artificial
  Probe
tagctctggaaatcccagaagggga

SEQ ID NO: 249830 - DNA, 25 bp, Artificial
  Probe
gtcaacctggacaccaatgatgaga

SEQ ID NO: 249831 - DNA, 25 bp, Artificial
  Probe
atatcttggatattggacagttctc

SEQ ID NO: 249832 - DNA, 25 bp, Artificial
  Probe
cctgtgtacagcatggtgaacgggc

SEQ ID NO: 249833 - DNA, 25 bp, Artificial
  Probe
acttgacgggcaacgtggacggcat

SEQ ID NO: 249834 - DNA, 25 bp, Artificial
  Probe
cggccgcgcggcttccgaaggaaat

SEQ ID NO: 249835 - DNA, 25 bp, Artificial
  Probe
ttatggagccgcatgccgtttactc

SEQ ID NO: 249836 - DNA, 25 bp, Artificial
  Probe
ggcttccagggctccggaggcctct

SEQ ID NO: 249837 - DNA, 25 bp, Artificial
  Probe
gccgctctcaacagcggggcttctt

SEQ ID NO: 249838 - DNA, 25 bp, Artificial
  Probe
tatggagccgcatgccgtttactcc

SEQ ID NO: 249839 - DNA, 25 bp, Artificial
  Probe
gcgctcaagcctgtgtacagcatgg

SEQ ID NO: 249840 - DNA, 25 bp, Artificial
  Probe
aacagcggggcttcttacatcaaac

SEQ ID NO: 249841 - DNA, 25 bp, Artificial
  Probe
gaatggccacttgacgggcaacgtg

SEQ ID NO: 249842 - DNA, 25 bp, Artificial
  Probe
cttccgaaggaaatgccaggcgctc

SEQ ID NO: 249843 - DNA, 25 bp, Artificial
  Probe
ggcttgggcatgatgaatggccact

SEQ ID NO: 249844 - DNA, 25 bp, Artificial
  Probe
acagcggggcttcttacatcaaaca

SEQ ID NO: 249845 - DNA, 25 bp, Artificial
  Probe
ggacggcatggctttgcccagccac

SEQ ID NO: 249846 - DNA, 25 bp, Artificial
  Probe
ccaacggcggccactcgtacatggg

SEQ ID NO: 249847 - DNA, 25 bp, Artificial
  Probe
agcggggcttcttacatcaaacaac

SEQ ID NO: 249848 - DNA, 25 bp, Artificial
  Probe
aacgtggacggcatggctttgccca

SEQ ID NO: 249849 - DNA, 25 bp, Artificial
  Probe
ggcttccgaaggaaatgccaggcgc

SEQ ID NO: 249850 - DNA, 25 bp, Artificial
  Probe
cggcttccgaaggaaatgccaggcg

SEQ ID NO: 249851 - DNA, 25 bp, Artificial
  Probe
atgaatggccacttgacgggcaacg

SEQ ID NO: 249852 - DNA, 25 bp, Artificial
  Probe
ctgtgtacagcatggtgaacgggct

SEQ ID NO: 249853 - DNA, 25 bp, Artificial
  Probe
cggccactcgtacatgggtggctgc

SEQ ID NO: 249854 - DNA, 25 bp, Artificial
  Probe
caagcctgtgtacagcatggtgaac

SEQ ID NO: 249855 - DNA, 25 bp, Artificial
  Probe
atggctttgcccagccactcggtgc

SEQ ID NO: 249856 - DNA, 25 bp, Artificial
  Probe
gccaggcgctcaagcctgtgtacag

SEQ ID NO: 249857 - DNA, 25 bp, Artificial
  Probe
atgccaggcgctcaagcctgtgtac

SEQ ID NO: 249858 - DNA, 25 bp, Artificial
  Probe
agcctgtgtacagcatggtgaacgg

SEQ ID NO: 249859 - DNA, 25 bp, Artificial
  Probe
cctacggcttccagggctccggagg

SEQ ID NO: 249860 - DNA, 25 bp, Artificial
  Probe
tgcgcgcctaacagcctggcgctgg

SEQ ID NO: 249861 - DNA, 25 bp, Artificial
  Probe
gacggcatggctttgcccagccact

SEQ ID NO: 249862 - DNA, 25 bp, Artificial
  Probe
acgtggacggcatggctttgcccag

SEQ ID NO: 249863 - DNA, 25 bp, Artificial
  Probe
ggggcttcttacatcaaacaacagc

SEQ ID NO: 249864 - DNA, 25 bp, Artificial
  Probe
gtgcgcgcctaacagcctggcgctg

SEQ ID NO: 249865 - DNA, 25 bp, Artificial
  Probe
gctcaagcctgtgtacagcatggtg

SEQ ID NO: 249866 - DNA, 25 bp, Artificial
  Probe
tgatgaatggccacttgacgggcaa

SEQ ID NO: 249867 - DNA, 25 bp, Artificial
  Probe
aatggccacttgacgggcaacgtgg

SEQ ID NO: 249868 - DNA, 25 bp, Artificial
  Probe
gcgcggcttccgaaggaaatgccag

SEQ ID NO: 249869 - DNA, 25 bp, Artificial
  Probe
cacttgacgggcaacgtggacggca

SEQ ID NO: 249870 - DNA, 25 bp, Artificial
  Probe
aacggcggccactcgtacatgggtg

SEQ ID NO: 249871 - DNA, 25 bp, Artificial
  Probe
aagcctgtgtacagcatggtgaacg

SEQ ID NO: 249872 - DNA, 25 bp, Artificial
  Probe
aatgccaggcgctcaagcctgtgta

SEQ ID NO: 249873 - DNA, 25 bp, Artificial
  Probe
gggcttcttacatcaaacaacagcc

SEQ ID NO: 249874 - DNA, 25 bp, Artificial
  Probe
cggcttgggcatgatgaatggccac

SEQ ID NO: 249875 - DNA, 25 bp, Artificial
  Probe
acctacggcttccagggctccggag

SEQ ID NO: 249876 - DNA, 25 bp, Artificial
  Probe
caacagcggggcttcttacatcaaa

SEQ ID NO: 249877 - DNA, 25 bp, Artificial
  Probe
ggcgctcaagcctgtgtacagcatg

SEQ ID NO: 249878 - DNA, 25 bp, Artificial
  Probe
acactgccaagtacggttacaagtt

SEQ ID NO: 249879 - DNA, 25 bp, Artificial
  Probe
tgccaagtacggttacaagttgtgc

SEQ ID NO: 249880 - DNA, 25 bp, Artificial
  Probe
tcagtgtgtggcaggactgtcagcc

SEQ ID NO: 249881 - DNA, 25 bp, Artificial
  Probe
accaatgtcaccaagcggtgccacg

SEQ ID NO: 249882 - DNA, 25 bp, Artificial
  Probe
atggctcaggcaagaagacccacct

SEQ ID NO: 249883 - DNA, 25 bp, Artificial
  Probe
cggtgccacgaatcagtgtgtggca

SEQ ID NO: 249884 - DNA, 25 bp, Artificial
  Probe
ccaatgtcaccaagcggtgccacga

SEQ ID NO: 249885 - DNA, 25 bp, Artificial
  Probe
agaatatgacgctctgctgccctgg

SEQ ID NO: 249886 - DNA, 25 bp, Artificial
  Probe
ggttctgggcaaacttgagcacagt

SEQ ID NO: 249887 - DNA, 25 bp, Artificial
  Probe
tttccggaacaaggtcacctttatg

SEQ ID NO: 249888 - DNA, 25 bp, Artificial
  Probe
agagtcagttggaccgagagcacgt

SEQ ID NO: 249889 - DNA, 25 bp, Artificial
  Probe
tgtgcctgcgcctgtacctgaatgg

SEQ ID NO: 249890 - DNA, 25 bp, Artificial
  Probe
ttatgctacttgaccagaacaaccg

SEQ ID NO: 249891 - DNA, 25 bp, Artificial
  Probe
ttgagcacagtctgcgactcatgga

SEQ ID NO: 249892 - DNA, 25 bp, Artificial
  Probe
tggcctttccggaacaaggtcacct

SEQ ID NO: 249893 - DNA, 25 bp, Artificial
  Probe
ttctacactgccaagtacggttaca

SEQ ID NO: 249894 - DNA, 25 bp, Artificial
  Probe
agaacaaccgtgagcacgccattga

SEQ ID NO: 249895 - DNA, 25 bp, Artificial
  Probe
cgaatcagtgtgtggcaggactgtc

SEQ ID NO: 249896 - DNA, 25 bp, Artificial
  Probe
ccagctttctacactgccaagtacg

SEQ ID NO: 249897 - DNA, 25 bp, Artificial
  Probe
tgccacgaatcagtgtgtggcagga

SEQ ID NO: 249898 - DNA, 25 bp, Artificial
  Probe
gatcaccaatgtcaccaagcggtgc

SEQ ID NO: 249899 - DNA, 25 bp, Artificial
  Probe
gaggaggcgtcctttgatggtactt

SEQ ID NO: 249900 - DNA, 25 bp, Artificial
  Probe
ggctcaggcaagaagacccacctgt

SEQ ID NO: 249901 - DNA, 25 bp, Artificial
  Probe
acgtcctgaacttggagcagagggt

SEQ ID NO: 249902 - DNA, 25 bp, Artificial
  Probe
agctttctacactgccaagtacggt

SEQ ID NO: 249903 - DNA, 25 bp, Artificial
  Probe
cgtgagcacgccattgatgccttcc

SEQ ID NO: 249904 - DNA, 25 bp, Artificial
  Probe
gtcacctttatgctacttgaccaga

SEQ ID NO: 249905 - DNA, 25 bp, Artificial
  Probe
gtcaccaagcggtgccacgaatcag

SEQ ID NO: 249906 - DNA, 25 bp, Artificial
  Probe
ccaagcggtgccacgaatcagtgtg

SEQ ID NO: 249907 - DNA, 25 bp, Artificial
  Probe
tcagttggaccgagagcacgtcctg

SEQ ID NO: 249908 - DNA, 25 bp, Artificial
  Probe
tggaagatcaccaatgtcaccaagc

SEQ ID NO: 249909 - DNA, 25 bp, Artificial
  Probe
gctgccctggcctttccggaacaag

SEQ ID NO: 249910 - DNA, 25 bp, Artificial
  Probe
ttgaccagaacaaccgtgagcacgc

SEQ ID NO: 249911 - DNA, 25 bp, Artificial
  Probe
gatggtactttcctgtggaagatca

SEQ ID NO: 249912 - DNA, 25 bp, Artificial
  Probe
acaagttgtgcctgcgcctgtacct

SEQ ID NO: 249913 - DNA, 25 bp, Artificial
  Probe
atgacgctctgctgccctggccttt

SEQ ID NO: 249914 - DNA, 25 bp, Artificial
  Probe
gtactttcctgtggaagatcaccaa

SEQ ID NO: 249915 - DNA, 25 bp, Artificial
  Probe
tgccctggcctttccggaacaaggt

SEQ ID NO: 249916 - DNA, 25 bp, Artificial
  Probe
gcacagtctgcgactcatggaggag

SEQ ID NO: 249917 - DNA, 25 bp, Artificial
  Probe
ggcaggactgtcagcctcttctctc

SEQ ID NO: 249918 - DNA, 25 bp, Artificial
  Probe
ccagaacaaccgtgagcacgccatt

SEQ ID NO: 249919 - DNA, 25 bp, Artificial
  Probe
ggttacaagttgtgcctgcgcctgt

SEQ ID NO: 249920 - DNA, 25 bp, Artificial
  Probe
ctgcgcctgtacctgaatggggatg

SEQ ID NO: 249921 - DNA, 25 bp, Artificial
  Probe
tttcctgtggaagatcaccaatgtc

SEQ ID NO: 249922 - DNA, 25 bp, Artificial
  Probe
tcaaaaagaccaggttctgggcaaa

SEQ ID NO: 249923 - DNA, 25 bp, Artificial
  Probe
gcagaccctggctcaaaaagaccag

SEQ ID NO: 249924 - DNA, 25 bp, Artificial
  Probe
ccggcgcgagttcgaccgtgactct

SEQ ID NO: 249925 - DNA, 25 bp, Artificial
  Probe
gagacacgcttcactgcagtcaccg

SEQ ID NO: 249926 - DNA, 25 bp, Artificial
  Probe
agttcgaccgtgactctggacccgc

SEQ ID NO: 249927 - DNA, 25 bp, Artificial
  Probe
ctgcgacccggaggactggccccga

SEQ ID NO: 249928 - DNA, 25 bp, Artificial
  Probe
ctttgctcgctctcggaatcccgtg

SEQ ID NO: 249929 - DNA, 25 bp, Artificial
  Probe
cgctgccgcttgtaagtgcctttgc

SEQ ID NO: 249930 - DNA, 25 bp, Artificial
  Probe
tcgaccgtgactctggacccgcagc

SEQ ID NO: 249931 - DNA, 25 bp, Artificial
  Probe
gttcgaccgtgactctggacccgca

SEQ ID NO: 249932 - DNA, 25 bp, Artificial
  Probe
gctgccgcttgtaagtgcctttgct

SEQ ID NO: 249933 - DNA, 25 bp, Artificial
  Probe
tcgccaaaggcttccgggactgcga

SEQ ID NO: 249934 - DNA, 25 bp, Artificial
  Probe
cggcgcgagttcgaccgtgactctg

SEQ ID NO: 249935 - DNA, 25 bp, Artificial
  Probe
aagtgcctttgctcgctctcggaat

SEQ ID NO: 249936 - DNA, 25 bp, Artificial
  Probe
gcccggcgcgagttcgaccgtgact

SEQ ID NO: 249937 - DNA, 25 bp, Artificial
  Probe
cttgtaagtgcctttgctcgctctc

SEQ ID NO: 249938 - DNA, 25 bp, Artificial
  Probe
ttaagattgccagcaaccccttcgc

SEQ ID NO: 249939 - DNA, 25 bp, Artificial
  Probe
tgccgcttgtaagtgcctttgctcg

SEQ ID NO: 249940 - DNA, 25 bp, Artificial
  Probe
ccgcacgctgatctgcgcctggagg

SEQ ID NO: 249941 - DNA, 25 bp, Artificial
  Probe
cttaagattgccagcaaccccttcg

SEQ ID NO: 249942 - DNA, 25 bp, Artificial
  Probe
ccaacggagcggacaaagatgtggc

SEQ ID NO: 249943 - DNA, 25 bp, Artificial
  Probe
agcgctgccgcttgtaagtgccttt

SEQ ID NO: 249944 - DNA, 25 bp, Artificial
  Probe
caacggagcggacaaagatgtggca

SEQ ID NO: 249945 - DNA, 25 bp, Artificial
  Probe
ttcgccaaaggcttccgggactgcg

SEQ ID NO: 249946 - DNA, 25 bp, Artificial
  Probe
gctcgctctcggaatcccgtggctt

SEQ ID NO: 249947 - DNA, 25 bp, Artificial
  Probe
tgtaagtgcctttgctcgctctcgg

SEQ ID NO: 249948 - DNA, 25 bp, Artificial
  Probe
ctgcagtcaccgcctaccagaatca

SEQ ID NO: 249949 - DNA, 25 bp, Artificial
  Probe
tcggcgacgccacgcacccgccgca

SEQ ID NO: 249950 - DNA, 25 bp, Artificial
  Probe
gccgcttgtaagtgcctttgctcgc

SEQ ID NO: 249951 - DNA, 25 bp, Artificial
  Probe
gagttcgaccgtgactctggacccg

SEQ ID NO: 249952 - DNA, 25 bp, Artificial
  Probe
ttcgaccgtgactctggacccgcag

SEQ ID NO: 249953 - DNA, 25 bp, Artificial
  Probe
taagtgcctttgctcgctctcggaa

SEQ ID NO: 249954 - DNA, 25 bp, Artificial
  Probe
gcagcccaacggagcggacaaagat

SEQ ID NO: 249955 - DNA, 25 bp, Artificial
  Probe
aagcccggcgcgagttcgaccgtga

SEQ ID NO: 249956 - DNA, 25 bp, Artificial
  Probe
ttgtaagtgcctttgctcgctctcg

SEQ ID NO: 249957 - DNA, 25 bp, Artificial
  Probe
cgagttcgaccgtgactctggaccc

SEQ ID NO: 249958 - DNA, 25 bp, Artificial
  Probe
cgcacgctgatctgcgcctggaggc

SEQ ID NO: 249959 - DNA, 25 bp, Artificial
  Probe
gtaagtgcctttgctcgctctcgga

SEQ ID NO: 249960 - DNA, 25 bp, Artificial
  Probe
gcgctgccgcttgtaagtgcctttg

SEQ ID NO: 249961 - DNA, 25 bp, Artificial
  Probe
gcagcttaagattgccagcaacccc

SEQ ID NO: 249962 - DNA, 25 bp, Artificial
  Probe
ctgccgcttgtaagtgcctttgctc

SEQ ID NO: 249963 - DNA, 25 bp, Artificial
  Probe
cagcttaagattgccagcaacccct

SEQ ID NO: 249964 - DNA, 25 bp, Artificial
  Probe
agcccggcgcgagttcgaccgtgac

SEQ ID NO: 249965 - DNA, 25 bp, Artificial
  Probe
cgcagcttaagattgccagcaaccc

SEQ ID NO: 249966 - DNA, 25 bp, Artificial
  Probe
ggagacacgcttcactgcagtcacc

SEQ ID NO: 249967 - DNA, 25 bp, Artificial
  Probe
actgcctgggcctggtggcctcgtc

SEQ ID NO: 249968 - DNA, 25 bp, Artificial
  Probe
tgcgacccggaggactggccccgaa

SEQ ID NO: 249969 - DNA, 25 bp, Artificial
  Probe
gagcgctgccgcttgtaagtgcctt

SEQ ID NO: 249970 - DNA, 25 bp, Artificial
  Probe
cagttggatgcacacagactcctcc

SEQ ID NO: 249971 - DNA, 25 bp, Artificial
  Probe
ccgagtgtcagtacgtctatctgca

SEQ ID NO: 249972 - DNA, 25 bp, Artificial
  Probe
tccagagtatcacagagatgcaatg

SEQ ID NO: 249973 - DNA, 25 bp, Artificial
  Probe
agtatcacagagatgcaatgtactc

SEQ ID NO: 249974 - DNA, 25 bp, Artificial
  Probe
tactcgagacattgagaattcacct

SEQ ID NO: 249975 - DNA, 25 bp, Artificial
  Probe
ttccgatctatgaaaatgtgaatcc

SEQ ID NO: 249976 - DNA, 25 bp, Artificial
  Probe
tgtgtgagagacgtcctcagagcaa

SEQ ID NO: 249977 - DNA, 25 bp, Artificial
  Probe
ttcacctggagatcccctggataaa

SEQ ID NO: 249978 - DNA, 25 bp, Artificial
  Probe
catcagtgtgtgagagacgtcctca

SEQ ID NO: 249979 - DNA, 25 bp, Artificial
  Probe
catttatggggcagtgcatgaccta

SEQ ID NO: 249980 - DNA, 25 bp, Artificial
  Probe
tatatcaaccgaagcccaggggccg

SEQ ID NO: 249981 - DNA, 25 bp, Artificial
  Probe
tgtgaatccagagtatcacagagat

SEQ ID NO: 249982 - DNA, 25 bp, Artificial
  Probe
gggactatatcaaccgaagcccagg

SEQ ID NO: 249983 - DNA, 25 bp, Artificial
  Probe
tgtgagaacggtcagggactatatc

SEQ ID NO: 249984 - DNA, 25 bp, Artificial
  Probe
tcagggactatatcaaccgaagccc

SEQ ID NO: 249985 - DNA, 25 bp, Artificial
  Probe
tatcacagagatgcaatgtactcga

SEQ ID NO: 249986 - DNA, 25 bp, Artificial
  Probe
cctgatccagtttgtgagaacggtc

SEQ ID NO: 249987 - DNA, 25 bp, Artificial
  Probe
tcacttccactacacggtgtggcca

SEQ ID NO: 249988 - DNA, 25 bp, Artificial
  Probe
ctaagactccacagggttcacatgg

SEQ ID NO: 249989 - DNA, 25 bp, Artificial
  Probe
catttgttgccctggaccggatcct

SEQ ID NO: 249990 - DNA, 25 bp, Artificial
  Probe
ggttcacatggtccagaccgagtgt

SEQ ID NO: 249991 - DNA, 25 bp, Artificial
  Probe
agacattgagaattcacctggagat

SEQ ID NO: 249992 - DNA, 25 bp, Artificial
  Probe
tccctgatccagtttgtgagaacgg

SEQ ID NO: 249993 - DNA, 25 bp, Artificial
  Probe
aacagggacatttgttgccctggac

SEQ ID NO: 249994 - DNA, 25 bp, Artificial
  Probe
ttgttgccctggaccggatcctcca

SEQ ID NO: 249995 - DNA, 25 bp, Artificial
  Probe
agggacatttgttgccctggaccgg

SEQ ID NO: 249996 - DNA, 25 bp, Artificial
  Probe
tcccctggataaaagtttttcactg

SEQ ID NO: 249997 - DNA, 25 bp, Artificial
  Probe
cgtcctcagagcaaggaaactgcgg

SEQ ID NO: 249998 - DNA, 25 bp, Artificial
  Probe
ctatatcaaccgaagcccaggggcc

SEQ ID NO: 249999 - DNA, 25 bp, Artificial
  Probe
ctggagatcccctggataaaagttt

SEQ ID NO: 250000 - DNA, 25 bp, Artificial
  Probe
tggagatcccctggataaaagtttt

SEQ ID NO: 250001 - DNA, 25 bp, Artificial
  Probe
cagcagttggactcaaaggactccg

SEQ ID NO: 250002 - DNA, 25 bp, Artificial
  Probe
cctggaccggatcctccagcagttg

SEQ ID NO: 250003 - DNA, 25 bp, Artificial
  Probe
ccgtggacatttatggggcagtgca

SEQ ID NO: 250004 - DNA, 25 bp, Artificial
  Probe
gcaatgtactcgagacattgagaat

SEQ ID NO: 250005 - DNA, 25 bp, Artificial
  Probe
ccagtccctgatccagtttgtgaga

SEQ ID NO: 250006 - DNA, 25 bp, Artificial
  Probe
gactcaaaggactccgtggacattt

SEQ ID NO: 250007 - DNA, 25 bp, Artificial
  Probe
gactccacagggttcacatggtcca

SEQ ID NO: 250008 - DNA, 25 bp, Artificial
  Probe
cccctgtttccgatctatgaaaatg

SEQ ID NO: 250009 - DNA, 25 bp, Artificial
  Probe
gagatgcaatgtactcgagacattg

SEQ ID NO: 250010 - DNA, 25 bp, Artificial
  Probe
agagatgcaatgtactcgagacatt

SEQ ID NO: 250011 - DNA, 25 bp, Artificial
  Probe
cagtttgtgagaacggtcagggact

SEQ ID NO: 250012 - DNA, 25 bp, Artificial
  Probe
gttggactcaaaggactccgtggac

SEQ ID NO: 250013 - DNA, 25 bp, Artificial
  Probe
caaaggactccgtggacatttatgg

SEQ ID NO: 250014 - DNA, 25 bp, Artificial
  Probe
ctgtttccgatctatgaaaatgtga

SEQ ID NO: 250015 - DNA, 25 bp, Artificial
  Probe
cacccagtccctgatccagtttgtg

SEQ ID NO: 250016 - DNA, 25 bp, Artificial
  Probe
agccaactgtgtcttgtgttggaac

SEQ ID NO: 250017 - DNA, 25 bp, Artificial
  Probe
tagatctttgtgaggtttccatggc

SEQ ID NO: 250018 - DNA, 25 bp, Artificial
  Probe
aaggaagccaactgtgtcttgtgtt

SEQ ID NO: 250019 - DNA, 25 bp, Artificial
  Probe
ttaaaccttctccaaatgtggaatg

SEQ ID NO: 250020 - DNA, 25 bp, Artificial
  Probe
gcatcatagaccaggggtccattct

SEQ ID NO: 250021 - DNA, 25 bp, Artificial
  Probe
gtgaggtttccatggcatcatagac

SEQ ID NO: 250022 - DNA, 25 bp, Artificial
  Probe
tcaccaaatgtgttcagacattgct

SEQ ID NO: 250023 - DNA, 25 bp, Artificial
  Probe
tgcaaattgttcttgtcaccaaatg

SEQ ID NO: 250024 - DNA, 25 bp, Artificial
  Probe
tgtggaatggtctggccaacttgct

SEQ ID NO: 250025 - DNA, 25 bp, Artificial
  Probe
aaatgtgttcagacattgctgtgca

SEQ ID NO: 250026 - DNA, 25 bp, Artificial
  Probe
cctgttgtttcttgtgaagaatcta

SEQ ID NO: 250027 - DNA, 25 bp, Artificial
  Probe
ataactgactcagaaggaagccaac

SEQ ID NO: 250028 - DNA, 25 bp, Artificial
  Probe
aatggtctggccaacttgctccgga

SEQ ID NO: 250029 - DNA, 25 bp, Artificial
  Probe
gaccacttttgcaaattgttcttgt

SEQ ID NO: 250030 - DNA, 25 bp, Artificial
  Probe
aatgtatctgagcaggctctgattt

SEQ ID NO: 250031 - DNA, 25 bp, Artificial
  Probe
gccaactgctcactcttgacttagc

SEQ ID NO: 250032 - DNA, 25 bp, Artificial
  Probe
gccatttgtgacaaccacccttgtt

SEQ ID NO: 250033 - DNA, 25 bp, Artificial
  Probe
gaaatgtatctgagcaggctctgat

SEQ ID NO: 250034 - DNA, 25 bp, Artificial
  Probe
ccaaatgtggaatggtctggccaac

SEQ ID NO: 250035 - DNA, 25 bp, Artificial
  Probe
cccttgtgtgccttctctgcaaggt

SEQ ID NO: 250036 - DNA, 25 bp, Artificial
  Probe
gaggcccttgtgtgccttctctgca

SEQ ID NO: 250037 - DNA, 25 bp, Artificial
  Probe
tcagacattgctgtgcagttgtggg

SEQ ID NO: 250038 - DNA, 25 bp, Artificial
  Probe
gctctagccatttgtgacaaccacc

SEQ ID NO: 250039 - DNA, 25 bp, Artificial
  Probe
ctcttgacttagctctagccatttg

SEQ ID NO: 250040 - DNA, 25 bp, Artificial
  Probe
aggaagccaactgtgtcttgtgttg

SEQ ID NO: 250041 - DNA, 25 bp, Artificial
  Probe
ctgctcactcttgacttagctctag

SEQ ID NO: 250042 - DNA, 25 bp, Artificial
  Probe
gctcactcttgacttagctctagcc

SEQ ID NO: 250043 - DNA, 25 bp, Artificial
  Probe
atagaccaggggtccattcttggtc

SEQ ID NO: 250044 - DNA, 25 bp, Artificial
  Probe
gatgatctctactgccaggtagatc

SEQ ID NO: 250045 - DNA, 25 bp, Artificial
  Probe
ctgactcagaaggaagccaactgtg

SEQ ID NO: 250046 - DNA, 25 bp, Artificial
  Probe
caaatcctcgcatgtaaccttggta

SEQ ID NO: 250047 - DNA, 25 bp, Artificial
  Probe
tagccatttgtgacaaccacccttg

SEQ ID NO: 250048 - DNA, 25 bp, Artificial
  Probe
accttggtactcctgttgtttcttg

SEQ ID NO: 250049 - DNA, 25 bp, Artificial
  Probe
agaccacttttgcaaattgttcttg

SEQ ID NO: 250050 - DNA, 25 bp, Artificial
  Probe
aacttgctccggatgcaataaagac

SEQ ID NO: 250051 - DNA, 25 bp, Artificial
  Probe
tgccttctctgcaaggtaccagctc

SEQ ID NO: 250052 - DNA, 25 bp, Artificial
  Probe
tgacttagctctagccatttgtgac

SEQ ID NO: 250053 - DNA, 25 bp, Artificial
  Probe
ctttgctgccaactgctcactcttg

SEQ ID NO: 250054 - DNA, 25 bp, Artificial
  Probe
ttggtcctttgctgccaactgctca

SEQ ID NO: 250055 - DNA, 25 bp, Artificial
  Probe
atctgagcaggctctgatttctagg

SEQ ID NO: 250056 - DNA, 25 bp, Artificial
  Probe
aatgtgttcagacattgctgtgcag

SEQ ID NO: 250057 - DNA, 25 bp, Artificial
  Probe
ccttctccaaatgtggaatggtctg

SEQ ID NO: 250058 - DNA, 25 bp, Artificial
  Probe
ctgtgtcttgtgttggaacaattca

SEQ ID NO: 250059 - DNA, 25 bp, Artificial
  Probe
ggtttccatggcatcatagaccagg

SEQ ID NO: 250060 - DNA, 25 bp, Artificial
  Probe
atctctactgccaggtagatctttg

SEQ ID NO: 250061 - DNA, 25 bp, Artificial
  Probe
tggccaacttgctccggatgcaata

SEQ ID NO: 250062 - DNA, 25 bp, Artificial
  Probe
ttctctgtctatatttgtggtggcc

SEQ ID NO: 250063 - DNA, 25 bp, Artificial
  Probe
gaattctcaccctgttgtcccatgc

SEQ ID NO: 250064 - DNA, 25 bp, Artificial
  Probe
ggaccatttccttcacttgggaatt

SEQ ID NO: 250065 - DNA, 25 bp, Artificial
  Probe
ggcagggaccatttccttcacttgg

SEQ ID NO: 250066 - DNA, 25 bp, Artificial
  Probe
agaacagacatctgtatttttgcct

SEQ ID NO: 250067 - DNA, 25 bp, Artificial
  Probe
ttcagaacagacatctgtatttttg

SEQ ID NO: 250068 - DNA, 25 bp, Artificial
  Probe
gatcctgacttttccaaagtgcctt

SEQ ID NO: 250069 - DNA, 25 bp, Artificial
  Probe
gaccttgatattcagaacagacatc

SEQ ID NO: 250070 - DNA, 25 bp, Artificial
  Probe
cagggtctcggctgcccactgggct

SEQ ID NO: 250071 - DNA, 25 bp, Artificial
  Probe
agacatctgtatttttgcctttgaa

SEQ ID NO: 250072 - DNA, 25 bp, Artificial
  Probe
agacacatggagtgtgtcacttcct

SEQ ID NO: 250073 - DNA, 25 bp, Artificial
  Probe
cccagcatgctttggggcacctcag

SEQ ID NO: 250074 - DNA, 25 bp, Artificial
  Probe
acagacatctgtatttttgcctttg

SEQ ID NO: 250075 - DNA, 25 bp, Artificial
  Probe
caccttttctctgtgctgttcctgt

SEQ ID NO: 250076 - DNA, 25 bp, Artificial
  Probe
tccaaagtgccttaaaagaagggag

SEQ ID NO: 250077 - DNA, 25 bp, Artificial
  Probe
tcggctgcccactgggctgttacag

SEQ ID NO: 250078 - DNA, 25 bp, Artificial
  Probe
ttgggaattctcaccctgttgtccc

SEQ ID NO: 250079 - DNA, 25 bp, Artificial
  Probe
caaggcacacccaaggcactgttgt

SEQ ID NO: 250080 - DNA, 25 bp, Artificial
  Probe
aaggcacacccaaggcactgttgtt

SEQ ID NO: 250081 - DNA, 25 bp, Artificial
  Probe
tgggcatttgcctgacccaggagat

SEQ ID NO: 250082 - DNA, 25 bp, Artificial
  Probe
ctatatttgtggtggcctgtgtggc

SEQ ID NO: 250083 - DNA, 25 bp, Artificial
  Probe
catctgtatttttgcctttgaaatg

SEQ ID NO: 250084 - DNA, 25 bp, Artificial
  Probe
atagatgtatttaccactggggctg

SEQ ID NO: 250085 - DNA, 25 bp, Artificial
  Probe
gggagatcacagacacatggagtgt

SEQ ID NO: 250086 - DNA, 25 bp, Artificial
  Probe
ctcaccctgttgtcccatgctgtgt

SEQ ID NO: 250087 - DNA, 25 bp, Artificial
  Probe
cagggaccatttccttcacttggga

SEQ ID NO: 250088 - DNA, 25 bp, Artificial
  Probe
tatagatgtatttaccactggggct

SEQ ID NO: 250089 - DNA, 25 bp, Artificial
  Probe
ttggggcacctcaggcccaaggcac

SEQ ID NO: 250090 - DNA, 25 bp, Artificial
  Probe
ttcctgttgggttttgttcacgtca

SEQ ID NO: 250091 - DNA, 25 bp, Artificial
  Probe
tcccagcatgctttggggcacctca

SEQ ID NO: 250092 - DNA, 25 bp, Artificial
  Probe
cagacacatggagtgtgtcacttcc

SEQ ID NO: 250093 - DNA, 25 bp, Artificial
  Probe
ttcctcccagcatgctttggggcac

SEQ ID NO: 250094 - DNA, 25 bp, Artificial
  Probe
tcctgttgggttttgttcacgtcaa

SEQ ID NO: 250095 - DNA, 25 bp, Artificial
  Probe
cacacccaaggcactgttgttaggc

SEQ ID NO: 250096 - DNA, 25 bp, Artificial
  Probe
atcccatgtgtatagatgtatttac

SEQ ID NO: 250097 - DNA, 25 bp, Artificial
  Probe
gggtggctgtctctgaccttgatat

SEQ ID NO: 250098 - DNA, 25 bp, Artificial
  Probe
gatattcagaacagacatctgtatt

SEQ ID NO: 250099 - DNA, 25 bp, Artificial
  Probe
tcacagacacatggagtgtgtcact

SEQ ID NO: 250100 - DNA, 25 bp, Artificial
  Probe
catgctgtgtctttctctgtctata

SEQ ID NO: 250101 - DNA, 25 bp, Artificial
  Probe
ctgtctatatttgtggtggcctgtg

SEQ ID NO: 250102 - DNA, 25 bp, Artificial
  Probe
tctcggctgcccactgggctgttac

SEQ ID NO: 250103 - DNA, 25 bp, Artificial
  Probe
atgctttggggcacctcaggcccaa

SEQ ID NO: 250104 - DNA, 25 bp, Artificial
  Probe
ccttcacttgggaattctcaccctg

SEQ ID NO: 250105 - DNA, 25 bp, Artificial
  Probe
ccaccttttctctgtgctgttcctg

SEQ ID NO: 250106 - DNA, 25 bp, Artificial
  Probe
ccctgttgtcccatgctgtgtcttt

SEQ ID NO: 250107 - DNA, 25 bp, Artificial
  Probe
tgacttttccaaagtgccttaaaag

SEQ ID NO: 250108 - DNA, 25 bp, Artificial
  Probe
tttgtcattgacagccctgcagagg

SEQ ID NO: 250109 - DNA, 25 bp, Artificial
  Probe
tgtccccaggcatggggctcttttg

SEQ ID NO: 250110 - DNA, 25 bp, Artificial
  Probe
ttgacagccctgcagaggggactcc

SEQ ID NO: 250111 - DNA, 25 bp, Artificial
  Probe
tgacagccctgcagaggggactcca

SEQ ID NO: 250112 - DNA, 25 bp, Artificial
  Probe
ggggctcttttgtcattgacagccc

SEQ ID NO: 250113 - DNA, 25 bp, Artificial
  Probe
gctcttttgtcattgacagccctgc

SEQ ID NO: 250114 - DNA, 25 bp, Artificial
  Probe
tggcagctggtctccatcccttgtt

SEQ ID NO: 250115 - DNA, 25 bp, Artificial
  Probe
gtctccatcccttgttcatgagctt

SEQ ID NO: 250116 - DNA, 25 bp, Artificial
  Probe
ggcatggggctcttttgtcattgac

SEQ ID NO: 250117 - DNA, 25 bp, Artificial
  Probe
caggcatggggctcttttgtcattg

SEQ ID NO: 250118 - DNA, 25 bp, Artificial
  Probe
ctccatcccttgttcatgagcttag

SEQ ID NO: 250119 - DNA, 25 bp, Artificial
  Probe
cattgacagccctgcagaggggact

SEQ ID NO: 250120 - DNA, 25 bp, Artificial
  Probe
atggggctcttttgtcattgacagc

SEQ ID NO: 250121 - DNA, 25 bp, Artificial
  Probe
ggctcttttgtcattgacagccctg

SEQ ID NO: 250122 - DNA, 25 bp, Artificial
  Probe
aattcccaatttgtgtccccaggca

SEQ ID NO: 250123 - DNA, 25 bp, Artificial
  Probe
ggactccatggcagctggtctccat

SEQ ID NO: 250124 - DNA, 25 bp, Artificial
  Probe
catggcagctggtctccatcccttg

SEQ ID NO: 250125 - DNA, 25 bp, Artificial
  Probe
atggcagctggtctccatcccttgt

SEQ ID NO: 250126 - DNA, 25 bp, Artificial
  Probe
ttttgtcattgacagccctgcagag

SEQ ID NO: 250127 - DNA, 25 bp, Artificial
  Probe
ccatcccttgttcatgagcttaggg

SEQ ID NO: 250128 - DNA, 25 bp, Artificial
  Probe
ggtctccatcccttgttcatgagct

SEQ ID NO: 250129 - DNA, 25 bp, Artificial
  Probe
agctggtctccatcccttgttcatg

SEQ ID NO: 250130 - DNA, 25 bp, Artificial
  Probe
catcccttgttcatgagcttagggt

SEQ ID NO: 250131 - DNA, 25 bp, Artificial
  Probe
ggcagctggtctccatcccttgttc

SEQ ID NO: 250132 - DNA, 25 bp, Artificial
  Probe
caattcccaatttgtgtccccaggc

SEQ ID NO: 250133 - DNA, 25 bp, Artificial
  Probe
gactccatggcagctggtctccatc

SEQ ID NO: 250134 - DNA, 25 bp, Artificial
  Probe
cagctggtctccatcccttgttcat

SEQ ID NO: 250135 - DNA, 25 bp, Artificial
  Probe
gcagctggtctccatcccttgttca

SEQ ID NO: 250136 - DNA, 25 bp, Artificial
  Probe
ccaattcccaatttgtgtccccagg

SEQ ID NO: 250137 - DNA, 25 bp, Artificial
  Probe
cttttgtcattgacagccctgcaga

SEQ ID NO: 250138 - DNA, 25 bp, Artificial
  Probe
aggcatggggctcttttgtcattga

SEQ ID NO: 250139 - DNA, 25 bp, Artificial
  Probe
gtgtccccaggcatggggctctttt

SEQ ID NO: 250140 - DNA, 25 bp, Artificial
  Probe
gggctcttttgtcattgacagccct

SEQ ID NO: 250141 - DNA, 25 bp, Artificial
  Probe
gacagccctgcagaggggactccat

SEQ ID NO: 250142 - DNA, 25 bp, Artificial
  Probe
atttgtgtccccaggcatggggctc

SEQ ID NO: 250143 - DNA, 25 bp, Artificial
  Probe
tcccaatttgtgtccccaggcatgg

SEQ ID NO: 250144 - DNA, 25 bp, Artificial
  Probe
ctcttttgtcattgacagccctgca

SEQ ID NO: 250145 - DNA, 25 bp, Artificial
  Probe
gcatggggctcttttgtcattgaca

SEQ ID NO: 250146 - DNA, 25 bp, Artificial
  Probe
cttgttcatgagcttagggtgggtt

SEQ ID NO: 250147 - DNA, 25 bp, Artificial
  Probe
attgacagccctgcagaggggactc

SEQ ID NO: 250148 - DNA, 25 bp, Artificial
  Probe
atcccttgttcatgagcttagggtg

SEQ ID NO: 250149 - DNA, 25 bp, Artificial
  Probe
tgtaataaagaccgaccatttcaaa

SEQ ID NO: 250150 - DNA, 25 bp, Artificial
  Probe
tcttttgtcattgacagccctgcag

SEQ ID NO: 250151 - DNA, 25 bp, Artificial
  Probe
catggggctcttttgtcattgacag

SEQ ID NO: 250152 - DNA, 25 bp, Artificial
  Probe
tccatcccttgttcatgagcttagg

SEQ ID NO: 250153 - DNA, 25 bp, Artificial
  Probe
tggggctcttttgtcattgacagcc

SEQ ID NO: 250154 - DNA, 25 bp, Artificial
  Probe
aggggccctgactgccacactgggc

SEQ ID NO: 250155 - DNA, 25 bp, Artificial
  Probe
ttaaggacccttctaatctcagaag

SEQ ID NO: 250156 - DNA, 25 bp, Artificial
  Probe
gataaccagtgtcaccaagaatttc

SEQ ID NO: 250157 - DNA, 25 bp, Artificial
  Probe
agccctgggtgctagtcatgaatga

SEQ ID NO: 250158 - DNA, 25 bp, Artificial
  Probe
gcctgagctacaaatgattccttta

SEQ ID NO: 250159 - DNA, 25 bp, Artificial
  Probe
ggagcccatcagagagcagctcctg

SEQ ID NO: 250160 - DNA, 25 bp, Artificial
  Probe
tgattgtaaagttcgccactaaaat

SEQ ID NO: 250161 - DNA, 25 bp, Artificial
  Probe
agtcccagtagactgactacagtgt

SEQ ID NO: 250162 - DNA, 25 bp, Artificial
  Probe
ctgctctgtgaaggactgtgctgtg

SEQ ID NO: 250163 - DNA, 25 bp, Artificial
  Probe
gagcccatcagagagcagctcctga

SEQ ID NO: 250164 - DNA, 25 bp, Artificial
  Probe
acggtggtctgtaagcaaagtgcct

SEQ ID NO: 250165 - DNA, 25 bp, Artificial
  Probe
gcagctcctgacctccaaacaagtg

SEQ ID NO: 250166 - DNA, 25 bp, Artificial
  Probe
tccttggagcccatcagagagcagc

SEQ ID NO: 250167 - DNA, 25 bp, Artificial
  Probe
ctgcctccacggtggtctgtaagca

SEQ ID NO: 250168 - DNA, 25 bp, Artificial
  Probe
ctgtaagcaaagtgccttgggctgg

SEQ ID NO: 250169 - DNA, 25 bp, Artificial
  Probe
ccttgggctggctatagtggctcac

SEQ ID NO: 250170 - DNA, 25 bp, Artificial
  Probe
aaagcaagtgcctttacctggagat

SEQ ID NO: 250171 - DNA, 25 bp, Artificial
  Probe
ggagataaccagtgtcaccaagaat

SEQ ID NO: 250172 - DNA, 25 bp, Artificial
  Probe
tcatatccttggagcccatcagaga

SEQ ID NO: 250173 - DNA, 25 bp, Artificial
  Probe
aacacacgaaagcaagtgcctttac

SEQ ID NO: 250174 - DNA, 25 bp, Artificial
  Probe
cagtgtgctcacagccctgggtgct

SEQ ID NO: 250175 - DNA, 25 bp, Artificial
  Probe
tcctagcacttgagagttgagaact

SEQ ID NO: 250176 - DNA, 25 bp, Artificial
  Probe
aaggacccttctaatctcagaagtc

SEQ ID NO: 250177 - DNA, 25 bp, Artificial
  Probe
tagcacttgagagttgagaactgct

SEQ ID NO: 250178 - DNA, 25 bp, Artificial
  Probe
gttgagaactgctgtgctttatagc

SEQ ID NO: 250179 - DNA, 25 bp, Artificial
  Probe
tacctggagataaccagtgtcacca

SEQ ID NO: 250180 - DNA, 25 bp, Artificial
  Probe
agcaaagtgccttgggctggctata

SEQ ID NO: 250181 - DNA, 25 bp, Artificial
  Probe
ctgactgccacactgggcggccaaa

SEQ ID NO: 250182 - DNA, 25 bp, Artificial
  Probe
agcaggggccctgactgccacactg

SEQ ID NO: 250183 - DNA, 25 bp, Artificial
  Probe
gctcactctgcaatcctagcacttg

SEQ ID NO: 250184 - DNA, 25 bp, Artificial
  Probe
tcgccactaaaatcgctgctctgtg

SEQ ID NO: 250185 - DNA, 25 bp, Artificial
  Probe
cacagccctgggtgctagtcatgaa

SEQ ID NO: 250186 - DNA, 25 bp, Artificial
  Probe
agagagcagctcctgacctccaaac

SEQ ID NO: 250187 - DNA, 25 bp, Artificial
  Probe
tttatagcagcctgagctacaaatg

SEQ ID NO: 250188 - DNA, 25 bp, Artificial
  Probe
gtgctttatagcagcctgagctaca

SEQ ID NO: 250189 - DNA, 25 bp, Artificial
  Probe
gagggagcaccctgcctccacggtg

SEQ ID NO: 250190 - DNA, 25 bp, Artificial
  Probe
tcagagagcagctcctgacctccaa

SEQ ID NO: 250191 - DNA, 25 bp, Artificial
  Probe
ggctatagtggctcactctgcaatc

SEQ ID NO: 250192 - DNA, 25 bp, Artificial
  Probe
tgactgccacactgggcggccaaat

SEQ ID NO: 250193 - DNA, 25 bp, Artificial
  Probe
gtaaagttcgccactaaaatcgctg

SEQ ID NO: 250194 - DNA, 25 bp, Artificial
  Probe
cactgggcggccaaataaaccattt

SEQ ID NO: 250195 - DNA, 25 bp, Artificial
  Probe
cacacgaaagcaagtgcctttacct

SEQ ID NO: 250196 - DNA, 25 bp, Artificial
  Probe
cttctaatctcagaagtcccagtag

SEQ ID NO: 250197 - DNA, 25 bp, Artificial
  Probe
taatctcagaagtcccagtagactg

SEQ ID NO: 250198 - DNA, 25 bp, Artificial
  Probe
ggcggccaaataaaccatttcttgt

SEQ ID NO: 250199 - DNA, 25 bp, Artificial
  Probe
gacctccaaacaagtgcaagagcct

SEQ ID NO: 250200 - DNA, 25 bp, Artificial
  Probe
tctgtgtgtttcagattaagaacac

SEQ ID NO: 250201 - DNA, 25 bp, Artificial
  Probe
tgtggcgaggaccatactgtgaaga

SEQ ID NO: 250202 - DNA, 25 bp, Artificial
  Probe
taccttagtgattgaatgagtttcc

SEQ ID NO: 250203 - DNA, 25 bp, Artificial
  Probe
attttgcaagctgtggcgaggacca

SEQ ID NO: 250204 - DNA, 25 bp, Artificial
  Probe
aagctgtggcgaggaccatactgtg

SEQ ID NO: 250205 - DNA, 25 bp, Artificial
  Probe
agctgcagcggcagcactgagcaga

SEQ ID NO: 250206 - DNA, 25 bp, Artificial
  Probe
ctacctctgtgtgtttcagattaag

SEQ ID NO: 250207 - DNA, 25 bp, Artificial
  Probe
ctcaccctgcctgtcttgattgtct

SEQ ID NO: 250208 - DNA, 25 bp, Artificial
  Probe
ggcgaggaccatactgtgaagattt

SEQ ID NO: 250209 - DNA, 25 bp, Artificial
  Probe
tgcctgtcttgattgtcttaaacgt

SEQ ID NO: 250210 - DNA, 25 bp, Artificial
  Probe
tcgcatgtatgtaacctcccagaac

SEQ ID NO: 250211 - DNA, 25 bp, Artificial
  Probe
tccttaccttagtgattgaatgagt

SEQ ID NO: 250212 - DNA, 25 bp, Artificial
  Probe
ctggaagagctgcagcggcagcact

SEQ ID NO: 250213 - DNA, 25 bp, Artificial
  Probe
ccctgcctgtcttgattgtcttaaa

SEQ ID NO: 250214 - DNA, 25 bp, Artificial
  Probe
caccctgcctgtcttgattgtctta

SEQ ID NO: 250215 - DNA, 25 bp, Artificial
  Probe
ctttccttaccttagtgattgaatg

SEQ ID NO: 250216 - DNA, 25 bp, Artificial
  Probe
gtggcgaggaccatactgtgaagat

SEQ ID NO: 250217 - DNA, 25 bp, Artificial
  Probe
acctctgtgtgtttcagattaagaa

SEQ ID NO: 250218 - DNA, 25 bp, Artificial
  Probe
tcacacgctgggtatcagaaggtta

SEQ ID NO: 250219 - DNA, 25 bp, Artificial
  Probe
ctgtggcgaggaccatactgtgaag

SEQ ID NO: 250220 - DNA, 25 bp, Artificial
  Probe
cacacgctgggtatcagaaggttat

SEQ ID NO: 250221 - DNA, 25 bp, Artificial
  Probe
tggcgaggaccatactgtgaagatt

SEQ ID NO: 250222 - DNA, 25 bp, Artificial
  Probe
tcaccctgcctgtcttgattgtctt

SEQ ID NO: 250223 - DNA, 25 bp, Artificial
  Probe
atctgatataggtcacgggctcttt

SEQ ID NO: 250224 - DNA, 25 bp, Artificial
  Probe
agctgtggcgaggaccatactgtga

SEQ ID NO: 250225 - DNA, 25 bp, Artificial
  Probe
tacctctgtgtgtttcagattaaga

SEQ ID NO: 250226 - DNA, 25 bp, Artificial
  Probe
gattttgcaagctgtggcgaggacc

SEQ ID NO: 250227 - DNA, 25 bp, Artificial
  Probe
ttatgctggaagagctgcagcggca

SEQ ID NO: 250228 - DNA, 25 bp, Artificial
  Probe
acgctgggtatcagaaggttatgct

SEQ ID NO: 250229 - DNA, 25 bp, Artificial
  Probe
tctgatataggtcacgggctctttc

SEQ ID NO: 250230 - DNA, 25 bp, Artificial
  Probe
actatctgatataggtcacgggctc

SEQ ID NO: 250231 - DNA, 25 bp, Artificial
  Probe
atcgcatgtatgtaacctcccagaa

SEQ ID NO: 250232 - DNA, 25 bp, Artificial
  Probe
ctgatataggtcacgggctctttcc

SEQ ID NO: 250233 - DNA, 25 bp, Artificial
  Probe
gctgtggcgaggaccatactgtgaa

SEQ ID NO: 250234 - DNA, 25 bp, Artificial
  Probe
cgcatgtatgtaacctcccagaacc

SEQ ID NO: 250235 - DNA, 25 bp, Artificial
  Probe
ttttgcaagctgtggcgaggaccat

SEQ ID NO: 250236 - DNA, 25 bp, Artificial
  Probe
ccttaccttagtgattgaatgagtt

SEQ ID NO: 250237 - DNA, 25 bp, Artificial
  Probe
ctatctgatataggtcacgggctct

SEQ ID NO: 250238 - DNA, 25 bp, Artificial
  Probe
tttccttaccttagtgattgaatga

SEQ ID NO: 250239 - DNA, 25 bp, Artificial
  Probe
acacgctgggtatcagaaggttatg

SEQ ID NO: 250240 - DNA, 25 bp, Artificial
  Probe
caagctgtggcgaggaccatactgt

SEQ ID NO: 250241 - DNA, 25 bp, Artificial
  Probe
cctgcctgtcttgattgtcttaaac

SEQ ID NO: 250242 - DNA, 25 bp, Artificial
  Probe
gaccgagtggttggattttgcaagc

SEQ ID NO: 250243 - DNA, 25 bp, Artificial
  Probe
ttccttaccttagtgattgaatgag

SEQ ID NO: 250244 - DNA, 25 bp, Artificial
  Probe
cctctgtgtgtttcagattaagaac

SEQ ID NO: 250245 - DNA, 25 bp, Artificial
  Probe
ctctgtgtgtttcagattaagaaca

SEQ ID NO: 250246 - DNA, 25 bp, Artificial
  Probe
ctgtctttagcattgtgcaatttaa

SEQ ID NO: 250247 - DNA, 25 bp, Artificial
  Probe
ggaagctattatcttgccaagcctg

SEQ ID NO: 250248 - DNA, 25 bp, Artificial
  Probe
cgggtctctgggaactcaagacttt

SEQ ID NO: 250249 - DNA, 25 bp, Artificial
  Probe
ggattccctgtgtggctcacttgga

SEQ ID NO: 250250 - DNA, 25 bp, Artificial
  Probe
cttttataggctgtctttagcattg

SEQ ID NO: 250251 - DNA, 25 bp, Artificial
  Probe
caggggccctgagcttctgtgcaga

SEQ ID NO: 250252 - DNA, 25 bp, Artificial
  Probe
caagacacactggagaacaaaggga

SEQ ID NO: 250253 - DNA, 25 bp, Artificial
  Probe
ttgtcacacctgaccccagtgagtg

SEQ ID NO: 250254 - DNA, 25 bp, Artificial
  Probe
gacacggactaatcggtatggattc

SEQ ID NO: 250255 - DNA, 25 bp, Artificial
  Probe
tctctgggaactcaagactttttta

SEQ ID NO: 250256 - DNA, 25 bp, Artificial
  Probe
ttcagggagtgagacacggactaat

SEQ ID NO: 250257 - DNA, 25 bp, Artificial
  Probe
gggccctgagcttctgtgcagacag

SEQ ID NO: 250258 - DNA, 25 bp, Artificial
  Probe
aggggccctgagcttctgtgcagac

SEQ ID NO: 250259 - DNA, 25 bp, Artificial
  Probe
attatcttgccaagcctggttgtaa

SEQ ID NO: 250260 - DNA, 25 bp, Artificial
  Probe
cagacaggaagctgtatgggagact

SEQ ID NO: 250261 - DNA, 25 bp, Artificial
  Probe
ttctgtgcagacaggaagctgtatg

SEQ ID NO: 250262 - DNA, 25 bp, Artificial
  Probe
tattatcttgccaagcctggttgta

SEQ ID NO: 250263 - DNA, 25 bp, Artificial
  Probe
cggactaatcggtatggattccctg

SEQ ID NO: 250264 - DNA, 25 bp, Artificial
  Probe
ttataggctgtctttagcattgtgc

SEQ ID NO: 250265 - DNA, 25 bp, Artificial
  Probe
gagtgggactaactcccctgctgct

SEQ ID NO: 250266 - DNA, 25 bp, Artificial
  Probe
gtatggattccctgtgtggctcact

SEQ ID NO: 250267 - DNA, 25 bp, Artificial
  Probe
attttgtacaagacacactggagaa

SEQ ID NO: 250268 - DNA, 25 bp, Artificial
  Probe
agtgagacacggactaatcggtatg

SEQ ID NO: 250269 - DNA, 25 bp, Artificial
  Probe
atattttgtacaagacacactggag

SEQ ID NO: 250270 - DNA, 25 bp, Artificial
  Probe
agcgattgtcacacctgaccccagt

SEQ ID NO: 250271 - DNA, 25 bp, Artificial
  Probe
cttcctccgggtctctgggaactca

SEQ ID NO: 250272 - DNA, 25 bp, Artificial
  Probe
tccctgtgtggctcacttggatgag

SEQ ID NO: 250273 - DNA, 25 bp, Artificial
  Probe
acaggaagctgtatgggagactgtc

SEQ ID NO: 250274 - DNA, 25 bp, Artificial
  Probe
acacactggagaacaaagggaactt

SEQ ID NO: 250275 - DNA, 25 bp, Artificial
  Probe
aatcggtatggattccctgtgtggc

SEQ ID NO: 250276 - DNA, 25 bp, Artificial
  Probe
tctgtgcagacaggaagctgtatgg

SEQ ID NO: 250277 - DNA, 25 bp, Artificial
  Probe
agacacactggagaacaaagggaac

SEQ ID NO: 250278 - DNA, 25 bp, Artificial
  Probe
gccaagcctggttgtaatttgtaac

SEQ ID NO: 250279 - DNA, 25 bp, Artificial
  Probe
tcttgccaagcctggttgtaatttg

SEQ ID NO: 250280 - DNA, 25 bp, Artificial
  Probe
agcctggttgtaatttgtaaccatt

SEQ ID NO: 250281 - DNA, 25 bp, Artificial
  Probe
acttttataggctgtctttagcatt

SEQ ID NO: 250282 - DNA, 25 bp, Artificial
  Probe
aggagcgattgtcacacctgacccc

SEQ ID NO: 250283 - DNA, 25 bp, Artificial
  Probe
ctaatcggtatggattccctgtgtg

SEQ ID NO: 250284 - DNA, 25 bp, Artificial
  Probe
gcttctgtgcagacaggaagctgta

SEQ ID NO: 250285 - DNA, 25 bp, Artificial
  Probe
agccaggggccctgagcttctgtgc

SEQ ID NO: 250286 - DNA, 25 bp, Artificial
  Probe
agtgggactaactcccctgctgctc

SEQ ID NO: 250287 - DNA, 25 bp, Artificial
  Probe
atcggtatggattccctgtgtggct

SEQ ID NO: 250288 - DNA, 25 bp, Artificial
  Probe
cctccgggtctctgggaactcaaga

SEQ ID NO: 250289 - DNA, 25 bp, Artificial
  Probe
aagctattatcttgccaagcctggt

SEQ ID NO: 250290 - DNA, 25 bp, Artificial
  Probe
ctgagcttctgtgcagacaggaagc

SEQ ID NO: 250291 - DNA, 25 bp, Artificial
  Probe
caagcctggttgtaatttgtaacca

SEQ ID NO: 250292 - DNA, 25 bp, Artificial
  Probe
aagcgcgtggagcagatccgcagtt

SEQ ID NO: 250293 - DNA, 25 bp, Artificial
  Probe
aatcctcccaaaaagggagctggat

SEQ ID NO: 250294 - DNA, 25 bp, Artificial
  Probe
ttcgagggagtcaggccatcatgct

SEQ ID NO: 250295 - DNA, 25 bp, Artificial
  Probe
tcccaaaaagggagctggatggaca

SEQ ID NO: 250296 - DNA, 25 bp, Artificial
  Probe
tttcctggacctagggcacttggat

SEQ ID NO: 250297 - DNA, 25 bp, Artificial
  Probe
atcctcccaaaaagggagctggatg

SEQ ID NO: 250298 - DNA, 25 bp, Artificial
  Probe
gtggggctgtcacaactgaaaatcc

SEQ ID NO: 250299 - DNA, 25 bp, Artificial
  Probe
agtcagagctgcttcgagggagtca

SEQ ID NO: 250300 - DNA, 25 bp, Artificial
  Probe
tggacaggagcctggaagctcaata

SEQ ID NO: 250301 - DNA, 25 bp, Artificial
  Probe
tcaggccatcatgcttcgttcagca

SEQ ID NO: 250302 - DNA, 25 bp, Artificial
  Probe
gatgtacgaccacaaagtccaataa

SEQ ID NO: 250303 - DNA, 25 bp, Artificial
  Probe
ctcaaaaactgaacaaagtgtgatg

SEQ ID NO: 250304 - DNA, 25 bp, Artificial
  Probe
ctgtactatggcacctgcaagtgat

SEQ ID NO: 250305 - DNA, 25 bp, Artificial
  Probe
caagtgatcttaagtcccagcctca

SEQ ID NO: 250306 - DNA, 25 bp, Artificial
  Probe
atagtctggtcaccatggacatgct

SEQ ID NO: 250307 - DNA, 25 bp, Artificial
  Probe
tctttggacaggagcctggaagctc

SEQ ID NO: 250308 - DNA, 25 bp, Artificial
  Probe
tcgttcagcagacctgtcggggctg

SEQ ID NO: 250309 - DNA, 25 bp, Artificial
  Probe
tgggaccaactcaaaaactgaacaa

SEQ ID NO: 250310 - DNA, 25 bp, Artificial
  Probe
cctccactgtggtaaagtctgggac

SEQ ID NO: 250311 - DNA, 25 bp, Artificial
  Probe
gcgtggagcagatccgcagttacat

SEQ ID NO: 250312 - DNA, 25 bp, Artificial
  Probe
ggctgtcacaactgaaaatcctccc

SEQ ID NO: 250313 - DNA, 25 bp, Artificial
  Probe
caactcaaaaactgaacaaagtgtg

SEQ ID NO: 250314 - DNA, 25 bp, Artificial
  Probe
ctgcttcgagggagtcaggccatca

SEQ ID NO: 250315 - DNA, 25 bp, Artificial
  Probe
ttcaaggtacctgactgccactgag

SEQ ID NO: 250316 - DNA, 25 bp, Artificial
  Probe
acctgcaagtgatcttaagtcccag

SEQ ID NO: 250317 - DNA, 25 bp, Artificial
  Probe
gggagtcaggccatcatgcttcgtt

SEQ ID NO: 250318 - DNA, 25 bp, Artificial
  Probe
gcagttacatcaacgggcgtgtgct

SEQ ID NO: 250319 - DNA, 25 bp, Artificial
  Probe
cctgtgcttgcctgaccacactaag

SEQ ID NO: 250320 - DNA, 25 bp, Artificial
  Probe
cacactaaggagagagatggtgcag

SEQ ID NO: 250321 - DNA, 25 bp, Artificial
  Probe
cactgtggtaaagtctgggaccaac

SEQ ID NO: 250322 - DNA, 25 bp, Artificial
  Probe
agacatggagtcagagctgcttcga

SEQ ID NO: 250323 - DNA, 25 bp, Artificial
  Probe
gaggtgtttcctggacctagggcac

SEQ ID NO: 250324 - DNA, 25 bp, Artificial
  Probe
aagtctgggaccaactcaaaaactg

SEQ ID NO: 250325 - DNA, 25 bp, Artificial
  Probe
agtgatcttaagtcccagcctcaga

SEQ ID NO: 250326 - DNA, 25 bp, Artificial
  Probe
tgtgctgtactatggcacctgcaag

SEQ ID NO: 250327 - DNA, 25 bp, Artificial
  Probe
gtgtgatgtacgaccacaaagtcca

SEQ ID NO: 250328 - DNA, 25 bp, Artificial
  Probe
tgagcctgtgcttgcctgaccacac

SEQ ID NO: 250329 - DNA, 25 bp, Artificial
  Probe
tgactgccactgagcctgtgcttgc

SEQ ID NO: 250330 - DNA, 25 bp, Artificial
  Probe
tggacctagggcacttggataccat

SEQ ID NO: 250331 - DNA, 25 bp, Artificial
  Probe
gagtcaggccatcatgcttcgttca

SEQ ID NO: 250332 - DNA, 25 bp, Artificial
  Probe
acatggagtcagagctgcttcgagg

SEQ ID NO: 250333 - DNA, 25 bp, Artificial
  Probe
aaatctttggacaggagcctggaag

SEQ ID NO: 250334 - DNA, 25 bp, Artificial
  Probe
acctgactgccactgagcctgtgct

SEQ ID NO: 250335 - DNA, 25 bp, Artificial
  Probe
catcaacgggcgtgtgctgtactat

SEQ ID NO: 250336 - DNA, 25 bp, Artificial
  Probe
tgccactgagcctgtgcttgcctga

SEQ ID NO: 250337 - DNA, 25 bp, Artificial
  Probe
gagcagatccgcagttacatcaacg

SEQ ID NO: 250338 - DNA, 25 bp, Artificial
  Probe
tatctcttgtgctgcccaggaccca

SEQ ID NO: 250339 - DNA, 25 bp, Artificial
  Probe
gcttatatcacaaaagatctgaagt

SEQ ID NO: 250340 - DNA, 25 bp, Artificial
  Probe
agctctacaagcaagaaaaggggcc

SEQ ID NO: 250341 - DNA, 25 bp, Artificial
  Probe
ccagctagctctacaagcaagaaaa

SEQ ID NO: 250342 - DNA, 25 bp, Artificial
  Probe
cgtaatatctcttgtgctgcccagg

SEQ ID NO: 250343 - DNA, 25 bp, Artificial
  Probe
ttagcattcgcaagtcagtggcccc

SEQ ID NO: 250344 - DNA, 25 bp, Artificial
  Probe
tgaaatcatcctaacgctggggcag

SEQ ID NO: 250345 - DNA, 25 bp, Artificial
  Probe
ttcgcaagtcagtggcccctgcaga

SEQ ID NO: 250346 - DNA, 25 bp, Artificial
  Probe
aggacccagaagacctctcaacctt

SEQ ID NO: 250347 - DNA, 25 bp, Artificial
  Probe
ccacgcttccggagagctttgagaa

SEQ ID NO: 250348 - DNA, 25 bp, Artificial
  Probe
tgcctttgatgtgaatttagcctat

SEQ ID NO: 250349 - DNA, 25 bp, Artificial
  Probe
tgcttatatcacaaaagatctgaag

SEQ ID NO: 250350 - DNA, 25 bp, Artificial
  Probe
gtgctgcccaggacccagaagacct

SEQ ID NO: 250351 - DNA, 25 bp, Artificial
  Probe
gacccagaagacctctcaacctttg

SEQ ID NO: 250352 - DNA, 25 bp, Artificial
  Probe
acgcttccggagagctttgagaaca

SEQ ID NO: 250353 - DNA, 25 bp, Artificial
  Probe
gtcagtggcccctgcagagtcgctg

SEQ ID NO: 250354 - DNA, 25 bp, Artificial
  Probe
tctacaagcaagaaaaggggcccat

SEQ ID NO: 250355 - DNA, 25 bp, Artificial
  Probe
cttgtgctgcccaggacccagaaga

SEQ ID NO: 250356 - DNA, 25 bp, Artificial
  Probe
tgccgagcatgaaattcgtaatatc

SEQ ID NO: 250357 - DNA, 25 bp, Artificial
  Probe
cactactgtcacgtgtttactgcct

SEQ ID NO: 250358 - DNA, 25 bp, Artificial
  Probe
ttccggagagctttgagaacaagcc

SEQ ID NO: 250359 - DNA, 25 bp, Artificial
  Probe
gtcacgtgtttactgcctttgatgt

SEQ ID NO: 250360 - DNA, 25 bp, Artificial
  Probe
ataattgccgagcatgaaattcgta

SEQ ID NO: 250361 - DNA, 25 bp, Artificial
  Probe
agctttgagaacaagccctcgaaac

SEQ ID NO: 250362 - DNA, 25 bp, Artificial
  Probe
gaaattcgtaatatctcttgtgctg

SEQ ID NO: 250363 - DNA, 25 bp, Artificial
  Probe
atttgaggtcgcttaccagctagct

SEQ ID NO: 250364 - DNA, 25 bp, Artificial
  Probe
ggcaggcatttgaggtcgcttacca

SEQ ID NO: 250365 - DNA, 25 bp, Artificial
  Probe
tgaaattcgtaatatctcttgtgct

SEQ ID NO: 250366 - DNA, 25 bp, Artificial
  Probe
gcaggcatttgaggtcgcttaccag

SEQ ID NO: 250367 - DNA, 25 bp, Artificial
  Probe
ggcccctgcagagtcgctgtgcagt

SEQ ID NO: 250368 - DNA, 25 bp, Artificial
  Probe
tcacgtgtttactgcctttgatgtg

SEQ ID NO: 250369 - DNA, 25 bp, Artificial
  Probe
aggcatttgaggtcgcttaccagct

SEQ ID NO: 250370 - DNA, 25 bp, Artificial
  Probe
ccaaagccccgagttagcattcgca

SEQ ID NO: 250371 - DNA, 25 bp, Artificial
  Probe
gctttgagaacaagccctcgaaacc

SEQ ID NO: 250372 - DNA, 25 bp, Artificial
  Probe
tagctctacaagcaagaaaaggggc

SEQ ID NO: 250373 - DNA, 25 bp, Artificial
  Probe
ttactgcctttgatgtgaatttagc

SEQ ID NO: 250374 - DNA, 25 bp, Artificial
  Probe
ctactgtcacgtgtttactgccttt

SEQ ID NO: 250375 - DNA, 25 bp, Artificial
  Probe
ctgcctttgatgtgaatttagccta

SEQ ID NO: 250376 - DNA, 25 bp, Artificial
  Probe
gttagcattcgcaagtcagtggccc

SEQ ID NO: 250377 - DNA, 25 bp, Artificial
  Probe
agcctatgaaatcatcctaacgctg

SEQ ID NO: 250378 - DNA, 25 bp, Artificial
  Probe
attcgcaagtcagtggcccctgcag

SEQ ID NO: 250379 - DNA, 25 bp, Artificial
  Probe
ccgagttagcattcgcaagtcagtg

SEQ ID NO: 250380 - DNA, 25 bp, Artificial
  Probe
aatatctcttgtgctgcccaggacc

SEQ ID NO: 250381 - DNA, 25 bp, Artificial
  Probe
caccactactgtcacgtgtttactg

SEQ ID NO: 250382 - DNA, 25 bp, Artificial
  Probe
aaagccccgagttagcattcgcaag

SEQ ID NO: 250383 - DNA, 25 bp, Artificial
  Probe
gcttaccagctagctctacaagcaa

SEQ ID NO: 250384 - DNA, 25 bp, Artificial
  Probe
cctgtgcctaacaccagcgtttgag

SEQ ID NO: 250385 - DNA, 25 bp, Artificial
  Probe
tgtagggaactctggggtcccccat

SEQ ID NO: 250386 - DNA, 25 bp, Artificial
  Probe
gcactggcattgtccctgtgcctaa

SEQ ID NO: 250387 - DNA, 25 bp, Artificial
  Probe
gcctttgagcccacaaagccttatc

SEQ ID NO: 250388 - DNA, 25 bp, Artificial
  Probe
tttactgaacaatcaaagcacttgg

SEQ ID NO: 250389 - DNA, 25 bp, Artificial
  Probe
acaatcaaagcacttggactcttgc

SEQ ID NO: 250390 - DNA, 25 bp, Artificial
  Probe
aacagcactggctctctccaggatc

SEQ ID NO: 250391 - DNA, 25 bp, Artificial
  Probe
agcactggctctctccaggatccag

SEQ ID NO: 250392 - DNA, 25 bp, Artificial
  Probe
tacagaggtctctgccggctctttc

SEQ ID NO: 250393 - DNA, 25 bp, Artificial
  Probe
ttccttgctcaaccatggctgaagg

SEQ ID NO: 250394 - DNA, 25 bp, Artificial
  Probe
gtgcaacagcactggctctctccag

SEQ ID NO: 250395 - DNA, 25 bp, Artificial
  Probe
caaccatggctgaaggaaaccagtg

SEQ ID NO: 250396 - DNA, 25 bp, Artificial
  Probe
gcccacaaagccttatcaagtgtct

SEQ ID NO: 250397 - DNA, 25 bp, Artificial
  Probe
tttgagcccacaaagccttatcaag

SEQ ID NO: 250398 - DNA, 25 bp, Artificial
  Probe
tctccagtcaggaggcatagttttt

SEQ ID NO: 250399 - DNA, 25 bp, Artificial
  Probe
tctctgtagggaactctggggtccc

SEQ ID NO: 250400 - DNA, 25 bp, Artificial
  Probe
tatggcactggcattgtccctgtgc

SEQ ID NO: 250401 - DNA, 25 bp, Artificial
  Probe
aggtaaggcctttgagcccacaaag

SEQ ID NO: 250402 - DNA, 25 bp, Artificial
  Probe
cggctctttccttgctcaaccatgg

SEQ ID NO: 250403 - DNA, 25 bp, Artificial
  Probe
gcagctctccagtcaggaggcatag

SEQ ID NO: 250404 - DNA, 25 bp, Artificial
  Probe
ttgagcccacaaagccttatcaagt

SEQ ID NO: 250405 - DNA, 25 bp, Artificial
  Probe
ctccaggatccagaaggggtttggt

SEQ ID NO: 250406 - DNA, 25 bp, Artificial
  Probe
agcttatggtactctcctagagaca

SEQ ID NO: 250407 - DNA, 25 bp, Artificial
  Probe
tgccctacagaggtctctgccggct

SEQ ID NO: 250408 - DNA, 25 bp, Artificial
  Probe
cctacagaggtctctgccggctctt

SEQ ID NO: 250409 - DNA, 25 bp, Artificial
  Probe
agtgtcttccatcatggattcatta

SEQ ID NO: 250410 - DNA, 25 bp, Artificial
  Probe
gaacaatcaaagcacttggactctt

SEQ ID NO: 250411 - DNA, 25 bp, Artificial
  Probe
gtcttccatcatggattcattacag

SEQ ID NO: 250412 - DNA, 25 bp, Artificial
  Probe
tatggtactctcctagagacagaag

SEQ ID NO: 250413 - DNA, 25 bp, Artificial
  Probe
cttatggtactctcctagagacaga

SEQ ID NO: 250414 - DNA, 25 bp, Artificial
  Probe
tgtccctgtgcctaacaccagcgtt

SEQ ID NO: 250415 - DNA, 25 bp, Artificial
  Probe
ccttgctcaaccatggctgaaggaa

SEQ ID NO: 250416 - DNA, 25 bp, Artificial
  Probe
ctcaaccatggctgaaggaaaccag

SEQ ID NO: 250417 - DNA, 25 bp, Artificial
  Probe
aggctggcagctctccagtcaggag

SEQ ID NO: 250418 - DNA, 25 bp, Artificial
  Probe
accagtgcaacagcactggctctct

SEQ ID NO: 250419 - DNA, 25 bp, Artificial
  Probe
gtaaggcctttgagcccacaaagcc

SEQ ID NO: 250420 - DNA, 25 bp, Artificial
  Probe
gcattgtccctgtgcctaacaccag

SEQ ID NO: 250421 - DNA, 25 bp, Artificial
  Probe
gaaggaaaccagtgcaacagcactg

SEQ ID NO: 250422 - DNA, 25 bp, Artificial
  Probe
gcaggctggcagctctccagtcagg

SEQ ID NO: 250423 - DNA, 25 bp, Artificial
  Probe
tggcattgtccctgtgcctaacacc

SEQ ID NO: 250424 - DNA, 25 bp, Artificial
  Probe
tggcagctctccagtcaggaggcat

SEQ ID NO: 250425 - DNA, 25 bp, Artificial
  Probe
ggaaaccagtgcaacagcactggct

SEQ ID NO: 250426 - DNA, 25 bp, Artificial
  Probe
ctcctagagacagaagcaggctgga

SEQ ID NO: 250427 - DNA, 25 bp, Artificial
  Probe
agtgcaacagcactggctctctcca

SEQ ID NO: 250428 - DNA, 25 bp, Artificial
  Probe
gagcaggctggcagctctccagtca

SEQ ID NO: 250429 - DNA, 25 bp, Artificial
  Probe
cttgctcaaccatggctgaaggaaa

SEQ ID NO: 250430 - DNA, 25 bp, Artificial
  Probe
acggattcacggaccgtcactgtgg

SEQ ID NO: 250431 - DNA, 25 bp, Artificial
  Probe
gcctggcggaaacttcactctgacc

SEQ ID NO: 250432 - DNA, 25 bp, Artificial
  Probe
aataccggcctgtggtggctgagct

SEQ ID NO: 250433 - DNA, 25 bp, Artificial
  Probe
cttcactctgacctgccgtgcagag

SEQ ID NO: 250434 - DNA, 25 bp, Artificial
  Probe
cgcatggcacggattcacggaccgt

SEQ ID NO: 250435 - DNA, 25 bp, Artificial
  Probe
agtgcgcagccaccaatgcgcatgg

SEQ ID NO: 250436 - DNA, 25 bp, Artificial
  Probe
ctaccaacgcgcatggcacggattc

SEQ ID NO: 250437 - DNA, 25 bp, Artificial
  Probe
cctgtgtgtggctaccaacgcgcat

SEQ ID NO: 250438 - DNA, 25 bp, Artificial
  Probe
cagcaacaacagcacgctgagcgtg

SEQ ID NO: 250439 - DNA, 25 bp, Artificial
  Probe
tccagcaacaacagcacgctgagcg

SEQ ID NO: 250440 - DNA, 25 bp, Artificial
  Probe
tctccagcaacaacagcacgctgag

SEQ ID NO: 250441 - DNA, 25 bp, Artificial
  Probe
acgcacggcgcatcacggtgcgcgt

SEQ ID NO: 250442 - DNA, 25 bp, Artificial
  Probe
gtatgagtgcgcagccaccaatgcg

SEQ ID NO: 250443 - DNA, 25 bp, Artificial
  Probe
gtgtggctaccaacgcgcatggcac

SEQ ID NO: 250444 - DNA, 25 bp, Artificial
  Probe
ctgtgtgtggctaccaacgcgcatg

SEQ ID NO: 250445 - DNA, 25 bp, Artificial
  Probe
gcgcagccaccaatgcgcatgggcg

SEQ ID NO: 250446 - DNA, 25 bp, Artificial
  Probe
tgagtgacgggctcctggagtaaaa

SEQ ID NO: 250447 - DNA, 25 bp, Artificial
  Probe
catggcacggattcacggaccgtca

SEQ ID NO: 250448 - DNA, 25 bp, Artificial
  Probe
acctacctgtgtgtggctaccaacg

SEQ ID NO: 250449 - DNA, 25 bp, Artificial
  Probe
cctacctgtgtgtggctaccaacgc

SEQ ID NO: 250450 - DNA, 25 bp, Artificial
  Probe
taccaacgcgcatggcacggattca

SEQ ID NO: 250451 - DNA, 25 bp, Artificial
  Probe
gacccgaggctactgcgctggcctg

SEQ ID NO: 250452 - DNA, 25 bp, Artificial
  Probe
ttcacggaccgtcactgtgggtgtg

SEQ ID NO: 250453 - DNA, 25 bp, Artificial
  Probe
attcacggaccgtcactgtgggtgt

SEQ ID NO: 250454 - DNA, 25 bp, Artificial
  Probe
tggcacggattcacggaccgtcact

SEQ ID NO: 250455 - DNA, 25 bp, Artificial
  Probe
tgtgtgtggctaccaacgcgcatgg

SEQ ID NO: 250456 - DNA, 25 bp, Artificial
  Probe
ccacgcgtgcgctgttccagggaag

SEQ ID NO: 250457 - DNA, 25 bp, Artificial
  Probe
aggacccgaggctactgcgctggcc

SEQ ID NO: 250458 - DNA, 25 bp, Artificial
  Probe
cctggcggaaacttcactctgacct

SEQ ID NO: 250459 - DNA, 25 bp, Artificial
  Probe
tctgacctgccgtgcagaggcctgg

SEQ ID NO: 250460 - DNA, 25 bp, Artificial
  Probe
ttcactctgacctgccgtgcagagg

SEQ ID NO: 250461 - DNA, 25 bp, Artificial
  Probe
atggcacggattcacggaccgtcac

SEQ ID NO: 250462 - DNA, 25 bp, Artificial
  Probe
gcggaaacttcactctgacctgccg

SEQ ID NO: 250463 - DNA, 25 bp, Artificial
  Probe
agcaacaacagcacgctgagcgtgg

SEQ ID NO: 250464 - DNA, 25 bp, Artificial
  Probe
ggggacctacctgtgtgtggctacc

SEQ ID NO: 250465 - DNA, 25 bp, Artificial
  Probe
tgtgtggctaccaacgcgcatggca

SEQ ID NO: 250466 - DNA, 25 bp, Artificial
  Probe
actgcgctggcctgcagtgccagag

SEQ ID NO: 250467 - DNA, 25 bp, Artificial
  Probe
aacttcactctgacctgccgtgcag

SEQ ID NO: 250468 - DNA, 25 bp, Artificial
  Probe
gagtgcgcagccaccaatgcgcatg

SEQ ID NO: 250469 - DNA, 25 bp, Artificial
  Probe
ggaaacttcactctgacctgccgtg

SEQ ID NO: 250470 - DNA, 25 bp, Artificial
  Probe
aacgcgcatggcacggattcacgga

SEQ ID NO: 250471 - DNA, 25 bp, Artificial
  Probe
aagcgtgcggcctggcggaaacttc

SEQ ID NO: 250472 - DNA, 25 bp, Artificial
  Probe
cggggacctacctgtgtgtggctac

SEQ ID NO: 250473 - DNA, 25 bp, Artificial
  Probe
cggcctggcggaaacttcactctga

SEQ ID NO: 250474 - DNA, 25 bp, Artificial
  Probe
tggaaggacccgaggctactgcgct

SEQ ID NO: 250475 - DNA, 25 bp, Artificial
  Probe
gacctgccgtgcagaggcctggcct

SEQ ID NO: 250476 - DNA, 25 bp, Artificial
  Probe
ttcattcaaaaatctcaagcgcgtg

SEQ ID NO: 250477 - DNA, 25 bp, Artificial
  Probe
caaagaggccacaggaaagatcagt

SEQ ID NO: 250478 - DNA, 25 bp, Artificial
  Probe
agatcagtttcaatgacttcttggc

SEQ ID NO: 250479 - DNA, 25 bp, Artificial
  Probe
ccctgcttctgcttttgtgaaagta

SEQ ID NO: 250480 - DNA, 25 bp, Artificial
  Probe
tcaatgacttcttggctgtgatgac

SEQ ID NO: 250481 - DNA, 25 bp, Artificial
  Probe
gggaaagcctcacagacgaggagct

SEQ ID NO: 250482 - DNA, 25 bp, Artificial
  Probe
cctgaaggctttcaggttgtttgat

SEQ ID NO: 250483 - DNA, 25 bp, Artificial
  Probe
tgtgatgactcagaagatggccgag

SEQ ID NO: 250484 - DNA, 25 bp, Artificial
  Probe
ctggggtccctgcttctgcttttgt

SEQ ID NO: 250485 - DNA, 25 bp, Artificial
  Probe
ttcctgcctcctgtgcttgattagc

SEQ ID NO: 250486 - DNA, 25 bp, Artificial
  Probe
tcctgtgcttgattagcttctaagc

SEQ ID NO: 250487 - DNA, 25 bp, Artificial
  Probe
ctttgaacccaggaaggaagagatg

SEQ ID NO: 250488 - DNA, 25 bp, Artificial
  Probe
gggtccctgcttctgcttttgtgaa

SEQ ID NO: 250489 - DNA, 25 bp, Artificial
  Probe
cttctgcttttgtgaaagtataaca

SEQ ID NO: 250490 - DNA, 25 bp, Artificial
  Probe
gcctttgacctcttcgattctgatg

SEQ ID NO: 250491 - DNA, 25 bp, Artificial
  Probe
tttcaatgacttcttggctgtgatg

SEQ ID NO: 250492 - DNA, 25 bp, Artificial
  Probe
tgcttgattagcttctaagcctcca

SEQ ID NO: 250493 - DNA, 25 bp, Artificial
  Probe
aatcctgaaggctttcaggttgttt

SEQ ID NO: 250494 - DNA, 25 bp, Artificial
  Probe
atctcaagcgcgtggccaacgagtt

SEQ ID NO: 250495 - DNA, 25 bp, Artificial
  Probe
aagaccaacctttattaagtgactg

SEQ ID NO: 250496 - DNA, 25 bp, Artificial
  Probe
gcttctgcttttgtgaaagtataac

SEQ ID NO: 250497 - DNA, 25 bp, Artificial
  Probe
tcaaaaatctcaagcgcgtggccaa

SEQ ID NO: 250498 - DNA, 25 bp, Artificial
  Probe
cctcacagacgaggagctgcaggaa

SEQ ID NO: 250499 - DNA, 25 bp, Artificial
  Probe
tggctgtgatgactcagaagatggc

SEQ ID NO: 250500 - DNA, 25 bp, Artificial
  Probe
aggaaatcctgaaggctttcaggtt

SEQ ID NO: 250501 - DNA, 25 bp, Artificial
  Probe
gcctcacagacgaggagctgcagga

SEQ ID NO: 250502 - DNA, 25 bp, Artificial
  Probe
ttcaaaaatctcaagcgcgtggcca

SEQ ID NO: 250503 - DNA, 25 bp, Artificial
  Probe
ccatgagagcactcggctttgaacc

SEQ ID NO: 250504 - DNA, 25 bp, Artificial
  Probe
ccatcgatgtgaaggagctgaaggt

SEQ ID NO: 250505 - DNA, 25 bp, Artificial
  Probe
gacctcttcgattctgatgggagtg

SEQ ID NO: 250506 - DNA, 25 bp, Artificial
  Probe
cttggctgtgatgactcagaagatg

SEQ ID NO: 250507 - DNA, 25 bp, Artificial
  Probe
tgcctcctgtgcttgattagcttct

SEQ ID NO: 250508 - DNA, 25 bp, Artificial
  Probe
agagcactcggctttgaacccagga

SEQ ID NO: 250509 - DNA, 25 bp, Artificial
  Probe
aacctttattaagtgactggctggg

SEQ ID NO: 250510 - DNA, 25 bp, Artificial
  Probe
aaagcctcacagacgaggagctgca

SEQ ID NO: 250511 - DNA, 25 bp, Artificial
  Probe
aagtataacagagcagctgtggtct

SEQ ID NO: 250512 - DNA, 25 bp, Artificial
  Probe
ataccaaagaggaaatcctgaaggc

SEQ ID NO: 250513 - DNA, 25 bp, Artificial
  Probe
ttcttggctgtgatgactcagaaga

SEQ ID NO: 250514 - DNA, 25 bp, Artificial
  Probe
tccctgcttctgcttttgtgaaagt

SEQ ID NO: 250515 - DNA, 25 bp, Artificial
  Probe
ggctttgaacccaggaaggaagaga

SEQ ID NO: 250516 - DNA, 25 bp, Artificial
  Probe
cagctgtggtctgttccttcttcct

SEQ ID NO: 250517 - DNA, 25 bp, Artificial
  Probe
ggctgtgatgactcagaagatggcc

SEQ ID NO: 250518 - DNA, 25 bp, Artificial
  Probe
cactcggctttgaacccaggaagga

SEQ ID NO: 250519 - DNA, 25 bp, Artificial
  Probe
tgactcagaagatggccgagaaaga

SEQ ID NO: 250520 - DNA, 25 bp, Artificial
  Probe
tgacttcttggctgtgatgactcag

SEQ ID NO: 250521 - DNA, 25 bp, Artificial
  Probe
ctgtgatgactcagaagatggccga

SEQ ID NO: 250522 - DNA, 25 bp, Artificial
  Probe
attcttgggcgatttgattacagcc

SEQ ID NO: 250523 - DNA, 25 bp, Artificial
  Probe
ttcttgggcgatttgattacagcca

SEQ ID NO: 250524 - DNA, 25 bp, Artificial
  Probe
tacagccagtgtgacatttggtaca

SEQ ID NO: 250525 - DNA, 25 bp, Artificial
  Probe
tttctggcaaaagatgcttgcattg

SEQ ID NO: 250526 - DNA, 25 bp, Artificial
  Probe
gcaaaagatgcttgcattgggcaat

SEQ ID NO: 250527 - DNA, 25 bp, Artificial
  Probe
cagccagtgtgacatttggtacatg

SEQ ID NO: 250528 - DNA, 25 bp, Artificial
  Probe
gattacagccagtgtgacatttggt

SEQ ID NO: 250529 - DNA, 25 bp, Artificial
  Probe
ttaaacctagtgagtctaatgtgac

SEQ ID NO: 250530 - DNA, 25 bp, Artificial
  Probe
aaacctagtgagtctaatgtgacta

SEQ ID NO: 250531 - DNA, 25 bp, Artificial
  Probe
acagccagtgtgacatttggtacat

SEQ ID NO: 250532 - DNA, 25 bp, Artificial
  Probe
agtctaatgtgactattcttgggcg

SEQ ID NO: 250533 - DNA, 25 bp, Artificial
  Probe
ctattcttgggcgatttgattacag

SEQ ID NO: 250534 - DNA, 25 bp, Artificial
  Probe
tcttgggcgatttgattacagccag

SEQ ID NO: 250535 - DNA, 25 bp, Artificial
  Probe
gtctaatgtgactattcttgggcga

SEQ ID NO: 250536 - DNA, 25 bp, Artificial
  Probe
tgtgacatttggtacatgaggtttt

SEQ ID NO: 250537 - DNA, 25 bp, Artificial
  Probe
atttctggcaaaagatgcttgcatt

SEQ ID NO: 250538 - DNA, 25 bp, Artificial
  Probe
cgatttgattacagccagtgtgaca

SEQ ID NO: 250539 - DNA, 25 bp, Artificial
  Probe
ttgattacagccagtgtgacatttg

SEQ ID NO: 250540 - DNA, 25 bp, Artificial
  Probe
acatgaggttttctatggatttctg

SEQ ID NO: 250541 - DNA, 25 bp, Artificial
  Probe
aggttttctatggatttctggcaaa

SEQ ID NO: 250542 - DNA, 25 bp, Artificial
  Probe
ctatggatttctggcaaaagatgct

SEQ ID NO: 250543 - DNA, 25 bp, Artificial
  Probe
gtacatgaggttttctatggatttc

SEQ ID NO: 250544 - DNA, 25 bp, Artificial
  Probe
tctaatgtgactattcttgggcgat

SEQ ID NO: 250545 - DNA, 25 bp, Artificial
  Probe
attacagccagtgtgacatttggta

SEQ ID NO: 250546 - DNA, 25 bp, Artificial
  Probe
ggtacatgaggttttctatggattt

SEQ ID NO: 250547 - DNA, 25 bp, Artificial
  Probe
taatgtgactattcttgggcgattt

SEQ ID NO: 250548 - DNA, 25 bp, Artificial
  Probe
ctaatgtgactattcttgggcgatt

SEQ ID NO: 250549 - DNA, 25 bp, Artificial
  Probe
tgattacagccagtgtgacatttgg

SEQ ID NO: 250550 - DNA, 25 bp, Artificial
  Probe
tttgattacagccagtgtgacattt

SEQ ID NO: 250551 - DNA, 25 bp, Artificial
  Probe
gatttgattacagccagtgtgacat

SEQ ID NO: 250552 - DNA, 25 bp, Artificial
  Probe
tattcttgggcgatttgattacagc

SEQ ID NO: 250553 - DNA, 25 bp, Artificial
  Probe
ttctatggatttctggcaaaagatg

SEQ ID NO: 250554 - DNA, 25 bp, Artificial
  Probe
tttctatggatttctggcaaaagat

SEQ ID NO: 250555 - DNA, 25 bp, Artificial
  Probe
cttgggcgatttgattacagccagt

SEQ ID NO: 250556 - DNA, 25 bp, Artificial
  Probe
ttacagccagtgtgacatttggtac

SEQ ID NO: 250557 - DNA, 25 bp, Artificial
  Probe
gtgactattcttgggcgatttgatt

SEQ ID NO: 250558 - DNA, 25 bp, Artificial
  Probe
tctatggatttctggcaaaagatgc

SEQ ID NO: 250559 - DNA, 25 bp, Artificial
  Probe
acatttggtacatgaggttttctat

SEQ ID NO: 250560 - DNA, 25 bp, Artificial
  Probe
aacctagtgagtctaatgtgactat

SEQ ID NO: 250561 - DNA, 25 bp, Artificial
  Probe
taaacctagtgagtctaatgtgact

SEQ ID NO: 250562 - DNA, 25 bp, Artificial
  Probe
catttggtacatgaggttttctatg

SEQ ID NO: 250563 - DNA, 25 bp, Artificial
  Probe
tgacatttggtacatgaggttttct

SEQ ID NO: 250564 - DNA, 25 bp, Artificial
  Probe
acctagtgagtctaatgtgactatt

SEQ ID NO: 250565 - DNA, 25 bp, Artificial
  Probe
agccagtgtgacatttggtacatga

SEQ ID NO: 250566 - DNA, 25 bp, Artificial
  Probe
agtgtgacatttggtacatgaggtt

SEQ ID NO: 250567 - DNA, 25 bp, Artificial
  Probe
tggatttctggcaaaagatgcttgc

SEQ ID NO: 250568 - DNA, 25 bp, Artificial
  Probe
tgggaacagcagtccacgtaagaaa

SEQ ID NO: 250569 - DNA, 25 bp, Artificial
  Probe
tttcaaggtcggtgaaaagtagaag

SEQ ID NO: 250570 - DNA, 25 bp, Artificial
  Probe
cagtccacgtaagaaactgtagatg

SEQ ID NO: 250571 - DNA, 25 bp, Artificial
  Probe
atatttcaaggtcggtgaaaagtag

SEQ ID NO: 250572 - DNA, 25 bp, Artificial
  Probe
tccacgtaagaaactgtagatgtct

SEQ ID NO: 250573 - DNA, 25 bp, Artificial
  Probe
gtctcagtgtaatgtgggaacagca

SEQ ID NO: 250574 - DNA, 25 bp, Artificial
  Probe
aactgtagatgtctgtagtactttc

SEQ ID NO: 250575 - DNA, 25 bp, Artificial
  Probe
gtagaagtctcagtgtaatgtggga

SEQ ID NO: 250576 - DNA, 25 bp, Artificial
  Probe
gtccacgtaagaaactgtagatgtc

SEQ ID NO: 250577 - DNA, 25 bp, Artificial
  Probe
cagcagtccacgtaagaaactgtag

SEQ ID NO: 250578 - DNA, 25 bp, Artificial
  Probe
agcagtccacgtaagaaactgtaga

SEQ ID NO: 250579 - DNA, 25 bp, Artificial
  Probe
gaagtctcagtgtaatgtgggaaca

SEQ ID NO: 250580 - DNA, 25 bp, Artificial
  Probe
agtccacgtaagaaactgtagatgt

SEQ ID NO: 250581 - DNA, 25 bp, Artificial
  Probe
gcagtccacgtaagaaactgtagat

SEQ ID NO: 250582 - DNA, 25 bp, Artificial
  Probe
agaagtctcagtgtaatgtgggaac

SEQ ID NO: 250583 - DNA, 25 bp, Artificial
  Probe
tatatttcaaggtcggtgaaaagta

SEQ ID NO: 250584 - DNA, 25 bp, Artificial
  Probe
agtctcagtgtaatgtgggaacagc

SEQ ID NO: 250585 - DNA, 25 bp, Artificial
  Probe
ttatatttcaaggtcggtgaaaagt

SEQ ID NO: 250586 - DNA, 25 bp, Artificial
  Probe
gaacagcagtccacgtaagaaactg

SEQ ID NO: 250587 - DNA, 25 bp, Artificial
  Probe
ttcaaggtcggtgaaaagtagaagt

SEQ ID NO: 250588 - DNA, 25 bp, Artificial
  Probe
tttatatttcaaggtcggtgaaaag

SEQ ID NO: 250589 - DNA, 25 bp, Artificial
  Probe
aaactgtagatgtctgtagtacttt

SEQ ID NO: 250590 - DNA, 25 bp, Artificial
  Probe
tgtttatatttcaaggtcggtgaaa

SEQ ID NO: 250591 - DNA, 25 bp, Artificial
  Probe
tagaagtctcagtgtaatgtgggaa

SEQ ID NO: 250592 - DNA, 25 bp, Artificial
  Probe
acagcagtccacgtaagaaactgta

SEQ ID NO: 250593 - DNA, 25 bp, Artificial
  Probe
gggaacagcagtccacgtaagaaac

SEQ ID NO: 250594 - DNA, 25 bp, Artificial
  Probe
aagtctcagtgtaatgtgggaacag

SEQ ID NO: 250595 - DNA, 25 bp, Artificial
  Probe
tgtgggaacagcagtccacgtaaga

SEQ ID NO: 250596 - DNA, 25 bp, Artificial
  Probe
gaaactgtagatgtctgtagtactt

SEQ ID NO: 250597 - DNA, 25 bp, Artificial
  Probe
ggaacagcagtccacgtaagaaact

SEQ ID NO: 250598 - DNA, 25 bp, Artificial
  Probe
tatttcaaggtcggtgaaaagtaga

SEQ ID NO: 250599 - DNA, 25 bp, Artificial
  Probe
aacagcagtccacgtaagaaactgt

SEQ ID NO: 250600 - DNA, 25 bp, Artificial
  Probe
gtgggaacagcagtccacgtaagaa

SEQ ID NO: 250601 - DNA, 25 bp, Artificial
  Probe
aaggatcagaaaccattcaaagagg

SEQ ID NO: 250602 - DNA, 25 bp, Artificial
  Probe
aaacctgcaggcatatatcattggc

SEQ ID NO: 250603 - DNA, 25 bp, Artificial
  Probe
agacgttcggacagacccggcaagg

SEQ ID NO: 250604 - DNA, 25 bp, Artificial
  Probe
cctgcaggcatatatcattggcgta

SEQ ID NO: 250605 - DNA, 25 bp, Artificial
  Probe
gtatagaacgcactaccctaagcca

SEQ ID NO: 250606 - DNA, 25 bp, Artificial
  Probe
atatcattggcgtatggcactcatg

SEQ ID NO: 250607 - DNA, 25 bp, Artificial
  Probe
gagcacgctcacaaacctgcaggca

SEQ ID NO: 250608 - DNA, 25 bp, Artificial
  Probe
tggcgtatggcactcatgcaaaagg

SEQ ID NO: 250609 - DNA, 25 bp, Artificial
  Probe
agccatgaggaactccatgctttgc

SEQ ID NO: 250610 - DNA, 25 bp, Artificial
  Probe
ccctaagccatgaggaactccatgc

SEQ ID NO: 250611 - DNA, 25 bp, Artificial
  Probe
gcacgctcacaaacctgcaggcata

SEQ ID NO: 250612 - DNA, 25 bp, Artificial
  Probe
gtggccactggttaatgttaggaac

SEQ ID NO: 250613 - DNA, 25 bp, Artificial
  Probe
ctgcaggcatatatcattggcgtat

SEQ ID NO: 250614 - DNA, 25 bp, Artificial
  Probe
tgagcacgctcacaaacctgcaggc

SEQ ID NO: 250615 - DNA, 25 bp, Artificial
  Probe
caggcatatatcattggcgtatggc

SEQ ID NO: 250616 - DNA, 25 bp, Artificial
  Probe
taaatctgggtctgcatctcttatt

SEQ ID NO: 250617 - DNA, 25 bp, Artificial
  Probe
atctgagcacgctcacaaacctgca

SEQ ID NO: 250618 - DNA, 25 bp, Artificial
  Probe
ttggcgtatggcactcatgcaaaag

SEQ ID NO: 250619 - DNA, 25 bp, Artificial
  Probe
atcattggcgtatggcactcatgca

SEQ ID NO: 250620 - DNA, 25 bp, Artificial
  Probe
aacgcactaccctaagccatgagga

SEQ ID NO: 250621 - DNA, 25 bp, Artificial
  Probe
atgtatagacgttcggacagacccg

SEQ ID NO: 250622 - DNA, 25 bp, Artificial
  Probe
aggaactccatgctttgctaaccaa

SEQ ID NO: 250623 - DNA, 25 bp, Artificial
  Probe
ggcatatatcattggcgtatggcac

SEQ ID NO: 250624 - DNA, 25 bp, Artificial
  Probe
ggaactccatgctttgctaaccaac

SEQ ID NO: 250625 - DNA, 25 bp, Artificial
  Probe
ggcactcatgcaaaaggatcagaaa

SEQ ID NO: 250626 - DNA, 25 bp, Artificial
  Probe
atctgggtctgcatctcttattaaa

SEQ ID NO: 250627 - DNA, 25 bp, Artificial
  Probe
gtatggcactcatgcaaaaggatca

SEQ ID NO: 250628 - DNA, 25 bp, Artificial
  Probe
tggccactggttaatgttaggaaca

SEQ ID NO: 250629 - DNA, 25 bp, Artificial
  Probe
gtgtttttcccctcaatagcttcgc

SEQ ID NO: 250630 - DNA, 25 bp, Artificial
  Probe
tgtatagaacgcactaccctaagcc

SEQ ID NO: 250631 - DNA, 25 bp, Artificial
  Probe
cataactgttttctctttgtagaag

SEQ ID NO: 250632 - DNA, 25 bp, Artificial
  Probe
ccactggttaatgttaggaacatgc

SEQ ID NO: 250633 - DNA, 25 bp, Artificial
  Probe
gccactggttaatgttaggaacatg

SEQ ID NO: 250634 - DNA, 25 bp, Artificial
  Probe
gcactcatgcaaaaggatcagaaac

SEQ ID NO: 250635 - DNA, 25 bp, Artificial
  Probe
cgcactaccctaagccatgaggaac

SEQ ID NO: 250636 - DNA, 25 bp, Artificial
  Probe
atagaacgcactaccctaagccatg

SEQ ID NO: 250637 - DNA, 25 bp, Artificial
  Probe
atggcactcatgcaaaaggatcaga

SEQ ID NO: 250638 - DNA, 25 bp, Artificial
  Probe
atagacgttcggacagacccggcaa

SEQ ID NO: 250639 - DNA, 25 bp, Artificial
  Probe
cctaagccatgaggaactccatgct

SEQ ID NO: 250640 - DNA, 25 bp, Artificial
  Probe
atgaggaactccatgctttgctaac

SEQ ID NO: 250641 - DNA, 25 bp, Artificial
  Probe
gtcacctaacatctgagcacgctca

SEQ ID NO: 250642 - DNA, 25 bp, Artificial
  Probe
caccaaggactttttgtatagaacg

SEQ ID NO: 250643 - DNA, 25 bp, Artificial
  Probe
actcatgcaaaaggatcagaaacca

SEQ ID NO: 250644 - DNA, 25 bp, Artificial
  Probe
ctaccctaagccatgaggaactcca

SEQ ID NO: 250645 - DNA, 25 bp, Artificial
  Probe
taccctaagccatgaggaactccat

SEQ ID NO: 250646 - DNA, 25 bp, Artificial
  Probe
gctcacaaacctgcaggcatatatc

SEQ ID NO: 250647 - DNA, 25 bp, Artificial
  Probe
agataatattttatcctatgtcgaa

SEQ ID NO: 250648 - DNA, 25 bp, Artificial
  Probe
tctttttattcatggacttgttttt

SEQ ID NO: 250649 - DNA, 25 bp, Artificial
  Probe
atgaaaatcgctttctttttattca

SEQ ID NO: 250650 - DNA, 25 bp, Artificial
  Probe
ggaaagtccctgtttatgaaaatcg

SEQ ID NO: 250651 - DNA, 25 bp, Artificial
  Probe
tcctatgtcgaaagaagggggaaag

SEQ ID NO: 250652 - DNA, 25 bp, Artificial
  Probe
atgttacggaccaaacaccagaaag

SEQ ID NO: 250653 - DNA, 25 bp, Artificial
  Probe
gaaagtccctgtttatgaaaatcgc

SEQ ID NO: 250654 - DNA, 25 bp, Artificial
  Probe
gatgttacggaccaaacaccagaaa

SEQ ID NO: 250655 - DNA, 25 bp, Artificial
  Probe
ttatttttaatttgtagttggatgt

SEQ ID NO: 250656 - DNA, 25 bp, Artificial
  Probe
tttatgaaaatcgctttctttttat

SEQ ID NO: 250657 - DNA, 25 bp, Artificial
  Probe
ttgcgttcagagactcgctttcctg

SEQ ID NO: 250658 - DNA, 25 bp, Artificial
  Probe
tccattgtttgtttattaataaatt

SEQ ID NO: 250659 - DNA, 25 bp, Artificial
  Probe
gtttcttgcgttcagagactcgctt

SEQ ID NO: 250660 - DNA, 25 bp, Artificial
  Probe
tattttgtacagacagcaaaatcat

SEQ ID NO: 250661 - DNA, 25 bp, Artificial
  Probe
ttttgtacagacagcaaaatcatgg

SEQ ID NO: 250662 - DNA, 25 bp, Artificial
  Probe
tgttacggaccaaacaccagaaagt

SEQ ID NO: 250663 - DNA, 25 bp, Artificial
  Probe
gttacggaccaaacaccagaaagtg

SEQ ID NO: 250664 - DNA, 25 bp, Artificial
  Probe
agcgaacagaatctctcctgaaatt

SEQ ID NO: 250665 - DNA, 25 bp, Artificial
  Probe
ttcttgcgttcagagactcgctttc

SEQ ID NO: 250666 - DNA, 25 bp, Artificial
  Probe
aagtccctgtttatgaaaatcgctt

SEQ ID NO: 250667 - DNA, 25 bp, Artificial
  Probe
aaagtccctgtttatgaaaatcgct

SEQ ID NO: 250668 - DNA, 25 bp, Artificial
  Probe
attttgtacagacagcaaaatcatg

SEQ ID NO: 250669 - DNA, 25 bp, Artificial
  Probe
cagcgaacagaatctctcctgaaat

SEQ ID NO: 250670 - DNA, 25 bp, Artificial
  Probe
cctatttttctaaaagattaatgca

SEQ ID NO: 250671 - DNA, 25 bp, Artificial
  Probe
tcttgcgttcagagactcgctttcc

SEQ ID NO: 250672 - DNA, 25 bp, Artificial
  Probe
aactattttgtacagacagcaaaat

SEQ ID NO: 250673 - DNA, 25 bp, Artificial
  Probe
agtccctgtttatgaaaatcgcttt

SEQ ID NO: 250674 - DNA, 25 bp, Artificial
  Probe
gtccctgtttatgaaaatcgctttc

SEQ ID NO: 250675 - DNA, 25 bp, Artificial
  Probe
ggaccaaacaccagaaagtgttcca

SEQ ID NO: 250676 - DNA, 25 bp, Artificial
  Probe
tctctcattataaaaagggaaactg

SEQ ID NO: 250677 - DNA, 25 bp, Artificial
  Probe
agtttcttgcgttcagagactcgct

SEQ ID NO: 250678 - DNA, 25 bp, Artificial
  Probe
aaactgtattaatctcattctatca

SEQ ID NO: 250679 - DNA, 25 bp, Artificial
  Probe
ttttcaagttaaattgcctgaaact

SEQ ID NO: 250680 - DNA, 25 bp, Artificial
  Probe
tttgtcttgcccctctgcctctgcc

SEQ ID NO: 250681 - DNA, 25 bp, Artificial
  Probe
tttcttgcgttcagagactcgcttt

SEQ ID NO: 250682 - DNA, 25 bp, Artificial
  Probe
gcgaacagaatctctcctgaaattc

SEQ ID NO: 250683 - DNA, 25 bp, Artificial
  Probe
ttacggaccaaacaccagaaagtgt

SEQ ID NO: 250684 - DNA, 25 bp, Artificial
  Probe
atctctcctgaaattcaactcacca

SEQ ID NO: 250685 - DNA, 25 bp, Artificial
  Probe
tcatggacttgtttttaaatgtaaa

SEQ ID NO: 250686 - DNA, 25 bp, Artificial
  Probe
tggatgttacggaccaaacaccaga

SEQ ID NO: 250687 - DNA, 25 bp, Artificial
  Probe
tgcgttcagagactcgctttcctgc

SEQ ID NO: 250688 - DNA, 25 bp, Artificial
  Probe
cttgcgttcagagactcgctttcct

SEQ ID NO: 250689 - DNA, 25 bp, Artificial
  Probe
gaccaaacaccagaaagtgttccaa

SEQ ID NO: 250690 - DNA, 25 bp, Artificial
  Probe
ggatgttacggaccaaacaccagaa

SEQ ID NO: 250691 - DNA, 25 bp, Artificial
  Probe
ttgtagttggatgttacggaccaaa

SEQ ID NO: 250692 - DNA, 25 bp, Artificial
  Probe
tacggaccaaacaccagaaagtgtt

SEQ ID NO: 250693 - DNA, 25 bp, Artificial
  Probe
gaggatgtccccactgcccttgaat

SEQ ID NO: 250694 - DNA, 25 bp, Artificial
  Probe
cctggcacgccaaactgtctactgg

SEQ ID NO: 250695 - DNA, 25 bp, Artificial
  Probe
gaagttgaggcacacagaggtcaaa

SEQ ID NO: 250696 - DNA, 25 bp, Artificial
  Probe
cagcatgcgccagacaagaggatgt

SEQ ID NO: 250697 - DNA, 25 bp, Artificial
  Probe
tcacaacatgcctgtgaggtaggga

SEQ ID NO: 250698 - DNA, 25 bp, Artificial
  Probe
cccttgaatcatatgcacagtatag

SEQ ID NO: 250699 - DNA, 25 bp, Artificial
  Probe
ggactgtccccattttacagaggag

SEQ ID NO: 250700 - DNA, 25 bp, Artificial
  Probe
ttcatccaggggacccctgcagcat

SEQ ID NO: 250701 - DNA, 25 bp, Artificial
  Probe
atacactctaaggtctatgtgcata

SEQ ID NO: 250702 - DNA, 25 bp, Artificial
  Probe
aggcccttgcttcatccaggggacc

SEQ ID NO: 250703 - DNA, 25 bp, Artificial
  Probe
ggggacccctgcagcatgcgccaga

SEQ ID NO: 250704 - DNA, 25 bp, Artificial
  Probe
tatgtacacatacgtacagacaccg

SEQ ID NO: 250705 - DNA, 25 bp, Artificial
  Probe
atatgcacagtatagaacagcccct

SEQ ID NO: 250706 - DNA, 25 bp, Artificial
  Probe
tgcgccagacaagaggatgtcccca

SEQ ID NO: 250707 - DNA, 25 bp, Artificial
  Probe
aaggtgcggccaagggcagacaacc

SEQ ID NO: 250708 - DNA, 25 bp, Artificial
  Probe
gcagcatgcgccagacaagaggatg

SEQ ID NO: 250709 - DNA, 25 bp, Artificial
  Probe
ggcacacagaggtcaaatgacttgc

SEQ ID NO: 250710 - DNA, 25 bp, Artificial
  Probe
tgaggcacacagaggtcaaatgact

SEQ ID NO: 250711 - DNA, 25 bp, Artificial
  Probe
aagccacttgggagtcctacatttt

SEQ ID NO: 250712 - DNA, 25 bp, Artificial
  Probe
aatatacactctaaggtctatgtgc

SEQ ID NO: 250713 - DNA, 25 bp, Artificial
  Probe
gactgtccccattttacagaggagg

SEQ ID NO: 250714 - DNA, 25 bp, Artificial
  Probe
tatgtgcatatgtacacatacgtac

SEQ ID NO: 250715 - DNA, 25 bp, Artificial
  Probe
acagtatagaacagcccctggcacg

SEQ ID NO: 250716 - DNA, 25 bp, Artificial
  Probe
cccctggaagccacttgggagtcct

SEQ ID NO: 250717 - DNA, 25 bp, Artificial
  Probe
cacaacatgcctgtgaggtagggag

SEQ ID NO: 250718 - DNA, 25 bp, Artificial
  Probe
tatacactctaaggtctatgtgcat

SEQ ID NO: 250719 - DNA, 25 bp, Artificial
  Probe
atcatatgcacagtatagaacagcc

SEQ ID NO: 250720 - DNA, 25 bp, Artificial
  Probe
actctaaggtctatgtgcatatgta

SEQ ID NO: 250721 - DNA, 25 bp, Artificial
  Probe
aggggacccctgcagcatgcgccag

SEQ ID NO: 250722 - DNA, 25 bp, Artificial
  Probe
ctaaggtctatgtgcatatgtacac

SEQ ID NO: 250723 - DNA, 25 bp, Artificial
  Probe
gtccccattttacagaggaggaagt

SEQ ID NO: 250724 - DNA, 25 bp, Artificial
  Probe
gccaagctggaacaggcccccagag

SEQ ID NO: 250725 - DNA, 25 bp, Artificial
  Probe
cacagtatagaacagcccctggcac

SEQ ID NO: 250726 - DNA, 25 bp, Artificial
  Probe
attctcacaacatgcctgtgaggta

SEQ ID NO: 250727 - DNA, 25 bp, Artificial
  Probe
ctggaagccacttgggagtcctaca

SEQ ID NO: 250728 - DNA, 25 bp, Artificial
  Probe
gccacttgggagtcctacattttct

SEQ ID NO: 250729 - DNA, 25 bp, Artificial
  Probe
gtacacatacgtacagacaccgcca

SEQ ID NO: 250730 - DNA, 25 bp, Artificial
  Probe
ggcacgccaaactgtctactgggcc

SEQ ID NO: 250731 - DNA, 25 bp, Artificial
  Probe
ggccaagctggaacaggcccccaga

SEQ ID NO: 250732 - DNA, 25 bp, Artificial
  Probe
cagagcaggcccttgcttcatccag

SEQ ID NO: 250733 - DNA, 25 bp, Artificial
  Probe
catatgcacagtatagaacagcccc

SEQ ID NO: 250734 - DNA, 25 bp, Artificial
  Probe
acactctaaggtctatgtgcatatg

SEQ ID NO: 250735 - DNA, 25 bp, Artificial
  Probe
ttgaatcatatgcacagtatagaac

SEQ ID NO: 250736 - DNA, 25 bp, Artificial
  Probe
gacaagaggatgtccccactgccct

SEQ ID NO: 250737 - DNA, 25 bp, Artificial
  Probe
cactgcccttgaatcatatgcacag

SEQ ID NO: 250738 - DNA, 25 bp, Artificial
  Probe
gaatcatatgcacagtatagaacag

SEQ ID NO: 250739 - DNA, 25 bp, Artificial
  Probe
ggttggaccaggtggacagataagc

SEQ ID NO: 250740 - DNA, 25 bp, Artificial
  Probe
ccatgaactagatggttggaccagg

SEQ ID NO: 250741 - DNA, 25 bp, Artificial
  Probe
tggaccaggtggacagataagctga

SEQ ID NO: 250742 - DNA, 25 bp, Artificial
  Probe
gtccccttgataaccatgaactaga

SEQ ID NO: 250743 - DNA, 25 bp, Artificial
  Probe
cccttgataaccatgaactagatgg

SEQ ID NO: 250744 - DNA, 25 bp, Artificial
  Probe
cagtccccttgataaccatgaacta

SEQ ID NO: 250745 - DNA, 25 bp, Artificial
  Probe
gtccttgtgcatgacctgcaaaaaa

SEQ ID NO: 250746 - DNA, 25 bp, Artificial
  Probe
ccctcgtccttgtgcatgacctgca

SEQ ID NO: 250747 - DNA, 25 bp, Artificial
  Probe
ccccttgataaccatgaactagatg

SEQ ID NO: 250748 - DNA, 25 bp, Artificial
  Probe
ctagatggttggaccaggtggacag

SEQ ID NO: 250749 - DNA, 25 bp, Artificial
  Probe
ataaccatgaactagatggttggac

SEQ ID NO: 250750 - DNA, 25 bp, Artificial
  Probe
caaaaaaacaactgtgtgtctttgg

SEQ ID NO: 250751 - DNA, 25 bp, Artificial
  Probe
gaactagatggttggaccaggtgga

SEQ ID NO: 250752 - DNA, 25 bp, Artificial
  Probe
cttgataaccatgaactagatggtt

SEQ ID NO: 250753 - DNA, 25 bp, Artificial
  Probe
tccccttgataaccatgaactagat

SEQ ID NO: 250754 - DNA, 25 bp, Artificial
  Probe
cttgtgcatgacctgcaaaaaaaca

SEQ ID NO: 250755 - DNA, 25 bp, Artificial
  Probe
tcgtccttgtgcatgacctgcaaaa

SEQ ID NO: 250756 - DNA, 25 bp, Artificial
  Probe
agagctcacagtaacaccgcgtgtc

SEQ ID NO: 250757 - DNA, 25 bp, Artificial
  Probe
taaccatgaactagatggttggacc

SEQ ID NO: 250758 - DNA, 25 bp, Artificial
  Probe
acagataagctgacgcccctgtcat

SEQ ID NO: 250759 - DNA, 25 bp, Artificial
  Probe
aaccatgaactagatggttggacca

SEQ ID NO: 250760 - DNA, 25 bp, Artificial
  Probe
cctcgtccttgtgcatgacctgcaa

SEQ ID NO: 250761 - DNA, 25 bp, Artificial
  Probe
agtccccttgataaccatgaactag

SEQ ID NO: 250762 - DNA, 25 bp, Artificial
  Probe
actagatggttggaccaggtggaca

SEQ ID NO: 250763 - DNA, 25 bp, Artificial
  Probe
ttgataaccatgaactagatggttg

SEQ ID NO: 250764 - DNA, 25 bp, Artificial
  Probe
atgacctgcaaaaaaacaactgtgt

SEQ ID NO: 250765 - DNA, 25 bp, Artificial
  Probe
tccttgtgcatgacctgcaaaaaaa

SEQ ID NO: 250766 - DNA, 25 bp, Artificial
  Probe
cgtccttgtgcatgacctgcaaaaa

SEQ ID NO: 250767 - DNA, 25 bp, Artificial
  Probe
cagataagctgacgcccctgtcatc

SEQ ID NO: 250768 - DNA, 25 bp, Artificial
  Probe
tcaccctcgtccttgtgcatgacct

SEQ ID NO: 250769 - DNA, 25 bp, Artificial
  Probe
aactagatggttggaccaggtggac

SEQ ID NO: 250770 - DNA, 25 bp, Artificial
  Probe
gacagataagctgacgcccctgtca

SEQ ID NO: 250771 - DNA, 25 bp, Artificial
  Probe
ccttgataaccatgaactagatggt

SEQ ID NO: 250772 - DNA, 25 bp, Artificial
  Probe
ttggaccaggtggacagataagctg

SEQ ID NO: 250773 - DNA, 25 bp, Artificial
  Probe
ctcgtccttgtgcatgacctgcaaa

SEQ ID NO: 250774 - DNA, 25 bp, Artificial
  Probe
aaaaacaactgtgtgtctttgggct

SEQ ID NO: 250775 - DNA, 25 bp, Artificial
  Probe
ataagctgacgcccctgtcatctgc

SEQ ID NO: 250776 - DNA, 25 bp, Artificial
  Probe
accatgaactagatggttggaccag

SEQ ID NO: 250777 - DNA, 25 bp, Artificial
  Probe
cttcaccctcgtccttgtgcatgac

SEQ ID NO: 250778 - DNA, 25 bp, Artificial
  Probe
ggagagctcacagtaacaccgcgtg

SEQ ID NO: 250779 - DNA, 25 bp, Artificial
  Probe
gagagctcacagtaacaccgcgtgt

SEQ ID NO: 250780 - DNA, 25 bp, Artificial
  Probe
gataaccatgaactagatggttgga

SEQ ID NO: 250781 - DNA, 25 bp, Artificial
  Probe
gtgcatgacctgcaaaaaaacaact

SEQ ID NO: 250782 - DNA, 25 bp, Artificial
  Probe
agatggttggaccaggtggacagat

SEQ ID NO: 250783 - DNA, 25 bp, Artificial
  Probe
gttggaccaggtggacagataagct

SEQ ID NO: 250784 - DNA, 25 bp, Artificial
  Probe
tgcaaaaaaacaactgtgtgtcttt

SEQ ID NO: 250785 - DNA, 25 bp, Artificial
  Probe
cagcgctcctcgtgtggctgacgtc

SEQ ID NO: 250786 - DNA, 25 bp, Artificial
  Probe
gtacagttccacacgatgtttgaat

SEQ ID NO: 250787 - DNA, 25 bp, Artificial
  Probe
gaatacagccctaatgacacctcgt

SEQ ID NO: 250788 - DNA, 25 bp, Artificial
  Probe
cacgactcgggtgatctaagccctc

SEQ ID NO: 250789 - DNA, 25 bp, Artificial
  Probe
cggactggcacgactcgggtgatct

SEQ ID NO: 250790 - DNA, 25 bp, Artificial
  Probe
tcaccgcaggtgcaggcgcagcgct

SEQ ID NO: 250791 - DNA, 25 bp, Artificial
  Probe
gcgttaccaagtcttaagtaatcct

SEQ ID NO: 250792 - DNA, 25 bp, Artificial
  Probe
gtatgttgtttctcattacttcccg

SEQ ID NO: 250793 - DNA, 25 bp, Artificial
  Probe
cctgcagatttcaaaagttgcatta

SEQ ID NO: 250794 - DNA, 25 bp, Artificial
  Probe
atgtttgaatacagccctaatgaca

SEQ ID NO: 250795 - DNA, 25 bp, Artificial
  Probe
ctaaagtgctgaccatgagaaggga

SEQ ID NO: 250796 - DNA, 25 bp, Artificial
  Probe
ttcagcttcttggaagtcaccgcag

SEQ ID NO: 250797 - DNA, 25 bp, Artificial
  Probe
tgaatacagccctaatgacacctcg

SEQ ID NO: 250798 - DNA, 25 bp, Artificial
  Probe
gcgcagcgctcctcgtgtggctgac

SEQ ID NO: 250799 - DNA, 25 bp, Artificial
  Probe
atgttgtttctcattacttcccgtg

SEQ ID NO: 250800 - DNA, 25 bp, Artificial
  Probe
cgactcgggtgatctaagccctcca

SEQ ID NO: 250801 - DNA, 25 bp, Artificial
  Probe
gtcttaagtaatcctcactgcaaga

SEQ ID NO: 250802 - DNA, 25 bp, Artificial
  Probe
caggcgcagcgctcctcgtgtggct

SEQ ID NO: 250803 - DNA, 25 bp, Artificial
  Probe
ttgtacagttccacacgatgtttga

SEQ ID NO: 250804 - DNA, 25 bp, Artificial
  Probe
agttacgtatgttgtttctcattac

SEQ ID NO: 250805 - DNA, 25 bp, Artificial
  Probe
cagttccacacgatgtttgaataca

SEQ ID NO: 250806 - DNA, 25 bp, Artificial
  Probe
gactggcacgactcgggtgatctaa

SEQ ID NO: 250807 - DNA, 25 bp, Artificial
  Probe
attcagcttcttggaagtcaccgca

SEQ ID NO: 250808 - DNA, 25 bp, Artificial
  Probe
gcgctcctcgtgtggctgacgtcgc

SEQ ID NO: 250809 - DNA, 25 bp, Artificial
  Probe
agtcttaagtaatcctcactgcaag

SEQ ID NO: 250810 - DNA, 25 bp, Artificial
  Probe
tcagcttcttggaagtcaccgcagg

SEQ ID NO: 250811 - DNA, 25 bp, Artificial
  Probe
agaaccaaggattcagcttcttgga

SEQ ID NO: 250812 - DNA, 25 bp, Artificial
  Probe
ctccactgagaaccaaggattcagc

SEQ ID NO: 250813 - DNA, 25 bp, Artificial
  Probe
actgagaaccaaggattcagcttct

SEQ ID NO: 250814 - DNA, 25 bp, Artificial
  Probe
gaaccaaggattcagcttcttggaa

SEQ ID NO: 250815 - DNA, 25 bp, Artificial
  Probe
caaactaaagtgctgaccatgagaa

SEQ ID NO: 250816 - DNA, 25 bp, Artificial
  Probe
cagacaaactaaagtgctgaccatg

SEQ ID NO: 250817 - DNA, 25 bp, Artificial
  Probe
aaactaaagtgctgaccatgagaag

SEQ ID NO: 250818 - DNA, 25 bp, Artificial
  Probe
cctccactgagaaccaaggattcag

SEQ ID NO: 250819 - DNA, 25 bp, Artificial
  Probe
ccacacgatgtttgaatacagccct

SEQ ID NO: 250820 - DNA, 25 bp, Artificial
  Probe
atgcgttaccaagtcttaagtaatc

SEQ ID NO: 250821 - DNA, 25 bp, Artificial
  Probe
aaacctgcagatttcaaaagttgca

SEQ ID NO: 250822 - DNA, 25 bp, Artificial
  Probe
gttgtttctcattacttcccgtgca

SEQ ID NO: 250823 - DNA, 25 bp, Artificial
  Probe
acagttccacacgatgtttgaatac

SEQ ID NO: 250824 - DNA, 25 bp, Artificial
  Probe
gcttcttggaagtcaccgcaggtgc

SEQ ID NO: 250825 - DNA, 25 bp, Artificial
  Probe
aatatttgtacagttccacacgatg

SEQ ID NO: 250826 - DNA, 25 bp, Artificial
  Probe
aagtcaccgcaggtgcaggcgcagc

SEQ ID NO: 250827 - DNA, 25 bp, Artificial
  Probe
gcacgactcgggtgatctaagccct

SEQ ID NO: 250828 - DNA, 25 bp, Artificial
  Probe
gcagcgctcctcgtgtggctgacgt

SEQ ID NO: 250829 - DNA, 25 bp, Artificial
  Probe
aaggattcagcttcttggaagtcac

SEQ ID NO: 250830 - DNA, 25 bp, Artificial
  Probe
ttcttggaagtcaccgcaggtgcag

SEQ ID NO: 250831 - DNA, 25 bp, Artificial
  Probe
agtgcagggtatgcaccagcagccc

SEQ ID NO: 250832 - DNA, 25 bp, Artificial
  Probe
cgcaccgttttttagtgtggtgtat

SEQ ID NO: 250833 - DNA, 25 bp, Artificial
  Probe
atgttatgcaatggacgcatacgga

SEQ ID NO: 250834 - DNA, 25 bp, Artificial
  Probe
agtgtcagccgcaccgttttttagt

SEQ ID NO: 250835 - DNA, 25 bp, Artificial
  Probe
gcggactgccactgtcccagtgcag

SEQ ID NO: 250836 - DNA, 25 bp, Artificial
  Probe
cccagtgcagggtatgcaccagcag

SEQ ID NO: 250837 - DNA, 25 bp, Artificial
  Probe
agcatagagcccagacagtgcggac

SEQ ID NO: 250838 - DNA, 25 bp, Artificial
  Probe
gttatgcaatggacgcatacggaaa

SEQ ID NO: 250839 - DNA, 25 bp, Artificial
  Probe
catacggaaatccacttagtgtcag

SEQ ID NO: 250840 - DNA, 25 bp, Artificial
  Probe
agagcccagacagtgcggactgcca

SEQ ID NO: 250841 - DNA, 25 bp, Artificial
  Probe
tactgctgtgcttatgtctgcttgg

SEQ ID NO: 250842 - DNA, 25 bp, Artificial
  Probe
tcaatctgtgtttccttgacttaga

SEQ ID NO: 250843 - DNA, 25 bp, Artificial
  Probe
ttgaggccccttttacacaatctgg

SEQ ID NO: 250844 - DNA, 25 bp, Artificial
  Probe
tccttgacttagaagaagagaaaca

SEQ ID NO: 250845 - DNA, 25 bp, Artificial
  Probe
gacgcatacggaaatccacttagtg

SEQ ID NO: 250846 - DNA, 25 bp, Artificial
  Probe
atagagcccagacagtgcggactgc

SEQ ID NO: 250847 - DNA, 25 bp, Artificial
  Probe
tccacttagtgtcagccgcaccgtt

SEQ ID NO: 250848 - DNA, 25 bp, Artificial
  Probe
gagcccagacagtgcggactgccac

SEQ ID NO: 250849 - DNA, 25 bp, Artificial
  Probe
tgccactgtcccagtgcagggtatg

SEQ ID NO: 250850 - DNA, 25 bp, Artificial
  Probe
gcaatggacgcatacggaaatccac

SEQ ID NO: 250851 - DNA, 25 bp, Artificial
  Probe
aacagtactgctgtgcttatgtctg

SEQ ID NO: 250852 - DNA, 25 bp, Artificial
  Probe
cggaaatccacttagtgtcagccgc

SEQ ID NO: 250853 - DNA, 25 bp, Artificial
  Probe
agtactgctgtgcttatgtctgctt

SEQ ID NO: 250854 - DNA, 25 bp, Artificial
  Probe
cagtgcagggtatgcaccagcagcc

SEQ ID NO: 250855 - DNA, 25 bp, Artificial
  Probe
tacggaaatccacttagtgtcagcc

SEQ ID NO: 250856 - DNA, 25 bp, Artificial
  Probe
ttcaatctgtgtttccttgacttag

SEQ ID NO: 250857 - DNA, 25 bp, Artificial
  Probe
gtgcggactgccactgtcccagtgc

SEQ ID NO: 250858 - DNA, 25 bp, Artificial
  Probe
agagaaacagtactgctgtgcttat

SEQ ID NO: 250859 - DNA, 25 bp, Artificial
  Probe
gaaatccacttagtgtcagccgcac

SEQ ID NO: 250860 - DNA, 25 bp, Artificial
  Probe
caatggacgcatacggaaatccact

SEQ ID NO: 250861 - DNA, 25 bp, Artificial
  Probe
tctgtgtttccttgacttagaagaa

SEQ ID NO: 250862 - DNA, 25 bp, Artificial
  Probe
tcagccgcaccgttttttagtgtgg

SEQ ID NO: 250863 - DNA, 25 bp, Artificial
  Probe
ggacgcatacggaaatccacttagt

SEQ ID NO: 250864 - DNA, 25 bp, Artificial
  Probe
gaaacagtactgctgtgcttatgtc

SEQ ID NO: 250865 - DNA, 25 bp, Artificial
  Probe
aatgttatgcaatggacgcatacgg

SEQ ID NO: 250866 - DNA, 25 bp, Artificial
  Probe
cagtactgctgtgcttatgtctgct

SEQ ID NO: 250867 - DNA, 25 bp, Artificial
  Probe
ccactgtcccagtgcagggtatgca

SEQ ID NO: 250868 - DNA, 25 bp, Artificial
  Probe
tgcagggtatgcaccagcagcccac

SEQ ID NO: 250869 - DNA, 25 bp, Artificial
  Probe
aaatccacttagtgtcagccgcacc

SEQ ID NO: 250870 - DNA, 25 bp, Artificial
  Probe
catagagcccagacagtgcggactg

SEQ ID NO: 250871 - DNA, 25 bp, Artificial
  Probe
ccacttagtgtcagccgcaccgttt

SEQ ID NO: 250872 - DNA, 25 bp, Artificial
  Probe
ggactgccactgtcccagtgcaggg

SEQ ID NO: 250873 - DNA, 25 bp, Artificial
  Probe
gccgcaccgttttttagtgtggtgt

SEQ ID NO: 250874 - DNA, 25 bp, Artificial
  Probe
tgcaatggacgcatacggaaatcca

SEQ ID NO: 250875 - DNA, 25 bp, Artificial
  Probe
ctgtcccagtgcagggtatgcacca

SEQ ID NO: 250876 - DNA, 25 bp, Artificial
  Probe
atccacttagtgtcagccgcaccgt

SEQ ID NO: 250877 - DNA, 25 bp, Artificial
  Probe
tctcgatcagctaagtgcaggaggg

SEQ ID NO: 250878 - DNA, 25 bp, Artificial
  Probe
ggagacaatcagcattacaacacct

SEQ ID NO: 250879 - DNA, 25 bp, Artificial
  Probe
gccttgtgtcttccaacagtctgag

SEQ ID NO: 250880 - DNA, 25 bp, Artificial
  Probe
tggcatcataccagacattatctcg

SEQ ID NO: 250881 - DNA, 25 bp, Artificial
  Probe
ttgtgtcttccaacagtctgaggga

SEQ ID NO: 250882 - DNA, 25 bp, Artificial
  Probe
ggcatcataccagacattatctcgt

SEQ ID NO: 250883 - DNA, 25 bp, Artificial
  Probe
gatgtttctcgatcagctaagtgca

SEQ ID NO: 250884 - DNA, 25 bp, Artificial
  Probe
ctcgatcagctaagtgcaggaggga

SEQ ID NO: 250885 - DNA, 25 bp, Artificial
  Probe
tcctcgcagatgtttctcgatcagc

SEQ ID NO: 250886 - DNA, 25 bp, Artificial
  Probe
caggagcagcgcagacacggcatcc

SEQ ID NO: 250887 - DNA, 25 bp, Artificial
  Probe
cgcagacacggcatccatctttggc

SEQ ID NO: 250888 - DNA, 25 bp, Artificial
  Probe
agccatggccatggtgtggccagca

SEQ ID NO: 250889 - DNA, 25 bp, Artificial
  Probe
ctcgcagatgtttctcgatcagcta

SEQ ID NO: 250890 - DNA, 25 bp, Artificial
  Probe
cccatgccttatgacttacaaggat

SEQ ID NO: 250891 - DNA, 25 bp, Artificial
  Probe
taccagacattatctcgttggactg

SEQ ID NO: 250892 - DNA, 25 bp, Artificial
  Probe
tcccgtatacctcctcgcagatgtt

SEQ ID NO: 250893 - DNA, 25 bp, Artificial
  Probe
tctaagactgcctgtctgataaaac

SEQ ID NO: 250894 - DNA, 25 bp, Artificial
  Probe
atacctcctcgcagatgtttctcga

SEQ ID NO: 250895 - DNA, 25 bp, Artificial
  Probe
cggcatccatctttggcatcatacc

SEQ ID NO: 250896 - DNA, 25 bp, Artificial
  Probe
taaatctaagactgcctgtctgata

SEQ ID NO: 250897 - DNA, 25 bp, Artificial
  Probe
tttcccgtatacctcctcgcagatg

SEQ ID NO: 250898 - DNA, 25 bp, Artificial
  Probe
tcccagattaaatgacttggcagaa

SEQ ID NO: 250899 - DNA, 25 bp, Artificial
  Probe
ttatcaggagacaatcagcattaca

SEQ ID NO: 250900 - DNA, 25 bp, Artificial
  Probe
gacgcccatgccttatgacttacaa

SEQ ID NO: 250901 - DNA, 25 bp, Artificial
  Probe
tacctcctcgcagatgtttctcgat

SEQ ID NO: 250902 - DNA, 25 bp, Artificial
  Probe
tatctcgttggactgacgccctcac

SEQ ID NO: 250903 - DNA, 25 bp, Artificial
  Probe
agcagcgcagacacggcatccatct

SEQ ID NO: 250904 - DNA, 25 bp, Artificial
  Probe
agacacggcatccatctttggcatc

SEQ ID NO: 250905 - DNA, 25 bp, Artificial
  Probe
gacattatctcgttggactgacgcc

SEQ ID NO: 250906 - DNA, 25 bp, Artificial
  Probe
ccttatgacttacaaggattagatt

SEQ ID NO: 250907 - DNA, 25 bp, Artificial
  Probe
ttatctcgttggactgacgccctca

SEQ ID NO: 250908 - DNA, 25 bp, Artificial
  Probe
atgccttatgacttacaaggattag

SEQ ID NO: 250909 - DNA, 25 bp, Artificial
  Probe
cttatcaggagacaatcagcattac

SEQ ID NO: 250910 - DNA, 25 bp, Artificial
  Probe
ccatcccagattaaatgacttggca

SEQ ID NO: 250911 - DNA, 25 bp, Artificial
  Probe
tcagatgaccaggacctcctgcact

SEQ ID NO: 250912 - DNA, 25 bp, Artificial
  Probe
ggcatccatctttggcatcatacca

SEQ ID NO: 250913 - DNA, 25 bp, Artificial
  Probe
ggagcagcgcagacacggcatccat

SEQ ID NO: 250914 - DNA, 25 bp, Artificial
  Probe
aagactgcctgtctgataaaacact

SEQ ID NO: 250915 - DNA, 25 bp, Artificial
  Probe
tcctttcttatcaggagacaatcag

SEQ ID NO: 250916 - DNA, 25 bp, Artificial
  Probe
cagcagccttgtgtcttccaacagt

SEQ ID NO: 250917 - DNA, 25 bp, Artificial
  Probe
tataaatctaagactgcctgtctga

SEQ ID NO: 250918 - DNA, 25 bp, Artificial
  Probe
gatttctttcctttcttatcaggag

SEQ ID NO: 250919 - DNA, 25 bp, Artificial
  Probe
acatgacgcccatgccttatgactt

SEQ ID NO: 250920 - DNA, 25 bp, Artificial
  Probe
atcataccagacattatctcgttgg

SEQ ID NO: 250921 - DNA, 25 bp, Artificial
  Probe
gtttctcgatcagctaagtgcagga

SEQ ID NO: 250922 - DNA, 25 bp, Artificial
  Probe
atataaatctaagactgcctgtctg

SEQ ID NO: 250923 - DNA, 25 bp, Artificial
  Probe
cagcaatgatcttaaactggagagt

SEQ ID NO: 250924 - DNA, 25 bp, Artificial
  Probe
tcttaaactggagagtgcttcctgt

SEQ ID NO: 250925 - DNA, 25 bp, Artificial
  Probe
tttgaaggacactgcagtcctaaca

SEQ ID NO: 250926 - DNA, 25 bp, Artificial
  Probe
accacctttgaaaaagcatatgttg

SEQ ID NO: 250927 - DNA, 25 bp, Artificial
  Probe
agcaatgatcttaaactggagagtg

SEQ ID NO: 250928 - DNA, 25 bp, Artificial
  Probe
aaggacactgcagtcctaacatggt

SEQ ID NO: 250929 - DNA, 25 bp, Artificial
  Probe
cccctattgaaaagttcagcaatga

SEQ ID NO: 250930 - DNA, 25 bp, Artificial
  Probe
ttcagcaatgatcttaaactggaga

SEQ ID NO: 250931 - DNA, 25 bp, Artificial
  Probe
gaaggacactgcagtcctaacatgg

SEQ ID NO: 250932 - DNA, 25 bp, Artificial
  Probe
tgaaggacactgcagtcctaacatg

SEQ ID NO: 250933 - DNA, 25 bp, Artificial
  Probe
aaagttcagcaatgatcttaaactg

SEQ ID NO: 250934 - DNA, 25 bp, Artificial
  Probe
cacctttgaaaaagcatatgttgtt

SEQ ID NO: 250935 - DNA, 25 bp, Artificial
  Probe
gatcttaaactggagagtgcttcct

SEQ ID NO: 250936 - DNA, 25 bp, Artificial
  Probe
ttatttgaaggacactgcagtccta

SEQ ID NO: 250937 - DNA, 25 bp, Artificial
  Probe
aagttcagcaatgatcttaaactgg

SEQ ID NO: 250938 - DNA, 25 bp, Artificial
  Probe
aatgatcttaaactggagagtgctt

SEQ ID NO: 250939 - DNA, 25 bp, Artificial
  Probe
tcagcaatgatcttaaactggagag

SEQ ID NO: 250940 - DNA, 25 bp, Artificial
  Probe
tatttgaaggacactgcagtcctaa

SEQ ID NO: 250941 - DNA, 25 bp, Artificial
  Probe
atcttaaactggagagtgcttcctg

SEQ ID NO: 250942 - DNA, 25 bp, Artificial
  Probe
atgatcttaaactggagagtgcttc

SEQ ID NO: 250943 - DNA, 25 bp, Artificial
  Probe
ttgaaggacactgcagtcctaacat

SEQ ID NO: 250944 - DNA, 25 bp, Artificial
  Probe
agttcagcaatgatcttaaactgga

SEQ ID NO: 250945 - DNA, 25 bp, Artificial
  Probe
caatgatcttaaactggagagtgct

SEQ ID NO: 250946 - DNA, 25 bp, Artificial
  Probe
ccacctttgaaaaagcatatgttgt

SEQ ID NO: 250947 - DNA, 25 bp, Artificial
  Probe
taccacctttgaaaaagcatatgtt

SEQ ID NO: 250948 - DNA, 25 bp, Artificial
  Probe
atttgaaggacactgcagtcctaac

SEQ ID NO: 250949 - DNA, 25 bp, Artificial
  Probe
cttaaactggagagtgcttcctgtc

SEQ ID NO: 250950 - DNA, 25 bp, Artificial
  Probe
tgatcttaaactggagagtgcttcc

SEQ ID NO: 250951 - DNA, 25 bp, Artificial
  Probe
aaaagttcagcaatgatcttaaact

SEQ ID NO: 250952 - DNA, 25 bp, Artificial
  Probe
taggtgtccgggtgcacatgctcct

SEQ ID NO: 250953 - DNA, 25 bp, Artificial
  Probe
aggtccgtaccataaagcgaggata

SEQ ID NO: 250954 - DNA, 25 bp, Artificial
  Probe
cagtgaattgcgtgcccggataagg

SEQ ID NO: 250955 - DNA, 25 bp, Artificial
  Probe
tcctagatcagtgaattgcgtgccc

SEQ ID NO: 250956 - DNA, 25 bp, Artificial
  Probe
gggtccctggttgtccaagcgaacg

SEQ ID NO: 250957 - DNA, 25 bp, Artificial
  Probe
gagggtccctggttgtccaagcgaa

SEQ ID NO: 250958 - DNA, 25 bp, Artificial
  Probe
tagagggtccctggttgtccaagcg

SEQ ID NO: 250959 - DNA, 25 bp, Artificial
  Probe
gacagtccagttagagggtccctgg

SEQ ID NO: 250960 - DNA, 25 bp, Artificial
  Probe
ccctggttgtccaagcgaacgcatg

SEQ ID NO: 250961 - DNA, 25 bp, Artificial
  Probe
gcgaacgcatggacgggtccaaaca

SEQ ID NO: 250962 - DNA, 25 bp, Artificial
  Probe
gggttcacgacagtccagttagagg

SEQ ID NO: 250963 - DNA, 25 bp, Artificial
  Probe
cgatttgtaggtgtccgggtgcaca

SEQ ID NO: 250964 - DNA, 25 bp, Artificial
  Probe
caaacatgatcaatagacccaaggt

SEQ ID NO: 250965 - DNA, 25 bp, Artificial
  Probe
atgctcctagatcagtgaattgcgt

SEQ ID NO: 250966 - DNA, 25 bp, Artificial
  Probe
aaggtccgtaccataaagcgaggat

SEQ ID NO: 250967 - DNA, 25 bp, Artificial
  Probe
acatgctcctagatcagtgaattgc

SEQ ID NO: 250968 - DNA, 25 bp, Artificial
  Probe
cacgacagtccagttagagggtccc

SEQ ID NO: 250969 - DNA, 25 bp, Artificial
  Probe
catgatcaatagacccaaggtccgt

SEQ ID NO: 250970 - DNA, 25 bp, Artificial
  Probe
gtccgggtgcacatgctcctagatc

SEQ ID NO: 250971 - DNA, 25 bp, Artificial
  Probe
ttagagggtccctggttgtccaagc

SEQ ID NO: 250972 - DNA, 25 bp, Artificial
  Probe
agagggttcacgacagtccagttag

SEQ ID NO: 250973 - DNA, 25 bp, Artificial
  Probe
taaggcagagggttcacgacagtcc

SEQ ID NO: 250974 - DNA, 25 bp, Artificial
  Probe
gcacatgctcctagatcagtgaatt

SEQ ID NO: 250975 - DNA, 25 bp, Artificial
  Probe
cagtccagttagagggtccctggtt

SEQ ID NO: 250976 - DNA, 25 bp, Artificial
  Probe
atcaatagacccaaggtccgtacca

SEQ ID NO: 250977 - DNA, 25 bp, Artificial
  Probe
gttgtccaagcgaacgcatggacgg

SEQ ID NO: 250978 - DNA, 25 bp, Artificial
  Probe
ctagatcagtgaattgcgtgcccgg

SEQ ID NO: 250979 - DNA, 25 bp, Artificial
  Probe
ccaagcgaacgcatggacgggtcca

SEQ ID NO: 250980 - DNA, 25 bp, Artificial
  Probe
gcatggacgggtccaaacatgatca

SEQ ID NO: 250981 - DNA, 25 bp, Artificial
  Probe
ttgtccaagcgaacgcatggacggg

SEQ ID NO: 250982 - DNA, 25 bp, Artificial
  Probe
caatagacccaaggtccgtaccata

SEQ ID NO: 250983 - DNA, 25 bp, Artificial
  Probe
gtccgtaccataaagcgaggataat

SEQ ID NO: 250984 - DNA, 25 bp, Artificial
  Probe
aacatgatcaatagacccaaggtcc

SEQ ID NO: 250985 - DNA, 25 bp, Artificial
  Probe
atggacgggtccaaacatgatcaat

SEQ ID NO: 250986 - DNA, 25 bp, Artificial
  Probe
cgacagtccagttagagggtccctg

SEQ ID NO: 250987 - DNA, 25 bp, Artificial
  Probe
gggtgcacatgctcctagatcagtg

SEQ ID NO: 250988 - DNA, 25 bp, Artificial
  Probe
agcgaacgcatggacgggtccaaac

SEQ ID NO: 250989 - DNA, 25 bp, Artificial
  Probe
cccaaggtccgtaccataaagcgag

SEQ ID NO: 250990 - DNA, 25 bp, Artificial
  Probe
aggcagagggttcacgacagtccag

SEQ ID NO: 250991 - DNA, 25 bp, Artificial
  Probe
acgggtccaaacatgatcaatagac

SEQ ID NO: 250992 - DNA, 25 bp, Artificial
  Probe
ggtccctggttgtccaagcgaacgc

SEQ ID NO: 250993 - DNA, 25 bp, Artificial
  Probe
cgcatggacgggtccaaacatgatc

SEQ ID NO: 250994 - DNA, 25 bp, Artificial
  Probe
agggttcacgacagtccagttagag

SEQ ID NO: 250995 - DNA, 25 bp, Artificial
  Probe
ggtccaaacatgatcaatagaccca

SEQ ID NO: 250996 - DNA, 25 bp, Artificial
  Probe
ccgggtgcacatgctcctagatcag

SEQ ID NO: 250997 - DNA, 25 bp, Artificial
  Probe
gatttgtaggtgtccgggtgcacat

SEQ ID NO: 250998 - DNA, 25 bp, Artificial
  Probe
tgctctgaagaacaaggaggacact

SEQ ID NO: 250999 - DNA, 25 bp, Artificial
  Probe
aggctgtcgtcatggagagcatcta

SEQ ID NO: 251000 - DNA, 25 bp, Artificial
  Probe
cctgtaacacaatgctgacttactg

SEQ ID NO: 251001 - DNA, 25 bp, Artificial
  Probe
gtcctgtaacacaatgctgacttac

SEQ ID NO: 251002 - DNA, 25 bp, Artificial
  Probe
gattacaagacacataggctgtcgt

SEQ ID NO: 251003 - DNA, 25 bp, Artificial
  Probe
acttactgctctgaagaacaaggag

SEQ ID NO: 251004 - DNA, 25 bp, Artificial
  Probe
tctacttaagactgctaagtcttag

SEQ ID NO: 251005 - DNA, 25 bp, Artificial
  Probe
tcgtcatggagagcatctacttaag

SEQ ID NO: 251006 - DNA, 25 bp, Artificial
  Probe
agacacataggctgtcgtcatggag

SEQ ID NO: 251007 - DNA, 25 bp, Artificial
  Probe
acaatgctgacttactgctctgaag

SEQ ID NO: 251008 - DNA, 25 bp, Artificial
  Probe
gagtgacagacactattgggcctca

SEQ ID NO: 251009 - DNA, 25 bp, Artificial
  Probe
tacaagacacataggctgtcgtcat

SEQ ID NO: 251010 - DNA, 25 bp, Artificial
  Probe
gaaagctttcagtctctaaaagaag

SEQ ID NO: 251011 - DNA, 25 bp, Artificial
  Probe
cacataggctgtcgtcatggagagc

SEQ ID NO: 251012 - DNA, 25 bp, Artificial
  Probe
agtgacgcacccttactcaacagaa

SEQ ID NO: 251013 - DNA, 25 bp, Artificial
  Probe
cagaaagctttcagtctctaaaaga

SEQ ID NO: 251014 - DNA, 25 bp, Artificial
  Probe
gcatctacttaagactgctaagtct

SEQ ID NO: 251015 - DNA, 25 bp, Artificial
  Probe
atgctgacttactgctctgaagaac

SEQ ID NO: 251016 - DNA, 25 bp, Artificial
  Probe
aggattacaagacacataggctgtc

SEQ ID NO: 251017 - DNA, 25 bp, Artificial
  Probe
tctgtcctgtaacacaatgctgact

SEQ ID NO: 251018 - DNA, 25 bp, Artificial
  Probe
taggctgtcgtcatggagagcatct

SEQ ID NO: 251019 - DNA, 25 bp, Artificial
  Probe
cataggctgtcgtcatggagagcat

SEQ ID NO: 251020 - DNA, 25 bp, Artificial
  Probe
gagcatctacttaagactgctaagt

SEQ ID NO: 251021 - DNA, 25 bp, Artificial
  Probe
aacacaatgctgacttactgctctg

SEQ ID NO: 251022 - DNA, 25 bp, Artificial
  Probe
ctgacttactgctctgaagaacaag

SEQ ID NO: 251023 - DNA, 25 bp, Artificial
  Probe
tcagaaagctttcagtctctaaaag

SEQ ID NO: 251024 - DNA, 25 bp, Artificial
  Probe
actattgggcctcatcggttagaaa

SEQ ID NO: 251025 - DNA, 25 bp, Artificial
  Probe
caatgctgacttactgctctgaaga

SEQ ID NO: 251026 - DNA, 25 bp, Artificial
  Probe
tgtcgtcatggagagcatctactta

SEQ ID NO: 251027 - DNA, 25 bp, Artificial
  Probe
ctttcagtctctaaaagaagatgat

SEQ ID NO: 251028 - DNA, 25 bp, Artificial
  Probe
gtaacacaatgctgacttactgctc

SEQ ID NO: 251029 - DNA, 25 bp, Artificial
  Probe
agtgacagacactattgggcctcat

SEQ ID NO: 251030 - DNA, 25 bp, Artificial
  Probe
actgctctgaagaacaaggaggaca

SEQ ID NO: 251031 - DNA, 25 bp, Artificial
  Probe
gacagacactattgggcctcatcgg

SEQ ID NO: 251032 - DNA, 25 bp, Artificial
  Probe
aaggattacaagacacataggctgt

SEQ ID NO: 251033 - DNA, 25 bp, Artificial
  Probe
ataccaggagtgacagacactattg

SEQ ID NO: 251034 - DNA, 25 bp, Artificial
  Probe
tggagagcatctacttaagactgct

SEQ ID NO: 251035 - DNA, 25 bp, Artificial
  Probe
attacaagacacataggctgtcgtc

SEQ ID NO: 251036 - DNA, 25 bp, Artificial
  Probe
tgtaacacaatgctgacttactgct

SEQ ID NO: 251037 - DNA, 25 bp, Artificial
  Probe
atggagagcatctacttaagactgc

SEQ ID NO: 251038 - DNA, 25 bp, Artificial
  Probe
tcatggagagcatctacttaagact

SEQ ID NO: 251039 - DNA, 25 bp, Artificial
  Probe
tgctgacttactgctctgaagaaca

SEQ ID NO: 251040 - DNA, 25 bp, Artificial
  Probe
gagagcatctacttaagactgctaa

SEQ ID NO: 251041 - DNA, 25 bp, Artificial
  Probe
cactattgggcctcatcggttagaa

SEQ ID NO: 251042 - DNA, 25 bp, Artificial
  Probe
aaagctttcagtctctaaaagaaga

SEQ ID NO: 251043 - DNA, 25 bp, Artificial
  Probe
ccatctgtcctgtaacacaatgctg

SEQ ID NO: 251044 - DNA, 25 bp, Artificial
  Probe
agcaaggtcctaaaggaccctgatt

SEQ ID NO: 251045 - DNA, 25 bp, Artificial
  Probe
ttggcttgaatccaagtatatggct

SEQ ID NO: 251046 - DNA, 25 bp, Artificial
  Probe
tgcgcttttagacaagtttccatct

SEQ ID NO: 251047 - DNA, 25 bp, Artificial
  Probe
caccttcccggctgggagcttggct

SEQ ID NO: 251048 - DNA, 25 bp, Artificial
  Probe
ctccagaatgacatttggcactgtt

SEQ ID NO: 251049 - DNA, 25 bp, Artificial
  Probe
ctaaaagcacttccagggtcgaagg

SEQ ID NO: 251050 - DNA, 25 bp, Artificial
  Probe
tgtgtgtctgatagtggtaccctca

SEQ ID NO: 251051 - DNA, 25 bp, Artificial
  Probe
gttcttagaaccacatggtcactct

SEQ ID NO: 251052 - DNA, 25 bp, Artificial
  Probe
aatccaagtatatggctgctttgcc

SEQ ID NO: 251053 - DNA, 25 bp, Artificial
  Probe
tctgtcatcattgaaatgcaaaaag

SEQ ID NO: 251054 - DNA, 25 bp, Artificial
  Probe
ggcaaccagcttgtgtgctgtcacc

SEQ ID NO: 251055 - DNA, 25 bp, Artificial
  Probe
gtttccatctaaaagcacttccagg

SEQ ID NO: 251056 - DNA, 25 bp, Artificial
  Probe
cagaatgacatttggcactgttctt

SEQ ID NO: 251057 - DNA, 25 bp, Artificial
  Probe
tgtgtgctgtcaccttgctgtagtt

SEQ ID NO: 251058 - DNA, 25 bp, Artificial
  Probe
atatggctgctttgccctagaggga

SEQ ID NO: 251059 - DNA, 25 bp, Artificial
  Probe
gagccaaatgctagcaacattcttc

SEQ ID NO: 251060 - DNA, 25 bp, Artificial
  Probe
ctccacgctgcctgttctggaggca

SEQ ID NO: 251061 - DNA, 25 bp, Artificial
  Probe
aggaatgcgcttttagacaagtttc

SEQ ID NO: 251062 - DNA, 25 bp, Artificial
  Probe
atgacatttggcactgttcttagaa

SEQ ID NO: 251063 - DNA, 25 bp, Artificial
  Probe
ggtcgaaggcaaccagcttgtgtgc

SEQ ID NO: 251064 - DNA, 25 bp, Artificial
  Probe
ggtcctctgcactgccatttttacc

SEQ ID NO: 251065 - DNA, 25 bp, Artificial
  Probe
caaccagcttgtgtgctgtcacctt

SEQ ID NO: 251066 - DNA, 25 bp, Artificial
  Probe
gatagacgagccaaatgctagcaac

SEQ ID NO: 251067 - DNA, 25 bp, Artificial
  Probe
cggctgggagcttggcttgaatcca

SEQ ID NO: 251068 - DNA, 25 bp, Artificial
  Probe
ccggctgggagcttggcttgaatcc

SEQ ID NO: 251069 - DNA, 25 bp, Artificial
  Probe
gctgctttgccctagagggaatccc

SEQ ID NO: 251070 - DNA, 25 bp, Artificial
  Probe
tgggagcttggcttgaatccaagta

SEQ ID NO: 251071 - DNA, 25 bp, Artificial
  Probe
aggcaaccagcttgtgtgctgtcac

SEQ ID NO: 251072 - DNA, 25 bp, Artificial
  Probe
gtgtctgatagtggtaccctcatcc

SEQ ID NO: 251073 - DNA, 25 bp, Artificial
  Probe
tactccagaatgacatttggcactg

SEQ ID NO: 251074 - DNA, 25 bp, Artificial
  Probe
cgaaggcaaccagcttgtgtgctgt

SEQ ID NO: 251075 - DNA, 25 bp, Artificial
  Probe
gctttgccctagagggaatccctcc

SEQ ID NO: 251076 - DNA, 25 bp, Artificial
  Probe
cttgctgtagtttctaatactgtgt

SEQ ID NO: 251077 - DNA, 25 bp, Artificial
  Probe
caaactactccagaatgacatttgg

SEQ ID NO: 251078 - DNA, 25 bp, Artificial
  Probe
gcacttccagggtcgaaggcaacca

SEQ ID NO: 251079 - DNA, 25 bp, Artificial
  Probe
ttccagggtcgaaggcaaccagctt

SEQ ID NO: 251080 - DNA, 25 bp, Artificial
  Probe
gtctgatagtggtaccctcatcccc

SEQ ID NO: 251081 - DNA, 25 bp, Artificial
  Probe
ctctagcaaggtcctaaaggaccct

SEQ ID NO: 251082 - DNA, 25 bp, Artificial
  Probe
cactctagcaaggtcctaaaggacc

SEQ ID NO: 251083 - DNA, 25 bp, Artificial
  Probe
ccacgctgcctgttctggaggcagt

SEQ ID NO: 251084 - DNA, 25 bp, Artificial
  Probe
gtcaccttgctgtagtttctaatac

SEQ ID NO: 251085 - DNA, 25 bp, Artificial
  Probe
caagtatatggctgctttgccctag

SEQ ID NO: 251086 - DNA, 25 bp, Artificial
  Probe
ctgtagtttctaatactgtgtgtct

SEQ ID NO: 251087 - DNA, 25 bp, Artificial
  Probe
tagaaccacatggtcactctagcaa

SEQ ID NO: 251088 - DNA, 25 bp, Artificial
  Probe
caccttgctgtagtttctaatactg

SEQ ID NO: 251089 - DNA, 25 bp, Artificial
  Probe
atactgtgtgtctgatagtggtacc

SEQ ID NO: 251090 - DNA, 25 bp, Artificial
  Probe
ccgtgacagctattgcctaccagag

SEQ ID NO: 251091 - DNA, 25 bp, Artificial
  Probe
tgcctaccagagaaacaaagccaga

SEQ ID NO: 251092 - DNA, 25 bp, Artificial
  Probe
gctgggttcagtttctttaagctaa

SEQ ID NO: 251093 - DNA, 25 bp, Artificial
  Probe
cagggtgctgggttcagtttcttta

SEQ ID NO: 251094 - DNA, 25 bp, Artificial
  Probe
gcctcaccgtgacagctattgccta

SEQ ID NO: 251095 - DNA, 25 bp, Artificial
  Probe
gtttctttaagctaagactgacaag

SEQ ID NO: 251096 - DNA, 25 bp, Artificial
  Probe
gcctaccagagaaacaaagccagac

SEQ ID NO: 251097 - DNA, 25 bp, Artificial
  Probe
taagctaagactgacaaggccatgt

SEQ ID NO: 251098 - DNA, 25 bp, Artificial
  Probe
tctgcctcaccgtgacagctattgc

SEQ ID NO: 251099 - DNA, 25 bp, Artificial
  Probe
tattgcctaccagagaaacaaagcc

SEQ ID NO: 251100 - DNA, 25 bp, Artificial
  Probe
ctattgcctaccagagaaacaaagc

SEQ ID NO: 251101 - DNA, 25 bp, Artificial
  Probe
ttctttaagctaagactgacaaggc

SEQ ID NO: 251102 - DNA, 25 bp, Artificial
  Probe
ttgcctaccagagaaacaaagccag

SEQ ID NO: 251103 - DNA, 25 bp, Artificial
  Probe
cctaccagagaaacaaagccagaca

SEQ ID NO: 251104 - DNA, 25 bp, Artificial
  Probe
tttctttaagctaagactgacaagg

SEQ ID NO: 251105 - DNA, 25 bp, Artificial
  Probe
agctaagactgacaaggccatgttg

SEQ ID NO: 251106 - DNA, 25 bp, Artificial
  Probe
accgtgacagctattgcctaccaga

SEQ ID NO: 251107 - DNA, 25 bp, Artificial
  Probe
cagctattgcctaccagagaaacaa

SEQ ID NO: 251108 - DNA, 25 bp, Artificial
  Probe
tcaccgtgacagctattgcctacca

SEQ ID NO: 251109 - DNA, 25 bp, Artificial
  Probe
acagctattgcctaccagagaaaca

SEQ ID NO: 251110 - DNA, 25 bp, Artificial
  Probe
ggttcagtttctttaagctaagact

SEQ ID NO: 251111 - DNA, 25 bp, Artificial
  Probe
tgtaaacccagcagtgagccctgca

SEQ ID NO: 251112 - DNA, 25 bp, Artificial
  Probe
cagtttctttaagctaagactgaca

SEQ ID NO: 251113 - DNA, 25 bp, Artificial
  Probe
caccgtgacagctattgcctaccag

SEQ ID NO: 251114 - DNA, 25 bp, Artificial
  Probe
tctttaagctaagactgacaaggcc

SEQ ID NO: 251115 - DNA, 25 bp, Artificial
  Probe
agctattgcctaccagagaaacaaa

SEQ ID NO: 251116 - DNA, 25 bp, Artificial
  Probe
tggttgcctctctgcctcaccgtga

SEQ ID NO: 251117 - DNA, 25 bp, Artificial
  Probe
ctgggttcagtttctttaagctaag

SEQ ID NO: 251118 - DNA, 25 bp, Artificial
  Probe
gtgctgggttcagtttctttaagct

SEQ ID NO: 251119 - DNA, 25 bp, Artificial
  Probe
aacccagcagtgagccctgcaagag

SEQ ID NO: 251120 - DNA, 25 bp, Artificial
  Probe
gttcagtttctttaagctaagactg

SEQ ID NO: 251121 - DNA, 25 bp, Artificial
  Probe
ggtgctgggttcagtttctttaagc

SEQ ID NO: 251122 - DNA, 25 bp, Artificial
  Probe
aaacccagcagtgagccctgcaaga

SEQ ID NO: 251123 - DNA, 25 bp, Artificial
  Probe
agtttctttaagctaagactgacaa

SEQ ID NO: 251124 - DNA, 25 bp, Artificial
  Probe
agcagtgagccctgcaagagggcaa

SEQ ID NO: 251125 - DNA, 25 bp, Artificial
  Probe
gtaaacccagcagtgagccctgcaa

SEQ ID NO: 251126 - DNA, 25 bp, Artificial
  Probe
cgtgacagctattgcctaccagaga

SEQ ID NO: 251127 - DNA, 25 bp, Artificial
  Probe
taaacccagcagtgagccctgcaag

SEQ ID NO: 251128 - DNA, 25 bp, Artificial
  Probe
attgcctaccagagaaacaaagcca

SEQ ID NO: 251129 - DNA, 25 bp, Artificial
  Probe
tgctgggttcagtttctttaagcta

SEQ ID NO: 251130 - DNA, 25 bp, Artificial
  Probe
gaaacaaagccagacagcccagacc

SEQ ID NO: 251131 - DNA, 25 bp, Artificial
  Probe
tgcctcaccgtgacagctattgcct

SEQ ID NO: 251132 - DNA, 25 bp, Artificial
  Probe
ctttaagctaagactgacaaggcca

SEQ ID NO: 251133 - DNA, 25 bp, Artificial
  Probe
tttaagctaagactgacaaggccat

SEQ ID NO: 251134 - DNA, 25 bp, Artificial
  Probe
gctattgcctaccagagaaacaaag

SEQ ID NO: 251135 - DNA, 25 bp, Artificial
  Probe
ttaagctaagactgacaaggccatg

SEQ ID NO: 251136 - DNA, 25 bp, Artificial
  Probe
tagtaatacggtggactcttctatg

SEQ ID NO: 251137 - DNA, 25 bp, Artificial
  Probe
ccccatgtcctgttcctgaggagct

SEQ ID NO: 251138 - DNA, 25 bp, Artificial
  Probe
cagtaaccttacaggtcttacagga

SEQ ID NO: 251139 - DNA, 25 bp, Artificial
  Probe
cttgccagtaaccttacaggtctta

SEQ ID NO: 251140 - DNA, 25 bp, Artificial
  Probe
tgcaaccacagctgtccatcaagaa

SEQ ID NO: 251141 - DNA, 25 bp, Artificial
  Probe
ttacaggagggcagacctaagttcc

SEQ ID NO: 251142 - DNA, 25 bp, Artificial
  Probe
taaccttacaggtcttacaggaggg

SEQ ID NO: 251143 - DNA, 25 bp, Artificial
  Probe
aacattcctttcagtgcaaaatggt

SEQ ID NO: 251144 - DNA, 25 bp, Artificial
  Probe
tacaggagggcagacctaagttccg

SEQ ID NO: 251145 - DNA, 25 bp, Artificial
  Probe
gtttctcctacagacaccttgccag

SEQ ID NO: 251146 - DNA, 25 bp, Artificial
  Probe
tctgcaaccacagctgtccatcaag

SEQ ID NO: 251147 - DNA, 25 bp, Artificial
  Probe
gacaccttgccagtaaccttacagg

SEQ ID NO: 251148 - DNA, 25 bp, Artificial
  Probe
gtcctgttcctgaggagctacttcc

SEQ ID NO: 251149 - DNA, 25 bp, Artificial
  Probe
tgaggagctacttcctgtagtaata

SEQ ID NO: 251150 - DNA, 25 bp, Artificial
  Probe
gcaaccacagctgtccatcaagaaa

SEQ ID NO: 251151 - DNA, 25 bp, Artificial
  Probe
tcctgtagtaatacggtggactctt

SEQ ID NO: 251152 - DNA, 25 bp, Artificial
  Probe
agaagacgactctggctccaaactc

SEQ ID NO: 251153 - DNA, 25 bp, Artificial
  Probe
ctggctccaaactcagccctttgaa

SEQ ID NO: 251154 - DNA, 25 bp, Artificial
  Probe
gctacttcctgtagtaatacggtgg

SEQ ID NO: 251155 - DNA, 25 bp, Artificial
  Probe
tacaggtcttacaggagggcagacc

SEQ ID NO: 251156 - DNA, 25 bp, Artificial
  Probe
ggctccaaactcagccctttgaaga

SEQ ID NO: 251157 - DNA, 25 bp, Artificial
  Probe
tggctccaaactcagccctttgaag

SEQ ID NO: 251158 - DNA, 25 bp, Artificial
  Probe
ggttctttgctgtttctggattccc

SEQ ID NO: 251159 - DNA, 25 bp, Artificial
  Probe
agggcagacctaagttccgaggctg

SEQ ID NO: 251160 - DNA, 25 bp, Artificial
  Probe
catgtcctgttcctgaggagctact

SEQ ID NO: 251161 - DNA, 25 bp, Artificial
  Probe
aactcagccctttgaagaaagctat

SEQ ID NO: 251162 - DNA, 25 bp, Artificial
  Probe
ggtggactcttctatgaggagacaa

SEQ ID NO: 251163 - DNA, 25 bp, Artificial
  Probe
gatctgcaaccacagctgtccatca

SEQ ID NO: 251164 - DNA, 25 bp, Artificial
  Probe
ctttcagtgcaaaatggttctttgc

SEQ ID NO: 251165 - DNA, 25 bp, Artificial
  Probe
aggtcttacaggagggcagacctaa

SEQ ID NO: 251166 - DNA, 25 bp, Artificial
  Probe
gaggctgatctgcaaccacagctgt

SEQ ID NO: 251167 - DNA, 25 bp, Artificial
  Probe
gagggcagacctaagttccgaggct

SEQ ID NO: 251168 - DNA, 25 bp, Artificial
  Probe
agacaccttgccagtaaccttacag

SEQ ID NO: 251169 - DNA, 25 bp, Artificial
  Probe
acctaagttccgaggctgatctgca

SEQ ID NO: 251170 - DNA, 25 bp, Artificial
  Probe
ttccgaggctgatctgcaaccacag

SEQ ID NO: 251171 - DNA, 25 bp, Artificial
  Probe
ttcctttcagtgcaaaatggttctt

SEQ ID NO: 251172 - DNA, 25 bp, Artificial
  Probe
aagttccgaggctgatctgcaacca

SEQ ID NO: 251173 - DNA, 25 bp, Artificial
  Probe
tggattcccttcttcttgccccatg

SEQ ID NO: 251174 - DNA, 25 bp, Artificial
  Probe
tacttcctgtagtaatacggtggac

SEQ ID NO: 251175 - DNA, 25 bp, Artificial
  Probe
gcaaaatggttctttgctgtttctg

SEQ ID NO: 251176 - DNA, 25 bp, Artificial
  Probe
accttacaggtcttacaggagggca

SEQ ID NO: 251177 - DNA, 25 bp, Artificial
  Probe
agccctttgaagaaagctatttagt

SEQ ID NO: 251178 - DNA, 25 bp, Artificial
  Probe
ggattcccttcttcttgccccatgt

SEQ ID NO: 251179 - DNA, 25 bp, Artificial
  Probe
gcagacctaagttccgaggctgatc

SEQ ID NO: 251180 - DNA, 25 bp, Artificial
  Probe
ttcttgccccatgtcctgttcctga

SEQ ID NO: 251181 - DNA, 25 bp, Artificial
  Probe
tgcaaaatggttctttgctgtttct

SEQ ID NO: 251182 - DNA, 25 bp, Artificial
  Probe
tcatgcacaggctcacacagtggtt

SEQ ID NO: 251183 - DNA, 25 bp, Artificial
  Probe
ttacaaactgccagtgttaatcctg

SEQ ID NO: 251184 - DNA, 25 bp, Artificial
  Probe
tagtgtgatctcacagtctacttac

SEQ ID NO: 251185 - DNA, 25 bp, Artificial
  Probe
gtgtttacattgagccaagtcctgg

SEQ ID NO: 251186 - DNA, 25 bp, Artificial
  Probe
tgtgcgccaacatacaacagggagg

SEQ ID NO: 251187 - DNA, 25 bp, Artificial
  Probe
ctgaaatgtctcaccgactggtcct

SEQ ID NO: 251188 - DNA, 25 bp, Artificial
  Probe
tgagcactaaactgggctagctttc

SEQ ID NO: 251189 - DNA, 25 bp, Artificial
  Probe
gtgtgtcccagcacacttccaaata

SEQ ID NO: 251190 - DNA, 25 bp, Artificial
  Probe
agagctttctccttggttatgtctt

SEQ ID NO: 251191 - DNA, 25 bp, Artificial
  Probe
acgagggtcgtatgtcattgtttgc

SEQ ID NO: 251192 - DNA, 25 bp, Artificial
  Probe
gttatgtctttgctctattgccccc

SEQ ID NO: 251193 - DNA, 25 bp, Artificial
  Probe
tgccagtgttaatcctgaaatgtct

SEQ ID NO: 251194 - DNA, 25 bp, Artificial
  Probe
tgcatttttgtgtttacattgagcc

SEQ ID NO: 251195 - DNA, 25 bp, Artificial
  Probe
gatctcacagtctacttactgcctg

SEQ ID NO: 251196 - DNA, 25 bp, Artificial
  Probe
cgttttgtggatagtgtgatctcac

SEQ ID NO: 251197 - DNA, 25 bp, Artificial
  Probe
caaactgccagtgttaatcctgaaa

SEQ ID NO: 251198 - DNA, 25 bp, Artificial
  Probe
cctgtccatgttgtgtctgcagagc

SEQ ID NO: 251199 - DNA, 25 bp, Artificial
  Probe
tacaaactgccagtgttaatcctga

SEQ ID NO: 251200 - DNA, 25 bp, Artificial
  Probe
ttctttcatgcacaggctcacacag

SEQ ID NO: 251201 - DNA, 25 bp, Artificial
  Probe
gttaatcctgaaatgtctcaccgac

SEQ ID NO: 251202 - DNA, 25 bp, Artificial
  Probe
tctatgcatttgaaactgagcacta

SEQ ID NO: 251203 - DNA, 25 bp, Artificial
  Probe
tggtagagccggtcaacaaatgaga

SEQ ID NO: 251204 - DNA, 25 bp, Artificial
  Probe
tgcatttgaaactgagcactaaact

SEQ ID NO: 251205 - DNA, 25 bp, Artificial
  Probe
tggttatgtctttgctctattgccc

SEQ ID NO: 251206 - DNA, 25 bp, Artificial
  Probe
tgtttgcagcacaaaacattctatg

SEQ ID NO: 251207 - DNA, 25 bp, Artificial
  Probe
gaggtgtgtcccagcacacttccaa

SEQ ID NO: 251208 - DNA, 25 bp, Artificial
  Probe
tctttcatgcacaggctcacacagt

SEQ ID NO: 251209 - DNA, 25 bp, Artificial
  Probe
ttttgtgtttacattgagccaagtc

SEQ ID NO: 251210 - DNA, 25 bp, Artificial
  Probe
ttacattgagccaagtcctggtaga

SEQ ID NO: 251211 - DNA, 25 bp, Artificial
  Probe
taatcctgaaatgtctcaccgactg

SEQ ID NO: 251212 - DNA, 25 bp, Artificial
  Probe
aagtcctggtagagccggtcaacaa

SEQ ID NO: 251213 - DNA, 25 bp, Artificial
  Probe
gctttctgatagaccgttttgtgga

SEQ ID NO: 251214 - DNA, 25 bp, Artificial
  Probe
cagtggttacaaactgccagtgtta

SEQ ID NO: 251215 - DNA, 25 bp, Artificial
  Probe
agggtcgtatgtcattgtttgcagc

SEQ ID NO: 251216 - DNA, 25 bp, Artificial
  Probe
gtgatctcacagtctacttactgcc

SEQ ID NO: 251217 - DNA, 25 bp, Artificial
  Probe
accgttttgtggatagtgtgatctc

SEQ ID NO: 251218 - DNA, 25 bp, Artificial
  Probe
gtcattgtttgcagcacaaaacatt

SEQ ID NO: 251219 - DNA, 25 bp, Artificial
  Probe
gtggttacaaactgccagtgttaat

SEQ ID NO: 251220 - DNA, 25 bp, Artificial
  Probe
gtttgcagcacaaaacattctatgc

SEQ ID NO: 251221 - DNA, 25 bp, Artificial
  Probe
cacacagtggttacaaactgccagt

SEQ ID NO: 251222 - DNA, 25 bp, Artificial
  Probe
actaaactgggctagctttctgata

SEQ ID NO: 251223 - DNA, 25 bp, Artificial
  Probe
ctcctgtccatgttgtgtctgcaga

SEQ ID NO: 251224 - DNA, 25 bp, Artificial
  Probe
gtgcgccaacatacaacagggaggt

SEQ ID NO: 251225 - DNA, 25 bp, Artificial
  Probe
aacattctatgcatttgaaactgag

SEQ ID NO: 251226 - DNA, 25 bp, Artificial
  Probe
ctcctcctgtccatgttgtgtctgc

SEQ ID NO: 251227 - DNA, 25 bp, Artificial
  Probe
catttttgtgtttacattgagccaa

SEQ ID NO: 251228 - DNA, 25 bp, Artificial
  Probe
atgcagacgtgttttcaacattgaa

SEQ ID NO: 251229 - DNA, 25 bp, Artificial
  Probe
ggcatttctgcagaacttcattttt

SEQ ID NO: 251230 - DNA, 25 bp, Artificial
  Probe
cagacgtgttttcaacattgaagac

SEQ ID NO: 251231 - DNA, 25 bp, Artificial
  Probe
gctacgcagtattacacagaagttc

SEQ ID NO: 251232 - DNA, 25 bp, Artificial
  Probe
agacgtgttttcaacattgaagaca

SEQ ID NO: 251233 - DNA, 25 bp, Artificial
  Probe
gtgcatgtttcagtttacactatac

SEQ ID NO: 251234 - DNA, 25 bp, Artificial
  Probe
acagctattgggtatatctgttcaa

SEQ ID NO: 251235 - DNA, 25 bp, Artificial
  Probe
aaatgtgcatgtttcagtttacact

SEQ ID NO: 251236 - DNA, 25 bp, Artificial
  Probe
gcagacgtgttttcaacattgaaga

SEQ ID NO: 251237 - DNA, 25 bp, Artificial
  Probe
tgtgcatgtttcagtttacactata

SEQ ID NO: 251238 - DNA, 25 bp, Artificial
  Probe
aaactggcatttctgcagaacttca

SEQ ID NO: 251239 - DNA, 25 bp, Artificial
  Probe
ttcatgctacgcagtattacacaga

SEQ ID NO: 251240 - DNA, 25 bp, Artificial
  Probe
agaattcatgctacgcagtattaca

SEQ ID NO: 251241 - DNA, 25 bp, Artificial
  Probe
caatttacagctattgggtatatct

SEQ ID NO: 251242 - DNA, 25 bp, Artificial
  Probe
gttttcaacattgaagacatgagac

SEQ ID NO: 251243 - DNA, 25 bp, Artificial
  Probe
cgtgttttcaacattgaagacatga

SEQ ID NO: 251244 - DNA, 25 bp, Artificial
  Probe
atgtgcatgtttcagtttacactat

SEQ ID NO: 251245 - DNA, 25 bp, Artificial
  Probe
aatgcagacgtgttttcaacattga

SEQ ID NO: 251246 - DNA, 25 bp, Artificial
  Probe
tgctacgcagtattacacagaagtt

SEQ ID NO: 251247 - DNA, 25 bp, Artificial
  Probe
acgcagtattacacagaagttctta

SEQ ID NO: 251248 - DNA, 25 bp, Artificial
  Probe
tgcagaattcatgctacgcagtatt

SEQ ID NO: 251249 - DNA, 25 bp, Artificial
  Probe
ttcaatgcagaattcatgctacgca

SEQ ID NO: 251250 - DNA, 25 bp, Artificial
  Probe
tgcagacgtgttttcaacattgaag

SEQ ID NO: 251251 - DNA, 25 bp, Artificial
  Probe
aaagcacaatgtacaaaatgtgcat

SEQ ID NO: 251252 - DNA, 25 bp, Artificial
  Probe
tcaatgcagaattcatgctacgcag

SEQ ID NO: 251253 - DNA, 25 bp, Artificial
  Probe
tacgcagtattacacagaagttctt

SEQ ID NO: 251254 - DNA, 25 bp, Artificial
  Probe
atgctacgcagtattacacagaagt

SEQ ID NO: 251255 - DNA, 25 bp, Artificial
  Probe
aactggcatttctgcagaacttcat

SEQ ID NO: 251256 - DNA, 25 bp, Artificial
  Probe
tcatgctacgcagtattacacagaa

SEQ ID NO: 251257 - DNA, 25 bp, Artificial
  Probe
cagtattacacagaagttcttaagt

SEQ ID NO: 251258 - DNA, 25 bp, Artificial
  Probe
aatgcagaattcatgctacgcagta

SEQ ID NO: 251259 - DNA, 25 bp, Artificial
  Probe
gcagaattcatgctacgcagtatta

SEQ ID NO: 251260 - DNA, 25 bp, Artificial
  Probe
ctggcatttctgcagaacttcattt

SEQ ID NO: 251261 - DNA, 25 bp, Artificial
  Probe
tggcatttctgcagaacttcatttt

SEQ ID NO: 251262 - DNA, 25 bp, Artificial
  Probe
aaatgcagacgtgttttcaacattg

SEQ ID NO: 251263 - DNA, 25 bp, Artificial
  Probe
ttcaacattgaagacatgagacagt

SEQ ID NO: 251264 - DNA, 25 bp, Artificial
  Probe
aatgtgcatgtttcagtttacacta

SEQ ID NO: 251265 - DNA, 25 bp, Artificial
  Probe
atgcagaattcatgctacgcagtat

SEQ ID NO: 251266 - DNA, 25 bp, Artificial
  Probe
catgctacgcagtattacacagaag

SEQ ID NO: 251267 - DNA, 25 bp, Artificial
  Probe
ttttcaacattgaagacatgagaca

SEQ ID NO: 251268 - DNA, 25 bp, Artificial
  Probe
tttcaacattgaagacatgagacag

SEQ ID NO: 251269 - DNA, 25 bp, Artificial
  Probe
acaatttacagctattgggtatatc

SEQ ID NO: 251270 - DNA, 25 bp, Artificial
  Probe
ctacgcagtattacacagaagttct

SEQ ID NO: 251271 - DNA, 25 bp, Artificial
  Probe
cagctattgggtatatctgttcaat

SEQ ID NO: 251272 - DNA, 25 bp, Artificial
  Probe
actggcatttctgcagaacttcatt

SEQ ID NO: 251273 - DNA, 25 bp, Artificial
  Probe
ttttcaatgcagaattcatgctacg

SEQ ID NO: 251274 - DNA, 25 bp, Artificial
  Probe
gcaggaaacagctgctgtgctcata

SEQ ID NO: 251275 - DNA, 25 bp, Artificial
  Probe
gctgctgtgctcatacaccctgagc

SEQ ID NO: 251276 - DNA, 25 bp, Artificial
  Probe
tgtgctcatacaccctgagctctga

SEQ ID NO: 251277 - DNA, 25 bp, Artificial
  Probe
atacaccctgagctctgatatagac

SEQ ID NO: 251278 - DNA, 25 bp, Artificial
  Probe
gtggttcccctcaacaagaagagga

SEQ ID NO: 251279 - DNA, 25 bp, Artificial
  Probe
gggtggttcccctcaacaagaagag

SEQ ID NO: 251280 - DNA, 25 bp, Artificial
  Probe
tgctgtgctcatacaccctgagctc

SEQ ID NO: 251281 - DNA, 25 bp, Artificial
  Probe
agactgtggcaaggcaggaaacagc

SEQ ID NO: 251282 - DNA, 25 bp, Artificial
  Probe
ggcaggaaacagctgctgtgctcat

SEQ ID NO: 251283 - DNA, 25 bp, Artificial
  Probe
ggtggttcccctcaacaagaagagg

SEQ ID NO: 251284 - DNA, 25 bp, Artificial
  Probe
ctctcgggtggggcatggtggggat

SEQ ID NO: 251285 - DNA, 25 bp, Artificial
  Probe
agtagaatgctggggtggttcccct

SEQ ID NO: 251286 - DNA, 25 bp, Artificial
  Probe
ggttcccctcaacaagaagaggaag

SEQ ID NO: 251287 - DNA, 25 bp, Artificial
  Probe
ctcatacaccctgagctctgatata

SEQ ID NO: 251288 - DNA, 25 bp, Artificial
  Probe
ttgagctctcgggtggggcatggtg

SEQ ID NO: 251289 - DNA, 25 bp, Artificial
  Probe
cagactgtggcaaggcaggaaacag

SEQ ID NO: 251290 - DNA, 25 bp, Artificial
  Probe
caggaaacagctgctgtgctcatac

SEQ ID NO: 251291 - DNA, 25 bp, Artificial
  Probe
actgtggcaaggcaggaaacagctg

SEQ ID NO: 251292 - DNA, 25 bp, Artificial
  Probe
acagcagtagaatgctggggtggtt

SEQ ID NO: 251293 - DNA, 25 bp, Artificial
  Probe
tggttcccctcaacaagaagaggaa

SEQ ID NO: 251294 - DNA, 25 bp, Artificial
  Probe
tcatacaccctgagctctgatatag

SEQ ID NO: 251295 - DNA, 25 bp, Artificial
  Probe
gctcatacaccctgagctctgatat

SEQ ID NO: 251296 - DNA, 25 bp, Artificial
  Probe
agctgctgtgctcatacaccctgag

SEQ ID NO: 251297 - DNA, 25 bp, Artificial
  Probe
gaaacagctgctgtgctcatacacc

SEQ ID NO: 251298 - DNA, 25 bp, Artificial
  Probe
tatgttgagctctcgggtggggcat

SEQ ID NO: 251299 - DNA, 25 bp, Artificial
  Probe
cagcagtagaatgctggggtggttc

SEQ ID NO: 251300 - DNA, 25 bp, Artificial
  Probe
tgctcatacaccctgagctctgata

SEQ ID NO: 251301 - DNA, 25 bp, Artificial
  Probe
gttcccctcaacaagaagaggaaga

SEQ ID NO: 251302 - DNA, 25 bp, Artificial
  Probe
tggtgcagactgtggcaaggcagga

SEQ ID NO: 251303 - DNA, 25 bp, Artificial
  Probe
catacaccctgagctctgatataga

SEQ ID NO: 251304 - DNA, 25 bp, Artificial
  Probe
aggaaacagctgctgtgctcataca

SEQ ID NO: 251305 - DNA, 25 bp, Artificial
  Probe
aatgctggggtggttcccctcaaca

SEQ ID NO: 251306 - DNA, 25 bp, Artificial
  Probe
gctgtgctcatacaccctgagctct

SEQ ID NO: 251307 - DNA, 25 bp, Artificial
  Probe
ctgctgtgctcatacaccctgagct

SEQ ID NO: 251308 - DNA, 25 bp, Artificial
  Probe
ttcccctcaacaagaagaggaagag

SEQ ID NO: 251309 - DNA, 25 bp, Artificial
  Probe
tagaatgctggggtggttcccctca

SEQ ID NO: 251310 - DNA, 25 bp, Artificial
  Probe
agcagtagaatgctggggtggttcc

SEQ ID NO: 251311 - DNA, 25 bp, Artificial
  Probe
gcagactgtggcaaggcaggaaaca

SEQ ID NO: 251312 - DNA, 25 bp, Artificial
  Probe
tgcagactgtggcaaggcaggaaac

SEQ ID NO: 251313 - DNA, 25 bp, Artificial
  Probe
gtgctcatacaccctgagctctgat

SEQ ID NO: 251314 - DNA, 25 bp, Artificial
  Probe
gagctctcgggtggggcatggtggg

SEQ ID NO: 251315 - DNA, 25 bp, Artificial
  Probe
ggaaacagctgctgtgctcatacac

SEQ ID NO: 251316 - DNA, 25 bp, Artificial
  Probe
aaacagctgctgtgctcatacaccc

SEQ ID NO: 251317 - DNA, 25 bp, Artificial
  Probe
ctgtgctcatacaccctgagctctg

SEQ ID NO: 251318 - DNA, 25 bp, Artificial
  Probe
aggcaggaaacagctgctgtgctca

SEQ ID NO: 251319 - DNA, 25 bp, Artificial
  Probe
tgttgagctctcgggtggggcatgg

SEQ ID NO: 251320 - DNA, 25 bp, Artificial
  Probe
ggccgtggggacacattctgcccag

SEQ ID NO: 251321 - DNA, 25 bp, Artificial
  Probe
ggcccacactgtctgaggacaagga

SEQ ID NO: 251322 - DNA, 25 bp, Artificial
  Probe
cacctaagctggtacttcagcccag

SEQ ID NO: 251323 - DNA, 25 bp, Artificial
  Probe
agtggcagcttcaggagccactgct

SEQ ID NO: 251324 - DNA, 25 bp, Artificial
  Probe
tcaatacttgaattcccatcaaggg

SEQ ID NO: 251325 - DNA, 25 bp, Artificial
  Probe
aggcatggtttgtggttcccgagaa

SEQ ID NO: 251326 - DNA, 25 bp, Artificial
  Probe
gacaacagtggcagcttcaggagcc

SEQ ID NO: 251327 - DNA, 25 bp, Artificial
  Probe
catggtttgtggttcccgagaatga

SEQ ID NO: 251328 - DNA, 25 bp, Artificial
  Probe
aacagtggcagcttcaggagccact

SEQ ID NO: 251329 - DNA, 25 bp, Artificial
  Probe
gctgcccatgttcaattgggggctc

SEQ ID NO: 251330 - DNA, 25 bp, Artificial
  Probe
tcccgagaatgaacccttggtgctg

SEQ ID NO: 251331 - DNA, 25 bp, Artificial
  Probe
cgggccgtggggacacattctgccc

SEQ ID NO: 251332 - DNA, 25 bp, Artificial
  Probe
gcccatgttcaattgggggctctag

SEQ ID NO: 251333 - DNA, 25 bp, Artificial
  Probe
gagccactgctgaacctcctgaagc

SEQ ID NO: 251334 - DNA, 25 bp, Artificial
  Probe
acactgtctgaggacaaggagatgg

SEQ ID NO: 251335 - DNA, 25 bp, Artificial
  Probe
agaatgaacccttggtgctgtacat

SEQ ID NO: 251336 - DNA, 25 bp, Artificial
  Probe
cagctgcccatgttcaattgggggc

SEQ ID NO: 251337 - DNA, 25 bp, Artificial
  Probe
tgtcttcaagatcacccagagccac

SEQ ID NO: 251338 - DNA, 25 bp, Artificial
  Probe
cagaagaactccagcggcgctggat

SEQ ID NO: 251339 - DNA, 25 bp, Artificial
  Probe
tcacccagagccacctaagctggta

SEQ ID NO: 251340 - DNA, 25 bp, Artificial
  Probe
gtggggacacattctgcccagggcc

SEQ ID NO: 251341 - DNA, 25 bp, Artificial
  Probe
cagcccagagacagaagaactccag

SEQ ID NO: 251342 - DNA, 25 bp, Artificial
  Probe
gtcaatacttgaattcccatcaagg

SEQ ID NO: 251343 - DNA, 25 bp, Artificial
  Probe
tcccagacccgagacaagacctaga

SEQ ID NO: 251344 - DNA, 25 bp, Artificial
  Probe
cccgagacaagacctagagggtttg

SEQ ID NO: 251345 - DNA, 25 bp, Artificial
  Probe
gtacttcagcccagagacagaagaa

SEQ ID NO: 251346 - DNA, 25 bp, Artificial
  Probe
agccacctaagctggtacttcagcc

SEQ ID NO: 251347 - DNA, 25 bp, Artificial
  Probe
aagatcacccagagccacctaagct

SEQ ID NO: 251348 - DNA, 25 bp, Artificial
  Probe
ggcatgtcttcaagatcacccagag

SEQ ID NO: 251349 - DNA, 25 bp, Artificial
  Probe
tgcccatgttcaattgggggctcta

SEQ ID NO: 251350 - DNA, 25 bp, Artificial
  Probe
agacagaagaactccagcggcgctg

SEQ ID NO: 251351 - DNA, 25 bp, Artificial
  Probe
aattcatcttttcacaaaatgtggg

SEQ ID NO: 251352 - DNA, 25 bp, Artificial
  Probe
ttgtggttcccgagaatgaaccctt

SEQ ID NO: 251353 - DNA, 25 bp, Artificial
  Probe
ggggacacattctgcccagggccca

SEQ ID NO: 251354 - DNA, 25 bp, Artificial
  Probe
tccagctgcccatgttcaattgggg

SEQ ID NO: 251355 - DNA, 25 bp, Artificial
  Probe
agctggtacttcagcccagagacag

SEQ ID NO: 251356 - DNA, 25 bp, Artificial
  Probe
agcggccagacaggaggcatgtctt

SEQ ID NO: 251357 - DNA, 25 bp, Artificial
  Probe
cagagccacctaagctggtacttca

SEQ ID NO: 251358 - DNA, 25 bp, Artificial
  Probe
cggccagacaggaggcatgtcttca

SEQ ID NO: 251359 - DNA, 25 bp, Artificial
  Probe
ccgtggggacacattctgcccaggg

SEQ ID NO: 251360 - DNA, 25 bp, Artificial
  Probe
ccgagacaagacctagagggtttgg

SEQ ID NO: 251361 - DNA, 25 bp, Artificial
  Probe
gggcccacactgtctgaggacaagg

SEQ ID NO: 251362 - DNA, 25 bp, Artificial
  Probe
gagaatgaacccttggtgctgtaca

SEQ ID NO: 251363 - DNA, 25 bp, Artificial
  Probe
atgtgaaagcccaacgcagcctgcc

SEQ ID NO: 251364 - DNA, 25 bp, Artificial
  Probe
agacaggaggcatgtcttcaagatc

SEQ ID NO: 251365 - DNA, 25 bp, Artificial
  Probe
tcaagatcacccagagccacctaag

SEQ ID NO: 251366 - DNA, 25 bp, Artificial
  Probe
tcctggccgccgtttacagacatct

SEQ ID NO: 251367 - DNA, 25 bp, Artificial
  Probe
agagctgtccaatgccttacaacag

SEQ ID NO: 251368 - DNA, 25 bp, Artificial
  Probe
gggccagtgtcatcaagaagacatc

SEQ ID NO: 251369 - DNA, 25 bp, Artificial
  Probe
ctctccctggtggttgttgggattt

SEQ ID NO: 251370 - DNA, 25 bp, Artificial
  Probe
tacaacagctcctggccgccgttta

SEQ ID NO: 251371 - DNA, 25 bp, Artificial
  Probe
agacatctgatatcacccaggcccg

SEQ ID NO: 251372 - DNA, 25 bp, Artificial
  Probe
gcccgggccagtgtcatcaagaaga

SEQ ID NO: 251373 - DNA, 25 bp, Artificial
  Probe
caagagctgctaagcctttggctct

SEQ ID NO: 251374 - DNA, 25 bp, Artificial
  Probe
tgtcaagagctgctaagcctttggc

SEQ ID NO: 251375 - DNA, 25 bp, Artificial
  Probe
tgtcatcaagaagacatctgatatc

SEQ ID NO: 251376 - DNA, 25 bp, Artificial
  Probe
agaagacatctgatatcacccaggc

SEQ ID NO: 251377 - DNA, 25 bp, Artificial
  Probe
agcctttggctctccctggtggttg

SEQ ID NO: 251378 - DNA, 25 bp, Artificial
  Probe
cccaggcccgtgtcaagagctgcta

SEQ ID NO: 251379 - DNA, 25 bp, Artificial
  Probe
aggcccgggccagtgtcatcaagaa

SEQ ID NO: 251380 - DNA, 25 bp, Artificial
  Probe
aagacatctgatatcacccaggccc

SEQ ID NO: 251381 - DNA, 25 bp, Artificial
  Probe
acccaggcccgtgtcaagagctgct

SEQ ID NO: 251382 - DNA, 25 bp, Artificial
  Probe
ttacaacagctcctggccgccgttt

SEQ ID NO: 251383 - DNA, 25 bp, Artificial
  Probe
ctgctaagcctttggctctccctgg

SEQ ID NO: 251384 - DNA, 25 bp, Artificial
  Probe
ctgatatcacccaggcccgtgtcaa

SEQ ID NO: 251385 - DNA, 25 bp, Artificial
  Probe
cgggccagtgtcatcaagaagacat

SEQ ID NO: 251386 - DNA, 25 bp, Artificial
  Probe
tttggctctccctggtggttgttgg

SEQ ID NO: 251387 - DNA, 25 bp, Artificial
  Probe
tccctggtggttgttgggatttctt

SEQ ID NO: 251388 - DNA, 25 bp, Artificial
  Probe
gtgtcaagagctgctaagcctttgg

SEQ ID NO: 251389 - DNA, 25 bp, Artificial
  Probe
cccgtgtcaagagctgctaagcctt

SEQ ID NO: 251390 - DNA, 25 bp, Artificial
  Probe
ggccagtgtcatcaagaagacatct

SEQ ID NO: 251391 - DNA, 25 bp, Artificial
  Probe
aggcccgtgtcaagagctgctaagc

SEQ ID NO: 251392 - DNA, 25 bp, Artificial
  Probe
agctgctaagcctttggctctccct

SEQ ID NO: 251393 - DNA, 25 bp, Artificial
  Probe
acatctgatatcacccaggcccgtg

SEQ ID NO: 251394 - DNA, 25 bp, Artificial
  Probe
aatgccttacaacagctcctggccg

SEQ ID NO: 251395 - DNA, 25 bp, Artificial
  Probe
caggcccgtgtcaagagctgctaag

SEQ ID NO: 251396 - DNA, 25 bp, Artificial
  Probe
gaggcccgggccagtgtcatcaaga

SEQ ID NO: 251397 - DNA, 25 bp, Artificial
  Probe
ctccctggtggttgttgggatttct

SEQ ID NO: 251398 - DNA, 25 bp, Artificial
  Probe
cgtgtcaagagctgctaagcctttg

SEQ ID NO: 251399 - DNA, 25 bp, Artificial
  Probe
ggcccgtgtcaagagctgctaagcc

SEQ ID NO: 251400 - DNA, 25 bp, Artificial
  Probe
gacatctgatatcacccaggcccgt

SEQ ID NO: 251401 - DNA, 25 bp, Artificial
  Probe
ccgtgtcaagagctgctaagccttt

SEQ ID NO: 251402 - DNA, 25 bp, Artificial
  Probe
gctctccctggtggttgttgggatt

SEQ ID NO: 251403 - DNA, 25 bp, Artificial
  Probe
gtcatcaagaagacatctgatatca

SEQ ID NO: 251404 - DNA, 25 bp, Artificial
  Probe
taagcctttggctctccctggtggt

SEQ ID NO: 251405 - DNA, 25 bp, Artificial
  Probe
cccgggccagtgtcatcaagaagac

SEQ ID NO: 251406 - DNA, 25 bp, Artificial
  Probe
tctccctggtggttgttgggatttc

SEQ ID NO: 251407 - DNA, 25 bp, Artificial
  Probe
gtccaatgccttacaacagctcctg

SEQ ID NO: 251408 - DNA, 25 bp, Artificial
  Probe
tccaatgccttacaacagctcctgg

SEQ ID NO: 251409 - DNA, 25 bp, Artificial
  Probe
gtgtcatcaagaagacatctgatat

SEQ ID NO: 251410 - DNA, 25 bp, Artificial
  Probe
gtcaagagctgctaagcctttggct

SEQ ID NO: 251411 - DNA, 25 bp, Artificial
  Probe
gcccgtgtcaagagctgctaagcct

SEQ ID NO: 251412 - DNA, 25 bp, Artificial
  Probe
acggacgcttgtggagcattctgga

SEQ ID NO: 251413 - DNA, 25 bp, Artificial
  Probe
ggactctttgtctacggacgcttgt

SEQ ID NO: 251414 - DNA, 25 bp, Artificial
  Probe
tccgactccagtttgatgaattcca

SEQ ID NO: 251415 - DNA, 25 bp, Artificial
  Probe
atgaattccagattgtcagtagttc

SEQ ID NO: 251416 - DNA, 25 bp, Artificial
  Probe
atggctgctctggacccgcgtgctc

SEQ ID NO: 251417 - DNA, 25 bp, Artificial
  Probe
tcagtagttcacatgatgacacaat

SEQ ID NO: 251418 - DNA, 25 bp, Artificial
  Probe
atgatgacacaattctcatctggga

SEQ ID NO: 251419 - DNA, 25 bp, Artificial
  Probe
gacgcttgtggagcattctggaaga

SEQ ID NO: 251420 - DNA, 25 bp, Artificial
  Probe
atgacacaattctcatctgggactt

SEQ ID NO: 251421 - DNA, 25 bp, Artificial
  Probe
tccagattgtcagtagttcacatga

SEQ ID NO: 251422 - DNA, 25 bp, Artificial
  Probe
tatggctgctctggacccgcgtgct

SEQ ID NO: 251423 - DNA, 25 bp, Artificial
  Probe
ttctcatctgggacttcctaaatga

SEQ ID NO: 251424 - DNA, 25 bp, Artificial
  Probe
gcagggactctttgtctacggacgc

SEQ ID NO: 251425 - DNA, 25 bp, Artificial
  Probe
catgatgacacaattctcatctggg

SEQ ID NO: 251426 - DNA, 25 bp, Artificial
  Probe
tggagcattctggaagagttttccg

SEQ ID NO: 251427 - DNA, 25 bp, Artificial
  Probe
ttttccgactccagtttgatgaatt

SEQ ID NO: 251428 - DNA, 25 bp, Artificial
  Probe
gctcctgcagggactctttgtctac

SEQ ID NO: 251429 - DNA, 25 bp, Artificial
  Probe
tggacccgcgtgctcctgcagggac

SEQ ID NO: 251430 - DNA, 25 bp, Artificial
  Probe
tctggacccgcgtgctcctgcaggg

SEQ ID NO: 251431 - DNA, 25 bp, Artificial
  Probe
gagttttccgactccagtttgatga

SEQ ID NO: 251432 - DNA, 25 bp, Artificial
  Probe
ttctggaagagttttccgactccag

SEQ ID NO: 251433 - DNA, 25 bp, Artificial
  Probe
gcgtgctcctgcagggactctttgt

SEQ ID NO: 251434 - DNA, 25 bp, Artificial
  Probe
ctttgtctacggacgcttgtggagc

SEQ ID NO: 251435 - DNA, 25 bp, Artificial
  Probe
aagagttttccgactccagtttgat

SEQ ID NO: 251436 - DNA, 25 bp, Artificial
  Probe
gtagttcacatgatgacacaattct

SEQ ID NO: 251437 - DNA, 25 bp, Artificial
  Probe
gattgtcagtagttcacatgatgac

SEQ ID NO: 251438 - DNA, 25 bp, Artificial
  Probe
ggacccgcgtgctcctgcagggact

SEQ ID NO: 251439 - DNA, 25 bp, Artificial
  Probe
gactctttgtctacggacgcttgtg

SEQ ID NO: 251440 - DNA, 25 bp, Artificial
  Probe
cagattgtcagtagttcacatgatg

SEQ ID NO: 251441 - DNA, 25 bp, Artificial
  Probe
ttatggctgctctggacccgcgtgc

SEQ ID NO: 251442 - DNA, 25 bp, Artificial
  Probe
cgactccagtttgatgaattccaga

SEQ ID NO: 251443 - DNA, 25 bp, Artificial
  Probe
acatgatgacacaattctcatctgg

SEQ ID NO: 251444 - DNA, 25 bp, Artificial
  Probe
aattccagattgtcagtagttcaca

SEQ ID NO: 251445 - DNA, 25 bp, Artificial
  Probe
ccgcgtgctcctgcagggactcttt

SEQ ID NO: 251446 - DNA, 25 bp, Artificial
  Probe
gtctacggacgcttgtggagcattc

SEQ ID NO: 251447 - DNA, 25 bp, Artificial
  Probe
gtcagtagttcacatgatgacacaa

SEQ ID NO: 251448 - DNA, 25 bp, Artificial
  Probe
cggacgcttgtggagcattctggaa

SEQ ID NO: 251449 - DNA, 25 bp, Artificial
  Probe
gtggagcattctggaagagttttcc

SEQ ID NO: 251450 - DNA, 25 bp, Artificial
  Probe
ctcctgcagggactctttgtctacg

SEQ ID NO: 251451 - DNA, 25 bp, Artificial
  Probe
tccagtttgatgaattccagattgt

SEQ ID NO: 251452 - DNA, 25 bp, Artificial
  Probe
cgcttgtggagcattctggaagagt

SEQ ID NO: 251453 - DNA, 25 bp, Artificial
  Probe
tttccgactccagtttgatgaattc

SEQ ID NO: 251454 - DNA, 25 bp, Artificial
  Probe
cttatggctgctctggacccgcgtg

SEQ ID NO: 251455 - DNA, 25 bp, Artificial
  Probe
actccagtttgatgaattccagatt

SEQ ID NO: 251456 - DNA, 25 bp, Artificial
  Probe
gacacaattctcatctgggacttcc

SEQ ID NO: 251457 - DNA, 25 bp, Artificial
  Probe
cattctggaagagttttccgactcc

SEQ ID NO: 251458 - DNA, 25 bp, Artificial
  Probe
ctgaggaggctcagcccgtcgtaag

SEQ ID NO: 251459 - DNA, 25 bp, Artificial
  Probe
ggcctgtgcagcaccgtgaggttca

SEQ ID NO: 251460 - DNA, 25 bp, Artificial
  Probe
tgatccaggttctgggccccaagcc

SEQ ID NO: 251461 - DNA, 25 bp, Artificial
  Probe
cggcctgtgcagcaccgtgaggttc

SEQ ID NO: 251462 - DNA, 25 bp, Artificial
  Probe
agtccaagacccaggcctacacata

SEQ ID NO: 251463 - DNA, 25 bp, Artificial
  Probe
agagttgaatcactgacctgaggag

SEQ ID NO: 251464 - DNA, 25 bp, Artificial
  Probe
agtgcttcacaatggcccggaagag

SEQ ID NO: 251465 - DNA, 25 bp, Artificial
  Probe
tcagaacatctttgcctggtgtggt

SEQ ID NO: 251466 - DNA, 25 bp, Artificial
  Probe
aagaggcctcccatctgcacctgtg

SEQ ID NO: 251467 - DNA, 25 bp, Artificial
  Probe
agctacttcccacaaggcctcaagt

SEQ ID NO: 251468 - DNA, 25 bp, Artificial
  Probe
tcttcatgagctacttcccacaagg

SEQ ID NO: 251469 - DNA, 25 bp, Artificial
  Probe
ctgctctgaaggagggcaaccctga

SEQ ID NO: 251470 - DNA, 25 bp, Artificial
  Probe
accctgaggaggacattacagcgga

SEQ ID NO: 251471 - DNA, 25 bp, Artificial
  Probe
gttctgggccccaagcctgctctga

SEQ ID NO: 251472 - DNA, 25 bp, Artificial
  Probe
gcgttccacaagacaacctcgggca

SEQ ID NO: 251473 - DNA, 25 bp, Artificial
  Probe
gctctaccaggttaaggggaagaag

SEQ ID NO: 251474 - DNA, 25 bp, Artificial
  Probe
gttcaagggaacgagtccgacctct

SEQ ID NO: 251475 - DNA, 25 bp, Artificial
  Probe
acgccagcagccatcaggaagctct

SEQ ID NO: 251476 - DNA, 25 bp, Artificial
  Probe
agccggtgcccatagcacgagagaa

SEQ ID NO: 251477 - DNA, 25 bp, Artificial
  Probe
tgcagcaccgtgaggttcaagggaa

SEQ ID NO: 251478 - DNA, 25 bp, Artificial
  Probe
gtccgacctcttcatgagctacttc

SEQ ID NO: 251479 - DNA, 25 bp, Artificial
  Probe
cacatatggcgtgtggagaagctga

SEQ ID NO: 251480 - DNA, 25 bp, Artificial
  Probe
tagtctgaaaacagcatgtacacgc

SEQ ID NO: 251481 - DNA, 25 bp, Artificial
  Probe
atggcccggaagaggcctcccatct

SEQ ID NO: 251482 - DNA, 25 bp, Artificial
  Probe
tgtgcacctcaacaccctgctgggg

SEQ ID NO: 251483 - DNA, 25 bp, Artificial
  Probe
ggccagcagtcatcgcgcgatgagc

SEQ ID NO: 251484 - DNA, 25 bp, Artificial
  Probe
cccgtcgtaagtagtctgaaaacag

SEQ ID NO: 251485 - DNA, 25 bp, Artificial
  Probe
gtggagtcggcgttccacaagacaa

SEQ ID NO: 251486 - DNA, 25 bp, Artificial
  Probe
aacgcccaggctgcagccctgtata

SEQ ID NO: 251487 - DNA, 25 bp, Artificial
  Probe
aggaggctctgaagagttgaatcac

SEQ ID NO: 251488 - DNA, 25 bp, Artificial
  Probe
gaagaacatccgtgcgaccgagagg

SEQ ID NO: 251489 - DNA, 25 bp, Artificial
  Probe
caccgtgaggttcaagggaacgagt

SEQ ID NO: 251490 - DNA, 25 bp, Artificial
  Probe
gagggcaaccctgaggaggacatta

SEQ ID NO: 251491 - DNA, 25 bp, Artificial
  Probe
acaatggcccggaagaggcctccca

SEQ ID NO: 251492 - DNA, 25 bp, Artificial
  Probe
tgaaaacagcatgtacacgcccatc

SEQ ID NO: 251493 - DNA, 25 bp, Artificial
  Probe
tgtgctagctgtgcacctcaacacc

SEQ ID NO: 251494 - DNA, 25 bp, Artificial
  Probe
aacatccgtgcgaccgagagggctc

SEQ ID NO: 251495 - DNA, 25 bp, Artificial
  Probe
agcacgagagaaccatggcatcttt

SEQ ID NO: 251496 - DNA, 25 bp, Artificial
  Probe
ccacaaggcctcaagtatcgggagg

SEQ ID NO: 251497 - DNA, 25 bp, Artificial
  Probe
agctgaagccggtgcccatagcacg

SEQ ID NO: 251498 - DNA, 25 bp, Artificial
  Probe
agggctctgagctgggacagcttca

SEQ ID NO: 251499 - DNA, 25 bp, Artificial
  Probe
ctcccatctgcacctgtggataggc

SEQ ID NO: 251500 - DNA, 25 bp, Artificial
  Probe
tttttctggggattcctacctagtg

SEQ ID NO: 251501 - DNA, 25 bp, Artificial
  Probe
ggcctgcgctgtgctagctgtgcac

SEQ ID NO: 251502 - DNA, 25 bp, Artificial
  Probe
tcccacaaggcctcaagtatcggga

SEQ ID NO: 251503 - DNA, 25 bp, Artificial
  Probe
ccgagatgatccaggttctgggccc

SEQ ID NO: 251504 - DNA, 25 bp, Artificial
  Probe
gatcttttcactctgaagccaccgt

SEQ ID NO: 251505 - DNA, 25 bp, Artificial
  Probe
cgtgaatgatcttttcactctgaag

SEQ ID NO: 251506 - DNA, 25 bp, Artificial
  Probe
gctttatagcagtgagcgcactaac

SEQ ID NO: 251507 - DNA, 25 bp, Artificial
  Probe
gttagttatgtcctctgggaaagtc

SEQ ID NO: 251508 - DNA, 25 bp, Artificial
  Probe
gaatgtctgacgtgaaccgtgaatg

SEQ ID NO: 251509 - DNA, 25 bp, Artificial
  Probe
gtccgagtctgctttatagcagtga

SEQ ID NO: 251510 - DNA, 25 bp, Artificial
  Probe
tgtccgagtctgctttatagcagtg

SEQ ID NO: 251511 - DNA, 25 bp, Artificial
  Probe
catttaaggttggttccaatccttg

SEQ ID NO: 251512 - DNA, 25 bp, Artificial
  Probe
agcagtgagcgcactaacccttcgt

SEQ ID NO: 251513 - DNA, 25 bp, Artificial
  Probe
tgacgatctggcagatctcagctgt

SEQ ID NO: 251514 - DNA, 25 bp, Artificial
  Probe
aagattgaatgtctgacgtgaaccg

SEQ ID NO: 251515 - DNA, 25 bp, Artificial
  Probe
gcagtgagcgcactaacccttcgtg

SEQ ID NO: 251516 - DNA, 25 bp, Artificial
  Probe
gtgagcgcactaacccttcgtgggg

SEQ ID NO: 251517 - DNA, 25 bp, Artificial
  Probe
gacgtgaaccgtgaatgatcttttc

SEQ ID NO: 251518 - DNA, 25 bp, Artificial
  Probe
tgaaccgtgaatgatcttttcactc

SEQ ID NO: 251519 - DNA, 25 bp, Artificial
  Probe
accttttgtatgatagtgagcctgt

SEQ ID NO: 251520 - DNA, 25 bp, Artificial
  Probe
agattgaatgtctgacgtgaaccgt

SEQ ID NO: 251521 - DNA, 25 bp, Artificial
  Probe
tccttgaaactgtccgagtctgctt

SEQ ID NO: 251522 - DNA, 25 bp, Artificial
  Probe
tgccatttaaggttggttccaatcc

SEQ ID NO: 251523 - DNA, 25 bp, Artificial
  Probe
tggttccaatccttgaaactgtccg

SEQ ID NO: 251524 - DNA, 25 bp, Artificial
  Probe
agtctgctttatagcagtgagcgca

SEQ ID NO: 251525 - DNA, 25 bp, Artificial
  Probe
atccttgaaactgtccgagtctgct

SEQ ID NO: 251526 - DNA, 25 bp, Artificial
  Probe
tttgccatttaaggttggttccaat

SEQ ID NO: 251527 - DNA, 25 bp, Artificial
  Probe
gaaactgtccgagtctgctttatag

SEQ ID NO: 251528 - DNA, 25 bp, Artificial
  Probe
tctgctttatagcagtgagcgcact

SEQ ID NO: 251529 - DNA, 25 bp, Artificial
  Probe
gttggttccaatccttgaaactgtc

SEQ ID NO: 251530 - DNA, 25 bp, Artificial
  Probe
ttttcactctgaagccaccgttgcc

SEQ ID NO: 251531 - DNA, 25 bp, Artificial
  Probe
tagttatgtcctctgggaaagtctt

SEQ ID NO: 251532 - DNA, 25 bp, Artificial
  Probe
cttttcactctgaagccaccgttgc

SEQ ID NO: 251533 - DNA, 25 bp, Artificial
  Probe
tgatcttttcactctgaagccaccg

SEQ ID NO: 251534 - DNA, 25 bp, Artificial
  Probe
gaatgatcttttcactctgaagcca

SEQ ID NO: 251535 - DNA, 25 bp, Artificial
  Probe
agtgagcgcactaacccttcgtggg

SEQ ID NO: 251536 - DNA, 25 bp, Artificial
  Probe
tgacgtgaaccgtgaatgatctttt

SEQ ID NO: 251537 - DNA, 25 bp, Artificial
  Probe
acgtgaaccgtgaatgatcttttca

SEQ ID NO: 251538 - DNA, 25 bp, Artificial
  Probe
aggttggttccaatccttgaaactg

SEQ ID NO: 251539 - DNA, 25 bp, Artificial
  Probe
ttgaatgtctgacgtgaaccgtgaa

SEQ ID NO: 251540 - DNA, 25 bp, Artificial
  Probe
aaccgtgaatgatcttttcactctg

SEQ ID NO: 251541 - DNA, 25 bp, Artificial
  Probe
gttccaatccttgaaactgtccgag

SEQ ID NO: 251542 - DNA, 25 bp, Artificial
  Probe
tccgagtctgctttatagcagtgag

SEQ ID NO: 251543 - DNA, 25 bp, Artificial
  Probe
tgtctgacgtgaaccgtgaatgatc

SEQ ID NO: 251544 - DNA, 25 bp, Artificial
  Probe
ttccaatccttgaaactgtccgagt

SEQ ID NO: 251545 - DNA, 25 bp, Artificial
  Probe
actgtccgagtctgctttatagcag

SEQ ID NO: 251546 - DNA, 25 bp, Artificial
  Probe
aatgtctgacgtgaaccgtgaatga

SEQ ID NO: 251547 - DNA, 25 bp, Artificial
  Probe
gccatttaaggttggttccaatcct

SEQ ID NO: 251548 - DNA, 25 bp, Artificial
  Probe
tttatagcagtgagcgcactaaccc

SEQ ID NO: 251549 - DNA, 25 bp, Artificial
  Probe
tgaaactgtccgagtctgctttata

SEQ ID NO: 251550 - DNA, 25 bp, Artificial
  Probe
ctgagctgtgctaatgtagctgatt

SEQ ID NO: 251551 - DNA, 25 bp, Artificial
  Probe
ggtgctgctaatacccaacatttcc

SEQ ID NO: 251552 - DNA, 25 bp, Artificial
  Probe
ataacagatggtgctgctaataccc

SEQ ID NO: 251553 - DNA, 25 bp, Artificial
  Probe
aatactgagctgtgctaatgtagct

SEQ ID NO: 251554 - DNA, 25 bp, Artificial
  Probe
gcattaggccatatagttactctct

SEQ ID NO: 251555 - DNA, 25 bp, Artificial
  Probe
accagtggcattaggccatatagtt

SEQ ID NO: 251556 - DNA, 25 bp, Artificial
  Probe
tggcattaggccatatagttactct

SEQ ID NO: 251557 - DNA, 25 bp, Artificial
  Probe
gcattcttctagaacagtacatctg

SEQ ID NO: 251558 - DNA, 25 bp, Artificial
  Probe
gtatcttgtaacttcagtagcattc

SEQ ID NO: 251559 - DNA, 25 bp, Artificial
  Probe
tttatatcatacaggctttcattgg

SEQ ID NO: 251560 - DNA, 25 bp, Artificial
  Probe
cccttgtgaagaacacgtgactttt

SEQ ID NO: 251561 - DNA, 25 bp, Artificial
  Probe
tggcggtgtgtttgcctaacacacc

SEQ ID NO: 251562 - DNA, 25 bp, Artificial
  Probe
tactgaaatctctggcacagatggc

SEQ ID NO: 251563 - DNA, 25 bp, Artificial
  Probe
cagaccagtggcattaggccatata

SEQ ID NO: 251564 - DNA, 25 bp, Artificial
  Probe
cttcagtagcattcttctagaacag

SEQ ID NO: 251565 - DNA, 25 bp, Artificial
  Probe
agaacagtacatctggtgtgcttac

SEQ ID NO: 251566 - DNA, 25 bp, Artificial
  Probe
cttctagtgtttgcttaaaatacgt

SEQ ID NO: 251567 - DNA, 25 bp, Artificial
  Probe
ttactgaaatctctggcacagatgg

SEQ ID NO: 251568 - DNA, 25 bp, Artificial
  Probe
tatcatacaggctttcattggttat

SEQ ID NO: 251569 - DNA, 25 bp, Artificial
  Probe
atagttactctcttctagtgtttgc

SEQ ID NO: 251570 - DNA, 25 bp, Artificial
  Probe
cacagatggcggtgtgtttgcctaa

SEQ ID NO: 251571 - DNA, 25 bp, Artificial
  Probe
tcatagtgctctgtgctccacttaa

SEQ ID NO: 251572 - DNA, 25 bp, Artificial
  Probe
gaaatctctggcacagatggcggtg

SEQ ID NO: 251573 - DNA, 25 bp, Artificial
  Probe
gtagcattcttctagaacagtacat

SEQ ID NO: 251574 - DNA, 25 bp, Artificial
  Probe
tctggtgtgcttactgaaatctctg

SEQ ID NO: 251575 - DNA, 25 bp, Artificial
  Probe
tgtatacaccccttgtgaagaacac

SEQ ID NO: 251576 - DNA, 25 bp, Artificial
  Probe
gtagctgattttagtctccttgtcc

SEQ ID NO: 251577 - DNA, 25 bp, Artificial
  Probe
acacttgtatacaccccttgtgaag

SEQ ID NO: 251578 - DNA, 25 bp, Artificial
  Probe
tgctaatgtagctgattttagtctc

SEQ ID NO: 251579 - DNA, 25 bp, Artificial
  Probe
ttcttgctatttcaataacagatgg

SEQ ID NO: 251580 - DNA, 25 bp, Artificial
  Probe
tgtaacttcagtagcattcttctag

SEQ ID NO: 251581 - DNA, 25 bp, Artificial
  Probe
aagtattttcatagtgctctgtgct

SEQ ID NO: 251582 - DNA, 25 bp, Artificial
  Probe
ctctggcacagatggcggtgtgttt

SEQ ID NO: 251583 - DNA, 25 bp, Artificial
  Probe
tcttctagtgtttgcttaaaatacg

SEQ ID NO: 251584 - DNA, 25 bp, Artificial
  Probe
caataacagatggtgctgctaatac

SEQ ID NO: 251585 - DNA, 25 bp, Artificial
  Probe
actatctgtcccagaccagtggcat

SEQ ID NO: 251586 - DNA, 25 bp, Artificial
  Probe
gtaacttcagtagcattcttctaga

SEQ ID NO: 251587 - DNA, 25 bp, Artificial
  Probe
actatgcagtatcttgtaacttcag

SEQ ID NO: 251588 - DNA, 25 bp, Artificial
  Probe
gccatatagttactctcttctagtg

SEQ ID NO: 251589 - DNA, 25 bp, Artificial
  Probe
gctgattttagtctccttgtcccac

SEQ ID NO: 251590 - DNA, 25 bp, Artificial
  Probe
aggccatatagttactctcttctag

SEQ ID NO: 251591 - DNA, 25 bp, Artificial
  Probe
gtgtgtttgcctaacacaccactat

SEQ ID NO: 251592 - DNA, 25 bp, Artificial
  Probe
gtcccagaccagtggcattaggcca

SEQ ID NO: 251593 - DNA, 25 bp, Artificial
  Probe
ctaatgtagctgattttagtctcct

SEQ ID NO: 251594 - DNA, 25 bp, Artificial
  Probe
ggtgtgtttgcctaacacaccacta

SEQ ID NO: 251595 - DNA, 25 bp, Artificial
  Probe
aacctttcataggaaaaatactgag

SEQ ID NO: 251596 - DNA, 25 bp, Artificial
  Probe
ctccattatgtgagtcagcggccag

SEQ ID NO: 251597 - DNA, 25 bp, Artificial
  Probe
cagcggccagccttctggtcagcat

SEQ ID NO: 251598 - DNA, 25 bp, Artificial
  Probe
attatgtgagtcagcggccagcctt

SEQ ID NO: 251599 - DNA, 25 bp, Artificial
  Probe
gacatgcccggcttgtcaggctgca

SEQ ID NO: 251600 - DNA, 25 bp, Artificial
  Probe
agataccttcctggtcggttcccat

SEQ ID NO: 251601 - DNA, 25 bp, Artificial
  Probe
aattatgcacagactccattatgtg

SEQ ID NO: 251602 - DNA, 25 bp, Artificial
  Probe
gccttctggtcagcatccccagtga

SEQ ID NO: 251603 - DNA, 25 bp, Artificial
  Probe
gtcagcatccccagtgacggacatg

SEQ ID NO: 251604 - DNA, 25 bp, Artificial
  Probe
ttctggtcagcatccccagtgacgg

SEQ ID NO: 251605 - DNA, 25 bp, Artificial
  Probe
atccttggttcagattgagttatac

SEQ ID NO: 251606 - DNA, 25 bp, Artificial
  Probe
gagtcagcggccagccttctggtca

SEQ ID NO: 251607 - DNA, 25 bp, Artificial
  Probe
gtcactaacactttgaccatggcag

SEQ ID NO: 251608 - DNA, 25 bp, Artificial
  Probe
ctgaattgctgattttccttttggc

SEQ ID NO: 251609 - DNA, 25 bp, Artificial
  Probe
tcttccttctggtaggctacagaac

SEQ ID NO: 251610 - DNA, 25 bp, Artificial
  Probe
cttctggtcagcatccccagtgacg

SEQ ID NO: 251611 - DNA, 25 bp, Artificial
  Probe
ccttggttcagattgagttatacag

SEQ ID NO: 251612 - DNA, 25 bp, Artificial
  Probe
agccttctggtcagcatccccagtg

SEQ ID NO: 251613 - DNA, 25 bp, Artificial
  Probe
caatccttggttcagattgagttat

SEQ ID NO: 251614 - DNA, 25 bp, Artificial
  Probe
acaacaatccttggttcagattgag

SEQ ID NO: 251615 - DNA, 25 bp, Artificial
  Probe
cagtgacggacatgcccggcttgtc

SEQ ID NO: 251616 - DNA, 25 bp, Artificial
  Probe
ataccttcctggtcggttcccatgc

SEQ ID NO: 251617 - DNA, 25 bp, Artificial
  Probe
gctgcatcatgtagaacccacttca

SEQ ID NO: 251618 - DNA, 25 bp, Artificial
  Probe
caggaaaagataccttcctggtcgg

SEQ ID NO: 251619 - DNA, 25 bp, Artificial
  Probe
acaatccttggttcagattgagtta

SEQ ID NO: 251620 - DNA, 25 bp, Artificial
  Probe
ggcttgtcaggctgcatcatgtaga

SEQ ID NO: 251621 - DNA, 25 bp, Artificial
  Probe
agcggccagccttctggtcagcatc

SEQ ID NO: 251622 - DNA, 25 bp, Artificial
  Probe
tcagcatccccagtgacggacatgc

SEQ ID NO: 251623 - DNA, 25 bp, Artificial
  Probe
gcaattatgcacagactccattatg

SEQ ID NO: 251624 - DNA, 25 bp, Artificial
  Probe
ttcctggtcggttcccatgccaaaa

SEQ ID NO: 251625 - DNA, 25 bp, Artificial
  Probe
aggctacagaacaatgtccgtcact

SEQ ID NO: 251626 - DNA, 25 bp, Artificial
  Probe
aaagcctcttccttctggtaggcta

SEQ ID NO: 251627 - DNA, 25 bp, Artificial
  Probe
gcccggcttgtcaggctgcatcatg

SEQ ID NO: 251628 - DNA, 25 bp, Artificial
  Probe
cccagtgacggacatgcccggcttg

SEQ ID NO: 251629 - DNA, 25 bp, Artificial
  Probe
tggtcggttcccatgccaaaaagga

SEQ ID NO: 251630 - DNA, 25 bp, Artificial
  Probe
gaacaacaatccttggttcagattg

SEQ ID NO: 251631 - DNA, 25 bp, Artificial
  Probe
cttcctggtcggttcccatgccaaa

SEQ ID NO: 251632 - DNA, 25 bp, Artificial
  Probe
acatgcccggcttgtcaggctgcat

SEQ ID NO: 251633 - DNA, 25 bp, Artificial
  Probe
caggctgcatcatgtagaacccact

SEQ ID NO: 251634 - DNA, 25 bp, Artificial
  Probe
gataccttcctggtcggttcccatg

SEQ ID NO: 251635 - DNA, 25 bp, Artificial
  Probe
caacaatccttggttcagattgagt

SEQ ID NO: 251636 - DNA, 25 bp, Artificial
  Probe
gctacagaacaatgtccgtcactaa

SEQ ID NO: 251637 - DNA, 25 bp, Artificial
  Probe
ccaaagcctcttccttctggtaggc

SEQ ID NO: 251638 - DNA, 25 bp, Artificial
  Probe
acagactccattatgtgagtcagcg

SEQ ID NO: 251639 - DNA, 25 bp, Artificial
  Probe
gtccgtcactaacactttgaccatg

SEQ ID NO: 251640 - DNA, 25 bp, Artificial
  Probe
tttgaccatggcaggcttgaggaag

SEQ ID NO: 251641 - DNA, 25 bp, Artificial
  Probe
acactttgaccatggcaggcttgag

SEQ ID NO: 251642 - DNA, 25 bp, Artificial
  Probe
agagccgtaaggattgggaaagtct

SEQ ID NO: 251643 - DNA, 25 bp, Artificial
  Probe
agagcctaaagcagctcacaccgca

SEQ ID NO: 251644 - DNA, 25 bp, Artificial
  Probe
cacagtcctgtagagccgtaaggat

SEQ ID NO: 251645 - DNA, 25 bp, Artificial
  Probe
aggagcacagtcctgtagagccgta

SEQ ID NO: 251646 - DNA, 25 bp, Artificial
  Probe
agtggccctcagtggttaatgcaca

SEQ ID NO: 251647 - DNA, 25 bp, Artificial
  Probe
ggcgcaagagcctaaagcagctcac

SEQ ID NO: 251648 - DNA, 25 bp, Artificial
  Probe
tcttcccagtcagtggccctcagtg

SEQ ID NO: 251649 - DNA, 25 bp, Artificial
  Probe
gcgcaagagcctaaagcagctcaca

SEQ ID NO: 251650 - DNA, 25 bp, Artificial
  Probe
aaagcagctcacaccgcactgactg

SEQ ID NO: 251651 - DNA, 25 bp, Artificial
  Probe
taaagcagctcacaccgcactgact

SEQ ID NO: 251652 - DNA, 25 bp, Artificial
  Probe
aagtcttcccagtcagtggccctca

SEQ ID NO: 251653 - DNA, 25 bp, Artificial
  Probe
gtcttcccagtcagtggccctcagt

SEQ ID NO: 251654 - DNA, 25 bp, Artificial
  Probe
tcaggagcacagtcctgtagagccg

SEQ ID NO: 251655 - DNA, 25 bp, Artificial
  Probe
cagtggccctcagtggttaatgcac

SEQ ID NO: 251656 - DNA, 25 bp, Artificial
  Probe
gtggccctcagtggttaatgcacaa

SEQ ID NO: 251657 - DNA, 25 bp, Artificial
  Probe
caagagcctaaagcagctcacaccg

SEQ ID NO: 251658 - DNA, 25 bp, Artificial
  Probe
cgcaagagcctaaagcagctcacac

SEQ ID NO: 251659 - DNA, 25 bp, Artificial
  Probe
ccagcatttgttgctgggaagaaaa

SEQ ID NO: 251660 - DNA, 25 bp, Artificial
  Probe
cctgtagagccgtaaggattgggaa

SEQ ID NO: 251661 - DNA, 25 bp, Artificial
  Probe
agcacagtcctgtagagccgtaagg

SEQ ID NO: 251662 - DNA, 25 bp, Artificial
  Probe
tcagtggccctcagtggttaatgca

SEQ ID NO: 251663 - DNA, 25 bp, Artificial
  Probe
aagagcctaaagcagctcacaccgc

SEQ ID NO: 251664 - DNA, 25 bp, Artificial
  Probe
cccagcatttgttgctgggaagaaa

SEQ ID NO: 251665 - DNA, 25 bp, Artificial
  Probe
ccctcagtggttaatgcacaaggcc

SEQ ID NO: 251666 - DNA, 25 bp, Artificial
  Probe
gattgggaaagtcttcccagtcagt

SEQ ID NO: 251667 - DNA, 25 bp, Artificial
  Probe
tggccctcagtggttaatgcacaag

SEQ ID NO: 251668 - DNA, 25 bp, Artificial
  Probe
cagtcagtggccctcagtggttaat

SEQ ID NO: 251669 - DNA, 25 bp, Artificial
  Probe
ttcaggagcacagtcctgtagagcc

SEQ ID NO: 251670 - DNA, 25 bp, Artificial
  Probe
caggagcacagtcctgtagagccgt

SEQ ID NO: 251671 - DNA, 25 bp, Artificial
  Probe
gagcacagtcctgtagagccgtaag

SEQ ID NO: 251672 - DNA, 25 bp, Artificial
  Probe
ggagcacagtcctgtagagccgtaa

SEQ ID NO: 251673 - DNA, 25 bp, Artificial
  Probe
ggccctcagtggttaatgcacaagg

SEQ ID NO: 251674 - DNA, 25 bp, Artificial
  Probe
ctggggagggggcgcaagagcctaa

SEQ ID NO: 251675 - DNA, 25 bp, Artificial
  Probe
aaagtcttcccagtcagtggccctc

SEQ ID NO: 251676 - DNA, 25 bp, Artificial
  Probe
gggaaagtcttcccagtcagtggcc

SEQ ID NO: 251677 - DNA, 25 bp, Artificial
  Probe
gtcagtggccctcagtggttaatgc

SEQ ID NO: 251678 - DNA, 25 bp, Artificial
  Probe
gcaagagcctaaagcagctcacacc

SEQ ID NO: 251679 - DNA, 25 bp, Artificial
  Probe
gaaagtcttcccagtcagtggccct

SEQ ID NO: 251680 - DNA, 25 bp, Artificial
  Probe
gccctcagtggttaatgcacaaggc

SEQ ID NO: 251681 - DNA, 25 bp, Artificial
  Probe
cttcccagtcagtggccctcagtgg

SEQ ID NO: 251682 - DNA, 25 bp, Artificial
  Probe
agtcttcccagtcagtggccctcag

SEQ ID NO: 251683 - DNA, 25 bp, Artificial
  Probe
tcagtggttaatgcacaaggccccc

SEQ ID NO: 251684 - DNA, 25 bp, Artificial
  Probe
gcacagtcctgtagagccgtaagga

SEQ ID NO: 251685 - DNA, 25 bp, Artificial
  Probe
agtcagtggccctcagtggttaatg

SEQ ID NO: 251686 - DNA, 25 bp, Artificial
  Probe
gagcctaaagcagctcacaccgcac

SEQ ID NO: 251687 - DNA, 25 bp, Artificial
  Probe
tggttaatgcacaaggcccccggct

SEQ ID NO: 251688 - DNA, 25 bp, Artificial
  Probe
ctctcagctttcctgtgagctggaa

SEQ ID NO: 251689 - DNA, 25 bp, Artificial
  Probe
gcctctcagctttcctgtgagctgg

SEQ ID NO: 251690 - DNA, 25 bp, Artificial
  Probe
atcgcctctcagctttcctgtgagc

SEQ ID NO: 251691 - DNA, 25 bp, Artificial
  Probe
agagccagtgcttccgatgttgtgg

SEQ ID NO: 251692 - DNA, 25 bp, Artificial
  Probe
tctcagctttcctgtgagctggaag

SEQ ID NO: 251693 - DNA, 25 bp, Artificial
  Probe
cttgctcgtgtttgagggaagcagc

SEQ ID NO: 251694 - DNA, 25 bp, Artificial
  Probe
cagagccagtgcttccgatgttgtg

SEQ ID NO: 251695 - DNA, 25 bp, Artificial
  Probe
cagtgcttccgatgttgtgggtttg

SEQ ID NO: 251696 - DNA, 25 bp, Artificial
  Probe
ctcccggtaaggagatgacgcagtt

SEQ ID NO: 251697 - DNA, 25 bp, Artificial
  Probe
cgctctcccggtaaggagatgacgc

SEQ ID NO: 251698 - DNA, 25 bp, Artificial
  Probe
tgcgtagaaggcagtggtgatccta

SEQ ID NO: 251699 - DNA, 25 bp, Artificial
  Probe
cctctcagctttcctgtgagctgga

SEQ ID NO: 251700 - DNA, 25 bp, Artificial
  Probe
agctgtgcacagagccagtgcttcc

SEQ ID NO: 251701 - DNA, 25 bp, Artificial
  Probe
tgctcgtgtttgagggaagcagctc

SEQ ID NO: 251702 - DNA, 25 bp, Artificial
  Probe
tggagctgtgcacagagccagtgct

SEQ ID NO: 251703 - DNA, 25 bp, Artificial
  Probe
gctttcctgtgagctggaagaaggc

SEQ ID NO: 251704 - DNA, 25 bp, Artificial
  Probe
gacgcagttccagacagtgacccct

SEQ ID NO: 251705 - DNA, 25 bp, Artificial
  Probe
gagctgtgcacagagccagtgcttc

SEQ ID NO: 251706 - DNA, 25 bp, Artificial
  Probe
ttgagggaagcagctcccagctcat

SEQ ID NO: 251707 - DNA, 25 bp, Artificial
  Probe
cacagagccagtgcttccgatgttg

SEQ ID NO: 251708 - DNA, 25 bp, Artificial
  Probe
tcgctctcccggtaaggagatgacg

SEQ ID NO: 251709 - DNA, 25 bp, Artificial
  Probe
tgcacagagccagtgcttccgatgt

SEQ ID NO: 251710 - DNA, 25 bp, Artificial
  Probe
tcatcgcctctcagctttcctgtga

SEQ ID NO: 251711 - DNA, 25 bp, Artificial
  Probe
ctctcccggtaaggagatgacgcag

SEQ ID NO: 251712 - DNA, 25 bp, Artificial
  Probe
ccttgctcgtgtttgagggaagcag

SEQ ID NO: 251713 - DNA, 25 bp, Artificial
  Probe
tcagctttcctgtgagctggaagaa

SEQ ID NO: 251714 - DNA, 25 bp, Artificial
  Probe
gtgcacagagccagtgcttccgatg

SEQ ID NO: 251715 - DNA, 25 bp, Artificial
  Probe
ttgctcgtgtttgagggaagcagct

SEQ ID NO: 251716 - DNA, 25 bp, Artificial
  Probe
cgcctctcagctttcctgtgagctg

SEQ ID NO: 251717 - DNA, 25 bp, Artificial
  Probe
ctttcctgtgagctggaagaaggct

SEQ ID NO: 251718 - DNA, 25 bp, Artificial
  Probe
aggagatgacgcagttccagacagt

SEQ ID NO: 251719 - DNA, 25 bp, Artificial
  Probe
agatgacgcagttccagacagtgac

SEQ ID NO: 251720 - DNA, 25 bp, Artificial
  Probe
agctttcctgtgagctggaagaagg

SEQ ID NO: 251721 - DNA, 25 bp, Artificial
  Probe
tatttttcgctctcccggtaaggag

SEQ ID NO: 251722 - DNA, 25 bp, Artificial
  Probe
atgacgcagttccagacagtgaccc

SEQ ID NO: 251723 - DNA, 25 bp, Artificial
  Probe
ctcagctttcctgtgagctggaaga

SEQ ID NO: 251724 - DNA, 25 bp, Artificial
  Probe
gcacagagccagtgcttccgatgtt

SEQ ID NO: 251725 - DNA, 25 bp, Artificial
  Probe
tcgcctctcagctttcctgtgagct

SEQ ID NO: 251726 - DNA, 25 bp, Artificial
  Probe
tttcctgtgagctggaagaaggctg

SEQ ID NO: 251727 - DNA, 25 bp, Artificial
  Probe
gatgacgcagttccagacagtgacc

SEQ ID NO: 251728 - DNA, 25 bp, Artificial
  Probe
tgacgcagttccagacagtgacccc

SEQ ID NO: 251729 - DNA, 25 bp, Artificial
  Probe
tctcccggtaaggagatgacgcagt

SEQ ID NO: 251730 - DNA, 25 bp, Artificial
  Probe
cagctttcctgtgagctggaagaag

SEQ ID NO: 251731 - DNA, 25 bp, Artificial
  Probe
ggagctgtgcacagagccagtgctt

SEQ ID NO: 251732 - DNA, 25 bp, Artificial
  Probe
ccagtgcttccgatgttgtgggttt

SEQ ID NO: 251733 - DNA, 25 bp, Artificial
  Probe
gctctcccggtaaggagatgacgca

SEQ ID NO: 251734 - DNA, 25 bp, Artificial
  Probe
caggtcgtagtatcggacatggtag

SEQ ID NO: 251735 - DNA, 25 bp, Artificial
  Probe
agacatttctactcaaagctagcag

SEQ ID NO: 251736 - DNA, 25 bp, Artificial
  Probe
ctatggctccttctctaatgctccg

SEQ ID NO: 251737 - DNA, 25 bp, Artificial
  Probe
taaacaaattcaacaggtcgtagta

SEQ ID NO: 251738 - DNA, 25 bp, Artificial
  Probe
cttctctaatgctccgaggttcctc

SEQ ID NO: 251739 - DNA, 25 bp, Artificial
  Probe
ataggttgagcctattgttacctct

SEQ ID NO: 251740 - DNA, 25 bp, Artificial
  Probe
gtattaaacatgtcggttcactgag

SEQ ID NO: 251741 - DNA, 25 bp, Artificial
  Probe
tatctggtagtttcattttgctcag

SEQ ID NO: 251742 - DNA, 25 bp, Artificial
  Probe
taaacatgtcggttcactgagaata

SEQ ID NO: 251743 - DNA, 25 bp, Artificial
  Probe
aaagggcctagattgttgcttggca

SEQ ID NO: 251744 - DNA, 25 bp, Artificial
  Probe
aaggtgaacgacgtgtcttgcgtat

SEQ ID NO: 251745 - DNA, 25 bp, Artificial
  Probe
ctactggacttgagagtacaataaa

SEQ ID NO: 251746 - DNA, 25 bp, Artificial
  Probe
tgagaaatcagctcagttactgaaa

SEQ ID NO: 251747 - DNA, 25 bp, Artificial
  Probe
cagattagtccaggatagaactgat

SEQ ID NO: 251748 - DNA, 25 bp, Artificial
  Probe
ttggattttaacactcacaagcccg

SEQ ID NO: 251749 - DNA, 25 bp, Artificial
  Probe
tagcaggagggcaccatgagtcaca

SEQ ID NO: 251750 - DNA, 25 bp, Artificial
  Probe
cattcctgcaatatgaagccccaag

SEQ ID NO: 251751 - DNA, 25 bp, Artificial
  Probe
caaattcaacaggtcgtagtatcgg

SEQ ID NO: 251752 - DNA, 25 bp, Artificial
  Probe
tcacaagcccggtcttaatcagtag

SEQ ID NO: 251753 - DNA, 25 bp, Artificial
  Probe
atatgaagccccaagacactgtatt

SEQ ID NO: 251754 - DNA, 25 bp, Artificial
  Probe
tcagttactgaaagggcctagattg

SEQ ID NO: 251755 - DNA, 25 bp, Artificial
  Probe
tctaatgctccgaggttcctccaat

SEQ ID NO: 251756 - DNA, 25 bp, Artificial
  Probe
ttgttgcttggcattgattgctctg

SEQ ID NO: 251757 - DNA, 25 bp, Artificial
  Probe
tgctcaggcttatgaagatgctatc

SEQ ID NO: 251758 - DNA, 25 bp, Artificial
  Probe
tatgaagatgctatctactggactt

SEQ ID NO: 251759 - DNA, 25 bp, Artificial
  Probe
acgtgtcttgcgtattaaacatgtc

SEQ ID NO: 251760 - DNA, 25 bp, Artificial
  Probe
cgtattaaacatgtcggttcactga

SEQ ID NO: 251761 - DNA, 25 bp, Artificial
  Probe
gattttaacactcacaagcccggtc

SEQ ID NO: 251762 - DNA, 25 bp, Artificial
  Probe
cctgcaatatgaagccccaagacac

SEQ ID NO: 251763 - DNA, 25 bp, Artificial
  Probe
caaatggttctatggctccttctct

SEQ ID NO: 251764 - DNA, 25 bp, Artificial
  Probe
aagctagcagttggattttaacact

SEQ ID NO: 251765 - DNA, 25 bp, Artificial
  Probe
cactgtatttacttgtttgagctct

SEQ ID NO: 251766 - DNA, 25 bp, Artificial
  Probe
cttggcattgattgctctgagagta

SEQ ID NO: 251767 - DNA, 25 bp, Artificial
  Probe
cctagattgttgcttggcattgatt

SEQ ID NO: 251768 - DNA, 25 bp, Artificial
  Probe
ggtcttaatcagtagcactaaataa

SEQ ID NO: 251769 - DNA, 25 bp, Artificial
  Probe
tggttctatggctccttctctaatg

SEQ ID NO: 251770 - DNA, 25 bp, Artificial
  Probe
ccaagacactgtatttacttgtttg

SEQ ID NO: 251771 - DNA, 25 bp, Artificial
  Probe
gctccgaggttcctccaatactatc

SEQ ID NO: 251772 - DNA, 25 bp, Artificial
  Probe
ccatgagtcacaggtataggtgtat

SEQ ID NO: 251773 - DNA, 25 bp, Artificial
  Probe
ttttgctcaggcttatgaagatgct

SEQ ID NO: 251774 - DNA, 25 bp, Artificial
  Probe
aacgacgtgtcttgcgtattaaaca

SEQ ID NO: 251775 - DNA, 25 bp, Artificial
  Probe
ttgcgtattaaacatgtcggttcac

SEQ ID NO: 251776 - DNA, 25 bp, Artificial
  Probe
gccccaagacactgtatttacttgt

SEQ ID NO: 251777 - DNA, 25 bp, Artificial
  Probe
tcggttcactgagaataacatagat

SEQ ID NO: 251778 - DNA, 25 bp, Artificial
  Probe
cctctcagttttgtggcttcgttta

SEQ ID NO: 251779 - DNA, 25 bp, Artificial
  Probe
ttcattttgctcaggcttatgaaga

SEQ ID NO: 251780 - DNA, 25 bp, Artificial
  Probe
atccacagtcattgtaaattgtacg

SEQ ID NO: 251781 - DNA, 25 bp, Artificial
  Probe
gcttcgaacacgaacagccaaataa

SEQ ID NO: 251782 - DNA, 25 bp, Artificial
  Probe
aaattgctttggtagactgtttcac

SEQ ID NO: 251783 - DNA, 25 bp, Artificial
  Probe
atctacggttggtgcgaatgtagcc

SEQ ID NO: 251784 - DNA, 25 bp, Artificial
  Probe
acggttggtgcgaatgtagcctcta

SEQ ID NO: 251785 - DNA, 25 bp, Artificial
  Probe
gattctcaaacgacggcttcgaaca

SEQ ID NO: 251786 - DNA, 25 bp, Artificial
  Probe
aaatgcctctgtatagattggtgtc

SEQ ID NO: 251787 - DNA, 25 bp, Artificial
  Probe
cttacggagccaagcatctacggtt

SEQ ID NO: 251788 - DNA, 25 bp, Artificial
  Probe
ccttacggagccaagcatctacggt

SEQ ID NO: 251789 - DNA, 25 bp, Artificial
  Probe
gagccaagcatctacggttggtgcg

SEQ ID NO: 251790 - DNA, 25 bp, Artificial
  Probe
ctttggtagactgtttcactgtaaa

SEQ ID NO: 251791 - DNA, 25 bp, Artificial
  Probe
gggaacactacagaaatttggagac

SEQ ID NO: 251792 - DNA, 25 bp, Artificial
  Probe
ctgatcatcagattctcaaacgacg

SEQ ID NO: 251793 - DNA, 25 bp, Artificial
  Probe
taagaagacatactccttacggagc

SEQ ID NO: 251794 - DNA, 25 bp, Artificial
  Probe
tcaaacgacggcttcgaacacgaac

SEQ ID NO: 251795 - DNA, 25 bp, Artificial
  Probe
ttggtgcgaatgtagcctctaaaaa

SEQ ID NO: 251796 - DNA, 25 bp, Artificial
  Probe
aagcatctacggttggtgcgaatgt

SEQ ID NO: 251797 - DNA, 25 bp, Artificial
  Probe
aacgacggcttcgaacacgaacagc

SEQ ID NO: 251798 - DNA, 25 bp, Artificial
  Probe
tccacagtcattgtaaattgtacgt

SEQ ID NO: 251799 - DNA, 25 bp, Artificial
  Probe
tccccaaagttatcaactgtagaag

SEQ ID NO: 251800 - DNA, 25 bp, Artificial
  Probe
ccacagtcattgtaaattgtacgtt

SEQ ID NO: 251801 - DNA, 25 bp, Artificial
  Probe
tactccttacggagccaagcatcta

SEQ ID NO: 251802 - DNA, 25 bp, Artificial
  Probe
atgagttccccaaagttatcaactg

SEQ ID NO: 251803 - DNA, 25 bp, Artificial
  Probe
tgtccgtcatttaagaagacatact

SEQ ID NO: 251804 - DNA, 25 bp, Artificial
  Probe
tctggccaagtgattttaatggaac

SEQ ID NO: 251805 - DNA, 25 bp, Artificial
  Probe
tcatcagattctcaaacgacggctt

SEQ ID NO: 251806 - DNA, 25 bp, Artificial
  Probe
ttgaaacaatgagttccccaaagtt

SEQ ID NO: 251807 - DNA, 25 bp, Artificial
  Probe
tgctttggtagactgtttcactgta

SEQ ID NO: 251808 - DNA, 25 bp, Artificial
  Probe
agccaagcatctacggttggtgcga

SEQ ID NO: 251809 - DNA, 25 bp, Artificial
  Probe
cggagccaagcatctacggttggtg

SEQ ID NO: 251810 - DNA, 25 bp, Artificial
  Probe
gacatactccttacggagccaagca

SEQ ID NO: 251811 - DNA, 25 bp, Artificial
  Probe
agaagacatactccttacggagcca

SEQ ID NO: 251812 - DNA, 25 bp, Artificial
  Probe
agttccccaaagttatcaactgtag

SEQ ID NO: 251813 - DNA, 25 bp, Artificial
  Probe
gaaacaatgagttccccaaagttat

SEQ ID NO: 251814 - DNA, 25 bp, Artificial
  Probe
ccaaagttatcaactgtagaagtaa

SEQ ID NO: 251815 - DNA, 25 bp, Artificial
  Probe
tcccatcaacatatctggccaagtg

SEQ ID NO: 251816 - DNA, 25 bp, Artificial
  Probe
atgtccgtcatttaagaagacatac

SEQ ID NO: 251817 - DNA, 25 bp, Artificial
  Probe
acactacagaaatttggagacttct

SEQ ID NO: 251818 - DNA, 25 bp, Artificial
  Probe
catcaacatatctggccaagtgatt

SEQ ID NO: 251819 - DNA, 25 bp, Artificial
  Probe
ttatgtccgtcatttaagaagacat

SEQ ID NO: 251820 - DNA, 25 bp, Artificial
  Probe
atcagattctcaaacgacggcttcg

SEQ ID NO: 251821 - DNA, 25 bp, Artificial
  Probe
acatatctggccaagtgattttaat

SEQ ID NO: 251822 - DNA, 25 bp, Artificial
  Probe
tggtgcgaatgtagcctctaaaaaa

SEQ ID NO: 251823 - DNA, 25 bp, Artificial
  Probe
atttaagaagacatactccttacgg

SEQ ID NO: 251824 - DNA, 25 bp, Artificial
  Probe
tgaaacaatgagttccccaaagtta

SEQ ID NO: 251825 - DNA, 25 bp, Artificial
  Probe
catatctggccaagtgattttaatg

SEQ ID NO: 251826 - DNA, 25 bp, Artificial
  Probe
gtagaagaagctcctcatcttgtga

SEQ ID NO: 251827 - DNA, 25 bp, Artificial
  Probe
tggcatgccctgaggaaatgcttgt

SEQ ID NO: 251828 - DNA, 25 bp, Artificial
  Probe
gcttccttgtagaagaagctcctca

SEQ ID NO: 251829 - DNA, 25 bp, Artificial
  Probe
ggcatgccctgaggaaatgcttgtg

SEQ ID NO: 251830 - DNA, 25 bp, Artificial
  Probe
aagctcctcatcttgtgagcctctt

SEQ ID NO: 251831 - DNA, 25 bp, Artificial
  Probe
catgccctgaggaaatgcttgtggc

SEQ ID NO: 251832 - DNA, 25 bp, Artificial
  Probe
agaagaagctcctcatcttgtgagc

SEQ ID NO: 251833 - DNA, 25 bp, Artificial
  Probe
aaatgcttgtggcttccttgtagaa

SEQ ID NO: 251834 - DNA, 25 bp, Artificial
  Probe
ggaaatgcttgtggcttccttgtag

SEQ ID NO: 251835 - DNA, 25 bp, Artificial
  Probe
agctcctcatcttgtgagcctctta

SEQ ID NO: 251836 - DNA, 25 bp, Artificial
  Probe
aatgcttgtggcttccttgtagaag

SEQ ID NO: 251837 - DNA, 25 bp, Artificial
  Probe
tgtggcttccttgtagaagaagctc

SEQ ID NO: 251838 - DNA, 25 bp, Artificial
  Probe
tagaagaagctcctcatcttgtgag

SEQ ID NO: 251839 - DNA, 25 bp, Artificial
  Probe
gcatgccctgaggaaatgcttgtgg

SEQ ID NO: 251840 - DNA, 25 bp, Artificial
  Probe
cttccttgtagaagaagctcctcat

SEQ ID NO: 251841 - DNA, 25 bp, Artificial
  Probe
ggcttccttgtagaagaagctcctc

SEQ ID NO: 251842 - DNA, 25 bp, Artificial
  Probe
tgtggcatgccctgaggaaatgctt

SEQ ID NO: 251843 - DNA, 25 bp, Artificial
  Probe
tggcttccttgtagaagaagctcct

SEQ ID NO: 251844 - DNA, 25 bp, Artificial
  Probe
atgccctgaggaaatgcttgtggct

SEQ ID NO: 251845 - DNA, 25 bp, Artificial
  Probe
agaagctcctcatcttgtgagcctc

SEQ ID NO: 251846 - DNA, 25 bp, Artificial
  Probe
gaagaagctcctcatcttgtgagcc

SEQ ID NO: 251847 - DNA, 25 bp, Artificial
  Probe
ttgtggcttccttgtagaagaagct

SEQ ID NO: 251848 - DNA, 25 bp, Artificial
  Probe
gaaatgcttgtggcttccttgtaga

SEQ ID NO: 251849 - DNA, 25 bp, Artificial
  Probe
ttgtggcatgccctgaggaaatgct

SEQ ID NO: 251850 - DNA, 25 bp, Artificial
  Probe
gaagctcctcatcttgtgagcctct

SEQ ID NO: 251851 - DNA, 25 bp, Artificial
  Probe
gcttgtggcttccttgtagaagaag

SEQ ID NO: 251852 - DNA, 25 bp, Artificial
  Probe
atgcttgtggcttccttgtagaaga

SEQ ID NO: 251853 - DNA, 25 bp, Artificial
  Probe
ccctgaggaaatgcttgtggcttcc

SEQ ID NO: 251854 - DNA, 25 bp, Artificial
  Probe
cttgtggcttccttgtagaagaagc

SEQ ID NO: 251855 - DNA, 25 bp, Artificial
  Probe
aagaagctcctcatcttgtgagcct

SEQ ID NO: 251856 - DNA, 25 bp, Artificial
  Probe
gtggcttccttgtagaagaagctcc

SEQ ID NO: 251857 - DNA, 25 bp, Artificial
  Probe
tgccctgaggaaatgcttgtggctt

SEQ ID NO: 251858 - DNA, 25 bp, Artificial
  Probe
tgtagaagaagctcctcatcttgtg

SEQ ID NO: 251859 - DNA, 25 bp, Artificial
  Probe
tgcttgtggcttccttgtagaagaa

SEQ ID NO: 251860 - DNA, 25 bp, Artificial
  Probe
gccctgaggaaatgcttgtggcttc

SEQ ID NO: 251861 - DNA, 25 bp, Artificial
  Probe
ttccttgtagaagaagctcctcatc

SEQ ID NO: 251862 - DNA, 25 bp, Artificial
  Probe
ccattcatcgagtgccatggcagag

SEQ ID NO: 251863 - DNA, 25 bp, Artificial
  Probe
agtgccatggcagaggaacgtgcaa

SEQ ID NO: 251864 - DNA, 25 bp, Artificial
  Probe
tggattggctattcctttgtgatgc

SEQ ID NO: 251865 - DNA, 25 bp, Artificial
  Probe
acagcttttggctcgccaccataga

SEQ ID NO: 251866 - DNA, 25 bp, Artificial
  Probe
tcccgggtcctgtctggaagagttt

SEQ ID NO: 251867 - DNA, 25 bp, Artificial
  Probe
tggtcctcactgtggattggctatt

SEQ ID NO: 251868 - DNA, 25 bp, Artificial
  Probe
catcgagtgccatggcagaggaacg

SEQ ID NO: 251869 - DNA, 25 bp, Artificial
  Probe
gtgatgcacaccagcgctggtgctg

SEQ ID NO: 251870 - DNA, 25 bp, Artificial
  Probe
cgggtcctgtctggaagagtttaga

SEQ ID NO: 251871 - DNA, 25 bp, Artificial
  Probe
gccttacagggatttgcgtaactaa

SEQ ID NO: 251872 - DNA, 25 bp, Artificial
  Probe
tgaaaaccgtaaagtgccttacagg

SEQ ID NO: 251873 - DNA, 25 bp, Artificial
  Probe
cacgccgtccaccttgaaggcaggg

SEQ ID NO: 251874 - DNA, 25 bp, Artificial
  Probe
ggaacgtgcaattactacgcgaatg

SEQ ID NO: 251875 - DNA, 25 bp, Artificial
  Probe
ctctgtttgctgaaggagaaggaca

SEQ ID NO: 251876 - DNA, 25 bp, Artificial
  Probe
ctcactgtggattggctattccttt

SEQ ID NO: 251877 - DNA, 25 bp, Artificial
  Probe
accagcgctggtgctgaaggttctg

SEQ ID NO: 251878 - DNA, 25 bp, Artificial
  Probe
ctgtggattggctattcctttgtga

SEQ ID NO: 251879 - DNA, 25 bp, Artificial
  Probe
tgccccaacggttggtcctcactgt

SEQ ID NO: 251880 - DNA, 25 bp, Artificial
  Probe
tgtccactatgaaaaccgtaaagtg

SEQ ID NO: 251881 - DNA, 25 bp, Artificial
  Probe
aagtgccccattcatcgagtgccat

SEQ ID NO: 251882 - DNA, 25 bp, Artificial
  Probe
gcacaccagcgctggtgctgaaggt

SEQ ID NO: 251883 - DNA, 25 bp, Artificial
  Probe
cgtgcaattactacgcgaatgctta

SEQ ID NO: 251884 - DNA, 25 bp, Artificial
  Probe
tggcctctgtttgctgaaggagaag

SEQ ID NO: 251885 - DNA, 25 bp, Artificial
  Probe
ttttggctcgccaccatagagagaa

SEQ ID NO: 251886 - DNA, 25 bp, Artificial
  Probe
agctgcgcacgcatgtcagccgctg

SEQ ID NO: 251887 - DNA, 25 bp, Artificial
  Probe
aaagtgccttacagggatttgcgta

SEQ ID NO: 251888 - DNA, 25 bp, Artificial
  Probe
actacgcgaatgcttacagcttttg

SEQ ID NO: 251889 - DNA, 25 bp, Artificial
  Probe
gcatctcccgggtcctgtctggaag

SEQ ID NO: 251890 - DNA, 25 bp, Artificial
  Probe
tccactatgaaaaccgtaaagtgcc

SEQ ID NO: 251891 - DNA, 25 bp, Artificial
  Probe
actgtccactatgaaaaccgtaaag

SEQ ID NO: 251892 - DNA, 25 bp, Artificial
  Probe
gccgccgtcacaacatggtgctact

SEQ ID NO: 251893 - DNA, 25 bp, Artificial
  Probe
gcctctgtttgctgaaggagaagga

SEQ ID NO: 251894 - DNA, 25 bp, Artificial
  Probe
ccgggtcctgtctggaagagtttag

SEQ ID NO: 251895 - DNA, 25 bp, Artificial
  Probe
tcatcgagtgccatggcagaggaac

SEQ ID NO: 251896 - DNA, 25 bp, Artificial
  Probe
ccgtaaagtgccttacagggatttg

SEQ ID NO: 251897 - DNA, 25 bp, Artificial
  Probe
ccaccatagagagaagcgagatgtt

SEQ ID NO: 251898 - DNA, 25 bp, Artificial
  Probe
aattactacgcgaatgcttacagct

SEQ ID NO: 251899 - DNA, 25 bp, Artificial
  Probe
tagaagtgccccattcatcgagtgc

SEQ ID NO: 251900 - DNA, 25 bp, Artificial
  Probe
ttggcctctgtttgctgaaggagaa

SEQ ID NO: 251901 - DNA, 25 bp, Artificial
  Probe
ccccaacggttggtcctcactgtgg

SEQ ID NO: 251902 - DNA, 25 bp, Artificial
  Probe
ccatggcagaggaacgtgcaattac

SEQ ID NO: 251903 - DNA, 25 bp, Artificial
  Probe
gcttacagcttttggctcgccacca

SEQ ID NO: 251904 - DNA, 25 bp, Artificial
  Probe
tgccttacagggatttgcgtaacta

SEQ ID NO: 251905 - DNA, 25 bp, Artificial
  Probe
aaggacagacagctacgagcctccc

SEQ ID NO: 251906 - DNA, 25 bp, Artificial
  Probe
gttaacagcaacgaaccctagaatt

SEQ ID NO: 251907 - DNA, 25 bp, Artificial
  Probe
cctgtctggaagagtttagaagtgc

SEQ ID NO: 251908 - DNA, 25 bp, Artificial
  Probe
tctgcactggccaggcttatgacct

SEQ ID NO: 251909 - DNA, 25 bp, Artificial
  Probe
aggatcaccactgtagcaccccatg

SEQ ID NO: 251910 - DNA, 25 bp, Artificial
  Probe
atgaaatgaatcatatcctgccctg

SEQ ID NO: 251911 - DNA, 25 bp, Artificial
  Probe
tgtcttcctgggagccaaaccctgc

SEQ ID NO: 251912 - DNA, 25 bp, Artificial
  Probe
actggccaggcttatgacctccagc

SEQ ID NO: 251913 - DNA, 25 bp, Artificial
  Probe
tataggaggatcaccactgtagcac

SEQ ID NO: 251914 - DNA, 25 bp, Artificial
  Probe
ccctgtctgcactggccaggcttat

SEQ ID NO: 251915 - DNA, 25 bp, Artificial
  Probe
gtaccagtacatagcccaagatgtg

SEQ ID NO: 251916 - DNA, 25 bp, Artificial
  Probe
gccttgtgtgcatgaaatgaatcat

SEQ ID NO: 251917 - DNA, 25 bp, Artificial
  Probe
ccttgattaccctgtctgcactggc

SEQ ID NO: 251918 - DNA, 25 bp, Artificial
  Probe
tagcccaagatgtggatgagctgag

SEQ ID NO: 251919 - DNA, 25 bp, Artificial
  Probe
ttcctgggagccaaaccctgccagt

SEQ ID NO: 251920 - DNA, 25 bp, Artificial
  Probe
ctgtagcaccccatgcctggtgctg

SEQ ID NO: 251921 - DNA, 25 bp, Artificial
  Probe
catatcctgccctgtgagctaagtg

SEQ ID NO: 251922 - DNA, 25 bp, Artificial
  Probe
gctgccttcctatgggttgaattgc

SEQ ID NO: 251923 - DNA, 25 bp, Artificial
  Probe
gggccctgtgtataggaggatcacc

SEQ ID NO: 251924 - DNA, 25 bp, Artificial
  Probe
ccaaaccctgccagtgggagccttg

SEQ ID NO: 251925 - DNA, 25 bp, Artificial
  Probe
ccagtgggagccttgattaccctgt

SEQ ID NO: 251926 - DNA, 25 bp, Artificial
  Probe
aggtctctttccaggaaactatgtg

SEQ ID NO: 251927 - DNA, 25 bp, Artificial
  Probe
aagtgctgggcactgcccagggtta

SEQ ID NO: 251928 - DNA, 25 bp, Artificial
  Probe
tcccagctgccttgtgtgcatgaaa

SEQ ID NO: 251929 - DNA, 25 bp, Artificial
  Probe
catcactgaggcaataaacatatgt

SEQ ID NO: 251930 - DNA, 25 bp, Artificial
  Probe
ggagccttgattaccctgtctgcac

SEQ ID NO: 251931 - DNA, 25 bp, Artificial
  Probe
tgtagcaccccatgcctggtgctgc

SEQ ID NO: 251932 - DNA, 25 bp, Artificial
  Probe
caggcttatgacctccagcccagtg

SEQ ID NO: 251933 - DNA, 25 bp, Artificial
  Probe
acacacctgtctgcttgtcttcctg

SEQ ID NO: 251934 - DNA, 25 bp, Artificial
  Probe
gccaggaaggtctctttccaggaaa

SEQ ID NO: 251935 - DNA, 25 bp, Artificial
  Probe
tgaatcatatcctgccctgtgagct

SEQ ID NO: 251936 - DNA, 25 bp, Artificial
  Probe
ttgcatggccaggaaggtctctttc

SEQ ID NO: 251937 - DNA, 25 bp, Artificial
  Probe
tgagatcctgatggaagattcttct

SEQ ID NO: 251938 - DNA, 25 bp, Artificial
  Probe
ccttcctatgggttgaattgctatc

SEQ ID NO: 251939 - DNA, 25 bp, Artificial
  Probe
catgcctggtgctgccttcctatgg

SEQ ID NO: 251940 - DNA, 25 bp, Artificial
  Probe
cctgccagtgggagccttgattacc

SEQ ID NO: 251941 - DNA, 25 bp, Artificial
  Probe
tgtgagctaagtgctgggcactgcc

SEQ ID NO: 251942 - DNA, 25 bp, Artificial
  Probe
cactggccaggcttatgacctccag

SEQ ID NO: 251943 - DNA, 25 bp, Artificial
  Probe
ttgagatcctgatggaagattcttc

SEQ ID NO: 251944 - DNA, 25 bp, Artificial
  Probe
ccatgcctggtgctgccttcctatg

SEQ ID NO: 251945 - DNA, 25 bp, Artificial
  Probe
gccctgtgtataggaggatcaccac

SEQ ID NO: 251946 - DNA, 25 bp, Artificial
  Probe
taagtgctgggcactgcccagggtt

SEQ ID NO: 251947 - DNA, 25 bp, Artificial
  Probe
cctgggagccaaaccctgccagtgg

SEQ ID NO: 251948 - DNA, 25 bp, Artificial
  Probe
ggagccaaaccctgccagtgggagc

SEQ ID NO: 251949 - DNA, 25 bp, Artificial
  Probe
ttcctatgggttgaattgctatcta

SEQ ID NO: 251950 - DNA, 25 bp, Artificial
  Probe
ggttgcatggccaggaaggtctctt

SEQ ID NO: 251951 - DNA, 25 bp, Artificial
  Probe
gcttatgacctccagcccagtgggg

SEQ ID NO: 251952 - DNA, 25 bp, Artificial
  Probe
aaaccctgccagtgggagccttgat

SEQ ID NO: 251953 - DNA, 25 bp, Artificial
  Probe
agtacatagcccaagatgtggatga

SEQ ID NO: 251954 - DNA, 25 bp, Artificial
  Probe
acccggctggaatcgaattcctcct

SEQ ID NO: 251955 - DNA, 25 bp, Artificial
  Probe
caaacgctccaagttcaagaagctg

SEQ ID NO: 251956 - DNA, 25 bp, Artificial
  Probe
tacacgtcgtggtatccctcagcgc

SEQ ID NO: 251957 - DNA, 25 bp, Artificial
  Probe
gaatcgaattcctcctctgggaagg

SEQ ID NO: 251958 - DNA, 25 bp, Artificial
  Probe
tccaagttcaagaagctgatgaagc

SEQ ID NO: 251959 - DNA, 25 bp, Artificial
  Probe
attcgcacgccctgggccggaagga

SEQ ID NO: 251960 - DNA, 25 bp, Artificial
  Probe
gtaccacccggctggaatcgaattc

SEQ ID NO: 251961 - DNA, 25 bp, Artificial
  Probe
tatgcagcagcctcaactgatgtga

SEQ ID NO: 251962 - DNA, 25 bp, Artificial
  Probe
acgctccaagttcaagaagctgatg

SEQ ID NO: 251963 - DNA, 25 bp, Artificial
  Probe
tccctcagcgcaccaagaagctatg

SEQ ID NO: 251964 - DNA, 25 bp, Artificial
  Probe
gcagcagcctcaactgatgtgaggt

SEQ ID NO: 251965 - DNA, 25 bp, Artificial
  Probe
gcagcctcaactgatgtgaggttat

SEQ ID NO: 251966 - DNA, 25 bp, Artificial
  Probe
tggcagggccttgtctgccggctcc

SEQ ID NO: 251967 - DNA, 25 bp, Artificial
  Probe
caagttcaagaagctgatgaagcaa

SEQ ID NO: 251968 - DNA, 25 bp, Artificial
  Probe
gctggaatcgaattcctcctctggg

SEQ ID NO: 251969 - DNA, 25 bp, Artificial
  Probe
acacgtcgtggtatccctcagcgca

SEQ ID NO: 251970 - DNA, 25 bp, Artificial
  Probe
acgtccccagctacacgtcgtggta

SEQ ID NO: 251971 - DNA, 25 bp, Artificial
  Probe
cagcctcaactgatgtgaggttatc

SEQ ID NO: 251972 - DNA, 25 bp, Artificial
  Probe
aagctatgcagcagcctcaactgat

SEQ ID NO: 251973 - DNA, 25 bp, Artificial
  Probe
tcgtggtatccctcagcgcaccaag

SEQ ID NO: 251974 - DNA, 25 bp, Artificial
  Probe
cgcaccaagaagctatgcagcagcc

SEQ ID NO: 251975 - DNA, 25 bp, Artificial
  Probe
taccacccggctggaatcgaattcc

SEQ ID NO: 251976 - DNA, 25 bp, Artificial
  Probe
atgcagcagcctcaactgatgtgag

SEQ ID NO: 251977 - DNA, 25 bp, Artificial
  Probe
ccaagttcaagaagctgatgaagca

SEQ ID NO: 251978 - DNA, 25 bp, Artificial
  Probe
tgcagcagcctcaactgatgtgagg

SEQ ID NO: 251979 - DNA, 25 bp, Artificial
  Probe
cgtggtatccctcagcgcaccaaga

SEQ ID NO: 251980 - DNA, 25 bp, Artificial
  Probe
accacccggctggaatcgaattcct

SEQ ID NO: 251981 - DNA, 25 bp, Artificial
  Probe
tcagcgcaccaagaagctatgcagc

SEQ ID NO: 251982 - DNA, 25 bp, Artificial
  Probe
aatggcagggccttgtctgccggct

SEQ ID NO: 251983 - DNA, 25 bp, Artificial
  Probe
ggaatcgaattcctcctctgggaag

SEQ ID NO: 251984 - DNA, 25 bp, Artificial
  Probe
ctcaactgatgtgaggttatcagtt

SEQ ID NO: 251985 - DNA, 25 bp, Artificial
  Probe
agaagctatgcagcagcctcaactg

SEQ ID NO: 251986 - DNA, 25 bp, Artificial
  Probe
tggaatcgaattcctcctctgggaa

SEQ ID NO: 251987 - DNA, 25 bp, Artificial
  Probe
cagcgcaccaagaagctatgcagca

SEQ ID NO: 251988 - DNA, 25 bp, Artificial
  Probe
cctcagcgcaccaagaagctatgca

SEQ ID NO: 251989 - DNA, 25 bp, Artificial
  Probe
gaggttatcagttcgcactcacccg

SEQ ID NO: 251990 - DNA, 25 bp, Artificial
  Probe
gtccccagctacacgtcgtggtatc

SEQ ID NO: 251991 - DNA, 25 bp, Artificial
  Probe
agctacacgtcgtggtatccctcag

SEQ ID NO: 251992 - DNA, 25 bp, Artificial
  Probe
gtggtatccctcagcgcaccaagaa

SEQ ID NO: 251993 - DNA, 25 bp, Artificial
  Probe
cgctccaagttcaagaagctgatga

SEQ ID NO: 251994 - DNA, 25 bp, Artificial
  Probe
tgaggttatcagttcgcactcaccc

SEQ ID NO: 251995 - DNA, 25 bp, Artificial
  Probe
ccaagaagctatgcagcagcctcaa

SEQ ID NO: 251996 - DNA, 25 bp, Artificial
  Probe
cagctacacgtcgtggtatccctca

SEQ ID NO: 251997 - DNA, 25 bp, Artificial
  Probe
agcagcctcaactgatgtgaggtta

SEQ ID NO: 251998 - DNA, 25 bp, Artificial
  Probe
aaacgctccaagttcaagaagctga

SEQ ID NO: 251999 - DNA, 25 bp, Artificial
  Probe
cacacagactcaggtcaagatatgg

SEQ ID NO: 252000 - DNA, 25 bp, Artificial
  Probe
tgagcctgggctttcccatgaaggg

SEQ ID NO: 252001 - DNA, 25 bp, Artificial
  Probe
ggcctgccttcctgggactagatgg

SEQ ID NO: 252002 - DNA, 25 bp, Artificial
  Probe
ggggtacaagtacctctgaggcagc

SEQ ID NO: 252003 - DNA, 25 bp, Artificial
  Probe
ctgaatttccccacaagtgggcacc

SEQ ID NO: 252004 - DNA, 25 bp, Artificial
  Probe
caggctgcacttggtgtgaagtagc

SEQ ID NO: 252005 - DNA, 25 bp, Artificial
  Probe
tcctgggactagatggcacccagcc

SEQ ID NO: 252006 - DNA, 25 bp, Artificial
  Probe
acaagtacctctgaggcagcagctg

SEQ ID NO: 252007 - DNA, 25 bp, Artificial
  Probe
gggtacaagtacctctgaggcagca

SEQ ID NO: 252008 - DNA, 25 bp, Artificial
  Probe
acccccatttggtgctaacagctct

SEQ ID NO: 252009 - DNA, 25 bp, Artificial
  Probe
ctgggctttcccatgaagggcattt

SEQ ID NO: 252010 - DNA, 25 bp, Artificial
  Probe
atccttcaggctgcacttggtgtga

SEQ ID NO: 252011 - DNA, 25 bp, Artificial
  Probe
cctgtttggacttagtgcctgcctg

SEQ ID NO: 252012 - DNA, 25 bp, Artificial
  Probe
acctctgaggcagcagctggtctgg

SEQ ID NO: 252013 - DNA, 25 bp, Artificial
  Probe
ttagtgcctgcctggcagtcgacgg

SEQ ID NO: 252014 - DNA, 25 bp, Artificial
  Probe
acccctgtttggacttagtgcctgc

SEQ ID NO: 252015 - DNA, 25 bp, Artificial
  Probe
aggctgcacttggtgtgaagtagct

SEQ ID NO: 252016 - DNA, 25 bp, Artificial
  Probe
gagcctgggctttcccatgaagggc

SEQ ID NO: 252017 - DNA, 25 bp, Artificial
  Probe
ttgtgcctttagtaaacactgtgct

SEQ ID NO: 252018 - DNA, 25 bp, Artificial
  Probe
tacctctgaggcagcagctggtctg

SEQ ID NO: 252019 - DNA, 25 bp, Artificial
  Probe
tgaatttccccacaagtgggcaccc

SEQ ID NO: 252020 - DNA, 25 bp, Artificial
  Probe
gaatttccccacaagtgggcaccca

SEQ ID NO: 252021 - DNA, 25 bp, Artificial
  Probe
cttcctgggactagatggcacccag

SEQ ID NO: 252022 - DNA, 25 bp, Artificial
  Probe
cacttggtgtgaagtagctgcctct

SEQ ID NO: 252023 - DNA, 25 bp, Artificial
  Probe
ggctttcccatgaagggcattttgg

SEQ ID NO: 252024 - DNA, 25 bp, Artificial
  Probe
gctttcccatgaagggcattttgga

SEQ ID NO: 252025 - DNA, 25 bp, Artificial
  Probe
gctgcacttggtgtgaagtagctgc

SEQ ID NO: 252026 - DNA, 25 bp, Artificial
  Probe
ccctgtttggacttagtgcctgcct

SEQ ID NO: 252027 - DNA, 25 bp, Artificial
  Probe
ccaggcctgccttcctgggactaga

SEQ ID NO: 252028 - DNA, 25 bp, Artificial
  Probe
tcaggctgcacttggtgtgaagtag

SEQ ID NO: 252029 - DNA, 25 bp, Artificial
  Probe
ttcctgggactagatggcacccagc

SEQ ID NO: 252030 - DNA, 25 bp, Artificial
  Probe
caagtacctctgaggcagcagctgg

SEQ ID NO: 252031 - DNA, 25 bp, Artificial
  Probe
ctcttctgagcctgggctttcccat

SEQ ID NO: 252032 - DNA, 25 bp, Artificial
  Probe
tcctctggcggcagtcctatgatgg

SEQ ID NO: 252033 - DNA, 25 bp, Artificial
  Probe
acttggtgtgaagtagctgcctctc

SEQ ID NO: 252034 - DNA, 25 bp, Artificial
  Probe
cactttgtgcctttagtaaacactg

SEQ ID NO: 252035 - DNA, 25 bp, Artificial
  Probe
ggacttagtgcctgcctggcagtcg

SEQ ID NO: 252036 - DNA, 25 bp, Artificial
  Probe
cccatgaagggcattttggagaagg

SEQ ID NO: 252037 - DNA, 25 bp, Artificial
  Probe
tgcacttggtgtgaagtagctgcct

SEQ ID NO: 252038 - DNA, 25 bp, Artificial
  Probe
ctgagcctgggctttcccatgaagg

SEQ ID NO: 252039 - DNA, 25 bp, Artificial
  Probe
tccttcaggctgcacttggtgtgaa

SEQ ID NO: 252040 - DNA, 25 bp, Artificial
  Probe
cacccctgtttggacttagtgcctg

SEQ ID NO: 252041 - DNA, 25 bp, Artificial
  Probe
cctctggcggcagtcctatgatggg

SEQ ID NO: 252042 - DNA, 25 bp, Artificial
  Probe
ggtgcccaggcctgccttcctggga

SEQ ID NO: 252043 - DNA, 25 bp, Artificial
  Probe
gcctttagtaaacactgtgctttgt

SEQ ID NO: 252044 - DNA, 25 bp, Artificial
  Probe
gtttggacttagtgcctgcctggca

SEQ ID NO: 252045 - DNA, 25 bp, Artificial
  Probe
ccagcctgaatttccccacaagtgg

SEQ ID NO: 252046 - DNA, 25 bp, Artificial
  Probe
tcccaggatcagacctcgggagatg

SEQ ID NO: 252047 - DNA, 25 bp, Artificial
  Probe
tcagacctcgggagatggaccagga

SEQ ID NO: 252048 - DNA, 25 bp, Artificial
  Probe
ccctcctgtctggtctgtttgtata

SEQ ID NO: 252049 - DNA, 25 bp, Artificial
  Probe
gactgacccacgtgggctttagact

SEQ ID NO: 252050 - DNA, 25 bp, Artificial
  Probe
tgtgctgtgggtttccctcttcctg

SEQ ID NO: 252051 - DNA, 25 bp, Artificial
  Probe
tgtctgtggccctgtagtcctgagc

SEQ ID NO: 252052 - DNA, 25 bp, Artificial
  Probe
gctgagctcggcttgagatgccact

SEQ ID NO: 252053 - DNA, 25 bp, Artificial
  Probe
cagacctcgggagatggaccaggac

SEQ ID NO: 252054 - DNA, 25 bp, Artificial
  Probe
cctgtggaatctgcagaaatcgatg

SEQ ID NO: 252055 - DNA, 25 bp, Artificial
  Probe
tgtttgctgtgctgtgggtttccct

SEQ ID NO: 252056 - DNA, 25 bp, Artificial
  Probe
ccagcgcctgtttgctgtgctgtgg

SEQ ID NO: 252057 - DNA, 25 bp, Artificial
  Probe
tagtcctgagccagcatctgctgag

SEQ ID NO: 252058 - DNA, 25 bp, Artificial
  Probe
cctgtagtcctgagccagcatctgc

SEQ ID NO: 252059 - DNA, 25 bp, Artificial
  Probe
aaatgtgctggaaggcctaagcttc

SEQ ID NO: 252060 - DNA, 25 bp, Artificial
  Probe
gccagcatctgctgagctcggcttg

SEQ ID NO: 252061 - DNA, 25 bp, Artificial
  Probe
cccgggtgactgacccacgtgggct

SEQ ID NO: 252062 - DNA, 25 bp, Artificial
  Probe
tccccagcgcctgtttgctgtgctg

SEQ ID NO: 252063 - DNA, 25 bp, Artificial
  Probe
gcttgagatgccactttctcaaatg

SEQ ID NO: 252064 - DNA, 25 bp, Artificial
  Probe
tagactcaggatgtacagagtcagc

SEQ ID NO: 252065 - DNA, 25 bp, Artificial
  Probe
tggtaaacttccttccttgtgagtt

SEQ ID NO: 252066 - DNA, 25 bp, Artificial
  Probe
tgcctttcccaggatcagacctcgg

SEQ ID NO: 252067 - DNA, 25 bp, Artificial
  Probe
ggaatctgcagaaatcgatgtgaca

SEQ ID NO: 252068 - DNA, 25 bp, Artificial
  Probe
ctcctcatgaggtcccgggtgactg

SEQ ID NO: 252069 - DNA, 25 bp, Artificial
  Probe
tgtgtttcctgcacttcctcactgc

SEQ ID NO: 252070 - DNA, 25 bp, Artificial
  Probe
ttctgcatgattgattagctcataa

SEQ ID NO: 252071 - DNA, 25 bp, Artificial
  Probe
ctgtgtttcctgcacttcctcactg

SEQ ID NO: 252072 - DNA, 25 bp, Artificial
  Probe
cttggtaaacttccttccttgtgag

SEQ ID NO: 252073 - DNA, 25 bp, Artificial
  Probe
gtcctgagccagcatctgctgagct

SEQ ID NO: 252074 - DNA, 25 bp, Artificial
  Probe
ctctgagaacaaacttggtaaactt

SEQ ID NO: 252075 - DNA, 25 bp, Artificial
  Probe
ttctggaaataccaccgagtcccct

SEQ ID NO: 252076 - DNA, 25 bp, Artificial
  Probe
caggatcagacctcgggagatggac

SEQ ID NO: 252077 - DNA, 25 bp, Artificial
  Probe
tgctggaaggcctaagcttctggaa

SEQ ID NO: 252078 - DNA, 25 bp, Artificial
  Probe
atctgcagaaatcgatgtgacatac

SEQ ID NO: 252079 - DNA, 25 bp, Artificial
  Probe
atgtgacttatgacttatctttggc

SEQ ID NO: 252080 - DNA, 25 bp, Artificial
  Probe
cgcctgtttgctgtgctgtgggttt

SEQ ID NO: 252081 - DNA, 25 bp, Artificial
  Probe
cccagcacctttttctgcatgattg

SEQ ID NO: 252082 - DNA, 25 bp, Artificial
  Probe
tgaggtcccgggtgactgacccacg

SEQ ID NO: 252083 - DNA, 25 bp, Artificial
  Probe
gggcacttgctgatgcttctcccca

SEQ ID NO: 252084 - DNA, 25 bp, Artificial
  Probe
gccctgagtcttgaacacatacact

SEQ ID NO: 252085 - DNA, 25 bp, Artificial
  Probe
agtcagccctgagtcttgaacacat

SEQ ID NO: 252086 - DNA, 25 bp, Artificial
  Probe
ctgtgctgtgggtttccctcttcct

SEQ ID NO: 252087 - DNA, 25 bp, Artificial
  Probe
caaccagggcacttgctgatgcttc

SEQ ID NO: 252088 - DNA, 25 bp, Artificial
  Probe
cttatctttggcttctctgagaaca

SEQ ID NO: 252089 - DNA, 25 bp, Artificial
  Probe
acccacgtgggctttagactcagga

SEQ ID NO: 252090 - DNA, 25 bp, Artificial
  Probe
gcatctgctgagctcggcttgagat

SEQ ID NO: 252091 - DNA, 25 bp, Artificial
  Probe
gacttatgacttatctttggcttct

SEQ ID NO: 252092 - DNA, 25 bp, Artificial
  Probe
gctccatcttctctccaagtccctt

SEQ ID NO: 252093 - DNA, 25 bp, Artificial
  Probe
aggtcaagatggcctgagcaaggtc

SEQ ID NO: 252094 - DNA, 25 bp, Artificial
  Probe
aagatggcctgagcaaggtctgcag

SEQ ID NO: 252095 - DNA, 25 bp, Artificial
  Probe
gaggtcaagatggcctgagcaaggt

SEQ ID NO: 252096 - DNA, 25 bp, Artificial
  Probe
tgcagctccatcttctctccaagtc

SEQ ID NO: 252097 - DNA, 25 bp, Artificial
  Probe
agatggcctgagcaaggtctgcagc

SEQ ID NO: 252098 - DNA, 25 bp, Artificial
  Probe
gagcaaggtctgcagctccatcttc

SEQ ID NO: 252099 - DNA, 25 bp, Artificial
  Probe
ggtcaagatggcctgagcaaggtct

SEQ ID NO: 252100 - DNA, 25 bp, Artificial
  Probe
gcctgagcaaggtctgcagctccat

SEQ ID NO: 252101 - DNA, 25 bp, Artificial
  Probe
caagatggcctgagcaaggtctgca

SEQ ID NO: 252102 - DNA, 25 bp, Artificial
  Probe
tctgcagctccatcttctctccaag

SEQ ID NO: 252103 - DNA, 25 bp, Artificial
  Probe
ctgagcaaggtctgcagctccatct

SEQ ID NO: 252104 - DNA, 25 bp, Artificial
  Probe
aggtctgcagctccatcttctctcc

SEQ ID NO: 252105 - DNA, 25 bp, Artificial
  Probe
agaggtcaagatggcctgagcaagg

SEQ ID NO: 252106 - DNA, 25 bp, Artificial
  Probe
agcaaggtctgcagctccatcttct

SEQ ID NO: 252107 - DNA, 25 bp, Artificial
  Probe
agctccatcttctctccaagtccct

SEQ ID NO: 252108 - DNA, 25 bp, Artificial
  Probe
gcaaggtctgcagctccatcttctc

SEQ ID NO: 252109 - DNA, 25 bp, Artificial
  Probe
tcaagatggcctgagcaaggtctgc

SEQ ID NO: 252110 - DNA, 25 bp, Artificial
  Probe
ctccatcttctctccaagtccctta

SEQ ID NO: 252111 - DNA, 25 bp, Artificial
  Probe
ctgcagctccatcttctctccaagt

SEQ ID NO: 252112 - DNA, 25 bp, Artificial
  Probe
tgagcaaggtctgcagctccatctt

SEQ ID NO: 252113 - DNA, 25 bp, Artificial
  Probe
gcagctccatcttctctccaagtcc

SEQ ID NO: 252114 - DNA, 25 bp, Artificial
  Probe
gatggcctgagcaaggtctgcagct

SEQ ID NO: 252115 - DNA, 25 bp, Artificial
  Probe
atggcctgagcaaggtctgcagctc

SEQ ID NO: 252116 - DNA, 25 bp, Artificial
  Probe
aaggtctgcagctccatcttctctc

SEQ ID NO: 252117 - DNA, 25 bp, Artificial
  Probe
ggcctgagcaaggtctgcagctcca

SEQ ID NO: 252118 - DNA, 25 bp, Artificial
  Probe
gtcaagatggcctgagcaaggtctg

SEQ ID NO: 252119 - DNA, 25 bp, Artificial
  Probe
gtctgcagctccatcttctctccaa

SEQ ID NO: 252120 - DNA, 25 bp, Artificial
  Probe
ggtctgcagctccatcttctctcca

SEQ ID NO: 252121 - DNA, 25 bp, Artificial
  Probe
caaggtctgcagctccatcttctct

SEQ ID NO: 252122 - DNA, 25 bp, Artificial
  Probe
caaaggtaaatcacaccatgaaatg

SEQ ID NO: 252123 - DNA, 25 bp, Artificial
  Probe
accttctacatggaaggccccacaa

SEQ ID NO: 252124 - DNA, 25 bp, Artificial
  Probe
tcttgcaccggcattaagttcctga

SEQ ID NO: 252125 - DNA, 25 bp, Artificial
  Probe
catgaaatggtcttgccagggagaa

SEQ ID NO: 252126 - DNA, 25 bp, Artificial
  Probe
cttagtctcctgcagttcaggaaag

SEQ ID NO: 252127 - DNA, 25 bp, Artificial
  Probe
actttgacataagtttcttgcaccg

SEQ ID NO: 252128 - DNA, 25 bp, Artificial
  Probe
ttgaattccaccttctacatggaag

SEQ ID NO: 252129 - DNA, 25 bp, Artificial
  Probe
ggttggatctgtccaaaggtaaatc

SEQ ID NO: 252130 - DNA, 25 bp, Artificial
  Probe
gccactttgacataagtttcttgca

SEQ ID NO: 252131 - DNA, 25 bp, Artificial
  Probe
cctgcagttcaggaaagatatcagg

SEQ ID NO: 252132 - DNA, 25 bp, Artificial
  Probe
aatcttgtggccactttgacataag

SEQ ID NO: 252133 - DNA, 25 bp, Artificial
  Probe
tacctaagggtgacagattacgttg

SEQ ID NO: 252134 - DNA, 25 bp, Artificial
  Probe
taagtttcttgcaccggcattaagt

SEQ ID NO: 252135 - DNA, 25 bp, Artificial
  Probe
gctttggtttctagcagtaaacatg

SEQ ID NO: 252136 - DNA, 25 bp, Artificial
  Probe
ctgtccaaaggtaaatcacaccatg

SEQ ID NO: 252137 - DNA, 25 bp, Artificial
  Probe
tggaaggccccacaactgcttctct

SEQ ID NO: 252138 - DNA, 25 bp, Artificial
  Probe
acctgcagtccctgcacagaggagt

SEQ ID NO: 252139 - DNA, 25 bp, Artificial
  Probe
cgttggttggatctgtccaaaggta

SEQ ID NO: 252140 - DNA, 25 bp, Artificial
  Probe
attccaccttctacatggaaggccc

SEQ ID NO: 252141 - DNA, 25 bp, Artificial
  Probe
acagattacgttggttggatctgtc

SEQ ID NO: 252142 - DNA, 25 bp, Artificial
  Probe
cttgccagggagaaggggctcacct

SEQ ID NO: 252143 - DNA, 25 bp, Artificial
  Probe
gccccagggggcttagtctcctgca

SEQ ID NO: 252144 - DNA, 25 bp, Artificial
  Probe
ttggatctgtccaaaggtaaatcac

SEQ ID NO: 252145 - DNA, 25 bp, Artificial
  Probe
tcttgccagggagaaggggctcacc

SEQ ID NO: 252146 - DNA, 25 bp, Artificial
  Probe
gacaggcaagtacacactttcccac

SEQ ID NO: 252147 - DNA, 25 bp, Artificial
  Probe
ctgcagtccctgcacagaggagtct

SEQ ID NO: 252148 - DNA, 25 bp, Artificial
  Probe
catggagatacattcgtccgtctcc

SEQ ID NO: 252149 - DNA, 25 bp, Artificial
  Probe
agtccctgcacagaggagtctgagg

SEQ ID NO: 252150 - DNA, 25 bp, Artificial
  Probe
gtctcctgcagttcaggaaagatat

SEQ ID NO: 252151 - DNA, 25 bp, Artificial
  Probe
acaactgcttctctctacctaaggg

SEQ ID NO: 252152 - DNA, 25 bp, Artificial
  Probe
gtaacaatcttgtggccactttgac

SEQ ID NO: 252153 - DNA, 25 bp, Artificial
  Probe
ttcaagatttctcacaaagctttgg

SEQ ID NO: 252154 - DNA, 25 bp, Artificial
  Probe
gagatacattcgtccgtctcctagt

SEQ ID NO: 252155 - DNA, 25 bp, Artificial
  Probe
tctctctacctaagggtgacagatt

SEQ ID NO: 252156 - DNA, 25 bp, Artificial
  Probe
agggggcttagtctcctgcagttca

SEQ ID NO: 252157 - DNA, 25 bp, Artificial
  Probe
tctacctaagggtgacagattacgt

SEQ ID NO: 252158 - DNA, 25 bp, Artificial
  Probe
atggaaggccccacaactgcttctc

SEQ ID NO: 252159 - DNA, 25 bp, Artificial
  Probe
ttctcacaaagctttggtttctagc

SEQ ID NO: 252160 - DNA, 25 bp, Artificial
  Probe
caaagctttggtttctagcagtaaa

SEQ ID NO: 252161 - DNA, 25 bp, Artificial
  Probe
aaggggctcacctgcagtccctgca

SEQ ID NO: 252162 - DNA, 25 bp, Artificial
  Probe
ggacagcaaaactcaaccatgaaat

SEQ ID NO: 252163 - DNA, 25 bp, Artificial
  Probe
agaaggggctcacctgcagtccctg

SEQ ID NO: 252164 - DNA, 25 bp, Artificial
  Probe
gatctgtccaaaggtaaatcacacc

SEQ ID NO: 252165 - DNA, 25 bp, Artificial
  Probe
cttctacatggaaggccccacaact

SEQ ID NO: 252166 - DNA, 25 bp, Artificial
  Probe
cgtccgtctcctagtaacaatcttg

SEQ ID NO: 252167 - DNA, 25 bp, Artificial
  Probe
cctgagtgtctcaactttacgtaca

SEQ ID NO: 252168 - DNA, 25 bp, Artificial
  Probe
agacaatgtgcctatccagggtatc

SEQ ID NO: 252169 - DNA, 25 bp, Artificial
  Probe
ccccttacctgctgagggttacaat

SEQ ID NO: 252170 - DNA, 25 bp, Artificial
  Probe
gcagcggcttcagagacaatgtgcc

SEQ ID NO: 252171 - DNA, 25 bp, Artificial
  Probe
tgtgcctatccagggtatcaccctg

SEQ ID NO: 252172 - DNA, 25 bp, Artificial
  Probe
aatgtgcctatccagggtatcaccc

SEQ ID NO: 252173 - DNA, 25 bp, Artificial
  Probe
acaatgtgcctatccagggtatcac

SEQ ID NO: 252174 - DNA, 25 bp, Artificial
  Probe
atgtgcctatccagggtatcaccct

SEQ ID NO: 252175 - DNA, 25 bp, Artificial
  Probe
cttacctgctgagggttacaatgag

SEQ ID NO: 252176 - DNA, 25 bp, Artificial
  Probe
cagcggcttcagagacaatgtgcct

SEQ ID NO: 252177 - DNA, 25 bp, Artificial
  Probe
ttcggcgcaggagaaatccaggggt

SEQ ID NO: 252178 - DNA, 25 bp, Artificial
  Probe
ctggggagggggcttcggcgcagga

SEQ ID NO: 252179 - DNA, 25 bp, Artificial
  Probe
agagacaatgtgcctatccagggta

SEQ ID NO: 252180 - DNA, 25 bp, Artificial
  Probe
cctggggagggggcttcggcgcagg

SEQ ID NO: 252181 - DNA, 25 bp, Artificial
  Probe
tggggccaggctataccccctgggg

SEQ ID NO: 252182 - DNA, 25 bp, Artificial
  Probe
agggttacaatgaggtggggccagg

SEQ ID NO: 252183 - DNA, 25 bp, Artificial
  Probe
cctgctgagggttacaatgaggtgg

SEQ ID NO: 252184 - DNA, 25 bp, Artificial
  Probe
gcggcttcagagacaatgtgcctat

SEQ ID NO: 252185 - DNA, 25 bp, Artificial
  Probe
ttcagagacaatgtgcctatccagg

SEQ ID NO: 252186 - DNA, 25 bp, Artificial
  Probe
tacaatgaggtggggccaggctata

SEQ ID NO: 252187 - DNA, 25 bp, Artificial
  Probe
caccccttacctgctgagggttaca

SEQ ID NO: 252188 - DNA, 25 bp, Artificial
  Probe
cggcagcggcttcagagacaatgtg

SEQ ID NO: 252189 - DNA, 25 bp, Artificial
  Probe
acctgctgagggttacaatgaggtg

SEQ ID NO: 252190 - DNA, 25 bp, Artificial
  Probe
caatgaggtggggccaggctatacc

SEQ ID NO: 252191 - DNA, 25 bp, Artificial
  Probe
ctgctgagggttacaatgaggtggg

SEQ ID NO: 252192 - DNA, 25 bp, Artificial
  Probe
ggcagcggcttcagagacaatgtgc

SEQ ID NO: 252193 - DNA, 25 bp, Artificial
  Probe
gttacaatgaggtggggccaggcta

SEQ ID NO: 252194 - DNA, 25 bp, Artificial
  Probe
tacctgctgagggttacaatgaggt

SEQ ID NO: 252195 - DNA, 25 bp, Artificial
  Probe
cggcttcagagacaatgtgcctatc

SEQ ID NO: 252196 - DNA, 25 bp, Artificial
  Probe
agggggcttcggcgcaggagaaatc

SEQ ID NO: 252197 - DNA, 25 bp, Artificial
  Probe
ccctggggagggggcttcggcgcag

SEQ ID NO: 252198 - DNA, 25 bp, Artificial
  Probe
gcttcagagacaatgtgcctatcca

SEQ ID NO: 252199 - DNA, 25 bp, Artificial
  Probe
aggtggggccaggctataccccctg

SEQ ID NO: 252200 - DNA, 25 bp, Artificial
  Probe
gggccaggctataccccctggggag

SEQ ID NO: 252201 - DNA, 25 bp, Artificial
  Probe
agcggcttcagagacaatgtgccta

SEQ ID NO: 252202 - DNA, 25 bp, Artificial
  Probe
tgcctatccagggtatcaccctgga

SEQ ID NO: 252203 - DNA, 25 bp, Artificial
  Probe
ccttacctgctgagggttacaatga

SEQ ID NO: 252204 - DNA, 25 bp, Artificial
  Probe
cccttacctgctgagggttacaatg

SEQ ID NO: 252205 - DNA, 25 bp, Artificial
  Probe
gagtgctgtccaccccttacctgct

SEQ ID NO: 252206 - DNA, 25 bp, Artificial
  Probe
tgaggtggggccaggctataccccc

SEQ ID NO: 252207 - DNA, 25 bp, Artificial
  Probe
gagacaatgtgcctatccagggtat

SEQ ID NO: 252208 - DNA, 25 bp, Artificial
  Probe
gggcttcggcgcaggagaaatccag

SEQ ID NO: 252209 - DNA, 25 bp, Artificial
  Probe
gacaatgtgcctatccagggtatca

SEQ ID NO: 252210 - DNA, 25 bp, Artificial
  Probe
acggcagcggcttcagagacaatgt

SEQ ID NO: 252211 - DNA, 25 bp, Artificial
  Probe
tacggcagcggcttcagagacaatg

SEQ ID NO: 252212 - DNA, 25 bp, Artificial
  Probe
gccaggctataccccctggggaggg

SEQ ID NO: 252213 - DNA, 25 bp, Artificial
  Probe
cttcagagacaatgtgcctatccag

SEQ ID NO: 252214 - DNA, 25 bp, Artificial
  Probe
ggcactagaaggctactataatgac

SEQ ID NO: 252215 - DNA, 25 bp, Artificial
  Probe
cggctgtttgaccagcgggagctct

SEQ ID NO: 252216 - DNA, 25 bp, Artificial
  Probe
ttgaccagcgggagctctccgccta

SEQ ID NO: 252217 - DNA, 25 bp, Artificial
  Probe
ggctgtttgaccagcgggagctctc

SEQ ID NO: 252218 - DNA, 25 bp, Artificial
  Probe
tgaccagcgggagctctccgcctac

SEQ ID NO: 252219 - DNA, 25 bp, Artificial
  Probe
accggctgtttgaccagcgggagct

SEQ ID NO: 252220 - DNA, 25 bp, Artificial
  Probe
tataatgaccggctgtttgaccagc

SEQ ID NO: 252221 - DNA, 25 bp, Artificial
  Probe
caatgatggcgctatggtagaagtg

SEQ ID NO: 252222 - DNA, 25 bp, Artificial
  Probe
atgaccggctgtttgaccagcggga

SEQ ID NO: 252223 - DNA, 25 bp, Artificial
  Probe
aatgaccggctgtttgaccagcggg

SEQ ID NO: 252224 - DNA, 25 bp, Artificial
  Probe
caatatgccaggcccaatgatggcg

SEQ ID NO: 252225 - DNA, 25 bp, Artificial
  Probe
caggcccaatgatggcgctatggta

SEQ ID NO: 252226 - DNA, 25 bp, Artificial
  Probe
gatggcgctatggtagaagtggcac

SEQ ID NO: 252227 - DNA, 25 bp, Artificial
  Probe
atggcgctatggtagaagtggcact

SEQ ID NO: 252228 - DNA, 25 bp, Artificial
  Probe
gctgtttgaccagcgggagctctcc

SEQ ID NO: 252229 - DNA, 25 bp, Artificial
  Probe
ccaggcccaatgatggcgctatggt

SEQ ID NO: 252230 - DNA, 25 bp, Artificial
  Probe
atgccaggcccaatgatggcgctat

SEQ ID NO: 252231 - DNA, 25 bp, Artificial
  Probe
ctgtttgaccagcgggagctctccg

SEQ ID NO: 252232 - DNA, 25 bp, Artificial
  Probe
aatgatggcgctatggtagaagtgg

SEQ ID NO: 252233 - DNA, 25 bp, Artificial
  Probe
tttgaccagcgggagctctccgcct

SEQ ID NO: 252234 - DNA, 25 bp, Artificial
  Probe
tgccaggcccaatgatggcgctatg

SEQ ID NO: 252235 - DNA, 25 bp, Artificial
  Probe
aacaatatgccaggcccaatgatgg

SEQ ID NO: 252236 - DNA, 25 bp, Artificial
  Probe
cagcgggagctctccgcctacccac

SEQ ID NO: 252237 - DNA, 25 bp, Artificial
  Probe
aaggctactataatgaccggctgtt

SEQ ID NO: 252238 - DNA, 25 bp, Artificial
  Probe
tatgccaggcccaatgatggcgcta

SEQ ID NO: 252239 - DNA, 25 bp, Artificial
  Probe
cgaacaatatgccaggcccaatgat

SEQ ID NO: 252240 - DNA, 25 bp, Artificial
  Probe
ctactataatgaccggctgtttgac

SEQ ID NO: 252241 - DNA, 25 bp, Artificial
  Probe
taatgaccggctgtttgaccagcgg

SEQ ID NO: 252242 - DNA, 25 bp, Artificial
  Probe
actataatgaccggctgtttgacca

SEQ ID NO: 252243 - DNA, 25 bp, Artificial
  Probe
agccgaacaatatgccaggcccaat

SEQ ID NO: 252244 - DNA, 25 bp, Artificial
  Probe
ggcccaatgatggcgctatggtaga

SEQ ID NO: 252245 - DNA, 25 bp, Artificial
  Probe
gccgaacaatatgccaggcccaatg

SEQ ID NO: 252246 - DNA, 25 bp, Artificial
  Probe
gaccagcgggagctctccgcctacc

SEQ ID NO: 252247 - DNA, 25 bp, Artificial
  Probe
gaacaatatgccaggcccaatgatg

SEQ ID NO: 252248 - DNA, 25 bp, Artificial
  Probe
ccggctgtttgaccagcgggagctc

SEQ ID NO: 252249 - DNA, 25 bp, Artificial
  Probe
ataatgaccggctgtttgaccagcg

SEQ ID NO: 252250 - DNA, 25 bp, Artificial
  Probe
aggctactataatgaccggctgttt

SEQ ID NO: 252251 - DNA, 25 bp, Artificial
  Probe
gctactataatgaccggctgtttga

SEQ ID NO: 252252 - DNA, 25 bp, Artificial
  Probe
gaccggctgtttgaccagcgggagc

SEQ ID NO: 252253 - DNA, 25 bp, Artificial
  Probe
atatgccaggcccaatgatggcgct

SEQ ID NO: 252254 - DNA, 25 bp, Artificial
  Probe
tggcactagaaggctactataatga

SEQ ID NO: 252255 - DNA, 25 bp, Artificial
  Probe
tgaccggctgtttgaccagcgggag

SEQ ID NO: 252256 - DNA, 25 bp, Artificial
  Probe
ggctactataatgaccggctgtttg

SEQ ID NO: 252257 - DNA, 25 bp, Artificial
  Probe
aggcccaatgatggcgctatggtag

SEQ ID NO: 252258 - DNA, 25 bp, Artificial
  Probe
tggcgctatggtagaagtggcacta

SEQ ID NO: 252259 - DNA, 25 bp, Artificial
  Probe
gccaggcccaatgatggcgctatgg

SEQ ID NO: 252260 - DNA, 25 bp, Artificial
  Probe
gtcatgagaaggacgtcgtgaaacc

SEQ ID NO: 252261 - DNA, 25 bp, Artificial
  Probe
atctagatgtatgtcaccattttaa

SEQ ID NO: 252262 - DNA, 25 bp, Artificial
  Probe
tgatgccagtttgtccctctgggct

SEQ ID NO: 252263 - DNA, 25 bp, Artificial
  Probe
acagaactgatgatgccagtttgtc

SEQ ID NO: 252264 - DNA, 25 bp, Artificial
  Probe
gatgccagtttgtccctctgggcta

SEQ ID NO: 252265 - DNA, 25 bp, Artificial
  Probe
gacgtcgtgaaacccggtcaatttg

SEQ ID NO: 252266 - DNA, 25 bp, Artificial
  Probe
ctagatgtatgtcaccattttaaaa

SEQ ID NO: 252267 - DNA, 25 bp, Artificial
  Probe
tcacagaactgatgatgccagtttg

SEQ ID NO: 252268 - DNA, 25 bp, Artificial
  Probe
atgccagtttgtccctctgggctag

SEQ ID NO: 252269 - DNA, 25 bp, Artificial
  Probe
taaggactcacagaactgatgatgc

SEQ ID NO: 252270 - DNA, 25 bp, Artificial
  Probe
gactcacagaactgatgatgccagt

SEQ ID NO: 252271 - DNA, 25 bp, Artificial
  Probe
actgatgatgccagtttgtccctct

SEQ ID NO: 252272 - DNA, 25 bp, Artificial
  Probe
atttggtttgcacttttcataacac

SEQ ID NO: 252273 - DNA, 25 bp, Artificial
  Probe
aaggactcacagaactgatgatgcc

SEQ ID NO: 252274 - DNA, 25 bp, Artificial
  Probe
tgatgatgccagtttgtccctctgg

SEQ ID NO: 252275 - DNA, 25 bp, Artificial
  Probe
cctgtgtcatgagaaggacgtcgtg

SEQ ID NO: 252276 - DNA, 25 bp, Artificial
  Probe
gaactgatgatgccagtttgtccct

SEQ ID NO: 252277 - DNA, 25 bp, Artificial
  Probe
ctcacagaactgatgatgccagttt

SEQ ID NO: 252278 - DNA, 25 bp, Artificial
  Probe
atgatgccagtttgtccctctgggc

SEQ ID NO: 252279 - DNA, 25 bp, Artificial
  Probe
gccagtttgtccctctgggctagtt

SEQ ID NO: 252280 - DNA, 25 bp, Artificial
  Probe
tatgtcaccattttaaaagacggtt

SEQ ID NO: 252281 - DNA, 25 bp, Artificial
  Probe
aggactcacagaactgatgatgcca

SEQ ID NO: 252282 - DNA, 25 bp, Artificial
  Probe
agaactgatgatgccagtttgtccc

SEQ ID NO: 252283 - DNA, 25 bp, Artificial
  Probe
ctgatgatgccagtttgtccctctg

SEQ ID NO: 252284 - DNA, 25 bp, Artificial
  Probe
tgccagtttgtccctctgggctagt

SEQ ID NO: 252285 - DNA, 25 bp, Artificial
  Probe
aactgatgatgccagtttgtccctc

SEQ ID NO: 252286 - DNA, 25 bp, Artificial
  Probe
ggactcacagaactgatgatgccag

SEQ ID NO: 252287 - DNA, 25 bp, Artificial
  Probe
tcaatttggtttgcacttttcataa

SEQ ID NO: 252288 - DNA, 25 bp, Artificial
  Probe
tgaaacccggtcaatttggtttgca

SEQ ID NO: 252289 - DNA, 25 bp, Artificial
  Probe
aatttggtttgcacttttcataaca

SEQ ID NO: 252290 - DNA, 25 bp, Artificial
  Probe
caatttggtttgcacttttcataac

SEQ ID NO: 252291 - DNA, 25 bp, Artificial
  Probe
cagaactgatgatgccagtttgtcc

SEQ ID NO: 252292 - DNA, 25 bp, Artificial
  Probe
aatctagatgtatgtcaccatttta

SEQ ID NO: 252293 - DNA, 25 bp, Artificial
  Probe
gtcaatttggtttgcacttttcata

SEQ ID NO: 252294 - DNA, 25 bp, Artificial
  Probe
ttggtttgcacttttcataacacgg

SEQ ID NO: 252295 - DNA, 25 bp, Artificial
  Probe
tcatgagaaggacgtcgtgaaaccc

SEQ ID NO: 252296 - DNA, 25 bp, Artificial
  Probe
tctagatgtatgtcaccattttaaa

SEQ ID NO: 252297 - DNA, 25 bp, Artificial
  Probe
ggtcaatttggtttgcacttttcat

SEQ ID NO: 252298 - DNA, 25 bp, Artificial
  Probe
cacagaactgatgatgccagtttgt

SEQ ID NO: 252299 - DNA, 25 bp, Artificial
  Probe
gtatgtcaccattttaaaagacggt

SEQ ID NO: 252300 - DNA, 25 bp, Artificial
  Probe
actcacagaactgatgatgccagtt

SEQ ID NO: 252301 - DNA, 25 bp, Artificial
  Probe
tttggtttgcacttttcataacacg

SEQ ID NO: 252302 - DNA, 25 bp, Artificial
  Probe
gatgtatgtcaccattttaaaagac

SEQ ID NO: 252303 - DNA, 25 bp, Artificial
  Probe
atgtatgtcaccattttaaaagacg

SEQ ID NO: 252304 - DNA, 25 bp, Artificial
  Probe
agatgtatgtcaccattttaaaaga

SEQ ID NO: 252305 - DNA, 25 bp, Artificial
  Probe
tgtatgtcaccattttaaaagacgg

SEQ ID NO: 252306 - DNA, 25 bp, Artificial
  Probe
aatactggtttcaagctccaccaga

SEQ ID NO: 252307 - DNA, 25 bp, Artificial
  Probe
cctccctttgatgtggtccaggagg

SEQ ID NO: 252308 - DNA, 25 bp, Artificial
  Probe
atatcggaccgcacgggctcctgag

SEQ ID NO: 252309 - DNA, 25 bp, Artificial
  Probe
ggcactgacgggagcctgcttcatc

SEQ ID NO: 252310 - DNA, 25 bp, Artificial
  Probe
agctcatcctggaggccttggacaa

SEQ ID NO: 252311 - DNA, 25 bp, Artificial
  Probe
gtattttgtccactactgggaaaag

SEQ ID NO: 252312 - DNA, 25 bp, Artificial
  Probe
ctgacgggagcctgcttcatcctgt

SEQ ID NO: 252313 - DNA, 25 bp, Artificial
  Probe
tttgtccactactgggaaaagacag

SEQ ID NO: 252314 - DNA, 25 bp, Artificial
  Probe
tcatgttgctgctggcactgacggg

SEQ ID NO: 252315 - DNA, 25 bp, Artificial
  Probe
ttttcagtattttgtccactactgg

SEQ ID NO: 252316 - DNA, 25 bp, Artificial
  Probe
agcaatgtatcttgtcacgaaacaa

SEQ ID NO: 252317 - DNA, 25 bp, Artificial
  Probe
ttgtttacaaaccaaggcccaactg

SEQ ID NO: 252318 - DNA, 25 bp, Artificial
  Probe
atcttcatgttgctgctggcactga

SEQ ID NO: 252319 - DNA, 25 bp, Artificial
  Probe
ctcctgagcaatgtatcttgtcacg

SEQ ID NO: 252320 - DNA, 25 bp, Artificial
  Probe
gttaaaggcccttacaagagcaact

SEQ ID NO: 252321 - DNA, 25 bp, Artificial
  Probe
gcctgcttcatcctgttcctcagat

SEQ ID NO: 252322 - DNA, 25 bp, Artificial
  Probe
aagccattcagagtatattgtttac

SEQ ID NO: 252323 - DNA, 25 bp, Artificial
  Probe
tgaaatactggtttcaagctccacc

SEQ ID NO: 252324 - DNA, 25 bp, Artificial
  Probe
ggtccaggaggcatcttttcagtat

SEQ ID NO: 252325 - DNA, 25 bp, Artificial
  Probe
cagaaatatcggaccgcacgggctc

SEQ ID NO: 252326 - DNA, 25 bp, Artificial
  Probe
tttaaaggacccagatcagctcatc

SEQ ID NO: 252327 - DNA, 25 bp, Artificial
  Probe
gaaaggctccctcgtcatacacttc

SEQ ID NO: 252328 - DNA, 25 bp, Artificial
  Probe
tccactactgggaaaagacagaaac

SEQ ID NO: 252329 - DNA, 25 bp, Artificial
  Probe
atgtggtccaggaggcatcttttca

SEQ ID NO: 252330 - DNA, 25 bp, Artificial
  Probe
atcctggaggccttggacaaggacg

SEQ ID NO: 252331 - DNA, 25 bp, Artificial
  Probe
cattgtgctggatgatttgaagcca

SEQ ID NO: 252332 - DNA, 25 bp, Artificial
  Probe
gtcacgaaacaacagcggatgcctc

SEQ ID NO: 252333 - DNA, 25 bp, Artificial
  Probe
gaatgttactgttggacctccaaaa

SEQ ID NO: 252334 - DNA, 25 bp, Artificial
  Probe
agtatttaaaggacccagatcagct

SEQ ID NO: 252335 - DNA, 25 bp, Artificial
  Probe
gaaatactggtttcaagctccacca

SEQ ID NO: 252336 - DNA, 25 bp, Artificial
  Probe
tcaacactatgagaatgttactgtt

SEQ ID NO: 252337 - DNA, 25 bp, Artificial
  Probe
agccattcagagtatattgtttaca

SEQ ID NO: 252338 - DNA, 25 bp, Artificial
  Probe
ctgagcaatgtatcttgtcacgaaa

SEQ ID NO: 252339 - DNA, 25 bp, Artificial
  Probe
aggcccaactgattttgaaaaacag

SEQ ID NO: 252340 - DNA, 25 bp, Artificial
  Probe
tggtttcaagctccaccagacatcc

SEQ ID NO: 252341 - DNA, 25 bp, Artificial
  Probe
tttcaacactatgagaatgttactg

SEQ ID NO: 252342 - DNA, 25 bp, Artificial
  Probe
ctgctggcactgacgggagcctgct

SEQ ID NO: 252343 - DNA, 25 bp, Artificial
  Probe
gccttggacaaggacggttcgccga

SEQ ID NO: 252344 - DNA, 25 bp, Artificial
  Probe
ggcccaactgattttgaaaaacaga

SEQ ID NO: 252345 - DNA, 25 bp, Artificial
  Probe
gtttacaaaccaaggcccaactgat

SEQ ID NO: 252346 - DNA, 25 bp, Artificial
  Probe
gaccgcacgggctcctgagcaatgt

SEQ ID NO: 252347 - DNA, 25 bp, Artificial
  Probe
ttgctgctggcactgacgggagcct

SEQ ID NO: 252348 - DNA, 25 bp, Artificial
  Probe
agaatgttactgttggacctccaaa

SEQ ID NO: 252349 - DNA, 25 bp, Artificial
  Probe
tgacgggagcctgcttcatcctgtt

SEQ ID NO: 252350 - DNA, 25 bp, Artificial
  Probe
gatccatttcaacactatgagaatg

SEQ ID NO: 252351 - DNA, 25 bp, Artificial
  Probe
ggcatcttttcagtattttgtccac

SEQ ID NO: 252352 - DNA, 25 bp, Artificial
  Probe
ccctgcttgtggagaaaggagaata

SEQ ID NO: 252353 - DNA, 25 bp, Artificial
  Probe
tatgtgaagactactgggaatgcca

SEQ ID NO: 252354 - DNA, 25 bp, Artificial
  Probe
gagaatactgccagactaggtatgt

SEQ ID NO: 252355 - DNA, 25 bp, Artificial
  Probe
gggtgcctcggacacagacggcttt

SEQ ID NO: 252356 - DNA, 25 bp, Artificial
  Probe
gtggatcacctctccaagtacttgg

SEQ ID NO: 252357 - DNA, 25 bp, Artificial
  Probe
ctccagagccaggtggagagatcga

SEQ ID NO: 252358 - DNA, 25 bp, Artificial
  Probe
agaatactgccagactaggtatgtg

SEQ ID NO: 252359 - DNA, 25 bp, Artificial
  Probe
cctgcttgtggagaaaggagaatac

SEQ ID NO: 252360 - DNA, 25 bp, Artificial
  Probe
cacagtggatcacctctccaagtac

SEQ ID NO: 252361 - DNA, 25 bp, Artificial
  Probe
tgccacagtggatcacctctccaag

SEQ ID NO: 252362 - DNA, 25 bp, Artificial
  Probe
actgccagactaggtatgtgaagac

SEQ ID NO: 252363 - DNA, 25 bp, Artificial
  Probe
gccacagtggatcacctctccaagt

SEQ ID NO: 252364 - DNA, 25 bp, Artificial
  Probe
ggtgcctcggacacagacggctttt

SEQ ID NO: 252365 - DNA, 25 bp, Artificial
  Probe
acagtggatcacctctccaagtact

SEQ ID NO: 252366 - DNA, 25 bp, Artificial
  Probe
tactgccagactaggtatgtgaaga

SEQ ID NO: 252367 - DNA, 25 bp, Artificial
  Probe
tctccaagtacttggccctgcgcat

SEQ ID NO: 252368 - DNA, 25 bp, Artificial
  Probe
tgccagactaggtatgtgaagacta

SEQ ID NO: 252369 - DNA, 25 bp, Artificial
  Probe
agactactgggaatgccacagtgga

SEQ ID NO: 252370 - DNA, 25 bp, Artificial
  Probe
tcctccagagccaggtggagagatc

SEQ ID NO: 252371 - DNA, 25 bp, Artificial
  Probe
aagactactgggaatgccacagtgg

SEQ ID NO: 252372 - DNA, 25 bp, Artificial
  Probe
actgggaatgccacagtggatcacc

SEQ ID NO: 252373 - DNA, 25 bp, Artificial
  Probe
gaatgccacagtggatcacctctcc

SEQ ID NO: 252374 - DNA, 25 bp, Artificial
  Probe
gactactgggaatgccacagtggat

SEQ ID NO: 252375 - DNA, 25 bp, Artificial
  Probe
agagatcgagcttgtgttccggccc

SEQ ID NO: 252376 - DNA, 25 bp, Artificial
  Probe
tggatcacctctccaagtacttggc

SEQ ID NO: 252377 - DNA, 25 bp, Artificial
  Probe
atgccacagtggatcacctctccaa

SEQ ID NO: 252378 - DNA, 25 bp, Artificial
  Probe
cagcagcaggaaaccgtagagcccg

SEQ ID NO: 252379 - DNA, 25 bp, Artificial
  Probe
gccagactaggtatgtgaagactac

SEQ ID NO: 252380 - DNA, 25 bp, Artificial
  Probe
cagtggatcacctctccaagtactt

SEQ ID NO: 252381 - DNA, 25 bp, Artificial
  Probe
tgtgaagactactgggaatgccaca

SEQ ID NO: 252382 - DNA, 25 bp, Artificial
  Probe
ttggccctgcgcattgccctggaga

SEQ ID NO: 252383 - DNA, 25 bp, Artificial
  Probe
catcccctgcttgtggagaaaggag

SEQ ID NO: 252384 - DNA, 25 bp, Artificial
  Probe
cccagtcctccagagccaggtggag

SEQ ID NO: 252385 - DNA, 25 bp, Artificial
  Probe
tgggaatgccacagtggatcacctc

SEQ ID NO: 252386 - DNA, 25 bp, Artificial
  Probe
ttctgaagactctggtgatcggggc

SEQ ID NO: 252387 - DNA, 25 bp, Artificial
  Probe
tggccctgcgcattgccctggagag

SEQ ID NO: 252388 - DNA, 25 bp, Artificial
  Probe
cctccagagccaggtggagagatcg

SEQ ID NO: 252389 - DNA, 25 bp, Artificial
  Probe
ccagtcctccagagccaggtggaga

SEQ ID NO: 252390 - DNA, 25 bp, Artificial
  Probe
ggcagcagcaggaaaccgtagagcc

SEQ ID NO: 252391 - DNA, 25 bp, Artificial
  Probe
cccctgcttgtggagaaaggagaat

SEQ ID NO: 252392 - DNA, 25 bp, Artificial
  Probe
aggcagcagcaggaaaccgtagagc

SEQ ID NO: 252393 - DNA, 25 bp, Artificial
  Probe
cctcggacacagacggcttttatac

SEQ ID NO: 252394 - DNA, 25 bp, Artificial
  Probe
gggaatgccacagtggatcacctct

SEQ ID NO: 252395 - DNA, 25 bp, Artificial
  Probe
agtacttggccctgcgcattgccct

SEQ ID NO: 252396 - DNA, 25 bp, Artificial
  Probe
aatactgccagactaggtatgtgaa

SEQ ID NO: 252397 - DNA, 25 bp, Artificial
  Probe
gcctcggacacagacggcttttata

SEQ ID NO: 252398 - DNA, 25 bp, Artificial
  Probe
aatatcatcaacaggctctggcttt

SEQ ID NO: 252399 - DNA, 25 bp, Artificial
  Probe
actgtagctggcacaagattggcag

SEQ ID NO: 252400 - DNA, 25 bp, Artificial
  Probe
tttaataagcccaagcaagtgaacg

SEQ ID NO: 252401 - DNA, 25 bp, Artificial
  Probe
catagagtcagatgtacggtcgtga

SEQ ID NO: 252402 - DNA, 25 bp, Artificial
  Probe
ctgcttccaatacagtgccttcttg

SEQ ID NO: 252403 - DNA, 25 bp, Artificial
  Probe
ctccccatagagtcagatgtacggt

SEQ ID NO: 252404 - DNA, 25 bp, Artificial
  Probe
tagagtcagatgtacggtcgtgact

SEQ ID NO: 252405 - DNA, 25 bp, Artificial
  Probe
gtcctgtgccgcagggttcaggtca

SEQ ID NO: 252406 - DNA, 25 bp, Artificial
  Probe
acagtttgacacaacttggactata

SEQ ID NO: 252407 - DNA, 25 bp, Artificial
  Probe
ctggcacaagattggcagtgaattt

SEQ ID NO: 252408 - DNA, 25 bp, Artificial
  Probe
caatacagtgccttcttggtctgat

SEQ ID NO: 252409 - DNA, 25 bp, Artificial
  Probe
catggcttggctgtgttggctgcct

SEQ ID NO: 252410 - DNA, 25 bp, Artificial
  Probe
tcaggctgtgccatactttgcagga

SEQ ID NO: 252411 - DNA, 25 bp, Artificial
  Probe
ccatactttgcaggaggatgtgttt

SEQ ID NO: 252412 - DNA, 25 bp, Artificial
  Probe
tgcaatggttggtcctgtgccgcag

SEQ ID NO: 252413 - DNA, 25 bp, Artificial
  Probe
ggctgtgttggctgcctgcttccaa

SEQ ID NO: 252414 - DNA, 25 bp, Artificial
  Probe
acgcacagtttacagttctgtctgt

SEQ ID NO: 252415 - DNA, 25 bp, Artificial
  Probe
cagttctgtctgtgttggagaaatc

SEQ ID NO: 252416 - DNA, 25 bp, Artificial
  Probe
tgagcatctgcattttagcccgctt

SEQ ID NO: 252417 - DNA, 25 bp, Artificial
  Probe
gttctgtctgtgttggagaaatcac

SEQ ID NO: 252418 - DNA, 25 bp, Artificial
  Probe
tgttactgtagctggcacaagattg

SEQ ID NO: 252419 - DNA, 25 bp, Artificial
  Probe
gtgccttcttggtctgatgtcagca

SEQ ID NO: 252420 - DNA, 25 bp, Artificial
  Probe
acagtttacagttctgtctgtgttg

SEQ ID NO: 252421 - DNA, 25 bp, Artificial
  Probe
ataagcccaagcaagtgaacggtcc

SEQ ID NO: 252422 - DNA, 25 bp, Artificial
  Probe
aaactcaggctgtgccatactttgc

SEQ ID NO: 252423 - DNA, 25 bp, Artificial
  Probe
cccctctgtgtctgttactgtagct

SEQ ID NO: 252424 - DNA, 25 bp, Artificial
  Probe
gcaagtgaacggtcctttcaaactc

SEQ ID NO: 252425 - DNA, 25 bp, Artificial
  Probe
gtgttggctgcctgcttccaataca

SEQ ID NO: 252426 - DNA, 25 bp, Artificial
  Probe
tctgtctgtgttggagaaatcactt

SEQ ID NO: 252427 - DNA, 25 bp, Artificial
  Probe
cagtttacagttctgtctgtgttgg

SEQ ID NO: 252428 - DNA, 25 bp, Artificial
  Probe
cttccaatacagtgccttcttggtc

SEQ ID NO: 252429 - DNA, 25 bp, Artificial
  Probe
tcatcaacaggctctggctttcaaa

SEQ ID NO: 252430 - DNA, 25 bp, Artificial
  Probe
catctgcattttagcccgcttaggt

SEQ ID NO: 252431 - DNA, 25 bp, Artificial
  Probe
agagtcagatgtacggtcgtgactg

SEQ ID NO: 252432 - DNA, 25 bp, Artificial
  Probe
gtcattctcctgagtctcaagcctc

SEQ ID NO: 252433 - DNA, 25 bp, Artificial
  Probe
tcaaactcaggctgtgccatacttt

SEQ ID NO: 252434 - DNA, 25 bp, Artificial
  Probe
gaatatcatcaacaggctctggctt

SEQ ID NO: 252435 - DNA, 25 bp, Artificial
  Probe
cccaagcaagtgaacggtcctttca

SEQ ID NO: 252436 - DNA, 25 bp, Artificial
  Probe
tggagaaatcacttcagagacaggc

SEQ ID NO: 252437 - DNA, 25 bp, Artificial
  Probe
gtttgacacaacttggactatacct

SEQ ID NO: 252438 - DNA, 25 bp, Artificial
  Probe
cagggttcaggtcattctcctgagt

SEQ ID NO: 252439 - DNA, 25 bp, Artificial
  Probe
ggactatacctttaataagcccaag

SEQ ID NO: 252440 - DNA, 25 bp, Artificial
  Probe
tgcctgcttccaatacagtgccttc

SEQ ID NO: 252441 - DNA, 25 bp, Artificial
  Probe
tgtgccgcagggttcaggtcattct

SEQ ID NO: 252442 - DNA, 25 bp, Artificial
  Probe
taaacgcacagtttacagttctgtc

SEQ ID NO: 252443 - DNA, 25 bp, Artificial
  Probe
cctttcaaactcaggctgtgccata

SEQ ID NO: 252444 - DNA, 25 bp, Artificial
  Probe
gtgaccacactgttacgatgcaatt

SEQ ID NO: 252445 - DNA, 25 bp, Artificial
  Probe
tggactggcccctttgagtctgaat

SEQ ID NO: 252446 - DNA, 25 bp, Artificial
  Probe
ttcagtaggcttctggaatagaaac

SEQ ID NO: 252447 - DNA, 25 bp, Artificial
  Probe
gcatttcttaccagtgtgaccacac

SEQ ID NO: 252448 - DNA, 25 bp, Artificial
  Probe
tatacaatgattttcagtaggcttc

SEQ ID NO: 252449 - DNA, 25 bp, Artificial
  Probe
actggcccctttgagtctgaatccc

SEQ ID NO: 252450 - DNA, 25 bp, Artificial
  Probe
attgcatttcttaccagtgtgacca

SEQ ID NO: 252451 - DNA, 25 bp, Artificial
  Probe
ttcttaccagtgtgaccacactgtt

SEQ ID NO: 252452 - DNA, 25 bp, Artificial
  Probe
ggcccctttgagtctgaatccccgg

SEQ ID NO: 252453 - DNA, 25 bp, Artificial
  Probe
tggcccctttgagtctgaatccccg

SEQ ID NO: 252454 - DNA, 25 bp, Artificial
  Probe
tcctagtcttatggaaagcaaatat

SEQ ID NO: 252455 - DNA, 25 bp, Artificial
  Probe
gaccacactgttacgatgcaattct

SEQ ID NO: 252456 - DNA, 25 bp, Artificial
  Probe
tgcatttcttaccagtgtgaccaca

SEQ ID NO: 252457 - DNA, 25 bp, Artificial
  Probe
tagaattgcatttcttaccagtgtg

SEQ ID NO: 252458 - DNA, 25 bp, Artificial
  Probe
atttcttaccagtgtgaccacactg

SEQ ID NO: 252459 - DNA, 25 bp, Artificial
  Probe
agctgggccaactccagtgaattca

SEQ ID NO: 252460 - DNA, 25 bp, Artificial
  Probe
cctagctgggccaactccagtgaat

SEQ ID NO: 252461 - DNA, 25 bp, Artificial
  Probe
ggactggcccctttgagtctgaatc

SEQ ID NO: 252462 - DNA, 25 bp, Artificial
  Probe
tgccacctttatggactggcccctt

SEQ ID NO: 252463 - DNA, 25 bp, Artificial
  Probe
atacaatgattttcagtaggcttct

SEQ ID NO: 252464 - DNA, 25 bp, Artificial
  Probe
acaatgattttcagtaggcttctgg

SEQ ID NO: 252465 - DNA, 25 bp, Artificial
  Probe
ggccaactccagtgaattcacccat

SEQ ID NO: 252466 - DNA, 25 bp, Artificial
  Probe
ttttcctagtcttatggaaagcaaa

SEQ ID NO: 252467 - DNA, 25 bp, Artificial
  Probe
ctttttcctagtcttatggaaagca

SEQ ID NO: 252468 - DNA, 25 bp, Artificial
  Probe
gctgggccaactccagtgaattcac

SEQ ID NO: 252469 - DNA, 25 bp, Artificial
  Probe
tgtgaccacactgttacgatgcaat

SEQ ID NO: 252470 - DNA, 25 bp, Artificial
  Probe
ttcctagtcttatggaaagcaaata

SEQ ID NO: 252471 - DNA, 25 bp, Artificial
  Probe
cacactgttacgatgcaattctagc

SEQ ID NO: 252472 - DNA, 25 bp, Artificial
  Probe
cagtaggcttctggaatagaaacag

SEQ ID NO: 252473 - DNA, 25 bp, Artificial
  Probe
tactttttcctagtcttatggaaag

SEQ ID NO: 252474 - DNA, 25 bp, Artificial
  Probe
tagctgggccaactccagtgaattc

SEQ ID NO: 252475 - DNA, 25 bp, Artificial
  Probe
ctagctgggccaactccagtgaatt

SEQ ID NO: 252476 - DNA, 25 bp, Artificial
  Probe
cactgttacgatgcaattctagcca

SEQ ID NO: 252477 - DNA, 25 bp, Artificial
  Probe
tgggccaactccagtgaattcaccc

SEQ ID NO: 252478 - DNA, 25 bp, Artificial
  Probe
acctttatggactggcccctttgag

SEQ ID NO: 252479 - DNA, 25 bp, Artificial
  Probe
caatgattttcagtaggcttctgga

SEQ ID NO: 252480 - DNA, 25 bp, Artificial
  Probe
gggccaactccagtgaattcaccca

SEQ ID NO: 252481 - DNA, 25 bp, Artificial
  Probe
ttgcatttcttaccagtgtgaccac

SEQ ID NO: 252482 - DNA, 25 bp, Artificial
  Probe
tgaccacactgttacgatgcaattc

SEQ ID NO: 252483 - DNA, 25 bp, Artificial
  Probe
ggctagaattgcatttcttaccagt

SEQ ID NO: 252484 - DNA, 25 bp, Artificial
  Probe
ccacctttatggactggcccctttg

SEQ ID NO: 252485 - DNA, 25 bp, Artificial
  Probe
tttcttaccagtgtgaccacactgt

SEQ ID NO: 252486 - DNA, 25 bp, Artificial
  Probe
ccacactgttacgatgcaattctag

SEQ ID NO: 252487 - DNA, 25 bp, Artificial
  Probe
tttcctagtcttatggaaagcaaat

SEQ ID NO: 252488 - DNA, 25 bp, Artificial
  Probe
agtggtttgaagaccccactgccac

SEQ ID NO: 252489 - DNA, 25 bp, Artificial
  Probe
agtgtgaccacactgttacgatgca

SEQ ID NO: 252490 - DNA, 25 bp, Artificial
  Probe
cgccccttggttctagcctcatgtt

SEQ ID NO: 252491 - DNA, 25 bp, Artificial
  Probe
gccccttggttctagcctcatgttc

SEQ ID NO: 252492 - DNA, 25 bp, Artificial
  Probe
gggtcatgtgacctcaggaaaagga

SEQ ID NO: 252493 - DNA, 25 bp, Artificial
  Probe
tgcagtcccagcagccagaagtatg

SEQ ID NO: 252494 - DNA, 25 bp, Artificial
  Probe
gaccagaagctccaggtcagcctgg

SEQ ID NO: 252495 - DNA, 25 bp, Artificial
  Probe
agtatggcaagaggaccagaagctc

SEQ ID NO: 252496 - DNA, 25 bp, Artificial
  Probe
actgcagtcccagcagccagaagta

SEQ ID NO: 252497 - DNA, 25 bp, Artificial
  Probe
gcagccagaagtatggcaagaggac

SEQ ID NO: 252498 - DNA, 25 bp, Artificial
  Probe
tctagtcctgcatggtggcccgaca

SEQ ID NO: 252499 - DNA, 25 bp, Artificial
  Probe
ggtcatgtgacctcaggaaaaggaa

SEQ ID NO: 252500 - DNA, 25 bp, Artificial
  Probe
gtgaaaatctagtcctgcatggtgg

SEQ ID NO: 252501 - DNA, 25 bp, Artificial
  Probe
aatctagtcctgcatggtggcccga

SEQ ID NO: 252502 - DNA, 25 bp, Artificial
  Probe
gtcatgtgacctcaggaaaaggaaa

SEQ ID NO: 252503 - DNA, 25 bp, Artificial
  Probe
aaatctagtcctgcatggtggcccg

SEQ ID NO: 252504 - DNA, 25 bp, Artificial
  Probe
tagtcctgcatggtggcccgacact

SEQ ID NO: 252505 - DNA, 25 bp, Artificial
  Probe
tggtggcccgacactgcagtcccag

SEQ ID NO: 252506 - DNA, 25 bp, Artificial
  Probe
tggttctagcctcatgttctctcct

SEQ ID NO: 252507 - DNA, 25 bp, Artificial
  Probe
ctgggtcatgtgacctcaggaaaag

SEQ ID NO: 252508 - DNA, 25 bp, Artificial
  Probe
gtcccagcagccagaagtatggcaa

SEQ ID NO: 252509 - DNA, 25 bp, Artificial
  Probe
tcccagcagccagaagtatggcaag

SEQ ID NO: 252510 - DNA, 25 bp, Artificial
  Probe
ctagtcctgcatggtggcccgacac

SEQ ID NO: 252511 - DNA, 25 bp, Artificial
  Probe
tgggtcatgtgacctcaggaaaagg

SEQ ID NO: 252512 - DNA, 25 bp, Artificial
  Probe
agcagccagaagtatggcaagagga

SEQ ID NO: 252513 - DNA, 25 bp, Artificial
  Probe
cactgcagtcccagcagccagaagt

SEQ ID NO: 252514 - DNA, 25 bp, Artificial
  Probe
atggtggcccgacactgcagtccca

SEQ ID NO: 252515 - DNA, 25 bp, Artificial
  Probe
atctagtcctgcatggtggcccgac

SEQ ID NO: 252516 - DNA, 25 bp, Artificial
  Probe
catgtgacctcaggaaaaggaaact

SEQ ID NO: 252517 - DNA, 25 bp, Artificial
  Probe
cagcagccagaagtatggcaagagg

SEQ ID NO: 252518 - DNA, 25 bp, Artificial
  Probe
agtgaaaatctagtcctgcatggtg

SEQ ID NO: 252519 - DNA, 25 bp, Artificial
  Probe
tgaaaatctagtcctgcatggtggc

SEQ ID NO: 252520 - DNA, 25 bp, Artificial
  Probe
atgtgacctcaggaaaaggaaactg

SEQ ID NO: 252521 - DNA, 25 bp, Artificial
  Probe
gctgggtcatgtgacctcaggaaaa

SEQ ID NO: 252522 - DNA, 25 bp, Artificial
  Probe
ggttctagcctcatgttctctcctt

SEQ ID NO: 252523 - DNA, 25 bp, Artificial
  Probe
accagaagctccaggtcagcctggg

SEQ ID NO: 252524 - DNA, 25 bp, Artificial
  Probe
ctgcagtcccagcagccagaagtat

SEQ ID NO: 252525 - DNA, 25 bp, Artificial
  Probe
ttggttctagcctcatgttctctcc

SEQ ID NO: 252526 - DNA, 25 bp, Artificial
  Probe
agaggaccagaagctccaggtcagc

SEQ ID NO: 252527 - DNA, 25 bp, Artificial
  Probe
aagctccaggtcagcctgggctggg

SEQ ID NO: 252528 - DNA, 25 bp, Artificial
  Probe
tgtgacctcaggaaaaggaaactga

SEQ ID NO: 252529 - DNA, 25 bp, Artificial
  Probe
ccagcagccagaagtatggcaagag

SEQ ID NO: 252530 - DNA, 25 bp, Artificial
  Probe
tcatgtgacctcaggaaaaggaaac

SEQ ID NO: 252531 - DNA, 25 bp, Artificial
  Probe
ggctgggtcatgtgacctcaggaaa

SEQ ID NO: 252532 - DNA, 25 bp, Artificial
  Probe
ccccttggttctagcctcatgttct

SEQ ID NO: 252533 - DNA, 25 bp, Artificial
  Probe
aagaggaccagaagctccaggtcag

SEQ ID NO: 252534 - DNA, 25 bp, Artificial
  Probe
cccagcagccagaagtatggcaaga

SEQ ID NO: 252535 - DNA, 25 bp, Artificial
  Probe
agtcctgcatggtggcccgacactg

SEQ ID NO: 252536 - DNA, 25 bp, Artificial
  Probe
gaataagccaggtcagtcctgatgg

SEQ ID NO: 252537 - DNA, 25 bp, Artificial
  Probe
gatcttcgtatactcacttcgcttg

SEQ ID NO: 252538 - DNA, 25 bp, Artificial
  Probe
acaggtgccaaagaactttgtgaag

SEQ ID NO: 252539 - DNA, 25 bp, Artificial
  Probe
tttctgttttgaataagccaggtca

SEQ ID NO: 252540 - DNA, 25 bp, Artificial
  Probe
tcagtcctgatggtgggctttctca

SEQ ID NO: 252541 - DNA, 25 bp, Artificial
  Probe
gcgacagtacaacattttttacaag

SEQ ID NO: 252542 - DNA, 25 bp, Artificial
  Probe
ctagggaccctttcctctgcagact

SEQ ID NO: 252543 - DNA, 25 bp, Artificial
  Probe
ggctctcagtattgcgacagtacaa

SEQ ID NO: 252544 - DNA, 25 bp, Artificial
  Probe
tctgttttgaataagccaggtcagt

SEQ ID NO: 252545 - DNA, 25 bp, Artificial
  Probe
taagccaggtcagtcctgatggtgg

SEQ ID NO: 252546 - DNA, 25 bp, Artificial
  Probe
tcgtatactcacttcgcttgtattg

SEQ ID NO: 252547 - DNA, 25 bp, Artificial
  Probe
ttcctctgcagactccctttcatgg

SEQ ID NO: 252548 - DNA, 25 bp, Artificial
  Probe
gcaacattgcaactctaggctgccc

SEQ ID NO: 252549 - DNA, 25 bp, Artificial
  Probe
ctccaggcaacattgcaactctagg

SEQ ID NO: 252550 - DNA, 25 bp, Artificial
  Probe
gaaagtggctctcagtattgcgaca

SEQ ID NO: 252551 - DNA, 25 bp, Artificial
  Probe
gaaccaatcgtctgggttaagaaag

SEQ ID NO: 252552 - DNA, 25 bp, Artificial
  Probe
cagtattgcgacagtacaacatttt

SEQ ID NO: 252553 - DNA, 25 bp, Artificial
  Probe
atcgtctgggttaagaaagtggctc

SEQ ID NO: 252554 - DNA, 25 bp, Artificial
  Probe
ataagccaggtcagtcctgatggtg

SEQ ID NO: 252555 - DNA, 25 bp, Artificial
  Probe
tcacttcgcttgtattgtaaaagga

SEQ ID NO: 252556 - DNA, 25 bp, Artificial
  Probe
gacagtacaacattttttacaaggt

SEQ ID NO: 252557 - DNA, 25 bp, Artificial
  Probe
caggcaacattgcaactctaggctg

SEQ ID NO: 252558 - DNA, 25 bp, Artificial
  Probe
cgtatactcacttcgcttgtattgt

SEQ ID NO: 252559 - DNA, 25 bp, Artificial
  Probe
caatcgtctgggttaagaaagtggc

SEQ ID NO: 252560 - DNA, 25 bp, Artificial
  Probe
gtggctctcagtattgcgacagtac

SEQ ID NO: 252561 - DNA, 25 bp, Artificial
  Probe
actcccttcggatacaggtgccaaa

SEQ ID NO: 252562 - DNA, 25 bp, Artificial
  Probe
aaatgaagaaccaatcgtctgggtt

SEQ ID NO: 252563 - DNA, 25 bp, Artificial
  Probe
tggcccggtaggaggtctctcccac

SEQ ID NO: 252564 - DNA, 25 bp, Artificial
  Probe
ccaggtcagtcctgatggtgggctt

SEQ ID NO: 252565 - DNA, 25 bp, Artificial
  Probe
actcacttcgcttgtattgtaaaag

SEQ ID NO: 252566 - DNA, 25 bp, Artificial
  Probe
cctccaggcaacattgcaactctag

SEQ ID NO: 252567 - DNA, 25 bp, Artificial
  Probe
gatacaggtgccaaagaactttgtg

SEQ ID NO: 252568 - DNA, 25 bp, Artificial
  Probe
aatgaagaaccaatcgtctgggtta

SEQ ID NO: 252569 - DNA, 25 bp, Artificial
  Probe
aggtcagtcctgatggtgggctttc

SEQ ID NO: 252570 - DNA, 25 bp, Artificial
  Probe
gtattgcgacagtacaacatttttt

SEQ ID NO: 252571 - DNA, 25 bp, Artificial
  Probe
tagggaccctttcctctgcagactc

SEQ ID NO: 252572 - DNA, 25 bp, Artificial
  Probe
cactcccttcggatacaggtgccaa

SEQ ID NO: 252573 - DNA, 25 bp, Artificial
  Probe
ctcagtattgcgacagtacaacatt

SEQ ID NO: 252574 - DNA, 25 bp, Artificial
  Probe
tttgaataagccaggtcagtcctga

SEQ ID NO: 252575 - DNA, 25 bp, Artificial
  Probe
ctggcccggtaggaggtctctccca

SEQ ID NO: 252576 - DNA, 25 bp, Artificial
  Probe
agtggctctcagtattgcgacagta

SEQ ID NO: 252577 - DNA, 25 bp, Artificial
  Probe
taagaaagtggctctcagtattgcg

SEQ ID NO: 252578 - DNA, 25 bp, Artificial
  Probe
cagtacaacattttttacaaggttg

SEQ ID NO: 252579 - DNA, 25 bp, Artificial
  Probe
cacttcgcttgtattgtaaaaggag

SEQ ID NO: 252580 - DNA, 25 bp, Artificial
  Probe
tccctggcccggtaggaggtctctc

SEQ ID NO: 252581 - DNA, 25 bp, Artificial
  Probe
gaagaaccaatcgtctgggttaaga

SEQ ID NO: 252582 - DNA, 25 bp, Artificial
  Probe
ttggtgaacaacgtactatggaagc

SEQ ID NO: 252583 - DNA, 25 bp, Artificial
  Probe
ccaggtctgatctgggttttgcctc

SEQ ID NO: 252584 - DNA, 25 bp, Artificial
  Probe
ctgggttttgcctctgcccttgggg

SEQ ID NO: 252585 - DNA, 25 bp, Artificial
  Probe
gggcccccaggtctgatctgggttt

SEQ ID NO: 252586 - DNA, 25 bp, Artificial
  Probe
gtctgtcatttctctttcaaaaagg

SEQ ID NO: 252587 - DNA, 25 bp, Artificial
  Probe
caggtgaccttagatttggtgaaca

SEQ ID NO: 252588 - DNA, 25 bp, Artificial
  Probe
aggccaacagcattggcctggccag

SEQ ID NO: 252589 - DNA, 25 bp, Artificial
  Probe
aacgtactatggaagccacatcact

SEQ ID NO: 252590 - DNA, 25 bp, Artificial
  Probe
actatggaagccacatcactattgg

SEQ ID NO: 252591 - DNA, 25 bp, Artificial
  Probe
acgtactatggaagccacatcacta

SEQ ID NO: 252592 - DNA, 25 bp, Artificial
  Probe
ttgcctctgcccttggggaaatgct

SEQ ID NO: 252593 - DNA, 25 bp, Artificial
  Probe
acaacgtactatggaagccacatca

SEQ ID NO: 252594 - DNA, 25 bp, Artificial
  Probe
acagcattggcctggccagaccagg

SEQ ID NO: 252595 - DNA, 25 bp, Artificial
  Probe
tgcctctgcccttggggaaatgcta

SEQ ID NO: 252596 - DNA, 25 bp, Artificial
  Probe
caaaggccaacagcattggcctggc

SEQ ID NO: 252597 - DNA, 25 bp, Artificial
  Probe
ggtgaccttagatttggtgaacaac

SEQ ID NO: 252598 - DNA, 25 bp, Artificial
  Probe
ccagaccaggtgaccttagatttgg

SEQ ID NO: 252599 - DNA, 25 bp, Artificial
  Probe
gcccccaggtctgatctgggttttg

SEQ ID NO: 252600 - DNA, 25 bp, Artificial
  Probe
ctgcccttggggaaatgctatcaga

SEQ ID NO: 252601 - DNA, 25 bp, Artificial
  Probe
ccaggtgaccttagatttggtgaac

SEQ ID NO: 252602 - DNA, 25 bp, Artificial
  Probe
tgggcccccaggtctgatctgggtt

SEQ ID NO: 252603 - DNA, 25 bp, Artificial
  Probe
gaacaacgtactatggaagccacat

SEQ ID NO: 252604 - DNA, 25 bp, Artificial
  Probe
catttctctttcaaaaaggcggtgt

SEQ ID NO: 252605 - DNA, 25 bp, Artificial
  Probe
ggccagaccaggtgaccttagattt

SEQ ID NO: 252606 - DNA, 25 bp, Artificial
  Probe
gggtgacctgcttccccaaaggcca

SEQ ID NO: 252607 - DNA, 25 bp, Artificial
  Probe
gtgaccttagatttggtgaacaacg

SEQ ID NO: 252608 - DNA, 25 bp, Artificial
  Probe
ctgtcatttctctttcaaaaaggcg

SEQ ID NO: 252609 - DNA, 25 bp, Artificial
  Probe
tatggaagccacatcactattgggc

SEQ ID NO: 252610 - DNA, 25 bp, Artificial
  Probe
attggcctggccagaccaggtgacc

SEQ ID NO: 252611 - DNA, 25 bp, Artificial
  Probe
tggcctggccagaccaggtgacctt

SEQ ID NO: 252612 - DNA, 25 bp, Artificial
  Probe
ctgatctgggttttgcctctgccct

SEQ ID NO: 252613 - DNA, 25 bp, Artificial
  Probe
aaggccaacagcattggcctggcca

SEQ ID NO: 252614 - DNA, 25 bp, Artificial
  Probe
gcctggccagaccaggtgaccttag

SEQ ID NO: 252615 - DNA, 25 bp, Artificial
  Probe
tgcccttggggaaatgctatcagaa

SEQ ID NO: 252616 - DNA, 25 bp, Artificial
  Probe
cccaaaggccaacagcattggcctg

SEQ ID NO: 252617 - DNA, 25 bp, Artificial
  Probe
gtgaacaacgtactatggaagccac

SEQ ID NO: 252618 - DNA, 25 bp, Artificial
  Probe
tgggttttgcctctgcccttgggga

SEQ ID NO: 252619 - DNA, 25 bp, Artificial
  Probe
tggtgaacaacgtactatggaagcc

SEQ ID NO: 252620 - DNA, 25 bp, Artificial
  Probe
ggaagccacatcactattgggcccc

SEQ ID NO: 252621 - DNA, 25 bp, Artificial
  Probe
tgatctgggttttgcctctgccctt

SEQ ID NO: 252622 - DNA, 25 bp, Artificial
  Probe
ggccaacagcattggcctggccaga

SEQ ID NO: 252623 - DNA, 25 bp, Artificial
  Probe
tgcagggtgacctgcttccccaaag

SEQ ID NO: 252624 - DNA, 25 bp, Artificial
  Probe
tgtcatttctctttcaaaaaggcgg

SEQ ID NO: 252625 - DNA, 25 bp, Artificial
  Probe
cagggtgacctgcttccccaaaggc

SEQ ID NO: 252626 - DNA, 25 bp, Artificial
  Probe
ccccaggtctgatctgggttttgcc

SEQ ID NO: 252627 - DNA, 25 bp, Artificial
  Probe
gaccttagatttggtgaacaacgta

SEQ ID NO: 252628 - DNA, 25 bp, Artificial
  Probe
aggcagcaattctgactatacgatt

SEQ ID NO: 252629 - DNA, 25 bp, Artificial
  Probe
ggatcactacactaaaaatcctgtg

SEQ ID NO: 252630 - DNA, 25 bp, Artificial
  Probe
ctcttcacattattacattccttct

SEQ ID NO: 252631 - DNA, 25 bp, Artificial
  Probe
ggcacgaggggctttctaatatgaa

SEQ ID NO: 252632 - DNA, 25 bp, Artificial
  Probe
aatcctgtggacttaaatggtaagc

SEQ ID NO: 252633 - DNA, 25 bp, Artificial
  Probe
ttgagtcaacgtcgtacacagtcct

SEQ ID NO: 252634 - DNA, 25 bp, Artificial
  Probe
cttgagtcaacgtcgtacacagtcc

SEQ ID NO: 252635 - DNA, 25 bp, Artificial
  Probe
tgagtcaacgtcgtacacagtcctt

SEQ ID NO: 252636 - DNA, 25 bp, Artificial
  Probe
aagctgctagggtatattttctcct

SEQ ID NO: 252637 - DNA, 25 bp, Artificial
  Probe
tctgactatacgatttaacttgagt

SEQ ID NO: 252638 - DNA, 25 bp, Artificial
  Probe
acgaggggctttctaatatgaaact

SEQ ID NO: 252639 - DNA, 25 bp, Artificial
  Probe
tctgtgtggagtaggcagcaattct

SEQ ID NO: 252640 - DNA, 25 bp, Artificial
  Probe
ctatacgatttaacttgagtcaacg

SEQ ID NO: 252641 - DNA, 25 bp, Artificial
  Probe
ctaaaaatcctgtggacttaaatgg

SEQ ID NO: 252642 - DNA, 25 bp, Artificial
  Probe
gtaggcagcaattctgactatacga

SEQ ID NO: 252643 - DNA, 25 bp, Artificial
  Probe
cgatttaacttgagtcaacgtcgta

SEQ ID NO: 252644 - DNA, 25 bp, Artificial
  Probe
acttgagtcaacgtcgtacacagtc

SEQ ID NO: 252645 - DNA, 25 bp, Artificial
  Probe
agtcaacgtcgtacacagtccttta

SEQ ID NO: 252646 - DNA, 25 bp, Artificial
  Probe
ttcatttattattcgactgttttat

SEQ ID NO: 252647 - DNA, 25 bp, Artificial
  Probe
gagtcaacgtcgtacacagtccttt

SEQ ID NO: 252648 - DNA, 25 bp, Artificial
  Probe
gatttaacttgagtcaacgtcgtac

SEQ ID NO: 252649 - DNA, 25 bp, Artificial
  Probe
tcctgtggacttaaatggtaagctg

SEQ ID NO: 252650 - DNA, 25 bp, Artificial
  Probe
tacgatttaacttgagtcaacgtcg

SEQ ID NO: 252651 - DNA, 25 bp, Artificial
  Probe
ggcagcaattctgactatacgattt

SEQ ID NO: 252652 - DNA, 25 bp, Artificial
  Probe
gcagcaattctgactatacgattta

SEQ ID NO: 252653 - DNA, 25 bp, Artificial
  Probe
agtaggcagcaattctgactatacg

SEQ ID NO: 252654 - DNA, 25 bp, Artificial
  Probe
atttaacttgagtcaacgtcgtaca

SEQ ID NO: 252655 - DNA, 25 bp, Artificial
  Probe
actaaaaatcctgtggacttaaatg

SEQ ID NO: 252656 - DNA, 25 bp, Artificial
  Probe
aacttgagtcaacgtcgtacacagt

SEQ ID NO: 252657 - DNA, 25 bp, Artificial
  Probe
atctgtgtggagtaggcagcaattc

SEQ ID NO: 252658 - DNA, 25 bp, Artificial
  Probe
gtcaacgtcgtacacagtcctttaa

SEQ ID NO: 252659 - DNA, 25 bp, Artificial
  Probe
atcctgtggacttaaatggtaagct

SEQ ID NO: 252660 - DNA, 25 bp, Artificial
  Probe
ttttttgtaagtagatcttgacatc

SEQ ID NO: 252661 - DNA, 25 bp, Artificial
  Probe
taacttgagtcaacgtcgtacacag

SEQ ID NO: 252662 - DNA, 25 bp, Artificial
  Probe
atacgatttaacttgagtcaacgtc

SEQ ID NO: 252663 - DNA, 25 bp, Artificial
  Probe
tttaacttgagtcaacgtcgtacac

SEQ ID NO: 252664 - DNA, 25 bp, Artificial
  Probe
gcacgaggggctttctaatatgaaa

SEQ ID NO: 252665 - DNA, 25 bp, Artificial
  Probe
gatcactacactaaaaatcctgtgg

SEQ ID NO: 252666 - DNA, 25 bp, Artificial
  Probe
ttctgactatacgatttaacttgag

SEQ ID NO: 252667 - DNA, 25 bp, Artificial
  Probe
tattttctcctgttttcattccttt

SEQ ID NO: 252668 - DNA, 25 bp, Artificial
  Probe
ttaacttgagtcaacgtcgtacaca

SEQ ID NO: 252669 - DNA, 25 bp, Artificial
  Probe
ctgactatacgatttaacttgagtc

SEQ ID NO: 252670 - DNA, 25 bp, Artificial
  Probe
taggcagcaattctgactatacgat

SEQ ID NO: 252671 - DNA, 25 bp, Artificial
  Probe
ccttaagttcatatatttgaatcaa

SEQ ID NO: 252672 - DNA, 25 bp, Artificial
  Probe
tctttttaataactgagagaaaaat

SEQ ID NO: 252673 - DNA, 25 bp, Artificial
  Probe
gactatacgatttaacttgagtcaa

SEQ ID NO: 252674 - DNA, 25 bp, Artificial
  Probe
tctgatgtgttcatccccaagcatt

SEQ ID NO: 252675 - DNA, 25 bp, Artificial
  Probe
ctgttctctgcttcagcaagcggct

SEQ ID NO: 252676 - DNA, 25 bp, Artificial
  Probe
tctctgcttcagcaagcggcttctt

SEQ ID NO: 252677 - DNA, 25 bp, Artificial
  Probe
gtggcgcaatcgtcacaaccagcag

SEQ ID NO: 252678 - DNA, 25 bp, Artificial
  Probe
agcaccagctgcaatgcagccttgg

SEQ ID NO: 252679 - DNA, 25 bp, Artificial
  Probe
ttctctgcttcagcaagcggcttct

SEQ ID NO: 252680 - DNA, 25 bp, Artificial
  Probe
cgctcttcccggtctgatgtgttca

SEQ ID NO: 252681 - DNA, 25 bp, Artificial
  Probe
ctgatgtgttcatccccaagcattc

SEQ ID NO: 252682 - DNA, 25 bp, Artificial
  Probe
gaaaggcgctcttcccggtctgatg

SEQ ID NO: 252683 - DNA, 25 bp, Artificial
  Probe
agcaagcggcttcttacaccaactt

SEQ ID NO: 252684 - DNA, 25 bp, Artificial
  Probe
ggtctgatgtgttcatccccaagca

SEQ ID NO: 252685 - DNA, 25 bp, Artificial
  Probe
ggcgcaatcgtcacaaccagcagac

SEQ ID NO: 252686 - DNA, 25 bp, Artificial
  Probe
tggcgcaatcgtcacaaccagcaga

SEQ ID NO: 252687 - DNA, 25 bp, Artificial
  Probe
gcaagcggcttcttacaccaacttt

SEQ ID NO: 252688 - DNA, 25 bp, Artificial
  Probe
cggtctgatgtgttcatccccaagc

SEQ ID NO: 252689 - DNA, 25 bp, Artificial
  Probe
gctcttcccggtctgatgtgttcat

SEQ ID NO: 252690 - DNA, 25 bp, Artificial
  Probe
tctgttctctgcttcagcaagcggc

SEQ ID NO: 252691 - DNA, 25 bp, Artificial
  Probe
aagttatcctagtaactgtgtcttt

SEQ ID NO: 252692 - DNA, 25 bp, Artificial
  Probe
cagcagacgcccacgggacagtggc

SEQ ID NO: 252693 - DNA, 25 bp, Artificial
  Probe
tcccggtctgatgtgttcatcccca

SEQ ID NO: 252694 - DNA, 25 bp, Artificial
  Probe
ttcccggtctgatgtgttcatcccc

SEQ ID NO: 252695 - DNA, 25 bp, Artificial
  Probe
gcgcaatcgtcacaaccagcagacg

SEQ ID NO: 252696 - DNA, 25 bp, Artificial
  Probe
ccggtctgatgtgttcatccccaag

SEQ ID NO: 252697 - DNA, 25 bp, Artificial
  Probe
gtctgatgtgttcatccccaagcat

SEQ ID NO: 252698 - DNA, 25 bp, Artificial
  Probe
ggtggcgcaatcgtcacaaccagca

SEQ ID NO: 252699 - DNA, 25 bp, Artificial
  Probe
taggaaaggcgctcttcccggtctg

SEQ ID NO: 252700 - DNA, 25 bp, Artificial
  Probe
tctgcttcagcaagcggcttcttac

SEQ ID NO: 252701 - DNA, 25 bp, Artificial
  Probe
taactctgttctctgcttcagcaag

SEQ ID NO: 252702 - DNA, 25 bp, Artificial
  Probe
tgttctctgcttcagcaagcggctt

SEQ ID NO: 252703 - DNA, 25 bp, Artificial
  Probe
tcagcaagcggcttcttacaccaac

SEQ ID NO: 252704 - DNA, 25 bp, Artificial
  Probe
ctcttcccggtctgatgtgttcatc

SEQ ID NO: 252705 - DNA, 25 bp, Artificial
  Probe
cccggtctgatgtgttcatccccaa

SEQ ID NO: 252706 - DNA, 25 bp, Artificial
  Probe
aggaaaggcgctcttcccggtctga

SEQ ID NO: 252707 - DNA, 25 bp, Artificial
  Probe
agttatcctagtaactgtgtctttc

SEQ ID NO: 252708 - DNA, 25 bp, Artificial
  Probe
aactctgttctctgcttcagcaagc

SEQ ID NO: 252709 - DNA, 25 bp, Artificial
  Probe
cagcaagcggcttcttacaccaact

SEQ ID NO: 252710 - DNA, 25 bp, Artificial
  Probe
ccagctgcaatgcagccttggttta

SEQ ID NO: 252711 - DNA, 25 bp, Artificial
  Probe
cagctgcaatgcagccttggtttat

SEQ ID NO: 252712 - DNA, 25 bp, Artificial
  Probe
gttctctgcttcagcaagcggcttc

SEQ ID NO: 252713 - DNA, 25 bp, Artificial
  Probe
gttatcctagtaactgtgtctttca

SEQ ID NO: 252714 - DNA, 25 bp, Artificial
  Probe
actctgttctctgcttcagcaagcg

SEQ ID NO: 252715 - DNA, 25 bp, Artificial
  Probe
aaagttatcctagtaactgtgtctt

SEQ ID NO: 252716 - DNA, 25 bp, Artificial
  Probe
aacagcaccagctgcaatgcagcct

SEQ ID NO: 252717 - DNA, 25 bp, Artificial
  Probe
gaacagcaccagctgcaatgcagcc

SEQ ID NO: 252718 - DNA, 25 bp, Artificial
  Probe
cttcccggtctgatgtgttcatccc

SEQ ID NO: 252719 - DNA, 25 bp, Artificial
  Probe
acagcaccagctgcaatgcagcctt

SEQ ID NO: 252720 - DNA, 25 bp, Artificial
  Probe
tccgtgcccctgcttgattgaagtg

SEQ ID NO: 252721 - DNA, 25 bp, Artificial
  Probe
atgagagaaacctcatgattctacc

SEQ ID NO: 252722 - DNA, 25 bp, Artificial
  Probe
tctttagaatagcttcgcctcctcg

SEQ ID NO: 252723 - DNA, 25 bp, Artificial
  Probe
ccgtgcccctgcttgattgaagtgt

SEQ ID NO: 252724 - DNA, 25 bp, Artificial
  Probe
tgcccctgcttgattgaagtgtttc

SEQ ID NO: 252725 - DNA, 25 bp, Artificial
  Probe
tgaccaagtctttagaatagcttcg

SEQ ID NO: 252726 - DNA, 25 bp, Artificial
  Probe
ctggctgggacgcaaccccagcctc

SEQ ID NO: 252727 - DNA, 25 bp, Artificial
  Probe
gctggctgaagctgcccacggcaag

SEQ ID NO: 252728 - DNA, 25 bp, Artificial
  Probe
tccttctggttcttggttcgccctt

SEQ ID NO: 252729 - DNA, 25 bp, Artificial
  Probe
ttggtcaatatttgacccattctta

SEQ ID NO: 252730 - DNA, 25 bp, Artificial
  Probe
tgaagtgtttccttctggttcttgg

SEQ ID NO: 252731 - DNA, 25 bp, Artificial
  Probe
gcccctgcttgattgaagtgtttcc

SEQ ID NO: 252732 - DNA, 25 bp, Artificial
  Probe
cttgattgaagtgtttccttctggt

SEQ ID NO: 252733 - DNA, 25 bp, Artificial
  Probe
tttgtgccactgtggctacatgagt

SEQ ID NO: 252734 - DNA, 25 bp, Artificial
  Probe
acagctgtttaaagtctttgtagcg

SEQ ID NO: 252735 - DNA, 25 bp, Artificial
  Probe
tttcttgttctttaattttgtgcca

SEQ ID NO: 252736 - DNA, 25 bp, Artificial
  Probe
gccctctgtcccaacggggccctgg

SEQ ID NO: 252737 - DNA, 25 bp, Artificial
  Probe
ttagaatagcttcgcctcctcgtct

SEQ ID NO: 252738 - DNA, 25 bp, Artificial
  Probe
cccctgcttgattgaagtgtttcct

SEQ ID NO: 252739 - DNA, 25 bp, Artificial
  Probe
ttttgtgccactgtggctacatgag

SEQ ID NO: 252740 - DNA, 25 bp, Artificial
  Probe
gtgccactgtggctacatgagttaa

SEQ ID NO: 252741 - DNA, 25 bp, Artificial
  Probe
tatcaacagctgtttaaagtctttg

SEQ ID NO: 252742 - DNA, 25 bp, Artificial
  Probe
aattttgtgccactgtggctacatg

SEQ ID NO: 252743 - DNA, 25 bp, Artificial
  Probe
taattttgtgccactgtggctacat

SEQ ID NO: 252744 - DNA, 25 bp, Artificial
  Probe
tcttggttcgcccttcccccgcttg

SEQ ID NO: 252745 - DNA, 25 bp, Artificial
  Probe
ggtgaccaagtctttagaatagctt

SEQ ID NO: 252746 - DNA, 25 bp, Artificial
  Probe
gattgaagtgtttccttctggttct

SEQ ID NO: 252747 - DNA, 25 bp, Artificial
  Probe
cgtgcccctgcttgattgaagtgtt

SEQ ID NO: 252748 - DNA, 25 bp, Artificial
  Probe
acctgtccatgatgcctccaccacc

SEQ ID NO: 252749 - DNA, 25 bp, Artificial
  Probe
gagagaaacctcatgattctaccaa

SEQ ID NO: 252750 - DNA, 25 bp, Artificial
  Probe
attcccacaactcgctggctgggac

SEQ ID NO: 252751 - DNA, 25 bp, Artificial
  Probe
cttcctcatcgctcgcacaaccatc

SEQ ID NO: 252752 - DNA, 25 bp, Artificial
  Probe
cttccgtgcccctgcttgattgaag

SEQ ID NO: 252753 - DNA, 25 bp, Artificial
  Probe
agagaaacctcatgattctaccaaa

SEQ ID NO: 252754 - DNA, 25 bp, Artificial
  Probe
ttccttctggttcttggttcgccct

SEQ ID NO: 252755 - DNA, 25 bp, Artificial
  Probe
tgattgaagtgtttccttctggttc

SEQ ID NO: 252756 - DNA, 25 bp, Artificial
  Probe
gaagtgtttccttctggttcttggt

SEQ ID NO: 252757 - DNA, 25 bp, Artificial
  Probe
ccctgcttgattgaagtgtttcctt

SEQ ID NO: 252758 - DNA, 25 bp, Artificial
  Probe
gtgaccaagtctttagaatagcttc

SEQ ID NO: 252759 - DNA, 25 bp, Artificial
  Probe
ctttagaatagcttcgcctcctcgt

SEQ ID NO: 252760 - DNA, 25 bp, Artificial
  Probe
ttccgtgcccctgcttgattgaagt

SEQ ID NO: 252761 - DNA, 25 bp, Artificial
  Probe
ctggctgaagctgcccacggcaagg

SEQ ID NO: 252762 - DNA, 25 bp, Artificial
  Probe
tctttgtagcgtttaaaaaatatat

SEQ ID NO: 252763 - DNA, 25 bp, Artificial
  Probe
tttagaatagcttcgcctcctcgtc

SEQ ID NO: 252764 - DNA, 25 bp, Artificial
  Probe
attttgtgccactgtggctacatga

SEQ ID NO: 252765 - DNA, 25 bp, Artificial
  Probe
acattcccacaactcgctggctggg

SEQ ID NO: 252766 - DNA, 25 bp, Artificial
  Probe
ctgggctcgggcagccctattgtga

SEQ ID NO: 252767 - DNA, 25 bp, Artificial
  Probe
ccatgttggactaattcatgcttca

SEQ ID NO: 252768 - DNA, 25 bp, Artificial
  Probe
aaagtatctcgcttggagtgcagag

SEQ ID NO: 252769 - DNA, 25 bp, Artificial
  Probe
tgttggactaattcatgcttcataa

SEQ ID NO: 252770 - DNA, 25 bp, Artificial
  Probe
gacctctgagaagcaagaggcggaa

SEQ ID NO: 252771 - DNA, 25 bp, Artificial
  Probe
gattattaccaaaagcagcagggtt

SEQ ID NO: 252772 - DNA, 25 bp, Artificial
  Probe
agtatctcgcttggagtgcagaggc

SEQ ID NO: 252773 - DNA, 25 bp, Artificial
  Probe
ctattgtgaatgcagcagtggattc

SEQ ID NO: 252774 - DNA, 25 bp, Artificial
  Probe
gattcaccggggacagctgtgacag

SEQ ID NO: 252775 - DNA, 25 bp, Artificial
  Probe
agcagcagggttacgctgcctgtca

SEQ ID NO: 252776 - DNA, 25 bp, Artificial
  Probe
tgtggacctctgagaagcaagaggc

SEQ ID NO: 252777 - DNA, 25 bp, Artificial
  Probe
ggttacgctgcctgtcaaacgacta

SEQ ID NO: 252778 - DNA, 25 bp, Artificial
  Probe
cagcagtggattcaccggggacagc

SEQ ID NO: 252779 - DNA, 25 bp, Artificial
  Probe
aatgcagcagtggattcaccgggga

SEQ ID NO: 252780 - DNA, 25 bp, Artificial
  Probe
ttcgaatgcacagatggatcttcat

SEQ ID NO: 252781 - DNA, 25 bp, Artificial
  Probe
gaccatgttggactaattcatgctt

SEQ ID NO: 252782 - DNA, 25 bp, Artificial
  Probe
aaagcagcagggttacgctgcctgt

SEQ ID NO: 252783 - DNA, 25 bp, Artificial
  Probe
tggatcttcatttgtggacgaggtc

SEQ ID NO: 252784 - DNA, 25 bp, Artificial
  Probe
ctctgagaagcaagaggcggaaata

SEQ ID NO: 252785 - DNA, 25 bp, Artificial
  Probe
ggctctctgggctcgggcagcccta

SEQ ID NO: 252786 - DNA, 25 bp, Artificial
  Probe
cagatggatcttcatttgtggacga

SEQ ID NO: 252787 - DNA, 25 bp, Artificial
  Probe
aagtgcggctgcacgagatgtgcct

SEQ ID NO: 252788 - DNA, 25 bp, Artificial
  Probe
acgagatgtgcctcctaagtgcagc

SEQ ID NO: 252789 - DNA, 25 bp, Artificial
  Probe
ctgtctttggcgaaggttgtacact

SEQ ID NO: 252790 - DNA, 25 bp, Artificial
  Probe
tgcacagatggatcttcatttgtgg

SEQ ID NO: 252791 - DNA, 25 bp, Artificial
  Probe
tcttcatttgtggacgaggtcgaga

SEQ ID NO: 252792 - DNA, 25 bp, Artificial
  Probe
agcttctgtctttggcgaaggttgt

SEQ ID NO: 252793 - DNA, 25 bp, Artificial
  Probe
aatactctttcgaatgcacagatgg

SEQ ID NO: 252794 - DNA, 25 bp, Artificial
  Probe
cacagatggatcttcatttgtggac

SEQ ID NO: 252795 - DNA, 25 bp, Artificial
  Probe
gcagggttacgctgcctgtcaaacg

SEQ ID NO: 252796 - DNA, 25 bp, Artificial
  Probe
gcagtgctgtggacctctgagaagc

SEQ ID NO: 252797 - DNA, 25 bp, Artificial
  Probe
ctcgggcagccctattgtgaatgca

SEQ ID NO: 252798 - DNA, 25 bp, Artificial
  Probe
accaaaagcagcagggttacgctgc

SEQ ID NO: 252799 - DNA, 25 bp, Artificial
  Probe
attgtgaatgcagcagtggattcac

SEQ ID NO: 252800 - DNA, 25 bp, Artificial
  Probe
cgaaggttgtacacttcttgaccat

SEQ ID NO: 252801 - DNA, 25 bp, Artificial
  Probe
taagaaagtatctcgcttggagtgc

SEQ ID NO: 252802 - DNA, 25 bp, Artificial
  Probe
gaaatactctttcgaatgcacagat

SEQ ID NO: 252803 - DNA, 25 bp, Artificial
  Probe
atgcacagatggatcttcatttgtg

SEQ ID NO: 252804 - DNA, 25 bp, Artificial
  Probe
ctgcacgagatgtgcctcctaagtg

SEQ ID NO: 252805 - DNA, 25 bp, Artificial
  Probe
tttggcgaaggttgtacacttcttg

SEQ ID NO: 252806 - DNA, 25 bp, Artificial
  Probe
ggcggaaatactctttcgaatgcac

SEQ ID NO: 252807 - DNA, 25 bp, Artificial
  Probe
tgaatgcagcagtggattcaccggg

SEQ ID NO: 252808 - DNA, 25 bp, Artificial
  Probe
actaagaaagtatctcgcttggagt

SEQ ID NO: 252809 - DNA, 25 bp, Artificial
  Probe
agcagtggattcaccggggacagct

SEQ ID NO: 252810 - DNA, 25 bp, Artificial
  Probe
cggggacagctgtgacagagaaatt

SEQ ID NO: 252811 - DNA, 25 bp, Artificial
  Probe
ctgtcaaacgactaagaaagtatct

SEQ ID NO: 252812 - DNA, 25 bp, Artificial
  Probe
tcgtcgggaatgtccttctgatgaa

SEQ ID NO: 252813 - DNA, 25 bp, Artificial
  Probe
ggaattcctcctgatcagcagaggt

SEQ ID NO: 252814 - DNA, 25 bp, Artificial
  Probe
aatggcaaaatcagccgacttcgtc

SEQ ID NO: 252815 - DNA, 25 bp, Artificial
  Probe
gggaagaccatcacgctcgaggttg

SEQ ID NO: 252816 - DNA, 25 bp, Artificial
  Probe
atgtaaaggccaagatccaggataa

SEQ ID NO: 252817 - DNA, 25 bp, Artificial
  Probe
caagttggctgtgctgaaatactat

SEQ ID NO: 252818 - DNA, 25 bp, Artificial
  Probe
agatttttgtgaagacccttacagg

SEQ ID NO: 252819 - DNA, 25 bp, Artificial
  Probe
tctcgtgctgagacttcgtggtggc

SEQ ID NO: 252820 - DNA, 25 bp, Artificial
  Probe
tgatcagcagaggttgatctttgct

SEQ ID NO: 252821 - DNA, 25 bp, Artificial
  Probe
tgctgagacttcgtggtggcgctaa

SEQ ID NO: 252822 - DNA, 25 bp, Artificial
  Probe
cagccgacttcgtcgggaatgtcct

SEQ ID NO: 252823 - DNA, 25 bp, Artificial
  Probe
aaaggagtccactctccatctcgtg

SEQ ID NO: 252824 - DNA, 25 bp, Artificial
  Probe
cacgctcgaggttgaaccctcggac

SEQ ID NO: 252825 - DNA, 25 bp, Artificial
  Probe
aaggaaggaattcctcctgatcagc

SEQ ID NO: 252826 - DNA, 25 bp, Artificial
  Probe
accatcacgctcgaggttgaaccct

SEQ ID NO: 252827 - DNA, 25 bp, Artificial
  Probe
aggagtccactctccatctcgtgct

SEQ ID NO: 252828 - DNA, 25 bp, Artificial
  Probe
ccaagatccaggataaggaaggaat

SEQ ID NO: 252829 - DNA, 25 bp, Artificial
  Probe
cactctccatctcgtgctgagactt

SEQ ID NO: 252830 - DNA, 25 bp, Artificial
  Probe
atcagccgacttcgtcgggaatgtc

SEQ ID NO: 252831 - DNA, 25 bp, Artificial
  Probe
cacgatgcagatttttgtgaagacc

SEQ ID NO: 252832 - DNA, 25 bp, Artificial
  Probe
tcctcctgatcagcagaggttgatc

SEQ ID NO: 252833 - DNA, 25 bp, Artificial
  Probe
ctgagacttcgtggtggcgctaaga

SEQ ID NO: 252834 - DNA, 25 bp, Artificial
  Probe
attcctcctgatcagcagaggttga

SEQ ID NO: 252835 - DNA, 25 bp, Artificial
  Probe
ttgtgaagacccttacagggaagac

SEQ ID NO: 252836 - DNA, 25 bp, Artificial
  Probe
agaccatcacgctcgaggttgaacc

SEQ ID NO: 252837 - DNA, 25 bp, Artificial
  Probe
acagggaagaccatcacgctcgagg

SEQ ID NO: 252838 - DNA, 25 bp, Artificial
  Probe
gagacttcgtggtggcgctaagaaa

SEQ ID NO: 252839 - DNA, 25 bp, Artificial
  Probe
ctcggacactatagaaaatgtaaag

SEQ ID NO: 252840 - DNA, 25 bp, Artificial
  Probe
gaggttgaaccctcggacactatag

SEQ ID NO: 252841 - DNA, 25 bp, Artificial
  Probe
aaatcagccgacttcgtcgggaatg

SEQ ID NO: 252842 - DNA, 25 bp, Artificial
  Probe
ttacagggaagaccatcacgctcga

SEQ ID NO: 252843 - DNA, 25 bp, Artificial
  Probe
cgggaatgtccttctgatgaatgtg

SEQ ID NO: 252844 - DNA, 25 bp, Artificial
  Probe
tcagcagaggttgatctttgctggt

SEQ ID NO: 252845 - DNA, 25 bp, Artificial
  Probe
acccttacagggaagaccatcacgc

SEQ ID NO: 252846 - DNA, 25 bp, Artificial
  Probe
ccttacagggaagaccatcacgctc

SEQ ID NO: 252847 - DNA, 25 bp, Artificial
  Probe
gctcgaggttgaaccctcggacact

SEQ ID NO: 252848 - DNA, 25 bp, Artificial
  Probe
ggtcaagttggctgtgctgaaatac

SEQ ID NO: 252849 - DNA, 25 bp, Artificial
  Probe
aatgtccttctgatgaatgtggtgc

SEQ ID NO: 252850 - DNA, 25 bp, Artificial
  Probe
cgatgcagatttttgtgaagaccct

SEQ ID NO: 252851 - DNA, 25 bp, Artificial
  Probe
gatttttgtgaagacccttacaggg

SEQ ID NO: 252852 - DNA, 25 bp, Artificial
  Probe
cagaggttgatctttgctggtaagc

SEQ ID NO: 252853 - DNA, 25 bp, Artificial
  Probe
gacttcgtcgggaatgtccttctga

SEQ ID NO: 252854 - DNA, 25 bp, Artificial
  Probe
atcagcagaggttgatctttgctgg

SEQ ID NO: 252855 - DNA, 25 bp, Artificial
  Probe
catcacgctcgaggttgaaccctcg

SEQ ID NO: 252856 - DNA, 25 bp, Artificial
  Probe
gaagacccttacagggaagaccatc

SEQ ID NO: 252857 - DNA, 25 bp, Artificial
  Probe
ttgaaccctcggacactatagaaaa

SEQ ID NO: 252858 - DNA, 25 bp, Artificial
  Probe
gactttgtgaatctctgaactgctc

SEQ ID NO: 252859 - DNA, 25 bp, Artificial
  Probe
gccacgcgacgctggtatgtatagg

SEQ ID NO: 252860 - DNA, 25 bp, Artificial
  Probe
acgctggtatgtataggagacagca

SEQ ID NO: 252861 - DNA, 25 bp, Artificial
  Probe
ctcctgttgaaagaccagattcttg

SEQ ID NO: 252862 - DNA, 25 bp, Artificial
  Probe
tgctctactttgacaagatgaccag

SEQ ID NO: 252863 - DNA, 25 bp, Artificial
  Probe
gaaagcggcgacagctttgcagcac

SEQ ID NO: 252864 - DNA, 25 bp, Artificial
  Probe
acagcagcagtgaaacggctcccag

SEQ ID NO: 252865 - DNA, 25 bp, Artificial
  Probe
ttggaaaagcggtctctcctgttga

SEQ ID NO: 252866 - DNA, 25 bp, Artificial
  Probe
tcactcttcagctgtttaagcctgc

SEQ ID NO: 252867 - DNA, 25 bp, Artificial
  Probe
cggcgacagctttgcagcaccttgg

SEQ ID NO: 252868 - DNA, 25 bp, Artificial
  Probe
gaaggccacgcgacgctggtatgta

SEQ ID NO: 252869 - DNA, 25 bp, Artificial
  Probe
ggaaaagcggtctctcctgttgaaa

SEQ ID NO: 252870 - DNA, 25 bp, Artificial
  Probe
ctctactttgacaagatgaccagat

SEQ ID NO: 252871 - DNA, 25 bp, Artificial
  Probe
acgcgacgctggtatgtataggaga

SEQ ID NO: 252872 - DNA, 25 bp, Artificial
  Probe
ggcacagtcactcttcagctgttta

SEQ ID NO: 252873 - DNA, 25 bp, Artificial
  Probe
ataggagacagcagcagtgaaacgg

SEQ ID NO: 252874 - DNA, 25 bp, Artificial
  Probe
tttgcagcaccttggcacagtcact

SEQ ID NO: 252875 - DNA, 25 bp, Artificial
  Probe
gaatctctgaactgctctactttga

SEQ ID NO: 252876 - DNA, 25 bp, Artificial
  Probe
cgacgctggtatgtataggagacag

SEQ ID NO: 252877 - DNA, 25 bp, Artificial
  Probe
gtggactttgtgaatctctgaactg

SEQ ID NO: 252878 - DNA, 25 bp, Artificial
  Probe
gcgacagctttgcagcaccttggca

SEQ ID NO: 252879 - DNA, 25 bp, Artificial
  Probe
agcaccttggcacagtcactcttca

SEQ ID NO: 252880 - DNA, 25 bp, Artificial
  Probe
ggtctctcctgttgaaagaccagat

SEQ ID NO: 252881 - DNA, 25 bp, Artificial
  Probe
actgctctactttgacaagatgacc

SEQ ID NO: 252882 - DNA, 25 bp, Artificial
  Probe
aaagcggtctctcctgttgaaagac

SEQ ID NO: 252883 - DNA, 25 bp, Artificial
  Probe
ggactttgtgaatctctgaactgct

SEQ ID NO: 252884 - DNA, 25 bp, Artificial
  Probe
agacagcagcagtgaaacggctccc

SEQ ID NO: 252885 - DNA, 25 bp, Artificial
  Probe
aggaaagcggcgacagctttgcagc

SEQ ID NO: 252886 - DNA, 25 bp, Artificial
  Probe
ttcagctgtttaagcctgcccagcc

SEQ ID NO: 252887 - DNA, 25 bp, Artificial
  Probe
cgacagctttgcagcaccttggcac

SEQ ID NO: 252888 - DNA, 25 bp, Artificial
  Probe
cacagtcactcttcagctgtttaag

SEQ ID NO: 252889 - DNA, 25 bp, Artificial
  Probe
gcaccttggcacagtcactcttcag

SEQ ID NO: 252890 - DNA, 25 bp, Artificial
  Probe
caagatgaccagattggagtaatca

SEQ ID NO: 252891 - DNA, 25 bp, Artificial
  Probe
tggactttgtgaatctctgaactgc

SEQ ID NO: 252892 - DNA, 25 bp, Artificial
  Probe
gcacagtcactcttcagctgtttaa

SEQ ID NO: 252893 - DNA, 25 bp, Artificial
  Probe
gagacagcagcagtgaaacggctcc

SEQ ID NO: 252894 - DNA, 25 bp, Artificial
  Probe
ctttgacaagatgaccagattggag

SEQ ID NO: 252895 - DNA, 25 bp, Artificial
  Probe
acaagatgaccagattggagtaatc

SEQ ID NO: 252896 - DNA, 25 bp, Artificial
  Probe
ctctgtttggtggactttgtgaatc

SEQ ID NO: 252897 - DNA, 25 bp, Artificial
  Probe
ctgtttggtggactttgtgaatctc

SEQ ID NO: 252898 - DNA, 25 bp, Artificial
  Probe
ttccagaaggccacgcgacgctggt

SEQ ID NO: 252899 - DNA, 25 bp, Artificial
  Probe
accttggcacagtcactcttcagct

SEQ ID NO: 252900 - DNA, 25 bp, Artificial
  Probe
cttggcacagtcactcttcagctgt

SEQ ID NO: 252901 - DNA, 25 bp, Artificial
  Probe
tataggagacagcagcagtgaaacg

SEQ ID NO: 252902 - DNA, 25 bp, Artificial
  Probe
aagcggtctctcctgttgaaagacc

SEQ ID NO: 252903 - DNA, 25 bp, Artificial
  Probe
ctctgaactgctctactttgacaag

SEQ ID NO: 252904 - DNA, 25 bp, Artificial
  Probe
tgaacctaattgtaaactttcaggt

SEQ ID NO: 252905 - DNA, 25 bp, Artificial
  Probe
acatgtaaacgttttcagggaatgc

SEQ ID NO: 252906 - DNA, 25 bp, Artificial
  Probe
ctttgcttcactctgtgctatatag

SEQ ID NO: 252907 - DNA, 25 bp, Artificial
  Probe
tatatagctctttggctcgtgaacc

SEQ ID NO: 252908 - DNA, 25 bp, Artificial
  Probe
tttgcttcactctgtgctatatagc

SEQ ID NO: 252909 - DNA, 25 bp, Artificial
  Probe
ttagcgttttaatacgtaggctctg

SEQ ID NO: 252910 - DNA, 25 bp, Artificial
  Probe
tttatcccgcgtgctttgcttcact

SEQ ID NO: 252911 - DNA, 25 bp, Artificial
  Probe
tggctcgtgaacctaattgtaaact

SEQ ID NO: 252912 - DNA, 25 bp, Artificial
  Probe
tgtgctatatagctctttggctcgt

SEQ ID NO: 252913 - DNA, 25 bp, Artificial
  Probe
tgctttgcttcactctgtgctatat

SEQ ID NO: 252914 - DNA, 25 bp, Artificial
  Probe
cgtgctttgcttcactctgtgctat

SEQ ID NO: 252915 - DNA, 25 bp, Artificial
  Probe
tctgtgctatatagctctttggctc

SEQ ID NO: 252916 - DNA, 25 bp, Artificial
  Probe
gctatatagctctttggctcgtgaa

SEQ ID NO: 252917 - DNA, 25 bp, Artificial
  Probe
ctttggctcgtgaacctaattgtaa

SEQ ID NO: 252918 - DNA, 25 bp, Artificial
  Probe
tttggctcgtgaacctaattgtaaa

SEQ ID NO: 252919 - DNA, 25 bp, Artificial
  Probe
tcccgcgtgctttgcttcactctgt

SEQ ID NO: 252920 - DNA, 25 bp, Artificial
  Probe
cagctcagggttgtttggagcctgt

SEQ ID NO: 252921 - DNA, 25 bp, Artificial
  Probe
cgcgtgctttgcttcactctgtgct

SEQ ID NO: 252922 - DNA, 25 bp, Artificial
  Probe
agctctttggctcgtgaacctaatt

SEQ ID NO: 252923 - DNA, 25 bp, Artificial
  Probe
ttatcccgcgtgctttgcttcactc

SEQ ID NO: 252924 - DNA, 25 bp, Artificial
  Probe
gctctttggctcgtgaacctaattg

SEQ ID NO: 252925 - DNA, 25 bp, Artificial
  Probe
atgccaaatgctttgggtttttagc

SEQ ID NO: 252926 - DNA, 25 bp, Artificial
  Probe
cgttttaatacgtaggctctgttat

SEQ ID NO: 252927 - DNA, 25 bp, Artificial
  Probe
tcactctgtgctatatagctctttg

SEQ ID NO: 252928 - DNA, 25 bp, Artificial
  Probe
tcatagtgtaaactgcagtgaccgg

SEQ ID NO: 252929 - DNA, 25 bp, Artificial
  Probe
gctcgtgaacctaattgtaaacttt

SEQ ID NO: 252930 - DNA, 25 bp, Artificial
  Probe
tagctctttggctcgtgaacctaat

SEQ ID NO: 252931 - DNA, 25 bp, Artificial
  Probe
tctttggctcgtgaacctaattgta

SEQ ID NO: 252932 - DNA, 25 bp, Artificial
  Probe
gtgctatatagctctttggctcgtg

SEQ ID NO: 252933 - DNA, 25 bp, Artificial
  Probe
ctctttggctcgtgaacctaattgt

SEQ ID NO: 252934 - DNA, 25 bp, Artificial
  Probe
gctttgcttcactctgtgctatata

SEQ ID NO: 252935 - DNA, 25 bp, Artificial
  Probe
actctgtgctatatagctctttggc

SEQ ID NO: 252936 - DNA, 25 bp, Artificial
  Probe
ctttatcccgcgtgctttgcttcac

SEQ ID NO: 252937 - DNA, 25 bp, Artificial
  Probe
gctcagggttgtttggagcctgttt

SEQ ID NO: 252938 - DNA, 25 bp, Artificial
  Probe
cactctgtgctatatagctctttgg

SEQ ID NO: 252939 - DNA, 25 bp, Artificial
  Probe
gcgtgctttgcttcactctgtgcta

SEQ ID NO: 252940 - DNA, 25 bp, Artificial
  Probe
tgccaaatgctttgggtttttagcg

SEQ ID NO: 252941 - DNA, 25 bp, Artificial
  Probe
ttgcttcactctgtgctatatagct

SEQ ID NO: 252942 - DNA, 25 bp, Artificial
  Probe
tttagcgttttaatacgtaggctct

SEQ ID NO: 252943 - DNA, 25 bp, Artificial
  Probe
ccgcgtgctttgcttcactctgtgc

SEQ ID NO: 252944 - DNA, 25 bp, Artificial
  Probe
catgtaaacgttttcagggaatgca

SEQ ID NO: 252945 - DNA, 25 bp, Artificial
  Probe
ctatatagctctttggctcgtgaac

SEQ ID NO: 252946 - DNA, 25 bp, Artificial
  Probe
ttggctcgtgaacctaattgtaaac

SEQ ID NO: 252947 - DNA, 25 bp, Artificial
  Probe
gcttcactctgtgctatatagctct

SEQ ID NO: 252948 - DNA, 25 bp, Artificial
  Probe
cccgcgtgctttgcttcactctgtg

SEQ ID NO: 252949 - DNA, 25 bp, Artificial
  Probe
tatcccgcgtgctttgcttcactct

SEQ ID NO: 252950 - DNA, 25 bp, Artificial
  Probe
aaccagccgccatgtctctatgtgc

SEQ ID NO: 252951 - DNA, 25 bp, Artificial
  Probe
taggttacccatctgacactgcggt

SEQ ID NO: 252952 - DNA, 25 bp, Artificial
  Probe
gcctggtatttgttggggacaccct

SEQ ID NO: 252953 - DNA, 25 bp, Artificial
  Probe
aggttacccatctgacactgcggtc

SEQ ID NO: 252954 - DNA, 25 bp, Artificial
  Probe
catgtctctatgtgccccacggcaa

SEQ ID NO: 252955 - DNA, 25 bp, Artificial
  Probe
tccggctagaggttcatctcttggt

SEQ ID NO: 252956 - DNA, 25 bp, Artificial
  Probe
gccgccttaggttacccatctgaca

SEQ ID NO: 252957 - DNA, 25 bp, Artificial
  Probe
caggtacagtgctggcccaaacctt

SEQ ID NO: 252958 - DNA, 25 bp, Artificial
  Probe
cccatctgacactgcggtccaagag

SEQ ID NO: 252959 - DNA, 25 bp, Artificial
  Probe
tgccccacggcaaacgagtggtggt

SEQ ID NO: 252960 - DNA, 25 bp, Artificial
  Probe
cactgcggtccaagagatggcgcga

SEQ ID NO: 252961 - DNA, 25 bp, Artificial
  Probe
acactgcggtccaagagatggcgcg

SEQ ID NO: 252962 - DNA, 25 bp, Artificial
  Probe
ggggccgccttaggttacccatctg

SEQ ID NO: 252963 - DNA, 25 bp, Artificial
  Probe
gagggcctgtttgtccagccttacc

SEQ ID NO: 252964 - DNA, 25 bp, Artificial
  Probe
ccttgcgggccactgtgcttgctgt

SEQ ID NO: 252965 - DNA, 25 bp, Artificial
  Probe
tctatgtgccccacggcaaacgagt

SEQ ID NO: 252966 - DNA, 25 bp, Artificial
  Probe
ctccggctagaggttcatctcttgg

SEQ ID NO: 252967 - DNA, 25 bp, Artificial
  Probe
ctgacactgcggtccaagagatggc

SEQ ID NO: 252968 - DNA, 25 bp, Artificial
  Probe
ctgcgctccggctagaggttcatct

SEQ ID NO: 252969 - DNA, 25 bp, Artificial
  Probe
ggttcatctcttggtcattttagcc

SEQ ID NO: 252970 - DNA, 25 bp, Artificial
  Probe
caccgcctggtatttgttggggaca

SEQ ID NO: 252971 - DNA, 25 bp, Artificial
  Probe
tggcccaaaccttgcgggccactgt

SEQ ID NO: 252972 - DNA, 25 bp, Artificial
  Probe
gctccggctagaggttcatctcttg

SEQ ID NO: 252973 - DNA, 25 bp, Artificial
  Probe
tgcgctccggctagaggttcatctc

SEQ ID NO: 252974 - DNA, 25 bp, Artificial
  Probe
acccatctgacactgcggtccaaga

SEQ ID NO: 252975 - DNA, 25 bp, Artificial
  Probe
ccggctagaggttcatctcttggtc

SEQ ID NO: 252976 - DNA, 25 bp, Artificial
  Probe
cctgagggcctgtttgtccagcctt

SEQ ID NO: 252977 - DNA, 25 bp, Artificial
  Probe
cttgcgggccactgtgcttgctgtc

SEQ ID NO: 252978 - DNA, 25 bp, Artificial
  Probe
gggccgccttaggttacccatctga

SEQ ID NO: 252979 - DNA, 25 bp, Artificial
  Probe
cctgctcccctgagggcctgtttgt

SEQ ID NO: 252980 - DNA, 25 bp, Artificial
  Probe
gggcctgtttgtccagccttaccct

SEQ ID NO: 252981 - DNA, 25 bp, Artificial
  Probe
cgggccactgtgcttgctgtcaagg

SEQ ID NO: 252982 - DNA, 25 bp, Artificial
  Probe
tatttgttggggacaccctaggccg

SEQ ID NO: 252983 - DNA, 25 bp, Artificial
  Probe
ctagaggttcatctcttggtcattt

SEQ ID NO: 252984 - DNA, 25 bp, Artificial
  Probe
gcaggtacagtgctggcccaaacct

SEQ ID NO: 252985 - DNA, 25 bp, Artificial
  Probe
tagaggttcatctcttggtcatttt

SEQ ID NO: 252986 - DNA, 25 bp, Artificial
  Probe
ggttacccatctgacactgcggtcc

SEQ ID NO: 252987 - DNA, 25 bp, Artificial
  Probe
actgcggtccaagagatggcgcgat

SEQ ID NO: 252988 - DNA, 25 bp, Artificial
  Probe
ggctgcaggtacagtgctggcccaa

SEQ ID NO: 252989 - DNA, 25 bp, Artificial
  Probe
agagccctgcgctccggctagaggt

SEQ ID NO: 252990 - DNA, 25 bp, Artificial
  Probe
tgagggcctgtttgtccagccttac

SEQ ID NO: 252991 - DNA, 25 bp, Artificial
  Probe
tgcaggtacagtgctggcccaaacc

SEQ ID NO: 252992 - DNA, 25 bp, Artificial
  Probe
cttaggttacccatctgacactgcg

SEQ ID NO: 252993 - DNA, 25 bp, Artificial
  Probe
tgacactgcggtccaagagatggcg

SEQ ID NO: 252994 - DNA, 25 bp, Artificial
  Probe
ggccgccttaggttacccatctgac

SEQ ID NO: 252995 - DNA, 25 bp, Artificial
  Probe
ccctgagggcctgtttgtccagcct

SEQ ID NO: 252996 - DNA, 25 bp, Artificial
  Probe
ccaacttttctgcttatttgggagt

SEQ ID NO: 252997 - DNA, 25 bp, Artificial
  Probe
cttaggtctgttagaggaagacgac

SEQ ID NO: 252998 - DNA, 25 bp, Artificial
  Probe
ctgcttggatttatttgtgtttttg

SEQ ID NO: 252999 - DNA, 25 bp, Artificial
  Probe
gcagagaacccaggatgggacacta

SEQ ID NO: 253000 - DNA, 25 bp, Artificial
  Probe
gtttgaagagttccctgccgaagac

SEQ ID NO: 253001 - DNA, 25 bp, Artificial
  Probe
tgcttaatacattctagggcagaga

SEQ ID NO: 253002 - DNA, 25 bp, Artificial
  Probe
gatttatttgtgtttttgtaacaca

SEQ ID NO: 253003 - DNA, 25 bp, Artificial
  Probe
agtttgaagagttccctgccgaaga

SEQ ID NO: 253004 - DNA, 25 bp, Artificial
  Probe
taatacattctagggcagagaaccc

SEQ ID NO: 253005 - DNA, 25 bp, Artificial
  Probe
aagcagccggtagacttaggtctgt

SEQ ID NO: 253006 - DNA, 25 bp, Artificial
  Probe
cctgcttaatacattctagggcaga

SEQ ID NO: 253007 - DNA, 25 bp, Artificial
  Probe
cttaatacattctagggcagagaac

SEQ ID NO: 253008 - DNA, 25 bp, Artificial
  Probe
acttgacctgcttaatacattctag

SEQ ID NO: 253009 - DNA, 25 bp, Artificial
  Probe
agagttccctgccgaagactgggct

SEQ ID NO: 253010 - DNA, 25 bp, Artificial
  Probe
atagcatccagaagaagtgttgaag

SEQ ID NO: 253011 - DNA, 25 bp, Artificial
  Probe
ctgcttaatacattctagggcagag

SEQ ID NO: 253012 - DNA, 25 bp, Artificial
  Probe
gacagtctagatgtcagagaaaaag

SEQ ID NO: 253013 - DNA, 25 bp, Artificial
  Probe
tcatagcatccagaagaagtgttga

SEQ ID NO: 253014 - DNA, 25 bp, Artificial
  Probe
aaagcagccggtagacttaggtctg

SEQ ID NO: 253015 - DNA, 25 bp, Artificial
  Probe
cgagtttgaagagttccctgccgaa

SEQ ID NO: 253016 - DNA, 25 bp, Artificial
  Probe
acagtctagatgtcagagaaaaagc

SEQ ID NO: 253017 - DNA, 25 bp, Artificial
  Probe
ttgacctgcttaatacattctaggg

SEQ ID NO: 253018 - DNA, 25 bp, Artificial
  Probe
gtaacctaaacttgacctgcttaat

SEQ ID NO: 253019 - DNA, 25 bp, Artificial
  Probe
agccggtagacttaggtctgttaga

SEQ ID NO: 253020 - DNA, 25 bp, Artificial
  Probe
gcgcggacagtctagatgtcagaga

SEQ ID NO: 253021 - DNA, 25 bp, Artificial
  Probe
gcttaatacattctagggcagagaa

SEQ ID NO: 253022 - DNA, 25 bp, Artificial
  Probe
gcatccagaagaagtgttgaagtaa

SEQ ID NO: 253023 - DNA, 25 bp, Artificial
  Probe
agggcagagaacccaggatgggaca

SEQ ID NO: 253024 - DNA, 25 bp, Artificial
  Probe
cgcggacagtctagatgtcagagaa

SEQ ID NO: 253025 - DNA, 25 bp, Artificial
  Probe
tgaagagttccctgccgaagactgg

SEQ ID NO: 253026 - DNA, 25 bp, Artificial
  Probe
acctgcttaatacattctagggcag

SEQ ID NO: 253027 - DNA, 25 bp, Artificial
  Probe
gacctgcttaatacattctagggca

SEQ ID NO: 253028 - DNA, 25 bp, Artificial
  Probe
agcagccggtagacttaggtctgtt

SEQ ID NO: 253029 - DNA, 25 bp, Artificial
  Probe
gccggtagacttaggtctgttagag

SEQ ID NO: 253030 - DNA, 25 bp, Artificial
  Probe
cagagaacccaggatgggacactaa

SEQ ID NO: 253031 - DNA, 25 bp, Artificial
  Probe
gaagtaacctaaacttgacctgctt

SEQ ID NO: 253032 - DNA, 25 bp, Artificial
  Probe
cggacagtctagatgtcagagaaaa

SEQ ID NO: 253033 - DNA, 25 bp, Artificial
  Probe
caacttttctgcttatttgggagtt

SEQ ID NO: 253034 - DNA, 25 bp, Artificial
  Probe
catagcatccagaagaagtgttgaa

SEQ ID NO: 253035 - DNA, 25 bp, Artificial
  Probe
ttaatacattctagggcagagaacc

SEQ ID NO: 253036 - DNA, 25 bp, Artificial
  Probe
tgacctgcttaatacattctagggc

SEQ ID NO: 253037 - DNA, 25 bp, Artificial
  Probe
ttaggtctgttagaggaagacgacg

SEQ ID NO: 253038 - DNA, 25 bp, Artificial
  Probe
cggtagacttaggtctgttagagga

SEQ ID NO: 253039 - DNA, 25 bp, Artificial
  Probe
cagccggtagacttaggtctgttag

SEQ ID NO: 253040 - DNA, 25 bp, Artificial
  Probe
ccggtagacttaggtctgttagagg

SEQ ID NO: 253041 - DNA, 25 bp, Artificial
  Probe
gcagccggtagacttaggtctgtta

SEQ ID NO: 253042 - DNA, 25 bp, Artificial
  Probe
ccgcggtgtcggtggaaaacttcat

SEQ ID NO: 253043 - DNA, 25 bp, Artificial
  Probe
tgctgagctcctgcctgacaagtgg

SEQ ID NO: 253044 - DNA, 25 bp, Artificial
  Probe
tggaaaacttcattgctgagctcct

SEQ ID NO: 253045 - DNA, 25 bp, Artificial
  Probe
ctgagctcctgcctgacaagtggtt

SEQ ID NO: 253046 - DNA, 25 bp, Artificial
  Probe
ctgcctgacaagtggtttgacatcg

SEQ ID NO: 253047 - DNA, 25 bp, Artificial
  Probe
ttgctgagctcctgcctgacaagtg

SEQ ID NO: 253048 - DNA, 25 bp, Artificial
  Probe
gaaaagcagaccgcggtgtcggtgg

SEQ ID NO: 253049 - DNA, 25 bp, Artificial
  Probe
cttcattgctgagctcctgcctgac

SEQ ID NO: 253050 - DNA, 25 bp, Artificial
  Probe
gagctcctgcctgacaagtggtttg

SEQ ID NO: 253051 - DNA, 25 bp, Artificial
  Probe
ctcctgcctgacaagtggtttgaca

SEQ ID NO: 253052 - DNA, 25 bp, Artificial
  Probe
tgagctcctgcctgacaagtggttt

SEQ ID NO: 253053 - DNA, 25 bp, Artificial
  Probe
tgaaaagcagaccgcggtgtcggtg

SEQ ID NO: 253054 - DNA, 25 bp, Artificial
  Probe
agctcctgcctgacaagtggtttga

SEQ ID NO: 253055 - DNA, 25 bp, Artificial
  Probe
tcctgcctgacaagtggtttgacat

SEQ ID NO: 253056 - DNA, 25 bp, Artificial
  Probe
gcagaccgcggtgtcggtggaaaac

SEQ ID NO: 253057 - DNA, 25 bp, Artificial
  Probe
aaaagcagaccgcggtgtcggtgga

SEQ ID NO: 253058 - DNA, 25 bp, Artificial
  Probe
tgcctgacaagtggtttgacatcgg

SEQ ID NO: 253059 - DNA, 25 bp, Artificial
  Probe
aaagcagaccgcggtgtcggtggaa

SEQ ID NO: 253060 - DNA, 25 bp, Artificial
  Probe
gcctgacaagtggtttgacatcggc

SEQ ID NO: 253061 - DNA, 25 bp, Artificial
  Probe
cgcggtgtcggtggaaaacttcatt

SEQ ID NO: 253062 - DNA, 25 bp, Artificial
  Probe
cagaccgcggtgtcggtggaaaact

SEQ ID NO: 253063 - DNA, 25 bp, Artificial
  Probe
agcagaccgcggtgtcggtggaaaa

SEQ ID NO: 253064 - DNA, 25 bp, Artificial
  Probe
aagcagaccgcggtgtcggtggaaa

SEQ ID NO: 253065 - DNA, 25 bp, Artificial
  Probe
gctcctgcctgacaagtggtttgac

SEQ ID NO: 253066 - DNA, 25 bp, Artificial
  Probe
gctgagctcctgcctgacaagtggt

SEQ ID NO: 253067 - DNA, 25 bp, Artificial
  Probe
acttcattgctgagctcctgcctga

SEQ ID NO: 253068 - DNA, 25 bp, Artificial
  Probe
tcattgctgagctcctgcctgacaa

SEQ ID NO: 253069 - DNA, 25 bp, Artificial
  Probe
cctgcctgacaagtggtttgacatc

SEQ ID NO: 253070 - DNA, 25 bp, Artificial
  Probe
aactgatgaagttgtcgctactaaa

SEQ ID NO: 253071 - DNA, 25 bp, Artificial
  Probe
tgtagcgatgtgatcacactgtctt

SEQ ID NO: 253072 - DNA, 25 bp, Artificial
  Probe
tgttttcatcatgacatcgtgcgct

SEQ ID NO: 253073 - DNA, 25 bp, Artificial
  Probe
gcgatgtgatcacactgtcttggaa

SEQ ID NO: 253074 - DNA, 25 bp, Artificial
  Probe
ttttctcggtctctgaggtgaagcg

SEQ ID NO: 253075 - DNA, 25 bp, Artificial
  Probe
cggtctctgaggtgaagcgagttat

SEQ ID NO: 253076 - DNA, 25 bp, Artificial
  Probe
gttgtcgctactaaaatgcttgttt

SEQ ID NO: 253077 - DNA, 25 bp, Artificial
  Probe
ttcttaactgatgaagttgtcgcta

SEQ ID NO: 253078 - DNA, 25 bp, Artificial
  Probe
tttgatcattttctcggtctctgag

SEQ ID NO: 253079 - DNA, 25 bp, Artificial
  Probe
aattcttaactgatgaagttgtcgc

SEQ ID NO: 253080 - DNA, 25 bp, Artificial
  Probe
ctgttatagcttgttactcagtttc

SEQ ID NO: 253081 - DNA, 25 bp, Artificial
  Probe
cgatgtgatcacactgtcttggaat

SEQ ID NO: 253082 - DNA, 25 bp, Artificial
  Probe
ttgatcattttctcggtctctgagg

SEQ ID NO: 253083 - DNA, 25 bp, Artificial
  Probe
cattttctcggtctctgaggtgaag

SEQ ID NO: 253084 - DNA, 25 bp, Artificial
  Probe
tcattttctcggtctctgaggtgaa

SEQ ID NO: 253085 - DNA, 25 bp, Artificial
  Probe
ctcggtctctgaggtgaagcgagtt

SEQ ID NO: 253086 - DNA, 25 bp, Artificial
  Probe
cttgttttcatcatgacatcgtgcg

SEQ ID NO: 253087 - DNA, 25 bp, Artificial
  Probe
tcctgttgtggtgaactgttatagc

SEQ ID NO: 253088 - DNA, 25 bp, Artificial
  Probe
actgtcttggaattacattaaactg

SEQ ID NO: 253089 - DNA, 25 bp, Artificial
  Probe
ctaattcttaactgatgaagttgtc

SEQ ID NO: 253090 - DNA, 25 bp, Artificial
  Probe
aagttgtcgctactaaaatgcttgt

SEQ ID NO: 253091 - DNA, 25 bp, Artificial
  Probe
attcttaactgatgaagttgtcgct

SEQ ID NO: 253092 - DNA, 25 bp, Artificial
  Probe
gttttcatcatgacatcgtgcgctt

SEQ ID NO: 253093 - DNA, 25 bp, Artificial
  Probe
atcatgacatcgtgcgcttctaaat

SEQ ID NO: 253094 - DNA, 25 bp, Artificial
  Probe
cctgttgtggtgaactgttatagct

SEQ ID NO: 253095 - DNA, 25 bp, Artificial
  Probe
aatgcttgttttcatcatgacatcg

SEQ ID NO: 253096 - DNA, 25 bp, Artificial
  Probe
gatgtgatcacactgtcttggaatt

SEQ ID NO: 253097 - DNA, 25 bp, Artificial
  Probe
tttcatcatgacatcgtgcgcttct

SEQ ID NO: 253098 - DNA, 25 bp, Artificial
  Probe
actgttatagcttgttactcagttt

SEQ ID NO: 253099 - DNA, 25 bp, Artificial
  Probe
ttaactgatgaagttgtcgctacta

SEQ ID NO: 253100 - DNA, 25 bp, Artificial
  Probe
atgcttgttttcatcatgacatcgt

SEQ ID NO: 253101 - DNA, 25 bp, Artificial
  Probe
tcggtctctgaggtgaagcgagtta

SEQ ID NO: 253102 - DNA, 25 bp, Artificial
  Probe
atatgtgtagcgatgtgatcacact

SEQ ID NO: 253103 - DNA, 25 bp, Artificial
  Probe
tacattaaactgtttggaatcactg

SEQ ID NO: 253104 - DNA, 25 bp, Artificial
  Probe
gatcacactgtcttggaattacatt

SEQ ID NO: 253105 - DNA, 25 bp, Artificial
  Probe
tgaagttgtcgctactaaaatgctt

SEQ ID NO: 253106 - DNA, 25 bp, Artificial
  Probe
tgatcacactgtcttggaattacat

SEQ ID NO: 253107 - DNA, 25 bp, Artificial
  Probe
ttgttttcatcatgacatcgtgcgc

SEQ ID NO: 253108 - DNA, 25 bp, Artificial
  Probe
ttcatcatgacatcgtgcgcttcta

SEQ ID NO: 253109 - DNA, 25 bp, Artificial
  Probe
tatgtgtagcgatgtgatcacactg

SEQ ID NO: 253110 - DNA, 25 bp, Artificial
  Probe
tagcgatgtgatcacactgtcttgg

SEQ ID NO: 253111 - DNA, 25 bp, Artificial
  Probe
tttctcggtctctgaggtgaagcga

SEQ ID NO: 253112 - DNA, 25 bp, Artificial
  Probe
taactgatgaagttgtcgctactaa

SEQ ID NO: 253113 - DNA, 25 bp, Artificial
  Probe
atgtgatcacactgtcttggaatta

SEQ ID NO: 253114 - DNA, 25 bp, Artificial
  Probe
cttaactgatgaagttgtcgctact

SEQ ID NO: 253115 - DNA, 25 bp, Artificial
  Probe
tgaactgttatagcttgttactcag

SEQ ID NO: 253116 - DNA, 25 bp, Artificial
  Probe
aagcaacgattcatgttgtaacagc

SEQ ID NO: 253117 - DNA, 25 bp, Artificial
  Probe
gtttgttgagctacattcttcattg

SEQ ID NO: 253118 - DNA, 25 bp, Artificial
  Probe
acctcaagcaacgattcatgttgta

SEQ ID NO: 253119 - DNA, 25 bp, Artificial
  Probe
acgattcatgttgtaacagcttcat

SEQ ID NO: 253120 - DNA, 25 bp, Artificial
  Probe
tcaagcaacgattcatgttgtaaca

SEQ ID NO: 253121 - DNA, 25 bp, Artificial
  Probe
agtacccgtggaatggattcgtaag

SEQ ID NO: 253122 - DNA, 25 bp, Artificial
  Probe
aagtttataacagtctgtttggcca

SEQ ID NO: 253123 - DNA, 25 bp, Artificial
  Probe
atgtttgttgagctacattcttcat

SEQ ID NO: 253124 - DNA, 25 bp, Artificial
  Probe
ataacagtctgtttggccattacta

SEQ ID NO: 253125 - DNA, 25 bp, Artificial
  Probe
aaacctcaagcaacgattcatgttg

SEQ ID NO: 253126 - DNA, 25 bp, Artificial
  Probe
gtttataacagtctgtttggccatt

SEQ ID NO: 253127 - DNA, 25 bp, Artificial
  Probe
taacagtctgtttggccattactac

SEQ ID NO: 253128 - DNA, 25 bp, Artificial
  Probe
tacccgtggaatggattcgtaaggt

SEQ ID NO: 253129 - DNA, 25 bp, Artificial
  Probe
catgttgtaacagcttcatgtggtt

SEQ ID NO: 253130 - DNA, 25 bp, Artificial
  Probe
tttctcactggtcaggctagtggag

SEQ ID NO: 253131 - DNA, 25 bp, Artificial
  Probe
gataaacctcaagcaacgattcatg

SEQ ID NO: 253132 - DNA, 25 bp, Artificial
  Probe
agtttataacagtctgtttggccat

SEQ ID NO: 253133 - DNA, 25 bp, Artificial
  Probe
gtacccgtggaatggattcgtaagg

SEQ ID NO: 253134 - DNA, 25 bp, Artificial
  Probe
ccgtgttgtaagtacccgtggaatg

SEQ ID NO: 253135 - DNA, 25 bp, Artificial
  Probe
attattgcagttttctctagaaggc

SEQ ID NO: 253136 - DNA, 25 bp, Artificial
  Probe
tgtaagtacccgtggaatggattcg

SEQ ID NO: 253137 - DNA, 25 bp, Artificial
  Probe
tcatgttgtaacagcttcatgtggt

SEQ ID NO: 253138 - DNA, 25 bp, Artificial
  Probe
cctcaagcaacgattcatgttgtaa

SEQ ID NO: 253139 - DNA, 25 bp, Artificial
  Probe
gagacggccaagtgtacagttctca

SEQ ID NO: 253140 - DNA, 25 bp, Artificial
  Probe
cgtgttgtaagtacccgtggaatgg

SEQ ID NO: 253141 - DNA, 25 bp, Artificial
  Probe
gagagacggccaagtgtacagttct

SEQ ID NO: 253142 - DNA, 25 bp, Artificial
  Probe
acggccaagtgtacagttctcacca

SEQ ID NO: 253143 - DNA, 25 bp, Artificial
  Probe
ttcatgttgtaacagcttcatgtgg

SEQ ID NO: 253144 - DNA, 25 bp, Artificial
  Probe
cgattcatgttgtaacagcttcatg

SEQ ID NO: 253145 - DNA, 25 bp, Artificial
  Probe
tgttgagctacattcttcattgctt

SEQ ID NO: 253146 - DNA, 25 bp, Artificial
  Probe
gttgagctacattcttcattgcttt

SEQ ID NO: 253147 - DNA, 25 bp, Artificial
  Probe
gtctgtttggccattactacacttt

SEQ ID NO: 253148 - DNA, 25 bp, Artificial
  Probe
agacggccaagtgtacagttctcac

SEQ ID NO: 253149 - DNA, 25 bp, Artificial
  Probe
ttgttgagctacattcttcattgct

SEQ ID NO: 253150 - DNA, 25 bp, Artificial
  Probe
atttctcactggtcaggctagtgga

SEQ ID NO: 253151 - DNA, 25 bp, Artificial
  Probe
taagtacccgtggaatggattcgta

SEQ ID NO: 253152 - DNA, 25 bp, Artificial
  Probe
gacggccaagtgtacagttctcacc

SEQ ID NO: 253153 - DNA, 25 bp, Artificial
  Probe
ttataacagtctgtttggccattac

SEQ ID NO: 253154 - DNA, 25 bp, Artificial
  Probe
gattcatgttgtaacagcttcatgt

SEQ ID NO: 253155 - DNA, 25 bp, Artificial
  Probe
gcaacgattcatgttgtaacagctt

SEQ ID NO: 253156 - DNA, 25 bp, Artificial
  Probe
ctcaagcaacgattcatgttgtaac

SEQ ID NO: 253157 - DNA, 25 bp, Artificial
  Probe
aatgtttgttgagctacattcttca

SEQ ID NO: 253158 - DNA, 25 bp, Artificial
  Probe
aacgattcatgttgtaacagcttca

SEQ ID NO: 253159 - DNA, 25 bp, Artificial
  Probe
gtaagtacccgtggaatggattcgt

SEQ ID NO: 253160 - DNA, 25 bp, Artificial
  Probe
agcaacgattcatgttgtaacagct

SEQ ID NO: 253161 - DNA, 25 bp, Artificial
  Probe
tataacagtctgtttggccattact

SEQ ID NO: 253162 - DNA, 25 bp, Artificial
  Probe
atcacggatgagtccccatacgtgc

SEQ ID NO: 253163 - DNA, 25 bp, Artificial
  Probe
caagcttcacgagagaaagtgtgaa

SEQ ID NO: 253164 - DNA, 25 bp, Artificial
  Probe
acagtccccaggacagtgtaatgcc

SEQ ID NO: 253165 - DNA, 25 bp, Artificial
  Probe
tactttgaaatcacggatgagtccc

SEQ ID NO: 253166 - DNA, 25 bp, Artificial
  Probe
caacaccttcagcagcaaggagcct

SEQ ID NO: 253167 - DNA, 25 bp, Artificial
  Probe
cttcaagcttcacgagagaaagtgt

SEQ ID NO: 253168 - DNA, 25 bp, Artificial
  Probe
tgacgtcaacaagtgtgagatcgcc

SEQ ID NO: 253169 - DNA, 25 bp, Artificial
  Probe
agggtgacagcagtatccgctactt

SEQ ID NO: 253170 - DNA, 25 bp, Artificial
  Probe
gatcgccagatccttcaagcttcac

SEQ ID NO: 253171 - DNA, 25 bp, Artificial
  Probe
acaagtgtgagatcgccagatcctt

SEQ ID NO: 253172 - DNA, 25 bp, Artificial
  Probe
agcagtatccgctactttgaaatca

SEQ ID NO: 253173 - DNA, 25 bp, Artificial
  Probe
aaatcacggatgagtccccatacgt

SEQ ID NO: 253174 - DNA, 25 bp, Artificial
  Probe
ctactttgaaatcacggatgagtcc

SEQ ID NO: 253175 - DNA, 25 bp, Artificial
  Probe
ttcttctcatgacagtccccaggac

SEQ ID NO: 253176 - DNA, 25 bp, Artificial
  Probe
gtccccatacgtgcaatacgtcaac

SEQ ID NO: 253177 - DNA, 25 bp, Artificial
  Probe
gtgaacttcttctcatgacagtccc

SEQ ID NO: 253178 - DNA, 25 bp, Artificial
  Probe
tgtgaacttcttctcatgacagtcc

SEQ ID NO: 253179 - DNA, 25 bp, Artificial
  Probe
cgccagcatcatttacattatgtgg

SEQ ID NO: 253180 - DNA, 25 bp, Artificial
  Probe
ttctcatgacagtccccaggacagt

SEQ ID NO: 253181 - DNA, 25 bp, Artificial
  Probe
tgaaatcacggatgagtccccatac

SEQ ID NO: 253182 - DNA, 25 bp, Artificial
  Probe
gcttcacgagagaaagtgtgaactt

SEQ ID NO: 253183 - DNA, 25 bp, Artificial
  Probe
cgccagatccttcaagcttcacgag

SEQ ID NO: 253184 - DNA, 25 bp, Artificial
  Probe
tcagcagcaaggagcctcagagagg

SEQ ID NO: 253185 - DNA, 25 bp, Artificial
  Probe
gcttgacgtcaacaagtgtgagatc

SEQ ID NO: 253186 - DNA, 25 bp, Artificial
  Probe
acgtgcaatacgtcaacaccttcag

SEQ ID NO: 253187 - DNA, 25 bp, Artificial
  Probe
gcaatacgtcaacaccttcagcagc

SEQ ID NO: 253188 - DNA, 25 bp, Artificial
  Probe
cccggacgccagcatcatttacatt

SEQ ID NO: 253189 - DNA, 25 bp, Artificial
  Probe
aaagtgtgaacttcttctcatgaca

SEQ ID NO: 253190 - DNA, 25 bp, Artificial
  Probe
cagcatcatttacattatgtgggaa

SEQ ID NO: 253191 - DNA, 25 bp, Artificial
  Probe
tgacagtccccaggacagtgtaatg

SEQ ID NO: 253192 - DNA, 25 bp, Artificial
  Probe
gatgagtccccatacgtgcaatacg

SEQ ID NO: 253193 - DNA, 25 bp, Artificial
  Probe
ggatgagtccccatacgtgcaatac

SEQ ID NO: 253194 - DNA, 25 bp, Artificial
  Probe
cagatccttcaagcttcacgagaga

SEQ ID NO: 253195 - DNA, 25 bp, Artificial
  Probe
cttcagcagcaaggagcctcagaga

SEQ ID NO: 253196 - DNA, 25 bp, Artificial
  Probe
tgagatcgccagatccttcaagctt

SEQ ID NO: 253197 - DNA, 25 bp, Artificial
  Probe
cgctactttgaaatcacggatgagt

SEQ ID NO: 253198 - DNA, 25 bp, Artificial
  Probe
ggacactagcaatggggtgctgctc

SEQ ID NO: 253199 - DNA, 25 bp, Artificial
  Probe
tgtgagatcgccagatccttcaagc

SEQ ID NO: 253200 - DNA, 25 bp, Artificial
  Probe
cgtcaacaagtgtgagatcgccaga

SEQ ID NO: 253201 - DNA, 25 bp, Artificial
  Probe
ctagcaatggggtgctgctcccttt

SEQ ID NO: 253202 - DNA, 25 bp, Artificial
  Probe
ttcaagcttcacgagagaaagtgtg

SEQ ID NO: 253203 - DNA, 25 bp, Artificial
  Probe
gtgacagcagtatccgctactttga

SEQ ID NO: 253204 - DNA, 25 bp, Artificial
  Probe
acttcttctcatgacagtccccagg

SEQ ID NO: 253205 - DNA, 25 bp, Artificial
  Probe
atacgtcaacaccttcagcagcaag

SEQ ID NO: 253206 - DNA, 25 bp, Artificial
  Probe
atggggtgctgctccctttatacgc

SEQ ID NO: 253207 - DNA, 25 bp, Artificial
  Probe
tgcaatacgtcaacaccttcagcag

SEQ ID NO: 253208 - DNA, 25 bp, Artificial
  Probe
agtgtccctggaagccccttcaagg

SEQ ID NO: 253209 - DNA, 25 bp, Artificial
  Probe
aaaggagactacatcctcattgtca

SEQ ID NO: 253210 - DNA, 25 bp, Artificial
  Probe
cctcagcacattgtgggcagtccct

SEQ ID NO: 253211 - DNA, 25 bp, Artificial
  Probe
aagcacatggggaaccgggtctaca

SEQ ID NO: 253212 - DNA, 25 bp, Artificial
  Probe
cagcaaagcaggtaccaacatgatg

SEQ ID NO: 253213 - DNA, 25 bp, Artificial
  Probe
agactgtgacaaagtcctcctcgag

SEQ ID NO: 253214 - DNA, 25 bp, Artificial
  Probe
ttctggtggagactgtgacaaagtc

SEQ ID NO: 253215 - DNA, 25 bp, Artificial
  Probe
ccggttgtctggaggccacagcctt

SEQ ID NO: 253216 - DNA, 25 bp, Artificial
  Probe
caggtccccggttgtctggaggcca

SEQ ID NO: 253217 - DNA, 25 bp, Artificial
  Probe
cagatgccagcaaggtggtgacaag

SEQ ID NO: 253218 - DNA, 25 bp, Artificial
  Probe
tgcagcaaagcaggtaccaacatga

SEQ ID NO: 253219 - DNA, 25 bp, Artificial
  Probe
gtgatgaaagtgtccctggaagccc

SEQ ID NO: 253220 - DNA, 25 bp, Artificial
  Probe
agcaaaggtcacaggtccccggttg

SEQ ID NO: 253221 - DNA, 25 bp, Artificial
  Probe
tctggaggccacagccttcacgaaa

SEQ ID NO: 253222 - DNA, 25 bp, Artificial
  Probe
gtctggaggccacagccttcacgaa

SEQ ID NO: 253223 - DNA, 25 bp, Artificial
  Probe
gttctcctcagatgccagcaaggtg

SEQ ID NO: 253224 - DNA, 25 bp, Artificial
  Probe
gaagaactccttcaccgtggactgc

SEQ ID NO: 253225 - DNA, 25 bp, Artificial
  Probe
tacaatgtcacctacactgtcaagg

SEQ ID NO: 253226 - DNA, 25 bp, Artificial
  Probe
ccggcctgtcccaggcctttgtggg

SEQ ID NO: 253227 - DNA, 25 bp, Artificial
  Probe
agactacatcctcattgtcaagtgg

SEQ ID NO: 253228 - DNA, 25 bp, Artificial
  Probe
cagttctggtggagactgtgacaaa

SEQ ID NO: 253229 - DNA, 25 bp, Artificial
  Probe
cctggaagccccttcaaggtcaatg

SEQ ID NO: 253230 - DNA, 25 bp, Artificial
  Probe
tcctcagatgccagcaaggtggtga

SEQ ID NO: 253231 - DNA, 25 bp, Artificial
  Probe
ccaagttctcctcagatgccagcaa

SEQ ID NO: 253232 - DNA, 25 bp, Artificial
  Probe
gaaacatccacagttctggtggaga

SEQ ID NO: 253233 - DNA, 25 bp, Artificial
  Probe
cctttgtgggtcagaagaactcctt

SEQ ID NO: 253234 - DNA, 25 bp, Artificial
  Probe
tgacaaagtcctcctcgagccgcgg

SEQ ID NO: 253235 - DNA, 25 bp, Artificial
  Probe
tcaaagcaaaggtcacaggtccccg

SEQ ID NO: 253236 - DNA, 25 bp, Artificial
  Probe
cacattgtgggcagtcccttcaaag

SEQ ID NO: 253237 - DNA, 25 bp, Artificial
  Probe
ggtgatgaaagtgtccctggaagcc

SEQ ID NO: 253238 - DNA, 25 bp, Artificial
  Probe
gaaagtgtccctggaagccccttca

SEQ ID NO: 253239 - DNA, 25 bp, Artificial
  Probe
ccgggtctacaatgtcacctacact

SEQ ID NO: 253240 - DNA, 25 bp, Artificial
  Probe
agcacatggggaaccgggtctacaa

SEQ ID NO: 253241 - DNA, 25 bp, Artificial
  Probe
acactgtcaaggagaaaggagacta

SEQ ID NO: 253242 - DNA, 25 bp, Artificial
  Probe
gtgggcagtcccttcaaagcaaagg

SEQ ID NO: 253243 - DNA, 25 bp, Artificial
  Probe
atccacagttctggtggagactgtg

SEQ ID NO: 253244 - DNA, 25 bp, Artificial
  Probe
ggcctttgtgggtcagaagaactcc

SEQ ID NO: 253245 - DNA, 25 bp, Artificial
  Probe
tgaaagtgtccctggaagccccttc

SEQ ID NO: 253246 - DNA, 25 bp, Artificial
  Probe
ctcagcacattgtgggcagtccctt

SEQ ID NO: 253247 - DNA, 25 bp, Artificial
  Probe
ggtctacaatgtcacctacactgtc

SEQ ID NO: 253248 - DNA, 25 bp, Artificial
  Probe
ggtcagaagaactccttcaccgtgg

SEQ ID NO: 253249 - DNA, 25 bp, Artificial
  Probe
actccttcaccgtggactgcagcaa

SEQ ID NO: 253250 - DNA, 25 bp, Artificial
  Probe
tggggaaccgggtctacaatgtcac

SEQ ID NO: 253251 - DNA, 25 bp, Artificial
  Probe
cattgtgggcagtcccttcaaagca

SEQ ID NO: 253252 - DNA, 25 bp, Artificial
  Probe
gcaaaggtcacaggtccccggttgt

SEQ ID NO: 253253 - DNA, 25 bp, Artificial
  Probe
cttcacgaaacatccacagttctgg

SEQ ID NO: 253254 - DNA, 25 bp, Artificial
  Probe
ttttcaaaaccgtaggccagactca

SEQ ID NO: 253255 - DNA, 25 bp, Artificial
  Probe
gcctgtctgtaaaggttgtaaactc

SEQ ID NO: 253256 - DNA, 25 bp, Artificial
  Probe
caggcctgtctgtaaaggttgtaaa

SEQ ID NO: 253257 - DNA, 25 bp, Artificial
  Probe
tttcaaaaccgtaggccagactcaa

SEQ ID NO: 253258 - DNA, 25 bp, Artificial
  Probe
gagtgccgagaactcctaatcacca

SEQ ID NO: 253259 - DNA, 25 bp, Artificial
  Probe
ccatctatgacaaaacctacgctgg

SEQ ID NO: 253260 - DNA, 25 bp, Artificial
  Probe
caccttccgaaaccaagggctagag

SEQ ID NO: 253261 - DNA, 25 bp, Artificial
  Probe
accctcgtcacattggctggaaaga

SEQ ID NO: 253262 - DNA, 25 bp, Artificial
  Probe
ctacgctggcggtagactaggcctg

SEQ ID NO: 253263 - DNA, 25 bp, Artificial
  Probe
agtgtgggcttctagagtctgtgac

SEQ ID NO: 253264 - DNA, 25 bp, Artificial
  Probe
ggcattgcaccttccgaaaccaagg

SEQ ID NO: 253265 - DNA, 25 bp, Artificial
  Probe
atgacaaaacctacgctggcggtag

SEQ ID NO: 253266 - DNA, 25 bp, Artificial
  Probe
tccctgcctctcttcttgcatagtg

SEQ ID NO: 253267 - DNA, 25 bp, Artificial
  Probe
tggcggtagactaggcctgttcgtc

SEQ ID NO: 253268 - DNA, 25 bp, Artificial
  Probe
ctggcggtagactaggcctgttcgt

SEQ ID NO: 253269 - DNA, 25 bp, Artificial
  Probe
gaaatggtgttcttctcggacatga

SEQ ID NO: 253270 - DNA, 25 bp, Artificial
  Probe
actgcatacagatggcgtctcagcc

SEQ ID NO: 253271 - DNA, 25 bp, Artificial
  Probe
ttcactgcatacagatggcgtctca

SEQ ID NO: 253272 - DNA, 25 bp, Artificial
  Probe
ctctcaagaaatggtgttcttctcg

SEQ ID NO: 253273 - DNA, 25 bp, Artificial
  Probe
atacagatggcgtctcagccacagg

SEQ ID NO: 253274 - DNA, 25 bp, Artificial
  Probe
catagtgtgggcttctagagtctgt

SEQ ID NO: 253275 - DNA, 25 bp, Artificial
  Probe
atgaaatacgagtgccgagaactcc

SEQ ID NO: 253276 - DNA, 25 bp, Artificial
  Probe
atacgagtgccgagaactcctaatc

SEQ ID NO: 253277 - DNA, 25 bp, Artificial
  Probe
gttcttctcggacatgaaatacgag

SEQ ID NO: 253278 - DNA, 25 bp, Artificial
  Probe
ggacccatctatgacaaaacctacg

SEQ ID NO: 253279 - DNA, 25 bp, Artificial
  Probe
ggcctgtctgtaaaggttgtaaact

SEQ ID NO: 253280 - DNA, 25 bp, Artificial
  Probe
tctcggacatgaaatacgagtgccg

SEQ ID NO: 253281 - DNA, 25 bp, Artificial
  Probe
aaatcatggctgactcaggacccat

SEQ ID NO: 253282 - DNA, 25 bp, Artificial
  Probe
tcttgcatagtgtgggcttctagag

SEQ ID NO: 253283 - DNA, 25 bp, Artificial
  Probe
aatggtgttcttctcggacatgaaa

SEQ ID NO: 253284 - DNA, 25 bp, Artificial
  Probe
gtggcatgaccctcgtcacattggc

SEQ ID NO: 253285 - DNA, 25 bp, Artificial
  Probe
gtagactaggcctgttcgtcttctc

SEQ ID NO: 253286 - DNA, 25 bp, Artificial
  Probe
ctggcattgcaccttccgaaaccaa

SEQ ID NO: 253287 - DNA, 25 bp, Artificial
  Probe
ggctgactcaggacccatctatgac

SEQ ID NO: 253288 - DNA, 25 bp, Artificial
  Probe
aaccgtaggccagactcaagaactt

SEQ ID NO: 253289 - DNA, 25 bp, Artificial
  Probe
ctgtgacctgcctcaagaaaatgca

SEQ ID NO: 253290 - DNA, 25 bp, Artificial
  Probe
ttgcaccttccgaaaccaagggcta

SEQ ID NO: 253291 - DNA, 25 bp, Artificial
  Probe
atgcagttttcaaaaccgtaggcca

SEQ ID NO: 253292 - DNA, 25 bp, Artificial
  Probe
ctgcctcaagaaaatgcagttttca

SEQ ID NO: 253293 - DNA, 25 bp, Artificial
  Probe
acatgaaatacgagtgccgagaact

SEQ ID NO: 253294 - DNA, 25 bp, Artificial
  Probe
gactaggcctgttcgtcttctctca

SEQ ID NO: 253295 - DNA, 25 bp, Artificial
  Probe
cgctggcggtagactaggcctgttc

SEQ ID NO: 253296 - DNA, 25 bp, Artificial
  Probe
gagtctgtgacctgcctcaagaaaa

SEQ ID NO: 253297 - DNA, 25 bp, Artificial
  Probe
gcagttttcaaaaccgtaggccaga

SEQ ID NO: 253298 - DNA, 25 bp, Artificial
  Probe
atggtgttcttctcggacatgaaat

SEQ ID NO: 253299 - DNA, 25 bp, Artificial
  Probe
gactcaggacccatctatgacaaaa

SEQ ID NO: 253300 - DNA, 25 bp, Artificial
  Probe
ctttgaccgaggactgtacgctctc

SEQ ID NO: 253301 - DNA, 25 bp, Artificial
  Probe
ttgaccgaggactgtacgctctcat

SEQ ID NO: 253302 - DNA, 25 bp, Artificial
  Probe
cagtatccgtgttccaaatccgcct

SEQ ID NO: 253303 - DNA, 25 bp, Artificial
  Probe
caacaaagtggtcgatcttgcggga

SEQ ID NO: 253304 - DNA, 25 bp, Artificial
  Probe
actaaagctgccaaggcttactgtg

SEQ ID NO: 253305 - DNA, 25 bp, Artificial
  Probe
ccctgcttgcctctggaccttaaag

SEQ ID NO: 253306 - DNA, 25 bp, Artificial
  Probe
gtgatgctccatttctggacccctg

SEQ ID NO: 253307 - DNA, 25 bp, Artificial
  Probe
tgctgctaaatttactaaagctgcc

SEQ ID NO: 253308 - DNA, 25 bp, Artificial
  Probe
ctctggaccttaaagatgagatcca

SEQ ID NO: 253309 - DNA, 25 bp, Artificial
  Probe
ctgtgcaacaaagtggtcgatcttg

SEQ ID NO: 253310 - DNA, 25 bp, Artificial
  Probe
tgctaaatttactaaagctgccaag

SEQ ID NO: 253311 - DNA, 25 bp, Artificial
  Probe
atccgtgttccaaatccgcctggat

SEQ ID NO: 253312 - DNA, 25 bp, Artificial
  Probe
ctaaagctgccaaggcttactgtgc

SEQ ID NO: 253313 - DNA, 25 bp, Artificial
  Probe
aatgctgctaaatttactaaagctg

SEQ ID NO: 253314 - DNA, 25 bp, Artificial
  Probe
cttactgtgcaacaaagtggtcgat

SEQ ID NO: 253315 - DNA, 25 bp, Artificial
  Probe
ttctggacccctgcttgcctctgga

SEQ ID NO: 253316 - DNA, 25 bp, Artificial
  Probe
gggaacgctttgaccgaggactgta

SEQ ID NO: 253317 - DNA, 25 bp, Artificial
  Probe
cctgcttgcctctggaccttaaaga

SEQ ID NO: 253318 - DNA, 25 bp, Artificial
  Probe
atttactaaagctgccaaggcttac

SEQ ID NO: 253319 - DNA, 25 bp, Artificial
  Probe
gatcttgcgggaacgctttgaccga

SEQ ID NO: 253320 - DNA, 25 bp, Artificial
  Probe
tgcaacaaagtggtcgatcttgcgg

SEQ ID NO: 253321 - DNA, 25 bp, Artificial
  Probe
taaatttactaaagctgccaaggct

SEQ ID NO: 253322 - DNA, 25 bp, Artificial
  Probe
ttgcgggaacgctttgaccgaggac

SEQ ID NO: 253323 - DNA, 25 bp, Artificial
  Probe
agctgccaaggcttactgtgcaaca

SEQ ID NO: 253324 - DNA, 25 bp, Artificial
  Probe
accgaggactgtacgctctcatgcc

SEQ ID NO: 253325 - DNA, 25 bp, Artificial
  Probe
cttgcctctggaccttaaagatgag

SEQ ID NO: 253326 - DNA, 25 bp, Artificial
  Probe
ggagactacaatgctgctaaattta

SEQ ID NO: 253327 - DNA, 25 bp, Artificial
  Probe
caaagtggtcgatcttgcgggaacg

SEQ ID NO: 253328 - DNA, 25 bp, Artificial
  Probe
agtggtcgatcttgcgggaacgctt

SEQ ID NO: 253329 - DNA, 25 bp, Artificial
  Probe
cgatcttgcgggaacgctttgaccg

SEQ ID NO: 253330 - DNA, 25 bp, Artificial
  Probe
tgcgggaacgctttgaccgaggact

SEQ ID NO: 253331 - DNA, 25 bp, Artificial
  Probe
aggactgtacgctctcatgccgacc

SEQ ID NO: 253332 - DNA, 25 bp, Artificial
  Probe
aaagtggtcgatcttgcgggaacgc

SEQ ID NO: 253333 - DNA, 25 bp, Artificial
  Probe
cgggaacgctttgaccgaggactgt

SEQ ID NO: 253334 - DNA, 25 bp, Artificial
  Probe
atcgactctcagtatccgtgttcca

SEQ ID NO: 253335 - DNA, 25 bp, Artificial
  Probe
tttctggacccctgcttgcctctgg

SEQ ID NO: 253336 - DNA, 25 bp, Artificial
  Probe
cgactctcagtatccgtgttccaaa

SEQ ID NO: 253337 - DNA, 25 bp, Artificial
  Probe
ggactgtacgctctcatgccgacct

SEQ ID NO: 253338 - DNA, 25 bp, Artificial
  Probe
ctccatcgactctcagtatccgtgt

SEQ ID NO: 253339 - DNA, 25 bp, Artificial
  Probe
tgctccatttctggacccctgcttg

SEQ ID NO: 253340 - DNA, 25 bp, Artificial
  Probe
aatttactaaagctgccaaggctta

SEQ ID NO: 253341 - DNA, 25 bp, Artificial
  Probe
acgctttgaccgaggactgtacgct

SEQ ID NO: 253342 - DNA, 25 bp, Artificial
  Probe
tctcagtatccgtgttccaaatccg

SEQ ID NO: 253343 - DNA, 25 bp, Artificial
  Probe
aaggcttactgtgcaacaaagtggt

SEQ ID NO: 253344 - DNA, 25 bp, Artificial
  Probe
gagactacaatgctgctaaatttac

SEQ ID NO: 253345 - DNA, 25 bp, Artificial
  Probe
gaccgaggactgtacgctctcatgc

SEQ ID NO: 253346 - DNA, 25 bp, Artificial
  Probe
ccctcaggagctctggaggagtgct

SEQ ID NO: 253347 - DNA, 25 bp, Artificial
  Probe
ccctccagaggtgaagatggattgc

SEQ ID NO: 253348 - DNA, 25 bp, Artificial
  Probe
ttgcagtcagcctaaatagagccaa

SEQ ID NO: 253349 - DNA, 25 bp, Artificial
  Probe
catccctggaagtcccttcaagatt

SEQ ID NO: 253350 - DNA, 25 bp, Artificial
  Probe
tcttttgcagtcagcctaaatagag

SEQ ID NO: 253351 - DNA, 25 bp, Artificial
  Probe
gtcaagttcaatggtactcacatcc

SEQ ID NO: 253352 - DNA, 25 bp, Artificial
  Probe
caggagcctgggtgccctttccggt

SEQ ID NO: 253353 - DNA, 25 bp, Artificial
  Probe
aatggcgtctacttgatcgatgtca

SEQ ID NO: 253354 - DNA, 25 bp, Artificial
  Probe
tcacatccctggaagtcccttcaag

SEQ ID NO: 253355 - DNA, 25 bp, Artificial
  Probe
atgctgtgcgtttcatcccacgaga

SEQ ID NO: 253356 - DNA, 25 bp, Artificial
  Probe
gccaaggtgcatagcccctcaggag

SEQ ID NO: 253357 - DNA, 25 bp, Artificial
  Probe
tatccgcctatggagcaggcctgga

SEQ ID NO: 253358 - DNA, 25 bp, Artificial
  Probe
ttggatgccaaggtgcatagcccct

SEQ ID NO: 253359 - DNA, 25 bp, Artificial
  Probe
agataagtatgctgtgcgtttcatc

SEQ ID NO: 253360 - DNA, 25 bp, Artificial
  Probe
ccatcaaagtatggtggccctatca

SEQ ID NO: 253361 - DNA, 25 bp, Artificial
  Probe
tgccaaggtgcatagcccctcagga

SEQ ID NO: 253362 - DNA, 25 bp, Artificial
  Probe
ggatgccaaggtgcatagcccctca

SEQ ID NO: 253363 - DNA, 25 bp, Artificial
  Probe
attggatgccaaggtgcatagcccc

SEQ ID NO: 253364 - DNA, 25 bp, Artificial
  Probe
gataagtatgctgtgcgtttcatcc

SEQ ID NO: 253365 - DNA, 25 bp, Artificial
  Probe
catcaaagtatggtggccctatcac

SEQ ID NO: 253366 - DNA, 25 bp, Artificial
  Probe
tagcccctcaggagctctggaggag

SEQ ID NO: 253367 - DNA, 25 bp, Artificial
  Probe
tgatcgatgtcaagttcaatggtac

SEQ ID NO: 253368 - DNA, 25 bp, Artificial
  Probe
gtctacttgatcgatgtcaagttca

SEQ ID NO: 253369 - DNA, 25 bp, Artificial
  Probe
atggtactcacatccctggaagtcc

SEQ ID NO: 253370 - DNA, 25 bp, Artificial
  Probe
ggcagctacctcatctccatcaaag

SEQ ID NO: 253371 - DNA, 25 bp, Artificial
  Probe
cagcctaaatagagccaaaggggca

SEQ ID NO: 253372 - DNA, 25 bp, Artificial
  Probe
agctctggaggagtgctatgtcaca

SEQ ID NO: 253373 - DNA, 25 bp, Artificial
  Probe
cacatccctggaagtcccttcaaga

SEQ ID NO: 253374 - DNA, 25 bp, Artificial
  Probe
ataagtatgctgtgcgtttcatccc

SEQ ID NO: 253375 - DNA, 25 bp, Artificial
  Probe
gtatgctgtgcgtttcatcccacga

SEQ ID NO: 253376 - DNA, 25 bp, Artificial
  Probe
tcatctccatcaaagtatggtggcc

SEQ ID NO: 253377 - DNA, 25 bp, Artificial
  Probe
tacttgatcgatgtcaagttcaatg

SEQ ID NO: 253378 - DNA, 25 bp, Artificial
  Probe
tccgcctatggagcaggcctggaag

SEQ ID NO: 253379 - DNA, 25 bp, Artificial
  Probe
cttgatcgatgtcaagttcaatggt

SEQ ID NO: 253380 - DNA, 25 bp, Artificial
  Probe
ctacttgatcgatgtcaagttcaat

SEQ ID NO: 253381 - DNA, 25 bp, Artificial
  Probe
cctccagaggtgaagatggattgcc

SEQ ID NO: 253382 - DNA, 25 bp, Artificial
  Probe
cgtctacttgatcgatgtcaagttc

SEQ ID NO: 253383 - DNA, 25 bp, Artificial
  Probe
gagctctggaggagtgctatgtcac

SEQ ID NO: 253384 - DNA, 25 bp, Artificial
  Probe
ggcgtctacttgatcgatgtcaagt

SEQ ID NO: 253385 - DNA, 25 bp, Artificial
  Probe
ctcaggagctctggaggagtgctat

SEQ ID NO: 253386 - DNA, 25 bp, Artificial
  Probe
aagttcaatggtactcacatccctg

SEQ ID NO: 253387 - DNA, 25 bp, Artificial
  Probe
caatggtactcacatccctggaagt

SEQ ID NO: 253388 - DNA, 25 bp, Artificial
  Probe
gtgcatagcccctcaggagctctgg

SEQ ID NO: 253389 - DNA, 25 bp, Artificial
  Probe
acctcatctccatcaaagtatggtg

SEQ ID NO: 253390 - DNA, 25 bp, Artificial
  Probe
caattggatgccaaggtgcatagcc

SEQ ID NO: 253391 - DNA, 25 bp, Artificial
  Probe
cgatgtcaagttcaatggtactcac

SEQ ID NO: 253392 - DNA, 25 bp, Artificial
  Probe
ttcaagagtgcctccagaattgtgt

SEQ ID NO: 253393 - DNA, 25 bp, Artificial
  Probe
actggagccctgcttgggcacggca

SEQ ID NO: 253394 - DNA, 25 bp, Artificial
  Probe
gctactcctctggactggagccctg

SEQ ID NO: 253395 - DNA, 25 bp, Artificial
  Probe
agaacttcaagagtgcctccagaat

SEQ ID NO: 253396 - DNA, 25 bp, Artificial
  Probe
cttgccttctgttactgcccctgag

SEQ ID NO: 253397 - DNA, 25 bp, Artificial
  Probe
tgacatccacagcacctacaaggag

SEQ ID NO: 253398 - DNA, 25 bp, Artificial
  Probe
tctgggatgcagaccctggtgctac

SEQ ID NO: 253399 - DNA, 25 bp, Artificial
  Probe
agctgaacagcgaacagagtctgtc

SEQ ID NO: 253400 - DNA, 25 bp, Artificial
  Probe
ggtgctgtctcaaccggcaacattc

SEQ ID NO: 253401 - DNA, 25 bp, Artificial
  Probe
ctgtttccaacttcggctacgatct

SEQ ID NO: 253402 - DNA, 25 bp, Artificial
  Probe
attcaccgggctctctactacgact

SEQ ID NO: 253403 - DNA, 25 bp, Artificial
  Probe
ggcagcagccagaatgtccctgaca

SEQ ID NO: 253404 - DNA, 25 bp, Artificial
  Probe
gcagccagaatgtccctgacagctc

SEQ ID NO: 253405 - DNA, 25 bp, Artificial
  Probe
gttggcagcagctgtttccaacttc

SEQ ID NO: 253406 - DNA, 25 bp, Artificial
  Probe
ccagaatgtccctgacagctctcag

SEQ ID NO: 253407 - DNA, 25 bp, Artificial
  Probe
gaacaagttggcagcagctgtttcc

SEQ ID NO: 253408 - DNA, 25 bp, Artificial
  Probe
caagttggcagcagctgtttccaac

SEQ ID NO: 253409 - DNA, 25 bp, Artificial
  Probe
cccgtgaacaagttggcagcagctg

SEQ ID NO: 253410 - DNA, 25 bp, Artificial
  Probe
acagcacctacaaggagctccttgc

SEQ ID NO: 253411 - DNA, 25 bp, Artificial
  Probe
gagctccttgccttctgttactgcc

SEQ ID NO: 253412 - DNA, 25 bp, Artificial
  Probe
acatccacagcacctacaaggagct

SEQ ID NO: 253413 - DNA, 25 bp, Artificial
  Probe
caaggagctccttgccttctgttac

SEQ ID NO: 253414 - DNA, 25 bp, Artificial
  Probe
acctacaaggagctccttgccttct

SEQ ID NO: 253415 - DNA, 25 bp, Artificial
  Probe
atgcagaccctggtgctactcctct

SEQ ID NO: 253416 - DNA, 25 bp, Artificial
  Probe
tcaaggcccccgtgaacaagttggc

SEQ ID NO: 253417 - DNA, 25 bp, Artificial
  Probe
cccctgagaagaacttcaagagtgc

SEQ ID NO: 253418 - DNA, 25 bp, Artificial
  Probe
gccttctgttactgcccctgagaag

SEQ ID NO: 253419 - DNA, 25 bp, Artificial
  Probe
taccgcctgagatccggtgctgtct

SEQ ID NO: 253420 - DNA, 25 bp, Artificial
  Probe
tgtccctgacagctctcaggattcc

SEQ ID NO: 253421 - DNA, 25 bp, Artificial
  Probe
gctacgatctctaccgcctgagatc

SEQ ID NO: 253422 - DNA, 25 bp, Artificial
  Probe
gaatgtccctgacagctctcaggat

SEQ ID NO: 253423 - DNA, 25 bp, Artificial
  Probe
atctctaccgcctgagatccggtgc

SEQ ID NO: 253424 - DNA, 25 bp, Artificial
  Probe
ctgaacagcgaacagagtctgtcat

SEQ ID NO: 253425 - DNA, 25 bp, Artificial
  Probe
gcacctacaaggagctccttgcctt

SEQ ID NO: 253426 - DNA, 25 bp, Artificial
  Probe
cggctacgatctctaccgcctgaga

SEQ ID NO: 253427 - DNA, 25 bp, Artificial
  Probe
ttgggcacggcagcagccagaatgt

SEQ ID NO: 253428 - DNA, 25 bp, Artificial
  Probe
ggctctctactacgacttgatcaac

SEQ ID NO: 253429 - DNA, 25 bp, Artificial
  Probe
cctgagatccggtgctgtctcaacc

SEQ ID NO: 253430 - DNA, 25 bp, Artificial
  Probe
agtctgtcattcaccgggctctcta

SEQ ID NO: 253431 - DNA, 25 bp, Artificial
  Probe
gaacttcaagagtgcctccagaatt

SEQ ID NO: 253432 - DNA, 25 bp, Artificial
  Probe
tgttactgcccctgagaagaacttc

SEQ ID NO: 253433 - DNA, 25 bp, Artificial
  Probe
gggcacggcagcagccagaatgtcc

SEQ ID NO: 253434 - DNA, 25 bp, Artificial
  Probe
cacagcacctacaaggagctccttg

SEQ ID NO: 253435 - DNA, 25 bp, Artificial
  Probe
acaagttggcagcagctgtttccaa

SEQ ID NO: 253436 - DNA, 25 bp, Artificial
  Probe
cctctggactggagccctgcttggg

SEQ ID NO: 253437 - DNA, 25 bp, Artificial
  Probe
cttgggcacggcagcagccagaatg

SEQ ID NO: 253438 - DNA, 25 bp, Artificial
  Probe
agagctccgggaagacttggagaac

SEQ ID NO: 253439 - DNA, 25 bp, Artificial
  Probe
gatttacgactacctacgtcaagga

SEQ ID NO: 253440 - DNA, 25 bp, Artificial
  Probe
atgtcccggtgctgggagctgaacc

SEQ ID NO: 253441 - DNA, 25 bp, Artificial
  Probe
cggccaagttttgcagagctccggg

SEQ ID NO: 253442 - DNA, 25 bp, Artificial
  Probe
aagatgccagtcaagtggattgcta

SEQ ID NO: 253443 - DNA, 25 bp, Artificial
  Probe
aacagcctctggactgtctggatgg

SEQ ID NO: 253444 - DNA, 25 bp, Artificial
  Probe
caagttttgcagagctccgggaaga

SEQ ID NO: 253445 - DNA, 25 bp, Artificial
  Probe
cctgaaacagcctctggactgtctg

SEQ ID NO: 253446 - DNA, 25 bp, Artificial
  Probe
cgcattgccaagatgccagtcaagt

SEQ ID NO: 253447 - DNA, 25 bp, Artificial
  Probe
agatttacgactacctacgtcaagg

SEQ ID NO: 253448 - DNA, 25 bp, Artificial
  Probe
tgccaagatgccagtcaagtggatt

SEQ ID NO: 253449 - DNA, 25 bp, Artificial
  Probe
gcctctatgccctgatgtcccggtg

SEQ ID NO: 253450 - DNA, 25 bp, Artificial
  Probe
tggatggcctctatgccctgatgtc

SEQ ID NO: 253451 - DNA, 25 bp, Artificial
  Probe
agttttgcagagctccgggaagact

SEQ ID NO: 253452 - DNA, 25 bp, Artificial
  Probe
aaggaaatcgcctgaaacagcctct

SEQ ID NO: 253453 - DNA, 25 bp, Artificial
  Probe
cgccaagggcgcattgccaagatgc

SEQ ID NO: 253454 - DNA, 25 bp, Artificial
  Probe
aggaaatcgcctgaaacagcctctg

SEQ ID NO: 253455 - DNA, 25 bp, Artificial
  Probe
ttactaccgccaagggcgcattgcc

SEQ ID NO: 253456 - DNA, 25 bp, Artificial
  Probe
gccaagttttgcagagctccgggaa

SEQ ID NO: 253457 - DNA, 25 bp, Artificial
  Probe
tatgccctgatgtcccggtgctggg

SEQ ID NO: 253458 - DNA, 25 bp, Artificial
  Probe
ggcgcattgccaagatgccagtcaa

SEQ ID NO: 253459 - DNA, 25 bp, Artificial
  Probe
gttttgcagagctccgggaagactt

SEQ ID NO: 253460 - DNA, 25 bp, Artificial
  Probe
acgtcaaggaaatcgcctgaaacag

SEQ ID NO: 253461 - DNA, 25 bp, Artificial
  Probe
agatgccagtcaagtggattgctat

SEQ ID NO: 253462 - DNA, 25 bp, Artificial
  Probe
gccaagggcgcattgccaagatgcc

SEQ ID NO: 253463 - DNA, 25 bp, Artificial
  Probe
ccaagatgccagtcaagtggattgc

SEQ ID NO: 253464 - DNA, 25 bp, Artificial
  Probe
gtctggatggcctctatgccctgat

SEQ ID NO: 253465 - DNA, 25 bp, Artificial
  Probe
tcgagaccggccaagttttgcagag

SEQ ID NO: 253466 - DNA, 25 bp, Artificial
  Probe
tctggactgtctggatggcctctat

SEQ ID NO: 253467 - DNA, 25 bp, Artificial
  Probe
ctatcgagagtctggcagatcgagt

SEQ ID NO: 253468 - DNA, 25 bp, Artificial
  Probe
gctgggagctgaaccctcgagaccg

SEQ ID NO: 253469 - DNA, 25 bp, Artificial
  Probe
tgaaccctcgagaccggccaagttt

SEQ ID NO: 253470 - DNA, 25 bp, Artificial
  Probe
gattgctatcgagagtctggcagat

SEQ ID NO: 253471 - DNA, 25 bp, Artificial
  Probe
aaatcgcctgaaacagcctctggac

SEQ ID NO: 253472 - DNA, 25 bp, Artificial
  Probe
ctctatgccctgatgtcccggtgct

SEQ ID NO: 253473 - DNA, 25 bp, Artificial
  Probe
ggactgtctggatggcctctatgcc

SEQ ID NO: 253474 - DNA, 25 bp, Artificial
  Probe
ccggtgctgggagctgaaccctcga

SEQ ID NO: 253475 - DNA, 25 bp, Artificial
  Probe
tcgagtctacaccagcaagagtgac

SEQ ID NO: 253476 - DNA, 25 bp, Artificial
  Probe
cgagagtctggcagatcgagtctac

SEQ ID NO: 253477 - DNA, 25 bp, Artificial
  Probe
ggagctgaaccctcgagaccggcca

SEQ ID NO: 253478 - DNA, 25 bp, Artificial
  Probe
ttacgactacctacgtcaaggaaat

SEQ ID NO: 253479 - DNA, 25 bp, Artificial
  Probe
atgccagtcaagtggattgctatcg

SEQ ID NO: 253480 - DNA, 25 bp, Artificial
  Probe
gggcgcattgccaagatgccagtca

SEQ ID NO: 253481 - DNA, 25 bp, Artificial
  Probe
ccagtcaagtggattgctatcgaga

SEQ ID NO: 253482 - DNA, 25 bp, Artificial
  Probe
gcattgccaagatgccagtcaagtg

SEQ ID NO: 253483 - DNA, 25 bp, Artificial
  Probe
gaaacagcctctggactgtctggat

SEQ ID NO: 253484 - DNA, 25 bp, Artificial
  Probe
gcacctaagtttgctccagtggcac

SEQ ID NO: 253485 - DNA, 25 bp, Artificial
  Probe
tatgctcagcagaaggagaagcccc

SEQ ID NO: 253486 - DNA, 25 bp, Artificial
  Probe
gctccagtggcacctaaatttactc

SEQ ID NO: 253487 - DNA, 25 bp, Artificial
  Probe
gacctgggccacagcccagtcaaaa

SEQ ID NO: 253488 - DNA, 25 bp, Artificial
  Probe
cctggtgctccaagtggacctgggc

SEQ ID NO: 253489 - DNA, 25 bp, Artificial
  Probe
gcctctggaagctccttcttctgtg

SEQ ID NO: 253490 - DNA, 25 bp, Artificial
  Probe
gcttcacctatgctcagcagaagga

SEQ ID NO: 253491 - DNA, 25 bp, Artificial
  Probe
cccagtcaaaaatcggtgcctctgg

SEQ ID NO: 253492 - DNA, 25 bp, Artificial
  Probe
gtcaaaaatcggtgcctctggaagc

SEQ ID NO: 253493 - DNA, 25 bp, Artificial
  Probe
gcacctaaatttactcccgtggctt

SEQ ID NO: 253494 - DNA, 25 bp, Artificial
  Probe
gccacagcccagtcaaaaatcggtg

SEQ ID NO: 253495 - DNA, 25 bp, Artificial
  Probe
gcttccaaattcagccctggtgctc

SEQ ID NO: 253496 - DNA, 25 bp, Artificial
  Probe
tgctcagcagaaggagaagccccta

SEQ ID NO: 253497 - DNA, 25 bp, Artificial
  Probe
tcaagagaagcagcacccactgcct

SEQ ID NO: 253498 - DNA, 25 bp, Artificial
  Probe
gaagcccctagttcaagagaagcag

SEQ ID NO: 253499 - DNA, 25 bp, Artificial
  Probe
aggagaagcccctagttcaagagaa

SEQ ID NO: 253500 - DNA, 25 bp, Artificial
  Probe
agtttgctccagtggcacctaaatt

SEQ ID NO: 253501 - DNA, 25 bp, Artificial
  Probe
ctggtgctccaagtggacctgggcc

SEQ ID NO: 253502 - DNA, 25 bp, Artificial
  Probe
cctaagtttgctccagtggcaccta

SEQ ID NO: 253503 - DNA, 25 bp, Artificial
  Probe
ccagtggcacctaaatttactcccg

SEQ ID NO: 253504 - DNA, 25 bp, Artificial
  Probe
ctccttcttctgtgggcacaggctc

SEQ ID NO: 253505 - DNA, 25 bp, Artificial
  Probe
agctccttcttctgtgggcacaggc

SEQ ID NO: 253506 - DNA, 25 bp, Artificial
  Probe
tagcttcacctatgctcagcagaag

SEQ ID NO: 253507 - DNA, 25 bp, Artificial
  Probe
tcggtgcctctggaagctccttctt

SEQ ID NO: 253508 - DNA, 25 bp, Artificial
  Probe
ggagaagcccctagttcaagagaag

SEQ ID NO: 253509 - DNA, 25 bp, Artificial
  Probe
aattcagccctggtgctccaagtgg

SEQ ID NO: 253510 - DNA, 25 bp, Artificial
  Probe
cctagcttcacctatgctcagcaga

SEQ ID NO: 253511 - DNA, 25 bp, Artificial
  Probe
tgctccaagtggacctgggccacag

SEQ ID NO: 253512 - DNA, 25 bp, Artificial
  Probe
gggccacagcccagtcaaaaatcgg

SEQ ID NO: 253513 - DNA, 25 bp, Artificial
  Probe
cagtggcacctaaatttactcccgt

SEQ ID NO: 253514 - DNA, 25 bp, Artificial
  Probe
attcagccctggtgctccaagtgga

SEQ ID NO: 253515 - DNA, 25 bp, Artificial
  Probe
ggacctgggccacagcccagtcaaa

SEQ ID NO: 253516 - DNA, 25 bp, Artificial
  Probe
ttcaagagaagcagcacccactgcc

SEQ ID NO: 253517 - DNA, 25 bp, Artificial
  Probe
ccgtggcttccaaattcagccctgg

SEQ ID NO: 253518 - DNA, 25 bp, Artificial
  Probe
tctggaagctccttcttctgtgggc

SEQ ID NO: 253519 - DNA, 25 bp, Artificial
  Probe
ggcacctaaatttactcccgtggct

SEQ ID NO: 253520 - DNA, 25 bp, Artificial
  Probe
tggaagctccttcttctgtgggcac

SEQ ID NO: 253521 - DNA, 25 bp, Artificial
  Probe
cagcacctaagtttgctccagtggc

SEQ ID NO: 253522 - DNA, 25 bp, Artificial
  Probe
ccctagttcaagagaagcagcaccc

SEQ ID NO: 253523 - DNA, 25 bp, Artificial
  Probe
tactcccgtggcttccaaattcagc

SEQ ID NO: 253524 - DNA, 25 bp, Artificial
  Probe
cagctcaaaaccaaaaccaggtacg

SEQ ID NO: 253525 - DNA, 25 bp, Artificial
  Probe
caaattcagccctggtgctccaagt

SEQ ID NO: 253526 - DNA, 25 bp, Artificial
  Probe
aatcggtgcctctggaagctccttc

SEQ ID NO: 253527 - DNA, 25 bp, Artificial
  Probe
acagcccagtcaaaaatcggtgcct

SEQ ID NO: 253528 - DNA, 25 bp, Artificial
  Probe
tgctccagtggcacctaaatttact

SEQ ID NO: 253529 - DNA, 25 bp, Artificial
  Probe
ccaggtacgttctcctggaggccca

SEQ ID NO: 253530 - DNA, 25 bp, Artificial
  Probe
gcgtctactactttgcttaccacgt

SEQ ID NO: 253531 - DNA, 25 bp, Artificial
  Probe
cagttaggtttgaccggactctcta

SEQ ID NO: 253532 - DNA, 25 bp, Artificial
  Probe
tagccctgtacaagaacaacgtgcc

SEQ ID NO: 253533 - DNA, 25 bp, Artificial
  Probe
accggactctctacaatggccacag

SEQ ID NO: 253534 - DNA, 25 bp, Artificial
  Probe
gactctctacaatggccacagcggc

SEQ ID NO: 253535 - DNA, 25 bp, Artificial
  Probe
tcaagggcaccaatgtgtgggtagc

SEQ ID NO: 253536 - DNA, 25 bp, Artificial
  Probe
tgaccggactctctacaatggccac

SEQ ID NO: 253537 - DNA, 25 bp, Artificial
  Probe
ctgtactgggcaaaggaggcaagcc

SEQ ID NO: 253538 - DNA, 25 bp, Artificial
  Probe
ttgcttaccacgtgcatgtcaaggg

SEQ ID NO: 253539 - DNA, 25 bp, Artificial
  Probe
ttaccacgtgcatgtcaagggcacc

SEQ ID NO: 253540 - DNA, 25 bp, Artificial
  Probe
cacgtgcatgtcaagggcaccaatg

SEQ ID NO: 253541 - DNA, 25 bp, Artificial
  Probe
ggctcggtgagctgtcagcccacgc

SEQ ID NO: 253542 - DNA, 25 bp, Artificial
  Probe
cgggcatgccagttaggtttgaccg

SEQ ID NO: 253543 - DNA, 25 bp, Artificial
  Probe
tgggctcggtgagctgtcagcccac

SEQ ID NO: 253544 - DNA, 25 bp, Artificial
  Probe
cgtctactactttgcttaccacgtg

SEQ ID NO: 253545 - DNA, 25 bp, Artificial
  Probe
gcatgccagttaggtttgaccggac

SEQ ID NO: 253546 - DNA, 25 bp, Artificial
  Probe
tgggtagccctgtacaagaacaacg

SEQ ID NO: 253547 - DNA, 25 bp, Artificial
  Probe
ctcgggcatgccagttaggtttgac

SEQ ID NO: 253548 - DNA, 25 bp, Artificial
  Probe
tgtgggtagccctgtacaagaacaa

SEQ ID NO: 253549 - DNA, 25 bp, Artificial
  Probe
acgtgcatgtcaagggcaccaatgt

SEQ ID NO: 253550 - DNA, 25 bp, Artificial
  Probe
aggcgtctactactttgcttaccac

SEQ ID NO: 253551 - DNA, 25 bp, Artificial
  Probe
ggtagccctgtacaagaacaacgtg

SEQ ID NO: 253552 - DNA, 25 bp, Artificial
  Probe
catgtcaagggcaccaatgtgtggg

SEQ ID NO: 253553 - DNA, 25 bp, Artificial
  Probe
caagggcaccaatgtgtgggtagcc

SEQ ID NO: 253554 - DNA, 25 bp, Artificial
  Probe
tactttgcttaccacgtgcatgtca

SEQ ID NO: 253555 - DNA, 25 bp, Artificial
  Probe
gcttaccacgtgcatgtcaagggca

SEQ ID NO: 253556 - DNA, 25 bp, Artificial
  Probe
tactactttgcttaccacgtgcatg

SEQ ID NO: 253557 - DNA, 25 bp, Artificial
  Probe
ctgcctcgggcatgccagttaggtt

SEQ ID NO: 253558 - DNA, 25 bp, Artificial
  Probe
cctgcctcgggcatgccagttaggt

SEQ ID NO: 253559 - DNA, 25 bp, Artificial
  Probe
tttgggctcggtgagctgtcagccc

SEQ ID NO: 253560 - DNA, 25 bp, Artificial
  Probe
cggactctctacaatggccacagcg

SEQ ID NO: 253561 - DNA, 25 bp, Artificial
  Probe
tttcatctgcccaatggtggcgtgg

SEQ ID NO: 253562 - DNA, 25 bp, Artificial
  Probe
tgtcaagggcaccaatgtgtgggta

SEQ ID NO: 253563 - DNA, 25 bp, Artificial
  Probe
ttgaccggactctctacaatggcca

SEQ ID NO: 253564 - DNA, 25 bp, Artificial
  Probe
gtttgaccggactctctacaatggc

SEQ ID NO: 253565 - DNA, 25 bp, Artificial
  Probe
aggtttgaccggactctctacaatg

SEQ ID NO: 253566 - DNA, 25 bp, Artificial
  Probe
gccagttaggtttgaccggactctc

SEQ ID NO: 253567 - DNA, 25 bp, Artificial
  Probe
gtagccctgtacaagaacaacgtgc

SEQ ID NO: 253568 - DNA, 25 bp, Artificial
  Probe
tactgggcaaaggaggcaagccgca

SEQ ID NO: 253569 - DNA, 25 bp, Artificial
  Probe
caatgtgtgggtagccctgtacaag

SEQ ID NO: 253570 - DNA, 25 bp, Artificial
  Probe
ggcaccaatgtgtgggtagccctgt

SEQ ID NO: 253571 - DNA, 25 bp, Artificial
  Probe
ggcatgccagttaggtttgaccgga

SEQ ID NO: 253572 - DNA, 25 bp, Artificial
  Probe
taccacgtgcatgtcaagggcacca

SEQ ID NO: 253573 - DNA, 25 bp, Artificial
  Probe
ggaggcgtctactactttgcttacc

SEQ ID NO: 253574 - DNA, 25 bp, Artificial
  Probe
actttgcttaccacgtgcatgtcaa

SEQ ID NO: 253575 - DNA, 25 bp, Artificial
  Probe
ccaatgtgtgggtagccctgtacaa

SEQ ID NO: 253576 - DNA, 25 bp, Artificial
  Probe
cagaaagatcaccagtagtcggtgt

SEQ ID NO: 253577 - DNA, 25 bp, Artificial
  Probe
gatcaccagtagtcggtgtccctgg

SEQ ID NO: 253578 - DNA, 25 bp, Artificial
  Probe
aagattcccaagaggaatctcaaga

SEQ ID NO: 253579 - DNA, 25 bp, Artificial
  Probe
aagatcaccagtagtcggtgtccct

SEQ ID NO: 253580 - DNA, 25 bp, Artificial
  Probe
acgtgtgggcccaaccagatgggac

SEQ ID NO: 253581 - DNA, 25 bp, Artificial
  Probe
agttacagaaagatcaccagtagtc

SEQ ID NO: 253582 - DNA, 25 bp, Artificial
  Probe
accagatgggaccaattcatccact

SEQ ID NO: 253583 - DNA, 25 bp, Artificial
  Probe
tctctgccgcgcttctgtgtgtgct

SEQ ID NO: 253584 - DNA, 25 bp, Artificial
  Probe
tcccaagaggaatctcaagagttac

SEQ ID NO: 253585 - DNA, 25 bp, Artificial
  Probe
agatgggaccaattcatccacttgc

SEQ ID NO: 253586 - DNA, 25 bp, Artificial
  Probe
accgagtctgccaactttcactgaa

SEQ ID NO: 253587 - DNA, 25 bp, Artificial
  Probe
gctgctgctttcaccgtgcacgtgt

SEQ ID NO: 253588 - DNA, 25 bp, Artificial
  Probe
gagtctgccaactttcactgaagcc

SEQ ID NO: 253589 - DNA, 25 bp, Artificial
  Probe
tgaagccagcttcaactttcactga

SEQ ID NO: 253590 - DNA, 25 bp, Artificial
  Probe
gcgcttctgtgtgtgctgctcacag

SEQ ID NO: 253591 - DNA, 25 bp, Artificial
  Probe
ggaccaattcatccacttgctgcta

SEQ ID NO: 253592 - DNA, 25 bp, Artificial
  Probe
cttctgtgtgtgctgctcacagctg

SEQ ID NO: 253593 - DNA, 25 bp, Artificial
  Probe
ttcaccgtgcacgtgtgggcccaac

SEQ ID NO: 253594 - DNA, 25 bp, Artificial
  Probe
atctcaagagttacagaaagatcac

SEQ ID NO: 253595 - DNA, 25 bp, Artificial
  Probe
accgtgcacgtgtgggcccaaccag

SEQ ID NO: 253596 - DNA, 25 bp, Artificial
  Probe
ctgccgcgcttctgtgtgtgctgct

SEQ ID NO: 253597 - DNA, 25 bp, Artificial
  Probe
ccagtagtcggtgtccctgggaagc

SEQ ID NO: 253598 - DNA, 25 bp, Artificial
  Probe
agtcggtgtccctgggaagctgtta

SEQ ID NO: 253599 - DNA, 25 bp, Artificial
  Probe
ctgaagccagcttcaactttcactg

SEQ ID NO: 253600 - DNA, 25 bp, Artificial
  Probe
acagaaagatcaccagtagtcggtg

SEQ ID NO: 253601 - DNA, 25 bp, Artificial
  Probe
acagctgctgctttcaccgtgcacg

SEQ ID NO: 253602 - DNA, 25 bp, Artificial
  Probe
cagtagtcggtgtccctgggaagct

SEQ ID NO: 253603 - DNA, 25 bp, Artificial
  Probe
gtgtgtgctgctcacagctgctgct

SEQ ID NO: 253604 - DNA, 25 bp, Artificial
  Probe
ttacagaaagatcaccagtagtcgg

SEQ ID NO: 253605 - DNA, 25 bp, Artificial
  Probe
gaagctgttatcttcaagaccaaaa

SEQ ID NO: 253606 - DNA, 25 bp, Artificial
  Probe
gaatctcaagagttacagaaagatc

SEQ ID NO: 253607 - DNA, 25 bp, Artificial
  Probe
ggtgtccctgggaagctgttatctt

SEQ ID NO: 253608 - DNA, 25 bp, Artificial
  Probe
gcttcaactttcactgaagccagcc

SEQ ID NO: 253609 - DNA, 25 bp, Artificial
  Probe
acttgctgctatgtcaagaaacaaa

SEQ ID NO: 253610 - DNA, 25 bp, Artificial
  Probe
gattcccaagaggaatctcaagagt

SEQ ID NO: 253611 - DNA, 25 bp, Artificial
  Probe
ccctgggaagctgttatcttcaaga

SEQ ID NO: 253612 - DNA, 25 bp, Artificial
  Probe
ggcccaaccagatgggaccaattca

SEQ ID NO: 253613 - DNA, 25 bp, Artificial
  Probe
caaccagatgggaccaattcatcca

SEQ ID NO: 253614 - DNA, 25 bp, Artificial
  Probe
ccacttgctgctatgtcaagaaaca

SEQ ID NO: 253615 - DNA, 25 bp, Artificial
  Probe
ttcatccacttgctgctatgtcaag

SEQ ID NO: 253616 - DNA, 25 bp, Artificial
  Probe
ctgctttcaccgtgcacgtgtgggc

SEQ ID NO: 253617 - DNA, 25 bp, Artificial
  Probe
accagtagtcggtgtccctgggaag

SEQ ID NO: 253618 - DNA, 25 bp, Artificial
  Probe
aatctcaagagttacagaaagatca

SEQ ID NO: 253619 - DNA, 25 bp, Artificial
  Probe
aagctgttatcttcaagaccaaaag

SEQ ID NO: 253620 - DNA, 25 bp, Artificial
  Probe
cgtgtgggcccaaccagatgggacc

SEQ ID NO: 253621 - DNA, 25 bp, Artificial
  Probe
gaaagatcaccagtagtcggtgtcc

SEQ ID NO: 253622 - DNA, 25 bp, Artificial
  Probe
ggacagcaagctcaactacaagccg

SEQ ID NO: 253623 - DNA, 25 bp, Artificial
  Probe
taacctacagagacacacagggcgg

SEQ ID NO: 253624 - DNA, 25 bp, Artificial
  Probe
cagtgcaccatgaccaatcaccatg

SEQ ID NO: 253625 - DNA, 25 bp, Artificial
  Probe
ccgtggtagcagacccaacagttcc

SEQ ID NO: 253626 - DNA, 25 bp, Artificial
  Probe
ggtagcagacccaacagttcccaac

SEQ ID NO: 253627 - DNA, 25 bp, Artificial
  Probe
tgaccaatcaccatggaccttactg

SEQ ID NO: 253628 - DNA, 25 bp, Artificial
  Probe
caagaaaacactgctgggagatgtc

SEQ ID NO: 253629 - DNA, 25 bp, Artificial
  Probe
aactgccagtactcagaagtcagag

SEQ ID NO: 253630 - DNA, 25 bp, Artificial
  Probe
cggacaggagcctggaattaaggaa

SEQ ID NO: 253631 - DNA, 25 bp, Artificial
  Probe
agacccaacagttcccaacgtgact

SEQ ID NO: 253632 - DNA, 25 bp, Artificial
  Probe
agccttgtttgtgacagtgcaccat

SEQ ID NO: 253633 - DNA, 25 bp, Artificial
  Probe
gcagacccaacagttcccaacgtga

SEQ ID NO: 253634 - DNA, 25 bp, Artificial
  Probe
ctgtgacccggcttagccttgtttg

SEQ ID NO: 253635 - DNA, 25 bp, Artificial
  Probe
cgagagtctaaccaagtacaagaaa

SEQ ID NO: 253636 - DNA, 25 bp, Artificial
  Probe
atgagctggacagcaagctcaacta

SEQ ID NO: 253637 - DNA, 25 bp, Artificial
  Probe
gagatgtccccgtggtagcagaccc

SEQ ID NO: 253638 - DNA, 25 bp, Artificial
  Probe
ctcagaagtccctgaaggagctgca

SEQ ID NO: 253639 - DNA, 25 bp, Artificial
  Probe
tttgtgacagtgcaccatgaccaat

SEQ ID NO: 253640 - DNA, 25 bp, Artificial
  Probe
tacaagaaaacactgctgggagatg

SEQ ID NO: 253641 - DNA, 25 bp, Artificial
  Probe
ccccgtggtagcagacccaacagtt

SEQ ID NO: 253642 - DNA, 25 bp, Artificial
  Probe
aacgtgactgtgacccggcttagcc

SEQ ID NO: 253643 - DNA, 25 bp, Artificial
  Probe
ccaacagttcccaacgtgactgtga

SEQ ID NO: 253644 - DNA, 25 bp, Artificial
  Probe
agtacaagaaaacactgctgggaga

SEQ ID NO: 253645 - DNA, 25 bp, Artificial
  Probe
gttctaactgccagtactcagaagt

SEQ ID NO: 253646 - DNA, 25 bp, Artificial
  Probe
tcagaagtccctgaaggagctgcag

SEQ ID NO: 253647 - DNA, 25 bp, Artificial
  Probe
ttctaactgccagtactcagaagtc

SEQ ID NO: 253648 - DNA, 25 bp, Artificial
  Probe
atgacgagagtctaaccaagtacaa

SEQ ID NO: 253649 - DNA, 25 bp, Artificial
  Probe
acagagacacacagggcggacagga

SEQ ID NO: 253650 - DNA, 25 bp, Artificial
  Probe
tgtgacccggcttagccttgtttgt

SEQ ID NO: 253651 - DNA, 25 bp, Artificial
  Probe
agctggacagcaagctcaactacaa

SEQ ID NO: 253652 - DNA, 25 bp, Artificial
  Probe
tagcagacccaacagttcccaacgt

SEQ ID NO: 253653 - DNA, 25 bp, Artificial
  Probe
gcttccttcctgttctaactgccag

SEQ ID NO: 253654 - DNA, 25 bp, Artificial
  Probe
ccaagtacaagaaaacactgctggg

SEQ ID NO: 253655 - DNA, 25 bp, Artificial
  Probe
gacagcaagctcaactacaagccgc

SEQ ID NO: 253656 - DNA, 25 bp, Artificial
  Probe
aacactgctgggagatgtccccgtg

SEQ ID NO: 253657 - DNA, 25 bp, Artificial
  Probe
tgagctggacagcaagctcaactac

SEQ ID NO: 253658 - DNA, 25 bp, Artificial
  Probe
actgctgggagatgtccccgtggta

SEQ ID NO: 253659 - DNA, 25 bp, Artificial
  Probe
acaggagcctggaattaaggaacaa

SEQ ID NO: 253660 - DNA, 25 bp, Artificial
  Probe
cccggcttagccttgtttgtgacag

SEQ ID NO: 253661 - DNA, 25 bp, Artificial
  Probe
gtgacagtgcaccatgaccaatcac

SEQ ID NO: 253662 - DNA, 25 bp, Artificial
  Probe
tgcaccatgaccaatcaccatggac

SEQ ID NO: 253663 - DNA, 25 bp, Artificial
  Probe
gacagtgcaccatgaccaatcacca

SEQ ID NO: 253664 - DNA, 25 bp, Artificial
  Probe
gttcccaacgtgactgtgacccggc

SEQ ID NO: 253665 - DNA, 25 bp, Artificial
  Probe
cggcttagccttgtttgtgacagtg

SEQ ID NO: 253666 - DNA, 25 bp, Artificial
  Probe
gtgacccggcttagccttgtttgtg

SEQ ID NO: 253667 - DNA, 25 bp, Artificial
  Probe
tcctgttctaactgccagtactcag

SEQ ID NO: 253668 - DNA, 25 bp, Artificial
  Probe
tcatctttgcggaggtgcttggcct

SEQ ID NO: 253669 - DNA, 25 bp, Artificial
  Probe
cagccatgtcggtcatgaggccaga

SEQ ID NO: 253670 - DNA, 25 bp, Artificial
  Probe
acaggagttttcttcaactgggtgc

SEQ ID NO: 253671 - DNA, 25 bp, Artificial
  Probe
catcgcagccatgtcggtcatgagg

SEQ ID NO: 253672 - DNA, 25 bp, Artificial
  Probe
ttcaactgggtgctggcctgagtgt

SEQ ID NO: 253673 - DNA, 25 bp, Artificial
  Probe
atgggcgcctcgtccgccatggtct

SEQ ID NO: 253674 - DNA, 25 bp, Artificial
  Probe
gaatattcttcgtttttcggtgtca

SEQ ID NO: 253675 - DNA, 25 bp, Artificial
  Probe
cgccatgggagctgcctatggcaca

SEQ ID NO: 253676 - DNA, 25 bp, Artificial
  Probe
ttcgtttttcggtgtcatgggcgcc

SEQ ID NO: 253677 - DNA, 25 bp, Artificial
  Probe
tcttcagcgccatgggagctgccta

SEQ ID NO: 253678 - DNA, 25 bp, Artificial
  Probe
gctgcctatggcacagccaagagtg

SEQ ID NO: 253679 - DNA, 25 bp, Artificial
  Probe
gtccgccatggtcttcagcgccatg

SEQ ID NO: 253680 - DNA, 25 bp, Artificial
  Probe
atggctgacatcaagaacaaccccg

SEQ ID NO: 253681 - DNA, 25 bp, Artificial
  Probe
cgcttgcagacatggctgacatcaa

SEQ ID NO: 253682 - DNA, 25 bp, Artificial
  Probe
ggcatcgcagccatgtcggtcatga

SEQ ID NO: 253683 - DNA, 25 bp, Artificial
  Probe
ggagaatcttctttcgtctgctcgc

SEQ ID NO: 253684 - DNA, 25 bp, Artificial
  Probe
gtcttcagcgccatgggagctgcct

SEQ ID NO: 253685 - DNA, 25 bp, Artificial
  Probe
tccccgcttgcagacatggctgaca

SEQ ID NO: 253686 - DNA, 25 bp, Artificial
  Probe
tctttgcggaggtgcttggcctcta

SEQ ID NO: 253687 - DNA, 25 bp, Artificial
  Probe
tcgtttttcggtgtcatgggcgcct

SEQ ID NO: 253688 - DNA, 25 bp, Artificial
  Probe
cgtttttcggtgtcatgggcgcctc

SEQ ID NO: 253689 - DNA, 25 bp, Artificial
  Probe
gctgacatcaagaacaaccccgaat

SEQ ID NO: 253690 - DNA, 25 bp, Artificial
  Probe
ccatgtcggtcatgaggccagagct

SEQ ID NO: 253691 - DNA, 25 bp, Artificial
  Probe
attcttcgtttttcggtgtcatggg

SEQ ID NO: 253692 - DNA, 25 bp, Artificial
  Probe
atcgcagccatgtcggtcatgaggc

SEQ ID NO: 253693 - DNA, 25 bp, Artificial
  Probe
atgggagctgcctatggcacagcca

SEQ ID NO: 253694 - DNA, 25 bp, Artificial
  Probe
tcttcaactgggtgctggcctgagt

SEQ ID NO: 253695 - DNA, 25 bp, Artificial
  Probe
atgtcggtcatgaggccagagctga

SEQ ID NO: 253696 - DNA, 25 bp, Artificial
  Probe
gtacttatcgctaactccctgactg

SEQ ID NO: 253697 - DNA, 25 bp, Artificial
  Probe
caggagttttcttcaactgggtgct

SEQ ID NO: 253698 - DNA, 25 bp, Artificial
  Probe
ttttcggtgtcatgggcgcctcgtc

SEQ ID NO: 253699 - DNA, 25 bp, Artificial
  Probe
cctctacaggagttttcttcaactg

SEQ ID NO: 253700 - DNA, 25 bp, Artificial
  Probe
tgcagacatggctgacatcaagaac

SEQ ID NO: 253701 - DNA, 25 bp, Artificial
  Probe
aggagttttcttcaactgggtgctg

SEQ ID NO: 253702 - DNA, 25 bp, Artificial
  Probe
ttccggagaatcttctttcgtctgc

SEQ ID NO: 253703 - DNA, 25 bp, Artificial
  Probe
gcagacatggctgacatcaagaaca

SEQ ID NO: 253704 - DNA, 25 bp, Artificial
  Probe
cctgatcctcatctttgcggaggtg

SEQ ID NO: 253705 - DNA, 25 bp, Artificial
  Probe
gggagctgcctatggcacagccaag

SEQ ID NO: 253706 - DNA, 25 bp, Artificial
  Probe
cagcgccatgggagctgcctatggc

SEQ ID NO: 253707 - DNA, 25 bp, Artificial
  Probe
gaatcttctttcgtctgctcgctct

SEQ ID NO: 253708 - DNA, 25 bp, Artificial
  Probe
gcatcaccctctacaggagttttct

SEQ ID NO: 253709 - DNA, 25 bp, Artificial
  Probe
gttttcttcaactgggtgctggcct

SEQ ID NO: 253710 - DNA, 25 bp, Artificial
  Probe
tgcctatggcacagccaagagtggc

SEQ ID NO: 253711 - DNA, 25 bp, Artificial
  Probe
gccatggtcttcagcgccatgggag

SEQ ID NO: 253712 - DNA, 25 bp, Artificial
  Probe
gatcctcatctttgcggaggtgctt

SEQ ID NO: 253713 - DNA, 25 bp, Artificial
  Probe
cttcaactgggtgctggcctgagtg

SEQ ID NO: 253714 - DNA, 25 bp, Artificial
  Probe
tgtgtgaccctaaccatttgaaaag

SEQ ID NO: 253715 - DNA, 25 bp, Artificial
  Probe
atgtggacctgactggagatggcct

SEQ ID NO: 253716 - DNA, 25 bp, Artificial
  Probe
tcttgacacggcttcgtcatcaagt

SEQ ID NO: 253717 - DNA, 25 bp, Artificial
  Probe
ttggactccccgagaaggaggttgc

SEQ ID NO: 253718 - DNA, 25 bp, Artificial
  Probe
tggactccccgagaaggaggttgct

SEQ ID NO: 253719 - DNA, 25 bp, Artificial
  Probe
agctggctgtggtatccctgaaagg

SEQ ID NO: 253720 - DNA, 25 bp, Artificial
  Probe
tcatcaagtggagcagaggaaacat

SEQ ID NO: 253721 - DNA, 25 bp, Artificial
  Probe
catctcagaagacaaatgtgcccct

SEQ ID NO: 253722 - DNA, 25 bp, Artificial
  Probe
cttgcagaagccaccacaggcttcg

SEQ ID NO: 253723 - DNA, 25 bp, Artificial
  Probe
aggaagcatctcagaagacaaatgt

SEQ ID NO: 253724 - DNA, 25 bp, Artificial
  Probe
tgccccttggactccccgagaagga

SEQ ID NO: 253725 - DNA, 25 bp, Artificial
  Probe
ctccccgagaaggaggttgctgaga

SEQ ID NO: 253726 - DNA, 25 bp, Artificial
  Probe
gacagagactttctggtaaaagttc

SEQ ID NO: 253727 - DNA, 25 bp, Artificial
  Probe
cgcctgctgttgagaagaagtttgc

SEQ ID NO: 253728 - DNA, 25 bp, Artificial
  Probe
cactgcaatcccatcaggtgttggt

SEQ ID NO: 253729 - DNA, 25 bp, Artificial
  Probe
cagagactttctggtaaaagttcca

SEQ ID NO: 253730 - DNA, 25 bp, Artificial
  Probe
ctttctggtaaaagttccatggctt

SEQ ID NO: 253731 - DNA, 25 bp, Artificial
  Probe
acaggcttcgcctgctgttgagaag

SEQ ID NO: 253732 - DNA, 25 bp, Artificial
  Probe
aaaggaacgttctcagcctaccact

SEQ ID NO: 253733 - DNA, 25 bp, Artificial
  Probe
ttgcagaagccaccacaggcttcgc

SEQ ID NO: 253734 - DNA, 25 bp, Artificial
  Probe
catggcccatgtggacctgactgga

SEQ ID NO: 253735 - DNA, 25 bp, Artificial
  Probe
catatgacagagactttctggtaaa

SEQ ID NO: 253736 - DNA, 25 bp, Artificial
  Probe
atggcttgcagaagccaccacaggc

SEQ ID NO: 253737 - DNA, 25 bp, Artificial
  Probe
atcccatcaggtgttggtccctgaa

SEQ ID NO: 253738 - DNA, 25 bp, Artificial
  Probe
aaaggggtgcacatcctccagcaca

SEQ ID NO: 253739 - DNA, 25 bp, Artificial
  Probe
catcaggtgttggtccctgaagact

SEQ ID NO: 253740 - DNA, 25 bp, Artificial
  Probe
ttctggtaaaagttccatggcttgc

SEQ ID NO: 253741 - DNA, 25 bp, Artificial
  Probe
ggtaaaagttccatggcttgcagaa

SEQ ID NO: 253742 - DNA, 25 bp, Artificial
  Probe
gccatggcccatgtggacctgactg

SEQ ID NO: 253743 - DNA, 25 bp, Artificial
  Probe
ctaccactgcaatcccatcaggtgt

SEQ ID NO: 253744 - DNA, 25 bp, Artificial
  Probe
ggtatccctgaaaggggtgcacatc

SEQ ID NO: 253745 - DNA, 25 bp, Artificial
  Probe
ctgtggtatccctgaaaggggtgca

SEQ ID NO: 253746 - DNA, 25 bp, Artificial
  Probe
tggccatggcccatgtggacctgac

SEQ ID NO: 253747 - DNA, 25 bp, Artificial
  Probe
ggagctggctgtggtatccctgaaa

SEQ ID NO: 253748 - DNA, 25 bp, Artificial
  Probe
tgtgaccctaaccatttgaaaaggg

SEQ ID NO: 253749 - DNA, 25 bp, Artificial
  Probe
aaatgtgccccttggactccccgag

SEQ ID NO: 253750 - DNA, 25 bp, Artificial
  Probe
ggtgttggtccctgaagactattca

SEQ ID NO: 253751 - DNA, 25 bp, Artificial
  Probe
gcacagcctgatccaggcctctgag

SEQ ID NO: 253752 - DNA, 25 bp, Artificial
  Probe
agaagacaaatgtgccccttggact

SEQ ID NO: 253753 - DNA, 25 bp, Artificial
  Probe
tgcaatcccatcaggtgttggtccc

SEQ ID NO: 253754 - DNA, 25 bp, Artificial
  Probe
agcacagcctgatccaggcctctga

SEQ ID NO: 253755 - DNA, 25 bp, Artificial
  Probe
aaggggtgcacatcctccagcacag

SEQ ID NO: 253756 - DNA, 25 bp, Artificial
  Probe
agactttctggtaaaagttccatgg

SEQ ID NO: 253757 - DNA, 25 bp, Artificial
  Probe
aagttccatggcttgcagaagccac

SEQ ID NO: 253758 - DNA, 25 bp, Artificial
  Probe
gtaaaagttccatggcttgcagaag

SEQ ID NO: 253759 - DNA, 25 bp, Artificial
  Probe
aggaacgttctcagcctaccactgc

SEQ ID NO: 253760 - DNA, 25 bp, Artificial
  Probe
ccatatagtgtactgtgttttaaca

SEQ ID NO: 253761 - DNA, 25 bp, Artificial
  Probe
cccaggtcggccactttgggcttgg

SEQ ID NO: 253762 - DNA, 25 bp, Artificial
  Probe
tctgttctccagaaaagtgggcatg

SEQ ID NO: 253763 - DNA, 25 bp, Artificial
  Probe
aggccctggcacctgtcctgtcttt

SEQ ID NO: 253764 - DNA, 25 bp, Artificial
  Probe
tgccttcttgtggtgtccagagccc

SEQ ID NO: 253765 - DNA, 25 bp, Artificial
  Probe
gcagttaaaccatcttgtagcccca

SEQ ID NO: 253766 - DNA, 25 bp, Artificial
  Probe
tttgggcagtattgcagtctcaccc

SEQ ID NO: 253767 - DNA, 25 bp, Artificial
  Probe
actataggtctgtggctttatgagc

SEQ ID NO: 253768 - DNA, 25 bp, Artificial
  Probe
tcttgtagccccattcatgatgttg

SEQ ID NO: 253769 - DNA, 25 bp, Artificial
  Probe
gaggtggccaacctttccatataag

SEQ ID NO: 253770 - DNA, 25 bp, Artificial
  Probe
tgggtaagaccacttcctttgtcct

SEQ ID NO: 253771 - DNA, 25 bp, Artificial
  Probe
gacatgaatcatcttagcttagctt

SEQ ID NO: 253772 - DNA, 25 bp, Artificial
  Probe
ccaagtcatagtttggagtgatctg

SEQ ID NO: 253773 - DNA, 25 bp, Artificial
  Probe
cacttgctagagagaagaggtgcca

SEQ ID NO: 253774 - DNA, 25 bp, Artificial
  Probe
agcccccaagtcatagtttggagtg

SEQ ID NO: 253775 - DNA, 25 bp, Artificial
  Probe
ctcaggcccaggtcggccactttgg

SEQ ID NO: 253776 - DNA, 25 bp, Artificial
  Probe
gtggttttctctgtatacccccatt

SEQ ID NO: 253777 - DNA, 25 bp, Artificial
  Probe
tacactactagcagtgggtaagacc

SEQ ID NO: 253778 - DNA, 25 bp, Artificial
  Probe
tactctgccatatctcttgtaggca

SEQ ID NO: 253779 - DNA, 25 bp, Artificial
  Probe
tccccactgctgatggactttagct

SEQ ID NO: 253780 - DNA, 25 bp, Artificial
  Probe
gggtactctgccatatctcttgtag

SEQ ID NO: 253781 - DNA, 25 bp, Artificial
  Probe
ggctgtagcctgtgcagttgctgta

SEQ ID NO: 253782 - DNA, 25 bp, Artificial
  Probe
aaggccctggcacctgtcctgtctt

SEQ ID NO: 253783 - DNA, 25 bp, Artificial
  Probe
ccactttgggcttgggtacagttag

SEQ ID NO: 253784 - DNA, 25 bp, Artificial
  Probe
caaacgatttacactgactgttgct

SEQ ID NO: 253785 - DNA, 25 bp, Artificial
  Probe
gctgtccttagaagtgaagagtcca

SEQ ID NO: 253786 - DNA, 25 bp, Artificial
  Probe
tgcagttgctgtactgggcatgatc

SEQ ID NO: 253787 - DNA, 25 bp, Artificial
  Probe
aaacttctctctagcttctgaaagg

SEQ ID NO: 253788 - DNA, 25 bp, Artificial
  Probe
gagctaccctattgtgagctcccca

SEQ ID NO: 253789 - DNA, 25 bp, Artificial
  Probe
cagttcctgtccttgaataggggtg

SEQ ID NO: 253790 - DNA, 25 bp, Artificial
  Probe
tgtggctttatgagccttcaaactt

SEQ ID NO: 253791 - DNA, 25 bp, Artificial
  Probe
tggctctccactgcagagccaatgt

SEQ ID NO: 253792 - DNA, 25 bp, Artificial
  Probe
agtcttgaagtgtagcagttaaacc

SEQ ID NO: 253793 - DNA, 25 bp, Artificial
  Probe
tgtggtttgatggtctgtggtccct

SEQ ID NO: 253794 - DNA, 25 bp, Artificial
  Probe
tacaaggaattctggcttgttactt

SEQ ID NO: 253795 - DNA, 25 bp, Artificial
  Probe
cactactagcagtgggtaagaccac

SEQ ID NO: 253796 - DNA, 25 bp, Artificial
  Probe
ctagcttctgaaagggttacttttg

SEQ ID NO: 253797 - DNA, 25 bp, Artificial
  Probe
agtgatctggtcagtgctaataggc

SEQ ID NO: 253798 - DNA, 25 bp, Artificial
  Probe
ttacttttgggcagtattgcagtct

SEQ ID NO: 253799 - DNA, 25 bp, Artificial
  Probe
taggtccctgacttcccagccaggt

SEQ ID NO: 253800 - DNA, 25 bp, Artificial
  Probe
ctgcagagccaatgtctttgggtgg

SEQ ID NO: 253801 - DNA, 25 bp, Artificial
  Probe
ttgcctgctgccttcttgtggtgtc

SEQ ID NO: 253802 - DNA, 25 bp, Artificial
  Probe
ccatcctgcagttcctgtccttgaa

SEQ ID NO: 253803 - DNA, 25 bp, Artificial
  Probe
ttgacttcaatataagagtgtatcc

SEQ ID NO: 253804 - DNA, 25 bp, Artificial
  Probe
aagaggtgccataaggctagaacct

SEQ ID NO: 253805 - DNA, 25 bp, Artificial
  Probe
ctaataggcagtttacaaggaattc

SEQ ID NO: 253806 - DNA, 25 bp, Artificial
  Probe
agaggggctgcggctggtggaaaag

SEQ ID NO: 253807 - DNA, 25 bp, Artificial
  Probe
atagggtacgcggaagaggtcaggg

SEQ ID NO: 253808 - DNA, 25 bp, Artificial
  Probe
gctatagtggctatggcggctatga

SEQ ID NO: 253809 - DNA, 25 bp, Artificial
  Probe
gagctatagtggctatggcggctat

SEQ ID NO: 253810 - DNA, 25 bp, Artificial
  Probe
gtgatagggtacgcggaagaggtca

SEQ ID NO: 253811 - DNA, 25 bp, Artificial
  Probe
gatggtgatagggtacgcggaagag

SEQ ID NO: 253812 - DNA, 25 bp, Artificial
  Probe
gaggggctgcggctggtggaaaaga

SEQ ID NO: 253813 - DNA, 25 bp, Artificial
  Probe
gatagggtacgcggaagaggtcagg

SEQ ID NO: 253814 - DNA, 25 bp, Artificial
  Probe
tgatagggtacgcggaagaggtcag

SEQ ID NO: 253815 - DNA, 25 bp, Artificial
  Probe
gtaagaggggctgcggctggtggaa

SEQ ID NO: 253816 - DNA, 25 bp, Artificial
  Probe
tacgcggaagaggtcagggccaaaa

SEQ ID NO: 253817 - DNA, 25 bp, Artificial
  Probe
gtgtaagaggggctgcggctggtgg

SEQ ID NO: 253818 - DNA, 25 bp, Artificial
  Probe
gaggtcagggccaaaactggaacca

SEQ ID NO: 253819 - DNA, 25 bp, Artificial
  Probe
ggctgcggctggtggaaaagatggt

SEQ ID NO: 253820 - DNA, 25 bp, Artificial
  Probe
ggggctgcggctggtggaaaagatg

SEQ ID NO: 253821 - DNA, 25 bp, Artificial
  Probe
ggtcagggccaaaactggaaccaag

SEQ ID NO: 253822 - DNA, 25 bp, Artificial
  Probe
taactatgggagctatggatatgga

SEQ ID NO: 253823 - DNA, 25 bp, Artificial
  Probe
aggggctgcggctggtggaaaagat

SEQ ID NO: 253824 - DNA, 25 bp, Artificial
  Probe
gggctgcggctggtggaaaagatgg

SEQ ID NO: 253825 - DNA, 25 bp, Artificial
  Probe
aagaggggctgcggctggtggaaaa

SEQ ID NO: 253826 - DNA, 25 bp, Artificial
  Probe
tgtaagaggggctgcggctggtgga

SEQ ID NO: 253827 - DNA, 25 bp, Artificial
  Probe
gtataactatgggagctatggatat

SEQ ID NO: 253828 - DNA, 25 bp, Artificial
  Probe
ataactatgggagctatggatatgg

SEQ ID NO: 253829 - DNA, 25 bp, Artificial
  Probe
ctgcggctggtggaaaagatggtga

SEQ ID NO: 253830 - DNA, 25 bp, Artificial
  Probe
gtacgcggaagaggtcagggccaaa

SEQ ID NO: 253831 - DNA, 25 bp, Artificial
  Probe
gagagctatagtggctatggcggct

SEQ ID NO: 253832 - DNA, 25 bp, Artificial
  Probe
agagctatagtggctatggcggcta

SEQ ID NO: 253833 - DNA, 25 bp, Artificial
  Probe
gtcagggccaaaactggaaccaagg

SEQ ID NO: 253834 - DNA, 25 bp, Artificial
  Probe
ggtacgcggaagaggtcagggccaa

SEQ ID NO: 253835 - DNA, 25 bp, Artificial
  Probe
gctgcggctggtggaaaagatggtg

SEQ ID NO: 253836 - DNA, 25 bp, Artificial
  Probe
tataactatgggagctatggatatg

SEQ ID NO: 253837 - DNA, 25 bp, Artificial
  Probe
atggtgatagggtacgcggaagagg

SEQ ID NO: 253838 - DNA, 25 bp, Artificial
  Probe
agctatagtggctatggcggctatg

SEQ ID NO: 253839 - DNA, 25 bp, Artificial
  Probe
aactatgggagctatggatatggac

SEQ ID NO: 253840 - DNA, 25 bp, Artificial
  Probe
taagaggggctgcggctggtggaaa

SEQ ID NO: 253841 - DNA, 25 bp, Artificial
  Probe
ggttccgtgggagcttccttcggct

SEQ ID NO: 253842 - DNA, 25 bp, Artificial
  Probe
accctcaggaattcagtgccttaaa

SEQ ID NO: 253843 - DNA, 25 bp, Artificial
  Probe
caagacacggacatggccgtactag

SEQ ID NO: 253844 - DNA, 25 bp, Artificial
  Probe
gcaagacacggacatggccgtacta

SEQ ID NO: 253845 - DNA, 25 bp, Artificial
  Probe
aaggaagaagccagccacggttccg

SEQ ID NO: 253846 - DNA, 25 bp, Artificial
  Probe
agtgccttaaaacagaacgtgagag

SEQ ID NO: 253847 - DNA, 25 bp, Artificial
  Probe
acaagaccctcaggaattcagtgcc

SEQ ID NO: 253848 - DNA, 25 bp, Artificial
  Probe
gccacggttccgtgggagcttcctt

SEQ ID NO: 253849 - DNA, 25 bp, Artificial
  Probe
gccttaaaacagaacgtgagagaaa

SEQ ID NO: 253850 - DNA, 25 bp, Artificial
  Probe
ggacaagaccctcaggaattcagtg

SEQ ID NO: 253851 - DNA, 25 bp, Artificial
  Probe
gttccgtgggagcttccttcggctt

SEQ ID NO: 253852 - DNA, 25 bp, Artificial
  Probe
gacaagaccctcaggaattcagtgc

SEQ ID NO: 253853 - DNA, 25 bp, Artificial
  Probe
ggacatggccgtactagggataagc

SEQ ID NO: 253854 - DNA, 25 bp, Artificial
  Probe
cttaaaacagaacgtgagagaaagg

SEQ ID NO: 253855 - DNA, 25 bp, Artificial
  Probe
caagaccctcaggaattcagtgcct

SEQ ID NO: 253856 - DNA, 25 bp, Artificial
  Probe
aattcagtgccttaaaacagaacgt

SEQ ID NO: 253857 - DNA, 25 bp, Artificial
  Probe
tcagtgccttaaaacagaacgtgag

SEQ ID NO: 253858 - DNA, 25 bp, Artificial
  Probe
tccaagataaggggcatggaaggac

SEQ ID NO: 253859 - DNA, 25 bp, Artificial
  Probe
tcaggaattcagtgccttaaaacag

SEQ ID NO: 253860 - DNA, 25 bp, Artificial
  Probe
agcaagacacggacatggccgtact

SEQ ID NO: 253861 - DNA, 25 bp, Artificial
  Probe
cttccttcggcttgggaagaagcaa

SEQ ID NO: 253862 - DNA, 25 bp, Artificial
  Probe
ttcagtgccttaaaacagaacgtga

SEQ ID NO: 253863 - DNA, 25 bp, Artificial
  Probe
aagaccctcaggaattcagtgcctt

SEQ ID NO: 253864 - DNA, 25 bp, Artificial
  Probe
gtgccttaaaacagaacgtgagaga

SEQ ID NO: 253865 - DNA, 25 bp, Artificial
  Probe
aggacaagaccctcaggaattcagt

SEQ ID NO: 253866 - DNA, 25 bp, Artificial
  Probe
gacatggccgtactagggataagcc

SEQ ID NO: 253867 - DNA, 25 bp, Artificial
  Probe
acatggccgtactagggataagcca

SEQ ID NO: 253868 - DNA, 25 bp, Artificial
  Probe
cggacatggccgtactagggataag

SEQ ID NO: 253869 - DNA, 25 bp, Artificial
  Probe
tttattaccgtcaccctctcagaac

SEQ ID NO: 253870 - DNA, 25 bp, Artificial
  Probe
ctcaggaattcagtgccttaaaaca

SEQ ID NO: 253871 - DNA, 25 bp, Artificial
  Probe
aggaagaagccagccacggttccgt

SEQ ID NO: 253872 - DNA, 25 bp, Artificial
  Probe
tccctccaagataaggggcatggaa

SEQ ID NO: 253873 - DNA, 25 bp, Artificial
  Probe
tggaaggacaagaccctcaggaatt

SEQ ID NO: 253874 - DNA, 25 bp, Artificial
  Probe
aatgacttgctccctccaagataag

SEQ ID NO: 253875 - DNA, 25 bp, Artificial
  Probe
ccctcaggaattcagtgccttaaaa

SEQ ID NO: 253876 - DNA, 25 bp, Artificial
  Probe
cctcaggaattcagtgccttaaaac

SEQ ID NO: 253877 - DNA, 25 bp, Artificial
  Probe
ccttaaaacagaacgtgagagaaag

SEQ ID NO: 253878 - DNA, 25 bp, Artificial
  Probe
gaattcagtgccttaaaacagaacg

SEQ ID NO: 253879 - DNA, 25 bp, Artificial
  Probe
ttccgtgggagcttccttcggcttg

SEQ ID NO: 253880 - DNA, 25 bp, Artificial
  Probe
agaccctcaggaattcagtgcctta

SEQ ID NO: 253881 - DNA, 25 bp, Artificial
  Probe
tccgtgggagcttccttcggcttgg

SEQ ID NO: 253882 - DNA, 25 bp, Artificial
  Probe
cttcggcttgggaagaagcaagaca

SEQ ID NO: 253883 - DNA, 25 bp, Artificial
  Probe
ccctccaagataaggggcatggaag

SEQ ID NO: 253884 - DNA, 25 bp, Artificial
  Probe
gaccctcaggaattcagtgccttaa

SEQ ID NO: 253885 - DNA, 25 bp, Artificial
  Probe
catggccgtactagggataagccac

SEQ ID NO: 253886 - DNA, 25 bp, Artificial
  Probe
aagacacggacatggccgtactagg

SEQ ID NO: 253887 - DNA, 25 bp, Artificial
  Probe
gtttggcatgctatttcagtttgca

SEQ ID NO: 253888 - DNA, 25 bp, Artificial
  Probe
tggcatgctatttcagtttgcatta

SEQ ID NO: 253889 - DNA, 25 bp, Artificial
  Probe
accaggttcacttcggtgtcacagt

SEQ ID NO: 253890 - DNA, 25 bp, Artificial
  Probe
tactgattctgttacagttttgcta

SEQ ID NO: 253891 - DNA, 25 bp, Artificial
  Probe
actcgagaccaggttcacttcggtg

SEQ ID NO: 253892 - DNA, 25 bp, Artificial
  Probe
cggtgtcacagttgactgtgtttat

SEQ ID NO: 253893 - DNA, 25 bp, Artificial
  Probe
tcgagaccaggttcacttcggtgtc

SEQ ID NO: 253894 - DNA, 25 bp, Artificial
  Probe
cacttcggtgtcacagttgactgtg

SEQ ID NO: 253895 - DNA, 25 bp, Artificial
  Probe
ctaaggtccgaatgtttggcatgct

SEQ ID NO: 253896 - DNA, 25 bp, Artificial
  Probe
gttcacttcggtgtcacagttgact

SEQ ID NO: 253897 - DNA, 25 bp, Artificial
  Probe
ttcacttcggtgtcacagttgactg

SEQ ID NO: 253898 - DNA, 25 bp, Artificial
  Probe
gagaccaggttcacttcggtgtcac

SEQ ID NO: 253899 - DNA, 25 bp, Artificial
  Probe
tttatttatgatgattcttgacatt

SEQ ID NO: 253900 - DNA, 25 bp, Artificial
  Probe
cgagaccaggttcacttcggtgtca

SEQ ID NO: 253901 - DNA, 25 bp, Artificial
  Probe
gaccaggttcacttcggtgtcacag

SEQ ID NO: 253902 - DNA, 25 bp, Artificial
  Probe
cttcggtgtcacagttgactgtgtt

SEQ ID NO: 253903 - DNA, 25 bp, Artificial
  Probe
acttcggtgtcacagttgactgtgt

SEQ ID NO: 253904 - DNA, 25 bp, Artificial
  Probe
tcagtttgcattatttatttatgat

SEQ ID NO: 253905 - DNA, 25 bp, Artificial
  Probe
aaactcgagaccaggttcacttcgg

SEQ ID NO: 253906 - DNA, 25 bp, Artificial
  Probe
aatactaaggtccgaatgtttggca

SEQ ID NO: 253907 - DNA, 25 bp, Artificial
  Probe
tcacttcggtgtcacagttgactgt

SEQ ID NO: 253908 - DNA, 25 bp, Artificial
  Probe
agaccaggttcacttcggtgtcaca

SEQ ID NO: 253909 - DNA, 25 bp, Artificial
  Probe
aactcgagaccaggttcacttcggt

SEQ ID NO: 253910 - DNA, 25 bp, Artificial
  Probe
ctcgagaccaggttcacttcggtgt

SEQ ID NO: 253911 - DNA, 25 bp, Artificial
  Probe
cgaatgtttggcatgctatttcagt

SEQ ID NO: 253912 - DNA, 25 bp, Artificial
  Probe
tcggtgtcacagttgactgtgttta

SEQ ID NO: 253913 - DNA, 25 bp, Artificial
  Probe
tgttacagttttgctaattttaaat

SEQ ID NO: 253914 - DNA, 25 bp, Artificial
  Probe
aggtccgaatgtttggcatgctatt

SEQ ID NO: 253915 - DNA, 25 bp, Artificial
  Probe
ggtccgaatgtttggcatgctattt

SEQ ID NO: 253916 - DNA, 25 bp, Artificial
  Probe
taaggtccgaatgtttggcatgcta

SEQ ID NO: 253917 - DNA, 25 bp, Artificial
  Probe
aaaactcgagaccaggttcacttcg

SEQ ID NO: 253918 - DNA, 25 bp, Artificial
  Probe
ggcatgctatttcagtttgcattat

SEQ ID NO: 253919 - DNA, 25 bp, Artificial
  Probe
actaaggtccgaatgtttggcatgc

SEQ ID NO: 253920 - DNA, 25 bp, Artificial
  Probe
tgtttggcatgctatttcagtttgc

SEQ ID NO: 253921 - DNA, 25 bp, Artificial
  Probe
ttcggtgtcacagttgactgtgttt

SEQ ID NO: 253922 - DNA, 25 bp, Artificial
  Probe
aaggtccgaatgtttggcatgctat

SEQ ID NO: 253923 - DNA, 25 bp, Artificial
  Probe
actgattctgttacagttttgctaa

SEQ ID NO: 253924 - DNA, 25 bp, Artificial
  Probe
tactaaggtccgaatgtttggcatg

SEQ ID NO: 253925 - DNA, 25 bp, Artificial
  Probe
gcatgctatttcagtttgcattatt

SEQ ID NO: 253926 - DNA, 25 bp, Artificial
  Probe
ggtgtcacagttgactgtgtttatt

SEQ ID NO: 253927 - DNA, 25 bp, Artificial
  Probe
ctgattctgttacagttttgctaat

SEQ ID NO: 253928 - DNA, 25 bp, Artificial
  Probe
ggttcacttcggtgtcacagttgac

SEQ ID NO: 253929 - DNA, 25 bp, Artificial
  Probe
tttggcatgctatttcagtttgcat

SEQ ID NO: 253930 - DNA, 25 bp, Artificial
  Probe
ttggcatgctatttcagtttgcatt

SEQ ID NO: 253931 - DNA, 25 bp, Artificial
  Probe
ccaggttcacttcggtgtcacagtt

SEQ ID NO: 253932 - DNA, 25 bp, Artificial
  Probe
aggttcacttcggtgtcacagttga

SEQ ID NO: 253933 - DNA, 25 bp, Artificial
  Probe
cggtggccagtcactggtgtcgcca

SEQ ID NO: 253934 - DNA, 25 bp, Artificial
  Probe
aggcagctgtctggaggacttccgt

SEQ ID NO: 253935 - DNA, 25 bp, Artificial
  Probe
aaccctaacatcagccgctgttcgg

SEQ ID NO: 253936 - DNA, 25 bp, Artificial
  Probe
gcagctgtctggaggacttccgtgc

SEQ ID NO: 253937 - DNA, 25 bp, Artificial
  Probe
tcgccaggcagctgtctggaggact

SEQ ID NO: 253938 - DNA, 25 bp, Artificial
  Probe
attcctgagcagaacttccagagca

SEQ ID NO: 253939 - DNA, 25 bp, Artificial
  Probe
acagcttctggctgaccacaattcc

SEQ ID NO: 253940 - DNA, 25 bp, Artificial
  Probe
gtgggacctgccattacttcgctaa

SEQ ID NO: 253941 - DNA, 25 bp, Artificial
  Probe
acttcgctaacaagtacagcttctg

SEQ ID NO: 253942 - DNA, 25 bp, Artificial
  Probe
acaagtacagcttctggctgaccac

SEQ ID NO: 253943 - DNA, 25 bp, Artificial
  Probe
ctgtccacagccaagatgtctctat

SEQ ID NO: 253944 - DNA, 25 bp, Artificial
  Probe
accctgccggccagcagctgtgtgg

SEQ ID NO: 253945 - DNA, 25 bp, Artificial
  Probe
cacaattcctgagcagaacttccag

SEQ ID NO: 253946 - DNA, 25 bp, Artificial
  Probe
tgagcagaacttccagagcacacca

SEQ ID NO: 253947 - DNA, 25 bp, Artificial
  Probe
ggatattcattcctcatgcacactg

SEQ ID NO: 253948 - DNA, 25 bp, Artificial
  Probe
atgaagaatctgtgagccgtccacc

SEQ ID NO: 253949 - DNA, 25 bp, Artificial
  Probe
tttgtggatcggatattcattcctc

SEQ ID NO: 253950 - DNA, 25 bp, Artificial
  Probe
aggctccggccgtggccattgctgt

SEQ ID NO: 253951 - DNA, 25 bp, Artificial
  Probe
catcagccgctgttcggtgtgtgag

SEQ ID NO: 253952 - DNA, 25 bp, Artificial
  Probe
agcagaacttccagagcacaccatc

SEQ ID NO: 253953 - DNA, 25 bp, Artificial
  Probe
actggtgtcgccaggcagctgtctg

SEQ ID NO: 253954 - DNA, 25 bp, Artificial
  Probe
ggccgtgggacctgccattacttcg

SEQ ID NO: 253955 - DNA, 25 bp, Artificial
  Probe
aagtacagcttctggctgaccacaa

SEQ ID NO: 253956 - DNA, 25 bp, Artificial
  Probe
gggccgtgggacctgccattacttc

SEQ ID NO: 253957 - DNA, 25 bp, Artificial
  Probe
gaagaatctgtgagccgtccaccct

SEQ ID NO: 253958 - DNA, 25 bp, Artificial
  Probe
tggccagtcactggtgtcgccaggc

SEQ ID NO: 253959 - DNA, 25 bp, Artificial
  Probe
tcattcctcatgcacactgcagctg

SEQ ID NO: 253960 - DNA, 25 bp, Artificial
  Probe
cggccgtggccattgctgtccacag

SEQ ID NO: 253961 - DNA, 25 bp, Artificial
  Probe
attgctgtccacagccaagatgtct

SEQ ID NO: 253962 - DNA, 25 bp, Artificial
  Probe
atgcacactgcagctggggacgaag

SEQ ID NO: 253963 - DNA, 25 bp, Artificial
  Probe
gacctgccattacttcgctaacaag

SEQ ID NO: 253964 - DNA, 25 bp, Artificial
  Probe
cagtcactggtgtcgccaggcagct

SEQ ID NO: 253965 - DNA, 25 bp, Artificial
  Probe
ggccgtggccattgctgtccacagc

SEQ ID NO: 253966 - DNA, 25 bp, Artificial
  Probe
gccaagatgtctctataccccactg

SEQ ID NO: 253967 - DNA, 25 bp, Artificial
  Probe
cctgagcagaacttccagagcacac

SEQ ID NO: 253968 - DNA, 25 bp, Artificial
  Probe
cctcatgcacactgcagctggggac

SEQ ID NO: 253969 - DNA, 25 bp, Artificial
  Probe
ttcctcatgcacactgcagctgggg

SEQ ID NO: 253970 - DNA, 25 bp, Artificial
  Probe
gatcggatattcattcctcatgcac

SEQ ID NO: 253971 - DNA, 25 bp, Artificial
  Probe
aacatcagccgctgttcggtgtgtg

SEQ ID NO: 253972 - DNA, 25 bp, Artificial
  Probe
ggatcggatattcattcctcatgca

SEQ ID NO: 253973 - DNA, 25 bp, Artificial
  Probe
cgtggccattgctgtccacagccaa

SEQ ID NO: 253974 - DNA, 25 bp, Artificial
  Probe
gtccacagccaagatgtctctatac

SEQ ID NO: 253975 - DNA, 25 bp, Artificial
  Probe
taacaagtacagcttctggctgacc

SEQ ID NO: 253976 - DNA, 25 bp, Artificial
  Probe
gaccacaattcctgagcagaacttc

SEQ ID NO: 253977 - DNA, 25 bp, Artificial
  Probe
gggaggccactttggtgcttatcct

SEQ ID NO: 253978 - DNA, 25 bp, Artificial
  Probe
ttcctgagcagaacttccagagcac

SEQ ID NO: 253979 - DNA, 25 bp, Artificial
  Probe
ctcattgccattggaatagagatct

SEQ ID NO: 253980 - DNA, 25 bp, Artificial
  Probe
gagaatgatcccaatacagaaatag

SEQ ID NO: 253981 - DNA, 25 bp, Artificial
  Probe
ggtttgactatttgccaatgccctg

SEQ ID NO: 253982 - DNA, 25 bp, Artificial
  Probe
gatcccaatacagaaatagctttga

SEQ ID NO: 253983 - DNA, 25 bp, Artificial
  Probe
cataaaaatcctttgcagagaatga

SEQ ID NO: 253984 - DNA, 25 bp, Artificial
  Probe
ctgcctgtagagttagtatttctgt

SEQ ID NO: 253985 - DNA, 25 bp, Artificial
  Probe
caaatattacctcatttgttgtgtg

SEQ ID NO: 253986 - DNA, 25 bp, Artificial
  Probe
actatttgccaatgccctgtgttct

SEQ ID NO: 253987 - DNA, 25 bp, Artificial
  Probe
tttcttgtgtacaaggaacaacaat

SEQ ID NO: 253988 - DNA, 25 bp, Artificial
  Probe
cccaggtttgactatttgccaatgc

SEQ ID NO: 253989 - DNA, 25 bp, Artificial
  Probe
ttactgtttcttgtgtacaaggaac

SEQ ID NO: 253990 - DNA, 25 bp, Artificial
  Probe
aactactgtcgtgtctaaaaagtca

SEQ ID NO: 253991 - DNA, 25 bp, Artificial
  Probe
ttacattctaaagcagtgtaacttg

SEQ ID NO: 253992 - DNA, 25 bp, Artificial
  Probe
tttacttcccaggtttgactatttg

SEQ ID NO: 253993 - DNA, 25 bp, Artificial
  Probe
atattacctcatttgttgtgtgact

SEQ ID NO: 253994 - DNA, 25 bp, Artificial
  Probe
gagatctcagactatgtagatatgc

SEQ ID NO: 253995 - DNA, 25 bp, Artificial
  Probe
ctgtgttctaggaacgtgctttttt

SEQ ID NO: 253996 - DNA, 25 bp, Artificial
  Probe
tcctttgcagagaatgatcccaata

SEQ ID NO: 253997 - DNA, 25 bp, Artificial
  Probe
ggttttgttctatcatcttgtacac

SEQ ID NO: 253998 - DNA, 25 bp, Artificial
  Probe
tcaaagttctggttttgttctatca

SEQ ID NO: 253999 - DNA, 25 bp, Artificial
  Probe
aatattacctcatttgttgtgtgac

SEQ ID NO: 254000 - DNA, 25 bp, Artificial
  Probe
actgtcgtgtctaaaaagtcagtgt

SEQ ID NO: 254001 - DNA, 25 bp, Artificial
  Probe
aaagttctggttttgttctatcatc

SEQ ID NO: 254002 - DNA, 25 bp, Artificial
  Probe
taatttatcaggaaatactgcctgt

SEQ ID NO: 254003 - DNA, 25 bp, Artificial
  Probe
atcaggaaatactgcctgtagagtt

SEQ ID NO: 254004 - DNA, 25 bp, Artificial
  Probe
ttgccaatgccctgtgttctaggaa

SEQ ID NO: 254005 - DNA, 25 bp, Artificial
  Probe
tactgcctgtagagttagtatttct

SEQ ID NO: 254006 - DNA, 25 bp, Artificial
  Probe
tactgtcgtgtctaaaaagtcagtg

SEQ ID NO: 254007 - DNA, 25 bp, Artificial
  Probe
atgccctgtgttctaggaacgtgct

SEQ ID NO: 254008 - DNA, 25 bp, Artificial
  Probe
cattttcccaaaagagacaaaggtg

SEQ ID NO: 254009 - DNA, 25 bp, Artificial
  Probe
atcctttgcagagaatgatcccaat

SEQ ID NO: 254010 - DNA, 25 bp, Artificial
  Probe
tacttcccaggtttgactatttgcc

SEQ ID NO: 254011 - DNA, 25 bp, Artificial
  Probe
gaatgatcccaatacagaaatagct

SEQ ID NO: 254012 - DNA, 25 bp, Artificial
  Probe
catagcataaaaatcctttgcagag

SEQ ID NO: 254013 - DNA, 25 bp, Artificial
  Probe
aaatcctttgcagagaatgatccca

SEQ ID NO: 254014 - DNA, 25 bp, Artificial
  Probe
aggtttgactatttgccaatgccct

SEQ ID NO: 254015 - DNA, 25 bp, Artificial
  Probe
aatgccctgtgttctaggaacgtgc

SEQ ID NO: 254016 - DNA, 25 bp, Artificial
  Probe
tgactatttgccaatgccctgtgtt

SEQ ID NO: 254017 - DNA, 25 bp, Artificial
  Probe
attgccattggaatagagatctcag

SEQ ID NO: 254018 - DNA, 25 bp, Artificial
  Probe
ttacctcatttgttgtgtgactgag

SEQ ID NO: 254019 - DNA, 25 bp, Artificial
  Probe
atagcataaaaatcctttgcagaga

SEQ ID NO: 254020 - DNA, 25 bp, Artificial
  Probe
cattctaaagcagtgtaacttgtat

SEQ ID NO: 254021 - DNA, 25 bp, Artificial
  Probe
tgatcccaatacagaaatagctttg

SEQ ID NO: 254022 - DNA, 25 bp, Artificial
  Probe
atactgcctgtagagttagtatttc

SEQ ID NO: 254023 - DNA, 25 bp, Artificial
  Probe
ttatcaggaaatactgcctgtagag

SEQ ID NO: 254024 - DNA, 25 bp, Artificial
  Probe
tctcagactatgtagatatgctatt

SEQ ID NO: 254025 - DNA, 25 bp, Artificial
  Probe
gacctctgtaagcacagccttattt

SEQ ID NO: 254026 - DNA, 25 bp, Artificial
  Probe
tgcattcatgtaacggaaagggcaa

SEQ ID NO: 254027 - DNA, 25 bp, Artificial
  Probe
agagagaagaccttctcgaccccgg

SEQ ID NO: 254028 - DNA, 25 bp, Artificial
  Probe
aatactgccagatgctgatgttcag

SEQ ID NO: 254029 - DNA, 25 bp, Artificial
  Probe
gagagaagaccttctcgaccccggg

SEQ ID NO: 254030 - DNA, 25 bp, Artificial
  Probe
tgacgacttgcttgcggtagatttt

SEQ ID NO: 254031 - DNA, 25 bp, Artificial
  Probe
ggcagttacatgcatacttcaaaag

SEQ ID NO: 254032 - DNA, 25 bp, Artificial
  Probe
gtccagaatacttacaattcttgag

SEQ ID NO: 254033 - DNA, 25 bp, Artificial
  Probe
cacctgatgtgtgcattcatgtaac

SEQ ID NO: 254034 - DNA, 25 bp, Artificial
  Probe
ttcccaaaaatactgccagatgctg

SEQ ID NO: 254035 - DNA, 25 bp, Artificial
  Probe
gcagttacatgcatacttcaaaagt

SEQ ID NO: 254036 - DNA, 25 bp, Artificial
  Probe
tcgaccccgggaagcctcttcagga

SEQ ID NO: 254037 - DNA, 25 bp, Artificial
  Probe
cttgagcctcccagaaattggaagc

SEQ ID NO: 254038 - DNA, 25 bp, Artificial
  Probe
agctaaataaagcaactcgagtttc

SEQ ID NO: 254039 - DNA, 25 bp, Artificial
  Probe
ttgtaaagtgtggtcccaacaggag

SEQ ID NO: 254040 - DNA, 25 bp, Artificial
  Probe
tcctttgcctgttgagttacagaaa

SEQ ID NO: 254041 - DNA, 25 bp, Artificial
  Probe
tattttccaagtgtgcatattgtac

SEQ ID NO: 254042 - DNA, 25 bp, Artificial
  Probe
ggacaattcatgaacttcgcatcaa

SEQ ID NO: 254043 - DNA, 25 bp, Artificial
  Probe
ttcatgtaacggaaagggcaacaat

SEQ ID NO: 254044 - DNA, 25 bp, Artificial
  Probe
cacacttaagggacatgttttgata

SEQ ID NO: 254045 - DNA, 25 bp, Artificial
  Probe
acaacagtgctaaaaatgggacttc

SEQ ID NO: 254046 - DNA, 25 bp, Artificial
  Probe
gcacagccttattttcctctgttgt

SEQ ID NO: 254047 - DNA, 25 bp, Artificial
  Probe
tgcttagtaatgctgtgtgactttc

SEQ ID NO: 254048 - DNA, 25 bp, Artificial
  Probe
ctgatgtgtgcattcatgtaacgga

SEQ ID NO: 254049 - DNA, 25 bp, Artificial
  Probe
agccttattttcctctgttgtccag

SEQ ID NO: 254050 - DNA, 25 bp, Artificial
  Probe
gaaagacctctgtaagcacagcctt

SEQ ID NO: 254051 - DNA, 25 bp, Artificial
  Probe
cctcttcaggagtgtgattgggaat

SEQ ID NO: 254052 - DNA, 25 bp, Artificial
  Probe
gccttattttcctctgttgtccaga

SEQ ID NO: 254053 - DNA, 25 bp, Artificial
  Probe
tcccaaaaatactgccagatgctga

SEQ ID NO: 254054 - DNA, 25 bp, Artificial
  Probe
aaatgaatcctacacacttaaggga

SEQ ID NO: 254055 - DNA, 25 bp, Artificial
  Probe
aggacaattcatgaacttcgcatca

SEQ ID NO: 254056 - DNA, 25 bp, Artificial
  Probe
gtaagcacagccttattttcctctg

SEQ ID NO: 254057 - DNA, 25 bp, Artificial
  Probe
ggtgacgacttgcttgcggtagatt

SEQ ID NO: 254058 - DNA, 25 bp, Artificial
  Probe
gtttgctcagtcaactaacctgaaa

SEQ ID NO: 254059 - DNA, 25 bp, Artificial
  Probe
cttagtaatgctgtgtgactttctg

SEQ ID NO: 254060 - DNA, 25 bp, Artificial
  Probe
tgtaaagtgtggtcccaacaggagg

SEQ ID NO: 254061 - DNA, 25 bp, Artificial
  Probe
aattcttgagcctcccagaaattgg

SEQ ID NO: 254062 - DNA, 25 bp, Artificial
  Probe
tgtgcattcatgtaacggaaagggc

SEQ ID NO: 254063 - DNA, 25 bp, Artificial
  Probe
ctttatacaacagtgctaaaaatgg

SEQ ID NO: 254064 - DNA, 25 bp, Artificial
  Probe
gctctatcttgctctgtaatctcgt

SEQ ID NO: 254065 - DNA, 25 bp, Artificial
  Probe
tgacattgctaagatgctctatctt

SEQ ID NO: 254066 - DNA, 25 bp, Artificial
  Probe
aagtgtggtcccaacaggaggacaa

SEQ ID NO: 254067 - DNA, 25 bp, Artificial
  Probe
tcccaacaggaggacaattcatgaa

SEQ ID NO: 254068 - DNA, 25 bp, Artificial
  Probe
ctcccagaaattggaagctaaataa

SEQ ID NO: 254069 - DNA, 25 bp, Artificial
  Probe
tgatcctttgcctgttgagttacag

SEQ ID NO: 254070 - DNA, 25 bp, Artificial
  Probe
ttccaagtgtgcatattgtacactt

SEQ ID NO: 254071 - DNA, 25 bp, Artificial
  Probe
aagaccctggagtcttggcggcgct

SEQ ID NO: 254072 - DNA, 25 bp, Artificial
  Probe
cactaagacggacaagctagagaag

SEQ ID NO: 254073 - DNA, 25 bp, Artificial
  Probe
agaagctcatgatccgcattggcat

SEQ ID NO: 254074 - DNA, 25 bp, Artificial
  Probe
ggcaaccaaaacctgaactcgctac

SEQ ID NO: 254075 - DNA, 25 bp, Artificial
  Probe
catgatccgcattggcatcttcact

SEQ ID NO: 254076 - DNA, 25 bp, Artificial
  Probe
tcaagtacttcatgtgcctggtggt

SEQ ID NO: 254077 - DNA, 25 bp, Artificial
  Probe
ccgagtactgggtgctcatgctcaa

SEQ ID NO: 254078 - DNA, 25 bp, Artificial
  Probe
catcaagcagggtggcactaagacg

SEQ ID NO: 254079 - DNA, 25 bp, Artificial
  Probe
atcgtggtggcctgctacctgtatg

SEQ ID NO: 254080 - DNA, 25 bp, Artificial
  Probe
accctggagtcttggcggcgcttca

SEQ ID NO: 254081 - DNA, 25 bp, Artificial
  Probe
ctggtccggaaagaccctggagtct

SEQ ID NO: 254082 - DNA, 25 bp, Artificial
  Probe
tccgcattggcatcttcactctgct

SEQ ID NO: 254083 - DNA, 25 bp, Artificial
  Probe
ccagccagcatcgtggtggcctgct

SEQ ID NO: 254084 - DNA, 25 bp, Artificial
  Probe
acggagacccagtggctggcatctg

SEQ ID NO: 254085 - DNA, 25 bp, Artificial
  Probe
ctcatgatccgcattggcatcttca

SEQ ID NO: 254086 - DNA, 25 bp, Artificial
  Probe
cgctatggtcgcaggagactatgcg

SEQ ID NO: 254087 - DNA, 25 bp, Artificial
  Probe
acaagctagagaagctcatgatccg

SEQ ID NO: 254088 - DNA, 25 bp, Artificial
  Probe
tatgtgggcaaccaaaacctgaact

SEQ ID NO: 254089 - DNA, 25 bp, Artificial
  Probe
ctgcagctctcgacggggccataaa

SEQ ID NO: 254090 - DNA, 25 bp, Artificial
  Probe
ccagcatcgtggtggcctgctacct

SEQ ID NO: 254091 - DNA, 25 bp, Artificial
  Probe
ggtgctcatgctcaagtacttcatg

SEQ ID NO: 254092 - DNA, 25 bp, Artificial
  Probe
tgaacagcactatcgggagagctgg

SEQ ID NO: 254093 - DNA, 25 bp, Artificial
  Probe
taagacggacaagctagagaagctc

SEQ ID NO: 254094 - DNA, 25 bp, Artificial
  Probe
tgctcatgctcaagtacttcatgtg

SEQ ID NO: 254095 - DNA, 25 bp, Artificial
  Probe
ccataaaagcggtggcgctatggtc

SEQ ID NO: 254096 - DNA, 25 bp, Artificial
  Probe
agcagggtggcactaagacggacaa

SEQ ID NO: 254097 - DNA, 25 bp, Artificial
  Probe
atccggagcgtcatcaagcagggtg

SEQ ID NO: 254098 - DNA, 25 bp, Artificial
  Probe
gcatccggagcgtcatcaagcaggg

SEQ ID NO: 254099 - DNA, 25 bp, Artificial
  Probe
cactgagctccgtggacggagaccc

SEQ ID NO: 254100 - DNA, 25 bp, Artificial
  Probe
ctgctgctgcagctctcgacggggc

SEQ ID NO: 254101 - DNA, 25 bp, Artificial
  Probe
ctccgtggacggagacccagtggct

SEQ ID NO: 254102 - DNA, 25 bp, Artificial
  Probe
gcgccaaacccgagtactgggtgct

SEQ ID NO: 254103 - DNA, 25 bp, Artificial
  Probe
aaacccgagtactgggtgctcatgc

SEQ ID NO: 254104 - DNA, 25 bp, Artificial
  Probe
ctagagaagctcatgatccgcattg

SEQ ID NO: 254105 - DNA, 25 bp, Artificial
  Probe
cagggtggcactaagacggacaagc

SEQ ID NO: 254106 - DNA, 25 bp, Artificial
  Probe
tggtccggaaagaccctggagtctt

SEQ ID NO: 254107 - DNA, 25 bp, Artificial
  Probe
ccggaaagaccctggagtcttggcg

SEQ ID NO: 254108 - DNA, 25 bp, Artificial
  Probe
gtggcctgctacctgtatgaacagc

SEQ ID NO: 254109 - DNA, 25 bp, Artificial
  Probe
cgctgctgctgcagctctcgacggg

SEQ ID NO: 254110 - DNA, 25 bp, Artificial
  Probe
gcctgctacctgtatgaacagcact

SEQ ID NO: 254111 - DNA, 25 bp, Artificial
  Probe
gacggagacccagtggctggcatct

SEQ ID NO: 254112 - DNA, 25 bp, Artificial
  Probe
aagcagggtggcactaagacggaca

SEQ ID NO: 254113 - DNA, 25 bp, Artificial
  Probe
atccgcattggcatcttcactctgc

SEQ ID NO: 254114 - DNA, 25 bp, Artificial
  Probe
ctatggtcgcaggagactatgcgga

SEQ ID NO: 254115 - DNA, 25 bp, Artificial
  Probe
gagcgtcatcaagcagggtggcact

SEQ ID NO: 254116 - DNA, 25 bp, Artificial
  Probe
gcgtcatcaagcagggtggcactaa

SEQ ID NO: 254117 - DNA, 25 bp, Artificial
  Probe
tccagccagatctcctcagcaaggg

SEQ ID NO: 254118 - DNA, 25 bp, Artificial
  Probe
gagattaacaggacacggagcagag

SEQ ID NO: 254119 - DNA, 25 bp, Artificial
  Probe
tcgttttttgcctcttgatcctggg

SEQ ID NO: 254120 - DNA, 25 bp, Artificial
  Probe
cagcacaagcaggatgaagtcttcc

SEQ ID NO: 254121 - DNA, 25 bp, Artificial
  Probe
agcagaggactcaagagctgaccag

SEQ ID NO: 254122 - DNA, 25 bp, Artificial
  Probe
acctggggtcccagcaggagttcac

SEQ ID NO: 254123 - DNA, 25 bp, Artificial
  Probe
gcaaaagacggttccagtttatgaa

SEQ ID NO: 254124 - DNA, 25 bp, Artificial
  Probe
ttgagttatttcctaaaacctggat

SEQ ID NO: 254125 - DNA, 25 bp, Artificial
  Probe
caattactgagttgagttatttcct

SEQ ID NO: 254126 - DNA, 25 bp, Artificial
  Probe
gacggttccagtttatgaaggaagc

SEQ ID NO: 254127 - DNA, 25 bp, Artificial
  Probe
cagtacatatagacgtctccagcca

SEQ ID NO: 254128 - DNA, 25 bp, Artificial
  Probe
agaggccactcacctggggtcccag

SEQ ID NO: 254129 - DNA, 25 bp, Artificial
  Probe
tactcggacatgagaaaggccaact

SEQ ID NO: 254130 - DNA, 25 bp, Artificial
  Probe
caggatgaagtcttccattgccatc

SEQ ID NO: 254131 - DNA, 25 bp, Artificial
  Probe
tcctgggagttgacagcaaaagacg

SEQ ID NO: 254132 - DNA, 25 bp, Artificial
  Probe
gatccctaaacatcccaatgtgctg

SEQ ID NO: 254133 - DNA, 25 bp, Artificial
  Probe
tcttcatgttgttcccgggcgcaca

SEQ ID NO: 254134 - DNA, 25 bp, Artificial
  Probe
gccatcgttttttgcctcttgatcc

SEQ ID NO: 254135 - DNA, 25 bp, Artificial
  Probe
agcaaaagacggttccagtttatga

SEQ ID NO: 254136 - DNA, 25 bp, Artificial
  Probe
cggttccagtttatgaaggaagctg

SEQ ID NO: 254137 - DNA, 25 bp, Artificial
  Probe
gaagtcttccattgccatcgttttt

SEQ ID NO: 254138 - DNA, 25 bp, Artificial
  Probe
acgggcagtggcagtacatatagac

SEQ ID NO: 254139 - DNA, 25 bp, Artificial
  Probe
aaggccaactggaaaaactcagaca

SEQ ID NO: 254140 - DNA, 25 bp, Artificial
  Probe
gggagcctgggctgctaaagtcatc

SEQ ID NO: 254141 - DNA, 25 bp, Artificial
  Probe
aggccaactggaaaaactcagacaa

SEQ ID NO: 254142 - DNA, 25 bp, Artificial
  Probe
gaattttctcttcatgttgttcccg

SEQ ID NO: 254143 - DNA, 25 bp, Artificial
  Probe
agctgaccagtttgccaacaagtgg

SEQ ID NO: 254144 - DNA, 25 bp, Artificial
  Probe
atctcctcagcaagggacagaggcc

SEQ ID NO: 254145 - DNA, 25 bp, Artificial
  Probe
cacggagcagaggactcaagagctg

SEQ ID NO: 254146 - DNA, 25 bp, Artificial
  Probe
ttgcgtaagaccaaaaggggattgc

SEQ ID NO: 254147 - DNA, 25 bp, Artificial
  Probe
aacaggacacggagcagaggactca

SEQ ID NO: 254148 - DNA, 25 bp, Artificial
  Probe
ggattgctccatacgggcagtggca

SEQ ID NO: 254149 - DNA, 25 bp, Artificial
  Probe
atcagtgatgccagagagggtattc

SEQ ID NO: 254150 - DNA, 25 bp, Artificial
  Probe
gcgcctactcggacatgagaaaggc

SEQ ID NO: 254151 - DNA, 25 bp, Artificial
  Probe
aaaggggattgctccatacgggcag

SEQ ID NO: 254152 - DNA, 25 bp, Artificial
  Probe
atagacgtctccagccagatctcct

SEQ ID NO: 254153 - DNA, 25 bp, Artificial
  Probe
aagtcatcagtgatgccagagaggg

SEQ ID NO: 254154 - DNA, 25 bp, Artificial
  Probe
ctccatacgggcagtggcagtacat

SEQ ID NO: 254155 - DNA, 25 bp, Artificial
  Probe
ccatacgggcagtggcagtacatat

SEQ ID NO: 254156 - DNA, 25 bp, Artificial
  Probe
ctcagcaagggacagaggccactca

SEQ ID NO: 254157 - DNA, 25 bp, Artificial
  Probe
ggacagaggccactcacctggggtc

SEQ ID NO: 254158 - DNA, 25 bp, Artificial
  Probe
cagtgatgccagagagggtattcag

SEQ ID NO: 254159 - DNA, 25 bp, Artificial
  Probe
tgagttatttcctaaaacctggatc

SEQ ID NO: 254160 - DNA, 25 bp, Artificial
  Probe
ctggatccctaaacatcccaatgtg

SEQ ID NO: 254161 - DNA, 25 bp, Artificial
  Probe
accagtttgccaacaagtggggccg

SEQ ID NO: 254162 - DNA, 25 bp, Artificial
  Probe
aacatcccaatgtgctgaataaatg

SEQ ID NO: 254163 - DNA, 25 bp, Artificial
  Probe
gattttcactctggacactagacca

SEQ ID NO: 254164 - DNA, 25 bp, Artificial
  Probe
ggagactacctgtttcaggttgtca

SEQ ID NO: 254165 - DNA, 25 bp, Artificial
  Probe
gtcattaaccccaactatgaggtgc

SEQ ID NO: 254166 - DNA, 25 bp, Artificial
  Probe
actacctgtttcaggttgtcattaa

SEQ ID NO: 254167 - DNA, 25 bp, Artificial
  Probe
tgactgccagtggatagacatcacc

SEQ ID NO: 254168 - DNA, 25 bp, Artificial
  Probe
catgaagtgcaggagccgctatgat

SEQ ID NO: 254169 - DNA, 25 bp, Artificial
  Probe
tctctaacaacatcatgaagtgcag

SEQ ID NO: 254170 - DNA, 25 bp, Artificial
  Probe
gctatgatggctaccgcatctggat

SEQ ID NO: 254171 - DNA, 25 bp, Artificial
  Probe
tgcaggagccgctatgatggctacc

SEQ ID NO: 254172 - DNA, 25 bp, Artificial
  Probe
tggatagacatcaccgatgtgcccc

SEQ ID NO: 254173 - DNA, 25 bp, Artificial
  Probe
tctctgtgcagtaaagacgactctg

SEQ ID NO: 254174 - DNA, 25 bp, Artificial
  Probe
ggactcctaaataatcagctctctg

SEQ ID NO: 254175 - DNA, 25 bp, Artificial
  Probe
tcgtcatgacattgactgccagtgg

SEQ ID NO: 254176 - DNA, 25 bp, Artificial
  Probe
tgcagtaaagacgactctgggccag

SEQ ID NO: 254177 - DNA, 25 bp, Artificial
  Probe
tctgcttggaggacactgagtgtga

SEQ ID NO: 254178 - DNA, 25 bp, Artificial
  Probe
caccatgggctgctgggacatgtat

SEQ ID NO: 254179 - DNA, 25 bp, Artificial
  Probe
acatcaccgatgtgccccctggaga

SEQ ID NO: 254180 - DNA, 25 bp, Artificial
  Probe
aaggcatcaccatgggctgctggga

SEQ ID NO: 254181 - DNA, 25 bp, Artificial
  Probe
taaagacgactctgggccaggcatg

SEQ ID NO: 254182 - DNA, 25 bp, Artificial
  Probe
caggttgtcattaaccccaactatg

SEQ ID NO: 254183 - DNA, 25 bp, Artificial
  Probe
caccaaggtggctgagggccacaag

SEQ ID NO: 254184 - DNA, 25 bp, Artificial
  Probe
ccaacttcggagaacaaggcatcac

SEQ ID NO: 254185 - DNA, 25 bp, Artificial
  Probe
tagacatcaccgatgtgccccctgg

SEQ ID NO: 254186 - DNA, 25 bp, Artificial
  Probe
ccaactatgaggtgccagaatcaga

SEQ ID NO: 254187 - DNA, 25 bp, Artificial
  Probe
tgtttcaggttgtcattaaccccaa

SEQ ID NO: 254188 - DNA, 25 bp, Artificial
  Probe
tgtcacgtaggtggagccttcagtg

SEQ ID NO: 254189 - DNA, 25 bp, Artificial
  Probe
tggagccttcagtgaggagacagaa

SEQ ID NO: 254190 - DNA, 25 bp, Artificial
  Probe
tatgaggtgccagaatcagatttct

SEQ ID NO: 254191 - DNA, 25 bp, Artificial
  Probe
gaacacttcagtggactcctaaata

SEQ ID NO: 254192 - DNA, 25 bp, Artificial
  Probe
aggttgtcattaaccccaactatga

SEQ ID NO: 254193 - DNA, 25 bp, Artificial
  Probe
ctatgaggtgccagaatcagatttc

SEQ ID NO: 254194 - DNA, 25 bp, Artificial
  Probe
gatggctaccgcatctggatgtaca

SEQ ID NO: 254195 - DNA, 25 bp, Artificial
  Probe
ctaaataatcagctctctgtgcagt

SEQ ID NO: 254196 - DNA, 25 bp, Artificial
  Probe
aacagaagttcgaacacttcagtgg

SEQ ID NO: 254197 - DNA, 25 bp, Artificial
  Probe
cttcagtggactcctaaataatcag

SEQ ID NO: 254198 - DNA, 25 bp, Artificial
  Probe
gatgtgccccctggagactacctgt

SEQ ID NO: 254199 - DNA, 25 bp, Artificial
  Probe
agtggatagacatcaccgatgtgcc

SEQ ID NO: 254200 - DNA, 25 bp, Artificial
  Probe
gcatctggatgtacaattgtcacgt

SEQ ID NO: 254201 - DNA, 25 bp, Artificial
  Probe
ccttcagtgaggagacagaacagaa

SEQ ID NO: 254202 - DNA, 25 bp, Artificial
  Probe
tgggctgctgggacatgtatcgtca

SEQ ID NO: 254203 - DNA, 25 bp, Artificial
  Probe
gagccgctatgatggctaccgcatc

SEQ ID NO: 254204 - DNA, 25 bp, Artificial
  Probe
aacttcggagaacaaggcatcacca

SEQ ID NO: 254205 - DNA, 25 bp, Artificial
  Probe
tgtacaattgtcacgtaggtggagc

SEQ ID NO: 254206 - DNA, 25 bp, Artificial
  Probe
ccagcttctgcttggaggacactga

SEQ ID NO: 254207 - DNA, 25 bp, Artificial
  Probe
gagaacaaggcatcaccatgggctg

SEQ ID NO: 254208 - DNA, 25 bp, Artificial
  Probe
atcaccatgggctgctgggacatgt

SEQ ID NO: 254209 - DNA, 25 bp, Artificial
  Probe
tgggacctgactccacccctgagac

SEQ ID NO: 254210 - DNA, 25 bp, Artificial
  Probe
tgggtttgttcaggtctatgggacc

SEQ ID NO: 254211 - DNA, 25 bp, Artificial
  Probe
cacccctgagaccatgatggatgtc

SEQ ID NO: 254212 - DNA, 25 bp, Artificial
  Probe
caggtctatgggacctgactccacc

SEQ ID NO: 254213 - DNA, 25 bp, Artificial
  Probe
taatgggtttgttcaggtctatggg

SEQ ID NO: 254214 - DNA, 25 bp, Artificial
  Probe
gaccatgatggatgtcctcctgtac

SEQ ID NO: 254215 - DNA, 25 bp, Artificial
  Probe
ccatgatggatgtcctcctgtactg

SEQ ID NO: 254216 - DNA, 25 bp, Artificial
  Probe
aggtctatgggacctgactccaccc

SEQ ID NO: 254217 - DNA, 25 bp, Artificial
  Probe
tgagaccatgatggatgtcctcctg

SEQ ID NO: 254218 - DNA, 25 bp, Artificial
  Probe
ggatgggctgggctcaggatatttg

SEQ ID NO: 254219 - DNA, 25 bp, Artificial
  Probe
atgggtttgttcaggtctatgggac

SEQ ID NO: 254220 - DNA, 25 bp, Artificial
  Probe
gtttgttcaggtctatgggacctga

SEQ ID NO: 254221 - DNA, 25 bp, Artificial
  Probe
atgggctgggctcaggatatttgaa

SEQ ID NO: 254222 - DNA, 25 bp, Artificial
  Probe
atgatggatgtcctcctgtactgat

SEQ ID NO: 254223 - DNA, 25 bp, Artificial
  Probe
acccctgagaccatgatggatgtcc

SEQ ID NO: 254224 - DNA, 25 bp, Artificial
  Probe
atgggacctgactccacccctgaga

SEQ ID NO: 254225 - DNA, 25 bp, Artificial
  Probe
tctatgggacctgactccacccctg

SEQ ID NO: 254226 - DNA, 25 bp, Artificial
  Probe
ggtctatgggacctgactccacccc

SEQ ID NO: 254227 - DNA, 25 bp, Artificial
  Probe
caggtggatgggctgggctcaggat

SEQ ID NO: 254228 - DNA, 25 bp, Artificial
  Probe
aggtggatgggctgggctcaggata

SEQ ID NO: 254229 - DNA, 25 bp, Artificial
  Probe
catgatggatgtcctcctgtactga

SEQ ID NO: 254230 - DNA, 25 bp, Artificial
  Probe
ttcaggtctatgggacctgactcca

SEQ ID NO: 254231 - DNA, 25 bp, Artificial
  Probe
tatttgaacgtgtttaatgggtttg

SEQ ID NO: 254232 - DNA, 25 bp, Artificial
  Probe
gggtttgttcaggtctatgggacct

SEQ ID NO: 254233 - DNA, 25 bp, Artificial
  Probe
tcaggtctatgggacctgactccac

SEQ ID NO: 254234 - DNA, 25 bp, Artificial
  Probe
agaccatgatggatgtcctcctgta

SEQ ID NO: 254235 - DNA, 25 bp, Artificial
  Probe
ttaatgggtttgttcaggtctatgg

SEQ ID NO: 254236 - DNA, 25 bp, Artificial
  Probe
gggctgggctcaggatatttgaacg

SEQ ID NO: 254237 - DNA, 25 bp, Artificial
  Probe
gtggatgggctgggctcaggatatt

SEQ ID NO: 254238 - DNA, 25 bp, Artificial
  Probe
accatgatggatgtcctcctgtact

SEQ ID NO: 254239 - DNA, 25 bp, Artificial
  Probe
gttcaggtctatgggacctgactcc

SEQ ID NO: 254240 - DNA, 25 bp, Artificial
  Probe
tgggctgggctcaggatatttgaac

SEQ ID NO: 254241 - DNA, 25 bp, Artificial
  Probe
tgtttaatgggtttgttcaggtcta

SEQ ID NO: 254242 - DNA, 25 bp, Artificial
  Probe
ggctgggctcaggatatttgaacgt

SEQ ID NO: 254243 - DNA, 25 bp, Artificial
  Probe
ccacccctgagaccatgatggatgt

SEQ ID NO: 254244 - DNA, 25 bp, Artificial
  Probe
ggtggatgggctgggctcaggatat

SEQ ID NO: 254245 - DNA, 25 bp, Artificial
  Probe
tccacccctgagaccatgatggatg

SEQ ID NO: 254246 - DNA, 25 bp, Artificial
  Probe
cctgagaccatgatggatgtcctcc

SEQ ID NO: 254247 - DNA, 25 bp, Artificial
  Probe
gctgggctcaggatatttgaacgtg

SEQ ID NO: 254248 - DNA, 25 bp, Artificial
  Probe
tgttcaggtctatgggacctgactc

SEQ ID NO: 254249 - DNA, 25 bp, Artificial
  Probe
ggtttgttcaggtctatgggacctg

SEQ ID NO: 254250 - DNA, 25 bp, Artificial
  Probe
ttgttcaggtctatgggacctgact

SEQ ID NO: 254251 - DNA, 25 bp, Artificial
  Probe
ctatgggacctgactccacccctga

SEQ ID NO: 254252 - DNA, 25 bp, Artificial
  Probe
gtttaatgggtttgttcaggtctat

SEQ ID NO: 254253 - DNA, 25 bp, Artificial
  Probe
tttgttcaggtctatgggacctgac

SEQ ID NO: 254254 - DNA, 25 bp, Artificial
  Probe
ctccacccctgagaccatgatggat

SEQ ID NO: 254255 - DNA, 25 bp, Artificial
  Probe
cttgtccaatagcaaggaagagggt

SEQ ID NO: 254256 - DNA, 25 bp, Artificial
  Probe
ggaaaagccttcagtcagctctctt

SEQ ID NO: 254257 - DNA, 25 bp, Artificial
  Probe
tgccttattgtccaccagagaattc

SEQ ID NO: 254258 - DNA, 25 bp, Artificial
  Probe
catcttgtccaatagcaaggaagag

SEQ ID NO: 254259 - DNA, 25 bp, Artificial
  Probe
gaaaccttgctcttggtcataacct

SEQ ID NO: 254260 - DNA, 25 bp, Artificial
  Probe
gactgcagcgaatgtggaaaagcct

SEQ ID NO: 254261 - DNA, 25 bp, Artificial
  Probe
ccttattcttgtaacgagtgtggga

SEQ ID NO: 254262 - DNA, 25 bp, Artificial
  Probe
ttgctcttggtcataacctactgct

SEQ ID NO: 254263 - DNA, 25 bp, Artificial
  Probe
ccttgctcttggtcataacctactg

SEQ ID NO: 254264 - DNA, 25 bp, Artificial
  Probe
tctcttgccttattgtccaccagag

SEQ ID NO: 254265 - DNA, 25 bp, Artificial
  Probe
cagagaaaccttacgactgcagcga

SEQ ID NO: 254266 - DNA, 25 bp, Artificial
  Probe
cttgccttattgtccaccagagaat

SEQ ID NO: 254267 - DNA, 25 bp, Artificial
  Probe
ctcccttatgtatgtaatgagtgtg

SEQ ID NO: 254268 - DNA, 25 bp, Artificial
  Probe
tgcgacatcacagaactcatcttgt

SEQ ID NO: 254269 - DNA, 25 bp, Artificial
  Probe
gattcatcaaagaatccataatggg

SEQ ID NO: 254270 - DNA, 25 bp, Artificial
  Probe
cgactgcagcgaatgtggaaaagcc

SEQ ID NO: 254271 - DNA, 25 bp, Artificial
  Probe
tgaaaccttgctcttggtcataacc

SEQ ID NO: 254272 - DNA, 25 bp, Artificial
  Probe
ctcatcttgtccaatagcaaggaag

SEQ ID NO: 254273 - DNA, 25 bp, Artificial
  Probe
tgattcatcaaagaatccataatgg

SEQ ID NO: 254274 - DNA, 25 bp, Artificial
  Probe
tcttgtccaatagcaaggaagaggg

SEQ ID NO: 254275 - DNA, 25 bp, Artificial
  Probe
agggtgaaaccttgctcttggtcat

SEQ ID NO: 254276 - DNA, 25 bp, Artificial
  Probe
ttgccttattgtccaccagagaatt

SEQ ID NO: 254277 - DNA, 25 bp, Artificial
  Probe
gcgacatcacagaactcatcttgtc

SEQ ID NO: 254278 - DNA, 25 bp, Artificial
  Probe
tgctcttggtcataacctactgctg

SEQ ID NO: 254279 - DNA, 25 bp, Artificial
  Probe
gtaatgtaaacacacatttcaaagg

SEQ ID NO: 254280 - DNA, 25 bp, Artificial
  Probe
gaactcatcttgtccaatagcaagg

SEQ ID NO: 254281 - DNA, 25 bp, Artificial
  Probe
agccttcagtcagctctcttgcctt

SEQ ID NO: 254282 - DNA, 25 bp, Artificial
  Probe
agaactcatcttgtccaatagcaag

SEQ ID NO: 254283 - DNA, 25 bp, Artificial
  Probe
gctctcttgccttattgtccaccag

SEQ ID NO: 254284 - DNA, 25 bp, Artificial
  Probe
gggtgaaaccttgctcttggtcata

SEQ ID NO: 254285 - DNA, 25 bp, Artificial
  Probe
tcagtcagctctcttgccttattgt

SEQ ID NO: 254286 - DNA, 25 bp, Artificial
  Probe
gccttcagtcagctctcttgcctta

SEQ ID NO: 254287 - DNA, 25 bp, Artificial
  Probe
atagcaggcacctctgttctttatt

SEQ ID NO: 254288 - DNA, 25 bp, Artificial
  Probe
aaagccttcagtcagctctcttgcc

SEQ ID NO: 254289 - DNA, 25 bp, Artificial
  Probe
gcagagaaaccttacgactgcagcg

SEQ ID NO: 254290 - DNA, 25 bp, Artificial
  Probe
ctcttgccttattgtccaccagaga

SEQ ID NO: 254291 - DNA, 25 bp, Artificial
  Probe
accttattcttgtaacgagtgtggg

SEQ ID NO: 254292 - DNA, 25 bp, Artificial
  Probe
tcatcttgtccaatagcaaggaaga

SEQ ID NO: 254293 - DNA, 25 bp, Artificial
  Probe
atgcgacatcacagaactcatcttg

SEQ ID NO: 254294 - DNA, 25 bp, Artificial
  Probe
ggccttcacttgtagctcataccta

SEQ ID NO: 254295 - DNA, 25 bp, Artificial
  Probe
aagccttcagtcagctctcttgcct

SEQ ID NO: 254296 - DNA, 25 bp, Artificial
  Probe
agtcagctctcttgccttattgtcc

SEQ ID NO: 254297 - DNA, 25 bp, Artificial
  Probe
ttcttgtaacgagtgtgggaaggcc

SEQ ID NO: 254298 - DNA, 25 bp, Artificial
  Probe
ttcagtcagctctcttgccttattg

SEQ ID NO: 254299 - DNA, 25 bp, Artificial
  Probe
cagtcagctctcttgccttattgtc

SEQ ID NO: 254300 - DNA, 25 bp, Artificial
  Probe
aatagcaggcacctctgttctttat

SEQ ID NO: 254301 - DNA, 25 bp, Artificial
  Probe
cggcgagactcacaagctggtggtc

SEQ ID NO: 254302 - DNA, 25 bp, Artificial
  Probe
gccaggtccttcgatcagaggcctc

SEQ ID NO: 254303 - DNA, 25 bp, Artificial
  Probe
agctcttcactcagatcctcagggt

SEQ ID NO: 254304 - DNA, 25 bp, Artificial
  Probe
ccggcgagactcacaagctggtggt

SEQ ID NO: 254305 - DNA, 25 bp, Artificial
  Probe
acaaggcagatctggagacacagcg

SEQ ID NO: 254306 - DNA, 25 bp, Artificial
  Probe
ccagttcatccagtcctactttgtg

SEQ ID NO: 254307 - DNA, 25 bp, Artificial
  Probe
gatgacttccccattgtgctggttg

SEQ ID NO: 254308 - DNA, 25 bp, Artificial
  Probe
ctttgaggcctcagccaaactgcgt

SEQ ID NO: 254309 - DNA, 25 bp, Artificial
  Probe
caagagcgcgctgaccatccagttc

SEQ ID NO: 254310 - DNA, 25 bp, Artificial
  Probe
tgacttactttgaggcctcagccaa

SEQ ID NO: 254311 - DNA, 25 bp, Artificial
  Probe
gcgagactcacaagctggtggtcgt

SEQ ID NO: 254312 - DNA, 25 bp, Artificial
  Probe
tcgcgtgctggcaatggcttcttgc

SEQ ID NO: 254313 - DNA, 25 bp, Artificial
  Probe
tttgagcagctggtgcggactgtcc

SEQ ID NO: 254314 - DNA, 25 bp, Artificial
  Probe
atgacttccccattgtgctggttgg

SEQ ID NO: 254315 - DNA, 25 bp, Artificial
  Probe
actcacaagctggtggtcgtaggcg

SEQ ID NO: 254316 - DNA, 25 bp, Artificial
  Probe
agacacagcgccaggtccttcgatc

SEQ ID NO: 254317 - DNA, 25 bp, Artificial
  Probe
ttgaggattcctacacaaagatctg

SEQ ID NO: 254318 - DNA, 25 bp, Artificial
  Probe
tcctactttgtgtctgactatgacc

SEQ ID NO: 254319 - DNA, 25 bp, Artificial
  Probe
acggcatccctgcacggctggacat

SEQ ID NO: 254320 - DNA, 25 bp, Artificial
  Probe
cagtacatcgcgtgctggcaatggc

SEQ ID NO: 254321 - DNA, 25 bp, Artificial
  Probe
cattgtgctggttgggaacaaggca

SEQ ID NO: 254322 - DNA, 25 bp, Artificial
  Probe
tcccaccatatgacttactttgagg

SEQ ID NO: 254323 - DNA, 25 bp, Artificial
  Probe
ctcttcactcagatcctcagggtca

SEQ ID NO: 254324 - DNA, 25 bp, Artificial
  Probe
gcgtgctggcaatggcttcttgctg

SEQ ID NO: 254325 - DNA, 25 bp, Artificial
  Probe
ggaacaaggcagatctggagacaca

SEQ ID NO: 254326 - DNA, 25 bp, Artificial
  Probe
catttgagcagctggtgcggactgt

SEQ ID NO: 254327 - DNA, 25 bp, Artificial
  Probe
aggtccttcgatcagaggcctcctc

SEQ ID NO: 254328 - DNA, 25 bp, Artificial
  Probe
ttcactcagatcctcagggtcaagg

SEQ ID NO: 254329 - DNA, 25 bp, Artificial
  Probe
cttccccattgtgctggttgggaac

SEQ ID NO: 254330 - DNA, 25 bp, Artificial
  Probe
cagctggtgcggactgtccggaaat

SEQ ID NO: 254331 - DNA, 25 bp, Artificial
  Probe
gaacaaggcagatctggagacacag

SEQ ID NO: 254332 - DNA, 25 bp, Artificial
  Probe
tacatcgcgtgctggcaatggcttc

SEQ ID NO: 254333 - DNA, 25 bp, Artificial
  Probe
gacggcatccctgcacggctggaca

SEQ ID NO: 254334 - DNA, 25 bp, Artificial
  Probe
gaggcctcagccaaactgcgtctaa

SEQ ID NO: 254335 - DNA, 25 bp, Artificial
  Probe
gattcctacacaaagatctgcacgg

SEQ ID NO: 254336 - DNA, 25 bp, Artificial
  Probe
tactttgaggcctcagccaaactgc

SEQ ID NO: 254337 - DNA, 25 bp, Artificial
  Probe
caccattgaggattcctacacaaag

SEQ ID NO: 254338 - DNA, 25 bp, Artificial
  Probe
caccatatgacttactttgaggcct

SEQ ID NO: 254339 - DNA, 25 bp, Artificial
  Probe
tgtcgatgaggcatttgagcagctg

SEQ ID NO: 254340 - DNA, 25 bp, Artificial
  Probe
tcgatgaggcatttgagcagctggt

SEQ ID NO: 254341 - DNA, 25 bp, Artificial
  Probe
cgtctaaatgtcgatgaggcatttg

SEQ ID NO: 254342 - DNA, 25 bp, Artificial
  Probe
cctcagccaaactgcgtctaaatgt

SEQ ID NO: 254343 - DNA, 25 bp, Artificial
  Probe
agccaaactgcgtctaaatgtcgat

SEQ ID NO: 254344 - DNA, 25 bp, Artificial
  Probe
acttccccattgtgctggttgggaa

SEQ ID NO: 254345 - DNA, 25 bp, Artificial
  Probe
ccattgaggattcctacacaaagat

SEQ ID NO: 254346 - DNA, 25 bp, Artificial
  Probe
caggtccttcgatcagaggcctcct

SEQ ID NO: 254347 - DNA, 25 bp, Artificial
  Probe
gtcttgtcctcgtcctggacaggcc

SEQ ID NO: 254348 - DNA, 25 bp, Artificial
  Probe
tgaaggcttgcgactaactgtggca

SEQ ID NO: 254349 - DNA, 25 bp, Artificial
  Probe
aactgtggcagcagacatgtcttgt

SEQ ID NO: 254350 - DNA, 25 bp, Artificial
  Probe
agtggccgagtcagtcacacgactg

SEQ ID NO: 254351 - DNA, 25 bp, Artificial
  Probe
ttacctgtcaataaagcagaagacg

SEQ ID NO: 254352 - DNA, 25 bp, Artificial
  Probe
ttagtggccgagtcagtcacacgac

SEQ ID NO: 254353 - DNA, 25 bp, Artificial
  Probe
ggcttgcgactaactgtggcagcag

SEQ ID NO: 254354 - DNA, 25 bp, Artificial
  Probe
gcagacatgtcttgtcctcgtcctg

SEQ ID NO: 254355 - DNA, 25 bp, Artificial
  Probe
gtggccgagtcagtcacacgactgc

SEQ ID NO: 254356 - DNA, 25 bp, Artificial
  Probe
tagtggccgagtcagtcacacgact

SEQ ID NO: 254357 - DNA, 25 bp, Artificial
  Probe
tggcagcagacatgtcttgtcctcg

SEQ ID NO: 254358 - DNA, 25 bp, Artificial
  Probe
agacatgtcttgtcctcgtcctgga

SEQ ID NO: 254359 - DNA, 25 bp, Artificial
  Probe
gaaggcttgcgactaactgtggcag

SEQ ID NO: 254360 - DNA, 25 bp, Artificial
  Probe
tcttgtcctcgtcctggacaggcct

SEQ ID NO: 254361 - DNA, 25 bp, Artificial
  Probe
acccatgaaggcttgcgactaactg

SEQ ID NO: 254362 - DNA, 25 bp, Artificial
  Probe
acatgtcttgtcctcgtcctggaca

SEQ ID NO: 254363 - DNA, 25 bp, Artificial
  Probe
cttgcgactaactgtggcagcagac

SEQ ID NO: 254364 - DNA, 25 bp, Artificial
  Probe
actgtggcagcagacatgtcttgtc

SEQ ID NO: 254365 - DNA, 25 bp, Artificial
  Probe
catgtcttgtcctcgtcctggacag

SEQ ID NO: 254366 - DNA, 25 bp, Artificial
  Probe
cttagtggccgagtcagtcacacga

SEQ ID NO: 254367 - DNA, 25 bp, Artificial
  Probe
ttgcgactaactgtggcagcagaca

SEQ ID NO: 254368 - DNA, 25 bp, Artificial
  Probe
ctaactgtggcagcagacatgtctt

SEQ ID NO: 254369 - DNA, 25 bp, Artificial
  Probe
agcagacatgtcttgtcctcgtcct

SEQ ID NO: 254370 - DNA, 25 bp, Artificial
  Probe
tttacctgtcaataaagcagaagac

SEQ ID NO: 254371 - DNA, 25 bp, Artificial
  Probe
gcttagtggccgagtcagtcacacg

SEQ ID NO: 254372 - DNA, 25 bp, Artificial
  Probe
gacatgtcttgtcctcgtcctggac

SEQ ID NO: 254373 - DNA, 25 bp, Artificial
  Probe
aatttacctgtcaataaagcagaag

SEQ ID NO: 254374 - DNA, 25 bp, Artificial
  Probe
cccatgaaggcttgcgactaactgt

SEQ ID NO: 254375 - DNA, 25 bp, Artificial
  Probe
atgtcttgtcctcgtcctggacagg

SEQ ID NO: 254376 - DNA, 25 bp, Artificial
  Probe
atttacctgtcaataaagcagaaga

SEQ ID NO: 254377 - DNA, 25 bp, Artificial
  Probe
gcttgcgactaactgtggcagcaga

SEQ ID NO: 254378 - DNA, 25 bp, Artificial
  Probe
ggcagcagacatgtcttgtcctcgt

SEQ ID NO: 254379 - DNA, 25 bp, Artificial
  Probe
tgcgactaactgtggcagcagacat

SEQ ID NO: 254380 - DNA, 25 bp, Artificial
  Probe
tacctgtcaataaagcagaagacgg

SEQ ID NO: 254381 - DNA, 25 bp, Artificial
  Probe
cagcagacatgtcttgtcctcgtcc

SEQ ID NO: 254382 - DNA, 25 bp, Artificial
  Probe
taactgtggcagcagacatgtcttg

SEQ ID NO: 254383 - DNA, 25 bp, Artificial
  Probe
aaggcttgcgactaactgtggcagc

SEQ ID NO: 254384 - DNA, 25 bp, Artificial
  Probe
aggcttgcgactaactgtggcagca

SEQ ID NO: 254385 - DNA, 25 bp, Artificial
  Probe
tgtcttgtcctcgtcctggacaggc

SEQ ID NO: 254386 - DNA, 25 bp, Artificial
  Probe
tgtggcagcagacatgtcttgtcct

SEQ ID NO: 254387 - DNA, 25 bp, Artificial
  Probe
ctgtggcagcagacatgtcttgtcc

SEQ ID NO: 254388 - DNA, 25 bp, Artificial
  Probe
cagacatgtcttgtcctcgtcctgg

SEQ ID NO: 254389 - DNA, 25 bp, Artificial
  Probe
actaactgtggcagcagacatgtct

SEQ ID NO: 254390 - DNA, 25 bp, Artificial
  Probe
actatagaacagtatcagtgccctg

SEQ ID NO: 254391 - DNA, 25 bp, Artificial
  Probe
ttagcaaagggtttccacagtagta

SEQ ID NO: 254392 - DNA, 25 bp, Artificial
  Probe
aaacttccgtaacatccaggttgat

SEQ ID NO: 254393 - DNA, 25 bp, Artificial
  Probe
gtaatagactcaacagacagacccc

SEQ ID NO: 254394 - DNA, 25 bp, Artificial
  Probe
cggcggcagcattggcaactttgtc

SEQ ID NO: 254395 - DNA, 25 bp, Artificial
  Probe
gtttccacagtagtaatagactcaa

SEQ ID NO: 254396 - DNA, 25 bp, Artificial
  Probe
caaagggtttccacagtagtaatag

SEQ ID NO: 254397 - DNA, 25 bp, Artificial
  Probe
gcggcggcagcattggcaactttgt

SEQ ID NO: 254398 - DNA, 25 bp, Artificial
  Probe
acgggacatccgtgcaaagggaagc

SEQ ID NO: 254399 - DNA, 25 bp, Artificial
  Probe
tgccccacgggacatccgtgcaaag

SEQ ID NO: 254400 - DNA, 25 bp, Artificial
  Probe
ttgtcctgtgccacactgcccgtgg

SEQ ID NO: 254401 - DNA, 25 bp, Artificial
  Probe
cgggacatccgtgcaaagggaagcc

SEQ ID NO: 254402 - DNA, 25 bp, Artificial
  Probe
agggtttccacagtagtaatagact

SEQ ID NO: 254403 - DNA, 25 bp, Artificial
  Probe
caagggcttattgttcctgacaacc

SEQ ID NO: 254404 - DNA, 25 bp, Artificial
  Probe
gcaactttgtcctgtgccacactgc

SEQ ID NO: 254405 - DNA, 25 bp, Artificial
  Probe
tgacaaccctccatatgataaggga

SEQ ID NO: 254406 - DNA, 25 bp, Artificial
  Probe
atccgcaaatgtggaatgaaaaact

SEQ ID NO: 254407 - DNA, 25 bp, Artificial
  Probe
ctgcccgtggataatgaatagctca

SEQ ID NO: 254408 - DNA, 25 bp, Artificial
  Probe
cctgtgccacactgcccgtggataa

SEQ ID NO: 254409 - DNA, 25 bp, Artificial
  Probe
atagactcaacagacagaccccatg

SEQ ID NO: 254410 - DNA, 25 bp, Artificial
  Probe
cctgacaaccctccatatgataagg

SEQ ID NO: 254411 - DNA, 25 bp, Artificial
  Probe
agcattggcaactttgtcctgtgcc

SEQ ID NO: 254412 - DNA, 25 bp, Artificial
  Probe
gccccacgggacatccgtgcaaagg

SEQ ID NO: 254413 - DNA, 25 bp, Artificial
  Probe
gaatagctcaagtccccataccagc

SEQ ID NO: 254414 - DNA, 25 bp, Artificial
  Probe
agccttcagaattgagatcaacttc

SEQ ID NO: 254415 - DNA, 25 bp, Artificial
  Probe
agcttgaagagatccgcaaatgtgg

SEQ ID NO: 254416 - DNA, 25 bp, Artificial
  Probe
ggcagcattggcaactttgtcctgt

SEQ ID NO: 254417 - DNA, 25 bp, Artificial
  Probe
tgaatagctcaagtccccataccag

SEQ ID NO: 254418 - DNA, 25 bp, Artificial
  Probe
taagggagccttcagaattgagatc

SEQ ID NO: 254419 - DNA, 25 bp, Artificial
  Probe
aaatcttagcaaagggtttccacag

SEQ ID NO: 254420 - DNA, 25 bp, Artificial
  Probe
cttggcaagggcttattgttcctga

SEQ ID NO: 254421 - DNA, 25 bp, Artificial
  Probe
gatccgcaaatgtggaatgaaaaac

SEQ ID NO: 254422 - DNA, 25 bp, Artificial
  Probe
acatccgtgcaaagggaagccgttg

SEQ ID NO: 254423 - DNA, 25 bp, Artificial
  Probe
gatcaacttcccagcagagtatccc

SEQ ID NO: 254424 - DNA, 25 bp, Artificial
  Probe
gcaagggcttattgttcctgacaac

SEQ ID NO: 254425 - DNA, 25 bp, Artificial
  Probe
ggagccttcagaattgagatcaact

SEQ ID NO: 254426 - DNA, 25 bp, Artificial
  Probe
cctccatatgataagggagccttca

SEQ ID NO: 254427 - DNA, 25 bp, Artificial
  Probe
ttgagatcaacttcccagcagagta

SEQ ID NO: 254428 - DNA, 25 bp, Artificial
  Probe
catccaggttgatgaagctaattta

SEQ ID NO: 254429 - DNA, 25 bp, Artificial
  Probe
ggcttattgttcctgacaaccctcc

SEQ ID NO: 254430 - DNA, 25 bp, Artificial
  Probe
agggcttattgttcctgacaaccct

SEQ ID NO: 254431 - DNA, 25 bp, Artificial
  Probe
agtaatagactcaacagacagaccc

SEQ ID NO: 254432 - DNA, 25 bp, Artificial
  Probe
ccacactgcccgtggataatgaata

SEQ ID NO: 254433 - DNA, 25 bp, Artificial
  Probe
gaattgagatcaacttcccagcaga

SEQ ID NO: 254434 - DNA, 25 bp, Artificial
  Probe
cttagcaaagggtttccacagtagt

SEQ ID NO: 254435 - DNA, 25 bp, Artificial
  Probe
ggacatccgtgcaaagggaagccgt

SEQ ID NO: 254436 - DNA, 25 bp, Artificial
  Probe
ctaaaatcagacaacagatatgggc

SEQ ID NO: 254437 - DNA, 25 bp, Artificial
  Probe
ttcaaagctccttccatcgagactg

SEQ ID NO: 254438 - DNA, 25 bp, Artificial
  Probe
ggcaccagcactagcagtccagagc

SEQ ID NO: 254439 - DNA, 25 bp, Artificial
  Probe
taaagagaccatcgtggttcaccca

SEQ ID NO: 254440 - DNA, 25 bp, Artificial
  Probe
caccctcacggagctagcatatgat

SEQ ID NO: 254441 - DNA, 25 bp, Artificial
  Probe
agctagcatatgataccagtaaaaa

SEQ ID NO: 254442 - DNA, 25 bp, Artificial
  Probe
cgtggttcacccagaattgagctaa

SEQ ID NO: 254443 - DNA, 25 bp, Artificial
  Probe
aatatagacatttgccctgaatgtg

SEQ ID NO: 254444 - DNA, 25 bp, Artificial
  Probe
caatatagacatttgccctgaatgt

SEQ ID NO: 254445 - DNA, 25 bp, Artificial
  Probe
gagaagaaaccctcacaagcttatt

SEQ ID NO: 254446 - DNA, 25 bp, Artificial
  Probe
cgagactgtggtactgtacacagga

SEQ ID NO: 254447 - DNA, 25 bp, Artificial
  Probe
gaattccagctttttagatagtatc

SEQ ID NO: 254448 - DNA, 25 bp, Artificial
  Probe
tgctgcaacggcaactgaagcagac

SEQ ID NO: 254449 - DNA, 25 bp, Artificial
  Probe
agtgcgttccggaccgctacatagg

SEQ ID NO: 254450 - DNA, 25 bp, Artificial
  Probe
acctgaagcagaaacacgtcctttg

SEQ ID NO: 254451 - DNA, 25 bp, Artificial
  Probe
tgctgctgtcgctcccgtggccagt

SEQ ID NO: 254452 - DNA, 25 bp, Artificial
  Probe
agacatttgccctgaatgtggtcac

SEQ ID NO: 254453 - DNA, 25 bp, Artificial
  Probe
tgctgggagctgctgcaacggcaac

SEQ ID NO: 254454 - DNA, 25 bp, Artificial
  Probe
cggcaactgaagcagacatggagtg

SEQ ID NO: 254455 - DNA, 25 bp, Artificial
  Probe
cgcaccatcgaagttaaccgatgta

SEQ ID NO: 254456 - DNA, 25 bp, Artificial
  Probe
gttccggaccgctacataggtgctg

SEQ ID NO: 254457 - DNA, 25 bp, Artificial
  Probe
aaaccatcagaaaaggatcagggca

SEQ ID NO: 254458 - DNA, 25 bp, Artificial
  Probe
aacataaagagaccatcgtggttca

SEQ ID NO: 254459 - DNA, 25 bp, Artificial
  Probe
ccggaccgctacataggtgctggga

SEQ ID NO: 254460 - DNA, 25 bp, Artificial
  Probe
ctgtggtactgtacacaggagagaa

SEQ ID NO: 254461 - DNA, 25 bp, Artificial
  Probe
gctcccgtggccagtgcgttccgga

SEQ ID NO: 254462 - DNA, 25 bp, Artificial
  Probe
ctacataggtgctgggagctgctgc

SEQ ID NO: 254463 - DNA, 25 bp, Artificial
  Probe
ctgtcgctcccgtggccagtgcgtt

SEQ ID NO: 254464 - DNA, 25 bp, Artificial
  Probe
atagtaaggcagtcttcactttaat

SEQ ID NO: 254465 - DNA, 25 bp, Artificial
  Probe
ggacctttcaaagctccttccatcg

SEQ ID NO: 254466 - DNA, 25 bp, Artificial
  Probe
tcacggagctagcatatgataccag

SEQ ID NO: 254467 - DNA, 25 bp, Artificial
  Probe
gaccgctacataggtgctgggagct

SEQ ID NO: 254468 - DNA, 25 bp, Artificial
  Probe
gtggccagtgcgttccggaccgcta

SEQ ID NO: 254469 - DNA, 25 bp, Artificial
  Probe
ccatcagaaaaggatcagggcaaga

SEQ ID NO: 254470 - DNA, 25 bp, Artificial
  Probe
gggcaccagcactagcagtccagag

SEQ ID NO: 254471 - DNA, 25 bp, Artificial
  Probe
gctagcatatgataccagtaaaaat

SEQ ID NO: 254472 - DNA, 25 bp, Artificial
  Probe
tggccagtgcgttccggaccgctac

SEQ ID NO: 254473 - DNA, 25 bp, Artificial
  Probe
tactgtacacaggagagaaaccatc

SEQ ID NO: 254474 - DNA, 25 bp, Artificial
  Probe
accatcgtggttcacccagaattga

SEQ ID NO: 254475 - DNA, 25 bp, Artificial
  Probe
ggggacctttcaaagctccttccat

SEQ ID NO: 254476 - DNA, 25 bp, Artificial
  Probe
tcagacaacagatatgggctcaaga

SEQ ID NO: 254477 - DNA, 25 bp, Artificial
  Probe
aaatcagacaacagatatgggctca

SEQ ID NO: 254478 - DNA, 25 bp, Artificial
  Probe
acagacgcaccatcgaagttaaccg

SEQ ID NO: 254479 - DNA, 25 bp, Artificial
  Probe
gttcacccagaattgagctaaaacc

SEQ ID NO: 254480 - DNA, 25 bp, Artificial
  Probe
ggagctgctgcaacggcaactgaag

SEQ ID NO: 254481 - DNA, 25 bp, Artificial
  Probe
gactgtggtactgtacacaggagag

SEQ ID NO: 254482 - DNA, 25 bp, Artificial
  Probe
atccagtccaagagcactggcagag

SEQ ID NO: 254483 - DNA, 25 bp, Artificial
  Probe
gtccaagagcactggcagagagccc

SEQ ID NO: 254484 - DNA, 25 bp, Artificial
  Probe
ccggctgacacttgagggctgtgat

SEQ ID NO: 254485 - DNA, 25 bp, Artificial
  Probe
tatcaatggcttcatccagtccaag

SEQ ID NO: 254486 - DNA, 25 bp, Artificial
  Probe
tgtgtcaaggacgatgagctctatg

SEQ ID NO: 254487 - DNA, 25 bp, Artificial
  Probe
cccgtgccttatcagaactactacg

SEQ ID NO: 254488 - DNA, 25 bp, Artificial
  Probe
gctcccgtgccttatcagaactact

SEQ ID NO: 254489 - DNA, 25 bp, Artificial
  Probe
acacggcacagaattctgatgagct

SEQ ID NO: 254490 - DNA, 25 bp, Artificial
  Probe
catcctggcagtcatcctggaaggg

SEQ ID NO: 254491 - DNA, 25 bp, Artificial
  Probe
tgtcaaggacgatgagctctatgag

SEQ ID NO: 254492 - DNA, 25 bp, Artificial
  Probe
acccaggggaaccttaactcagcag

SEQ ID NO: 254493 - DNA, 25 bp, Artificial
  Probe
tccggctgacacttgagggctgtga

SEQ ID NO: 254494 - DNA, 25 bp, Artificial
  Probe
cgaggaaccagctctccatgcagtg

SEQ ID NO: 254495 - DNA, 25 bp, Artificial
  Probe
tgataaagaggttctctgggctgct

SEQ ID NO: 254496 - DNA, 25 bp, Artificial
  Probe
aagtccggctgacacttgagggctg

SEQ ID NO: 254497 - DNA, 25 bp, Artificial
  Probe
gctacatggaagtcccaagaccaca

SEQ ID NO: 254498 - DNA, 25 bp, Artificial
  Probe
acctctgagcagaaagaattggtct

SEQ ID NO: 254499 - DNA, 25 bp, Artificial
  Probe
gctggacatttctgcgggagacatc

SEQ ID NO: 254500 - DNA, 25 bp, Artificial
  Probe
taaagaggttctctgggctgctaca

SEQ ID NO: 254501 - DNA, 25 bp, Artificial
  Probe
catttctgcgggagacatcctggca

SEQ ID NO: 254502 - DNA, 25 bp, Artificial
  Probe
gcaacccaggggaaccttaactcag

SEQ ID NO: 254503 - DNA, 25 bp, Artificial
  Probe
cagaactactacgaccgggaggtca

SEQ ID NO: 254504 - DNA, 25 bp, Artificial
  Probe
tggaagtcccaagaccacaccttct

SEQ ID NO: 254505 - DNA, 25 bp, Artificial
  Probe
agacatcctggcagtcatcctggaa

SEQ ID NO: 254506 - DNA, 25 bp, Artificial
  Probe
cacagaattctgatgagctggacat

SEQ ID NO: 254507 - DNA, 25 bp, Artificial
  Probe
acggcacagaattctgatgagctgg

SEQ ID NO: 254508 - DNA, 25 bp, Artificial
  Probe
tgggctgctacatggaagtcccaag

SEQ ID NO: 254509 - DNA, 25 bp, Artificial
  Probe
accttaactcagcagcccaggacta

SEQ ID NO: 254510 - DNA, 25 bp, Artificial
  Probe
atgagctggacatttctgcgggaga

SEQ ID NO: 254511 - DNA, 25 bp, Artificial
  Probe
acaacgtggctttgtccctggttcg

SEQ ID NO: 254512 - DNA, 25 bp, Artificial
  Probe
gatatcaatggcttcatccagtcca

SEQ ID NO: 254513 - DNA, 25 bp, Artificial
  Probe
cacgaggaaccagctctccatgcag

SEQ ID NO: 254514 - DNA, 25 bp, Artificial
  Probe
agtccggctgacacttgagggctgt

SEQ ID NO: 254515 - DNA, 25 bp, Artificial
  Probe
ctcctgtggtgtgataaagaggttc

SEQ ID NO: 254516 - DNA, 25 bp, Artificial
  Probe
ggttctctgggctgctacatggaag

SEQ ID NO: 254517 - DNA, 25 bp, Artificial
  Probe
cggcacagaattctgatgagctgga

SEQ ID NO: 254518 - DNA, 25 bp, Artificial
  Probe
cgggagacatcctggcagtcatcct

SEQ ID NO: 254519 - DNA, 25 bp, Artificial
  Probe
gatgggatggttgctggctactctc

SEQ ID NO: 254520 - DNA, 25 bp, Artificial
  Probe
catggaagtcccaagaccacacctt

SEQ ID NO: 254521 - DNA, 25 bp, Artificial
  Probe
aagagcactggcagagagcccccag

SEQ ID NO: 254522 - DNA, 25 bp, Artificial
  Probe
ccacctctgagcagaaagaattggt

SEQ ID NO: 254523 - DNA, 25 bp, Artificial
  Probe
ttcatccagtccaagagcactggca

SEQ ID NO: 254524 - DNA, 25 bp, Artificial
  Probe
cctatcgtccagacctcctgtggtg

SEQ ID NO: 254525 - DNA, 25 bp, Artificial
  Probe
agctcccgtgccttatcagaactac

SEQ ID NO: 254526 - DNA, 25 bp, Artificial
  Probe
tgactacacggcacagaattctgat

SEQ ID NO: 254527 - DNA, 25 bp, Artificial
  Probe
ggacaacgtggctttgtccctggtt

SEQ ID NO: 254528 - DNA, 25 bp, Artificial
  Probe
ggcgccaagtaacctgccaggcagc

SEQ ID NO: 254529 - DNA, 25 bp, Artificial
  Probe
gctttgtgttgaaacccagatttgt

SEQ ID NO: 254530 - DNA, 25 bp, Artificial
  Probe
tgggcgccaagtaacctgccaggca

SEQ ID NO: 254531 - DNA, 25 bp, Artificial
  Probe
cagtctgctttgtgttgaaacccag

SEQ ID NO: 254532 - DNA, 25 bp, Artificial
  Probe
ggagacatacagtctgctttgtgtt

SEQ ID NO: 254533 - DNA, 25 bp, Artificial
  Probe
tgatcctggtgctgcccgaattccc

SEQ ID NO: 254534 - DNA, 25 bp, Artificial
  Probe
tgctttgtgttgaaacccagatttg

SEQ ID NO: 254535 - DNA, 25 bp, Artificial
  Probe
tctgctttgtgttgaaacccagatt

SEQ ID NO: 254536 - DNA, 25 bp, Artificial
  Probe
cagcctttgcatctggatagggaaa

SEQ ID NO: 254537 - DNA, 25 bp, Artificial
  Probe
atacagtctgctttgtgttgaaacc

SEQ ID NO: 254538 - DNA, 25 bp, Artificial
  Probe
gatgatcctggtgctgcccgaattc

SEQ ID NO: 254539 - DNA, 25 bp, Artificial
  Probe
ctttgtgttgaaacccagatttgta

SEQ ID NO: 254540 - DNA, 25 bp, Artificial
  Probe
gtctgctttgtgttgaaacccagat

SEQ ID NO: 254541 - DNA, 25 bp, Artificial
  Probe
tcaccagcctttgcatctggatagg

SEQ ID NO: 254542 - DNA, 25 bp, Artificial
  Probe
ctgtcaccagcctttgcatctggat

SEQ ID NO: 254543 - DNA, 25 bp, Artificial
  Probe
tacagtctgctttgtgttgaaaccc

SEQ ID NO: 254544 - DNA, 25 bp, Artificial
  Probe
tggtgctgcccgaattcccttgggc

SEQ ID NO: 254545 - DNA, 25 bp, Artificial
  Probe
aagtaacctgccaggcagccagtcc

SEQ ID NO: 254546 - DNA, 25 bp, Artificial
  Probe
gagacatacagtctgctttgtgttg

SEQ ID NO: 254547 - DNA, 25 bp, Artificial
  Probe
ctgctttgtgttgaaacccagattt

SEQ ID NO: 254548 - DNA, 25 bp, Artificial
  Probe
tgatgatcctggtgctgcccgaatt

SEQ ID NO: 254549 - DNA, 25 bp, Artificial
  Probe
gtgctgcccgaattcccttgggcgc

SEQ ID NO: 254550 - DNA, 25 bp, Artificial
  Probe
ccagcctttgcatctggatagggaa

SEQ ID NO: 254551 - DNA, 25 bp, Artificial
  Probe
tttgtgttgaaacccagatttgtac

SEQ ID NO: 254552 - DNA, 25 bp, Artificial
  Probe
gggcgccaagtaacctgccaggcag

SEQ ID NO: 254553 - DNA, 25 bp, Artificial
  Probe
ccttgggcgccaagtaacctgccag

SEQ ID NO: 254554 - DNA, 25 bp, Artificial
  Probe
gcccgaattcccttgggcgccaagt

SEQ ID NO: 254555 - DNA, 25 bp, Artificial
  Probe
gcctttgcatctggatagggaaaag

SEQ ID NO: 254556 - DNA, 25 bp, Artificial
  Probe
catctggatagggaaaagggggttg

SEQ ID NO: 254557 - DNA, 25 bp, Artificial
  Probe
gtcaccagcctttgcatctggatag

SEQ ID NO: 254558 - DNA, 25 bp, Artificial
  Probe
atgatcctggtgctgcccgaattcc

SEQ ID NO: 254559 - DNA, 25 bp, Artificial
  Probe
agacatacagtctgctttgtgttga

SEQ ID NO: 254560 - DNA, 25 bp, Artificial
  Probe
tgtcaccagcctttgcatctggata

SEQ ID NO: 254561 - DNA, 25 bp, Artificial
  Probe
ggtgctgcccgaattcccttgggcg

SEQ ID NO: 254562 - DNA, 25 bp, Artificial
  Probe
acagtctgctttgtgttgaaaccca

SEQ ID NO: 254563 - DNA, 25 bp, Artificial
  Probe
accagcctttgcatctggataggga

SEQ ID NO: 254564 - DNA, 25 bp, Artificial
  Probe
ctgatgatcctggtgctgcccgaat

SEQ ID NO: 254565 - DNA, 25 bp, Artificial
  Probe
tggagacatacagtctgctttgtgt

SEQ ID NO: 254566 - DNA, 25 bp, Artificial
  Probe
agtctgctttgtgttgaaacccaga

SEQ ID NO: 254567 - DNA, 25 bp, Artificial
  Probe
agcctttgcatctggatagggaaaa

SEQ ID NO: 254568 - DNA, 25 bp, Artificial
  Probe
gacatacagtctgctttgtgttgaa

SEQ ID NO: 254569 - DNA, 25 bp, Artificial
  Probe
ttgggcgccaagtaacctgccaggc

SEQ ID NO: 254570 - DNA, 25 bp, Artificial
  Probe
acatacagtctgctttgtgttgaaa

SEQ ID NO: 254571 - DNA, 25 bp, Artificial
  Probe
catacagtctgctttgtgttgaaac

SEQ ID NO: 254572 - DNA, 25 bp, Artificial
  Probe
caccagcctttgcatctggataggg

SEQ ID NO: 254573 - DNA, 25 bp, Artificial
  Probe
cttgggcgccaagtaacctgccagg

SEQ ID NO: 254574 - DNA, 25 bp, Artificial
  Probe
gtgtcacatccctggagggcacccg

SEQ ID NO: 254575 - DNA, 25 bp, Artificial
  Probe
tgctctgctcgtggttggagacaac

SEQ ID NO: 254576 - DNA, 25 bp, Artificial
  Probe
cccgaagtcgctcacacacaagtga

SEQ ID NO: 254577 - DNA, 25 bp, Artificial
  Probe
gccaccctacgctaatgcggtatta

SEQ ID NO: 254578 - DNA, 25 bp, Artificial
  Probe
tcacatccctggagggcacccgtag

SEQ ID NO: 254579 - DNA, 25 bp, Artificial
  Probe
tcctgctaagcagtctgcatcagtc

SEQ ID NO: 254580 - DNA, 25 bp, Artificial
  Probe
tctggctccagtgtcacatccctgg

SEQ ID NO: 254581 - DNA, 25 bp, Artificial
  Probe
caccctactcaagatggcagactgt

SEQ ID NO: 254582 - DNA, 25 bp, Artificial
  Probe
cttgcagaggccttcaagtactttg

SEQ ID NO: 254583 - DNA, 25 bp, Artificial
  Probe
ggaggccttcctcagatctctcagc

SEQ ID NO: 254584 - DNA, 25 bp, Artificial
  Probe
ctctcctgccgtggatgctgtggtg

SEQ ID NO: 254585 - DNA, 25 bp, Artificial
  Probe
ggctccagtgtcacatccctggagg

SEQ ID NO: 254586 - DNA, 25 bp, Artificial
  Probe
acagcctctggctccagtgtcacat

SEQ ID NO: 254587 - DNA, 25 bp, Artificial
  Probe
gaggtgtcctgctaagcagtctgca

SEQ ID NO: 254588 - DNA, 25 bp, Artificial
  Probe
taccagtgaggatgcccgtctgaac

SEQ ID NO: 254589 - DNA, 25 bp, Artificial
  Probe
ccaccctactcaagatggcagactg

SEQ ID NO: 254590 - DNA, 25 bp, Artificial
  Probe
gactggtggtctcttccttagcccc

SEQ ID NO: 254591 - DNA, 25 bp, Artificial
  Probe
cagtgccctgctctgctcgtggttg

SEQ ID NO: 254592 - DNA, 25 bp, Artificial
  Probe
ctggactggtggtctcttccttagc

SEQ ID NO: 254593 - DNA, 25 bp, Artificial
  Probe
tccagtgtcacatccctggagggca

SEQ ID NO: 254594 - DNA, 25 bp, Artificial
  Probe
gctaagcagtctgcatcagtcatcc

SEQ ID NO: 254595 - DNA, 25 bp, Artificial
  Probe
cagtcatcctggactggtggtctct

SEQ ID NO: 254596 - DNA, 25 bp, Artificial
  Probe
gtcacatccctggagggcacccgta

SEQ ID NO: 254597 - DNA, 25 bp, Artificial
  Probe
agacaactctcctgccgtggatgct

SEQ ID NO: 254598 - DNA, 25 bp, Artificial
  Probe
ctgctcgtggttggagacaactctc

SEQ ID NO: 254599 - DNA, 25 bp, Artificial
  Probe
tgctcgtggttggagacaactctcc

SEQ ID NO: 254600 - DNA, 25 bp, Artificial
  Probe
cagtctgcatcagtcatcctggact

SEQ ID NO: 254601 - DNA, 25 bp, Artificial
  Probe
ttgtgcagggcatgggatacatgcc

SEQ ID NO: 254602 - DNA, 25 bp, Artificial
  Probe
gcccaagtccatggaggtgtcctgc

SEQ ID NO: 254603 - DNA, 25 bp, Artificial
  Probe
gaggggccccgaagtcgctcacaca

SEQ ID NO: 254604 - DNA, 25 bp, Artificial
  Probe
gatctctcagcctgccaagcttgca

SEQ ID NO: 254605 - DNA, 25 bp, Artificial
  Probe
ccaagcttgcagaggccttcaagta

SEQ ID NO: 254606 - DNA, 25 bp, Artificial
  Probe
gcctgccaagcttgcagaggccttc

SEQ ID NO: 254607 - DNA, 25 bp, Artificial
  Probe
actgtggaggccttcctcagatctc

SEQ ID NO: 254608 - DNA, 25 bp, Artificial
  Probe
actctcctgccgtggatgctgtggt

SEQ ID NO: 254609 - DNA, 25 bp, Artificial
  Probe
gctcccataccagtgaggatgcccg

SEQ ID NO: 254610 - DNA, 25 bp, Artificial
  Probe
tctgcatcagtcatcctggactggt

SEQ ID NO: 254611 - DNA, 25 bp, Artificial
  Probe
gaccaccctactcaagatggcagac

SEQ ID NO: 254612 - DNA, 25 bp, Artificial
  Probe
catcagtcatcctggactggtggtc

SEQ ID NO: 254613 - DNA, 25 bp, Artificial
  Probe
cgggcccaagtccatggaggtgtcc

SEQ ID NO: 254614 - DNA, 25 bp, Artificial
  Probe
tggtggtctcttccttagcccccaa

SEQ ID NO: 254615 - DNA, 25 bp, Artificial
  Probe
gaagtcgctcacacacaagtgaggg

SEQ ID NO: 254616 - DNA, 25 bp, Artificial
  Probe
tcagtcatcctggactggtggtctc

SEQ ID NO: 254617 - DNA, 25 bp, Artificial
  Probe
gggcccaagtccatggaggtgtcct

SEQ ID NO: 254618 - DNA, 25 bp, Artificial
  Probe
ggttggagacaactctcctgccgtg

SEQ ID NO: 254619 - DNA, 25 bp, Artificial
  Probe
tggagacaactctcctgccgtggat

SEQ ID NO: 254620 - DNA, 25 bp, Artificial
  Probe
cagcttttaagacatttggatcctg

SEQ ID NO: 254621 - DNA, 25 bp, Artificial
  Probe
cagcgagcctgttggacaaaactcg

SEQ ID NO: 254622 - DNA, 25 bp, Artificial
  Probe
tttcagcttttaagacatttggatc

SEQ ID NO: 254623 - DNA, 25 bp, Artificial
  Probe
ccgatttcagcttttaagacatttg

SEQ ID NO: 254624 - DNA, 25 bp, Artificial
  Probe
cactttgccccgatttcagctttta

SEQ ID NO: 254625 - DNA, 25 bp, Artificial
  Probe
aacagcgagcctgttggacaaaact

SEQ ID NO: 254626 - DNA, 25 bp, Artificial
  Probe
gacaaaactcgcagctggcgttggt

SEQ ID NO: 254627 - DNA, 25 bp, Artificial
  Probe
gttggacaaaactcgcagctggcgt

SEQ ID NO: 254628 - DNA, 25 bp, Artificial
  Probe
aagacatttggatcctgagtaacag

SEQ ID NO: 254629 - DNA, 25 bp, Artificial
  Probe
cccgatttcagcttttaagacattt

SEQ ID NO: 254630 - DNA, 25 bp, Artificial
  Probe
agcctgttggacaaaactcgcagct

SEQ ID NO: 254631 - DNA, 25 bp, Artificial
  Probe
ttaagacatttggatcctgagtaac

SEQ ID NO: 254632 - DNA, 25 bp, Artificial
  Probe
agacaactaacacgtgtccttggat

SEQ ID NO: 254633 - DNA, 25 bp, Artificial
  Probe
acagcgagcctgttggacaaaactc

SEQ ID NO: 254634 - DNA, 25 bp, Artificial
  Probe
taagacatttggatcctgagtaaca

SEQ ID NO: 254635 - DNA, 25 bp, Artificial
  Probe
agtagggtgatgagctcgggtttca

SEQ ID NO: 254636 - DNA, 25 bp, Artificial
  Probe
agcgagcctgttggacaaaactcgc

SEQ ID NO: 254637 - DNA, 25 bp, Artificial
  Probe
agcttttaagacatttggatcctga

SEQ ID NO: 254638 - DNA, 25 bp, Artificial
  Probe
gccccgatttcagcttttaagacat

SEQ ID NO: 254639 - DNA, 25 bp, Artificial
  Probe
ggtgatgagctcgggtttcagtctt

SEQ ID NO: 254640 - DNA, 25 bp, Artificial
  Probe
tgccccgatttcagcttttaagaca

SEQ ID NO: 254641 - DNA, 25 bp, Artificial
  Probe
acaactaacacgtgtccttggatga

SEQ ID NO: 254642 - DNA, 25 bp, Artificial
  Probe
ctgttggacaaaactcgcagctggc

SEQ ID NO: 254643 - DNA, 25 bp, Artificial
  Probe
tcagcttttaagacatttggatcct

SEQ ID NO: 254644 - DNA, 25 bp, Artificial
  Probe
ttcagcttttaagacatttggatcc

SEQ ID NO: 254645 - DNA, 25 bp, Artificial
  Probe
gacaactaacacgtgtccttggatg

SEQ ID NO: 254646 - DNA, 25 bp, Artificial
  Probe
gcgagcctgttggacaaaactcgca

SEQ ID NO: 254647 - DNA, 25 bp, Artificial
  Probe
ttttaagacatttggatcctgagta

SEQ ID NO: 254648 - DNA, 25 bp, Artificial
  Probe
taacagcgagcctgttggacaaaac

SEQ ID NO: 254649 - DNA, 25 bp, Artificial
  Probe
attgctgtaaaagtagggtgatgag

SEQ ID NO: 254650 - DNA, 25 bp, Artificial
  Probe
tttcttctcgttgtaaatattgtga

SEQ ID NO: 254651 - DNA, 25 bp, Artificial
  Probe
cctgttggacaaaactcgcagctgg

SEQ ID NO: 254652 - DNA, 25 bp, Artificial
  Probe
cggcactttgccccgatttcagctt

SEQ ID NO: 254653 - DNA, 25 bp, Artificial
  Probe
ctttgccccgatttcagcttttaag

SEQ ID NO: 254654 - DNA, 25 bp, Artificial
  Probe
cgagcctgttggacaaaactcgcag

SEQ ID NO: 254655 - DNA, 25 bp, Artificial
  Probe
ttggacaaaactcgcagctggcgtt

SEQ ID NO: 254656 - DNA, 25 bp, Artificial
  Probe
atttcagcttttaagacatttggat

SEQ ID NO: 254657 - DNA, 25 bp, Artificial
  Probe
cgatttcagcttttaagacatttgg

SEQ ID NO: 254658 - DNA, 25 bp, Artificial
  Probe
tgatgagctcgggtttcagtctttc

SEQ ID NO: 254659 - DNA, 25 bp, Artificial
  Probe
ggacaaaactcgcagctggcgttgg

SEQ ID NO: 254660 - DNA, 25 bp, Artificial
  Probe
tttgccccgatttcagcttttaaga

SEQ ID NO: 254661 - DNA, 25 bp, Artificial
  Probe
gatttcagcttttaagacatttgga

SEQ ID NO: 254662 - DNA, 25 bp, Artificial
  Probe
tttaagacatttggatcctgagtaa

SEQ ID NO: 254663 - DNA, 25 bp, Artificial
  Probe
ccccgatttcagcttttaagacatt

SEQ ID NO: 254664 - DNA, 25 bp, Artificial
  Probe
tgttggacaaaactcgcagctggcg

SEQ ID NO: 254665 - DNA, 25 bp, Artificial
  Probe
ttgccccgatttcagcttttaagac

SEQ ID NO: 254666 - DNA, 25 bp, Artificial
  Probe
ggtcttggcactttcctcttttcaa

SEQ ID NO: 254667 - DNA, 25 bp, Artificial
  Probe
ccctcctaataagtggttgacaaat

SEQ ID NO: 254668 - DNA, 25 bp, Artificial
  Probe
tccacacaggtgctgaagagtaacc

SEQ ID NO: 254669 - DNA, 25 bp, Artificial
  Probe
cactgtctgacatggaaaccaagcc

SEQ ID NO: 254670 - DNA, 25 bp, Artificial
  Probe
cctcctaataagtggttgacaaata

SEQ ID NO: 254671 - DNA, 25 bp, Artificial
  Probe
taatcttcggttacctctggttcta

SEQ ID NO: 254672 - DNA, 25 bp, Artificial
  Probe
catccacacaggtgctgaagagtaa

SEQ ID NO: 254673 - DNA, 25 bp, Artificial
  Probe
tcggttacctctggttctacaaatg

SEQ ID NO: 254674 - DNA, 25 bp, Artificial
  Probe
ttaaataaccatgtcctccggcgtg

SEQ ID NO: 254675 - DNA, 25 bp, Artificial
  Probe
agccactgtctgacatggaaaccaa

SEQ ID NO: 254676 - DNA, 25 bp, Artificial
  Probe
aaccaagccagaactgagtcaggca

SEQ ID NO: 254677 - DNA, 25 bp, Artificial
  Probe
tgcccgatcatccacacaggtgctg

SEQ ID NO: 254678 - DNA, 25 bp, Artificial
  Probe
cactttcctcttttcaaggtgtcgt

SEQ ID NO: 254679 - DNA, 25 bp, Artificial
  Probe
cagaactgagtcaggcaccaagata

SEQ ID NO: 254680 - DNA, 25 bp, Artificial
  Probe
ctgacatggaaaccaagccagaact

SEQ ID NO: 254681 - DNA, 25 bp, Artificial
  Probe
ccagaactgagtcaggcaccaagat

SEQ ID NO: 254682 - DNA, 25 bp, Artificial
  Probe
atcatccacacaggtgctgaagagt

SEQ ID NO: 254683 - DNA, 25 bp, Artificial
  Probe
ggacaagccactgtctgacatggaa

SEQ ID NO: 254684 - DNA, 25 bp, Artificial
  Probe
ccacacaggtgctgaagagtaaccc

SEQ ID NO: 254685 - DNA, 25 bp, Artificial
  Probe
gaaaccaagccagaactgagtcagg

SEQ ID NO: 254686 - DNA, 25 bp, Artificial
  Probe
aagccagaactgagtcaggcaccaa

SEQ ID NO: 254687 - DNA, 25 bp, Artificial
  Probe
tcccacgttgtattcagaataatgt

SEQ ID NO: 254688 - DNA, 25 bp, Artificial
  Probe
tggcactttcctcttttcaaggtgt

SEQ ID NO: 254689 - DNA, 25 bp, Artificial
  Probe
ccgatcatccacacaggtgctgaag

SEQ ID NO: 254690 - DNA, 25 bp, Artificial
  Probe
acaagccactgtctgacatggaaac

SEQ ID NO: 254691 - DNA, 25 bp, Artificial
  Probe
ttgcccgatcatccacacaggtgct

SEQ ID NO: 254692 - DNA, 25 bp, Artificial
  Probe
ctgtctgacatggaaaccaagccag

SEQ ID NO: 254693 - DNA, 25 bp, Artificial
  Probe
ccaagccagaactgagtcaggcacc

SEQ ID NO: 254694 - DNA, 25 bp, Artificial
  Probe
atcccacgttgtattcagaataatg

SEQ ID NO: 254695 - DNA, 25 bp, Artificial
  Probe
actgagtcaggcaccaagatacccc

SEQ ID NO: 254696 - DNA, 25 bp, Artificial
  Probe
acttgcccgatcatccacacaggtg

SEQ ID NO: 254697 - DNA, 25 bp, Artificial
  Probe
ttcggttacctctggttctacaaat

SEQ ID NO: 254698 - DNA, 25 bp, Artificial
  Probe
gtttttgtacttcaaatacatctgg

SEQ ID NO: 254699 - DNA, 25 bp, Artificial
  Probe
acttggccccaaatgtgaattaaat

SEQ ID NO: 254700 - DNA, 25 bp, Artificial
  Probe
aggtcttggcactttcctcttttca

SEQ ID NO: 254701 - DNA, 25 bp, Artificial
  Probe
tcttggcactttcctcttttcaagg

SEQ ID NO: 254702 - DNA, 25 bp, Artificial
  Probe
gttacctctggttctacaaatgaca

SEQ ID NO: 254703 - DNA, 25 bp, Artificial
  Probe
tgacttgcccgatcatccacacagg

SEQ ID NO: 254704 - DNA, 25 bp, Artificial
  Probe
gccagaactgagtcaggcaccaaga

SEQ ID NO: 254705 - DNA, 25 bp, Artificial
  Probe
cccacgttgtattcagaataatgtt

SEQ ID NO: 254706 - DNA, 25 bp, Artificial
  Probe
ataatcttcggttacctctggttct

SEQ ID NO: 254707 - DNA, 25 bp, Artificial
  Probe
tctgaataatcttcggttacctctg

SEQ ID NO: 254708 - DNA, 25 bp, Artificial
  Probe
acacaggtgctgaagagtaacccat

SEQ ID NO: 254709 - DNA, 25 bp, Artificial
  Probe
atcttcggttacctctggttctaca

SEQ ID NO: 254710 - DNA, 25 bp, Artificial
  Probe
cggttacctctggttctacaaatga

SEQ ID NO: 254711 - DNA, 25 bp, Artificial
  Probe
tcttcggttacctctggttctacaa

SEQ ID NO: 254712 - DNA, 25 bp, Artificial
  Probe
tttagcttggcactggccgtcgttt

SEQ ID NO: 254713 - DNA, 25 bp, Artificial
  Probe
tctgtcctgtggagctcctgccctg

SEQ ID NO: 254714 - DNA, 25 bp, Artificial
  Probe
gcacaccttgatccaaagcaacgct

SEQ ID NO: 254715 - DNA, 25 bp, Artificial
  Probe
tgcacaccttgatccaaagcaacgc

SEQ ID NO: 254716 - DNA, 25 bp, Artificial
  Probe
acttttctgtcctgtggagctcctg

SEQ ID NO: 254717 - DNA, 25 bp, Artificial
  Probe
tgtgcggccgcaagcttattccctt

SEQ ID NO: 254718 - DNA, 25 bp, Artificial
  Probe
ggaactcttgagaccctgcttccat

SEQ ID NO: 254719 - DNA, 25 bp, Artificial
  Probe
ttgtgcggccgcaagcttattccct

SEQ ID NO: 254720 - DNA, 25 bp, Artificial
  Probe
ccacttttctgtcctgtggagctcc

SEQ ID NO: 254721 - DNA, 25 bp, Artificial
  Probe
aggggacattgctggctgccttcag

SEQ ID NO: 254722 - DNA, 25 bp, Artificial
  Probe
tctccatgctgagcagtggctgagg

SEQ ID NO: 254723 - DNA, 25 bp, Artificial
  Probe
tagggaactcttgagaccctgcttc

SEQ ID NO: 254724 - DNA, 25 bp, Artificial
  Probe
cttttctgtcctgtggagctcctgc

SEQ ID NO: 254725 - DNA, 25 bp, Artificial
  Probe
ttagcttggcactggccgtcgtttt

SEQ ID NO: 254726 - DNA, 25 bp, Artificial
  Probe
tgcggccgcaagcttattcccttta

SEQ ID NO: 254727 - DNA, 25 bp, Artificial
  Probe
ttttctgtcctgtggagctcctgcc

SEQ ID NO: 254728 - DNA, 25 bp, Artificial
  Probe
gggaactcttgagaccctgcttcca

SEQ ID NO: 254729 - DNA, 25 bp, Artificial
  Probe
agggaactcttgagaccctgcttcc

SEQ ID NO: 254730 - DNA, 25 bp, Artificial
  Probe
gccgcaagcttattccctttagtga

SEQ ID NO: 254731 - DNA, 25 bp, Artificial
  Probe
gggccacttttctgtcctgtggagc

SEQ ID NO: 254732 - DNA, 25 bp, Artificial
  Probe
caactctccatgctgagcagtggct

SEQ ID NO: 254733 - DNA, 25 bp, Artificial
  Probe
cggccgcaagcttattccctttagt

SEQ ID NO: 254734 - DNA, 25 bp, Artificial
  Probe
actctccatgctgagcagtggctga

SEQ ID NO: 254735 - DNA, 25 bp, Artificial
  Probe
aactctccatgctgagcagtggctg

SEQ ID NO: 254736 - DNA, 25 bp, Artificial
  Probe
gccacttttctgtcctgtggagctc

SEQ ID NO: 254737 - DNA, 25 bp, Artificial
  Probe
ggccgcaagcttattccctttagtg

SEQ ID NO: 254738 - DNA, 25 bp, Artificial
  Probe
cacttttctgtcctgtggagctcct

SEQ ID NO: 254739 - DNA, 25 bp, Artificial
  Probe
ggggccacttttctgtcctgtggag

SEQ ID NO: 254740 - DNA, 25 bp, Artificial
  Probe
tgccaactctccatgctgagcagtg

SEQ ID NO: 254741 - DNA, 25 bp, Artificial
  Probe
ttttagcttggcactggccgtcgtt

SEQ ID NO: 254742 - DNA, 25 bp, Artificial
  Probe
ctgccaactctccatgctgagcagt

SEQ ID NO: 254743 - DNA, 25 bp, Artificial
  Probe
gtgcggccgcaagcttattcccttt

SEQ ID NO: 254744 - DNA, 25 bp, Artificial
  Probe
ggccacttttctgtcctgtggagct

SEQ ID NO: 254745 - DNA, 25 bp, Artificial
  Probe
tttctgtcctgtggagctcctgccc

SEQ ID NO: 254746 - DNA, 25 bp, Artificial
  Probe
gcggccgcaagcttattccctttag

SEQ ID NO: 254747 - DNA, 25 bp, Artificial
  Probe
gaggggacattgctggctgccttca

SEQ ID NO: 254748 - DNA, 25 bp, Artificial
  Probe
ccgcaagcttattccctttagtgag

SEQ ID NO: 254749 - DNA, 25 bp, Artificial
  Probe
ttctgtcctgtggagctcctgccct

SEQ ID NO: 254750 - DNA, 25 bp, Artificial
  Probe
tcactcaacatatagtgatgataaa

SEQ ID NO: 254751 - DNA, 25 bp, Artificial
  Probe
ttactgtcactcaacatatagtgat

SEQ ID NO: 254752 - DNA, 25 bp, Artificial
  Probe
tgataaacttcgaggtactcggtaa

SEQ ID NO: 254753 - DNA, 25 bp, Artificial
  Probe
gtgacgcccagaatgaggatgaggc

SEQ ID NO: 254754 - DNA, 25 bp, Artificial
  Probe
actgtcactcaacatatagtgatga

SEQ ID NO: 254755 - DNA, 25 bp, Artificial
  Probe
gacgcccagaatgaggatgaggctg

SEQ ID NO: 254756 - DNA, 25 bp, Artificial
  Probe
cgcccagaatgaggatgaggctgat

SEQ ID NO: 254757 - DNA, 25 bp, Artificial
  Probe
gtcactcaacatatagtgatgataa

SEQ ID NO: 254758 - DNA, 25 bp, Artificial
  Probe
ctgtcactcaacatatagtgatgat

SEQ ID NO: 254759 - DNA, 25 bp, Artificial
  Probe
acaatccgtgacgcccagaatgagg

SEQ ID NO: 254760 - DNA, 25 bp, Artificial
  Probe
tgacaatccgtgacgcccagaatga

SEQ ID NO: 254761 - DNA, 25 bp, Artificial
  Probe
acgcccagaatgaggatgaggctga

SEQ ID NO: 254762 - DNA, 25 bp, Artificial
  Probe
ccgtgacgcccagaatgaggatgag

SEQ ID NO: 254763 - DNA, 25 bp, Artificial
  Probe
tgacgcccagaatgaggatgaggct

SEQ ID NO: 254764 - DNA, 25 bp, Artificial
  Probe
cactcaacatatagtgatgataaac

SEQ ID NO: 254765 - DNA, 25 bp, Artificial
  Probe
attactgtcactcaacatatagtga

SEQ ID NO: 254766 - DNA, 25 bp, Artificial
  Probe
atgataaacttcgaggtactcggta

SEQ ID NO: 254767 - DNA, 25 bp, Artificial
  Probe
gacaatccgtgacgcccagaatgag

SEQ ID NO: 254768 - DNA, 25 bp, Artificial
  Probe
tccgtgacgcccagaatgaggatga

SEQ ID NO: 254769 - DNA, 25 bp, Artificial
  Probe
caatccgtgacgcccagaatgagga

SEQ ID NO: 254770 - DNA, 25 bp, Artificial
  Probe
tgtcactcaacatatagtgatgata

SEQ ID NO: 254771 - DNA, 25 bp, Artificial
  Probe
atccgtgacgcccagaatgaggatg

SEQ ID NO: 254772 - DNA, 25 bp, Artificial
  Probe
tactgtcactcaacatatagtgatg

SEQ ID NO: 254773 - DNA, 25 bp, Artificial
  Probe
aatccgtgacgcccagaatgaggat

SEQ ID NO: 254774 - DNA, 25 bp, Artificial
  Probe
cgtgacgcccagaatgaggatgagg

SEQ ID NO: 254775 - DNA, 25 bp, Artificial
  Probe
gatttgctgtgtgaacttgccttca

SEQ ID NO: 254776 - DNA, 25 bp, Artificial
  Probe
tgctgtgtgaacttgccttcataac

SEQ ID NO: 254777 - DNA, 25 bp, Artificial
  Probe
actgagatttgctgtgtgaacttgc

SEQ ID NO: 254778 - DNA, 25 bp, Artificial
  Probe
cgaaataccctcttgcaatgtatag

SEQ ID NO: 254779 - DNA, 25 bp, Artificial
  Probe
ttgctgtgtgaacttgccttcataa

SEQ ID NO: 254780 - DNA, 25 bp, Artificial
  Probe
gaaataccctcttgcaatgtatagt

SEQ ID NO: 254781 - DNA, 25 bp, Artificial
  Probe
tgagatttgctgtgtgaacttgcct

SEQ ID NO: 254782 - DNA, 25 bp, Artificial
  Probe
tcataacctaggtaagaggactttg

SEQ ID NO: 254783 - DNA, 25 bp, Artificial
  Probe
cctcttgcaatgtatagtttttagg

SEQ ID NO: 254784 - DNA, 25 bp, Artificial
  Probe
atgtgtttacatttcaaaagaaatg

SEQ ID NO: 254785 - DNA, 25 bp, Artificial
  Probe
cttgccttcataacctaggtaagag

SEQ ID NO: 254786 - DNA, 25 bp, Artificial
  Probe
gagatttgctgtgtgaacttgcctt

SEQ ID NO: 254787 - DNA, 25 bp, Artificial
  Probe
tgaacttgccttcataacctaggta

SEQ ID NO: 254788 - DNA, 25 bp, Artificial
  Probe
actggttcgaaataccctcttgcaa

SEQ ID NO: 254789 - DNA, 25 bp, Artificial
  Probe
acttgccttcataacctaggtaaga

SEQ ID NO: 254790 - DNA, 25 bp, Artificial
  Probe
cttttcaaaggaacagatttcagaa

SEQ ID NO: 254791 - DNA, 25 bp, Artificial
  Probe
atactggttcgaaataccctcttgc

SEQ ID NO: 254792 - DNA, 25 bp, Artificial
  Probe
aatcttagacatatctagtcaattt

SEQ ID NO: 254793 - DNA, 25 bp, Artificial
  Probe
ttactttggaatgtaagtaggaaat

SEQ ID NO: 254794 - DNA, 25 bp, Artificial
  Probe
acccaataattgtgatgtgtttaca

SEQ ID NO: 254795 - DNA, 25 bp, Artificial
  Probe
ttgtaacttcttttcaaaggaacag

SEQ ID NO: 254796 - DNA, 25 bp, Artificial
  Probe
aacttgccttcataacctaggtaag

SEQ ID NO: 254797 - DNA, 25 bp, Artificial
  Probe
tttgctgtgtgaacttgccttcata

SEQ ID NO: 254798 - DNA, 25 bp, Artificial
  Probe
tggttcgaaataccctcttgcaatg

SEQ ID NO: 254799 - DNA, 25 bp, Artificial
  Probe
gtgaacttgccttcataacctaggt

SEQ ID NO: 254800 - DNA, 25 bp, Artificial
  Probe
ccctcttgcaatgtatagtttttag

SEQ ID NO: 254801 - DNA, 25 bp, Artificial
  Probe
tcttgcaaagtgtccccatttataa

SEQ ID NO: 254802 - DNA, 25 bp, Artificial
  Probe
cttcataacctaggtaagaggactt

SEQ ID NO: 254803 - DNA, 25 bp, Artificial
  Probe
tttatgcttgttttttgattgacat

SEQ ID NO: 254804 - DNA, 25 bp, Artificial
  Probe
cttcttttcaaaggaacagatttca

SEQ ID NO: 254805 - DNA, 25 bp, Artificial
  Probe
ttcttttcaaaggaacagatttcag

SEQ ID NO: 254806 - DNA, 25 bp, Artificial
  Probe
ctggttcgaaataccctcttgcaat

SEQ ID NO: 254807 - DNA, 25 bp, Artificial
  Probe
atttgctgtgtgaacttgccttcat

SEQ ID NO: 254808 - DNA, 25 bp, Artificial
  Probe
gtttaaaatctagttaccaatatgc

SEQ ID NO: 254809 - DNA, 25 bp, Artificial
  Probe
ctgagatttgctgtgtgaacttgcc

SEQ ID NO: 254810 - DNA, 25 bp, Artificial
  Probe
gaacttgccttcataacctaggtaa

SEQ ID NO: 254811 - DNA, 25 bp, Artificial
  Probe
ttacatttcaaaagaaatgaaattg

SEQ ID NO: 254812 - DNA, 25 bp, Artificial
  Probe
gtaacttcttttcaaaggaacagat

SEQ ID NO: 254813 - DNA, 25 bp, Artificial
  Probe
ttgccttcataacctaggtaagagg

SEQ ID NO: 254814 - DNA, 25 bp, Artificial
  Probe
agatttgctgtgtgaacttgccttc

SEQ ID NO: 254815 - DNA, 25 bp, Artificial
  Probe
tacccaataattgtgatgtgtttac

SEQ ID NO: 254816 - DNA, 25 bp, Artificial
  Probe
gctgtgtgaacttgccttcataacc

SEQ ID NO: 254817 - DNA, 25 bp, Artificial
  Probe
tcttttcaaaggaacagatttcaga

SEQ ID NO: 254818 - DNA, 25 bp, Artificial
  Probe
tactggttcgaaataccctcttgca

SEQ ID NO: 254819 - DNA, 25 bp, Artificial
  Probe
ttcataacctaggtaagaggacttt

SEQ ID NO: 254820 - DNA, 25 bp, Artificial
  Probe
atagctttctgaagtaaaattgaag

SEQ ID NO: 254821 - DNA, 25 bp, Artificial
  Probe
ttagttacccaggacccgagacaca

SEQ ID NO: 254822 - DNA, 25 bp, Artificial
  Probe
ccgttgttggactatttgaatccaa

SEQ ID NO: 254823 - DNA, 25 bp, Artificial
  Probe
aagatgcagcactttatacaagctg

SEQ ID NO: 254824 - DNA, 25 bp, Artificial
  Probe
acaggagctgctttaatcatctctt

SEQ ID NO: 254825 - DNA, 25 bp, Artificial
  Probe
ctattataaccgttgttggactatt

SEQ ID NO: 254826 - DNA, 25 bp, Artificial
  Probe
gccatcagctttcagagtgactgat

SEQ ID NO: 254827 - DNA, 25 bp, Artificial
  Probe
ccctttctgggctcctgggaagtca

SEQ ID NO: 254828 - DNA, 25 bp, Artificial
  Probe
agattccctttctgggctcctggga

SEQ ID NO: 254829 - DNA, 25 bp, Artificial
  Probe
tagtaggctttagattccctttctg

SEQ ID NO: 254830 - DNA, 25 bp, Artificial
  Probe
taaatctggcatgaggaaaacaaca

SEQ ID NO: 254831 - DNA, 25 bp, Artificial
  Probe
aaagtctgtattccattatgggctt

SEQ ID NO: 254832 - DNA, 25 bp, Artificial
  Probe
gctcctatgctaatcagtaatgaat

SEQ ID NO: 254833 - DNA, 25 bp, Artificial
  Probe
atgtctattataaccgttgttggac

SEQ ID NO: 254834 - DNA, 25 bp, Artificial
  Probe
ggctatataactatccagcttactg

SEQ ID NO: 254835 - DNA, 25 bp, Artificial
  Probe
ttagattccctttctgggctcctgg

SEQ ID NO: 254836 - DNA, 25 bp, Artificial
  Probe
aacagttgggccatcagctttcaga

SEQ ID NO: 254837 - DNA, 25 bp, Artificial
  Probe
cagcttactgaaagatgcagcactt

SEQ ID NO: 254838 - DNA, 25 bp, Artificial
  Probe
catagcaaggcctgtacaggtgtga

SEQ ID NO: 254839 - DNA, 25 bp, Artificial
  Probe
gctgctttaatcatctcttcatggc

SEQ ID NO: 254840 - DNA, 25 bp, Artificial
  Probe
agtctgtattccattatgggcttat

SEQ ID NO: 254841 - DNA, 25 bp, Artificial
  Probe
taaccgttgttggactatttgaatc

SEQ ID NO: 254842 - DNA, 25 bp, Artificial
  Probe
taactatccagcttactgaaagatg

SEQ ID NO: 254843 - DNA, 25 bp, Artificial
  Probe
taggctttagattccctttctgggc

SEQ ID NO: 254844 - DNA, 25 bp, Artificial
  Probe
tccattatgggcttatgtaacttac

SEQ ID NO: 254845 - DNA, 25 bp, Artificial
  Probe
ctgaaagatgcagcactttatacaa

SEQ ID NO: 254846 - DNA, 25 bp, Artificial
  Probe
gagatgacaggagctgctttaatca

SEQ ID NO: 254847 - DNA, 25 bp, Artificial
  Probe
atgtgcaggtgcatgtgctcctatg

SEQ ID NO: 254848 - DNA, 25 bp, Artificial
  Probe
ctgtattccattatgggcttatgta

SEQ ID NO: 254849 - DNA, 25 bp, Artificial
  Probe
ctttatacaagctgaatagtaggct

SEQ ID NO: 254850 - DNA, 25 bp, Artificial
  Probe
tttctgggctcctgggaagtcatag

SEQ ID NO: 254851 - DNA, 25 bp, Artificial
  Probe
ttatgggcttatgtaacttacctat

SEQ ID NO: 254852 - DNA, 25 bp, Artificial
  Probe
ggattaggcaaccagcactgaacag

SEQ ID NO: 254853 - DNA, 25 bp, Artificial
  Probe
gtgcaggtgcatgtgctcctatgct

SEQ ID NO: 254854 - DNA, 25 bp, Artificial
  Probe
ggcttatgtaacttacctatgtatg

SEQ ID NO: 254855 - DNA, 25 bp, Artificial
  Probe
tagttgctgcttaactggagatgac

SEQ ID NO: 254856 - DNA, 25 bp, Artificial
  Probe
accgttgttggactatttgaatcca

SEQ ID NO: 254857 - DNA, 25 bp, Artificial
  Probe
tcctgggaagtcatagcaaggcctg

SEQ ID NO: 254858 - DNA, 25 bp, Artificial
  Probe
ttaactggagatgacaggagctgct

SEQ ID NO: 254859 - DNA, 25 bp, Artificial
  Probe
ggaagtcatagcaaggcctgtacag

SEQ ID NO: 254860 - DNA, 25 bp, Artificial
  Probe
atcagctttcagagtgactgatgga

SEQ ID NO: 254861 - DNA, 25 bp, Artificial
  Probe
caaggcctgtacaggtgtgagatga

SEQ ID NO: 254862 - DNA, 25 bp, Artificial
  Probe
gaaagatgcagcactttatacaagc

SEQ ID NO: 254863 - DNA, 25 bp, Artificial
  Probe
cagctttcagagtgactgatggaag

SEQ ID NO: 254864 - DNA, 25 bp, Artificial
  Probe
gaagtcatagcaaggcctgtacagg

SEQ ID NO: 254865 - DNA, 25 bp, Artificial
  Probe
tgggctcctgggaagtcatagcaag

SEQ ID NO: 254866 - DNA, 25 bp, Artificial
  Probe
gcactgaacagttgggccatcagct

SEQ ID NO: 254867 - DNA, 25 bp, Artificial
  Probe
ctcacggtacaacttgtggcaaatg

SEQ ID NO: 254868 - DNA, 25 bp, Artificial
  Probe
ccttggtctcagagccctgaaggtt

SEQ ID NO: 254869 - DNA, 25 bp, Artificial
  Probe
taagaaatcggcaaggccagacagg

SEQ ID NO: 254870 - DNA, 25 bp, Artificial
  Probe
ggcaaggccttggtctcagagccct

SEQ ID NO: 254871 - DNA, 25 bp, Artificial
  Probe
gtgctcacggtacaacttgtggcaa

SEQ ID NO: 254872 - DNA, 25 bp, Artificial
  Probe
atcctgatcctttgtgagttcctgg

SEQ ID NO: 254873 - DNA, 25 bp, Artificial
  Probe
gtgatggtgccgttgcatcctgatc

SEQ ID NO: 254874 - DNA, 25 bp, Artificial
  Probe
aagggcatttcttcttttgtacagt

SEQ ID NO: 254875 - DNA, 25 bp, Artificial
  Probe
tgatggtgccgttgcatcctgatcc

SEQ ID NO: 254876 - DNA, 25 bp, Artificial
  Probe
taaggtgtgctcacggtacaacttg

SEQ ID NO: 254877 - DNA, 25 bp, Artificial
  Probe
gatggtgccgttgcatcctgatcct

SEQ ID NO: 254878 - DNA, 25 bp, Artificial
  Probe
ccctgaatagctagtcctttgtaca

SEQ ID NO: 254879 - DNA, 25 bp, Artificial
  Probe
acaacttgtggcaaatgaaacgtga

SEQ ID NO: 254880 - DNA, 25 bp, Artificial
  Probe
aggcaaggccttggtctcagagccc

SEQ ID NO: 254881 - DNA, 25 bp, Artificial
  Probe
gtgccgttgcatcctgatcctttgt

SEQ ID NO: 254882 - DNA, 25 bp, Artificial
  Probe
tccttaggggcgacccaggcaaggc

SEQ ID NO: 254883 - DNA, 25 bp, Artificial
  Probe
gatcctttgtgagttcctgggttct

SEQ ID NO: 254884 - DNA, 25 bp, Artificial
  Probe
gccgttgcatcctgatcctttgtga

SEQ ID NO: 254885 - DNA, 25 bp, Artificial
  Probe
gggcatttcttcttttgtacagtgt

SEQ ID NO: 254886 - DNA, 25 bp, Artificial
  Probe
cacggtacaacttgtggcaaatgaa

SEQ ID NO: 254887 - DNA, 25 bp, Artificial
  Probe
gtgtgctcacggtacaacttgtggc

SEQ ID NO: 254888 - DNA, 25 bp, Artificial
  Probe
atttttatgccattgtcaaggaagc

SEQ ID NO: 254889 - DNA, 25 bp, Artificial
  Probe
cgttgcatcctgatcctttgtgagt

SEQ ID NO: 254890 - DNA, 25 bp, Artificial
  Probe
gctcacggtacaacttgtggcaaat

SEQ ID NO: 254891 - DNA, 25 bp, Artificial
  Probe
acgccctgaatagctagtcctttgt

SEQ ID NO: 254892 - DNA, 25 bp, Artificial
  Probe
tgatcctttgtgagttcctgggttc

SEQ ID NO: 254893 - DNA, 25 bp, Artificial
  Probe
cctgaatagctagtcctttgtacat

SEQ ID NO: 254894 - DNA, 25 bp, Artificial
  Probe
ccaggcaaggccttggtctcagagc

SEQ ID NO: 254895 - DNA, 25 bp, Artificial
  Probe
atgccattgtcaaggaagccagggg

SEQ ID NO: 254896 - DNA, 25 bp, Artificial
  Probe
tgaatagctagtcctttgtacatca

SEQ ID NO: 254897 - DNA, 25 bp, Artificial
  Probe
cctgatcctttgtgagttcctgggt

SEQ ID NO: 254898 - DNA, 25 bp, Artificial
  Probe
gcatcctgatcctttgtgagttcct

SEQ ID NO: 254899 - DNA, 25 bp, Artificial
  Probe
tttatgccattgtcaaggaagccag

SEQ ID NO: 254900 - DNA, 25 bp, Artificial
  Probe
cggtacaacttgtggcaaatgaaac

SEQ ID NO: 254901 - DNA, 25 bp, Artificial
  Probe
tggtgccgttgcatcctgatccttt

SEQ ID NO: 254902 - DNA, 25 bp, Artificial
  Probe
aaggccttggtctcagagccctgaa

SEQ ID NO: 254903 - DNA, 25 bp, Artificial
  Probe
tttttatgccattgtcaaggaagcc

SEQ ID NO: 254904 - DNA, 25 bp, Artificial
  Probe
ttttatgccattgtcaaggaagcca

SEQ ID NO: 254905 - DNA, 25 bp, Artificial
  Probe
ttgcatcctgatcctttgtgagttc

SEQ ID NO: 254906 - DNA, 25 bp, Artificial
  Probe
aggccttggtctcagagccctgaag

SEQ ID NO: 254907 - DNA, 25 bp, Artificial
  Probe
ggcgacccaggcaaggccttggtct

SEQ ID NO: 254908 - DNA, 25 bp, Artificial
  Probe
ggtgccgttgcatcctgatcctttg

SEQ ID NO: 254909 - DNA, 25 bp, Artificial
  Probe
cacgccctgaatagctagtcctttg

SEQ ID NO: 254910 - DNA, 25 bp, Artificial
  Probe
caaggccttggtctcagagccctga

SEQ ID NO: 254911 - DNA, 25 bp, Artificial
  Probe
tatgccattgtcaaggaagccaggg

SEQ ID NO: 254912 - DNA, 25 bp, Artificial
  Probe
cgccctgaatagctagtcctttgta

SEQ ID NO: 254913 - DNA, 25 bp, Artificial
  Probe
gaccccaacggacaaggcacagtca

SEQ ID NO: 254914 - DNA, 25 bp, Artificial
  Probe
catcttggcagaggaacttcgtcga

SEQ ID NO: 254915 - DNA, 25 bp, Artificial
  Probe
attatgactctggttgaccccaacg

SEQ ID NO: 254916 - DNA, 25 bp, Artificial
  Probe
agaaccatcaatgaggtggagaccc

SEQ ID NO: 254917 - DNA, 25 bp, Artificial
  Probe
tgaccccaacggacaaggcacagtc

SEQ ID NO: 254918 - DNA, 25 bp, Artificial
  Probe
gagttgctgctcacaactatcgcca

SEQ ID NO: 254919 - DNA, 25 bp, Artificial
  Probe
cactttgacaggaggaagaatggcc

SEQ ID NO: 254920 - DNA, 25 bp, Artificial
  Probe
aaccatcaatgaggtggagacccag

SEQ ID NO: 254921 - DNA, 25 bp, Artificial
  Probe
tcgccagaaccatcaatgaggtgga

SEQ ID NO: 254922 - DNA, 25 bp, Artificial
  Probe
gacccagatcctgacaagagatgcc

SEQ ID NO: 254923 - DNA, 25 bp, Artificial
  Probe
ggagacccagatcctgacaagagat

SEQ ID NO: 254924 - DNA, 25 bp, Artificial
  Probe
caccatggagcatatccgtgtcgga

SEQ ID NO: 254925 - DNA, 25 bp, Artificial
  Probe
catgactagagagaccgcagacacg

SEQ ID NO: 254926 - DNA, 25 bp, Artificial
  Probe
ccatgggctatgacttgggtgaagc

SEQ ID NO: 254927 - DNA, 25 bp, Artificial
  Probe
aactatcgccagaaccatcaatgag

SEQ ID NO: 254928 - DNA, 25 bp, Artificial
  Probe
tgtcggatgggagttgctgctcaca

SEQ ID NO: 254929 - DNA, 25 bp, Artificial
  Probe
tgggagttgctgctcacaactatcg

SEQ ID NO: 254930 - DNA, 25 bp, Artificial
  Probe
ttacatcttggcagaggaacttcgt

SEQ ID NO: 254931 - DNA, 25 bp, Artificial
  Probe
ttggcagaggaacttcgtcgagagc

SEQ ID NO: 254932 - DNA, 25 bp, Artificial
  Probe
cgccagaaccatcaatgaggtggag

SEQ ID NO: 254933 - DNA, 25 bp, Artificial
  Probe
tgcatcaagagaatgcccccatact

SEQ ID NO: 254934 - DNA, 25 bp, Artificial
  Probe
aattatgactctggttgaccccaac

SEQ ID NO: 254935 - DNA, 25 bp, Artificial
  Probe
ccagaaccatcaatgaggtggagac

SEQ ID NO: 254936 - DNA, 25 bp, Artificial
  Probe
atgactagagagaccgcagacacgg

SEQ ID NO: 254937 - DNA, 25 bp, Artificial
  Probe
agcatatccgtgtcggatgggagtt

SEQ ID NO: 254938 - DNA, 25 bp, Artificial
  Probe
atcaggcccagtactgcatcaagag

SEQ ID NO: 254939 - DNA, 25 bp, Artificial
  Probe
caatgaggtggagacccagatcctg

SEQ ID NO: 254940 - DNA, 25 bp, Artificial
  Probe
tgataagccttacatcttggcagag

SEQ ID NO: 254941 - DNA, 25 bp, Artificial
  Probe
agccttacatcttggcagaggaact

SEQ ID NO: 254942 - DNA, 25 bp, Artificial
  Probe
atcgccagaaccatcaatgaggtgg

SEQ ID NO: 254943 - DNA, 25 bp, Artificial
  Probe
ctggttgaccccaacggacaaggca

SEQ ID NO: 254944 - DNA, 25 bp, Artificial
  Probe
taagccttacatcttggcagaggaa

SEQ ID NO: 254945 - DNA, 25 bp, Artificial
  Probe
tacatcttggcagaggaacttcgtc

SEQ ID NO: 254946 - DNA, 25 bp, Artificial
  Probe
ttccatgggctatgacttgggtgaa

SEQ ID NO: 254947 - DNA, 25 bp, Artificial
  Probe
tatgactctggttgaccccaacgga

SEQ ID NO: 254948 - DNA, 25 bp, Artificial
  Probe
cccagatcctgacaagagatgccaa

SEQ ID NO: 254949 - DNA, 25 bp, Artificial
  Probe
atgggagttgctgctcacaactatc

SEQ ID NO: 254950 - DNA, 25 bp, Artificial
  Probe
tgactctggttgaccccaacggaca

SEQ ID NO: 254951 - DNA, 25 bp, Artificial
  Probe
catgggctatgacttgggtgaagct

SEQ ID NO: 254952 - DNA, 25 bp, Artificial
  Probe
tcaggcccagtactgcatcaagaga

SEQ ID NO: 254953 - DNA, 25 bp, Artificial
  Probe
ccatggagcatatccgtgtcggatg

SEQ ID NO: 254954 - DNA, 25 bp, Artificial
  Probe
tggttgaccccaacggacaaggcac

SEQ ID NO: 254955 - DNA, 25 bp, Artificial
  Probe
agacccagatcctgacaagagatgc

SEQ ID NO: 254956 - DNA, 25 bp, Artificial
  Probe
cggatgggagttgctgctcacaact

SEQ ID NO: 254957 - DNA, 25 bp, Artificial
  Probe
ccgaattatgactctggttgacccc

SEQ ID NO: 254958 - DNA, 25 bp, Artificial
  Probe
cccgaattatgactctggttgaccc

SEQ ID NO: 254959 - DNA, 25 bp, Artificial
  Probe
gatggatggctctctgaagctagtg

SEQ ID NO: 254960 - DNA, 25 bp, Artificial
  Probe
ccaggccttctggaagcacggagtt

SEQ ID NO: 254961 - DNA, 25 bp, Artificial
  Probe
caggccttctggaagcacggagttc

SEQ ID NO: 254962 - DNA, 25 bp, Artificial
  Probe
ccttctggaagcacggagttcaggt

SEQ ID NO: 254963 - DNA, 25 bp, Artificial
  Probe
atggatggctctctgaagctagtga

SEQ ID NO: 254964 - DNA, 25 bp, Artificial
  Probe
gccttctggaagcacggagttcagg

SEQ ID NO: 254965 - DNA, 25 bp, Artificial
  Probe
aggtgtgggctccagactcggaaca

SEQ ID NO: 254966 - DNA, 25 bp, Artificial
  Probe
ccagtgcaggtgatccaagtaaagg

SEQ ID NO: 254967 - DNA, 25 bp, Artificial
  Probe
tcgcacccctgagatccccatgaca

SEQ ID NO: 254968 - DNA, 25 bp, Artificial
  Probe
tgaccccggagggggcaccagctcc

SEQ ID NO: 254969 - DNA, 25 bp, Artificial
  Probe
tctgaagctagtgaccccggagggg

SEQ ID NO: 254970 - DNA, 25 bp, Artificial
  Probe
gttgatggatggctctctgaagcta

SEQ ID NO: 254971 - DNA, 25 bp, Artificial
  Probe
tggatggctctctgaagctagtgac

SEQ ID NO: 254972 - DNA, 25 bp, Artificial
  Probe
ttgatggatggctctctgaagctag

SEQ ID NO: 254973 - DNA, 25 bp, Artificial
  Probe
tctgctccccgaggcctgtagtggt

SEQ ID NO: 254974 - DNA, 25 bp, Artificial
  Probe
gagatcgactccaggccttctggaa

SEQ ID NO: 254975 - DNA, 25 bp, Artificial
  Probe
gaggctgtggcaatggttggagatc

SEQ ID NO: 254976 - DNA, 25 bp, Artificial
  Probe
tctctgaagctagtgaccccggagg

SEQ ID NO: 254977 - DNA, 25 bp, Artificial
  Probe
cgctgcaggagctgagagatcccac

SEQ ID NO: 254978 - DNA, 25 bp, Artificial
  Probe
ggagatcgactccaggccttctgga

SEQ ID NO: 254979 - DNA, 25 bp, Artificial
  Probe
gctgtggcaatggttggagatcgac

SEQ ID NO: 254980 - DNA, 25 bp, Artificial
  Probe
tggctctctgaagctagtgaccccg

SEQ ID NO: 254981 - DNA, 25 bp, Artificial
  Probe
gactccaggccttctggaagcacgg

SEQ ID NO: 254982 - DNA, 25 bp, Artificial
  Probe
tccccgaggcctgtagtggtggaaa

SEQ ID NO: 254983 - DNA, 25 bp, Artificial
  Probe
ggctctctgaagctagtgaccccgg

SEQ ID NO: 254984 - DNA, 25 bp, Artificial
  Probe
ggccttctggaagcacggagttcag

SEQ ID NO: 254985 - DNA, 25 bp, Artificial
  Probe
tggagatcgactccaggccttctgg

SEQ ID NO: 254986 - DNA, 25 bp, Artificial
  Probe
ccgaggcctgtagtggtggaaacac

SEQ ID NO: 254987 - DNA, 25 bp, Artificial
  Probe
ggatggctctctgaagctagtgacc

SEQ ID NO: 254988 - DNA, 25 bp, Artificial
  Probe
cagtgcaggtgatccaagtaaagga

SEQ ID NO: 254989 - DNA, 25 bp, Artificial
  Probe
agatcgactccaggccttctggaag

SEQ ID NO: 254990 - DNA, 25 bp, Artificial
  Probe
tgatggatggctctctgaagctagt

SEQ ID NO: 254991 - DNA, 25 bp, Artificial
  Probe
ccgctgcaggagctgagagatccca

SEQ ID NO: 254992 - DNA, 25 bp, Artificial
  Probe
atggtgatggtgttgatggatggct

SEQ ID NO: 254993 - DNA, 25 bp, Artificial
  Probe
cgactccaggccttctggaagcacg

SEQ ID NO: 254994 - DNA, 25 bp, Artificial
  Probe
gctccccgaggcctgtagtggtgga

SEQ ID NO: 254995 - DNA, 25 bp, Artificial
  Probe
ctctgaagctagtgaccccggaggg

SEQ ID NO: 254996 - DNA, 25 bp, Artificial
  Probe
cccgaggcctgtagtggtggaaaca

SEQ ID NO: 254997 - DNA, 25 bp, Artificial
  Probe
gtgttgatggatggctctctgaagc

SEQ ID NO: 254998 - DNA, 25 bp, Artificial
  Probe
ctccccgaggcctgtagtggtggaa

SEQ ID NO: 254999 - DNA, 25 bp, Artificial
  Probe
cttctggaagcacggagttcaggtg

SEQ ID NO: 255000 - DNA, 25 bp, Artificial
  Probe
gctctctgaagctagtgaccccgga

SEQ ID NO: 255001 - DNA, 25 bp, Artificial
  Probe
agggggcaccagctcccgggcttcg

SEQ ID NO: 255002 - DNA, 25 bp, Artificial
  Probe
ctctctgaagctagtgaccccggag

SEQ ID NO: 255003 - DNA, 25 bp, Artificial
  Probe
ctgtggcaatggttggagatcgact

SEQ ID NO: 255004 - DNA, 25 bp, Artificial
  Probe
aggccttctggaagcacggagttca

SEQ ID NO: 255005 - DNA, 25 bp, Artificial
  Probe
tcaaaaccaaactggaagcccctct

SEQ ID NO: 255006 - DNA, 25 bp, Artificial
  Probe
cagctggggccccaggggtgggctg

SEQ ID NO: 255007 - DNA, 25 bp, Artificial
  Probe
tgcctcccagctggggccccagggg

SEQ ID NO: 255008 - DNA, 25 bp, Artificial
  Probe
tcccagctggggccccaggggtggg

SEQ ID NO: 255009 - DNA, 25 bp, Artificial
  Probe
aaggtgaggggtgccgcctatgggc

SEQ ID NO: 255010 - DNA, 25 bp, Artificial
  Probe
gggccacaaatctctacaagtgcct

SEQ ID NO: 255011 - DNA, 25 bp, Artificial
  Probe
gggtgccgcctatgggccacaaatc

SEQ ID NO: 255012 - DNA, 25 bp, Artificial
  Probe
tgcctcttacctcgtcctgcctctc

SEQ ID NO: 255013 - DNA, 25 bp, Artificial
  Probe
catgggcaggtgggtcaagggacag

SEQ ID NO: 255014 - DNA, 25 bp, Artificial
  Probe
ctctgcctcttacctcgtcctgcct

SEQ ID NO: 255015 - DNA, 25 bp, Artificial
  Probe
ccgcctatgggccacaaatctctac

SEQ ID NO: 255016 - DNA, 25 bp, Artificial
  Probe
ggtgggacatgagggggctgctgga

SEQ ID NO: 255017 - DNA, 25 bp, Artificial
  Probe
atgggccacaaatctctacaagtgc

SEQ ID NO: 255018 - DNA, 25 bp, Artificial
  Probe
tctacaagtgcctgttccctacacc

SEQ ID NO: 255019 - DNA, 25 bp, Artificial
  Probe
tgagggggctgctggagaatgtatt

SEQ ID NO: 255020 - DNA, 25 bp, Artificial
  Probe
tatgggccacaaatctctacaagtg

SEQ ID NO: 255021 - DNA, 25 bp, Artificial
  Probe
tgggccacaaatctctacaagtgcc

SEQ ID NO: 255022 - DNA, 25 bp, Artificial
  Probe
caccaccccagtactagtccagtcc

SEQ ID NO: 255023 - DNA, 25 bp, Artificial
  Probe
tggggtgggacatgagggggctgct

SEQ ID NO: 255024 - DNA, 25 bp, Artificial
  Probe
gggctggagggttttggtcaagcct

SEQ ID NO: 255025 - DNA, 25 bp, Artificial
  Probe
ccccagtactagtccagtcccttca

SEQ ID NO: 255026 - DNA, 25 bp, Artificial
  Probe
caaactggaagcccctctctgcctc

SEQ ID NO: 255027 - DNA, 25 bp, Artificial
  Probe
ggtgggctggagggttttggtcaag

SEQ ID NO: 255028 - DNA, 25 bp, Artificial
  Probe
aaaccaaactggaagcccctctctg

SEQ ID NO: 255029 - DNA, 25 bp, Artificial
  Probe
aactggaagcccctctctgcctccc

SEQ ID NO: 255030 - DNA, 25 bp, Artificial
  Probe
ctatgggccacaaatctctacaagt

SEQ ID NO: 255031 - DNA, 25 bp, Artificial
  Probe
accaaactggaagcccctctctgcc

SEQ ID NO: 255032 - DNA, 25 bp, Artificial
  Probe
tgggcaggtgggtcaagggacagga

SEQ ID NO: 255033 - DNA, 25 bp, Artificial
  Probe
acatgagggggctgctggagaatgt

SEQ ID NO: 255034 - DNA, 25 bp, Artificial
  Probe
cgcctatgggccacaaatctctaca

SEQ ID NO: 255035 - DNA, 25 bp, Artificial
  Probe
ggtgccgcctatgggccacaaatct

SEQ ID NO: 255036 - DNA, 25 bp, Artificial
  Probe
aatctctacaagtgcctgttcccta

SEQ ID NO: 255037 - DNA, 25 bp, Artificial
  Probe
tgaggggtgccgcctatgggccaca

SEQ ID NO: 255038 - DNA, 25 bp, Artificial
  Probe
tctctgcctcccagctggggcccca

SEQ ID NO: 255039 - DNA, 25 bp, Artificial
  Probe
gtactagtccagtcccttcacaccc

SEQ ID NO: 255040 - DNA, 25 bp, Artificial
  Probe
gcctatgggccacaaatctctacaa

SEQ ID NO: 255041 - DNA, 25 bp, Artificial
  Probe
agtgcctgttccctacaccacccca

SEQ ID NO: 255042 - DNA, 25 bp, Artificial
  Probe
gccacaaatctctacaagtgcctgt

SEQ ID NO: 255043 - DNA, 25 bp, Artificial
  Probe
ggccacaaatctctacaagtgcctg

SEQ ID NO: 255044 - DNA, 25 bp, Artificial
  Probe
ctagtccagtcccttcacacccact

SEQ ID NO: 255045 - DNA, 25 bp, Artificial
  Probe
cctatgggccacaaatctctacaag

SEQ ID NO: 255046 - DNA, 25 bp, Artificial
  Probe
caggtgggtcaagggacaggaaggg

SEQ ID NO: 255047 - DNA, 25 bp, Artificial
  Probe
acaagtgcctgttccctacaccacc

SEQ ID NO: 255048 - DNA, 25 bp, Artificial
  Probe
tggggccccaggggtgggctggagg

SEQ ID NO: 255049 - DNA, 25 bp, Artificial
  Probe
ccacaaatctctacaagtgcctgtt

SEQ ID NO: 255050 - DNA, 25 bp, Artificial
  Probe
tggcccatgggcaggtgggtcaagg

SEQ ID NO: 255051 - DNA, 25 bp, Artificial
  Probe
gactggaggccttaggccctggccc

SEQ ID NO: 255052 - DNA, 25 bp, Artificial
  Probe
cccagcagtggacttggtgagcgcc

SEQ ID NO: 255053 - DNA, 25 bp, Artificial
  Probe
tggtccaggcccagcagtggacttg

SEQ ID NO: 255054 - DNA, 25 bp, Artificial
  Probe
gaggaggacctcgatccttaccacg

SEQ ID NO: 255055 - DNA, 25 bp, Artificial
  Probe
tcctcgagtggcagattccatcgac

SEQ ID NO: 255056 - DNA, 25 bp, Artificial
  Probe
agactggaggccttaggccctggcc

SEQ ID NO: 255057 - DNA, 25 bp, Artificial
  Probe
ttatagagtcggactctcggctcgg

SEQ ID NO: 255058 - DNA, 25 bp, Artificial
  Probe
cagtccgctgcagcacatgccaata

SEQ ID NO: 255059 - DNA, 25 bp, Artificial
  Probe
cctgtgcctcctcgagtggcagatt

SEQ ID NO: 255060 - DNA, 25 bp, Artificial
  Probe
ctctcggctcggttgaggaggcacc

SEQ ID NO: 255061 - DNA, 25 bp, Artificial
  Probe
tcagggaccggcaaaccgtgccacg

SEQ ID NO: 255062 - DNA, 25 bp, Artificial
  Probe
agccgtgtttacagaatgtttgtgc

SEQ ID NO: 255063 - DNA, 25 bp, Artificial
  Probe
aaagcccaggacctggcagctgcca

SEQ ID NO: 255064 - DNA, 25 bp, Artificial
  Probe
cagaatgtttgtgcagcttcgcttc

SEQ ID NO: 255065 - DNA, 25 bp, Artificial
  Probe
gcaccgggaggttgcctgtgcctcc

SEQ ID NO: 255066 - DNA, 25 bp, Artificial
  Probe
caagatgaaacgtgcccgggcctga

SEQ ID NO: 255067 - DNA, 25 bp, Artificial
  Probe
cgctctctcctttgaacttttggag

SEQ ID NO: 255068 - DNA, 25 bp, Artificial
  Probe
agtccgctgcagcacatgccaatac

SEQ ID NO: 255069 - DNA, 25 bp, Artificial
  Probe
tcttggtcagggaccggcaaaccgt

SEQ ID NO: 255070 - DNA, 25 bp, Artificial
  Probe
ttgcctgtgcctcctcgagtggcag

SEQ ID NO: 255071 - DNA, 25 bp, Artificial
  Probe
ctcaaagcccaggacctggcagctg

SEQ ID NO: 255072 - DNA, 25 bp, Artificial
  Probe
ccaggcccagcagtggacttggtga

SEQ ID NO: 255073 - DNA, 25 bp, Artificial
  Probe
cctcgagtggcagattccatcgact

SEQ ID NO: 255074 - DNA, 25 bp, Artificial
  Probe
tcaaagcccaggacctggcagctgc

SEQ ID NO: 255075 - DNA, 25 bp, Artificial
  Probe
gagtggcagattccatcgactctgc

SEQ ID NO: 255076 - DNA, 25 bp, Artificial
  Probe
gtgcctcctcgagtggcagattcca

SEQ ID NO: 255077 - DNA, 25 bp, Artificial
  Probe
tctctcctttgaacttttggagagg

SEQ ID NO: 255078 - DNA, 25 bp, Artificial
  Probe
gctctctcctttgaacttttggaga

SEQ ID NO: 255079 - DNA, 25 bp, Artificial
  Probe
tagagtcggactctcggctcggttg

SEQ ID NO: 255080 - DNA, 25 bp, Artificial
  Probe
ctaagccgtgtttacagaatgtttg

SEQ ID NO: 255081 - DNA, 25 bp, Artificial
  Probe
ttacagaatgtttgtgcagcttcgc

SEQ ID NO: 255082 - DNA, 25 bp, Artificial
  Probe
ggtagaactctaagccgtgtttaca

SEQ ID NO: 255083 - DNA, 25 bp, Artificial
  Probe
ccctccaagactggaggccttaggc

SEQ ID NO: 255084 - DNA, 25 bp, Artificial
  Probe
agagtcggactctcggctcggttga

SEQ ID NO: 255085 - DNA, 25 bp, Artificial
  Probe
ggaggttgcctgtgcctcctcgagt

SEQ ID NO: 255086 - DNA, 25 bp, Artificial
  Probe
atagagtcggactctcggctcggtt

SEQ ID NO: 255087 - DNA, 25 bp, Artificial
  Probe
ccgtgtttacagaatgtttgtgcag

SEQ ID NO: 255088 - DNA, 25 bp, Artificial
  Probe
tccaggcccagcagtggacttggtg

SEQ ID NO: 255089 - DNA, 25 bp, Artificial
  Probe
tttacagaatgtttgtgcagcttcg

SEQ ID NO: 255090 - DNA, 25 bp, Artificial
  Probe
ctctaagccgtgtttacagaatgtt

SEQ ID NO: 255091 - DNA, 25 bp, Artificial
  Probe
ctccaagactggaggccttaggccc

SEQ ID NO: 255092 - DNA, 25 bp, Artificial
  Probe
tgcctcctcgagtggcagattccat

SEQ ID NO: 255093 - DNA, 25 bp, Artificial
  Probe
gtccaggcccagcagtggacttggt

SEQ ID NO: 255094 - DNA, 25 bp, Artificial
  Probe
aactctaagccgtgtttacagaatg

SEQ ID NO: 255095 - DNA, 25 bp, Artificial
  Probe
gttgcctgtgcctcctcgagtggca

SEQ ID NO: 255096 - DNA, 25 bp, Artificial
  Probe
agtggcagattccatcgactctgcc

SEQ ID NO: 255097 - DNA, 25 bp, Artificial
  Probe
catcagtcacatcaacaaggcactg

SEQ ID NO: 255098 - DNA, 25 bp, Artificial
  Probe
gatgtgtgccttagcgccccaagtg

SEQ ID NO: 255099 - DNA, 25 bp, Artificial
  Probe
cttgattgtcggtctgtggatgccc

SEQ ID NO: 255100 - DNA, 25 bp, Artificial
  Probe
ccttagcgccccaagtggcaaatgc

SEQ ID NO: 255101 - DNA, 25 bp, Artificial
  Probe
gagaagatcctgcaaagcaccagca

SEQ ID NO: 255102 - DNA, 25 bp, Artificial
  Probe
gtaaatgttatccatgtggcctccc

SEQ ID NO: 255103 - DNA, 25 bp, Artificial
  Probe
atgctgaaaggttcaaggtggacct

SEQ ID NO: 255104 - DNA, 25 bp, Artificial
  Probe
gccccaagtggcaaatgctgaaagg

SEQ ID NO: 255105 - DNA, 25 bp, Artificial
  Probe
cccaccagctctggagaagatcctg

SEQ ID NO: 255106 - DNA, 25 bp, Artificial
  Probe
caagaccatggcaactctaaaagag

SEQ ID NO: 255107 - DNA, 25 bp, Artificial
  Probe
acaaggcactgctggccttagaggc

SEQ ID NO: 255108 - DNA, 25 bp, Artificial
  Probe
catcaacaaggcactgctggcctta

SEQ ID NO: 255109 - DNA, 25 bp, Artificial
  Probe
ggtgtccatggctgatgtgtgcctt

SEQ ID NO: 255110 - DNA, 25 bp, Artificial
  Probe
ctctggagaagatcctgcaaagcac

SEQ ID NO: 255111 - DNA, 25 bp, Artificial
  Probe
ccccaagtggcaaatgctgaaaggt

SEQ ID NO: 255112 - DNA, 25 bp, Artificial
  Probe
atgtaaatgttatccatgtggcctc

SEQ ID NO: 255113 - DNA, 25 bp, Artificial
  Probe
tagcatccaggcacacatggtgttg

SEQ ID NO: 255114 - DNA, 25 bp, Artificial
  Probe
catggcaactctaaaagaggaaaac

SEQ ID NO: 255115 - DNA, 25 bp, Artificial
  Probe
ctgatgtgtgccttagcgccccaag

SEQ ID NO: 255116 - DNA, 25 bp, Artificial
  Probe
caaagcaccagcagggaagtacctg

SEQ ID NO: 255117 - DNA, 25 bp, Artificial
  Probe
tacctgtgtaggagatgaggtgtcc

SEQ ID NO: 255118 - DNA, 25 bp, Artificial
  Probe
tagaggctttccaagtgtctcaccc

SEQ ID NO: 255119 - DNA, 25 bp, Artificial
  Probe
cggcccgagcctgaggaccttagct

SEQ ID NO: 255120 - DNA, 25 bp, Artificial
  Probe
tcggtctgtggatgcccaagcccct

SEQ ID NO: 255121 - DNA, 25 bp, Artificial
  Probe
catgccctcactggtaccagggagg

SEQ ID NO: 255122 - DNA, 25 bp, Artificial
  Probe
tgtggatgcccaagcccctggagag

SEQ ID NO: 255123 - DNA, 25 bp, Artificial
  Probe
acctgtgtaggagatgaggtgtcca

SEQ ID NO: 255124 - DNA, 25 bp, Artificial
  Probe
atggctgatgtgtgccttagcgccc

SEQ ID NO: 255125 - DNA, 25 bp, Artificial
  Probe
ccatgccctcactggtaccagggag

SEQ ID NO: 255126 - DNA, 25 bp, Artificial
  Probe
acctcttgattgtcggtctgtggat

SEQ ID NO: 255127 - DNA, 25 bp, Artificial
  Probe
tccaggcacacatggtgttggagag

SEQ ID NO: 255128 - DNA, 25 bp, Artificial
  Probe
gcactgctggccttagaggctttcc

SEQ ID NO: 255129 - DNA, 25 bp, Artificial
  Probe
ggcccgagcctgaggaccttagctc

SEQ ID NO: 255130 - DNA, 25 bp, Artificial
  Probe
cgagcctgaggaccttagctcccaa

SEQ ID NO: 255131 - DNA, 25 bp, Artificial
  Probe
gcacacatggtgttggagaggtaac

SEQ ID NO: 255132 - DNA, 25 bp, Artificial
  Probe
aagcccctggagaggcctgatgtaa

SEQ ID NO: 255133 - DNA, 25 bp, Artificial
  Probe
gcaccagcagggaagtacctgtgta

SEQ ID NO: 255134 - DNA, 25 bp, Artificial
  Probe
cctggagaggcctgatgtaaatgtt

SEQ ID NO: 255135 - DNA, 25 bp, Artificial
  Probe
ggccttagaggctttccaagtgtct

SEQ ID NO: 255136 - DNA, 25 bp, Artificial
  Probe
tgctggccttagaggctttccaagt

SEQ ID NO: 255137 - DNA, 25 bp, Artificial
  Probe
tgctgaaaggttcaaggtggaccta

SEQ ID NO: 255138 - DNA, 25 bp, Artificial
  Probe
gaggaccttagctcccaaaccatgc

SEQ ID NO: 255139 - DNA, 25 bp, Artificial
  Probe
gtcacatcaacaaggcactgctggc

SEQ ID NO: 255140 - DNA, 25 bp, Artificial
  Probe
ctgtggatgcccaagcccctggaga

SEQ ID NO: 255141 - DNA, 25 bp, Artificial
  Probe
tgcccaagcccctggagaggcctga

SEQ ID NO: 255142 - DNA, 25 bp, Artificial
  Probe
ccagcagggaagtacctgtgtagga

SEQ ID NO: 255143 - DNA, 25 bp, Artificial
  Probe
tgacctgtagccgagaacgctattt

SEQ ID NO: 255144 - DNA, 25 bp, Artificial
  Probe
tcacttgattactttggtctggttg

SEQ ID NO: 255145 - DNA, 25 bp, Artificial
  Probe
gagaatgacctgtagccgagaacgc

SEQ ID NO: 255146 - DNA, 25 bp, Artificial
  Probe
ggagaatgacctgtagccgagaacg

SEQ ID NO: 255147 - DNA, 25 bp, Artificial
  Probe
tggagaatgacctgtagccgagaac

SEQ ID NO: 255148 - DNA, 25 bp, Artificial
  Probe
cattgtccttattgcagtgatttat

SEQ ID NO: 255149 - DNA, 25 bp, Artificial
  Probe
ggtgcacagactaatgtcatctatt

SEQ ID NO: 255150 - DNA, 25 bp, Artificial
  Probe
tgacttcccgttaaccagtcatttg

SEQ ID NO: 255151 - DNA, 25 bp, Artificial
  Probe
aattgacttcccgttaaccagtcat

SEQ ID NO: 255152 - DNA, 25 bp, Artificial
  Probe
ggtctggttgcagcgcaactgtata

SEQ ID NO: 255153 - DNA, 25 bp, Artificial
  Probe
cacagactaatgtcatctattgagg

SEQ ID NO: 255154 - DNA, 25 bp, Artificial
  Probe
ctttggtctggttgcagcgcaactg

SEQ ID NO: 255155 - DNA, 25 bp, Artificial
  Probe
tggtctggttgcagcgcaactgtat

SEQ ID NO: 255156 - DNA, 25 bp, Artificial
  Probe
tcattgtccttattgcagtgattta

SEQ ID NO: 255157 - DNA, 25 bp, Artificial
  Probe
ttcacttgattactttggtctggtt

SEQ ID NO: 255158 - DNA, 25 bp, Artificial
  Probe
tgcacagactaatgtcatctattga

SEQ ID NO: 255159 - DNA, 25 bp, Artificial
  Probe
cacttgattactttggtctggttgc

SEQ ID NO: 255160 - DNA, 25 bp, Artificial
  Probe
tgattactttggtctggttgcagcg

SEQ ID NO: 255161 - DNA, 25 bp, Artificial
  Probe
ttataattagggcatgtttaataaa

SEQ ID NO: 255162 - DNA, 25 bp, Artificial
  Probe
cttgattactttggtctggttgcag

SEQ ID NO: 255163 - DNA, 25 bp, Artificial
  Probe
actttggtctggttgcagcgcaact

SEQ ID NO: 255164 - DNA, 25 bp, Artificial
  Probe
gattactttggtctggttgcagcgc

SEQ ID NO: 255165 - DNA, 25 bp, Artificial
  Probe
ttcccgttaaccagtcatttgactg

SEQ ID NO: 255166 - DNA, 25 bp, Artificial
  Probe
tatgatattcaattcattcacttga

SEQ ID NO: 255167 - DNA, 25 bp, Artificial
  Probe
gtgcacagactaatgtcatctattg

SEQ ID NO: 255168 - DNA, 25 bp, Artificial
  Probe
attttcattgtccttattgcagtga

SEQ ID NO: 255169 - DNA, 25 bp, Artificial
  Probe
tcccgttaaccagtcatttgactga

SEQ ID NO: 255170 - DNA, 25 bp, Artificial
  Probe
tactttggtctggttgcagcgcaac

SEQ ID NO: 255171 - DNA, 25 bp, Artificial
  Probe
tttggtctggttgcagcgcaactgt

SEQ ID NO: 255172 - DNA, 25 bp, Artificial
  Probe
ttactttggtctggttgcagcgcaa

SEQ ID NO: 255173 - DNA, 25 bp, Artificial
  Probe
cattcacttgattactttggtctgg

SEQ ID NO: 255174 - DNA, 25 bp, Artificial
  Probe
ttattttcattgtccttattgcagt

SEQ ID NO: 255175 - DNA, 25 bp, Artificial
  Probe
gaatgacctgtagccgagaacgcta

SEQ ID NO: 255176 - DNA, 25 bp, Artificial
  Probe
gcacagactaatgtcatctattgag

SEQ ID NO: 255177 - DNA, 25 bp, Artificial
  Probe
ttggtctggttgcagcgcaactgta

SEQ ID NO: 255178 - DNA, 25 bp, Artificial
  Probe
aaagggtgcacagactaatgtcatc

SEQ ID NO: 255179 - DNA, 25 bp, Artificial
  Probe
gacttcccgttaaccagtcatttga

SEQ ID NO: 255180 - DNA, 25 bp, Artificial
  Probe
tcattcacttgattactttggtctg

SEQ ID NO: 255181 - DNA, 25 bp, Artificial
  Probe
gacctgtagccgagaacgctatttt

SEQ ID NO: 255182 - DNA, 25 bp, Artificial
  Probe
acagactaatgtcatctattgaggg

SEQ ID NO: 255183 - DNA, 25 bp, Artificial
  Probe
agaatgacctgtagccgagaacgct

SEQ ID NO: 255184 - DNA, 25 bp, Artificial
  Probe
acttgattactttggtctggttgca

SEQ ID NO: 255185 - DNA, 25 bp, Artificial
  Probe
attactttggtctggttgcagcgca

SEQ ID NO: 255186 - DNA, 25 bp, Artificial
  Probe
attcacttgattactttggtctggt

SEQ ID NO: 255187 - DNA, 25 bp, Artificial
  Probe
ttgattactttggtctggttgcagc

SEQ ID NO: 255188 - DNA, 25 bp, Artificial
  Probe
cagactaatgtcatctattgagggt

SEQ ID NO: 255189 - DNA, 25 bp, Artificial
  Probe
tggatcgacccgtttgaggtttcct

SEQ ID NO: 255190 - DNA, 25 bp, Artificial
  Probe
ctaccaaatcggtgagaagggacca

SEQ ID NO: 255191 - DNA, 25 bp, Artificial
  Probe
agtggtctggacattgacgatgttc

SEQ ID NO: 255192 - DNA, 25 bp, Artificial
  Probe
ctcccatcagcctgggcgtgaatgt

SEQ ID NO: 255193 - DNA, 25 bp, Artificial
  Probe
ttttcatgcccataagcgacccagc

SEQ ID NO: 255194 - DNA, 25 bp, Artificial
  Probe
cgtagcagcaaggtagcacgcactt

SEQ ID NO: 255195 - DNA, 25 bp, Artificial
  Probe
aatgtcaatgtgaacgacctcctga

SEQ ID NO: 255196 - DNA, 25 bp, Artificial
  Probe
tgagcgtgtggatcgacccgtttga

SEQ ID NO: 255197 - DNA, 25 bp, Artificial
  Probe
acttttgctgccaccaagtttggct

SEQ ID NO: 255198 - DNA, 25 bp, Artificial
  Probe
cctcctgaagcagaaagccatctct

SEQ ID NO: 255199 - DNA, 25 bp, Artificial
  Probe
ggacattgacgatgttcgtggcaat

SEQ ID NO: 255200 - DNA, 25 bp, Artificial
  Probe
ttgctgccaccaagtttggctccac

SEQ ID NO: 255201 - DNA, 25 bp, Artificial
  Probe
cctttggccattctgctgccgtcag

SEQ ID NO: 255202 - DNA, 25 bp, Artificial
  Probe
tttcctaccaaatcggtgagaaggg

SEQ ID NO: 255203 - DNA, 25 bp, Artificial
  Probe
accaagtttggctccaccaaaatga

SEQ ID NO: 255204 - DNA, 25 bp, Artificial
  Probe
gatgttcgtggcaatctgccgcagg

SEQ ID NO: 255205 - DNA, 25 bp, Artificial
  Probe
cctgggcgtgaatgtcaatgtgaac

SEQ ID NO: 255206 - DNA, 25 bp, Artificial
  Probe
cttcctcaatgcactctctgtacgg

SEQ ID NO: 255207 - DNA, 25 bp, Artificial
  Probe
ggctccaccaaaatgaagaacagtg

SEQ ID NO: 255208 - DNA, 25 bp, Artificial
  Probe
gcagcaaggtagcacgcacttctcc

SEQ ID NO: 255209 - DNA, 25 bp, Artificial
  Probe
aggtagcacgcacttctcccatcag

SEQ ID NO: 255210 - DNA, 25 bp, Artificial
  Probe
agaacagctttaaccctgaggccca

SEQ ID NO: 255211 - DNA, 25 bp, Artificial
  Probe
ttcgtggcaatctgccgcaggatct

SEQ ID NO: 255212 - DNA, 25 bp, Artificial
  Probe
gcaatctgccgcaggatctgagcgt

SEQ ID NO: 255213 - DNA, 25 bp, Artificial
  Probe
tcagcctgggcgtgaatgtcaatgt

SEQ ID NO: 255214 - DNA, 25 bp, Artificial
  Probe
tccaaagagagtggtctggacattg

SEQ ID NO: 255215 - DNA, 25 bp, Artificial
  Probe
gaacagtggccgtagcagcaaggta

SEQ ID NO: 255216 - DNA, 25 bp, Artificial
  Probe
atcgagcaagcgtccaaagagagtg

SEQ ID NO: 255217 - DNA, 25 bp, Artificial
  Probe
attgacgatgttcgtggcaatctgc

SEQ ID NO: 255218 - DNA, 25 bp, Artificial
  Probe
gttttcatgcccataagcgacccag

SEQ ID NO: 255219 - DNA, 25 bp, Artificial
  Probe
tttgaggtttcctaccaaatcggtg

SEQ ID NO: 255220 - DNA, 25 bp, Artificial
  Probe
atctgccgcaggatctgagcgtgtg

SEQ ID NO: 255221 - DNA, 25 bp, Artificial
  Probe
actgccacttttgctgccaccaagt

SEQ ID NO: 255222 - DNA, 25 bp, Artificial
  Probe
tgccaccaagtttggctccaccaaa

SEQ ID NO: 255223 - DNA, 25 bp, Artificial
  Probe
aaggtagcacgcacttctcccatca

SEQ ID NO: 255224 - DNA, 25 bp, Artificial
  Probe
tgccacttttgctgccaccaagttt

SEQ ID NO: 255225 - DNA, 25 bp, Artificial
  Probe
tccaccaaaatgaagaacagtggcc

SEQ ID NO: 255226 - DNA, 25 bp, Artificial
  Probe
tttggccattctgctgccgtcagcc

SEQ ID NO: 255227 - DNA, 25 bp, Artificial
  Probe
accaaatcggtgagaagggaccagt

SEQ ID NO: 255228 - DNA, 25 bp, Artificial
  Probe
aggatctgagcgtgtggatcgaccc

SEQ ID NO: 255229 - DNA, 25 bp, Artificial
  Probe
cagctttaaccctgaggcccaggtt

SEQ ID NO: 255230 - DNA, 25 bp, Artificial
  Probe
ggtgatcgagcaagcgtccaaagag

SEQ ID NO: 255231 - DNA, 25 bp, Artificial
  Probe
cccaggttttcatgcccataagcga

SEQ ID NO: 255232 - DNA, 25 bp, Artificial
  Probe
accctgaggcccaggttttcatgcc

SEQ ID NO: 255233 - DNA, 25 bp, Artificial
  Probe
atcaagaacagctttaaccctgagg

SEQ ID NO: 255234 - DNA, 25 bp, Artificial
  Probe
tgacgatgttcgtggcaatctgccg

SEQ ID NO: 255235 - DNA, 25 bp, Artificial
  Probe
ttgccttcctgttctaaccaatagg

SEQ ID NO: 255236 - DNA, 25 bp, Artificial
  Probe
ccatgcctcactgagtaccttcttg

SEQ ID NO: 255237 - DNA, 25 bp, Artificial
  Probe
gtcctcagtacttgcctcatgataa

SEQ ID NO: 255238 - DNA, 25 bp, Artificial
  Probe
tggtagattgccttcctgttctaac

SEQ ID NO: 255239 - DNA, 25 bp, Artificial
  Probe
tcaggcactggaaagcaagccctgt

SEQ ID NO: 255240 - DNA, 25 bp, Artificial
  Probe
gtccatagagactctatagtttaaa

SEQ ID NO: 255241 - DNA, 25 bp, Artificial
  Probe
tcagtacttgcctcatgataaatgc

SEQ ID NO: 255242 - DNA, 25 bp, Artificial
  Probe
cctcatcgtatttaagcctctgaag

SEQ ID NO: 255243 - DNA, 25 bp, Artificial
  Probe
cgtatttaagcctctgaagtactac

SEQ ID NO: 255244 - DNA, 25 bp, Artificial
  Probe
ctaaccaataggtaaatgcagtaat

SEQ ID NO: 255245 - DNA, 25 bp, Artificial
  Probe
cctgtctctgtttcccctttgtgtc

SEQ ID NO: 255246 - DNA, 25 bp, Artificial
  Probe
ctctgtttcccctttgtgtcctcag

SEQ ID NO: 255247 - DNA, 25 bp, Artificial
  Probe
atgactaaggacactaagcaatggt

SEQ ID NO: 255248 - DNA, 25 bp, Artificial
  Probe
cttactgagtgatgcctactccatg

SEQ ID NO: 255249 - DNA, 25 bp, Artificial
  Probe
tgtactcacaggatagaagaccttg

SEQ ID NO: 255250 - DNA, 25 bp, Artificial
  Probe
aaacttgcagattaaacaagctgtt

SEQ ID NO: 255251 - DNA, 25 bp, Artificial
  Probe
agctgttgctttttctggttacaat

SEQ ID NO: 255252 - DNA, 25 bp, Artificial
  Probe
tcatcgtatttaagcctctgaagta

SEQ ID NO: 255253 - DNA, 25 bp, Artificial
  Probe
ttgaatatcaaatgcctcgagagga

SEQ ID NO: 255254 - DNA, 25 bp, Artificial
  Probe
catcaccagtttaagtgtaatgagg

SEQ ID NO: 255255 - DNA, 25 bp, Artificial
  Probe
tgcctcatgataaatgctgaagtta

SEQ ID NO: 255256 - DNA, 25 bp, Artificial
  Probe
gcactggaaagcaagccctgtctct

SEQ ID NO: 255257 - DNA, 25 bp, Artificial
  Probe
gttgaatatcaaatgcctcgagagg

SEQ ID NO: 255258 - DNA, 25 bp, Artificial
  Probe
acccactcaggcactggaaagcaag

SEQ ID NO: 255259 - DNA, 25 bp, Artificial
  Probe
cactggaaagcaagccctgtctctg

SEQ ID NO: 255260 - DNA, 25 bp, Artificial
  Probe
aagcctctgaagtactaccttactg

SEQ ID NO: 255261 - DNA, 25 bp, Artificial
  Probe
atccatcaccagtttaagtgtaatg

SEQ ID NO: 255262 - DNA, 25 bp, Artificial
  Probe
tcaaatgcctcgagaggaggatgga

SEQ ID NO: 255263 - DNA, 25 bp, Artificial
  Probe
gtatttaagcctctgaagtactacc

SEQ ID NO: 255264 - DNA, 25 bp, Artificial
  Probe
ctgagtgatgcctactccatgcctc

SEQ ID NO: 255265 - DNA, 25 bp, Artificial
  Probe
gtagattgccttcctgttctaacca

SEQ ID NO: 255266 - DNA, 25 bp, Artificial
  Probe
tcctgttctaaccaataggtaaatg

SEQ ID NO: 255267 - DNA, 25 bp, Artificial
  Probe
gccttcctgttctaaccaataggta

SEQ ID NO: 255268 - DNA, 25 bp, Artificial
  Probe
gatgcctactccatgcctcactgag

SEQ ID NO: 255269 - DNA, 25 bp, Artificial
  Probe
accttcttgaaaaagatgtgcttca

SEQ ID NO: 255270 - DNA, 25 bp, Artificial
  Probe
atatcaaatgcctcgagaggaggat

SEQ ID NO: 255271 - DNA, 25 bp, Artificial
  Probe
acactaagcaatggtatctgtcttg

SEQ ID NO: 255272 - DNA, 25 bp, Artificial
  Probe
cttggagttgtggtagattgccttc

SEQ ID NO: 255273 - DNA, 25 bp, Artificial
  Probe
aagccctgtctctgtttcccctttg

SEQ ID NO: 255274 - DNA, 25 bp, Artificial
  Probe
aaagcaagccctgtctctgtttccc

SEQ ID NO: 255275 - DNA, 25 bp, Artificial
  Probe
tctctgggaatcttaagcatcaccc

SEQ ID NO: 255276 - DNA, 25 bp, Artificial
  Probe
atcctctctgggaatcttaagcatc

SEQ ID NO: 255277 - DNA, 25 bp, Artificial
  Probe
agattaaacaagctgttgctttttc

SEQ ID NO: 255278 - DNA, 25 bp, Artificial
  Probe
gaccttggagttgtggtagattgcc

SEQ ID NO: 255279 - DNA, 25 bp, Artificial
  Probe
ctaagcaatggtatctgtcttgtac

SEQ ID NO: 255280 - DNA, 25 bp, Artificial
  Probe
aaggacactaagcaatggtatctgt

SEQ ID NO: 255281 - DNA, 25 bp, Artificial
  Probe
gcttcacctgttaaacatgggcggg

SEQ ID NO: 255282 - DNA, 25 bp, Artificial
  Probe
ttgcaaggaattggagtgggtaaaa

SEQ ID NO: 255283 - DNA, 25 bp, Artificial
  Probe
gtacaacttccctgggttgctgccc

SEQ ID NO: 255284 - DNA, 25 bp, Artificial
  Probe
aattcaatttttgtagtcataaaca

SEQ ID NO: 255285 - DNA, 25 bp, Artificial
  Probe
tccatacatttgttgattttgagga

SEQ ID NO: 255286 - DNA, 25 bp, Artificial
  Probe
gtgcccaatgactaggctggcttta

SEQ ID NO: 255287 - DNA, 25 bp, Artificial
  Probe
tgcccaatgactaggctggctttat

SEQ ID NO: 255288 - DNA, 25 bp, Artificial
  Probe
tatttttttctgtgcccaatgacta

SEQ ID NO: 255289 - DNA, 25 bp, Artificial
  Probe
tttcccctccatacatttgttgatt

SEQ ID NO: 255290 - DNA, 25 bp, Artificial
  Probe
ctaggctggctttatttctaagtta

SEQ ID NO: 255291 - DNA, 25 bp, Artificial
  Probe
tctaagttaatgccacctgaaagaa

SEQ ID NO: 255292 - DNA, 25 bp, Artificial
  Probe
ttcaatttttgtagtcataaacata

SEQ ID NO: 255293 - DNA, 25 bp, Artificial
  Probe
ggcttcacctgttaaacatgggcgg

SEQ ID NO: 255294 - DNA, 25 bp, Artificial
  Probe
taaacatgggcgggcgtctttgaat

SEQ ID NO: 255295 - DNA, 25 bp, Artificial
  Probe
aggagtacaacttccctgggttgct

SEQ ID NO: 255296 - DNA, 25 bp, Artificial
  Probe
tttttctgtgcccaatgactaggct

SEQ ID NO: 255297 - DNA, 25 bp, Artificial
  Probe
ttttctgtgcccaatgactaggctg

SEQ ID NO: 255298 - DNA, 25 bp, Artificial
  Probe
tgggttgctgccccttccctgagaa

SEQ ID NO: 255299 - DNA, 25 bp, Artificial
  Probe
ctccatacatttgttgattttgagg

SEQ ID NO: 255300 - DNA, 25 bp, Artificial
  Probe
gactaggctggctttatttctaagt

SEQ ID NO: 255301 - DNA, 25 bp, Artificial
  Probe
tggtttgcaaggaattggagtgggt

SEQ ID NO: 255302 - DNA, 25 bp, Artificial
  Probe
agaatatttttttctgtgcccaatg

SEQ ID NO: 255303 - DNA, 25 bp, Artificial
  Probe
ttcacctgttaaacatgggcgggcg

SEQ ID NO: 255304 - DNA, 25 bp, Artificial
  Probe
tgtgcccaatgactaggctggcttt

SEQ ID NO: 255305 - DNA, 25 bp, Artificial
  Probe
tgggcgggcgtctttgaataaagga

SEQ ID NO: 255306 - DNA, 25 bp, Artificial
  Probe
caatgactaggctggctttatttct

SEQ ID NO: 255307 - DNA, 25 bp, Artificial
  Probe
ctattaactgatttcaagttcagat

SEQ ID NO: 255308 - DNA, 25 bp, Artificial
  Probe
aggtgttttcccctccatacatttg

SEQ ID NO: 255309 - DNA, 25 bp, Artificial
  Probe
tttctaagttaatgccacctgaaag

SEQ ID NO: 255310 - DNA, 25 bp, Artificial
  Probe
attaactgatttcaagttcagatga

SEQ ID NO: 255311 - DNA, 25 bp, Artificial
  Probe
ctgtgcccaatgactaggctggctt

SEQ ID NO: 255312 - DNA, 25 bp, Artificial
  Probe
actaggctggctttatttctaagtt

SEQ ID NO: 255313 - DNA, 25 bp, Artificial
  Probe
gctattaactgatttcaagttcaga

SEQ ID NO: 255314 - DNA, 25 bp, Artificial
  Probe
gctggctttatttctaagttaatgc

SEQ ID NO: 255315 - DNA, 25 bp, Artificial
  Probe
gttaaacatgggcgggcgtctttga

SEQ ID NO: 255316 - DNA, 25 bp, Artificial
  Probe
gcccaatgactaggctggctttatt

SEQ ID NO: 255317 - DNA, 25 bp, Artificial
  Probe
ttctgtgcccaatgactaggctggc

SEQ ID NO: 255318 - DNA, 25 bp, Artificial
  Probe
tgccccttccctgagaatatttttt

SEQ ID NO: 255319 - DNA, 25 bp, Artificial
  Probe
cctccatacatttgttgattttgag

SEQ ID NO: 255320 - DNA, 25 bp, Artificial
  Probe
ttccctgagaatatttttttctgtg

SEQ ID NO: 255321 - DNA, 25 bp, Artificial
  Probe
tttctgtgcccaatgactaggctgg

SEQ ID NO: 255322 - DNA, 25 bp, Artificial
  Probe
tggcttcacctgttaaacatgggcg

SEQ ID NO: 255323 - DNA, 25 bp, Artificial
  Probe
tggctttatttctaagttaatgcca

SEQ ID NO: 255324 - DNA, 25 bp, Artificial
  Probe
tctgtgcccaatgactaggctggct

SEQ ID NO: 255325 - DNA, 25 bp, Artificial
  Probe
ggctattaactgatttcaagttcag

SEQ ID NO: 255326 - DNA, 25 bp, Artificial
  Probe
catttgttgattttgaggaacaaac

SEQ ID NO: 255327 - DNA, 25 bp, Artificial
  Probe
ccaaccacgaccaacagcggcctcc

SEQ ID NO: 255328 - DNA, 25 bp, Artificial
  Probe
ttactccatcgtgttgtacacaatt

SEQ ID NO: 255329 - DNA, 25 bp, Artificial
  Probe
aaactggcggagcaaactcaactcg

SEQ ID NO: 255330 - DNA, 25 bp, Artificial
  Probe
ggagcaaactcaactcgcttccgct

SEQ ID NO: 255331 - DNA, 25 bp, Artificial
  Probe
ctccatcgtgttgtacacaattttg

SEQ ID NO: 255332 - DNA, 25 bp, Artificial
  Probe
gttactccatcgtgttgtacacaat

SEQ ID NO: 255333 - DNA, 25 bp, Artificial
  Probe
tttttttgaaggttcactctccgca

SEQ ID NO: 255334 - DNA, 25 bp, Artificial
  Probe
actggcggagcaaactcaactcgct

SEQ ID NO: 255335 - DNA, 25 bp, Artificial
  Probe
tttgaaggttcactctccgcagttt

SEQ ID NO: 255336 - DNA, 25 bp, Artificial
  Probe
taaatgttactccatcgtgttgtac

SEQ ID NO: 255337 - DNA, 25 bp, Artificial
  Probe
tgaaggttcactctccgcagtttta

SEQ ID NO: 255338 - DNA, 25 bp, Artificial
  Probe
gagcaaactcaactcgcttccgctg

SEQ ID NO: 255339 - DNA, 25 bp, Artificial
  Probe
ccatcgtgttgtacacaattttgta

SEQ ID NO: 255340 - DNA, 25 bp, Artificial
  Probe
tccatcgtgttgtacacaattttgt

SEQ ID NO: 255341 - DNA, 25 bp, Artificial
  Probe
tcgctcacctaaactggcggagcaa

SEQ ID NO: 255342 - DNA, 25 bp, Artificial
  Probe
taaactggcggagcaaactcaactc

SEQ ID NO: 255343 - DNA, 25 bp, Artificial
  Probe
atttttcaaaaaggcgaagtgtcat

SEQ ID NO: 255344 - DNA, 25 bp, Artificial
  Probe
ttttcaaaaaggcgaagtgtcattg

SEQ ID NO: 255345 - DNA, 25 bp, Artificial
  Probe
actcaactcgcttccgctgggaata

SEQ ID NO: 255346 - DNA, 25 bp, Artificial
  Probe
aaatgttactccatcgtgttgtaca

SEQ ID NO: 255347 - DNA, 25 bp, Artificial
  Probe
taaaaatcattgactttccttttgg

SEQ ID NO: 255348 - DNA, 25 bp, Artificial
  Probe
tttttgaaggttcactctccgcagt

SEQ ID NO: 255349 - DNA, 25 bp, Artificial
  Probe
ttttttgaaggttcactctccgcag

SEQ ID NO: 255350 - DNA, 25 bp, Artificial
  Probe
tcagtactgtgggggtgggagggaa

SEQ ID NO: 255351 - DNA, 25 bp, Artificial
  Probe
gaaggttcactctccgcagttttat

SEQ ID NO: 255352 - DNA, 25 bp, Artificial
  Probe
ggcggagcaaactcaactcgcttcc

SEQ ID NO: 255353 - DNA, 25 bp, Artificial
  Probe
catcgtgttgtacacaattttgtaa

SEQ ID NO: 255354 - DNA, 25 bp, Artificial
  Probe
gcggagcaaactcaactcgcttccg

SEQ ID NO: 255355 - DNA, 25 bp, Artificial
  Probe
accaacagcggcctccatccccctc

SEQ ID NO: 255356 - DNA, 25 bp, Artificial
  Probe
aactggcggagcaaactcaactcgc

SEQ ID NO: 255357 - DNA, 25 bp, Artificial
  Probe
actcgcttccgctgggaataacttt

SEQ ID NO: 255358 - DNA, 25 bp, Artificial
  Probe
tgttactccatcgtgttgtacacaa

SEQ ID NO: 255359 - DNA, 25 bp, Artificial
  Probe
tcctggactctacaacccgcccccg

SEQ ID NO: 255360 - DNA, 25 bp, Artificial
  Probe
atgttactccatcgtgttgtacaca

SEQ ID NO: 255361 - DNA, 25 bp, Artificial
  Probe
gcttccgctgggaataactttccgt

SEQ ID NO: 255362 - DNA, 25 bp, Artificial
  Probe
aatgttactccatcgtgttgtacac

SEQ ID NO: 255363 - DNA, 25 bp, Artificial
  Probe
agcaaactcaactcgcttccgctgg

SEQ ID NO: 255364 - DNA, 25 bp, Artificial
  Probe
ttcattttttttgaaggttcactct

SEQ ID NO: 255365 - DNA, 25 bp, Artificial
  Probe
gaaattctttgtacatatttgtata

SEQ ID NO: 255366 - DNA, 25 bp, Artificial
  Probe
aactcaactcgcttccgctgggaat

SEQ ID NO: 255367 - DNA, 25 bp, Artificial
  Probe
cgcttccgctgggaataactttccg

SEQ ID NO: 255368 - DNA, 25 bp, Artificial
  Probe
ttgaaggttcactctccgcagtttt

SEQ ID NO: 255369 - DNA, 25 bp, Artificial
  Probe
ctcgctcacctaaactggcggagca

SEQ ID NO: 255370 - DNA, 25 bp, Artificial
  Probe
ctaaactggcggagcaaactcaact

SEQ ID NO: 255371 - DNA, 25 bp, Artificial
  Probe
cggagcaaactcaactcgcttccgc

SEQ ID NO: 255372 - DNA, 25 bp, Artificial
  Probe
ttttgaaggttcactctccgcagtt

SEQ ID NO: 255373 - DNA, 25 bp, Artificial
  Probe
ttgtttcttgcgaccaaagatcagt

SEQ ID NO: 255374 - DNA, 25 bp, Artificial
  Probe
tctctgctttctattcgtcaagatg

SEQ ID NO: 255375 - DNA, 25 bp, Artificial
  Probe
gcgttgccatgtgcacgcccttggc

SEQ ID NO: 255376 - DNA, 25 bp, Artificial
  Probe
tggctatgtctatggctacaattct

SEQ ID NO: 255377 - DNA, 25 bp, Artificial
  Probe
tctcccaagctgagaaagtgtacat

SEQ ID NO: 255378 - DNA, 25 bp, Artificial
  Probe
agatcagtgagcaacgacaaatact

SEQ ID NO: 255379 - DNA, 25 bp, Artificial
  Probe
tcccaagctgagaaagtgtacatca

SEQ ID NO: 255380 - DNA, 25 bp, Artificial
  Probe
gataaagttgtttgcccaagaacca

SEQ ID NO: 255381 - DNA, 25 bp, Artificial
  Probe
catgatgctgcctaatggctatgtc

SEQ ID NO: 255382 - DNA, 25 bp, Artificial
  Probe
atgtgcacgcccttggccagaggct

SEQ ID NO: 255383 - DNA, 25 bp, Artificial
  Probe
gttgccatgtgcacgcccttggcca

SEQ ID NO: 255384 - DNA, 25 bp, Artificial
  Probe
gttgtttgcccaagaaccaaagaag

SEQ ID NO: 255385 - DNA, 25 bp, Artificial
  Probe
cgaccaaagatcagtgagcaacgac

SEQ ID NO: 255386 - DNA, 25 bp, Artificial
  Probe
tgcgaccaaagatcagtgagcaacg

SEQ ID NO: 255387 - DNA, 25 bp, Artificial
  Probe
tgtgcacgcccttggccagaggctg

SEQ ID NO: 255388 - DNA, 25 bp, Artificial
  Probe
ctgcgttgccatgtgcacgcccttg

SEQ ID NO: 255389 - DNA, 25 bp, Artificial
  Probe
cacccatgatgctgcctaatggcta

SEQ ID NO: 255390 - DNA, 25 bp, Artificial
  Probe
gcatttgtttcttgcgaccaaagat

SEQ ID NO: 255391 - DNA, 25 bp, Artificial
  Probe
tcgactgatgcctctgcaggttctt

SEQ ID NO: 255392 - DNA, 25 bp, Artificial
  Probe
gtctatggctacaattctctgcttt

SEQ ID NO: 255393 - DNA, 25 bp, Artificial
  Probe
ctaatggctatgtctatggctacaa

SEQ ID NO: 255394 - DNA, 25 bp, Artificial
  Probe
aaagtgtacatcatgtaggcctgcg

SEQ ID NO: 255395 - DNA, 25 bp, Artificial
  Probe
taagtcgactgatgcctctgcaggt

SEQ ID NO: 255396 - DNA, 25 bp, Artificial
  Probe
ccacccatgatgctgcctaatggct

SEQ ID NO: 255397 - DNA, 25 bp, Artificial
  Probe
atttactaagtctgtgcttgagaac

SEQ ID NO: 255398 - DNA, 25 bp, Artificial
  Probe
gtgtacatcatgtaggcctgcgttg

SEQ ID NO: 255399 - DNA, 25 bp, Artificial
  Probe
tgtaggcctgcgttgccatgtgcac

SEQ ID NO: 255400 - DNA, 25 bp, Artificial
  Probe
ctggtgacgtgatgaacgagaacaa

SEQ ID NO: 255401 - DNA, 25 bp, Artificial
  Probe
ttttgtaacataagtcgactgatgc

SEQ ID NO: 255402 - DNA, 25 bp, Artificial
  Probe
gcccaagaaccaaagaagtcttcca

SEQ ID NO: 255403 - DNA, 25 bp, Artificial
  Probe
ctctgcaggttcttgcacctctcaa

SEQ ID NO: 255404 - DNA, 25 bp, Artificial
  Probe
tgataaagttgtttgcccaagaacc

SEQ ID NO: 255405 - DNA, 25 bp, Artificial
  Probe
tatgtctatggctacaattctctgc

SEQ ID NO: 255406 - DNA, 25 bp, Artificial
  Probe
tgtacatcatgtaggcctgcgttgc

SEQ ID NO: 255407 - DNA, 25 bp, Artificial
  Probe
acttctcccaagctgagaaagtgta

SEQ ID NO: 255408 - DNA, 25 bp, Artificial
  Probe
cgacaaatactcttagaaaaagagg

SEQ ID NO: 255409 - DNA, 25 bp, Artificial
  Probe
gtgagcaacgacaaatactcttaga

SEQ ID NO: 255410 - DNA, 25 bp, Artificial
  Probe
gagcaacgacaaatactcttagaaa

SEQ ID NO: 255411 - DNA, 25 bp, Artificial
  Probe
ttactaagtctgtgcttgagaacag

SEQ ID NO: 255412 - DNA, 25 bp, Artificial
  Probe
tgcctctgcaggttcttgcacctct

SEQ ID NO: 255413 - DNA, 25 bp, Artificial
  Probe
gtaggcctgcgttgccatgtgcacg

SEQ ID NO: 255414 - DNA, 25 bp, Artificial
  Probe
gctttctattcgtcaagatgataaa

SEQ ID NO: 255415 - DNA, 25 bp, Artificial
  Probe
ctgtgcttgagaacagcgtttggtt

SEQ ID NO: 255416 - DNA, 25 bp, Artificial
  Probe
gcctgcctcggcatttgtttcttgc

SEQ ID NO: 255417 - DNA, 25 bp, Artificial
  Probe
gaagtcttccacttctcccaagctg

SEQ ID NO: 255418 - DNA, 25 bp, Artificial
  Probe
atcatgtaggcctgcgttgccatgt

SEQ ID NO: 255419 - DNA, 25 bp, Artificial
  Probe
tctgcccagtcttggcctggggtac

SEQ ID NO: 255420 - DNA, 25 bp, Artificial
  Probe
tctgcaggtttttaacggagacttt

SEQ ID NO: 255421 - DNA, 25 bp, Artificial
  Probe
agaggtttcgacaggcaatggcagt

SEQ ID NO: 255422 - DNA, 25 bp, Artificial
  Probe
ggcaatggcagtagcggtctctctt

SEQ ID NO: 255423 - DNA, 25 bp, Artificial
  Probe
ggacacctaccatcctatgagtgaa

SEQ ID NO: 255424 - DNA, 25 bp, Artificial
  Probe
caacttgtaggagcaagtcacccta

SEQ ID NO: 255425 - DNA, 25 bp, Artificial
  Probe
gtggcaaccacttcggccaacttgt

SEQ ID NO: 255426 - DNA, 25 bp, Artificial
  Probe
ccactcgggcagtggcagttggctc

SEQ ID NO: 255427 - DNA, 25 bp, Artificial
  Probe
gcagctgactataatctgactatct

SEQ ID NO: 255428 - DNA, 25 bp, Artificial
  Probe
gcctctgaagtgaagtcacagctcg

SEQ ID NO: 255429 - DNA, 25 bp, Artificial
  Probe
agagctatgggcagctggacctctt

SEQ ID NO: 255430 - DNA, 25 bp, Artificial
  Probe
cgggacacctaccatcctatgagtg

SEQ ID NO: 255431 - DNA, 25 bp, Artificial
  Probe
atttccggattgtttctgcaggttt

SEQ ID NO: 255432 - DNA, 25 bp, Artificial
  Probe
ttcgacaggcaatggcagtagcggt

SEQ ID NO: 255433 - DNA, 25 bp, Artificial
  Probe
agtagcggtctctcttacaccaacc

SEQ ID NO: 255434 - DNA, 25 bp, Artificial
  Probe
tccggattgtttctgcaggttttta

SEQ ID NO: 255435 - DNA, 25 bp, Artificial
  Probe
ggtggtagcatcgactatgattttc

SEQ ID NO: 255436 - DNA, 25 bp, Artificial
  Probe
ctgggggtctctactatcaagttca

SEQ ID NO: 255437 - DNA, 25 bp, Artificial
  Probe
tcagaggctttgtcaccacgttagc

SEQ ID NO: 255438 - DNA, 25 bp, Artificial
  Probe
agctcccgctactaccaagaactga

SEQ ID NO: 255439 - DNA, 25 bp, Artificial
  Probe
acgtagcccctatgaagaggtttcg

SEQ ID NO: 255440 - DNA, 25 bp, Artificial
  Probe
tgaagtgaagtcacagctcgtacaa

SEQ ID NO: 255441 - DNA, 25 bp, Artificial
  Probe
actataatctgactatctcggaagt

SEQ ID NO: 255442 - DNA, 25 bp, Artificial
  Probe
ttcctctgcccagtcttggcctggg

SEQ ID NO: 255443 - DNA, 25 bp, Artificial
  Probe
aagaggtttcgacaggcaatggcag

SEQ ID NO: 255444 - DNA, 25 bp, Artificial
  Probe
gtttcgacaggcaatggcagtagcg

SEQ ID NO: 255445 - DNA, 25 bp, Artificial
  Probe
gcatcgactatgattttccgggagg

SEQ ID NO: 255446 - DNA, 25 bp, Artificial
  Probe
tttctgcaggtttttaacggagact

SEQ ID NO: 255447 - DNA, 25 bp, Artificial
  Probe
tggcagttggctccagcagtccact

SEQ ID NO: 255448 - DNA, 25 bp, Artificial
  Probe
actttctgggggtctctactatcaa

SEQ ID NO: 255449 - DNA, 25 bp, Artificial
  Probe
gagctatgggcagctggacctcttt

SEQ ID NO: 255450 - DNA, 25 bp, Artificial
  Probe
actaccaaacgtagcccctatgaag

SEQ ID NO: 255451 - DNA, 25 bp, Artificial
  Probe
taacggagactttctgggggtctct

SEQ ID NO: 255452 - DNA, 25 bp, Artificial
  Probe
ctgtggcaaccacttcggccaactt

SEQ ID NO: 255453 - DNA, 25 bp, Artificial
  Probe
acaggcaatggcagtagcggtctct

SEQ ID NO: 255454 - DNA, 25 bp, Artificial
  Probe
ccgggacacctaccatcctatgagt

SEQ ID NO: 255455 - DNA, 25 bp, Artificial
  Probe
gacacctaccatcctatgagtgaat

SEQ ID NO: 255456 - DNA, 25 bp, Artificial
  Probe
aattcttccctggaagaccccagct

SEQ ID NO: 255457 - DNA, 25 bp, Artificial
  Probe
accacttcggccaacttgtaggagc

SEQ ID NO: 255458 - DNA, 25 bp, Artificial
  Probe
gaacatttccggattgtttctgcag

SEQ ID NO: 255459 - DNA, 25 bp, Artificial
  Probe
tggcagtagcggtctctcttacacc

SEQ ID NO: 255460 - DNA, 25 bp, Artificial
  Probe
acccactcgggcagtggcagttggc

SEQ ID NO: 255461 - DNA, 25 bp, Artificial
  Probe
cccctatgaagaggtttcgacaggc

SEQ ID NO: 255462 - DNA, 25 bp, Artificial
  Probe
gtgaagtcacagctcgtacaacata

SEQ ID NO: 255463 - DNA, 25 bp, Artificial
  Probe
ctaccaagaactgaagaggaacatt

SEQ ID NO: 255464 - DNA, 25 bp, Artificial
  Probe
cctctgaagtgaagtcacagctcgt

SEQ ID NO: 255465 - DNA, 25 bp, Artificial
  Probe
atacactggatgtggcccagccttt

SEQ ID NO: 255466 - DNA, 25 bp, Artificial
  Probe
agtcactggagaaggactcatggat

SEQ ID NO: 255467 - DNA, 25 bp, Artificial
  Probe
tgtggcccagcctttctgcttaatt

SEQ ID NO: 255468 - DNA, 25 bp, Artificial
  Probe
gaaggactcatggattcaagctggc

SEQ ID NO: 255469 - DNA, 25 bp, Artificial
  Probe
ttcaagctggcctttgagataacta

SEQ ID NO: 255470 - DNA, 25 bp, Artificial
  Probe
acagcagtaccacatccgacagcaa

SEQ ID NO: 255471 - DNA, 25 bp, Artificial
  Probe
agatcctaaggcaacagcagcaaca

SEQ ID NO: 255472 - DNA, 25 bp, Artificial
  Probe
cccagtaccaacatatttggacgct

SEQ ID NO: 255473 - DNA, 25 bp, Artificial
  Probe
tactgagtcacctggaggaactgct

SEQ ID NO: 255474 - DNA, 25 bp, Artificial
  Probe
tggatgtggcccagcctttctgctt

SEQ ID NO: 255475 - DNA, 25 bp, Artificial
  Probe
gtaccaacatatttggacgctactg

SEQ ID NO: 255476 - DNA, 25 bp, Artificial
  Probe
gacgctactgagtcacctggaggaa

SEQ ID NO: 255477 - DNA, 25 bp, Artificial
  Probe
aacagcagtaccacatccgacagca

SEQ ID NO: 255478 - DNA, 25 bp, Artificial
  Probe
agcaacaacagcagtaccacatccg

SEQ ID NO: 255479 - DNA, 25 bp, Artificial
  Probe
gcaacaacagcagtaccacatccga

SEQ ID NO: 255480 - DNA, 25 bp, Artificial
  Probe
agcagtaccacatccgacagcaaca

SEQ ID NO: 255481 - DNA, 25 bp, Artificial
  Probe
atatttggacgctactgagtcacct

SEQ ID NO: 255482 - DNA, 25 bp, Artificial
  Probe
acaacagcagtaccacatccgacag

SEQ ID NO: 255483 - DNA, 25 bp, Artificial
  Probe
acaacagcaacagcagatcctaagg

SEQ ID NO: 255484 - DNA, 25 bp, Artificial
  Probe
ctggcctttgagataactatgattg

SEQ ID NO: 255485 - DNA, 25 bp, Artificial
  Probe
gaggaactgcttatacactggatgt

SEQ ID NO: 255486 - DNA, 25 bp, Artificial
  Probe
cacagcccagtaccaacatatttgg

SEQ ID NO: 255487 - DNA, 25 bp, Artificial
  Probe
tttggacgctactgagtcacctgga

SEQ ID NO: 255488 - DNA, 25 bp, Artificial
  Probe
gatcctaaggcaacagcagcaacag

SEQ ID NO: 255489 - DNA, 25 bp, Artificial
  Probe
acgctactgagtcacctggaggaac

SEQ ID NO: 255490 - DNA, 25 bp, Artificial
  Probe
tggcccagcctttctgcttaattcc

SEQ ID NO: 255491 - DNA, 25 bp, Artificial
  Probe
cagcagatcctaaggcaacagcagc

SEQ ID NO: 255492 - DNA, 25 bp, Artificial
  Probe
tcatggattcaagctggcctttgag

SEQ ID NO: 255493 - DNA, 25 bp, Artificial
  Probe
ccttcttgggcgagctccagtagtg

SEQ ID NO: 255494 - DNA, 25 bp, Artificial
  Probe
ttatacactggatgtggcccagcct

SEQ ID NO: 255495 - DNA, 25 bp, Artificial
  Probe
aactgcttatacactggatgtggcc

SEQ ID NO: 255496 - DNA, 25 bp, Artificial
  Probe
actcatggattcaagctggcctttg

SEQ ID NO: 255497 - DNA, 25 bp, Artificial
  Probe
catggattcaagctggcctttgaga

SEQ ID NO: 255498 - DNA, 25 bp, Artificial
  Probe
tatacactggatgtggcccagcctt

SEQ ID NO: 255499 - DNA, 25 bp, Artificial
  Probe
tcactggagaaggactcatggattc

SEQ ID NO: 255500 - DNA, 25 bp, Artificial
  Probe
agcccagtaccaacatatttggacg

SEQ ID NO: 255501 - DNA, 25 bp, Artificial
  Probe
ctaccagtatagatcagagtcactg

SEQ ID NO: 255502 - DNA, 25 bp, Artificial
  Probe
gcaacagcagatcctaaggcaacag

SEQ ID NO: 255503 - DNA, 25 bp, Artificial
  Probe
gctggcctttgagataactatgatt

SEQ ID NO: 255504 - DNA, 25 bp, Artificial
  Probe
cacctggaggaactgcttatacact

SEQ ID NO: 255505 - DNA, 25 bp, Artificial
  Probe
atggattcaagctggcctttgagat

SEQ ID NO: 255506 - DNA, 25 bp, Artificial
  Probe
caacatatttggacgctactgagtc

SEQ ID NO: 255507 - DNA, 25 bp, Artificial
  Probe
gggctactaccagtatagatcagag

SEQ ID NO: 255508 - DNA, 25 bp, Artificial
  Probe
gcttaattcccagtccccttcttgg

SEQ ID NO: 255509 - DNA, 25 bp, Artificial
  Probe
cagtaccaacatatttggacgctac

SEQ ID NO: 255510 - DNA, 25 bp, Artificial
  Probe
aaggatgcagcatgagccaacaaca

SEQ ID NO: 255511 - DNA, 25 bp, Artificial
  Probe
tacagctgctccagggaagtgaact

SEQ ID NO: 255512 - DNA, 25 bp, Artificial
  Probe
acaatgtgtacatttctgaaatgac

SEQ ID NO: 255513 - DNA, 25 bp, Artificial
  Probe
catttctgaaatgacctcaagatgg

SEQ ID NO: 255514 - DNA, 25 bp, Artificial
  Probe
tttctgaaatgacctcaagatggcc

SEQ ID NO: 255515 - DNA, 25 bp, Artificial
  Probe
tcaaacatgaaaaactcaagggagt

SEQ ID NO: 255516 - DNA, 25 bp, Artificial
  Probe
agtgtgtacagctgctccagggaag

SEQ ID NO: 255517 - DNA, 25 bp, Artificial
  Probe
aagatggcctccttgtcctactgat

SEQ ID NO: 255518 - DNA, 25 bp, Artificial
  Probe
gtacagctgctccagggaagtgaac

SEQ ID NO: 255519 - DNA, 25 bp, Artificial
  Probe
tgaaatgacctcaagatggcctcct

SEQ ID NO: 255520 - DNA, 25 bp, Artificial
  Probe
tgtacatttctgaaatgacctcaag

SEQ ID NO: 255521 - DNA, 25 bp, Artificial
  Probe
tggcctccttgtcctactgatgatc

SEQ ID NO: 255522 - DNA, 25 bp, Artificial
  Probe
ctcaagggagtctatttttgtatcc

SEQ ID NO: 255523 - DNA, 25 bp, Artificial
  Probe
aaatgacctcaagatggcctccttg

SEQ ID NO: 255524 - DNA, 25 bp, Artificial
  Probe
tctgaaatgacctcaagatggcctc

SEQ ID NO: 255525 - DNA, 25 bp, Artificial
  Probe
atgtgtacatttctgaaatgacctc

SEQ ID NO: 255526 - DNA, 25 bp, Artificial
  Probe
agatggcctccttgtcctactgatg

SEQ ID NO: 255527 - DNA, 25 bp, Artificial
  Probe
gcctccttgtcctactgatgatctt

SEQ ID NO: 255528 - DNA, 25 bp, Artificial
  Probe
gaaatgacctcaagatggcctcctt

SEQ ID NO: 255529 - DNA, 25 bp, Artificial
  Probe
tgctccagggaagtgaactaaatta

SEQ ID NO: 255530 - DNA, 25 bp, Artificial
  Probe
gtacatttctgaaatgacctcaaga

SEQ ID NO: 255531 - DNA, 25 bp, Artificial
  Probe
tgtgtacatttctgaaatgacctca

SEQ ID NO: 255532 - DNA, 25 bp, Artificial
  Probe
tgtgtacagctgctccagggaagtg

SEQ ID NO: 255533 - DNA, 25 bp, Artificial
  Probe
ctgaaatgacctcaagatggcctcc

SEQ ID NO: 255534 - DNA, 25 bp, Artificial
  Probe
cctattgaatgtggattcagttcta

SEQ ID NO: 255535 - DNA, 25 bp, Artificial
  Probe
tactgaatacttatgtaggtaacct

SEQ ID NO: 255536 - DNA, 25 bp, Artificial
  Probe
ggcctccttgtcctactgatgatct

SEQ ID NO: 255537 - DNA, 25 bp, Artificial
  Probe
ttctgaaatgacctcaagatggcct

SEQ ID NO: 255538 - DNA, 25 bp, Artificial
  Probe
ctgctccagggaagtgaactaaatt

SEQ ID NO: 255539 - DNA, 25 bp, Artificial
  Probe
gtaacctcataaagttttcttatgg

SEQ ID NO: 255540 - DNA, 25 bp, Artificial
  Probe
cctccttgtcctactgatgatcttg

SEQ ID NO: 255541 - DNA, 25 bp, Artificial
  Probe
gtgtacagctgctccagggaagtga

SEQ ID NO: 255542 - DNA, 25 bp, Artificial
  Probe
tgtaggtaacctcataaagttttct

SEQ ID NO: 255543 - DNA, 25 bp, Artificial
  Probe
acatttctgaaatgacctcaagatg

SEQ ID NO: 255544 - DNA, 25 bp, Artificial
  Probe
caatgtgtacatttctgaaatgacc

SEQ ID NO: 255545 - DNA, 25 bp, Artificial
  Probe
gtgtgtacagctgctccagggaagt

SEQ ID NO: 255546 - DNA, 25 bp, Artificial
  Probe
ggtaacctcataaagttttcttatg

SEQ ID NO: 255547 - DNA, 25 bp, Artificial
  Probe
atgacctcaagatggcctccttgtc

SEQ ID NO: 255548 - DNA, 25 bp, Artificial
  Probe
caaacatgaaaaactcaagggagtc

SEQ ID NO: 255549 - DNA, 25 bp, Artificial
  Probe
gagtgtgtacagctgctccagggaa

SEQ ID NO: 255550 - DNA, 25 bp, Artificial
  Probe
gctgctccagggaagtgaactaaat

SEQ ID NO: 255551 - DNA, 25 bp, Artificial
  Probe
gatggcctccttgtcctactgatga

SEQ ID NO: 255552 - DNA, 25 bp, Artificial
  Probe
atttctgaaatgacctcaagatggc

SEQ ID NO: 255553 - DNA, 25 bp, Artificial
  Probe
aatgtgtacatttctgaaatgacct

SEQ ID NO: 255554 - DNA, 25 bp, Artificial
  Probe
tgtacagctgctccagggaagtgaa

SEQ ID NO: 255555 - DNA, 25 bp, Artificial
  Probe
aatgacctcaagatggcctccttgt

SEQ ID NO: 255556 - DNA, 25 bp, Artificial
  Probe
ctccttgtcctactgatgatcttgt

SEQ ID NO: 255557 - DNA, 25 bp, Artificial
  Probe
tgtgtacactctgattctgtaatat

SEQ ID NO: 255558 - DNA, 25 bp, Artificial
  Probe
ttccctggagatcgtgaccacttta

SEQ ID NO: 255559 - DNA, 25 bp, Artificial
  Probe
atctctacaagtttgagagtttccc

SEQ ID NO: 255560 - DNA, 25 bp, Artificial
  Probe
ggacttccctggagatcgtgaccac

SEQ ID NO: 255561 - DNA, 25 bp, Artificial
  Probe
gagtttccccattaaatgttatcag

SEQ ID NO: 255562 - DNA, 25 bp, Artificial
  Probe
tacactctgattctgtaatatgtgc

SEQ ID NO: 255563 - DNA, 25 bp, Artificial
  Probe
gtacactctgattctgtaatatgtg

SEQ ID NO: 255564 - DNA, 25 bp, Artificial
  Probe
atctgtgtgtacactctgattctgt

SEQ ID NO: 255565 - DNA, 25 bp, Artificial
  Probe
ctgtaatatgtgcacaactagatgt

SEQ ID NO: 255566 - DNA, 25 bp, Artificial
  Probe
acactctgattctgtaatatgtgca

SEQ ID NO: 255567 - DNA, 25 bp, Artificial
  Probe
gtctgcactgtggacttccctggag

SEQ ID NO: 255568 - DNA, 25 bp, Artificial
  Probe
gtgtacactctgattctgtaatatg

SEQ ID NO: 255569 - DNA, 25 bp, Artificial
  Probe
tcttcagggtctgcactgtggactt

SEQ ID NO: 255570 - DNA, 25 bp, Artificial
  Probe
tctgattctgtaatatgtgcacaac

SEQ ID NO: 255571 - DNA, 25 bp, Artificial
  Probe
cactctgattctgtaatatgtgcac

SEQ ID NO: 255572 - DNA, 25 bp, Artificial
  Probe
ctgcactgtggacttccctggagat

SEQ ID NO: 255573 - DNA, 25 bp, Artificial
  Probe
actctgattctgtaatatgtgcaca

SEQ ID NO: 255574 - DNA, 25 bp, Artificial
  Probe
agtttgagagtttccccattaaatg

SEQ ID NO: 255575 - DNA, 25 bp, Artificial
  Probe
gggtctgcactgtggacttccctgg

SEQ ID NO: 255576 - DNA, 25 bp, Artificial
  Probe
tctgtgtgtacactctgattctgta

SEQ ID NO: 255577 - DNA, 25 bp, Artificial
  Probe
gtatctctacaagtttgagagtttc

SEQ ID NO: 255578 - DNA, 25 bp, Artificial
  Probe
gcactgtggacttccctggagatcg

SEQ ID NO: 255579 - DNA, 25 bp, Artificial
  Probe
tgtggacttccctggagatcgtgac

SEQ ID NO: 255580 - DNA, 25 bp, Artificial
  Probe
gtgtgtacactctgattctgtaata

SEQ ID NO: 255581 - DNA, 25 bp, Artificial
  Probe
acatcttcagggtctgcactgtgga

SEQ ID NO: 255582 - DNA, 25 bp, Artificial
  Probe
atcttcagggtctgcactgtggact

SEQ ID NO: 255583 - DNA, 25 bp, Artificial
  Probe
agggtctgcactgtggacttccctg

SEQ ID NO: 255584 - DNA, 25 bp, Artificial
  Probe
gagagtttccccattaaatgttatc

SEQ ID NO: 255585 - DNA, 25 bp, Artificial
  Probe
attctgtaatatgtgcacaactaga

SEQ ID NO: 255586 - DNA, 25 bp, Artificial
  Probe
tgatattgacatcttcagggtctgc

SEQ ID NO: 255587 - DNA, 25 bp, Artificial
  Probe
gacttccctggagatcgtgaccact

SEQ ID NO: 255588 - DNA, 25 bp, Artificial
  Probe
tgtgtgtacactctgattctgtaat

SEQ ID NO: 255589 - DNA, 25 bp, Artificial
  Probe
cagggtctgcactgtggacttccct

SEQ ID NO: 255590 - DNA, 25 bp, Artificial
  Probe
tctctacaagtttgagagtttcccc

SEQ ID NO: 255591 - DNA, 25 bp, Artificial
  Probe
atattgacatcttcagggtctgcac

SEQ ID NO: 255592 - DNA, 25 bp, Artificial
  Probe
attgacatcttcagggtctgcactg

SEQ ID NO: 255593 - DNA, 25 bp, Artificial
  Probe
cttcagggtctgcactgtggacttc

SEQ ID NO: 255594 - DNA, 25 bp, Artificial
  Probe
ctgtgtgtacactctgattctgtaa

SEQ ID NO: 255595 - DNA, 25 bp, Artificial
  Probe
cttccctggagatcgtgaccacttt

SEQ ID NO: 255596 - DNA, 25 bp, Artificial
  Probe
catcttcagggtctgcactgtggac

SEQ ID NO: 255597 - DNA, 25 bp, Artificial
  Probe
ctctacaagtttgagagtttcccca

SEQ ID NO: 255598 - DNA, 25 bp, Artificial
  Probe
tattgacatcttcagggtctgcact

SEQ ID NO: 255599 - DNA, 25 bp, Artificial
  Probe
tgtgatattgacatcttcagggtct

SEQ ID NO: 255600 - DNA, 25 bp, Artificial
  Probe
tcagggtctgcactgtggacttccc

SEQ ID NO: 255601 - DNA, 25 bp, Artificial
  Probe
gatattgacatcttcagggtctgca

SEQ ID NO: 255602 - DNA, 25 bp, Artificial
  Probe
gtggacttccctggagatcgtgacc

SEQ ID NO: 255603 - DNA, 25 bp, Artificial
  Probe
aatgtctcttaaactttctgggatc

SEQ ID NO: 255604 - DNA, 25 bp, Artificial
  Probe
cccagccgctttcaatggaggagaa

SEQ ID NO: 255605 - DNA, 25 bp, Artificial
  Probe
cacacacatagtagttagaaatgtc

SEQ ID NO: 255606 - DNA, 25 bp, Artificial
  Probe
tggtccatcatattaactgtcagta

SEQ ID NO: 255607 - DNA, 25 bp, Artificial
  Probe
gtcccagccgctttcaatggaggag

SEQ ID NO: 255608 - DNA, 25 bp, Artificial
  Probe
ccagccgctttcaatggaggagaag

SEQ ID NO: 255609 - DNA, 25 bp, Artificial
  Probe
tcagccagggagtcccagccgcttt

SEQ ID NO: 255610 - DNA, 25 bp, Artificial
  Probe
tcccagccgctttcaatggaggaga

SEQ ID NO: 255611 - DNA, 25 bp, Artificial
  Probe
tgctgtttgatacttgtctcaatct

SEQ ID NO: 255612 - DNA, 25 bp, Artificial
  Probe
gaagcagtctcagatcctgacggtg

SEQ ID NO: 255613 - DNA, 25 bp, Artificial
  Probe
agccgctttcaatggaggagaagcc

SEQ ID NO: 255614 - DNA, 25 bp, Artificial
  Probe
cacacacacatagtagttagaaatg

SEQ ID NO: 255615 - DNA, 25 bp, Artificial
  Probe
agatcctgacggtgcagcagcccgc

SEQ ID NO: 255616 - DNA, 25 bp, Artificial
  Probe
gccgctttcaatggaggagaagccc

SEQ ID NO: 255617 - DNA, 25 bp, Artificial
  Probe
atggtccatcatattaactgtcagt

SEQ ID NO: 255618 - DNA, 25 bp, Artificial
  Probe
ccagggagtcccagccgctttcaat

SEQ ID NO: 255619 - DNA, 25 bp, Artificial
  Probe
tgggatccctaatggtccatcatat

SEQ ID NO: 255620 - DNA, 25 bp, Artificial
  Probe
ggtcctcacacaattccttacagag

SEQ ID NO: 255621 - DNA, 25 bp, Artificial
  Probe
ttgtgctgtttgatacttgtctcaa

SEQ ID NO: 255622 - DNA, 25 bp, Artificial
  Probe
agtcccagccgctttcaatggagga

SEQ ID NO: 255623 - DNA, 25 bp, Artificial
  Probe
gtctcagatcctgacggtgcagcag

SEQ ID NO: 255624 - DNA, 25 bp, Artificial
  Probe
cagccgctttcaatggaggagaagc

SEQ ID NO: 255625 - DNA, 25 bp, Artificial
  Probe
gtctcttaaactttctgggatccct

SEQ ID NO: 255626 - DNA, 25 bp, Artificial
  Probe
ttctgggatccctaatggtccatca

SEQ ID NO: 255627 - DNA, 25 bp, Artificial
  Probe
gatcctgacggtgcagcagcccgca

SEQ ID NO: 255628 - DNA, 25 bp, Artificial
  Probe
cagtctcagatcctgacggtgcagc

SEQ ID NO: 255629 - DNA, 25 bp, Artificial
  Probe
aatggtccatcatattaactgtcag

SEQ ID NO: 255630 - DNA, 25 bp, Artificial
  Probe
tctgggatccctaatggtccatcat

SEQ ID NO: 255631 - DNA, 25 bp, Artificial
  Probe
tctcagatcctgacggtgcagcagc

SEQ ID NO: 255632 - DNA, 25 bp, Artificial
  Probe
gtgctgtttgatacttgtctcaatc

SEQ ID NO: 255633 - DNA, 25 bp, Artificial
  Probe
tgtctcttaaactttctgggatccc

SEQ ID NO: 255634 - DNA, 25 bp, Artificial
  Probe
ggatccctaatggtccatcatatta

SEQ ID NO: 255635 - DNA, 25 bp, Artificial
  Probe
agcagtctcagatcctgacggtgca

SEQ ID NO: 255636 - DNA, 25 bp, Artificial
  Probe
atgtctcttaaactttctgggatcc

SEQ ID NO: 255637 - DNA, 25 bp, Artificial
  Probe
tagaaatgtctcttaaactttctgg

SEQ ID NO: 255638 - DNA, 25 bp, Artificial
  Probe
atcctgacggtgcagcagcccgcag

SEQ ID NO: 255639 - DNA, 25 bp, Artificial
  Probe
gctgtttgatacttgtctcaatctt

SEQ ID NO: 255640 - DNA, 25 bp, Artificial
  Probe
agtctcagatcctgacggtgcagca

SEQ ID NO: 255641 - DNA, 25 bp, Artificial
  Probe
gcagtctcagatcctgacggtgcag

SEQ ID NO: 255642 - DNA, 25 bp, Artificial
  Probe
gggatccctaatggtccatcatatt

SEQ ID NO: 255643 - DNA, 25 bp, Artificial
  Probe
ctgggatccctaatggtccatcata

SEQ ID NO: 255644 - DNA, 25 bp, Artificial
  Probe
gaaatgtctcttaaactttctggga

SEQ ID NO: 255645 - DNA, 25 bp, Artificial
  Probe
aagcagtctcagatcctgacggtgc

SEQ ID NO: 255646 - DNA, 25 bp, Artificial
  Probe
acacacacatagtagttagaaatgt

SEQ ID NO: 255647 - DNA, 25 bp, Artificial
  Probe
aaatgtctcttaaactttctgggat

SEQ ID NO: 255648 - DNA, 25 bp, Artificial
  Probe
ggtccatcatattaactgtcagtat

SEQ ID NO: 255649 - DNA, 25 bp, Artificial
  Probe
aaactcaggtctagttccctaattg

SEQ ID NO: 255650 - DNA, 25 bp, Artificial
  Probe
agccgcttcctttcaggccctgtgt

SEQ ID NO: 255651 - DNA, 25 bp, Artificial
  Probe
catgtaaggtcttccggcagctagg

SEQ ID NO: 255652 - DNA, 25 bp, Artificial
  Probe
gatttgagacccttgagaagatctc

SEQ ID NO: 255653 - DNA, 25 bp, Artificial
  Probe
taagagcacgcctttccaggccgtt

SEQ ID NO: 255654 - DNA, 25 bp, Artificial
  Probe
gtaacagtcatgtaaggtcttccgg

SEQ ID NO: 255655 - DNA, 25 bp, Artificial
  Probe
gtagagcgcccgtaataccagggcc

SEQ ID NO: 255656 - DNA, 25 bp, Artificial
  Probe
aataccagggccaggaggagattta

SEQ ID NO: 255657 - DNA, 25 bp, Artificial
  Probe
attgctgggcggaaggtaacagtca

SEQ ID NO: 255658 - DNA, 25 bp, Artificial
  Probe
cctaattggttcttgatgtgtcaat

SEQ ID NO: 255659 - DNA, 25 bp, Artificial
  Probe
tctctgaaaggtgttagtgactccg

SEQ ID NO: 255660 - DNA, 25 bp, Artificial
  Probe
ctcaggtctagttccctaattggtt

SEQ ID NO: 255661 - DNA, 25 bp, Artificial
  Probe
taacagtcatgtaaggtcttccggc

SEQ ID NO: 255662 - DNA, 25 bp, Artificial
  Probe
ttgctgggcggaaggtaacagtcat

SEQ ID NO: 255663 - DNA, 25 bp, Artificial
  Probe
cctttcaggccctgtgtatttgaag

SEQ ID NO: 255664 - DNA, 25 bp, Artificial
  Probe
cttgcggtccatggtctggggccca

SEQ ID NO: 255665 - DNA, 25 bp, Artificial
  Probe
ccctgtgtatttgaagacagcgctg

SEQ ID NO: 255666 - DNA, 25 bp, Artificial
  Probe
aaactggtaagagcacgcctttcca

SEQ ID NO: 255667 - DNA, 25 bp, Artificial
  Probe
cagtcatgtaaggtcttccggcagc

SEQ ID NO: 255668 - DNA, 25 bp, Artificial
  Probe
gctcgatttgagacccttgagaaga

SEQ ID NO: 255669 - DNA, 25 bp, Artificial
  Probe
cttccggcagctagggcctgtggcc

SEQ ID NO: 255670 - DNA, 25 bp, Artificial
  Probe
atttgagacccttgagaagatctct

SEQ ID NO: 255671 - DNA, 25 bp, Artificial
  Probe
ggtgttagtgactccgctttctacc

SEQ ID NO: 255672 - DNA, 25 bp, Artificial
  Probe
gcgtccccgggcatctctgtatcag

SEQ ID NO: 255673 - DNA, 25 bp, Artificial
  Probe
ctggctgatacaagtcactaagttt

SEQ ID NO: 255674 - DNA, 25 bp, Artificial
  Probe
tcttccggcagctagggcctgtggc

SEQ ID NO: 255675 - DNA, 25 bp, Artificial
  Probe
aagacagcgctgtggggtaacaagt

SEQ ID NO: 255676 - DNA, 25 bp, Artificial
  Probe
tacctctatgcttgcggtccatggt

SEQ ID NO: 255677 - DNA, 25 bp, Artificial
  Probe
aaggtgttagtgactccgctttcta

SEQ ID NO: 255678 - DNA, 25 bp, Artificial
  Probe
ggtctagttccctaattggttcttg

SEQ ID NO: 255679 - DNA, 25 bp, Artificial
  Probe
ctatgcttgcggtccatggtctggg

SEQ ID NO: 255680 - DNA, 25 bp, Artificial
  Probe
gcccgtaataccagggccaggagga

SEQ ID NO: 255681 - DNA, 25 bp, Artificial
  Probe
aggtcttccggcagctagggcctgt

SEQ ID NO: 255682 - DNA, 25 bp, Artificial
  Probe
ccagggccaggaggagatttacctc

SEQ ID NO: 255683 - DNA, 25 bp, Artificial
  Probe
cacctccgttcttctctgaaaggtg

SEQ ID NO: 255684 - DNA, 25 bp, Artificial
  Probe
tgaagacagcgctgtggggtaacaa

SEQ ID NO: 255685 - DNA, 25 bp, Artificial
  Probe
ggtaacaagtagagcgcccgtaata

SEQ ID NO: 255686 - DNA, 25 bp, Artificial
  Probe
tggctgatacaagtcactaagttta

SEQ ID NO: 255687 - DNA, 25 bp, Artificial
  Probe
gggaggttctcaaactcaggtctag

SEQ ID NO: 255688 - DNA, 25 bp, Artificial
  Probe
ccgcttcctttcaggccctgtgtat

SEQ ID NO: 255689 - DNA, 25 bp, Artificial
  Probe
cggtccatggtctggggcccatctg

SEQ ID NO: 255690 - DNA, 25 bp, Artificial
  Probe
aggagatttacctctatgcttgcgg

SEQ ID NO: 255691 - DNA, 25 bp, Artificial
  Probe
gcagctagggcctgtggcctccgca

SEQ ID NO: 255692 - DNA, 25 bp, Artificial
  Probe
agctagggcctgtggcctccgcaac

SEQ ID NO: 255693 - DNA, 25 bp, Artificial
  Probe
gttctcaaactcaggtctagttccc

SEQ ID NO: 255694 - DNA, 25 bp, Artificial
  Probe
ggcatctctgtatcagtcttcccac

SEQ ID NO: 255695 - DNA, 25 bp, Artificial
  Probe
ttcctttgtgaaacaaggacaatca

SEQ ID NO: 255696 - DNA, 25 bp, Artificial
  Probe
tttatcttatttagccctggagcat

SEQ ID NO: 255697 - DNA, 25 bp, Artificial
  Probe
gttacttatcatttggtagccactg

SEQ ID NO: 255698 - DNA, 25 bp, Artificial
  Probe
tatctcagagcatgggaagacaggt

SEQ ID NO: 255699 - DNA, 25 bp, Artificial
  Probe
taagcataggcctcctattcctgac

SEQ ID NO: 255700 - DNA, 25 bp, Artificial
  Probe
gaattaacttgcatctcttagaaga

SEQ ID NO: 255701 - DNA, 25 bp, Artificial
  Probe
atcactagtggcagtgccttactgg

SEQ ID NO: 255702 - DNA, 25 bp, Artificial
  Probe
tgtgctttgggctactgacctttga

SEQ ID NO: 255703 - DNA, 25 bp, Artificial
  Probe
gtgctcatgccaagaggaatgggaa

SEQ ID NO: 255704 - DNA, 25 bp, Artificial
  Probe
tggattggtacacgactgctgtaaa

SEQ ID NO: 255705 - DNA, 25 bp, Artificial
  Probe
cttatttagccctggagcatcacta

SEQ ID NO: 255706 - DNA, 25 bp, Artificial
  Probe
ggttttgtgctttgggctactgacc

SEQ ID NO: 255707 - DNA, 25 bp, Artificial
  Probe
ggagcttaaagcatagcccataaat

SEQ ID NO: 255708 - DNA, 25 bp, Artificial
  Probe
ggaaccaaggctcaccagacagagg

SEQ ID NO: 255709 - DNA, 25 bp, Artificial
  Probe
cactagtggcagtgccttactggtt

SEQ ID NO: 255710 - DNA, 25 bp, Artificial
  Probe
ccttttatgagatggattggtacac

SEQ ID NO: 255711 - DNA, 25 bp, Artificial
  Probe
tgcttatcaaatatctcagagcatg

SEQ ID NO: 255712 - DNA, 25 bp, Artificial
  Probe
cagtgccttactggttttaagaaag

SEQ ID NO: 255713 - DNA, 25 bp, Artificial
  Probe
ccagacagagggtgctcatgccaag

SEQ ID NO: 255714 - DNA, 25 bp, Artificial
  Probe
tcatgccaagaggaatgggaaggct

SEQ ID NO: 255715 - DNA, 25 bp, Artificial
  Probe
aattttatcttatttagccctggag

SEQ ID NO: 255716 - DNA, 25 bp, Artificial
  Probe
ttatcatttggtagccactgccttt

SEQ ID NO: 255717 - DNA, 25 bp, Artificial
  Probe
agacaggttttgtgctttgggctac

SEQ ID NO: 255718 - DNA, 25 bp, Artificial
  Probe
aatctatgttgctactatcagactg

SEQ ID NO: 255719 - DNA, 25 bp, Artificial
  Probe
ctcaccagacagagggtgctcatgc

SEQ ID NO: 255720 - DNA, 25 bp, Artificial
  Probe
agagggtgctcatgccaagaggaat

SEQ ID NO: 255721 - DNA, 25 bp, Artificial
  Probe
gagcttaaagcatagcccataaatt

SEQ ID NO: 255722 - DNA, 25 bp, Artificial
  Probe
tccttggatttgcagtttaaaaaca

SEQ ID NO: 255723 - DNA, 25 bp, Artificial
  Probe
aaattatccctgagcttatttagtg

SEQ ID NO: 255724 - DNA, 25 bp, Artificial
  Probe
cacgactgctgtaaaatgagaattc

SEQ ID NO: 255725 - DNA, 25 bp, Artificial
  Probe
aagtttgctgagtttttcactaagc

SEQ ID NO: 255726 - DNA, 25 bp, Artificial
  Probe
ctgcatgattgtttcatgtaataac

SEQ ID NO: 255727 - DNA, 25 bp, Artificial
  Probe
ctactatcagactggtttggttgtg

SEQ ID NO: 255728 - DNA, 25 bp, Artificial
  Probe
cctcaatggagcttaaagcatagcc

SEQ ID NO: 255729 - DNA, 25 bp, Artificial
  Probe
agtggcagtgccttactggttttaa

SEQ ID NO: 255730 - DNA, 25 bp, Artificial
  Probe
gtttttcactaagcataggcctcct

SEQ ID NO: 255731 - DNA, 25 bp, Artificial
  Probe
ggccttactaccattgtccaaagtt

SEQ ID NO: 255732 - DNA, 25 bp, Artificial
  Probe
acaaggacaatcatcattttaagga

SEQ ID NO: 255733 - DNA, 25 bp, Artificial
  Probe
gctactgacctttgaattaacttgc

SEQ ID NO: 255734 - DNA, 25 bp, Artificial
  Probe
cctggagcatcactaagacgaaact

SEQ ID NO: 255735 - DNA, 25 bp, Artificial
  Probe
gcataggcctcctattcctgactca

SEQ ID NO: 255736 - DNA, 25 bp, Artificial
  Probe
ctaaagttacttatcatttggtagc

SEQ ID NO: 255737 - DNA, 25 bp, Artificial
  Probe
tgactcactcccttttatgagatgg

SEQ ID NO: 255738 - DNA, 25 bp, Artificial
  Probe
gtaataacatctttatcactagtgg

SEQ ID NO: 255739 - DNA, 25 bp, Artificial
  Probe
tgaattaacttgcatctcttagaag

SEQ ID NO: 255740 - DNA, 25 bp, Artificial
  Probe
tactaccattgtccaaagtttgctg

SEQ ID NO: 255741 - DNA, 25 bp, Artificial
  Probe
agacgtggatcaactagggaaaatc

SEQ ID NO: 255742 - DNA, 25 bp, Artificial
  Probe
gaaactaaacttacgctagtgtttg

SEQ ID NO: 255743 - DNA, 25 bp, Artificial
  Probe
atatgatgtttcagcttctccgagg

SEQ ID NO: 255744 - DNA, 25 bp, Artificial
  Probe
tccagaacccggtgtgcccacagag

SEQ ID NO: 255745 - DNA, 25 bp, Artificial
  Probe
tggtcaggttgtttgacgtgtgcac

SEQ ID NO: 255746 - DNA, 25 bp, Artificial
  Probe
gtcacggacagacagagaaactaaa

SEQ ID NO: 255747 - DNA, 25 bp, Artificial
  Probe
gaagactggcctagggatgttgctc

SEQ ID NO: 255748 - DNA, 25 bp, Artificial
  Probe
tcgtggaagttcagacgtggatcaa

SEQ ID NO: 255749 - DNA, 25 bp, Artificial
  Probe
gataaagttccagaacccggtgtgc

SEQ ID NO: 255750 - DNA, 25 bp, Artificial
  Probe
gaagttcagacgtggatcaactagg

SEQ ID NO: 255751 - DNA, 25 bp, Artificial
  Probe
acagttttcagatggcccttacctc

SEQ ID NO: 255752 - DNA, 25 bp, Artificial
  Probe
ccacttacttggataaagttccaga

SEQ ID NO: 255753 - DNA, 25 bp, Artificial
  Probe
tttgagcaccccaacgtggtcaggt

SEQ ID NO: 255754 - DNA, 25 bp, Artificial
  Probe
cctcggtggtcgtcacgctgtggta

SEQ ID NO: 255755 - DNA, 25 bp, Artificial
  Probe
agcatgttgatcaagacttgaccac

SEQ ID NO: 255756 - DNA, 25 bp, Artificial
  Probe
ctcccaggagaagaagactggccta

SEQ ID NO: 255757 - DNA, 25 bp, Artificial
  Probe
catcggactcccaggagaagaagac

SEQ ID NO: 255758 - DNA, 25 bp, Artificial
  Probe
agaagactggcctagggatgttgct

SEQ ID NO: 255759 - DNA, 25 bp, Artificial
  Probe
caacgtggtcaggttgtttgacgtg

SEQ ID NO: 255760 - DNA, 25 bp, Artificial
  Probe
gagaaactaaacttacgctagtgtt

SEQ ID NO: 255761 - DNA, 25 bp, Artificial
  Probe
tgtttcagcttctccgaggtctgga

SEQ ID NO: 255762 - DNA, 25 bp, Artificial
  Probe
tggtgaccagcagtggacaaataaa

SEQ ID NO: 255763 - DNA, 25 bp, Artificial
  Probe
tacttggataaagttccagaacccg

SEQ ID NO: 255764 - DNA, 25 bp, Artificial
  Probe
tgcatctttgcagaactgtttcgca

SEQ ID NO: 255765 - DNA, 25 bp, Artificial
  Probe
gtgcacagtgtcacggacagacaga

SEQ ID NO: 255766 - DNA, 25 bp, Artificial
  Probe
cacagaacattctggtgaccagcag

SEQ ID NO: 255767 - DNA, 25 bp, Artificial
  Probe
aaatcttggacgtcatcggactccc

SEQ ID NO: 255768 - DNA, 25 bp, Artificial
  Probe
ggccttgcccgcatctacagttttc

SEQ ID NO: 255769 - DNA, 25 bp, Artificial
  Probe
acctggagacctttgagcaccccaa

SEQ ID NO: 255770 - DNA, 25 bp, Artificial
  Probe
cccacagagaccataaaggatatga

SEQ ID NO: 255771 - DNA, 25 bp, Artificial
  Probe
acgctagtgtttgagcatgttgatc

SEQ ID NO: 255772 - DNA, 25 bp, Artificial
  Probe
tcttggacgtcatcggactcccagg

SEQ ID NO: 255773 - DNA, 25 bp, Artificial
  Probe
ccccgtggacctctggagtgttggc

SEQ ID NO: 255774 - DNA, 25 bp, Artificial
  Probe
cggaagtcctgctccagtccagcta

SEQ ID NO: 255775 - DNA, 25 bp, Artificial
  Probe
cagaacccggtgtgcccacagagac

SEQ ID NO: 255776 - DNA, 25 bp, Artificial
  Probe
agacctttgagcaccccaacgtggt

SEQ ID NO: 255777 - DNA, 25 bp, Artificial
  Probe
ggaagtcctgctccagtccagctac

SEQ ID NO: 255778 - DNA, 25 bp, Artificial
  Probe
ccttacctcggtggtcgtcacgctg

SEQ ID NO: 255779 - DNA, 25 bp, Artificial
  Probe
atggcccttacctcggtggtcgtca

SEQ ID NO: 255780 - DNA, 25 bp, Artificial
  Probe
atcaactagggaaaatcttggacgt

SEQ ID NO: 255781 - DNA, 25 bp, Artificial
  Probe
catctacagttttcagatggccctt

SEQ ID NO: 255782 - DNA, 25 bp, Artificial
  Probe
ggataaagttccagaacccggtgtg

SEQ ID NO: 255783 - DNA, 25 bp, Artificial
  Probe
cccggtgtgcccacagagaccataa

SEQ ID NO: 255784 - DNA, 25 bp, Artificial
  Probe
aagcctctttttcgtggaagttcag

SEQ ID NO: 255785 - DNA, 25 bp, Artificial
  Probe
ttcagatggcccttacctcggtggt

SEQ ID NO: 255786 - DNA, 25 bp, Artificial
  Probe
gttgctcttcccagacaggcttttc

SEQ ID NO: 255787 - DNA, 25 bp, Artificial
  Probe
agacgtgggctccaagaccaccata

SEQ ID NO: 255788 - DNA, 25 bp, Artificial
  Probe
ttctccgggtgttggccatcaccag

SEQ ID NO: 255789 - DNA, 25 bp, Artificial
  Probe
ccgcctatgagttgccctttgggac

SEQ ID NO: 255790 - DNA, 25 bp, Artificial
  Probe
gttggccatcaccagctactctata

SEQ ID NO: 255791 - DNA, 25 bp, Artificial
  Probe
catacgtctcttctatcctgagtcg

SEQ ID NO: 255792 - DNA, 25 bp, Artificial
  Probe
gagaccatcttgagcgataagaagc

SEQ ID NO: 255793 - DNA, 25 bp, Artificial
  Probe
aagtgaagatcttcttctccgggtg

SEQ ID NO: 255794 - DNA, 25 bp, Artificial
  Probe
caacaagtacgatgtggtcatcaga

SEQ ID NO: 255795 - DNA, 25 bp, Artificial
  Probe
tgttatcaacaagtacgatgtggtc

SEQ ID NO: 255796 - DNA, 25 bp, Artificial
  Probe
agatagaaaacaacccagacacgct

SEQ ID NO: 255797 - DNA, 25 bp, Artificial
  Probe
tcaccagctactctatacccgagag

SEQ ID NO: 255798 - DNA, 25 bp, Artificial
  Probe
gttaaagaacagctcactgggaggt

SEQ ID NO: 255799 - DNA, 25 bp, Artificial
  Probe
cagattaaacaatgctcctgtagcc

SEQ ID NO: 255800 - DNA, 25 bp, Artificial
  Probe
gtaaagacaccatccgcctatgagt

SEQ ID NO: 255801 - DNA, 25 bp, Artificial
  Probe
ccatcttgagcgataagaagcgttg

SEQ ID NO: 255802 - DNA, 25 bp, Artificial
  Probe
accatccgcctatgagttgcccttt

SEQ ID NO: 255803 - DNA, 25 bp, Artificial
  Probe
tgagtcggcccacttcgaccctaag

SEQ ID NO: 255804 - DNA, 25 bp, Artificial
  Probe
tgagttgccctttgggactaaagga

SEQ ID NO: 255805 - DNA, 25 bp, Artificial
  Probe
tgggctccaagaccaccatacgtct

SEQ ID NO: 255806 - DNA, 25 bp, Artificial
  Probe
cagctactctatacccgagagcata

SEQ ID NO: 255807 - DNA, 25 bp, Artificial
  Probe
tgccctttgggactaaaggaagtga

SEQ ID NO: 255808 - DNA, 25 bp, Artificial
  Probe
ttcttctccgggtgttggccatcac

SEQ ID NO: 255809 - DNA, 25 bp, Artificial
  Probe
ggttaaagaacagctcactgggagg

SEQ ID NO: 255810 - DNA, 25 bp, Artificial
  Probe
ttctatcctgagtcggcccacttcg

SEQ ID NO: 255811 - DNA, 25 bp, Artificial
  Probe
aagatcttcttctccgggtgttggc

SEQ ID NO: 255812 - DNA, 25 bp, Artificial
  Probe
caagtacgatgtggtcatcagatta

SEQ ID NO: 255813 - DNA, 25 bp, Artificial
  Probe
tcttctatcctgagtcggcccactt

SEQ ID NO: 255814 - DNA, 25 bp, Artificial
  Probe
cccagacacgctcttggtcctggta

SEQ ID NO: 255815 - DNA, 25 bp, Artificial
  Probe
tcctgtagccggttatgagggagac

SEQ ID NO: 255816 - DNA, 25 bp, Artificial
  Probe
tatgagttgccctttgggactaaag

SEQ ID NO: 255817 - DNA, 25 bp, Artificial
  Probe
ctctatacccgagagcatacagagc

SEQ ID NO: 255818 - DNA, 25 bp, Artificial
  Probe
gtctcttctatcctgagtcggccca

SEQ ID NO: 255819 - DNA, 25 bp, Artificial
  Probe
aatgggcaccggttaaagaacagct

SEQ ID NO: 255820 - DNA, 25 bp, Artificial
  Probe
tggacttccactggattgagaccat

SEQ ID NO: 255821 - DNA, 25 bp, Artificial
  Probe
tggtagctttcaaggcgatggactt

SEQ ID NO: 255822 - DNA, 25 bp, Artificial
  Probe
actctatacccgagagcatacagag

SEQ ID NO: 255823 - DNA, 25 bp, Artificial
  Probe
atgggcaccggttaaagaacagctc

SEQ ID NO: 255824 - DNA, 25 bp, Artificial
  Probe
gctttcaaggcgatggacttccact

SEQ ID NO: 255825 - DNA, 25 bp, Artificial
  Probe
acgatgtggtcatcagattaaacaa

SEQ ID NO: 255826 - DNA, 25 bp, Artificial
  Probe
tcagattaaacaatgctcctgtagc

SEQ ID NO: 255827 - DNA, 25 bp, Artificial
  Probe
cgatggacttccactggattgagac

SEQ ID NO: 255828 - DNA, 25 bp, Artificial
  Probe
caatgctcctgtagccggttatgag

SEQ ID NO: 255829 - DNA, 25 bp, Artificial
  Probe
cggcccacttcgaccctaagataga

SEQ ID NO: 255830 - DNA, 25 bp, Artificial
  Probe
ttgccctttgggactaaaggaagtg

SEQ ID NO: 255831 - DNA, 25 bp, Artificial
  Probe
cgggtgttggccatcaccagctact

SEQ ID NO: 255832 - DNA, 25 bp, Artificial
  Probe
cgtgggctccaagaccaccatacgt

SEQ ID NO: 255833 - DNA, 25 bp, Artificial
  Probe
gcacagaatagctctcaataaagta

SEQ ID NO: 255834 - DNA, 25 bp, Artificial
  Probe
tctatgccttccacttctaagacgg

SEQ ID NO: 255835 - DNA, 25 bp, Artificial
  Probe
caaatgaactcaaatgtcttctgtg

SEQ ID NO: 255836 - DNA, 25 bp, Artificial
  Probe
actcaaaacatggataagtggaacc

SEQ ID NO: 255837 - DNA, 25 bp, Artificial
  Probe
aatataggaaactcctcaccaggaa

SEQ ID NO: 255838 - DNA, 25 bp, Artificial
  Probe
tccacatgttttgaaaagagcatat

SEQ ID NO: 255839 - DNA, 25 bp, Artificial
  Probe
ttgcccagattttcatcttgggttg

SEQ ID NO: 255840 - DNA, 25 bp, Artificial
  Probe
ggtatcgttagttggcggcagcttt

SEQ ID NO: 255841 - DNA, 25 bp, Artificial
  Probe
tgctcaaccgccaggtacgagatga

SEQ ID NO: 255842 - DNA, 25 bp, Artificial
  Probe
caccaggaagactgatcttagctcc

SEQ ID NO: 255843 - DNA, 25 bp, Artificial
  Probe
gggccttcatcttcctcattcactg

SEQ ID NO: 255844 - DNA, 25 bp, Artificial
  Probe
tatgtcctttcttgtggggttccag

SEQ ID NO: 255845 - DNA, 25 bp, Artificial
  Probe
tatcaagtagtgagcacagaatagc

SEQ ID NO: 255846 - DNA, 25 bp, Artificial
  Probe
ctcccattcccagacttctgggatt

SEQ ID NO: 255847 - DNA, 25 bp, Artificial
  Probe
ccttggcaagcataatggcatacct

SEQ ID NO: 255848 - DNA, 25 bp, Artificial
  Probe
gaagactgatcttagctcccattcc

SEQ ID NO: 255849 - DNA, 25 bp, Artificial
  Probe
cctatcaagtagtgagcacagaata

SEQ ID NO: 255850 - DNA, 25 bp, Artificial
  Probe
gtcttctgtgccttgcaactatgaa

SEQ ID NO: 255851 - DNA, 25 bp, Artificial
  Probe
aatattatcttccaggttgctgacc

SEQ ID NO: 255852 - DNA, 25 bp, Artificial
  Probe
tccacttctaagacgggttaacatt

SEQ ID NO: 255853 - DNA, 25 bp, Artificial
  Probe
gaaccaaactccaagagcttcatgc

SEQ ID NO: 255854 - DNA, 25 bp, Artificial
  Probe
cttcagggggccttcatcttcctca

SEQ ID NO: 255855 - DNA, 25 bp, Artificial
  Probe
tcaccactatcaacagccttcaggg

SEQ ID NO: 255856 - DNA, 25 bp, Artificial
  Probe
atgcaccaaggagaaacataagtta

SEQ ID NO: 255857 - DNA, 25 bp, Artificial
  Probe
gactgatcttagctcccattcccag

SEQ ID NO: 255858 - DNA, 25 bp, Artificial
  Probe
taaggtatcgttagttggcggcagc

SEQ ID NO: 255859 - DNA, 25 bp, Artificial
  Probe
agctctcaataaagtatttgttgtc

SEQ ID NO: 255860 - DNA, 25 bp, Artificial
  Probe
aagcataatggcatacctgttcacc

SEQ ID NO: 255861 - DNA, 25 bp, Artificial
  Probe
aactccaagagcttcatgcaccaag

SEQ ID NO: 255862 - DNA, 25 bp, Artificial
  Probe
tttcatcttgggttgctcctgggtg

SEQ ID NO: 255863 - DNA, 25 bp, Artificial
  Probe
tgcctgtaggagttgagacagcaat

SEQ ID NO: 255864 - DNA, 25 bp, Artificial
  Probe
aactcaaaacatggataagtggaac

SEQ ID NO: 255865 - DNA, 25 bp, Artificial
  Probe
tgggtgctgggcattttccagattg

SEQ ID NO: 255866 - DNA, 25 bp, Artificial
  Probe
gcataatggcatacctgttcaccac

SEQ ID NO: 255867 - DNA, 25 bp, Artificial
  Probe
catcttgggttgctcctgggtgctg

SEQ ID NO: 255868 - DNA, 25 bp, Artificial
  Probe
ccgccaggtacgagatgaatatagg

SEQ ID NO: 255869 - DNA, 25 bp, Artificial
  Probe
catatgatatcatctttagacagtg

SEQ ID NO: 255870 - DNA, 25 bp, Artificial
  Probe
ataagtggaaccaaactccaagagc

SEQ ID NO: 255871 - DNA, 25 bp, Artificial
  Probe
gagaccataccagctcccaagacaa

SEQ ID NO: 255872 - DNA, 25 bp, Artificial
  Probe
actgtctgctcaaccgccaggtacg

SEQ ID NO: 255873 - DNA, 25 bp, Artificial
  Probe
attcactgtctgctcaaccgccagg

SEQ ID NO: 255874 - DNA, 25 bp, Artificial
  Probe
tcaacagccttcagggggccttcat

SEQ ID NO: 255875 - DNA, 25 bp, Artificial
  Probe
tgtcctttcttgtggggttccagaa

SEQ ID NO: 255876 - DNA, 25 bp, Artificial
  Probe
tgagcacagaatagctctcaataaa

SEQ ID NO: 255877 - DNA, 25 bp, Artificial
  Probe
ggattttactgtcatctatgccttc

SEQ ID NO: 255878 - DNA, 25 bp, Artificial
  Probe
gttgctcctgggtgctgggcatttt

SEQ ID NO: 255879 - DNA, 25 bp, Artificial
  Probe
tgatgcctggttgtcaccggtgaat

SEQ ID NO: 255880 - DNA, 25 bp, Artificial
  Probe
gtttcttagacattcagtaatgtac

SEQ ID NO: 255881 - DNA, 25 bp, Artificial
  Probe
gtttacttccttacttgtctgatgc

SEQ ID NO: 255882 - DNA, 25 bp, Artificial
  Probe
attcctggtgcgtgtcccatgtctt

SEQ ID NO: 255883 - DNA, 25 bp, Artificial
  Probe
gatgcctggttgtcaccggtgaatg

SEQ ID NO: 255884 - DNA, 25 bp, Artificial
  Probe
ttgtctgatgcctggttgtcaccgg

SEQ ID NO: 255885 - DNA, 25 bp, Artificial
  Probe
gtaatgtactcagacttttgaaact

SEQ ID NO: 255886 - DNA, 25 bp, Artificial
  Probe
gtctgatgcctggttgtcaccggtg

SEQ ID NO: 255887 - DNA, 25 bp, Artificial
  Probe
tgcctggttgtcaccggtgaatgaa

SEQ ID NO: 255888 - DNA, 25 bp, Artificial
  Probe
agacttttgaaacttcatatgacgg

SEQ ID NO: 255889 - DNA, 25 bp, Artificial
  Probe
ccttacttgtctgatgcctggttgt

SEQ ID NO: 255890 - DNA, 25 bp, Artificial
  Probe
ttttgccatgtgtgccttggaagag

SEQ ID NO: 255891 - DNA, 25 bp, Artificial
  Probe
tctgatgcctggttgtcaccggtga

SEQ ID NO: 255892 - DNA, 25 bp, Artificial
  Probe
acttttgaaacttcatatgacggat

SEQ ID NO: 255893 - DNA, 25 bp, Artificial
  Probe
ggtttatagccatgcctatattcaa

SEQ ID NO: 255894 - DNA, 25 bp, Artificial
  Probe
ttcagtaatgtactcagacttttga

SEQ ID NO: 255895 - DNA, 25 bp, Artificial
  Probe
tccaagtgcctgttttaatgaattc

SEQ ID NO: 255896 - DNA, 25 bp, Artificial
  Probe
tacttccttacttgtctgatgcctg

SEQ ID NO: 255897 - DNA, 25 bp, Artificial
  Probe
ctccaagtgcctgttttaatgaatt

SEQ ID NO: 255898 - DNA, 25 bp, Artificial
  Probe
tccttacttgtctgatgcctggttg

SEQ ID NO: 255899 - DNA, 25 bp, Artificial
  Probe
tttttgccatgtgtgccttggaaga

SEQ ID NO: 255900 - DNA, 25 bp, Artificial
  Probe
ttacttgtctgatgcctggttgtca

SEQ ID NO: 255901 - DNA, 25 bp, Artificial
  Probe
caagtgcctgttttaatgaattctg

SEQ ID NO: 255902 - DNA, 25 bp, Artificial
  Probe
ccaagtgcctgttttaatgaattct

SEQ ID NO: 255903 - DNA, 25 bp, Artificial
  Probe
tcctggtgcgtgtcccatgtctttc

SEQ ID NO: 255904 - DNA, 25 bp, Artificial
  Probe
gacttttgaaacttcatatgacgga

SEQ ID NO: 255905 - DNA, 25 bp, Artificial
  Probe
atgcctggttgtcaccggtgaatga

SEQ ID NO: 255906 - DNA, 25 bp, Artificial
  Probe
attcagtaatgtactcagacttttg

SEQ ID NO: 255907 - DNA, 25 bp, Artificial
  Probe
cctccaagtgcctgttttaatgaat

SEQ ID NO: 255908 - DNA, 25 bp, Artificial
  Probe
tggtttatagccatgcctatattca

SEQ ID NO: 255909 - DNA, 25 bp, Artificial
  Probe
acttccttacttgtctgatgcctgg

SEQ ID NO: 255910 - DNA, 25 bp, Artificial
  Probe
tcagtaatgtactcagacttttgaa

SEQ ID NO: 255911 - DNA, 25 bp, Artificial
  Probe
ttcctggtgcgtgtcccatgtcttt

SEQ ID NO: 255912 - DNA, 25 bp, Artificial
  Probe
ttgtcaccggtgaatgaaagccttt

SEQ ID NO: 255913 - DNA, 25 bp, Artificial
  Probe
cagtaatgtactcagacttttgaaa

SEQ ID NO: 255914 - DNA, 25 bp, Artificial
  Probe
catttttgccatgtgtgccttggaa

SEQ ID NO: 255915 - DNA, 25 bp, Artificial
  Probe
tgaatgaaagccttttctggattac

SEQ ID NO: 255916 - DNA, 25 bp, Artificial
  Probe
ggttgtcaccggtgaatgaaagcct

SEQ ID NO: 255917 - DNA, 25 bp, Artificial
  Probe
agtttacttccttacttgtctgatg

SEQ ID NO: 255918 - DNA, 25 bp, Artificial
  Probe
tgtctgatgcctggttgtcaccggt

SEQ ID NO: 255919 - DNA, 25 bp, Artificial
  Probe
ttcatttttgccatgtgtgccttgg

SEQ ID NO: 255920 - DNA, 25 bp, Artificial
  Probe
ttccttacttgtctgatgcctggtt

SEQ ID NO: 255921 - DNA, 25 bp, Artificial
  Probe
cagacttttgaaacttcatatgacg

SEQ ID NO: 255922 - DNA, 25 bp, Artificial
  Probe
ctgatgcctggttgtcaccggtgaa

SEQ ID NO: 255923 - DNA, 25 bp, Artificial
  Probe
gttgtcaccggtgaatgaaagcctt

SEQ ID NO: 255924 - DNA, 25 bp, Artificial
  Probe
tgtcaccggtgaatgaaagcctttt

SEQ ID NO: 255925 - DNA, 25 bp, Artificial
  Probe
aaggaggctctcactggccctaatg

SEQ ID NO: 255926 - DNA, 25 bp, Artificial
  Probe
ctctgcatcatctaccctacaggtg

SEQ ID NO: 255927 - DNA, 25 bp, Artificial
  Probe
tctgcatcatctaccctacaggtgg

SEQ ID NO: 255928 - DNA, 25 bp, Artificial
  Probe
ctgggcctgaaggaggctctcactg

SEQ ID NO: 255929 - DNA, 25 bp, Artificial
  Probe
ggaggctctcactggccctaatgaa

SEQ ID NO: 255930 - DNA, 25 bp, Artificial
  Probe
tgacagatgggaccatccaagactt

SEQ ID NO: 255931 - DNA, 25 bp, Artificial
  Probe
tggaacggccagtggaggttcttct

SEQ ID NO: 255932 - DNA, 25 bp, Artificial
  Probe
acaggaggtgactgaactggtctca

SEQ ID NO: 255933 - DNA, 25 bp, Artificial
  Probe
ttctctgtgtcctggggccttttga

SEQ ID NO: 255934 - DNA, 25 bp, Artificial
  Probe
ctccccaaaataaggcagagttggt

SEQ ID NO: 255935 - DNA, 25 bp, Artificial
  Probe
cctgaaggaggctctcactggccct

SEQ ID NO: 255936 - DNA, 25 bp, Artificial
  Probe
ctaccctacaggtggctgaccagat

SEQ ID NO: 255937 - DNA, 25 bp, Artificial
  Probe
catcatctaccctacaggtggctga

SEQ ID NO: 255938 - DNA, 25 bp, Artificial
  Probe
gtccccagctggatctctgcatcat

SEQ ID NO: 255939 - DNA, 25 bp, Artificial
  Probe
ctgaactgggcctgaaggaggctct

SEQ ID NO: 255940 - DNA, 25 bp, Artificial
  Probe
catgcactagccagacttctctgtg

SEQ ID NO: 255941 - DNA, 25 bp, Artificial
  Probe
actgaactggtctcaggcctctcga

SEQ ID NO: 255942 - DNA, 25 bp, Artificial
  Probe
gtgacagtctatgctgtcacacacg

SEQ ID NO: 255943 - DNA, 25 bp, Artificial
  Probe
gcccggaggacagtccccagctgga

SEQ ID NO: 255944 - DNA, 25 bp, Artificial
  Probe
acggccagtggaggttcttctagga

SEQ ID NO: 255945 - DNA, 25 bp, Artificial
  Probe
gcaacaggtgacagatgggaccatc

SEQ ID NO: 255946 - DNA, 25 bp, Artificial
  Probe
aggacagtccccagctggatctctg

SEQ ID NO: 255947 - DNA, 25 bp, Artificial
  Probe
caacacttaatgaaagactgaactg

SEQ ID NO: 255948 - DNA, 25 bp, Artificial
  Probe
gatcaaggactctgagaaggggttc

SEQ ID NO: 255949 - DNA, 25 bp, Artificial
  Probe
tggaagctgcaggatcaaggactct

SEQ ID NO: 255950 - DNA, 25 bp, Artificial
  Probe
aagctgcaggatcaaggactctgag

SEQ ID NO: 255951 - DNA, 25 bp, Artificial
  Probe
tgaactggtctcaggcctctcgagg

SEQ ID NO: 255952 - DNA, 25 bp, Artificial
  Probe
agtccccagctggatctctgcatca

SEQ ID NO: 255953 - DNA, 25 bp, Artificial
  Probe
ttttgaggagccactgcgtggaacg

SEQ ID NO: 255954 - DNA, 25 bp, Artificial
  Probe
gctggatctctgcatcatctaccct

SEQ ID NO: 255955 - DNA, 25 bp, Artificial
  Probe
cagtggaattggactccccaaaata

SEQ ID NO: 255956 - DNA, 25 bp, Artificial
  Probe
gtggaattggactccccaaaataag

SEQ ID NO: 255957 - DNA, 25 bp, Artificial
  Probe
ctgcaggatcaaggactctgagaag

SEQ ID NO: 255958 - DNA, 25 bp, Artificial
  Probe
cccagctggatctctgcatcatcta

SEQ ID NO: 255959 - DNA, 25 bp, Artificial
  Probe
tcggcaacacttaatgaaagactga

SEQ ID NO: 255960 - DNA, 25 bp, Artificial
  Probe
ggtgactgaactggtctcaggcctc

SEQ ID NO: 255961 - DNA, 25 bp, Artificial
  Probe
gaaagactgaactgggcctgaagga

SEQ ID NO: 255962 - DNA, 25 bp, Artificial
  Probe
tgtcctggggccttttgaggagcca

SEQ ID NO: 255963 - DNA, 25 bp, Artificial
  Probe
catccaagactttgagtagaggttg

SEQ ID NO: 255964 - DNA, 25 bp, Artificial
  Probe
attggactccccaaaataaggcaga

SEQ ID NO: 255965 - DNA, 25 bp, Artificial
  Probe
tgcaggatcaaggactctgagaagg

SEQ ID NO: 255966 - DNA, 25 bp, Artificial
  Probe
cactagccagacttctctgtgtcct

SEQ ID NO: 255967 - DNA, 25 bp, Artificial
  Probe
gggacatgcactagccagacttctc

SEQ ID NO: 255968 - DNA, 25 bp, Artificial
  Probe
gcgggtgacagtctatgctgtcaca

SEQ ID NO: 255969 - DNA, 25 bp, Artificial
  Probe
ccaaattcagggacatgcactagcc

SEQ ID NO: 255970 - DNA, 25 bp, Artificial
  Probe
aagcaacaggtgacagatgggacca

SEQ ID NO: 255971 - DNA, 25 bp, Artificial
  Probe
gagttcaaagtcagcctggtatagt

SEQ ID NO: 255972 - DNA, 25 bp, Artificial
  Probe
attgtctaatgttgatagcgtgccc

SEQ ID NO: 255973 - DNA, 25 bp, Artificial
  Probe
atgttgatagcgtgccctttgtatg

SEQ ID NO: 255974 - DNA, 25 bp, Artificial
  Probe
caaatgatgactgcaatcaactgtg

SEQ ID NO: 255975 - DNA, 25 bp, Artificial
  Probe
ttggtgcacgcctttaatcccggca

SEQ ID NO: 255976 - DNA, 25 bp, Artificial
  Probe
cagaaactctgtcttggaaaaccaa

SEQ ID NO: 255977 - DNA, 25 bp, Artificial
  Probe
tgtctaatgttgatagcgtgccctt

SEQ ID NO: 255978 - DNA, 25 bp, Artificial
  Probe
tccaggacagccagggctacacaga

SEQ ID NO: 255979 - DNA, 25 bp, Artificial
  Probe
agacttttcattgaaattgctgtac

SEQ ID NO: 255980 - DNA, 25 bp, Artificial
  Probe
ctgttctctaagatgcatttttatg

SEQ ID NO: 255981 - DNA, 25 bp, Artificial
  Probe
gttgcccaatcttaagtacaaatag

SEQ ID NO: 255982 - DNA, 25 bp, Artificial
  Probe
tgactgcaatcaactgtgagaactg

SEQ ID NO: 255983 - DNA, 25 bp, Artificial
  Probe
cttgagacttttcattgaaattgct

SEQ ID NO: 255984 - DNA, 25 bp, Artificial
  Probe
cagcctggtatagtaagtgaattcc

SEQ ID NO: 255985 - DNA, 25 bp, Artificial
  Probe
tttaatcccggcactcgggaggcag

SEQ ID NO: 255986 - DNA, 25 bp, Artificial
  Probe
gaggcaaggcccttgagacttttca

SEQ ID NO: 255987 - DNA, 25 bp, Artificial
  Probe
aacaccactctgatgggaaaaggga

SEQ ID NO: 255988 - DNA, 25 bp, Artificial
  Probe
aagtgaattccaggacagccagggc

SEQ ID NO: 255989 - DNA, 25 bp, Artificial
  Probe
gatagcgtgccctttgtatgtagtt

SEQ ID NO: 255990 - DNA, 25 bp, Artificial
  Probe
tcagcctggtatagtaagtgaattc

SEQ ID NO: 255991 - DNA, 25 bp, Artificial
  Probe
cgtgccctttgtatgtagtttgagt

SEQ ID NO: 255992 - DNA, 25 bp, Artificial
  Probe
gcaagcaatcggaactgttctctaa

SEQ ID NO: 255993 - DNA, 25 bp, Artificial
  Probe
agagacagtctcagatctctctgag

SEQ ID NO: 255994 - DNA, 25 bp, Artificial
  Probe
gaagaaaacaccactctgatgggaa

SEQ ID NO: 255995 - DNA, 25 bp, Artificial
  Probe
agcgtgccctttgtatgtagtttga

SEQ ID NO: 255996 - DNA, 25 bp, Artificial
  Probe
atagcgtgccctttgtatgtagttt

SEQ ID NO: 255997 - DNA, 25 bp, Artificial
  Probe
tgaattccaggacagccagggctac

SEQ ID NO: 255998 - DNA, 25 bp, Artificial
  Probe
gacagccagggctacacagaaactc

SEQ ID NO: 255999 - DNA, 25 bp, Artificial
  Probe
ttggacctgagttgcccaatcttaa

SEQ ID NO: 256000 - DNA, 25 bp, Artificial
  Probe
taagtgaattccaggacagccaggg

SEQ ID NO: 256001 - DNA, 25 bp, Artificial
  Probe
gtgtgttggtgcacgcctttaatcc

SEQ ID NO: 256002 - DNA, 25 bp, Artificial
  Probe
ggtgcacgcctttaatcccggcact

SEQ ID NO: 256003 - DNA, 25 bp, Artificial
  Probe
tcaaagtcagcctggtatagtaagt

SEQ ID NO: 256004 - DNA, 25 bp, Artificial
  Probe
caaagtcagcctggtatagtaagtg

SEQ ID NO: 256005 - DNA, 25 bp, Artificial
  Probe
gaattccaggacagccagggctaca

SEQ ID NO: 256006 - DNA, 25 bp, Artificial
  Probe
gacttttcattgaaattgctgtact

SEQ ID NO: 256007 - DNA, 25 bp, Artificial
  Probe
taatcccggcactcgggaggcagag

SEQ ID NO: 256008 - DNA, 25 bp, Artificial
  Probe
gtgctgatagcgtgccctttgtatg

SEQ ID NO: 256009 - DNA, 25 bp, Artificial
  Probe
gaactgttctctaagatgcattttt

SEQ ID NO: 256010 - DNA, 25 bp, Artificial
  Probe
acaccactctgatgggaaaagggag

SEQ ID NO: 256011 - DNA, 25 bp, Artificial
  Probe
gcgtgccctttgtatgtagtttgag

SEQ ID NO: 256012 - DNA, 25 bp, Artificial
  Probe
ctgggtgtgttggtgcacgccttta

SEQ ID NO: 256013 - DNA, 25 bp, Artificial
  Probe
actcgggaggcagagacagtctcag

SEQ ID NO: 256014 - DNA, 25 bp, Artificial
  Probe
cactcgggaggcagagacagtctca

SEQ ID NO: 256015 - DNA, 25 bp, Artificial
  Probe
cctgagttgcccaatcttaagtaca

SEQ ID NO: 256016 - DNA, 25 bp, Artificial
  Probe
cactctgatgggaaaagggaggcaa

SEQ ID NO: 256017 - DNA, 25 bp, Artificial
  Probe
gccttaccagtaaaatctgttaaag

SEQ ID NO: 256018 - DNA, 25 bp, Artificial
  Probe
ataccagtgaacagaaacaagcttg

SEQ ID NO: 256019 - DNA, 25 bp, Artificial
  Probe
ctaaaatcgatctgggtcatttcat

SEQ ID NO: 256020 - DNA, 25 bp, Artificial
  Probe
ggaatttcctaaaatcgatctgggt

SEQ ID NO: 256021 - DNA, 25 bp, Artificial
  Probe
ctagctggacgttctagtgataaca

SEQ ID NO: 256022 - DNA, 25 bp, Artificial
  Probe
atctgtgttatggtttatgaccgca

SEQ ID NO: 256023 - DNA, 25 bp, Artificial
  Probe
tcgatctgggtcatttcatctctat

SEQ ID NO: 256024 - DNA, 25 bp, Artificial
  Probe
tgtttcctgaccatgttcccaagcc

SEQ ID NO: 256025 - DNA, 25 bp, Artificial
  Probe
cctaaaatcgatctgggtcatttca

SEQ ID NO: 256026 - DNA, 25 bp, Artificial
  Probe
gatgtttcctgaccatgttcccaag

SEQ ID NO: 256027 - DNA, 25 bp, Artificial
  Probe
gccgcattttattgcgatggagaat

SEQ ID NO: 256028 - DNA, 25 bp, Artificial
  Probe
cctgtactttgatgacagctccaat

SEQ ID NO: 256029 - DNA, 25 bp, Artificial
  Probe
aatcgatctgggtcatttcatctct

SEQ ID NO: 256030 - DNA, 25 bp, Artificial
  Probe
ctttcggatgccttaccagtaaaat

SEQ ID NO: 256031 - DNA, 25 bp, Artificial
  Probe
tctcggtcctgtactttgatgacag

SEQ ID NO: 256032 - DNA, 25 bp, Artificial
  Probe
agctggacgttctagtgataacaat

SEQ ID NO: 256033 - DNA, 25 bp, Artificial
  Probe
ctttgatgacagctccaatgtaatt

SEQ ID NO: 256034 - DNA, 25 bp, Artificial
  Probe
ttctctttcggatgccttaccagta

SEQ ID NO: 256035 - DNA, 25 bp, Artificial
  Probe
attctctttcggatgccttaccagt

SEQ ID NO: 256036 - DNA, 25 bp, Artificial
  Probe
ctcggtcctgtactttgatgacagc

SEQ ID NO: 256037 - DNA, 25 bp, Artificial
  Probe
catctctatgtatgataatcatggt

SEQ ID NO: 256038 - DNA, 25 bp, Artificial
  Probe
agcaccagaaggatatgccgcattt

SEQ ID NO: 256039 - DNA, 25 bp, Artificial
  Probe
gatatattctctttcggatgcctta

SEQ ID NO: 256040 - DNA, 25 bp, Artificial
  Probe
aaatgatatattctctttcggatgc

SEQ ID NO: 256041 - DNA, 25 bp, Artificial
  Probe
tgggtcatttcatctctatgtatga

SEQ ID NO: 256042 - DNA, 25 bp, Artificial
  Probe
ggttcatgtggctgccactagctgg

SEQ ID NO: 256043 - DNA, 25 bp, Artificial
  Probe
atagtccatactctggtacacctga

SEQ ID NO: 256044 - DNA, 25 bp, Artificial
  Probe
atagcaccagaaggatatgccgcat

SEQ ID NO: 256045 - DNA, 25 bp, Artificial
  Probe
tcatctctatgtatgataatcatgg

SEQ ID NO: 256046 - DNA, 25 bp, Artificial
  Probe
ggtcctgtactttgatgacagctcc

SEQ ID NO: 256047 - DNA, 25 bp, Artificial
  Probe
ggtcatttcatctctatgtatgata

SEQ ID NO: 256048 - DNA, 25 bp, Artificial
  Probe
ctggacgttctagtgataacaatga

SEQ ID NO: 256049 - DNA, 25 bp, Artificial
  Probe
atgccgcattttattgcgatggaga

SEQ ID NO: 256050 - DNA, 25 bp, Artificial
  Probe
ggagaatgttcttttccacttaacg

SEQ ID NO: 256051 - DNA, 25 bp, Artificial
  Probe
gatgccttaccagtaaaatctgtta

SEQ ID NO: 256052 - DNA, 25 bp, Artificial
  Probe
aggatatgccgcattttattgcgat

SEQ ID NO: 256053 - DNA, 25 bp, Artificial
  Probe
catagcaccagaaggatatgccgca

SEQ ID NO: 256054 - DNA, 25 bp, Artificial
  Probe
ctgccactagctggacgttctagtg

SEQ ID NO: 256055 - DNA, 25 bp, Artificial
  Probe
gatctgtgttatggtttatgaccgc

SEQ ID NO: 256056 - DNA, 25 bp, Artificial
  Probe
cagatctgtgttatggtttatgacc

SEQ ID NO: 256057 - DNA, 25 bp, Artificial
  Probe
catgtggctgccactagctggacgt

SEQ ID NO: 256058 - DNA, 25 bp, Artificial
  Probe
gagaatgttcttttccacttaacgc

SEQ ID NO: 256059 - DNA, 25 bp, Artificial
  Probe
taataccagtgaacagaaacaagct

SEQ ID NO: 256060 - DNA, 25 bp, Artificial
  Probe
tgatgacagctccaatgtaattttg

SEQ ID NO: 256061 - DNA, 25 bp, Artificial
  Probe
tggtacacctgatgtttcctgacca

SEQ ID NO: 256062 - DNA, 25 bp, Artificial
  Probe
tgaacagaaacaagcttgcaagaag

SEQ ID NO: 256063 - DNA, 25 bp, Artificial
  Probe
tttcagttcagaaccctaggaacca

SEQ ID NO: 256064 - DNA, 25 bp, Artificial
  Probe
accctaggaaccagaatgcgcaatt

SEQ ID NO: 256065 - DNA, 25 bp, Artificial
  Probe
gcgcttgggcgctcagtggaagctg

SEQ ID NO: 256066 - DNA, 25 bp, Artificial
  Probe
gcacggacaatcagggacaaccccg

SEQ ID NO: 256067 - DNA, 25 bp, Artificial
  Probe
agttcagaaccctaggaaccagaat

SEQ ID NO: 256068 - DNA, 25 bp, Artificial
  Probe
tggcacggacaatcagggacaaccc

SEQ ID NO: 256069 - DNA, 25 bp, Artificial
  Probe
ggcacggacaatcagggacaacccc

SEQ ID NO: 256070 - DNA, 25 bp, Artificial
  Probe
catgactaccccgactacaagtacc

SEQ ID NO: 256071 - DNA, 25 bp, Artificial
  Probe
ccagaatgcgcaattttgtataatt

SEQ ID NO: 256072 - DNA, 25 bp, Artificial
  Probe
actggcacggacaatcagggacaac

SEQ ID NO: 256073 - DNA, 25 bp, Artificial
  Probe
aaccctaggaaccagaatgcgcaat

SEQ ID NO: 256074 - DNA, 25 bp, Artificial
  Probe
tggtgcctccatgccagtaacccac

SEQ ID NO: 256075 - DNA, 25 bp, Artificial
  Probe
gacaatcagggacaaccccgaagac

SEQ ID NO: 256076 - DNA, 25 bp, Artificial
  Probe
gttcagaaccctaggaaccagaatg

SEQ ID NO: 256077 - DNA, 25 bp, Artificial
  Probe
cagttcagaaccctaggaaccagaa

SEQ ID NO: 256078 - DNA, 25 bp, Artificial
  Probe
ctggcacggacaatcagggacaacc

SEQ ID NO: 256079 - DNA, 25 bp, Artificial
  Probe
taactggcacggacaatcagggaca

SEQ ID NO: 256080 - DNA, 25 bp, Artificial
  Probe
agccctttcagttcagaaccctagg

SEQ ID NO: 256081 - DNA, 25 bp, Artificial
  Probe
accagaatgcgcaattttgtataat

SEQ ID NO: 256082 - DNA, 25 bp, Artificial
  Probe
tcagaaccctaggaaccagaatgcg

SEQ ID NO: 256083 - DNA, 25 bp, Artificial
  Probe
ctaggaaccagaatgcgcaattttg

SEQ ID NO: 256084 - DNA, 25 bp, Artificial
  Probe
cctaggaaccagaatgcgcaatttt

SEQ ID NO: 256085 - DNA, 25 bp, Artificial
  Probe
cagaaccctaggaaccagaatgcgc

SEQ ID NO: 256086 - DNA, 25 bp, Artificial
  Probe
ttcagaaccctaggaaccagaatgc

SEQ ID NO: 256087 - DNA, 25 bp, Artificial
  Probe
tgactaccccgactacaagtaccga

SEQ ID NO: 256088 - DNA, 25 bp, Artificial
  Probe
aactggcacggacaatcagggacaa

SEQ ID NO: 256089 - DNA, 25 bp, Artificial
  Probe
ctccatatatataatacttcccttg

SEQ ID NO: 256090 - DNA, 25 bp, Artificial
  Probe
agacccttcgtggaggaggctaagc

SEQ ID NO: 256091 - DNA, 25 bp, Artificial
  Probe
ggtacacaactacccaagggagtag

SEQ ID NO: 256092 - DNA, 25 bp, Artificial
  Probe
agaaccctaggaaccagaatgcgca

SEQ ID NO: 256093 - DNA, 25 bp, Artificial
  Probe
acccttcgtggaggaggctaagcgt

SEQ ID NO: 256094 - DNA, 25 bp, Artificial
  Probe
ctctcccactccatatatataatac

SEQ ID NO: 256095 - DNA, 25 bp, Artificial
  Probe
tacacaactacccaagggagtaggg

SEQ ID NO: 256096 - DNA, 25 bp, Artificial
  Probe
ggacaatcagggacaaccccgaaga

SEQ ID NO: 256097 - DNA, 25 bp, Artificial
  Probe
gccctttcagttcagaaccctagga

SEQ ID NO: 256098 - DNA, 25 bp, Artificial
  Probe
agccccccaactattcgacagccta

SEQ ID NO: 256099 - DNA, 25 bp, Artificial
  Probe
cccacctttaactggcacggacaat

SEQ ID NO: 256100 - DNA, 25 bp, Artificial
  Probe
ataattaaagcatgtttgagtcttt

SEQ ID NO: 256101 - DNA, 25 bp, Artificial
  Probe
ccctaggaaccagaatgcgcaattt

SEQ ID NO: 256102 - DNA, 25 bp, Artificial
  Probe
cagtaacccacctttaactggcacg

SEQ ID NO: 256103 - DNA, 25 bp, Artificial
  Probe
taggaaccagaatgcgcaattttgt

SEQ ID NO: 256104 - DNA, 25 bp, Artificial
  Probe
cccaactattcgacagcctacatgc

SEQ ID NO: 256105 - DNA, 25 bp, Artificial
  Probe
agaatgcgcaattttgtataattaa

SEQ ID NO: 256106 - DNA, 25 bp, Artificial
  Probe
cagccctttcagttcagaaccctag

SEQ ID NO: 256107 - DNA, 25 bp, Artificial
  Probe
cctttaactggcacggacaatcagg

SEQ ID NO: 256108 - DNA, 25 bp, Artificial
  Probe
gaaccctaggaaccagaatgcgcaa

SEQ ID NO: 256109 - DNA, 25 bp, Artificial
  Probe
atgaggcaagcaaccccaagatctt

SEQ ID NO: 256110 - DNA, 25 bp, Artificial
  Probe
aaggccacttcctgatttttcccag

SEQ ID NO: 256111 - DNA, 25 bp, Artificial
  Probe
tccctgaaggccacttcctgatttt

SEQ ID NO: 256112 - DNA, 25 bp, Artificial
  Probe
catttagccatctagatgtcctttg

SEQ ID NO: 256113 - DNA, 25 bp, Artificial
  Probe
ctgatttttcccagcaaatgaggca

SEQ ID NO: 256114 - DNA, 25 bp, Artificial
  Probe
tgtgcagacaagctagccattagag

SEQ ID NO: 256115 - DNA, 25 bp, Artificial
  Probe
tcctttggtctccattgagagttga

SEQ ID NO: 256116 - DNA, 25 bp, Artificial
  Probe
gatgtcctttggtctccattgagag

SEQ ID NO: 256117 - DNA, 25 bp, Artificial
  Probe
tctccattgagagttgaatcaccct

SEQ ID NO: 256118 - DNA, 25 bp, Artificial
  Probe
ggccacttcctgatttttcccagca

SEQ ID NO: 256119 - DNA, 25 bp, Artificial
  Probe
ggtctccattgagagttgaatcacc

SEQ ID NO: 256120 - DNA, 25 bp, Artificial
  Probe
tagccatctagatgtcctttggtct

SEQ ID NO: 256121 - DNA, 25 bp, Artificial
  Probe
atttcagggtgtcttccaactgaaa

SEQ ID NO: 256122 - DNA, 25 bp, Artificial
  Probe
cctgtgcagacaagctagccattag

SEQ ID NO: 256123 - DNA, 25 bp, Artificial
  Probe
tttcccagcaaatgaggcaagcaac

SEQ ID NO: 256124 - DNA, 25 bp, Artificial
  Probe
cctgcctgtgcagacaagctagcca

SEQ ID NO: 256125 - DNA, 25 bp, Artificial
  Probe
catctagatgtcctttggtctccat

SEQ ID NO: 256126 - DNA, 25 bp, Artificial
  Probe
tgcagacaagctagccattagagag

SEQ ID NO: 256127 - DNA, 25 bp, Artificial
  Probe
tctagatgtcctttggtctccattg

SEQ ID NO: 256128 - DNA, 25 bp, Artificial
  Probe
aaatgaggcaagcaaccccaagatc

SEQ ID NO: 256129 - DNA, 25 bp, Artificial
  Probe
tttttcccagcaaatgaggcaagca

SEQ ID NO: 256130 - DNA, 25 bp, Artificial
  Probe
agatgtcctttggtctccattgaga

SEQ ID NO: 256131 - DNA, 25 bp, Artificial
  Probe
gatttcagggtgtcttccaactgaa

SEQ ID NO: 256132 - DNA, 25 bp, Artificial
  Probe
ctttggtctccattgagagttgaat

SEQ ID NO: 256133 - DNA, 25 bp, Artificial
  Probe
tttcagggtgtcttccaactgaaat

SEQ ID NO: 256134 - DNA, 25 bp, Artificial
  Probe
ttcccagcaaatgaggcaagcaacc

SEQ ID NO: 256135 - DNA, 25 bp, Artificial
  Probe
ttggtctccattgagagttgaatca

SEQ ID NO: 256136 - DNA, 25 bp, Artificial
  Probe
acaagctagccattagagagggttg

SEQ ID NO: 256137 - DNA, 25 bp, Artificial
  Probe
aagtgtccctgaaggccacttcctg

SEQ ID NO: 256138 - DNA, 25 bp, Artificial
  Probe
gtgcagacaagctagccattagaga

SEQ ID NO: 256139 - DNA, 25 bp, Artificial
  Probe
gacaagctagccattagagagggtt

SEQ ID NO: 256140 - DNA, 25 bp, Artificial
  Probe
tgatttttcccagcaaatgaggcaa

SEQ ID NO: 256141 - DNA, 25 bp, Artificial
  Probe
tgtcctttggtctccattgagagtt

SEQ ID NO: 256142 - DNA, 25 bp, Artificial
  Probe
gaaggccacttcctgatttttccca

SEQ ID NO: 256143 - DNA, 25 bp, Artificial
  Probe
tcccagcaaatgaggcaagcaaccc

SEQ ID NO: 256144 - DNA, 25 bp, Artificial
  Probe
ctagatgtcctttggtctccattga

SEQ ID NO: 256145 - DNA, 25 bp, Artificial
  Probe
gccatctagatgtcctttggtctcc

SEQ ID NO: 256146 - DNA, 25 bp, Artificial
  Probe
ttagccatctagatgtcctttggtc

SEQ ID NO: 256147 - DNA, 25 bp, Artificial
  Probe
atttttcccagcaaatgaggcaagc

SEQ ID NO: 256148 - DNA, 25 bp, Artificial
  Probe
ctgcctgtgcagacaagctagccat

SEQ ID NO: 256149 - DNA, 25 bp, Artificial
  Probe
aggcatgtactatttacccagaaac

SEQ ID NO: 256150 - DNA, 25 bp, Artificial
  Probe
tgaaggccacttcctgatttttccc

SEQ ID NO: 256151 - DNA, 25 bp, Artificial
  Probe
atttagccatctagatgtcctttgg

SEQ ID NO: 256152 - DNA, 25 bp, Artificial
  Probe
ttgagagttgaatcaccctgcctgt

SEQ ID NO: 256153 - DNA, 25 bp, Artificial
  Probe
gttgaatcaccctgcctgtgcagac

SEQ ID NO: 256154 - DNA, 25 bp, Artificial
  Probe
gagagttgaatcaccctgcctgtgc

SEQ ID NO: 256155 - DNA, 25 bp, Artificial
  Probe
ttggtggctcctaggagccaggatc

SEQ ID NO: 256156 - DNA, 25 bp, Artificial
  Probe
agttcgctgaagacatctttctaaa

SEQ ID NO: 256157 - DNA, 25 bp, Artificial
  Probe
aagaggctctgcagatcaaacacaa

SEQ ID NO: 256158 - DNA, 25 bp, Artificial
  Probe
tactcctgttggtggctcctaggag

SEQ ID NO: 256159 - DNA, 25 bp, Artificial
  Probe
gacatctttctaaatggctgtgaaa

SEQ ID NO: 256160 - DNA, 25 bp, Artificial
  Probe
tggcccacagacacaacgtgtccat

SEQ ID NO: 256161 - DNA, 25 bp, Artificial
  Probe
tcctaggagccaggatcgcttggaa

SEQ ID NO: 256162 - DNA, 25 bp, Artificial
  Probe
acgtgtccatcctgccaagcgtttg

SEQ ID NO: 256163 - DNA, 25 bp, Artificial
  Probe
cctgttggtggctcctaggagccag

SEQ ID NO: 256164 - DNA, 25 bp, Artificial
  Probe
gtggctcctaggagccaggatcgct

SEQ ID NO: 256165 - DNA, 25 bp, Artificial
  Probe
tcctgccaagcgtttgtagctaatt

SEQ ID NO: 256166 - DNA, 25 bp, Artificial
  Probe
gggtactcctgttggtggctcctag

SEQ ID NO: 256167 - DNA, 25 bp, Artificial
  Probe
agccaggatcgcttggaaacttagc

SEQ ID NO: 256168 - DNA, 25 bp, Artificial
  Probe
ccaagcgtttgtagctaatttggac

SEQ ID NO: 256169 - DNA, 25 bp, Artificial
  Probe
ggctctgcagatcaaacacaatttc

SEQ ID NO: 256170 - DNA, 25 bp, Artificial
  Probe
tgtagctaatttggacgagttcgct

SEQ ID NO: 256171 - DNA, 25 bp, Artificial
  Probe
gggcaaagaggctctgcagatcaaa

SEQ ID NO: 256172 - DNA, 25 bp, Artificial
  Probe
tcgctgaagacatctttctaaatgg

SEQ ID NO: 256173 - DNA, 25 bp, Artificial
  Probe
ctaatttggacgagttcgctgaaga

SEQ ID NO: 256174 - DNA, 25 bp, Artificial
  Probe
atcatgggcaaagaggctctgcaga

SEQ ID NO: 256175 - DNA, 25 bp, Artificial
  Probe
ctccacctggattgaatattggccc

SEQ ID NO: 256176 - DNA, 25 bp, Artificial
  Probe
ccgggtactcctgttggtggctcct

SEQ ID NO: 256177 - DNA, 25 bp, Artificial
  Probe
acaacgtgtccatcctgccaagcgt

SEQ ID NO: 256178 - DNA, 25 bp, Artificial
  Probe
taggagccaggatcgcttggaaact

SEQ ID NO: 256179 - DNA, 25 bp, Artificial
  Probe
aacgtgtccatcctgccaagcgttt

SEQ ID NO: 256180 - DNA, 25 bp, Artificial
  Probe
agacacaacgtgtccatcctgccaa

SEQ ID NO: 256181 - DNA, 25 bp, Artificial
  Probe
gtccatcctgccaagcgtttgtagc

SEQ ID NO: 256182 - DNA, 25 bp, Artificial
  Probe
ggacgagttcgctgaagacatcttt

SEQ ID NO: 256183 - DNA, 25 bp, Artificial
  Probe
ttcccgggtactcctgttggtggct

SEQ ID NO: 256184 - DNA, 25 bp, Artificial
  Probe
gcttggaaacttagcctagaatcgg

SEQ ID NO: 256185 - DNA, 25 bp, Artificial
  Probe
tcccgggtactcctgttggtggctc

SEQ ID NO: 256186 - DNA, 25 bp, Artificial
  Probe
agctaatttggacgagttcgctgaa

SEQ ID NO: 256187 - DNA, 25 bp, Artificial
  Probe
tccatcctgccaagcgtttgtagct

SEQ ID NO: 256188 - DNA, 25 bp, Artificial
  Probe
gaatattggcccacagacacaacgt

SEQ ID NO: 256189 - DNA, 25 bp, Artificial
  Probe
atttggacgagttcgctgaagacat

SEQ ID NO: 256190 - DNA, 25 bp, Artificial
  Probe
gacacaacgtgtccatcctgccaag

SEQ ID NO: 256191 - DNA, 25 bp, Artificial
  Probe
caaagaggctctgcagatcaaacac

SEQ ID NO: 256192 - DNA, 25 bp, Artificial
  Probe
ttaatcatgggcaaagaggctctgc

SEQ ID NO: 256193 - DNA, 25 bp, Artificial
  Probe
gccttcccgggtactcctgttggtg

SEQ ID NO: 256194 - DNA, 25 bp, Artificial
  Probe
ccacctggattgaatattggcccac

SEQ ID NO: 256195 - DNA, 25 bp, Artificial
  Probe
ggaaacttagcctagaatcggatac

SEQ ID NO: 256196 - DNA, 25 bp, Artificial
  Probe
tgctgcgtggccttcccgggtactc

SEQ ID NO: 256197 - DNA, 25 bp, Artificial
  Probe
ttgtagctaatttggacgagttcgc

SEQ ID NO: 256198 - DNA, 25 bp, Artificial
  Probe
tcatgggcaaagaggctctgcagat

SEQ ID NO: 256199 - DNA, 25 bp, Artificial
  Probe
ctattggacatcagcaccaataagc

SEQ ID NO: 256200 - DNA, 25 bp, Artificial
  Probe
tttctaaatggctgtgaaaatgcct

SEQ ID NO: 256201 - DNA, 25 bp, Artificial
  Probe
tgtttcagggacaatcattctctag

SEQ ID NO: 256202 - DNA, 25 bp, Artificial
  Probe
tttcagggacaatcattctctaggc

SEQ ID NO: 256203 - DNA, 25 bp, Artificial
  Probe
gtgctcggcaacaatggataaaggc

SEQ ID NO: 256204 - DNA, 25 bp, Artificial
  Probe
tggtttggggttctaaactgcctgt

SEQ ID NO: 256205 - DNA, 25 bp, Artificial
  Probe
tgctcggcaacaatggataaaggca

SEQ ID NO: 256206 - DNA, 25 bp, Artificial
  Probe
ttctaaactgcctgtggggtagtga

SEQ ID NO: 256207 - DNA, 25 bp, Artificial
  Probe
tgtgtttcagggacaatcattctct

SEQ ID NO: 256208 - DNA, 25 bp, Artificial
  Probe
ggacaatcattctctaggcgttggt

SEQ ID NO: 256209 - DNA, 25 bp, Artificial
  Probe
agggacaatcattctctaggcgttg

SEQ ID NO: 256210 - DNA, 25 bp, Artificial
  Probe
tctaaactgcctgtggggtagtgaa

SEQ ID NO: 256211 - DNA, 25 bp, Artificial
  Probe
ctgcctgtggggtagtgaatgccca

SEQ ID NO: 256212 - DNA, 25 bp, Artificial
  Probe
gtttcagggacaatcattctctagg

SEQ ID NO: 256213 - DNA, 25 bp, Artificial
  Probe
ctaaactgcctgtggggtagtgaat

SEQ ID NO: 256214 - DNA, 25 bp, Artificial
  Probe
tccagagacccacgtgagggcacgc

SEQ ID NO: 256215 - DNA, 25 bp, Artificial
  Probe
ttccagagacccacgtgagggcacg

SEQ ID NO: 256216 - DNA, 25 bp, Artificial
  Probe
ttcagggacaatcattctctaggcg

SEQ ID NO: 256217 - DNA, 25 bp, Artificial
  Probe
ggtgctcggcaacaatggataaagg

SEQ ID NO: 256218 - DNA, 25 bp, Artificial
  Probe
tggggaagcctgttgcttacctttt

SEQ ID NO: 256219 - DNA, 25 bp, Artificial
  Probe
tttggggttctaaactgcctgtggg

SEQ ID NO: 256220 - DNA, 25 bp, Artificial
  Probe
gggacaatcattctctaggcgttgg

SEQ ID NO: 256221 - DNA, 25 bp, Artificial
  Probe
gacaatcattctctaggcgttggtt

SEQ ID NO: 256222 - DNA, 25 bp, Artificial
  Probe
gggtgctcggcaacaatggataaag

SEQ ID NO: 256223 - DNA, 25 bp, Artificial
  Probe
tcagggacaatcattctctaggcgt

SEQ ID NO: 256224 - DNA, 25 bp, Artificial
  Probe
cagggacaatcattctctaggcgtt

SEQ ID NO: 256225 - DNA, 25 bp, Artificial
  Probe
cagagacccacgtgagggcacgccg

SEQ ID NO: 256226 - DNA, 25 bp, Artificial
  Probe
acaatcattctctaggcgttggttg

SEQ ID NO: 256227 - DNA, 25 bp, Artificial
  Probe
gtgtttcagggacaatcattctcta

SEQ ID NO: 256228 - DNA, 25 bp, Artificial
  Probe
caatcattctctaggcgttggttgg

SEQ ID NO: 256229 - DNA, 25 bp, Artificial
  Probe
aacttgcagaggtagctgtgagtgc

SEQ ID NO: 256230 - DNA, 25 bp, Artificial
  Probe
atccatctcccttgttttggcatcg

SEQ ID NO: 256231 - DNA, 25 bp, Artificial
  Probe
ccttgttttggcatcggtttcccag

SEQ ID NO: 256232 - DNA, 25 bp, Artificial
  Probe
gtccttgccccatttttaccctctg

SEQ ID NO: 256233 - DNA, 25 bp, Artificial
  Probe
cttgcagaggtagctgtgagtgcca

SEQ ID NO: 256234 - DNA, 25 bp, Artificial
  Probe
tgcagaggtagctgtgagtgccaag

SEQ ID NO: 256235 - DNA, 25 bp, Artificial
  Probe
caacttgcagaggtagctgtgagtg

SEQ ID NO: 256236 - DNA, 25 bp, Artificial
  Probe
gattcaagagcaacttgcagaggta

SEQ ID NO: 256237 - DNA, 25 bp, Artificial
  Probe
agcaacttgcagaggtagctgtgag

SEQ ID NO: 256238 - DNA, 25 bp, Artificial
  Probe
attgggtctgctgggggagaatacc

SEQ ID NO: 256239 - DNA, 25 bp, Artificial
  Probe
tgattcaagagcaacttgcagaggt

SEQ ID NO: 256240 - DNA, 25 bp, Artificial
  Probe
tccatctcccttgttttggcatcgg

SEQ ID NO: 256241 - DNA, 25 bp, Artificial
  Probe
tacccatgctgttcagcacgggcca

SEQ ID NO: 256242 - DNA, 25 bp, Artificial
  Probe
gaggtagctgtgagtgccaagcgag

SEQ ID NO: 256243 - DNA, 25 bp, Artificial
  Probe
caagagcaacttgcagaggtagctg

SEQ ID NO: 256244 - DNA, 25 bp, Artificial
  Probe
tcaagagcaacttgcagaggtagct

SEQ ID NO: 256245 - DNA, 25 bp, Artificial
  Probe
tgaggtgtcagtccttaggccagcc

SEQ ID NO: 256246 - DNA, 25 bp, Artificial
  Probe
ttggcatcggtttcccagtcccttt

SEQ ID NO: 256247 - DNA, 25 bp, Artificial
  Probe
gatgattcaagagcaacttgcagag

SEQ ID NO: 256248 - DNA, 25 bp, Artificial
  Probe
aggtgtcagtccttaggccagcccc

SEQ ID NO: 256249 - DNA, 25 bp, Artificial
  Probe
gtgaccagcacattgtggatgtggt

SEQ ID NO: 256250 - DNA, 25 bp, Artificial
  Probe
tggatgtggtgctgaagatgattca

SEQ ID NO: 256251 - DNA, 25 bp, Artificial
  Probe
cagtgaccagcacattgtggatgtg

SEQ ID NO: 256252 - DNA, 25 bp, Artificial
  Probe
gagcaacttgcagaggtagctgtga

SEQ ID NO: 256253 - DNA, 25 bp, Artificial
  Probe
gaggtgtcagtccttaggccagccc

SEQ ID NO: 256254 - DNA, 25 bp, Artificial
  Probe
atgattcaagagcaacttgcagagg

SEQ ID NO: 256255 - DNA, 25 bp, Artificial
  Probe
gcaacttgcagaggtagctgtgagt

SEQ ID NO: 256256 - DNA, 25 bp, Artificial
  Probe
ccagtgaccagcacattgtggatgt

SEQ ID NO: 256257 - DNA, 25 bp, Artificial
  Probe
catctcccttgttttggcatcggtt

SEQ ID NO: 256258 - DNA, 25 bp, Artificial
  Probe
accagcacattgtggatgtggtgct

SEQ ID NO: 256259 - DNA, 25 bp, Artificial
  Probe
aagagcaacttgcagaggtagctgt

SEQ ID NO: 256260 - DNA, 25 bp, Artificial
  Probe
ttacccatgctgttcagcacgggcc

SEQ ID NO: 256261 - DNA, 25 bp, Artificial
  Probe
cttgttttggcatcggtttcccagt

SEQ ID NO: 256262 - DNA, 25 bp, Artificial
  Probe
tttggcatcggtttcccagtccctt

SEQ ID NO: 256263 - DNA, 25 bp, Artificial
  Probe
agagcaacttgcagaggtagctgtg

SEQ ID NO: 256264 - DNA, 25 bp, Artificial
  Probe
cccatgctgttcagcacgggccatc

SEQ ID NO: 256265 - DNA, 25 bp, Artificial
  Probe
catccatctcccttgttttggcatc

SEQ ID NO: 256266 - DNA, 25 bp, Artificial
  Probe
acttgcagaggtagctgtgagtgcc

SEQ ID NO: 256267 - DNA, 25 bp, Artificial
  Probe
ttttggcatcggtttcccagtccct

SEQ ID NO: 256268 - DNA, 25 bp, Artificial
  Probe
atctcccttgttttggcatcggttt

SEQ ID NO: 256269 - DNA, 25 bp, Artificial
  Probe
ttgcagaggtagctgtgagtgccaa

SEQ ID NO: 256270 - DNA, 25 bp, Artificial
  Probe
attcaagagcaacttgcagaggtag

SEQ ID NO: 256271 - DNA, 25 bp, Artificial
  Probe
tctcccttgttttggcatcggtttc

SEQ ID NO: 256272 - DNA, 25 bp, Artificial
  Probe
agtgaccagcacattgtggatgtgg

SEQ ID NO: 256273 - DNA, 25 bp, Artificial
  Probe
ccatctcccttgttttggcatcggt

SEQ ID NO: 256274 - DNA, 25 bp, Artificial
  Probe
ttcaagagcaacttgcagaggtagc

SEQ ID NO: 256275 - DNA, 25 bp, Artificial
  Probe
ggaaaatgcaaactctttcgatgtt

SEQ ID NO: 256276 - DNA, 25 bp, Artificial
  Probe
ggtggcccgtgttctcaatctcact

SEQ ID NO: 256277 - DNA, 25 bp, Artificial
  Probe
tagagtaggcaactccgtggccaac

SEQ ID NO: 256278 - DNA, 25 bp, Artificial
  Probe
agagtaggcaactccgtggccaact

SEQ ID NO: 256279 - DNA, 25 bp, Artificial
  Probe
gtgttctcaatctcactgagcggca

SEQ ID NO: 256280 - DNA, 25 bp, Artificial
  Probe
gttagttctatccatcgaggaggag

SEQ ID NO: 256281 - DNA, 25 bp, Artificial
  Probe
gtggcccgtgttctcaatctcactg

SEQ ID NO: 256282 - DNA, 25 bp, Artificial
  Probe
tgcaaactctttcgatgttgggagg

SEQ ID NO: 256283 - DNA, 25 bp, Artificial
  Probe
taccccagcgcaactgaaataaatg

SEQ ID NO: 256284 - DNA, 25 bp, Artificial
  Probe
tgctgcctcggcacagccaagggaa

SEQ ID NO: 256285 - DNA, 25 bp, Artificial
  Probe
attagagtaggcaactccgtggcca

SEQ ID NO: 256286 - DNA, 25 bp, Artificial
  Probe
tagagttagttctatccatcgagga

SEQ ID NO: 256287 - DNA, 25 bp, Artificial
  Probe
cgaggtggcccgtgttctcaatctc

SEQ ID NO: 256288 - DNA, 25 bp, Artificial
  Probe
gctgcctcggcacagccaagggaaa

SEQ ID NO: 256289 - DNA, 25 bp, Artificial
  Probe
cccagcgcaactgaaataaatgaca

SEQ ID NO: 256290 - DNA, 25 bp, Artificial
  Probe
cgtgttctcaatctcactgagcggc

SEQ ID NO: 256291 - DNA, 25 bp, Artificial
  Probe
ccagcgcaactgaaataaatgacac

SEQ ID NO: 256292 - DNA, 25 bp, Artificial
  Probe
tgttctcaatctcactgagcggcag

SEQ ID NO: 256293 - DNA, 25 bp, Artificial
  Probe
actccgtggccaactggatccatgc

SEQ ID NO: 256294 - DNA, 25 bp, Artificial
  Probe
gttctcaatctcactgagcggcagg

SEQ ID NO: 256295 - DNA, 25 bp, Artificial
  Probe
agagttagttctatccatcgaggag

SEQ ID NO: 256296 - DNA, 25 bp, Artificial
  Probe
ctgcctcggcacagccaagggaaac

SEQ ID NO: 256297 - DNA, 25 bp, Artificial
  Probe
gagaaactgcgttctcttaccccag

SEQ ID NO: 256298 - DNA, 25 bp, Artificial
  Probe
ctcggcacagccaagggaaacacaa

SEQ ID NO: 256299 - DNA, 25 bp, Artificial
  Probe
aaatgcaaactctttcgatgttggg

SEQ ID NO: 256300 - DNA, 25 bp, Artificial
  Probe
ttagagttagttctatccatcgagg

SEQ ID NO: 256301 - DNA, 25 bp, Artificial
  Probe
agagaaactgcgttctcttacccca

SEQ ID NO: 256302 - DNA, 25 bp, Artificial
  Probe
aatgcaaactctttcgatgttggga

SEQ ID NO: 256303 - DNA, 25 bp, Artificial
  Probe
ggcccgtgttctcaatctcactgag

SEQ ID NO: 256304 - DNA, 25 bp, Artificial
  Probe
tggcccgtgttctcaatctcactga

SEQ ID NO: 256305 - DNA, 25 bp, Artificial
  Probe
gagttagttctatccatcgaggagg

SEQ ID NO: 256306 - DNA, 25 bp, Artificial
  Probe
gaaataaatgacacacacaagtgtg

SEQ ID NO: 256307 - DNA, 25 bp, Artificial
  Probe
aactccgtggccaactggatccatg

SEQ ID NO: 256308 - DNA, 25 bp, Artificial
  Probe
tcggcacagccaagggaaacacaaa

SEQ ID NO: 256309 - DNA, 25 bp, Artificial
  Probe
ttagagtaggcaactccgtggccaa

SEQ ID NO: 256310 - DNA, 25 bp, Artificial
  Probe
gaaactgcgttctcttaccccagcg

SEQ ID NO: 256311 - DNA, 25 bp, Artificial
  Probe
ccgtgttctcaatctcactgagcgg

SEQ ID NO: 256312 - DNA, 25 bp, Artificial
  Probe
taggcaactccgtggccaactggat

SEQ ID NO: 256313 - DNA, 25 bp, Artificial
  Probe
gcccgtgttctcaatctcactgagc

SEQ ID NO: 256314 - DNA, 25 bp, Artificial
  Probe
gaggtggcccgtgttctcaatctca

SEQ ID NO: 256315 - DNA, 25 bp, Artificial
  Probe
aggtggcccgtgttctcaatctcac

SEQ ID NO: 256316 - DNA, 25 bp, Artificial
  Probe
ccccagcgcaactgaaataaatgac

SEQ ID NO: 256317 - DNA, 25 bp, Artificial
  Probe
agttagttctatccatcgaggagga

SEQ ID NO: 256318 - DNA, 25 bp, Artificial
  Probe
accccagcgcaactgaaataaatga

SEQ ID NO: 256319 - DNA, 25 bp, Artificial
  Probe
cccgtgttctcaatctcactgagcg

SEQ ID NO: 256320 - DNA, 25 bp, Artificial
  Probe
atgcaaactctttcgatgttgggag

SEQ ID NO: 256321 - DNA, 25 bp, Artificial
  Probe
tggcagcgaccatctccagcaagtc

SEQ ID NO: 256322 - DNA, 25 bp, Artificial
  Probe
tctcttcttgaaccacaccgggctg

SEQ ID NO: 256323 - DNA, 25 bp, Artificial
  Probe
tctggtctcagcagcggctgcagct

SEQ ID NO: 256324 - DNA, 25 bp, Artificial
  Probe
gggatacagtggatcctcggagcag

SEQ ID NO: 256325 - DNA, 25 bp, Artificial
  Probe
ccgagtgagagcccaccatgcctcc

SEQ ID NO: 256326 - DNA, 25 bp, Artificial
  Probe
gctgcccctgctcagtgccccacca

SEQ ID NO: 256327 - DNA, 25 bp, Artificial
  Probe
cgcctctcttcttgaaccacaccgg

SEQ ID NO: 256328 - DNA, 25 bp, Artificial
  Probe
tgaaccacaccgggctgcccctgct

SEQ ID NO: 256329 - DNA, 25 bp, Artificial
  Probe
gatacagtggatcctcggagcagga

SEQ ID NO: 256330 - DNA, 25 bp, Artificial
  Probe
gtctggtctcagcagcggctgcagc

SEQ ID NO: 256331 - DNA, 25 bp, Artificial
  Probe
agcaagtctcctggcctctcctcct

SEQ ID NO: 256332 - DNA, 25 bp, Artificial
  Probe
tcccctgaccttggtcccctgccca

SEQ ID NO: 256333 - DNA, 25 bp, Artificial
  Probe
atacagtggatcctcggagcaggag

SEQ ID NO: 256334 - DNA, 25 bp, Artificial
  Probe
ggtctggtctcagcagcggctgcag

SEQ ID NO: 256335 - DNA, 25 bp, Artificial
  Probe
tggtctcagcagcggctgcagctgt

SEQ ID NO: 256336 - DNA, 25 bp, Artificial
  Probe
agctgtggcagcgaccatctccagc

SEQ ID NO: 256337 - DNA, 25 bp, Artificial
  Probe
gtggcagcgaccatctccagcaagt

SEQ ID NO: 256338 - DNA, 25 bp, Artificial
  Probe
tcctactcctctgagtcccctgacc

SEQ ID NO: 256339 - DNA, 25 bp, Artificial
  Probe
acagtggatcctcggagcaggagtg

SEQ ID NO: 256340 - DNA, 25 bp, Artificial
  Probe
aggcgtgggtctggtctcagcagcg

SEQ ID NO: 256341 - DNA, 25 bp, Artificial
  Probe
gctgcagctgtggcagcgaccatct

SEQ ID NO: 256342 - DNA, 25 bp, Artificial
  Probe
gtgagagcccaccatgcctcccctc

SEQ ID NO: 256343 - DNA, 25 bp, Artificial
  Probe
cagcggctgcagctgtggcagcgac

SEQ ID NO: 256344 - DNA, 25 bp, Artificial
  Probe
tacagtggatcctcggagcaggagt

SEQ ID NO: 256345 - DNA, 25 bp, Artificial
  Probe
agtgccccaccaggcgtgggtctgg

SEQ ID NO: 256346 - DNA, 25 bp, Artificial
  Probe
tgtggcagcgaccatctccagcaag

SEQ ID NO: 256347 - DNA, 25 bp, Artificial
  Probe
ggcagcgaccatctccagcaagtct

SEQ ID NO: 256348 - DNA, 25 bp, Artificial
  Probe
gcgaccatctccagcaagtctcctg

SEQ ID NO: 256349 - DNA, 25 bp, Artificial
  Probe
cgggctgcccctgctcagtgcccca

SEQ ID NO: 256350 - DNA, 25 bp, Artificial
  Probe
tgcagctgtggcagcgaccatctcc

SEQ ID NO: 256351 - DNA, 25 bp, Artificial
  Probe
tgcccctgctcagtgccccaccagg

SEQ ID NO: 256352 - DNA, 25 bp, Artificial
  Probe
ctctcttcttgaaccacaccgggct

SEQ ID NO: 256353 - DNA, 25 bp, Artificial
  Probe
ggatacagtggatcctcggagcagg

SEQ ID NO: 256354 - DNA, 25 bp, Artificial
  Probe
actcctctgagtcccctgaccttgg

SEQ ID NO: 256355 - DNA, 25 bp, Artificial
  Probe
gcagcgaccatctccagcaagtctc

SEQ ID NO: 256356 - DNA, 25 bp, Artificial
  Probe
gtgaggaggctggtgggggatacag

SEQ ID NO: 256357 - DNA, 25 bp, Artificial
  Probe
ctgctcagtgccccaccaggcgtgg

SEQ ID NO: 256358 - DNA, 25 bp, Artificial
  Probe
gcgtgggtctggtctcagcagcggc

SEQ ID NO: 256359 - DNA, 25 bp, Artificial
  Probe
caagtctcctggcctctcctcctcg

SEQ ID NO: 256360 - DNA, 25 bp, Artificial
  Probe
cctcctcgtcttcatcctcctcctc

SEQ ID NO: 256361 - DNA, 25 bp, Artificial
  Probe
ctgaccttggtcccctgcccaagag

SEQ ID NO: 256362 - DNA, 25 bp, Artificial
  Probe
ctcttcttgaaccacaccgggctgc

SEQ ID NO: 256363 - DNA, 25 bp, Artificial
  Probe
cctcgtcttcatcctcctcctcctc

SEQ ID NO: 256364 - DNA, 25 bp, Artificial
  Probe
aggctggtgggggatacagtggatc

SEQ ID NO: 256365 - DNA, 25 bp, Artificial
  Probe
ccccaccaggcgtgggtctggtctc

SEQ ID NO: 256366 - DNA, 25 bp, Artificial
  Probe
gagtcccctgaccttggtcccctgc

SEQ ID NO: 256367 - DNA, 25 bp, Artificial
  Probe
ttactggacccgagagctggccaac

SEQ ID NO: 256368 - DNA, 25 bp, Artificial
  Probe
cacaagaatttatgtccgggagtaa

SEQ ID NO: 256369 - DNA, 25 bp, Artificial
  Probe
agaacaagattcactgcacgcagac

SEQ ID NO: 256370 - DNA, 25 bp, Artificial
  Probe
catcaagacatccattacggtgcgc

SEQ ID NO: 256371 - DNA, 25 bp, Artificial
  Probe
cggacgcaagtgcaggagtttaccc

SEQ ID NO: 256372 - DNA, 25 bp, Artificial
  Probe
ggacccgagagctggccaacgatga

SEQ ID NO: 256373 - DNA, 25 bp, Artificial
  Probe
aagattcactgcacgcagacgcttc

SEQ ID NO: 256374 - DNA, 25 bp, Artificial
  Probe
gtaaaggtggccagcttgttctgct

SEQ ID NO: 256375 - DNA, 25 bp, Artificial
  Probe
gacgcaagtgcaggagtttacccac

SEQ ID NO: 256376 - DNA, 25 bp, Artificial
  Probe
aggagtttacccacttgggagaatg

SEQ ID NO: 256377 - DNA, 25 bp, Artificial
  Probe
ccgatgatgtggtgtgcacaagaat

SEQ ID NO: 256378 - DNA, 25 bp, Artificial
  Probe
agtttacccacttgggagaatgaga

SEQ ID NO: 256379 - DNA, 25 bp, Artificial
  Probe
gctggccaacgatgagctaatcctg

SEQ ID NO: 256380 - DNA, 25 bp, Artificial
  Probe
gcaggatacaagttcccacgaggag

SEQ ID NO: 256381 - DNA, 25 bp, Artificial
  Probe
tcgtggtcccgcactgccagtgggt

SEQ ID NO: 256382 - DNA, 25 bp, Artificial
  Probe
tgccagtgggtctttcctccacaca

SEQ ID NO: 256383 - DNA, 25 bp, Artificial
  Probe
tcccgcatccctggtttggcatctg

SEQ ID NO: 256384 - DNA, 25 bp, Artificial
  Probe
atacaagttcccacgaggagcacgt

SEQ ID NO: 256385 - DNA, 25 bp, Artificial
  Probe
ctttcatggcaggatacaagttccc

SEQ ID NO: 256386 - DNA, 25 bp, Artificial
  Probe
ccgcatccctggtttggcatctgca

SEQ ID NO: 256387 - DNA, 25 bp, Artificial
  Probe
ccacgaggagcacgtcgtggtcccg

SEQ ID NO: 256388 - DNA, 25 bp, Artificial
  Probe
acccacttgggagaatgagaacaag

SEQ ID NO: 256389 - DNA, 25 bp, Artificial
  Probe
cgccgatgatgtggtgtgcacaaga

SEQ ID NO: 256390 - DNA, 25 bp, Artificial
  Probe
gaacaagattcactgcacgcagacg

SEQ ID NO: 256391 - DNA, 25 bp, Artificial
  Probe
ccctatgacaatgttgtagtaccct

SEQ ID NO: 256392 - DNA, 25 bp, Artificial
  Probe
gttctgctttcatggcaggatacaa

SEQ ID NO: 256393 - DNA, 25 bp, Artificial
  Probe
ctggccaacgatgagctaatcctga

SEQ ID NO: 256394 - DNA, 25 bp, Artificial
  Probe
ccaaaacttactggacccgagagct

SEQ ID NO: 256395 - DNA, 25 bp, Artificial
  Probe
tcccacgaggagcacgtcgtggtcc

SEQ ID NO: 256396 - DNA, 25 bp, Artificial
  Probe
actgccagtgggtctttcctccaca

SEQ ID NO: 256397 - DNA, 25 bp, Artificial
  Probe
caggatacaagttcccacgaggagc

SEQ ID NO: 256398 - DNA, 25 bp, Artificial
  Probe
agtgcaggagtttacccacttggga

SEQ ID NO: 256399 - DNA, 25 bp, Artificial
  Probe
acaagattcactgcacgcagacgct

SEQ ID NO: 256400 - DNA, 25 bp, Artificial
  Probe
aggagcacgtcgtggtcccgcactg

SEQ ID NO: 256401 - DNA, 25 bp, Artificial
  Probe
tacccacttgggagaatgagaacaa

SEQ ID NO: 256402 - DNA, 25 bp, Artificial
  Probe
ccctggtttggcatctgcatgattg

SEQ ID NO: 256403 - DNA, 25 bp, Artificial
  Probe
gtggtcccgcactgccagtgggtct

SEQ ID NO: 256404 - DNA, 25 bp, Artificial
  Probe
gccaacgatgagctaatcctgacat

SEQ ID NO: 256405 - DNA, 25 bp, Artificial
  Probe
aatcctgacatttggcgccgatgat

SEQ ID NO: 256406 - DNA, 25 bp, Artificial
  Probe
ccagcttgttctgctttcatggcag

SEQ ID NO: 256407 - DNA, 25 bp, Artificial
  Probe
gcatccctggtttggcatctgcatg

SEQ ID NO: 256408 - DNA, 25 bp, Artificial
  Probe
cactgcacgcagacgcttcttgagg

SEQ ID NO: 256409 - DNA, 25 bp, Artificial
  Probe
ttatgtccgggagtaaaggtggcca

SEQ ID NO: 256410 - DNA, 25 bp, Artificial
  Probe
ttcatggcaggatacaagttcccac

SEQ ID NO: 256411 - DNA, 25 bp, Artificial
  Probe
ttcactgcacgcagacgcttcttga

SEQ ID NO: 256412 - DNA, 25 bp, Artificial
  Probe
cattttccctatgacaatgttgtag

SEQ ID NO: 256413 - DNA, 25 bp, Artificial
  Probe
gaaaggcctgcctgtcacaaaggcc

SEQ ID NO: 256414 - DNA, 25 bp, Artificial
  Probe
cctgctaacactcatagacaggaag

SEQ ID NO: 256415 - DNA, 25 bp, Artificial
  Probe
gtagctgggactactggtgtatgcc

SEQ ID NO: 256416 - DNA, 25 bp, Artificial
  Probe
aacactcatagacaggaagtgctct

SEQ ID NO: 256417 - DNA, 25 bp, Artificial
  Probe
tgcctgtcacaaaggccctaaacat

SEQ ID NO: 256418 - DNA, 25 bp, Artificial
  Probe
tgaagacccttagaggagcggagtt

SEQ ID NO: 256419 - DNA, 25 bp, Artificial
  Probe
gacaggatccctctgttaatttgag

SEQ ID NO: 256420 - DNA, 25 bp, Artificial
  Probe
agactctgagaaaggcctgcctgtc

SEQ ID NO: 256421 - DNA, 25 bp, Artificial
  Probe
ctgagaaaggcctgcctgtcacaaa

SEQ ID NO: 256422 - DNA, 25 bp, Artificial
  Probe
ctccctagtagctgggactactggt

SEQ ID NO: 256423 - DNA, 25 bp, Artificial
  Probe
gcctgcctgtcacaaaggccctaaa

SEQ ID NO: 256424 - DNA, 25 bp, Artificial
  Probe
aagactctgagaaaggcctgcctgt

SEQ ID NO: 256425 - DNA, 25 bp, Artificial
  Probe
tcagtgtgcatgtcagtgagtccag

SEQ ID NO: 256426 - DNA, 25 bp, Artificial
  Probe
ctgcctgtcacaaaggccctaaaca

SEQ ID NO: 256427 - DNA, 25 bp, Artificial
  Probe
tgccaagaaagtctgtttggttctg

SEQ ID NO: 256428 - DNA, 25 bp, Artificial
  Probe
atgtgaagacccttagaggagcgga

SEQ ID NO: 256429 - DNA, 25 bp, Artificial
  Probe
agaaggtaggccttggttcacatct

SEQ ID NO: 256430 - DNA, 25 bp, Artificial
  Probe
cttgaactggtgaactcaaaacagc

SEQ ID NO: 256431 - DNA, 25 bp, Artificial
  Probe
tgtatgccaccatgccccagtttgt

SEQ ID NO: 256432 - DNA, 25 bp, Artificial
  Probe
ggttcacatctagtcctgctaacac

SEQ ID NO: 256433 - DNA, 25 bp, Artificial
  Probe
ctggtgtatgccaccatgccccagt

SEQ ID NO: 256434 - DNA, 25 bp, Artificial
  Probe
tagtcctgctaacactcatagacag

SEQ ID NO: 256435 - DNA, 25 bp, Artificial
  Probe
aagacccttagaggagcggagttgt

SEQ ID NO: 256436 - DNA, 25 bp, Artificial
  Probe
ctggtcttgaactggtgaactcaaa

SEQ ID NO: 256437 - DNA, 25 bp, Artificial
  Probe
ccaccatgccccagtttgtaaaggt

SEQ ID NO: 256438 - DNA, 25 bp, Artificial
  Probe
agtaagaattcttgccaacaaaaga

SEQ ID NO: 256439 - DNA, 25 bp, Artificial
  Probe
agtgtgcatgtcagtgagtccagtg

SEQ ID NO: 256440 - DNA, 25 bp, Artificial
  Probe
aactggtgaactcaaaacagccctc

SEQ ID NO: 256441 - DNA, 25 bp, Artificial
  Probe
ccatgccccagtttgtaaaggtttg

SEQ ID NO: 256442 - DNA, 25 bp, Artificial
  Probe
ctgctaacactcatagacaggaagt

SEQ ID NO: 256443 - DNA, 25 bp, Artificial
  Probe
actactggtgtatgccaccatgccc

SEQ ID NO: 256444 - DNA, 25 bp, Artificial
  Probe
caccatgccccagtttgtaaaggtt

SEQ ID NO: 256445 - DNA, 25 bp, Artificial
  Probe
tgaaagacaggatccctctgttaat

SEQ ID NO: 256446 - DNA, 25 bp, Artificial
  Probe
agtagctgggactactggtgtatgc

SEQ ID NO: 256447 - DNA, 25 bp, Artificial
  Probe
ggatccctctgttaatttgaggaca

SEQ ID NO: 256448 - DNA, 25 bp, Artificial
  Probe
gaatttctctaaaatgccaagaaag

SEQ ID NO: 256449 - DNA, 25 bp, Artificial
  Probe
catgccccagtttgtaaaggtttga

SEQ ID NO: 256450 - DNA, 25 bp, Artificial
  Probe
agtcctgctaacactcatagacagg

SEQ ID NO: 256451 - DNA, 25 bp, Artificial
  Probe
ggtgaactcaaaacagccctcttcc

SEQ ID NO: 256452 - DNA, 25 bp, Artificial
  Probe
ctctaaaatgccaagaaagtctgtt

SEQ ID NO: 256453 - DNA, 25 bp, Artificial
  Probe
ctagtagctgggactactggtgtat

SEQ ID NO: 256454 - DNA, 25 bp, Artificial
  Probe
atccctctgttaatttgaggacagc

SEQ ID NO: 256455 - DNA, 25 bp, Artificial
  Probe
acttcagtctagtgtgttgggaagc

SEQ ID NO: 256456 - DNA, 25 bp, Artificial
  Probe
atgccaagaaagtctgtttggttct

SEQ ID NO: 256457 - DNA, 25 bp, Artificial
  Probe
cttcagtctagtgtgttgggaagct

SEQ ID NO: 256458 - DNA, 25 bp, Artificial
  Probe
tggtgaactcaaaacagccctcttc

SEQ ID NO: 256459 - DNA, 25 bp, Artificial
  Probe
tcacaagtgttctcattgcaggcag

SEQ ID NO: 256460 - DNA, 25 bp, Artificial
  Probe
tcttttaacataactgtactttcca

SEQ ID NO: 256461 - DNA, 25 bp, Artificial
  Probe
acattagtcctgtcatccaacgagt

SEQ ID NO: 256462 - DNA, 25 bp, Artificial
  Probe
tccaacgagtctcacaagtgttctc

SEQ ID NO: 256463 - DNA, 25 bp, Artificial
  Probe
aacgagtctcacaagtgttctcatt

SEQ ID NO: 256464 - DNA, 25 bp, Artificial
  Probe
tcatccaacgagtctcacaagtgtt

SEQ ID NO: 256465 - DNA, 25 bp, Artificial
  Probe
atccaacgagtctcacaagtgttct

SEQ ID NO: 256466 - DNA, 25 bp, Artificial
  Probe
gagtctcacaagtgttctcattgca

SEQ ID NO: 256467 - DNA, 25 bp, Artificial
  Probe
cattagtcctgtcatccaacgagtc

SEQ ID NO: 256468 - DNA, 25 bp, Artificial
  Probe
catccaacgagtctcacaagtgttc

SEQ ID NO: 256469 - DNA, 25 bp, Artificial
  Probe
gtataataaatacacattagtcctg

SEQ ID NO: 256470 - DNA, 25 bp, Artificial
  Probe
ctcacaagtgttctcattgcaggca

SEQ ID NO: 256471 - DNA, 25 bp, Artificial
  Probe
attagtcctgtcatccaacgagtct

SEQ ID NO: 256472 - DNA, 25 bp, Artificial
  Probe
cgagtctcacaagtgttctcattgc

SEQ ID NO: 256473 - DNA, 25 bp, Artificial
  Probe
acgagtctcacaagtgttctcattg

SEQ ID NO: 256474 - DNA, 25 bp, Artificial
  Probe
agtgttctcattgcaggcagagatc

SEQ ID NO: 256475 - DNA, 25 bp, Artificial
  Probe
gcatcattagtcatatgccaatgta

SEQ ID NO: 256476 - DNA, 25 bp, Artificial
  Probe
gtcatccaacgagtctcacaagtgt

SEQ ID NO: 256477 - DNA, 25 bp, Artificial
  Probe
cctgtcatccaacgagtctcacaag

SEQ ID NO: 256478 - DNA, 25 bp, Artificial
  Probe
caacgagtctcacaagtgttctcat

SEQ ID NO: 256479 - DNA, 25 bp, Artificial
  Probe
tctcacaagtgttctcattgcaggc

SEQ ID NO: 256480 - DNA, 25 bp, Artificial
  Probe
tgcatcattagtcatatgccaatgt

SEQ ID NO: 256481 - DNA, 25 bp, Artificial
  Probe
aagtgttctcattgcaggcagagat

SEQ ID NO: 256482 - DNA, 25 bp, Artificial
  Probe
tgtcatccaacgagtctcacaagtg

SEQ ID NO: 256483 - DNA, 25 bp, Artificial
  Probe
ccaacgagtctcacaagtgttctca

SEQ ID NO: 256484 - DNA, 25 bp, Artificial
  Probe
acacattagtcctgtcatccaacga

SEQ ID NO: 256485 - DNA, 25 bp, Artificial
  Probe
gtcctgtcatccaacgagtctcaca

SEQ ID NO: 256486 - DNA, 25 bp, Artificial
  Probe
tctgcatcattagtcatatgccaat

SEQ ID NO: 256487 - DNA, 25 bp, Artificial
  Probe
ctcattgcaggcagagatcctgcaa

SEQ ID NO: 256488 - DNA, 25 bp, Artificial
  Probe
tgttctcattgcaggcagagatcct

SEQ ID NO: 256489 - DNA, 25 bp, Artificial
  Probe
tagtcctgtcatccaacgagtctca

SEQ ID NO: 256490 - DNA, 25 bp, Artificial
  Probe
agtctcacaagtgttctcattgcag

SEQ ID NO: 256491 - DNA, 25 bp, Artificial
  Probe
tcctgtcatccaacgagtctcacaa

SEQ ID NO: 256492 - DNA, 25 bp, Artificial
  Probe
tcatatgccaatgtataataaatac

SEQ ID NO: 256493 - DNA, 25 bp, Artificial
  Probe
caagtgttctcattgcaggcagaga

SEQ ID NO: 256494 - DNA, 25 bp, Artificial
  Probe
ttaacataactgtactttccatttc

SEQ ID NO: 256495 - DNA, 25 bp, Artificial
  Probe
agtcctgtcatccaacgagtctcac

SEQ ID NO: 256496 - DNA, 25 bp, Artificial
  Probe
cacaagtgttctcattgcaggcaga

SEQ ID NO: 256497 - DNA, 25 bp, Artificial
  Probe
ttagtcctgtcatccaacgagtctc

SEQ ID NO: 256498 - DNA, 25 bp, Artificial
  Probe
cacattagtcctgtcatccaacgag

SEQ ID NO: 256499 - DNA, 25 bp, Artificial
  Probe
gtctcacaagtgttctcattgcagg

SEQ ID NO: 256500 - DNA, 25 bp, Artificial
  Probe
gtgttctcattgcaggcagagatcc

SEQ ID NO: 256501 - DNA, 25 bp, Artificial
  Probe
ctgtcatccaacgagtctcacaagt

SEQ ID NO: 256502 - DNA, 25 bp, Artificial
  Probe
catcattagtcatatgccaatgtat

SEQ ID NO: 256503 - DNA, 25 bp, Artificial
  Probe
ctgcatcattagtcatatgccaatg

SEQ ID NO: 256504 - DNA, 25 bp, Artificial
  Probe
acaagtgttctcattgcaggcagag

SEQ ID NO: 256505 - DNA, 25 bp, Artificial
  Probe
ggacctgttggtacagattttaagc

SEQ ID NO: 256506 - DNA, 25 bp, Artificial
  Probe
acctgctcattggagaggtttttat

SEQ ID NO: 256507 - DNA, 25 bp, Artificial
  Probe
tacccctgcagcaacgactacagaa

SEQ ID NO: 256508 - DNA, 25 bp, Artificial
  Probe
tactttacaggctcaggtagctgtc

SEQ ID NO: 256509 - DNA, 25 bp, Artificial
  Probe
tgctacactgacaaccaccagtgca

SEQ ID NO: 256510 - DNA, 25 bp, Artificial
  Probe
agcaacgactacagaacccccgaag

SEQ ID NO: 256511 - DNA, 25 bp, Artificial
  Probe
gttgttactttacaggctcaggtag

SEQ ID NO: 256512 - DNA, 25 bp, Artificial
  Probe
aacagtactgcagctaaaccagcag

SEQ ID NO: 256513 - DNA, 25 bp, Artificial
  Probe
taatttcagccgagtatcttttgat

SEQ ID NO: 256514 - DNA, 25 bp, Artificial
  Probe
ttatttgtattcacgtggtcttcac

SEQ ID NO: 256515 - DNA, 25 bp, Artificial
  Probe
accagcagcttcaataacaagtaag

SEQ ID NO: 256516 - DNA, 25 bp, Artificial
  Probe
agccgagtatcttttgatattctta

SEQ ID NO: 256517 - DNA, 25 bp, Artificial
  Probe
ctttacaggctcaggtagctgtcca

SEQ ID NO: 256518 - DNA, 25 bp, Artificial
  Probe
gtacaacaaacagtactgcagctaa

SEQ ID NO: 256519 - DNA, 25 bp, Artificial
  Probe
gtactgcagctaaaccagcagcttc

SEQ ID NO: 256520 - DNA, 25 bp, Artificial
  Probe
actagtacaacaaacagtactgcag

SEQ ID NO: 256521 - DNA, 25 bp, Artificial
  Probe
tagcaacctgctcattggagaggtt

SEQ ID NO: 256522 - DNA, 25 bp, Artificial
  Probe
caaggacctgttggtacagatttta

SEQ ID NO: 256523 - DNA, 25 bp, Artificial
  Probe
tatagtaatttcagccgagtatctt

SEQ ID NO: 256524 - DNA, 25 bp, Artificial
  Probe
agctgtccaaggacctgttggtaca

SEQ ID NO: 256525 - DNA, 25 bp, Artificial
  Probe
tgacaaccaccagtgcaaccagtaa

SEQ ID NO: 256526 - DNA, 25 bp, Artificial
  Probe
actgacaaccaccagtgcaaccagt

SEQ ID NO: 256527 - DNA, 25 bp, Artificial
  Probe
acaagtaagcctgctacactgacaa

SEQ ID NO: 256528 - DNA, 25 bp, Artificial
  Probe
gtacagattttaagcccttaaatag

SEQ ID NO: 256529 - DNA, 25 bp, Artificial
  Probe
ccaaggacctgttggtacagatttt

SEQ ID NO: 256530 - DNA, 25 bp, Artificial
  Probe
tgtccaaggacctgttggtacagat

SEQ ID NO: 256531 - DNA, 25 bp, Artificial
  Probe
ccagcagcttcaataacaagtaagc

SEQ ID NO: 256532 - DNA, 25 bp, Artificial
  Probe
gcagctaaaccagcagcttcaataa

SEQ ID NO: 256533 - DNA, 25 bp, Artificial
  Probe
aagggttgttactttacaggctcag

SEQ ID NO: 256534 - DNA, 25 bp, Artificial
  Probe
tattcacgtggtcttcactgatttt

SEQ ID NO: 256535 - DNA, 25 bp, Artificial
  Probe
tacaggctcaggtagctgtccaagg

SEQ ID NO: 256536 - DNA, 25 bp, Artificial
  Probe
atgctaaacattggatattgacatc

SEQ ID NO: 256537 - DNA, 25 bp, Artificial
  Probe
gtaagcctgctacactgacaaccac

SEQ ID NO: 256538 - DNA, 25 bp, Artificial
  Probe
gctacactgacaaccaccagtgcaa

SEQ ID NO: 256539 - DNA, 25 bp, Artificial
  Probe
ttgttactttacaggctcaggtagc

SEQ ID NO: 256540 - DNA, 25 bp, Artificial
  Probe
aatagtacccctgcagcaacgacta

SEQ ID NO: 256541 - DNA, 25 bp, Artificial
  Probe
gcccttaaatagtacccctgcagca

SEQ ID NO: 256542 - DNA, 25 bp, Artificial
  Probe
caggtagctgtccaaggacctgttg

SEQ ID NO: 256543 - DNA, 25 bp, Artificial
  Probe
caaacagtactgcagctaaaccagc

SEQ ID NO: 256544 - DNA, 25 bp, Artificial
  Probe
caagtaagcctgctacactgacaac

SEQ ID NO: 256545 - DNA, 25 bp, Artificial
  Probe
gcaacctgctcattggagaggtttt

SEQ ID NO: 256546 - DNA, 25 bp, Artificial
  Probe
accagtgcaaccagtaagttgatcc

SEQ ID NO: 256547 - DNA, 25 bp, Artificial
  Probe
cagcttcaataacaagtaagcctgc

SEQ ID NO: 256548 - DNA, 25 bp, Artificial
  Probe
aaatcatagcaacctgctcattgga

SEQ ID NO: 256549 - DNA, 25 bp, Artificial
  Probe
catttggttttctgttatgctaaac

SEQ ID NO: 256550 - DNA, 25 bp, Artificial
  Probe
aagcccttaaatagtacccctgcag

SEQ ID NO: 256551 - DNA, 25 bp, Artificial
  Probe
gaccgtgatgttgactacttgaggg

SEQ ID NO: 256552 - DNA, 25 bp, Artificial
  Probe
atcagaccgtgatgttgactacttg

SEQ ID NO: 256553 - DNA, 25 bp, Artificial
  Probe
ccgtgatgttgactacttgagggtg

SEQ ID NO: 256554 - DNA, 25 bp, Artificial
  Probe
tccttccatcagtgcgggactttgt

SEQ ID NO: 256555 - DNA, 25 bp, Artificial
  Probe
agagggactgcatccttgatatcag

SEQ ID NO: 256556 - DNA, 25 bp, Artificial
  Probe
gggactgcatccttgatatcagacc

SEQ ID NO: 256557 - DNA, 25 bp, Artificial
  Probe
ttaatttccaaaactgtagggatct

SEQ ID NO: 256558 - DNA, 25 bp, Artificial
  Probe
ctgtagggatcttctttctccttcc

SEQ ID NO: 256559 - DNA, 25 bp, Artificial
  Probe
catcagtgcgggactttgtgaactt

SEQ ID NO: 256560 - DNA, 25 bp, Artificial
  Probe
ccttgatatcagaccgtgatgttga

SEQ ID NO: 256561 - DNA, 25 bp, Artificial
  Probe
tatcagaccgtgatgttgactactt

SEQ ID NO: 256562 - DNA, 25 bp, Artificial
  Probe
ggtgtcagcccaggacctcaccgat

SEQ ID NO: 256563 - DNA, 25 bp, Artificial
  Probe
tctgacttcgcatgtactgtgctgc

SEQ ID NO: 256564 - DNA, 25 bp, Artificial
  Probe
atttccaaaactgtagggatcttct

SEQ ID NO: 256565 - DNA, 25 bp, Artificial
  Probe
attgcatccaggtgtcagcccagga

SEQ ID NO: 256566 - DNA, 25 bp, Artificial
  Probe
aagtattgcatccaggtgtcagccc

SEQ ID NO: 256567 - DNA, 25 bp, Artificial
  Probe
cctgtcctgagttcgaattctgact

SEQ ID NO: 256568 - DNA, 25 bp, Artificial
  Probe
tctcaagtaccgacttcgctaccgg

SEQ ID NO: 256569 - DNA, 25 bp, Artificial
  Probe
gaggagcctctcacttccgccaggt

SEQ ID NO: 256570 - DNA, 25 bp, Artificial
  Probe
tcagcccaggacctcaccgattatg

SEQ ID NO: 256571 - DNA, 25 bp, Artificial
  Probe
ctcacttccgccaggtgggacctat

SEQ ID NO: 256572 - DNA, 25 bp, Artificial
  Probe
gcccaggacctcaccgattatggga

SEQ ID NO: 256573 - DNA, 25 bp, Artificial
  Probe
actgcatccttgatatcagaccgtg

SEQ ID NO: 256574 - DNA, 25 bp, Artificial
  Probe
ttccaaaactgtagggatcttcttt

SEQ ID NO: 256575 - DNA, 25 bp, Artificial
  Probe
aggtgtcagcccaggacctcaccga

SEQ ID NO: 256576 - DNA, 25 bp, Artificial
  Probe
gcatccaggtgtcagcccaggacct

SEQ ID NO: 256577 - DNA, 25 bp, Artificial
  Probe
taatttccaaaactgtagggatctt

SEQ ID NO: 256578 - DNA, 25 bp, Artificial
  Probe
tcaagtaccgacttcgctaccggcg

SEQ ID NO: 256579 - DNA, 25 bp, Artificial
  Probe
tgaagagggactgcatccttgatat

SEQ ID NO: 256580 - DNA, 25 bp, Artificial
  Probe
gtagggatcttctttctccttccat

SEQ ID NO: 256581 - DNA, 25 bp, Artificial
  Probe
ttctttctccttccatcagtgcggg

SEQ ID NO: 256582 - DNA, 25 bp, Artificial
  Probe
gagttcgaattctgacttcgcatgt

SEQ ID NO: 256583 - DNA, 25 bp, Artificial
  Probe
tctttctccttccatcagtgcggga

SEQ ID NO: 256584 - DNA, 25 bp, Artificial
  Probe
gatatcagaccgtgatgttgactac

SEQ ID NO: 256585 - DNA, 25 bp, Artificial
  Probe
ttctgacttcgcatgtactgtgctg

SEQ ID NO: 256586 - DNA, 25 bp, Artificial
  Probe
ttctccttccatcagtgcgggactt

SEQ ID NO: 256587 - DNA, 25 bp, Artificial
  Probe
aaactgtagggatcttctttctcct

SEQ ID NO: 256588 - DNA, 25 bp, Artificial
  Probe
acttccgccaggtgggacctattga

SEQ ID NO: 256589 - DNA, 25 bp, Artificial
  Probe
cctgagttcgaattctgacttcgca

SEQ ID NO: 256590 - DNA, 25 bp, Artificial
  Probe
cgaattctgacttcgcatgtactgt

SEQ ID NO: 256591 - DNA, 25 bp, Artificial
  Probe
tgcatccttgatatcagaccgtgat

SEQ ID NO: 256592 - DNA, 25 bp, Artificial
  Probe
atccttgatatcagaccgtgatgtt

SEQ ID NO: 256593 - DNA, 25 bp, Artificial
  Probe
gtggcctgtcctgagttcgaattct

SEQ ID NO: 256594 - DNA, 25 bp, Artificial
  Probe
tcagtgcgggactttgtgaacttta

SEQ ID NO: 256595 - DNA, 25 bp, Artificial
  Probe
ggacatcttctctctcaagtaccga

SEQ ID NO: 256596 - DNA, 25 bp, Artificial
  Probe
gggatcttctttctccttccatcag

SEQ ID NO: 256597 - DNA, 25 bp, Artificial
  Probe
tgatgggcgtgtgtgcaccgcttac

SEQ ID NO: 256598 - DNA, 25 bp, Artificial
  Probe
cttaccctctgtaggaggcacaagt

SEQ ID NO: 256599 - DNA, 25 bp, Artificial
  Probe
ggacatccaacctagacgctaaaca

SEQ ID NO: 256600 - DNA, 25 bp, Artificial
  Probe
atgggcgtgtgtgcaccgcttactc

SEQ ID NO: 256601 - DNA, 25 bp, Artificial
  Probe
aagatgggattctcttctgctggtt

SEQ ID NO: 256602 - DNA, 25 bp, Artificial
  Probe
ccagtgttcacagaaaggttttggt

SEQ ID NO: 256603 - DNA, 25 bp, Artificial
  Probe
ttgcttgtgttccagataaaagtac

SEQ ID NO: 256604 - DNA, 25 bp, Artificial
  Probe
ctttgatgggcgtgtgtgcaccgct

SEQ ID NO: 256605 - DNA, 25 bp, Artificial
  Probe
agacgctaaacactggaactgagag

SEQ ID NO: 256606 - DNA, 25 bp, Artificial
  Probe
agagacggtttctgggacatccaac

SEQ ID NO: 256607 - DNA, 25 bp, Artificial
  Probe
cttactccagtgtcccgcttaggaa

SEQ ID NO: 256608 - DNA, 25 bp, Artificial
  Probe
gtcttaccctctgtaggaggcacaa

SEQ ID NO: 256609 - DNA, 25 bp, Artificial
  Probe
gtgtcccgcttaggaagatgggatt

SEQ ID NO: 256610 - DNA, 25 bp, Artificial
  Probe
accataccgtggtcttggccctcta

SEQ ID NO: 256611 - DNA, 25 bp, Artificial
  Probe
tctgggacatccaacctagacgcta

SEQ ID NO: 256612 - DNA, 25 bp, Artificial
  Probe
atgtcttaccctctgtaggaggcac

SEQ ID NO: 256613 - DNA, 25 bp, Artificial
  Probe
ggattctcttctgctggtttctgtc

SEQ ID NO: 256614 - DNA, 25 bp, Artificial
  Probe
ctcttctgctggtttctgtcttaca

SEQ ID NO: 256615 - DNA, 25 bp, Artificial
  Probe
tgtgtgcaccgcttactccagtgtc

SEQ ID NO: 256616 - DNA, 25 bp, Artificial
  Probe
tgtcccgcttaggaagatgggattc

SEQ ID NO: 256617 - DNA, 25 bp, Artificial
  Probe
aggaggcacaagtcaacagttgctt

SEQ ID NO: 256618 - DNA, 25 bp, Artificial
  Probe
tatgtcttaccctctgtaggaggca

SEQ ID NO: 256619 - DNA, 25 bp, Artificial
  Probe
taagagacggtttctgggacatcca

SEQ ID NO: 256620 - DNA, 25 bp, Artificial
  Probe
tggtgcccagtgttcacagaaaggt

SEQ ID NO: 256621 - DNA, 25 bp, Artificial
  Probe
ccagtgtcccgcttaggaagatggg

SEQ ID NO: 256622 - DNA, 25 bp, Artificial
  Probe
cctcaaatgtgtggaggctttgatg

SEQ ID NO: 256623 - DNA, 25 bp, Artificial
  Probe
ttgtgttccagataaaagtacttca

SEQ ID NO: 256624 - DNA, 25 bp, Artificial
  Probe
tctaacctcaaatgtgtggaggctt

SEQ ID NO: 256625 - DNA, 25 bp, Artificial
  Probe
gggcgtgtgtgcaccgcttactcca

SEQ ID NO: 256626 - DNA, 25 bp, Artificial
  Probe
acaagtcaacagttgcttatggaaa

SEQ ID NO: 256627 - DNA, 25 bp, Artificial
  Probe
gaggcacaagtcaacagttgcttat

SEQ ID NO: 256628 - DNA, 25 bp, Artificial
  Probe
taaacactggaactgagagatgtct

SEQ ID NO: 256629 - DNA, 25 bp, Artificial
  Probe
cccgcttaggaagatgggattctct

SEQ ID NO: 256630 - DNA, 25 bp, Artificial
  Probe
cagatatgtcttaccctctgtagga

SEQ ID NO: 256631 - DNA, 25 bp, Artificial
  Probe
tggtgtggtctaggagactgccctc

SEQ ID NO: 256632 - DNA, 25 bp, Artificial
  Probe
gtgtgcaccgcttactccagtgtcc

SEQ ID NO: 256633 - DNA, 25 bp, Artificial
  Probe
gtcccgcttaggaagatgggattct

SEQ ID NO: 256634 - DNA, 25 bp, Artificial
  Probe
tggtcttggccctctaacctcaaat

SEQ ID NO: 256635 - DNA, 25 bp, Artificial
  Probe
caacctagacgctaaacactggaac

SEQ ID NO: 256636 - DNA, 25 bp, Artificial
  Probe
acactggaactgagagatgtctgtg

SEQ ID NO: 256637 - DNA, 25 bp, Artificial
  Probe
cgcttactccagtgtcccgcttagg

SEQ ID NO: 256638 - DNA, 25 bp, Artificial
  Probe
cataccgtggtcttggccctctaac

SEQ ID NO: 256639 - DNA, 25 bp, Artificial
  Probe
accctctgtaggaggcacaagtcaa

SEQ ID NO: 256640 - DNA, 25 bp, Artificial
  Probe
acggtttctgggacatccaacctag

SEQ ID NO: 256641 - DNA, 25 bp, Artificial
  Probe
aacactggaactgagagatgtctgt

SEQ ID NO: 256642 - DNA, 25 bp, Artificial
  Probe
ttcagatatgtcttaccctctgtag

SEQ ID NO: 256643 - DNA, 25 bp, Artificial
  Probe
ccctactctgtagaatctgggactg

SEQ ID NO: 256644 - DNA, 25 bp, Artificial
  Probe
acttgcaaacggattggcctaatga

SEQ ID NO: 256645 - DNA, 25 bp, Artificial
  Probe
gtccctactctgtagaatctgggac

SEQ ID NO: 256646 - DNA, 25 bp, Artificial
  Probe
gcaaatgtttgtgtggcctccttaa

SEQ ID NO: 256647 - DNA, 25 bp, Artificial
  Probe
gtcattcctagcttccttgcttcag

SEQ ID NO: 256648 - DNA, 25 bp, Artificial
  Probe
actctgtagaatctgggactgggca

SEQ ID NO: 256649 - DNA, 25 bp, Artificial
  Probe
ttcaacctggagagatggaaaatca

SEQ ID NO: 256650 - DNA, 25 bp, Artificial
  Probe
ctgggcaaatgtttgtgtggcctcc

SEQ ID NO: 256651 - DNA, 25 bp, Artificial
  Probe
tggcctccttaaactagctgttatg

SEQ ID NO: 256652 - DNA, 25 bp, Artificial
  Probe
gcctccttaaactagctgttatgtt

SEQ ID NO: 256653 - DNA, 25 bp, Artificial
  Probe
tccttgcttcagaattgaaatggaa

SEQ ID NO: 256654 - DNA, 25 bp, Artificial
  Probe
ccttaaactagctgttatgttatga

SEQ ID NO: 256655 - DNA, 25 bp, Artificial
  Probe
tcctagcttccttgcttcagaattg

SEQ ID NO: 256656 - DNA, 25 bp, Artificial
  Probe
gggtgtccctactctgtagaatctg

SEQ ID NO: 256657 - DNA, 25 bp, Artificial
  Probe
gtgtggcctccttaaactagctgtt

SEQ ID NO: 256658 - DNA, 25 bp, Artificial
  Probe
ttccttgcttcagaattgaaatgga

SEQ ID NO: 256659 - DNA, 25 bp, Artificial
  Probe
ttgtgtggcctccttaaactagctg

SEQ ID NO: 256660 - DNA, 25 bp, Artificial
  Probe
tactctgtagaatctgggactgggc

SEQ ID NO: 256661 - DNA, 25 bp, Artificial
  Probe
agcttccttgcttcagaattgaaat

SEQ ID NO: 256662 - DNA, 25 bp, Artificial
  Probe
ccttgcttcagaattgaaatggaag

SEQ ID NO: 256663 - DNA, 25 bp, Artificial
  Probe
acggattggcctaatgaagaagttc

SEQ ID NO: 256664 - DNA, 25 bp, Artificial
  Probe
tgtccctactctgtagaatctggga

SEQ ID NO: 256665 - DNA, 25 bp, Artificial
  Probe
cctactctgtagaatctgggactgg

SEQ ID NO: 256666 - DNA, 25 bp, Artificial
  Probe
ggtgtccctactctgtagaatctgg

SEQ ID NO: 256667 - DNA, 25 bp, Artificial
  Probe
ctactctgtagaatctgggactggg

SEQ ID NO: 256668 - DNA, 25 bp, Artificial
  Probe
gtggcctccttaaactagctgttat

SEQ ID NO: 256669 - DNA, 25 bp, Artificial
  Probe
ggcctccttaaactagctgttatgt

SEQ ID NO: 256670 - DNA, 25 bp, Artificial
  Probe
ctctgtagaatctgggactgggcaa

SEQ ID NO: 256671 - DNA, 25 bp, Artificial
  Probe
cttccttgcttcagaattgaaatgg

SEQ ID NO: 256672 - DNA, 25 bp, Artificial
  Probe
tccttaaactagctgttatgttatg

SEQ ID NO: 256673 - DNA, 25 bp, Artificial
  Probe
ggggtgtccctactctgtagaatct

SEQ ID NO: 256674 - DNA, 25 bp, Artificial
  Probe
tcaacctggagagatggaaaatcag

SEQ ID NO: 256675 - DNA, 25 bp, Artificial
  Probe
ggaaaatcagctctcataactaagt

SEQ ID NO: 256676 - DNA, 25 bp, Artificial
  Probe
ctagcttccttgcttcagaattgaa

SEQ ID NO: 256677 - DNA, 25 bp, Artificial
  Probe
actgggcaaatgtttgtgtggcctc

SEQ ID NO: 256678 - DNA, 25 bp, Artificial
  Probe
ttgcaaacggattggcctaatgaag

SEQ ID NO: 256679 - DNA, 25 bp, Artificial
  Probe
gttcaacctggagagatggaaaatc

SEQ ID NO: 256680 - DNA, 25 bp, Artificial
  Probe
cctagcttccttgcttcagaattga

SEQ ID NO: 256681 - DNA, 25 bp, Artificial
  Probe
tgtgtggcctccttaaactagctgt

SEQ ID NO: 256682 - DNA, 25 bp, Artificial
  Probe
gtttgtgtggcctccttaaactagc

SEQ ID NO: 256683 - DNA, 25 bp, Artificial
  Probe
tggaaaatcagctctcataactaag

SEQ ID NO: 256684 - DNA, 25 bp, Artificial
  Probe
gtgtccctactctgtagaatctggg

SEQ ID NO: 256685 - DNA, 25 bp, Artificial
  Probe
tttgtgtggcctccttaaactagct

SEQ ID NO: 256686 - DNA, 25 bp, Artificial
  Probe
caaatgtttgtgtggcctccttaaa

SEQ ID NO: 256687 - DNA, 25 bp, Artificial
  Probe
cttgcaaacggattggcctaatgaa

SEQ ID NO: 256688 - DNA, 25 bp, Artificial
  Probe
gcttccttgcttcagaattgaaatg

SEQ ID NO: 256689 - DNA, 25 bp, Artificial
  Probe
ctacagcaattatggcttaagatct

SEQ ID NO: 256690 - DNA, 25 bp, Artificial
  Probe
cagctacagcaattatggcttaaga

SEQ ID NO: 256691 - DNA, 25 bp, Artificial
  Probe
aaataaggcgcccagcagctacagc

SEQ ID NO: 256692 - DNA, 25 bp, Artificial
  Probe
aggcgcccagcagctacagcaatta

SEQ ID NO: 256693 - DNA, 25 bp, Artificial
  Probe
agaaataaggcgcccagcagctaca

SEQ ID NO: 256694 - DNA, 25 bp, Artificial
  Probe
agctacagcaattatggcttaagat

SEQ ID NO: 256695 - DNA, 25 bp, Artificial
  Probe
cccagcagctacagcaattatggct

SEQ ID NO: 256696 - DNA, 25 bp, Artificial
  Probe
aaggcgcccagcagctacagcaatt

SEQ ID NO: 256697 - DNA, 25 bp, Artificial
  Probe
gcccagcagctacagcaattatggc

SEQ ID NO: 256698 - DNA, 25 bp, Artificial
  Probe
ggcgcccagcagctacagcaattat

SEQ ID NO: 256699 - DNA, 25 bp, Artificial
  Probe
taaggcgcccagcagctacagcaat

SEQ ID NO: 256700 - DNA, 25 bp, Artificial
  Probe
cagcagctacagcaattatggctta

SEQ ID NO: 256701 - DNA, 25 bp, Artificial
  Probe
agcagctacagcaattatggcttaa

SEQ ID NO: 256702 - DNA, 25 bp, Artificial
  Probe
aattatggcttaagatctttttatt

SEQ ID NO: 256703 - DNA, 25 bp, Artificial
  Probe
gagaaataaggcgcccagcagctac

SEQ ID NO: 256704 - DNA, 25 bp, Artificial
  Probe
ttatggcttaagatctttttattaa

SEQ ID NO: 256705 - DNA, 25 bp, Artificial
  Probe
gcagctacagcaattatggcttaag

SEQ ID NO: 256706 - DNA, 25 bp, Artificial
  Probe
cgcccagcagctacagcaattatgg

SEQ ID NO: 256707 - DNA, 25 bp, Artificial
  Probe
gcgcccagcagctacagcaattatg

SEQ ID NO: 256708 - DNA, 25 bp, Artificial
  Probe
ataaggcgcccagcagctacagcaa

SEQ ID NO: 256709 - DNA, 25 bp, Artificial
  Probe
aataaggcgcccagcagctacagca

SEQ ID NO: 256710 - DNA, 25 bp, Artificial
  Probe
gaaataaggcgcccagcagctacag

SEQ ID NO: 256711 - DNA, 25 bp, Artificial
  Probe
tacagcaattatggcttaagatctt

SEQ ID NO: 256712 - DNA, 25 bp, Artificial
  Probe
gctacagcaattatggcttaagatc

SEQ ID NO: 256713 - DNA, 25 bp, Artificial
  Probe
acagcaattatggcttaagatcttt

SEQ ID NO: 256714 - DNA, 25 bp, Artificial
  Probe
agccgtttgcccttgaattgatgcc

SEQ ID NO: 256715 - DNA, 25 bp, Artificial
  Probe
agtaggacacccaacgccttggctt

SEQ ID NO: 256716 - DNA, 25 bp, Artificial
  Probe
cctgtttctggacttaacaaccttg

SEQ ID NO: 256717 - DNA, 25 bp, Artificial
  Probe
cccttgaattgatgccctttgatgt

SEQ ID NO: 256718 - DNA, 25 bp, Artificial
  Probe
gtaggacacccaacgccttggcttt

SEQ ID NO: 256719 - DNA, 25 bp, Artificial
  Probe
cttaacaaccttgtgaatagcacag

SEQ ID NO: 256720 - DNA, 25 bp, Artificial
  Probe
aattgatgccctttgatgtgtgcca

SEQ ID NO: 256721 - DNA, 25 bp, Artificial
  Probe
tcaaactccctgtactcacagtagg

SEQ ID NO: 256722 - DNA, 25 bp, Artificial
  Probe
cctgcatagcccataggaagtaaca

SEQ ID NO: 256723 - DNA, 25 bp, Artificial
  Probe
cacttcggtttcctgtttctggact

SEQ ID NO: 256724 - DNA, 25 bp, Artificial
  Probe
accttgtgaatagcacagtcaagag

SEQ ID NO: 256725 - DNA, 25 bp, Artificial
  Probe
actccctgtactcacagtaggacac

SEQ ID NO: 256726 - DNA, 25 bp, Artificial
  Probe
taacaaccttgtgaatagcacagtc

SEQ ID NO: 256727 - DNA, 25 bp, Artificial
  Probe
ccctttgatgtgtgccacgtagtga

SEQ ID NO: 256728 - DNA, 25 bp, Artificial
  Probe
aatctcagtgcttcctcggtaccgc

SEQ ID NO: 256729 - DNA, 25 bp, Artificial
  Probe
ggctttcaggcctggccacggctac

SEQ ID NO: 256730 - DNA, 25 bp, Artificial
  Probe
tgaaagtgcaagtcttcagtctccc

SEQ ID NO: 256731 - DNA, 25 bp, Artificial
  Probe
gtgtggtgagctcagccgtttgccc

SEQ ID NO: 256732 - DNA, 25 bp, Artificial
  Probe
atagcccataggaagtaacactgta

SEQ ID NO: 256733 - DNA, 25 bp, Artificial
  Probe
agctcagccgtttgcccttgaattg

SEQ ID NO: 256734 - DNA, 25 bp, Artificial
  Probe
tgccacgtagtgaaagtgcaagtct

SEQ ID NO: 256735 - DNA, 25 bp, Artificial
  Probe
aaagtgcaagtcttcagtctcccac

SEQ ID NO: 256736 - DNA, 25 bp, Artificial
  Probe
acaaccttgtgaatagcacagtcaa

SEQ ID NO: 256737 - DNA, 25 bp, Artificial
  Probe
aagtaacactgtagagctccatatt

SEQ ID NO: 256738 - DNA, 25 bp, Artificial
  Probe
cctgtactcacagtaggacacccaa

SEQ ID NO: 256739 - DNA, 25 bp, Artificial
  Probe
cctggccacggctacagggagcttg

SEQ ID NO: 256740 - DNA, 25 bp, Artificial
  Probe
gctccactgaaaagcagctcctcaa

SEQ ID NO: 256741 - DNA, 25 bp, Artificial
  Probe
agcacagtcaagagaaatggatacc

SEQ ID NO: 256742 - DNA, 25 bp, Artificial
  Probe
caccacttcggtttcctgtttctgg

SEQ ID NO: 256743 - DNA, 25 bp, Artificial
  Probe
gacttaacaaccttgtgaatagcac

SEQ ID NO: 256744 - DNA, 25 bp, Artificial
  Probe
gtactcacagtaggacacccaacgc

SEQ ID NO: 256745 - DNA, 25 bp, Artificial
  Probe
tcacagtaggacacccaacgccttg

SEQ ID NO: 256746 - DNA, 25 bp, Artificial
  Probe
acggctacagggagcttggcacctg

SEQ ID NO: 256747 - DNA, 25 bp, Artificial
  Probe
tgtggtgagctcagccgtttgccct

SEQ ID NO: 256748 - DNA, 25 bp, Artificial
  Probe
cttctcaggctggagtgatggcgta

SEQ ID NO: 256749 - DNA, 25 bp, Artificial
  Probe
cctggacggcttctcaggctggagt

SEQ ID NO: 256750 - DNA, 25 bp, Artificial
  Probe
gctacagggagcttggcacctggac

SEQ ID NO: 256751 - DNA, 25 bp, Artificial
  Probe
gaaatggatacctgcatagcccata

SEQ ID NO: 256752 - DNA, 25 bp, Artificial
  Probe
cttggcacctggacggcttctcagg

SEQ ID NO: 256753 - DNA, 25 bp, Artificial
  Probe
ggatacctgcatagcccataggaag

SEQ ID NO: 256754 - DNA, 25 bp, Artificial
  Probe
ggagcttggcacctggacggcttct

SEQ ID NO: 256755 - DNA, 25 bp, Artificial
  Probe
tgagctcagccgtttgcccttgaat

SEQ ID NO: 256756 - DNA, 25 bp, Artificial
  Probe
ctacagggagcttggcacctggacg

SEQ ID NO: 256757 - DNA, 25 bp, Artificial
  Probe
ccaccacttcggtttcctgtttctg

SEQ ID NO: 256758 - DNA, 25 bp, Artificial
  Probe
cacctggacggcttctcaggctgga

SEQ ID NO: 256759 - DNA, 25 bp, Artificial
  Probe
gatgtgtgccacgtagtgaaagtgc

SEQ ID NO: 256760 - DNA, 25 bp, Artificial
  Probe
ctgcagggatacatcgaagggatga

SEQ ID NO: 256761 - DNA, 25 bp, Artificial
  Probe
ccctgcctctgatggatatcatgga

SEQ ID NO: 256762 - DNA, 25 bp, Artificial
  Probe
catggagacggaagttctggacatc

SEQ ID NO: 256763 - DNA, 25 bp, Artificial
  Probe
aggctgtactgtttgtctcagtgaa

SEQ ID NO: 256764 - DNA, 25 bp, Artificial
  Probe
gcctctgatggatatcatggagacg

SEQ ID NO: 256765 - DNA, 25 bp, Artificial
  Probe
tagagcagcagaacaggctgcccct

SEQ ID NO: 256766 - DNA, 25 bp, Artificial
  Probe
tccacgattggcaggagccacttca

SEQ ID NO: 256767 - DNA, 25 bp, Artificial
  Probe
ctccagctcaagtggccgacgagac

SEQ ID NO: 256768 - DNA, 25 bp, Artificial
  Probe
tatcaaagccgcatcgagcctactg

SEQ ID NO: 256769 - DNA, 25 bp, Artificial
  Probe
aaagccgcatcgagcctactggata

SEQ ID NO: 256770 - DNA, 25 bp, Artificial
  Probe
cagaagtcagtctatcaaagccgca

SEQ ID NO: 256771 - DNA, 25 bp, Artificial
  Probe
tcagtctatcaaagccgcatcgagc

SEQ ID NO: 256772 - DNA, 25 bp, Artificial
  Probe
ctaaagagctgcagggatacatcga

SEQ ID NO: 256773 - DNA, 25 bp, Artificial
  Probe
catcctcaagaaagccctcagtagt

SEQ ID NO: 256774 - DNA, 25 bp, Artificial
  Probe
gcaggagccacttcatgactaaaga

SEQ ID NO: 256775 - DNA, 25 bp, Artificial
  Probe
aagctcgaacccatctgcatgaaat

SEQ ID NO: 256776 - DNA, 25 bp, Artificial
  Probe
agaagcgccggaacaagaggctgta

SEQ ID NO: 256777 - DNA, 25 bp, Artificial
  Probe
gaacaagaggctgtactgtttgtct

SEQ ID NO: 256778 - DNA, 25 bp, Artificial
  Probe
gaaagccctcagtagtccacgattg

SEQ ID NO: 256779 - DNA, 25 bp, Artificial
  Probe
tcttcagaatcagaagtcagtctat

SEQ ID NO: 256780 - DNA, 25 bp, Artificial
  Probe
catcgagcctactggatagagcagc

SEQ ID NO: 256781 - DNA, 25 bp, Artificial
  Probe
caagaaagccctcagtagtccacga

SEQ ID NO: 256782 - DNA, 25 bp, Artificial
  Probe
ctcaagtggccgacgagacgtcctc

SEQ ID NO: 256783 - DNA, 25 bp, Artificial
  Probe
ttggcaggagccacttcatgactaa

SEQ ID NO: 256784 - DNA, 25 bp, Artificial
  Probe
ttagcaacatcttcagaatcagaag

SEQ ID NO: 256785 - DNA, 25 bp, Artificial
  Probe
tcaagtggccgacgagacgtcctcc

SEQ ID NO: 256786 - DNA, 25 bp, Artificial
  Probe
gcaacatcttcagaatcagaagtca

SEQ ID NO: 256787 - DNA, 25 bp, Artificial
  Probe
acaagaggctgtactgtttgtctca

SEQ ID NO: 256788 - DNA, 25 bp, Artificial
  Probe
tcagtagtccacgattggcaggagc

SEQ ID NO: 256789 - DNA, 25 bp, Artificial
  Probe
cttcagaatcagaagtcagtctatc

SEQ ID NO: 256790 - DNA, 25 bp, Artificial
  Probe
agctgcagggatacatcgaagggat

SEQ ID NO: 256791 - DNA, 25 bp, Artificial
  Probe
agagcagcagaacaggctgcccctg

SEQ ID NO: 256792 - DNA, 25 bp, Artificial
  Probe
ctactggatagagcagcagaacagg

SEQ ID NO: 256793 - DNA, 25 bp, Artificial
  Probe
gaagttctggacatcctcaagaaag

SEQ ID NO: 256794 - DNA, 25 bp, Artificial
  Probe
ccgcatcgagcctactggatagagc

SEQ ID NO: 256795 - DNA, 25 bp, Artificial
  Probe
tttgtctcagtgaacctccagctca

SEQ ID NO: 256796 - DNA, 25 bp, Artificial
  Probe
actgtttgtctcagtgaacctccag

SEQ ID NO: 256797 - DNA, 25 bp, Artificial
  Probe
acgattggcaggagccacttcatga

SEQ ID NO: 256798 - DNA, 25 bp, Artificial
  Probe
tactgtttgtctcagtgaacctcca

SEQ ID NO: 256799 - DNA, 25 bp, Artificial
  Probe
cggaagttctggacatcctcaagaa

SEQ ID NO: 256800 - DNA, 25 bp, Artificial
  Probe
ctctgatggatatcatggagacgga

SEQ ID NO: 256801 - DNA, 25 bp, Artificial
  Probe
tcaagaaagccctcagtagtccacg

SEQ ID NO: 256802 - DNA, 25 bp, Artificial
  Probe
cgccggaacaagaggctgtactgtt

SEQ ID NO: 256803 - DNA, 25 bp, Artificial
  Probe
gtagtccacgattggcaggagccac

SEQ ID NO: 256804 - DNA, 25 bp, Artificial
  Probe
aatcagaagtcagtctatcaaagcc

SEQ ID NO: 256805 - DNA, 25 bp, Artificial
  Probe
ccttggagcgtgagatcgaagagaa

SEQ ID NO: 256806 - DNA, 25 bp, Artificial
  Probe
tttgatgctatacagacacagaaaa

SEQ ID NO: 256807 - DNA, 25 bp, Artificial
  Probe
agacacagaaaatccaaattcacgg

SEQ ID NO: 256808 - DNA, 25 bp, Artificial
  Probe
acctgctgctccaggtgaaggactg

SEQ ID NO: 256809 - DNA, 25 bp, Artificial
  Probe
ccaatgaagctgtacctgctgctcc

SEQ ID NO: 256810 - DNA, 25 bp, Artificial
  Probe
actcctcagcgtcctgctgattttg

SEQ ID NO: 256811 - DNA, 25 bp, Artificial
  Probe
ctcctcagcgtcctgctgattttgt

SEQ ID NO: 256812 - DNA, 25 bp, Artificial
  Probe
caggacccgcacatctccagagggg

SEQ ID NO: 256813 - DNA, 25 bp, Artificial
  Probe
tcagctacgccgttggtggactcct

SEQ ID NO: 256814 - DNA, 25 bp, Artificial
  Probe
tgctgctccaggtgaaggactgcat

SEQ ID NO: 256815 - DNA, 25 bp, Artificial
  Probe
gctacgccgttggtggactcctcag

SEQ ID NO: 256816 - DNA, 25 bp, Artificial
  Probe
tacgccgttggtggactcctcagcg

SEQ ID NO: 256817 - DNA, 25 bp, Artificial
  Probe
ccaaattcacggatcctggaaaggg

SEQ ID NO: 256818 - DNA, 25 bp, Artificial
  Probe
ggtggactcctcagcgtcctgctga

SEQ ID NO: 256819 - DNA, 25 bp, Artificial
  Probe
tgtgcacattccaatgaagctgtac

SEQ ID NO: 256820 - DNA, 25 bp, Artificial
  Probe
tccaatgaagctgtacctgctgctc

SEQ ID NO: 256821 - DNA, 25 bp, Artificial
  Probe
ttgttggtgactgcagctttgatgc

SEQ ID NO: 256822 - DNA, 25 bp, Artificial
  Probe
atgaagctgtacctgctgctccagg

SEQ ID NO: 256823 - DNA, 25 bp, Artificial
  Probe
tgtacctgctgctccaggtgaagga

SEQ ID NO: 256824 - DNA, 25 bp, Artificial
  Probe
agatgctctgaaagggacgcccagc

SEQ ID NO: 256825 - DNA, 25 bp, Artificial
  Probe
tccaggtgaaggactgcatgtcagc

SEQ ID NO: 256826 - DNA, 25 bp, Artificial
  Probe
aagatgctctgaaagggacgcccag

SEQ ID NO: 256827 - DNA, 25 bp, Artificial
  Probe
ttggtgactgcagctttgatgctat

SEQ ID NO: 256828 - DNA, 25 bp, Artificial
  Probe
gacacagaaaatccaaattcacgga

SEQ ID NO: 256829 - DNA, 25 bp, Artificial
  Probe
cagctacgccgttggtggactcctc

SEQ ID NO: 256830 - DNA, 25 bp, Artificial
  Probe
tgatgctatacagacacagaaaatc

SEQ ID NO: 256831 - DNA, 25 bp, Artificial
  Probe
agctgggcctctgtgcacattccaa

SEQ ID NO: 256832 - DNA, 25 bp, Artificial
  Probe
agctttgatgctatacagacacaga

SEQ ID NO: 256833 - DNA, 25 bp, Artificial
  Probe
cagcgtcctgctgattttgttggtg

SEQ ID NO: 256834 - DNA, 25 bp, Artificial
  Probe
ctcagcgtcctgctgattttgttgg

SEQ ID NO: 256835 - DNA, 25 bp, Artificial
  Probe
gtgactgcagctttgatgctataca

SEQ ID NO: 256836 - DNA, 25 bp, Artificial
  Probe
aaagggacgcccagctgggcctctg

SEQ ID NO: 256837 - DNA, 25 bp, Artificial
  Probe
gtgaaggactgcatgtcagctacgc

SEQ ID NO: 256838 - DNA, 25 bp, Artificial
  Probe
ctgctccaggtgaaggactgcatgt

SEQ ID NO: 256839 - DNA, 25 bp, Artificial
  Probe
tgcatgtcagctacgccgttggtgg

SEQ ID NO: 256840 - DNA, 25 bp, Artificial
  Probe
ctccaggtgaaggactgcatgtcag

SEQ ID NO: 256841 - DNA, 25 bp, Artificial
  Probe
cattccaatgaagctgtacctgctg

SEQ ID NO: 256842 - DNA, 25 bp, Artificial
  Probe
cagctgggcctctgtgcacattcca

SEQ ID NO: 256843 - DNA, 25 bp, Artificial
  Probe
aggaagatgctctgaaagggacgcc

SEQ ID NO: 256844 - DNA, 25 bp, Artificial
  Probe
gatgctatacagacacagaaaatcc

SEQ ID NO: 256845 - DNA, 25 bp, Artificial
  Probe
agcgtcctgctgattttgttggtga

SEQ ID NO: 256846 - DNA, 25 bp, Artificial
  Probe
ctgattttgttggtgactgcagctt

SEQ ID NO: 256847 - DNA, 25 bp, Artificial
  Probe
tgttggtgactgcagctttgatgct

SEQ ID NO: 256848 - DNA, 25 bp, Artificial
  Probe
aattcacggatcctggaaagggcaa

SEQ ID NO: 256849 - DNA, 25 bp, Artificial
  Probe
ctttgatgctatacagacacagaaa

SEQ ID NO: 256850 - DNA, 25 bp, Artificial
  Probe
gactcctcagcgtcctgctgatttt

SEQ ID NO: 256851 - DNA, 25 bp, Artificial
  Probe
aaatccaaattcacggatcctggaa

SEQ ID NO: 256852 - DNA, 25 bp, Artificial
  Probe
tatgtgaacccaagggcgctgctgc

SEQ ID NO: 256853 - DNA, 25 bp, Artificial
  Probe
aactggctttgaagatggctccgtg

SEQ ID NO: 256854 - DNA, 25 bp, Artificial
  Probe
gctatatcattgagtgcaagctggg

SEQ ID NO: 256855 - DNA, 25 bp, Artificial
  Probe
ctctcatccggctgcctgatgactg

SEQ ID NO: 256856 - DNA, 25 bp, Artificial
  Probe
gcagcttctgagagccttcccgctg

SEQ ID NO: 256857 - DNA, 25 bp, Artificial
  Probe
tgcaccatgggctatatcattgagt

SEQ ID NO: 256858 - DNA, 25 bp, Artificial
  Probe
tcatggacacatctgctctcatccg

SEQ ID NO: 256859 - DNA, 25 bp, Artificial
  Probe
cttctgcatcaatcgcaaactggct

SEQ ID NO: 256860 - DNA, 25 bp, Artificial
  Probe
tcgcaaactggctttgaagatggct

SEQ ID NO: 256861 - DNA, 25 bp, Artificial
  Probe
gccttccaggagagactggggtccc

SEQ ID NO: 256862 - DNA, 25 bp, Artificial
  Probe
tgcatcaatcgcaaactggctttga

SEQ ID NO: 256863 - DNA, 25 bp, Artificial
  Probe
atgggctatatcattgagtgcaagc

SEQ ID NO: 256864 - DNA, 25 bp, Artificial
  Probe
cagtggctcccgtttcatggacaca

SEQ ID NO: 256865 - DNA, 25 bp, Artificial
  Probe
tttgaagatggctccgtgggccagt

SEQ ID NO: 256866 - DNA, 25 bp, Artificial
  Probe
acccaagggcgctgctgcagcttct

SEQ ID NO: 256867 - DNA, 25 bp, Artificial
  Probe
ccggctgcctgatgactgcaccatg

SEQ ID NO: 256868 - DNA, 25 bp, Artificial
  Probe
accgcacgaggctggtacagttctg

SEQ ID NO: 256869 - DNA, 25 bp, Artificial
  Probe
tcaatcgcaaactggctttgaagat

SEQ ID NO: 256870 - DNA, 25 bp, Artificial
  Probe
gtttcatggacacatctgctctcat

SEQ ID NO: 256871 - DNA, 25 bp, Artificial
  Probe
aagggcgctgctgcagcttctgaga

SEQ ID NO: 256872 - DNA, 25 bp, Artificial
  Probe
ccacaaccgcacgaggctggtacag

SEQ ID NO: 256873 - DNA, 25 bp, Artificial
  Probe
ggacacatctgctctcatccggctg

SEQ ID NO: 256874 - DNA, 25 bp, Artificial
  Probe
atccggctgcctgatgactgcacca

SEQ ID NO: 256875 - DNA, 25 bp, Artificial
  Probe
tccgtgggccagtggctcccgtttc

SEQ ID NO: 256876 - DNA, 25 bp, Artificial
  Probe
ggggtgctggcttctgcatcaatcg

SEQ ID NO: 256877 - DNA, 25 bp, Artificial
  Probe
gctgcagcttctgagagccttcccg

SEQ ID NO: 256878 - DNA, 25 bp, Artificial
  Probe
ctatgtgaacccaagggcgctgctg

SEQ ID NO: 256879 - DNA, 25 bp, Artificial
  Probe
ctggcccgcgacgtctatgtgggaa

SEQ ID NO: 256880 - DNA, 25 bp, Artificial
  Probe
cacccagctctgtcctgcaagatgg

SEQ ID NO: 256881 - DNA, 25 bp, Artificial
  Probe
gtctatgtgggaaggcccagcctga

SEQ ID NO: 256882 - DNA, 25 bp, Artificial
  Probe
tgacaactatgtgaacccaagggcg

SEQ ID NO: 256883 - DNA, 25 bp, Artificial
  Probe
tctgtcctgcaagatggctgctgag

SEQ ID NO: 256884 - DNA, 25 bp, Artificial
  Probe
gctgcctgatgactgcaccatgggc

SEQ ID NO: 256885 - DNA, 25 bp, Artificial
  Probe
agctctgtcctgcaagatggctgct

SEQ ID NO: 256886 - DNA, 25 bp, Artificial
  Probe
acagttctggtttgccactgggggt

SEQ ID NO: 256887 - DNA, 25 bp, Artificial
  Probe
gctccgtgggccagtggctcccgtt

SEQ ID NO: 256888 - DNA, 25 bp, Artificial
  Probe
tgggccagtggctcccgtttcatgg

SEQ ID NO: 256889 - DNA, 25 bp, Artificial
  Probe
gcctgatgactgcaccatgggctat

SEQ ID NO: 256890 - DNA, 25 bp, Artificial
  Probe
gctgctgcagcttctgagagccttc

SEQ ID NO: 256891 - DNA, 25 bp, Artificial
  Probe
cacaaccgcacgaggctggtacagt

SEQ ID NO: 256892 - DNA, 25 bp, Artificial
  Probe
cccgcgacgtctatgtgggaaggcc

SEQ ID NO: 256893 - DNA, 25 bp, Artificial
  Probe
cgtctatgtgggaaggcccagcctg

SEQ ID NO: 256894 - DNA, 25 bp, Artificial
  Probe
acaactatgtgaacccaagggcgct

SEQ ID NO: 256895 - DNA, 25 bp, Artificial
  Probe
cgcgacgtctatgtgggaaggccca

SEQ ID NO: 256896 - DNA, 25 bp, Artificial
  Probe
ctgatgactgcaccatgggctatat

SEQ ID NO: 256897 - DNA, 25 bp, Artificial
  Probe
cccagctctgtcctgcaagatggct

SEQ ID NO: 256898 - DNA, 25 bp, Artificial
  Probe
agcgtcgtcgcctgttctaaaccgc

SEQ ID NO: 256899 - DNA, 25 bp, Artificial
  Probe
gcgtctcggcgtgatttcacccgtc

SEQ ID NO: 256900 - DNA, 25 bp, Artificial
  Probe
gctcttcctgaagcacagcgccgta

SEQ ID NO: 256901 - DNA, 25 bp, Artificial
  Probe
cacacggtgtgaacccttacatgtc

SEQ ID NO: 256902 - DNA, 25 bp, Artificial
  Probe
tctgctgcggattgcgttgcgtctc

SEQ ID NO: 256903 - DNA, 25 bp, Artificial
  Probe
ccttaacacaacgtgttccacggca

SEQ ID NO: 256904 - DNA, 25 bp, Artificial
  Probe
tgcctgaagtctctccgctcagggc

SEQ ID NO: 256905 - DNA, 25 bp, Artificial
  Probe
gggcgctgcctgaagtctctccgct

SEQ ID NO: 256906 - DNA, 25 bp, Artificial
  Probe
gttccacggcactactatgcaaatt

SEQ ID NO: 256907 - DNA, 25 bp, Artificial
  Probe
gaacccttacatgtcacagtcgcca

SEQ ID NO: 256908 - DNA, 25 bp, Artificial
  Probe
actgtagccttcctcagaacacacg

SEQ ID NO: 256909 - DNA, 25 bp, Artificial
  Probe
tgcgtctcggcgtgatttcacccgt

SEQ ID NO: 256910 - DNA, 25 bp, Artificial
  Probe
acgggcgctgcctgaagtctctccg

SEQ ID NO: 256911 - DNA, 25 bp, Artificial
  Probe
acaacgtgttccacggcactactat

SEQ ID NO: 256912 - DNA, 25 bp, Artificial
  Probe
tccacggcactactatgcaaatttg

SEQ ID NO: 256913 - DNA, 25 bp, Artificial
  Probe
cggtgtgaacccttacatgtcacag

SEQ ID NO: 256914 - DNA, 25 bp, Artificial
  Probe
tcctcagaacacacggtgtgaaccc

SEQ ID NO: 256915 - DNA, 25 bp, Artificial
  Probe
gaccaaaacctcagaattcatcagg

SEQ ID NO: 256916 - DNA, 25 bp, Artificial
  Probe
ttgcgttgcgtctcggcgtgatttc

SEQ ID NO: 256917 - DNA, 25 bp, Artificial
  Probe
cagggccagcgtcgtcgcctgttct

SEQ ID NO: 256918 - DNA, 25 bp, Artificial
  Probe
gcgtcgtcgcctgttctaaaccgca

SEQ ID NO: 256919 - DNA, 25 bp, Artificial
  Probe
tcttcagtgctcacgcatcaagcta

SEQ ID NO: 256920 - DNA, 25 bp, Artificial
  Probe
cagtgctcacgcatcaagctagtct

SEQ ID NO: 256921 - DNA, 25 bp, Artificial
  Probe
acgcatcaagctagtctgctgcgga

SEQ ID NO: 256922 - DNA, 25 bp, Artificial
  Probe
tcttcctgaagcacagcgccgtact

SEQ ID NO: 256923 - DNA, 25 bp, Artificial
  Probe
gtcgtcgcctgttctaaaccgcact

SEQ ID NO: 256924 - DNA, 25 bp, Artificial
  Probe
cgcctgttctaaaccgcactgcttt

SEQ ID NO: 256925 - DNA, 25 bp, Artificial
  Probe
gtcgcctgttctaaaccgcactgct

SEQ ID NO: 256926 - DNA, 25 bp, Artificial
  Probe
aagctagtctgctgcggattgcgtt

SEQ ID NO: 256927 - DNA, 25 bp, Artificial
  Probe
ttcctgaagcacagcgccgtactta

SEQ ID NO: 256928 - DNA, 25 bp, Artificial
  Probe
tcagaattcatcaggtaagaaatcc

SEQ ID NO: 256929 - DNA, 25 bp, Artificial
  Probe
agcacagcgccgtacttacggtcct

SEQ ID NO: 256930 - DNA, 25 bp, Artificial
  Probe
aaacctcagaattcatcaggtaaga

SEQ ID NO: 256931 - DNA, 25 bp, Artificial
  Probe
ccattctcgttcttcagtgctcacg

SEQ ID NO: 256932 - DNA, 25 bp, Artificial
  Probe
agtctgctgcggattgcgttgcgtc

SEQ ID NO: 256933 - DNA, 25 bp, Artificial
  Probe
gtgttccacggcactactatgcaaa

SEQ ID NO: 256934 - DNA, 25 bp, Artificial
  Probe
tgacctcactgtagccttcctcaga

SEQ ID NO: 256935 - DNA, 25 bp, Artificial
  Probe
aaaccgcactgctttgctcttcctg

SEQ ID NO: 256936 - DNA, 25 bp, Artificial
  Probe
gattgcgttgcgtctcggcgtgatt

SEQ ID NO: 256937 - DNA, 25 bp, Artificial
  Probe
gctgcctgaagtctctccgctcagg

SEQ ID NO: 256938 - DNA, 25 bp, Artificial
  Probe
gttctaaaccgcactgctttgctct

SEQ ID NO: 256939 - DNA, 25 bp, Artificial
  Probe
atgccgcacctgtgtgacctcactg

SEQ ID NO: 256940 - DNA, 25 bp, Artificial
  Probe
tacatgtcacagtcgccacacacag

SEQ ID NO: 256941 - DNA, 25 bp, Artificial
  Probe
tcgtcgcctgttctaaaccgcactg

SEQ ID NO: 256942 - DNA, 25 bp, Artificial
  Probe
gggccagcgtcgtcgcctgttctaa

SEQ ID NO: 256943 - DNA, 25 bp, Artificial
  Probe
cagaacacacggtgtgaacccttac

SEQ ID NO: 256944 - DNA, 25 bp, Artificial
  Probe
agccaagatgatgtccgcggcggcc

SEQ ID NO: 256945 - DNA, 25 bp, Artificial
  Probe
gggaatcgcctcgtcctccatagca

SEQ ID NO: 256946 - DNA, 25 bp, Artificial
  Probe
tgggtctgccattgcggctgtcatt

SEQ ID NO: 256947 - DNA, 25 bp, Artificial
  Probe
cctgggctccattgggtctgccatt

SEQ ID NO: 256948 - DNA, 25 bp, Artificial
  Probe
cctgacccagcgaggagccaactat

SEQ ID NO: 256949 - DNA, 25 bp, Artificial
  Probe
attgggtctgccattgcggctgtca

SEQ ID NO: 256950 - DNA, 25 bp, Artificial
  Probe
gcagtcactgggagcaactggactc

SEQ ID NO: 256951 - DNA, 25 bp, Artificial
  Probe
gccaggattgctacagttgtgattg

SEQ ID NO: 256952 - DNA, 25 bp, Artificial
  Probe
tgccattgcggctgtcattgcgagg

SEQ ID NO: 256953 - DNA, 25 bp, Artificial
  Probe
ctggctctgccgtagttttgcccct

SEQ ID NO: 256954 - DNA, 25 bp, Artificial
  Probe
ttgcccctggccaggattgctacag

SEQ ID NO: 256955 - DNA, 25 bp, Artificial
  Probe
atatacctggggtgaaatataccaa

SEQ ID NO: 256956 - DNA, 25 bp, Artificial
  Probe
ttgtggctactctgcagtcactggg

SEQ ID NO: 256957 - DNA, 25 bp, Artificial
  Probe
cagccttgtggctactctgcagtca

SEQ ID NO: 256958 - DNA, 25 bp, Artificial
  Probe
gtgcccatggtgctcagtgccatgg

SEQ ID NO: 256959 - DNA, 25 bp, Artificial
  Probe
gccacggaattaacccgagcaggca

SEQ ID NO: 256960 - DNA, 25 bp, Artificial
  Probe
catgccaggggagaaggcacccagc

SEQ ID NO: 256961 - DNA, 25 bp, Artificial
  Probe
ccatggcggctgtgcccatggtgct

SEQ ID NO: 256962 - DNA, 25 bp, Artificial
  Probe
agaagagaaccatgccaggggagaa

SEQ ID NO: 256963 - DNA, 25 bp, Artificial
  Probe
gccaactatcccaaatatacctggg

SEQ ID NO: 256964 - DNA, 25 bp, Artificial
  Probe
ggctccattgggtctgccattgcgg

SEQ ID NO: 256965 - DNA, 25 bp, Artificial
  Probe
cccgagcaggcatggagcctctgct

SEQ ID NO: 256966 - DNA, 25 bp, Artificial
  Probe
tggactctccggattgaccaagttc

SEQ ID NO: 256967 - DNA, 25 bp, Artificial
  Probe
gaggagccaactatcccaaatatac

SEQ ID NO: 256968 - DNA, 25 bp, Artificial
  Probe
cagtgaccagtgtggccaaagtggt

SEQ ID NO: 256969 - DNA, 25 bp, Artificial
  Probe
ccatgccaggggagaaggcacccag

SEQ ID NO: 256970 - DNA, 25 bp, Artificial
  Probe
ctgccgtagttttgcccctggccag

SEQ ID NO: 256971 - DNA, 25 bp, Artificial
  Probe
cgggcagccttgtggctactctgca

SEQ ID NO: 256972 - DNA, 25 bp, Artificial
  Probe
cggctgtgcccatggtgctcagtgc

SEQ ID NO: 256973 - DNA, 25 bp, Artificial
  Probe
agccttgtggctactctgcagtcac

SEQ ID NO: 256974 - DNA, 25 bp, Artificial
  Probe
agcgaggagccaactatcccaaata

SEQ ID NO: 256975 - DNA, 25 bp, Artificial
  Probe
ctcgccctgcagagaagagaaccat

SEQ ID NO: 256976 - DNA, 25 bp, Artificial
  Probe
tagttttgcccctggccaggattgc

SEQ ID NO: 256977 - DNA, 25 bp, Artificial
  Probe
ttcatcctgggctccattgggtctg

SEQ ID NO: 256978 - DNA, 25 bp, Artificial
  Probe
cccaaatatacctggggtgaaatat

SEQ ID NO: 256979 - DNA, 25 bp, Artificial
  Probe
tatacctggggtgaaatataccaaa

SEQ ID NO: 256980 - DNA, 25 bp, Artificial
  Probe
tgacccagcgaggagccaactatcc

SEQ ID NO: 256981 - DNA, 25 bp, Artificial
  Probe
gcgggaatcgcctcgtcctccatag

SEQ ID NO: 256982 - DNA, 25 bp, Artificial
  Probe
gcaactggactctccggattgacca

SEQ ID NO: 256983 - DNA, 25 bp, Artificial
  Probe
ccaagttcatcctgggctccattgg

SEQ ID NO: 256984 - DNA, 25 bp, Artificial
  Probe
ataccaaattctgcatctccagagg

SEQ ID NO: 256985 - DNA, 25 bp, Artificial
  Probe
tctcacctcatcagcagtgaccagt

SEQ ID NO: 256986 - DNA, 25 bp, Artificial
  Probe
ggaattaacccgagcaggcatggag

SEQ ID NO: 256987 - DNA, 25 bp, Artificial
  Probe
ccattgcggctgtcattgcgaggtt

SEQ ID NO: 256988 - DNA, 25 bp, Artificial
  Probe
cgccctgcagagaagagaaccatgc

SEQ ID NO: 256989 - DNA, 25 bp, Artificial
  Probe
gttgcctcgggcagccttgtggcta

SEQ ID NO: 256990 - DNA, 25 bp, Artificial
  Probe
cctgtgctggagcagctgcccgtgc

SEQ ID NO: 256991 - DNA, 25 bp, Artificial
  Probe
gcctgtctgcttcatgggctaggcc

SEQ ID NO: 256992 - DNA, 25 bp, Artificial
  Probe
cctgtctgcttcatgggctaggcct

SEQ ID NO: 256993 - DNA, 25 bp, Artificial
  Probe
caagcctcaagtcaggggcagcacc

SEQ ID NO: 256994 - DNA, 25 bp, Artificial
  Probe
agagatggctgtcagacccagcaag

SEQ ID NO: 256995 - DNA, 25 bp, Artificial
  Probe
gcacctcaagcctcaagtcaggggc

SEQ ID NO: 256996 - DNA, 25 bp, Artificial
  Probe
ccagcccttacgtcaaggagttcag

SEQ ID NO: 256997 - DNA, 25 bp, Artificial
  Probe
acgcctgtgctggagcagctgcccg

SEQ ID NO: 256998 - DNA, 25 bp, Artificial
  Probe
agcagctgcccgtgctggatgcttc

SEQ ID NO: 256999 - DNA, 25 bp, Artificial
  Probe
ccaaaaccaggtccacctggagtca

SEQ ID NO: 257000 - DNA, 25 bp, Artificial
  Probe
gctgtcagacccagcaaggccggac

SEQ ID NO: 257001 - DNA, 25 bp, Artificial
  Probe
ggatgcttccttctcagacctgggg

SEQ ID NO: 257002 - DNA, 25 bp, Artificial
  Probe
tacgtcaaggagttcagagatggct

SEQ ID NO: 257003 - DNA, 25 bp, Artificial
  Probe
tgctggatgcttccttctcagacct

SEQ ID NO: 257004 - DNA, 25 bp, Artificial
  Probe
agctgagccctgagaccagccctta

SEQ ID NO: 257005 - DNA, 25 bp, Artificial
  Probe
cccttacgtcaaggagttcagagat

SEQ ID NO: 257006 - DNA, 25 bp, Artificial
  Probe
ggtcagggcacctcaagcctcaagt

SEQ ID NO: 257007 - DNA, 25 bp, Artificial
  Probe
ggcctgtctgcttcatgggctaggc

SEQ ID NO: 257008 - DNA, 25 bp, Artificial
  Probe
tgggtcagggcacctcaagcctcaa

SEQ ID NO: 257009 - DNA, 25 bp, Artificial
  Probe
gatggctgtcagacccagcaaggcc

SEQ ID NO: 257010 - DNA, 25 bp, Artificial
  Probe
gaccaaaaccaggtccacctggagt

SEQ ID NO: 257011 - DNA, 25 bp, Artificial
  Probe
agcccttacgtcaaggagttcagag

SEQ ID NO: 257012 - DNA, 25 bp, Artificial
  Probe
tgtcagacccagcaaggccggacgg

SEQ ID NO: 257013 - DNA, 25 bp, Artificial
  Probe
ctgtgctggagcagctgcccgtgct

SEQ ID NO: 257014 - DNA, 25 bp, Artificial
  Probe
tcagagatggctgtcagacccagca

SEQ ID NO: 257015 - DNA, 25 bp, Artificial
  Probe
tctgaccctgtcgaccaaaaccagg

SEQ ID NO: 257016 - DNA, 25 bp, Artificial
  Probe
ccgtgctggatgcttccttctcaga

SEQ ID NO: 257017 - DNA, 25 bp, Artificial
  Probe
tgtctctgaccctgtcgaccaaaac

SEQ ID NO: 257018 - DNA, 25 bp, Artificial
  Probe
gcttctggggcctgtctgcttcatg

SEQ ID NO: 257019 - DNA, 25 bp, Artificial
  Probe
gcagctgcccgtgctggatgcttcc

SEQ ID NO: 257020 - DNA, 25 bp, Artificial
  Probe
acctcaagcctcaagtcaggggcag

SEQ ID NO: 257021 - DNA, 25 bp, Artificial
  Probe
tgaccctgtcgaccaaaaccaggtc

SEQ ID NO: 257022 - DNA, 25 bp, Artificial
  Probe
tggggcctgtctgcttcatgggcta

SEQ ID NO: 257023 - DNA, 25 bp, Artificial
  Probe
gaccagcccttacgtcaaggagttc

SEQ ID NO: 257024 - DNA, 25 bp, Artificial
  Probe
ttcagagatggctgtcagacccagc

SEQ ID NO: 257025 - DNA, 25 bp, Artificial
  Probe
cccgtgctggatgcttccttctcag

SEQ ID NO: 257026 - DNA, 25 bp, Artificial
  Probe
ctgtctgcttcatgggctaggcctg

SEQ ID NO: 257027 - DNA, 25 bp, Artificial
  Probe
cgcctgtgctggagcagctgcccgt

SEQ ID NO: 257028 - DNA, 25 bp, Artificial
  Probe
tgagccctgagaccagcccttacgt

SEQ ID NO: 257029 - DNA, 25 bp, Artificial
  Probe
aagggtggtacctgggcctccagct

SEQ ID NO: 257030 - DNA, 25 bp, Artificial
  Probe
ttgggtcagggcacctcaagcctca

SEQ ID NO: 257031 - DNA, 25 bp, Artificial
  Probe
tgtcgaccaaaaccaggtccacctg

SEQ ID NO: 257032 - DNA, 25 bp, Artificial
  Probe
tgcttccttctcagacctgggggcc

SEQ ID NO: 257033 - DNA, 25 bp, Artificial
  Probe
tcagacccagcaaggccggacggtg

SEQ ID NO: 257034 - DNA, 25 bp, Artificial
  Probe
cagggcacctcaagcctcaagtcag

SEQ ID NO: 257035 - DNA, 25 bp, Artificial
  Probe
atgcttccttctcagacctgggggc

SEQ ID NO: 257036 - DNA, 25 bp, Artificial
  Probe
agatggtcccaggaaaacccatgtg

SEQ ID NO: 257037 - DNA, 25 bp, Artificial
  Probe
gatggtcccaggaaaacccatgtgt

SEQ ID NO: 257038 - DNA, 25 bp, Artificial
  Probe
atcccaagtccctgaagtctgggga

SEQ ID NO: 257039 - DNA, 25 bp, Artificial
  Probe
agtccgcacagaaggcgcagaaagc

SEQ ID NO: 257040 - DNA, 25 bp, Artificial
  Probe
attgttgagatggtcccaggaaaac

SEQ ID NO: 257041 - DNA, 25 bp, Artificial
  Probe
aagtccgcacagaaggcgcagaaag

SEQ ID NO: 257042 - DNA, 25 bp, Artificial
  Probe
gctgaccacgctcagtgcccgtttt

SEQ ID NO: 257043 - DNA, 25 bp, Artificial
  Probe
ggcaaggtcaccaagtccgcacaga

SEQ ID NO: 257044 - DNA, 25 bp, Artificial
  Probe
caaggtcaccaagtccgcacagaag

SEQ ID NO: 257045 - DNA, 25 bp, Artificial
  Probe
gacaatcccaagtccctgaagtctg

SEQ ID NO: 257046 - DNA, 25 bp, Artificial
  Probe
cattgttgagatggtcccaggaaaa

SEQ ID NO: 257047 - DNA, 25 bp, Artificial
  Probe
gcgccagtgctgaccacgctcagtg

SEQ ID NO: 257048 - DNA, 25 bp, Artificial
  Probe
ggacaatcccaagtccctgaagtct

SEQ ID NO: 257049 - DNA, 25 bp, Artificial
  Probe
cggcaaggtcaccaagtccgcacag

SEQ ID NO: 257050 - DNA, 25 bp, Artificial
  Probe
ccattgttgagatggtcccaggaaa

SEQ ID NO: 257051 - DNA, 25 bp, Artificial
  Probe
gaggacaatcccaagtccctgaagt

SEQ ID NO: 257052 - DNA, 25 bp, Artificial
  Probe
caccaagtccgcacagaaggcgcag

SEQ ID NO: 257053 - DNA, 25 bp, Artificial
  Probe
ccaagtccgcacagaaggcgcagaa

SEQ ID NO: 257054 - DNA, 25 bp, Artificial
  Probe
aagctggaggacaatcccaagtccc

SEQ ID NO: 257055 - DNA, 25 bp, Artificial
  Probe
aggaaaacccatgtgtgtggagagc

SEQ ID NO: 257056 - DNA, 25 bp, Artificial
  Probe
aggacaatcccaagtccctgaagtc

SEQ ID NO: 257057 - DNA, 25 bp, Artificial
  Probe
gagatggtcccaggaaaacccatgt

SEQ ID NO: 257058 - DNA, 25 bp, Artificial
  Probe
aaggtcaccaagtccgcacagaagg

SEQ ID NO: 257059 - DNA, 25 bp, Artificial
  Probe
ggtcccaggaaaacccatgtgtgtg

SEQ ID NO: 257060 - DNA, 25 bp, Artificial
  Probe
cacagaaggcgcagaaagcgggcaa

SEQ ID NO: 257061 - DNA, 25 bp, Artificial
  Probe
agctggaggacaatcccaagtccct

SEQ ID NO: 257062 - DNA, 25 bp, Artificial
  Probe
gcaaggtcaccaagtccgcacagaa

SEQ ID NO: 257063 - DNA, 25 bp, Artificial
  Probe
tgagatggtcccaggaaaacccatg

SEQ ID NO: 257064 - DNA, 25 bp, Artificial
  Probe
accaagtccgcacagaaggcgcaga

SEQ ID NO: 257065 - DNA, 25 bp, Artificial
  Probe
caagtccgcacagaaggcgcagaaa

SEQ ID NO: 257066 - DNA, 25 bp, Artificial
  Probe
ccaggaaaacccatgtgtgtggaga

SEQ ID NO: 257067 - DNA, 25 bp, Artificial
  Probe
gctcagtgcccgttttcccaataaa

SEQ ID NO: 257068 - DNA, 25 bp, Artificial
  Probe
ttgttgagatggtcccaggaaaacc

SEQ ID NO: 257069 - DNA, 25 bp, Artificial
  Probe
tggtcccaggaaaacccatgtgtgt

SEQ ID NO: 257070 - DNA, 25 bp, Artificial
  Probe
atggtcccaggaaaacccatgtgtg

SEQ ID NO: 257071 - DNA, 25 bp, Artificial
  Probe
tgctgaccacgctcagtgcccgttt

SEQ ID NO: 257072 - DNA, 25 bp, Artificial
  Probe
caggaaaacccatgtgtgtggagag

SEQ ID NO: 257073 - DNA, 25 bp, Artificial
  Probe
tcccaagtccctgaagtctggggat

SEQ ID NO: 257074 - DNA, 25 bp, Artificial
  Probe
ggaaaacccatgtgtgtggagagct

SEQ ID NO: 257075 - DNA, 25 bp, Artificial
  Probe
gcctagtccattcagtggtgctcag

SEQ ID NO: 257076 - DNA, 25 bp, Artificial
  Probe
ttcctgtgtaacctcaggaaaatgt

SEQ ID NO: 257077 - DNA, 25 bp, Artificial
  Probe
ccttcctgtgtaacctcaggaaaat

SEQ ID NO: 257078 - DNA, 25 bp, Artificial
  Probe
gcttcaggaagaatacccagagttg

SEQ ID NO: 257079 - DNA, 25 bp, Artificial
  Probe
acaggcagccttgtggacctcactg

SEQ ID NO: 257080 - DNA, 25 bp, Artificial
  Probe
gacctctgtacaaacatgtgcatac

SEQ ID NO: 257081 - DNA, 25 bp, Artificial
  Probe
agacaggcagccttgtggacctcac

SEQ ID NO: 257082 - DNA, 25 bp, Artificial
  Probe
catttaaactgcttaggagagacac

SEQ ID NO: 257083 - DNA, 25 bp, Artificial
  Probe
atttaaactgcttaggagagacaca

SEQ ID NO: 257084 - DNA, 25 bp, Artificial
  Probe
ctgtgtaacctcaggaaaatgtctt

SEQ ID NO: 257085 - DNA, 25 bp, Artificial
  Probe
caagaagcctagtccattcagtggt

SEQ ID NO: 257086 - DNA, 25 bp, Artificial
  Probe
tagatcagttcctggtatacagaag

SEQ ID NO: 257087 - DNA, 25 bp, Artificial
  Probe
cagaaggcactcagtagctgcttgt

SEQ ID NO: 257088 - DNA, 25 bp, Artificial
  Probe
ttcctggtatacagaaggcactcag

SEQ ID NO: 257089 - DNA, 25 bp, Artificial
  Probe
gcagtgcttcaggaagaatacccag

SEQ ID NO: 257090 - DNA, 25 bp, Artificial
  Probe
actcagtagctgcttgttagaagct

SEQ ID NO: 257091 - DNA, 25 bp, Artificial
  Probe
agttcctggtatacagaaggcactc

SEQ ID NO: 257092 - DNA, 25 bp, Artificial
  Probe
tggagcagtgcttcaggaagaatac

SEQ ID NO: 257093 - DNA, 25 bp, Artificial
  Probe
tcagtggtgctcaggccaaaaagca

SEQ ID NO: 257094 - DNA, 25 bp, Artificial
  Probe
agcctagtccattcagtggtgctca

SEQ ID NO: 257095 - DNA, 25 bp, Artificial
  Probe
atacagaaggcactcagtagctgct

SEQ ID NO: 257096 - DNA, 25 bp, Artificial
  Probe
tcacatatgtaggactgccaatttt

SEQ ID NO: 257097 - DNA, 25 bp, Artificial
  Probe
ctagtccattcagtggtgctcaggc

SEQ ID NO: 257098 - DNA, 25 bp, Artificial
  Probe
ccatttgtcacatatgtaggactgc

SEQ ID NO: 257099 - DNA, 25 bp, Artificial
  Probe
cctgtgtaacctcaggaaaatgtct

SEQ ID NO: 257100 - DNA, 25 bp, Artificial
  Probe
gcactcagtagctgcttgttagaag

SEQ ID NO: 257101 - DNA, 25 bp, Artificial
  Probe
tttgtcacatatgtaggactgccaa

SEQ ID NO: 257102 - DNA, 25 bp, Artificial
  Probe
tccattcagtggtgctcaggccaaa

SEQ ID NO: 257103 - DNA, 25 bp, Artificial
  Probe
tatacagaaggcactcagtagctgc

SEQ ID NO: 257104 - DNA, 25 bp, Artificial
  Probe
aaggcactcagtagctgcttgttag

SEQ ID NO: 257105 - DNA, 25 bp, Artificial
  Probe
atcagttcctggtatacagaaggca

SEQ ID NO: 257106 - DNA, 25 bp, Artificial
  Probe
gtccattcagtggtgctcaggccaa

SEQ ID NO: 257107 - DNA, 25 bp, Artificial
  Probe
tcagtagctgcttgttagaagctgg

SEQ ID NO: 257108 - DNA, 25 bp, Artificial
  Probe
agaagcctagtccattcagtggtgc

SEQ ID NO: 257109 - DNA, 25 bp, Artificial
  Probe
tgggctcatctcagccatggggatg

SEQ ID NO: 257110 - DNA, 25 bp, Artificial
  Probe
atggagacaggcagccttgtggacc

SEQ ID NO: 257111 - DNA, 25 bp, Artificial
  Probe
tgtaggactgccaattttacccttt

SEQ ID NO: 257112 - DNA, 25 bp, Artificial
  Probe
tgacctctgtacaaacatgtgcata

SEQ ID NO: 257113 - DNA, 25 bp, Artificial
  Probe
aagcctagtccattcagtggtgctc

SEQ ID NO: 257114 - DNA, 25 bp, Artificial
  Probe
catacatatgcattcacacaggaag

SEQ ID NO: 257115 - DNA, 25 bp, Artificial
  Probe
acctcaggaaaatgtcttgacctct

SEQ ID NO: 257116 - DNA, 25 bp, Artificial
  Probe
ccatttaaactgcttaggagagaca

SEQ ID NO: 257117 - DNA, 25 bp, Artificial
  Probe
catatgtaggactgccaattttacc

SEQ ID NO: 257118 - DNA, 25 bp, Artificial
  Probe
aacctcaggaaaatgtcttgacctc

SEQ ID NO: 257119 - DNA, 25 bp, Artificial
  Probe
atttgtcacatatgtaggactgcca

SEQ ID NO: 257120 - DNA, 25 bp, Artificial
  Probe
cctttccttcctgtgtaacctcagg

SEQ ID NO: 257121 - DNA, 25 bp, Artificial
  Probe
cgagttcaaagagctggttacccag

SEQ ID NO: 257122 - DNA, 25 bp, Artificial
  Probe
gctggttacccagcagttgccccat

SEQ ID NO: 257123 - DNA, 25 bp, Artificial
  Probe
aaggatagcctcagcgtcaacgagt

SEQ ID NO: 257124 - DNA, 25 bp, Artificial
  Probe
ggtcagccctgacaaaggtcagcta

SEQ ID NO: 257125 - DNA, 25 bp, Artificial
  Probe
gagtccattgagaccgtggtcacca

SEQ ID NO: 257126 - DNA, 25 bp, Artificial
  Probe
ccgggtcagccctgacaaaggtcag

SEQ ID NO: 257127 - DNA, 25 bp, Artificial
  Probe
ctcagcgtcaacgagttcaaagagc

SEQ ID NO: 257128 - DNA, 25 bp, Artificial
  Probe
cctgacaaaggtcagctagcccctt

SEQ ID NO: 257129 - DNA, 25 bp, Artificial
  Probe
tcagctagccccttgaggacatcag

SEQ ID NO: 257130 - DNA, 25 bp, Artificial
  Probe
agcagaaccactgacagagctagag

SEQ ID NO: 257131 - DNA, 25 bp, Artificial
  Probe
agaaccactgacagagctagaggag

SEQ ID NO: 257132 - DNA, 25 bp, Artificial
  Probe
tcaaagagctggttacccagcagtt

SEQ ID NO: 257133 - DNA, 25 bp, Artificial
  Probe
caaaggtcagctagccccttgagga

SEQ ID NO: 257134 - DNA, 25 bp, Artificial
  Probe
ccttgccgggtcagccctgacaaag

SEQ ID NO: 257135 - DNA, 25 bp, Artificial
  Probe
gacaaaggtcagctagccccttgag

SEQ ID NO: 257136 - DNA, 25 bp, Artificial
  Probe
cgtcaacgagttcaaagagctggtt

SEQ ID NO: 257137 - DNA, 25 bp, Artificial
  Probe
cagctagccccttgaggacatcagc

SEQ ID NO: 257138 - DNA, 25 bp, Artificial
  Probe
ggagtccattgagaccgtggtcacc

SEQ ID NO: 257139 - DNA, 25 bp, Artificial
  Probe
agaggagtccattgagaccgtggtc

SEQ ID NO: 257140 - DNA, 25 bp, Artificial
  Probe
gagcagaaccgcactcttcccaaat

SEQ ID NO: 257141 - DNA, 25 bp, Artificial
  Probe
tagccccttgaggacatcagctttg

SEQ ID NO: 257142 - DNA, 25 bp, Artificial
  Probe
tccttgccgggtcagccctgacaaa

SEQ ID NO: 257143 - DNA, 25 bp, Artificial
  Probe
agcgtcaacgagttcaaagagctgg

SEQ ID NO: 257144 - DNA, 25 bp, Artificial
  Probe
cagcagaaccactgacagagctaga

SEQ ID NO: 257145 - DNA, 25 bp, Artificial
  Probe
agctggttacccagcagttgcccca

SEQ ID NO: 257146 - DNA, 25 bp, Artificial
  Probe
actgacagagctagaggagtccatt

SEQ ID NO: 257147 - DNA, 25 bp, Artificial
  Probe
caacgagttcaaagagctggttacc

SEQ ID NO: 257148 - DNA, 25 bp, Artificial
  Probe
agccctgacaaaggtcagctagccc

SEQ ID NO: 257149 - DNA, 25 bp, Artificial
  Probe
gatcagggccgagcagaaccgcact

SEQ ID NO: 257150 - DNA, 25 bp, Artificial
  Probe
ttcaaagagctggttacccagcagt

SEQ ID NO: 257151 - DNA, 25 bp, Artificial
  Probe
agctagaggagtccattgagaccgt

SEQ ID NO: 257152 - DNA, 25 bp, Artificial
  Probe
cagccctgacaaaggtcagctagcc

SEQ ID NO: 257153 - DNA, 25 bp, Artificial
  Probe
atagcctcagcgtcaacgagttcaa

SEQ ID NO: 257154 - DNA, 25 bp, Artificial
  Probe
cagggccgagcagaaccgcactctt

SEQ ID NO: 257155 - DNA, 25 bp, Artificial
  Probe
tgacaaaggtcagctagccccttga

SEQ ID NO: 257156 - DNA, 25 bp, Artificial
  Probe
tgatcagggccgagcagaaccgcac

SEQ ID NO: 257157 - DNA, 25 bp, Artificial
  Probe
tggttacccagcagttgccccatct

SEQ ID NO: 257158 - DNA, 25 bp, Artificial
  Probe
agggccgagcagaaccgcactcttc

SEQ ID NO: 257159 - DNA, 25 bp, Artificial
  Probe
tcaacgagttcaaagagctggttac

SEQ ID NO: 257160 - DNA, 25 bp, Artificial
  Probe
gctagccccttgaggacatcagctt

SEQ ID NO: 257161 - DNA, 25 bp, Artificial
  Probe
caaagagctggttacccagcagttg

SEQ ID NO: 257162 - DNA, 25 bp, Artificial
  Probe
ccactgacagagctagaggagtcca

SEQ ID NO: 257163 - DNA, 25 bp, Artificial
  Probe
agagctagaggagtccattgagacc

SEQ ID NO: 257164 - DNA, 25 bp, Artificial
  Probe
ggaaggatagcctcagcgtcaacga

SEQ ID NO: 257165 - DNA, 25 bp, Artificial
  Probe
ggttacccagcagttgccccatctg

SEQ ID NO: 257166 - DNA, 25 bp, Artificial
  Probe
gcacgaggcctgaggctccagctca

SEQ ID NO: 257167 - DNA, 25 bp, Artificial
  Probe
gtccacagaagcaggccttgtgttt

SEQ ID NO: 257168 - DNA, 25 bp, Artificial
  Probe
agaagcaggccttgtgtttccagcg

SEQ ID NO: 257169 - DNA, 25 bp, Artificial
  Probe
ccagcggcctctgataagaggcagg

SEQ ID NO: 257170 - DNA, 25 bp, Artificial
  Probe
cgctccgtgtggacgtggaccagct

SEQ ID NO: 257171 - DNA, 25 bp, Artificial
  Probe
gctcctggacttctagggatctcag

SEQ ID NO: 257172 - DNA, 25 bp, Artificial
  Probe
aggtagcctgtgtgtttgacaaaca

SEQ ID NO: 257173 - DNA, 25 bp, Artificial
  Probe
tccccttggaagatgcttccccagg

SEQ ID NO: 257174 - DNA, 25 bp, Artificial
  Probe
cagcaggtagcctgtgtgtttgaca

SEQ ID NO: 257175 - DNA, 25 bp, Artificial
  Probe
caggccttgtgtttccagcggcctc

SEQ ID NO: 257176 - DNA, 25 bp, Artificial
  Probe
tccagcggcctctgataagaggcag

SEQ ID NO: 257177 - DNA, 25 bp, Artificial
  Probe
gccttgtgtttccagcggcctctga

SEQ ID NO: 257178 - DNA, 25 bp, Artificial
  Probe
aagcaggccttgtgtttccagcggc

SEQ ID NO: 257179 - DNA, 25 bp, Artificial
  Probe
gattcaaacaagatctctgggagtc

SEQ ID NO: 257180 - DNA, 25 bp, Artificial
  Probe
acgcgctccgtgtggacgtggacca

SEQ ID NO: 257181 - DNA, 25 bp, Artificial
  Probe
actgcagtgcactgcgggccttgga

SEQ ID NO: 257182 - DNA, 25 bp, Artificial
  Probe
ccttgtgtttccagcggcctctgat

SEQ ID NO: 257183 - DNA, 25 bp, Artificial
  Probe
agcctgtgtgtttgacaaacagcag

SEQ ID NO: 257184 - DNA, 25 bp, Artificial
  Probe
cagaggagcccctggtccacagaag

SEQ ID NO: 257185 - DNA, 25 bp, Artificial
  Probe
gatattccccttggaagatgcttcc

SEQ ID NO: 257186 - DNA, 25 bp, Artificial
  Probe
aggcccaggcagaagacgcgctccg

SEQ ID NO: 257187 - DNA, 25 bp, Artificial
  Probe
tttccagcggcctctgataagaggc

SEQ ID NO: 257188 - DNA, 25 bp, Artificial
  Probe
cactgcgggccttggagtgtccagt

SEQ ID NO: 257189 - DNA, 25 bp, Artificial
  Probe
tattccccttggaagatgcttcccc

SEQ ID NO: 257190 - DNA, 25 bp, Artificial
  Probe
ggtccacagaagcaggccttgtgtt

SEQ ID NO: 257191 - DNA, 25 bp, Artificial
  Probe
gcaggcccaggcagaagacgcgctc

SEQ ID NO: 257192 - DNA, 25 bp, Artificial
  Probe
cttggaagatgcttccccaggctat

SEQ ID NO: 257193 - DNA, 25 bp, Artificial
  Probe
ttgattcaaacaagatctctgggag

SEQ ID NO: 257194 - DNA, 25 bp, Artificial
  Probe
cagaagacgcgctccgtgtggacgt

SEQ ID NO: 257195 - DNA, 25 bp, Artificial
  Probe
agcaggccttgtgtttccagcggcc

SEQ ID NO: 257196 - DNA, 25 bp, Artificial
  Probe
ttctagggatctcagccgtggctga

SEQ ID NO: 257197 - DNA, 25 bp, Artificial
  Probe
cccttggaagatgcttccccaggct

SEQ ID NO: 257198 - DNA, 25 bp, Artificial
  Probe
atattccccttggaagatgcttccc

SEQ ID NO: 257199 - DNA, 25 bp, Artificial
  Probe
tcctggacttctagggatctcagcc

SEQ ID NO: 257200 - DNA, 25 bp, Artificial
  Probe
acttctagggatctcagccgtggct

SEQ ID NO: 257201 - DNA, 25 bp, Artificial
  Probe
gcccaggcagaagacgcgctccgtg

SEQ ID NO: 257202 - DNA, 25 bp, Artificial
  Probe
cccaggcagaagacgcgctccgtgt

SEQ ID NO: 257203 - DNA, 25 bp, Artificial
  Probe
cctggtccacagaagcaggccttgt

SEQ ID NO: 257204 - DNA, 25 bp, Artificial
  Probe
ttccagcggcctctgataagaggca

SEQ ID NO: 257205 - DNA, 25 bp, Artificial
  Probe
caaacaagatctctgggagtctcca

SEQ ID NO: 257206 - DNA, 25 bp, Artificial
  Probe
ttccccttggaagatgcttccccag

SEQ ID NO: 257207 - DNA, 25 bp, Artificial
  Probe
gacttctagggatctcagccgtggc

SEQ ID NO: 257208 - DNA, 25 bp, Artificial
  Probe
tctagggatctcagccgtggctgag

SEQ ID NO: 257209 - DNA, 25 bp, Artificial
  Probe
agcaggtagcctgtgtgtttgacaa

SEQ ID NO: 257210 - DNA, 25 bp, Artificial
  Probe
ggacttctagggatctcagccgtgg

SEQ ID NO: 257211 - DNA, 25 bp, Artificial
  Probe
tggtccacagaagcaggccttgtgt

SEQ ID NO: 257212 - DNA, 25 bp, Artificial
  Probe
ccttggaagatgcttccccaggcta

SEQ ID NO: 257213 - DNA, 25 bp, Artificial
  Probe
tgctatatttcatggggcctaggca

SEQ ID NO: 257214 - DNA, 25 bp, Artificial
  Probe
aggcagtccttcctccaggactttc

SEQ ID NO: 257215 - DNA, 25 bp, Artificial
  Probe
ttgtgacccctggacgctaagaccc

SEQ ID NO: 257216 - DNA, 25 bp, Artificial
  Probe
gctgggtctcccttgttttgcaagc

SEQ ID NO: 257217 - DNA, 25 bp, Artificial
  Probe
accttgacagcttggccctgacagt

SEQ ID NO: 257218 - DNA, 25 bp, Artificial
  Probe
gactttcctcttgtctttaactgga

SEQ ID NO: 257219 - DNA, 25 bp, Artificial
  Probe
tgctccatggaggacaaattagtgg

SEQ ID NO: 257220 - DNA, 25 bp, Artificial
  Probe
ctggtcaccgcctcagtgtggatct

SEQ ID NO: 257221 - DNA, 25 bp, Artificial
  Probe
agtgtggatctgagggcctatctgc

SEQ ID NO: 257222 - DNA, 25 bp, Artificial
  Probe
ctggacgctaagaccccaagctgct

SEQ ID NO: 257223 - DNA, 25 bp, Artificial
  Probe
gcatagctcagacaagactttatat

SEQ ID NO: 257224 - DNA, 25 bp, Artificial
  Probe
ggactcttccttgtgaaacctgacc

SEQ ID NO: 257225 - DNA, 25 bp, Artificial
  Probe
tcttgtgacccctggacgctaagac

SEQ ID NO: 257226 - DNA, 25 bp, Artificial
  Probe
tttcatggggcctaggcagtccttc

SEQ ID NO: 257227 - DNA, 25 bp, Artificial
  Probe
atggagcccaggatgcatacagaga

SEQ ID NO: 257228 - DNA, 25 bp, Artificial
  Probe
tgcatggagcccaggatgcatacag

SEQ ID NO: 257229 - DNA, 25 bp, Artificial
  Probe
acagtggaattgttcccttgctcca

SEQ ID NO: 257230 - DNA, 25 bp, Artificial
  Probe
actggactcagtatttattgtgagc

SEQ ID NO: 257231 - DNA, 25 bp, Artificial
  Probe
cactggacagcattagtaactgctg

SEQ ID NO: 257232 - DNA, 25 bp, Artificial
  Probe
acagcttggccctgacagtggaatt

SEQ ID NO: 257233 - DNA, 25 bp, Artificial
  Probe
ctttaactggactcagtatttattg

SEQ ID NO: 257234 - DNA, 25 bp, Artificial
  Probe
ccaccagctttggactcttccttgt

SEQ ID NO: 257235 - DNA, 25 bp, Artificial
  Probe
gccctgacagtggaattgttccctt

SEQ ID NO: 257236 - DNA, 25 bp, Artificial
  Probe
ctatctgcatggagcccaggatgca

SEQ ID NO: 257237 - DNA, 25 bp, Artificial
  Probe
gatctgagggcctatctgcatggag

SEQ ID NO: 257238 - DNA, 25 bp, Artificial
  Probe
tgaaggctggtcaccgcctcagtgt

SEQ ID NO: 257239 - DNA, 25 bp, Artificial
  Probe
cccctcagggatgagttcttaccca

SEQ ID NO: 257240 - DNA, 25 bp, Artificial
  Probe
aggactttcctcttgtctttaactg

SEQ ID NO: 257241 - DNA, 25 bp, Artificial
  Probe
attagtaactgctgggcagctgcta

SEQ ID NO: 257242 - DNA, 25 bp, Artificial
  Probe
gggatgagttcttacccacgtgaca

SEQ ID NO: 257243 - DNA, 25 bp, Artificial
  Probe
aaattagtggatcgttcctggaatc

SEQ ID NO: 257244 - DNA, 25 bp, Artificial
  Probe
gcatacagagactgggagctgtctc

SEQ ID NO: 257245 - DNA, 25 bp, Artificial
  Probe
taactgctgggcagctgctagaaat

SEQ ID NO: 257246 - DNA, 25 bp, Artificial
  Probe
ccacgtgacattgcacatgggtgct

SEQ ID NO: 257247 - DNA, 25 bp, Artificial
  Probe
tatttattgtgagcatagctcagac

SEQ ID NO: 257248 - DNA, 25 bp, Artificial
  Probe
gcccaggatgcatacagagactggg

SEQ ID NO: 257249 - DNA, 25 bp, Artificial
  Probe
aggatgcatacagagactgggagct

SEQ ID NO: 257250 - DNA, 25 bp, Artificial
  Probe
atataattcactggacagcattagt

SEQ ID NO: 257251 - DNA, 25 bp, Artificial
  Probe
ggaatcgtctgttgcgcctgaaggc

SEQ ID NO: 257252 - DNA, 25 bp, Artificial
  Probe
ccctcagggatgagttcttacccac

SEQ ID NO: 257253 - DNA, 25 bp, Artificial
  Probe
ctggactcagtatttattgtgagca

SEQ ID NO: 257254 - DNA, 25 bp, Artificial
  Probe
tgttgcgcctgaaggctggtcaccg

SEQ ID NO: 257255 - DNA, 25 bp, Artificial
  Probe
aacacaggccgcaaggtgcagggct

SEQ ID NO: 257256 - DNA, 25 bp, Artificial
  Probe
cgctaagaccccaagctgctatatt

SEQ ID NO: 257257 - DNA, 25 bp, Artificial
  Probe
gtctgttgcgcctgaaggctggtca

SEQ ID NO: 257258 - DNA, 25 bp, Artificial
  Probe
tcctcttgtctttaactggactcag

SEQ ID NO: 257259 - DNA, 25 bp, Artificial
  Probe
tccctgctggccataatgggagata

SEQ ID NO: 257260 - DNA, 25 bp, Artificial
  Probe
tcttctggagaagtttccccttaca

SEQ ID NO: 257261 - DNA, 25 bp, Artificial
  Probe
gcagcatttcagatctattgtcctc

SEQ ID NO: 257262 - DNA, 25 bp, Artificial
  Probe
gacaaccagaaaacggcagccccat

SEQ ID NO: 257263 - DNA, 25 bp, Artificial
  Probe
agaagcaagacaaactcctgcatac

SEQ ID NO: 257264 - DNA, 25 bp, Artificial
  Probe
gatggactctcaacgctgcatgagg

SEQ ID NO: 257265 - DNA, 25 bp, Artificial
  Probe
caaatgtagctcaaagatggtgctc

SEQ ID NO: 257266 - DNA, 25 bp, Artificial
  Probe
tgtcgattctatcagtcacccattg

SEQ ID NO: 257267 - DNA, 25 bp, Artificial
  Probe
gactctcaacgctgcatgaggcacc

SEQ ID NO: 257268 - DNA, 25 bp, Artificial
  Probe
gaaatcatgtactagctgcatccat

SEQ ID NO: 257269 - DNA, 25 bp, Artificial
  Probe
cctgcatacaaaggacaatgacaac

SEQ ID NO: 257270 - DNA, 25 bp, Artificial
  Probe
caagctgtgtagcaggcactgcggt

SEQ ID NO: 257271 - DNA, 25 bp, Artificial
  Probe
tccatttctatgctctccctgctgg

SEQ ID NO: 257272 - DNA, 25 bp, Artificial
  Probe
aaactcctgcatacaaaggacaatg

SEQ ID NO: 257273 - DNA, 25 bp, Artificial
  Probe
gacaaactcctgcatacaaaggaca

SEQ ID NO: 257274 - DNA, 25 bp, Artificial
  Probe
gatacagacagcaaaacagacagct

SEQ ID NO: 257275 - DNA, 25 bp, Artificial
  Probe
tattgtcctctgtcgccctctgctg

SEQ ID NO: 257276 - DNA, 25 bp, Artificial
  Probe
gcaaaacagacagctcgttcctgat

SEQ ID NO: 257277 - DNA, 25 bp, Artificial
  Probe
cctggccttgaaagggattggatcc

SEQ ID NO: 257278 - DNA, 25 bp, Artificial
  Probe
gctgcatgaggcaccattatgtcga

SEQ ID NO: 257279 - DNA, 25 bp, Artificial
  Probe
aacagacagctcgttcctgatggac

SEQ ID NO: 257280 - DNA, 25 bp, Artificial
  Probe
tctgtcgccctctgctgttcttctg

SEQ ID NO: 257281 - DNA, 25 bp, Artificial
  Probe
agcatttcagatctattgtcctctg

SEQ ID NO: 257282 - DNA, 25 bp, Artificial
  Probe
tacaaatgtagctcaaagatggtgc

SEQ ID NO: 257283 - DNA, 25 bp, Artificial
  Probe
aggacaatgacaaccagaaaacggc

SEQ ID NO: 257284 - DNA, 25 bp, Artificial
  Probe
atttctatgctctccctgctggcca

SEQ ID NO: 257285 - DNA, 25 bp, Artificial
  Probe
tcagtcacccattgtacaaatgtag

SEQ ID NO: 257286 - DNA, 25 bp, Artificial
  Probe
tgttcttctggagaagtttcccctt

SEQ ID NO: 257287 - DNA, 25 bp, Artificial
  Probe
cctgccctggccttgaaagggattg

SEQ ID NO: 257288 - DNA, 25 bp, Artificial
  Probe
gtcgattctatcagtcacccattgt

SEQ ID NO: 257289 - DNA, 25 bp, Artificial
  Probe
gaagcaagacaaactcctgcataca

SEQ ID NO: 257290 - DNA, 25 bp, Artificial
  Probe
tctggagaagtttccccttacaaca

SEQ ID NO: 257291 - DNA, 25 bp, Artificial
  Probe
tgctggccataatgggagatacaga

SEQ ID NO: 257292 - DNA, 25 bp, Artificial
  Probe
gaagtttccccttacaacaatgaga

SEQ ID NO: 257293 - DNA, 25 bp, Artificial
  Probe
agaagtttccccttacaacaatgag

SEQ ID NO: 257294 - DNA, 25 bp, Artificial
  Probe
caacgctgcatgaggcaccattatg

SEQ ID NO: 257295 - DNA, 25 bp, Artificial
  Probe
atctattgtcctctgtcgccctctg

SEQ ID NO: 257296 - DNA, 25 bp, Artificial
  Probe
agacagcaaaacagacagctcgttc

SEQ ID NO: 257297 - DNA, 25 bp, Artificial
  Probe
gcaagacaaactcctgcatacaaag

SEQ ID NO: 257298 - DNA, 25 bp, Artificial
  Probe
ctctcaacgctgcatgaggcaccat

SEQ ID NO: 257299 - DNA, 25 bp, Artificial
  Probe
gcatttcagatctattgtcctctgt

SEQ ID NO: 257300 - DNA, 25 bp, Artificial
  Probe
aggtggcagcatttcagatctattg

SEQ ID NO: 257301 - DNA, 25 bp, Artificial
  Probe
gtcacccattgtacaaatgtagctc

SEQ ID NO: 257302 - DNA, 25 bp, Artificial
  Probe
aatgtagctcaaagatggtgctcct

SEQ ID NO: 257303 - DNA, 25 bp, Artificial
  Probe
gcaccattatgtcgattctatcagt

SEQ ID NO: 257304 - DNA, 25 bp, Artificial
  Probe
cccattgtacaaatgtagctcaaag

SEQ ID NO: 257305 - DNA, 25 bp, Artificial
  Probe
taggaacctgtccagcaccctctgg

SEQ ID NO: 257306 - DNA, 25 bp, Artificial
  Probe
acctcagctccagcagaggctggtt

SEQ ID NO: 257307 - DNA, 25 bp, Artificial
  Probe
tgtcagttgtatagcatctgccacc

SEQ ID NO: 257308 - DNA, 25 bp, Artificial
  Probe
acttcactagccagggagaacaggc

SEQ ID NO: 257309 - DNA, 25 bp, Artificial
  Probe
accttgtagaagataccatgaggtg

SEQ ID NO: 257310 - DNA, 25 bp, Artificial
  Probe
acacagcttcaatggccttggctct

SEQ ID NO: 257311 - DNA, 25 bp, Artificial
  Probe
tgcaaaccttgtagaagataccatg

SEQ ID NO: 257312 - DNA, 25 bp, Artificial
  Probe
gacagggcccatcttggtttcttaa

SEQ ID NO: 257313 - DNA, 25 bp, Artificial
  Probe
cgcatgtgctcagaaaagaacttca

SEQ ID NO: 257314 - DNA, 25 bp, Artificial
  Probe
tgtccagcaccctctggtttgcaaa

SEQ ID NO: 257315 - DNA, 25 bp, Artificial
  Probe
agttccccagaatcagtgagatgct

SEQ ID NO: 257316 - DNA, 25 bp, Artificial
  Probe
aggctggttcagtcaacccctgtca

SEQ ID NO: 257317 - DNA, 25 bp, Artificial
  Probe
cacattattggtaggcctgacgcat

SEQ ID NO: 257318 - DNA, 25 bp, Artificial
  Probe
ccttctgaagtcattggggcaagtc

SEQ ID NO: 257319 - DNA, 25 bp, Artificial
  Probe
agtcattggggcaagtccaatcaca

SEQ ID NO: 257320 - DNA, 25 bp, Artificial
  Probe
ttgagcaagagctccggaagccacc

SEQ ID NO: 257321 - DNA, 25 bp, Artificial
  Probe
agaatcagtgagatgcttgggttcc

SEQ ID NO: 257322 - DNA, 25 bp, Artificial
  Probe
gcaggacccgggtcacattattggt

SEQ ID NO: 257323 - DNA, 25 bp, Artificial
  Probe
ctggttcagtcaacccctgtcagtt

SEQ ID NO: 257324 - DNA, 25 bp, Artificial
  Probe
ggttcctaggaacctgtccagcacc

SEQ ID NO: 257325 - DNA, 25 bp, Artificial
  Probe
ttggtaggcctgacgcatgtgctca

SEQ ID NO: 257326 - DNA, 25 bp, Artificial
  Probe
ggcccatcttggtttcttaaaatag

SEQ ID NO: 257327 - DNA, 25 bp, Artificial
  Probe
ccccagaatcagtgagatgcttggg

SEQ ID NO: 257328 - DNA, 25 bp, Artificial
  Probe
aagagctccggaagccacctcagct

SEQ ID NO: 257329 - DNA, 25 bp, Artificial
  Probe
actagccagggagaacaggcatgga

SEQ ID NO: 257330 - DNA, 25 bp, Artificial
  Probe
tattggtaggcctgacgcatgtgct

SEQ ID NO: 257331 - DNA, 25 bp, Artificial
  Probe
gagatgcttgggttcctaggaacct

SEQ ID NO: 257332 - DNA, 25 bp, Artificial
  Probe
tcagtcaacccctgtcagttgtata

SEQ ID NO: 257333 - DNA, 25 bp, Artificial
  Probe
tcagtgagatgcttgggttcctagg

SEQ ID NO: 257334 - DNA, 25 bp, Artificial
  Probe
tccagcagaggctggttcagtcaac

SEQ ID NO: 257335 - DNA, 25 bp, Artificial
  Probe
cagacagggcccatcttggtttctt

SEQ ID NO: 257336 - DNA, 25 bp, Artificial
  Probe
ttgtatagcatctgccacctttgtc

SEQ ID NO: 257337 - DNA, 25 bp, Artificial
  Probe
caatcacacagcttcaatggccttg

SEQ ID NO: 257338 - DNA, 25 bp, Artificial
  Probe
taggcctgacgcatgtgctcagaaa

SEQ ID NO: 257339 - DNA, 25 bp, Artificial
  Probe
gcacatttgtacttttaaagtcatg

SEQ ID NO: 257340 - DNA, 25 bp, Artificial
  Probe
tgtgcacatttgtacttttaaagtc

SEQ ID NO: 257341 - DNA, 25 bp, Artificial
  Probe
gtccagcaccctctggtttgcaaac

SEQ ID NO: 257342 - DNA, 25 bp, Artificial
  Probe
atctttgagcaagagctccggaagc

SEQ ID NO: 257343 - DNA, 25 bp, Artificial
  Probe
gaactacatgtatccatttagattg

SEQ ID NO: 257344 - DNA, 25 bp, Artificial
  Probe
ttctgaagtcattggggcaagtcca

SEQ ID NO: 257345 - DNA, 25 bp, Artificial
  Probe
gcccatcttggtttcttaaaataga

SEQ ID NO: 257346 - DNA, 25 bp, Artificial
  Probe
ctcagaaaagaacttcactagccag

SEQ ID NO: 257347 - DNA, 25 bp, Artificial
  Probe
cactagccagggagaacaggcatgg

SEQ ID NO: 257348 - DNA, 25 bp, Artificial
  Probe
cagctccagcagaggctggttcagt

SEQ ID NO: 257349 - DNA, 25 bp, Artificial
  Probe
ggaacctgtccagcaccctctggtt

SEQ ID NO: 257350 - DNA, 25 bp, Artificial
  Probe
tgagcacccacagcaggacccgggt

SEQ ID NO: 257351 - DNA, 25 bp, Artificial
  Probe
gtcccgtcaggacgttgaggacttt

SEQ ID NO: 257352 - DNA, 25 bp, Artificial
  Probe
gacgggaatcccttcctggtccctg

SEQ ID NO: 257353 - DNA, 25 bp, Artificial
  Probe
acactggacgggaatcccttcctgg

SEQ ID NO: 257354 - DNA, 25 bp, Artificial
  Probe
cctaagatccaagacagaataatga

SEQ ID NO: 257355 - DNA, 25 bp, Artificial
  Probe
cctagcgctccgagatgcatgtggt

SEQ ID NO: 257356 - DNA, 25 bp, Artificial
  Probe
cgcagcctgacgagctgcccgaggt

SEQ ID NO: 257357 - DNA, 25 bp, Artificial
  Probe
atggactcaaactgccttggcttca

SEQ ID NO: 257358 - DNA, 25 bp, Artificial
  Probe
cggggctttgcctaagatccaagac

SEQ ID NO: 257359 - DNA, 25 bp, Artificial
  Probe
ggctcaatgaactccggcgtggtcc

SEQ ID NO: 257360 - DNA, 25 bp, Artificial
  Probe
agcctgtgcacgttcgaccctgtcg

SEQ ID NO: 257361 - DNA, 25 bp, Artificial
  Probe
tgtgcacgttcgaccctgtcggtgg

SEQ ID NO: 257362 - DNA, 25 bp, Artificial
  Probe
aaaccctagcgctccgagatgcatg

SEQ ID NO: 257363 - DNA, 25 bp, Artificial
  Probe
cggcgtggtcccagcctgtgcacgt

SEQ ID NO: 257364 - DNA, 25 bp, Artificial
  Probe
aacagactgaacagggcgccgcagc

SEQ ID NO: 257365 - DNA, 25 bp, Artificial
  Probe
tgcccgaggtggataacctgacact

SEQ ID NO: 257366 - DNA, 25 bp, Artificial
  Probe
accgtaaaccctagcgctccgagat

SEQ ID NO: 257367 - DNA, 25 bp, Artificial
  Probe
gtggtcccagcctgtgcacgttcga

SEQ ID NO: 257368 - DNA, 25 bp, Artificial
  Probe
acagggcgccgcagcctgacgagct

SEQ ID NO: 257369 - DNA, 25 bp, Artificial
  Probe
cgtcaggacgttgaggacttttcga

SEQ ID NO: 257370 - DNA, 25 bp, Artificial
  Probe
gaatcccttcctggtccctggaact

SEQ ID NO: 257371 - DNA, 25 bp, Artificial
  Probe
gcaacagactgaacagggcgccgca

SEQ ID NO: 257372 - DNA, 25 bp, Artificial
  Probe
gctccgagatgcatgtggtccagcg

SEQ ID NO: 257373 - DNA, 25 bp, Artificial
  Probe
ggacgttgaggacttttcgaccaat

SEQ ID NO: 257374 - DNA, 25 bp, Artificial
  Probe
acctgacactggacgggaatccctt

SEQ ID NO: 257375 - DNA, 25 bp, Artificial
  Probe
ggcccggggctttgcctaagatcca

SEQ ID NO: 257376 - DNA, 25 bp, Artificial
  Probe
cgggaaccctggtgctgctccaagg

SEQ ID NO: 257377 - DNA, 25 bp, Artificial
  Probe
tgaactccggcgtggtcccagcctg

SEQ ID NO: 257378 - DNA, 25 bp, Artificial
  Probe
aatcccttcctggtccctggaactg

SEQ ID NO: 257379 - DNA, 25 bp, Artificial
  Probe
tctgtcgttcgctgggctggaacag

SEQ ID NO: 257380 - DNA, 25 bp, Artificial
  Probe
tgaatggactcaaactgccttggct

SEQ ID NO: 257381 - DNA, 25 bp, Artificial
  Probe
aaccctggtgctgctccaaggggcc

SEQ ID NO: 257382 - DNA, 25 bp, Artificial
  Probe
cccacgagggctcaatgaactccgg

SEQ ID NO: 257383 - DNA, 25 bp, Artificial
  Probe
aactgccttggcttcaggggagtcc

SEQ ID NO: 257384 - DNA, 25 bp, Artificial
  Probe
acgagctgcccgaggtggataacct

SEQ ID NO: 257385 - DNA, 25 bp, Artificial
  Probe
gaaccctggtgctgctccaaggggc

SEQ ID NO: 257386 - DNA, 25 bp, Artificial
  Probe
cgagggctcaatgaactccggcgtg

SEQ ID NO: 257387 - DNA, 25 bp, Artificial
  Probe
aggtggataacctgacactggacgg

SEQ ID NO: 257388 - DNA, 25 bp, Artificial
  Probe
ccacgagggctcaatgaactccggc

SEQ ID NO: 257389 - DNA, 25 bp, Artificial
  Probe
aactccggcgtggtcccagcctgtg

SEQ ID NO: 257390 - DNA, 25 bp, Artificial
  Probe
cactggacgggaatcccttcctggt

SEQ ID NO: 257391 - DNA, 25 bp, Artificial
  Probe
gaactccctcaatctgtcgttcgct

SEQ ID NO: 257392 - DNA, 25 bp, Artificial
  Probe
tggtcccagcctgtgcacgttcgac

SEQ ID NO: 257393 - DNA, 25 bp, Artificial
  Probe
tgcatgtggtccagcgccctgaact

SEQ ID NO: 257394 - DNA, 25 bp, Artificial
  Probe
tgtcgggaaccctggtgctgctcca

SEQ ID NO: 257395 - DNA, 25 bp, Artificial
  Probe
tgaactccctcaatctgtcgttcgc

SEQ ID NO: 257396 - DNA, 25 bp, Artificial
  Probe
tgccttggcttcaggggagtcccgt

SEQ ID NO: 257397 - DNA, 25 bp, Artificial
  Probe
cctgctagcataaagggtgagtgaa

SEQ ID NO: 257398 - DNA, 25 bp, Artificial
  Probe
gtgatgcctgctagcataaagggtg

SEQ ID NO: 257399 - DNA, 25 bp, Artificial
  Probe
attctctgaaaagtcacaagccaag

SEQ ID NO: 257400 - DNA, 25 bp, Artificial
  Probe
gtgtgatgcctgctagcataaaggg

SEQ ID NO: 257401 - DNA, 25 bp, Artificial
  Probe
cggatgggtgtgatgcctgctagca

SEQ ID NO: 257402 - DNA, 25 bp, Artificial
  Probe
gtgcggtcagccatgagcggatggg

SEQ ID NO: 257403 - DNA, 25 bp, Artificial
  Probe
atgggtgtgatgcctgctagcataa

SEQ ID NO: 257404 - DNA, 25 bp, Artificial
  Probe
ccctttcggcaatgttgagggctgc

SEQ ID NO: 257405 - DNA, 25 bp, Artificial
  Probe
tgcctgctagcataaagggtgagtg

SEQ ID NO: 257406 - DNA, 25 bp, Artificial
  Probe
agggctgcgctcctttctctgccgt

SEQ ID NO: 257407 - DNA, 25 bp, Artificial
  Probe
ttgagggctgcgctcctttctctgc

SEQ ID NO: 257408 - DNA, 25 bp, Artificial
  Probe
gcctgctagcataaagggtgagtga

SEQ ID NO: 257409 - DNA, 25 bp, Artificial
  Probe
tgactattctctgaaaagtcacaag

SEQ ID NO: 257410 - DNA, 25 bp, Artificial
  Probe
tcggcaatgttgagggctgcgctcc

SEQ ID NO: 257411 - DNA, 25 bp, Artificial
  Probe
tctgaaaagtcacaagccaagaaaa

SEQ ID NO: 257412 - DNA, 25 bp, Artificial
  Probe
tgtgatgcctgctagcataaagggt

SEQ ID NO: 257413 - DNA, 25 bp, Artificial
  Probe
aagtgggtgactattctctgaaaag

SEQ ID NO: 257414 - DNA, 25 bp, Artificial
  Probe
gatgcctgctagcataaagggtgag

SEQ ID NO: 257415 - DNA, 25 bp, Artificial
  Probe
tgatgcctgctagcataaagggtga

SEQ ID NO: 257416 - DNA, 25 bp, Artificial
  Probe
ggtgtgatgcctgctagcataaagg

SEQ ID NO: 257417 - DNA, 25 bp, Artificial
  Probe
tgagcggatgggtgtgatgcctgct

SEQ ID NO: 257418 - DNA, 25 bp, Artificial
  Probe
tctgccgtgcggtcagccatgagcg

SEQ ID NO: 257419 - DNA, 25 bp, Artificial
  Probe
tattctctgaaaagtcacaagccaa

SEQ ID NO: 257420 - DNA, 25 bp, Artificial
  Probe
ggctgcgctcctttctctgccgtgc

SEQ ID NO: 257421 - DNA, 25 bp, Artificial
  Probe
tgcgctcctttctctgccgtgcggt

SEQ ID NO: 257422 - DNA, 25 bp, Artificial
  Probe
tgggtgtgatgcctgctagcataaa

SEQ ID NO: 257423 - DNA, 25 bp, Artificial
  Probe
ctgctagcataaagggtgagtgaaa

SEQ ID NO: 257424 - DNA, 25 bp, Artificial
  Probe
aatgttgagggctgcgctcctttct

SEQ ID NO: 257425 - DNA, 25 bp, Artificial
  Probe
ctttcggcaatgttgagggctgcgc

SEQ ID NO: 257426 - DNA, 25 bp, Artificial
  Probe
gactattctctgaaaagtcacaagc

SEQ ID NO: 257427 - DNA, 25 bp, Artificial
  Probe
gtgggtgactattctctgaaaagtc

SEQ ID NO: 257428 - DNA, 25 bp, Artificial
  Probe
gggtgtgatgcctgctagcataaag

SEQ ID NO: 257429 - DNA, 25 bp, Artificial
  Probe
ttctctgaaaagtcacaagccaaga

SEQ ID NO: 257430 - DNA, 25 bp, Artificial
  Probe
atgcctgctagcataaagggtgagt

SEQ ID NO: 257431 - DNA, 25 bp, Artificial
  Probe
tgggtgactattctctgaaaagtca

SEQ ID NO: 257432 - DNA, 25 bp, Artificial
  Probe
ctttctctgccgtgcggtcagccat

SEQ ID NO: 257433 - DNA, 25 bp, Artificial
  Probe
gggtgactattctctgaaaagtcac

SEQ ID NO: 257434 - DNA, 25 bp, Artificial
  Probe
gggctgcgctcctttctctgccgtg

SEQ ID NO: 257435 - DNA, 25 bp, Artificial
  Probe
ttcggcaatgttgagggctgcgctc

SEQ ID NO: 257436 - DNA, 25 bp, Artificial
  Probe
gtgactattctctgaaaagtcacaa

SEQ ID NO: 257437 - DNA, 25 bp, Artificial
  Probe
cctttcggcaatgttgagggctgcg

SEQ ID NO: 257438 - DNA, 25 bp, Artificial
  Probe
agtgggtgactattctctgaaaagt

SEQ ID NO: 257439 - DNA, 25 bp, Artificial
  Probe
tttcggcaatgttgagggctgcgct

SEQ ID NO: 257440 - DNA, 25 bp, Artificial
  Probe
gagggctgcgctcctttctctgccg

SEQ ID NO: 257441 - DNA, 25 bp, Artificial
  Probe
ctctgaaaagtcacaagccaagaaa

SEQ ID NO: 257442 - DNA, 25 bp, Artificial
  Probe
cggcaatgttgagggctgcgctcct

SEQ ID NO: 257443 - DNA, 25 bp, Artificial
  Probe
taggggccagggtactatctcagtt

SEQ ID NO: 257444 - DNA, 25 bp, Artificial
  Probe
tgaacatcttgctggctgtctcccc

SEQ ID NO: 257445 - DNA, 25 bp, Artificial
  Probe
ccaatactaggacttgggttgttat

SEQ ID NO: 257446 - DNA, 25 bp, Artificial
  Probe
cccagagctgccttctaacaattgt

SEQ ID NO: 257447 - DNA, 25 bp, Artificial
  Probe
gccttctaacaattgtcaagagaac

SEQ ID NO: 257448 - DNA, 25 bp, Artificial
  Probe
actatctcagttagccactctggtc

SEQ ID NO: 257449 - DNA, 25 bp, Artificial
  Probe
caggcctttttcatagggagaagag

SEQ ID NO: 257450 - DNA, 25 bp, Artificial
  Probe
acaagctgcttttcggactccacag

SEQ ID NO: 257451 - DNA, 25 bp, Artificial
  Probe
atgcctcaccttaggggccagggta

SEQ ID NO: 257452 - DNA, 25 bp, Artificial
  Probe
aaggtgacaagctgcttttcggact

SEQ ID NO: 257453 - DNA, 25 bp, Artificial
  Probe
gaagctgcgaaggtgacaagctgct

SEQ ID NO: 257454 - DNA, 25 bp, Artificial
  Probe
ccagggtactatctcagttagccac

SEQ ID NO: 257455 - DNA, 25 bp, Artificial
  Probe
gggccagggtactatctcagttagc

SEQ ID NO: 257456 - DNA, 25 bp, Artificial
  Probe
gcctcacaggcctttttcataggga

SEQ ID NO: 257457 - DNA, 25 bp, Artificial
  Probe
ctgggaggacattgccccaggactt

SEQ ID NO: 257458 - DNA, 25 bp, Artificial
  Probe
ttcggactccacaggcctgtgtgcc

SEQ ID NO: 257459 - DNA, 25 bp, Artificial
  Probe
acaattgtcaagagaacctcatgcc

SEQ ID NO: 257460 - DNA, 25 bp, Artificial
  Probe
tcagtctgggaggacattgccccag

SEQ ID NO: 257461 - DNA, 25 bp, Artificial
  Probe
agtctgggaggacattgccccagga

SEQ ID NO: 257462 - DNA, 25 bp, Artificial
  Probe
ctctggtcaagtgaacatcttgctg

SEQ ID NO: 257463 - DNA, 25 bp, Artificial
  Probe
taccaatactaggacttgggttgtt

SEQ ID NO: 257464 - DNA, 25 bp, Artificial
  Probe
ctcatgcctcaccttaggggccagg

SEQ ID NO: 257465 - DNA, 25 bp, Artificial
  Probe
agatacctgcaggtgccggaagctg

SEQ ID NO: 257466 - DNA, 25 bp, Artificial
  Probe
gcttttagagagctctcaccatctt

SEQ ID NO: 257467 - DNA, 25 bp, Artificial
  Probe
gggtactatctcagttagccactct

SEQ ID NO: 257468 - DNA, 25 bp, Artificial
  Probe
tctgggaggacattgccccaggact

SEQ ID NO: 257469 - DNA, 25 bp, Artificial
  Probe
cctcagtctgggaggacattgcccc

SEQ ID NO: 257470 - DNA, 25 bp, Artificial
  Probe
aacttctaccaatactaggacttgg

SEQ ID NO: 257471 - DNA, 25 bp, Artificial
  Probe
ttgccccaggacttggagcttttag

SEQ ID NO: 257472 - DNA, 25 bp, Artificial
  Probe
ggcctgtgtgcctcacaggcctttt

SEQ ID NO: 257473 - DNA, 25 bp, Artificial
  Probe
agctgcgaaggtgacaagctgcttt

SEQ ID NO: 257474 - DNA, 25 bp, Artificial
  Probe
agcataggataaccacctcagtctg

SEQ ID NO: 257475 - DNA, 25 bp, Artificial
  Probe
tgtgtgcctcacaggcctttttcat

SEQ ID NO: 257476 - DNA, 25 bp, Artificial
  Probe
accacctcagtctgggaggacattg

SEQ ID NO: 257477 - DNA, 25 bp, Artificial
  Probe
gctgcttttcggactccacaggcct

SEQ ID NO: 257478 - DNA, 25 bp, Artificial
  Probe
tctcagttagccactctggtcaagt

SEQ ID NO: 257479 - DNA, 25 bp, Artificial
  Probe
gagcttttagagagctctcaccatc

SEQ ID NO: 257480 - DNA, 25 bp, Artificial
  Probe
aagagaacctcatgcctcaccttag

SEQ ID NO: 257481 - DNA, 25 bp, Artificial
  Probe
tccacaggcctgtgtgcctcacagg

SEQ ID NO: 257482 - DNA, 25 bp, Artificial
  Probe
ctggtcaagtgaacatcttgctggc

SEQ ID NO: 257483 - DNA, 25 bp, Artificial
  Probe
acattgccccaggacttggagcttt

SEQ ID NO: 257484 - DNA, 25 bp, Artificial
  Probe
acttggagcttttagagagctctca

SEQ ID NO: 257485 - DNA, 25 bp, Artificial
  Probe
caggacttggagcttttagagagct

SEQ ID NO: 257486 - DNA, 25 bp, Artificial
  Probe
gtcaagtgaacatcttgctggctgt

SEQ ID NO: 257487 - DNA, 25 bp, Artificial
  Probe
gtcaagagaacctcatgcctcacct

SEQ ID NO: 257488 - DNA, 25 bp, Artificial
  Probe
tcaacccagatacctgcaggtgccg

SEQ ID NO: 257489 - DNA, 25 bp, Artificial
  Probe
ttctgcccctgcagaactgggaatc

SEQ ID NO: 257490 - DNA, 25 bp, Artificial
  Probe
catggccctaggaggcccagaactt

SEQ ID NO: 257491 - DNA, 25 bp, Artificial
  Probe
tgtgtctttgctgtgagcagaccgt

SEQ ID NO: 257492 - DNA, 25 bp, Artificial
  Probe
cctgtgccccactgagggagactga

SEQ ID NO: 257493 - DNA, 25 bp, Artificial
  Probe
gccttgtgtgtgtctttgctgtgag

SEQ ID NO: 257494 - DNA, 25 bp, Artificial
  Probe
tgtgccccactgagggagactgata

SEQ ID NO: 257495 - DNA, 25 bp, Artificial
  Probe
tacctgtgccccactgagggagact

SEQ ID NO: 257496 - DNA, 25 bp, Artificial
  Probe
ggaggcccagaacttcctgctgcct

SEQ ID NO: 257497 - DNA, 25 bp, Artificial
  Probe
ccccactgagggagactgataatgg

SEQ ID NO: 257498 - DNA, 25 bp, Artificial
  Probe
gagctacactttgtgggtgcttcct

SEQ ID NO: 257499 - DNA, 25 bp, Artificial
  Probe
catgcctttcctctctggagctaca

SEQ ID NO: 257500 - DNA, 25 bp, Artificial
  Probe
tgctgcagtggcttctctgctcaca

SEQ ID NO: 257501 - DNA, 25 bp, Artificial
  Probe
gctgcagtggcttctctgctcacac

SEQ ID NO: 257502 - DNA, 25 bp, Artificial
  Probe
tgagtatcccactaccaccattgtg

SEQ ID NO: 257503 - DNA, 25 bp, Artificial
  Probe
ctgataatgggctcatggccctagg

SEQ ID NO: 257504 - DNA, 25 bp, Artificial
  Probe
taggaggcccagaacttcctgctgc

SEQ ID NO: 257505 - DNA, 25 bp, Artificial
  Probe
ccccctgtggttttcacacagtcta

SEQ ID NO: 257506 - DNA, 25 bp, Artificial
  Probe
cctaaccctgccttgtgtgtgtctt

SEQ ID NO: 257507 - DNA, 25 bp, Artificial
  Probe
tccctgctgcagtggcttctctgct

SEQ ID NO: 257508 - DNA, 25 bp, Artificial
  Probe
cttgtgtgtgtctttgctgtgagca

SEQ ID NO: 257509 - DNA, 25 bp, Artificial
  Probe
tctttgctgtgagcagaccgtgtca

SEQ ID NO: 257510 - DNA, 25 bp, Artificial
  Probe
tctggagctacactttgtgggtgct

SEQ ID NO: 257511 - DNA, 25 bp, Artificial
  Probe
tgctgtgagcagaccgtgtcatctc

SEQ ID NO: 257512 - DNA, 25 bp, Artificial
  Probe
tgaacatgcctttcctctctggagc

SEQ ID NO: 257513 - DNA, 25 bp, Artificial
  Probe
gggtgcttcctaaccctgccttgtg

SEQ ID NO: 257514 - DNA, 25 bp, Artificial
  Probe
gcttcctaaccctgccttgtgtgtg

SEQ ID NO: 257515 - DNA, 25 bp, Artificial
  Probe
gctcatggccctaggaggcccagaa

SEQ ID NO: 257516 - DNA, 25 bp, Artificial
  Probe
tggagctacactttgtgggtgcttc

SEQ ID NO: 257517 - DNA, 25 bp, Artificial
  Probe
gcctttcctctctggagctacactt

SEQ ID NO: 257518 - DNA, 25 bp, Artificial
  Probe
gtgtgtgtctttgctgtgagcagac

SEQ ID NO: 257519 - DNA, 25 bp, Artificial
  Probe
cttctgcccctgcagaactgggaat

SEQ ID NO: 257520 - DNA, 25 bp, Artificial
  Probe
cactttgtgggtgcttcctaaccct

SEQ ID NO: 257521 - DNA, 25 bp, Artificial
  Probe
cccactgagggagactgataatggg

SEQ ID NO: 257522 - DNA, 25 bp, Artificial
  Probe
cctctctggagctacactttgtggg

SEQ ID NO: 257523 - DNA, 25 bp, Artificial
  Probe
tgtgaacatgcctttcctctctgga

SEQ ID NO: 257524 - DNA, 25 bp, Artificial
  Probe
tgtgtccctgctgcagtggcttctc

SEQ ID NO: 257525 - DNA, 25 bp, Artificial
  Probe
acagtctacctgtgccccactgagg

SEQ ID NO: 257526 - DNA, 25 bp, Artificial
  Probe
ttgctgtgagcagaccgtgtcatct

SEQ ID NO: 257527 - DNA, 25 bp, Artificial
  Probe
ctttcctctctggagctacactttg

SEQ ID NO: 257528 - DNA, 25 bp, Artificial
  Probe
ataatgggctcatggccctaggagg

SEQ ID NO: 257529 - DNA, 25 bp, Artificial
  Probe
gtggttttcacacagtctacctgtg

SEQ ID NO: 257530 - DNA, 25 bp, Artificial
  Probe
tttcctctctggagctacactttgt

SEQ ID NO: 257531 - DNA, 25 bp, Artificial
  Probe
ggctcatggccctaggaggcccaga

SEQ ID NO: 257532 - DNA, 25 bp, Artificial
  Probe
gttttcacacagtctacctgtgccc

SEQ ID NO: 257533 - DNA, 25 bp, Artificial
  Probe
ttgtgggtgcttcctaaccctgcct

SEQ ID NO: 257534 - DNA, 25 bp, Artificial
  Probe
ccctgtggttttcacacagtctacc

SEQ ID NO: 257535 - DNA, 25 bp, Artificial
  Probe
tggctcaaagacagcctgcagtgca

SEQ ID NO: 257536 - DNA, 25 bp, Artificial
  Probe
tgtccgatagggacctgaagaaatc

SEQ ID NO: 257537 - DNA, 25 bp, Artificial
  Probe
agcagcttgccctgccttttgcatg

SEQ ID NO: 257538 - DNA, 25 bp, Artificial
  Probe
gagttcaagcgcatctcccgcagca

SEQ ID NO: 257539 - DNA, 25 bp, Artificial
  Probe
agttcaagcgcatctcccgcagcat

SEQ ID NO: 257540 - DNA, 25 bp, Artificial
  Probe
tcctgagttataaggccctaggagg

SEQ ID NO: 257541 - DNA, 25 bp, Artificial
  Probe
ggtttcccaagtactgtcgggagag

SEQ ID NO: 257542 - DNA, 25 bp, Artificial
  Probe
ttcccaagtactgtcgggagagcta

SEQ ID NO: 257543 - DNA, 25 bp, Artificial
  Probe
atcaacgctccctatctggtcatgg

SEQ ID NO: 257544 - DNA, 25 bp, Artificial
  Probe
cactctgcgacctcatttccggttt

SEQ ID NO: 257545 - DNA, 25 bp, Artificial
  Probe
cctatctggtcatgggacagaaaca

SEQ ID NO: 257546 - DNA, 25 bp, Artificial
  Probe
tcatttccggtttcccaagtactgt

SEQ ID NO: 257547 - DNA, 25 bp, Artificial
  Probe
cgaaaagtccattctgatgttgtag

SEQ ID NO: 257548 - DNA, 25 bp, Artificial
  Probe
tttacaagctgaacggggtgtccga

SEQ ID NO: 257549 - DNA, 25 bp, Artificial
  Probe
catcctggagacaaagagcaagacc

SEQ ID NO: 257550 - DNA, 25 bp, Artificial
  Probe
cacctccgtgaaacggtggcagaag

SEQ ID NO: 257551 - DNA, 25 bp, Artificial
  Probe
cgcagcatccgcaagctgcaatgct

SEQ ID NO: 257552 - DNA, 25 bp, Artificial
  Probe
cagatagctattttcacataaagcg

SEQ ID NO: 257553 - DNA, 25 bp, Artificial
  Probe
tgaagaaatcagtgctgtggctcaa

SEQ ID NO: 257554 - DNA, 25 bp, Artificial
  Probe
agatgaacgacatcaacgctcccta

SEQ ID NO: 257555 - DNA, 25 bp, Artificial
  Probe
tggagtggcttctcgccgaccaggc

SEQ ID NO: 257556 - DNA, 25 bp, Artificial
  Probe
cacctgtgaggagatgaacgacatc

SEQ ID NO: 257557 - DNA, 25 bp, Artificial
  Probe
tctggtcatgggacagaaacagggt

SEQ ID NO: 257558 - DNA, 25 bp, Artificial
  Probe
tcaaagacagcctgcagtgcacctg

SEQ ID NO: 257559 - DNA, 25 bp, Artificial
  Probe
aagcgaaaagtccattctgatgttg

SEQ ID NO: 257560 - DNA, 25 bp, Artificial
  Probe
tgcgacctcatttccggtttcccaa

SEQ ID NO: 257561 - DNA, 25 bp, Artificial
  Probe
aagagcaagaccatttacaagctga

SEQ ID NO: 257562 - DNA, 25 bp, Artificial
  Probe
aaatcagtgctgtggctcaaagaca

SEQ ID NO: 257563 - DNA, 25 bp, Artificial
  Probe
ggaggccccgggaacagatagctat

SEQ ID NO: 257564 - DNA, 25 bp, Artificial
  Probe
agagctggtgatcacctccgtgaaa

SEQ ID NO: 257565 - DNA, 25 bp, Artificial
  Probe
agtctcagcttggagcagcttgccc

SEQ ID NO: 257566 - DNA, 25 bp, Artificial
  Probe
gtgctgtggctcaaagacagcctgc

SEQ ID NO: 257567 - DNA, 25 bp, Artificial
  Probe
ccccgggaacagatagctattttca

SEQ ID NO: 257568 - DNA, 25 bp, Artificial
  Probe
ttcctagtggagtggcttctcgccg

SEQ ID NO: 257569 - DNA, 25 bp, Artificial
  Probe
gatgaacgacatcaacgctccctat

SEQ ID NO: 257570 - DNA, 25 bp, Artificial
  Probe
tccgatagggacctgaagaaatcag

SEQ ID NO: 257571 - DNA, 25 bp, Artificial
  Probe
ctcatttccggtttcccaagtactg

SEQ ID NO: 257572 - DNA, 25 bp, Artificial
  Probe
gcttgccctgccttttgcatgtgtg

SEQ ID NO: 257573 - DNA, 25 bp, Artificial
  Probe
ccattctgatgttgtagaaatattc

SEQ ID NO: 257574 - DNA, 25 bp, Artificial
  Probe
gctattttcacataaagcgaaaagt

SEQ ID NO: 257575 - DNA, 25 bp, Artificial
  Probe
cttggagcagcttgccctgcctttt

SEQ ID NO: 257576 - DNA, 25 bp, Artificial
  Probe
tagtggagtggcttctcgccgacca

SEQ ID NO: 257577 - DNA, 25 bp, Artificial
  Probe
aacagagacaccaaaatcatcctgg

SEQ ID NO: 257578 - DNA, 25 bp, Artificial
  Probe
gagataacctacatcaacagagaca

SEQ ID NO: 257579 - DNA, 25 bp, Artificial
  Probe
actctgcgacctcatttccggtttc

SEQ ID NO: 257580 - DNA, 25 bp, Artificial
  Probe
tgatcacctccgtgaaacggtggca

SEQ ID NO: 257581 - DNA, 25 bp, Artificial
  Probe
ttcggcacgaggtcgactacgagct

SEQ ID NO: 257582 - DNA, 25 bp, Artificial
  Probe
ctgagtctcctgtgcccaggggaca

SEQ ID NO: 257583 - DNA, 25 bp, Artificial
  Probe
agctgctccggagaggaagacgtca

SEQ ID NO: 257584 - DNA, 25 bp, Artificial
  Probe
agctgagtctcctgtgcccagggga

SEQ ID NO: 257585 - DNA, 25 bp, Artificial
  Probe
gagatggctgctaacgtgctgctgt

SEQ ID NO: 257586 - DNA, 25 bp, Artificial
  Probe
gatggctgctaacgtgctgctgtgt

SEQ ID NO: 257587 - DNA, 25 bp, Artificial
  Probe
cgctgctccgagatgctcttcaagc

SEQ ID NO: 257588 - DNA, 25 bp, Artificial
  Probe
gtggctgcaccatgctggatggctt

SEQ ID NO: 257589 - DNA, 25 bp, Artificial
  Probe
cgagatgctcttcaagccctctttg

SEQ ID NO: 257590 - DNA, 25 bp, Artificial
  Probe
cgaggtcgactacgagctcccggat

SEQ ID NO: 257591 - DNA, 25 bp, Artificial
  Probe
agccctctttggtgggcagcaccca

SEQ ID NO: 257592 - DNA, 25 bp, Artificial
  Probe
gccccacaggcaagagctggagagc

SEQ ID NO: 257593 - DNA, 25 bp, Artificial
  Probe
tgctgctgtgtggtggctgcaccat

SEQ ID NO: 257594 - DNA, 25 bp, Artificial
  Probe
tcgttgcaggccttccagcagcttt

SEQ ID NO: 257595 - DNA, 25 bp, Artificial
  Probe
cgctgccagggcactggcttcaagg

SEQ ID NO: 257596 - DNA, 25 bp, Artificial
  Probe
cactggcttcaaggaggagatggct

SEQ ID NO: 257597 - DNA, 25 bp, Artificial
  Probe
caagagctggagagcagtggccctc

SEQ ID NO: 257598 - DNA, 25 bp, Artificial
  Probe
tccctggggtcactctataccttta

SEQ ID NO: 257599 - DNA, 25 bp, Artificial
  Probe
cgttgcaggccttccagcagctttg

SEQ ID NO: 257600 - DNA, 25 bp, Artificial
  Probe
ctccctggggtcactctataccttt

SEQ ID NO: 257601 - DNA, 25 bp, Artificial
  Probe
ggctgtgcagccatctacagcaagt

SEQ ID NO: 257602 - DNA, 25 bp, Artificial
  Probe
tcgaccgctgccagggcactggctt

SEQ ID NO: 257603 - DNA, 25 bp, Artificial
  Probe
agatgctcttcaagccctctttggt

SEQ ID NO: 257604 - DNA, 25 bp, Artificial
  Probe
atggctgctaacgtgctgctgtgtg

SEQ ID NO: 257605 - DNA, 25 bp, Artificial
  Probe
tggggtcactctatacctttacaga

SEQ ID NO: 257606 - DNA, 25 bp, Artificial
  Probe
gctgcaccatgctggatggcttccc

SEQ ID NO: 257607 - DNA, 25 bp, Artificial
  Probe
gaatttcgcataaaagtttaacctg

SEQ ID NO: 257608 - DNA, 25 bp, Artificial
  Probe
gttgcaggccttccagcagctttgg

SEQ ID NO: 257609 - DNA, 25 bp, Artificial
  Probe
tccgctgctccgagatgctcttcaa

SEQ ID NO: 257610 - DNA, 25 bp, Artificial
  Probe
ccacaggcaagagctggagagcagt

SEQ ID NO: 257611 - DNA, 25 bp, Artificial
  Probe
ttccagagggagctgagtctcctgt

SEQ ID NO: 257612 - DNA, 25 bp, Artificial
  Probe
cttcaaggaggagatggctgctaac

SEQ ID NO: 257613 - DNA, 25 bp, Artificial
  Probe
tgctccgagatgctcttcaagccct

SEQ ID NO: 257614 - DNA, 25 bp, Artificial
  Probe
cctggggtcactctatacctttaca

SEQ ID NO: 257615 - DNA, 25 bp, Artificial
  Probe
cagctgctccggagaggaagacgtc

SEQ ID NO: 257616 - DNA, 25 bp, Artificial
  Probe
gtttccagagggagctgagtctcct

SEQ ID NO: 257617 - DNA, 25 bp, Artificial
  Probe
ctgccagggcactggcttcaaggag

SEQ ID NO: 257618 - DNA, 25 bp, Artificial
  Probe
tttggtgggcagcacccagcctggc

SEQ ID NO: 257619 - DNA, 25 bp, Artificial
  Probe
agggagctgagtctcctgtgcccag

SEQ ID NO: 257620 - DNA, 25 bp, Artificial
  Probe
agagggagctgagtctcctgtgccc

SEQ ID NO: 257621 - DNA, 25 bp, Artificial
  Probe
aggagatggctgctaacgtgctgct

SEQ ID NO: 257622 - DNA, 25 bp, Artificial
  Probe
ctcttcaagccctctttggtgggca

SEQ ID NO: 257623 - DNA, 25 bp, Artificial
  Probe
catctacagcaagtgctaaggggcg

SEQ ID NO: 257624 - DNA, 25 bp, Artificial
  Probe
gggtcactctatacctttacagaat

SEQ ID NO: 257625 - DNA, 25 bp, Artificial
  Probe
tggcctcgttgcaggccttccagca

SEQ ID NO: 257626 - DNA, 25 bp, Artificial
  Probe
gctgctccgagatgctcttcaagcc

SEQ ID NO: 257627 - DNA, 25 bp, Artificial
  Probe
gtttcttggagcatcactaatggcc

SEQ ID NO: 257628 - DNA, 25 bp, Artificial
  Probe
cttggagcatcactaatggcccagt

SEQ ID NO: 257629 - DNA, 25 bp, Artificial
  Probe
gccttggctgtttcttggagcatca

SEQ ID NO: 257630 - DNA, 25 bp, Artificial
  Probe
cagtcgccccaaataagctctgggg

SEQ ID NO: 257631 - DNA, 25 bp, Artificial
  Probe
cgccccaaataagctctggggaagt

SEQ ID NO: 257632 - DNA, 25 bp, Artificial
  Probe
tcttggagcatcactaatggcccag

SEQ ID NO: 257633 - DNA, 25 bp, Artificial
  Probe
cagtcccaggcacaaggggcagaga

SEQ ID NO: 257634 - DNA, 25 bp, Artificial
  Probe
ttctgtcttgggagccggtttcaaa

SEQ ID NO: 257635 - DNA, 25 bp, Artificial
  Probe
gaacagttctgtcttgggagccggt

SEQ ID NO: 257636 - DNA, 25 bp, Artificial
  Probe
ggctgtttcttggagcatcactaat

SEQ ID NO: 257637 - DNA, 25 bp, Artificial
  Probe
gctgtttcttggagcatcactaatg

SEQ ID NO: 257638 - DNA, 25 bp, Artificial
  Probe
taagctctggggaagtccattccag

SEQ ID NO: 257639 - DNA, 25 bp, Artificial
  Probe
gtcgccccaaataagctctggggaa

SEQ ID NO: 257640 - DNA, 25 bp, Artificial
  Probe
ttcttggagcatcactaatggccca

SEQ ID NO: 257641 - DNA, 25 bp, Artificial
  Probe
ctaatggcccagtcccaggcacaag

SEQ ID NO: 257642 - DNA, 25 bp, Artificial
  Probe
gcagtcgccccaaataagctctggg

SEQ ID NO: 257643 - DNA, 25 bp, Artificial
  Probe
tgtttcttggagcatcactaatggc

SEQ ID NO: 257644 - DNA, 25 bp, Artificial
  Probe
ctgtttcttggagcatcactaatgg

SEQ ID NO: 257645 - DNA, 25 bp, Artificial
  Probe
tggcccagtcccaggcacaaggggc

SEQ ID NO: 257646 - DNA, 25 bp, Artificial
  Probe
agctctggggaagtccattccagtc

SEQ ID NO: 257647 - DNA, 25 bp, Artificial
  Probe
ggcagtcgccccaaataagctctgg

SEQ ID NO: 257648 - DNA, 25 bp, Artificial
  Probe
aagctctggggaagtccattccagt

SEQ ID NO: 257649 - DNA, 25 bp, Artificial
  Probe
tcaggaggcgacacacagaggagct

SEQ ID NO: 257650 - DNA, 25 bp, Artificial
  Probe
gccccaaataagctctggggaagtc

SEQ ID NO: 257651 - DNA, 25 bp, Artificial
  Probe
taatggttcaggaggcgacacacag

SEQ ID NO: 257652 - DNA, 25 bp, Artificial
  Probe
ttggagcatcactaatggcccagtc

SEQ ID NO: 257653 - DNA, 25 bp, Artificial
  Probe
ccaaataagctctggggaagtccat

SEQ ID NO: 257654 - DNA, 25 bp, Artificial
  Probe
ccttggctgtttcttggagcatcac

SEQ ID NO: 257655 - DNA, 25 bp, Artificial
  Probe
agagacaggcagtcgccccaaataa

SEQ ID NO: 257656 - DNA, 25 bp, Artificial
  Probe
tggctgtttcttggagcatcactaa

SEQ ID NO: 257657 - DNA, 25 bp, Artificial
  Probe
ttcaggaggcgacacacagaggagc

SEQ ID NO: 257658 - DNA, 25 bp, Artificial
  Probe
cccaaataagctctggggaagtcca

SEQ ID NO: 257659 - DNA, 25 bp, Artificial
  Probe
tcgccccaaataagctctggggaag

SEQ ID NO: 257660 - DNA, 25 bp, Artificial
  Probe
aacagttctgtcttgggagccggtt

SEQ ID NO: 257661 - DNA, 25 bp, Artificial
  Probe
ggagcatcactaatggcccagtccc

SEQ ID NO: 257662 - DNA, 25 bp, Artificial
  Probe
acagttctgtcttgggagccggttt

SEQ ID NO: 257663 - DNA, 25 bp, Artificial
  Probe
agtcgccccaaataagctctgggga

SEQ ID NO: 257664 - DNA, 25 bp, Artificial
  Probe
ccagtcccaggcacaaggggcagag

SEQ ID NO: 257665 - DNA, 25 bp, Artificial
  Probe
tggagcatcactaatggcccagtcc

SEQ ID NO: 257666 - DNA, 25 bp, Artificial
  Probe
ttggctgtttcttggagcatcacta

SEQ ID NO: 257667 - DNA, 25 bp, Artificial
  Probe
tttcttggagcatcactaatggccc

SEQ ID NO: 257668 - DNA, 25 bp, Artificial
  Probe
gagcatcactaatggcccagtccca

SEQ ID NO: 257669 - DNA, 25 bp, Artificial
  Probe
actaatggcccagtcccaggcacaa

SEQ ID NO: 257670 - DNA, 25 bp, Artificial
  Probe
ctctggggaagtccattccagtcgc

SEQ ID NO: 257671 - DNA, 25 bp, Artificial
  Probe
gagagacaggcagtcgccccaaata

SEQ ID NO: 257672 - DNA, 25 bp, Artificial
  Probe
cttggctgtttcttggagcatcact

SEQ ID NO: 257673 - DNA, 25 bp, Artificial
  Probe
caaacattccaagttgggacttcca

SEQ ID NO: 257674 - DNA, 25 bp, Artificial
  Probe
taccgaacaaacattccaagttggg

SEQ ID NO: 257675 - DNA, 25 bp, Artificial
  Probe
ttatcagtggtgtacgaaatccctg

SEQ ID NO: 257676 - DNA, 25 bp, Artificial
  Probe
atccctgtttttctgtttgagcatg

SEQ ID NO: 257677 - DNA, 25 bp, Artificial
  Probe
aagggagctgggttcctttatcagt

SEQ ID NO: 257678 - DNA, 25 bp, Artificial
  Probe
tgtgctgattgtctcagctgctgtt

SEQ ID NO: 257679 - DNA, 25 bp, Artificial
  Probe
cacttgaggcttctccgggagaaaa

SEQ ID NO: 257680 - DNA, 25 bp, Artificial
  Probe
tctcagctgctgttgttgctgttct

SEQ ID NO: 257681 - DNA, 25 bp, Artificial
  Probe
tgattgtctcagctgctgttgttgc

SEQ ID NO: 257682 - DNA, 25 bp, Artificial
  Probe
cgaaatccctgtttttctgtttgag

SEQ ID NO: 257683 - DNA, 25 bp, Artificial
  Probe
gttctgttgtgctgattgtctcagc

SEQ ID NO: 257684 - DNA, 25 bp, Artificial
  Probe
aaatccctgtttttctgtttgagca

SEQ ID NO: 257685 - DNA, 25 bp, Artificial
  Probe
gctgattgtctcagctgctgttgtt

SEQ ID NO: 257686 - DNA, 25 bp, Artificial
  Probe
ttccaagttgggacttccagcacca

SEQ ID NO: 257687 - DNA, 25 bp, Artificial
  Probe
tccaagttgggacttccagcaccag

SEQ ID NO: 257688 - DNA, 25 bp, Artificial
  Probe
agttgggacttccagcaccagagac

SEQ ID NO: 257689 - DNA, 25 bp, Artificial
  Probe
ttgcccgtactgaagaaactcaacg

SEQ ID NO: 257690 - DNA, 25 bp, Artificial
  Probe
acttgaggcttctccgggagaaaat

SEQ ID NO: 257691 - DNA, 25 bp, Artificial
  Probe
gaacaaacattccaagttgggactt

SEQ ID NO: 257692 - DNA, 25 bp, Artificial
  Probe
caagttgggacttccagcaccagag

SEQ ID NO: 257693 - DNA, 25 bp, Artificial
  Probe
tctctgcacttgaggcttctccggg

SEQ ID NO: 257694 - DNA, 25 bp, Artificial
  Probe
ttgtttgcccgtactgaagaaactc

SEQ ID NO: 257695 - DNA, 25 bp, Artificial
  Probe
gcacttgaggcttctccgggagaaa

SEQ ID NO: 257696 - DNA, 25 bp, Artificial
  Probe
tgcacttgaggcttctccgggagaa

SEQ ID NO: 257697 - DNA, 25 bp, Artificial
  Probe
gagctgggttcctttatcagtggtg

SEQ ID NO: 257698 - DNA, 25 bp, Artificial
  Probe
tgctgattgtctcagctgctgttgt

SEQ ID NO: 257699 - DNA, 25 bp, Artificial
  Probe
ctttatcagtggtgtacgaaatccc

SEQ ID NO: 257700 - DNA, 25 bp, Artificial
  Probe
aagttgggacttccagcaccagaga

SEQ ID NO: 257701 - DNA, 25 bp, Artificial
  Probe
gaaatccctgtttttctgtttgagc

SEQ ID NO: 257702 - DNA, 25 bp, Artificial
  Probe
tcagctgctgttgttgctgttctta

SEQ ID NO: 257703 - DNA, 25 bp, Artificial
  Probe
aacattccaagttgggacttccagc

SEQ ID NO: 257704 - DNA, 25 bp, Artificial
  Probe
ctgttgtgctgattgtctcagctgc

SEQ ID NO: 257705 - DNA, 25 bp, Artificial
  Probe
tttgtttgcccgtactgaagaaact

SEQ ID NO: 257706 - DNA, 25 bp, Artificial
  Probe
tgggttcctttatcagtggtgtacg

SEQ ID NO: 257707 - DNA, 25 bp, Artificial
  Probe
gggttcctttatcagtggtgtacga

SEQ ID NO: 257708 - DNA, 25 bp, Artificial
  Probe
agggagctgggttcctttatcagtg

SEQ ID NO: 257709 - DNA, 25 bp, Artificial
  Probe
ctgattgtctcagctgctgttgttg

SEQ ID NO: 257710 - DNA, 25 bp, Artificial
  Probe
tggtgtacgaaatccctgtttttct

SEQ ID NO: 257711 - DNA, 25 bp, Artificial
  Probe
tgtttgcccgtactgaagaaactca

SEQ ID NO: 257712 - DNA, 25 bp, Artificial
  Probe
ttctgttgtgctgattgtctcagct

SEQ ID NO: 257713 - DNA, 25 bp, Artificial
  Probe
cgaacaaacattccaagttgggact

SEQ ID NO: 257714 - DNA, 25 bp, Artificial
  Probe
gttcctttatcagtggtgtacgaaa

SEQ ID NO: 257715 - DNA, 25 bp, Artificial
  Probe
ttgtgctgattgtctcagctgctgt

SEQ ID NO: 257716 - DNA, 25 bp, Artificial
  Probe
tacgaaatccctgtttttctgtttg

SEQ ID NO: 257717 - DNA, 25 bp, Artificial
  Probe
gtctcagctgctgttgttgctgttc

SEQ ID NO: 257718 - DNA, 25 bp, Artificial
  Probe
ggagctgggttcctttatcagtggt

SEQ ID NO: 257719 - DNA, 25 bp, Artificial
  Probe
ctgctgctgcatgcaaccttattgc

SEQ ID NO: 257720 - DNA, 25 bp, Artificial
  Probe
attccagcagtctgtatagataact

SEQ ID NO: 257721 - DNA, 25 bp, Artificial
  Probe
tttggggacctaattccagcagtct

SEQ ID NO: 257722 - DNA, 25 bp, Artificial
  Probe
aaatgcaaagctgctgctgcatgca

SEQ ID NO: 257723 - DNA, 25 bp, Artificial
  Probe
aaatgtttaatgctttcagcctgct

SEQ ID NO: 257724 - DNA, 25 bp, Artificial
  Probe
aatccacatgaaaatgatgagacat

SEQ ID NO: 257725 - DNA, 25 bp, Artificial
  Probe
atagataactaaagcccagttaagt

SEQ ID NO: 257726 - DNA, 25 bp, Artificial
  Probe
aagctgctgctgcatgcaaccttat

SEQ ID NO: 257727 - DNA, 25 bp, Artificial
  Probe
ataatccacatgaaaatgatgagac

SEQ ID NO: 257728 - DNA, 25 bp, Artificial
  Probe
tttaatgctttcagcctgctttatg

SEQ ID NO: 257729 - DNA, 25 bp, Artificial
  Probe
atgctttcagcctgctttatggctg

SEQ ID NO: 257730 - DNA, 25 bp, Artificial
  Probe
atgatgagacattttctctttgaac

SEQ ID NO: 257731 - DNA, 25 bp, Artificial
  Probe
tatagataactaaagcccagttaag

SEQ ID NO: 257732 - DNA, 25 bp, Artificial
  Probe
gctgcatgcaaccttattgcaatca

SEQ ID NO: 257733 - DNA, 25 bp, Artificial
  Probe
gaactatatggtattccctattcag

SEQ ID NO: 257734 - DNA, 25 bp, Artificial
  Probe
ctgtggcaatttctgtcacattata

SEQ ID NO: 257735 - DNA, 25 bp, Artificial
  Probe
atatcattcctgtggcaatttctgt

SEQ ID NO: 257736 - DNA, 25 bp, Artificial
  Probe
ctagacatgcatgtttcaggggtta

SEQ ID NO: 257737 - DNA, 25 bp, Artificial
  Probe
cattcctgtggcaatttctgtcaca

SEQ ID NO: 257738 - DNA, 25 bp, Artificial
  Probe
tgcatgcaaccttattgcaatcagt

SEQ ID NO: 257739 - DNA, 25 bp, Artificial
  Probe
gacattttctctttgaactatatgg

SEQ ID NO: 257740 - DNA, 25 bp, Artificial
  Probe
gcaatcagtatatcattcctgtggc

SEQ ID NO: 257741 - DNA, 25 bp, Artificial
  Probe
cttcatcttctaagtaaatctgtgg

SEQ ID NO: 257742 - DNA, 25 bp, Artificial
  Probe
acagataatccacatgaaaatgatg

SEQ ID NO: 257743 - DNA, 25 bp, Artificial
  Probe
atgtttaatgctttcagcctgcttt

SEQ ID NO: 257744 - DNA, 25 bp, Artificial
  Probe
caaatctagacatgcatgtttcagg

SEQ ID NO: 257745 - DNA, 25 bp, Artificial
  Probe
cagcctgctttatggctggttttgt

SEQ ID NO: 257746 - DNA, 25 bp, Artificial
  Probe
tcttctaagtaaatctgtgggtgac

SEQ ID NO: 257747 - DNA, 25 bp, Artificial
  Probe
ttcatcttctaagtaaatctgtggg

SEQ ID NO: 257748 - DNA, 25 bp, Artificial
  Probe
tttcagcctgctttatggctggttt

SEQ ID NO: 257749 - DNA, 25 bp, Artificial
  Probe
ccagcagtctgtatagataactaaa

SEQ ID NO: 257750 - DNA, 25 bp, Artificial
  Probe
ctatgccatgcttgggatgtttgaa

SEQ ID NO: 257751 - DNA, 25 bp, Artificial
  Probe
gcaatttctgtcacattatattgtg

SEQ ID NO: 257752 - DNA, 25 bp, Artificial
  Probe
gatgagacattttctctttgaacta

SEQ ID NO: 257753 - DNA, 25 bp, Artificial
  Probe
gcatgcaaccttattgcaatcagta

SEQ ID NO: 257754 - DNA, 25 bp, Artificial
  Probe
cagtatatcattcctgtggcaattt

SEQ ID NO: 257755 - DNA, 25 bp, Artificial
  Probe
cagataatccacatgaaaatgatga

SEQ ID NO: 257756 - DNA, 25 bp, Artificial
  Probe
atttcaggttactatgccatgcttg

SEQ ID NO: 257757 - DNA, 25 bp, Artificial
  Probe
catcttctaagtaaatctgtgggtg

SEQ ID NO: 257758 - DNA, 25 bp, Artificial
  Probe
ttcaggttactatgccatgcttggg

SEQ ID NO: 257759 - DNA, 25 bp, Artificial
  Probe
tttaatttcaggttactatgccatg

SEQ ID NO: 257760 - DNA, 25 bp, Artificial
  Probe
tgatgagacattttctctttgaact

SEQ ID NO: 257761 - DNA, 25 bp, Artificial
  Probe
catgtgataagcatgaccggagagg

SEQ ID NO: 257762 - DNA, 25 bp, Artificial
  Probe
gacctaattccagcagtctgtatag

SEQ ID NO: 257763 - DNA, 25 bp, Artificial
  Probe
ggttactatgccatgcttgggatgt

SEQ ID NO: 257764 - DNA, 25 bp, Artificial
  Probe
ctaatttggggacctaattccagca

SEQ ID NO: 257765 - DNA, 25 bp, Artificial
  Probe
cttccaagactgaagactacacggt

SEQ ID NO: 257766 - DNA, 25 bp, Artificial
  Probe
ggcggcctcttaaccttccaagact

SEQ ID NO: 257767 - DNA, 25 bp, Artificial
  Probe
ttccaagactgaagactacacggtg

SEQ ID NO: 257768 - DNA, 25 bp, Artificial
  Probe
cccgagtgacagtgttgacaaggtt

SEQ ID NO: 257769 - DNA, 25 bp, Artificial
  Probe
acatcagcatagtgttcttgagctt

SEQ ID NO: 257770 - DNA, 25 bp, Artificial
  Probe
cgttccccgtgtgacatcagcatag

SEQ ID NO: 257771 - DNA, 25 bp, Artificial
  Probe
taaagactgcagtgcaggcggcctc

SEQ ID NO: 257772 - DNA, 25 bp, Artificial
  Probe
agactgcagtgcaggcggcctctta

SEQ ID NO: 257773 - DNA, 25 bp, Artificial
  Probe
agaagctgcatgttaagtgccatta

SEQ ID NO: 257774 - DNA, 25 bp, Artificial
  Probe
tggcaagctgcaggtttgttatgca

SEQ ID NO: 257775 - DNA, 25 bp, Artificial
  Probe
gtgtggacagaatcccgtggtcact

SEQ ID NO: 257776 - DNA, 25 bp, Artificial
  Probe
ctgcaggtttgttatgcaaaggttc

SEQ ID NO: 257777 - DNA, 25 bp, Artificial
  Probe
aagactgcagtgcaggcggcctctt

SEQ ID NO: 257778 - DNA, 25 bp, Artificial
  Probe
atcccgtggtcactactgtatgtaa

SEQ ID NO: 257779 - DNA, 25 bp, Artificial
  Probe
tgctgctcctggtgtctgcaatagc

SEQ ID NO: 257780 - DNA, 25 bp, Artificial
  Probe
tcactcctgctgctcctggtgtctg

SEQ ID NO: 257781 - DNA, 25 bp, Artificial
  Probe
ggtgacaagcctcactcctgctgct

SEQ ID NO: 257782 - DNA, 25 bp, Artificial
  Probe
actcctgctgctcctggtgtctgca

SEQ ID NO: 257783 - DNA, 25 bp, Artificial
  Probe
cataaagactgcagtgcaggcggcc

SEQ ID NO: 257784 - DNA, 25 bp, Artificial
  Probe
taatattcacataaagactgcagtg

SEQ ID NO: 257785 - DNA, 25 bp, Artificial
  Probe
caagctgcaggtttgttatgcaaag

SEQ ID NO: 257786 - DNA, 25 bp, Artificial
  Probe
tccccgtgtgacatcagcatagtgt

SEQ ID NO: 257787 - DNA, 25 bp, Artificial
  Probe
taaagaagctgcatgttaagtgcca

SEQ ID NO: 257788 - DNA, 25 bp, Artificial
  Probe
aagactacacggtgacaagcctcac

SEQ ID NO: 257789 - DNA, 25 bp, Artificial
  Probe
ccgttccccgtgtgacatcagcata

SEQ ID NO: 257790 - DNA, 25 bp, Artificial
  Probe
ccaagactgaagactacacggtgac

SEQ ID NO: 257791 - DNA, 25 bp, Artificial
  Probe
ctggtgtctgcaatagcacaggacc

SEQ ID NO: 257792 - DNA, 25 bp, Artificial
  Probe
caggacccccgagtgacagtgttga

SEQ ID NO: 257793 - DNA, 25 bp, Artificial
  Probe
tacacggtgacaagcctcactcctg

SEQ ID NO: 257794 - DNA, 25 bp, Artificial
  Probe
actgaagactacacggtgacaagcc

SEQ ID NO: 257795 - DNA, 25 bp, Artificial
  Probe
cctggtgtctgcaatagcacaggac

SEQ ID NO: 257796 - DNA, 25 bp, Artificial
  Probe
acaggacccccgagtgacagtgttg

SEQ ID NO: 257797 - DNA, 25 bp, Artificial
  Probe
gacagaatcccgtggtcactactgt

SEQ ID NO: 257798 - DNA, 25 bp, Artificial
  Probe
gcaagctgcaggtttgttatgcaaa

SEQ ID NO: 257799 - DNA, 25 bp, Artificial
  Probe
ggtcactactgtatgtaatattcac

SEQ ID NO: 257800 - DNA, 25 bp, Artificial
  Probe
caatagcacaggacccccgagtgac

SEQ ID NO: 257801 - DNA, 25 bp, Artificial
  Probe
ctagcagtgtgtggacagaatcccg

SEQ ID NO: 257802 - DNA, 25 bp, Artificial
  Probe
gtgtgacatcagcatagtgttcttg

SEQ ID NO: 257803 - DNA, 25 bp, Artificial
  Probe
tgcaggcggcctcttaaccttccaa

SEQ ID NO: 257804 - DNA, 25 bp, Artificial
  Probe
gcctcttaaccttccaagactgaag

SEQ ID NO: 257805 - DNA, 25 bp, Artificial
  Probe
accttccaagactgaagactacacg

SEQ ID NO: 257806 - DNA, 25 bp, Artificial
  Probe
caggcggcctcttaaccttccaaga

SEQ ID NO: 257807 - DNA, 25 bp, Artificial
  Probe
ctcctggtgtctgcaatagcacagg

SEQ ID NO: 257808 - DNA, 25 bp, Artificial
  Probe
tgtgtggacagaatcccgtggtcac

SEQ ID NO: 257809 - DNA, 25 bp, Artificial
  Probe
ttggcaagctgcaggtttgttatgc

SEQ ID NO: 257810 - DNA, 25 bp, Artificial
  Probe
gactacacggtgacaagcctcactc

SEQ ID NO: 257811 - DNA, 25 bp, Artificial
  Probe
gcaagatcctgacacatatagcaaa

SEQ ID NO: 257812 - DNA, 25 bp, Artificial
  Probe
gtctccagccacatccaggtgcttg

SEQ ID NO: 257813 - DNA, 25 bp, Artificial
  Probe
aaagcccgggagatccaggccaagc

SEQ ID NO: 257814 - DNA, 25 bp, Artificial
  Probe
tggtcggaatgagctgatcgcacgc

SEQ ID NO: 257815 - DNA, 25 bp, Artificial
  Probe
aggccgcagcatagccagctccaag

SEQ ID NO: 257816 - DNA, 25 bp, Artificial
  Probe
cggaatgagctgatcgcacgctaca

SEQ ID NO: 257817 - DNA, 25 bp, Artificial
  Probe
gcagagcatggctgccatgtcgtcc

SEQ ID NO: 257818 - DNA, 25 bp, Artificial
  Probe
cctggctacccagcaatctcagggt

SEQ ID NO: 257819 - DNA, 25 bp, Artificial
  Probe
ggtgcttgcccgtcgaaaagcccgg

SEQ ID NO: 257820 - DNA, 25 bp, Artificial
  Probe
aaaccgtggacatccgccagatcta

SEQ ID NO: 257821 - DNA, 25 bp, Artificial
  Probe
agccagctccaagctctggatgttg

SEQ ID NO: 257822 - DNA, 25 bp, Artificial
  Probe
agaacaaggccctgcagagcatggc

SEQ ID NO: 257823 - DNA, 25 bp, Artificial
  Probe
ccaggcagctaagaacaaggccctg

SEQ ID NO: 257824 - DNA, 25 bp, Artificial
  Probe
tcctggagcgccagcaagatcctga

SEQ ID NO: 257825 - DNA, 25 bp, Artificial
  Probe
tgcccgtcgaaaagcccgggagatc

SEQ ID NO: 257826 - DNA, 25 bp, Artificial
  Probe
cagctaagaacaaggccctgcagag

SEQ ID NO: 257827 - DNA, 25 bp, Artificial
  Probe
accttccacagtaaaatggctcttg

SEQ ID NO: 257828 - DNA, 25 bp, Artificial
  Probe
tggacatccgccagatctatgacaa

SEQ ID NO: 257829 - DNA, 25 bp, Artificial
  Probe
gacacatatagcaaacacctgttcg

SEQ ID NO: 257830 - DNA, 25 bp, Artificial
  Probe
atgttggagttctccgctttcctgg

SEQ ID NO: 257831 - DNA, 25 bp, Artificial
  Probe
tggctgccatgtcgtccgcccagat

SEQ ID NO: 257832 - DNA, 25 bp, Artificial
  Probe
tccaagctctggatgttggagttct

SEQ ID NO: 257833 - DNA, 25 bp, Artificial
  Probe
gttttggcaaggagctttgccaggc

SEQ ID NO: 257834 - DNA, 25 bp, Artificial
  Probe
atctcagggttttggcaaggagctt

SEQ ID NO: 257835 - DNA, 25 bp, Artificial
  Probe
agtcaaacccgagctacagtgaccc

SEQ ID NO: 257836 - DNA, 25 bp, Artificial
  Probe
ctttgagtctcctgtaggacccacc

SEQ ID NO: 257837 - DNA, 25 bp, Artificial
  Probe
atggctgccatgtcgtccgcccaga

SEQ ID NO: 257838 - DNA, 25 bp, Artificial
  Probe
cagtaaaatggctcttgcccggggc

SEQ ID NO: 257839 - DNA, 25 bp, Artificial
  Probe
aggtctccagccacatccaggtgct

SEQ ID NO: 257840 - DNA, 25 bp, Artificial
  Probe
cacatccaggtgcttgcccgtcgaa

SEQ ID NO: 257841 - DNA, 25 bp, Artificial
  Probe
tgagctgatcgcacgctacatcaag

SEQ ID NO: 257842 - DNA, 25 bp, Artificial
  Probe
aagctcaaggaccaggcagctaaga

SEQ ID NO: 257843 - DNA, 25 bp, Artificial
  Probe
tggcaaggccgcagcatagccagct

SEQ ID NO: 257844 - DNA, 25 bp, Artificial
  Probe
aagacacgtacaaggaagcaggtct

SEQ ID NO: 257845 - DNA, 25 bp, Artificial
  Probe
ggaagcaggtctccagccacatcca

SEQ ID NO: 257846 - DNA, 25 bp, Artificial
  Probe
ctcgaaaccgtggacatccgccaga

SEQ ID NO: 257847 - DNA, 25 bp, Artificial
  Probe
tgcacatcagccagtcaaacccgag

SEQ ID NO: 257848 - DNA, 25 bp, Artificial
  Probe
tacaaggaagcaggtctccagccac

SEQ ID NO: 257849 - DNA, 25 bp, Artificial
  Probe
catccaggtgcttgcccgtcgaaaa

SEQ ID NO: 257850 - DNA, 25 bp, Artificial
  Probe
ccgctttcctggagcgccagcaaga

SEQ ID NO: 257851 - DNA, 25 bp, Artificial
  Probe
gccctgcagagcatggctgccatgt

SEQ ID NO: 257852 - DNA, 25 bp, Artificial
  Probe
caagctcagaacagggaagacacgt

SEQ ID NO: 257853 - DNA, 25 bp, Artificial
  Probe
tccactgcctctgtcaggctttgag

SEQ ID NO: 257854 - DNA, 25 bp, Artificial
  Probe
tcctccatggcaaggccgcagcata

SEQ ID NO: 257855 - DNA, 25 bp, Artificial
  Probe
gagatccaggccaagctcaaggacc

SEQ ID NO: 257856 - DNA, 25 bp, Artificial
  Probe
aggagctttgccaggccaacccgga

SEQ ID NO: 257857 - DNA, 25 bp, Artificial
  Probe
tgtaacccattcgtaggtctcaaaa

SEQ ID NO: 257858 - DNA, 25 bp, Artificial
  Probe
cgagtgacactttccggattcattc

SEQ ID NO: 257859 - DNA, 25 bp, Artificial
  Probe
gaggccacagtctccctaccgagtg

SEQ ID NO: 257860 - DNA, 25 bp, Artificial
  Probe
acctagcttatcagggctagaagaa

SEQ ID NO: 257861 - DNA, 25 bp, Artificial
  Probe
gggaggccacagtctccctaccgag

SEQ ID NO: 257862 - DNA, 25 bp, Artificial
  Probe
ctaggcctagactccctgctgttga

SEQ ID NO: 257863 - DNA, 25 bp, Artificial
  Probe
cgcatggtctttgtaacccattcgt

SEQ ID NO: 257864 - DNA, 25 bp, Artificial
  Probe
attcgcatggtctttgtaacccatt

SEQ ID NO: 257865 - DNA, 25 bp, Artificial
  Probe
ttatcagggctagaagaagagcccc

SEQ ID NO: 257866 - DNA, 25 bp, Artificial
  Probe
atggtctttgtaacccattcgtagg

SEQ ID NO: 257867 - DNA, 25 bp, Artificial
  Probe
gcaagtttttcctgagaaaaggacg

SEQ ID NO: 257868 - DNA, 25 bp, Artificial
  Probe
catccctgttcatcccgagcttggt

SEQ ID NO: 257869 - DNA, 25 bp, Artificial
  Probe
aaattctgcaagtttttcctgagaa

SEQ ID NO: 257870 - DNA, 25 bp, Artificial
  Probe
tctcagatatgcagggtccagggaa

SEQ ID NO: 257871 - DNA, 25 bp, Artificial
  Probe
aacccattcgtaggtctcaaaactg

SEQ ID NO: 257872 - DNA, 25 bp, Artificial
  Probe
ccagtagtcataatgctggacctag

SEQ ID NO: 257873 - DNA, 25 bp, Artificial
  Probe
ttccggattcattcgcatggtcttt

SEQ ID NO: 257874 - DNA, 25 bp, Artificial
  Probe
tctttgtaacccattcgtaggtctc

SEQ ID NO: 257875 - DNA, 25 bp, Artificial
  Probe
tttagactccagtagtcataatgct

SEQ ID NO: 257876 - DNA, 25 bp, Artificial
  Probe
tcccgagcttggtttagagaccccg

SEQ ID NO: 257877 - DNA, 25 bp, Artificial
  Probe
aagatatgggccttctcttgtctgt

SEQ ID NO: 257878 - DNA, 25 bp, Artificial
  Probe
tttcctgagaaaaggacgaaaacag

SEQ ID NO: 257879 - DNA, 25 bp, Artificial
  Probe
cagcccagagatactgacaggggga

SEQ ID NO: 257880 - DNA, 25 bp, Artificial
  Probe
tcgtaggtctcaaaactgttataaa

SEQ ID NO: 257881 - DNA, 25 bp, Artificial
  Probe
gcttatcagggctagaagaagagcc

SEQ ID NO: 257882 - DNA, 25 bp, Artificial
  Probe
taagggtatctatccctcctgcctc

SEQ ID NO: 257883 - DNA, 25 bp, Artificial
  Probe
tgagctagaacttctaggcctagac

SEQ ID NO: 257884 - DNA, 25 bp, Artificial
  Probe
tccctaccgagtgacactttccgga

SEQ ID NO: 257885 - DNA, 25 bp, Artificial
  Probe
ctcttgtctgtcacggatgctcctc

SEQ ID NO: 257886 - DNA, 25 bp, Artificial
  Probe
accctaagggtatctatccctcctg

SEQ ID NO: 257887 - DNA, 25 bp, Artificial
  Probe
aatagagaacccagaatgggggact

SEQ ID NO: 257888 - DNA, 25 bp, Artificial
  Probe
ctgttcatcccgagcttggtttaga

SEQ ID NO: 257889 - DNA, 25 bp, Artificial
  Probe
ccccatctcagatatgcagggtcca

SEQ ID NO: 257890 - DNA, 25 bp, Artificial
  Probe
ggattcattcgcatggtctttgtaa

SEQ ID NO: 257891 - DNA, 25 bp, Artificial
  Probe
aacttctaggcctagactccctgct

SEQ ID NO: 257892 - DNA, 25 bp, Artificial
  Probe
tagagaacccagaatgggggactca

SEQ ID NO: 257893 - DNA, 25 bp, Artificial
  Probe
ccagcccagagatactgacaggggg

SEQ ID NO: 257894 - DNA, 25 bp, Artificial
  Probe
gctagaacttctaggcctagactcc

SEQ ID NO: 257895 - DNA, 25 bp, Artificial
  Probe
gagaccccggaaatagagaacccag

SEQ ID NO: 257896 - DNA, 25 bp, Artificial
  Probe
gcctagactccctgctgttgactat

SEQ ID NO: 257897 - DNA, 25 bp, Artificial
  Probe
tgctgttgactattcaagaatctaa

SEQ ID NO: 257898 - DNA, 25 bp, Artificial
  Probe
gacactttccggattcattcgcatg

SEQ ID NO: 257899 - DNA, 25 bp, Artificial
  Probe
ttcatatttcccacttgccctgggg

SEQ ID NO: 257900 - DNA, 25 bp, Artificial
  Probe
gtagtcataatgctggacctagctt

SEQ ID NO: 257901 - DNA, 25 bp, Artificial
  Probe
ctaagggtatctatccctcctgcct

SEQ ID NO: 257902 - DNA, 25 bp, Artificial
  Probe
gtcataatgctggacctagcttatc

SEQ ID NO: 257903 - DNA, 25 bp, Artificial
  Probe
tctcaccgaggctctcaaaggcatg

SEQ ID NO: 257904 - DNA, 25 bp, Artificial
  Probe
actaacaggcacacgtctggggaag

SEQ ID NO: 257905 - DNA, 25 bp, Artificial
  Probe
gctgtctcacgcacttcagtctcat

SEQ ID NO: 257906 - DNA, 25 bp, Artificial
  Probe
ttacggatctgctggctcaggaccg

SEQ ID NO: 257907 - DNA, 25 bp, Artificial
  Probe
aacaccactaacaggcacacgtctg

SEQ ID NO: 257908 - DNA, 25 bp, Artificial
  Probe
actatctcaccgaggctctcaaagg

SEQ ID NO: 257909 - DNA, 25 bp, Artificial
  Probe
aacagacagcacacggaccccagtg

SEQ ID NO: 257910 - DNA, 25 bp, Artificial
  Probe
cgaggctctcaaaggcatggacaag

SEQ ID NO: 257911 - DNA, 25 bp, Artificial
  Probe
gtgaaacagagttccctgctaaagc

SEQ ID NO: 257912 - DNA, 25 bp, Artificial
  Probe
ggaccccagtgatctgcactccaga

SEQ ID NO: 257913 - DNA, 25 bp, Artificial
  Probe
gcatccaaagctgtctcacgcactt

SEQ ID NO: 257914 - DNA, 25 bp, Artificial
  Probe
gacagcacacggaccccagtgatct

SEQ ID NO: 257915 - DNA, 25 bp, Artificial
  Probe
ggttcacttagctcgggattttggg

SEQ ID NO: 257916 - DNA, 25 bp, Artificial
  Probe
tatctgagtatttgaacagacagca

SEQ ID NO: 257917 - DNA, 25 bp, Artificial
  Probe
ctggagccgggcatccaaagctgtc

SEQ ID NO: 257918 - DNA, 25 bp, Artificial
  Probe
agccgtatctgagtatttgaacaga

SEQ ID NO: 257919 - DNA, 25 bp, Artificial
  Probe
ttgtgaaacagagttccctgctaaa

SEQ ID NO: 257920 - DNA, 25 bp, Artificial
  Probe
caaagctgtctcacgcacttcagtc

SEQ ID NO: 257921 - DNA, 25 bp, Artificial
  Probe
tcaggaccggacaccgatcggaaac

SEQ ID NO: 257922 - DNA, 25 bp, Artificial
  Probe
ggatctgctggctcaggaccggaca

SEQ ID NO: 257923 - DNA, 25 bp, Artificial
  Probe
cgggcatccaaagctgtctcacgca

SEQ ID NO: 257924 - DNA, 25 bp, Artificial
  Probe
atgctgctggccaccaagcaacttt

SEQ ID NO: 257925 - DNA, 25 bp, Artificial
  Probe
aacagagttccctgctaaagccgta

SEQ ID NO: 257926 - DNA, 25 bp, Artificial
  Probe
tctcaaaggcatggacaagatgttc

SEQ ID NO: 257927 - DNA, 25 bp, Artificial
  Probe
ctgctaaagccgtatctgagtattt

SEQ ID NO: 257928 - DNA, 25 bp, Artificial
  Probe
agaatttacggatctgctggctcag

SEQ ID NO: 257929 - DNA, 25 bp, Artificial
  Probe
cagaactatctcaccgaggctctca

SEQ ID NO: 257930 - DNA, 25 bp, Artificial
  Probe
ccactaacaggcacacgtctgggga

SEQ ID NO: 257931 - DNA, 25 bp, Artificial
  Probe
accggacaccgatcggaaacagccg

SEQ ID NO: 257932 - DNA, 25 bp, Artificial
  Probe
agaatatgctgctggccaccaagca

SEQ ID NO: 257933 - DNA, 25 bp, Artificial
  Probe
gccgggcatccaaagctgtctcacg

SEQ ID NO: 257934 - DNA, 25 bp, Artificial
  Probe
cactccagaaagaatatgctgctgg

SEQ ID NO: 257935 - DNA, 25 bp, Artificial
  Probe
tgcagaactatctcaccgaggctct

SEQ ID NO: 257936 - DNA, 25 bp, Artificial
  Probe
tccaaagctgtctcacgcacttcag

SEQ ID NO: 257937 - DNA, 25 bp, Artificial
  Probe
tgcactccagaaagaatatgctgct

SEQ ID NO: 257938 - DNA, 25 bp, Artificial
  Probe
gtatttgaacagacagcacacggac

SEQ ID NO: 257939 - DNA, 25 bp, Artificial
  Probe
gaccggacaccgatcggaaacagcc

SEQ ID NO: 257940 - DNA, 25 bp, Artificial
  Probe
actccagaaagaatatgctgctggc

SEQ ID NO: 257941 - DNA, 25 bp, Artificial
  Probe
aaactggcgacaaggaggagaaaca

SEQ ID NO: 257942 - DNA, 25 bp, Artificial
  Probe
gctcaggaccggacaccgatcggaa

SEQ ID NO: 257943 - DNA, 25 bp, Artificial
  Probe
gttccctgctaaagccgtatctgag

SEQ ID NO: 257944 - DNA, 25 bp, Artificial
  Probe
gaacaacaccactaacaggcacacg

SEQ ID NO: 257945 - DNA, 25 bp, Artificial
  Probe
tgctggctcaggaccggacaccgat

SEQ ID NO: 257946 - DNA, 25 bp, Artificial
  Probe
gttcttgaacaacaccactaacagg

SEQ ID NO: 257947 - DNA, 25 bp, Artificial
  Probe
gccaccaagcaactttgtaaagaat

SEQ ID NO: 257948 - DNA, 25 bp, Artificial
  Probe
gctctcaaaggcatggacaagatgt

SEQ ID NO: 257949 - DNA, 25 bp, Artificial
  Probe
gctgcattgcagctggtgctgttca

SEQ ID NO: 257950 - DNA, 25 bp, Artificial
  Probe
gaattccttgcaactggagctcaga

SEQ ID NO: 257951 - DNA, 25 bp, Artificial
  Probe
ttcctgtgtgaacgtaatgacaagg

SEQ ID NO: 257952 - DNA, 25 bp, Artificial
  Probe
taaaccaaggctgcattgcagctgg

SEQ ID NO: 257953 - DNA, 25 bp, Artificial
  Probe
caccaaggacgtggttctgcagtgg

SEQ ID NO: 257954 - DNA, 25 bp, Artificial
  Probe
cagagactaaagttcctgtgtgaac

SEQ ID NO: 257955 - DNA, 25 bp, Artificial
  Probe
tcatttggacggtgtgtttatgcac

SEQ ID NO: 257956 - DNA, 25 bp, Artificial
  Probe
ctgtgccggtgcagccatgacagct

SEQ ID NO: 257957 - DNA, 25 bp, Artificial
  Probe
tgtttatgcacaaaagggctcagag

SEQ ID NO: 257958 - DNA, 25 bp, Artificial
  Probe
gagccgggatcactgacctctggag

SEQ ID NO: 257959 - DNA, 25 bp, Artificial
  Probe
tgacctctggagtcggcaagacccc

SEQ ID NO: 257960 - DNA, 25 bp, Artificial
  Probe
tttatgcacaaaagggctcagagac

SEQ ID NO: 257961 - DNA, 25 bp, Artificial
  Probe
agaatcaccaaggacgtggttctgc

SEQ ID NO: 257962 - DNA, 25 bp, Artificial
  Probe
cttcatgaccttaggcaggacttcc

SEQ ID NO: 257963 - DNA, 25 bp, Artificial
  Probe
ctaaagttcctgtgtgaacgtaatg

SEQ ID NO: 257964 - DNA, 25 bp, Artificial
  Probe
gcaagaccccaagaacttggaattc

SEQ ID NO: 257965 - DNA, 25 bp, Artificial
  Probe
tgtgtttatgcacaaaagggctcag

SEQ ID NO: 257966 - DNA, 25 bp, Artificial
  Probe
ggagtcggcaagaccccaagaactt

SEQ ID NO: 257967 - DNA, 25 bp, Artificial
  Probe
cggaagaatcaccaaggacgtggtt

SEQ ID NO: 257968 - DNA, 25 bp, Artificial
  Probe
atgaccttaggcaggacttcccttc

SEQ ID NO: 257969 - DNA, 25 bp, Artificial
  Probe
agaacttggaattccttgcaactgg

SEQ ID NO: 257970 - DNA, 25 bp, Artificial
  Probe
cgctctgtggaaactggtcatttgg

SEQ ID NO: 257971 - DNA, 25 bp, Artificial
  Probe
ctcagagactaaagttcctgtgtga

SEQ ID NO: 257972 - DNA, 25 bp, Artificial
  Probe
atagagatacgctctgtggaaactg

SEQ ID NO: 257973 - DNA, 25 bp, Artificial
  Probe
tgcattgcagctggtgctgttcaga

SEQ ID NO: 257974 - DNA, 25 bp, Artificial
  Probe
aaagttcctgtgtgaacgtaatgac

SEQ ID NO: 257975 - DNA, 25 bp, Artificial
  Probe
tgaccttaggcaggacttcccttct

SEQ ID NO: 257976 - DNA, 25 bp, Artificial
  Probe
gtgcagccatgacagctgtctatgc

SEQ ID NO: 257977 - DNA, 25 bp, Artificial
  Probe
aaggtgttctttgcttccgtccgct

SEQ ID NO: 257978 - DNA, 25 bp, Artificial
  Probe
gaccccaagaacttggaattccttg

SEQ ID NO: 257979 - DNA, 25 bp, Artificial
  Probe
ctctgtggaaactggtcatttggac

SEQ ID NO: 257980 - DNA, 25 bp, Artificial
  Probe
gccggtgcagccatgacagctgtct

SEQ ID NO: 257981 - DNA, 25 bp, Artificial
  Probe
taatgacaaggtgttctttgcttcc

SEQ ID NO: 257982 - DNA, 25 bp, Artificial
  Probe
tctggagtcggcaagaccccaagaa

SEQ ID NO: 257983 - DNA, 25 bp, Artificial
  Probe
cggcaagaccccaagaacttggaat

SEQ ID NO: 257984 - DNA, 25 bp, Artificial
  Probe
ccaaggctgcattgcagctggtgct

SEQ ID NO: 257985 - DNA, 25 bp, Artificial
  Probe
gaagaatcaccaaggacgtggttct

SEQ ID NO: 257986 - DNA, 25 bp, Artificial
  Probe
tgtgaaacacgtacggaagaatcac

SEQ ID NO: 257987 - DNA, 25 bp, Artificial
  Probe
cccaagaacttggaattccttgcaa

SEQ ID NO: 257988 - DNA, 25 bp, Artificial
  Probe
aaagggctcagagactaaagttcct

SEQ ID NO: 257989 - DNA, 25 bp, Artificial
  Probe
tacttcatgaccttaggcaggactt

SEQ ID NO: 257990 - DNA, 25 bp, Artificial
  Probe
ctgtggaaactggtcatttggacgg

SEQ ID NO: 257991 - DNA, 25 bp, Artificial
  Probe
aacacgtacggaagaatcaccaagg

SEQ ID NO: 257992 - DNA, 25 bp, Artificial
  Probe
catttggacggtgtgtttatgcaca

SEQ ID NO: 257993 - DNA, 25 bp, Artificial
  Probe
gagatacgctctgtggaaactggtc

SEQ ID NO: 257994 - DNA, 25 bp, Artificial
  Probe
aaggctgcattgcagctggtgctgt

SEQ ID NO: 257995 - DNA, 25 bp, Artificial
  Probe
tccttcctcaggaaacacgttggac

SEQ ID NO: 257996 - DNA, 25 bp, Artificial
  Probe
ggttccttttgtcaggccaataaca

SEQ ID NO: 257997 - DNA, 25 bp, Artificial
  Probe
tttcccattgggttccttttgtcag

SEQ ID NO: 257998 - DNA, 25 bp, Artificial
  Probe
tgcccaggatcttgataccccaata

SEQ ID NO: 257999 - DNA, 25 bp, Artificial
  Probe
cccacagtacctcgtggtgtgtttg

SEQ ID NO: 258000 - DNA, 25 bp, Artificial
  Probe
tcagttctaggcaatggactcactg

SEQ ID NO: 258001 - DNA, 25 bp, Artificial
  Probe
ggccatggtcagttctaggcaatgg

SEQ ID NO: 258002 - DNA, 25 bp, Artificial
  Probe
ggcaatggactcactggccaacctg

SEQ ID NO: 258003 - DNA, 25 bp, Artificial
  Probe
tcaggccaataacagcaaatggaat

SEQ ID NO: 258004 - DNA, 25 bp, Artificial
  Probe
ctcaggaaacacgttggacccacag

SEQ ID NO: 258005 - DNA, 25 bp, Artificial
  Probe
ttcctcaggaaacacgttggaccca

SEQ ID NO: 258006 - DNA, 25 bp, Artificial
  Probe
gtgctggccatggtcagttctaggc

SEQ ID NO: 258007 - DNA, 25 bp, Artificial
  Probe
ccaggatcttgataccccaatactg

SEQ ID NO: 258008 - DNA, 25 bp, Artificial
  Probe
tgtcaggccaataacagcaaatgga

SEQ ID NO: 258009 - DNA, 25 bp, Artificial
  Probe
gccaataacagcaaatggaattctg

SEQ ID NO: 258010 - DNA, 25 bp, Artificial
  Probe
ttggacccacagtacctcgtggtgt

SEQ ID NO: 258011 - DNA, 25 bp, Artificial
  Probe
ctgcccaggatcttgataccccaat

SEQ ID NO: 258012 - DNA, 25 bp, Artificial
  Probe
gcccaggatcttgataccccaatac

SEQ ID NO: 258013 - DNA, 25 bp, Artificial
  Probe
tgggttccttttgtcaggccaataa

SEQ ID NO: 258014 - DNA, 25 bp, Artificial
  Probe
gacccacagtacctcgtggtgtgtt

SEQ ID NO: 258015 - DNA, 25 bp, Artificial
  Probe
cctccttcctcaggaaacacgttgg

SEQ ID NO: 258016 - DNA, 25 bp, Artificial
  Probe
ttggtccaccagagagaaaggtgtt

SEQ ID NO: 258017 - DNA, 25 bp, Artificial
  Probe
gtgctctggtgtttcttgtgttgca

SEQ ID NO: 258018 - DNA, 25 bp, Artificial
  Probe
caggatcttgataccccaatactgt

SEQ ID NO: 258019 - DNA, 25 bp, Artificial
  Probe
aggccaataacagcaaatggaattc

SEQ ID NO: 258020 - DNA, 25 bp, Artificial
  Probe
caggaaacacgttggacccacagta

SEQ ID NO: 258021 - DNA, 25 bp, Artificial
  Probe
gcagatgtgtgtgctctggtgtttc

SEQ ID NO: 258022 - DNA, 25 bp, Artificial
  Probe
tggccatggtcagttctaggcaatg

SEQ ID NO: 258023 - DNA, 25 bp, Artificial
  Probe
tctaggcaatggactcactggccaa

SEQ ID NO: 258024 - DNA, 25 bp, Artificial
  Probe
gccatggtcagttctaggcaatgga

SEQ ID NO: 258025 - DNA, 25 bp, Artificial
  Probe
tccaccagagagaaaggtgtttggt

SEQ ID NO: 258026 - DNA, 25 bp, Artificial
  Probe
atactgtgaccctccttcctcagga

SEQ ID NO: 258027 - DNA, 25 bp, Artificial
  Probe
ctccttcctcaggaaacacgttgga

SEQ ID NO: 258028 - DNA, 25 bp, Artificial
  Probe
tcccattgggttccttttgtcaggc

SEQ ID NO: 258029 - DNA, 25 bp, Artificial
  Probe
gcaatggactcactggccaacctgc

SEQ ID NO: 258030 - DNA, 25 bp, Artificial
  Probe
agtgctggccatggtcagttctagg

SEQ ID NO: 258031 - DNA, 25 bp, Artificial
  Probe
gttccttttgtcaggccaataacag

SEQ ID NO: 258032 - DNA, 25 bp, Artificial
  Probe
cacgttggacccacagtacctcgtg

SEQ ID NO: 258033 - DNA, 25 bp, Artificial
  Probe
ccacagtacctcgtggtgtgtttgg

SEQ ID NO: 258034 - DNA, 25 bp, Artificial
  Probe
ggtccaccagagagaaaggtgtttg

SEQ ID NO: 258035 - DNA, 25 bp, Artificial
  Probe
ttttgtcaggccaataacagcaaat

SEQ ID NO: 258036 - DNA, 25 bp, Artificial
  Probe
cagatgtgtgtgctctggtgtttct

SEQ ID NO: 258037 - DNA, 25 bp, Artificial
  Probe
attgggttccttttgtcaggccaat

SEQ ID NO: 258038 - DNA, 25 bp, Artificial
  Probe
gaaacacgttggacccacagtacct

SEQ ID NO: 258039 - DNA, 25 bp, Artificial
  Probe
cattggtccaccagagagaaaggtg

SEQ ID NO: 258040 - DNA, 25 bp, Artificial
  Probe
ccattgggttccttttgtcaggcca

SEQ ID NO: 258041 - DNA, 25 bp, Artificial
  Probe
gcttaacaagcctgaggtcttggag

SEQ ID NO: 258042 - DNA, 25 bp, Artificial
  Probe
catgccccaactggtgctgcaagga

SEQ ID NO: 258043 - DNA, 25 bp, Artificial
  Probe
gcccctggcctttgaggcaaaggcc

SEQ ID NO: 258044 - DNA, 25 bp, Artificial
  Probe
gtgctgcaaggatcttatgacctgc

SEQ ID NO: 258045 - DNA, 25 bp, Artificial
  Probe
ggctccctcaactggatgaagaaac

SEQ ID NO: 258046 - DNA, 25 bp, Artificial
  Probe
gagctgaacctgcaaaaattgagca

SEQ ID NO: 258047 - DNA, 25 bp, Artificial
  Probe
ttatgacctgcaggacctgctcgcc

SEQ ID NO: 258048 - DNA, 25 bp, Artificial
  Probe
aaggatcttatgacctgcaggacct

SEQ ID NO: 258049 - DNA, 25 bp, Artificial
  Probe
aattgagcaatgaccgcatcagggt

SEQ ID NO: 258050 - DNA, 25 bp, Artificial
  Probe
gaagaaactgtctccccggaccatc

SEQ ID NO: 258051 - DNA, 25 bp, Artificial
  Probe
ccaactggtgctgcaaggatcttat

SEQ ID NO: 258052 - DNA, 25 bp, Artificial
  Probe
aaattgagcaatgaccgcatcaggg

SEQ ID NO: 258053 - DNA, 25 bp, Artificial
  Probe
cagggccccagaacacagtgcctgg

SEQ ID NO: 258054 - DNA, 25 bp, Artificial
  Probe
ctgcccctggcctttgaggcaaagg

SEQ ID NO: 258055 - DNA, 25 bp, Artificial
  Probe
gaccatgccccaactggtgctgcaa

SEQ ID NO: 258056 - DNA, 25 bp, Artificial
  Probe
cccgctgagcacagcatgaggccag

SEQ ID NO: 258057 - DNA, 25 bp, Artificial
  Probe
cctgtttgctgtgtatgatcaaagc

SEQ ID NO: 258058 - DNA, 25 bp, Artificial
  Probe
ttctgcacaccgagctgaacctgca

SEQ ID NO: 258059 - DNA, 25 bp, Artificial
  Probe
aacagcttaacaagcctgaggtctt

SEQ ID NO: 258060 - DNA, 25 bp, Artificial
  Probe
ggtcttggaggtgaccctgaaccgc

SEQ ID NO: 258061 - DNA, 25 bp, Artificial
  Probe
tggccaacccgctgagcacagcatg

SEQ ID NO: 258062 - DNA, 25 bp, Artificial
  Probe
taacaagcctgaggtcttggaggtg

SEQ ID NO: 258063 - DNA, 25 bp, Artificial
  Probe
cagcatgaggccagggccccagaac

SEQ ID NO: 258064 - DNA, 25 bp, Artificial
  Probe
ctggtgctgcaaggatcttatgacc

SEQ ID NO: 258065 - DNA, 25 bp, Artificial
  Probe
tgaacctgcaaaaattgagcaatga

SEQ ID NO: 258066 - DNA, 25 bp, Artificial
  Probe
ccattcctgtttgctgtgtatgatc

SEQ ID NO: 258067 - DNA, 25 bp, Artificial
  Probe
cccagaacacagtgcctggcaaggc

SEQ ID NO: 258068 - DNA, 25 bp, Artificial
  Probe
ccccaactggtgctgcaaggatctt

SEQ ID NO: 258069 - DNA, 25 bp, Artificial
  Probe
gagtctacccaacagcttaacaagc

SEQ ID NO: 258070 - DNA, 25 bp, Artificial
  Probe
tggaggtgaccctgaaccgcccatt

SEQ ID NO: 258071 - DNA, 25 bp, Artificial
  Probe
gccaacccgctgagcacagcatgag

SEQ ID NO: 258072 - DNA, 25 bp, Artificial
  Probe
gtcttggaggtgaccctgaaccgcc

SEQ ID NO: 258073 - DNA, 25 bp, Artificial
  Probe
aagcctgaggtcttggaggtgaccc

SEQ ID NO: 258074 - DNA, 25 bp, Artificial
  Probe
acaagcctgaggtcttggaggtgac

SEQ ID NO: 258075 - DNA, 25 bp, Artificial
  Probe
agagtctacccaacagcttaacaag

SEQ ID NO: 258076 - DNA, 25 bp, Artificial
  Probe
tctgcacaccgagctgaacctgcaa

SEQ ID NO: 258077 - DNA, 25 bp, Artificial
  Probe
tccctcaactggatgaagaaactgt

SEQ ID NO: 258078 - DNA, 25 bp, Artificial
  Probe
ccgctgagcacagcatgaggccagg

SEQ ID NO: 258079 - DNA, 25 bp, Artificial
  Probe
ctgagcacagcatgaggccagggcc

SEQ ID NO: 258080 - DNA, 25 bp, Artificial
  Probe
tgaaccgcccattcctgtttgctgt

SEQ ID NO: 258081 - DNA, 25 bp, Artificial
  Probe
gagcacagcatgaggccagggcccc

SEQ ID NO: 258082 - DNA, 25 bp, Artificial
  Probe
tgcaaggatcttatgacctgcagga

SEQ ID NO: 258083 - DNA, 25 bp, Artificial
  Probe
gaacacagtgcctggcaaggcctct

SEQ ID NO: 258084 - DNA, 25 bp, Artificial
  Probe
tacccaacagcttaacaagcctgag

SEQ ID NO: 258085 - DNA, 25 bp, Artificial
  Probe
tttgctgtgtatgatcaaagcgcca

SEQ ID NO: 258086 - DNA, 25 bp, Artificial
  Probe
atgaagaaactgtctccccggacca

SEQ ID NO: 258087 - DNA, 25 bp, Artificial
  Probe
tagatctcaggatttaagccaccct

SEQ ID NO: 258088 - DNA, 25 bp, Artificial
  Probe
acctgagttagatctcaggatttaa

SEQ ID NO: 258089 - DNA, 25 bp, Artificial
  Probe
gctcgtcctatcaatttgagtcaac

SEQ ID NO: 258090 - DNA, 25 bp, Artificial
  Probe
tcacacacattatggcgagcatagg

SEQ ID NO: 258091 - DNA, 25 bp, Artificial
  Probe
tactatctaggatgtttgaggccag

SEQ ID NO: 258092 - DNA, 25 bp, Artificial
  Probe
tggtggagagcctgcccttagttag

SEQ ID NO: 258093 - DNA, 25 bp, Artificial
  Probe
agtcagtccattgctcccaagttcc

SEQ ID NO: 258094 - DNA, 25 bp, Artificial
  Probe
agcacagtggtggagagcctgccct

SEQ ID NO: 258095 - DNA, 25 bp, Artificial
  Probe
tcggttctactctgaataccaacag

SEQ ID NO: 258096 - DNA, 25 bp, Artificial
  Probe
tgacctgagttagatctcaggattt

SEQ ID NO: 258097 - DNA, 25 bp, Artificial
  Probe
gtttggggtcacctttgattactat

SEQ ID NO: 258098 - DNA, 25 bp, Artificial
  Probe
gcgagcataggtgtgtgcagtcaat

SEQ ID NO: 258099 - DNA, 25 bp, Artificial
  Probe
cacaaactaggcacatggtccaggg

SEQ ID NO: 258100 - DNA, 25 bp, Artificial
  Probe
ttgctcccaagttcccaagcacagt

SEQ ID NO: 258101 - DNA, 25 bp, Artificial
  Probe
ccaccttgtggttttcttacaactg

SEQ ID NO: 258102 - DNA, 25 bp, Artificial
  Probe
gaaggcccagcaccacacaaactag

SEQ ID NO: 258103 - DNA, 25 bp, Artificial
  Probe
tcatcctagtagaggcaggaggatg

SEQ ID NO: 258104 - DNA, 25 bp, Artificial
  Probe
cagcaccacacaaactaggcacatg

SEQ ID NO: 258105 - DNA, 25 bp, Artificial
  Probe
tggcagaatggctcatctgaagaca

SEQ ID NO: 258106 - DNA, 25 bp, Artificial
  Probe
gtcaactaaatcacctctgactgga

SEQ ID NO: 258107 - DNA, 25 bp, Artificial
  Probe
tggctggcagaatggctcatctgaa

SEQ ID NO: 258108 - DNA, 25 bp, Artificial
  Probe
attgctcccaagttcccaagcacag

SEQ ID NO: 258109 - DNA, 25 bp, Artificial
  Probe
tcaccttcacacacattatggcgag

SEQ ID NO: 258110 - DNA, 25 bp, Artificial
  Probe
taaatcacctctgactggatcattg

SEQ ID NO: 258111 - DNA, 25 bp, Artificial
  Probe
atctgaagacacttgccaccaagcc

SEQ ID NO: 258112 - DNA, 25 bp, Artificial
  Probe
ctgtaagagactgtcacagaagaaa

SEQ ID NO: 258113 - DNA, 25 bp, Artificial
  Probe
aggccagcctggagctgtaagagac

SEQ ID NO: 258114 - DNA, 25 bp, Artificial
  Probe
gtcctgtcttgaaggcccagcacca

SEQ ID NO: 258115 - DNA, 25 bp, Artificial
  Probe
tcctgtggattgatgaggctctctc

SEQ ID NO: 258116 - DNA, 25 bp, Artificial
  Probe
gattgatgaggctctctcggttcta

SEQ ID NO: 258117 - DNA, 25 bp, Artificial
  Probe
attactatctaggatgtttgaggcc

SEQ ID NO: 258118 - DNA, 25 bp, Artificial
  Probe
ggccagcctggagctgtaagagact

SEQ ID NO: 258119 - DNA, 25 bp, Artificial
  Probe
caacagaggaaaccaccttgtggtt

SEQ ID NO: 258120 - DNA, 25 bp, Artificial
  Probe
gctctctcggttctactctgaatac

SEQ ID NO: 258121 - DNA, 25 bp, Artificial
  Probe
gaaagacctgtcaaagattctgtgg

SEQ ID NO: 258122 - DNA, 25 bp, Artificial
  Probe
gagtcaactaaatcacctctgactg

SEQ ID NO: 258123 - DNA, 25 bp, Artificial
  Probe
agttagatctcaggatttaagccac

SEQ ID NO: 258124 - DNA, 25 bp, Artificial
  Probe
ttttcttacaactggggatttggct

SEQ ID NO: 258125 - DNA, 25 bp, Artificial
  Probe
gagagcctgcccttagttagctaaa

SEQ ID NO: 258126 - DNA, 25 bp, Artificial
  Probe
cattatggcgagcataggtgtgtgc

SEQ ID NO: 258127 - DNA, 25 bp, Artificial
  Probe
cctttgattactatctaggatgttt

SEQ ID NO: 258128 - DNA, 25 bp, Artificial
  Probe
gatttggctggcagaatggctcatc

SEQ ID NO: 258129 - DNA, 25 bp, Artificial
  Probe
ttacaactggggatttggctggcag

SEQ ID NO: 258130 - DNA, 25 bp, Artificial
  Probe
caccttgtggttttcttacaactgg

SEQ ID NO: 258131 - DNA, 25 bp, Artificial
  Probe
caactggggatttggctggcagaat

SEQ ID NO: 258132 - DNA, 25 bp, Artificial
  Probe
cacattatggcgagcataggtgtgt

SEQ ID NO: 258133 - DNA, 25 bp, Artificial
  Probe
gtagctcaggaccttggctgggcct

SEQ ID NO: 258134 - DNA, 25 bp, Artificial
  Probe
ctgggcctggtcgtcatgtaggtca

SEQ ID NO: 258135 - DNA, 25 bp, Artificial
  Probe
gctggccgtggctctgtctctctga

SEQ ID NO: 258136 - DNA, 25 bp, Artificial
  Probe
gcacgagtccttgtgcgctgccctt

SEQ ID NO: 258137 - DNA, 25 bp, Artificial
  Probe
gacacctccgtgcacttgtgtccga

SEQ ID NO: 258138 - DNA, 25 bp, Artificial
  Probe
tcgtcatgtaggtcaggaccttggc

SEQ ID NO: 258139 - DNA, 25 bp, Artificial
  Probe
cccggtgttgcgttatgtagctcag

SEQ ID NO: 258140 - DNA, 25 bp, Artificial
  Probe
gcctggtcgtcatgtaggtcaggac

SEQ ID NO: 258141 - DNA, 25 bp, Artificial
  Probe
cttggctggacctggaggccctgcc

SEQ ID NO: 258142 - DNA, 25 bp, Artificial
  Probe
cctgacctgttctcggcaccttaaa

SEQ ID NO: 258143 - DNA, 25 bp, Artificial
  Probe
ttgcgaccccttgtcctgacctgtt

SEQ ID NO: 258144 - DNA, 25 bp, Artificial
  Probe
caggctggtctcctctagcctgttt

SEQ ID NO: 258145 - DNA, 25 bp, Artificial
  Probe
gtccttgtgcgctgcccttattgag

SEQ ID NO: 258146 - DNA, 25 bp, Artificial
  Probe
ccttggctggacctggaggccctgc

SEQ ID NO: 258147 - DNA, 25 bp, Artificial
  Probe
tcggcacgagtccttgtgcgctgcc

SEQ ID NO: 258148 - DNA, 25 bp, Artificial
  Probe
agccaggctggtctcctctagcctg

SEQ ID NO: 258149 - DNA, 25 bp, Artificial
  Probe
gtgttgcgttatgtagctcaggacc

SEQ ID NO: 258150 - DNA, 25 bp, Artificial
  Probe
cttggctgggcctggtcgtcatgta

SEQ ID NO: 258151 - DNA, 25 bp, Artificial
  Probe
ttgtcctgacctgttctcggcacct

SEQ ID NO: 258152 - DNA, 25 bp, Artificial
  Probe
tgcgctgcccttattgagagcggga

SEQ ID NO: 258153 - DNA, 25 bp, Artificial
  Probe
cggtgttgcgttatgtagctcagga

SEQ ID NO: 258154 - DNA, 25 bp, Artificial
  Probe
gtcctgacctgttctcggcacctta

SEQ ID NO: 258155 - DNA, 25 bp, Artificial
  Probe
tcctctagcctgtttgttgtggggt

SEQ ID NO: 258156 - DNA, 25 bp, Artificial
  Probe
aagacccggtgttgcgttatgtagc

SEQ ID NO: 258157 - DNA, 25 bp, Artificial
  Probe
tgcccttattgagagcgggatgaag

SEQ ID NO: 258158 - DNA, 25 bp, Artificial
  Probe
ttttgcgaccccttgtcctgacctg

SEQ ID NO: 258159 - DNA, 25 bp, Artificial
  Probe
ctggtctcctctagcctgtttgttg

SEQ ID NO: 258160 - DNA, 25 bp, Artificial
  Probe
ccgtgcacttgtgtccgaggagcga

SEQ ID NO: 258161 - DNA, 25 bp, Artificial
  Probe
cggcgctggccgtggctctgtctct

SEQ ID NO: 258162 - DNA, 25 bp, Artificial
  Probe
tgtaggtcaggaccttggctggacc

SEQ ID NO: 258163 - DNA, 25 bp, Artificial
  Probe
tctcctctagcctgtttgttgtggg

SEQ ID NO: 258164 - DNA, 25 bp, Artificial
  Probe
gttatgtagctcaggaccttggctg

SEQ ID NO: 258165 - DNA, 25 bp, Artificial
  Probe
ggcacgagtccttgtgcgctgccct

SEQ ID NO: 258166 - DNA, 25 bp, Artificial
  Probe
acacctccgtgcacttgtgtccgag

SEQ ID NO: 258167 - DNA, 25 bp, Artificial
  Probe
tggtcgtcatgtaggtcaggacctt

SEQ ID NO: 258168 - DNA, 25 bp, Artificial
  Probe
tattttgtaaccactgggcccccag

SEQ ID NO: 258169 - DNA, 25 bp, Artificial
  Probe
cacgagtccttgtgcgctgccctta

SEQ ID NO: 258170 - DNA, 25 bp, Artificial
  Probe
tagctcaggaccttggctgggcctg

SEQ ID NO: 258171 - DNA, 25 bp, Artificial
  Probe
tgtgcgctgcccttattgagagcgg

SEQ ID NO: 258172 - DNA, 25 bp, Artificial
  Probe
tccgtgcacttgtgtccgaggagcg

SEQ ID NO: 258173 - DNA, 25 bp, Artificial
  Probe
agaccccggggcagtcaggtgctcc

SEQ ID NO: 258174 - DNA, 25 bp, Artificial
  Probe
ccagcaggggctccaggccttggct

SEQ ID NO: 258175 - DNA, 25 bp, Artificial
  Probe
ccaaacagaggctgcggttcaaaga

SEQ ID NO: 258176 - DNA, 25 bp, Artificial
  Probe
aataccggcccaaacagaggctgcg

SEQ ID NO: 258177 - DNA, 25 bp, Artificial
  Probe
cggcccaaacagaggctgcggttca

SEQ ID NO: 258178 - DNA, 25 bp, Artificial
  Probe
ccgtggctctgtctctctgaggtgg

SEQ ID NO: 258179 - DNA, 25 bp, Artificial
  Probe
ttaaaaccgcatacataataaaaga

SEQ ID NO: 258180 - DNA, 25 bp, Artificial
  Probe
taattttaaaaccgcatacataata

SEQ ID NO: 258181 - DNA, 25 bp, Artificial
  Probe
ttaagttaggcaatttccagtatgt

SEQ ID NO: 258182 - DNA, 25 bp, Artificial
  Probe
accgcatacataataaaagacattg

SEQ ID NO: 258183 - DNA, 25 bp, Artificial
  Probe
caatttccagtatgttaagtaacac

SEQ ID NO: 258184 - DNA, 25 bp, Artificial
  Probe
gttaggcaatttccagtatgttaag

SEQ ID NO: 258185 - DNA, 25 bp, Artificial
  Probe
ttttctcttctttaggcaatgatta

SEQ ID NO: 258186 - DNA, 25 bp, Artificial
  Probe
ctcttctttaggcaatgattaagtt

SEQ ID NO: 258187 - DNA, 25 bp, Artificial
  Probe
taagtaacacacttatttttgcctg

SEQ ID NO: 258188 - DNA, 25 bp, Artificial
  Probe
atttccagtatgttaagtaacacac

SEQ ID NO: 258189 - DNA, 25 bp, Artificial
  Probe
aaaccgcatacataataaaagacat

SEQ ID NO: 258190 - DNA, 25 bp, Artificial
  Probe
ataattttaaaaccgcatacataat

SEQ ID NO: 258191 - DNA, 25 bp, Artificial
  Probe
aggcaatttccagtatgttaagtaa

SEQ ID NO: 258192 - DNA, 25 bp, Artificial
  Probe
cattgttgcatggcaaaaaaaaaaa

SEQ ID NO: 258193 - DNA, 25 bp, Artificial
  Probe
aagtaacacacttatttttgcctgt

SEQ ID NO: 258194 - DNA, 25 bp, Artificial
  Probe
aaagacattgttgcatggcaaaaaa

SEQ ID NO: 258195 - DNA, 25 bp, Artificial
  Probe
cttctttaggcaatgattaagttag

SEQ ID NO: 258196 - DNA, 25 bp, Artificial
  Probe
ttctcttctttaggcaatgattaag

SEQ ID NO: 258197 - DNA, 25 bp, Artificial
  Probe
aaaaccgcatacataataaaagaca

SEQ ID NO: 258198 - DNA, 25 bp, Artificial
  Probe
gacattgttgcatggcaaaaaaaaa

SEQ ID NO: 258199 - DNA, 25 bp, Artificial
  Probe
tctcttctttaggcaatgattaagt

SEQ ID NO: 258200 - DNA, 25 bp, Artificial
  Probe
tttaaaaccgcatacataataaaag

SEQ ID NO: 258201 - DNA, 25 bp, Artificial
  Probe
taattttctcttctttaggcaatga

SEQ ID NO: 258202 - DNA, 25 bp, Artificial
  Probe
agtaacacacttatttttgcctgtg

SEQ ID NO: 258203 - DNA, 25 bp, Artificial
  Probe
tcttctttaggcaatgattaagtta

SEQ ID NO: 258204 - DNA, 25 bp, Artificial
  Probe
atgttaagtaacacacttatttttg

SEQ ID NO: 258205 - DNA, 25 bp, Artificial
  Probe
ttaagtaacacacttatttttgcct

SEQ ID NO: 258206 - DNA, 25 bp, Artificial
  Probe
attttctcttctttaggcaatgatt

SEQ ID NO: 258207 - DNA, 25 bp, Artificial
  Probe
aagacattgttgcatggcaaaaaaa

SEQ ID NO: 258208 - DNA, 25 bp, Artificial
  Probe
gggataattttctcttctttaggca

SEQ ID NO: 258209 - DNA, 25 bp, Artificial
  Probe
gtaacacacttatttttgcctgtgt

SEQ ID NO: 258210 - DNA, 25 bp, Artificial
  Probe
acattgttgcatggcaaaaaaaaaa

SEQ ID NO: 258211 - DNA, 25 bp, Artificial
  Probe
agttaggcaatttccagtatgttaa

SEQ ID NO: 258212 - DNA, 25 bp, Artificial
  Probe
ataattttctcttctttaggcaatg

SEQ ID NO: 258213 - DNA, 25 bp, Artificial
  Probe
ttaggcaatttccagtatgttaagt

SEQ ID NO: 258214 - DNA, 25 bp, Artificial
  Probe
taggcaatttccagtatgttaagta

SEQ ID NO: 258215 - DNA, 25 bp, Artificial
  Probe
aaaagacattgttgcatggcaaaaa

SEQ ID NO: 258216 - DNA, 25 bp, Artificial
  Probe
aagttaggcaatttccagtatgtta

SEQ ID NO: 258217 - DNA, 25 bp, Artificial
  Probe
ttctttaggcaatgattaagttagg

SEQ ID NO: 258218 - DNA, 25 bp, Artificial
  Probe
ggataattttctcttctttaggcaa

SEQ ID NO: 258219 - DNA, 25 bp, Artificial
  Probe
tgttaagtaacacacttatttttgc

SEQ ID NO: 258220 - DNA, 25 bp, Artificial
  Probe
ataaaagacattgttgcatggcaaa

SEQ ID NO: 258221 - DNA, 25 bp, Artificial
  Probe
taagttaggcaatttccagtatgtt

SEQ ID NO: 258222 - DNA, 25 bp, Artificial
  Probe
taaaagacattgttgcatggcaaaa

SEQ ID NO: 258223 - DNA, 25 bp, Artificial
  Probe
gcaatttccagtatgttaagtaaca

SEQ ID NO: 258224 - DNA, 25 bp, Artificial
  Probe
ggcaatttccagtatgttaagtaac

SEQ ID NO: 258225 - DNA, 25 bp, Artificial
  Probe
gtttatgtgcagagcctagatgagc

SEQ ID NO: 258226 - DNA, 25 bp, Artificial
  Probe
acaccatggagtgtgtgctggagct

SEQ ID NO: 258227 - DNA, 25 bp, Artificial
  Probe
ctcctgaacttcaggggtacaaaca

SEQ ID NO: 258228 - DNA, 25 bp, Artificial
  Probe
tctctgagtggcttgaatccatacg

SEQ ID NO: 258229 - DNA, 25 bp, Artificial
  Probe
atagggtgaccctacgtctgcccag

SEQ ID NO: 258230 - DNA, 25 bp, Artificial
  Probe
tagggtgaccctacgtctgcccagc

SEQ ID NO: 258231 - DNA, 25 bp, Artificial
  Probe
agcatctgactcaatgctggctgcc

SEQ ID NO: 258232 - DNA, 25 bp, Artificial
  Probe
agctgacagccgagtgagaacgctg

SEQ ID NO: 258233 - DNA, 25 bp, Artificial
  Probe
atgttgtttcccatagggtgaccct

SEQ ID NO: 258234 - DNA, 25 bp, Artificial
  Probe
aagcatctgactcaatgctggctgc

SEQ ID NO: 258235 - DNA, 25 bp, Artificial
  Probe
tgaggttgagcttctagactcacag

SEQ ID NO: 258236 - DNA, 25 bp, Artificial
  Probe
gggccaggcagcaccaacatgggca

SEQ ID NO: 258237 - DNA, 25 bp, Artificial
  Probe
acttcaggggtacaaacatgatgtt

SEQ ID NO: 258238 - DNA, 25 bp, Artificial
  Probe
aacgctggggccaggcagcaccaac

SEQ ID NO: 258239 - DNA, 25 bp, Artificial
  Probe
atgtgcagagcctagatgagctaac

SEQ ID NO: 258240 - DNA, 25 bp, Artificial
  Probe
ctggggccaggcagcaccaacatgg

SEQ ID NO: 258241 - DNA, 25 bp, Artificial
  Probe
aggcagcaccaacatgggcatggga

SEQ ID NO: 258242 - DNA, 25 bp, Artificial
  Probe
agaagcgcattctctgcagtattca

SEQ ID NO: 258243 - DNA, 25 bp, Artificial
  Probe
aacacaagcatctgactcaatgctg

SEQ ID NO: 258244 - DNA, 25 bp, Artificial
  Probe
ggctctgatgggatcccttatcgaa

SEQ ID NO: 258245 - DNA, 25 bp, Artificial
  Probe
gaacttcaggggtacaaacatgatg

SEQ ID NO: 258246 - DNA, 25 bp, Artificial
  Probe
atgggaatcacattgccagggcacc

SEQ ID NO: 258247 - DNA, 25 bp, Artificial
  Probe
agcctgagtggctctgatgggatcc

SEQ ID NO: 258248 - DNA, 25 bp, Artificial
  Probe
gatgagctaacacaagcatctgact

SEQ ID NO: 258249 - DNA, 25 bp, Artificial
  Probe
ctacgtctgcccagcctgagtggct

SEQ ID NO: 258250 - DNA, 25 bp, Artificial
  Probe
caccagaagcgcattctctgcagta

SEQ ID NO: 258251 - DNA, 25 bp, Artificial
  Probe
gagcttctagactcacagcctcctt

SEQ ID NO: 258252 - DNA, 25 bp, Artificial
  Probe
ggctgaggttgagcttctagactca

SEQ ID NO: 258253 - DNA, 25 bp, Artificial
  Probe
agcctagatgagctaacacaagcat

SEQ ID NO: 258254 - DNA, 25 bp, Artificial
  Probe
gttgagcttctagactcacagcctc

SEQ ID NO: 258255 - DNA, 25 bp, Artificial
  Probe
ctcaatgctggctgccatgtggtgg

SEQ ID NO: 258256 - DNA, 25 bp, Artificial
  Probe
cagggcaccagaagcgcattctctg

SEQ ID NO: 258257 - DNA, 25 bp, Artificial
  Probe
ctgagtggcttgaatccatacgcat

SEQ ID NO: 258258 - DNA, 25 bp, Artificial
  Probe
tgttgtttcccatagggtgacccta

SEQ ID NO: 258259 - DNA, 25 bp, Artificial
  Probe
cattgccagggcaccagaagcgcat

SEQ ID NO: 258260 - DNA, 25 bp, Artificial
  Probe
aatcacattgccagggcaccagaag

SEQ ID NO: 258261 - DNA, 25 bp, Artificial
  Probe
tgatgggatcccttatcgaagtgtc

SEQ ID NO: 258262 - DNA, 25 bp, Artificial
  Probe
tttcccatagggtgaccctacgtct

SEQ ID NO: 258263 - DNA, 25 bp, Artificial
  Probe
gcagagcctagatgagctaacacaa

SEQ ID NO: 258264 - DNA, 25 bp, Artificial
  Probe
gctcggcaggcctggacaccatgga

SEQ ID NO: 258265 - DNA, 25 bp, Artificial
  Probe
ttctctcttccacagggacctgacg

SEQ ID NO: 258266 - DNA, 25 bp, Artificial
  Probe
atgctggctgccatgtggtggccca

SEQ ID NO: 258267 - DNA, 25 bp, Artificial
  Probe
atttaaggactgagcatccactgaa

SEQ ID NO: 258268 - DNA, 25 bp, Artificial
  Probe
aggccagccagctcctgaacttcag

SEQ ID NO: 258269 - DNA, 25 bp, Artificial
  Probe
tcggcaggcctggacaccatggagt

SEQ ID NO: 258270 - DNA, 25 bp, Artificial
  Probe
aacatgatgttgtttcccatagggt

SEQ ID NO: 258271 - DNA, 25 bp, Artificial
  Probe
aagaccagctgctgtccacacttgt

SEQ ID NO: 258272 - DNA, 25 bp, Artificial
  Probe
ggataatttctgtaaccccatcgtt

SEQ ID NO: 258273 - DNA, 25 bp, Artificial
  Probe
tcgagtaactcttcatttgaaactg

SEQ ID NO: 258274 - DNA, 25 bp, Artificial
  Probe
gtttgagctctccttacatactttg

SEQ ID NO: 258275 - DNA, 25 bp, Artificial
  Probe
atgatcaaaatgacactcagaggga

SEQ ID NO: 258276 - DNA, 25 bp, Artificial
  Probe
gtgtttcctcctcgagtaactcttc

SEQ ID NO: 258277 - DNA, 25 bp, Artificial
  Probe
tagagccaccagcactgaccctttt

SEQ ID NO: 258278 - DNA, 25 bp, Artificial
  Probe
tgtccacactaatgctaaagcactg

SEQ ID NO: 258279 - DNA, 25 bp, Artificial
  Probe
ggtacacacaacatatgttcagttg

SEQ ID NO: 258280 - DNA, 25 bp, Artificial
  Probe
ggactaggcgccatgtaattcagca

SEQ ID NO: 258281 - DNA, 25 bp, Artificial
  Probe
ttaaccacagggtccgtccatcctt

SEQ ID NO: 258282 - DNA, 25 bp, Artificial
  Probe
tcatttgaaactgttgatctacttg

SEQ ID NO: 258283 - DNA, 25 bp, Artificial
  Probe
caatggaccgatggatggacagaat

SEQ ID NO: 258284 - DNA, 25 bp, Artificial
  Probe
accaaaagtagaagctcccgaagat

SEQ ID NO: 258285 - DNA, 25 bp, Artificial
  Probe
tatagacgtacaaatcagtttgagc

SEQ ID NO: 258286 - DNA, 25 bp, Artificial
  Probe
agcagtaattccttgaaaggagtac

SEQ ID NO: 258287 - DNA, 25 bp, Artificial
  Probe
catttgctgcttttgttagtagcat

SEQ ID NO: 258288 - DNA, 25 bp, Artificial
  Probe
acaggatactgcattgctcttttgt

SEQ ID NO: 258289 - DNA, 25 bp, Artificial
  Probe
tggtgcagagagcagcccagaccca

SEQ ID NO: 258290 - DNA, 25 bp, Artificial
  Probe
tgatcaaaatgacactcagagggac

SEQ ID NO: 258291 - DNA, 25 bp, Artificial
  Probe
tggtttagagccaccagcactgacc

SEQ ID NO: 258292 - DNA, 25 bp, Artificial
  Probe
acactcagagggacagtgtggtttg

SEQ ID NO: 258293 - DNA, 25 bp, Artificial
  Probe
gactgctatgtactcggcaaccacc

SEQ ID NO: 258294 - DNA, 25 bp, Artificial
  Probe
cccgtggtaaaggtgtcagaaatag

SEQ ID NO: 258295 - DNA, 25 bp, Artificial
  Probe
atggtgcagagagcagcccagaccc

SEQ ID NO: 258296 - DNA, 25 bp, Artificial
  Probe
cccagcacaccgactctggagagat

SEQ ID NO: 258297 - DNA, 25 bp, Artificial
  Probe
gcatggatttgtgtttcctcctcga

SEQ ID NO: 258298 - DNA, 25 bp, Artificial
  Probe
gtagtgagcacaatggaccgatgga

SEQ ID NO: 258299 - DNA, 25 bp, Artificial
  Probe
ctgctgtgaagctttagctgaatat

SEQ ID NO: 258300 - DNA, 25 bp, Artificial
  Probe
agttggaataacaccagcatttgct

SEQ ID NO: 258301 - DNA, 25 bp, Artificial
  Probe
cgtccatccttatgcctggtacaca

SEQ ID NO: 258302 - DNA, 25 bp, Artificial
  Probe
actgttgacctgctcaggtgtgcat

SEQ ID NO: 258303 - DNA, 25 bp, Artificial
  Probe
cgtacaaatcagtttgagctctcct

SEQ ID NO: 258304 - DNA, 25 bp, Artificial
  Probe
taagcccaaaccaaaagtagaagct

SEQ ID NO: 258305 - DNA, 25 bp, Artificial
  Probe
agtaactcttcatttgaaactgttg

SEQ ID NO: 258306 - DNA, 25 bp, Artificial
  Probe
ctcaagatcccgtggtaaaggtgtc

SEQ ID NO: 258307 - DNA, 25 bp, Artificial
  Probe
cacaccgactctggagagatggaag

SEQ ID NO: 258308 - DNA, 25 bp, Artificial
  Probe
ctatattgagtgcatattgatgtcc

SEQ ID NO: 258309 - DNA, 25 bp, Artificial
  Probe
ccaaaagtagaagctcccgaagata

SEQ ID NO: 258310 - DNA, 25 bp, Artificial
  Probe
atagccctcagcttctgtgtgcagg

SEQ ID NO: 258311 - DNA, 25 bp, Artificial
  Probe
tgttgcagaggcagggttaactgca

SEQ ID NO: 258312 - DNA, 25 bp, Artificial
  Probe
ggaatccagtcttgtcatcacataa

SEQ ID NO: 258313 - DNA, 25 bp, Artificial
  Probe
caaacgggaggttctgacatcctag

SEQ ID NO: 258314 - DNA, 25 bp, Artificial
  Probe
catgaactggctaaacagtaagatg

SEQ ID NO: 258315 - DNA, 25 bp, Artificial
  Probe
ccactgtagccacagcttctacttg

SEQ ID NO: 258316 - DNA, 25 bp, Artificial
  Probe
cactcagagggacagtgtggtttga

SEQ ID NO: 258317 - DNA, 25 bp, Artificial
  Probe
tgaagctggcaagctacttttcagc

SEQ ID NO: 258318 - DNA, 25 bp, Artificial
  Probe
acttggcagatggaggaagcatctg

SEQ ID NO: 258319 - DNA, 25 bp, Artificial
  Probe
acacacttggcagatggaggaagca

SEQ ID NO: 258320 - DNA, 25 bp, Artificial
  Probe
agccagatgagtgctctgtggaccc

SEQ ID NO: 258321 - DNA, 25 bp, Artificial
  Probe
ggcaagctacttttcagcctcaagc

SEQ ID NO: 258322 - DNA, 25 bp, Artificial
  Probe
gccacgatgtgctctgtatccagaa

SEQ ID NO: 258323 - DNA, 25 bp, Artificial
  Probe
ccagccagatgagtgctctgtggac

SEQ ID NO: 258324 - DNA, 25 bp, Artificial
  Probe
agtgtgaccccagaagccacgatgt

SEQ ID NO: 258325 - DNA, 25 bp, Artificial
  Probe
aagcatctgagtttgagaccatggc

SEQ ID NO: 258326 - DNA, 25 bp, Artificial
  Probe
tctgagtttgagaccatggctgtta

SEQ ID NO: 258327 - DNA, 25 bp, Artificial
  Probe
agccacgatgtgctctgtatccaga

SEQ ID NO: 258328 - DNA, 25 bp, Artificial
  Probe
aagctgagtgtgaccccagaagcca

SEQ ID NO: 258329 - DNA, 25 bp, Artificial
  Probe
gctctgtatccagaacacacttggc

SEQ ID NO: 258330 - DNA, 25 bp, Artificial
  Probe
ctctgtggacccacagcctaagctg

SEQ ID NO: 258331 - DNA, 25 bp, Artificial
  Probe
ccagaacacacttggcagatggagg

SEQ ID NO: 258332 - DNA, 25 bp, Artificial
  Probe
tctgtatccagaacacacttggcag

SEQ ID NO: 258333 - DNA, 25 bp, Artificial
  Probe
cctaagctgagtgtgaccccagaag

SEQ ID NO: 258334 - DNA, 25 bp, Artificial
  Probe
cacagcctaagctgagtgtgacccc

SEQ ID NO: 258335 - DNA, 25 bp, Artificial
  Probe
cgatgtgctctgtatccagaacaca

SEQ ID NO: 258336 - DNA, 25 bp, Artificial
  Probe
tgtgaccccagaagccacgatgtgc

SEQ ID NO: 258337 - DNA, 25 bp, Artificial
  Probe
ctgttacagggatcatgtaaacttg

SEQ ID NO: 258338 - DNA, 25 bp, Artificial
  Probe
aggaagcatctgagtttgagaccat

SEQ ID NO: 258339 - DNA, 25 bp, Artificial
  Probe
caagaaatctgttcatgttaaaagc

SEQ ID NO: 258340 - DNA, 25 bp, Artificial
  Probe
agtttgagaccatggctgttacagg

SEQ ID NO: 258341 - DNA, 25 bp, Artificial
  Probe
accccagaagccacgatgtgctctg

SEQ ID NO: 258342 - DNA, 25 bp, Artificial
  Probe
gagaccatggctgttacagggatca

SEQ ID NO: 258343 - DNA, 25 bp, Artificial
  Probe
gagtgtgaccccagaagccacgatg

SEQ ID NO: 258344 - DNA, 25 bp, Artificial
  Probe
atagcccagccagatgagtgctctg

SEQ ID NO: 258345 - DNA, 25 bp, Artificial
  Probe
ggacccacagcctaagctgagtgtg

SEQ ID NO: 258346 - DNA, 25 bp, Artificial
  Probe
atgagtgctctgtggacccacagcc

SEQ ID NO: 258347 - DNA, 25 bp, Artificial
  Probe
tgagtttgagaccatggctgttaca

SEQ ID NO: 258348 - DNA, 25 bp, Artificial
  Probe
gtgctctgtatccagaacacacttg

SEQ ID NO: 258349 - DNA, 25 bp, Artificial
  Probe
ggaagcatctgagtttgagaccatg

SEQ ID NO: 258350 - DNA, 25 bp, Artificial
  Probe
ctgtggacccacagcctaagctgag

SEQ ID NO: 258351 - DNA, 25 bp, Artificial
  Probe
gagtgctctgtggacccacagccta

SEQ ID NO: 258352 - DNA, 25 bp, Artificial
  Probe
agtgctctgtggacccacagcctaa

SEQ ID NO: 258353 - DNA, 25 bp, Artificial
  Probe
catagcccagccagatgagtgctct

SEQ ID NO: 258354 - DNA, 25 bp, Artificial
  Probe
gcaagctacttttcagcctcaagct

SEQ ID NO: 258355 - DNA, 25 bp, Artificial
  Probe
tttcctgccgggtgttgtatgtgtg

SEQ ID NO: 258356 - DNA, 25 bp, Artificial
  Probe
ccatggctgttacagggatcatgta

SEQ ID NO: 258357 - DNA, 25 bp, Artificial
  Probe
ccccagaagccacgatgtgctctgt

SEQ ID NO: 258358 - DNA, 25 bp, Artificial
  Probe
gctgttacagggatcatgtaaactt

SEQ ID NO: 258359 - DNA, 25 bp, Artificial
  Probe
gcatctgagtttgagaccatggctg

SEQ ID NO: 258360 - DNA, 25 bp, Artificial
  Probe
gaagccacgatgtgctctgtatcca

SEQ ID NO: 258361 - DNA, 25 bp, Artificial
  Probe
tatccagaacacacttggcagatgg

SEQ ID NO: 258362 - DNA, 25 bp, Artificial
  Probe
aacacacttggcagatggaggaagc

SEQ ID NO: 258363 - DNA, 25 bp, Artificial
  Probe
ggaccatttggcaaatgactcaaaa

SEQ ID NO: 258364 - DNA, 25 bp, Artificial
  Probe
tcgcttaatttctttacgaagacga

SEQ ID NO: 258365 - DNA, 25 bp, Artificial
  Probe
gtataactgttgagagctgctcaca

SEQ ID NO: 258366 - DNA, 25 bp, Artificial
  Probe
acgatcttcattaataacgattagg

SEQ ID NO: 258367 - DNA, 25 bp, Artificial
  Probe
tataactgttgagagctgctcacag

SEQ ID NO: 258368 - DNA, 25 bp, Artificial
  Probe
aacttgtcttccaataaattgaggg

SEQ ID NO: 258369 - DNA, 25 bp, Artificial
  Probe
gtacatgttctgtggggtctttgcc

SEQ ID NO: 258370 - DNA, 25 bp, Artificial
  Probe
tccggtataactgttgagagctgct

SEQ ID NO: 258371 - DNA, 25 bp, Artificial
  Probe
ttttcagagccagtcctcttctgta

SEQ ID NO: 258372 - DNA, 25 bp, Artificial
  Probe
taacgattaggtctgtgaaatctct

SEQ ID NO: 258373 - DNA, 25 bp, Artificial
  Probe
atagagtgacctagccgtgtggtaa

SEQ ID NO: 258374 - DNA, 25 bp, Artificial
  Probe
gtcctcttctgtaataaacatgtga

SEQ ID NO: 258375 - DNA, 25 bp, Artificial
  Probe
attaggtctgtgaaatctcttgcaa

SEQ ID NO: 258376 - DNA, 25 bp, Artificial
  Probe
agtcctcttctgtaataaacatgtg

SEQ ID NO: 258377 - DNA, 25 bp, Artificial
  Probe
gtctttgcctcgtcgcttaatttct

SEQ ID NO: 258378 - DNA, 25 bp, Artificial
  Probe
taaacatgtgaatccggtataactg

SEQ ID NO: 258379 - DNA, 25 bp, Artificial
  Probe
gagaagcaaacatacgtccgataga

SEQ ID NO: 258380 - DNA, 25 bp, Artificial
  Probe
tactgttctcccatgaggtctgcct

SEQ ID NO: 258381 - DNA, 25 bp, Artificial
  Probe
ctcaaaataagtccatttggtgttt

SEQ ID NO: 258382 - DNA, 25 bp, Artificial
  Probe
ataacgattaggtctgtgaaatctc

SEQ ID NO: 258383 - DNA, 25 bp, Artificial
  Probe
cttgtcttccaataaattgagggtt

SEQ ID NO: 258384 - DNA, 25 bp, Artificial
  Probe
cttcattaataacgattaggtctgt

SEQ ID NO: 258385 - DNA, 25 bp, Artificial
  Probe
gagccagtcctcttctgtaataaac

SEQ ID NO: 258386 - DNA, 25 bp, Artificial
  Probe
tgaatccggtataactgttgagagc

SEQ ID NO: 258387 - DNA, 25 bp, Artificial
  Probe
aaatgagcagttggaccatttggca

SEQ ID NO: 258388 - DNA, 25 bp, Artificial
  Probe
aacatacgtccgatagagtgaccta

SEQ ID NO: 258389 - DNA, 25 bp, Artificial
  Probe
ctgttgagagctgctcacagagtcg

SEQ ID NO: 258390 - DNA, 25 bp, Artificial
  Probe
gtgacctagccgtgtggtaaagttg

SEQ ID NO: 258391 - DNA, 25 bp, Artificial
  Probe
gacctagccgtgtggtaaagttgtt

SEQ ID NO: 258392 - DNA, 25 bp, Artificial
  Probe
tgttctgtggggtctttgcctcgtc

SEQ ID NO: 258393 - DNA, 25 bp, Artificial
  Probe
gtcgtactgttctcccatgaggtct

SEQ ID NO: 258394 - DNA, 25 bp, Artificial
  Probe
ccgatagagtgacctagccgtgtgg

SEQ ID NO: 258395 - DNA, 25 bp, Artificial
  Probe
ggggtctttgcctcgtcgcttaatt

SEQ ID NO: 258396 - DNA, 25 bp, Artificial
  Probe
agttggaccatttggcaaatgactc

SEQ ID NO: 258397 - DNA, 25 bp, Artificial
  Probe
taagtccatttggtgttttacgatc

SEQ ID NO: 258398 - DNA, 25 bp, Artificial
  Probe
tttttcagagccagtcctcttctgt

SEQ ID NO: 258399 - DNA, 25 bp, Artificial
  Probe
ttagaattatctcaggtacatgttc

SEQ ID NO: 258400 - DNA, 25 bp, Artificial
  Probe
cttgcaatgcactgtgggataattt

SEQ ID NO: 258401 - DNA, 25 bp, Artificial
  Probe
ctgtggggtctttgcctcgtcgctt

SEQ ID NO: 258402 - DNA, 25 bp, Artificial
  Probe
ggtctgtgaaatctcttgcaatgca

SEQ ID NO: 258403 - DNA, 25 bp, Artificial
  Probe
aatgactcaaaataagtccatttgg

SEQ ID NO: 258404 - DNA, 25 bp, Artificial
  Probe
agcaaacatacgtccgatagagtga

SEQ ID NO: 258405 - DNA, 25 bp, Artificial
  Probe
ccatttggtgttttacgatcttcat

SEQ ID NO: 258406 - DNA, 25 bp, Artificial
  Probe
tgcctcgtcgcttaatttctttacg

SEQ ID NO: 258407 - DNA, 25 bp, Artificial
  Probe
taatcccgctgattgtggaacgtgg

SEQ ID NO: 258408 - DNA, 25 bp, Artificial
  Probe
gaccatttggcaaatgactcaaaat

SEQ ID NO: 258409 - DNA, 25 bp, Artificial
  Probe
tgatccacactgtgcccaggacagc

SEQ ID NO: 258410 - DNA, 25 bp, Artificial
  Probe
acagacagcgtgaggccctgtggcc

SEQ ID NO: 258411 - DNA, 25 bp, Artificial
  Probe
tcctaaactccaaggggactgtcca

SEQ ID NO: 258412 - DNA, 25 bp, Artificial
  Probe
cacagacagcgtgaggccctgtggc

SEQ ID NO: 258413 - DNA, 25 bp, Artificial
  Probe
aggatcctaaactccaaggggactg

SEQ ID NO: 258414 - DNA, 25 bp, Artificial
  Probe
taaacatctgccaggctccatgagt

SEQ ID NO: 258415 - DNA, 25 bp, Artificial
  Probe
cccaaggccatggaatagaggcagg

SEQ ID NO: 258416 - DNA, 25 bp, Artificial
  Probe
actccaaggggactgtccacctaca

SEQ ID NO: 258417 - DNA, 25 bp, Artificial
  Probe
acagggtaaacatctgccaggctcc

SEQ ID NO: 258418 - DNA, 25 bp, Artificial
  Probe
gcttgtcacagacagcgtgaggccc

SEQ ID NO: 258419 - DNA, 25 bp, Artificial
  Probe
gaggatcctaaactccaaggggact

SEQ ID NO: 258420 - DNA, 25 bp, Artificial
  Probe
gatcctaaactccaaggggactgtc

SEQ ID NO: 258421 - DNA, 25 bp, Artificial
  Probe
cttgtcacagacagcgtgaggccct

SEQ ID NO: 258422 - DNA, 25 bp, Artificial
  Probe
ggcttgtcacagacagcgtgaggcc

SEQ ID NO: 258423 - DNA, 25 bp, Artificial
  Probe
cctttgatccacactgtgcccagga

SEQ ID NO: 258424 - DNA, 25 bp, Artificial
  Probe
ttgatccacactgtgcccaggacag

SEQ ID NO: 258425 - DNA, 25 bp, Artificial
  Probe
gcccaaggccatggaatagaggcag

SEQ ID NO: 258426 - DNA, 25 bp, Artificial
  Probe
aggctccatgagtggcccaaggcca

SEQ ID NO: 258427 - DNA, 25 bp, Artificial
  Probe
ctccaaggggactgtccacctacag

SEQ ID NO: 258428 - DNA, 25 bp, Artificial
  Probe
caggctccatgagtggcccaaggcc

SEQ ID NO: 258429 - DNA, 25 bp, Artificial
  Probe
tcacagacagcgtgaggccctgtgg

SEQ ID NO: 258430 - DNA, 25 bp, Artificial
  Probe
cacgaggatcctaaactccaagggg

SEQ ID NO: 258431 - DNA, 25 bp, Artificial
  Probe
catgagtggcccaaggccatggaat

SEQ ID NO: 258432 - DNA, 25 bp, Artificial
  Probe
agaggcagggcttgtcacagacagc

SEQ ID NO: 258433 - DNA, 25 bp, Artificial
  Probe
tggataccacctttgatccacactg

SEQ ID NO: 258434 - DNA, 25 bp, Artificial
  Probe
acccatggacacagggtaaacatct

SEQ ID NO: 258435 - DNA, 25 bp, Artificial
  Probe
tggcccaaggccatggaatagaggc

SEQ ID NO: 258436 - DNA, 25 bp, Artificial
  Probe
tgccaggctccatgagtggcccaag

SEQ ID NO: 258437 - DNA, 25 bp, Artificial
  Probe
cctacccatggacacagggtaaaca

SEQ ID NO: 258438 - DNA, 25 bp, Artificial
  Probe
cagggcttgtcacagacagcgtgag

SEQ ID NO: 258439 - DNA, 25 bp, Artificial
  Probe
atctgccaggctccatgagtggccc

SEQ ID NO: 258440 - DNA, 25 bp, Artificial
  Probe
cagggtaaacatctgccaggctcca

SEQ ID NO: 258441 - DNA, 25 bp, Artificial
  Probe
cagtggataccacctttgatccaca

SEQ ID NO: 258442 - DNA, 25 bp, Artificial
  Probe
tcagtggataccacctttgatccac

SEQ ID NO: 258443 - DNA, 25 bp, Artificial
  Probe
gataccacctttgatccacactgtg

SEQ ID NO: 258444 - DNA, 25 bp, Artificial
  Probe
ctgccaggctccatgagtggcccaa

SEQ ID NO: 258445 - DNA, 25 bp, Artificial
  Probe
tagaggcagggcttgtcacagacag

SEQ ID NO: 258446 - DNA, 25 bp, Artificial
  Probe
tttgatccacactgtgcccaggaca

SEQ ID NO: 258447 - DNA, 25 bp, Artificial
  Probe
agggtaaacatctgccaggctccat

SEQ ID NO: 258448 - DNA, 25 bp, Artificial
  Probe
catctgccaggctccatgagtggcc

SEQ ID NO: 258449 - DNA, 25 bp, Artificial
  Probe
aggcagggcttgtcacagacagcgt

SEQ ID NO: 258450 - DNA, 25 bp, Artificial
  Probe
agcgtgaggccctgtggcctgccac

SEQ ID NO: 258451 - DNA, 25 bp, Artificial
  Probe
acctttgatccacactgtgcccagg

SEQ ID NO: 258452 - DNA, 25 bp, Artificial
  Probe
ccaaggggactgtccacctacagac

SEQ ID NO: 258453 - DNA, 25 bp, Artificial
  Probe
atgagtggcccaaggccatggaata

SEQ ID NO: 258454 - DNA, 25 bp, Artificial
  Probe
caaggggactgtccacctacagaca

SEQ ID NO: 258455 - DNA, 25 bp, Artificial
  Probe
ttttcctgccgttctctcagggact

SEQ ID NO: 258456 - DNA, 25 bp, Artificial
  Probe
tggcatatctgtcttcccctgcagg

SEQ ID NO: 258457 - DNA, 25 bp, Artificial
  Probe
gagcgccaaggaactgcagcaaata

SEQ ID NO: 258458 - DNA, 25 bp, Artificial
  Probe
tctcagggactctcagggcagctcc

SEQ ID NO: 258459 - DNA, 25 bp, Artificial
  Probe
ttctctcagggactctcagggcagc

SEQ ID NO: 258460 - DNA, 25 bp, Artificial
  Probe
gtcttcccctgcaggcgctgtgtga

SEQ ID NO: 258461 - DNA, 25 bp, Artificial
  Probe
ctggcatatctgtcttcccctgcag

SEQ ID NO: 258462 - DNA, 25 bp, Artificial
  Probe
agcatgccagtccaggcagagcagg

SEQ ID NO: 258463 - DNA, 25 bp, Artificial
  Probe
acacgcagcattttcctgccgttct

SEQ ID NO: 258464 - DNA, 25 bp, Artificial
  Probe
ccaaggaactgcagcaaataaactc

SEQ ID NO: 258465 - DNA, 25 bp, Artificial
  Probe
tctggcatatctgtcttcccctgca

SEQ ID NO: 258466 - DNA, 25 bp, Artificial
  Probe
cgcagccctgaggagcgccaaggaa

SEQ ID NO: 258467 - DNA, 25 bp, Artificial
  Probe
ggaagatggccctttgtctgctccg

SEQ ID NO: 258468 - DNA, 25 bp, Artificial
  Probe
atggccctttgtctgctccgtgggg

SEQ ID NO: 258469 - DNA, 25 bp, Artificial
  Probe
tcattacagtatgaagggagccgtg

SEQ ID NO: 258470 - DNA, 25 bp, Artificial
  Probe
ctgccgttctctcagggactctcag

SEQ ID NO: 258471 - DNA, 25 bp, Artificial
  Probe
tgacacgcagcattttcctgccgtt

SEQ ID NO: 258472 - DNA, 25 bp, Artificial
  Probe
gctgcctctggcatatctgtcttcc

SEQ ID NO: 258473 - DNA, 25 bp, Artificial
  Probe
acgcagcattttcctgccgttctct

SEQ ID NO: 258474 - DNA, 25 bp, Artificial
  Probe
gcagcattttcctgccgttctctca

SEQ ID NO: 258475 - DNA, 25 bp, Artificial
  Probe
tgaagggagccgtgacacgcagcat

SEQ ID NO: 258476 - DNA, 25 bp, Artificial
  Probe
gccagcatgccagtccaggcagagc

SEQ ID NO: 258477 - DNA, 25 bp, Artificial
  Probe
gaggagcgccaaggaactgcagcaa

SEQ ID NO: 258478 - DNA, 25 bp, Artificial
  Probe
ctcattacagtatgaagggagccgt

SEQ ID NO: 258479 - DNA, 25 bp, Artificial
  Probe
cgtgacacgcagcattttcctgccg

SEQ ID NO: 258480 - DNA, 25 bp, Artificial
  Probe
gcgccaaggaactgcagcaaataaa

SEQ ID NO: 258481 - DNA, 25 bp, Artificial
  Probe
ttcctgccgttctctcagggactct

SEQ ID NO: 258482 - DNA, 25 bp, Artificial
  Probe
cagtatgaagggagccgtgacacgc

SEQ ID NO: 258483 - DNA, 25 bp, Artificial
  Probe
gttctctcagggactctcagggcag

SEQ ID NO: 258484 - DNA, 25 bp, Artificial
  Probe
tgccgttctctcagggactctcagg

SEQ ID NO: 258485 - DNA, 25 bp, Artificial
  Probe
attttcctgccgttctctcagggac

SEQ ID NO: 258486 - DNA, 25 bp, Artificial
  Probe
tcctcattacagtatgaagggagcc

SEQ ID NO: 258487 - DNA, 25 bp, Artificial
  Probe
ggccagcatgccagtccaggcagag

SEQ ID NO: 258488 - DNA, 25 bp, Artificial
  Probe
tccacaggaccctggaccagggcgg

SEQ ID NO: 258489 - DNA, 25 bp, Artificial
  Probe
gcatgccagtccaggcagagcaggt

SEQ ID NO: 258490 - DNA, 25 bp, Artificial
  Probe
ccacaggaccctggaccagggcggt

SEQ ID NO: 258491 - DNA, 25 bp, Artificial
  Probe
gcagccctgaggagcgccaaggaac

SEQ ID NO: 258492 - DNA, 25 bp, Artificial
  Probe
ctgaggagcgccaaggaactgcagc

SEQ ID NO: 258493 - DNA, 25 bp, Artificial
  Probe
ccgggctgcctctggcatatctgtc

SEQ ID NO: 258494 - DNA, 25 bp, Artificial
  Probe
tggccctttgtctgctccgtggggt

SEQ ID NO: 258495 - DNA, 25 bp, Artificial
  Probe
cgccaaggaactgcagcaaataaac

SEQ ID NO: 258496 - DNA, 25 bp, Artificial
  Probe
gccgtgacacgcagcattttcctgc

SEQ ID NO: 258497 - DNA, 25 bp, Artificial
  Probe
aagggagccgtgacacgcagcattt

SEQ ID NO: 258498 - DNA, 25 bp, Artificial
  Probe
gccgggctgcctctggcatatctgt

SEQ ID NO: 258499 - DNA, 25 bp, Artificial
  Probe
ctcagggactctcagggcagctcct

SEQ ID NO: 258500 - DNA, 25 bp, Artificial
  Probe
gcatatctgtcttcccctgcaggcg

SEQ ID NO: 258501 - DNA, 25 bp, Artificial
  Probe
gatgcctcctgcttggattctgagt

SEQ ID NO: 258502 - DNA, 25 bp, Artificial
  Probe
ctgcttggattctgagtggtcagag

SEQ ID NO: 258503 - DNA, 25 bp, Artificial
  Probe
tggtgtggccattccccgagtgcca

SEQ ID NO: 258504 - DNA, 25 bp, Artificial
  Probe
tgctcagatgccacccaataaaatg

SEQ ID NO: 258505 - DNA, 25 bp, Artificial
  Probe
tgcctgtagaatcctcctctgcctg

SEQ ID NO: 258506 - DNA, 25 bp, Artificial
  Probe
catgactttcaaggatggttcttag

SEQ ID NO: 258507 - DNA, 25 bp, Artificial
  Probe
gggcacaggctggagtattcttagt

SEQ ID NO: 258508 - DNA, 25 bp, Artificial
  Probe
gtgtgggttctgtgtccttccagga

SEQ ID NO: 258509 - DNA, 25 bp, Artificial
  Probe
tgggttctgtgtccttccaggatct

SEQ ID NO: 258510 - DNA, 25 bp, Artificial
  Probe
aagtgttgggtcttcctccaggatg

SEQ ID NO: 258511 - DNA, 25 bp, Artificial
  Probe
agccaatctgtgaccacgattcctc

SEQ ID NO: 258512 - DNA, 25 bp, Artificial
  Probe
caatgggatttgctcagatgccacc

SEQ ID NO: 258513 - DNA, 25 bp, Artificial
  Probe
acccggagctggtgtggccattccc

SEQ ID NO: 258514 - DNA, 25 bp, Artificial
  Probe
gcctcctgcttggattctgagtggt

SEQ ID NO: 258515 - DNA, 25 bp, Artificial
  Probe
tgtgtggaccagtccctcactggcc

SEQ ID NO: 258516 - DNA, 25 bp, Artificial
  Probe
agaggcctggccttgagtttgtcag

SEQ ID NO: 258517 - DNA, 25 bp, Artificial
  Probe
ttgcctgtagaatcctcctctgcct

SEQ ID NO: 258518 - DNA, 25 bp, Artificial
  Probe
acgcagccaatctgtgaccacgatt

SEQ ID NO: 258519 - DNA, 25 bp, Artificial
  Probe
tttgacgcagccaatctgtgaccac

SEQ ID NO: 258520 - DNA, 25 bp, Artificial
  Probe
ctgtaaagcatgactttcaaggatg

SEQ ID NO: 258521 - DNA, 25 bp, Artificial
  Probe
gctggtgtggccattccccgagtgc

SEQ ID NO: 258522 - DNA, 25 bp, Artificial
  Probe
agatgccacccaataaaatgcctgt

SEQ ID NO: 258523 - DNA, 25 bp, Artificial
  Probe
ggacgttgcctgtagaatcctcctc

SEQ ID NO: 258524 - DNA, 25 bp, Artificial
  Probe
aatgggatttgctcagatgccaccc

SEQ ID NO: 258525 - DNA, 25 bp, Artificial
  Probe
cccccagaggcctggccttgagttt

SEQ ID NO: 258526 - DNA, 25 bp, Artificial
  Probe
ccacccggagctggtgtggccattc

SEQ ID NO: 258527 - DNA, 25 bp, Artificial
  Probe
cttcctccaggatgcctgcatggga

SEQ ID NO: 258528 - DNA, 25 bp, Artificial
  Probe
cccacagatgcctcctgcttggatt

SEQ ID NO: 258529 - DNA, 25 bp, Artificial
  Probe
aaagcatgactttcaaggatggttc

SEQ ID NO: 258530 - DNA, 25 bp, Artificial
  Probe
tcttcctccaggatgcctgcatggg

SEQ ID NO: 258531 - DNA, 25 bp, Artificial
  Probe
gggtcttcctccaggatgcctgcat

SEQ ID NO: 258532 - DNA, 25 bp, Artificial
  Probe
tccaggatgcctgcatgggacccca

SEQ ID NO: 258533 - DNA, 25 bp, Artificial
  Probe
gggatttgctcagatgccacccaat

SEQ ID NO: 258534 - DNA, 25 bp, Artificial
  Probe
acaggctggagtattcttagttcta

SEQ ID NO: 258535 - DNA, 25 bp, Artificial
  Probe
cttggattctgagtggtcagagatc

SEQ ID NO: 258536 - DNA, 25 bp, Artificial
  Probe
ccggagctggtgtggccattccccg

SEQ ID NO: 258537 - DNA, 25 bp, Artificial
  Probe
cagatgccacccaataaaatgcctg

SEQ ID NO: 258538 - DNA, 25 bp, Artificial
  Probe
cacagatgcctcctgcttggattct

SEQ ID NO: 258539 - DNA, 25 bp, Artificial
  Probe
gagtggctctgtgtggaccagtccc

SEQ ID NO: 258540 - DNA, 25 bp, Artificial
  Probe
ttgggtcttcctccaggatgcctgc

SEQ ID NO: 258541 - DNA, 25 bp, Artificial
  Probe
cctggccttgagtttgtcagcatgg

SEQ ID NO: 258542 - DNA, 25 bp, Artificial
  Probe
gatttgctcagatgccacccaataa

SEQ ID NO: 258543 - DNA, 25 bp, Artificial
  Probe
gaaagtgttgggtcttcctccagga

SEQ ID NO: 258544 - DNA, 25 bp, Artificial
  Probe
gtgggttctgtgtccttccaggatc

SEQ ID NO: 258545 - DNA, 25 bp, Artificial
  Probe
tgacacagcccaaggcagacattgc

SEQ ID NO: 258546 - DNA, 25 bp, Artificial
  Probe
cccgagtgccactggcccatggatg

SEQ ID NO: 258547 - DNA, 25 bp, Artificial
  Probe
acaccccagcattgcagatgtctta

SEQ ID NO: 258548 - DNA, 25 bp, Artificial
  Probe
tacatccacagcacggaggtaatct

SEQ ID NO: 258549 - DNA, 25 bp, Artificial
  Probe
tccacagcacggaggtaatctttcc

SEQ ID NO: 258550 - DNA, 25 bp, Artificial
  Probe
gtggagctgctcaggcaaagtcagt

SEQ ID NO: 258551 - DNA, 25 bp, Artificial
  Probe
ataatgctcctcttgaggagaaaag

SEQ ID NO: 258552 - DNA, 25 bp, Artificial
  Probe
gaaataatgctcctcttgaggagaa

SEQ ID NO: 258553 - DNA, 25 bp, Artificial
  Probe
cctcagtgtttgattacaaggaatg

SEQ ID NO: 258554 - DNA, 25 bp, Artificial
  Probe
agatgtcttagttacatccacagca

SEQ ID NO: 258555 - DNA, 25 bp, Artificial
  Probe
acagcacggaggtaatctttcctct

SEQ ID NO: 258556 - DNA, 25 bp, Artificial
  Probe
aggactcacgttaccgattttcata

SEQ ID NO: 258557 - DNA, 25 bp, Artificial
  Probe
acaataactccactgaggactcacg

SEQ ID NO: 258558 - DNA, 25 bp, Artificial
  Probe
ggggctttcttagacacactggcac

SEQ ID NO: 258559 - DNA, 25 bp, Artificial
  Probe
ggactgccccacttcaaattgcagt

SEQ ID NO: 258560 - DNA, 25 bp, Artificial
  Probe
cgagacaaaagcagcgatggaaata

SEQ ID NO: 258561 - DNA, 25 bp, Artificial
  Probe
taagaggtggagctgctcaggcaaa

SEQ ID NO: 258562 - DNA, 25 bp, Artificial
  Probe
caataactccactgaggactcacgt

SEQ ID NO: 258563 - DNA, 25 bp, Artificial
  Probe
gaggactgccccacttcaaattgca

SEQ ID NO: 258564 - DNA, 25 bp, Artificial
  Probe
gctcaggcaaagtcagtgaacatga

SEQ ID NO: 258565 - DNA, 25 bp, Artificial
  Probe
attgcagatgtcttagttacatcca

SEQ ID NO: 258566 - DNA, 25 bp, Artificial
  Probe
acactggcaccaaggtaagaggtgg

SEQ ID NO: 258567 - DNA, 25 bp, Artificial
  Probe
cgattttcatacttacgaaagggat

SEQ ID NO: 258568 - DNA, 25 bp, Artificial
  Probe
gtaatctttcctctgtttgctgtcc

SEQ ID NO: 258569 - DNA, 25 bp, Artificial
  Probe
acacactggcaccaaggtaagaggt

SEQ ID NO: 258570 - DNA, 25 bp, Artificial
  Probe
cggaggtaatctttcctctgtttgc

SEQ ID NO: 258571 - DNA, 25 bp, Artificial
  Probe
aaagcaatactgactagaagggctt

SEQ ID NO: 258572 - DNA, 25 bp, Artificial
  Probe
gttctgtcacctaggcaccatatcc

SEQ ID NO: 258573 - DNA, 25 bp, Artificial
  Probe
atactgactagaagggctttcctac

SEQ ID NO: 258574 - DNA, 25 bp, Artificial
  Probe
tcctcttgaggagaaaagcaatact

SEQ ID NO: 258575 - DNA, 25 bp, Artificial
  Probe
tcctcctgccctcagtgtttgatta

SEQ ID NO: 258576 - DNA, 25 bp, Artificial
  Probe
accccagcattgcagatgtcttagt

SEQ ID NO: 258577 - DNA, 25 bp, Artificial
  Probe
gaagggctttcctacaataactcca

SEQ ID NO: 258578 - DNA, 25 bp, Artificial
  Probe
agctgctcaggcaaagtcagtgaac

SEQ ID NO: 258579 - DNA, 25 bp, Artificial
  Probe
atggaaataatgctcctcttgagga

SEQ ID NO: 258580 - DNA, 25 bp, Artificial
  Probe
gggctttcctacaataactccactg

SEQ ID NO: 258581 - DNA, 25 bp, Artificial
  Probe
ttcctctgtttgctgtcctacttgc

SEQ ID NO: 258582 - DNA, 25 bp, Artificial
  Probe
ttcaaattgcagtgttctgtcacct

SEQ ID NO: 258583 - DNA, 25 bp, Artificial
  Probe
gccctcagtgtttgattacaaggaa

SEQ ID NO: 258584 - DNA, 25 bp, Artificial
  Probe
aacaccccagcattgcagatgtctt

SEQ ID NO: 258585 - DNA, 25 bp, Artificial
  Probe
taccgattttcatacttacgaaagg

SEQ ID NO: 258586 - DNA, 25 bp, Artificial
  Probe
cactggcaccaaggtaagaggtgga

SEQ ID NO: 258587 - DNA, 25 bp, Artificial
  Probe
tcttagacacactggcaccaaggta

SEQ ID NO: 258588 - DNA, 25 bp, Artificial
  Probe
agacacactggcaccaaggtaagag

SEQ ID NO: 258589 - DNA, 25 bp, Artificial
  Probe
gactagaagggctttcctacaataa

SEQ ID NO: 258590 - DNA, 25 bp, Artificial
  Probe
aggtggagctgctcaggcaaagtca

SEQ ID NO: 258591 - DNA, 25 bp, Artificial
  Probe
ctagaagggctttcctacaataact

SEQ ID NO: 258592 - DNA, 25 bp, Artificial
  Probe
caaattgcagtgttctgtcacctag

SEQ ID NO: 258593 - DNA, 25 bp, Artificial
  Probe
ctaaacagaccgtcgcgaagctaca

SEQ ID NO: 258594 - DNA, 25 bp, Artificial
  Probe
ttccagttcatgagagcccacgcgg

SEQ ID NO: 258595 - DNA, 25 bp, Artificial
  Probe
gagagttcggctctcaggcagttca

SEQ ID NO: 258596 - DNA, 25 bp, Artificial
  Probe
ccacgcggtccgtgagaaagatgga

SEQ ID NO: 258597 - DNA, 25 bp, Artificial
  Probe
gagctgcccgcgaagctaagagatg

SEQ ID NO: 258598 - DNA, 25 bp, Artificial
  Probe
tgagttctatgagtttgccctggag

SEQ ID NO: 258599 - DNA, 25 bp, Artificial
  Probe
ccagttcatgagagcccacgcggtc

SEQ ID NO: 258600 - DNA, 25 bp, Artificial
  Probe
gagacctctacatcctggcccagaa

SEQ ID NO: 258601 - DNA, 25 bp, Artificial
  Probe
ttgccctggagcagttccagttcat

SEQ ID NO: 258602 - DNA, 25 bp, Artificial
  Probe
agatggagacctctacatcctggcc

SEQ ID NO: 258603 - DNA, 25 bp, Artificial
  Probe
aagatggagacctctacatcctggc

SEQ ID NO: 258604 - DNA, 25 bp, Artificial
  Probe
agaccgtcgcgaagctacagcagtc

SEQ ID NO: 258605 - DNA, 25 bp, Artificial
  Probe
ctggagcagttccagttcatgagag

SEQ ID NO: 258606 - DNA, 25 bp, Artificial
  Probe
tgatgaggctttcctcacctctcct

SEQ ID NO: 258607 - DNA, 25 bp, Artificial
  Probe
cgagtaccattccagaagaggctct

SEQ ID NO: 258608 - DNA, 25 bp, Artificial
  Probe
tctgctgctcttgcttttgatgagg

SEQ ID NO: 258609 - DNA, 25 bp, Artificial
  Probe
gaaggcgagtaccattccagaagag

SEQ ID NO: 258610 - DNA, 25 bp, Artificial
  Probe
aaggcgagtaccattccagaagagg

SEQ ID NO: 258611 - DNA, 25 bp, Artificial
  Probe
aagaggctctgctgctcttgctttt

SEQ ID NO: 258612 - DNA, 25 bp, Artificial
  Probe
tgctgctcttgcttttgatgaggct

SEQ ID NO: 258613 - DNA, 25 bp, Artificial
  Probe
ccagaagaggctctgctgctcttgc

SEQ ID NO: 258614 - DNA, 25 bp, Artificial
  Probe
agttcggctctcaggcagttcactc

SEQ ID NO: 258615 - DNA, 25 bp, Artificial
  Probe
ttttgatgaggctttcctcacctct

SEQ ID NO: 258616 - DNA, 25 bp, Artificial
  Probe
gcccagaactttttctatgaaaaga

SEQ ID NO: 258617 - DNA, 25 bp, Artificial
  Probe
ctggcccagaactttttctatgaaa

SEQ ID NO: 258618 - DNA, 25 bp, Artificial
  Probe
tcgcgaagctacagcagtccgacat

SEQ ID NO: 258619 - DNA, 25 bp, Artificial
  Probe
cccgcgaagctaagagatgtcttag

SEQ ID NO: 258620 - DNA, 25 bp, Artificial
  Probe
tggagcagttccagttcatgagagc

SEQ ID NO: 258621 - DNA, 25 bp, Artificial
  Probe
cctggagcagttccagttcatgaga

SEQ ID NO: 258622 - DNA, 25 bp, Artificial
  Probe
tccagaagaggctctgctgctcttg

SEQ ID NO: 258623 - DNA, 25 bp, Artificial
  Probe
gaagaggctctgctgctcttgcttt

SEQ ID NO: 258624 - DNA, 25 bp, Artificial
  Probe
atggagacctctacatcctggccca

SEQ ID NO: 258625 - DNA, 25 bp, Artificial
  Probe
atgagtttgccctggagcagttcca

SEQ ID NO: 258626 - DNA, 25 bp, Artificial
  Probe
cagaccgtcgcgaagctacagcagt

SEQ ID NO: 258627 - DNA, 25 bp, Artificial
  Probe
tcatgagagcccacgcggtccgtga

SEQ ID NO: 258628 - DNA, 25 bp, Artificial
  Probe
gttctatgagtttgccctggagcag

SEQ ID NO: 258629 - DNA, 25 bp, Artificial
  Probe
ctcacctctccttgaatgaagatga

SEQ ID NO: 258630 - DNA, 25 bp, Artificial
  Probe
gcccactaaacagaccgtcgcgaag

SEQ ID NO: 258631 - DNA, 25 bp, Artificial
  Probe
ccattccagaagaggctctgctgct

SEQ ID NO: 258632 - DNA, 25 bp, Artificial
  Probe
ggctctcaggcagttcactctctcg

SEQ ID NO: 258633 - DNA, 25 bp, Artificial
  Probe
cctcacctctccttgaatgaagatg

SEQ ID NO: 258634 - DNA, 25 bp, Artificial
  Probe
ttgcttttgatgaggctttcctcac

SEQ ID NO: 258635 - DNA, 25 bp, Artificial
  Probe
tgaggctttcctcacctctccttga

SEQ ID NO: 258636 - DNA, 25 bp, Artificial
  Probe
ctctgctgctcttgcttttgatgag

SEQ ID NO: 258637 - DNA, 25 bp, Artificial
  Probe
gagcccacgcggtccgtgagaaaga

SEQ ID NO: 258638 - DNA, 25 bp, Artificial
  Probe
atcctggcccagaactttttctatg

SEQ ID NO: 258639 - DNA, 25 bp, Artificial
  Probe
ccagcgcctggctgagctcaagagc

SEQ ID NO: 258640 - DNA, 25 bp, Artificial
  Probe
caagagcaaccctaccttgaacgag

SEQ ID NO: 258641 - DNA, 25 bp, Artificial
  Probe
gccagcgagactctgactgcccagt

SEQ ID NO: 258642 - DNA, 25 bp, Artificial
  Probe
atgtggagctctaccgccagaaggt

SEQ ID NO: 258643 - DNA, 25 bp, Artificial
  Probe
aggacctgcgccatagtctgatgcc

SEQ ID NO: 258644 - DNA, 25 bp, Artificial
  Probe
gagactgtcccctgtggctgaggaa

SEQ ID NO: 258645 - DNA, 25 bp, Artificial
  Probe
gaacgagtaccacaccagggccaaa

SEQ ID NO: 258646 - DNA, 25 bp, Artificial
  Probe
gcttaagacccaagtccagagtgtg

SEQ ID NO: 258647 - DNA, 25 bp, Artificial
  Probe
aggaatttcgcgaccgcatgcgcac

SEQ ID NO: 258648 - DNA, 25 bp, Artificial
  Probe
ctaccttgaacgagtaccacaccag

SEQ ID NO: 258649 - DNA, 25 bp, Artificial
  Probe
ccagagtgtgatcgacaaggccagc

SEQ ID NO: 258650 - DNA, 25 bp, Artificial
  Probe
gagctgcaagggagactgtcccctg

SEQ ID NO: 258651 - DNA, 25 bp, Artificial
  Probe
tgcgcacacacgtagactctctgcg

SEQ ID NO: 258652 - DNA, 25 bp, Artificial
  Probe
cgctggaggacctgcgccatagtct

SEQ ID NO: 258653 - DNA, 25 bp, Artificial
  Probe
aggccgttagtcagctgcaggaacg

SEQ ID NO: 258654 - DNA, 25 bp, Artificial
  Probe
agtgtgatcgacaaggccagcgaga

SEQ ID NO: 258655 - DNA, 25 bp, Artificial
  Probe
acaaggccagcgagactctgactgc

SEQ ID NO: 258656 - DNA, 25 bp, Artificial
  Probe
gcaaccctaccttgaacgagtacca

SEQ ID NO: 258657 - DNA, 25 bp, Artificial
  Probe
ccagacctgcgctggaggacctgcg

SEQ ID NO: 258658 - DNA, 25 bp, Artificial
  Probe
atcgacaaggccagcgagactctga

SEQ ID NO: 258659 - DNA, 25 bp, Artificial
  Probe
gccatagtctgatgcccatgctgga

SEQ ID NO: 258660 - DNA, 25 bp, Artificial
  Probe
aaacccacctgaagacacttggcga

SEQ ID NO: 258661 - DNA, 25 bp, Artificial
  Probe
cggctgggcccattgactcgggact

SEQ ID NO: 258662 - DNA, 25 bp, Artificial
  Probe
gaccgcatgcgcacacacgtagact

SEQ ID NO: 258663 - DNA, 25 bp, Artificial
  Probe
acacgtagactctctgcgcacacag

SEQ ID NO: 258664 - DNA, 25 bp, Artificial
  Probe
cgagaaagccagacctgcgctggag

SEQ ID NO: 258665 - DNA, 25 bp, Artificial
  Probe
gtgtgatcgacaaggccagcgagac

SEQ ID NO: 258666 - DNA, 25 bp, Artificial
  Probe
agctcaagagcaaccctaccttgaa

SEQ ID NO: 258667 - DNA, 25 bp, Artificial
  Probe
gctgagctcaagagcaaccctacct

SEQ ID NO: 258668 - DNA, 25 bp, Artificial
  Probe
tgcaagggagactgtcccctgtggc

SEQ ID NO: 258669 - DNA, 25 bp, Artificial
  Probe
ggccaaaacccacctgaagacactt

SEQ ID NO: 258670 - DNA, 25 bp, Artificial
  Probe
caagggagactgtcccctgtggctg

SEQ ID NO: 258671 - DNA, 25 bp, Artificial
  Probe
gcatgcgcacacacgtagactctct

SEQ ID NO: 258672 - DNA, 25 bp, Artificial
  Probe
cccatgctggagacgcttaagaccc

SEQ ID NO: 258673 - DNA, 25 bp, Artificial
  Probe
agtctgatgcccatgctggagacgc

SEQ ID NO: 258674 - DNA, 25 bp, Artificial
  Probe
ccgttagtcagctgcaggaacggct

SEQ ID NO: 258675 - DNA, 25 bp, Artificial
  Probe
taagacccaagtccagagtgtgatc

SEQ ID NO: 258676 - DNA, 25 bp, Artificial
  Probe
cgttagtcagctgcaggaacggctg

SEQ ID NO: 258677 - DNA, 25 bp, Artificial
  Probe
gactgtcccctgtggctgaggaatt

SEQ ID NO: 258678 - DNA, 25 bp, Artificial
  Probe
cctgtggctgaggaatttcgcgacc

SEQ ID NO: 258679 - DNA, 25 bp, Artificial
  Probe
ctacctggacgaattccagaagaaa

SEQ ID NO: 258680 - DNA, 25 bp, Artificial
  Probe
gagacgcttaagacccaagtccaga

SEQ ID NO: 258681 - DNA, 25 bp, Artificial
  Probe
tgctggagacgcttaagacccaagt

SEQ ID NO: 258682 - DNA, 25 bp, Artificial
  Probe
gggccaaaacccacctgaagacact

SEQ ID NO: 258683 - DNA, 25 bp, Artificial
  Probe
cgcttaagacccaagtccagagtgt

SEQ ID NO: 258684 - DNA, 25 bp, Artificial
  Probe
gtcccctgtggctgaggaatttcgc

SEQ ID NO: 258685 - DNA, 25 bp, Artificial
  Probe
accgtatgcccgtggacctggttga

SEQ ID NO: 258686 - DNA, 25 bp, Artificial
  Probe
aaatgtcgtgccttttaaagtcgat

SEQ ID NO: 258687 - DNA, 25 bp, Artificial
  Probe
caacccacgctgctgttagtagttt

SEQ ID NO: 258688 - DNA, 25 bp, Artificial
  Probe
cgatgtcctgggaccgtatgcccgt

SEQ ID NO: 258689 - DNA, 25 bp, Artificial
  Probe
ggtcttacagggtctgaagtgcgcc

SEQ ID NO: 258690 - DNA, 25 bp, Artificial
  Probe
tcttacagggtctgaagtgcgcccg

SEQ ID NO: 258691 - DNA, 25 bp, Artificial
  Probe
aacctccggaaacttagatcttcag

SEQ ID NO: 258692 - DNA, 25 bp, Artificial
  Probe
ccggaaacttagatcttcagtctcc

SEQ ID NO: 258693 - DNA, 25 bp, Artificial
  Probe
cttacagggtctgaagtgcgcccgc

SEQ ID NO: 258694 - DNA, 25 bp, Artificial
  Probe
ggaaggtccctcagacatccccgat

SEQ ID NO: 258695 - DNA, 25 bp, Artificial
  Probe
agatcttcagtctccgaaggtctta

SEQ ID NO: 258696 - DNA, 25 bp, Artificial
  Probe
atgcccgcatagatgccgcggaagg

SEQ ID NO: 258697 - DNA, 25 bp, Artificial
  Probe
tccgaaggtcttacagggtctgaag

SEQ ID NO: 258698 - DNA, 25 bp, Artificial
  Probe
agccatgcccgcatagatgccgcgg

SEQ ID NO: 258699 - DNA, 25 bp, Artificial
  Probe
gtcctgggaccgtatgcccgtggac

SEQ ID NO: 258700 - DNA, 25 bp, Artificial
  Probe
ggtccctcagacatccccgattgaa

SEQ ID NO: 258701 - DNA, 25 bp, Artificial
  Probe
tgcccgcatagatgccgcggaaggt

SEQ ID NO: 258702 - DNA, 25 bp, Artificial
  Probe
tgccgcggaaggtccctcagacatc

SEQ ID NO: 258703 - DNA, 25 bp, Artificial
  Probe
atcgtgatgttgtgacggtacctgc

SEQ ID NO: 258704 - DNA, 25 bp, Artificial
  Probe
ggccatcgtgatgttgtgacggtac

SEQ ID NO: 258705 - DNA, 25 bp, Artificial
  Probe
cagacatccccgattgaaagatcca

SEQ ID NO: 258706 - DNA, 25 bp, Artificial
  Probe
atgccgcggaaggtccctcagacat

SEQ ID NO: 258707 - DNA, 25 bp, Artificial
  Probe
gtgccttttaaagtcgatctatccc

SEQ ID NO: 258708 - DNA, 25 bp, Artificial
  Probe
ccatcgtgatgttgtgacggtacct

SEQ ID NO: 258709 - DNA, 25 bp, Artificial
  Probe
cttcagtctccgaaggtcttacagg

SEQ ID NO: 258710 - DNA, 25 bp, Artificial
  Probe
atccagagcggctttgagaaacctc

SEQ ID NO: 258711 - DNA, 25 bp, Artificial
  Probe
cgaaggtcttacagggtctgaagtg

SEQ ID NO: 258712 - DNA, 25 bp, Artificial
  Probe
cccagtaccgtaaattccagtatag

SEQ ID NO: 258713 - DNA, 25 bp, Artificial
  Probe
tcgtgccttttaaagtcgatctatc

SEQ ID NO: 258714 - DNA, 25 bp, Artificial
  Probe
ccccgattgaaagatccagagcggc

SEQ ID NO: 258715 - DNA, 25 bp, Artificial
  Probe
tagatgccgcggaaggtccctcaga

SEQ ID NO: 258716 - DNA, 25 bp, Artificial
  Probe
aacttagatcttcagtctccgaagg

SEQ ID NO: 258717 - DNA, 25 bp, Artificial
  Probe
tgaaagatccagagcggctttgaga

SEQ ID NO: 258718 - DNA, 25 bp, Artificial
  Probe
ccagagcggctttgagaaacctccg

SEQ ID NO: 258719 - DNA, 25 bp, Artificial
  Probe
gaaacttagatcttcagtctccgaa

SEQ ID NO: 258720 - DNA, 25 bp, Artificial
  Probe
ccgtatgcccgtggacctggttgag

SEQ ID NO: 258721 - DNA, 25 bp, Artificial
  Probe
tgcgcgatgtcctgggaccgtatgc

SEQ ID NO: 258722 - DNA, 25 bp, Artificial
  Probe
ccatgcccgcatagatgccgcggaa

SEQ ID NO: 258723 - DNA, 25 bp, Artificial
  Probe
catccccgattgaaagatccagagc

SEQ ID NO: 258724 - DNA, 25 bp, Artificial
  Probe
cctgggaccgtatgcccgtggacct

SEQ ID NO: 258725 - DNA, 25 bp, Artificial
  Probe
cacaacccacgctgctgttagtagt

SEQ ID NO: 258726 - DNA, 25 bp, Artificial
  Probe
tccagagcggctttgagaaacctcc

SEQ ID NO: 258727 - DNA, 25 bp, Artificial
  Probe
tcagtctccgaaggtcttacagggt

SEQ ID NO: 258728 - DNA, 25 bp, Artificial
  Probe
cgtgcgcgatgtcctgggaccgtat

SEQ ID NO: 258729 - DNA, 25 bp, Artificial
  Probe
taccgtaaattccagtatagcattg

SEQ ID NO: 258730 - DNA, 25 bp, Artificial
  Probe
attgaaagatccagagcggctttga

SEQ ID NO: 258731 - DNA, 25 bp, Artificial
  Probe
gccacagattgatcatctgccttaa

SEQ ID NO: 258732 - DNA, 25 bp, Artificial
  Probe
cgtgatcggagatgctttgtaatct

SEQ ID NO: 258733 - DNA, 25 bp, Artificial
  Probe
ttttatgtacctttgggttcaggca

SEQ ID NO: 258734 - DNA, 25 bp, Artificial
  Probe
tgatcggagatgctttgtaatctac

SEQ ID NO: 258735 - DNA, 25 bp, Artificial
  Probe
gtacctttgggttcaggcattattt

SEQ ID NO: 258736 - DNA, 25 bp, Artificial
  Probe
aaattgttgcacaagttcaacgatg

SEQ ID NO: 258737 - DNA, 25 bp, Artificial
  Probe
tggtcccctaaattgttgcacaagt

SEQ ID NO: 258738 - DNA, 25 bp, Artificial
  Probe
gccttaacgtgatcggagatgcttt

SEQ ID NO: 258739 - DNA, 25 bp, Artificial
  Probe
taatctactgtccagctgaaagcac

SEQ ID NO: 258740 - DNA, 25 bp, Artificial
  Probe
ctgtccagctgaaagcactcatgtt

SEQ ID NO: 258741 - DNA, 25 bp, Artificial
  Probe
catcagtgacagagggccagcagaa

SEQ ID NO: 258742 - DNA, 25 bp, Artificial
  Probe
ttcccaggaggagttacagatgcag

SEQ ID NO: 258743 - DNA, 25 bp, Artificial
  Probe
gccaactaaccaaacaactgggaag

SEQ ID NO: 258744 - DNA, 25 bp, Artificial
  Probe
acagattgatcatctgccttaacgt

SEQ ID NO: 258745 - DNA, 25 bp, Artificial
  Probe
tgggccaactaaccaaacaactggg

SEQ ID NO: 258746 - DNA, 25 bp, Artificial
  Probe
tttatgtacctttgggttcaggcat

SEQ ID NO: 258747 - DNA, 25 bp, Artificial
  Probe
acaggattattttcccaggaggagt

SEQ ID NO: 258748 - DNA, 25 bp, Artificial
  Probe
gtcccctaaattgttgcacaagttc

SEQ ID NO: 258749 - DNA, 25 bp, Artificial
  Probe
acgtgatcggagatgctttgtaatc

SEQ ID NO: 258750 - DNA, 25 bp, Artificial
  Probe
cctaaattgttgcacaagttcaacg

SEQ ID NO: 258751 - DNA, 25 bp, Artificial
  Probe
ctactgtccagctgaaagcactcat

SEQ ID NO: 258752 - DNA, 25 bp, Artificial
  Probe
aagcaatacgtggtcccctaaattg

SEQ ID NO: 258753 - DNA, 25 bp, Artificial
  Probe
cacagattgatcatctgccttaacg

SEQ ID NO: 258754 - DNA, 25 bp, Artificial
  Probe
ttgttgcacaagttcaacgatgtgg

SEQ ID NO: 258755 - DNA, 25 bp, Artificial
  Probe
gttgcacaagttcaacgatgtggtg

SEQ ID NO: 258756 - DNA, 25 bp, Artificial
  Probe
gctccgtatcagcatcagtgacaga

SEQ ID NO: 258757 - DNA, 25 bp, Artificial
  Probe
agattgatcatctgccttaacgtga

SEQ ID NO: 258758 - DNA, 25 bp, Artificial
  Probe
cggcacgagggtgatgatgcctcaa

SEQ ID NO: 258759 - DNA, 25 bp, Artificial
  Probe
tacgtggtcccctaaattgttgcac

SEQ ID NO: 258760 - DNA, 25 bp, Artificial
  Probe
ctcatgttacgaggaagaaactaca

SEQ ID NO: 258761 - DNA, 25 bp, Artificial
  Probe
tcatctgccttaacgtgatcggaga

SEQ ID NO: 258762 - DNA, 25 bp, Artificial
  Probe
gagttacagatgcagccacagattg

SEQ ID NO: 258763 - DNA, 25 bp, Artificial
  Probe
tgtaatctactgtccagctgaaagc

SEQ ID NO: 258764 - DNA, 25 bp, Artificial
  Probe
attgttgcacaagttcaacgatgtg

SEQ ID NO: 258765 - DNA, 25 bp, Artificial
  Probe
tgtacctttgggttcaggcattatt

SEQ ID NO: 258766 - DNA, 25 bp, Artificial
  Probe
cctgggccaactaaccaaacaactg

SEQ ID NO: 258767 - DNA, 25 bp, Artificial
  Probe
gccagggctccgtatcagcatcagt

SEQ ID NO: 258768 - DNA, 25 bp, Artificial
  Probe
gattattttcccaggaggagttaca

SEQ ID NO: 258769 - DNA, 25 bp, Artificial
  Probe
ccaacaggattattttcccaggagg

SEQ ID NO: 258770 - DNA, 25 bp, Artificial
  Probe
ctttgtaatctactgtccagctgaa

SEQ ID NO: 258771 - DNA, 25 bp, Artificial
  Probe
ctgccttaacgtgatcggagatgct

SEQ ID NO: 258772 - DNA, 25 bp, Artificial
  Probe
agttacagatgcagccacagattga

SEQ ID NO: 258773 - DNA, 25 bp, Artificial
  Probe
agatgctttgtaatctactgtccag

SEQ ID NO: 258774 - DNA, 25 bp, Artificial
  Probe
gtccagctgaaagcactcatgttac

SEQ ID NO: 258775 - DNA, 25 bp, Artificial
  Probe
acagatgcagccacagattgatcat

SEQ ID NO: 258776 - DNA, 25 bp, Artificial
  Probe
tgatcatctgccttaacgtgatcgg

SEQ ID NO: 258777 - DNA, 25 bp, Artificial
  Probe
attcataggtcaagtaatggcccac

SEQ ID NO: 258778 - DNA, 25 bp, Artificial
  Probe
taatggcccacaagcaccaaggttc

SEQ ID NO: 258779 - DNA, 25 bp, Artificial
  Probe
agtaatggcccacaagcaccaaggt

SEQ ID NO: 258780 - DNA, 25 bp, Artificial
  Probe
tgctcttcaaggaatattgcttttt

SEQ ID NO: 258781 - DNA, 25 bp, Artificial
  Probe
gtaatggcccacaagcaccaaggtt

SEQ ID NO: 258782 - DNA, 25 bp, Artificial
  Probe
tggcccacaagcaccaaggttcatt

SEQ ID NO: 258783 - DNA, 25 bp, Artificial
  Probe
aagtaatggcccacaagcaccaagg

SEQ ID NO: 258784 - DNA, 25 bp, Artificial
  Probe
gctcttcaaggaatattgctttttt

SEQ ID NO: 258785 - DNA, 25 bp, Artificial
  Probe
ctccttgctcttcaaggaatattgc

SEQ ID NO: 258786 - DNA, 25 bp, Artificial
  Probe
aaggagcggtggccatcactcaagc

SEQ ID NO: 258787 - DNA, 25 bp, Artificial
  Probe
gcaccaaggttcattttagagtata

SEQ ID NO: 258788 - DNA, 25 bp, Artificial
  Probe
cggtggccatcactcaagcgatctt

SEQ ID NO: 258789 - DNA, 25 bp, Artificial
  Probe
cggcacgagggagggagggaaggag

SEQ ID NO: 258790 - DNA, 25 bp, Artificial
  Probe
tccttgctcttcaaggaatattgct

SEQ ID NO: 258791 - DNA, 25 bp, Artificial
  Probe
agcggtggccatcactcaagcgatc

SEQ ID NO: 258792 - DNA, 25 bp, Artificial
  Probe
caccaaggttcattttagagtatat

SEQ ID NO: 258793 - DNA, 25 bp, Artificial
  Probe
gtggccatcactcaagcgatcttta

SEQ ID NO: 258794 - DNA, 25 bp, Artificial
  Probe
gcccacaagcaccaaggttcatttt

SEQ ID NO: 258795 - DNA, 25 bp, Artificial
  Probe
cacaagcaccaaggttcattttaga

SEQ ID NO: 258796 - DNA, 25 bp, Artificial
  Probe
tgccttaaagattcataggtcaagt

SEQ ID NO: 258797 - DNA, 25 bp, Artificial
  Probe
cttgctcttcaaggaatattgcttt

SEQ ID NO: 258798 - DNA, 25 bp, Artificial
  Probe
ccacaagcaccaaggttcattttag

SEQ ID NO: 258799 - DNA, 25 bp, Artificial
  Probe
caagcaccaaggttcattttagagt

SEQ ID NO: 258800 - DNA, 25 bp, Artificial
  Probe
actgattgtgccttaaagattcata

SEQ ID NO: 258801 - DNA, 25 bp, Artificial
  Probe
ggcccacaagcaccaaggttcattt

SEQ ID NO: 258802 - DNA, 25 bp, Artificial
  Probe
ggccatcactcaagcgatctttata

SEQ ID NO: 258803 - DNA, 25 bp, Artificial
  Probe
ttgctcttcaaggaatattgctttt

SEQ ID NO: 258804 - DNA, 25 bp, Artificial
  Probe
agcaccaaggttcattttagagtat

SEQ ID NO: 258805 - DNA, 25 bp, Artificial
  Probe
tgtgccttaaagattcataggtcaa

SEQ ID NO: 258806 - DNA, 25 bp, Artificial
  Probe
gtgccttaaagattcataggtcaag

SEQ ID NO: 258807 - DNA, 25 bp, Artificial
  Probe
ccttgctcttcaaggaatattgctt

SEQ ID NO: 258808 - DNA, 25 bp, Artificial
  Probe
atggcccacaagcaccaaggttcat

SEQ ID NO: 258809 - DNA, 25 bp, Artificial
  Probe
aagcaccaaggttcattttagagta

SEQ ID NO: 258810 - DNA, 25 bp, Artificial
  Probe
gcggtggccatcactcaagcgatct

SEQ ID NO: 258811 - DNA, 25 bp, Artificial
  Probe
ttgtgccttaaagattcataggtca

SEQ ID NO: 258812 - DNA, 25 bp, Artificial
  Probe
attgtgccttaaagattcataggtc

SEQ ID NO: 258813 - DNA, 25 bp, Artificial
  Probe
acaagcaccaaggttcattttagag

SEQ ID NO: 258814 - DNA, 25 bp, Artificial
  Probe
ctgattgtgccttaaagattcatag

SEQ ID NO: 258815 - DNA, 25 bp, Artificial
  Probe
ctcaagcgatctttatatgtaaaag

SEQ ID NO: 258816 - DNA, 25 bp, Artificial
  Probe
ctcttcaaggaatattgcttttttt

SEQ ID NO: 258817 - DNA, 25 bp, Artificial
  Probe
tacaccattcattgataaaaaaaaa

SEQ ID NO: 258818 - DNA, 25 bp, Artificial
  Probe
cctccttgctcttcaaggaatattg

SEQ ID NO: 258819 - DNA, 25 bp, Artificial
  Probe
ggtggccatcactcaagcgatcttt

SEQ ID NO: 258820 - DNA, 25 bp, Artificial
  Probe
aatggcccacaagcaccaaggttca

SEQ ID NO: 258821 - DNA, 25 bp, Artificial
  Probe
tggccatcactcaagcgatctttat

SEQ ID NO: 258822 - DNA, 25 bp, Artificial
  Probe
gagcggtggccatcactcaagcgat

SEQ ID NO: 258823 - DNA, 25 bp, Artificial
  Probe
gataacctaggcatactgcactgta

SEQ ID NO: 258824 - DNA, 25 bp, Artificial
  Probe
tagagcagcactaaatgacaccact

SEQ ID NO: 258825 - DNA, 25 bp, Artificial
  Probe
ggcatactgcactgtacactctgac

SEQ ID NO: 258826 - DNA, 25 bp, Artificial
  Probe
ctgccagcattatgaaagtgaatct

SEQ ID NO: 258827 - DNA, 25 bp, Artificial
  Probe
ctttcacaataaagagctttaggat

SEQ ID NO: 258828 - DNA, 25 bp, Artificial
  Probe
tttgcaggaaatgctggcatagagc

SEQ ID NO: 258829 - DNA, 25 bp, Artificial
  Probe
atgacaccactaaagaaacgatcag

SEQ ID NO: 258830 - DNA, 25 bp, Artificial
  Probe
tactttcacaataaagagctttagg

SEQ ID NO: 258831 - DNA, 25 bp, Artificial
  Probe
tatatcactagtaggcagaccagca

SEQ ID NO: 258832 - DNA, 25 bp, Artificial
  Probe
gaaatgctggcatagagcagcacta

SEQ ID NO: 258833 - DNA, 25 bp, Artificial
  Probe
ttttatatcactagtaggcagacca

SEQ ID NO: 258834 - DNA, 25 bp, Artificial
  Probe
acatatgaagtgctctagtcaagtt

SEQ ID NO: 258835 - DNA, 25 bp, Artificial
  Probe
tcaagtttaactggtgtccacagag

SEQ ID NO: 258836 - DNA, 25 bp, Artificial
  Probe
tggaattcgtcaagcctctggttct

SEQ ID NO: 258837 - DNA, 25 bp, Artificial
  Probe
gcagcactaaatgacaccactaaag

SEQ ID NO: 258838 - DNA, 25 bp, Artificial
  Probe
tctgccagcattatgaaagtgaatc

SEQ ID NO: 258839 - DNA, 25 bp, Artificial
  Probe
catatgaagtgctctagtcaagttt

SEQ ID NO: 258840 - DNA, 25 bp, Artificial
  Probe
gcctctggttctaatttctcatttg

SEQ ID NO: 258841 - DNA, 25 bp, Artificial
  Probe
actctgacatatgaagtgctctagt

SEQ ID NO: 258842 - DNA, 25 bp, Artificial
  Probe
agtaggcagaccagcagactttttt

SEQ ID NO: 258843 - DNA, 25 bp, Artificial
  Probe
tctggttctaatttctcatttgcag

SEQ ID NO: 258844 - DNA, 25 bp, Artificial
  Probe
ctcatacttaactggttggttgtgt

SEQ ID NO: 258845 - DNA, 25 bp, Artificial
  Probe
gaaacgatcagacagatctggaatg

SEQ ID NO: 258846 - DNA, 25 bp, Artificial
  Probe
caccactaaagaaacgatcagacag

SEQ ID NO: 258847 - DNA, 25 bp, Artificial
  Probe
catttgcaggaaatgctggcataga

SEQ ID NO: 258848 - DNA, 25 bp, Artificial
  Probe
gacaccactaaagaaacgatcagac

SEQ ID NO: 258849 - DNA, 25 bp, Artificial
  Probe
actgcactgtacactctgacatatg

SEQ ID NO: 258850 - DNA, 25 bp, Artificial
  Probe
tcactagtaggcagaccagcagact

SEQ ID NO: 258851 - DNA, 25 bp, Artificial
  Probe
gttctaatttctcatttgcaggaaa

SEQ ID NO: 258852 - DNA, 25 bp, Artificial
  Probe
atatgggataacctaggcatactgc

SEQ ID NO: 258853 - DNA, 25 bp, Artificial
  Probe
tatgggataacctaggcatactgca

SEQ ID NO: 258854 - DNA, 25 bp, Artificial
  Probe
tccacagaggacatggtttaactgg

SEQ ID NO: 258855 - DNA, 25 bp, Artificial
  Probe
atttctcatttgcaggaaatgctgg

SEQ ID NO: 258856 - DNA, 25 bp, Artificial
  Probe
agtaagtctgccagcattatgaaag

SEQ ID NO: 258857 - DNA, 25 bp, Artificial
  Probe
gtcaagcctctggttctaatttctc

SEQ ID NO: 258858 - DNA, 25 bp, Artificial
  Probe
tagaattctcatacttaactggttg

SEQ ID NO: 258859 - DNA, 25 bp, Artificial
  Probe
ctggcatagagcagcactaaatgac

SEQ ID NO: 258860 - DNA, 25 bp, Artificial
  Probe
agtctgccagcattatgaaagtgaa

SEQ ID NO: 258861 - DNA, 25 bp, Artificial
  Probe
gcatagagcagcactaaatgacacc

SEQ ID NO: 258862 - DNA, 25 bp, Artificial
  Probe
catagagcagcactaaatgacacca

SEQ ID NO: 258863 - DNA, 25 bp, Artificial
  Probe
ttgcaggaaatgctggcatagagca

SEQ ID NO: 258864 - DNA, 25 bp, Artificial
  Probe
ttaaggagtaagtctgccagcatta

SEQ ID NO: 258865 - DNA, 25 bp, Artificial
  Probe
ggtttaactggaattcgtcaagcct

SEQ ID NO: 258866 - DNA, 25 bp, Artificial
  Probe
tagtcaagtttaactggtgtccaca

SEQ ID NO: 258867 - DNA, 25 bp, Artificial
  Probe
atgaagtgctctagtcaagtttaac

SEQ ID NO: 258868 - DNA, 25 bp, Artificial
  Probe
attcgtcaagcctctggttctaatt

SEQ ID NO: 258869 - DNA, 25 bp, Artificial
  Probe
gtcccagcaagagtgaagaacaaga

SEQ ID NO: 258870 - DNA, 25 bp, Artificial
  Probe
gccccagtgaaatcgcccgaagagg

SEQ ID NO: 258871 - DNA, 25 bp, Artificial
  Probe
ggcagagctctccatccaaatcatc

SEQ ID NO: 258872 - DNA, 25 bp, Artificial
  Probe
atcagcttcccacgtcagtgatccg

SEQ ID NO: 258873 - DNA, 25 bp, Artificial
  Probe
taatataagtccacaagacggtagc

SEQ ID NO: 258874 - DNA, 25 bp, Artificial
  Probe
atccatttggggagcccagtggtga

SEQ ID NO: 258875 - DNA, 25 bp, Artificial
  Probe
cagtgatccatttggggagcccagt

SEQ ID NO: 258876 - DNA, 25 bp, Artificial
  Probe
gactgacatgggaatccacagtgca

SEQ ID NO: 258877 - DNA, 25 bp, Artificial
  Probe
ttgacccctgtgacttgtaccacac

SEQ ID NO: 258878 - DNA, 25 bp, Artificial
  Probe
agagcctctctatgcgcagatcaac

SEQ ID NO: 258879 - DNA, 25 bp, Artificial
  Probe
tgggtgcttcatgactgacatggga

SEQ ID NO: 258880 - DNA, 25 bp, Artificial
  Probe
atacagacgactgtgatgactttga

SEQ ID NO: 258881 - DNA, 25 bp, Artificial
  Probe
gatcaacagacctaagaaatagcat

SEQ ID NO: 258882 - DNA, 25 bp, Artificial
  Probe
aacaggctctcttgggctctcactt

SEQ ID NO: 258883 - DNA, 25 bp, Artificial
  Probe
tcagcttcccacgtcagtgatccga

SEQ ID NO: 258884 - DNA, 25 bp, Artificial
  Probe
aggctttgaaagtcccagcaagagt

SEQ ID NO: 258885 - DNA, 25 bp, Artificial
  Probe
tctgggagccagagcctctctatgc

SEQ ID NO: 258886 - DNA, 25 bp, Artificial
  Probe
aaatcatcagcttcccacgtcagtg

SEQ ID NO: 258887 - DNA, 25 bp, Artificial
  Probe
ctctctatgcgcagatcaacagacc

SEQ ID NO: 258888 - DNA, 25 bp, Artificial
  Probe
gtcagtgatccgaccgcagatgaca

SEQ ID NO: 258889 - DNA, 25 bp, Artificial
  Probe
cagttacttcaacaaagtcggggtg

SEQ ID NO: 258890 - DNA, 25 bp, Artificial
  Probe
aaggctttgaaagtcccagcaagag

SEQ ID NO: 258891 - DNA, 25 bp, Artificial
  Probe
ctccaccagtgatccatttggggag

SEQ ID NO: 258892 - DNA, 25 bp, Artificial
  Probe
ccacagtgcaacaggctctcttggg

SEQ ID NO: 258893 - DNA, 25 bp, Artificial
  Probe
gatgactttgacatctcccaattga

SEQ ID NO: 258894 - DNA, 25 bp, Artificial
  Probe
ccacgtcagtgatccgaccgcagat

SEQ ID NO: 258895 - DNA, 25 bp, Artificial
  Probe
aatcgccccagtgaaatcgcccgaa

SEQ ID NO: 258896 - DNA, 25 bp, Artificial
  Probe
gaacttgacccctgtgacttgtacc

SEQ ID NO: 258897 - DNA, 25 bp, Artificial
  Probe
gcaaccaatggcagatacctatggc

SEQ ID NO: 258898 - DNA, 25 bp, Artificial
  Probe
aagacggtagctagatagcgcaggt

SEQ ID NO: 258899 - DNA, 25 bp, Artificial
  Probe
ctagatagcgcaggtctgggagcca

SEQ ID NO: 258900 - DNA, 25 bp, Artificial
  Probe
aatcgcccgaagagggaacagagtg

SEQ ID NO: 258901 - DNA, 25 bp, Artificial
  Probe
gcacaggatacagacgactgtgatg

SEQ ID NO: 258902 - DNA, 25 bp, Artificial
  Probe
tgaaatcgcccgaagagggaacaga

SEQ ID NO: 258903 - DNA, 25 bp, Artificial
  Probe
actgtgatgactttgacatctccca

SEQ ID NO: 258904 - DNA, 25 bp, Artificial
  Probe
ctcccaattgaacttgacccctgtg

SEQ ID NO: 258905 - DNA, 25 bp, Artificial
  Probe
caattgaacttgacccctgtgactt

SEQ ID NO: 258906 - DNA, 25 bp, Artificial
  Probe
gaaatagcatcaatgcgagctcatg

SEQ ID NO: 258907 - DNA, 25 bp, Artificial
  Probe
cagatgacatctttgaagaaggctt

SEQ ID NO: 258908 - DNA, 25 bp, Artificial
  Probe
gttttttggcaaccaatggcagata

SEQ ID NO: 258909 - DNA, 25 bp, Artificial
  Probe
ggtctgggagccagagcctctctat

SEQ ID NO: 258910 - DNA, 25 bp, Artificial
  Probe
cctaggcagagctctccatccaaat

SEQ ID NO: 258911 - DNA, 25 bp, Artificial
  Probe
cgactgtgatgactttgacatctcc

SEQ ID NO: 258912 - DNA, 25 bp, Artificial
  Probe
gcatcaatgcgagctcatggtgggt

SEQ ID NO: 258913 - DNA, 25 bp, Artificial
  Probe
agcatcaatgcgagctcatggtggg

SEQ ID NO: 258914 - DNA, 25 bp, Artificial
  Probe
tgatccgaccgcagatgacatcttt

SEQ ID NO: 258915 - DNA, 25 bp, Artificial
  Probe
ccgactgggataggttcgctgcagc

SEQ ID NO: 258916 - DNA, 25 bp, Artificial
  Probe
acgcaactgaggactacctcctcgg

SEQ ID NO: 258917 - DNA, 25 bp, Artificial
  Probe
catgacatcctgtgaccccacgtga

SEQ ID NO: 258918 - DNA, 25 bp, Artificial
  Probe
taggttcgctgcagcggagtacgac

SEQ ID NO: 258919 - DNA, 25 bp, Artificial
  Probe
cggtgagttcaatcgactgaggaca

SEQ ID NO: 258920 - DNA, 25 bp, Artificial
  Probe
ggagtacgacttcctgcttgctgag

SEQ ID NO: 258921 - DNA, 25 bp, Artificial
  Probe
tcacacaggatcacgcaactgagga

SEQ ID NO: 258922 - DNA, 25 bp, Artificial
  Probe
cgagttctttgatgcctttttcaat

SEQ ID NO: 258923 - DNA, 25 bp, Artificial
  Probe
ctgcccggggtcacacaggatcacg

SEQ ID NO: 258924 - DNA, 25 bp, Artificial
  Probe
ctacgacttcgcagatgacacccta

SEQ ID NO: 258925 - DNA, 25 bp, Artificial
  Probe
ttgatgcctttttcaatgctgacaa

SEQ ID NO: 258926 - DNA, 25 bp, Artificial
  Probe
gaaccgtcgtctgtaatttttgaat

SEQ ID NO: 258927 - DNA, 25 bp, Artificial
  Probe
tgcgcagaaccgtcgtctgtaattt

SEQ ID NO: 258928 - DNA, 25 bp, Artificial
  Probe
cacgctgggcgacctgaagcgctgc

SEQ ID NO: 258929 - DNA, 25 bp, Artificial
  Probe
cctgcttgctgaggaggcacaggat

SEQ ID NO: 258930 - DNA, 25 bp, Artificial
  Probe
ttcgcagatgacaccctagatccgc

SEQ ID NO: 258931 - DNA, 25 bp, Artificial
  Probe
atcacgcaactgaggactacctcct

SEQ ID NO: 258932 - DNA, 25 bp, Artificial
  Probe
aattcctggagcacgaacggcggga

SEQ ID NO: 258933 - DNA, 25 bp, Artificial
  Probe
gaggacaacctcgacactcccatga

SEQ ID NO: 258934 - DNA, 25 bp, Artificial
  Probe
tctttgatgcctttttcaatgctga

SEQ ID NO: 258935 - DNA, 25 bp, Artificial
  Probe
gcaactgaggactacctcctcggcg

SEQ ID NO: 258936 - DNA, 25 bp, Artificial
  Probe
actgaggactacctcctcggcggcg

SEQ ID NO: 258937 - DNA, 25 bp, Artificial
  Probe
acttcctgcttgctgaggaggcaca

SEQ ID NO: 258938 - DNA, 25 bp, Artificial
  Probe
gcgggcgagttctttgatgcctttt

SEQ ID NO: 258939 - DNA, 25 bp, Artificial
  Probe
ataggttcgctgcagcggagtacga

SEQ ID NO: 258940 - DNA, 25 bp, Artificial
  Probe
tgcagcggagtacgacttcctgctt

SEQ ID NO: 258941 - DNA, 25 bp, Artificial
  Probe
tcgtgggacatactgtgcaccctgc

SEQ ID NO: 258942 - DNA, 25 bp, Artificial
  Probe
acgacttcctgcttgctgaggaggc

SEQ ID NO: 258943 - DNA, 25 bp, Artificial
  Probe
ccactgtgcgcagaaccgtcgtctg

SEQ ID NO: 258944 - DNA, 25 bp, Artificial
  Probe
atgacatcctgtgaccccacgtgac

SEQ ID NO: 258945 - DNA, 25 bp, Artificial
  Probe
tctccgactgggataggttcgctgc

SEQ ID NO: 258946 - DNA, 25 bp, Artificial
  Probe
tcgactgaggacaacctcgacactc

SEQ ID NO: 258947 - DNA, 25 bp, Artificial
  Probe
actgtgcgcagaaccgtcgtctgta

SEQ ID NO: 258948 - DNA, 25 bp, Artificial
  Probe
agcggagtacgacttcctgcttgct

SEQ ID NO: 258949 - DNA, 25 bp, Artificial
  Probe
tcgctgcagcggagtacgacttcct

SEQ ID NO: 258950 - DNA, 25 bp, Artificial
  Probe
atccctacgacttcgcagatgacac

SEQ ID NO: 258951 - DNA, 25 bp, Artificial
  Probe
cctagatccgctgtgacgtgcgtgg

SEQ ID NO: 258952 - DNA, 25 bp, Artificial
  Probe
ccggatccctacgacttcgcagatg

SEQ ID NO: 258953 - DNA, 25 bp, Artificial
  Probe
tgacaccctagatccgctgtgacgt

SEQ ID NO: 258954 - DNA, 25 bp, Artificial
  Probe
cagatgacaccctagatccgctgtg

SEQ ID NO: 258955 - DNA, 25 bp, Artificial
  Probe
ccctagatccgctgtgacgtgcgtg

SEQ ID NO: 258956 - DNA, 25 bp, Artificial
  Probe
cagggtcgtgggacatactgtgcac

SEQ ID NO: 258957 - DNA, 25 bp, Artificial
  Probe
ggatcacgcaactgaggactacctc

SEQ ID NO: 258958 - DNA, 25 bp, Artificial
  Probe
tttttcaatgctgacaaattcctgg

SEQ ID NO: 258959 - DNA, 25 bp, Artificial
  Probe
tgaggacaacctcgacactcccatg

SEQ ID NO: 258960 - DNA, 25 bp, Artificial
  Probe
acaggatcacgcaactgaggactac

SEQ ID NO: 258961 - DNA, 25 bp, Artificial
  Probe
gcgctgctcactgctcaataaactc

SEQ ID NO: 258962 - DNA, 25 bp, Artificial
  Probe
ctgagcacacagtgtgaatgggaag

SEQ ID NO: 258963 - DNA, 25 bp, Artificial
  Probe
agagagatctgaagcccacagcgat

SEQ ID NO: 258964 - DNA, 25 bp, Artificial
  Probe
actgctgagcggtccaggaccagtt

SEQ ID NO: 258965 - DNA, 25 bp, Artificial
  Probe
accgtagcgctgctcactgctcaat

SEQ ID NO: 258966 - DNA, 25 bp, Artificial
  Probe
tcatgtactgcgagtacagtaaagt

SEQ ID NO: 258967 - DNA, 25 bp, Artificial
  Probe
tgtccaattctagtctatgaaattg

SEQ ID NO: 258968 - DNA, 25 bp, Artificial
  Probe
gaaacactgatcaggaaataccatc

SEQ ID NO: 258969 - DNA, 25 bp, Artificial
  Probe
tctcttcctccctggatatgactgg

SEQ ID NO: 258970 - DNA, 25 bp, Artificial
  Probe
cttctgaaagtacaagcatgcagac

SEQ ID NO: 258971 - DNA, 25 bp, Artificial
  Probe
tgcaggaaacactgatcaggaaata

SEQ ID NO: 258972 - DNA, 25 bp, Artificial
  Probe
cttcatgcagtttcccagcctgtgc

SEQ ID NO: 258973 - DNA, 25 bp, Artificial
  Probe
taaagtttctcctaccgttctggtg

SEQ ID NO: 258974 - DNA, 25 bp, Artificial
  Probe
tgcagactgctgagcggtccaggac

SEQ ID NO: 258975 - DNA, 25 bp, Artificial
  Probe
agatcttcaggtaccggcggtcatc

SEQ ID NO: 258976 - DNA, 25 bp, Artificial
  Probe
gactggcaccgtagcgctgctcact

SEQ ID NO: 258977 - DNA, 25 bp, Artificial
  Probe
tctaaagtttctcctaccgttctgg

SEQ ID NO: 258978 - DNA, 25 bp, Artificial
  Probe
agctagcttcccacttcatgtactg

SEQ ID NO: 258979 - DNA, 25 bp, Artificial
  Probe
agagagatcttcaggtaccggcggt

SEQ ID NO: 258980 - DNA, 25 bp, Artificial
  Probe
gtaaagttctgctccaatgtcttat

SEQ ID NO: 258981 - DNA, 25 bp, Artificial
  Probe
actgctcaataaactctctcggcag

SEQ ID NO: 258982 - DNA, 25 bp, Artificial
  Probe
gaatcatgtccaattctagtctatg

SEQ ID NO: 258983 - DNA, 25 bp, Artificial
  Probe
aggaaacactgatcaggaaatacca

SEQ ID NO: 258984 - DNA, 25 bp, Artificial
  Probe
cacagaactgctgctgtctgtgact

SEQ ID NO: 258985 - DNA, 25 bp, Artificial
  Probe
tactgcgagtacagtaaagttctgc

SEQ ID NO: 258986 - DNA, 25 bp, Artificial
  Probe
atgtcttatatgaggcacaactctt

SEQ ID NO: 258987 - DNA, 25 bp, Artificial
  Probe
cctttgttgcgcttgtgtcatagtc

SEQ ID NO: 258988 - DNA, 25 bp, Artificial
  Probe
tacagtaaagttctgctccaatgtc

SEQ ID NO: 258989 - DNA, 25 bp, Artificial
  Probe
ttcctgtgctttcagtgggtaaggg

SEQ ID NO: 258990 - DNA, 25 bp, Artificial
  Probe
gagcggtccaggaccagttaaggaa

SEQ ID NO: 258991 - DNA, 25 bp, Artificial
  Probe
tgactggcaccgtagcgctgctcac

SEQ ID NO: 258992 - DNA, 25 bp, Artificial
  Probe
cacttcatgtactgcgagtacagta

SEQ ID NO: 258993 - DNA, 25 bp, Artificial
  Probe
tctgaagcccacagcgattcttctg

SEQ ID NO: 258994 - DNA, 25 bp, Artificial
  Probe
aggtaccggcggtcatcacagaact

SEQ ID NO: 258995 - DNA, 25 bp, Artificial
  Probe
gatctgaagcccacagcgattcttc

SEQ ID NO: 258996 - DNA, 25 bp, Artificial
  Probe
gatggcctttgttgcgcttgtgtca

SEQ ID NO: 258997 - DNA, 25 bp, Artificial
  Probe
cctggatatgactggcaccgtagcg

SEQ ID NO: 258998 - DNA, 25 bp, Artificial
  Probe
aaagtacaagcatgcagactgctga

SEQ ID NO: 258999 - DNA, 25 bp, Artificial
  Probe
gaaagatggcctttgttgcgcttgt

SEQ ID NO: 259000 - DNA, 25 bp, Artificial
  Probe
tgctgtctgtgactactgtaaaaaa

SEQ ID NO: 259001 - DNA, 25 bp, Artificial
  Probe
tttctcctaccgttctggtgcttca

SEQ ID NO: 259002 - DNA, 25 bp, Artificial
  Probe
gatatgactggcaccgtagcgctgc

SEQ ID NO: 259003 - DNA, 25 bp, Artificial
  Probe
cccacagagggaacagatgtgcagg

SEQ ID NO: 259004 - DNA, 25 bp, Artificial
  Probe
ccccacagagggaacagatgtgcag

SEQ ID NO: 259005 - DNA, 25 bp, Artificial
  Probe
aagcccacagcgattcttctgaaag

SEQ ID NO: 259006 - DNA, 25 bp, Artificial
  Probe
gtccaattctagtctatgaaattgt

SEQ ID NO: 259007 - DNA, 25 bp, Artificial
  Probe
ggcaggaacgataccacagtttagc

SEQ ID NO: 259008 - DNA, 25 bp, Artificial
  Probe
ttagcccccatgtactacaggggtg

SEQ ID NO: 259009 - DNA, 25 bp, Artificial
  Probe
gataccacagtttagcccccatgta

SEQ ID NO: 259010 - DNA, 25 bp, Artificial
  Probe
ctatgactagcagaagtacagccag

SEQ ID NO: 259011 - DNA, 25 bp, Artificial
  Probe
catcgtggtctatgatatcactaat

SEQ ID NO: 259012 - DNA, 25 bp, Artificial
  Probe
aactacagcggcaagccagccctag

SEQ ID NO: 259013 - DNA, 25 bp, Artificial
  Probe
agccccaggccagcaaaatatgcca

SEQ ID NO: 259014 - DNA, 25 bp, Artificial
  Probe
ggaagtcgagcctggtgttacgttt

SEQ ID NO: 259015 - DNA, 25 bp, Artificial
  Probe
gtttgcccgggcaaagacatgggta

SEQ ID NO: 259016 - DNA, 25 bp, Artificial
  Probe
actagcagaagtacagccaggccca

SEQ ID NO: 259017 - DNA, 25 bp, Artificial
  Probe
cccatgtactacaggggtgcccagg

SEQ ID NO: 259018 - DNA, 25 bp, Artificial
  Probe
agtaaggtggcctacagaatcctcc

SEQ ID NO: 259019 - DNA, 25 bp, Artificial
  Probe
tgtgggacctctttttcccaaacag

SEQ ID NO: 259020 - DNA, 25 bp, Artificial
  Probe
gccagcaaaatatgccagttcaaat

SEQ ID NO: 259021 - DNA, 25 bp, Artificial
  Probe
acaggggtgcccaggctgccatcgt

SEQ ID NO: 259022 - DNA, 25 bp, Artificial
  Probe
accttgccaacaagcgcatggtgga

SEQ ID NO: 259023 - DNA, 25 bp, Artificial
  Probe
gcaagccagccctagcatcgtcatt

SEQ ID NO: 259024 - DNA, 25 bp, Artificial
  Probe
ctcctactttgataacctggctatg

SEQ ID NO: 259025 - DNA, 25 bp, Artificial
  Probe
aaattggtcctgctgggagaatctg

SEQ ID NO: 259026 - DNA, 25 bp, Artificial
  Probe
ttgcccgggcaaagacatgggtaaa

SEQ ID NO: 259027 - DNA, 25 bp, Artificial
  Probe
gtctatgatatcactaatcaggaaa

SEQ ID NO: 259028 - DNA, 25 bp, Artificial
  Probe
caacaagcgcatggtggagtatgaa

SEQ ID NO: 259029 - DNA, 25 bp, Artificial
  Probe
gcctggtgttacgttttgtcaaagg

SEQ ID NO: 259030 - DNA, 25 bp, Artificial
  Probe
ctagcagaagtacagccaggcccaa

SEQ ID NO: 259031 - DNA, 25 bp, Artificial
  Probe
gtactacaggggtgcccaggctgcc

SEQ ID NO: 259032 - DNA, 25 bp, Artificial
  Probe
gccaacaagcgcatggtggagtatg

SEQ ID NO: 259033 - DNA, 25 bp, Artificial
  Probe
taaaggaactacagcggcaagccag

SEQ ID NO: 259034 - DNA, 25 bp, Artificial
  Probe
agaagtacagccaggcccaatgggc

SEQ ID NO: 259035 - DNA, 25 bp, Artificial
  Probe
ccccatgtactacaggggtgcccag

SEQ ID NO: 259036 - DNA, 25 bp, Artificial
  Probe
tgataacctggctatgactagcaga

SEQ ID NO: 259037 - DNA, 25 bp, Artificial
  Probe
tacgttttgtcaaaggacagttcca

SEQ ID NO: 259038 - DNA, 25 bp, Artificial
  Probe
gaatcctcctagcatgttcactctg

SEQ ID NO: 259039 - DNA, 25 bp, Artificial
  Probe
cattgccttggcagggaacaaagct

SEQ ID NO: 259040 - DNA, 25 bp, Artificial
  Probe
gccttggcagggaacaaagctgacc

SEQ ID NO: 259041 - DNA, 25 bp, Artificial
  Probe
tagcatcgtcattgccttggcaggg

SEQ ID NO: 259042 - DNA, 25 bp, Artificial
  Probe
gttcaaattggtcctgctgggagaa

SEQ ID NO: 259043 - DNA, 25 bp, Artificial
  Probe
tcaggaaacgtttgcccgggcaaag

SEQ ID NO: 259044 - DNA, 25 bp, Artificial
  Probe
gcctacagaatcctcctagcatgtt

SEQ ID NO: 259045 - DNA, 25 bp, Artificial
  Probe
atgggcagccccaggccagcaaaat

SEQ ID NO: 259046 - DNA, 25 bp, Artificial
  Probe
agggaacaaagctgaccttgccaac

SEQ ID NO: 259047 - DNA, 25 bp, Artificial
  Probe
caaagctgaccttgccaacaagcgc

SEQ ID NO: 259048 - DNA, 25 bp, Artificial
  Probe
agtttagcccccatgtactacaggg

SEQ ID NO: 259049 - DNA, 25 bp, Artificial
  Probe
taatcaggaaacgtttgcccgggca

SEQ ID NO: 259050 - DNA, 25 bp, Artificial
  Probe
gaacgataccacagtttagccccca

SEQ ID NO: 259051 - DNA, 25 bp, Artificial
  Probe
gcccaggctgccatcgtggtctatg

SEQ ID NO: 259052 - DNA, 25 bp, Artificial
  Probe
tttgccaatttgtggcattcccctc

SEQ ID NO: 259053 - DNA, 25 bp, Artificial
  Probe
tttcagaatgcatacatttattagg

SEQ ID NO: 259054 - DNA, 25 bp, Artificial
  Probe
taccacaggtttcatagtatggttg

SEQ ID NO: 259055 - DNA, 25 bp, Artificial
  Probe
gggaagccagagactccataattca

SEQ ID NO: 259056 - DNA, 25 bp, Artificial
  Probe
tattaccacaggtttcatagtatgg

SEQ ID NO: 259057 - DNA, 25 bp, Artificial
  Probe
aaattttcattttcaactgctcttg

SEQ ID NO: 259058 - DNA, 25 bp, Artificial
  Probe
agagaatattaccacaggtttcata

SEQ ID NO: 259059 - DNA, 25 bp, Artificial
  Probe
ggaggttacccacaaattccagaat

SEQ ID NO: 259060 - DNA, 25 bp, Artificial
  Probe
gttaaaattttcattttcaactgct

SEQ ID NO: 259061 - DNA, 25 bp, Artificial
  Probe
atattaccacaggtttcatagtatg

SEQ ID NO: 259062 - DNA, 25 bp, Artificial
  Probe
attaccacaggtttcatagtatggt

SEQ ID NO: 259063 - DNA, 25 bp, Artificial
  Probe
gaatattaccacaggtttcatagta

SEQ ID NO: 259064 - DNA, 25 bp, Artificial
  Probe
cacaggtttcatagtatggttggca

SEQ ID NO: 259065 - DNA, 25 bp, Artificial
  Probe
ttggaggttacccacaaattccaga

SEQ ID NO: 259066 - DNA, 25 bp, Artificial
  Probe
ccacaggtttcatagtatggttggc

SEQ ID NO: 259067 - DNA, 25 bp, Artificial
  Probe
aagccagagactccataattcagaa

SEQ ID NO: 259068 - DNA, 25 bp, Artificial
  Probe
aatattaccacaggtttcatagtat

SEQ ID NO: 259069 - DNA, 25 bp, Artificial
  Probe
ggtttcatagtatggttggcagata

SEQ ID NO: 259070 - DNA, 25 bp, Artificial
  Probe
accacaggtttcatagtatggttgg

SEQ ID NO: 259071 - DNA, 25 bp, Artificial
  Probe
aaaattttcattttcaactgctctt

SEQ ID NO: 259072 - DNA, 25 bp, Artificial
  Probe
aatgcatacatttattaggttaaaa

SEQ ID NO: 259073 - DNA, 25 bp, Artificial
  Probe
caggtttcatagtatggttggcaga

SEQ ID NO: 259074 - DNA, 25 bp, Artificial
  Probe
ttttttgaggtttcagaatgcatac

SEQ ID NO: 259075 - DNA, 25 bp, Artificial
  Probe
tttttttttgaggtttcagaatgca

SEQ ID NO: 259076 - DNA, 25 bp, Artificial
  Probe
tacccacaaattccagaatttccca

SEQ ID NO: 259077 - DNA, 25 bp, Artificial
  Probe
attggaggttacccacaaattccag

SEQ ID NO: 259078 - DNA, 25 bp, Artificial
  Probe
gtttcatagtatggttggcagatac

SEQ ID NO: 259079 - DNA, 25 bp, Artificial
  Probe
cattttcaactgctcttggatgaaa

SEQ ID NO: 259080 - DNA, 25 bp, Artificial
  Probe
gtttcagaatgcatacatttattag

SEQ ID NO: 259081 - DNA, 25 bp, Artificial
  Probe
ttttcattttcaactgctcttggat

SEQ ID NO: 259082 - DNA, 25 bp, Artificial
  Probe
tttcatagtatggttggcagatact

SEQ ID NO: 259083 - DNA, 25 bp, Artificial
  Probe
ggaagccagagactccataattcag

SEQ ID NO: 259084 - DNA, 25 bp, Artificial
  Probe
tcattttcaactgctcttggatgaa

SEQ ID NO: 259085 - DNA, 25 bp, Artificial
  Probe
agaatattaccacaggtttcatagt

SEQ ID NO: 259086 - DNA, 25 bp, Artificial
  Probe
taaaattttcattttcaactgctct

SEQ ID NO: 259087 - DNA, 25 bp, Artificial
  Probe
gagaatattaccacaggtttcatag

SEQ ID NO: 259088 - DNA, 25 bp, Artificial
  Probe
tttttgaggtttcagaatgcataca

SEQ ID NO: 259089 - DNA, 25 bp, Artificial
  Probe
tttcattttcaactgctcttggatg

SEQ ID NO: 259090 - DNA, 25 bp, Artificial
  Probe
tgcatacatttattaggttaaaatt

SEQ ID NO: 259091 - DNA, 25 bp, Artificial
  Probe
agggaagccagagactccataattc

SEQ ID NO: 259092 - DNA, 25 bp, Artificial
  Probe
ccattgaatccatagagaatattac

SEQ ID NO: 259093 - DNA, 25 bp, Artificial
  Probe
gaggttacccacaaattccagaatt

SEQ ID NO: 259094 - DNA, 25 bp, Artificial
  Probe
tggaggttacccacaaattccagaa

SEQ ID NO: 259095 - DNA, 25 bp, Artificial
  Probe
ttaccacaggtttcatagtatggtt

SEQ ID NO: 259096 - DNA, 25 bp, Artificial
  Probe
agaatgcatacatttattaggttaa

SEQ ID NO: 259097 - DNA, 25 bp, Artificial
  Probe
gaagccagagactccataattcaga

SEQ ID NO: 259098 - DNA, 25 bp, Artificial
  Probe
ttcattttcaactgctcttggatga

SEQ ID NO: 259099 - DNA, 25 bp, Artificial
  Probe
tgagttctgctgacaggagcacttt

SEQ ID NO: 259100 - DNA, 25 bp, Artificial
  Probe
tttagtcctgctccatgctcgggcc

SEQ ID NO: 259101 - DNA, 25 bp, Artificial
  Probe
atttcttctgaaggattatttgcac

SEQ ID NO: 259102 - DNA, 25 bp, Artificial
  Probe
tgcctgcttctccagactccttgat

SEQ ID NO: 259103 - DNA, 25 bp, Artificial
  Probe
aaagcactgtgctctctgtaagctc

SEQ ID NO: 259104 - DNA, 25 bp, Artificial
  Probe
ccgaggactgcatgatgtcctctct

SEQ ID NO: 259105 - DNA, 25 bp, Artificial
  Probe
gtgctgctcaccaaaggcgagatca

SEQ ID NO: 259106 - DNA, 25 bp, Artificial
  Probe
agttggacttagagtgcatggtgcc

SEQ ID NO: 259107 - DNA, 25 bp, Artificial
  Probe
ccggtccgccgttcgtggcttgtgc

SEQ ID NO: 259108 - DNA, 25 bp, Artificial
  Probe
ctgacaggagcacttttatctggag

SEQ ID NO: 259109 - DNA, 25 bp, Artificial
  Probe
agactctacagtcaaatggattaat

SEQ ID NO: 259110 - DNA, 25 bp, Artificial
  Probe
ccaccatgcccactttggaatgctg

SEQ ID NO: 259111 - DNA, 25 bp, Artificial
  Probe
tgctgtcatgaagacatgtgcaatt

SEQ ID NO: 259112 - DNA, 25 bp, Artificial
  Probe
tcttctgaaggattatttgcacaga

SEQ ID NO: 259113 - DNA, 25 bp, Artificial
  Probe
agatgctctctcgtttgcactacag

SEQ ID NO: 259114 - DNA, 25 bp, Artificial
  Probe
cgaatgctgcgaagtgagaacaaga

SEQ ID NO: 259115 - DNA, 25 bp, Artificial
  Probe
aagctggaattcgtatgacagtcgt

SEQ ID NO: 259116 - DNA, 25 bp, Artificial
  Probe
aggaaacagataccagcatgacagc

SEQ ID NO: 259117 - DNA, 25 bp, Artificial
  Probe
ctccagctacatcttcatctggctg

SEQ ID NO: 259118 - DNA, 25 bp, Artificial
  Probe
aagacatgtgcaattaccgaggact

SEQ ID NO: 259119 - DNA, 25 bp, Artificial
  Probe
accactccaagaagggacaggttgc

SEQ ID NO: 259120 - DNA, 25 bp, Artificial
  Probe
acctgcgacaaaatgaggcaagcag

SEQ ID NO: 259121 - DNA, 25 bp, Artificial
  Probe
ggattatttgcacagactctacagt

SEQ ID NO: 259122 - DNA, 25 bp, Artificial
  Probe
tcctcccaagagtgaagcctcagga

SEQ ID NO: 259123 - DNA, 25 bp, Artificial
  Probe
ttccatggacaccactccaagaagg

SEQ ID NO: 259124 - DNA, 25 bp, Artificial
  Probe
catgtacagtggtcatgggaagctg

SEQ ID NO: 259125 - DNA, 25 bp, Artificial
  Probe
agctggaattcgtatgacagtcgtg

SEQ ID NO: 259126 - DNA, 25 bp, Artificial
  Probe
gagaaccttgggtatttcttctgaa

SEQ ID NO: 259127 - DNA, 25 bp, Artificial
  Probe
gcctcaggacaaggaaacagatacc

SEQ ID NO: 259128 - DNA, 25 bp, Artificial
  Probe
ggatcagcggcagcagatgctctct

SEQ ID NO: 259129 - DNA, 25 bp, Artificial
  Probe
gtctaactccggtccgccgttcgtg

SEQ ID NO: 259130 - DNA, 25 bp, Artificial
  Probe
ctctcccttgtgcactggggcatgt

SEQ ID NO: 259131 - DNA, 25 bp, Artificial
  Probe
aactgctgtctgacctgcgacaaaa

SEQ ID NO: 259132 - DNA, 25 bp, Artificial
  Probe
tcactgtgtggcaactggttacatg

SEQ ID NO: 259133 - DNA, 25 bp, Artificial
  Probe
caaacaggcccaaaaccactctggt

SEQ ID NO: 259134 - DNA, 25 bp, Artificial
  Probe
gagcgcggagccacaaacgtgtcct

SEQ ID NO: 259135 - DNA, 25 bp, Artificial
  Probe
tctcagcaacgagaagatcctctcc

SEQ ID NO: 259136 - DNA, 25 bp, Artificial
  Probe
ttagagtgcatggtgcccgtcagtg

SEQ ID NO: 259137 - DNA, 25 bp, Artificial
  Probe
tctgccgagccaaacaggcccaaaa

SEQ ID NO: 259138 - DNA, 25 bp, Artificial
  Probe
cggggcgtcaatggatcgccactcc

SEQ ID NO: 259139 - DNA, 25 bp, Artificial
  Probe
acggctgcctggactcactcgcaag

SEQ ID NO: 259140 - DNA, 25 bp, Artificial
  Probe
gcgccccgggagtcgtagtgcatcc

SEQ ID NO: 259141 - DNA, 25 bp, Artificial
  Probe
atggatcgccactccagctacatct

SEQ ID NO: 259142 - DNA, 25 bp, Artificial
  Probe
tgcttagtcatcctggagaaacaaa

SEQ ID NO: 259143 - DNA, 25 bp, Artificial
  Probe
agtcgtagtgcatccgcgcctggct

SEQ ID NO: 259144 - DNA, 25 bp, Artificial
  Probe
atgaggcaagcagatctcagcaacg

SEQ ID NO: 259145 - DNA, 25 bp, Artificial
  Probe
gctgatcacgaaagagcacattcag

SEQ ID NO: 259146 - DNA, 25 bp, Artificial
  Probe
tacatgctgcgcatggatggccccc

SEQ ID NO: 259147 - DNA, 25 bp, Artificial
  Probe
tgcctccctggcaggcggcaacttt

SEQ ID NO: 259148 - DNA, 25 bp, Artificial
  Probe
cctaataaacatgcatgtggatgaa

SEQ ID NO: 259149 - DNA, 25 bp, Artificial
  Probe
gaaattaacaagctgctggcacacc

SEQ ID NO: 259150 - DNA, 25 bp, Artificial
  Probe
tcctacctaataaacatgcatgtgg

SEQ ID NO: 259151 - DNA, 25 bp, Artificial
  Probe
cacgctctggccagctttgtttatg

SEQ ID NO: 259152 - DNA, 25 bp, Artificial
  Probe
gatgaaaaggctccaggaagacagg

SEQ ID NO: 259153 - DNA, 25 bp, Artificial
  Probe
ctgagtggctcaatggcttggaata

SEQ ID NO: 259154 - DNA, 25 bp, Artificial
  Probe
ctttgggattgtggactctctaggt

SEQ ID NO: 259155 - DNA, 25 bp, Artificial
  Probe
gagaccccggaatcgccaatgggtt

SEQ ID NO: 259156 - DNA, 25 bp, Artificial
  Probe
tggtagtggcatcaatccagagaga

SEQ ID NO: 259157 - DNA, 25 bp, Artificial
  Probe
gagagaccccggaatcgccaatggg

SEQ ID NO: 259158 - DNA, 25 bp, Artificial
  Probe
ttgctgagtggctcaatggcttgga

SEQ ID NO: 259159 - DNA, 25 bp, Artificial
  Probe
cagaaacttgtcaaaactggagaaa

SEQ ID NO: 259160 - DNA, 25 bp, Artificial
  Probe
tggctcaatggcttggaatatgtac

SEQ ID NO: 259161 - DNA, 25 bp, Artificial
  Probe
atccagagagagaccccggaatcgc

SEQ ID NO: 259162 - DNA, 25 bp, Artificial
  Probe
cccggaatcgccaatgggttcagac

SEQ ID NO: 259163 - DNA, 25 bp, Artificial
  Probe
agatgaagagactactccggaagaa

SEQ ID NO: 259164 - DNA, 25 bp, Artificial
  Probe
ttaacaagctgctggcacaccggcc

SEQ ID NO: 259165 - DNA, 25 bp, Artificial
  Probe
cactacatcgccatcatggctgcag

SEQ ID NO: 259166 - DNA, 25 bp, Artificial
  Probe
agttctacatgctgcgcatggatgg

SEQ ID NO: 259167 - DNA, 25 bp, Artificial
  Probe
actatcacgctctggccagctttgt

SEQ ID NO: 259168 - DNA, 25 bp, Artificial
  Probe
catgctgcgcatggatggccccctt

SEQ ID NO: 259169 - DNA, 25 bp, Artificial
  Probe
ttgtttatggtagtggcatcaatcc

SEQ ID NO: 259170 - DNA, 25 bp, Artificial
  Probe
agactactccggaagaaatgagcac

SEQ ID NO: 259171 - DNA, 25 bp, Artificial
  Probe
cacgaaagagcacattcagaaactt

SEQ ID NO: 259172 - DNA, 25 bp, Artificial
  Probe
ctcaatggcttggaatatgtaccac

SEQ ID NO: 259173 - DNA, 25 bp, Artificial
  Probe
gaatatgtaccacaaagactgagaa

SEQ ID NO: 259174 - DNA, 25 bp, Artificial
  Probe
ggcaactttgggattgtggactctc

SEQ ID NO: 259175 - DNA, 25 bp, Artificial
  Probe
catcatggctgcagccagacaccag

SEQ ID NO: 259176 - DNA, 25 bp, Artificial
  Probe
ggtcctcttggctcactatcacgct

SEQ ID NO: 259177 - DNA, 25 bp, Artificial
  Probe
ctccaggaagacagggaagatgaag

SEQ ID NO: 259178 - DNA, 25 bp, Artificial
  Probe
tctctaggtgagctagaagccttaa

SEQ ID NO: 259179 - DNA, 25 bp, Artificial
  Probe
gaaatgcctccctggcaggcggcaa

SEQ ID NO: 259180 - DNA, 25 bp, Artificial
  Probe
attggaaatgcctccctggcaggcg

SEQ ID NO: 259181 - DNA, 25 bp, Artificial
  Probe
tgcgacctggccaatgacaacagca

SEQ ID NO: 259182 - DNA, 25 bp, Artificial
  Probe
ataattggtccttgcctgagctagt

SEQ ID NO: 259183 - DNA, 25 bp, Artificial
  Probe
acatcgccatcatggctgcagccag

SEQ ID NO: 259184 - DNA, 25 bp, Artificial
  Probe
aagagcacattcagaaacttgtcaa

SEQ ID NO: 259185 - DNA, 25 bp, Artificial
  Probe
tgacaacagcattggaaatgcctcc

SEQ ID NO: 259186 - DNA, 25 bp, Artificial
  Probe
ggattgtggactctctaggtgagct

SEQ ID NO: 259187 - DNA, 25 bp, Artificial
  Probe
cggacaggcactacatcgccatcat

SEQ ID NO: 259188 - DNA, 25 bp, Artificial
  Probe
acaggcactacatcgccatcatggc

SEQ ID NO: 259189 - DNA, 25 bp, Artificial
  Probe
gccagacaccagtgttcctacctaa

SEQ ID NO: 259190 - DNA, 25 bp, Artificial
  Probe
cagctttgtttatggtagtggcatc

SEQ ID NO: 259191 - DNA, 25 bp, Artificial
  Probe
gatcctggtgatgcagcccaacagg

SEQ ID NO: 259192 - DNA, 25 bp, Artificial
  Probe
gacgaagaactcgaggcgctgagaa

SEQ ID NO: 259193 - DNA, 25 bp, Artificial
  Probe
gccaagcacggagatcctggtgatg

SEQ ID NO: 259194 - DNA, 25 bp, Artificial
  Probe
tcttagcccaagttctggatcagtc

SEQ ID NO: 259195 - DNA, 25 bp, Artificial
  Probe
gcgccatggcggacgaagaactcga

SEQ ID NO: 259196 - DNA, 25 bp, Artificial
  Probe
gatgcagcccaacaggaagcaaaac

SEQ ID NO: 259197 - DNA, 25 bp, Artificial
  Probe
aatactcgagaaagtcagccaacag

SEQ ID NO: 259198 - DNA, 25 bp, Artificial
  Probe
gtgatgcagcccaacaggaagcaaa

SEQ ID NO: 259199 - DNA, 25 bp, Artificial
  Probe
tgcaggccaagcacggagatcctgg

SEQ ID NO: 259200 - DNA, 25 bp, Artificial
  Probe
tgttccctgtctatatgccttttga

SEQ ID NO: 259201 - DNA, 25 bp, Artificial
  Probe
cgccatggcggacgaagaactcgag

SEQ ID NO: 259202 - DNA, 25 bp, Artificial
  Probe
tcctggtgatgcagcccaacaggaa

SEQ ID NO: 259203 - DNA, 25 bp, Artificial
  Probe
acgaagaactcgaggcgctgagaaa

SEQ ID NO: 259204 - DNA, 25 bp, Artificial
  Probe
gtatcttagcccaagttctggatca

SEQ ID NO: 259205 - DNA, 25 bp, Artificial
  Probe
gttctggatcagtcagcccgggcca

SEQ ID NO: 259206 - DNA, 25 bp, Artificial
  Probe
gaaatactcgagaaagtcagccaac

SEQ ID NO: 259207 - DNA, 25 bp, Artificial
  Probe
ggacagttaccacctgtaaatgttt

SEQ ID NO: 259208 - DNA, 25 bp, Artificial
  Probe
gagctgcaggccaagcacggagatc

SEQ ID NO: 259209 - DNA, 25 bp, Artificial
  Probe
aagtaacttagcacttgtgaagcct

SEQ ID NO: 259210 - DNA, 25 bp, Artificial
  Probe
caagttctggatcagtcagcccggg

SEQ ID NO: 259211 - DNA, 25 bp, Artificial
  Probe
tctggatcagtcagcccgggccagg

SEQ ID NO: 259212 - DNA, 25 bp, Artificial
  Probe
ttgtgaagcctgagaaaacgaaagc

SEQ ID NO: 259213 - DNA, 25 bp, Artificial
  Probe
tagcacttgtgaagcctgagaaaac

SEQ ID NO: 259214 - DNA, 25 bp, Artificial
  Probe
ttaagtaacttagcacttgtgaagc

SEQ ID NO: 259215 - DNA, 25 bp, Artificial
  Probe
ggccaagcacggagatcctggtgat

SEQ ID NO: 259216 - DNA, 25 bp, Artificial
  Probe
tcagcccgggccaggttaagtaact

SEQ ID NO: 259217 - DNA, 25 bp, Artificial
  Probe
acttgtgaagcctgagaaaacgaaa

SEQ ID NO: 259218 - DNA, 25 bp, Artificial
  Probe
taggacagttaccacctgtaaatgt

SEQ ID NO: 259219 - DNA, 25 bp, Artificial
  Probe
ggagaactaccttatacagatggca

SEQ ID NO: 259220 - DNA, 25 bp, Artificial
  Probe
agatcctggtgatgcagcccaacag

SEQ ID NO: 259221 - DNA, 25 bp, Artificial
  Probe
tatcttagcccaagttctggatcag

SEQ ID NO: 259222 - DNA, 25 bp, Artificial
  Probe
aagcacggagatcctggtgatgcag

SEQ ID NO: 259223 - DNA, 25 bp, Artificial
  Probe
cacggagatcctggtgatgcagccc

SEQ ID NO: 259224 - DNA, 25 bp, Artificial
  Probe
cggagatcctggtgatgcagcccaa

SEQ ID NO: 259225 - DNA, 25 bp, Artificial
  Probe
tgcagcccaacaggaagcaaaacaa

SEQ ID NO: 259226 - DNA, 25 bp, Artificial
  Probe
ctggccgagctgcaggccaagcacg

SEQ ID NO: 259227 - DNA, 25 bp, Artificial
  Probe
cgcgacgttggacagccgcgccatg

SEQ ID NO: 259228 - DNA, 25 bp, Artificial
  Probe
acttagcacttgtgaagcctgagaa

SEQ ID NO: 259229 - DNA, 25 bp, Artificial
  Probe
acagccgcgccatggcggacgaaga

SEQ ID NO: 259230 - DNA, 25 bp, Artificial
  Probe
aactcgaggcgctgagaaagcagag

SEQ ID NO: 259231 - DNA, 25 bp, Artificial
  Probe
ttagcacttgtgaagcctgagaaaa

SEQ ID NO: 259232 - DNA, 25 bp, Artificial
  Probe
tggagaactaccttatacagatggc

SEQ ID NO: 259233 - DNA, 25 bp, Artificial
  Probe
gaaacagtatcttagcccaagttct

SEQ ID NO: 259234 - DNA, 25 bp, Artificial
  Probe
tactcgagaaagtcagccaacagac

SEQ ID NO: 259235 - DNA, 25 bp, Artificial
  Probe
gacagttaccacctgtaaatgttta

SEQ ID NO: 259236 - DNA, 25 bp, Artificial
  Probe
cccaagttctggatcagtcagcccg

SEQ ID NO: 259237 - DNA, 25 bp, Artificial
  Probe
cccactctatactagggactggatc

SEQ ID NO: 259238 - DNA, 25 bp, Artificial
  Probe
caaatcccattgtcacctaactctg

SEQ ID NO: 259239 - DNA, 25 bp, Artificial
  Probe
catgagcacagggtcgggggggtcc

SEQ ID NO: 259240 - DNA, 25 bp, Artificial
  Probe
tgggcttcagcctctcccacccagc

SEQ ID NO: 259241 - DNA, 25 bp, Artificial
  Probe
gttgagaagactcctgggcttcagc

SEQ ID NO: 259242 - DNA, 25 bp, Artificial
  Probe
tctatactagggactggatctcagc

SEQ ID NO: 259243 - DNA, 25 bp, Artificial
  Probe
ttcttggaagaggttgagaagactc

SEQ ID NO: 259244 - DNA, 25 bp, Artificial
  Probe
tctgtgtctgcccccgtcttctctc

SEQ ID NO: 259245 - DNA, 25 bp, Artificial
  Probe
ccactctatactagggactggatct

SEQ ID NO: 259246 - DNA, 25 bp, Artificial
  Probe
tcccccactctatactagggactgg

SEQ ID NO: 259247 - DNA, 25 bp, Artificial
  Probe
gagaagactcctgggcttcagcctc

SEQ ID NO: 259248 - DNA, 25 bp, Artificial
  Probe
ccaggctgtttctttttttatgact

SEQ ID NO: 259249 - DNA, 25 bp, Artificial
  Probe
ctctatactagggactggatctcag

SEQ ID NO: 259250 - DNA, 25 bp, Artificial
  Probe
aagatctaaatagcccttggatcag

SEQ ID NO: 259251 - DNA, 25 bp, Artificial
  Probe
tgagaagactcctgggcttcagcct

SEQ ID NO: 259252 - DNA, 25 bp, Artificial
  Probe
aatagcccttggatcagtacgggaa

SEQ ID NO: 259253 - DNA, 25 bp, Artificial
  Probe
tctaaatagcccttggatcagtacg

SEQ ID NO: 259254 - DNA, 25 bp, Artificial
  Probe
tagcccttggatcagtacgggaacc

SEQ ID NO: 259255 - DNA, 25 bp, Artificial
  Probe
ttttatgactgtaaacatagatagt

SEQ ID NO: 259256 - DNA, 25 bp, Artificial
  Probe
ttcctccctcatgagcacagggtcg

SEQ ID NO: 259257 - DNA, 25 bp, Artificial
  Probe
ctaaatagcccttggatcagtacgg

SEQ ID NO: 259258 - DNA, 25 bp, Artificial
  Probe
tccccattcttggaagaggttgaga

SEQ ID NO: 259259 - DNA, 25 bp, Artificial
  Probe
ccattcttggaagaggttgagaaga

SEQ ID NO: 259260 - DNA, 25 bp, Artificial
  Probe
aggttgagaagactcctgggcttca

SEQ ID NO: 259261 - DNA, 25 bp, Artificial
  Probe
atagatagtgctttattttgttaat

SEQ ID NO: 259262 - DNA, 25 bp, Artificial
  Probe
tgaagatctaaatagcccttggatc

SEQ ID NO: 259263 - DNA, 25 bp, Artificial
  Probe
ccccattcttggaagaggttgagaa

SEQ ID NO: 259264 - DNA, 25 bp, Artificial
  Probe
attgtcacctaactctgaagatcta

SEQ ID NO: 259265 - DNA, 25 bp, Artificial
  Probe
tctttattcctccctcatgagcaca

SEQ ID NO: 259266 - DNA, 25 bp, Artificial
  Probe
gaagatctaaatagcccttggatca

SEQ ID NO: 259267 - DNA, 25 bp, Artificial
  Probe
taaggaaatcaaatcccattgtcac

SEQ ID NO: 259268 - DNA, 25 bp, Artificial
  Probe
agatgtggagtctgtgtctgccccc

SEQ ID NO: 259269 - DNA, 25 bp, Artificial
  Probe
ctatactagggactggatctcagcc

SEQ ID NO: 259270 - DNA, 25 bp, Artificial
  Probe
aaatagcccttggatcagtacggga

SEQ ID NO: 259271 - DNA, 25 bp, Artificial
  Probe
tggatcagtacgggaaccccaaatc

SEQ ID NO: 259272 - DNA, 25 bp, Artificial
  Probe
cagatgtggagtctgtgtctgcccc

SEQ ID NO: 259273 - DNA, 25 bp, Artificial
  Probe
ttgagaagactcctgggcttcagcc

SEQ ID NO: 259274 - DNA, 25 bp, Artificial
  Probe
gtccccattcttggaagaggttgag

SEQ ID NO: 259275 - DNA, 25 bp, Artificial
  Probe
taaatagcccttggatcagtacggg

SEQ ID NO: 259276 - DNA, 25 bp, Artificial
  Probe
atagcccttggatcagtacgggaac

SEQ ID NO: 259277 - DNA, 25 bp, Artificial
  Probe
gggtccccattcttggaagaggttg

SEQ ID NO: 259278 - DNA, 25 bp, Artificial
  Probe
cccattcttggaagaggttgagaag

SEQ ID NO: 259279 - DNA, 25 bp, Artificial
  Probe
tatactagggactggatctcagcct

SEQ ID NO: 259280 - DNA, 25 bp, Artificial
  Probe
ggtccccattcttggaagaggttga

SEQ ID NO: 259281 - DNA, 25 bp, Artificial
  Probe
tgatcagtttcacaaagtttgttcc

SEQ ID NO: 259282 - DNA, 25 bp, Artificial
  Probe
ccacttctctccaggctgtttcttt

SEQ ID NO: 259283 - DNA, 25 bp, Artificial
  Probe
atccccgaagccaaccttgatcagt

SEQ ID NO: 259284 - DNA, 25 bp, Artificial
  Probe
gccacggtcgtggagtctcctggcc

SEQ ID NO: 259285 - DNA, 25 bp, Artificial
  Probe
ggggctcctgcaggtggaccccttc

SEQ ID NO: 259286 - DNA, 25 bp, Artificial
  Probe
gttggtactgctagccttgtgggca

SEQ ID NO: 259287 - DNA, 25 bp, Artificial
  Probe
ctgctagccttgtgggcagcaacat

SEQ ID NO: 259288 - DNA, 25 bp, Artificial
  Probe
acggtcgtggagtctcctggcccag

SEQ ID NO: 259289 - DNA, 25 bp, Artificial
  Probe
gacgtctgcagtgctgttgagaaga

SEQ ID NO: 259290 - DNA, 25 bp, Artificial
  Probe
ctggactcttttgcagctccgggcc

SEQ ID NO: 259291 - DNA, 25 bp, Artificial
  Probe
gtggaccccttctcaggacagaatc

SEQ ID NO: 259292 - DNA, 25 bp, Artificial
  Probe
gggcctgaagccacgtagcctctga

SEQ ID NO: 259293 - DNA, 25 bp, Artificial
  Probe
cttgtgggcagcaacatgttcccta

SEQ ID NO: 259294 - DNA, 25 bp, Artificial
  Probe
gggctcctgcaggtggaccccttct

SEQ ID NO: 259295 - DNA, 25 bp, Artificial
  Probe
tgagtcggacgtctgcagtgctgtt

SEQ ID NO: 259296 - DNA, 25 bp, Artificial
  Probe
tccctaaccagtaccgagaggcagc

SEQ ID NO: 259297 - DNA, 25 bp, Artificial
  Probe
cgtagcctctgagttgaccaggagg

SEQ ID NO: 259298 - DNA, 25 bp, Artificial
  Probe
ccctggggatgttggtactgctagc

SEQ ID NO: 259299 - DNA, 25 bp, Artificial
  Probe
ttgtgggcagcaacatgttccctaa

SEQ ID NO: 259300 - DNA, 25 bp, Artificial
  Probe
cccctgtcgctggactcttttgcag

SEQ ID NO: 259301 - DNA, 25 bp, Artificial
  Probe
ttccctaaccagtaccgagaggcag

SEQ ID NO: 259302 - DNA, 25 bp, Artificial
  Probe
ctgaagccacgtagcctctgagttg

SEQ ID NO: 259303 - DNA, 25 bp, Artificial
  Probe
gtccccagggcctgaagccacgtag

SEQ ID NO: 259304 - DNA, 25 bp, Artificial
  Probe
tcggacgtctgcagtgctgttgaga

SEQ ID NO: 259305 - DNA, 25 bp, Artificial
  Probe
tcgtggagtctcctggcccagagcc

SEQ ID NO: 259306 - DNA, 25 bp, Artificial
  Probe
acagaatctcagagattgtacatag

SEQ ID NO: 259307 - DNA, 25 bp, Artificial
  Probe
gatgttggtactgctagccttgtgg

SEQ ID NO: 259308 - DNA, 25 bp, Artificial
  Probe
tctcaggacagaatctcagagattg

SEQ ID NO: 259309 - DNA, 25 bp, Artificial
  Probe
taaccagtaccgagaggcagccttc

SEQ ID NO: 259310 - DNA, 25 bp, Artificial
  Probe
accagtaccgagaggcagccttcgg

SEQ ID NO: 259311 - DNA, 25 bp, Artificial
  Probe
agccacgtagcctctgagttgacca

SEQ ID NO: 259312 - DNA, 25 bp, Artificial
  Probe
cctctgagttgaccaggaggcagtg

SEQ ID NO: 259313 - DNA, 25 bp, Artificial
  Probe
agcccctgtcgctggactcttttgc

SEQ ID NO: 259314 - DNA, 25 bp, Artificial
  Probe
aacatgttccctaaccagtaccgag

SEQ ID NO: 259315 - DNA, 25 bp, Artificial
  Probe
cgtctgcagtgctgttgagaagatg

SEQ ID NO: 259316 - DNA, 25 bp, Artificial
  Probe
tgggcagcaacatgttccctaacca

SEQ ID NO: 259317 - DNA, 25 bp, Artificial
  Probe
gggcagcaacatgttccctaaccag

SEQ ID NO: 259318 - DNA, 25 bp, Artificial
  Probe
cctggggatgttggtactgctagcc

SEQ ID NO: 259319 - DNA, 25 bp, Artificial
  Probe
cggacgtctgcagtgctgttgagaa

SEQ ID NO: 259320 - DNA, 25 bp, Artificial
  Probe
ctcaggacagaatctcagagattgt

SEQ ID NO: 259321 - DNA, 25 bp, Artificial
  Probe
gtactgctagccttgtgggcagcaa

SEQ ID NO: 259322 - DNA, 25 bp, Artificial
  Probe
caggtggaccccttctcaggacaga

SEQ ID NO: 259323 - DNA, 25 bp, Artificial
  Probe
aggtggaccccttctcaggacagaa

SEQ ID NO: 259324 - DNA, 25 bp, Artificial
  Probe
agccttgtgggcagcaacatgttcc

SEQ ID NO: 259325 - DNA, 25 bp, Artificial
  Probe
agtcggacgtctgcagtgctgttga

SEQ ID NO: 259326 - DNA, 25 bp, Artificial
  Probe
cggtcgtggagtctcctggcccaga

SEQ ID NO: 259327 - DNA, 25 bp, Artificial
  Probe
ctcttttgcagctccgggccctggg

SEQ ID NO: 259328 - DNA, 25 bp, Artificial
  Probe
ggacagaatctcagagattgtacat

SEQ ID NO: 259329 - DNA, 25 bp, Artificial
  Probe
aagtcttctcttcgattctcatttt

SEQ ID NO: 259330 - DNA, 25 bp, Artificial
  Probe
ttgcttcgtcaaagaagaaaaagat

SEQ ID NO: 259331 - DNA, 25 bp, Artificial
  Probe
tcttctcttcgattctcatttttta

SEQ ID NO: 259332 - DNA, 25 bp, Artificial
  Probe
ctcttcgattctcattttttattgc

SEQ ID NO: 259333 - DNA, 25 bp, Artificial
  Probe
ttaaagtcttctcttcgattctcat

SEQ ID NO: 259334 - DNA, 25 bp, Artificial
  Probe
taaagtcttctcttcgattctcatt

SEQ ID NO: 259335 - DNA, 25 bp, Artificial
  Probe
gaaaattaaagtcttctcttcgatt

SEQ ID NO: 259336 - DNA, 25 bp, Artificial
  Probe
tttattgcttcgtcaaagaagaaaa

SEQ ID NO: 259337 - DNA, 25 bp, Artificial
  Probe
ttctcattttttattgcttcgtcaa

SEQ ID NO: 259338 - DNA, 25 bp, Artificial
  Probe
attaaagtcttctcttcgattctca

SEQ ID NO: 259339 - DNA, 25 bp, Artificial
  Probe
tcttcgattctcattttttattgct

SEQ ID NO: 259340 - DNA, 25 bp, Artificial
  Probe
ttctcttcgattctcattttttatt

SEQ ID NO: 259341 - DNA, 25 bp, Artificial
  Probe
attctcattttttattgcttcgtca

SEQ ID NO: 259342 - DNA, 25 bp, Artificial
  Probe
tattgcttcgtcaaagaagaaaaag

SEQ ID NO: 259343 - DNA, 25 bp, Artificial
  Probe
attttttattgcttcgtcaaagaag

SEQ ID NO: 259344 - DNA, 25 bp, Artificial
  Probe
tttttattgcttcgtcaaagaagaa

SEQ ID NO: 259345 - DNA, 25 bp, Artificial
  Probe
ctcagaaaacaaacaaacagaaaat

SEQ ID NO: 259346 - DNA, 25 bp, Artificial
  Probe
tcagaaaacaaacaaacagaaaatt

SEQ ID NO: 259347 - DNA, 25 bp, Artificial
  Probe
tctcagaaaacaaacaaacagaaaa

SEQ ID NO: 259348 - DNA, 25 bp, Artificial
  Probe
cgattctcattttttattgcttcgt

SEQ ID NO: 259349 - DNA, 25 bp, Artificial
  Probe
attgcttcgtcaaagaagaaaaaga

SEQ ID NO: 259350 - DNA, 25 bp, Artificial
  Probe
ttttttattgcttcgtcaaagaaga

SEQ ID NO: 259351 - DNA, 25 bp, Artificial
  Probe
gattctcattttttattgcttcgtc

SEQ ID NO: 259352 - DNA, 25 bp, Artificial
  Probe
tcattttttattgcttcgtcaaaga

SEQ ID NO: 259353 - DNA, 25 bp, Artificial
  Probe
tctcattttttattgcttcgtcaaa

SEQ ID NO: 259354 - DNA, 25 bp, Artificial
  Probe
aattaaagtcttctcttcgattctc

SEQ ID NO: 259355 - DNA, 25 bp, Artificial
  Probe
aaattaaagtcttctcttcgattct

SEQ ID NO: 259356 - DNA, 25 bp, Artificial
  Probe
gtcttctcttcgattctcatttttt

SEQ ID NO: 259357 - DNA, 25 bp, Artificial
  Probe
tcgattctcattttttattgcttcg

SEQ ID NO: 259358 - DNA, 25 bp, Artificial
  Probe
cttcgattctcattttttattgctt

SEQ ID NO: 259359 - DNA, 25 bp, Artificial
  Probe
aaagtcttctcttcgattctcattt

SEQ ID NO: 259360 - DNA, 25 bp, Artificial
  Probe
ttcgattctcattttttattgcttc

SEQ ID NO: 259361 - DNA, 25 bp, Artificial
  Probe
agtcttctcttcgattctcattttt

SEQ ID NO: 259362 - DNA, 25 bp, Artificial
  Probe
ttttattgcttcgtcaaagaagaaa

SEQ ID NO: 259363 - DNA, 25 bp, Artificial
  Probe
cttctcttcgattctcattttttat

SEQ ID NO: 259364 - DNA, 25 bp, Artificial
  Probe
ctcattttttattgcttcgtcaaag

SEQ ID NO: 259365 - DNA, 25 bp, Artificial
  Probe
cattttttattgcttcgtcaaagaa

SEQ ID NO: 259366 - DNA, 25 bp, Artificial
  Probe
ttattgcttcgtcaaagaagaaaaa

SEQ ID NO: 259367 - DNA, 25 bp, Artificial
  Probe
tctcttcgattctcattttttattg

SEQ ID NO: 259368 - DNA, 25 bp, Artificial
  Probe
tgcttcgtcaaagaagaaaaagatt

SEQ ID NO: 259369 - DNA, 25 bp, Artificial
  Probe
accctatgagacgagagatgcagga

SEQ ID NO: 259370 - DNA, 25 bp, Artificial
  Probe
gcccttggaccatggaggacgtgaa

SEQ ID NO: 259371 - DNA, 25 bp, Artificial
  Probe
gcaagctacctatactgcagaaaca

SEQ ID NO: 259372 - DNA, 25 bp, Artificial
  Probe
gacgacgccgaggagtggacttacc

SEQ ID NO: 259373 - DNA, 25 bp, Artificial
  Probe
cccgcagtgcaaagacgacgccgag

SEQ ID NO: 259374 - DNA, 25 bp, Artificial
  Probe
aaagcaagctacctatactgcagaa

SEQ ID NO: 259375 - DNA, 25 bp, Artificial
  Probe
agcaagctacctatactgcagaaac

SEQ ID NO: 259376 - DNA, 25 bp, Artificial
  Probe
actgcagaaacatggcataactcat

SEQ ID NO: 259377 - DNA, 25 bp, Artificial
  Probe
cgcgagtgcttgctgtgagcccgcc

SEQ ID NO: 259378 - DNA, 25 bp, Artificial
  Probe
tattgctgataatccagttgaaaac

SEQ ID NO: 259379 - DNA, 25 bp, Artificial
  Probe
cctggattgttcttaggcccctact

SEQ ID NO: 259380 - DNA, 25 bp, Artificial
  Probe
cggaccccgtggtccgcgagtgctt

SEQ ID NO: 259381 - DNA, 25 bp, Artificial
  Probe
tcgctcccgcagtgcaaagacgacg

SEQ ID NO: 259382 - DNA, 25 bp, Artificial
  Probe
gcccctactcttctgctatgaaaag

SEQ ID NO: 259383 - DNA, 25 bp, Artificial
  Probe
tatgaaaagcaagctacctatactg

SEQ ID NO: 259384 - DNA, 25 bp, Artificial
  Probe
gtccgcgagtgcttgctgtgagccc

SEQ ID NO: 259385 - DNA, 25 bp, Artificial
  Probe
aagacgacgccgaggagtggactta

SEQ ID NO: 259386 - DNA, 25 bp, Artificial
  Probe
cttctgctatgaaaagcaagctacc

SEQ ID NO: 259387 - DNA, 25 bp, Artificial
  Probe
ctactcttctgctatgaaaagcaag

SEQ ID NO: 259388 - DNA, 25 bp, Artificial
  Probe
tacctatactgcagaaacatggcat

SEQ ID NO: 259389 - DNA, 25 bp, Artificial
  Probe
tccctatgactaaagagtttattga

SEQ ID NO: 259390 - DNA, 25 bp, Artificial
  Probe
agttttgcctggattgttcttaggc

SEQ ID NO: 259391 - DNA, 25 bp, Artificial
  Probe
cagtgcaaagacgacgccgaggagt

SEQ ID NO: 259392 - DNA, 25 bp, Artificial
  Probe
cttaggcccctactcttctgctatg

SEQ ID NO: 259393 - DNA, 25 bp, Artificial
  Probe
ttgcatacggcaaaatattgaagca

SEQ ID NO: 259394 - DNA, 25 bp, Artificial
  Probe
tggattgttcttaggcccctactct

SEQ ID NO: 259395 - DNA, 25 bp, Artificial
  Probe
agacgacgccgaggagtggacttac

SEQ ID NO: 259396 - DNA, 25 bp, Artificial
  Probe
cgacgccgaggagtggacttaccct

SEQ ID NO: 259397 - DNA, 25 bp, Artificial
  Probe
aggagtggacttaccctatgagacg

SEQ ID NO: 259398 - DNA, 25 bp, Artificial
  Probe
ttggaccatggaggacgtgaaactg

SEQ ID NO: 259399 - DNA, 25 bp, Artificial
  Probe
atcttggatattgctgataatccag

SEQ ID NO: 259400 - DNA, 25 bp, Artificial
  Probe
gtggacttaccctatgagacgagag

SEQ ID NO: 259401 - DNA, 25 bp, Artificial
  Probe
acgccgaggagtggacttaccctat

SEQ ID NO: 259402 - DNA, 25 bp, Artificial
  Probe
tttgcatacggcaaaatattgaagc

SEQ ID NO: 259403 - DNA, 25 bp, Artificial
  Probe
tcccgcagtgcaaagacgacgccga

SEQ ID NO: 259404 - DNA, 25 bp, Artificial
  Probe
cccttggaccatggaggacgtgaaa

SEQ ID NO: 259405 - DNA, 25 bp, Artificial
  Probe
actcttctgctatgaaaagcaagct

SEQ ID NO: 259406 - DNA, 25 bp, Artificial
  Probe
acctatactgcagaaacatggcata

SEQ ID NO: 259407 - DNA, 25 bp, Artificial
  Probe
tggacttaccctatgagacgagaga

SEQ ID NO: 259408 - DNA, 25 bp, Artificial
  Probe
ccctatgagacgagagatgcaggaa

SEQ ID NO: 259409 - DNA, 25 bp, Artificial
  Probe
tgctgataatccagttgaaaacata

SEQ ID NO: 259410 - DNA, 25 bp, Artificial
  Probe
cttaccctatgagacgagagatgca

SEQ ID NO: 259411 - DNA, 25 bp, Artificial
  Probe
tgaaaagcaagctacctatactgca

SEQ ID NO: 259412 - DNA, 25 bp, Artificial
  Probe
aagctacctatactgcagaaacatg

SEQ ID NO: 259413 - DNA, 25 bp, Artificial
  Probe
aggcccctactcttctgctatgaaa

SEQ ID NO: 259414 - DNA, 25 bp, Artificial
  Probe
ctaatcttggatattgctgataatc

SEQ ID NO: 259415 - DNA, 25 bp, Artificial
  Probe
aattcctgttactttacagacagga

SEQ ID NO: 259416 - DNA, 25 bp, Artificial
  Probe
ctgttactttacagacaggaaagtt

SEQ ID NO: 259417 - DNA, 25 bp, Artificial
  Probe
ttccaatgtagctcagtaattcctg

SEQ ID NO: 259418 - DNA, 25 bp, Artificial
  Probe
ccaatgtagctcagtaattcctgtt

SEQ ID NO: 259419 - DNA, 25 bp, Artificial
  Probe
tcaagtcaccatgctgaatgtacac

SEQ ID NO: 259420 - DNA, 25 bp, Artificial
  Probe
tactttacagacaggaaagttccag

SEQ ID NO: 259421 - DNA, 25 bp, Artificial
  Probe
gagaggctttccaatgtagctcagt

SEQ ID NO: 259422 - DNA, 25 bp, Artificial
  Probe
gttagaagcatgtctctcttgagct

SEQ ID NO: 259423 - DNA, 25 bp, Artificial
  Probe
atgtagctcagtaattcctgttact

SEQ ID NO: 259424 - DNA, 25 bp, Artificial
  Probe
ttgtgtagtcaagtcaccatgctga

SEQ ID NO: 259425 - DNA, 25 bp, Artificial
  Probe
tgattcctttatgatgactgcttaa

SEQ ID NO: 259426 - DNA, 25 bp, Artificial
  Probe
ccagagaggctttccaatgtagctc

SEQ ID NO: 259427 - DNA, 25 bp, Artificial
  Probe
tgtagtcaagtcaccatgctgaatg

SEQ ID NO: 259428 - DNA, 25 bp, Artificial
  Probe
tcctgttactttacagacaggaaag

SEQ ID NO: 259429 - DNA, 25 bp, Artificial
  Probe
actttacagacaggaaagttccaga

SEQ ID NO: 259430 - DNA, 25 bp, Artificial
  Probe
agtcaccatgctgaatgtacactga

SEQ ID NO: 259431 - DNA, 25 bp, Artificial
  Probe
acctcagtggttagaagcatgtctc

SEQ ID NO: 259432 - DNA, 25 bp, Artificial
  Probe
ctctcttgagctacagtagagggga

SEQ ID NO: 259433 - DNA, 25 bp, Artificial
  Probe
tgttactttacagacaggaaagttc

SEQ ID NO: 259434 - DNA, 25 bp, Artificial
  Probe
catttcattgtcttagtcaaagcag

SEQ ID NO: 259435 - DNA, 25 bp, Artificial
  Probe
ttactttacagacaggaaagttcca

SEQ ID NO: 259436 - DNA, 25 bp, Artificial
  Probe
agaggctttccaatgtagctcagta

SEQ ID NO: 259437 - DNA, 25 bp, Artificial
  Probe
ttcattgtcttagtcaaagcaggat

SEQ ID NO: 259438 - DNA, 25 bp, Artificial
  Probe
ctcttgagctacagtagaggggaag

SEQ ID NO: 259439 - DNA, 25 bp, Artificial
  Probe
atacctcagtggttagaagcatgtc

SEQ ID NO: 259440 - DNA, 25 bp, Artificial
  Probe
aagtcaccatgctgaatgtacactg

SEQ ID NO: 259441 - DNA, 25 bp, Artificial
  Probe
gattcctttatgatgactgcttaac

SEQ ID NO: 259442 - DNA, 25 bp, Artificial
  Probe
acgaggcatacctcagtggttagaa

SEQ ID NO: 259443 - DNA, 25 bp, Artificial
  Probe
gtaattcctgttactttacagacag

SEQ ID NO: 259444 - DNA, 25 bp, Artificial
  Probe
catgtctctcttgagctacagtaga

SEQ ID NO: 259445 - DNA, 25 bp, Artificial
  Probe
cctgtcccagagaggctttccaatg

SEQ ID NO: 259446 - DNA, 25 bp, Artificial
  Probe
accatgctgaatgtacactgattcc

SEQ ID NO: 259447 - DNA, 25 bp, Artificial
  Probe
catgctgaatgtacactgattcctt

SEQ ID NO: 259448 - DNA, 25 bp, Artificial
  Probe
actgcctgtcccagagaggctttcc

SEQ ID NO: 259449 - DNA, 25 bp, Artificial
  Probe
atgctgaatgtacactgattccttt

SEQ ID NO: 259450 - DNA, 25 bp, Artificial
  Probe
atgtacactgattcctttatgatga

SEQ ID NO: 259451 - DNA, 25 bp, Artificial
  Probe
tcccagagaggctttccaatgtagc

SEQ ID NO: 259452 - DNA, 25 bp, Artificial
  Probe
gaagcatgtctctcttgagctacag

SEQ ID NO: 259453 - DNA, 25 bp, Artificial
  Probe
gctttccaatgtagctcagtaattc

SEQ ID NO: 259454 - DNA, 25 bp, Artificial
  Probe
ttagaagcatgtctctcttgagcta

SEQ ID NO: 259455 - DNA, 25 bp, Artificial
  Probe
tagtcaagtcaccatgctgaatgta

SEQ ID NO: 259456 - DNA, 25 bp, Artificial
  Probe
gtagctcagtaattcctgttacttt

SEQ ID NO: 259457 - DNA, 25 bp, Artificial
  Probe
acactgattcctttatgatgactgc

SEQ ID NO: 259458 - DNA, 25 bp, Artificial
  Probe
cctcagtggttagaagcatgtctct

SEQ ID NO: 259459 - DNA, 25 bp, Artificial
  Probe
ctgcctgtcccagagaggctttcca

SEQ ID NO: 259460 - DNA, 25 bp, Artificial
  Probe
ctgaatgtacactgattcctttatg

SEQ ID NO: 259461 - DNA, 25 bp, Artificial
  Probe
ttcgagaccgcctcggtcaagtcgg

SEQ ID NO: 259462 - DNA, 25 bp, Artificial
  Probe
gggacgctcacagtcccgggcctct

SEQ ID NO: 259463 - DNA, 25 bp, Artificial
  Probe
ggccgctgttgctgccgggacacgg

SEQ ID NO: 259464 - DNA, 25 bp, Artificial
  Probe
ggcctctcgtcaagcccttcgagac

SEQ ID NO: 259465 - DNA, 25 bp, Artificial
  Probe
cgggcctctcgtcaagcccttcgag

SEQ ID NO: 259466 - DNA, 25 bp, Artificial
  Probe
gccgcccagacacatgagccccacc

SEQ ID NO: 259467 - DNA, 25 bp, Artificial
  Probe
gcccggcagatactccccgccgccc

SEQ ID NO: 259468 - DNA, 25 bp, Artificial
  Probe
gtggatacaggagcccggcagatac

SEQ ID NO: 259469 - DNA, 25 bp, Artificial
  Probe
tcgtcaagcccttcgagaccgcctc

SEQ ID NO: 259470 - DNA, 25 bp, Artificial
  Probe
tacaggagcccggcagatactcccc

SEQ ID NO: 259471 - DNA, 25 bp, Artificial
  Probe
gcctcggtcaagtcggaaaattccg

SEQ ID NO: 259472 - DNA, 25 bp, Artificial
  Probe
aggagcccggcagatactccccgcc

SEQ ID NO: 259473 - DNA, 25 bp, Artificial
  Probe
cccgccgcccagacacatgagcccc

SEQ ID NO: 259474 - DNA, 25 bp, Artificial
  Probe
ccgccgcccagacacatgagcccca

SEQ ID NO: 259475 - DNA, 25 bp, Artificial
  Probe
tcacagtcccgggcctctcgtcaag

SEQ ID NO: 259476 - DNA, 25 bp, Artificial
  Probe
ccttcgagaccgcctcggtcaagtc

SEQ ID NO: 259477 - DNA, 25 bp, Artificial
  Probe
gagcgccgtggatacaggagcccgg

SEQ ID NO: 259478 - DNA, 25 bp, Artificial
  Probe
gggcctctcgtcaagcccttcgaga

SEQ ID NO: 259479 - DNA, 25 bp, Artificial
  Probe
acggagcgccgtggatacaggagcc

SEQ ID NO: 259480 - DNA, 25 bp, Artificial
  Probe
gacgctcacagtcccgggcctctcg

SEQ ID NO: 259481 - DNA, 25 bp, Artificial
  Probe
cgtggatacaggagcccggcagata

SEQ ID NO: 259482 - DNA, 25 bp, Artificial
  Probe
ctctcgtcaagcccttcgagaccgc

SEQ ID NO: 259483 - DNA, 25 bp, Artificial
  Probe
cagtcccgggcctctcgtcaagccc

SEQ ID NO: 259484 - DNA, 25 bp, Artificial
  Probe
gagaccgcctcggtcaagtcggaaa

SEQ ID NO: 259485 - DNA, 25 bp, Artificial
  Probe
ggatacaggagcccggcagatactc

SEQ ID NO: 259486 - DNA, 25 bp, Artificial
  Probe
ccgggacgctcacagtcccgggcct

SEQ ID NO: 259487 - DNA, 25 bp, Artificial
  Probe
cggcagatactccccgccgcccaga

SEQ ID NO: 259488 - DNA, 25 bp, Artificial
  Probe
acgctcacagtcccgggcctctcgt

SEQ ID NO: 259489 - DNA, 25 bp, Artificial
  Probe
ccgtggatacaggagcccggcagat

SEQ ID NO: 259490 - DNA, 25 bp, Artificial
  Probe
tcccgggcctctcgtcaagcccttc

SEQ ID NO: 259491 - DNA, 25 bp, Artificial
  Probe
agcgccgtggatacaggagcccggc

SEQ ID NO: 259492 - DNA, 25 bp, Artificial
  Probe
gtccgggacgctcacagtcccgggc

SEQ ID NO: 259493 - DNA, 25 bp, Artificial
  Probe
gaccgcctcggtcaagtcggaaaat

SEQ ID NO: 259494 - DNA, 25 bp, Artificial
  Probe
gccgtggatacaggagcccggcaga

SEQ ID NO: 259495 - DNA, 25 bp, Artificial
  Probe
gagcccggcagatactccccgccgc

SEQ ID NO: 259496 - DNA, 25 bp, Artificial
  Probe
cccgggcctctcgtcaagcccttcg

SEQ ID NO: 259497 - DNA, 25 bp, Artificial
  Probe
atacaggagcccggcagatactccc

SEQ ID NO: 259498 - DNA, 25 bp, Artificial
  Probe
cacagtcccgggcctctcgtcaagc

SEQ ID NO: 259499 - DNA, 25 bp, Artificial
  Probe
cggagcgccgtggatacaggagccc

SEQ ID NO: 259500 - DNA, 25 bp, Artificial
  Probe
gcccttcgagaccgcctcggtcaag

SEQ ID NO: 259501 - DNA, 25 bp, Artificial
  Probe
gcctctcgtcaagcccttcgagacc

SEQ ID NO: 259502 - DNA, 25 bp, Artificial
  Probe
gtcaagcccttcgagaccgcctcgg

SEQ ID NO: 259503 - DNA, 25 bp, Artificial
  Probe
gctcacagtcccgggcctctcgtca

SEQ ID NO: 259504 - DNA, 25 bp, Artificial
  Probe
tcgagaccgcctcggtcaagtcgga

SEQ ID NO: 259505 - DNA, 25 bp, Artificial
  Probe
caagcccttcgagaccgcctcggtc

SEQ ID NO: 259506 - DNA, 25 bp, Artificial
  Probe
cttcgagaccgcctcggtcaagtcg

SEQ ID NO: 259507 - DNA, 25 bp, Artificial
  Probe
tcgttttcgcggaagccgactggca

SEQ ID NO: 259508 - DNA, 25 bp, Artificial
  Probe
tcattcataggtctgcgctggggcc

SEQ ID NO: 259509 - DNA, 25 bp, Artificial
  Probe
ttcacggctggctatgtggacagca

SEQ ID NO: 259510 - DNA, 25 bp, Artificial
  Probe
aggcctgcagtttggcttcacggct

SEQ ID NO: 259511 - DNA, 25 bp, Artificial
  Probe
ggccgggacgaagcacttggtaaca

SEQ ID NO: 259512 - DNA, 25 bp, Artificial
  Probe
ctggaattctgcagctaacccttcc

SEQ ID NO: 259513 - DNA, 25 bp, Artificial
  Probe
agcacttggtaacaggcacatcttc

SEQ ID NO: 259514 - DNA, 25 bp, Artificial
  Probe
ggcaatccaagcacctagataccag

SEQ ID NO: 259515 - DNA, 25 bp, Artificial
  Probe
cgttttcgcggaagccgactggcag

SEQ ID NO: 259516 - DNA, 25 bp, Artificial
  Probe
ctccgttggcttctgaactggaatt

SEQ ID NO: 259517 - DNA, 25 bp, Artificial
  Probe
tgcagctaacccttccacgactaga

SEQ ID NO: 259518 - DNA, 25 bp, Artificial
  Probe
ccacgactagaaccttaggcattgg

SEQ ID NO: 259519 - DNA, 25 bp, Artificial
  Probe
ttggtaacaggcacatcttcctccc

SEQ ID NO: 259520 - DNA, 25 bp, Artificial
  Probe
agcaagagtcgttttcgcggaagcc

SEQ ID NO: 259521 - DNA, 25 bp, Artificial
  Probe
gaattctgcagctaacccttccacg

SEQ ID NO: 259522 - DNA, 25 bp, Artificial
  Probe
ctggctatgtggacagcaagagtcg

SEQ ID NO: 259523 - DNA, 25 bp, Artificial
  Probe
gcacttggtaacaggcacatcttcc

SEQ ID NO: 259524 - DNA, 25 bp, Artificial
  Probe
gcctccgttggcttctgaactggaa

SEQ ID NO: 259525 - DNA, 25 bp, Artificial
  Probe
ctgcagtttggcttcacggctggct

SEQ ID NO: 259526 - DNA, 25 bp, Artificial
  Probe
ccttccacgactagaaccttaggca

SEQ ID NO: 259527 - DNA, 25 bp, Artificial
  Probe
cgatcgccgatttcggtctggcgcc

SEQ ID NO: 259528 - DNA, 25 bp, Artificial
  Probe
agaggcctgcagtttggcttcacgg

SEQ ID NO: 259529 - DNA, 25 bp, Artificial
  Probe
ctgaactggaattctgcagctaacc

SEQ ID NO: 259530 - DNA, 25 bp, Artificial
  Probe
ggaattctgcagctaacccttccac

SEQ ID NO: 259531 - DNA, 25 bp, Artificial
  Probe
tggctatgtggacagcaagagtcgt

SEQ ID NO: 259532 - DNA, 25 bp, Artificial
  Probe
gacagcaagagtcgttttcgcggaa

SEQ ID NO: 259533 - DNA, 25 bp, Artificial
  Probe
cattcataggtctgcgctggggccg

SEQ ID NO: 259534 - DNA, 25 bp, Artificial
  Probe
tccgttggcttctgaactggaattc

SEQ ID NO: 259535 - DNA, 25 bp, Artificial
  Probe
aagccgactggcagccaggcctgtc

SEQ ID NO: 259536 - DNA, 25 bp, Artificial
  Probe
acaggcacatcttcctcccgagtga

SEQ ID NO: 259537 - DNA, 25 bp, Artificial
  Probe
gctatgtggacagcaagagtcgttt

SEQ ID NO: 259538 - DNA, 25 bp, Artificial
  Probe
cgcgatcgccgatttcggtctggcg

SEQ ID NO: 259539 - DNA, 25 bp, Artificial
  Probe
ccatcttcattcataggtctgcgct

SEQ ID NO: 259540 - DNA, 25 bp, Artificial
  Probe
acggctggctatgtggacagcaaga

SEQ ID NO: 259541 - DNA, 25 bp, Artificial
  Probe
cgggacgaagcacttggtaacaggc

SEQ ID NO: 259542 - DNA, 25 bp, Artificial
  Probe
tcaactcggcaatccaagcacctag

SEQ ID NO: 259543 - DNA, 25 bp, Artificial
  Probe
agcaaactcaactcggcaatccaag

SEQ ID NO: 259544 - DNA, 25 bp, Artificial
  Probe
atgtggacagcaagagtcgttttcg

SEQ ID NO: 259545 - DNA, 25 bp, Artificial
  Probe
ggcagaggcctgcagtttggcttca

SEQ ID NO: 259546 - DNA, 25 bp, Artificial
  Probe
caagagtcgttttcgcggaagccga

SEQ ID NO: 259547 - DNA, 25 bp, Artificial
  Probe
ctccatcttcattcataggtctgcg

SEQ ID NO: 259548 - DNA, 25 bp, Artificial
  Probe
gacgaagcacttggtaacaggcaca

SEQ ID NO: 259549 - DNA, 25 bp, Artificial
  Probe
cagtttggcttcacggctggctatg

SEQ ID NO: 259550 - DNA, 25 bp, Artificial
  Probe
tatgtggacagcaagagtcgttttc

SEQ ID NO: 259551 - DNA, 25 bp, Artificial
  Probe
tggcttcacggctggctatgtggac

SEQ ID NO: 259552 - DNA, 25 bp, Artificial
  Probe
cttccacgactagaaccttaggcat

SEQ ID NO: 259553 - DNA, 25 bp, Artificial
  Probe
acaagctgccattgccgagaaaaat

SEQ ID NO: 259554 - DNA, 25 bp, Artificial
  Probe
tcaccattcaggagggcaaggcact

SEQ ID NO: 259555 - DNA, 25 bp, Artificial
  Probe
tctggacaagcatttgatgaagcct

SEQ ID NO: 259556 - DNA, 25 bp, Artificial
  Probe
atcagagcccccaaagggcaaccag

SEQ ID NO: 259557 - DNA, 25 bp, Artificial
  Probe
accactgcagcctcaagtttgaggc

SEQ ID NO: 259558 - DNA, 25 bp, Artificial
  Probe
tgagcacggcagactccggcaagta

SEQ ID NO: 259559 - DNA, 25 bp, Artificial
  Probe
cgctgctgttgtgaaaatgattcgg

SEQ ID NO: 259560 - DNA, 25 bp, Artificial
  Probe
cgacgaccactgcagcctcaagttt

SEQ ID NO: 259561 - DNA, 25 bp, Artificial
  Probe
gggaagacagccttcttcaccatct

SEQ ID NO: 259562 - DNA, 25 bp, Artificial
  Probe
ccactgcagcctcaagtttgaggct

SEQ ID NO: 259563 - DNA, 25 bp, Artificial
  Probe
tcagtgtgttcatccccgaggagga

SEQ ID NO: 259564 - DNA, 25 bp, Artificial
  Probe
tgtcctggctgaaaaatgagaagcc

SEQ ID NO: 259565 - DNA, 25 bp, Artificial
  Probe
cccaaagggcaaccagaagtccaag

SEQ ID NO: 259566 - DNA, 25 bp, Artificial
  Probe
agcctcaagtttgaggctgggaaga

SEQ ID NO: 259567 - DNA, 25 bp, Artificial
  Probe
tttgaggctgggaagacagccttct

SEQ ID NO: 259568 - DNA, 25 bp, Artificial
  Probe
aggttaaaacaagctgccattgccg

SEQ ID NO: 259569 - DNA, 25 bp, Artificial
  Probe
gtgtcctggctgaaaaatgagaagc

SEQ ID NO: 259570 - DNA, 25 bp, Artificial
  Probe
gcggtctcccggatgttgtcaccat

SEQ ID NO: 259571 - DNA, 25 bp, Artificial
  Probe
tgagaagccgctgacctccgacgac

SEQ ID NO: 259572 - DNA, 25 bp, Artificial
  Probe
agaagtcggtggatctctctggaca

SEQ ID NO: 259573 - DNA, 25 bp, Artificial
  Probe
gctggacaccagaagtcggtggatc

SEQ ID NO: 259574 - DNA, 25 bp, Artificial
  Probe
cctcctggtgtctccctgctttgtg

SEQ ID NO: 259575 - DNA, 25 bp, Artificial
  Probe
agggcaaggcactcaatctcacctg

SEQ ID NO: 259576 - DNA, 25 bp, Artificial
  Probe
aaccagaagtccaagtgagcggaga

SEQ ID NO: 259577 - DNA, 25 bp, Artificial
  Probe
caagtttgaggctgggaagacagcc

SEQ ID NO: 259578 - DNA, 25 bp, Artificial
  Probe
gttaaaacaagctgccattgccgag

SEQ ID NO: 259579 - DNA, 25 bp, Artificial
  Probe
cctgaggtgtcctggctgaaaaatg

SEQ ID NO: 259580 - DNA, 25 bp, Artificial
  Probe
ctgaattccagaggttaaaacaagc

SEQ ID NO: 259581 - DNA, 25 bp, Artificial
  Probe
acgaggctggacaccagaagtcggt

SEQ ID NO: 259582 - DNA, 25 bp, Artificial
  Probe
gtgacttcaccgtcagtgtgttcat

SEQ ID NO: 259583 - DNA, 25 bp, Artificial
  Probe
agggagcatcagagcccccaaaggg

SEQ ID NO: 259584 - DNA, 25 bp, Artificial
  Probe
agcacggcagactccggcaagtacg

SEQ ID NO: 259585 - DNA, 25 bp, Artificial
  Probe
cattgccgagaaaaatcgggctcgg

SEQ ID NO: 259586 - DNA, 25 bp, Artificial
  Probe
agatgaggagatcctcctggtgtct

SEQ ID NO: 259587 - DNA, 25 bp, Artificial
  Probe
attcaggagggcaaggcactcaatc

SEQ ID NO: 259588 - DNA, 25 bp, Artificial
  Probe
agacagccttcttcaccatctcagg

SEQ ID NO: 259589 - DNA, 25 bp, Artificial
  Probe
cagagcccccaaagggcaaccagaa

SEQ ID NO: 259590 - DNA, 25 bp, Artificial
  Probe
ctgccattgccgagaaaaatcgggc

SEQ ID NO: 259591 - DNA, 25 bp, Artificial
  Probe
ggacaccagaagtcggtggatctct

SEQ ID NO: 259592 - DNA, 25 bp, Artificial
  Probe
tgatgaagcctttgctgaattccag

SEQ ID NO: 259593 - DNA, 25 bp, Artificial
  Probe
ccaccgcgctgctgttgtgaaaatg

SEQ ID NO: 259594 - DNA, 25 bp, Artificial
  Probe
gacgaccactgcagcctcaagtttg

SEQ ID NO: 259595 - DNA, 25 bp, Artificial
  Probe
atacggctcggagaccagtgacttc

SEQ ID NO: 259596 - DNA, 25 bp, Artificial
  Probe
atgagaagccgctgacctccgacga

SEQ ID NO: 259597 - DNA, 25 bp, Artificial
  Probe
ctcaatctcacctgcaatgtgtggg

SEQ ID NO: 259598 - DNA, 25 bp, Artificial
  Probe
caacccctgaggtgtcctggctgaa

SEQ ID NO: 259599 - DNA, 25 bp, Artificial
  Probe
aaagtcgtctctgcttaaggagaga

SEQ ID NO: 259600 - DNA, 25 bp, Artificial
  Probe
ctgtttgactcatgttgacttaatt

SEQ ID NO: 259601 - DNA, 25 bp, Artificial
  Probe
tttacagtagtcaaagggctatcta

SEQ ID NO: 259602 - DNA, 25 bp, Artificial
  Probe
tgtaatcagccctgggaagtgagaa

SEQ ID NO: 259603 - DNA, 25 bp, Artificial
  Probe
ctctgcttaaggagagatgtatctt

SEQ ID NO: 259604 - DNA, 25 bp, Artificial
  Probe
agttcaagttaactgtttgactcat

SEQ ID NO: 259605 - DNA, 25 bp, Artificial
  Probe
agggctatctatgcagctttaaaag

SEQ ID NO: 259606 - DNA, 25 bp, Artificial
  Probe
attaaacatgtttcccatggtagaa

SEQ ID NO: 259607 - DNA, 25 bp, Artificial
  Probe
gagccaacaacctgttagcaattat

SEQ ID NO: 259608 - DNA, 25 bp, Artificial
  Probe
tcatattcagagttcaagttaactg

SEQ ID NO: 259609 - DNA, 25 bp, Artificial
  Probe
cttaaaagtcgtctctgcttaagga

SEQ ID NO: 259610 - DNA, 25 bp, Artificial
  Probe
agccctgggaagtgagaatgtctct

SEQ ID NO: 259611 - DNA, 25 bp, Artificial
  Probe
agtcaaagggctatctatgcagctt

SEQ ID NO: 259612 - DNA, 25 bp, Artificial
  Probe
ttaaaagtcgtctctgcttaaggag

SEQ ID NO: 259613 - DNA, 25 bp, Artificial
  Probe
tatccccctggcttaaagatagaga

SEQ ID NO: 259614 - DNA, 25 bp, Artificial
  Probe
ctatctatgcagctttaaaagaagt

SEQ ID NO: 259615 - DNA, 25 bp, Artificial
  Probe
acatgtttcccatggtagaaaggat

SEQ ID NO: 259616 - DNA, 25 bp, Artificial
  Probe
tagagagagccaacaacctgttagc

SEQ ID NO: 259617 - DNA, 25 bp, Artificial
  Probe
gtctcttggaattgggcatttacag

SEQ ID NO: 259618 - DNA, 25 bp, Artificial
  Probe
cccctggcttaaagatagagagagc

SEQ ID NO: 259619 - DNA, 25 bp, Artificial
  Probe
tccccaaaatggaaaattttgtatg

SEQ ID NO: 259620 - DNA, 25 bp, Artificial
  Probe
tacttaaaagtcgtctctgcttaag

SEQ ID NO: 259621 - DNA, 25 bp, Artificial
  Probe
atcagccctgggaagtgagaatgtc

SEQ ID NO: 259622 - DNA, 25 bp, Artificial
  Probe
ggatttgtaatcagccctgggaagt

SEQ ID NO: 259623 - DNA, 25 bp, Artificial
  Probe
gcatttacagtagtcaaagggctat

SEQ ID NO: 259624 - DNA, 25 bp, Artificial
  Probe
caaagggctatctatgcagctttaa

SEQ ID NO: 259625 - DNA, 25 bp, Artificial
  Probe
ccccctggcttaaagatagagagag

SEQ ID NO: 259626 - DNA, 25 bp, Artificial
  Probe
caagttaactgtttgactcatgttg

SEQ ID NO: 259627 - DNA, 25 bp, Artificial
  Probe
cattaaacatgtttcccatggtaga

SEQ ID NO: 259628 - DNA, 25 bp, Artificial
  Probe
catattcagagttcaagttaactgt

SEQ ID NO: 259629 - DNA, 25 bp, Artificial
  Probe
cgtctctgcttaaggagagatgtat

SEQ ID NO: 259630 - DNA, 25 bp, Artificial
  Probe
actgtttgactcatgttgacttaat

SEQ ID NO: 259631 - DNA, 25 bp, Artificial
  Probe
ttcaagttaactgtttgactcatgt

SEQ ID NO: 259632 - DNA, 25 bp, Artificial
  Probe
aacatgtttcccatggtagaaagga

SEQ ID NO: 259633 - DNA, 25 bp, Artificial
  Probe
ataagagatattatccccctggctt

SEQ ID NO: 259634 - DNA, 25 bp, Artificial
  Probe
atgtctcttggaattgggcatttac

SEQ ID NO: 259635 - DNA, 25 bp, Artificial
  Probe
ggctatctatgcagctttaaaagaa

SEQ ID NO: 259636 - DNA, 25 bp, Artificial
  Probe
aggatttgtaatcagccctgggaag

SEQ ID NO: 259637 - DNA, 25 bp, Artificial
  Probe
gtcgtctctgcttaaggagagatgt

SEQ ID NO: 259638 - DNA, 25 bp, Artificial
  Probe
tagtcaaagggctatctatgcagct

SEQ ID NO: 259639 - DNA, 25 bp, Artificial
  Probe
agttaactgtttgactcatgttgac

SEQ ID NO: 259640 - DNA, 25 bp, Artificial
  Probe
taagagatattatccccctggctta

SEQ ID NO: 259641 - DNA, 25 bp, Artificial
  Probe
ggcatttacagtagtcaaagggcta

SEQ ID NO: 259642 - DNA, 25 bp, Artificial
  Probe
agtcgtctctgcttaaggagagatg

SEQ ID NO: 259643 - DNA, 25 bp, Artificial
  Probe
catgtttcccatggtagaaaggatt

SEQ ID NO: 259644 - DNA, 25 bp, Artificial
  Probe
taactgtttgactcatgttgactta

SEQ ID NO: 259645 - DNA, 25 bp, Artificial
  Probe
ccgtccacgagaatgtcctcttagg

SEQ ID NO: 259646 - DNA, 25 bp, Artificial
  Probe
gtccacgagaatgtcctcttaggtc

SEQ ID NO: 259647 - DNA, 25 bp, Artificial
  Probe
ttcatcggggcctgaagatttagaa

SEQ ID NO: 259648 - DNA, 25 bp, Artificial
  Probe
ttcttaatgacatcagagagaatcg

SEQ ID NO: 259649 - DNA, 25 bp, Artificial
  Probe
cttaatgacatcagagagaatcgtt

SEQ ID NO: 259650 - DNA, 25 bp, Artificial
  Probe
ctttcttgtccctttagagaatgtg

SEQ ID NO: 259651 - DNA, 25 bp, Artificial
  Probe
ccaggaaactgaacacagagatatg

SEQ ID NO: 259652 - DNA, 25 bp, Artificial
  Probe
tgcccagggctctttattctcaatt

SEQ ID NO: 259653 - DNA, 25 bp, Artificial
  Probe
gctcaagaagcaagcggccctttcg

SEQ ID NO: 259654 - DNA, 25 bp, Artificial
  Probe
ttgagtcctatcctctgtgcccagg

SEQ ID NO: 259655 - DNA, 25 bp, Artificial
  Probe
tgtcctcttaggtcgcactcttgca

SEQ ID NO: 259656 - DNA, 25 bp, Artificial
  Probe
ctcttaggtcgcactcttgcacaca

SEQ ID NO: 259657 - DNA, 25 bp, Artificial
  Probe
catcattcttaatgacatcagagag

SEQ ID NO: 259658 - DNA, 25 bp, Artificial
  Probe
gttcagaatcccaacaagcttgagt

SEQ ID NO: 259659 - DNA, 25 bp, Artificial
  Probe
cttgtccctttagagaatgtgtgta

SEQ ID NO: 259660 - DNA, 25 bp, Artificial
  Probe
atgactttcttgtccctttagagaa

SEQ ID NO: 259661 - DNA, 25 bp, Artificial
  Probe
agctgactcgggtctgaagccatgt

SEQ ID NO: 259662 - DNA, 25 bp, Artificial
  Probe
tcctctgtgcccagggctctttatt

SEQ ID NO: 259663 - DNA, 25 bp, Artificial
  Probe
agggctctttattctcaattcatcg

SEQ ID NO: 259664 - DNA, 25 bp, Artificial
  Probe
ccctccaggaaactgaacacagaga

SEQ ID NO: 259665 - DNA, 25 bp, Artificial
  Probe
agtcctatcctctgtgcccagggct

SEQ ID NO: 259666 - DNA, 25 bp, Artificial
  Probe
agattttggcagctgactcgggtct

SEQ ID NO: 259667 - DNA, 25 bp, Artificial
  Probe
gaatcgttcagaatcccaacaagct

SEQ ID NO: 259668 - DNA, 25 bp, Artificial
  Probe
tcattcttaatgacatcagagagaa

SEQ ID NO: 259669 - DNA, 25 bp, Artificial
  Probe
acaagcttgagtcctatcctctgtg

SEQ ID NO: 259670 - DNA, 25 bp, Artificial
  Probe
tttcgggcatcaacggaggcctgga

SEQ ID NO: 259671 - DNA, 25 bp, Artificial
  Probe
gttaggcgcgaagactttgccccct

SEQ ID NO: 259672 - DNA, 25 bp, Artificial
  Probe
taggtcgcactcttgcacacagatt

SEQ ID NO: 259673 - DNA, 25 bp, Artificial
  Probe
acagattttggcagctgactcgggt

SEQ ID NO: 259674 - DNA, 25 bp, Artificial
  Probe
caacaagcttgagtcctatcctctg

SEQ ID NO: 259675 - DNA, 25 bp, Artificial
  Probe
actcgggtctgaagccatgtggcca

SEQ ID NO: 259676 - DNA, 25 bp, Artificial
  Probe
agcaagcggccctttcgggcatcaa

SEQ ID NO: 259677 - DNA, 25 bp, Artificial
  Probe
gagatatgactttcttgtcccttta

SEQ ID NO: 259678 - DNA, 25 bp, Artificial
  Probe
agatatgactttcttgtccctttag

SEQ ID NO: 259679 - DNA, 25 bp, Artificial
  Probe
attctcaattcatcggggcctgaag

SEQ ID NO: 259680 - DNA, 25 bp, Artificial
  Probe
gagaatcgttcagaatcccaacaag

SEQ ID NO: 259681 - DNA, 25 bp, Artificial
  Probe
gccctttcgggcatcaacggaggcc

SEQ ID NO: 259682 - DNA, 25 bp, Artificial
  Probe
aaactgaacacagagatatgacttt

SEQ ID NO: 259683 - DNA, 25 bp, Artificial
  Probe
caagcggccctttcgggcatcaacg

SEQ ID NO: 259684 - DNA, 25 bp, Artificial
  Probe
gaatcccaacaagcttgagtcctat

SEQ ID NO: 259685 - DNA, 25 bp, Artificial
  Probe
ttggcagctgactcgggtctgaagc

SEQ ID NO: 259686 - DNA, 25 bp, Artificial
  Probe
gcacacagattttggcagctgactc

SEQ ID NO: 259687 - DNA, 25 bp, Artificial
  Probe
gcccagggctctttattctcaattc

SEQ ID NO: 259688 - DNA, 25 bp, Artificial
  Probe
tgtgcccagggctctttattctcaa

SEQ ID NO: 259689 - DNA, 25 bp, Artificial
  Probe
aactgaacacagagatatgactttc

SEQ ID NO: 259690 - DNA, 25 bp, Artificial
  Probe
ccctttagagaatgtgtgtagatac

SEQ ID NO: 259691 - DNA, 25 bp, Artificial
  Probe
gatgatcaatcgtatcgaaaagaac

SEQ ID NO: 259692 - DNA, 25 bp, Artificial
  Probe
acttttctagctaccgaggtggaga

SEQ ID NO: 259693 - DNA, 25 bp, Artificial
  Probe
ttcaggccacaatgcctgggagaaa

SEQ ID NO: 259694 - DNA, 25 bp, Artificial
  Probe
gttggcagctgctcgttcatggagt

SEQ ID NO: 259695 - DNA, 25 bp, Artificial
  Probe
cagttggagcgcagcatccgtgaac

SEQ ID NO: 259696 - DNA, 25 bp, Artificial
  Probe
agaacattctgagctcagcagacta

SEQ ID NO: 259697 - DNA, 25 bp, Artificial
  Probe
gatcttcacttttctagctaccgag

SEQ ID NO: 259698 - DNA, 25 bp, Artificial
  Probe
gctcttctgggttggcagctgctcg

SEQ ID NO: 259699 - DNA, 25 bp, Artificial
  Probe
gactatgtggaacgtgggcaagaac

SEQ ID NO: 259700 - DNA, 25 bp, Artificial
  Probe
tcatggagtccttcccttcaggcca

SEQ ID NO: 259701 - DNA, 25 bp, Artificial
  Probe
tctagctaccgaggtggagatgcag

SEQ ID NO: 259702 - DNA, 25 bp, Artificial
  Probe
gcgcagcatccgtgaactccatgag

SEQ ID NO: 259703 - DNA, 25 bp, Artificial
  Probe
agagacccagcatttgtggaggcag

SEQ ID NO: 259704 - DNA, 25 bp, Artificial
  Probe
aacattctgagctcagcagactatg

SEQ ID NO: 259705 - DNA, 25 bp, Artificial
  Probe
tggagcgcagcatccgtgaactcca

SEQ ID NO: 259706 - DNA, 25 bp, Artificial
  Probe
tccagcagttggagcgcagcatccg

SEQ ID NO: 259707 - DNA, 25 bp, Artificial
  Probe
gcgacacagtgagatccagcagttg

SEQ ID NO: 259708 - DNA, 25 bp, Artificial
  Probe
cccttgtgcagaagggcatatggct

SEQ ID NO: 259709 - DNA, 25 bp, Artificial
  Probe
ggcatatggctcttctgggttggca

SEQ ID NO: 259710 - DNA, 25 bp, Artificial
  Probe
ctatgtggaacgtgggcaagaacat

SEQ ID NO: 259711 - DNA, 25 bp, Artificial
  Probe
agtgagatccagcagttggagcgca

SEQ ID NO: 259712 - DNA, 25 bp, Artificial
  Probe
ctgggttggcagctgctcgttcatg

SEQ ID NO: 259713 - DNA, 25 bp, Artificial
  Probe
gatcaatcgtatcgaaaagaacatt

SEQ ID NO: 259714 - DNA, 25 bp, Artificial
  Probe
agcagactatgtggaacgtgggcaa

SEQ ID NO: 259715 - DNA, 25 bp, Artificial
  Probe
cagcagactatgtggaacgtgggca

SEQ ID NO: 259716 - DNA, 25 bp, Artificial
  Probe
atccagcagttggagcgcagcatcc

SEQ ID NO: 259717 - DNA, 25 bp, Artificial
  Probe
ttctgggttggcagctgctcgttca

SEQ ID NO: 259718 - DNA, 25 bp, Artificial
  Probe
gcagctgctcgttcatggagtcctt

SEQ ID NO: 259719 - DNA, 25 bp, Artificial
  Probe
gtgaactccatgagatcttcacttt

SEQ ID NO: 259720 - DNA, 25 bp, Artificial
  Probe
ccaatgtcctgtttgtctgggacat

SEQ ID NO: 259721 - DNA, 25 bp, Artificial
  Probe
gagatcttcacttttctagctaccg

SEQ ID NO: 259722 - DNA, 25 bp, Artificial
  Probe
acatgtcaagatagcgctagagaat

SEQ ID NO: 259723 - DNA, 25 bp, Artificial
  Probe
atatggctcttctgggttggcagct

SEQ ID NO: 259724 - DNA, 25 bp, Artificial
  Probe
acacagtgagatccagcagttggag

SEQ ID NO: 259725 - DNA, 25 bp, Artificial
  Probe
ggctcttctgggttggcagctgctc

SEQ ID NO: 259726 - DNA, 25 bp, Artificial
  Probe
ttcatggagtccttcccttcaggcc

SEQ ID NO: 259727 - DNA, 25 bp, Artificial
  Probe
ccttcaggccacaatgcctgggaga

SEQ ID NO: 259728 - DNA, 25 bp, Artificial
  Probe
ttctagctaccgaggtggagatgca

SEQ ID NO: 259729 - DNA, 25 bp, Artificial
  Probe
cattctgagctcagcagactatgtg

SEQ ID NO: 259730 - DNA, 25 bp, Artificial
  Probe
aacagagacccagcatttgtggagg

SEQ ID NO: 259731 - DNA, 25 bp, Artificial
  Probe
tgagatccagcagttggagcgcagc

SEQ ID NO: 259732 - DNA, 25 bp, Artificial
  Probe
cagactatgtggaacgtgggcaaga

SEQ ID NO: 259733 - DNA, 25 bp, Artificial
  Probe
gaacatgtcaagatagcgctagaga

SEQ ID NO: 259734 - DNA, 25 bp, Artificial
  Probe
acccagcatttgtggaggcagggca

SEQ ID NO: 259735 - DNA, 25 bp, Artificial
  Probe
gaacattctgagctcagcagactat

SEQ ID NO: 259736 - DNA, 25 bp, Artificial
  Probe
gttggagcgcagcatccgtgaactc

SEQ ID NO: 259737 - DNA, 25 bp, Artificial
  Probe
atctaatgctactcactggattttg

SEQ ID NO: 259738 - DNA, 25 bp, Artificial
  Probe
cagctgctggactggctgatggcaa

SEQ ID NO: 259739 - DNA, 25 bp, Artificial
  Probe
cacccgagggctgtgaaatccccaa

SEQ ID NO: 259740 - DNA, 25 bp, Artificial
  Probe
cagagctcaatgtccctattttgta

SEQ ID NO: 259741 - DNA, 25 bp, Artificial
  Probe
acccgagggctgtgaaatccccaag

SEQ ID NO: 259742 - DNA, 25 bp, Artificial
  Probe
gtgttcctgcagtgggccgagtccc

SEQ ID NO: 259743 - DNA, 25 bp, Artificial
  Probe
tccccaaggtgatcgtcagcaacca

SEQ ID NO: 259744 - DNA, 25 bp, Artificial
  Probe
cagctctcagccactgctgtggaga

SEQ ID NO: 259745 - DNA, 25 bp, Artificial
  Probe
ggattttgcagattttcttgtccat

SEQ ID NO: 259746 - DNA, 25 bp, Artificial
  Probe
tggctgatggcaaacctgtgattgg

SEQ ID NO: 259747 - DNA, 25 bp, Artificial
  Probe
tggctgacactgttcagaacaagca

SEQ ID NO: 259748 - DNA, 25 bp, Artificial
  Probe
tgatcgtcagcaaccacaatctggc

SEQ ID NO: 259749 - DNA, 25 bp, Artificial
  Probe
acccggtgttcctgcagtgggccga

SEQ ID NO: 259750 - DNA, 25 bp, Artificial
  Probe
agggctgtgaaatccccaaggtgat

SEQ ID NO: 259751 - DNA, 25 bp, Artificial
  Probe
ttttcttgtccatgcgagcaaggac

SEQ ID NO: 259752 - DNA, 25 bp, Artificial
  Probe
tgttcagaacaagcagctgcaagct

SEQ ID NO: 259753 - DNA, 25 bp, Artificial
  Probe
ctgatggcaaacctgtgattggggc

SEQ ID NO: 259754 - DNA, 25 bp, Artificial
  Probe
ctggctgatggcaaacctgtgattg

SEQ ID NO: 259755 - DNA, 25 bp, Artificial
  Probe
ctgcagtcggtgcttaggtatgaga

SEQ ID NO: 259756 - DNA, 25 bp, Artificial
  Probe
aatgtccctattttgtacttcgctg

SEQ ID NO: 259757 - DNA, 25 bp, Artificial
  Probe
gaatccaggagaagctgcttcagct

SEQ ID NO: 259758 - DNA, 25 bp, Artificial
  Probe
atgtcacgcggctgcagctgctgga

SEQ ID NO: 259759 - DNA, 25 bp, Artificial
  Probe
gcctcagagctcaatgtccctattt

SEQ ID NO: 259760 - DNA, 25 bp, Artificial
  Probe
aggaatccaggagaagctgcttcag

SEQ ID NO: 259761 - DNA, 25 bp, Artificial
  Probe
gcaaccacaatctggctgacactgt

SEQ ID NO: 259762 - DNA, 25 bp, Artificial
  Probe
ccaggagaagctgcttcagctctca

SEQ ID NO: 259763 - DNA, 25 bp, Artificial
  Probe
tcgctggtgacgatgaaggaatcca

SEQ ID NO: 259764 - DNA, 25 bp, Artificial
  Probe
gctgcaagctgtccttcagtgggtg

SEQ ID NO: 259765 - DNA, 25 bp, Artificial
  Probe
gtcacgcggctgcagctgctggact

SEQ ID NO: 259766 - DNA, 25 bp, Artificial
  Probe
ttctgcagtcggtgcttaggtatga

SEQ ID NO: 259767 - DNA, 25 bp, Artificial
  Probe
ccacaatctggctgacactgttcag

SEQ ID NO: 259768 - DNA, 25 bp, Artificial
  Probe
ggcaaacctgtgattggggcccacc

SEQ ID NO: 259769 - DNA, 25 bp, Artificial
  Probe
tgtccatgcgagcaaggacataaat

SEQ ID NO: 259770 - DNA, 25 bp, Artificial
  Probe
ctattttgtacttcgctggtgacga

SEQ ID NO: 259771 - DNA, 25 bp, Artificial
  Probe
tcactggattttgcagattttcttg

SEQ ID NO: 259772 - DNA, 25 bp, Artificial
  Probe
ccactgctgtggagaaagaccgaag

SEQ ID NO: 259773 - DNA, 25 bp, Artificial
  Probe
gccatctaatgctactcactggatt

SEQ ID NO: 259774 - DNA, 25 bp, Artificial
  Probe
cacccggtgttcctgcagtgggccg

SEQ ID NO: 259775 - DNA, 25 bp, Artificial
  Probe
gggtggctgcctcagagctcaatgt

SEQ ID NO: 259776 - DNA, 25 bp, Artificial
  Probe
atcgtcagcaaccacaatctggctg

SEQ ID NO: 259777 - DNA, 25 bp, Artificial
  Probe
gacagccacccgagggctgtgaaat

SEQ ID NO: 259778 - DNA, 25 bp, Artificial
  Probe
tgtgaaatccccaaggtgatcgtca

SEQ ID NO: 259779 - DNA, 25 bp, Artificial
  Probe
cccaaggtgatcgtcagcaaccaca

SEQ ID NO: 259780 - DNA, 25 bp, Artificial
  Probe
tttgtacttcgctggtgacgatgaa

SEQ ID NO: 259781 - DNA, 25 bp, Artificial
  Probe
ctcagagctcaatgtccctattttg

SEQ ID NO: 259782 - DNA, 25 bp, Artificial
  Probe
cacgccatctaatgctactcactgg

SEQ ID NO: 259783 - DNA, 25 bp, Artificial
  Probe
cctcatgaagcctgcatggtcagat

SEQ ID NO: 259784 - DNA, 25 bp, Artificial
  Probe
gccaagaccgggtaaggagaaaatg

SEQ ID NO: 259785 - DNA, 25 bp, Artificial
  Probe
ctatgtttttggtgtccctatggta

SEQ ID NO: 259786 - DNA, 25 bp, Artificial
  Probe
cccgccgtaaaacactggtggcact

SEQ ID NO: 259787 - DNA, 25 bp, Artificial
  Probe
gacccgccgtaaaacactggtggca

SEQ ID NO: 259788 - DNA, 25 bp, Artificial
  Probe
tctctgtgcattttcctaaagcttg

SEQ ID NO: 259789 - DNA, 25 bp, Artificial
  Probe
ggcagaccgagacaaccctgagacc

SEQ ID NO: 259790 - DNA, 25 bp, Artificial
  Probe
agagcctcatgaagcctgcatggtc

SEQ ID NO: 259791 - DNA, 25 bp, Artificial
  Probe
accatcactgccagagcctcatgaa

SEQ ID NO: 259792 - DNA, 25 bp, Artificial
  Probe
tctatatggctatcccgagggtaag

SEQ ID NO: 259793 - DNA, 25 bp, Artificial
  Probe
ccctatggtaggtcccactgacctt

SEQ ID NO: 259794 - DNA, 25 bp, Artificial
  Probe
gtaaggacaccctgcgggagactat

SEQ ID NO: 259795 - DNA, 25 bp, Artificial
  Probe
aaatgggtgtcttcttctctgggac

SEQ ID NO: 259796 - DNA, 25 bp, Artificial
  Probe
tgagacccgccgtaaaacactggtg

SEQ ID NO: 259797 - DNA, 25 bp, Artificial
  Probe
actgccagagcctcatgaagcctgc

SEQ ID NO: 259798 - DNA, 25 bp, Artificial
  Probe
gagacaaccctgagacccgccgtaa

SEQ ID NO: 259799 - DNA, 25 bp, Artificial
  Probe
tacagactgggcagaccgagacaac

SEQ ID NO: 259800 - DNA, 25 bp, Artificial
  Probe
agctgatctgcatgcccgctatggc

SEQ ID NO: 259801 - DNA, 25 bp, Artificial
  Probe
ttcttctctgggaccccagcatgct

SEQ ID NO: 259802 - DNA, 25 bp, Artificial
  Probe
tgtcttcttctctgggaccccagca

SEQ ID NO: 259803 - DNA, 25 bp, Artificial
  Probe
acaccctgcgggagactatcaagtt

SEQ ID NO: 259804 - DNA, 25 bp, Artificial
  Probe
tgaagtaccctatgtttttggtgtc

SEQ ID NO: 259805 - DNA, 25 bp, Artificial
  Probe
tgctgttgttatgacctattggacc

SEQ ID NO: 259806 - DNA, 25 bp, Artificial
  Probe
ccgccgtaaaacactggtggcactc

SEQ ID NO: 259807 - DNA, 25 bp, Artificial
  Probe
catcactgccagagcctcatgaagc

SEQ ID NO: 259808 - DNA, 25 bp, Artificial
  Probe
tgcatggtcagatgcagcacacggg

SEQ ID NO: 259809 - DNA, 25 bp, Artificial
  Probe
ggaccccagcatgctcttacctttg

SEQ ID NO: 259810 - DNA, 25 bp, Artificial
  Probe
tggtgacagctgatctgcatgcccg

SEQ ID NO: 259811 - DNA, 25 bp, Artificial
  Probe
atggctatcccgagggtaaggacac

SEQ ID NO: 259812 - DNA, 25 bp, Artificial
  Probe
tcatgaagcctgcatggtcagatgc

SEQ ID NO: 259813 - DNA, 25 bp, Artificial
  Probe
accctatgtttttggtgtccctatg

SEQ ID NO: 259814 - DNA, 25 bp, Artificial
  Probe
gagacccgccgtaaaacactggtgg

SEQ ID NO: 259815 - DNA, 25 bp, Artificial
  Probe
atcccgagggtaaggacaccctgcg

SEQ ID NO: 259816 - DNA, 25 bp, Artificial
  Probe
ctgggcagaccgagacaaccctgag

SEQ ID NO: 259817 - DNA, 25 bp, Artificial
  Probe
ccgtaaaacactggtggcactcttc

SEQ ID NO: 259818 - DNA, 25 bp, Artificial
  Probe
cagactgggcagaccgagacaaccc

SEQ ID NO: 259819 - DNA, 25 bp, Artificial
  Probe
tatgctcagtgctgttgttatgacc

SEQ ID NO: 259820 - DNA, 25 bp, Artificial
  Probe
tttggtgtccctatggtaggtccca

SEQ ID NO: 259821 - DNA, 25 bp, Artificial
  Probe
ttatgctcagtgctgttgttatgac

SEQ ID NO: 259822 - DNA, 25 bp, Artificial
  Probe
tgggaccccagcatgctcttacctt

SEQ ID NO: 259823 - DNA, 25 bp, Artificial
  Probe
gctcagtgctgttgttatgacctat

SEQ ID NO: 259824 - DNA, 25 bp, Artificial
  Probe
ctatcccgagggtaaggacaccctg

SEQ ID NO: 259825 - DNA, 25 bp, Artificial
  Probe
ccctgcgggagactatcaagttcat

SEQ ID NO: 259826 - DNA, 25 bp, Artificial
  Probe
catggtcagatgcagcacacgggga

SEQ ID NO: 259827 - DNA, 25 bp, Artificial
  Probe
cagtgctgttgttatgacctattgg

SEQ ID NO: 259828 - DNA, 25 bp, Artificial
  Probe
taccctatgtttttggtgtccctat

SEQ ID NO: 259829 - DNA, 25 bp, Artificial
  Probe
tgggcagcccaatgacttcttccct

SEQ ID NO: 259830 - DNA, 25 bp, Artificial
  Probe
ttactggccagcaggaagccatctc

SEQ ID NO: 259831 - DNA, 25 bp, Artificial
  Probe
tgcaacatacaggttaccaaagtga

SEQ ID NO: 259832 - DNA, 25 bp, Artificial
  Probe
tttccaaatttacaagccattggag

SEQ ID NO: 259833 - DNA, 25 bp, Artificial
  Probe
gccctgttaggttttccacagagac

SEQ ID NO: 259834 - DNA, 25 bp, Artificial
  Probe
tcttactggccagcaggaagccatc

SEQ ID NO: 259835 - DNA, 25 bp, Artificial
  Probe
ttccacagagaccactttcttagtg

SEQ ID NO: 259836 - DNA, 25 bp, Artificial
  Probe
aatttacaagccattggagatcccc

SEQ ID NO: 259837 - DNA, 25 bp, Artificial
  Probe
gttcagcattcctgggcagcccaat

SEQ ID NO: 259838 - DNA, 25 bp, Artificial
  Probe
tttttgacaaagacatgacgctgac

SEQ ID NO: 259839 - DNA, 25 bp, Artificial
  Probe
ggaaaggctgctgatttctttggca

SEQ ID NO: 259840 - DNA, 25 bp, Artificial
  Probe
gacaaagacatgacgctgacataaa

SEQ ID NO: 259841 - DNA, 25 bp, Artificial
  Probe
cagcaggaagccatctctccaggga

SEQ ID NO: 259842 - DNA, 25 bp, Artificial
  Probe
ggcagatcttactggccagcaggaa

SEQ ID NO: 259843 - DNA, 25 bp, Artificial
  Probe
tactgcaacatacaggttaccaaag

SEQ ID NO: 259844 - DNA, 25 bp, Artificial
  Probe
agagtggcagcctggagttcagcat

SEQ ID NO: 259845 - DNA, 25 bp, Artificial
  Probe
tgtcacagagacatttttgacaaag

SEQ ID NO: 259846 - DNA, 25 bp, Artificial
  Probe
cctgtagtaccaagaagagaaagct

SEQ ID NO: 259847 - DNA, 25 bp, Artificial
  Probe
tgacgctgacataaagggaaaggct

SEQ ID NO: 259848 - DNA, 25 bp, Artificial
  Probe
agggaatgccccagtaaatagctct

SEQ ID NO: 259849 - DNA, 25 bp, Artificial
  Probe
actcacacccagtgttgtggtgtca

SEQ ID NO: 259850 - DNA, 25 bp, Artificial
  Probe
tttacaagccattggagatcccctc

SEQ ID NO: 259851 - DNA, 25 bp, Artificial
  Probe
aatatgaaatcctgtagtaccaaga

SEQ ID NO: 259852 - DNA, 25 bp, Artificial
  Probe
cagtgttgtggtgtcacagagacat

SEQ ID NO: 259853 - DNA, 25 bp, Artificial
  Probe
tgctgatttctttggcagatcttac

SEQ ID NO: 259854 - DNA, 25 bp, Artificial
  Probe
cactttcttagtggacaaatatgaa

SEQ ID NO: 259855 - DNA, 25 bp, Artificial
  Probe
aacagccctgttaggttttccacag

SEQ ID NO: 259856 - DNA, 25 bp, Artificial
  Probe
tccaaatttacaagccattggagat

SEQ ID NO: 259857 - DNA, 25 bp, Artificial
  Probe
atctctccagggaatgccccagtaa

SEQ ID NO: 259858 - DNA, 25 bp, Artificial
  Probe
aagacatgacgctgacataaaggga

SEQ ID NO: 259859 - DNA, 25 bp, Artificial
  Probe
gcattcctgggcagcccaatgactt

SEQ ID NO: 259860 - DNA, 25 bp, Artificial
  Probe
ctgccagtgattgatgccaaaaata

SEQ ID NO: 259861 - DNA, 25 bp, Artificial
  Probe
tggccagcaggaagccatctctcca

SEQ ID NO: 259862 - DNA, 25 bp, Artificial
  Probe
gcagcccaatgacttcttccctgtt

SEQ ID NO: 259863 - DNA, 25 bp, Artificial
  Probe
gtgcacgttctctgcgcgcaaggac

SEQ ID NO: 259864 - DNA, 25 bp, Artificial
  Probe
acatttttgacaaagacatgacgct

SEQ ID NO: 259865 - DNA, 25 bp, Artificial
  Probe
ttgacaaagacatgacgctgacata

SEQ ID NO: 259866 - DNA, 25 bp, Artificial
  Probe
gatttctttggcagatcttactggc

SEQ ID NO: 259867 - DNA, 25 bp, Artificial
  Probe
tttttctgatacagtgcacgttctc

SEQ ID NO: 259868 - DNA, 25 bp, Artificial
  Probe
tgttaggttttccacagagaccact

SEQ ID NO: 259869 - DNA, 25 bp, Artificial
  Probe
ctctccagggaatgccccagtaaat

SEQ ID NO: 259870 - DNA, 25 bp, Artificial
  Probe
agaattactgcaacatacaggttac

SEQ ID NO: 259871 - DNA, 25 bp, Artificial
  Probe
gaagccatctctccagggaatgccc

SEQ ID NO: 259872 - DNA, 25 bp, Artificial
  Probe
tggtgtcacagagacatttttgaca

SEQ ID NO: 259873 - DNA, 25 bp, Artificial
  Probe
gaattactgcaacatacaggttacc

SEQ ID NO: 259874 - DNA, 25 bp, Artificial
  Probe
ggttttccacagagaccactttctt

SEQ ID NO: 259875 - DNA, 25 bp, Artificial
  Probe
accccatcaatgacggcgagtggca

SEQ ID NO: 259876 - DNA, 25 bp, Artificial
  Probe
cctgcagcatcgtgcccaggcaggg

SEQ ID NO: 259877 - DNA, 25 bp, Artificial
  Probe
tctcaagaatctggtgctgcactca

SEQ ID NO: 259878 - DNA, 25 bp, Artificial
  Probe
aggagctggtcatcggccggtcccc

SEQ ID NO: 259879 - DNA, 25 bp, Artificial
  Probe
caaagacttcattagccttggacta

SEQ ID NO: 259880 - DNA, 25 bp, Artificial
  Probe
cctctgggatcacaggctgtctcaa

SEQ ID NO: 259881 - DNA, 25 bp, Artificial
  Probe
tcaatgacggcgagtggcatcgagt

SEQ ID NO: 259882 - DNA, 25 bp, Artificial
  Probe
tacaggatggccatcttgtcttcaa

SEQ ID NO: 259883 - DNA, 25 bp, Artificial
  Probe
ccatccaagtagacggtgaggagct

SEQ ID NO: 259884 - DNA, 25 bp, Artificial
  Probe
gtgaaagagtccagccgcagcaaag

SEQ ID NO: 259885 - DNA, 25 bp, Artificial
  Probe
aatctggtgctgcactcagcccggc

SEQ ID NO: 259886 - DNA, 25 bp, Artificial
  Probe
ggtgccccagatgtggccacactga

SEQ ID NO: 259887 - DNA, 25 bp, Artificial
  Probe
ctggacctgcagcatcgtgcccagg

SEQ ID NO: 259888 - DNA, 25 bp, Artificial
  Probe
tggtgctgcactcagcccggcctgg

SEQ ID NO: 259889 - DNA, 25 bp, Artificial
  Probe
ggccagagaggctccatccaagtag

SEQ ID NO: 259890 - DNA, 25 bp, Artificial
  Probe
ttctcctctgggatcacaggctgtc

SEQ ID NO: 259891 - DNA, 25 bp, Artificial
  Probe
tggtggtgccccagatgtggccaca

SEQ ID NO: 259892 - DNA, 25 bp, Artificial
  Probe
taccaactgggcagtggggaagccc

SEQ ID NO: 259893 - DNA, 25 bp, Artificial
  Probe
agagggccagagaggctccatccaa

SEQ ID NO: 259894 - DNA, 25 bp, Artificial
  Probe
gatggccatcttgtcttcaactacc

SEQ ID NO: 259895 - DNA, 25 bp, Artificial
  Probe
acccagcctgacagtgccgagtata

SEQ ID NO: 259896 - DNA, 25 bp, Artificial
  Probe
gaagcccgccttgtctctgaagacc

SEQ ID NO: 259897 - DNA, 25 bp, Artificial
  Probe
ctatattggtggtgccccagatgtg

SEQ ID NO: 259898 - DNA, 25 bp, Artificial
  Probe
ttgtctctgaagaccccatcaatga

SEQ ID NO: 259899 - DNA, 25 bp, Artificial
  Probe
caagttctcctctgggatcacaggc

SEQ ID NO: 259900 - DNA, 25 bp, Artificial
  Probe
ctcaagaatctggtgctgcactcag

SEQ ID NO: 259901 - DNA, 25 bp, Artificial
  Probe
tgaccaggggcaagttctcctctgg

SEQ ID NO: 259902 - DNA, 25 bp, Artificial
  Probe
gtaatgtggccgtcaacaccaagga

SEQ ID NO: 259903 - DNA, 25 bp, Artificial
  Probe
tccccgggtcgtaatgtggccgtca

SEQ ID NO: 259904 - DNA, 25 bp, Artificial
  Probe
ccagatgtggccacactgaccaggg

SEQ ID NO: 259905 - DNA, 25 bp, Artificial
  Probe
tctgaagaccccatcaatgacggcg

SEQ ID NO: 259906 - DNA, 25 bp, Artificial
  Probe
acttcattagccttggactacagga

SEQ ID NO: 259907 - DNA, 25 bp, Artificial
  Probe
ttggactacaggatggccatcttgt

SEQ ID NO: 259908 - DNA, 25 bp, Artificial
  Probe
tgggcagcacccagcctgacagtgc

SEQ ID NO: 259909 - DNA, 25 bp, Artificial
  Probe
cgggtcgtaatgtggccgtcaacac

SEQ ID NO: 259910 - DNA, 25 bp, Artificial
  Probe
gagtccagccgcagcaaagacttca

SEQ ID NO: 259911 - DNA, 25 bp, Artificial
  Probe
acaccaaggacatcatctatattgg

SEQ ID NO: 259912 - DNA, 25 bp, Artificial
  Probe
gggatcacaggctgtctcaagaatc

SEQ ID NO: 259913 - DNA, 25 bp, Artificial
  Probe
ctgtctcaagaatctggtgctgcac

SEQ ID NO: 259914 - DNA, 25 bp, Artificial
  Probe
atcttgtcttcaactaccaactggg

SEQ ID NO: 259915 - DNA, 25 bp, Artificial
  Probe
ggccacactgaccaggggcaagttc

SEQ ID NO: 259916 - DNA, 25 bp, Artificial
  Probe
agaatctggtgctgcactcagcccg

SEQ ID NO: 259917 - DNA, 25 bp, Artificial
  Probe
ttcaactaccaactgggcagtgggg

SEQ ID NO: 259918 - DNA, 25 bp, Artificial
  Probe
gccgtcaacaccaaggacatcatct

SEQ ID NO: 259919 - DNA, 25 bp, Artificial
  Probe
cttgtctctgaagaccccatcaatg

SEQ ID NO: 259920 - DNA, 25 bp, Artificial
  Probe
gggaagcccgccttgtctctgaaga

SEQ ID NO: 259921 - DNA, 25 bp, Artificial
  Probe
tataaaccatggagttcctaaagca

SEQ ID NO: 259922 - DNA, 25 bp, Artificial
  Probe
cagggcaagctcatagcatatgttt

SEQ ID NO: 259923 - DNA, 25 bp, Artificial
  Probe
agctcatagcatatgttttacagag

SEQ ID NO: 259924 - DNA, 25 bp, Artificial
  Probe
tatcagggcaagctcatagcatatg

SEQ ID NO: 259925 - DNA, 25 bp, Artificial
  Probe
tcatgtgacaactgtaaacgtggtg

SEQ ID NO: 259926 - DNA, 25 bp, Artificial
  Probe
ctattcgtaagttccgtgcagtttg

SEQ ID NO: 259927 - DNA, 25 bp, Artificial
  Probe
ttcttatgtcatcaagtagtagtac

SEQ ID NO: 259928 - DNA, 25 bp, Artificial
  Probe
tacattcttctgagttttgtgagac

SEQ ID NO: 259929 - DNA, 25 bp, Artificial
  Probe
caactgtaaacgtggtgaatttact

SEQ ID NO: 259930 - DNA, 25 bp, Artificial
  Probe
cttatgtcatcaagtagtagtacgt

SEQ ID NO: 259931 - DNA, 25 bp, Artificial
  Probe
gtacgtaatagtacccaacacagca

SEQ ID NO: 259932 - DNA, 25 bp, Artificial
  Probe
tctcaacttgtgtgctattcgtaag

SEQ ID NO: 259933 - DNA, 25 bp, Artificial
  Probe
cttctgagttttgtgagacttcctc

SEQ ID NO: 259934 - DNA, 25 bp, Artificial
  Probe
ttattctcaacttgtgtgctattcg

SEQ ID NO: 259935 - DNA, 25 bp, Artificial
  Probe
gcaattattctcaacttgtgtgcta

SEQ ID NO: 259936 - DNA, 25 bp, Artificial
  Probe
taaaccatggagttcctaaagcact

SEQ ID NO: 259937 - DNA, 25 bp, Artificial
  Probe
ttctgagttttgtgagacttcctct

SEQ ID NO: 259938 - DNA, 25 bp, Artificial
  Probe
tttctttcttaagtatcagggcaag

SEQ ID NO: 259939 - DNA, 25 bp, Artificial
  Probe
gttttaaaacagttcatgtgacaac

SEQ ID NO: 259940 - DNA, 25 bp, Artificial
  Probe
aagtatcagggcaagctcatagcat

SEQ ID NO: 259941 - DNA, 25 bp, Artificial
  Probe
agttttgtgagacttcctcttaatt

SEQ ID NO: 259942 - DNA, 25 bp, Artificial
  Probe
ctgtcaaatcattttgatgtgctat

SEQ ID NO: 259943 - DNA, 25 bp, Artificial
  Probe
gagttcctaaagcactagcaataag

SEQ ID NO: 259944 - DNA, 25 bp, Artificial
  Probe
gctattcgtaagttccgtgcagttt

SEQ ID NO: 259945 - DNA, 25 bp, Artificial
  Probe
actgtcaaatcattttgatgtgcta

SEQ ID NO: 259946 - DNA, 25 bp, Artificial
  Probe
tgattttcctcctttgtcaaacggt

SEQ ID NO: 259947 - DNA, 25 bp, Artificial
  Probe
aacagttcatgtgacaactgtaaac

SEQ ID NO: 259948 - DNA, 25 bp, Artificial
  Probe
gtatgtatactctttaagactgcct

SEQ ID NO: 259949 - DNA, 25 bp, Artificial
  Probe
catgtgacaactgtaaacgtggtga

SEQ ID NO: 259950 - DNA, 25 bp, Artificial
  Probe
agcaattattctcaacttgtgtgct

SEQ ID NO: 259951 - DNA, 25 bp, Artificial
  Probe
cagcaattattctcaacttgtgtgc

SEQ ID NO: 259952 - DNA, 25 bp, Artificial
  Probe
ttcttctgagttttgtgagacttcc

SEQ ID NO: 259953 - DNA, 25 bp, Artificial
  Probe
catagcatatgttttacagagacat

SEQ ID NO: 259954 - DNA, 25 bp, Artificial
  Probe
agtacgtaatagtacccaacacagc

SEQ ID NO: 259955 - DNA, 25 bp, Artificial
  Probe
ttaaaacagttcatgtgacaactgt

SEQ ID NO: 259956 - DNA, 25 bp, Artificial
  Probe
ctcatagcatatgttttacagagac

SEQ ID NO: 259957 - DNA, 25 bp, Artificial
  Probe
gtgattttcctcctttgtcaaacgg

SEQ ID NO: 259958 - DNA, 25 bp, Artificial
  Probe
gttcatgtgacaactgtaaacgtgg

SEQ ID NO: 259959 - DNA, 25 bp, Artificial
  Probe
atgtatgtatactctttaagactgc

SEQ ID NO: 259960 - DNA, 25 bp, Artificial
  Probe
tctgatttctttcttaagtatcagg

SEQ ID NO: 259961 - DNA, 25 bp, Artificial
  Probe
ttcttaagtatcagggcaagctcat

SEQ ID NO: 259962 - DNA, 25 bp, Artificial
  Probe
gacatagactataaaccatggagtt

SEQ ID NO: 259963 - DNA, 25 bp, Artificial
  Probe
actataaaccatggagttcctaaag

SEQ ID NO: 259964 - DNA, 25 bp, Artificial
  Probe
tcgtaagttccgtgcagtttggtat

SEQ ID NO: 259965 - DNA, 25 bp, Artificial
  Probe
cgtaagttccgtgcagtttggtatg

SEQ ID NO: 259966 - DNA, 25 bp, Artificial
  Probe
ggaaacatctgatttctttcttaag

SEQ ID NO: 259967 - DNA, 25 bp, Artificial
  Probe
gaacaaatcaaatcttgctgcgatc

SEQ ID NO: 259968 - DNA, 25 bp, Artificial
  Probe
agacgcgggtgcttcctgttgcctt

SEQ ID NO: 259969 - DNA, 25 bp, Artificial
  Probe
gtcagcctagactgatcgcctggcg

SEQ ID NO: 259970 - DNA, 25 bp, Artificial
  Probe
tgcaagcggtcaggagttgcgtcat

SEQ ID NO: 259971 - DNA, 25 bp, Artificial
  Probe
gccttcggctgagatccagaactga

SEQ ID NO: 259972 - DNA, 25 bp, Artificial
  Probe
atcgcctggcgtggactaccgcgga

SEQ ID NO: 259973 - DNA, 25 bp, Artificial
  Probe
aactacctggagttttacaatgtca

SEQ ID NO: 259974 - DNA, 25 bp, Artificial
  Probe
ttagacacgacctcttcgggcaaga

SEQ ID NO: 259975 - DNA, 25 bp, Artificial
  Probe
tgagatccagaactgaacaaatcaa

SEQ ID NO: 259976 - DNA, 25 bp, Artificial
  Probe
aaatcaaatcttgctgcgatcagag

SEQ ID NO: 259977 - DNA, 25 bp, Artificial
  Probe
acgcgggtgcttcctgttgccttgc

SEQ ID NO: 259978 - DNA, 25 bp, Artificial
  Probe
cctcttcgggcaagatagaattttt

SEQ ID NO: 259979 - DNA, 25 bp, Artificial
  Probe
caaatcaaatcttgctgcgatcaga

SEQ ID NO: 259980 - DNA, 25 bp, Artificial
  Probe
gacgcgggtgcttcctgttgccttg

SEQ ID NO: 259981 - DNA, 25 bp, Artificial
  Probe
tggtcagcctagactgatcgcctgg

SEQ ID NO: 259982 - DNA, 25 bp, Artificial
  Probe
tcagcctagactgatcgcctggcgt

SEQ ID NO: 259983 - DNA, 25 bp, Artificial
  Probe
acctcttcgggcaagatagaatttt

SEQ ID NO: 259984 - DNA, 25 bp, Artificial
  Probe
agactgatcgcctggcgtggactac

SEQ ID NO: 259985 - DNA, 25 bp, Artificial
  Probe
tcaggagttgcgtcatgggacagac

SEQ ID NO: 259986 - DNA, 25 bp, Artificial
  Probe
gttgtgtttaactcccaactacctg

SEQ ID NO: 259987 - DNA, 25 bp, Artificial
  Probe
cccaactacctggagttttacaatg

SEQ ID NO: 259988 - DNA, 25 bp, Artificial
  Probe
cggccttcggctgagatccagaact

SEQ ID NO: 259989 - DNA, 25 bp, Artificial
  Probe
caactacctggagttttacaatgtc

SEQ ID NO: 259990 - DNA, 25 bp, Artificial
  Probe
tgtttaactcccaactacctggagt

SEQ ID NO: 259991 - DNA, 25 bp, Artificial
  Probe
actgaacaaatcaaatcttgctgcg

SEQ ID NO: 259992 - DNA, 25 bp, Artificial
  Probe
acagacgcgggtgcttcctgttgcc

SEQ ID NO: 259993 - DNA, 25 bp, Artificial
  Probe
gcgggtgcttcctgttgccttgcgt

SEQ ID NO: 259994 - DNA, 25 bp, Artificial
  Probe
ttaccagcgaatttaagaaagtctg

SEQ ID NO: 259995 - DNA, 25 bp, Artificial
  Probe
gacacgacctcttcgggcaagatag

SEQ ID NO: 259996 - DNA, 25 bp, Artificial
  Probe
cgccctagggactgggaagtgactt

SEQ ID NO: 259997 - DNA, 25 bp, Artificial
  Probe
ctgaacaaatcaaatcttgctgcga

SEQ ID NO: 259998 - DNA, 25 bp, Artificial
  Probe
tcgcctggcgtggactaccgcggaa

SEQ ID NO: 259999 - DNA, 25 bp, Artificial
  Probe
ccggccttcggctgagatccagaac

SEQ ID NO: 260000 - DNA, 25 bp, Artificial
  Probe
ccgccctagggactgggaagtgact

SEQ ID NO: 260001 - DNA, 25 bp, Artificial
  Probe
ctgagatccagaactgaacaaatca

SEQ ID NO: 260002 - DNA, 25 bp, Artificial
  Probe
cttcggctgagatccagaactgaac

SEQ ID NO: 260003 - DNA, 25 bp, Artificial
  Probe
gacagacgcgggtgcttcctgttgc

SEQ ID NO: 260004 - DNA, 25 bp, Artificial
  Probe
cttcctgttgccttgcgtgggtgtg

SEQ ID NO: 260005 - DNA, 25 bp, Artificial
  Probe
tagacacgacctcttcgggcaagat

SEQ ID NO: 260006 - DNA, 25 bp, Artificial
  Probe
cgcctggcgtggactaccgcggaaa

SEQ ID NO: 260007 - DNA, 25 bp, Artificial
  Probe
tttaccagcgaatttaagaaagtct

SEQ ID NO: 260008 - DNA, 25 bp, Artificial
  Probe
ctcttcgggcaagatagaatttttt

SEQ ID NO: 260009 - DNA, 25 bp, Artificial
  Probe
ggctgagatccagaactgaacaaat

SEQ ID NO: 260010 - DNA, 25 bp, Artificial
  Probe
tcggctgagatccagaactgaacaa

SEQ ID NO: 260011 - DNA, 25 bp, Artificial
  Probe
agcctagactgatcgcctggcgtgg

SEQ ID NO: 260012 - DNA, 25 bp, Artificial
  Probe
cgggtgcttcctgttgccttgcgtg

SEQ ID NO: 260013 - DNA, 25 bp, Artificial
  Probe
gacgaggagccggaggaagaggagg

SEQ ID NO: 260014 - DNA, 25 bp, Artificial
  Probe
tcacctactgagcccaccgtcagcg

SEQ ID NO: 260015 - DNA, 25 bp, Artificial
  Probe
caaatccagacatacccctcccccg

SEQ ID NO: 260016 - DNA, 25 bp, Artificial
  Probe
cccgtctagtatcgccgacctggtt

SEQ ID NO: 260017 - DNA, 25 bp, Artificial
  Probe
cctagtcgtgcccatccccccacaa

SEQ ID NO: 260018 - DNA, 25 bp, Artificial
  Probe
gagcccaccgtcagcggggcgcgca

SEQ ID NO: 260019 - DNA, 25 bp, Artificial
  Probe
accctgtcggaggacgaggagccgg

SEQ ID NO: 260020 - DNA, 25 bp, Artificial
  Probe
cgaggagccggaggaagaggaggag

SEQ ID NO: 260021 - DNA, 25 bp, Artificial
  Probe
cgtctagtatcgccgacctggtttt

SEQ ID NO: 260022 - DNA, 25 bp, Artificial
  Probe
cgacctggttttcacctactgagcc

SEQ ID NO: 260023 - DNA, 25 bp, Artificial
  Probe
cggggcgcgcacgcccccaaaccag

SEQ ID NO: 260024 - DNA, 25 bp, Artificial
  Probe
agtatcgccgacctggttttcacct

SEQ ID NO: 260025 - DNA, 25 bp, Artificial
  Probe
tatcgccgacctggttttcacctac

SEQ ID NO: 260026 - DNA, 25 bp, Artificial
  Probe
aggagacggtggcatcgggggagga

SEQ ID NO: 260027 - DNA, 25 bp, Artificial
  Probe
tactgagcccaccgtcagcggggcg

SEQ ID NO: 260028 - DNA, 25 bp, Artificial
  Probe
ccaaaccagctgtttacatacagga

SEQ ID NO: 260029 - DNA, 25 bp, Artificial
  Probe
caaaccagctgtttacatacaggaa

SEQ ID NO: 260030 - DNA, 25 bp, Artificial
  Probe
tggttttcacctactgagcccaccg

SEQ ID NO: 260031 - DNA, 25 bp, Artificial
  Probe
cccaccgtcagcggggcgcgcacgc

SEQ ID NO: 260032 - DNA, 25 bp, Artificial
  Probe
aaccagctgtttacatacaggaatc

SEQ ID NO: 260033 - DNA, 25 bp, Artificial
  Probe
tctagtatcgccgacctggttttca

SEQ ID NO: 260034 - DNA, 25 bp, Artificial
  Probe
aagaggagacggtggcatcggggga

SEQ ID NO: 260035 - DNA, 25 bp, Artificial
  Probe
gaggacgaggagccggaggaagagg

SEQ ID NO: 260036 - DNA, 25 bp, Artificial
  Probe
gtatcgccgacctggttttcaccta

SEQ ID NO: 260037 - DNA, 25 bp, Artificial
  Probe
ctagtatcgccgacctggttttcac

SEQ ID NO: 260038 - DNA, 25 bp, Artificial
  Probe
ctggttttcacctactgagcccacc

SEQ ID NO: 260039 - DNA, 25 bp, Artificial
  Probe
acctggttttcacctactgagccca

SEQ ID NO: 260040 - DNA, 25 bp, Artificial
  Probe
cctggttttcacctactgagcccac

SEQ ID NO: 260041 - DNA, 25 bp, Artificial
  Probe
ggttttcacctactgagcccaccgt

SEQ ID NO: 260042 - DNA, 25 bp, Artificial
  Probe
ccgtcagcggggcgcgcacgccccc

SEQ ID NO: 260043 - DNA, 25 bp, Artificial
  Probe
gacctggttttcacctactgagccc

SEQ ID NO: 260044 - DNA, 25 bp, Artificial
  Probe
tagtatcgccgacctggttttcacc

SEQ ID NO: 260045 - DNA, 25 bp, Artificial
  Probe
accagctgtttacatacaggaatca

SEQ ID NO: 260046 - DNA, 25 bp, Artificial
  Probe
ccccaaaccagctgtttacatacag

SEQ ID NO: 260047 - DNA, 25 bp, Artificial
  Probe
cctcctagtcgtgcccatcccccca

SEQ ID NO: 260048 - DNA, 25 bp, Artificial
  Probe
ctgtcggaggacgaggagccggagg

SEQ ID NO: 260049 - DNA, 25 bp, Artificial
  Probe
aaaccagctgtttacatacaggaat

SEQ ID NO: 260050 - DNA, 25 bp, Artificial
  Probe
gttttcacctactgagcccaccgtc

SEQ ID NO: 260051 - DNA, 25 bp, Artificial
  Probe
cgcccccaaaccagctgtttacata

SEQ ID NO: 260052 - DNA, 25 bp, Artificial
  Probe
ccagctgtttacatacaggaatcag

SEQ ID NO: 260053 - DNA, 25 bp, Artificial
  Probe
cccaaaccagctgtttacatacagg

SEQ ID NO: 260054 - DNA, 25 bp, Artificial
  Probe
ggagccggaggaagaggaggaggag

SEQ ID NO: 260055 - DNA, 25 bp, Artificial
  Probe
ccacaaatccagacatacccctccc

SEQ ID NO: 260056 - DNA, 25 bp, Artificial
  Probe
acctactgagcccaccgtcagcggg

SEQ ID NO: 260057 - DNA, 25 bp, Artificial
  Probe
ccccacaaatccagacatacccctc

SEQ ID NO: 260058 - DNA, 25 bp, Artificial
  Probe
cccccacaaatccagacatacccct

SEQ ID NO: 260059 - DNA, 25 bp, Artificial
  Probe
agctgccgcggctgactgacatggc

SEQ ID NO: 260060 - DNA, 25 bp, Artificial
  Probe
cggctgactgacatggcgggcacca

SEQ ID NO: 260061 - DNA, 25 bp, Artificial
  Probe
ggctgactgacatggcgggcaccat

SEQ ID NO: 260062 - DNA, 25 bp, Artificial
  Probe
cgggcaccatgaatctgaacgatgg

SEQ ID NO: 260063 - DNA, 25 bp, Artificial
  Probe
atgacgtccaggacgatgacgggcc

SEQ ID NO: 260064 - DNA, 25 bp, Artificial
  Probe
tgacccagtcagaccccttgatgtc

SEQ ID NO: 260065 - DNA, 25 bp, Artificial
  Probe
ggagaacagaccagccaccttttct

SEQ ID NO: 260066 - DNA, 25 bp, Artificial
  Probe
agcaagccgtgtaccgtggagctgc

SEQ ID NO: 260067 - DNA, 25 bp, Artificial
  Probe
cccttgatgtctcaggctagcaccg

SEQ ID NO: 260068 - DNA, 25 bp, Artificial
  Probe
gtaagcaagccgtgtaccgtggagc

SEQ ID NO: 260069 - DNA, 25 bp, Artificial
  Probe
cgagcacggagctggatgacgtcca

SEQ ID NO: 260070 - DNA, 25 bp, Artificial
  Probe
atccaggagaacagaccagccacct

SEQ ID NO: 260071 - DNA, 25 bp, Artificial
  Probe
gctcctttaacagtaccgtgttcgg

SEQ ID NO: 260072 - DNA, 25 bp, Artificial
  Probe
ttttcttccgtgtcgcactacggca

SEQ ID NO: 260073 - DNA, 25 bp, Artificial
  Probe
cttatgcagcggagctccagcttcc

SEQ ID NO: 260074 - DNA, 25 bp, Artificial
  Probe
aggagaacagaccagccaccttttc

SEQ ID NO: 260075 - DNA, 25 bp, Artificial
  Probe
cgatgtcatgatgacccagtcagac

SEQ ID NO: 260076 - DNA, 25 bp, Artificial
  Probe
cccatcttggcgagcacggagctgg

SEQ ID NO: 260077 - DNA, 25 bp, Artificial
  Probe
tcagaccccttgatgtctcaggcta

SEQ ID NO: 260078 - DNA, 25 bp, Artificial
  Probe
atgggctggccgagaacctcatgga

SEQ ID NO: 260079 - DNA, 25 bp, Artificial
  Probe
accagctcctttaacagtaccgtgt

SEQ ID NO: 260080 - DNA, 25 bp, Artificial
  Probe
agctggatgacgtccaggacgatga

SEQ ID NO: 260081 - DNA, 25 bp, Artificial
  Probe
agtcgcccatgcagaccatccagga

SEQ ID NO: 260082 - DNA, 25 bp, Artificial
  Probe
tgcagcggagctccagcttcccgta

SEQ ID NO: 260083 - DNA, 25 bp, Artificial
  Probe
accccttgatgtctcaggctagcac

SEQ ID NO: 260084 - DNA, 25 bp, Artificial
  Probe
tgtcacccatcttggcgagcacgga

SEQ ID NO: 260085 - DNA, 25 bp, Artificial
  Probe
tgggctggccgagaacctcatggat

SEQ ID NO: 260086 - DNA, 25 bp, Artificial
  Probe
gtccaggacgatgacgggcccctct

SEQ ID NO: 260087 - DNA, 25 bp, Artificial
  Probe
ccttttcttccgtgtcgcactacgg

SEQ ID NO: 260088 - DNA, 25 bp, Artificial
  Probe
ggccgagaacctcatggatgacctg

SEQ ID NO: 260089 - DNA, 25 bp, Artificial
  Probe
tggccgagaacctcatggatgacct

SEQ ID NO: 260090 - DNA, 25 bp, Artificial
  Probe
ggctggccgagaacctcatggatga

SEQ ID NO: 260091 - DNA, 25 bp, Artificial
  Probe
caggagaacagaccagccacctttt

SEQ ID NO: 260092 - DNA, 25 bp, Artificial
  Probe
tcatgatgacccagtcagacccctt

SEQ ID NO: 260093 - DNA, 25 bp, Artificial
  Probe
accatccaggagaacagaccagcca

SEQ ID NO: 260094 - DNA, 25 bp, Artificial
  Probe
tgaatctgaacgatgggctggccga

SEQ ID NO: 260095 - DNA, 25 bp, Artificial
  Probe
gatgtcatgatgacccagtcagacc

SEQ ID NO: 260096 - DNA, 25 bp, Artificial
  Probe
aagcaagccgtgtaccgtggagctg

SEQ ID NO: 260097 - DNA, 25 bp, Artificial
  Probe
ctggatgacgtccaggacgatgacg

SEQ ID NO: 260098 - DNA, 25 bp, Artificial
  Probe
acgtccaggacgatgacgggcccct

SEQ ID NO: 260099 - DNA, 25 bp, Artificial
  Probe
cagtcagaccccttgatgtctcagg

SEQ ID NO: 260100 - DNA, 25 bp, Artificial
  Probe
tgaacgatgggctggccgagaacct

SEQ ID NO: 260101 - DNA, 25 bp, Artificial
  Probe
gacatggcgggcaccatgaatctga

SEQ ID NO: 260102 - DNA, 25 bp, Artificial
  Probe
aaccagctcctttaacagtaccgtg

SEQ ID NO: 260103 - DNA, 25 bp, Artificial
  Probe
tcgcccatgcagaccatccaggaga

SEQ ID NO: 260104 - DNA, 25 bp, Artificial
  Probe
catcttggcgagcacggagctggat

SEQ ID NO: 260105 - DNA, 25 bp, Artificial
  Probe
ccgttcaagagttggctgcccttga

SEQ ID NO: 260106 - DNA, 25 bp, Artificial
  Probe
ggagtaatcgcgtctgtagtcttaa

SEQ ID NO: 260107 - DNA, 25 bp, Artificial
  Probe
agctgaactattactgctaactctg

SEQ ID NO: 260108 - DNA, 25 bp, Artificial
  Probe
gcaaacacaaatcttaggagttctt

SEQ ID NO: 260109 - DNA, 25 bp, Artificial
  Probe
gctgttcagaaccttctgatttcat

SEQ ID NO: 260110 - DNA, 25 bp, Artificial
  Probe
tgcagctactttctgagatagaaga

SEQ ID NO: 260111 - DNA, 25 bp, Artificial
  Probe
acagtgtttacagtagctgaactat

SEQ ID NO: 260112 - DNA, 25 bp, Artificial
  Probe
agttggctgcccttgaaaaggaagc

SEQ ID NO: 260113 - DNA, 25 bp, Artificial
  Probe
cacagtgtttacagtagctgaacta

SEQ ID NO: 260114 - DNA, 25 bp, Artificial
  Probe
gtgcttctgagcacagtgtttacag

SEQ ID NO: 260115 - DNA, 25 bp, Artificial
  Probe
tgtttacagtagctgaactattact

SEQ ID NO: 260116 - DNA, 25 bp, Artificial
  Probe
tcttaggagttcttcataaaatggc

SEQ ID NO: 260117 - DNA, 25 bp, Artificial
  Probe
ctgcccttgaaaaggaagcacagac

SEQ ID NO: 260118 - DNA, 25 bp, Artificial
  Probe
gaactattactgctaactctgcatg

SEQ ID NO: 260119 - DNA, 25 bp, Artificial
  Probe
tattactgctaactctgcatgtcgg

SEQ ID NO: 260120 - DNA, 25 bp, Artificial
  Probe
ctgagcacagtgtttacagtagctg

SEQ ID NO: 260121 - DNA, 25 bp, Artificial
  Probe
cttctgagcacagtgtttacagtag

SEQ ID NO: 260122 - DNA, 25 bp, Artificial
  Probe
ttacagtagctgaactattactgct

SEQ ID NO: 260123 - DNA, 25 bp, Artificial
  Probe
gagtaatcgcgtctgtagtcttaac

SEQ ID NO: 260124 - DNA, 25 bp, Artificial
  Probe
gtcggcaaacacaaatcttaggagt

SEQ ID NO: 260125 - DNA, 25 bp, Artificial
  Probe
agcacagtgtttacagtagctgaac

SEQ ID NO: 260126 - DNA, 25 bp, Artificial
  Probe
acgtggtggtgcttctgagcacagt

SEQ ID NO: 260127 - DNA, 25 bp, Artificial
  Probe
cttaggagttcttcataaaatggcc

SEQ ID NO: 260128 - DNA, 25 bp, Artificial
  Probe
taacgtggtggtgcttctgagcaca

SEQ ID NO: 260129 - DNA, 25 bp, Artificial
  Probe
ctgcatgtcggcaaacacaaatctt

SEQ ID NO: 260130 - DNA, 25 bp, Artificial
  Probe
gcttctgagcacagtgtttacagta

SEQ ID NO: 260131 - DNA, 25 bp, Artificial
  Probe
gtgtttacagtagctgaactattac

SEQ ID NO: 260132 - DNA, 25 bp, Artificial
  Probe
taccgttcaagagttggctgccctt

SEQ ID NO: 260133 - DNA, 25 bp, Artificial
  Probe
taactctgcatgtcggcaaacacaa

SEQ ID NO: 260134 - DNA, 25 bp, Artificial
  Probe
tgttcagaaccttctgatttcatgt

SEQ ID NO: 260135 - DNA, 25 bp, Artificial
  Probe
tcaagagttggctgcccttgaaaag

SEQ ID NO: 260136 - DNA, 25 bp, Artificial
  Probe
agactcaaggaagatggcggctgta

SEQ ID NO: 260137 - DNA, 25 bp, Artificial
  Probe
ggctgcccttgaaaaggaagcacag

SEQ ID NO: 260138 - DNA, 25 bp, Artificial
  Probe
gttcagaaccttctgatttcatgta

SEQ ID NO: 260139 - DNA, 25 bp, Artificial
  Probe
cagtagctgaactattactgctaac

SEQ ID NO: 260140 - DNA, 25 bp, Artificial
  Probe
ttggctgcccttgaaaaggaagcac

SEQ ID NO: 260141 - DNA, 25 bp, Artificial
  Probe
gtagctgaactattactgctaactc

SEQ ID NO: 260142 - DNA, 25 bp, Artificial
  Probe
agttcttcataaaatggccgcctaa

SEQ ID NO: 260143 - DNA, 25 bp, Artificial
  Probe
tggtggtgcttctgagcacagtgtt

SEQ ID NO: 260144 - DNA, 25 bp, Artificial
  Probe
ccttctgatttcatgtagatggaga

SEQ ID NO: 260145 - DNA, 25 bp, Artificial
  Probe
ttactgctaactctgcatgtcggca

SEQ ID NO: 260146 - DNA, 25 bp, Artificial
  Probe
aaccttctgatttcatgtagatgga

SEQ ID NO: 260147 - DNA, 25 bp, Artificial
  Probe
gctactttctgagatagaagaacac

SEQ ID NO: 260148 - DNA, 25 bp, Artificial
  Probe
ccagctgttcagaaccttctgattt

SEQ ID NO: 260149 - DNA, 25 bp, Artificial
  Probe
gctaactctgcatgtcggcaaacac

SEQ ID NO: 260150 - DNA, 25 bp, Artificial
  Probe
cttaacgtggtggtgcttctgagca

SEQ ID NO: 260151 - DNA, 25 bp, Artificial
  Probe
gtgagtggacccaacagagctctct

SEQ ID NO: 260152 - DNA, 25 bp, Artificial
  Probe
tcagagcagagctttgatttcctca

SEQ ID NO: 260153 - DNA, 25 bp, Artificial
  Probe
atttcctcacggactggggacctcg

SEQ ID NO: 260154 - DNA, 25 bp, Artificial
  Probe
caccacaggagcaatattgtgctgg

SEQ ID NO: 260155 - DNA, 25 bp, Artificial
  Probe
ctcgcccttgtggtgacagaagccc

SEQ ID NO: 260156 - DNA, 25 bp, Artificial
  Probe
cgcttccggaaactggcagaactct

SEQ ID NO: 260157 - DNA, 25 bp, Artificial
  Probe
gtgcacccaaatccagacgttctca

SEQ ID NO: 260158 - DNA, 25 bp, Artificial
  Probe
agacgttctcaaacgctgcttctcg

SEQ ID NO: 260159 - DNA, 25 bp, Artificial
  Probe
aggaaacccagaagaagagggcaga

SEQ ID NO: 260160 - DNA, 25 bp, Artificial
  Probe
cggactcagagcagagctttgattt

SEQ ID NO: 260161 - DNA, 25 bp, Artificial
  Probe
acgctgcttctcgtccatgaggcgc

SEQ ID NO: 260162 - DNA, 25 bp, Artificial
  Probe
caaggtgcacccaaatccagacgtt

SEQ ID NO: 260163 - DNA, 25 bp, Artificial
  Probe
gagctttgatttcctcacggactgg

SEQ ID NO: 260164 - DNA, 25 bp, Artificial
  Probe
gcggccaccacaggagcaatattgt

SEQ ID NO: 260165 - DNA, 25 bp, Artificial
  Probe
aaggaaacccagaagaagagggcag

SEQ ID NO: 260166 - DNA, 25 bp, Artificial
  Probe
aggcgcggccaccacaggagcaata

SEQ ID NO: 260167 - DNA, 25 bp, Artificial
  Probe
tcagtcagccacctcggactcagag

SEQ ID NO: 260168 - DNA, 25 bp, Artificial
  Probe
actggcagaactctacggggcgtcg

SEQ ID NO: 260169 - DNA, 25 bp, Artificial
  Probe
gcttctcgtccatgaggcgcggcca

SEQ ID NO: 260170 - DNA, 25 bp, Artificial
  Probe
ccggaaactggcagaactctacggg

SEQ ID NO: 260171 - DNA, 25 bp, Artificial
  Probe
cagctttacttggttagacgaaatt

SEQ ID NO: 260172 - DNA, 25 bp, Artificial
  Probe
gaaactggcagaactctacggggcg

SEQ ID NO: 260173 - DNA, 25 bp, Artificial
  Probe
tttgatttcctcacggactggggac

SEQ ID NO: 260174 - DNA, 25 bp, Artificial
  Probe
aaacccagaagaagagggcagaatc

SEQ ID NO: 260175 - DNA, 25 bp, Artificial
  Probe
gcttccggaaactggcagaactcta

SEQ ID NO: 260176 - DNA, 25 bp, Artificial
  Probe
gacactgtattcacaggtttgaagt

SEQ ID NO: 260177 - DNA, 25 bp, Artificial
  Probe
agctctctctggatcagctttactt

SEQ ID NO: 260178 - DNA, 25 bp, Artificial
  Probe
aacagagctctctctggatcagctt

SEQ ID NO: 260179 - DNA, 25 bp, Artificial
  Probe
gctgcttctcgtccatgaggcgcgg

SEQ ID NO: 260180 - DNA, 25 bp, Artificial
  Probe
agcagagctttgatttcctcacgga

SEQ ID NO: 260181 - DNA, 25 bp, Artificial
  Probe
cccttgtggtgacagaagcccggag

SEQ ID NO: 260182 - DNA, 25 bp, Artificial
  Probe
aagagggcagaatccccaattatct

SEQ ID NO: 260183 - DNA, 25 bp, Artificial
  Probe
ttcctcacggactggggacctcgct

SEQ ID NO: 260184 - DNA, 25 bp, Artificial
  Probe
accacaggagcaatattgtgctgga

SEQ ID NO: 260185 - DNA, 25 bp, Artificial
  Probe
ggctcgctcagctcgcttcagtcag

SEQ ID NO: 260186 - DNA, 25 bp, Artificial
  Probe
gcgcggccaccacaggagcaatatt

SEQ ID NO: 260187 - DNA, 25 bp, Artificial
  Probe
ccacctcggactcagagcagagctt

SEQ ID NO: 260188 - DNA, 25 bp, Artificial
  Probe
cccaacagagctctctctggatcag

SEQ ID NO: 260189 - DNA, 25 bp, Artificial
  Probe
caaatccagacgttctcaaacgctg

SEQ ID NO: 260190 - DNA, 25 bp, Artificial
  Probe
agtggacccaacagagctctctctg

SEQ ID NO: 260191 - DNA, 25 bp, Artificial
  Probe
cctcgcttccggaaactggcagaac

SEQ ID NO: 260192 - DNA, 25 bp, Artificial
  Probe
ttgctttttgacactgtattcacag

SEQ ID NO: 260193 - DNA, 25 bp, Artificial
  Probe
tctcaaacgctgcttctcgtccatg

SEQ ID NO: 260194 - DNA, 25 bp, Artificial
  Probe
gttctcaaacgctgcttctcgtcca

SEQ ID NO: 260195 - DNA, 25 bp, Artificial
  Probe
ttcagtcagccacctcggactcaga

SEQ ID NO: 260196 - DNA, 25 bp, Artificial
  Probe
cagccacctcggactcagagcagag

SEQ ID NO: 260197 - DNA, 25 bp, Artificial
  Probe
gcgtgcttttggttttaagtcactt

SEQ ID NO: 260198 - DNA, 25 bp, Artificial
  Probe
actccaagtagaagaggctttttgt

SEQ ID NO: 260199 - DNA, 25 bp, Artificial
  Probe
ggcgtgcttttggttttaagtcact

SEQ ID NO: 260200 - DNA, 25 bp, Artificial
  Probe
aagcccttaagtgcagggatcgtgg

SEQ ID NO: 260201 - DNA, 25 bp, Artificial
  Probe
ttccccaggatcagggagctggcag

SEQ ID NO: 260202 - DNA, 25 bp, Artificial
  Probe
actctggcaagaagcccttaagtgc

SEQ ID NO: 260203 - DNA, 25 bp, Artificial
  Probe
cagctcctagcctgagaggtgtttg

SEQ ID NO: 260204 - DNA, 25 bp, Artificial
  Probe
ggacgtttcacctccacagacatag

SEQ ID NO: 260205 - DNA, 25 bp, Artificial
  Probe
ataggaagacccaagtgtgggccat

SEQ ID NO: 260206 - DNA, 25 bp, Artificial
  Probe
gaggtgtttgcctgacctgttgttt

SEQ ID NO: 260207 - DNA, 25 bp, Artificial
  Probe
ggttttaagtcacttctcaccagac

SEQ ID NO: 260208 - DNA, 25 bp, Artificial
  Probe
cagacaccagaggacacactccaag

SEQ ID NO: 260209 - DNA, 25 bp, Artificial
  Probe
ggcgtggcttcagctggacgtttca

SEQ ID NO: 260210 - DNA, 25 bp, Artificial
  Probe
ttggttttaagtcacttctcaccag

SEQ ID NO: 260211 - DNA, 25 bp, Artificial
  Probe
ggcaagaagcccttaagtgcaggga

SEQ ID NO: 260212 - DNA, 25 bp, Artificial
  Probe
cagtgcgggcgtgcttttggtttta

SEQ ID NO: 260213 - DNA, 25 bp, Artificial
  Probe
tctgccctcatcagacatcagcaga

SEQ ID NO: 260214 - DNA, 25 bp, Artificial
  Probe
ggtagagaagcctttggctttaact

SEQ ID NO: 260215 - DNA, 25 bp, Artificial
  Probe
ttgcctgacctgttgtttcctttcc

SEQ ID NO: 260216 - DNA, 25 bp, Artificial
  Probe
ccagtgcgggcgtgcttttggtttt

SEQ ID NO: 260217 - DNA, 25 bp, Artificial
  Probe
actagtgaatgttcccggaaataga

SEQ ID NO: 260218 - DNA, 25 bp, Artificial
  Probe
ggatcagggagctggcagaaatcac

SEQ ID NO: 260219 - DNA, 25 bp, Artificial
  Probe
caagtgtgggccatcagctcctagc

SEQ ID NO: 260220 - DNA, 25 bp, Artificial
  Probe
tgggattccacacctcacgtctgac

SEQ ID NO: 260221 - DNA, 25 bp, Artificial
  Probe
tccacacctcacgtctgactagagg

SEQ ID NO: 260222 - DNA, 25 bp, Artificial
  Probe
acttctcaccagacaccagaggaca

SEQ ID NO: 260223 - DNA, 25 bp, Artificial
  Probe
gcagacctactctggcaagaagccc

SEQ ID NO: 260224 - DNA, 25 bp, Artificial
  Probe
aaatcactagtgaatgttcccggaa

SEQ ID NO: 260225 - DNA, 25 bp, Artificial
  Probe
aagacccaagtgtgggccatcagct

SEQ ID NO: 260226 - DNA, 25 bp, Artificial
  Probe
tttcacctccacagacataggaaga

SEQ ID NO: 260227 - DNA, 25 bp, Artificial
  Probe
tgttgtttcctttccccaggatcag

SEQ ID NO: 260228 - DNA, 25 bp, Artificial
  Probe
tttcctttccccaggatcagggagc

SEQ ID NO: 260229 - DNA, 25 bp, Artificial
  Probe
catcagcagacctactctggcaaga

SEQ ID NO: 260230 - DNA, 25 bp, Artificial
  Probe
ttctcaccagacaccagaggacaca

SEQ ID NO: 260231 - DNA, 25 bp, Artificial
  Probe
agtccagttggtagagaagcctttg

SEQ ID NO: 260232 - DNA, 25 bp, Artificial
  Probe
ctccacagacataggaagacccaag

SEQ ID NO: 260233 - DNA, 25 bp, Artificial
  Probe
cctgagaggtgtttgcctgacctgt

SEQ ID NO: 260234 - DNA, 25 bp, Artificial
  Probe
tggctttaactctgccctcatcaga

SEQ ID NO: 260235 - DNA, 25 bp, Artificial
  Probe
gaagcctttggctttaactctgccc

SEQ ID NO: 260236 - DNA, 25 bp, Artificial
  Probe
gtagagaagcctttggctttaactc

SEQ ID NO: 260237 - DNA, 25 bp, Artificial
  Probe
tgacctgttgtttcctttccccagg

SEQ ID NO: 260238 - DNA, 25 bp, Artificial
  Probe
ttggctttaactctgccctcatcag

SEQ ID NO: 260239 - DNA, 25 bp, Artificial
  Probe
ctgacctgttgtttcctttccccag

SEQ ID NO: 260240 - DNA, 25 bp, Artificial
  Probe
ggatgggattccacacctcacgtct

SEQ ID NO: 260241 - DNA, 25 bp, Artificial
  Probe
gggaaaagtccttgcttgttcctgg

SEQ ID NO: 260242 - DNA, 25 bp, Artificial
  Probe
ctgtgctcccagtgcgggcgtgctt

SEQ ID NO: 260243 - DNA, 25 bp, Artificial
  Probe
tgttttctccaggtcccaggccgat

SEQ ID NO: 260244 - DNA, 25 bp, Artificial
  Probe
cagcagcgcgcagcttgcacgagta

SEQ ID NO: 260245 - DNA, 25 bp, Artificial
  Probe
cttgcacgagtatgcgctagggcac

SEQ ID NO: 260246 - DNA, 25 bp, Artificial
  Probe
agcgctgttttctccaggtcccagg

SEQ ID NO: 260247 - DNA, 25 bp, Artificial
  Probe
gttttctccaggtcccaggccgatt

SEQ ID NO: 260248 - DNA, 25 bp, Artificial
  Probe
gcgacacccaggtgtcgcatggcag

SEQ ID NO: 260249 - DNA, 25 bp, Artificial
  Probe
cgagtatgcgctagggcacccactc

SEQ ID NO: 260250 - DNA, 25 bp, Artificial
  Probe
cccaggtgtcgcatggcagggtcca

SEQ ID NO: 260251 - DNA, 25 bp, Artificial
  Probe
tcccaggccgatttcccaggtgagc

SEQ ID NO: 260252 - DNA, 25 bp, Artificial
  Probe
tccacgaggtgacctgcctgggcca

SEQ ID NO: 260253 - DNA, 25 bp, Artificial
  Probe
gtccacgaggtgacctgcctgggcc

SEQ ID NO: 260254 - DNA, 25 bp, Artificial
  Probe
cctgctgagcgctgttttctccagg

SEQ ID NO: 260255 - DNA, 25 bp, Artificial
  Probe
agcgcgcagcttgcacgagtatgcg

SEQ ID NO: 260256 - DNA, 25 bp, Artificial
  Probe
gcgcgcagcttgcacgagtatgcgc

SEQ ID NO: 260257 - DNA, 25 bp, Artificial
  Probe
ggccgatttcccaggtgagcggtca

SEQ ID NO: 260258 - DNA, 25 bp, Artificial
  Probe
agcttgcacgagtatgcgctagggc

SEQ ID NO: 260259 - DNA, 25 bp, Artificial
  Probe
gctgagcgctgttttctccaggtcc

SEQ ID NO: 260260 - DNA, 25 bp, Artificial
  Probe
catggcagggtccacgaggtgacct

SEQ ID NO: 260261 - DNA, 25 bp, Artificial
  Probe
ccagcagcgcgcagcttgcacgagt

SEQ ID NO: 260262 - DNA, 25 bp, Artificial
  Probe
cagcttgcacgagtatgcgctaggg

SEQ ID NO: 260263 - DNA, 25 bp, Artificial
  Probe
cacgaggtgacctgcctgggccagc

SEQ ID NO: 260264 - DNA, 25 bp, Artificial
  Probe
gcttgcacgagtatgcgctagggca

SEQ ID NO: 260265 - DNA, 25 bp, Artificial
  Probe
ccacgaggtgacctgcctgggccag

SEQ ID NO: 260266 - DNA, 25 bp, Artificial
  Probe
ccaggtgtcgcatggcagggtccac

SEQ ID NO: 260267 - DNA, 25 bp, Artificial
  Probe
cgcagcttgcacgagtatgcgctag

SEQ ID NO: 260268 - DNA, 25 bp, Artificial
  Probe
gcagcgcgcagcttgcacgagtatg

SEQ ID NO: 260269 - DNA, 25 bp, Artificial
  Probe
agcagcgcgcagcttgcacgagtat

SEQ ID NO: 260270 - DNA, 25 bp, Artificial
  Probe
cccaggccgatttcccaggtgagcg

SEQ ID NO: 260271 - DNA, 25 bp, Artificial
  Probe
gcagcttgcacgagtatgcgctagg

SEQ ID NO: 260272 - DNA, 25 bp, Artificial
  Probe
ctgttttctccaggtcccaggccga

SEQ ID NO: 260273 - DNA, 25 bp, Artificial
  Probe
cgatttcccaggtgagcggtcagtg

SEQ ID NO: 260274 - DNA, 25 bp, Artificial
  Probe
tgcctgggccagcagcgcgcagctt

SEQ ID NO: 260275 - DNA, 25 bp, Artificial
  Probe
tgagcgctgttttctccaggtccca

SEQ ID NO: 260276 - DNA, 25 bp, Artificial
  Probe
gcgcagcttgcacgagtatgcgcta

SEQ ID NO: 260277 - DNA, 25 bp, Artificial
  Probe
cagcgcgcagcttgcacgagtatgc

SEQ ID NO: 260278 - DNA, 25 bp, Artificial
  Probe
gtcccaggccgatttcccaggtgag

SEQ ID NO: 260279 - DNA, 25 bp, Artificial
  Probe
cgcgcagcttgcacgagtatgcgct

SEQ ID NO: 260280 - DNA, 25 bp, Artificial
  Probe
gccgatttcccaggtgagcggtcag

SEQ ID NO: 260281 - DNA, 25 bp, Artificial
  Probe
tgctgagcgctgttttctccaggtc

SEQ ID NO: 260282 - DNA, 25 bp, Artificial
  Probe
gctgttttctccaggtcccaggccg

SEQ ID NO: 260283 - DNA, 25 bp, Artificial
  Probe
gcgctgttttctccaggtcccaggc

SEQ ID NO: 260284 - DNA, 25 bp, Artificial
  Probe
acgagtatgcgctagggcacccact

SEQ ID NO: 260285 - DNA, 25 bp, Artificial
  Probe
cgacacccaggtgtcgcatggcagg

SEQ ID NO: 260286 - DNA, 25 bp, Artificial
  Probe
ggtcccaggccgatttcccaggtga

SEQ ID NO: 260287 - DNA, 25 bp, Artificial
  Probe
ctgagcgctgttttctccaggtccc

SEQ ID NO: 260288 - DNA, 25 bp, Artificial
  Probe
ccgatttcccaggtgagcggtcagt

SEQ ID NO: 260289 - DNA, 25 bp, Artificial
  Probe
tccaaggtttgcacccagtgtggtc

SEQ ID NO: 260290 - DNA, 25 bp, Artificial
  Probe
agcttttcctgcaacaggagcctcc

SEQ ID NO: 260291 - DNA, 25 bp, Artificial
  Probe
cacgaggctagtgctggggacccca

SEQ ID NO: 260292 - DNA, 25 bp, Artificial
  Probe
acagtccttggcaagaaacgaatga

SEQ ID NO: 260293 - DNA, 25 bp, Artificial
  Probe
actgcccttgcagacccaggggtgc

SEQ ID NO: 260294 - DNA, 25 bp, Artificial
  Probe
ctgaagccgggactcctccttgtct

SEQ ID NO: 260295 - DNA, 25 bp, Artificial
  Probe
ttccctagccttcaggtcgccatgg

SEQ ID NO: 260296 - DNA, 25 bp, Artificial
  Probe
ggctagaccttccactccattacag

SEQ ID NO: 260297 - DNA, 25 bp, Artificial
  Probe
cagacccaggggtgctttgcttgac

SEQ ID NO: 260298 - DNA, 25 bp, Artificial
  Probe
ggcccagtatatgcagaatgataca

SEQ ID NO: 260299 - DNA, 25 bp, Artificial
  Probe
tgacaatgctttcctcctgcttctg

SEQ ID NO: 260300 - DNA, 25 bp, Artificial
  Probe
tccttggcaagaaacgaatgaggat

SEQ ID NO: 260301 - DNA, 25 bp, Artificial
  Probe
ccactccattacagtccttggcaag

SEQ ID NO: 260302 - DNA, 25 bp, Artificial
  Probe
ccttgtcttggcagtgggacacact

SEQ ID NO: 260303 - DNA, 25 bp, Artificial
  Probe
cttcaggtcgccatggctcggtcct

SEQ ID NO: 260304 - DNA, 25 bp, Artificial
  Probe
ttcaggtcgccatggctcggtcctg

SEQ ID NO: 260305 - DNA, 25 bp, Artificial
  Probe
gaatgaggatctgcagagagtgtcc

SEQ ID NO: 260306 - DNA, 25 bp, Artificial
  Probe
ctgcagagagtgtccaaggtttgca

SEQ ID NO: 260307 - DNA, 25 bp, Artificial
  Probe
gctttcctcctgcttctgagctttt

SEQ ID NO: 260308 - DNA, 25 bp, Artificial
  Probe
ccctttggcacgtggcggaagctca

SEQ ID NO: 260309 - DNA, 25 bp, Artificial
  Probe
ggacacactgagcatcctgcagctc

SEQ ID NO: 260310 - DNA, 25 bp, Artificial
  Probe
tcctgctcagcttgggcctgtgaca

SEQ ID NO: 260311 - DNA, 25 bp, Artificial
  Probe
tcctcctgcttctgagcttttcctg

SEQ ID NO: 260312 - DNA, 25 bp, Artificial
  Probe
cgagagtcctgaagccgggactcct

SEQ ID NO: 260313 - DNA, 25 bp, Artificial
  Probe
gtccctttggcacgtggcggaagct

SEQ ID NO: 260314 - DNA, 25 bp, Artificial
  Probe
tgagcttttcctgcaacaggagcct

SEQ ID NO: 260315 - DNA, 25 bp, Artificial
  Probe
cctgcctggcccagtatatgcagaa

SEQ ID NO: 260316 - DNA, 25 bp, Artificial
  Probe
gagagtgtccaaggtttgcacccag

SEQ ID NO: 260317 - DNA, 25 bp, Artificial
  Probe
ggtcgccatggctcggtcctgctca

SEQ ID NO: 260318 - DNA, 25 bp, Artificial
  Probe
tcagcttgggcctgtgacaatccac

SEQ ID NO: 260319 - DNA, 25 bp, Artificial
  Probe
ccttgcagacccaggggtgctttgc

SEQ ID NO: 260320 - DNA, 25 bp, Artificial
  Probe
ctagccttcaggtcgccatggctcg

SEQ ID NO: 260321 - DNA, 25 bp, Artificial
  Probe
gccatggctcggtcctgctcagctt

SEQ ID NO: 260322 - DNA, 25 bp, Artificial
  Probe
gctgagcccccgagagtcctgaagc

SEQ ID NO: 260323 - DNA, 25 bp, Artificial
  Probe
gcccccgagagtcctgaagccggga

SEQ ID NO: 260324 - DNA, 25 bp, Artificial
  Probe
aggtttgcacccagtgtggtccctt

SEQ ID NO: 260325 - DNA, 25 bp, Artificial
  Probe
cttggcagtgggacacactgagcat

SEQ ID NO: 260326 - DNA, 25 bp, Artificial
  Probe
cagtgtggtccctttggcacgtggc

SEQ ID NO: 260327 - DNA, 25 bp, Artificial
  Probe
ttgtcttggcagtgggacacactga

SEQ ID NO: 260328 - DNA, 25 bp, Artificial
  Probe
aggatctgcagagagtgtccaaggt

SEQ ID NO: 260329 - DNA, 25 bp, Artificial
  Probe
ctgcccttgcagacccaggggtgct

SEQ ID NO: 260330 - DNA, 25 bp, Artificial
  Probe
cacccagtgtggtccctttggcacg

SEQ ID NO: 260331 - DNA, 25 bp, Artificial
  Probe
aatgctttcctcctgcttctgagct

SEQ ID NO: 260332 - DNA, 25 bp, Artificial
  Probe
tcctccttgtcttggcagtgggaca

SEQ ID NO: 260333 - DNA, 25 bp, Artificial
  Probe
gcttgacaatgctttcctcctgctt

SEQ ID NO: 260334 - DNA, 25 bp, Artificial
  Probe
cattacagtccttggcaagaaacga

SEQ ID NO: 260335 - DNA, 25 bp, Artificial
  Probe
attcctttcctatagttaagagccg

SEQ ID NO: 260336 - DNA, 25 bp, Artificial
  Probe
gtttcaagtaatctgcattcttgtt

SEQ ID NO: 260337 - DNA, 25 bp, Artificial
  Probe
gttaagagccgcagttctgcaggct

SEQ ID NO: 260338 - DNA, 25 bp, Artificial
  Probe
ccttgtttacggtgcgcctgctctg

SEQ ID NO: 260339 - DNA, 25 bp, Artificial
  Probe
gtaactgtggccacttatttgggtt

SEQ ID NO: 260340 - DNA, 25 bp, Artificial
  Probe
gctttgctcttcagcgcaagccctg

SEQ ID NO: 260341 - DNA, 25 bp, Artificial
  Probe
tttgagtaactgtggccacttattt

SEQ ID NO: 260342 - DNA, 25 bp, Artificial
  Probe
tcaatctgttgtacggtttggatgc

SEQ ID NO: 260343 - DNA, 25 bp, Artificial
  Probe
cacgaggttgggtccacacacgggt

SEQ ID NO: 260344 - DNA, 25 bp, Artificial
  Probe
cttcaaagtgcactaaagttttgtt

SEQ ID NO: 260345 - DNA, 25 bp, Artificial
  Probe
gctcttcagcgcaagccctgtaggc

SEQ ID NO: 260346 - DNA, 25 bp, Artificial
  Probe
tttagcagtggttcaaactgtttca

SEQ ID NO: 260347 - DNA, 25 bp, Artificial
  Probe
ctcttcagcgcaagccctgtaggca

SEQ ID NO: 260348 - DNA, 25 bp, Artificial
  Probe
ctaaggtcgtatactgtgcgtagta

SEQ ID NO: 260349 - DNA, 25 bp, Artificial
  Probe
tggttcaaactgtttcagaaattac

SEQ ID NO: 260350 - DNA, 25 bp, Artificial
  Probe
ggtgcgcctgctctgcacacgcagg

SEQ ID NO: 260351 - DNA, 25 bp, Artificial
  Probe
cctgtcagcagcacggagaactgtg

SEQ ID NO: 260352 - DNA, 25 bp, Artificial
  Probe
acgcaggcgcggtgctggtcactcc

SEQ ID NO: 260353 - DNA, 25 bp, Artificial
  Probe
ggtgctggtcactcctgcctctcta

SEQ ID NO: 260354 - DNA, 25 bp, Artificial
  Probe
ttacggtgcgcctgctctgcacacg

SEQ ID NO: 260355 - DNA, 25 bp, Artificial
  Probe
ggttcaaactgtttcagaaattact

SEQ ID NO: 260356 - DNA, 25 bp, Artificial
  Probe
ttaaaaccgtgtctgcctgtcagca

SEQ ID NO: 260357 - DNA, 25 bp, Artificial
  Probe
agtaactttgagtaactgtggccac

SEQ ID NO: 260358 - DNA, 25 bp, Artificial
  Probe
caggcgcggtgctggtcactcctgc

SEQ ID NO: 260359 - DNA, 25 bp, Artificial
  Probe
tctccgtttaaaaccgtgtctgcct

SEQ ID NO: 260360 - DNA, 25 bp, Artificial
  Probe
gctggtcactcctgcctctctattt

SEQ ID NO: 260361 - DNA, 25 bp, Artificial
  Probe
ttagcagtggttcaaactgtttcag

SEQ ID NO: 260362 - DNA, 25 bp, Artificial
  Probe
tactcttgttcaagcctgtgatctt

SEQ ID NO: 260363 - DNA, 25 bp, Artificial
  Probe
gggcggactcaagtcaagtgcgctt

SEQ ID NO: 260364 - DNA, 25 bp, Artificial
  Probe
ctgtgtttcaagtaatctgcattct

SEQ ID NO: 260365 - DNA, 25 bp, Artificial
  Probe
gccgcagttctgcaggctcctatct

SEQ ID NO: 260366 - DNA, 25 bp, Artificial
  Probe
ttgtctttactcttgttcaagcctg

SEQ ID NO: 260367 - DNA, 25 bp, Artificial
  Probe
cctatagttaagagccgcagttctg

SEQ ID NO: 260368 - DNA, 25 bp, Artificial
  Probe
ctctgcacacgcaggcgcggtgctg

SEQ ID NO: 260369 - DNA, 25 bp, Artificial
  Probe
tactctccgtttaaaaccgtgtctg

SEQ ID NO: 260370 - DNA, 25 bp, Artificial
  Probe
tgtaggcaccccttgtttacggtgc

SEQ ID NO: 260371 - DNA, 25 bp, Artificial
  Probe
tacttgtgctgtgtttcaagtaatc

SEQ ID NO: 260372 - DNA, 25 bp, Artificial
  Probe
gtgtctgcctgtcagcagcacggag

SEQ ID NO: 260373 - DNA, 25 bp, Artificial
  Probe
cgtttaaaaccgtgtctgcctgtca

SEQ ID NO: 260374 - DNA, 25 bp, Artificial
  Probe
cacttatttgggtttgctcatttag

SEQ ID NO: 260375 - DNA, 25 bp, Artificial
  Probe
agttctgcaggctcctatctcaatc

SEQ ID NO: 260376 - DNA, 25 bp, Artificial
  Probe
actcaagtcaagtgcgctttgctct

SEQ ID NO: 260377 - DNA, 25 bp, Artificial
  Probe
gcaccccttgtttacggtgcgcctg

SEQ ID NO: 260378 - DNA, 25 bp, Artificial
  Probe
tatcaaactcggaacttcaaagtgc

SEQ ID NO: 260379 - DNA, 25 bp, Artificial
  Probe
ggatttgctgccttcagttacttgt

SEQ ID NO: 260380 - DNA, 25 bp, Artificial
  Probe
agtcaagtgcgctttgctcttcagc

SEQ ID NO: 260381 - DNA, 25 bp, Artificial
  Probe
ggtgtaagagcctgtgctccttgct

SEQ ID NO: 260382 - DNA, 25 bp, Artificial
  Probe
aagagcctgtgctccttgctcacct

SEQ ID NO: 260383 - DNA, 25 bp, Artificial
  Probe
gacttttctgcatccacttatggaa

SEQ ID NO: 260384 - DNA, 25 bp, Artificial
  Probe
cttctgtatgggacagttatgtgct

SEQ ID NO: 260385 - DNA, 25 bp, Artificial
  Probe
gtttagctctctccatacttggaac

SEQ ID NO: 260386 - DNA, 25 bp, Artificial
  Probe
atacttggaacaaccaagctatttg

SEQ ID NO: 260387 - DNA, 25 bp, Artificial
  Probe
tttctgcatccacttatggaatctg

SEQ ID NO: 260388 - DNA, 25 bp, Artificial
  Probe
ttatgcactaccactggactccttg

SEQ ID NO: 260389 - DNA, 25 bp, Artificial
  Probe
cctgattctaactgggtcacttctg

SEQ ID NO: 260390 - DNA, 25 bp, Artificial
  Probe
acagtttagctctctccatacttgg

SEQ ID NO: 260391 - DNA, 25 bp, Artificial
  Probe
ggtgtctgctaaaacttccctgacc

SEQ ID NO: 260392 - DNA, 25 bp, Artificial
  Probe
agtctggacaaagtctcctgattct

SEQ ID NO: 260393 - DNA, 25 bp, Artificial
  Probe
tatccattgggcttctgacctgcct

SEQ ID NO: 260394 - DNA, 25 bp, Artificial
  Probe
tcctggtgtaagagcctgtgctcct

SEQ ID NO: 260395 - DNA, 25 bp, Artificial
  Probe
cacgagggctggaccgaccatatcc

SEQ ID NO: 260396 - DNA, 25 bp, Artificial
  Probe
cctacttcgttgtggccttcctggt

SEQ ID NO: 260397 - DNA, 25 bp, Artificial
  Probe
gggcttgctgtcaccctacttcgtt

SEQ ID NO: 260398 - DNA, 25 bp, Artificial
  Probe
gggcttctgacctgcctgtcatgga

SEQ ID NO: 260399 - DNA, 25 bp, Artificial
  Probe
cctgagtctggacaaagtctcctga

SEQ ID NO: 260400 - DNA, 25 bp, Artificial
  Probe
aaacttccctgaccaactgagagca

SEQ ID NO: 260401 - DNA, 25 bp, Artificial
  Probe
tacctcctgagtctggacaaagtct

SEQ ID NO: 260402 - DNA, 25 bp, Artificial
  Probe
gaggaccccttcaatatcatctgct

SEQ ID NO: 260403 - DNA, 25 bp, Artificial
  Probe
ttcgttgtggccttcctggtgtaag

SEQ ID NO: 260404 - DNA, 25 bp, Artificial
  Probe
agaacagctccgtcaagcaatgtct

SEQ ID NO: 260405 - DNA, 25 bp, Artificial
  Probe
aatatcatctgctccagggagcccc

SEQ ID NO: 260406 - DNA, 25 bp, Artificial
  Probe
cactggactccttggaggacccctt

SEQ ID NO: 260407 - DNA, 25 bp, Artificial
  Probe
gagtccagacttttctgcatccact

SEQ ID NO: 260408 - DNA, 25 bp, Artificial
  Probe
agggctggaccgaccatatccattg

SEQ ID NO: 260409 - DNA, 25 bp, Artificial
  Probe
tggaggaccccttcaatatcatctg

SEQ ID NO: 260410 - DNA, 25 bp, Artificial
  Probe
actccttggaggaccccttcaatat

SEQ ID NO: 260411 - DNA, 25 bp, Artificial
  Probe
gtcacttctgtatgggacagttatg

SEQ ID NO: 260412 - DNA, 25 bp, Artificial
  Probe
ttatgtgctgggtgtctgctaaaac

SEQ ID NO: 260413 - DNA, 25 bp, Artificial
  Probe
acagttatgtgctgggtgtctgcta

SEQ ID NO: 260414 - DNA, 25 bp, Artificial
  Probe
tggaatctgggcttgctgtcaccct

SEQ ID NO: 260415 - DNA, 25 bp, Artificial
  Probe
gacctgcctgtcatggagtccagac

SEQ ID NO: 260416 - DNA, 25 bp, Artificial
  Probe
gaccatatccattgggcttctgacc

SEQ ID NO: 260417 - DNA, 25 bp, Artificial
  Probe
ttgctgtcaccctacttcgttgtgg

SEQ ID NO: 260418 - DNA, 25 bp, Artificial
  Probe
ttggaacaaccaagctatttgtgca

SEQ ID NO: 260419 - DNA, 25 bp, Artificial
  Probe
acagctccgtcaagcaatgtctttt

SEQ ID NO: 260420 - DNA, 25 bp, Artificial
  Probe
attcagaacagctccgtcaagcaat

SEQ ID NO: 260421 - DNA, 25 bp, Artificial
  Probe
ctgggtgtctgctaaaacttccctg

SEQ ID NO: 260422 - DNA, 25 bp, Artificial
  Probe
acttatggaatctgggcttgctgtc

SEQ ID NO: 260423 - DNA, 25 bp, Artificial
  Probe
cccttcaatatcatctgctccaggg

SEQ ID NO: 260424 - DNA, 25 bp, Artificial
  Probe
gacagttatgtgctgggtgtctgct

SEQ ID NO: 260425 - DNA, 25 bp, Artificial
  Probe
tgattcagaacagctccgtcaagca

SEQ ID NO: 260426 - DNA, 25 bp, Artificial
  Probe
cagacttttctgcatccacttatgg

SEQ ID NO: 260427 - DNA, 25 bp, Artificial
  Probe
cacgcctcaggaagcccagcagtgg

SEQ ID NO: 260428 - DNA, 25 bp, Artificial
  Probe
tcttcagatcactggccagacgtgg

SEQ ID NO: 260429 - DNA, 25 bp, Artificial
  Probe
agacgtggagttcagtgtttcccta

SEQ ID NO: 260430 - DNA, 25 bp, Artificial
  Probe
agatcactggccagacgtggagttc

SEQ ID NO: 260431 - DNA, 25 bp, Artificial
  Probe
cacagcagccgcagacccttgtatt

SEQ ID NO: 260432 - DNA, 25 bp, Artificial
  Probe
tcgttgcagttgagggagcagccac

SEQ ID NO: 260433 - DNA, 25 bp, Artificial
  Probe
ccggatggtgcgtccaaggctgacc

SEQ ID NO: 260434 - DNA, 25 bp, Artificial
  Probe
gggagcagccacagcagccgcagac

SEQ ID NO: 260435 - DNA, 25 bp, Artificial
  Probe
gagttcagtgtttccctaggttctg

SEQ ID NO: 260436 - DNA, 25 bp, Artificial
  Probe
tgatatagagctctgacattttcct

SEQ ID NO: 260437 - DNA, 25 bp, Artificial
  Probe
taacgcattgaaaggccggatggtg

SEQ ID NO: 260438 - DNA, 25 bp, Artificial
  Probe
tcagtgtttccctaggttctgggtg

SEQ ID NO: 260439 - DNA, 25 bp, Artificial
  Probe
cccagcagtggctgcatcgaaaccg

SEQ ID NO: 260440 - DNA, 25 bp, Artificial
  Probe
ttttccacgttcacgaggcttttca

SEQ ID NO: 260441 - DNA, 25 bp, Artificial
  Probe
ggaagcccagcagtggctgcatcga

SEQ ID NO: 260442 - DNA, 25 bp, Artificial
  Probe
acagcggtgagaagcctggcccttg

SEQ ID NO: 260443 - DNA, 25 bp, Artificial
  Probe
catgcagatggaatccggctcttta

SEQ ID NO: 260444 - DNA, 25 bp, Artificial
  Probe
cttctcaggggcagacttactgaaa

SEQ ID NO: 260445 - DNA, 25 bp, Artificial
  Probe
agacccttgtattggcccctgctgt

SEQ ID NO: 260446 - DNA, 25 bp, Artificial
  Probe
atggtgcgtccaaggctgaccattt

SEQ ID NO: 260447 - DNA, 25 bp, Artificial
  Probe
tccacgttcacgaggcttttcacca

SEQ ID NO: 260448 - DNA, 25 bp, Artificial
  Probe
cctgctgtatgacgtcttcagatca

SEQ ID NO: 260449 - DNA, 25 bp, Artificial
  Probe
agatgacgtgatccaaatctgtggc

SEQ ID NO: 260450 - DNA, 25 bp, Artificial
  Probe
ttgaaaggccggatggtgcgtccaa

SEQ ID NO: 260451 - DNA, 25 bp, Artificial
  Probe
tctgtcaggagtcgttgcagttgag

SEQ ID NO: 260452 - DNA, 25 bp, Artificial
  Probe
acagcagccgcagacccttgtattg

SEQ ID NO: 260453 - DNA, 25 bp, Artificial
  Probe
tccggctctttaacgcattgaaagg

SEQ ID NO: 260454 - DNA, 25 bp, Artificial
  Probe
taatgggagtcgtgcgatgtcttct

SEQ ID NO: 260455 - DNA, 25 bp, Artificial
  Probe
cgtgcgatgtcttctggaaagaagt

SEQ ID NO: 260456 - DNA, 25 bp, Artificial
  Probe
ttccctaggttctgggtgctggtga

SEQ ID NO: 260457 - DNA, 25 bp, Artificial
  Probe
agtcgtgcgatgtcttctggaaaga

SEQ ID NO: 260458 - DNA, 25 bp, Artificial
  Probe
caggaagcccagcagtggctgcatc

SEQ ID NO: 260459 - DNA, 25 bp, Artificial
  Probe
caccaacttctcaggggcagactta

SEQ ID NO: 260460 - DNA, 25 bp, Artificial
  Probe
gctctttaacgcattgaaaggccgg

SEQ ID NO: 260461 - DNA, 25 bp, Artificial
  Probe
atggaatccggctctttaacgcatt

SEQ ID NO: 260462 - DNA, 25 bp, Artificial
  Probe
ggctgcatcgaaaccggttttccac

SEQ ID NO: 260463 - DNA, 25 bp, Artificial
  Probe
gatccaaatctgtggccatgcagat

SEQ ID NO: 260464 - DNA, 25 bp, Artificial
  Probe
acgaggcttttcaccaacttctcag

SEQ ID NO: 260465 - DNA, 25 bp, Artificial
  Probe
tgtattggcccctgctgtatgacgt

SEQ ID NO: 260466 - DNA, 25 bp, Artificial
  Probe
gcagacccttgtattggcccctgct

SEQ ID NO: 260467 - DNA, 25 bp, Artificial
  Probe
gtggagttcagtgtttccctaggtt

SEQ ID NO: 260468 - DNA, 25 bp, Artificial
  Probe
tgacagcggtgagaagcctggccct

SEQ ID NO: 260469 - DNA, 25 bp, Artificial
  Probe
ataatgggagtcgtgcgatgtcttc

SEQ ID NO: 260470 - DNA, 25 bp, Artificial
  Probe
aaatctgtggccatgcagatggaat

SEQ ID NO: 260471 - DNA, 25 bp, Artificial
  Probe
tcaggggcagacttactgaaactaa

SEQ ID NO: 260472 - DNA, 25 bp, Artificial
  Probe
tggcccctgctgtatgacgtcttca

SEQ ID NO: 260473 - DNA, 25 bp, Artificial
  Probe
aggcccctgaatacctgtcctactg

SEQ ID NO: 260474 - DNA, 25 bp, Artificial
  Probe
gccttgcatcagcagccctgtgtgg

SEQ ID NO: 260475 - DNA, 25 bp, Artificial
  Probe
agtattgcccacagggctctgcagt

SEQ ID NO: 260476 - DNA, 25 bp, Artificial
  Probe
gcagatgggctacacacagggcgcc

SEQ ID NO: 260477 - DNA, 25 bp, Artificial
  Probe
cctgaatacctgtcctactgccagg

SEQ ID NO: 260478 - DNA, 25 bp, Artificial
  Probe
gaccccaagtattgcccacagggct

SEQ ID NO: 260479 - DNA, 25 bp, Artificial
  Probe
acatctatgacaccaagctgggcac

SEQ ID NO: 260480 - DNA, 25 bp, Artificial
  Probe
acagcacgagggacccggaggcaca

SEQ ID NO: 260481 - DNA, 25 bp, Artificial
  Probe
gggacatctctacgaccccaagaac

SEQ ID NO: 260482 - DNA, 25 bp, Artificial
  Probe
tgcccacagggctctgcagttgacg

SEQ ID NO: 260483 - DNA, 25 bp, Artificial
  Probe
acagggcgccaaccagagcggccag

SEQ ID NO: 260484 - DNA, 25 bp, Artificial
  Probe
cgccttgcatcagcagccctgtgtg

SEQ ID NO: 260485 - DNA, 25 bp, Artificial
  Probe
aagtattgcccacagggctctgcag

SEQ ID NO: 260486 - DNA, 25 bp, Artificial
  Probe
tgggctacacacagggcgccaacca

SEQ ID NO: 260487 - DNA, 25 bp, Artificial
  Probe
ggctctgcagttgacggggctccta

SEQ ID NO: 260488 - DNA, 25 bp, Artificial
  Probe
ccagagcggccaggtcttcggactg

SEQ ID NO: 260489 - DNA, 25 bp, Artificial
  Probe
gcgaggcccctgaatacctgtccta

SEQ ID NO: 260490 - DNA, 25 bp, Artificial
  Probe
atggccaaggcgaggcccctgaata

SEQ ID NO: 260491 - DNA, 25 bp, Artificial
  Probe
aggaggaagccagctactgagcacc

SEQ ID NO: 260492 - DNA, 25 bp, Artificial
  Probe
ggcaccgacaagtgcgacaactcct

SEQ ID NO: 260493 - DNA, 25 bp, Artificial
  Probe
ggacccggaggcacatctatgacac

SEQ ID NO: 260494 - DNA, 25 bp, Artificial
  Probe
tacctgtcctactgccaggaggaag

SEQ ID NO: 260495 - DNA, 25 bp, Artificial
  Probe
tgtcctactgccaggaggaagccag

SEQ ID NO: 260496 - DNA, 25 bp, Artificial
  Probe
accaagctgggcaccgacaagtgcg

SEQ ID NO: 260497 - DNA, 25 bp, Artificial
  Probe
accagagcggccaggtcttcggact

SEQ ID NO: 260498 - DNA, 25 bp, Artificial
  Probe
ctgccaggaggaagccagctactga

SEQ ID NO: 260499 - DNA, 25 bp, Artificial
  Probe
acaagtgcgacaactcctccatgtc

SEQ ID NO: 260500 - DNA, 25 bp, Artificial
  Probe
agatgggctacacacagggcgccaa

SEQ ID NO: 260501 - DNA, 25 bp, Artificial
  Probe
cctccatgtccctgcagatgggcta

SEQ ID NO: 260502 - DNA, 25 bp, Artificial
  Probe
aggcgaggcccctgaatacctgtcc

SEQ ID NO: 260503 - DNA, 25 bp, Artificial
  Probe
gaggcccctgaatacctgtcctact

SEQ ID NO: 260504 - DNA, 25 bp, Artificial
  Probe
cagctactgagcacccaggggtgcc

SEQ ID NO: 260505 - DNA, 25 bp, Artificial
  Probe
agctgggcaccgacaagtgcgacaa

SEQ ID NO: 260506 - DNA, 25 bp, Artificial
  Probe
aagccagctactgagcacccagggg

SEQ ID NO: 260507 - DNA, 25 bp, Artificial
  Probe
ctgcagatgggctacacacagggcg

SEQ ID NO: 260508 - DNA, 25 bp, Artificial
  Probe
cccacagggctctgcagttgacggg

SEQ ID NO: 260509 - DNA, 25 bp, Artificial
  Probe
cgacaagtgcgacaactcctccatg

SEQ ID NO: 260510 - DNA, 25 bp, Artificial
  Probe
atgacaccaagctgggcaccgacaa

SEQ ID NO: 260511 - DNA, 25 bp, Artificial
  Probe
caagtattgcccacagggctctgca

SEQ ID NO: 260512 - DNA, 25 bp, Artificial
  Probe
ggcacatctatgacaccaagctggg

SEQ ID NO: 260513 - DNA, 25 bp, Artificial
  Probe
ggcgccaaccagagcggccaggtct

SEQ ID NO: 260514 - DNA, 25 bp, Artificial
  Probe
catcagcagccctgtgtgggtttgg

SEQ ID NO: 260515 - DNA, 25 bp, Artificial
  Probe
tgtccctgcagatgggctacacaca

SEQ ID NO: 260516 - DNA, 25 bp, Artificial
  Probe
atatgaccccaagtattgcccacag

SEQ ID NO: 260517 - DNA, 25 bp, Artificial
  Probe
gctctgcagttgacggggctcctac

SEQ ID NO: 260518 - DNA, 25 bp, Artificial
  Probe
cgagggacccggaggcacatctatg

SEQ ID NO: 260519 - DNA, 25 bp, Artificial
  Probe
cacagtacaggcagtacctgtcgac

SEQ ID NO: 260520 - DNA, 25 bp, Artificial
  Probe
gttcaaggatctcaaactcaacttg

SEQ ID NO: 260521 - DNA, 25 bp, Artificial
  Probe
tgcagaagctacaggctggaaggtc

SEQ ID NO: 260522 - DNA, 25 bp, Artificial
  Probe
aggctggaaggtctcaagggcctca

SEQ ID NO: 260523 - DNA, 25 bp, Artificial
  Probe
ctaaaagctctgcagaagctacagg

SEQ ID NO: 260524 - DNA, 25 bp, Artificial
  Probe
tactcacagtacaggcagtacctgt

SEQ ID NO: 260525 - DNA, 25 bp, Artificial
  Probe
aagctaattcgcatcagtgccctgg

SEQ ID NO: 260526 - DNA, 25 bp, Artificial
  Probe
tggaaggtctcaagggcctcaccaa

SEQ ID NO: 260527 - DNA, 25 bp, Artificial
  Probe
gtctcaagggcctcaccaagcaaac

SEQ ID NO: 260528 - DNA, 25 bp, Artificial
  Probe
tataaactttgtcctgttggctgtc

SEQ ID NO: 260529 - DNA, 25 bp, Artificial
  Probe
aaagctctgcagaagctacaggctg

SEQ ID NO: 260530 - DNA, 25 bp, Artificial
  Probe
gtctctgttgcacgatggcagcccc

SEQ ID NO: 260531 - DNA, 25 bp, Artificial
  Probe
aagatataaactttgtcctgttggc

SEQ ID NO: 260532 - DNA, 25 bp, Artificial
  Probe
gctgctggactcacccaaaatgggc

SEQ ID NO: 260533 - DNA, 25 bp, Artificial
  Probe
gcaggacacggcattcatcacactg

SEQ ID NO: 260534 - DNA, 25 bp, Artificial
  Probe
tcgacagacaagctaattcgcatca

SEQ ID NO: 260535 - DNA, 25 bp, Artificial
  Probe
acttgagtgcccagtctctgttgca

SEQ ID NO: 260536 - DNA, 25 bp, Artificial
  Probe
actcacccaaaatgggccaagatat

SEQ ID NO: 260537 - DNA, 25 bp, Artificial
  Probe
ccagtgatgtcctccaggtctctct

SEQ ID NO: 260538 - DNA, 25 bp, Artificial
  Probe
gacacggcattcatcacactgttcc

SEQ ID NO: 260539 - DNA, 25 bp, Artificial
  Probe
gaagctacaggctggaaggtctcaa

SEQ ID NO: 260540 - DNA, 25 bp, Artificial
  Probe
agacaagctaattcgcatcagtgcc

SEQ ID NO: 260541 - DNA, 25 bp, Artificial
  Probe
ggacagtgccagaagccccactaca

SEQ ID NO: 260542 - DNA, 25 bp, Artificial
  Probe
acggcaggacagtgccagaagcccc

SEQ ID NO: 260543 - DNA, 25 bp, Artificial
  Probe
actttgtcctgttggctgtcaacat

SEQ ID NO: 260544 - DNA, 25 bp, Artificial
  Probe
caaggatctcaaactcaacttgagt

SEQ ID NO: 260545 - DNA, 25 bp, Artificial
  Probe
agtgatgtcctccaggtctctctga

SEQ ID NO: 260546 - DNA, 25 bp, Artificial
  Probe
tgtcctgttggctgtcaacatgtca

SEQ ID NO: 260547 - DNA, 25 bp, Artificial
  Probe
cacactgttccctaaagaagaaaag

SEQ ID NO: 260548 - DNA, 25 bp, Artificial
  Probe
cctggccccgttttggcaggacacg

SEQ ID NO: 260549 - DNA, 25 bp, Artificial
  Probe
caggacagtgccagaagccccacta

SEQ ID NO: 260550 - DNA, 25 bp, Artificial
  Probe
gtcacctcagttcaaggatctcaaa

SEQ ID NO: 260551 - DNA, 25 bp, Artificial
  Probe
gggcctcaccaagcaaactcaaatc

SEQ ID NO: 260552 - DNA, 25 bp, Artificial
  Probe
tgccaccacggcaggacagtgccag

SEQ ID NO: 260553 - DNA, 25 bp, Artificial
  Probe
tcaagggcctcaccaagcaaactca

SEQ ID NO: 260554 - DNA, 25 bp, Artificial
  Probe
ttttggcaggacacggcattcatca

SEQ ID NO: 260555 - DNA, 25 bp, Artificial
  Probe
ctggccccgttttggcaggacacgg

SEQ ID NO: 260556 - DNA, 25 bp, Artificial
  Probe
ccccgttttggcaggacacggcatt

SEQ ID NO: 260557 - DNA, 25 bp, Artificial
  Probe
aagtttgagctgctggactcaccca

SEQ ID NO: 260558 - DNA, 25 bp, Artificial
  Probe
ctggaaggtctcaagggcctcacca

SEQ ID NO: 260559 - DNA, 25 bp, Artificial
  Probe
tgtcaacatgtcacctcagttcaag

SEQ ID NO: 260560 - DNA, 25 bp, Artificial
  Probe
gatctcaaactcaacttgagtgccc

SEQ ID NO: 260561 - DNA, 25 bp, Artificial
  Probe
aatcctctactcacagtacaggcag

SEQ ID NO: 260562 - DNA, 25 bp, Artificial
  Probe
cttcgacccagtgatgtcctccagg

SEQ ID NO: 260563 - DNA, 25 bp, Artificial
  Probe
actcaacttgagtgcccagtctctg

SEQ ID NO: 260564 - DNA, 25 bp, Artificial
  Probe
ctggactcacccaaaatgggccaag

SEQ ID NO: 260565 - DNA, 25 bp, Artificial
  Probe
tgtccttgctgcaggggccctgtga

SEQ ID NO: 260566 - DNA, 25 bp, Artificial
  Probe
aggtgaacacatctgtatgtgtgct

SEQ ID NO: 260567 - DNA, 25 bp, Artificial
  Probe
aacacatctgtatgtgtgctgcaga

SEQ ID NO: 260568 - DNA, 25 bp, Artificial
  Probe
ggctgcctgcttccagaatcctgtg

SEQ ID NO: 260569 - DNA, 25 bp, Artificial
  Probe
gtgtgctgcagacacatcctggtgt

SEQ ID NO: 260570 - DNA, 25 bp, Artificial
  Probe
ccctgttctctgaagcaagggcagg

SEQ ID NO: 260571 - DNA, 25 bp, Artificial
  Probe
cactgcttaaaggttttccgatcga

SEQ ID NO: 260572 - DNA, 25 bp, Artificial
  Probe
gagacagactgacagccatggatgg

SEQ ID NO: 260573 - DNA, 25 bp, Artificial
  Probe
ttgtacagtgtatgtgcatgcaccc

SEQ ID NO: 260574 - DNA, 25 bp, Artificial
  Probe
gtgtccacatgtgtgcatgagtcca

SEQ ID NO: 260575 - DNA, 25 bp, Artificial
  Probe
gtggctgcctgcttccagaatcctg

SEQ ID NO: 260576 - DNA, 25 bp, Artificial
  Probe
tcctggtgtgtccacatgtgtgcat

SEQ ID NO: 260577 - DNA, 25 bp, Artificial
  Probe
gctgcctgcttccagaatcctgtgt

SEQ ID NO: 260578 - DNA, 25 bp, Artificial
  Probe
agctgaggcccaagcagtttattta

SEQ ID NO: 260579 - DNA, 25 bp, Artificial
  Probe
acagtgtatgtgcatgcaccccata

SEQ ID NO: 260580 - DNA, 25 bp, Artificial
  Probe
gagctgaggcccaagcagtttattt

SEQ ID NO: 260581 - DNA, 25 bp, Artificial
  Probe
tgtacagtgtatgtgcatgcacccc

SEQ ID NO: 260582 - DNA, 25 bp, Artificial
  Probe
tacagtgtatgtgcatgcaccccat

SEQ ID NO: 260583 - DNA, 25 bp, Artificial
  Probe
ggtgtgtccacatgtgtgcatgagt

SEQ ID NO: 260584 - DNA, 25 bp, Artificial
  Probe
tttatcgaggcctctggcaaacctg

SEQ ID NO: 260585 - DNA, 25 bp, Artificial
  Probe
catgagtccatgtgtgcgcattggg

SEQ ID NO: 260586 - DNA, 25 bp, Artificial
  Probe
tgttgtacagtgtatgtgcatgcac

SEQ ID NO: 260587 - DNA, 25 bp, Artificial
  Probe
gcagacacatcctggtgtgtccaca

SEQ ID NO: 260588 - DNA, 25 bp, Artificial
  Probe
gaacacatctgtatgtgtgctgcag

SEQ ID NO: 260589 - DNA, 25 bp, Artificial
  Probe
ctggtgtgtccacatgtgtgcatga

SEQ ID NO: 260590 - DNA, 25 bp, Artificial
  Probe
ggcagggtcccctactcaaggagct

SEQ ID NO: 260591 - DNA, 25 bp, Artificial
  Probe
ccctactcaaggagctgaggcccaa

SEQ ID NO: 260592 - DNA, 25 bp, Artificial
  Probe
gaatcctgtgtcagccaggccgggt

SEQ ID NO: 260593 - DNA, 25 bp, Artificial
  Probe
ggcagcaagagcactgcttaaaggt

SEQ ID NO: 260594 - DNA, 25 bp, Artificial
  Probe
tccacatgtgtgcatgagtccatgt

SEQ ID NO: 260595 - DNA, 25 bp, Artificial
  Probe
gtatgtgcatgcaccccatactgcg

SEQ ID NO: 260596 - DNA, 25 bp, Artificial
  Probe
ccagaatcctgtgtcagccaggccg

SEQ ID NO: 260597 - DNA, 25 bp, Artificial
  Probe
tatcgaggcctctggcaaacctggg

SEQ ID NO: 260598 - DNA, 25 bp, Artificial
  Probe
gctgcagacacatcctggtgtgtcc

SEQ ID NO: 260599 - DNA, 25 bp, Artificial
  Probe
aatccctgttctctgaagcaagggc

SEQ ID NO: 260600 - DNA, 25 bp, Artificial
  Probe
cagcacttttggtgtccttgctgca

SEQ ID NO: 260601 - DNA, 25 bp, Artificial
  Probe
tgcaccccatactgcgcactgtgta

SEQ ID NO: 260602 - DNA, 25 bp, Artificial
  Probe
ggtgggctctaacagcacttttggt

SEQ ID NO: 260603 - DNA, 25 bp, Artificial
  Probe
gtcccctactcaaggagctgaggcc

SEQ ID NO: 260604 - DNA, 25 bp, Artificial
  Probe
gtgtatgtgcatgcaccccatactg

SEQ ID NO: 260605 - DNA, 25 bp, Artificial
  Probe
ggagacagactgacagccatggatg

SEQ ID NO: 260606 - DNA, 25 bp, Artificial
  Probe
ttggtgtccttgctgcaggggccct

SEQ ID NO: 260607 - DNA, 25 bp, Artificial
  Probe
ctcaaggagctgaggcccaagcagt

SEQ ID NO: 260608 - DNA, 25 bp, Artificial
  Probe
ccaaatccctgttctctgaagcaag

SEQ ID NO: 260609 - DNA, 25 bp, Artificial
  Probe
cctgcttccagaatcctgtgtcagc

SEQ ID NO: 260610 - DNA, 25 bp, Artificial
  Probe
tgtgtgctgcagacacatcctggtg

SEQ ID NO: 260611 - DNA, 25 bp, Artificial
  Probe
ctagcccggaaggaacgacagcttc

SEQ ID NO: 260612 - DNA, 25 bp, Artificial
  Probe
ggaacgacagcttcacatgcagctg

SEQ ID NO: 260613 - DNA, 25 bp, Artificial
  Probe
tggctggtctgcacgggataactat

SEQ ID NO: 260614 - DNA, 25 bp, Artificial
  Probe
ggctcactccatagctcaaagcatc

SEQ ID NO: 260615 - DNA, 25 bp, Artificial
  Probe
tcactccatagctcaaagcatcagg

SEQ ID NO: 260616 - DNA, 25 bp, Artificial
  Probe
accctggctggtctgcacgggataa

SEQ ID NO: 260617 - DNA, 25 bp, Artificial
  Probe
aacaggcaaagtactacgagctagc

SEQ ID NO: 260618 - DNA, 25 bp, Artificial
  Probe
catagctcaaagcatcaggactcca

SEQ ID NO: 260619 - DNA, 25 bp, Artificial
  Probe
ctgtaccctggctggtctgcacggg

SEQ ID NO: 260620 - DNA, 25 bp, Artificial
  Probe
agcccggaaggaacgacagcttcac

SEQ ID NO: 260621 - DNA, 25 bp, Artificial
  Probe
gcaggagtcctcacagagtgacgtc

SEQ ID NO: 260622 - DNA, 25 bp, Artificial
  Probe
accacagcaaggtcagcctgtgtac

SEQ ID NO: 260623 - DNA, 25 bp, Artificial
  Probe
attgtcacaccgacagtcaagcagg

SEQ ID NO: 260624 - DNA, 25 bp, Artificial
  Probe
ctgtcgcccggcaccgtaggacaaa

SEQ ID NO: 260625 - DNA, 25 bp, Artificial
  Probe
gtcagcctgtgtacccaatcacgac

SEQ ID NO: 260626 - DNA, 25 bp, Artificial
  Probe
gtcacaccgacagtcaagcaggagt

SEQ ID NO: 260627 - DNA, 25 bp, Artificial
  Probe
gtaccacagcaaggtcagcctgtgt

SEQ ID NO: 260628 - DNA, 25 bp, Artificial
  Probe
tcacgacaggaggattcagacaccc

SEQ ID NO: 260629 - DNA, 25 bp, Artificial
  Probe
cctgtccagggaagaacaggcaaag

SEQ ID NO: 260630 - DNA, 25 bp, Artificial
  Probe
gccccttaatgcattcatgttgtat

SEQ ID NO: 260631 - DNA, 25 bp, Artificial
  Probe
cggccattgtcacaccgacagtcaa

SEQ ID NO: 260632 - DNA, 25 bp, Artificial
  Probe
gcagctgtaccctggctggtctgca

SEQ ID NO: 260633 - DNA, 25 bp, Artificial
  Probe
ctgtccagggaagaacaggcaaagt

SEQ ID NO: 260634 - DNA, 25 bp, Artificial
  Probe
ggtctgcacgggataactatggaaa

SEQ ID NO: 260635 - DNA, 25 bp, Artificial
  Probe
agtgacgtcggctcactccatagct

SEQ ID NO: 260636 - DNA, 25 bp, Artificial
  Probe
gagtcctcacagagtgacgtcggct

SEQ ID NO: 260637 - DNA, 25 bp, Artificial
  Probe
gagctagcccggaaggaacgacagc

SEQ ID NO: 260638 - DNA, 25 bp, Artificial
  Probe
tcacatgcagctgtaccctggctgg

SEQ ID NO: 260639 - DNA, 25 bp, Artificial
  Probe
ccttaatgcattcatgttgtatatg

SEQ ID NO: 260640 - DNA, 25 bp, Artificial
  Probe
cacagcgctgacagtcaacgcgtct

SEQ ID NO: 260641 - DNA, 25 bp, Artificial
  Probe
ttgtcacaccgacagtcaagcagga

SEQ ID NO: 260642 - DNA, 25 bp, Artificial
  Probe
gtactacgagctagcccggaaggaa

SEQ ID NO: 260643 - DNA, 25 bp, Artificial
  Probe
gcgctgacagtcaacgcgtctatgt

SEQ ID NO: 260644 - DNA, 25 bp, Artificial
  Probe
cacagagtgacgtcggctcactcca

SEQ ID NO: 260645 - DNA, 25 bp, Artificial
  Probe
gtaccctggctggtctgcacgggat

SEQ ID NO: 260646 - DNA, 25 bp, Artificial
  Probe
gcctgtgtacccaatcacgacagga

SEQ ID NO: 260647 - DNA, 25 bp, Artificial
  Probe
cacagcaaggtcagcctgtgtaccc

SEQ ID NO: 260648 - DNA, 25 bp, Artificial
  Probe
ccatagctcaaagcatcaggactcc

SEQ ID NO: 260649 - DNA, 25 bp, Artificial
  Probe
gcaaggtcagcctgtgtacccaatc

SEQ ID NO: 260650 - DNA, 25 bp, Artificial
  Probe
gatggttagtaccacagcaaggtca

SEQ ID NO: 260651 - DNA, 25 bp, Artificial
  Probe
cacaccgacagtcaagcaggagtcc

SEQ ID NO: 260652 - DNA, 25 bp, Artificial
  Probe
aggagtcctcacagagtgacgtcgg

SEQ ID NO: 260653 - DNA, 25 bp, Artificial
  Probe
aagcaggagtcctcacagagtgacg

SEQ ID NO: 260654 - DNA, 25 bp, Artificial
  Probe
ggcaaagtactacgagctagcccgg

SEQ ID NO: 260655 - DNA, 25 bp, Artificial
  Probe
atggttagtaccacagcaaggtcag

SEQ ID NO: 260656 - DNA, 25 bp, Artificial
  Probe
acagcttcacatgcagctgtaccct

SEQ ID NO: 260657 - DNA, 25 bp, Artificial
  Probe
tccctctcagccatcttaggatggc

SEQ ID NO: 260658 - DNA, 25 bp, Artificial
  Probe
tggcatgaaccatggtgtcaacatg

SEQ ID NO: 260659 - DNA, 25 bp, Artificial
  Probe
tgtgtttgtccctctcagccatctt

SEQ ID NO: 260660 - DNA, 25 bp, Artificial
  Probe
gtttatgtgtttgtccctctcagcc

SEQ ID NO: 260661 - DNA, 25 bp, Artificial
  Probe
atggcatgaaccatggtgtcaacat

SEQ ID NO: 260662 - DNA, 25 bp, Artificial
  Probe
attcctgtccccttggtttatgtgt

SEQ ID NO: 260663 - DNA, 25 bp, Artificial
  Probe
accatggtgtcaacatgcttagccc

SEQ ID NO: 260664 - DNA, 25 bp, Artificial
  Probe
ttgtgcagatgattcctgtcccctt

SEQ ID NO: 260665 - DNA, 25 bp, Artificial
  Probe
ctctcagccatcttaggatggcatg

SEQ ID NO: 260666 - DNA, 25 bp, Artificial
  Probe
gaccttctcacttggattggggctg

SEQ ID NO: 260667 - DNA, 25 bp, Artificial
  Probe
gtcaacatgcttagcccctctgtaa

SEQ ID NO: 260668 - DNA, 25 bp, Artificial
  Probe
gaaccatggtgtcaacatgcttagc

SEQ ID NO: 260669 - DNA, 25 bp, Artificial
  Probe
gtgtcaacatgcttagcccctctgt

SEQ ID NO: 260670 - DNA, 25 bp, Artificial
  Probe
tggtgtcaacatgcttagcccctct

SEQ ID NO: 260671 - DNA, 25 bp, Artificial
  Probe
aaatgaccttctcacttggattggg

SEQ ID NO: 260672 - DNA, 25 bp, Artificial
  Probe
cagatgattcctgtccccttggttt

SEQ ID NO: 260673 - DNA, 25 bp, Artificial
  Probe
ggatggcatgaaccatggtgtcaac

SEQ ID NO: 260674 - DNA, 25 bp, Artificial
  Probe
tgaccttctcacttggattggggct

SEQ ID NO: 260675 - DNA, 25 bp, Artificial
  Probe
atgcttagcccctctgtaactgcct

SEQ ID NO: 260676 - DNA, 25 bp, Artificial
  Probe
accctatgggtcctaggccatccag

SEQ ID NO: 260677 - DNA, 25 bp, Artificial
  Probe
cctctcagccatcttaggatggcat

SEQ ID NO: 260678 - DNA, 25 bp, Artificial
  Probe
ttctacccctatcatcagagccagg

SEQ ID NO: 260679 - DNA, 25 bp, Artificial
  Probe
tgtttgtccctctcagccatcttag

SEQ ID NO: 260680 - DNA, 25 bp, Artificial
  Probe
gtgtttgtccctctcagccatctta

SEQ ID NO: 260681 - DNA, 25 bp, Artificial
  Probe
aaccatggtgtcaacatgcttagcc

SEQ ID NO: 260682 - DNA, 25 bp, Artificial
  Probe
gccatcttaggatggcatgaaccat

SEQ ID NO: 260683 - DNA, 25 bp, Artificial
  Probe
cctgtccccttggtttatgtgtttg

SEQ ID NO: 260684 - DNA, 25 bp, Artificial
  Probe
aatgaccttctcacttggattgggg

SEQ ID NO: 260685 - DNA, 25 bp, Artificial
  Probe
ggcaaaaatgaccttctcacttgga

SEQ ID NO: 260686 - DNA, 25 bp, Artificial
  Probe
agctcccaaggcaaaaatgaccttc

SEQ ID NO: 260687 - DNA, 25 bp, Artificial
  Probe
caattgtgcagatgattcctgtccc

SEQ ID NO: 260688 - DNA, 25 bp, Artificial
  Probe
catgaaccatggtgtcaacatgctt

SEQ ID NO: 260689 - DNA, 25 bp, Artificial
  Probe
gcaaaaatgaccttctcacttggat

SEQ ID NO: 260690 - DNA, 25 bp, Artificial
  Probe
ctccaattgtgcagatgattcctgt

SEQ ID NO: 260691 - DNA, 25 bp, Artificial
  Probe
cagccatcttaggatggcatgaacc

SEQ ID NO: 260692 - DNA, 25 bp, Artificial
  Probe
acagagctcccaaggcaaaaatgac

SEQ ID NO: 260693 - DNA, 25 bp, Artificial
  Probe
agatgattcctgtccccttggttta

SEQ ID NO: 260694 - DNA, 25 bp, Artificial
  Probe
aaggcaaaaatgaccttctcacttg

SEQ ID NO: 260695 - DNA, 25 bp, Artificial
  Probe
ggtgtcaacatgcttagcccctctg

SEQ ID NO: 260696 - DNA, 25 bp, Artificial
  Probe
tttatgtgtttgtccctctcagcca

SEQ ID NO: 260697 - DNA, 25 bp, Artificial
  Probe
tccaattgtgcagatgattcctgtc

SEQ ID NO: 260698 - DNA, 25 bp, Artificial
  Probe
tgtgcagatgattcctgtccccttg

SEQ ID NO: 260699 - DNA, 25 bp, Artificial
  Probe
ccctctcagccatcttaggatggca

SEQ ID NO: 260700 - DNA, 25 bp, Artificial
  Probe
actccaattgtgcagatgattcctg

SEQ ID NO: 260701 - DNA, 25 bp, Artificial
  Probe
gatggcatgaaccatggtgtcaaca

SEQ ID NO: 260702 - DNA, 25 bp, Artificial
  Probe
gctcccaaggcaaaaatgaccttct

SEQ ID NO: 260703 - DNA, 25 bp, Artificial
  Probe
ttcgagccctcctttgggaagttca

SEQ ID NO: 260704 - DNA, 25 bp, Artificial
  Probe
tagcaatcttactgttttctggtgc

SEQ ID NO: 260705 - DNA, 25 bp, Artificial
  Probe
taagccatttgtaccttagtcttag

SEQ ID NO: 260706 - DNA, 25 bp, Artificial
  Probe
cactctgatctgtgtgcttcacagg

SEQ ID NO: 260707 - DNA, 25 bp, Artificial
  Probe
aaatgattccctccagagccctgtc

SEQ ID NO: 260708 - DNA, 25 bp, Artificial
  Probe
ctctgatctgtgtgcttcacagggc

SEQ ID NO: 260709 - DNA, 25 bp, Artificial
  Probe
tcacagggcaaggtgaaagacactt

SEQ ID NO: 260710 - DNA, 25 bp, Artificial
  Probe
ttggcctcatctagcaaccaggaag

SEQ ID NO: 260711 - DNA, 25 bp, Artificial
  Probe
ttagtcttagtgtttggcctcatct

SEQ ID NO: 260712 - DNA, 25 bp, Artificial
  Probe
caatcttactgttttctggtgctgc

SEQ ID NO: 260713 - DNA, 25 bp, Artificial
  Probe
acaggcttacgcttcactctgatct

SEQ ID NO: 260714 - DNA, 25 bp, Artificial
  Probe
gcttcacagggcaaggtgaaagaca

SEQ ID NO: 260715 - DNA, 25 bp, Artificial
  Probe
atctagcaaccaggaagcctggttg

SEQ ID NO: 260716 - DNA, 25 bp, Artificial
  Probe
cctaccaccagtgagccagatttcg

SEQ ID NO: 260717 - DNA, 25 bp, Artificial
  Probe
gccaggagggcacaggcttacgctt

SEQ ID NO: 260718 - DNA, 25 bp, Artificial
  Probe
agtcttagtgtttggcctcatctag

SEQ ID NO: 260719 - DNA, 25 bp, Artificial
  Probe
ttgtaccttagtcttagtgtttggc

SEQ ID NO: 260720 - DNA, 25 bp, Artificial
  Probe
agaagaaatgattccctccagagcc

SEQ ID NO: 260721 - DNA, 25 bp, Artificial
  Probe
tcactctgatctgtgtgcttcacag

SEQ ID NO: 260722 - DNA, 25 bp, Artificial
  Probe
ttccccaggcaagaagagccaggag

SEQ ID NO: 260723 - DNA, 25 bp, Artificial
  Probe
gttttctggtgctgccggctgaacc

SEQ ID NO: 260724 - DNA, 25 bp, Artificial
  Probe
gccatttgtaccttagtcttagtgt

SEQ ID NO: 260725 - DNA, 25 bp, Artificial
  Probe
ctaccaccagtgagccagatttcgt

SEQ ID NO: 260726 - DNA, 25 bp, Artificial
  Probe
gcaatcttactgttttctggtgctg

SEQ ID NO: 260727 - DNA, 25 bp, Artificial
  Probe
gggcacaggcttacgcttcactctg

SEQ ID NO: 260728 - DNA, 25 bp, Artificial
  Probe
gagggcacaggcttacgcttcactc

SEQ ID NO: 260729 - DNA, 25 bp, Artificial
  Probe
tagtgtttggcctcatctagcaacc

SEQ ID NO: 260730 - DNA, 25 bp, Artificial
  Probe
tcgttcgagccctcctttgggaagt

SEQ ID NO: 260731 - DNA, 25 bp, Artificial
  Probe
accaggaagcctggttggagaaaca

SEQ ID NO: 260732 - DNA, 25 bp, Artificial
  Probe
ccatttgtaccttagtcttagtgtt

SEQ ID NO: 260733 - DNA, 25 bp, Artificial
  Probe
ctgatctgtgtgcttcacagggcaa

SEQ ID NO: 260734 - DNA, 25 bp, Artificial
  Probe
agacctaagccatttgtaccttagt

SEQ ID NO: 260735 - DNA, 25 bp, Artificial
  Probe
agccaggagggcacaggcttacgct

SEQ ID NO: 260736 - DNA, 25 bp, Artificial
  Probe
gaaatgattccctccagagccctgt

SEQ ID NO: 260737 - DNA, 25 bp, Artificial
  Probe
agccatttgtaccttagtcttagtg

SEQ ID NO: 260738 - DNA, 25 bp, Artificial
  Probe
agatttcgttcgagccctcctttgg

SEQ ID NO: 260739 - DNA, 25 bp, Artificial
  Probe
ttagcaatcttactgttttctggtg

SEQ ID NO: 260740 - DNA, 25 bp, Artificial
  Probe
taagcaaatgtacctaccaccagtg

SEQ ID NO: 260741 - DNA, 25 bp, Artificial
  Probe
caggaagcctggttggagaaacaga

SEQ ID NO: 260742 - DNA, 25 bp, Artificial
  Probe
ccaggaagcctggttggagaaacag

SEQ ID NO: 260743 - DNA, 25 bp, Artificial
  Probe
cttccccaggcaagaagagccagga

SEQ ID NO: 260744 - DNA, 25 bp, Artificial
  Probe
tgtttggcctcatctagcaaccagg

SEQ ID NO: 260745 - DNA, 25 bp, Artificial
  Probe
caggcttacgcttcactctgatctg

SEQ ID NO: 260746 - DNA, 25 bp, Artificial
  Probe
gcttacgcttcactctgatctgtgt

SEQ ID NO: 260747 - DNA, 25 bp, Artificial
  Probe
caccagtgagccagatttcgttcga

SEQ ID NO: 260748 - DNA, 25 bp, Artificial
  Probe
tgtgtgcttcacagggcaaggtgaa

SEQ ID NO: 260749 - DNA, 25 bp, Artificial
  Probe
ccagaactgtgttgagccagggcct

SEQ ID NO: 260750 - DNA, 25 bp, Artificial
  Probe
cctgggactcacacgcaaaacatag

SEQ ID NO: 260751 - DNA, 25 bp, Artificial
  Probe
aagcccagagacagagcctcttctg

SEQ ID NO: 260752 - DNA, 25 bp, Artificial
  Probe
tccgtctccagctgttccttggtca

SEQ ID NO: 260753 - DNA, 25 bp, Artificial
  Probe
gcaaaacatagacactgtgccaaag

SEQ ID NO: 260754 - DNA, 25 bp, Artificial
  Probe
cactgtgccaaagacagagggcata

SEQ ID NO: 260755 - DNA, 25 bp, Artificial
  Probe
cgctctggacacctgctcatgcagg

SEQ ID NO: 260756 - DNA, 25 bp, Artificial
  Probe
gtctccagctgttccttggtcaaga

SEQ ID NO: 260757 - DNA, 25 bp, Artificial
  Probe
ggtgatcccaactggagaagcccag

SEQ ID NO: 260758 - DNA, 25 bp, Artificial
  Probe
tgagccagggcctgggactcacacg

SEQ ID NO: 260759 - DNA, 25 bp, Artificial
  Probe
tattcgggctctgtgatacaggctc

SEQ ID NO: 260760 - DNA, 25 bp, Artificial
  Probe
accatcttcttatgggcaatcgggg

SEQ ID NO: 260761 - DNA, 25 bp, Artificial
  Probe
ctccagctgttccttggtcaagaga

SEQ ID NO: 260762 - DNA, 25 bp, Artificial
  Probe
tcttatgggcaatcggggatctcaa

SEQ ID NO: 260763 - DNA, 25 bp, Artificial
  Probe
tggacacctgctcatgcaggtgcct

SEQ ID NO: 260764 - DNA, 25 bp, Artificial
  Probe
ctgcaaccatcttcttatgggcaat

SEQ ID NO: 260765 - DNA, 25 bp, Artificial
  Probe
caaccccagttggtgatcccaactg

SEQ ID NO: 260766 - DNA, 25 bp, Artificial
  Probe
gggcaatcggggatctcaatgtccc

SEQ ID NO: 260767 - DNA, 25 bp, Artificial
  Probe
tgtgccaaagacagagggcataggc

SEQ ID NO: 260768 - DNA, 25 bp, Artificial
  Probe
gcccagagacagagcctcttctgtc

SEQ ID NO: 260769 - DNA, 25 bp, Artificial
  Probe
cttcttatgggcaatcggggatctc

SEQ ID NO: 260770 - DNA, 25 bp, Artificial
  Probe
cacgcaaaacatagacactgtgcca

SEQ ID NO: 260771 - DNA, 25 bp, Artificial
  Probe
ccctttgccagcaccgggtgcaaag

SEQ ID NO: 260772 - DNA, 25 bp, Artificial
  Probe
gttggtgatcccaactggagaagcc

SEQ ID NO: 260773 - DNA, 25 bp, Artificial
  Probe
ccagggcctgggactcacacgcaaa

SEQ ID NO: 260774 - DNA, 25 bp, Artificial
  Probe
attggagctgggttcaggtgactct

SEQ ID NO: 260775 - DNA, 25 bp, Artificial
  Probe
cagaactgtgttgagccagggcctg

SEQ ID NO: 260776 - DNA, 25 bp, Artificial
  Probe
gcaatcggggatctcaatgtcccac

SEQ ID NO: 260777 - DNA, 25 bp, Artificial
  Probe
accccagaactgtgttgagccaggg

SEQ ID NO: 260778 - DNA, 25 bp, Artificial
  Probe
cccaactggagaagcccagagacag

SEQ ID NO: 260779 - DNA, 25 bp, Artificial
  Probe
ggggatctcaatgtcccacctggac

SEQ ID NO: 260780 - DNA, 25 bp, Artificial
  Probe
cctgcaaccatcttcttatgggcaa

SEQ ID NO: 260781 - DNA, 25 bp, Artificial
  Probe
agcccagagacagagcctcttctgt

SEQ ID NO: 260782 - DNA, 25 bp, Artificial
  Probe
tgccaaagacagagggcataggctt

SEQ ID NO: 260783 - DNA, 25 bp, Artificial
  Probe
tgatcccaactggagaagcccagag

SEQ ID NO: 260784 - DNA, 25 bp, Artificial
  Probe
tcacacgcaaaacatagacactgtg

SEQ ID NO: 260785 - DNA, 25 bp, Artificial
  Probe
ggatattcgggctctgtgatacagg

SEQ ID NO: 260786 - DNA, 25 bp, Artificial
  Probe
cggggatctcaatgtcccacctgga

SEQ ID NO: 260787 - DNA, 25 bp, Artificial
  Probe
agacactgtgccaaagacagagggc

SEQ ID NO: 260788 - DNA, 25 bp, Artificial
  Probe
acaccccagaactgtgttgagccag

SEQ ID NO: 260789 - DNA, 25 bp, Artificial
  Probe
ttggtgatcccaactggagaagccc

SEQ ID NO: 260790 - DNA, 25 bp, Artificial
  Probe
ctggagaagcccagagacagagcct

SEQ ID NO: 260791 - DNA, 25 bp, Artificial
  Probe
aacatagacactgtgccaaagacag

SEQ ID NO: 260792 - DNA, 25 bp, Artificial
  Probe
tatggacccgctctggacacctgct

SEQ ID NO: 260793 - DNA, 25 bp, Artificial
  Probe
ggactcacacgcaaaacatagacac

SEQ ID NO: 260794 - DNA, 25 bp, Artificial
  Probe
acatagacactgtgccaaagacaga

SEQ ID NO: 260795 - DNA, 25 bp, Artificial
  Probe
catcagggtgtatgagcctccagct

SEQ ID NO: 260796 - DNA, 25 bp, Artificial
  Probe
cccagagatcggtggtctggagacc

SEQ ID NO: 260797 - DNA, 25 bp, Artificial
  Probe
tcaactgcagcaccagctgtgcagc

SEQ ID NO: 260798 - DNA, 25 bp, Artificial
  Probe
tcctagtctcaaacgccacagtcga

SEQ ID NO: 260799 - DNA, 25 bp, Artificial
  Probe
gacccctacgaataagttaatgttg

SEQ ID NO: 260800 - DNA, 25 bp, Artificial
  Probe
gaattcctagtctcaaacgccacag

SEQ ID NO: 260801 - DNA, 25 bp, Artificial
  Probe
cacagaggcttggagagtcaactgc

SEQ ID NO: 260802 - DNA, 25 bp, Artificial
  Probe
gatagaattcctagtctcaaacgcc

SEQ ID NO: 260803 - DNA, 25 bp, Artificial
  Probe
aaagcagcaggcagagagtttcaac

SEQ ID NO: 260804 - DNA, 25 bp, Artificial
  Probe
ggatagaattcctagtctcaaacgc

SEQ ID NO: 260805 - DNA, 25 bp, Artificial
  Probe
ggtggtctggagacccctacgaata

SEQ ID NO: 260806 - DNA, 25 bp, Artificial
  Probe
agccacagaggcttggagagtcaac

SEQ ID NO: 260807 - DNA, 25 bp, Artificial
  Probe
gcaccagctgtgcagccccagagat

SEQ ID NO: 260808 - DNA, 25 bp, Artificial
  Probe
cctcgagtgtttatgggtgaagcct

SEQ ID NO: 260809 - DNA, 25 bp, Artificial
  Probe
gagagtcaactgcagcaccagctgt

SEQ ID NO: 260810 - DNA, 25 bp, Artificial
  Probe
ttgaatgcaaggtgccctctgtgaa

SEQ ID NO: 260811 - DNA, 25 bp, Artificial
  Probe
gccacagtcgacacggtcttacttt

SEQ ID NO: 260812 - DNA, 25 bp, Artificial
  Probe
agctcaggtaacactgaaactgcag

SEQ ID NO: 260813 - DNA, 25 bp, Artificial
  Probe
ttactttgccatttcacttgttcgg

SEQ ID NO: 260814 - DNA, 25 bp, Artificial
  Probe
cagagagtttcaacatcagggtgta

SEQ ID NO: 260815 - DNA, 25 bp, Artificial
  Probe
agaggaccctcatgggaaatggata

SEQ ID NO: 260816 - DNA, 25 bp, Artificial
  Probe
gtctcaaacgccacagtcgacacgg

SEQ ID NO: 260817 - DNA, 25 bp, Artificial
  Probe
cagccccagagatcggtggtctgga

SEQ ID NO: 260818 - DNA, 25 bp, Artificial
  Probe
cacttgttcgggaaagcagcaggca

SEQ ID NO: 260819 - DNA, 25 bp, Artificial
  Probe
caggtaacactgaaactgcagcccc

SEQ ID NO: 260820 - DNA, 25 bp, Artificial
  Probe
ggtgtatgagcctccagctcaggta

SEQ ID NO: 260821 - DNA, 25 bp, Artificial
  Probe
catttcacttgttcgggaaagcagc

SEQ ID NO: 260822 - DNA, 25 bp, Artificial
  Probe
tgtgaagccccttgagagcctcacc

SEQ ID NO: 260823 - DNA, 25 bp, Artificial
  Probe
agtttcaacatcagggtgtatgagc

SEQ ID NO: 260824 - DNA, 25 bp, Artificial
  Probe
ctgtgcagccccagagatcggtggt

SEQ ID NO: 260825 - DNA, 25 bp, Artificial
  Probe
tgccctctgtgaagccccttgagag

SEQ ID NO: 260826 - DNA, 25 bp, Artificial
  Probe
gacacggtcttactttgccatttca

SEQ ID NO: 260827 - DNA, 25 bp, Artificial
  Probe
tgcaaggtgccctctgtgaagcccc

SEQ ID NO: 260828 - DNA, 25 bp, Artificial
  Probe
gagatcggtggtctggagaccccta

SEQ ID NO: 260829 - DNA, 25 bp, Artificial
  Probe
tctggagacccctacgaataagtta

SEQ ID NO: 260830 - DNA, 25 bp, Artificial
  Probe
cccctcgagtgtttatgggtgaagc

SEQ ID NO: 260831 - DNA, 25 bp, Artificial
  Probe
ccctcatgggaaatggatagaattc

SEQ ID NO: 260832 - DNA, 25 bp, Artificial
  Probe
tcaacatcagggtgtatgagcctcc

SEQ ID NO: 260833 - DNA, 25 bp, Artificial
  Probe
gaagaggaccctcatgggaaatgga

SEQ ID NO: 260834 - DNA, 25 bp, Artificial
  Probe
aagcagcaggcagagagtttcaaca

SEQ ID NO: 260835 - DNA, 25 bp, Artificial
  Probe
cttgttcgggaaagcagcaggcaga

SEQ ID NO: 260836 - DNA, 25 bp, Artificial
  Probe
cagtcgacacggtcttactttgcca

SEQ ID NO: 260837 - DNA, 25 bp, Artificial
  Probe
accctctctctgctctgtggcagag

SEQ ID NO: 260838 - DNA, 25 bp, Artificial
  Probe
gtaaaagccacagaggcttggagag

SEQ ID NO: 260839 - DNA, 25 bp, Artificial
  Probe
atgggtgaagccttcaccattgaat

SEQ ID NO: 260840 - DNA, 25 bp, Artificial
  Probe
cggtggtctggagacccctacgaat

SEQ ID NO: 260841 - DNA, 25 bp, Artificial
  Probe
tctacttccgctatttctgtgggag

SEQ ID NO: 260842 - DNA, 25 bp, Artificial
  Probe
acgcaccagaatgcatcaacttccg

SEQ ID NO: 260843 - DNA, 25 bp, Artificial
  Probe
cgcccgaaatgtacgcgcttatgag

SEQ ID NO: 260844 - DNA, 25 bp, Artificial
  Probe
cgttctgcagggaagtggcctctga

SEQ ID NO: 260845 - DNA, 25 bp, Artificial
  Probe
gccctacaagaagatgaagggccct

SEQ ID NO: 260846 - DNA, 25 bp, Artificial
  Probe
aggagcccaatcgaccgtcccatgt

SEQ ID NO: 260847 - DNA, 25 bp, Artificial
  Probe
ccagccgcagtgatgtctggagcta

SEQ ID NO: 260848 - DNA, 25 bp, Artificial
  Probe
ggagctcagagtcctccaggggtca

SEQ ID NO: 260849 - DNA, 25 bp, Artificial
  Probe
atgaagggccctgaggtcctggatt

SEQ ID NO: 260850 - DNA, 25 bp, Artificial
  Probe
tgatgtctggagctatggggtcacc

SEQ ID NO: 260851 - DNA, 25 bp, Artificial
  Probe
tgtccaaggcactgggtgctgatga

SEQ ID NO: 260852 - DNA, 25 bp, Artificial
  Probe
agtgtccgcccgaaatgtacgcgct

SEQ ID NO: 260853 - DNA, 25 bp, Artificial
  Probe
gtcctccaggggtcactgtcattca

SEQ ID NO: 260854 - DNA, 25 bp, Artificial
  Probe
ccgaggctgcatgtggctgagcccc

SEQ ID NO: 260855 - DNA, 25 bp, Artificial
  Probe
gagagtgtatgtgctcccaaatcta

SEQ ID NO: 260856 - DNA, 25 bp, Artificial
  Probe
ctaccctcagccttgcttagttagc

SEQ ID NO: 260857 - DNA, 25 bp, Artificial
  Probe
cacaggatgggctgtattcaggagc

SEQ ID NO: 260858 - DNA, 25 bp, Artificial
  Probe
tgctgatgacagctattacacagcc

SEQ ID NO: 260859 - DNA, 25 bp, Artificial
  Probe
cctatggccagaagccctacaagaa

SEQ ID NO: 260860 - DNA, 25 bp, Artificial
  Probe
gccttgcttagttagccttactctc

SEQ ID NO: 260861 - DNA, 25 bp, Artificial
  Probe
ctggatttcatcaagcagggtaaga

SEQ ID NO: 260862 - DNA, 25 bp, Artificial
  Probe
ggagcccaatcgaccgtcccatgtg

SEQ ID NO: 260863 - DNA, 25 bp, Artificial
  Probe
ttacacagcccgttctgcagggaag

SEQ ID NO: 260864 - DNA, 25 bp, Artificial
  Probe
atctacttccgctatttctgtggga

SEQ ID NO: 260865 - DNA, 25 bp, Artificial
  Probe
acacagcccgttctgcagggaagtg

SEQ ID NO: 260866 - DNA, 25 bp, Artificial
  Probe
ggccagaagccctacaagaagatga

SEQ ID NO: 260867 - DNA, 25 bp, Artificial
  Probe
tcgtggctgtggaacaacgaatgag

SEQ ID NO: 260868 - DNA, 25 bp, Artificial
  Probe
cttatgagtgactgctggatataca

SEQ ID NO: 260869 - DNA, 25 bp, Artificial
  Probe
gctgtattcaggagcccaatcgacc

SEQ ID NO: 260870 - DNA, 25 bp, Artificial
  Probe
tgggccgagagtgtatgtgctccca

SEQ ID NO: 260871 - DNA, 25 bp, Artificial
  Probe
aatgaggacctattactacagcatg

SEQ ID NO: 260872 - DNA, 25 bp, Artificial
  Probe
gcttagttagccttactctctctgc

SEQ ID NO: 260873 - DNA, 25 bp, Artificial
  Probe
gtatgtgctcccaaatctacttccg

SEQ ID NO: 260874 - DNA, 25 bp, Artificial
  Probe
aacttccggaagttctccagccgca

SEQ ID NO: 260875 - DNA, 25 bp, Artificial
  Probe
cggaagttctccagccgcagtgatg

SEQ ID NO: 260876 - DNA, 25 bp, Artificial
  Probe
tggaatgccctccagagtgtccgcc

SEQ ID NO: 260877 - DNA, 25 bp, Artificial
  Probe
gttctgcagggaagtggcctctgaa

SEQ ID NO: 260878 - DNA, 25 bp, Artificial
  Probe
tgcatgtggctgagccccaagcctc

SEQ ID NO: 260879 - DNA, 25 bp, Artificial
  Probe
aggatcgtcccgatttcgtggctgt

SEQ ID NO: 260880 - DNA, 25 bp, Artificial
  Probe
aaatgtacgcgcttatgagtgactg

SEQ ID NO: 260881 - DNA, 25 bp, Artificial
  Probe
cagctattacacagcccgttctgca

SEQ ID NO: 260882 - DNA, 25 bp, Artificial
  Probe
ctacagcatggctagccgggcagag

SEQ ID NO: 260883 - DNA, 25 bp, Artificial
  Probe
agaatgcatcaacttccggaagttc

SEQ ID NO: 260884 - DNA, 25 bp, Artificial
  Probe
aggcagcgactttggcctgtccaag

SEQ ID NO: 260885 - DNA, 25 bp, Artificial
  Probe
agccgcagtgatgtctggagctatg

SEQ ID NO: 260886 - DNA, 25 bp, Artificial
  Probe
gatggaatgccctccagagtgtccg

SEQ ID NO: 260887 - DNA, 25 bp, Artificial
  Probe
gccttttctcttgctgccaaggctc

SEQ ID NO: 260888 - DNA, 25 bp, Artificial
  Probe
tgaagtgttcagtggaactgttcct

SEQ ID NO: 260889 - DNA, 25 bp, Artificial
  Probe
ctacccaagcagctcacactgtgaa

SEQ ID NO: 260890 - DNA, 25 bp, Artificial
  Probe
cccaggttccgcttgcaggtttata

SEQ ID NO: 260891 - DNA, 25 bp, Artificial
  Probe
attgtgcctactttaagttggtggc

SEQ ID NO: 260892 - DNA, 25 bp, Artificial
  Probe
ggtcttggcgtaaggacaagctgca

SEQ ID NO: 260893 - DNA, 25 bp, Artificial
  Probe
ctctttggggttcatgccttttctc

SEQ ID NO: 260894 - DNA, 25 bp, Artificial
  Probe
tcctcaaagccctgagattgcccag

SEQ ID NO: 260895 - DNA, 25 bp, Artificial
  Probe
ggggttcatgccttttctcttgctg

SEQ ID NO: 260896 - DNA, 25 bp, Artificial
  Probe
tttatacactggaccgagggcatgg

SEQ ID NO: 260897 - DNA, 25 bp, Artificial
  Probe
gttcatgccttttctcttgctgcca

SEQ ID NO: 260898 - DNA, 25 bp, Artificial
  Probe
cctctgagcaccaggggtcttggcg

SEQ ID NO: 260899 - DNA, 25 bp, Artificial
  Probe
ctgagattgcccaggttccgcttgc

SEQ ID NO: 260900 - DNA, 25 bp, Artificial
  Probe
tggcgtgtagcttccccaacactgg

SEQ ID NO: 260901 - DNA, 25 bp, Artificial
  Probe
tccccacaaagagtggagagtttta

SEQ ID NO: 260902 - DNA, 25 bp, Artificial
  Probe
acgagggccctcagtcaccagcggt

SEQ ID NO: 260903 - DNA, 25 bp, Artificial
  Probe
ccaagcagctcacactgtgaagtgt

SEQ ID NO: 260904 - DNA, 25 bp, Artificial
  Probe
cttggcgtaaggacaagctgcactt

SEQ ID NO: 260905 - DNA, 25 bp, Artificial
  Probe
tcagtggaactgttcctctgagcac

SEQ ID NO: 260906 - DNA, 25 bp, Artificial
  Probe
tgggcagcctctttggggttcatgc

SEQ ID NO: 260907 - DNA, 25 bp, Artificial
  Probe
cgtaaggacaagctgcacttaggag

SEQ ID NO: 260908 - DNA, 25 bp, Artificial
  Probe
caccaggggtcttggcgtaaggaca

SEQ ID NO: 260909 - DNA, 25 bp, Artificial
  Probe
ttgcaggtttatacactggaccgag

SEQ ID NO: 260910 - DNA, 25 bp, Artificial
  Probe
ccgtgggcagcctctttggggttca

SEQ ID NO: 260911 - DNA, 25 bp, Artificial
  Probe
tcatgccttttctcttgctgccaag

SEQ ID NO: 260912 - DNA, 25 bp, Artificial
  Probe
tccctggccaaagaaagaattcgac

SEQ ID NO: 260913 - DNA, 25 bp, Artificial
  Probe
tgttcagtggaactgttcctctgag

SEQ ID NO: 260914 - DNA, 25 bp, Artificial
  Probe
atccggacgccgtgggcagcctctt

SEQ ID NO: 260915 - DNA, 25 bp, Artificial
  Probe
gcctactttaagttggtggcaaggg

SEQ ID NO: 260916 - DNA, 25 bp, Artificial
  Probe
cttccccaacactggctggagattg

SEQ ID NO: 260917 - DNA, 25 bp, Artificial
  Probe
ggtccctggccaaagaaagaattcg

SEQ ID NO: 260918 - DNA, 25 bp, Artificial
  Probe
agcggtcctcaaagccctgagattg

SEQ ID NO: 260919 - DNA, 25 bp, Artificial
  Probe
gattgcccaggttccgcttgcaggt

SEQ ID NO: 260920 - DNA, 25 bp, Artificial
  Probe
cactgtgaagtgttcagtggaactg

SEQ ID NO: 260921 - DNA, 25 bp, Artificial
  Probe
accagcggtcctcaaagccctgaga

SEQ ID NO: 260922 - DNA, 25 bp, Artificial
  Probe
gggcagcctctttggggttcatgcc

SEQ ID NO: 260923 - DNA, 25 bp, Artificial
  Probe
tggctggagattgtgcctactttaa

SEQ ID NO: 260924 - DNA, 25 bp, Artificial
  Probe
caggtttatacactggaccgagggc

SEQ ID NO: 260925 - DNA, 25 bp, Artificial
  Probe
aagtgttcagtggaactgttcctct

SEQ ID NO: 260926 - DNA, 25 bp, Artificial
  Probe
gagggcatggcgtgtagcttcccca

SEQ ID NO: 260927 - DNA, 25 bp, Artificial
  Probe
cccaacactggctggagattgtgcc

SEQ ID NO: 260928 - DNA, 25 bp, Artificial
  Probe
gcctctttggggttcatgccttttc

SEQ ID NO: 260929 - DNA, 25 bp, Artificial
  Probe
ttccccacaaagagtggagagtttt

SEQ ID NO: 260930 - DNA, 25 bp, Artificial
  Probe
agcttccccaacactggctggagat

SEQ ID NO: 260931 - DNA, 25 bp, Artificial
  Probe
cagctcacactgtgaagtgttcagt

SEQ ID NO: 260932 - DNA, 25 bp, Artificial
  Probe
aagccctgagattgcccaggttccg

SEQ ID NO: 260933 - DNA, 25 bp, Artificial
  Probe
ctcaggcttcaggttatagtcaagg

SEQ ID NO: 260934 - DNA, 25 bp, Artificial
  Probe
gcagtgctccagtgtctatctggag

SEQ ID NO: 260935 - DNA, 25 bp, Artificial
  Probe
accattgccagcagcagtgctccag

SEQ ID NO: 260936 - DNA, 25 bp, Artificial
  Probe
cagtcgcaaccattgccagcagcag

SEQ ID NO: 260937 - DNA, 25 bp, Artificial
  Probe
agtcgcaaccattgccagcagcagt

SEQ ID NO: 260938 - DNA, 25 bp, Artificial
  Probe
ggactgtggatcttacttgacccct

SEQ ID NO: 260939 - DNA, 25 bp, Artificial
  Probe
cagcagtgctccagtgtctatctgg

SEQ ID NO: 260940 - DNA, 25 bp, Artificial
  Probe
tcagtcgcaaccattgccagcagca

SEQ ID NO: 260941 - DNA, 25 bp, Artificial
  Probe
ccagtgtctatctggagcccggcct

SEQ ID NO: 260942 - DNA, 25 bp, Artificial
  Probe
atagtcaaggctatgccggctcgac

SEQ ID NO: 260943 - DNA, 25 bp, Artificial
  Probe
cagtgctccagtgtctatctggagc

SEQ ID NO: 260944 - DNA, 25 bp, Artificial
  Probe
ctccagtgtctatctggagcccggc

SEQ ID NO: 260945 - DNA, 25 bp, Artificial
  Probe
gtggatcttacttgacccctatgca

SEQ ID NO: 260946 - DNA, 25 bp, Artificial
  Probe
gcaaccattgccagcagcagtgctc

SEQ ID NO: 260947 - DNA, 25 bp, Artificial
  Probe
gtgtctatctggagcccggcctcca

SEQ ID NO: 260948 - DNA, 25 bp, Artificial
  Probe
cagcagcagtgctccagtgtctatc

SEQ ID NO: 260949 - DNA, 25 bp, Artificial
  Probe
ggcttcaggttatagtcaaggctat

SEQ ID NO: 260950 - DNA, 25 bp, Artificial
  Probe
tcgacttcctactttgggggcaagg

SEQ ID NO: 260951 - DNA, 25 bp, Artificial
  Probe
gccagcagcagtgctccagtgtcta

SEQ ID NO: 260952 - DNA, 25 bp, Artificial
  Probe
atgccggctcgacttcctactttgg

SEQ ID NO: 260953 - DNA, 25 bp, Artificial
  Probe
ccccagctcgggaagtgagttcaga

SEQ ID NO: 260954 - DNA, 25 bp, Artificial
  Probe
tatagtcaaggctatgccggctcga

SEQ ID NO: 260955 - DNA, 25 bp, Artificial
  Probe
tgctccagtgtctatctggagcccg

SEQ ID NO: 260956 - DNA, 25 bp, Artificial
  Probe
cccatgacctatactcaggcttcag

SEQ ID NO: 260957 - DNA, 25 bp, Artificial
  Probe
gctcgacttcctactttgggggcaa

SEQ ID NO: 260958 - DNA, 25 bp, Artificial
  Probe
tgccagcagcagtgctccagtgtct

SEQ ID NO: 260959 - DNA, 25 bp, Artificial
  Probe
tccagtgtctatctggagcccggcc

SEQ ID NO: 260960 - DNA, 25 bp, Artificial
  Probe
tgacctatactcaggcttcaggtta

SEQ ID NO: 260961 - DNA, 25 bp, Artificial
  Probe
tgtggatcttacttgacccctatgc

SEQ ID NO: 260962 - DNA, 25 bp, Artificial
  Probe
cttcaggttatagtcaaggctatgc

SEQ ID NO: 260963 - DNA, 25 bp, Artificial
  Probe
ctatgccggctcgacttcctacttt

SEQ ID NO: 260964 - DNA, 25 bp, Artificial
  Probe
ctagtacctcagtcgcaaccattgc

SEQ ID NO: 260965 - DNA, 25 bp, Artificial
  Probe
gccggctcgacttcctactttgggg

SEQ ID NO: 260966 - DNA, 25 bp, Artificial
  Probe
ggctcgacttcctactttgggggca

SEQ ID NO: 260967 - DNA, 25 bp, Artificial
  Probe
ggctatgccggctcgacttcctact

SEQ ID NO: 260968 - DNA, 25 bp, Artificial
  Probe
aggactgtggatcttacttgacccc

SEQ ID NO: 260969 - DNA, 25 bp, Artificial
  Probe
aaccattgccagcagcagtgctcca

SEQ ID NO: 260970 - DNA, 25 bp, Artificial
  Probe
attgccagcagcagtgctccagtgt

SEQ ID NO: 260971 - DNA, 25 bp, Artificial
  Probe
tactcaggcttcaggttatagtcaa

SEQ ID NO: 260972 - DNA, 25 bp, Artificial
  Probe
tatactcaggcttcaggttatagtc

SEQ ID NO: 260973 - DNA, 25 bp, Artificial
  Probe
agtgtctatctggagcccggcctcc

SEQ ID NO: 260974 - DNA, 25 bp, Artificial
  Probe
ctatactcaggcttcaggttatagt

SEQ ID NO: 260975 - DNA, 25 bp, Artificial
  Probe
tctagtacctcagtcgcaaccattg

SEQ ID NO: 260976 - DNA, 25 bp, Artificial
  Probe
tagtcaaggctatgccggctcgact

SEQ ID NO: 260977 - DNA, 25 bp, Artificial
  Probe
ccagctcgggaagtgagttcagaga

SEQ ID NO: 260978 - DNA, 25 bp, Artificial
  Probe
gcttcaggttatagtcaaggctatg

SEQ ID NO: 260979 - DNA, 25 bp, Artificial
  Probe
ggcctccggaacactttataaactg

SEQ ID NO: 260980 - DNA, 25 bp, Artificial
  Probe
ggatgatgaccctcctgctattcca

SEQ ID NO: 260981 - DNA, 25 bp, Artificial
  Probe
tccggaacactttataaactgtccg

SEQ ID NO: 260982 - DNA, 25 bp, Artificial
  Probe
gttacaaacacatgcccacagtgtc

SEQ ID NO: 260983 - DNA, 25 bp, Artificial
  Probe
atttgaagggcctgtgcccagtcca

SEQ ID NO: 260984 - DNA, 25 bp, Artificial
  Probe
cacgatgctccgaactccaagggag

SEQ ID NO: 260985 - DNA, 25 bp, Artificial
  Probe
tgatcacgatgctccgaactccaag

SEQ ID NO: 260986 - DNA, 25 bp, Artificial
  Probe
ccatgcgccaattgccctggtagat

SEQ ID NO: 260987 - DNA, 25 bp, Artificial
  Probe
agggttacaaacacatgcccacagt

SEQ ID NO: 260988 - DNA, 25 bp, Artificial
  Probe
ccctgaagcttagaattggtggaga

SEQ ID NO: 260989 - DNA, 25 bp, Artificial
  Probe
aatcggatgatgaccctcctgctat

SEQ ID NO: 260990 - DNA, 25 bp, Artificial
  Probe
cctccaaaggtaaagccaagagctc

SEQ ID NO: 260991 - DNA, 25 bp, Artificial
  Probe
actccaagggagctatgaaatcgga

SEQ ID NO: 260992 - DNA, 25 bp, Artificial
  Probe
tattggaattttgtcctgtaacagc

SEQ ID NO: 260993 - DNA, 25 bp, Artificial
  Probe
cactgtgaacggtaaccagtcttgt

SEQ ID NO: 260994 - DNA, 25 bp, Artificial
  Probe
tcacgggtacatttgaagggcctgt

SEQ ID NO: 260995 - DNA, 25 bp, Artificial
  Probe
gctcctgtcctcacgggtacatttg

SEQ ID NO: 260996 - DNA, 25 bp, Artificial
  Probe
ttacaactgccatgcgccaattgcc

SEQ ID NO: 260997 - DNA, 25 bp, Artificial
  Probe
gggtacatttgaagggcctgtgccc

SEQ ID NO: 260998 - DNA, 25 bp, Artificial
  Probe
gtcttctctcagagtctttcttcag

SEQ ID NO: 260999 - DNA, 25 bp, Artificial
  Probe
gtggaagtctacacaaactgagtga

SEQ ID NO: 261000 - DNA, 25 bp, Artificial
  Probe
gtaacacatctgacaaatacagtag

SEQ ID NO: 261001 - DNA, 25 bp, Artificial
  Probe
gaagtaacacatctgacaaatacag

SEQ ID NO: 261002 - DNA, 25 bp, Artificial
  Probe
ttggaattttgtcctgtaacagcac

SEQ ID NO: 261003 - DNA, 25 bp, Artificial
  Probe
ctccgaactccaagggagctatgaa

SEQ ID NO: 261004 - DNA, 25 bp, Artificial
  Probe
aaagtttgatcacgatgctccgaac

SEQ ID NO: 261005 - DNA, 25 bp, Artificial
  Probe
ctgccatgcgccaattgccctggta

SEQ ID NO: 261006 - DNA, 25 bp, Artificial
  Probe
tgtcctcacgggtacatttgaaggg

SEQ ID NO: 261007 - DNA, 25 bp, Artificial
  Probe
gcctccggaacactttataaactgt

SEQ ID NO: 261008 - DNA, 25 bp, Artificial
  Probe
agtgaagagccactagttcctcctc

SEQ ID NO: 261009 - DNA, 25 bp, Artificial
  Probe
ggtaaagccaagagctcctgtcctc

SEQ ID NO: 261010 - DNA, 25 bp, Artificial
  Probe
acagtgtccccctgaagcttagaat

SEQ ID NO: 261011 - DNA, 25 bp, Artificial
  Probe
ctcctccaaaggtaaagccaagagc

SEQ ID NO: 261012 - DNA, 25 bp, Artificial
  Probe
cgccaattgccctggtagatgctag

SEQ ID NO: 261013 - DNA, 25 bp, Artificial
  Probe
ttgaagggcctgtgcccagtccacc

SEQ ID NO: 261014 - DNA, 25 bp, Artificial
  Probe
acacatctgacaaatacagtagcag

SEQ ID NO: 261015 - DNA, 25 bp, Artificial
  Probe
gatgatgaccctcctgctattccac

SEQ ID NO: 261016 - DNA, 25 bp, Artificial
  Probe
ccctggtagatgctagggttacaaa

SEQ ID NO: 261017 - DNA, 25 bp, Artificial
  Probe
aaactgtccgtttaatctccagccg

SEQ ID NO: 261018 - DNA, 25 bp, Artificial
  Probe
aattttgtcctgtaacagcactgtg

SEQ ID NO: 261019 - DNA, 25 bp, Artificial
  Probe
gtcttgtcttctctcagagtctttc

SEQ ID NO: 261020 - DNA, 25 bp, Artificial
  Probe
tacacaaactgagtgaagagccact

SEQ ID NO: 261021 - DNA, 25 bp, Artificial
  Probe
acagcactgtgaacggtaaccagtc

SEQ ID NO: 261022 - DNA, 25 bp, Artificial
  Probe
aaatcggatgatgaccctcctgcta

SEQ ID NO: 261023 - DNA, 25 bp, Artificial
  Probe
gaactccaagggagctatgaaatcg

SEQ ID NO: 261024 - DNA, 25 bp, Artificial
  Probe
ctgacaaatacagtagcagaagtag

SEQ ID NO: 261025 - DNA, 25 bp, Artificial
  Probe
acgctgacgaaagtgttggtagcct

SEQ ID NO: 261026 - DNA, 25 bp, Artificial
  Probe
agctgcttcgcctagaattggcaga

SEQ ID NO: 261027 - DNA, 25 bp, Artificial
  Probe
cagctacgccgctgtggctgtcact

SEQ ID NO: 261028 - DNA, 25 bp, Artificial
  Probe
tgctggacacgctgacgaaagtgtt

SEQ ID NO: 261029 - DNA, 25 bp, Artificial
  Probe
ttggtagccttatatgaagaaccag

SEQ ID NO: 261030 - DNA, 25 bp, Artificial
  Probe
ccggagaacccagaaatagagctgc

SEQ ID NO: 261031 - DNA, 25 bp, Artificial
  Probe
cactgaaaactggttttgtatcact

SEQ ID NO: 261032 - DNA, 25 bp, Artificial
  Probe
gagaagcccaccagtgctctggact

SEQ ID NO: 261033 - DNA, 25 bp, Artificial
  Probe
tatatgatctttcctgaaaagatgc

SEQ ID NO: 261034 - DNA, 25 bp, Artificial
  Probe
tgaagaaccagagaagcccaccagt

SEQ ID NO: 261035 - DNA, 25 bp, Artificial
  Probe
ttcgcctagaattggcagaaatgaa

SEQ ID NO: 261036 - DNA, 25 bp, Artificial
  Probe
ctggttttgtatcacttgaatagct

SEQ ID NO: 261037 - DNA, 25 bp, Artificial
  Probe
cgccgctgtggctgtcactatggcc

SEQ ID NO: 261038 - DNA, 25 bp, Artificial
  Probe
actatggcccattacaaagccgccg

SEQ ID NO: 261039 - DNA, 25 bp, Artificial
  Probe
agcgcgagcagttccggaggtactt

SEQ ID NO: 261040 - DNA, 25 bp, Artificial
  Probe
aacccagaaatagagctgcttcgcc

SEQ ID NO: 261041 - DNA, 25 bp, Artificial
  Probe
caaagccgccgactcgaagcgcgag

SEQ ID NO: 261042 - DNA, 25 bp, Artificial
  Probe
ccgccgactcgaagcgcgagcagtt

SEQ ID NO: 261043 - DNA, 25 bp, Artificial
  Probe
tggctgtcactatggcccattacaa

SEQ ID NO: 261044 - DNA, 25 bp, Artificial
  Probe
aagcatcacttaggagctgccaccc

SEQ ID NO: 261045 - DNA, 25 bp, Artificial
  Probe
taggattcttctcagttgaaaagac

SEQ ID NO: 261046 - DNA, 25 bp, Artificial
  Probe
aaagcaaagcttgttcagtatgaac

SEQ ID NO: 261047 - DNA, 25 bp, Artificial
  Probe
tgaaccacctcaggaggagaagcgt

SEQ ID NO: 261048 - DNA, 25 bp, Artificial
  Probe
actcgaagcgcgagcagttccggag

SEQ ID NO: 261049 - DNA, 25 bp, Artificial
  Probe
agtgctctggactttttaaagcatc

SEQ ID NO: 261050 - DNA, 25 bp, Artificial
  Probe
agccttatatgaagaaccagagaag

SEQ ID NO: 261051 - DNA, 25 bp, Artificial
  Probe
agcagttccggaggtacttggagaa

SEQ ID NO: 261052 - DNA, 25 bp, Artificial
  Probe
tcactatggcccattacaaagccgc

SEQ ID NO: 261053 - DNA, 25 bp, Artificial
  Probe
ccagagaagcccaccagtgctctgg

SEQ ID NO: 261054 - DNA, 25 bp, Artificial
  Probe
agaacccagaaatagagctgcttcg

SEQ ID NO: 261055 - DNA, 25 bp, Artificial
  Probe
gacactgaaaactggttttgtatca

SEQ ID NO: 261056 - DNA, 25 bp, Artificial
  Probe
tcttctcagttgaaaagacactgaa

SEQ ID NO: 261057 - DNA, 25 bp, Artificial
  Probe
gaaatagagctgcttcgcctagaat

SEQ ID NO: 261058 - DNA, 25 bp, Artificial
  Probe
gctctggactttttaaagcatcact

SEQ ID NO: 261059 - DNA, 25 bp, Artificial
  Probe
cggagaacccagaaatagagctgct

SEQ ID NO: 261060 - DNA, 25 bp, Artificial
  Probe
gactttttaaagcatcacttaggag

SEQ ID NO: 261061 - DNA, 25 bp, Artificial
  Probe
atggcccattacaaagccgccgact

SEQ ID NO: 261062 - DNA, 25 bp, Artificial
  Probe
aagcgcgagcagttccggaggtact

SEQ ID NO: 261063 - DNA, 25 bp, Artificial
  Probe
cacgaggagtgtctccggcgccagc

SEQ ID NO: 261064 - DNA, 25 bp, Artificial
  Probe
cccggagaacccagaaatagagctg

SEQ ID NO: 261065 - DNA, 25 bp, Artificial
  Probe
gctacgccgctgtggctgtcactat

SEQ ID NO: 261066 - DNA, 25 bp, Artificial
  Probe
gatctttcctgaaaagatgctataa

SEQ ID NO: 261067 - DNA, 25 bp, Artificial
  Probe
actggttttgtatcacttgaatagc

SEQ ID NO: 261068 - DNA, 25 bp, Artificial
  Probe
tgttggtagccttatatgaagaacc

SEQ ID NO: 261069 - DNA, 25 bp, Artificial
  Probe
aatagagctgcttcgcctagaattg

SEQ ID NO: 261070 - DNA, 25 bp, Artificial
  Probe
ctgaataggattcttctcagttgaa

SEQ ID NO: 261071 - DNA, 25 bp, Artificial
  Probe
gctggtcgtgggtccacctgtgcta

SEQ ID NO: 261072 - DNA, 25 bp, Artificial
  Probe
gtctaggcctcagtctcccctaata

SEQ ID NO: 261073 - DNA, 25 bp, Artificial
  Probe
aagagtcactgagtacttatatccc

SEQ ID NO: 261074 - DNA, 25 bp, Artificial
  Probe
gggctcctgctgctgctggattcct

SEQ ID NO: 261075 - DNA, 25 bp, Artificial
  Probe
gctgctgctggattcctgccagttc

SEQ ID NO: 261076 - DNA, 25 bp, Artificial
  Probe
agcacagcagggacagtcatagcat

SEQ ID NO: 261077 - DNA, 25 bp, Artificial
  Probe
gcatactgtctacaactttgttagt

SEQ ID NO: 261078 - DNA, 25 bp, Artificial
  Probe
tgccagttcttagttcgaactaaag

SEQ ID NO: 261079 - DNA, 25 bp, Artificial
  Probe
ttcttagttcgaactaaaggagcgg

SEQ ID NO: 261080 - DNA, 25 bp, Artificial
  Probe
ctgctgctgctggattcctgccagt

SEQ ID NO: 261081 - DNA, 25 bp, Artificial
  Probe
ggagcggtcagatgccgtaacaaaa

SEQ ID NO: 261082 - DNA, 25 bp, Artificial
  Probe
acacagcacagcagggacagtcata

SEQ ID NO: 261083 - DNA, 25 bp, Artificial
  Probe
tcctggaagagtcactgagtactta

SEQ ID NO: 261084 - DNA, 25 bp, Artificial
  Probe
gacagtcatagcatactgtctacaa

SEQ ID NO: 261085 - DNA, 25 bp, Artificial
  Probe
acagcagggacagtcatagcatact

SEQ ID NO: 261086 - DNA, 25 bp, Artificial
  Probe
tacttatatcccagctgttgtctgt

SEQ ID NO: 261087 - DNA, 25 bp, Artificial
  Probe
gctcttgatcctcctcatgatgggg

SEQ ID NO: 261088 - DNA, 25 bp, Artificial
  Probe
ggctcctgctgctgctggattcctg

SEQ ID NO: 261089 - DNA, 25 bp, Artificial
  Probe
agcatactgtctacaactttgttag

SEQ ID NO: 261090 - DNA, 25 bp, Artificial
  Probe
accctaggaagtgagtcttcatgcc

SEQ ID NO: 261091 - DNA, 25 bp, Artificial
  Probe
agagagcttgtctaggcctcagtct

SEQ ID NO: 261092 - DNA, 25 bp, Artificial
  Probe
gaagtgagtcttcatgccacacagc

SEQ ID NO: 261093 - DNA, 25 bp, Artificial
  Probe
ggggctgtcttcactttggtggtcc

SEQ ID NO: 261094 - DNA, 25 bp, Artificial
  Probe
ttggtggtcctggaagagtcactga

SEQ ID NO: 261095 - DNA, 25 bp, Artificial
  Probe
gttcgaactaaaggagcggtcagat

SEQ ID NO: 261096 - DNA, 25 bp, Artificial
  Probe
ggtgcacttgggaaccctaggaagt

SEQ ID NO: 261097 - DNA, 25 bp, Artificial
  Probe
gtgcacttgggaaccctaggaagtg

SEQ ID NO: 261098 - DNA, 25 bp, Artificial
  Probe
ctaaaggagcggtcagatgccgtaa

SEQ ID NO: 261099 - DNA, 25 bp, Artificial
  Probe
aatccctggtgcacttgggaaccct

SEQ ID NO: 261100 - DNA, 25 bp, Artificial
  Probe
tgagtacttatatcccagctgttgt

SEQ ID NO: 261101 - DNA, 25 bp, Artificial
  Probe
agtgagtcttcatgccacacagcac

SEQ ID NO: 261102 - DNA, 25 bp, Artificial
  Probe
ctgttgtctgtctggggctcctgct

SEQ ID NO: 261103 - DNA, 25 bp, Artificial
  Probe
ccctggtgcacttgggaaccctagg

SEQ ID NO: 261104 - DNA, 25 bp, Artificial
  Probe
caactttgttagtcattcagtgtaa

SEQ ID NO: 261105 - DNA, 25 bp, Artificial
  Probe
taacaaaatccctggtgcacttggg

SEQ ID NO: 261106 - DNA, 25 bp, Artificial
  Probe
ctaataactatgttgctctgttctg

SEQ ID NO: 261107 - DNA, 25 bp, Artificial
  Probe
tgctgctggtcgtgggtccacctgt

SEQ ID NO: 261108 - DNA, 25 bp, Artificial
  Probe
gagagagcttgtctaggcctcagtc

SEQ ID NO: 261109 - DNA, 25 bp, Artificial
  Probe
ttgtctaggcctcagtctcccctaa

SEQ ID NO: 261110 - DNA, 25 bp, Artificial
  Probe
tggattcctgccagttcttagttcg

SEQ ID NO: 261111 - DNA, 25 bp, Artificial
  Probe
cttgggaaccctaggaagtgagtct

SEQ ID NO: 261112 - DNA, 25 bp, Artificial
  Probe
ctgctggattcctgccagttcttag

SEQ ID NO: 261113 - DNA, 25 bp, Artificial
  Probe
agtcttcatgccacacagcacagca

SEQ ID NO: 261114 - DNA, 25 bp, Artificial
  Probe
gtctacaactttgttagtcattcag

SEQ ID NO: 261115 - DNA, 25 bp, Artificial
  Probe
ggtcagatgccgtaacaaaatccct

SEQ ID NO: 261116 - DNA, 25 bp, Artificial
  Probe
gccgtaacaaaatccctggtgcact

SEQ ID NO: 261117 - DNA, 25 bp, Artificial
  Probe
cagctgactgttgttacagttgtag

SEQ ID NO: 261118 - DNA, 25 bp, Artificial
  Probe
aactttctgtgctgatcgccccttc

SEQ ID NO: 261119 - DNA, 25 bp, Artificial
  Probe
taaactcacattcactatgtgggga

SEQ ID NO: 261120 - DNA, 25 bp, Artificial
  Probe
gatcaaggctgacttatctggaatg

SEQ ID NO: 261121 - DNA, 25 bp, Artificial
  Probe
aggcttcaatgagatcaaggctgac

SEQ ID NO: 261122 - DNA, 25 bp, Artificial
  Probe
actcacattcactatgtggggaaag

SEQ ID NO: 261123 - DNA, 25 bp, Artificial
  Probe
acattcactatgtggggaaagttcc

SEQ ID NO: 261124 - DNA, 25 bp, Artificial
  Probe
ataagggaataccttcttccaagat

SEQ ID NO: 261125 - DNA, 25 bp, Artificial
  Probe
atctggaatgtgtcctgagaaagac

SEQ ID NO: 261126 - DNA, 25 bp, Artificial
  Probe
gtgtgtccaagtttgttcacgagtg

SEQ ID NO: 261127 - DNA, 25 bp, Artificial
  Probe
cacattcactatgtggggaaagttc

SEQ ID NO: 261128 - DNA, 25 bp, Artificial
  Probe
acaatgctacatctctggtagggtg

SEQ ID NO: 261129 - DNA, 25 bp, Artificial
  Probe
cttcaatgagatcaaggctgactta

SEQ ID NO: 261130 - DNA, 25 bp, Artificial
  Probe
agatcaaggctgacttatctggaat

SEQ ID NO: 261131 - DNA, 25 bp, Artificial
  Probe
acttatctggaatgtgtcctgagaa

SEQ ID NO: 261132 - DNA, 25 bp, Artificial
  Probe
gacctgtgtgtgtccaagtttgttc

SEQ ID NO: 261133 - DNA, 25 bp, Artificial
  Probe
caatgctacatctctggtagggtgg

SEQ ID NO: 261134 - DNA, 25 bp, Artificial
  Probe
gcagcatctgcagctgactgttgtt

SEQ ID NO: 261135 - DNA, 25 bp, Artificial
  Probe
cctgagaaagacctgtgtgtgtcca

SEQ ID NO: 261136 - DNA, 25 bp, Artificial
  Probe
aagacctgtgtgtgtccaagtttgt

SEQ ID NO: 261137 - DNA, 25 bp, Artificial
  Probe
ttcaatgagatcaaggctgacttat

SEQ ID NO: 261138 - DNA, 25 bp, Artificial
  Probe
gaatataccccaactttctgtgctg

SEQ ID NO: 261139 - DNA, 25 bp, Artificial
  Probe
aggaactgaggctgctgcagcatct

SEQ ID NO: 261140 - DNA, 25 bp, Artificial
  Probe
caaggctgacttatctggaatgtgt

SEQ ID NO: 261141 - DNA, 25 bp, Artificial
  Probe
tgcagcatctgcagctgactgttgt

SEQ ID NO: 261142 - DNA, 25 bp, Artificial
  Probe
cataaactcacattcactatgtggg

SEQ ID NO: 261143 - DNA, 25 bp, Artificial
  Probe
ccaagtttgttcacgagtgtgtggt

SEQ ID NO: 261144 - DNA, 25 bp, Artificial
  Probe
gtcctgagaaagacctgtgtgtgtc

SEQ ID NO: 261145 - DNA, 25 bp, Artificial
  Probe
ggctgacttatctggaatgtgtcct

SEQ ID NO: 261146 - DNA, 25 bp, Artificial
  Probe
cccaacaatgctacatctctggtag

SEQ ID NO: 261147 - DNA, 25 bp, Artificial
  Probe
gaaagacctgtgtgtgtccaagttt

SEQ ID NO: 261148 - DNA, 25 bp, Artificial
  Probe
aatgtgtcctgagaaagacctgtgt

SEQ ID NO: 261149 - DNA, 25 bp, Artificial
  Probe
gagaaagacctgtgtgtgtccaagt

SEQ ID NO: 261150 - DNA, 25 bp, Artificial
  Probe
caacaatgctacatctctggtaggg

SEQ ID NO: 261151 - DNA, 25 bp, Artificial
  Probe
ctcacattcactatgtggggaaagt

SEQ ID NO: 261152 - DNA, 25 bp, Artificial
  Probe
tgagatcaaggctgacttatctgga

SEQ ID NO: 261153 - DNA, 25 bp, Artificial
  Probe
taccccaactttctgtgctgatcgc

SEQ ID NO: 261154 - DNA, 25 bp, Artificial
  Probe
agacctgtgtgtgtccaagtttgtt

SEQ ID NO: 261155 - DNA, 25 bp, Artificial
  Probe
ataccccaactttctgtgctgatcg

SEQ ID NO: 261156 - DNA, 25 bp, Artificial
  Probe
aaactcacattcactatgtggggaa

SEQ ID NO: 261157 - DNA, 25 bp, Artificial
  Probe
caactttctgtgctgatcgcccctt

SEQ ID NO: 261158 - DNA, 25 bp, Artificial
  Probe
tctgcagctgactgttgttacagtt

SEQ ID NO: 261159 - DNA, 25 bp, Artificial
  Probe
cagcatctgcagctgactgttgtta

SEQ ID NO: 261160 - DNA, 25 bp, Artificial
  Probe
tgacttatctggaatgtgtcctgag

SEQ ID NO: 261161 - DNA, 25 bp, Artificial
  Probe
tggaatgtgtcctgagaaagacctg

SEQ ID NO: 261162 - DNA, 25 bp, Artificial
  Probe
tgtccaagtttgttcacgagtgtgt

SEQ ID NO: 261163 - DNA, 25 bp, Artificial
  Probe
aagactgctgggtcagaccaaggcc

SEQ ID NO: 261164 - DNA, 25 bp, Artificial
  Probe
gggaaagactgctgggtcagaccaa

SEQ ID NO: 261165 - DNA, 25 bp, Artificial
  Probe
tgggtcagaccaaggccatatccac

SEQ ID NO: 261166 - DNA, 25 bp, Artificial
  Probe
aacaccaccggcttattgggattct

SEQ ID NO: 261167 - DNA, 25 bp, Artificial
  Probe
aaggccatatccacgcgaactcctg

SEQ ID NO: 261168 - DNA, 25 bp, Artificial
  Probe
cacgattctacaaggggaaagactg

SEQ ID NO: 261169 - DNA, 25 bp, Artificial
  Probe
ggtcctctgagactagaacccttcc

SEQ ID NO: 261170 - DNA, 25 bp, Artificial
  Probe
ggttcccactgtacagcccaaaggt

SEQ ID NO: 261171 - DNA, 25 bp, Artificial
  Probe
cagaccaaggccatatccacgcgaa

SEQ ID NO: 261172 - DNA, 25 bp, Artificial
  Probe
ttctacaaggggaaagactgctggg

SEQ ID NO: 261173 - DNA, 25 bp, Artificial
  Probe
ccacgattctacaaggggaaagact

SEQ ID NO: 261174 - DNA, 25 bp, Artificial
  Probe
catccagaagcacatgaccaagagg

SEQ ID NO: 261175 - DNA, 25 bp, Artificial
  Probe
gttcccactgtacagcccaaaggtc

SEQ ID NO: 261176 - DNA, 25 bp, Artificial
  Probe
tgaccaagaggatgggcctgaactg

SEQ ID NO: 261177 - DNA, 25 bp, Artificial
  Probe
gaaagaagctcaacgctcctaggaa

SEQ ID NO: 261178 - DNA, 25 bp, Artificial
  Probe
caccaccggcttattgggattcttt

SEQ ID NO: 261179 - DNA, 25 bp, Artificial
  Probe
agcactaagggttccctcacaccat

SEQ ID NO: 261180 - DNA, 25 bp, Artificial
  Probe
agggttcccactgtacagcccaaag

SEQ ID NO: 261181 - DNA, 25 bp, Artificial
  Probe
acagcccaaaggtcctctgagacta

SEQ ID NO: 261182 - DNA, 25 bp, Artificial
  Probe
ctcctaggaagcatccagaagcaca

SEQ ID NO: 261183 - DNA, 25 bp, Artificial
  Probe
tgtacaaaacaccaccggcttattg

SEQ ID NO: 261184 - DNA, 25 bp, Artificial
  Probe
tcccgagctggagaaagaagctcaa

SEQ ID NO: 261185 - DNA, 25 bp, Artificial
  Probe
tgggaaccacgattctacaagggga

SEQ ID NO: 261186 - DNA, 25 bp, Artificial
  Probe
aagcatccagaagcacatgaccaag

SEQ ID NO: 261187 - DNA, 25 bp, Artificial
  Probe
tgtacagcccaaaggtcctctgaga

SEQ ID NO: 261188 - DNA, 25 bp, Artificial
  Probe
caaaggtcctctgagactagaaccc

SEQ ID NO: 261189 - DNA, 25 bp, Artificial
  Probe
gaagctcaacgctcctaggaagcat

SEQ ID NO: 261190 - DNA, 25 bp, Artificial
  Probe
catgaccaagaggatgggcctgaac

SEQ ID NO: 261191 - DNA, 25 bp, Artificial
  Probe
gcatccagaagcacatgaccaagag

SEQ ID NO: 261192 - DNA, 25 bp, Artificial
  Probe
acgctcctaggaagcatccagaagc

SEQ ID NO: 261193 - DNA, 25 bp, Artificial
  Probe
gtacaaaacaccaccggcttattgg

SEQ ID NO: 261194 - DNA, 25 bp, Artificial
  Probe
aagcacatgaccaagaggatgggcc

SEQ ID NO: 261195 - DNA, 25 bp, Artificial
  Probe
aaaggtcctctgagactagaaccct

SEQ ID NO: 261196 - DNA, 25 bp, Artificial
  Probe
ggaagcatccagaagcacatgacca

SEQ ID NO: 261197 - DNA, 25 bp, Artificial
  Probe
caacgctcctaggaagcatccagaa

SEQ ID NO: 261198 - DNA, 25 bp, Artificial
  Probe
actgtacagcccaaaggtcctctga

SEQ ID NO: 261199 - DNA, 25 bp, Artificial
  Probe
ccttcccgagctggagaaagaagct

SEQ ID NO: 261200 - DNA, 25 bp, Artificial
  Probe
ccagaagcacatgaccaagaggatg

SEQ ID NO: 261201 - DNA, 25 bp, Artificial
  Probe
gactgctgggtcagaccaaggccat

SEQ ID NO: 261202 - DNA, 25 bp, Artificial
  Probe
taagggttccctcacaccattcctg

SEQ ID NO: 261203 - DNA, 25 bp, Artificial
  Probe
cgagggttcccactgtacagcccaa

SEQ ID NO: 261204 - DNA, 25 bp, Artificial
  Probe
tgctgggtcagaccaaggccatatc

SEQ ID NO: 261205 - DNA, 25 bp, Artificial
  Probe
aagctcaacgctcctaggaagcatc

SEQ ID NO: 261206 - DNA, 25 bp, Artificial
  Probe
agaccaaggccatatccacgcgaac

SEQ ID NO: 261207 - DNA, 25 bp, Artificial
  Probe
gaaccacgattctacaaggggaaag

SEQ ID NO: 261208 - DNA, 25 bp, Artificial
  Probe
gaccaaggccatatccacgcgaact

SEQ ID NO: 261209 - DNA, 25 bp, Artificial
  Probe
taaggaccgttacagacaaggaagg

SEQ ID NO: 261210 - DNA, 25 bp, Artificial
  Probe
gaccattttcgtggtcttgtttagg

SEQ ID NO: 261211 - DNA, 25 bp, Artificial
  Probe
cttgtttagggcaaacgttctagat

SEQ ID NO: 261212 - DNA, 25 bp, Artificial
  Probe
cttgctgggttttgattctgcagct

SEQ ID NO: 261213 - DNA, 25 bp, Artificial
  Probe
ttcgtggtcttgtttagggcaaacg

SEQ ID NO: 261214 - DNA, 25 bp, Artificial
  Probe
tgagagcaagtactggcaagaccat

SEQ ID NO: 261215 - DNA, 25 bp, Artificial
  Probe
tgctgggttttgattctgcagctta

SEQ ID NO: 261216 - DNA, 25 bp, Artificial
  Probe
tttactccattatgcacagtttgag

SEQ ID NO: 261217 - DNA, 25 bp, Artificial
  Probe
ggcaaacgttctagattgtactaaa

SEQ ID NO: 261218 - DNA, 25 bp, Artificial
  Probe
gtactggcaagaccattttcgtggt

SEQ ID NO: 261219 - DNA, 25 bp, Artificial
  Probe
ttcttgctgggttttgattctgcag

SEQ ID NO: 261220 - DNA, 25 bp, Artificial
  Probe
tcggctgttattggaaccaggctgc

SEQ ID NO: 261221 - DNA, 25 bp, Artificial
  Probe
gaccgttacagacaaggaaggaatt

SEQ ID NO: 261222 - DNA, 25 bp, Artificial
  Probe
accaggctgccgagaatccatgtat

SEQ ID NO: 261223 - DNA, 25 bp, Artificial
  Probe
aagattcggctgttattggaaccag

SEQ ID NO: 261224 - DNA, 25 bp, Artificial
  Probe
gctgccgagaatccatgtatatatt

SEQ ID NO: 261225 - DNA, 25 bp, Artificial
  Probe
ttactccattatgcacagtttgaga

SEQ ID NO: 261226 - DNA, 25 bp, Artificial
  Probe
ggaccgttacagacaaggaaggaat

SEQ ID NO: 261227 - DNA, 25 bp, Artificial
  Probe
agggcaaacgttctagattgtacta

SEQ ID NO: 261228 - DNA, 25 bp, Artificial
  Probe
caggctgccgagaatccatgtatat

SEQ ID NO: 261229 - DNA, 25 bp, Artificial
  Probe
actggcaagaccattttcgtggtct

SEQ ID NO: 261230 - DNA, 25 bp, Artificial
  Probe
cattttcgtggtcttgtttagggca

SEQ ID NO: 261231 - DNA, 25 bp, Artificial
  Probe
ctgttattggaaccaggctgccgag

SEQ ID NO: 261232 - DNA, 25 bp, Artificial
  Probe
ttaaggaccgttacagacaaggaag

SEQ ID NO: 261233 - DNA, 25 bp, Artificial
  Probe
actccattatgcacagtttgagata

SEQ ID NO: 261234 - DNA, 25 bp, Artificial
  Probe
aacatgagagcaagtactggcaaga

SEQ ID NO: 261235 - DNA, 25 bp, Artificial
  Probe
attcggctgttattggaaccaggct

SEQ ID NO: 261236 - DNA, 25 bp, Artificial
  Probe
aagtactggcaagaccattttcgtg

SEQ ID NO: 261237 - DNA, 25 bp, Artificial
  Probe
caagaccattttcgtggtcttgttt

SEQ ID NO: 261238 - DNA, 25 bp, Artificial
  Probe
tcgtggtcttgtttagggcaaacgt

SEQ ID NO: 261239 - DNA, 25 bp, Artificial
  Probe
ctgggttttgattctgcagcttaaa

SEQ ID NO: 261240 - DNA, 25 bp, Artificial
  Probe
tccattatgcacagtttgagataaa

SEQ ID NO: 261241 - DNA, 25 bp, Artificial
  Probe
aaatgtccatgcaggttgatatcgt

SEQ ID NO: 261242 - DNA, 25 bp, Artificial
  Probe
tggcaagaccattttcgtggtcttg

SEQ ID NO: 261243 - DNA, 25 bp, Artificial
  Probe
tagggcaaacgttctagattgtact

SEQ ID NO: 261244 - DNA, 25 bp, Artificial
  Probe
ttagggcaaacgttctagattgtac

SEQ ID NO: 261245 - DNA, 25 bp, Artificial
  Probe
cggctgttattggaaccaggctgcc

SEQ ID NO: 261246 - DNA, 25 bp, Artificial
  Probe
gcaagtactggcaagaccattttcg

SEQ ID NO: 261247 - DNA, 25 bp, Artificial
  Probe
gattcggctgttattggaaccaggc

SEQ ID NO: 261248 - DNA, 25 bp, Artificial
  Probe
ttggaaccaggctgccgagaatcca

SEQ ID NO: 261249 - DNA, 25 bp, Artificial
  Probe
agaccattttcgtggtcttgtttag

SEQ ID NO: 261250 - DNA, 25 bp, Artificial
  Probe
ccatgcaggttgatatcgttggtaa

SEQ ID NO: 261251 - DNA, 25 bp, Artificial
  Probe
ccaggctgccgagaatccatgtata

SEQ ID NO: 261252 - DNA, 25 bp, Artificial
  Probe
gtccatgcaggttgatatcgttggt

SEQ ID NO: 261253 - DNA, 25 bp, Artificial
  Probe
gctgttattggaaccaggctgccga

SEQ ID NO: 261254 - DNA, 25 bp, Artificial
  Probe
gttattggaaccaggctgccgagaa

SEQ ID NO: 261255 - DNA, 25 bp, Artificial
  Probe
gccgccctgaggttgcttggagtct

SEQ ID NO: 261256 - DNA, 25 bp, Artificial
  Probe
tgaggttgcttggagtctgggaaag

SEQ ID NO: 261257 - DNA, 25 bp, Artificial
  Probe
gagctgcggttcgagccagtcacgt

SEQ ID NO: 261258 - DNA, 25 bp, Artificial
  Probe
ccctctgcaagctgccaggctaaag

SEQ ID NO: 261259 - DNA, 25 bp, Artificial
  Probe
ccagtcacgtcctgcgcacggaggg

SEQ ID NO: 261260 - DNA, 25 bp, Artificial
  Probe
agccttccaggagcagccaggaaga

SEQ ID NO: 261261 - DNA, 25 bp, Artificial
  Probe
ccttccaggagcagccaggaagatg

SEQ ID NO: 261262 - DNA, 25 bp, Artificial
  Probe
ccaggagcagccaggaagatgtctc

SEQ ID NO: 261263 - DNA, 25 bp, Artificial
  Probe
gccttccaggagcagccaggaagat

SEQ ID NO: 261264 - DNA, 25 bp, Artificial
  Probe
ctgcaagctgccaggctaaagggct

SEQ ID NO: 261265 - DNA, 25 bp, Artificial
  Probe
agccgccctgaggttgcttggagtc

SEQ ID NO: 261266 - DNA, 25 bp, Artificial
  Probe
cgcagccttccaggagcagccagga

SEQ ID NO: 261267 - DNA, 25 bp, Artificial
  Probe
agccagtcacgtcctgcgcacggag

SEQ ID NO: 261268 - DNA, 25 bp, Artificial
  Probe
aggagcagccaggaagatgtctcaa

SEQ ID NO: 261269 - DNA, 25 bp, Artificial
  Probe
ctggtagagcctggagaagccgccc

SEQ ID NO: 261270 - DNA, 25 bp, Artificial
  Probe
tccaggagcagccaggaagatgtct

SEQ ID NO: 261271 - DNA, 25 bp, Artificial
  Probe
tagagcctggagaagccgccctgag

SEQ ID NO: 261272 - DNA, 25 bp, Artificial
  Probe
aaccctctgcaagctgccaggctaa

SEQ ID NO: 261273 - DNA, 25 bp, Artificial
  Probe
gccagtcacgtcctgcgcacggagg

SEQ ID NO: 261274 - DNA, 25 bp, Artificial
  Probe
ccgccctgaggttgcttggagtctg

SEQ ID NO: 261275 - DNA, 25 bp, Artificial
  Probe
ttaaccctctgcaagctgccaggct

SEQ ID NO: 261276 - DNA, 25 bp, Artificial
  Probe
acttaaccctctgcaagctgccagg

SEQ ID NO: 261277 - DNA, 25 bp, Artificial
  Probe
tgagagctgcggttcgagccagtca

SEQ ID NO: 261278 - DNA, 25 bp, Artificial
  Probe
aagccgccctgaggttgcttggagt

SEQ ID NO: 261279 - DNA, 25 bp, Artificial
  Probe
gcggttcgagccagtcacgtcctgc

SEQ ID NO: 261280 - DNA, 25 bp, Artificial
  Probe
agagctgcggttcgagccagtcacg

SEQ ID NO: 261281 - DNA, 25 bp, Artificial
  Probe
tgcgcacggagggcgggtagcctcg

SEQ ID NO: 261282 - DNA, 25 bp, Artificial
  Probe
tggtagagcctggagaagccgccct

SEQ ID NO: 261283 - DNA, 25 bp, Artificial
  Probe
aagatgtctcaaacttaaccctctg

SEQ ID NO: 261284 - DNA, 25 bp, Artificial
  Probe
agaagccgccctgaggttgcttgga

SEQ ID NO: 261285 - DNA, 25 bp, Artificial
  Probe
gagccagtcacgtcctgcgcacgga

SEQ ID NO: 261286 - DNA, 25 bp, Artificial
  Probe
caggagcagccaggaagatgtctca

SEQ ID NO: 261287 - DNA, 25 bp, Artificial
  Probe
gcttgggcaggaagctgagcccccg

SEQ ID NO: 261288 - DNA, 25 bp, Artificial
  Probe
gtagagcctggagaagccgccctga

SEQ ID NO: 261289 - DNA, 25 bp, Artificial
  Probe
gagagctgcggttcgagccagtcac

SEQ ID NO: 261290 - DNA, 25 bp, Artificial
  Probe
ggttcgagccagtcacgtcctgcgc

SEQ ID NO: 261291 - DNA, 25 bp, Artificial
  Probe
agctgcggttcgagccagtcacgtc

SEQ ID NO: 261292 - DNA, 25 bp, Artificial
  Probe
taaccctctgcaagctgccaggcta

SEQ ID NO: 261293 - DNA, 25 bp, Artificial
  Probe
aagctgccaggctaaagggctggta

SEQ ID NO: 261294 - DNA, 25 bp, Artificial
  Probe
cgggagcaggcttgggcaggaagct

SEQ ID NO: 261295 - DNA, 25 bp, Artificial
  Probe
gttcgagccagtcacgtcctgcgca

SEQ ID NO: 261296 - DNA, 25 bp, Artificial
  Probe
ccgcagccttccaggagcagccagg

SEQ ID NO: 261297 - DNA, 25 bp, Artificial
  Probe
gcagccttccaggagcagccaggaa

SEQ ID NO: 261298 - DNA, 25 bp, Artificial
  Probe
ggggagctgagagctgcggttcgag

SEQ ID NO: 261299 - DNA, 25 bp, Artificial
  Probe
ccatcgggagcaggcttgggcagga

SEQ ID NO: 261300 - DNA, 25 bp, Artificial
  Probe
cagccttccaggagcagccaggaag

SEQ ID NO: 261301 - DNA, 25 bp, Artificial
  Probe
tgatgccgagaaccttctgcgactc

SEQ ID NO: 261302 - DNA, 25 bp, Artificial
  Probe
tgctgccagccgtgtccagtgtgtg

SEQ ID NO: 261303 - DNA, 25 bp, Artificial
  Probe
gaaccttctgcgactctgtaaggag

SEQ ID NO: 261304 - DNA, 25 bp, Artificial
  Probe
cttctgcgactctgtaaggagtgca

SEQ ID NO: 261305 - DNA, 25 bp, Artificial
  Probe
tgcggactctgtgaaaagaccagcc

SEQ ID NO: 261306 - DNA, 25 bp, Artificial
  Probe
atgaaactggccaagaccaaagaca

SEQ ID NO: 261307 - DNA, 25 bp, Artificial
  Probe
ccagtgtgtgtcgtgtgtatggtac

SEQ ID NO: 261308 - DNA, 25 bp, Artificial
  Probe
agggcttcatgcacatgaaactggc

SEQ ID NO: 261309 - DNA, 25 bp, Artificial
  Probe
caagaccaaagacaagtatgttctg

SEQ ID NO: 261310 - DNA, 25 bp, Artificial
  Probe
acagtgtcccggaagtcatccacta

SEQ ID NO: 261311 - DNA, 25 bp, Artificial
  Probe
caccaggaagctacccatcaagggg

SEQ ID NO: 261312 - DNA, 25 bp, Artificial
  Probe
gtcccggaagtcatccactactaca

SEQ ID NO: 261313 - DNA, 25 bp, Artificial
  Probe
gactctgtaaggagtgcagctacct

SEQ ID NO: 261314 - DNA, 25 bp, Artificial
  Probe
tgcacatgaaactggccaagaccaa

SEQ ID NO: 261315 - DNA, 25 bp, Artificial
  Probe
gaagtgatgccgagaaccttctgcg

SEQ ID NO: 261316 - DNA, 25 bp, Artificial
  Probe
cctttcgacagtgtcccggaagtca

SEQ ID NO: 261317 - DNA, 25 bp, Artificial
  Probe
gcgactctgtaaggagtgcagctac

SEQ ID NO: 261318 - DNA, 25 bp, Artificial
  Probe
tcctctacccagtggctgtgcggac

SEQ ID NO: 261319 - DNA, 25 bp, Artificial
  Probe
aggagtgcagctaccttgtccggaa

SEQ ID NO: 261320 - DNA, 25 bp, Artificial
  Probe
ctccctgaagagcaaccagggcttc

SEQ ID NO: 261321 - DNA, 25 bp, Artificial
  Probe
tccggaacagccagaccagcaaaca

SEQ ID NO: 261322 - DNA, 25 bp, Artificial
  Probe
tgtgtcgtgtgtatggtacaagcac

SEQ ID NO: 261323 - DNA, 25 bp, Artificial
  Probe
ctttcgacagtgtcccggaagtcat

SEQ ID NO: 261324 - DNA, 25 bp, Artificial
  Probe
agccagaccagcaaacacgactact

SEQ ID NO: 261325 - DNA, 25 bp, Artificial
  Probe
ctacccagtggctgtgcggactctg

SEQ ID NO: 261326 - DNA, 25 bp, Artificial
  Probe
tggctgtgcggactctgtgaaaaga

SEQ ID NO: 261327 - DNA, 25 bp, Artificial
  Probe
agacaagtatgttctgggtcagaac

SEQ ID NO: 261328 - DNA, 25 bp, Artificial
  Probe
tgccgagaaccttctgcgactctgt

SEQ ID NO: 261329 - DNA, 25 bp, Artificial
  Probe
accaccaggaagctacccatcaagg

SEQ ID NO: 261330 - DNA, 25 bp, Artificial
  Probe
acccagtggctgtgcggactctgtg

SEQ ID NO: 261331 - DNA, 25 bp, Artificial
  Probe
tgtatggtacaagcacaccactgca

SEQ ID NO: 261332 - DNA, 25 bp, Artificial
  Probe
tgaagagcaaccagggcttcatgca

SEQ ID NO: 261333 - DNA, 25 bp, Artificial
  Probe
taccttgtccggaacagccagacca

SEQ ID NO: 261334 - DNA, 25 bp, Artificial
  Probe
cgtgtccagtgtgtgtcgtgtgtat

SEQ ID NO: 261335 - DNA, 25 bp, Artificial
  Probe
ctctgtgctgccagccgtgtccagt

SEQ ID NO: 261336 - DNA, 25 bp, Artificial
  Probe
tcagcagaagtgatgccgagaacct

SEQ ID NO: 261337 - DNA, 25 bp, Artificial
  Probe
tatcacggagccatcagcagaagtg

SEQ ID NO: 261338 - DNA, 25 bp, Artificial
  Probe
ccgtgtccagtgtgtgtcgtgtgta

SEQ ID NO: 261339 - DNA, 25 bp, Artificial
  Probe
ctctccctgaagagcaaccagggct

SEQ ID NO: 261340 - DNA, 25 bp, Artificial
  Probe
tcccactggagaaacaaatatggta

SEQ ID NO: 261341 - DNA, 25 bp, Artificial
  Probe
atggtatcacggagccatcagcaga

SEQ ID NO: 261342 - DNA, 25 bp, Artificial
  Probe
cttgtccggaacagccagaccagca

SEQ ID NO: 261343 - DNA, 25 bp, Artificial
  Probe
gcagctaccttgtccggaacagcca

SEQ ID NO: 261344 - DNA, 25 bp, Artificial
  Probe
acaagtatgttctgggtcagaacag

SEQ ID NO: 261345 - DNA, 25 bp, Artificial
  Probe
gcttcatgcacatgaaactggccaa

SEQ ID NO: 261346 - DNA, 25 bp, Artificial
  Probe
ctcctctacccagtggctgtgcgga

SEQ ID NO: 261347 - DNA, 25 bp, Artificial
  Probe
ggcctaggcttatagttctatggct

SEQ ID NO: 261348 - DNA, 25 bp, Artificial
  Probe
tggcctaggcttatagttctatggc

SEQ ID NO: 261349 - DNA, 25 bp, Artificial
  Probe
atgataatcaactatgagagtttcc

SEQ ID NO: 261350 - DNA, 25 bp, Artificial
  Probe
tcaactatgagagtttcccacgggt

SEQ ID NO: 261351 - DNA, 25 bp, Artificial
  Probe
ttatgataatcaactatgagagttt

SEQ ID NO: 261352 - DNA, 25 bp, Artificial
  Probe
cagccttctgattttttgctactgt

SEQ ID NO: 261353 - DNA, 25 bp, Artificial
  Probe
gagactggcctggactatgttgtga

SEQ ID NO: 261354 - DNA, 25 bp, Artificial
  Probe
aggctaatctgagctacagagtaaa

SEQ ID NO: 261355 - DNA, 25 bp, Artificial
  Probe
tcagccttctgattttttgctactg

SEQ ID NO: 261356 - DNA, 25 bp, Artificial
  Probe
actggcctggactatgttgtgaatt

SEQ ID NO: 261357 - DNA, 25 bp, Artificial
  Probe
ttcccacgggtctggcctaggctta

SEQ ID NO: 261358 - DNA, 25 bp, Artificial
  Probe
tctggcctaggcttatagttctatg

SEQ ID NO: 261359 - DNA, 25 bp, Artificial
  Probe
taatcaactatgagagtttcccacg

SEQ ID NO: 261360 - DNA, 25 bp, Artificial
  Probe
ctaatctgagctacagagtaaatac

SEQ ID NO: 261361 - DNA, 25 bp, Artificial
  Probe
tttattattgactttgaatacagca

SEQ ID NO: 261362 - DNA, 25 bp, Artificial
  Probe
ttctatggctgagaatggatttact

SEQ ID NO: 261363 - DNA, 25 bp, Artificial
  Probe
tttcccacgggtctggcctaggctt

SEQ ID NO: 261364 - DNA, 25 bp, Artificial
  Probe
gtttcccacgggtctggcctaggct

SEQ ID NO: 261365 - DNA, 25 bp, Artificial
  Probe
gactggcctggactatgttgtgaat

SEQ ID NO: 261366 - DNA, 25 bp, Artificial
  Probe
ttgagactggcctggactatgttgt

SEQ ID NO: 261367 - DNA, 25 bp, Artificial
  Probe
tgagactggcctggactatgttgtg

SEQ ID NO: 261368 - DNA, 25 bp, Artificial
  Probe
taaatttgagactggcctggactat

SEQ ID NO: 261369 - DNA, 25 bp, Artificial
  Probe
aatttcaggctaatctgagctacag

SEQ ID NO: 261370 - DNA, 25 bp, Artificial
  Probe
actatgagagtttcccacgggtctg

SEQ ID NO: 261371 - DNA, 25 bp, Artificial
  Probe
gctaatctgagctacagagtaaata

SEQ ID NO: 261372 - DNA, 25 bp, Artificial
  Probe
ctggcctggactatgttgtgaattt

SEQ ID NO: 261373 - DNA, 25 bp, Artificial
  Probe
cctaggcttatagttctatggctga

SEQ ID NO: 261374 - DNA, 25 bp, Artificial
  Probe
gcctaggcttatagttctatggctg

SEQ ID NO: 261375 - DNA, 25 bp, Artificial
  Probe
acgggtctggcctaggcttatagtt

SEQ ID NO: 261376 - DNA, 25 bp, Artificial
  Probe
ggctaatctgagctacagagtaaat

SEQ ID NO: 261377 - DNA, 25 bp, Artificial
  Probe
tgaatttcaggctaatctgagctac

SEQ ID NO: 261378 - DNA, 25 bp, Artificial
  Probe
gcctggactatgttgtgaatttcag

SEQ ID NO: 261379 - DNA, 25 bp, Artificial
  Probe
tctatggctgagaatggatttactc

SEQ ID NO: 261380 - DNA, 25 bp, Artificial
  Probe
ggcctggactatgttgtgaatttca

SEQ ID NO: 261381 - DNA, 25 bp, Artificial
  Probe
tggcctggactatgttgtgaatttc

SEQ ID NO: 261382 - DNA, 25 bp, Artificial
  Probe
taatctgagctacagagtaaatact

SEQ ID NO: 261383 - DNA, 25 bp, Artificial
  Probe
cgggtctggcctaggcttatagttc

SEQ ID NO: 261384 - DNA, 25 bp, Artificial
  Probe
ctggcctaggcttatagttctatgg

SEQ ID NO: 261385 - DNA, 25 bp, Artificial
  Probe
ctaggcttatagttctatggctgag

SEQ ID NO: 261386 - DNA, 25 bp, Artificial
  Probe
atcaactatgagagtttcccacggg

SEQ ID NO: 261387 - DNA, 25 bp, Artificial
  Probe
tgagagtttcccacgggtctggcct

SEQ ID NO: 261388 - DNA, 25 bp, Artificial
  Probe
atttcaggctaatctgagctacaga

SEQ ID NO: 261389 - DNA, 25 bp, Artificial
  Probe
caactatgagagtttcccacgggtc

SEQ ID NO: 261390 - DNA, 25 bp, Artificial
  Probe
aactatgagagtttcccacgggtct

SEQ ID NO: 261391 - DNA, 25 bp, Artificial
  Probe
agactggcctggactatgttgtgaa

SEQ ID NO: 261392 - DNA, 25 bp, Artificial
  Probe
gtgaatttcaggctaatctgagcta

SEQ ID NO: 261393 - DNA, 25 bp, Artificial
  Probe
accagggatactcaaaggtaccaga

SEQ ID NO: 261394 - DNA, 25 bp, Artificial
  Probe
caggcccttgaagagctgatcacct

SEQ ID NO: 261395 - DNA, 25 bp, Artificial
  Probe
gttcagagccatgttctaccaatgt

SEQ ID NO: 261396 - DNA, 25 bp, Artificial
  Probe
ttaaaaatcgcatgctgttaggtct

SEQ ID NO: 261397 - DNA, 25 bp, Artificial
  Probe
ctgcttcggtgttcccattttctgg

SEQ ID NO: 261398 - DNA, 25 bp, Artificial
  Probe
ctttgggtactggaagttcatctga

SEQ ID NO: 261399 - DNA, 25 bp, Artificial
  Probe
ctgggccatgctctaccaatatctc

SEQ ID NO: 261400 - DNA, 25 bp, Artificial
  Probe
ttcggtgttcccattttctggagac

SEQ ID NO: 261401 - DNA, 25 bp, Artificial
  Probe
actcctgaggtgtgccccacaactg

SEQ ID NO: 261402 - DNA, 25 bp, Artificial
  Probe
agatacctgaccagggatactcaaa

SEQ ID NO: 261403 - DNA, 25 bp, Artificial
  Probe
aactgtcaccccaggattagctcag

SEQ ID NO: 261404 - DNA, 25 bp, Artificial
  Probe
gcagaccatcttagttccttgaaca

SEQ ID NO: 261405 - DNA, 25 bp, Artificial
  Probe
taccaatgtccgtgaacctggctac

SEQ ID NO: 261406 - DNA, 25 bp, Artificial
  Probe
tgaccctggctgtgccatggttcct

SEQ ID NO: 261407 - DNA, 25 bp, Artificial
  Probe
acactctttgggtactggaagttca

SEQ ID NO: 261408 - DNA, 25 bp, Artificial
  Probe
cttaaaaatcgcatgctgttaggtc

SEQ ID NO: 261409 - DNA, 25 bp, Artificial
  Probe
actggaagttcatctgaagtggaac

SEQ ID NO: 261410 - DNA, 25 bp, Artificial
  Probe
agagccatgccagtccagaactcct

SEQ ID NO: 261411 - DNA, 25 bp, Artificial
  Probe
tcaaaggtaccagagccatgccagt

SEQ ID NO: 261412 - DNA, 25 bp, Artificial
  Probe
gggatactcaaaggtaccagagcca

SEQ ID NO: 261413 - DNA, 25 bp, Artificial
  Probe
ggttcctgggccatgctctaccaat

SEQ ID NO: 261414 - DNA, 25 bp, Artificial
  Probe
agtaatatagtccatatgcagccag

SEQ ID NO: 261415 - DNA, 25 bp, Artificial
  Probe
tcttagttccttgaacactctttgg

SEQ ID NO: 261416 - DNA, 25 bp, Artificial
  Probe
gcagccaggcccttgaagagctgat

SEQ ID NO: 261417 - DNA, 25 bp, Artificial
  Probe
aaatcgcatgctgttaggtcttctc

SEQ ID NO: 261418 - DNA, 25 bp, Artificial
  Probe
aggttcctgatcagggatacaccaa

SEQ ID NO: 261419 - DNA, 25 bp, Artificial
  Probe
tgccatggttcctgggccatgctct

SEQ ID NO: 261420 - DNA, 25 bp, Artificial
  Probe
cttttctgtctgcttcggtgttccc

SEQ ID NO: 261421 - DNA, 25 bp, Artificial
  Probe
tctggagaccatgtaacaatatttt

SEQ ID NO: 261422 - DNA, 25 bp, Artificial
  Probe
aagtcttttctgtctgcttcggtgt

SEQ ID NO: 261423 - DNA, 25 bp, Artificial
  Probe
tgtaacttaaaaatcgcatgctgtt

SEQ ID NO: 261424 - DNA, 25 bp, Artificial
  Probe
agagctgatcacctgctgctgaagt

SEQ ID NO: 261425 - DNA, 25 bp, Artificial
  Probe
gagttaagcagaccatcttagttcc

SEQ ID NO: 261426 - DNA, 25 bp, Artificial
  Probe
gtaccagagccatgccagtccagaa

SEQ ID NO: 261427 - DNA, 25 bp, Artificial
  Probe
ccatatgcagccaggcccttgaaga

SEQ ID NO: 261428 - DNA, 25 bp, Artificial
  Probe
acctgaccagggatactcaaaggta

SEQ ID NO: 261429 - DNA, 25 bp, Artificial
  Probe
cagccaggcccttgaagagctgatc

SEQ ID NO: 261430 - DNA, 25 bp, Artificial
  Probe
gccaaggttcctgatcagggataca

SEQ ID NO: 261431 - DNA, 25 bp, Artificial
  Probe
ggtaccagagccatgccagtccaga

SEQ ID NO: 261432 - DNA, 25 bp, Artificial
  Probe
acctggctaccttaatgcctcagag

SEQ ID NO: 261433 - DNA, 25 bp, Artificial
  Probe
gattagctcagcagaagaccaagca

SEQ ID NO: 261434 - DNA, 25 bp, Artificial
  Probe
gctgttaggtcttctccataccctc

SEQ ID NO: 261435 - DNA, 25 bp, Artificial
  Probe
gttctaccaatgtccgtgaacctgg

SEQ ID NO: 261436 - DNA, 25 bp, Artificial
  Probe
tgtgccatggttcctgggccatgct

SEQ ID NO: 261437 - DNA, 25 bp, Artificial
  Probe
cccttgaagagctgatcacctgctg

SEQ ID NO: 261438 - DNA, 25 bp, Artificial
  Probe
tgtccgtgaacctggctaccttaat

SEQ ID NO: 261439 - DNA, 25 bp, Artificial
  Probe
agggtccacgcaaagcagagccagg

SEQ ID NO: 261440 - DNA, 25 bp, Artificial
  Probe
acagaacttctgtcacagcagaagg

SEQ ID NO: 261441 - DNA, 25 bp, Artificial
  Probe
tgctgaagctgtctcagagagtgaa

SEQ ID NO: 261442 - DNA, 25 bp, Artificial
  Probe
tctacgctgatgacattgccctgct

SEQ ID NO: 261443 - DNA, 25 bp, Artificial
  Probe
ctgaagctgtctcagagagtgaaaa

SEQ ID NO: 261444 - DNA, 25 bp, Artificial
  Probe
gtgaaaatgtccagccacgccaggc

SEQ ID NO: 261445 - DNA, 25 bp, Artificial
  Probe
agggcatctcggagttctacgctga

SEQ ID NO: 261446 - DNA, 25 bp, Artificial
  Probe
agccagggcatctcggagttctacg

SEQ ID NO: 261447 - DNA, 25 bp, Artificial
  Probe
ggtccacgcaaagcagagccagggc

SEQ ID NO: 261448 - DNA, 25 bp, Artificial
  Probe
caaagcagagccagggcatctcgga

SEQ ID NO: 261449 - DNA, 25 bp, Artificial
  Probe
agaccatgagacagaacttctgtca

SEQ ID NO: 261450 - DNA, 25 bp, Artificial
  Probe
gcacgagggtccacgcaaagcagag

SEQ ID NO: 261451 - DNA, 25 bp, Artificial
  Probe
tcacagcagaaggttcctgcgcatt

SEQ ID NO: 261452 - DNA, 25 bp, Artificial
  Probe
ccctgctgaagctgtctcagagagt

SEQ ID NO: 261453 - DNA, 25 bp, Artificial
  Probe
ggcatctcggagttctacgctgatg

SEQ ID NO: 261454 - DNA, 25 bp, Artificial
  Probe
acctgtaaagaccatgagacagaac

SEQ ID NO: 261455 - DNA, 25 bp, Artificial
  Probe
tctcggagttctacgctgatgacat

SEQ ID NO: 261456 - DNA, 25 bp, Artificial
  Probe
ggagttctacgctgatgacattgcc

SEQ ID NO: 261457 - DNA, 25 bp, Artificial
  Probe
cacgcaaagcagagccagggcatct

SEQ ID NO: 261458 - DNA, 25 bp, Artificial
  Probe
tgtaaagaccatgagacagaacttc

SEQ ID NO: 261459 - DNA, 25 bp, Artificial
  Probe
gccaacatggctctgcggagatccc

SEQ ID NO: 261460 - DNA, 25 bp, Artificial
  Probe
ttctgtcacagcagaaggttcctgc

SEQ ID NO: 261461 - DNA, 25 bp, Artificial
  Probe
agctgtctcagagagtgaaaatgtc

SEQ ID NO: 261462 - DNA, 25 bp, Artificial
  Probe
gtccacgcaaagcagagccagggca

SEQ ID NO: 261463 - DNA, 25 bp, Artificial
  Probe
tacctgtaaagaccatgagacagaa

SEQ ID NO: 261464 - DNA, 25 bp, Artificial
  Probe
ttgccctgctgaagctgtctcagag

SEQ ID NO: 261465 - DNA, 25 bp, Artificial
  Probe
cagaacttctgtcacagcagaaggt

SEQ ID NO: 261466 - DNA, 25 bp, Artificial
  Probe
gagggtccacgcaaagcagagccag

SEQ ID NO: 261467 - DNA, 25 bp, Artificial
  Probe
catctgccttccttgcacagtgggg

SEQ ID NO: 261468 - DNA, 25 bp, Artificial
  Probe
agtgaaaatgtccagccacgccagg

SEQ ID NO: 261469 - DNA, 25 bp, Artificial
  Probe
ctgtaaagaccatgagacagaactt

SEQ ID NO: 261470 - DNA, 25 bp, Artificial
  Probe
ggccaacatggctctgcggagatcc

SEQ ID NO: 261471 - DNA, 25 bp, Artificial
  Probe
cagcagaaggttcctgcgcatttcg

SEQ ID NO: 261472 - DNA, 25 bp, Artificial
  Probe
gctgtctcagagagtgaaaatgtcc

SEQ ID NO: 261473 - DNA, 25 bp, Artificial
  Probe
tgagacagaacttctgtcacagcag

SEQ ID NO: 261474 - DNA, 25 bp, Artificial
  Probe
atctcggagttctacgctgatgaca

SEQ ID NO: 261475 - DNA, 25 bp, Artificial
  Probe
atggctctgcggagatccccaggta

SEQ ID NO: 261476 - DNA, 25 bp, Artificial
  Probe
ccacgcaaagcagagccagggcatc

SEQ ID NO: 261477 - DNA, 25 bp, Artificial
  Probe
gagttctacgctgatgacattgccc

SEQ ID NO: 261478 - DNA, 25 bp, Artificial
  Probe
acttctgtcacagcagaaggttcct

SEQ ID NO: 261479 - DNA, 25 bp, Artificial
  Probe
gacagaacttctgtcacagcagaag

SEQ ID NO: 261480 - DNA, 25 bp, Artificial
  Probe
accatgagacagaacttctgtcaca

SEQ ID NO: 261481 - DNA, 25 bp, Artificial
  Probe
atgagacagaacttctgtcacagca

SEQ ID NO: 261482 - DNA, 25 bp, Artificial
  Probe
tgtcacagcagaaggttcctgcgca

SEQ ID NO: 261483 - DNA, 25 bp, Artificial
  Probe
cattgccctgctgaagctgtctcag

SEQ ID NO: 261484 - DNA, 25 bp, Artificial
  Probe
cagagccagggcatctcggagttct

SEQ ID NO: 261485 - DNA, 25 bp, Artificial
  Probe
ttgctttcagcatgagatatcacca

SEQ ID NO: 261486 - DNA, 25 bp, Artificial
  Probe
gtgagtcatgactccctttggagag

SEQ ID NO: 261487 - DNA, 25 bp, Artificial
  Probe
aggttgagagccactgaaatgcagg

SEQ ID NO: 261488 - DNA, 25 bp, Artificial
  Probe
tgcatgttaccaaatgttcagttaa

SEQ ID NO: 261489 - DNA, 25 bp, Artificial
  Probe
tacctaagtccattggagagcacag

SEQ ID NO: 261490 - DNA, 25 bp, Artificial
  Probe
accagtggtctgaactaatatcctg

SEQ ID NO: 261491 - DNA, 25 bp, Artificial
  Probe
caggggttacctaagtccattggag

SEQ ID NO: 261492 - DNA, 25 bp, Artificial
  Probe
ggcatggacctggatctgtttttca

SEQ ID NO: 261493 - DNA, 25 bp, Artificial
  Probe
tatcaccagtggtctgaactaatat

SEQ ID NO: 261494 - DNA, 25 bp, Artificial
  Probe
tgtatgtaaacatgccatcaggtaa

SEQ ID NO: 261495 - DNA, 25 bp, Artificial
  Probe
ttaaaagttgccagaaaccattttg

SEQ ID NO: 261496 - DNA, 25 bp, Artificial
  Probe
gagaatggccctttcacaggggtta

SEQ ID NO: 261497 - DNA, 25 bp, Artificial
  Probe
gaagggcatggacctggatctgttt

SEQ ID NO: 261498 - DNA, 25 bp, Artificial
  Probe
ggggttacctaagtccattggagag

SEQ ID NO: 261499 - DNA, 25 bp, Artificial
  Probe
ggacctggatctgtttttcatatat

SEQ ID NO: 261500 - DNA, 25 bp, Artificial
  Probe
tccctttggagagagaatggccctt

SEQ ID NO: 261501 - DNA, 25 bp, Artificial
  Probe
ctttgtcatcgctgagattaatgta

SEQ ID NO: 261502 - DNA, 25 bp, Artificial
  Probe
gactccctttggagagagaatggcc

SEQ ID NO: 261503 - DNA, 25 bp, Artificial
  Probe
gtatgaagggcatggacctggatct

SEQ ID NO: 261504 - DNA, 25 bp, Artificial
  Probe
tttcagcatgagatatcaccagtgg

SEQ ID NO: 261505 - DNA, 25 bp, Artificial
  Probe
catggacctggatctgtttttcata

SEQ ID NO: 261506 - DNA, 25 bp, Artificial
  Probe
atcccaaactgagatgtatgaaaat

SEQ ID NO: 261507 - DNA, 25 bp, Artificial
  Probe
ccattggagagcacagatgtttata

SEQ ID NO: 261508 - DNA, 25 bp, Artificial
  Probe
agcatgagatatcaccagtggtctg

SEQ ID NO: 261509 - DNA, 25 bp, Artificial
  Probe
agtccattggagagcacagatgttt

SEQ ID NO: 261510 - DNA, 25 bp, Artificial
  Probe
aacctgatgaaatcccaaactgaga

SEQ ID NO: 261511 - DNA, 25 bp, Artificial
  Probe
acctggatctgtttttcatatattg

SEQ ID NO: 261512 - DNA, 25 bp, Artificial
  Probe
agggcatggacctggatctgttttt

SEQ ID NO: 261513 - DNA, 25 bp, Artificial
  Probe
aatatagcattggttctcaacctgt

SEQ ID NO: 261514 - DNA, 25 bp, Artificial
  Probe
ctcaacctgtgagtcatgactccct

SEQ ID NO: 261515 - DNA, 25 bp, Artificial
  Probe
tcacaatttgctttcagcatgagat

SEQ ID NO: 261516 - DNA, 25 bp, Artificial
  Probe
ttgagagccactgaaatgcaggcct

SEQ ID NO: 261517 - DNA, 25 bp, Artificial
  Probe
tggtctgaactaatatcctgttttt

SEQ ID NO: 261518 - DNA, 25 bp, Artificial
  Probe
cacaatttgctttcagcatgagata

SEQ ID NO: 261519 - DNA, 25 bp, Artificial
  Probe
tcccaaactgagatgtatgaaaata

SEQ ID NO: 261520 - DNA, 25 bp, Artificial
  Probe
gagatatcaccagtggtctgaacta

SEQ ID NO: 261521 - DNA, 25 bp, Artificial
  Probe
tgatgaaatcccaaactgagatgta

SEQ ID NO: 261522 - DNA, 25 bp, Artificial
  Probe
ggtctgaactaatatcctgtttttc

SEQ ID NO: 261523 - DNA, 25 bp, Artificial
  Probe
tgtaaacatgccatcaggtaaaaaa

SEQ ID NO: 261524 - DNA, 25 bp, Artificial
  Probe
gccactgaaatgcaggcctttttat

SEQ ID NO: 261525 - DNA, 25 bp, Artificial
  Probe
aaagttgccagaaaccattttgtca

SEQ ID NO: 261526 - DNA, 25 bp, Artificial
  Probe
tttcacaatttgctttcagcatgag

SEQ ID NO: 261527 - DNA, 25 bp, Artificial
  Probe
aaacctgatgaaatcccaaactgag

SEQ ID NO: 261528 - DNA, 25 bp, Artificial
  Probe
agagaatggccctttcacaggggtt

SEQ ID NO: 261529 - DNA, 25 bp, Artificial
  Probe
tcagcatgagatatcaccagtggtc

SEQ ID NO: 261530 - DNA, 25 bp, Artificial
  Probe
gtcatgactccctttggagagagaa

SEQ ID NO: 261531 - DNA, 25 bp, Artificial
  Probe
aatgaggagtcacttcccaagtggt

SEQ ID NO: 261532 - DNA, 25 bp, Artificial
  Probe
ttcaagtctggtgctgactgttgtt

SEQ ID NO: 261533 - DNA, 25 bp, Artificial
  Probe
ctgttaacagaaacaacaggaaagc

SEQ ID NO: 261534 - DNA, 25 bp, Artificial
  Probe
tctggtgctgactgttgttcttagc

SEQ ID NO: 261535 - DNA, 25 bp, Artificial
  Probe
tgaatttcctgctgttaacagaaac

SEQ ID NO: 261536 - DNA, 25 bp, Artificial
  Probe
gagtcacttcccaagtggtgtcatt

SEQ ID NO: 261537 - DNA, 25 bp, Artificial
  Probe
tgttgtacctaacttttcaagtctg

SEQ ID NO: 261538 - DNA, 25 bp, Artificial
  Probe
acagtttgtgtcattgaatttcctg

SEQ ID NO: 261539 - DNA, 25 bp, Artificial
  Probe
tctgtgttgtacctaacttttcaag

SEQ ID NO: 261540 - DNA, 25 bp, Artificial
  Probe
cctaacttttcaagtctggtgctga

SEQ ID NO: 261541 - DNA, 25 bp, Artificial
  Probe
tgtcattgaatttcctgctgttaac

SEQ ID NO: 261542 - DNA, 25 bp, Artificial
  Probe
cattgaatttcctgctgttaacaga

SEQ ID NO: 261543 - DNA, 25 bp, Artificial
  Probe
gaactacatgaggttctttatcaaa

SEQ ID NO: 261544 - DNA, 25 bp, Artificial
  Probe
ttgtacctaacttttcaagtctggt

SEQ ID NO: 261545 - DNA, 25 bp, Artificial
  Probe
tcacaaacagtttgtgtcattgaat

SEQ ID NO: 261546 - DNA, 25 bp, Artificial
  Probe
aagtctggtgctgactgttgttctt

SEQ ID NO: 261547 - DNA, 25 bp, Artificial
  Probe
gttgttcttagcatcacaaacagtt

SEQ ID NO: 261548 - DNA, 25 bp, Artificial
  Probe
tgtgtcattgaatttcctgctgtta

SEQ ID NO: 261549 - DNA, 25 bp, Artificial
  Probe
cacttcccaagtggtgtcatttgtt

SEQ ID NO: 261550 - DNA, 25 bp, Artificial
  Probe
tgttcttagcatcacaaacagtttg

SEQ ID NO: 261551 - DNA, 25 bp, Artificial
  Probe
ttcctgctgttaacagaaacaacag

SEQ ID NO: 261552 - DNA, 25 bp, Artificial
  Probe
aacagtttgtgtcattgaatttcct

SEQ ID NO: 261553 - DNA, 25 bp, Artificial
  Probe
tgaggagtcacttcccaagtggtgt

SEQ ID NO: 261554 - DNA, 25 bp, Artificial
  Probe
tgttgttcttagcatcacaaacagt

SEQ ID NO: 261555 - DNA, 25 bp, Artificial
  Probe
gactgttgttcttagcatcacaaac

SEQ ID NO: 261556 - DNA, 25 bp, Artificial
  Probe
ctgactgttgttcttagcatcacaa

SEQ ID NO: 261557 - DNA, 25 bp, Artificial
  Probe
gatgtctgtgttgtacctaactttt

SEQ ID NO: 261558 - DNA, 25 bp, Artificial
  Probe
cttttcaagtctggtgctgactgtt

SEQ ID NO: 261559 - DNA, 25 bp, Artificial
  Probe
cctgctgttaacagaaacaacagga

SEQ ID NO: 261560 - DNA, 25 bp, Artificial
  Probe
ttcccaagtggtgtcatttgttcaa

SEQ ID NO: 261561 - DNA, 25 bp, Artificial
  Probe
ttgaactacatgaggttctttatca

SEQ ID NO: 261562 - DNA, 25 bp, Artificial
  Probe
tacctaacttttcaagtctggtgct

SEQ ID NO: 261563 - DNA, 25 bp, Artificial
  Probe
ttcttagcatcacaaacagtttgtg

SEQ ID NO: 261564 - DNA, 25 bp, Artificial
  Probe
caaacagtttgtgtcattgaatttc

SEQ ID NO: 261565 - DNA, 25 bp, Artificial
  Probe
cttagcatcacaaacagtttgtgtc

SEQ ID NO: 261566 - DNA, 25 bp, Artificial
  Probe
attgaatttcctgctgttaacagaa

SEQ ID NO: 261567 - DNA, 25 bp, Artificial
  Probe
cacaaacagtttgtgtcattgaatt

SEQ ID NO: 261568 - DNA, 25 bp, Artificial
  Probe
aaggatgtctgtgttgtacctaact

SEQ ID NO: 261569 - DNA, 25 bp, Artificial
  Probe
ggtgctgactgttgttcttagcatc

SEQ ID NO: 261570 - DNA, 25 bp, Artificial
  Probe
tgtgttgtacctaacttttcaagtc

SEQ ID NO: 261571 - DNA, 25 bp, Artificial
  Probe
tgactgttgttcttagcatcacaaa

SEQ ID NO: 261572 - DNA, 25 bp, Artificial
  Probe
tgaactacatgaggttctttatcaa

SEQ ID NO: 261573 - DNA, 25 bp, Artificial
  Probe
tgtacctaacttttcaagtctggtg

SEQ ID NO: 261574 - DNA, 25 bp, Artificial
  Probe
aacttttcaagtctggtgctgactg

SEQ ID NO: 261575 - DNA, 25 bp, Artificial
  Probe
gaatttcctgctgttaacagaaaca

SEQ ID NO: 261576 - DNA, 25 bp, Artificial
  Probe
ttttcaagtctggtgctgactgttg

SEQ ID NO: 261577 - DNA, 25 bp, Artificial
  Probe
gacatgatcagcatgtacctccccg

SEQ ID NO: 261578 - DNA, 25 bp, Artificial
  Probe
agcactaccagagcggcccggtgcc

SEQ ID NO: 261579 - DNA, 25 bp, Artificial
  Probe
tagactgcacatggcccagcactac

SEQ ID NO: 261580 - DNA, 25 bp, Artificial
  Probe
acatggcccagcactaccagagcgg

SEQ ID NO: 261581 - DNA, 25 bp, Artificial
  Probe
agcccgctgcgcccagtagactgca

SEQ ID NO: 261582 - DNA, 25 bp, Artificial
  Probe
tgcacatggcccagcactaccagag

SEQ ID NO: 261583 - DNA, 25 bp, Artificial
  Probe
gatcagcatgtacctccccggcgcc

SEQ ID NO: 261584 - DNA, 25 bp, Artificial
  Probe
cctgtcgcacatgtgagggccggac

SEQ ID NO: 261585 - DNA, 25 bp, Artificial
  Probe
gctgcgcccagtagactgcacatgg

SEQ ID NO: 261586 - DNA, 25 bp, Artificial
  Probe
cagtagactgcacatggcccagcac

SEQ ID NO: 261587 - DNA, 25 bp, Artificial
  Probe
ccggtgcccggcacggccattaacg

SEQ ID NO: 261588 - DNA, 25 bp, Artificial
  Probe
ctgcccctgtcgcacatgtgagggc

SEQ ID NO: 261589 - DNA, 25 bp, Artificial
  Probe
gcccctgtcgcacatgtgagggccg

SEQ ID NO: 261590 - DNA, 25 bp, Artificial
  Probe
ggcacggccattaacggcacactgc

SEQ ID NO: 261591 - DNA, 25 bp, Artificial
  Probe
ccgcgaactggagaaggggagagat

SEQ ID NO: 261592 - DNA, 25 bp, Artificial
  Probe
tgcccctgtcgcacatgtgagggcc

SEQ ID NO: 261593 - DNA, 25 bp, Artificial
  Probe
atacaagggaattgggaggggtgca

SEQ ID NO: 261594 - DNA, 25 bp, Artificial
  Probe
ctccagggcgccctgccaggccggg

SEQ ID NO: 261595 - DNA, 25 bp, Artificial
  Probe
ctgcgcccagtagactgcacatggc

SEQ ID NO: 261596 - DNA, 25 bp, Artificial
  Probe
cgctgcgcccagtagactgcacatg

SEQ ID NO: 261597 - DNA, 25 bp, Artificial
  Probe
ctgcacatggcccagcactaccaga

SEQ ID NO: 261598 - DNA, 25 bp, Artificial
  Probe
ccctgtcgcacatgtgagggccgga

SEQ ID NO: 261599 - DNA, 25 bp, Artificial
  Probe
ccagtagactgcacatggcccagca

SEQ ID NO: 261600 - DNA, 25 bp, Artificial
  Probe
catggcccagcactaccagagcggc

SEQ ID NO: 261601 - DNA, 25 bp, Artificial
  Probe
ccgctgcgcccagtagactgcacat

SEQ ID NO: 261602 - DNA, 25 bp, Artificial
  Probe
tccccggcgccgaggtgccggagcc

SEQ ID NO: 261603 - DNA, 25 bp, Artificial
  Probe
accagagcggcccggtgcccggcac

SEQ ID NO: 261604 - DNA, 25 bp, Artificial
  Probe
tgcgcccagtagactgcacatggcc

SEQ ID NO: 261605 - DNA, 25 bp, Artificial
  Probe
gcccagtagactgcacatggcccag

SEQ ID NO: 261606 - DNA, 25 bp, Artificial
  Probe
ctgtcgcacatgtgagggccggacc

SEQ ID NO: 261607 - DNA, 25 bp, Artificial
  Probe
actgcccctgtcgcacatgtgaggg

SEQ ID NO: 261608 - DNA, 25 bp, Artificial
  Probe
cagcatgtacctccccggcgccgag

SEQ ID NO: 261609 - DNA, 25 bp, Artificial
  Probe
aacggcacactgcccctgtcgcaca

SEQ ID NO: 261610 - DNA, 25 bp, Artificial
  Probe
cccctgtcgcacatgtgagggccgg

SEQ ID NO: 261611 - DNA, 25 bp, Artificial
  Probe
gtagactgcacatggcccagcacta

SEQ ID NO: 261612 - DNA, 25 bp, Artificial
  Probe
gcacggccattaacggcacactgcc

SEQ ID NO: 261613 - DNA, 25 bp, Artificial
  Probe
cgccctgccaggccggggacctccg

SEQ ID NO: 261614 - DNA, 25 bp, Artificial
  Probe
cgaggtgccggagcccgctgcgccc

SEQ ID NO: 261615 - DNA, 25 bp, Artificial
  Probe
gcgccctgccaggccggggacctcc

SEQ ID NO: 261616 - DNA, 25 bp, Artificial
  Probe
gcgcccagtagactgcacatggccc

SEQ ID NO: 261617 - DNA, 25 bp, Artificial
  Probe
ccggagcccgctgcgcccagtagac

SEQ ID NO: 261618 - DNA, 25 bp, Artificial
  Probe
tgtgagggccggaccgcgaactgga

SEQ ID NO: 261619 - DNA, 25 bp, Artificial
  Probe
cggcacggccattaacggcacactg

SEQ ID NO: 261620 - DNA, 25 bp, Artificial
  Probe
ccggcacggccattaacggcacact

SEQ ID NO: 261621 - DNA, 25 bp, Artificial
  Probe
ggccattaacggcacactgcccctg

SEQ ID NO: 261622 - DNA, 25 bp, Artificial
  Probe
tgtcgcacatgtgagggccggaccg

SEQ ID NO: 261623 - DNA, 25 bp, Artificial
  Probe
ttgatagttccgtttgtccctggtg

SEQ ID NO: 261624 - DNA, 25 bp, Artificial
  Probe
ttttctcagttctcattctgaagat

SEQ ID NO: 261625 - DNA, 25 bp, Artificial
  Probe
tagggccctgtgaagtgtccagtgg

SEQ ID NO: 261626 - DNA, 25 bp, Artificial
  Probe
gctccaacatcagaatgagaactga

SEQ ID NO: 261627 - DNA, 25 bp, Artificial
  Probe
tccgtttgtccctggtgctgctttt

SEQ ID NO: 261628 - DNA, 25 bp, Artificial
  Probe
gggttcctgtgcagaactgggcagc

SEQ ID NO: 261629 - DNA, 25 bp, Artificial
  Probe
cgctccaacatcagaatgagaactg

SEQ ID NO: 261630 - DNA, 25 bp, Artificial
  Probe
tccaacatcagaatgagaactgaga

SEQ ID NO: 261631 - DNA, 25 bp, Artificial
  Probe
tttaaaggtatagggccctgtgaag

SEQ ID NO: 261632 - DNA, 25 bp, Artificial
  Probe
gccctgtgaagtgtccagtggagta

SEQ ID NO: 261633 - DNA, 25 bp, Artificial
  Probe
ggaaagctctgtaaagcccgtaagg

SEQ ID NO: 261634 - DNA, 25 bp, Artificial
  Probe
ggccctgtgaagtgtccagtggagt

SEQ ID NO: 261635 - DNA, 25 bp, Artificial
  Probe
tagttccgtttgtccctggtgctgc

SEQ ID NO: 261636 - DNA, 25 bp, Artificial
  Probe
aaggtatagggccctgtgaagtgtc

SEQ ID NO: 261637 - DNA, 25 bp, Artificial
  Probe
gattttctcagttctcattctgaag

SEQ ID NO: 261638 - DNA, 25 bp, Artificial
  Probe
attttctcagttctcattctgaaga

SEQ ID NO: 261639 - DNA, 25 bp, Artificial
  Probe
ggtatagggccctgtgaagtgtcca

SEQ ID NO: 261640 - DNA, 25 bp, Artificial
  Probe
aaaggtatagggccctgtgaagtgt

SEQ ID NO: 261641 - DNA, 25 bp, Artificial
  Probe
ccgtttgtccctggtgctgctttta

SEQ ID NO: 261642 - DNA, 25 bp, Artificial
  Probe
ttccgtttgtccctggtgctgcttt

SEQ ID NO: 261643 - DNA, 25 bp, Artificial
  Probe
tgctgcttttaaaggtatagggccc

SEQ ID NO: 261644 - DNA, 25 bp, Artificial
  Probe
aggtatagggccctgtgaagtgtcc

SEQ ID NO: 261645 - DNA, 25 bp, Artificial
  Probe
gggccctgtgaagtgtccagtggag

SEQ ID NO: 261646 - DNA, 25 bp, Artificial
  Probe
tatagggccctgtgaagtgtccagt

SEQ ID NO: 261647 - DNA, 25 bp, Artificial
  Probe
atagggccctgtgaagtgtccagtg

SEQ ID NO: 261648 - DNA, 25 bp, Artificial
  Probe
ctgcttttaaaggtatagggccctg

SEQ ID NO: 261649 - DNA, 25 bp, Artificial
  Probe
cgtttgtccctggtgctgcttttaa

SEQ ID NO: 261650 - DNA, 25 bp, Artificial
  Probe
agggccctgtgaagtgtccagtgga

SEQ ID NO: 261651 - DNA, 25 bp, Artificial
  Probe
tgggttcctgtgcagaactgggcag

SEQ ID NO: 261652 - DNA, 25 bp, Artificial
  Probe
agttccgtttgtccctggtgctgct

SEQ ID NO: 261653 - DNA, 25 bp, Artificial
  Probe
ttaaaggtatagggccctgtgaagt

SEQ ID NO: 261654 - DNA, 25 bp, Artificial
  Probe
ctggtgctgcttttaaaggtatagg

SEQ ID NO: 261655 - DNA, 25 bp, Artificial
  Probe
tgatagttccgtttgtccctggtgc

SEQ ID NO: 261656 - DNA, 25 bp, Artificial
  Probe
tggtgctgcttttaaaggtataggg

SEQ ID NO: 261657 - DNA, 25 bp, Artificial
  Probe
atagttccgtttgtccctggtgctg

SEQ ID NO: 261658 - DNA, 25 bp, Artificial
  Probe
gtttgtccctggtgctgcttttaaa

SEQ ID NO: 261659 - DNA, 25 bp, Artificial
  Probe
ggttcctgtgcagaactgggcagca

SEQ ID NO: 261660 - DNA, 25 bp, Artificial
  Probe
gatagttccgtttgtccctggtgct

SEQ ID NO: 261661 - DNA, 25 bp, Artificial
  Probe
ctccaacatcagaatgagaactgag

SEQ ID NO: 261662 - DNA, 25 bp, Artificial
  Probe
gtatagggccctgtgaagtgtccag

SEQ ID NO: 261663 - DNA, 25 bp, Artificial
  Probe
tttgtccctggtgctgcttttaaag

SEQ ID NO: 261664 - DNA, 25 bp, Artificial
  Probe
ttgtccctggtgctgcttttaaagg

SEQ ID NO: 261665 - DNA, 25 bp, Artificial
  Probe
gttccgtttgtccctggtgctgctt

SEQ ID NO: 261666 - DNA, 25 bp, Artificial
  Probe
taaaggtatagggccctgtgaagtg

SEQ ID NO: 261667 - DNA, 25 bp, Artificial
  Probe
tgagaaaagcccaacagtggttccc

SEQ ID NO: 261668 - DNA, 25 bp, Artificial
  Probe
cagtggttcccgtaaggactgagga

SEQ ID NO: 261669 - DNA, 25 bp, Artificial
  Probe
ccagtgcactcagagcaactgtgac

SEQ ID NO: 261670 - DNA, 25 bp, Artificial
  Probe
gagaagccgaaataccgctgcccag

SEQ ID NO: 261671 - DNA, 25 bp, Artificial
  Probe
tcagagcaactgtgacgggtctcgg

SEQ ID NO: 261672 - DNA, 25 bp, Artificial
  Probe
ttcctcaacagtgatgaggaagacg

SEQ ID NO: 261673 - DNA, 25 bp, Artificial
  Probe
gcgatctgtgtgatctgttcggaga

SEQ ID NO: 261674 - DNA, 25 bp, Artificial
  Probe
acaaggattctctgagaatacaaga

SEQ ID NO: 261675 - DNA, 25 bp, Artificial
  Probe
caaaggtgacgactcctctatagct

SEQ ID NO: 261676 - DNA, 25 bp, Artificial
  Probe
tgtgtgatctgttcggagaagccga

SEQ ID NO: 261677 - DNA, 25 bp, Artificial
  Probe
agcagacaaggattctctgagaata

SEQ ID NO: 261678 - DNA, 25 bp, Artificial
  Probe
gggtctcgggcctgctccatctggc

SEQ ID NO: 261679 - DNA, 25 bp, Artificial
  Probe
aggattctctgagaatacaagatac

SEQ ID NO: 261680 - DNA, 25 bp, Artificial
  Probe
gtgcaactctgaagcgcgtcctgtt

SEQ ID NO: 261681 - DNA, 25 bp, Artificial
  Probe
accagcagcttccagtgcactcaga

SEQ ID NO: 261682 - DNA, 25 bp, Artificial
  Probe
gccctccagtgagcagacaaggatt

SEQ ID NO: 261683 - DNA, 25 bp, Artificial
  Probe
tgctcggtcgcctgtttccagaagc

SEQ ID NO: 261684 - DNA, 25 bp, Artificial
  Probe
tctatagctgatttcctcaacagtg

SEQ ID NO: 261685 - DNA, 25 bp, Artificial
  Probe
ctgtgacgggtctcgggcctgctcc

SEQ ID NO: 261686 - DNA, 25 bp, Artificial
  Probe
tctgttcggagaagccgaaataccg

SEQ ID NO: 261687 - DNA, 25 bp, Artificial
  Probe
tctcggtggcccagttccctggtac

SEQ ID NO: 261688 - DNA, 25 bp, Artificial
  Probe
cgcgtcctgttgagaaaagcccaac

SEQ ID NO: 261689 - DNA, 25 bp, Artificial
  Probe
aactgtgacgggtctcgggcctgct

SEQ ID NO: 261690 - DNA, 25 bp, Artificial
  Probe
gtttccagaagcacaaagagcagtg

SEQ ID NO: 261691 - DNA, 25 bp, Artificial
  Probe
attctctgagaatacaagatactgc

SEQ ID NO: 261692 - DNA, 25 bp, Artificial
  Probe
tgatctgttcggagaagccgaaata

SEQ ID NO: 261693 - DNA, 25 bp, Artificial
  Probe
agaagccgaaataccgctgcccagc

SEQ ID NO: 261694 - DNA, 25 bp, Artificial
  Probe
ctccagtgagcagacaaggattctc

SEQ ID NO: 261695 - DNA, 25 bp, Artificial
  Probe
gctccatgatatcagcaacagcctc

SEQ ID NO: 261696 - DNA, 25 bp, Artificial
  Probe
tcctgctccatgatatcagcaacag

SEQ ID NO: 261697 - DNA, 25 bp, Artificial
  Probe
gacgactcctctatagctgatttcc

SEQ ID NO: 261698 - DNA, 25 bp, Artificial
  Probe
gtgccctactgctcggtcgcctgtt

SEQ ID NO: 261699 - DNA, 25 bp, Artificial
  Probe
ccagttccctggtacctcactatgg

SEQ ID NO: 261700 - DNA, 25 bp, Artificial
  Probe
ggtacctcactatggcttttctctg

SEQ ID NO: 261701 - DNA, 25 bp, Artificial
  Probe
gagaaaagcccaacagtggttcccg

SEQ ID NO: 261702 - DNA, 25 bp, Artificial
  Probe
ttacatcctgctccttctcggtggc

SEQ ID NO: 261703 - DNA, 25 bp, Artificial
  Probe
ctctgaagcgcgtcctgttgagaaa

SEQ ID NO: 261704 - DNA, 25 bp, Artificial
  Probe
cactatggcttttctctgttctaag

SEQ ID NO: 261705 - DNA, 25 bp, Artificial
  Probe
tcggtggcccagttccctggtacct

SEQ ID NO: 261706 - DNA, 25 bp, Artificial
  Probe
tccagaagcacaaagagcagtgcaa

SEQ ID NO: 261707 - DNA, 25 bp, Artificial
  Probe
agctaatcctgctccatgatatcag

SEQ ID NO: 261708 - DNA, 25 bp, Artificial
  Probe
gcttacatcctgctccttctcggtg

SEQ ID NO: 261709 - DNA, 25 bp, Artificial
  Probe
gatttcctcaacagtgatgaggaag

SEQ ID NO: 261710 - DNA, 25 bp, Artificial
  Probe
caaagagcagtgcaactctgaagcg

SEQ ID NO: 261711 - DNA, 25 bp, Artificial
  Probe
cctcaacagtgatgaggaagacgat

SEQ ID NO: 261712 - DNA, 25 bp, Artificial
  Probe
cgagggcgatctgtgtgatctgttc

SEQ ID NO: 261713 - DNA, 25 bp, Artificial
  Probe
agcccgtctcttcagcaagtcatct

SEQ ID NO: 261714 - DNA, 25 bp, Artificial
  Probe
tatcaggaccccaggtccttccttg

SEQ ID NO: 261715 - DNA, 25 bp, Artificial
  Probe
tccatgatggccaaagtagttctcc

SEQ ID NO: 261716 - DNA, 25 bp, Artificial
  Probe
ctctggtgaaacctgacagaggtgg

SEQ ID NO: 261717 - DNA, 25 bp, Artificial
  Probe
ccagttgctgtgaaatgagcagctc

SEQ ID NO: 261718 - DNA, 25 bp, Artificial
  Probe
agcagcaggctttgagggcaagtcc

SEQ ID NO: 261719 - DNA, 25 bp, Artificial
  Probe
tgtgcggtctaaggaaaggaaccaa

SEQ ID NO: 261720 - DNA, 25 bp, Artificial
  Probe
agctctgtgtggacactggatgaga

SEQ ID NO: 261721 - DNA, 25 bp, Artificial
  Probe
caggctacccggaaatgcggtcagc

SEQ ID NO: 261722 - DNA, 25 bp, Artificial
  Probe
tggcccttagcttaaagaaggtagg

SEQ ID NO: 261723 - DNA, 25 bp, Artificial
  Probe
gtcctatttggatcttaaatgtacc

SEQ ID NO: 261724 - DNA, 25 bp, Artificial
  Probe
attgaagatgtcatctcctaatcag

SEQ ID NO: 261725 - DNA, 25 bp, Artificial
  Probe
caagcaccctggagctgacttggct

SEQ ID NO: 261726 - DNA, 25 bp, Artificial
  Probe
agggcaagtccctctaaagtgcttt

SEQ ID NO: 261727 - DNA, 25 bp, Artificial
  Probe
cagcaggctttgagggcaagtccct

SEQ ID NO: 261728 - DNA, 25 bp, Artificial
  Probe
tcctggacagccaggctacccggaa

SEQ ID NO: 261729 - DNA, 25 bp, Artificial
  Probe
gctctctggggcacttcacgtctac

SEQ ID NO: 261730 - DNA, 25 bp, Artificial
  Probe
ccttaggtgatgtgacaggcaaatg

SEQ ID NO: 261731 - DNA, 25 bp, Artificial
  Probe
tcttcagcaagtcatctccatgatg

SEQ ID NO: 261732 - DNA, 25 bp, Artificial
  Probe
ctaatcagcccgtctcttcagcaag

SEQ ID NO: 261733 - DNA, 25 bp, Artificial
  Probe
atgttactggggtgtatcaggaccc

SEQ ID NO: 261734 - DNA, 25 bp, Artificial
  Probe
atgacatagtgcttctttcccagcc

SEQ ID NO: 261735 - DNA, 25 bp, Artificial
  Probe
accaagtggtcgttgctgctggaag

SEQ ID NO: 261736 - DNA, 25 bp, Artificial
  Probe
cagaggagctctggtgaaacctgac

SEQ ID NO: 261737 - DNA, 25 bp, Artificial
  Probe
tcagctcagattgaagatgtcatct

SEQ ID NO: 261738 - DNA, 25 bp, Artificial
  Probe
tggggctcctggacagccaggctac

SEQ ID NO: 261739 - DNA, 25 bp, Artificial
  Probe
tttgggagctcactggtgtctgtgc

SEQ ID NO: 261740 - DNA, 25 bp, Artificial
  Probe
gatgtcatctcctaatcagcccgtc

SEQ ID NO: 261741 - DNA, 25 bp, Artificial
  Probe
gtgtagttagctcttaacattctcc

SEQ ID NO: 261742 - DNA, 25 bp, Artificial
  Probe
aagcaaagggccaagcaccctggag

SEQ ID NO: 261743 - DNA, 25 bp, Artificial
  Probe
cactggtgtctgtgcggtctaagga

SEQ ID NO: 261744 - DNA, 25 bp, Artificial
  Probe
ctctccactgccagttgctgtgaaa

SEQ ID NO: 261745 - DNA, 25 bp, Artificial
  Probe
cctctctagtgtagaaagggtgtag

SEQ ID NO: 261746 - DNA, 25 bp, Artificial
  Probe
ctccgccatgacatagtgcttcttt

SEQ ID NO: 261747 - DNA, 25 bp, Artificial
  Probe
cttttctgcggcattacctgcctct

SEQ ID NO: 261748 - DNA, 25 bp, Artificial
  Probe
tgtgcgtgggactttatcaacccac

SEQ ID NO: 261749 - DNA, 25 bp, Artificial
  Probe
cagccccaaagcaaagggccaagca

SEQ ID NO: 261750 - DNA, 25 bp, Artificial
  Probe
gtcgttgctgctggaaggagttctt

SEQ ID NO: 261751 - DNA, 25 bp, Artificial
  Probe
tcgttgctgctggaaggagttcttg

SEQ ID NO: 261752 - DNA, 25 bp, Artificial
  Probe
aaaggaaccaagtggtcgttgctgc

SEQ ID NO: 261753 - DNA, 25 bp, Artificial
  Probe
atgtgacaggcaaatgcaagtcctg

SEQ ID NO: 261754 - DNA, 25 bp, Artificial
  Probe
aatgtaccccaaatctatgttgaag

SEQ ID NO: 261755 - DNA, 25 bp, Artificial
  Probe
caaagggccaagcaccctggagctg

SEQ ID NO: 261756 - DNA, 25 bp, Artificial
  Probe
gagttcttggggagcccggctctct

SEQ ID NO: 261757 - DNA, 25 bp, Artificial
  Probe
gtggctggtcctatttggatcttaa

SEQ ID NO: 261758 - DNA, 25 bp, Artificial
  Probe
tagttctccagaggagctctggtga

SEQ ID NO: 261759 - DNA, 25 bp, Artificial
  Probe
gctccctggacagcaaacaggatgt

SEQ ID NO: 261760 - DNA, 25 bp, Artificial
  Probe
caaatactccgtgtcaatcaagcag

SEQ ID NO: 261761 - DNA, 25 bp, Artificial
  Probe
aatacaatgcctgtcttgccctcgg

SEQ ID NO: 261762 - DNA, 25 bp, Artificial
  Probe
gctccaaatacaatgcctgtcttgc

SEQ ID NO: 261763 - DNA, 25 bp, Artificial
  Probe
tgtctctctcttgtcccacagcagt

SEQ ID NO: 261764 - DNA, 25 bp, Artificial
  Probe
ccctctgacagcagacaaggcagct

SEQ ID NO: 261765 - DNA, 25 bp, Artificial
  Probe
gcccagtccccagcattgggggaaa

SEQ ID NO: 261766 - DNA, 25 bp, Artificial
  Probe
ggggacagctccaaatacaatgcct

SEQ ID NO: 261767 - DNA, 25 bp, Artificial
  Probe
gtctctctcttgtcccacagcagtt

SEQ ID NO: 261768 - DNA, 25 bp, Artificial
  Probe
ctgggggacagctccaaatacaatg

SEQ ID NO: 261769 - DNA, 25 bp, Artificial
  Probe
tgtcaatcaagcagtgcagtgagcc

SEQ ID NO: 261770 - DNA, 25 bp, Artificial
  Probe
gcaatccactgtcaaggacagaatt

SEQ ID NO: 261771 - DNA, 25 bp, Artificial
  Probe
acagcagttccctctgacagcagac

SEQ ID NO: 261772 - DNA, 25 bp, Artificial
  Probe
gcaaatactccgtgtcaatcaagca

SEQ ID NO: 261773 - DNA, 25 bp, Artificial
  Probe
cacagctccctggacagcaaacagg

SEQ ID NO: 261774 - DNA, 25 bp, Artificial
  Probe
gacagctccaaatacaatgcctgtc

SEQ ID NO: 261775 - DNA, 25 bp, Artificial
  Probe
cgcaatccactgtcaaggacagaat

SEQ ID NO: 261776 - DNA, 25 bp, Artificial
  Probe
agccgtgctgctgtgctgccacagc

SEQ ID NO: 261777 - DNA, 25 bp, Artificial
  Probe
caagcagtgcagtgagccgtgctgc

SEQ ID NO: 261778 - DNA, 25 bp, Artificial
  Probe
gttccctctgacagcagacaaggca

SEQ ID NO: 261779 - DNA, 25 bp, Artificial
  Probe
tgtcaccgcaatccactgtcaagga

SEQ ID NO: 261780 - DNA, 25 bp, Artificial
  Probe
gtgatgcaaatactccgtgtcaatc

SEQ ID NO: 261781 - DNA, 25 bp, Artificial
  Probe
ttacttttggcctggatgcttcctc

SEQ ID NO: 261782 - DNA, 25 bp, Artificial
  Probe
atacaatgcctgtcttgccctcggc

SEQ ID NO: 261783 - DNA, 25 bp, Artificial
  Probe
cagtgagccgtgctgctgtgctgcc

SEQ ID NO: 261784 - DNA, 25 bp, Artificial
  Probe
cctggacagcaaacaggatgtgtgc

SEQ ID NO: 261785 - DNA, 25 bp, Artificial
  Probe
tgctgtgctgccacagctccctgga

SEQ ID NO: 261786 - DNA, 25 bp, Artificial
  Probe
agctccaaatacaatgcctgtcttg

SEQ ID NO: 261787 - DNA, 25 bp, Artificial
  Probe
aatccactgtcaaggacagaattta

SEQ ID NO: 261788 - DNA, 25 bp, Artificial
  Probe
gtgagccgtgctgctgtgctgccac

SEQ ID NO: 261789 - DNA, 25 bp, Artificial
  Probe
actccgtgtcaatcaagcagtgcag

SEQ ID NO: 261790 - DNA, 25 bp, Artificial
  Probe
taggtttacttttggcctggatgct

SEQ ID NO: 261791 - DNA, 25 bp, Artificial
  Probe
caccgcaatccactgtcaaggacag

SEQ ID NO: 261792 - DNA, 25 bp, Artificial
  Probe
gcagttccctctgacagcagacaag

SEQ ID NO: 261793 - DNA, 25 bp, Artificial
  Probe
tcaccgcaatccactgtcaaggaca

SEQ ID NO: 261794 - DNA, 25 bp, Artificial
  Probe
cttttggcctggatgcttcctctcc

SEQ ID NO: 261795 - DNA, 25 bp, Artificial
  Probe
aatactccgtgtcaatcaagcagtg

SEQ ID NO: 261796 - DNA, 25 bp, Artificial
  Probe
agctccctggacagcaaacaggatg

SEQ ID NO: 261797 - DNA, 25 bp, Artificial
  Probe
tgatgcaaatactccgtgtcaatca

SEQ ID NO: 261798 - DNA, 25 bp, Artificial
  Probe
gccgtgctgctgtgctgccacagct

SEQ ID NO: 261799 - DNA, 25 bp, Artificial
  Probe
tccactgtcaaggacagaatttaaa

SEQ ID NO: 261800 - DNA, 25 bp, Artificial
  Probe
acttttggcctggatgcttcctctc

SEQ ID NO: 261801 - DNA, 25 bp, Artificial
  Probe
tgtgctgccacagctccctggacag

SEQ ID NO: 261802 - DNA, 25 bp, Artificial
  Probe
tactccgtgtcaatcaagcagtgca

SEQ ID NO: 261803 - DNA, 25 bp, Artificial
  Probe
tttgtcaccgcaatccactgtcaag

SEQ ID NO: 261804 - DNA, 25 bp, Artificial
  Probe
gtcaatcaagcagtgcagtgagccg

SEQ ID NO: 261805 - DNA, 25 bp, Artificial
  Probe
taatgccacccatatttcctgtgtg

SEQ ID NO: 261806 - DNA, 25 bp, Artificial
  Probe
ttagtcgtttccttacaaacgtgcg

SEQ ID NO: 261807 - DNA, 25 bp, Artificial
  Probe
gccttctccctaaaaagttgatgaa

SEQ ID NO: 261808 - DNA, 25 bp, Artificial
  Probe
taggacatactattttgcagttaac

SEQ ID NO: 261809 - DNA, 25 bp, Artificial
  Probe
tgctggggatctatttgtagcttcc

SEQ ID NO: 261810 - DNA, 25 bp, Artificial
  Probe
ttgccttctccctaaaaagttgatg

SEQ ID NO: 261811 - DNA, 25 bp, Artificial
  Probe
gcttattaaaggatctttggcctct

SEQ ID NO: 261812 - DNA, 25 bp, Artificial
  Probe
ttcactgaagcataaacttgcgttc

SEQ ID NO: 261813 - DNA, 25 bp, Artificial
  Probe
cactgaattattcacttgaaagtga

SEQ ID NO: 261814 - DNA, 25 bp, Artificial
  Probe
gccacccatatttcctgtgtgaatt

SEQ ID NO: 261815 - DNA, 25 bp, Artificial
  Probe
tttccatattgctggggatctattt

SEQ ID NO: 261816 - DNA, 25 bp, Artificial
  Probe
cactgaagcataaacttgcgttctt

SEQ ID NO: 261817 - DNA, 25 bp, Artificial
  Probe
tacaaacgtgcgactggaatgtgcc

SEQ ID NO: 261818 - DNA, 25 bp, Artificial
  Probe
ggacatactattttgcagttaacaa

SEQ ID NO: 261819 - DNA, 25 bp, Artificial
  Probe
gcgactggaatgtgcctctgtttcc

SEQ ID NO: 261820 - DNA, 25 bp, Artificial
  Probe
tcctgtgtgaatttccatattgctg

SEQ ID NO: 261821 - DNA, 25 bp, Artificial
  Probe
ggatctatttgtagcttcctcagac

SEQ ID NO: 261822 - DNA, 25 bp, Artificial
  Probe
tctccctaaaaagttgatgaatttg

SEQ ID NO: 261823 - DNA, 25 bp, Artificial
  Probe
ctagatagtttttcactgaagcata

SEQ ID NO: 261824 - DNA, 25 bp, Artificial
  Probe
tttttcactgaagcataaacttgcg

SEQ ID NO: 261825 - DNA, 25 bp, Artificial
  Probe
tattaaaggatctttggcctctgga

SEQ ID NO: 261826 - DNA, 25 bp, Artificial
  Probe
agtttttcactgaagcataaacttg

SEQ ID NO: 261827 - DNA, 25 bp, Artificial
  Probe
gtccactgaattattcacttgaaag

SEQ ID NO: 261828 - DNA, 25 bp, Artificial
  Probe
aacatttttgtgaggtttgctctca

SEQ ID NO: 261829 - DNA, 25 bp, Artificial
  Probe
tccttacaaacgtgcgactggaatg

SEQ ID NO: 261830 - DNA, 25 bp, Artificial
  Probe
ctcagactgatcaatgtgtgggtag

SEQ ID NO: 261831 - DNA, 25 bp, Artificial
  Probe
ctggaatgtgcctctgtttcctagt

SEQ ID NO: 261832 - DNA, 25 bp, Artificial
  Probe
ctgaagcataaacttgcgttcttaa

SEQ ID NO: 261833 - DNA, 25 bp, Artificial
  Probe
tagtcgtttccttacaaacgtgcga

SEQ ID NO: 261834 - DNA, 25 bp, Artificial
  Probe
ctccctaaaaagttgatgaatttga

SEQ ID NO: 261835 - DNA, 25 bp, Artificial
  Probe
gatagtttttcactgaagcataaac

SEQ ID NO: 261836 - DNA, 25 bp, Artificial
  Probe
ccactgaattattcacttgaaagtg

SEQ ID NO: 261837 - DNA, 25 bp, Artificial
  Probe
gtcgtttccttacaaacgtgcgact

SEQ ID NO: 261838 - DNA, 25 bp, Artificial
  Probe
gtgaatttccatattgctggggatc

SEQ ID NO: 261839 - DNA, 25 bp, Artificial
  Probe
ttgctggggatctatttgtagcttc

SEQ ID NO: 261840 - DNA, 25 bp, Artificial
  Probe
gatctatttgtagcttcctcagact

SEQ ID NO: 261841 - DNA, 25 bp, Artificial
  Probe
ctgtgtgaatttccatattgctggg

SEQ ID NO: 261842 - DNA, 25 bp, Artificial
  Probe
tttccttacaaacgtgcgactggaa

SEQ ID NO: 261843 - DNA, 25 bp, Artificial
  Probe
atactagatagtttttcactgaagc

SEQ ID NO: 261844 - DNA, 25 bp, Artificial
  Probe
aattgttctgggtccactgaattat

SEQ ID NO: 261845 - DNA, 25 bp, Artificial
  Probe
atttcctgtgtgaatttccatattg

SEQ ID NO: 261846 - DNA, 25 bp, Artificial
  Probe
caaacgtgcgactggaatgtgcctc

SEQ ID NO: 261847 - DNA, 25 bp, Artificial
  Probe
ctgggtccactgaattattcacttg

SEQ ID NO: 261848 - DNA, 25 bp, Artificial
  Probe
ctttttaggacatactattttgcag

SEQ ID NO: 261849 - DNA, 25 bp, Artificial
  Probe
gaagcataaacttgcgttcttaaag

SEQ ID NO: 261850 - DNA, 25 bp, Artificial
  Probe
tagcttcctcagactgatcaatgtg

SEQ ID NO: 261851 - DNA, 25 bp, Artificial
  Probe
gtgcaccgctacatgagcatcacct

SEQ ID NO: 261852 - DNA, 25 bp, Artificial
  Probe
gttacctctgccagtaccgctgtgt

SEQ ID NO: 261853 - DNA, 25 bp, Artificial
  Probe
cccctttgtcgagagcaaccgtcat

SEQ ID NO: 261854 - DNA, 25 bp, Artificial
  Probe
ctgctggccacaaggctctgccaag

SEQ ID NO: 261855 - DNA, 25 bp, Artificial
  Probe
gcgaagtgtgcctgccgacgtgttt

SEQ ID NO: 261856 - DNA, 25 bp, Artificial
  Probe
tcagatccaggcaacctctgtctac

SEQ ID NO: 261857 - DNA, 25 bp, Artificial
  Probe
gctactccagttacctctgccagta

SEQ ID NO: 261858 - DNA, 25 bp, Artificial
  Probe
agccaggtcgcttctcctgtcactg

SEQ ID NO: 261859 - DNA, 25 bp, Artificial
  Probe
tgtggagccctatgtccaagtgtcg

SEQ ID NO: 261860 - DNA, 25 bp, Artificial
  Probe
atgagcatcacctcagagcgaagtg

SEQ ID NO: 261861 - DNA, 25 bp, Artificial
  Probe
gccctatgtccaagtgtcggacaac

SEQ ID NO: 261862 - DNA, 25 bp, Artificial
  Probe
tatgtccaagtgtcggacaaccgct

SEQ ID NO: 261863 - DNA, 25 bp, Artificial
  Probe
cacctcagagcgaagtgtgcctgcc

SEQ ID NO: 261864 - DNA, 25 bp, Artificial
  Probe
caaggctctgccaagacattgacga

SEQ ID NO: 261865 - DNA, 25 bp, Artificial
  Probe
accgttgtgtggagccctatgtcca

SEQ ID NO: 261866 - DNA, 25 bp, Artificial
  Probe
ccaaacctgcgtcaacttccatggg

SEQ ID NO: 261867 - DNA, 25 bp, Artificial
  Probe
tgtttcagatccaggcaacctctgt

SEQ ID NO: 261868 - DNA, 25 bp, Artificial
  Probe
cttccatgggggttaccgctgtgtg

SEQ ID NO: 261869 - DNA, 25 bp, Artificial
  Probe
tccaagtgtcggacaaccgctgcct

SEQ ID NO: 261870 - DNA, 25 bp, Artificial
  Probe
ttacctctgccagtaccgctgtgtc

SEQ ID NO: 261871 - DNA, 25 bp, Artificial
  Probe
atcgtgcaccgctacatgagcatca

SEQ ID NO: 261872 - DNA, 25 bp, Artificial
  Probe
accgctacatgagcatcacctcaga

SEQ ID NO: 261873 - DNA, 25 bp, Artificial
  Probe
aacaggtgcacaccagtgttcggag

SEQ ID NO: 261874 - DNA, 25 bp, Artificial
  Probe
ttgacgagtgcgaaacaggtgcaca

SEQ ID NO: 261875 - DNA, 25 bp, Artificial
  Probe
ccagtaccgctgtgtcaatgagcca

SEQ ID NO: 261876 - DNA, 25 bp, Artificial
  Probe
cgagagcaaccgtcatccatcgtgc

SEQ ID NO: 261877 - DNA, 25 bp, Artificial
  Probe
tgacgagtgcgaaacaggtgcacac

SEQ ID NO: 261878 - DNA, 25 bp, Artificial
  Probe
gtgtgcctgccgacgtgtttcagat

SEQ ID NO: 261879 - DNA, 25 bp, Artificial
  Probe
agagcaaccgtcatccatcgtgcac

SEQ ID NO: 261880 - DNA, 25 bp, Artificial
  Probe
gacattgacgagtgcgaaacaggtg

SEQ ID NO: 261881 - DNA, 25 bp, Artificial
  Probe
tgcgaaacaggtgcacaccagtgtt

SEQ ID NO: 261882 - DNA, 25 bp, Artificial
  Probe
gctaccaactgctggccacaaggct

SEQ ID NO: 261883 - DNA, 25 bp, Artificial
  Probe
gtgtggacaccaaccgttgtgtgga

SEQ ID NO: 261884 - DNA, 25 bp, Artificial
  Probe
agctactccagttacctctgccagt

SEQ ID NO: 261885 - DNA, 25 bp, Artificial
  Probe
accagtgttcggaggcccaaacctg

SEQ ID NO: 261886 - DNA, 25 bp, Artificial
  Probe
aagtgtcggacaaccgctgcctctg

SEQ ID NO: 261887 - DNA, 25 bp, Artificial
  Probe
cagagcgaagtgtgcctgccgacgt

SEQ ID NO: 261888 - DNA, 25 bp, Artificial
  Probe
acaaggctaccaactgctggccaca

SEQ ID NO: 261889 - DNA, 25 bp, Artificial
  Probe
gttcggaggcccaaacctgcgtcaa

SEQ ID NO: 261890 - DNA, 25 bp, Artificial
  Probe
ttgtcgagagcaaccgtcatccatc

SEQ ID NO: 261891 - DNA, 25 bp, Artificial
  Probe
aactgctggccacaaggctctgcca

SEQ ID NO: 261892 - DNA, 25 bp, Artificial
  Probe
gcgtcaacttccatgggggttaccg

SEQ ID NO: 261893 - DNA, 25 bp, Artificial
  Probe
tcatccatcgtgcaccgctacatga

SEQ ID NO: 261894 - DNA, 25 bp, Artificial
  Probe
gtcatccatcgtgcaccgctacatg

SEQ ID NO: 261895 - DNA, 25 bp, Artificial
  Probe
ggggttaccgctgtgtggacaccaa

SEQ ID NO: 261896 - DNA, 25 bp, Artificial
  Probe
ggaggcccaaacctgcgtcaacttc

SEQ ID NO: 261897 - DNA, 25 bp, Artificial
  Probe
gacaagaaagactcctaccagcctg

SEQ ID NO: 261898 - DNA, 25 bp, Artificial
  Probe
ctggtgagcttgtgccaggccgccc

SEQ ID NO: 261899 - DNA, 25 bp, Artificial
  Probe
ccggtggtgaagctgctgtacaaca

SEQ ID NO: 261900 - DNA, 25 bp, Artificial
  Probe
aatcctccacaaagccggtggtgaa

SEQ ID NO: 261901 - DNA, 25 bp, Artificial
  Probe
tcacctactgaaaaacattggactg

SEQ ID NO: 261902 - DNA, 25 bp, Artificial
  Probe
agccggcaagaaatccaggaattga

SEQ ID NO: 261903 - DNA, 25 bp, Artificial
  Probe
ctgtacaacaggagcaataacaagt

SEQ ID NO: 261904 - DNA, 25 bp, Artificial
  Probe
ctcaaagccggcaagaaatccagga

SEQ ID NO: 261905 - DNA, 25 bp, Artificial
  Probe
ttgtggaaagcactttggcaccatc

SEQ ID NO: 261906 - DNA, 25 bp, Artificial
  Probe
tcattcaagggctggtgagcttgtg

SEQ ID NO: 261907 - DNA, 25 bp, Artificial
  Probe
caagaaagactcctaccagcctgtg

SEQ ID NO: 261908 - DNA, 25 bp, Artificial
  Probe
tggaaagcactttggcaccatcttg

SEQ ID NO: 261909 - DNA, 25 bp, Artificial
  Probe
gatgatcacctactgaaaaacattg

SEQ ID NO: 261910 - DNA, 25 bp, Artificial
  Probe
ccacaaagccggtggtgaagctgct

SEQ ID NO: 261911 - DNA, 25 bp, Artificial
  Probe
ttacctcattcaagggctggtgagc

SEQ ID NO: 261912 - DNA, 25 bp, Artificial
  Probe
ggatcctcatagaccgttgtggaaa

SEQ ID NO: 261913 - DNA, 25 bp, Artificial
  Probe
atccaggaattgatggctgaagcaa

SEQ ID NO: 261914 - DNA, 25 bp, Artificial
  Probe
gaattacctccgagatgacaccgtc

SEQ ID NO: 261915 - DNA, 25 bp, Artificial
  Probe
gaaagactcctaccagcctgtgtgc

SEQ ID NO: 261916 - DNA, 25 bp, Artificial
  Probe
tcttgaattacctccgagatgacac

SEQ ID NO: 261917 - DNA, 25 bp, Artificial
  Probe
acctactgaaaaacattggactgtt

SEQ ID NO: 261918 - DNA, 25 bp, Artificial
  Probe
aatattacctcattcaagggctggt

SEQ ID NO: 261919 - DNA, 25 bp, Artificial
  Probe
ttcaagggctggtgagcttgtgcca

SEQ ID NO: 261920 - DNA, 25 bp, Artificial
  Probe
agcctgtgtgcaacatccccatcat

SEQ ID NO: 261921 - DNA, 25 bp, Artificial
  Probe
aggaggacaggctcattgaatcctc

SEQ ID NO: 261922 - DNA, 25 bp, Artificial
  Probe
caggccgccctgcaggacaagaaag

SEQ ID NO: 261923 - DNA, 25 bp, Artificial
  Probe
aagtactcgtacaccagcaactctg

SEQ ID NO: 261924 - DNA, 25 bp, Artificial
  Probe
gaagctgctgtacaacaggagcaat

SEQ ID NO: 261925 - DNA, 25 bp, Artificial
  Probe
tgagcttgtgccaggccgccctgca

SEQ ID NO: 261926 - DNA, 25 bp, Artificial
  Probe
cctcatagaccgttgtggaaagcac

SEQ ID NO: 261927 - DNA, 25 bp, Artificial
  Probe
aacattggactgtttgacaagctgt

SEQ ID NO: 261928 - DNA, 25 bp, Artificial
  Probe
gcaactctgatgatcacctactgaa

SEQ ID NO: 261929 - DNA, 25 bp, Artificial
  Probe
gctgctgtacaacaggagcaataac

SEQ ID NO: 261930 - DNA, 25 bp, Artificial
  Probe
gcactttggcaccatcttgaattac

SEQ ID NO: 261931 - DNA, 25 bp, Artificial
  Probe
tggtgaagctgctgtacaacaggag

SEQ ID NO: 261932 - DNA, 25 bp, Artificial
  Probe
aagcactttggcaccatcttgaatt

SEQ ID NO: 261933 - DNA, 25 bp, Artificial
  Probe
cagcaactctgatgatcacctactg

SEQ ID NO: 261934 - DNA, 25 bp, Artificial
  Probe
cgtacaccagcaactctgatgatca

SEQ ID NO: 261935 - DNA, 25 bp, Artificial
  Probe
gccctgcaggacaagaaagactcct

SEQ ID NO: 261936 - DNA, 25 bp, Artificial
  Probe
agaccgttgtggaaagcactttggc

SEQ ID NO: 261937 - DNA, 25 bp, Artificial
  Probe
aggacaggctcattgaatcctccac

SEQ ID NO: 261938 - DNA, 25 bp, Artificial
  Probe
aaatccaggaattgatggctgaagc

SEQ ID NO: 261939 - DNA, 25 bp, Artificial
  Probe
gcaataacaagtactcgtacaccag

SEQ ID NO: 261940 - DNA, 25 bp, Artificial
  Probe
ggtgaagctgctgtacaacaggagc

SEQ ID NO: 261941 - DNA, 25 bp, Artificial
  Probe
attacctccgagatgacaccgtcac

SEQ ID NO: 261942 - DNA, 25 bp, Artificial
  Probe
ttggcaccatcttgaattacctccg

SEQ ID NO: 261943 - DNA, 25 bp, Artificial
  Probe
gaggtccagatggagccttaccacc

SEQ ID NO: 261944 - DNA, 25 bp, Artificial
  Probe
tgcctaatctgtgcagagagagacc

SEQ ID NO: 261945 - DNA, 25 bp, Artificial
  Probe
gtgtacatctcagttctagaaggcc

SEQ ID NO: 261946 - DNA, 25 bp, Artificial
  Probe
agccgagcggtgtacatctcagttc

SEQ ID NO: 261947 - DNA, 25 bp, Artificial
  Probe
gaccctttttggagccgagcggtgt

SEQ ID NO: 261948 - DNA, 25 bp, Artificial
  Probe
agctgggagtatccacctcatcagc

SEQ ID NO: 261949 - DNA, 25 bp, Artificial
  Probe
tttttggagccgagcggtgtacatc

SEQ ID NO: 261950 - DNA, 25 bp, Artificial
  Probe
ggtgtacatctcagttctagaaggc

SEQ ID NO: 261951 - DNA, 25 bp, Artificial
  Probe
ggagccgagcggtgtacatctcagt

SEQ ID NO: 261952 - DNA, 25 bp, Artificial
  Probe
agcggtagattgcttgcctaatctg

SEQ ID NO: 261953 - DNA, 25 bp, Artificial
  Probe
cggtagattgcttgcctaatctgtg

SEQ ID NO: 261954 - DNA, 25 bp, Artificial
  Probe
caggtctcacagttgccatggtaac

SEQ ID NO: 261955 - DNA, 25 bp, Artificial
  Probe
gcggtgtacatctcagttctagaag

SEQ ID NO: 261956 - DNA, 25 bp, Artificial
  Probe
tttgagctgggagtatccacctcat

SEQ ID NO: 261957 - DNA, 25 bp, Artificial
  Probe
agattgcttgcctaatctgtgcaga

SEQ ID NO: 261958 - DNA, 25 bp, Artificial
  Probe
gcagaagctttgagctgggagtatc

SEQ ID NO: 261959 - DNA, 25 bp, Artificial
  Probe
aaccgaaacccaggagcagcagtgg

SEQ ID NO: 261960 - DNA, 25 bp, Artificial
  Probe
agatggaggtccagatggagcctta

SEQ ID NO: 261961 - DNA, 25 bp, Artificial
  Probe
tgggagtatccacctcatcagccac

SEQ ID NO: 261962 - DNA, 25 bp, Artificial
  Probe
agagagagaccctttttggagccga

SEQ ID NO: 261963 - DNA, 25 bp, Artificial
  Probe
cagccctccagttcagcaacatatg

SEQ ID NO: 261964 - DNA, 25 bp, Artificial
  Probe
ctttgagctgggagtatccacctca

SEQ ID NO: 261965 - DNA, 25 bp, Artificial
  Probe
gatggaggtccagatggagccttac

SEQ ID NO: 261966 - DNA, 25 bp, Artificial
  Probe
gcctaatctgtgcagagagagaccc

SEQ ID NO: 261967 - DNA, 25 bp, Artificial
  Probe
accgaaacccaggagcagcagtggc

SEQ ID NO: 261968 - DNA, 25 bp, Artificial
  Probe
gggagtatccacctcatcagccact

SEQ ID NO: 261969 - DNA, 25 bp, Artificial
  Probe
gaagctttgagctgggagtatccac

SEQ ID NO: 261970 - DNA, 25 bp, Artificial
  Probe
ttgcctaatctgtgcagagagagac

SEQ ID NO: 261971 - DNA, 25 bp, Artificial
  Probe
aatctgtgcagagagagaccctttt

SEQ ID NO: 261972 - DNA, 25 bp, Artificial
  Probe
tccaggtctcacagttgccatggta

SEQ ID NO: 261973 - DNA, 25 bp, Artificial
  Probe
gctgggagtatccacctcatcagcc

SEQ ID NO: 261974 - DNA, 25 bp, Artificial
  Probe
agaccctttttggagccgagcggtg

SEQ ID NO: 261975 - DNA, 25 bp, Artificial
  Probe
agccctccagttcagcaacatatgg

SEQ ID NO: 261976 - DNA, 25 bp, Artificial
  Probe
gagccgagcggtgtacatctcagtt

SEQ ID NO: 261977 - DNA, 25 bp, Artificial
  Probe
aggtccagatggagccttaccaccc

SEQ ID NO: 261978 - DNA, 25 bp, Artificial
  Probe
ctccagttcagcaacatatggggag

SEQ ID NO: 261979 - DNA, 25 bp, Artificial
  Probe
gtacatctcagttctagaaggccaa

SEQ ID NO: 261980 - DNA, 25 bp, Artificial
  Probe
taccacaaccgaaacccaggagcag

SEQ ID NO: 261981 - DNA, 25 bp, Artificial
  Probe
ctcagttctagaaggccaatgaaag

SEQ ID NO: 261982 - DNA, 25 bp, Artificial
  Probe
caaccgaaacccaggagcagcagtg

SEQ ID NO: 261983 - DNA, 25 bp, Artificial
  Probe
ctaatctgtgcagagagagaccctt

SEQ ID NO: 261984 - DNA, 25 bp, Artificial
  Probe
tgtcctccaggtctcacagttgcca

SEQ ID NO: 261985 - DNA, 25 bp, Artificial
  Probe
aggtctcacagttgccatggtaacc

SEQ ID NO: 261986 - DNA, 25 bp, Artificial
  Probe
cttgcctaatctgtgcagagagaga

SEQ ID NO: 261987 - DNA, 25 bp, Artificial
  Probe
cgaaacccaggagcagcagtggccc

SEQ ID NO: 261988 - DNA, 25 bp, Artificial
  Probe
aacccaggagcagcagtggccccag

SEQ ID NO: 261989 - DNA, 25 bp, Artificial
  Probe
atacattaagctgagccacgtcatt

SEQ ID NO: 261990 - DNA, 25 bp, Artificial
  Probe
acgtcatttaagtccagctgacgta

SEQ ID NO: 261991 - DNA, 25 bp, Artificial
  Probe
gtcaatgtgcatatcttcgtctctg

SEQ ID NO: 261992 - DNA, 25 bp, Artificial
  Probe
tcacagaagggaaccttcgagactc

SEQ ID NO: 261993 - DNA, 25 bp, Artificial
  Probe
catgactgtgggtgtcgtgcgccaa

SEQ ID NO: 261994 - DNA, 25 bp, Artificial
  Probe
ccacatacattaagctgagccacgt

SEQ ID NO: 261995 - DNA, 25 bp, Artificial
  Probe
tgttggtttgtaaggccacatacat

SEQ ID NO: 261996 - DNA, 25 bp, Artificial
  Probe
tatgccgtcctgaagctggagatga

SEQ ID NO: 261997 - DNA, 25 bp, Artificial
  Probe
gaggatcatcttcgacatcacagaa

SEQ ID NO: 261998 - DNA, 25 bp, Artificial
  Probe
gtgtcgtgcgccaagtgcggcccat

SEQ ID NO: 261999 - DNA, 25 bp, Artificial
  Probe
gactcctttgatatcatcaagcgct

SEQ ID NO: 262000 - DNA, 25 bp, Artificial
  Probe
tcctttgatatcatcaagcgctatg

SEQ ID NO: 262001 - DNA, 25 bp, Artificial
  Probe
ttgtaaggccacatacattaagctg

SEQ ID NO: 262002 - DNA, 25 bp, Artificial
  Probe
agctgacgtactgtgctgtttaaac

SEQ ID NO: 262003 - DNA, 25 bp, Artificial
  Probe
agggaaccttcgagactcctttgat

SEQ ID NO: 262004 - DNA, 25 bp, Artificial
  Probe
tgctgtttaaacattgctcagtcat

SEQ ID NO: 262005 - DNA, 25 bp, Artificial
  Probe
taagtccagctgacgtactgtgctg

SEQ ID NO: 262006 - DNA, 25 bp, Artificial
  Probe
tgcggcccatcgtgggcccatttta

SEQ ID NO: 262007 - DNA, 25 bp, Artificial
  Probe
catcgtgggcccattttatgccgtc

SEQ ID NO: 262008 - DNA, 25 bp, Artificial
  Probe
agcgctatgaggacggcatgactgt

SEQ ID NO: 262009 - DNA, 25 bp, Artificial
  Probe
cattttatgccgtcctgaagctgga

SEQ ID NO: 262010 - DNA, 25 bp, Artificial
  Probe
tgccgtcctgaagctggagatgaac

SEQ ID NO: 262011 - DNA, 25 bp, Artificial
  Probe
gtcctgaagctggagatgaactacg

SEQ ID NO: 262012 - DNA, 25 bp, Artificial
  Probe
gggcccattttatgccgtcctgaag

SEQ ID NO: 262013 - DNA, 25 bp, Artificial
  Probe
tcgagactcctttgatatcatcaag

SEQ ID NO: 262014 - DNA, 25 bp, Artificial
  Probe
gaaccttcgagactcctttgatatc

SEQ ID NO: 262015 - DNA, 25 bp, Artificial
  Probe
gtttgtaaggccacatacattaagc

SEQ ID NO: 262016 - DNA, 25 bp, Artificial
  Probe
tcgtgcgccaagtgcggcccatcgt

SEQ ID NO: 262017 - DNA, 25 bp, Artificial
  Probe
tactgtgctgtttaaacattgctca

SEQ ID NO: 262018 - DNA, 25 bp, Artificial
  Probe
acagaagggaaccttcgagactcct

SEQ ID NO: 262019 - DNA, 25 bp, Artificial
  Probe
ttgatatcatcaagcgctatgagga

SEQ ID NO: 262020 - DNA, 25 bp, Artificial
  Probe
ttcatgttggtttgtaaggccacat

SEQ ID NO: 262021 - DNA, 25 bp, Artificial
  Probe
cctttgatatcatcaagcgctatga

SEQ ID NO: 262022 - DNA, 25 bp, Artificial
  Probe
atcatcaagcgctatgaggacggca

SEQ ID NO: 262023 - DNA, 25 bp, Artificial
  Probe
aacattgctcagtcatgtggttaaa

SEQ ID NO: 262024 - DNA, 25 bp, Artificial
  Probe
tgtcgtgcgccaagtgcggcccatc

SEQ ID NO: 262025 - DNA, 25 bp, Artificial
  Probe
atgttggtttgtaaggccacataca

SEQ ID NO: 262026 - DNA, 25 bp, Artificial
  Probe
atatcttcgtctctgagtactggtt

SEQ ID NO: 262027 - DNA, 25 bp, Artificial
  Probe
tacattaagctgagccacgtcattt

SEQ ID NO: 262028 - DNA, 25 bp, Artificial
  Probe
cgacatcacagaagggaaccttcga

SEQ ID NO: 262029 - DNA, 25 bp, Artificial
  Probe
ttaagtccagctgacgtactgtgct

SEQ ID NO: 262030 - DNA, 25 bp, Artificial
  Probe
gaagggaaccttcgagactcctttg

SEQ ID NO: 262031 - DNA, 25 bp, Artificial
  Probe
ttaaacattgctcagtcatgtggtt

SEQ ID NO: 262032 - DNA, 25 bp, Artificial
  Probe
gtttcatgttggtttgtaaggccac

SEQ ID NO: 262033 - DNA, 25 bp, Artificial
  Probe
ttaagctgagccacgtcatttaagt

SEQ ID NO: 262034 - DNA, 25 bp, Artificial
  Probe
agtccagctgacgtactgtgctgtt

SEQ ID NO: 262035 - DNA, 25 bp, Artificial
  Probe
ttcttgagaaaaacccagcctgtgt

SEQ ID NO: 262036 - DNA, 25 bp, Artificial
  Probe
ctctgtcatatggttcttgagaaaa

SEQ ID NO: 262037 - DNA, 25 bp, Artificial
  Probe
gtattgtcattggtgcctctgtcat

SEQ ID NO: 262038 - DNA, 25 bp, Artificial
  Probe
ttgttccttttccagggtgacttgt

SEQ ID NO: 262039 - DNA, 25 bp, Artificial
  Probe
attggtgcctctgtcatatggttct

SEQ ID NO: 262040 - DNA, 25 bp, Artificial
  Probe
catcttgttccttttccagggtgac

SEQ ID NO: 262041 - DNA, 25 bp, Artificial
  Probe
tattgtcattggtgcctctgtcata

SEQ ID NO: 262042 - DNA, 25 bp, Artificial
  Probe
ggagcagacctatcctctaagcaag

SEQ ID NO: 262043 - DNA, 25 bp, Artificial
  Probe
aatatggagcagacctatcctctaa

SEQ ID NO: 262044 - DNA, 25 bp, Artificial
  Probe
cacgaggcgctttgttacaaggttt

SEQ ID NO: 262045 - DNA, 25 bp, Artificial
  Probe
tgtgccacttgaacgttttccacag

SEQ ID NO: 262046 - DNA, 25 bp, Artificial
  Probe
ccttttccagggtgacttgtatgtg

SEQ ID NO: 262047 - DNA, 25 bp, Artificial
  Probe
ctgtcatatggttcttgagaaaaac

SEQ ID NO: 262048 - DNA, 25 bp, Artificial
  Probe
gttctcagtttgcttatgtagtcct

SEQ ID NO: 262049 - DNA, 25 bp, Artificial
  Probe
gtcattggtgcctctgtcatatggt

SEQ ID NO: 262050 - DNA, 25 bp, Artificial
  Probe
cttgtatgtgccacttgaacgtttt

SEQ ID NO: 262051 - DNA, 25 bp, Artificial
  Probe
tcatatggttcttgagaaaaaccca

SEQ ID NO: 262052 - DNA, 25 bp, Artificial
  Probe
tgccacttgaacgttttccacagtt

SEQ ID NO: 262053 - DNA, 25 bp, Artificial
  Probe
tcctctaagcaagattaggttttaa

SEQ ID NO: 262054 - DNA, 25 bp, Artificial
  Probe
gtgacttgtatgtgccacttgaacg

SEQ ID NO: 262055 - DNA, 25 bp, Artificial
  Probe
gcttatgtagtcctgccttactgtt

SEQ ID NO: 262056 - DNA, 25 bp, Artificial
  Probe
tgagaaaaacccagcctgtgtggat

SEQ ID NO: 262057 - DNA, 25 bp, Artificial
  Probe
ttttccagggtgacttgtatgtgcc

SEQ ID NO: 262058 - DNA, 25 bp, Artificial
  Probe
ttccagggtgacttgtatgtgccac

SEQ ID NO: 262059 - DNA, 25 bp, Artificial
  Probe
ggttcttgagaaaaacccagcctgt

SEQ ID NO: 262060 - DNA, 25 bp, Artificial
  Probe
gcagacctatcctctaagcaagatt

SEQ ID NO: 262061 - DNA, 25 bp, Artificial
  Probe
agacctatcctctaagcaagattag

SEQ ID NO: 262062 - DNA, 25 bp, Artificial
  Probe
ccagggtgacttgtatgtgccactt

SEQ ID NO: 262063 - DNA, 25 bp, Artificial
  Probe
gacctatcctctaagcaagattagg

SEQ ID NO: 262064 - DNA, 25 bp, Artificial
  Probe
gtttgcttatgtagtcctgccttac

SEQ ID NO: 262065 - DNA, 25 bp, Artificial
  Probe
cctctgtcatatggttcttgagaaa

SEQ ID NO: 262066 - DNA, 25 bp, Artificial
  Probe
tgccacatcttgttccttttccagg

SEQ ID NO: 262067 - DNA, 25 bp, Artificial
  Probe
tatgtgccacttgaacgttttccac

SEQ ID NO: 262068 - DNA, 25 bp, Artificial
  Probe
agttgtattgtcattggtgcctctg

SEQ ID NO: 262069 - DNA, 25 bp, Artificial
  Probe
caaagttgtattgtcattggtgcct

SEQ ID NO: 262070 - DNA, 25 bp, Artificial
  Probe
tgtcatatggttcttgagaaaaacc

SEQ ID NO: 262071 - DNA, 25 bp, Artificial
  Probe
tgttccttttccagggtgacttgta

SEQ ID NO: 262072 - DNA, 25 bp, Artificial
  Probe
gccacttgaacgttttccacagttt

SEQ ID NO: 262073 - DNA, 25 bp, Artificial
  Probe
ctatcctctaagcaagattaggttt

SEQ ID NO: 262074 - DNA, 25 bp, Artificial
  Probe
cacatcttgttccttttccagggtg

SEQ ID NO: 262075 - DNA, 25 bp, Artificial
  Probe
cgaggcgctttgttacaaggttttg

SEQ ID NO: 262076 - DNA, 25 bp, Artificial
  Probe
cctatcctctaagcaagattaggtt

SEQ ID NO: 262077 - DNA, 25 bp, Artificial
  Probe
tgttctcagtttgcttatgtagtcc

SEQ ID NO: 262078 - DNA, 25 bp, Artificial
  Probe
ctgaaaaacatttgttctcagtttg

SEQ ID NO: 262079 - DNA, 25 bp, Artificial
  Probe
aacatttgttctcagtttgcttatg

SEQ ID NO: 262080 - DNA, 25 bp, Artificial
  Probe
ggtgacttgtatgtgccacttgaac

SEQ ID NO: 262081 - DNA, 25 bp, Artificial
  Probe
attgccatgaactccccgtgtctgt

SEQ ID NO: 262082 - DNA, 25 bp, Artificial
  Probe
gtggctatgccgtagtgcctgtacc

SEQ ID NO: 262083 - DNA, 25 bp, Artificial
  Probe
gagatttttcatacttttgtccatg

SEQ ID NO: 262084 - DNA, 25 bp, Artificial
  Probe
tccagtttcctttaggagacacttt

SEQ ID NO: 262085 - DNA, 25 bp, Artificial
  Probe
tctccagttggctaccgttacatat

SEQ ID NO: 262086 - DNA, 25 bp, Artificial
  Probe
gccacgtggctatgccgtagtgcct

SEQ ID NO: 262087 - DNA, 25 bp, Artificial
  Probe
ttgggaacctgcagtgggccctcca

SEQ ID NO: 262088 - DNA, 25 bp, Artificial
  Probe
agctggctcccttcttgaaaacctc

SEQ ID NO: 262089 - DNA, 25 bp, Artificial
  Probe
caagataacgtctgaaggattgacg

SEQ ID NO: 262090 - DNA, 25 bp, Artificial
  Probe
aatgttaaatgtgctggccacgtgg

SEQ ID NO: 262091 - DNA, 25 bp, Artificial
  Probe
atatcttcttaggttttcagctaag

SEQ ID NO: 262092 - DNA, 25 bp, Artificial
  Probe
gttaagtaggtctccagttggctac

SEQ ID NO: 262093 - DNA, 25 bp, Artificial
  Probe
ctatctaatcggaaatcctgggaat

SEQ ID NO: 262094 - DNA, 25 bp, Artificial
  Probe
gtgctggccacgtggctatgccgta

SEQ ID NO: 262095 - DNA, 25 bp, Artificial
  Probe
agatttttcatacttttgtccatgg

SEQ ID NO: 262096 - DNA, 25 bp, Artificial
  Probe
tggccacgtggctatgccgtagtgc

SEQ ID NO: 262097 - DNA, 25 bp, Artificial
  Probe
tgccgtagtgcctgtaccttcctgc

SEQ ID NO: 262098 - DNA, 25 bp, Artificial
  Probe
tgttaaatgtgctggccacgtggct

SEQ ID NO: 262099 - DNA, 25 bp, Artificial
  Probe
ctaatcggaaatcctgggaatgtta

SEQ ID NO: 262100 - DNA, 25 bp, Artificial
  Probe
ctccagttggctaccgttacatata

SEQ ID NO: 262101 - DNA, 25 bp, Artificial
  Probe
taccgttacatataatggcacttcg

SEQ ID NO: 262102 - DNA, 25 bp, Artificial
  Probe
gctaccgttacatataatggcactt

SEQ ID NO: 262103 - DNA, 25 bp, Artificial
  Probe
taccttcctgcttgggaacctgcag

SEQ ID NO: 262104 - DNA, 25 bp, Artificial
  Probe
agttggctaccgttacatataatgg

SEQ ID NO: 262105 - DNA, 25 bp, Artificial
  Probe
gggaacctgcagtgggccctccagc

SEQ ID NO: 262106 - DNA, 25 bp, Artificial
  Probe
acatataatggcacttcgtttgtgt

SEQ ID NO: 262107 - DNA, 25 bp, Artificial
  Probe
cagctggctcccttcttgaaaacct

SEQ ID NO: 262108 - DNA, 25 bp, Artificial
  Probe
ttcagctaagctttgctttggcttc

SEQ ID NO: 262109 - DNA, 25 bp, Artificial
  Probe
ttcctgcttgggaacctgcagtggg

SEQ ID NO: 262110 - DNA, 25 bp, Artificial
  Probe
ctaagctttgctttggcttcagttg

SEQ ID NO: 262111 - DNA, 25 bp, Artificial
  Probe
ttaagtaggtctccagttggctacc

SEQ ID NO: 262112 - DNA, 25 bp, Artificial
  Probe
agatccagtttcctttaggagacac

SEQ ID NO: 262113 - DNA, 25 bp, Artificial
  Probe
tggaaaaactatctaatcggaaatc

SEQ ID NO: 262114 - DNA, 25 bp, Artificial
  Probe
atgaactccccgtgtctgtctgaag

SEQ ID NO: 262115 - DNA, 25 bp, Artificial
  Probe
agataacgtctgaaggattgacggc

SEQ ID NO: 262116 - DNA, 25 bp, Artificial
  Probe
gctatgccgtagtgcctgtaccttc

SEQ ID NO: 262117 - DNA, 25 bp, Artificial
  Probe
tagaaaacattgcattgccatgaac

SEQ ID NO: 262118 - DNA, 25 bp, Artificial
  Probe
taggtctccagttggctaccgttac

SEQ ID NO: 262119 - DNA, 25 bp, Artificial
  Probe
aagtaggtctccagttggctaccgt

SEQ ID NO: 262120 - DNA, 25 bp, Artificial
  Probe
aatgtgctggccacgtggctatgcc

SEQ ID NO: 262121 - DNA, 25 bp, Artificial
  Probe
catataatggcacttcgtttgtgtt

SEQ ID NO: 262122 - DNA, 25 bp, Artificial
  Probe
aggattgacggcagatccagtttcc

SEQ ID NO: 262123 - DNA, 25 bp, Artificial
  Probe
gatccagtttcctttaggagacact

SEQ ID NO: 262124 - DNA, 25 bp, Artificial
  Probe
cgtctgaaggattgacggcagatcc

SEQ ID NO: 262125 - DNA, 25 bp, Artificial
  Probe
ccctccaagataacgtctgaaggat

SEQ ID NO: 262126 - DNA, 25 bp, Artificial
  Probe
cattgcattgccatgaactccccgt

SEQ ID NO: 262127 - DNA, 25 bp, Artificial
  Probe
agcccagaagtgttacaaggttggt

SEQ ID NO: 262128 - DNA, 25 bp, Artificial
  Probe
tccctgcgacccatggaggcagaac

SEQ ID NO: 262129 - DNA, 25 bp, Artificial
  Probe
ctatgaacctctaggcatctccctg

SEQ ID NO: 262130 - DNA, 25 bp, Artificial
  Probe
ccaagtccagccagcccagaagtgt

SEQ ID NO: 262131 - DNA, 25 bp, Artificial
  Probe
tccagccagcccagaagtgttacaa

SEQ ID NO: 262132 - DNA, 25 bp, Artificial
  Probe
tgcagtcaaggttccccaagtccag

SEQ ID NO: 262133 - DNA, 25 bp, Artificial
  Probe
atttgggagccttgatttacagttc

SEQ ID NO: 262134 - DNA, 25 bp, Artificial
  Probe
ccagcccagaagtgttacaaggttg

SEQ ID NO: 262135 - DNA, 25 bp, Artificial
  Probe
ccttgatttacagttctgctctcgt

SEQ ID NO: 262136 - DNA, 25 bp, Artificial
  Probe
ccagctatgaacctctaggcatctc

SEQ ID NO: 262137 - DNA, 25 bp, Artificial
  Probe
cctactgagtctcgaagctgcagtc

SEQ ID NO: 262138 - DNA, 25 bp, Artificial
  Probe
acccatggaggcagaacccccaaga

SEQ ID NO: 262139 - DNA, 25 bp, Artificial
  Probe
ccaggcgctcagaaggacacccgga

SEQ ID NO: 262140 - DNA, 25 bp, Artificial
  Probe
ctcgaagctgcagtcaaggttcccc

SEQ ID NO: 262141 - DNA, 25 bp, Artificial
  Probe
ggcacgtagttcaggcatgtcaccg

SEQ ID NO: 262142 - DNA, 25 bp, Artificial
  Probe
aggcgctcagaaggacacccggacc

SEQ ID NO: 262143 - DNA, 25 bp, Artificial
  Probe
gtcaccgtttcatccaagccagcta

SEQ ID NO: 262144 - DNA, 25 bp, Artificial
  Probe
gcatgtcaccgtttcatccaagcca

SEQ ID NO: 262145 - DNA, 25 bp, Artificial
  Probe
actgagtctcgaagctgcagtcaag

SEQ ID NO: 262146 - DNA, 25 bp, Artificial
  Probe
ggcatgtcaccgtttcatccaagcc

SEQ ID NO: 262147 - DNA, 25 bp, Artificial
  Probe
atccaagccagctatgaacctctag

SEQ ID NO: 262148 - DNA, 25 bp, Artificial
  Probe
agtcccaggcgctcagaaggacacc

SEQ ID NO: 262149 - DNA, 25 bp, Artificial
  Probe
ccaggcagtcccaggcgctcagaag

SEQ ID NO: 262150 - DNA, 25 bp, Artificial
  Probe
aatttgtagggcagagactcctgaa

SEQ ID NO: 262151 - DNA, 25 bp, Artificial
  Probe
cggacccacctactgagtctcgaag

SEQ ID NO: 262152 - DNA, 25 bp, Artificial
  Probe
ttctgctctcgttgccttgggacct

SEQ ID NO: 262153 - DNA, 25 bp, Artificial
  Probe
acccacctactgagtctcgaagctg

SEQ ID NO: 262154 - DNA, 25 bp, Artificial
  Probe
ctctcgttgccttgggacctatctg

SEQ ID NO: 262155 - DNA, 25 bp, Artificial
  Probe
ccacctactgagtctcgaagctgca

SEQ ID NO: 262156 - DNA, 25 bp, Artificial
  Probe
acttgaatttgtagggcagagactc

SEQ ID NO: 262157 - DNA, 25 bp, Artificial
  Probe
ccgtttcatccaagccagctatgaa

SEQ ID NO: 262158 - DNA, 25 bp, Artificial
  Probe
acagttctgctctcgttgccttggg

SEQ ID NO: 262159 - DNA, 25 bp, Artificial
  Probe
accgtttcatccaagccagctatga

SEQ ID NO: 262160 - DNA, 25 bp, Artificial
  Probe
gggacctatctgattatagtacttg

SEQ ID NO: 262161 - DNA, 25 bp, Artificial
  Probe
caccgtttcatccaagccagctatg

SEQ ID NO: 262162 - DNA, 25 bp, Artificial
  Probe
acctactgagtctcgaagctgcagt

SEQ ID NO: 262163 - DNA, 25 bp, Artificial
  Probe
gggagccttgatttacagttctgct

SEQ ID NO: 262164 - DNA, 25 bp, Artificial
  Probe
tacagttctgctctcgttgccttgg

SEQ ID NO: 262165 - DNA, 25 bp, Artificial
  Probe
ggacctatctgattatagtacttgg

SEQ ID NO: 262166 - DNA, 25 bp, Artificial
  Probe
cgttgccttgggacctatctgatta

SEQ ID NO: 262167 - DNA, 25 bp, Artificial
  Probe
gagccttgatttacagttctgctct

SEQ ID NO: 262168 - DNA, 25 bp, Artificial
  Probe
cgtagttcaggcatgtcaccgtttc

SEQ ID NO: 262169 - DNA, 25 bp, Artificial
  Probe
cctatctgattatagtacttgggta

SEQ ID NO: 262170 - DNA, 25 bp, Artificial
  Probe
ctgcagtcaaggttccccaagtcca

SEQ ID NO: 262171 - DNA, 25 bp, Artificial
  Probe
ttcaggcatgtcaccgtttcatcca

SEQ ID NO: 262172 - DNA, 25 bp, Artificial
  Probe
gctctcgttgccttgggacctatct

SEQ ID NO: 262173 - DNA, 25 bp, Artificial
  Probe
cagctgacaacagatgctgccagga

SEQ ID NO: 262174 - DNA, 25 bp, Artificial
  Probe
acctcttagagaaaatcagcaaaga

SEQ ID NO: 262175 - DNA, 25 bp, Artificial
  Probe
aacgagagtcaggtgatctgtgctg

SEQ ID NO: 262176 - DNA, 25 bp, Artificial
  Probe
aagagacagatctcagctccactgt

SEQ ID NO: 262177 - DNA, 25 bp, Artificial
  Probe
gctcaaacctcttagagaaaatcag

SEQ ID NO: 262178 - DNA, 25 bp, Artificial
  Probe
gacagatctcagctccactgtgaat

SEQ ID NO: 262179 - DNA, 25 bp, Artificial
  Probe
tggtgctgatgcagctcagaagcag

SEQ ID NO: 262180 - DNA, 25 bp, Artificial
  Probe
gagaagcagctgacaacagatgctg

SEQ ID NO: 262181 - DNA, 25 bp, Artificial
  Probe
acgagagtcaggtgatctgtgctga

SEQ ID NO: 262182 - DNA, 25 bp, Artificial
  Probe
cagatccagagcttgaataaaatgt

SEQ ID NO: 262183 - DNA, 25 bp, Artificial
  Probe
cagaagcagatccagagcttgaata

SEQ ID NO: 262184 - DNA, 25 bp, Artificial
  Probe
agatgctgccaggattggtgctgat

SEQ ID NO: 262185 - DNA, 25 bp, Artificial
  Probe
aagcagatccagagcttgaataaaa

SEQ ID NO: 262186 - DNA, 25 bp, Artificial
  Probe
gcagctcagaagcagatccagagct

SEQ ID NO: 262187 - DNA, 25 bp, Artificial
  Probe
aaatgtgctcaaacctcttagagaa

SEQ ID NO: 262188 - DNA, 25 bp, Artificial
  Probe
tttcagcaagagacagatctcagct

SEQ ID NO: 262189 - DNA, 25 bp, Artificial
  Probe
agcagatccagagcttgaataaaat

SEQ ID NO: 262190 - DNA, 25 bp, Artificial
  Probe
atctcagctccactgtgaatagcca

SEQ ID NO: 262191 - DNA, 25 bp, Artificial
  Probe
gctgatgcagctcagaagcagatcc

SEQ ID NO: 262192 - DNA, 25 bp, Artificial
  Probe
agaagcagctgacaacagatgctgc

SEQ ID NO: 262193 - DNA, 25 bp, Artificial
  Probe
caggctttcagcaagagacagatct

SEQ ID NO: 262194 - DNA, 25 bp, Artificial
  Probe
ctttcagcaagagacagatctcagc

SEQ ID NO: 262195 - DNA, 25 bp, Artificial
  Probe
ctgatgcagctcagaagcagatcca

SEQ ID NO: 262196 - DNA, 25 bp, Artificial
  Probe
tgctgccaggattggtgctgatgca

SEQ ID NO: 262197 - DNA, 25 bp, Artificial
  Probe
cagatctcagctccactgtgaatag

SEQ ID NO: 262198 - DNA, 25 bp, Artificial
  Probe
gcagctgacaacagatgctgccagg

SEQ ID NO: 262199 - DNA, 25 bp, Artificial
  Probe
caggattggtgctgatgcagctcag

SEQ ID NO: 262200 - DNA, 25 bp, Artificial
  Probe
aagcagctgacaacagatgctgcca

SEQ ID NO: 262201 - DNA, 25 bp, Artificial
  Probe
gattggtgctgatgcagctcagaag

SEQ ID NO: 262202 - DNA, 25 bp, Artificial
  Probe
gccaggattggtgctgatgcagctc

SEQ ID NO: 262203 - DNA, 25 bp, Artificial
  Probe
caagagacagatctcagctccactg

SEQ ID NO: 262204 - DNA, 25 bp, Artificial
  Probe
gtgctcaaacctcttagagaaaatc

SEQ ID NO: 262205 - DNA, 25 bp, Artificial
  Probe
ggtgctgatgcagctcagaagcaga

SEQ ID NO: 262206 - DNA, 25 bp, Artificial
  Probe
ctgccaggattggtgctgatgcagc

SEQ ID NO: 262207 - DNA, 25 bp, Artificial
  Probe
gatctcagctccactgtgaatagcc

SEQ ID NO: 262208 - DNA, 25 bp, Artificial
  Probe
ggctttcagcaagagacagatctca

SEQ ID NO: 262209 - DNA, 25 bp, Artificial
  Probe
attggtgctgatgcagctcagaagc

SEQ ID NO: 262210 - DNA, 25 bp, Artificial
  Probe
atgctgccaggattggtgctgatgc

SEQ ID NO: 262211 - DNA, 25 bp, Artificial
  Probe
acagatgctgccaggattggtgctg

SEQ ID NO: 262212 - DNA, 25 bp, Artificial
  Probe
cagctcagaagcagatccagagctt

SEQ ID NO: 262213 - DNA, 25 bp, Artificial
  Probe
aacctcttagagaaaatcagcaaag

SEQ ID NO: 262214 - DNA, 25 bp, Artificial
  Probe
tgacaacagatgctgccaggattgg

SEQ ID NO: 262215 - DNA, 25 bp, Artificial
  Probe
atgtgctcaaacctcttagagaaaa

SEQ ID NO: 262216 - DNA, 25 bp, Artificial
  Probe
ctcagaagcagatccagagcttgaa

SEQ ID NO: 262217 - DNA, 25 bp, Artificial
  Probe
gacaacagatgctgccaggattggt

SEQ ID NO: 262218 - DNA, 25 bp, Artificial
  Probe
gcaggctttcagcaagagacagatc

SEQ ID NO: 262219 - DNA, 25 bp, Artificial
  Probe
ccttgaccaggaactaaaaatgtca

SEQ ID NO: 262220 - DNA, 25 bp, Artificial
  Probe
tgtgtcttttgcagtcctttatcca

SEQ ID NO: 262221 - DNA, 25 bp, Artificial
  Probe
ctgactggaaatcacatcaaagatg

SEQ ID NO: 262222 - DNA, 25 bp, Artificial
  Probe
agctttgcagtagctccatcctatt

SEQ ID NO: 262223 - DNA, 25 bp, Artificial
  Probe
gcagtagctccatcctattaacaga

SEQ ID NO: 262224 - DNA, 25 bp, Artificial
  Probe
gtcttttgcagtcctttatccaaag

SEQ ID NO: 262225 - DNA, 25 bp, Artificial
  Probe
caccttgtggttggaccctggaata

SEQ ID NO: 262226 - DNA, 25 bp, Artificial
  Probe
ctaaaaatgtcactgactgactgga

SEQ ID NO: 262227 - DNA, 25 bp, Artificial
  Probe
gacccaggaaggtcccttgaccagg

SEQ ID NO: 262228 - DNA, 25 bp, Artificial
  Probe
gctatgaagcctcataaatgcactt

SEQ ID NO: 262229 - DNA, 25 bp, Artificial
  Probe
acaagctttgcagtagctccatcct

SEQ ID NO: 262230 - DNA, 25 bp, Artificial
  Probe
tggttggaccctggaataactccca

SEQ ID NO: 262231 - DNA, 25 bp, Artificial
  Probe
gaccctggaataactcccatcttgt

SEQ ID NO: 262232 - DNA, 25 bp, Artificial
  Probe
atcacatcaaagatgagaagatggc

SEQ ID NO: 262233 - DNA, 25 bp, Artificial
  Probe
gcattcacaagtagaccaatgctta

SEQ ID NO: 262234 - DNA, 25 bp, Artificial
  Probe
tgaaaacaagctttgcagtagctcc

SEQ ID NO: 262235 - DNA, 25 bp, Artificial
  Probe
ctaaaaatctctgtagtgtgtttca

SEQ ID NO: 262236 - DNA, 25 bp, Artificial
  Probe
cccagcacatgaggaatatttgtag

SEQ ID NO: 262237 - DNA, 25 bp, Artificial
  Probe
caggaaggtcccttgaccaggaact

SEQ ID NO: 262238 - DNA, 25 bp, Artificial
  Probe
gaagaagacccaggaaggtcccttg

SEQ ID NO: 262239 - DNA, 25 bp, Artificial
  Probe
catttgcactatttgaaggggattc

SEQ ID NO: 262240 - DNA, 25 bp, Artificial
  Probe
tctaaaaatctctgtagtgtgtttc

SEQ ID NO: 262241 - DNA, 25 bp, Artificial
  Probe
tgcactatttgaaggggattccgtg

SEQ ID NO: 262242 - DNA, 25 bp, Artificial
  Probe
aactaaaaatgtcactgactgactg

SEQ ID NO: 262243 - DNA, 25 bp, Artificial
  Probe
ggctatgaagcctcataaatgcact

SEQ ID NO: 262244 - DNA, 25 bp, Artificial
  Probe
gtcactatttattgctaaatgactg

SEQ ID NO: 262245 - DNA, 25 bp, Artificial
  Probe
ctggaaatcacatcaaagatgagaa

SEQ ID NO: 262246 - DNA, 25 bp, Artificial
  Probe
aaagtatttcccatgtgcaataaag

SEQ ID NO: 262247 - DNA, 25 bp, Artificial
  Probe
actgcaaaagccagcgccttcatgc

SEQ ID NO: 262248 - DNA, 25 bp, Artificial
  Probe
catcttgtcccataacctgtttgtg

SEQ ID NO: 262249 - DNA, 25 bp, Artificial
  Probe
agtgcaatatgtgtcgtggcagatc

SEQ ID NO: 262250 - DNA, 25 bp, Artificial
  Probe
gtcccttgaccaggaactaaaaatg

SEQ ID NO: 262251 - DNA, 25 bp, Artificial
  Probe
tagaccaatgcttatgaaaacaagc

SEQ ID NO: 262252 - DNA, 25 bp, Artificial
  Probe
acctgtttgtgtcttttgcagtcct

SEQ ID NO: 262253 - DNA, 25 bp, Artificial
  Probe
aatgactgcaaaagccagcgccttc

SEQ ID NO: 262254 - DNA, 25 bp, Artificial
  Probe
tgcagtagctccatcctattaacag

SEQ ID NO: 262255 - DNA, 25 bp, Artificial
  Probe
aaagcccagcacatgaggaatattt

SEQ ID NO: 262256 - DNA, 25 bp, Artificial
  Probe
catgcatttgcactatttgaagggg

SEQ ID NO: 262257 - DNA, 25 bp, Artificial
  Probe
tatgaaaacaagctttgcagtagct

SEQ ID NO: 262258 - DNA, 25 bp, Artificial
  Probe
agacccaggaaggtcccttgaccag

SEQ ID NO: 262259 - DNA, 25 bp, Artificial
  Probe
taaagcattcacaagtagaccaatg

SEQ ID NO: 262260 - DNA, 25 bp, Artificial
  Probe
aaagccagcgccttcatgcatttgc

SEQ ID NO: 262261 - DNA, 25 bp, Artificial
  Probe
tttattgctaaatgactgcaaaagc

SEQ ID NO: 262262 - DNA, 25 bp, Artificial
  Probe
ctgactgactggaaatcacatcaaa

SEQ ID NO: 262263 - DNA, 25 bp, Artificial
  Probe
caatatgtgtcgtggcagatctctg

SEQ ID NO: 262264 - DNA, 25 bp, Artificial
  Probe
atgtcactgactgactggaaatcac

SEQ ID NO: 262265 - DNA, 25 bp, Artificial
  Probe
agcatgggaagtcgttccagttcat

SEQ ID NO: 262266 - DNA, 25 bp, Artificial
  Probe
agttcatcagggtcacttaatgctc

SEQ ID NO: 262267 - DNA, 25 bp, Artificial
  Probe
gcagaaagcgcatgcccggaagaat

SEQ ID NO: 262268 - DNA, 25 bp, Artificial
  Probe
atgtgagcagcatgggaagtcgttc

SEQ ID NO: 262269 - DNA, 25 bp, Artificial
  Probe
gcttcagcaagctcggagaaagtta

SEQ ID NO: 262270 - DNA, 25 bp, Artificial
  Probe
cagcaagctcggagaaagttagacc

SEQ ID NO: 262271 - DNA, 25 bp, Artificial
  Probe
tggctgtggacaacttcccagaagt

SEQ ID NO: 262272 - DNA, 25 bp, Artificial
  Probe
tccagagaacaccagctcctcggtg

SEQ ID NO: 262273 - DNA, 25 bp, Artificial
  Probe
ctcctcggtggctgtggacaacttc

SEQ ID NO: 262274 - DNA, 25 bp, Artificial
  Probe
tggacaaggccatgctgattgacag

SEQ ID NO: 262275 - DNA, 25 bp, Artificial
  Probe
ctgtggacaacttcccagaagtgga

SEQ ID NO: 262276 - DNA, 25 bp, Artificial
  Probe
tgagcacccaggtggaagagctgaa

SEQ ID NO: 262277 - DNA, 25 bp, Artificial
  Probe
agttagtaacacagaggcgcaagca

SEQ ID NO: 262278 - DNA, 25 bp, Artificial
  Probe
cagacggaagccagagccttgagca

SEQ ID NO: 262279 - DNA, 25 bp, Artificial
  Probe
acgtcaaggacctcagcaaacagct

SEQ ID NO: 262280 - DNA, 25 bp, Artificial
  Probe
aaactacgacaaagatgtgagcagc

SEQ ID NO: 262281 - DNA, 25 bp, Artificial
  Probe
catgcccggaagaatgagaagatag

SEQ ID NO: 262282 - DNA, 25 bp, Artificial
  Probe
gaagccagagccttgagcacccagg

SEQ ID NO: 262283 - DNA, 25 bp, Artificial
  Probe
tgtgcagacggaagccagagccttg

SEQ ID NO: 262284 - DNA, 25 bp, Artificial
  Probe
ttcccagaagtggacaaggccatgc

SEQ ID NO: 262285 - DNA, 25 bp, Artificial
  Probe
ctgattgacaggatagtgaggctgc

SEQ ID NO: 262286 - DNA, 25 bp, Artificial
  Probe
gaccgatctccagagaacaccagct

SEQ ID NO: 262287 - DNA, 25 bp, Artificial
  Probe
gagcacccaggtggaagagctgaaa

SEQ ID NO: 262288 - DNA, 25 bp, Artificial
  Probe
gatagtgaggctgcagaaagcgcat

SEQ ID NO: 262289 - DNA, 25 bp, Artificial
  Probe
agaggcgcaagcacgcctctaacgt

SEQ ID NO: 262290 - DNA, 25 bp, Artificial
  Probe
tgcagaaagcgcatgcccggaagaa

SEQ ID NO: 262291 - DNA, 25 bp, Artificial
  Probe
tagtgaggctgcagaaagcgcatgc

SEQ ID NO: 262292 - DNA, 25 bp, Artificial
  Probe
agcaagctcggagaaagttagacca

SEQ ID NO: 262293 - DNA, 25 bp, Artificial
  Probe
agagttcatggaggaccacatcctc

SEQ ID NO: 262294 - DNA, 25 bp, Artificial
  Probe
ttagtaacacagaggcgcaagcacg

SEQ ID NO: 262295 - DNA, 25 bp, Artificial
  Probe
ttccagttcatcagggtcacttaat

SEQ ID NO: 262296 - DNA, 25 bp, Artificial
  Probe
acacagaggcgcaagcacgcctcta

SEQ ID NO: 262297 - DNA, 25 bp, Artificial
  Probe
cgcaagcacgcctctaacgtcaagg

SEQ ID NO: 262298 - DNA, 25 bp, Artificial
  Probe
ccatgctgattgacaggatagtgag

SEQ ID NO: 262299 - DNA, 25 bp, Artificial
  Probe
ggaaactacgacaaagatgtgagca

SEQ ID NO: 262300 - DNA, 25 bp, Artificial
  Probe
ggacaacttcccagaagtggacaag

SEQ ID NO: 262301 - DNA, 25 bp, Artificial
  Probe
aacaccagctcctcggtggctgtgg

SEQ ID NO: 262302 - DNA, 25 bp, Artificial
  Probe
gttagaccagactgagaatggaaac

SEQ ID NO: 262303 - DNA, 25 bp, Artificial
  Probe
acgcctctaacgtcaaggacctcag

SEQ ID NO: 262304 - DNA, 25 bp, Artificial
  Probe
tgctgaagaccgatctccagagaac

SEQ ID NO: 262305 - DNA, 25 bp, Artificial
  Probe
gcgcatgcccggaagaatgagaaga

SEQ ID NO: 262306 - DNA, 25 bp, Artificial
  Probe
ccagctcctcggtggctgtggacaa

SEQ ID NO: 262307 - DNA, 25 bp, Artificial
  Probe
gacggaagccagagccttgagcacc

SEQ ID NO: 262308 - DNA, 25 bp, Artificial
  Probe
cctcagcaaacagcttcagcaagct

SEQ ID NO: 262309 - DNA, 25 bp, Artificial
  Probe
agagccttgagcacccaggtggaag

SEQ ID NO: 262310 - DNA, 25 bp, Artificial
  Probe
agcagtgctgaagaccgatctccag

SEQ ID NO: 262311 - DNA, 25 bp, Artificial
  Probe
aatgatctcacacttccctagggcc

SEQ ID NO: 262312 - DNA, 25 bp, Artificial
  Probe
cgtggtgccccgtgcagtgtgaaca

SEQ ID NO: 262313 - DNA, 25 bp, Artificial
  Probe
gcaaagccaggttcccctggaaata

SEQ ID NO: 262314 - DNA, 25 bp, Artificial
  Probe
ctttttcccgccatgcaaagccagg

SEQ ID NO: 262315 - DNA, 25 bp, Artificial
  Probe
tactggatgttaaggcccggcttga

SEQ ID NO: 262316 - DNA, 25 bp, Artificial
  Probe
cacgaggttgagctgagacgcacag

SEQ ID NO: 262317 - DNA, 25 bp, Artificial
  Probe
gcgaggactgcaagcttcctgccca

SEQ ID NO: 262318 - DNA, 25 bp, Artificial
  Probe
cccagctgggccagatgcagtgcct

SEQ ID NO: 262319 - DNA, 25 bp, Artificial
  Probe
ttgttccaccgattgcaagcctcct

SEQ ID NO: 262320 - DNA, 25 bp, Artificial
  Probe
catcactgaggagatcagggatgga

SEQ ID NO: 262321 - DNA, 25 bp, Artificial
  Probe
ttaaggcccggcttgagtcagagat

SEQ ID NO: 262322 - DNA, 25 bp, Artificial
  Probe
ctcaacatagcatgaggaattctct

SEQ ID NO: 262323 - DNA, 25 bp, Artificial
  Probe
gacgcacagtcaacgccctggagat

SEQ ID NO: 262324 - DNA, 25 bp, Artificial
  Probe
ggaagagtgatctcctccagggagc

SEQ ID NO: 262325 - DNA, 25 bp, Artificial
  Probe
cgccctggagatcgagctgcaggct

SEQ ID NO: 262326 - DNA, 25 bp, Artificial
  Probe
tctggaatctaccttggctgagaca

SEQ ID NO: 262327 - DNA, 25 bp, Artificial
  Probe
ggagatcgagctgcaggctcaacat

SEQ ID NO: 262328 - DNA, 25 bp, Artificial
  Probe
ttggtcttaactgtgctttttcccg

SEQ ID NO: 262329 - DNA, 25 bp, Artificial
  Probe
ccagatccgcaccatcactgaggag

SEQ ID NO: 262330 - DNA, 25 bp, Artificial
  Probe
cagcttctcaagtcagcacccagat

SEQ ID NO: 262331 - DNA, 25 bp, Artificial
  Probe
ggaaatattcccaataaagtgttct

SEQ ID NO: 262332 - DNA, 25 bp, Artificial
  Probe
aacatccaccagtggggccgaggcc

SEQ ID NO: 262333 - DNA, 25 bp, Artificial
  Probe
tttcccgccatgcaaagccaggttc

SEQ ID NO: 262334 - DNA, 25 bp, Artificial
  Probe
ccggcttgagtcagagattgctacc

SEQ ID NO: 262335 - DNA, 25 bp, Artificial
  Probe
atctaccttggctgagacagaggct

SEQ ID NO: 262336 - DNA, 25 bp, Artificial
  Probe
ggcagctaaatgatctcacacttcc

SEQ ID NO: 262337 - DNA, 25 bp, Artificial
  Probe
cccgtgcagtgtgaacatccaccag

SEQ ID NO: 262338 - DNA, 25 bp, Artificial
  Probe
accatgaatatcaggtgttactgga

SEQ ID NO: 262339 - DNA, 25 bp, Artificial
  Probe
aactgtgctttttcccgccatgcaa

SEQ ID NO: 262340 - DNA, 25 bp, Artificial
  Probe
cagtcaacgccctggagatcgagct

SEQ ID NO: 262341 - DNA, 25 bp, Artificial
  Probe
agcatgaggaattctctggaatcta

SEQ ID NO: 262342 - DNA, 25 bp, Artificial
  Probe
atagcatgaggaattctctggaatc

SEQ ID NO: 262343 - DNA, 25 bp, Artificial
  Probe
agcttctcaagtcagcacccagatc

SEQ ID NO: 262344 - DNA, 25 bp, Artificial
  Probe
acgccttgtggctcttggcagctaa

SEQ ID NO: 262345 - DNA, 25 bp, Artificial
  Probe
gtgttactggatgttaaggcccggc

SEQ ID NO: 262346 - DNA, 25 bp, Artificial
  Probe
gcttagcaggtttttctactaaaat

SEQ ID NO: 262347 - DNA, 25 bp, Artificial
  Probe
ccctggaaatattcccaataaagtg

SEQ ID NO: 262348 - DNA, 25 bp, Artificial
  Probe
tgagacagaggctcgctatagctcc

SEQ ID NO: 262349 - DNA, 25 bp, Artificial
  Probe
aggttgagctgagacgcacagtcaa

SEQ ID NO: 262350 - DNA, 25 bp, Artificial
  Probe
cctagggccctccttgcttagcagg

SEQ ID NO: 262351 - DNA, 25 bp, Artificial
  Probe
taaatgatctcacacttccctaggg

SEQ ID NO: 262352 - DNA, 25 bp, Artificial
  Probe
atagctcccagctgggccagatgca

SEQ ID NO: 262353 - DNA, 25 bp, Artificial
  Probe
ccatgcaaagccaggttcccctgga

SEQ ID NO: 262354 - DNA, 25 bp, Artificial
  Probe
tgtaagagttcctttcgtcccttct

SEQ ID NO: 262355 - DNA, 25 bp, Artificial
  Probe
agagtgatctcctccagggagcacg

SEQ ID NO: 262356 - DNA, 25 bp, Artificial
  Probe
aggaattctctggaatctaccttgg

SEQ ID NO: 262357 - DNA, 25 bp, Artificial
  Probe
aattcgagatcattgatgatcacag

SEQ ID NO: 262358 - DNA, 25 bp, Artificial
  Probe
agatcattgatgatcacagagctgg

SEQ ID NO: 262359 - DNA, 25 bp, Artificial
  Probe
tcaaagacctagagaagtggcagaa

SEQ ID NO: 262360 - DNA, 25 bp, Artificial
  Probe
gctctcaagagcatcaacaacgcgg

SEQ ID NO: 262361 - DNA, 25 bp, Artificial
  Probe
tcaacaacgcggagaagaggggcaa

SEQ ID NO: 262362 - DNA, 25 bp, Artificial
  Probe
ttcctaactgtgatgatgaagcatg

SEQ ID NO: 262363 - DNA, 25 bp, Artificial
  Probe
caacaacgcggagaagaggggcaaa

SEQ ID NO: 262364 - DNA, 25 bp, Artificial
  Probe
gttcctaactgtgatgatgaagcat

SEQ ID NO: 262365 - DNA, 25 bp, Artificial
  Probe
tgctctcaagagcatcaacaacgcg

SEQ ID NO: 262366 - DNA, 25 bp, Artificial
  Probe
tcctaactgtgatgatgaagcatgg

SEQ ID NO: 262367 - DNA, 25 bp, Artificial
  Probe
gaatgttctggcagatgctctcaag

SEQ ID NO: 262368 - DNA, 25 bp, Artificial
  Probe
cagatgctctcaagagcatcaacaa

SEQ ID NO: 262369 - DNA, 25 bp, Artificial
  Probe
atgttcaactcaaagacctagagaa

SEQ ID NO: 262370 - DNA, 25 bp, Artificial
  Probe
gccgagtcaccatggtgcgaatgaa

SEQ ID NO: 262371 - DNA, 25 bp, Artificial
  Probe
tctgctcccatcacggcagtttggt

SEQ ID NO: 262372 - DNA, 25 bp, Artificial
  Probe
accatggtgcgaatgaatgttctgg

SEQ ID NO: 262373 - DNA, 25 bp, Artificial
  Probe
tctcaagagcatcaacaacgcggag

SEQ ID NO: 262374 - DNA, 25 bp, Artificial
  Probe
tgatgttcaactcaaagacctagag

SEQ ID NO: 262375 - DNA, 25 bp, Artificial
  Probe
ctcaaagacctagagaagtggcaga

SEQ ID NO: 262376 - DNA, 25 bp, Artificial
  Probe
ccctgccgagtcaccatggtgcgaa

SEQ ID NO: 262377 - DNA, 25 bp, Artificial
  Probe
cattgatgatcacagagctgggaag

SEQ ID NO: 262378 - DNA, 25 bp, Artificial
  Probe
gttctggcagatgctctcaagagca

SEQ ID NO: 262379 - DNA, 25 bp, Artificial
  Probe
cctcacaggaaggttgaacaagtgt

SEQ ID NO: 262380 - DNA, 25 bp, Artificial
  Probe
agagcatcaacaacgcggagaagag

SEQ ID NO: 262381 - DNA, 25 bp, Artificial
  Probe
ttcaactcaaagacctagagaagtg

SEQ ID NO: 262382 - DNA, 25 bp, Artificial
  Probe
gcagatgctctcaagagcatcaaca

SEQ ID NO: 262383 - DNA, 25 bp, Artificial
  Probe
tgccgagtcaccatggtgcgaatga

SEQ ID NO: 262384 - DNA, 25 bp, Artificial
  Probe
tctggcagatgctctcaagagcatc

SEQ ID NO: 262385 - DNA, 25 bp, Artificial
  Probe
cgaatgaatgttctggcagatgctc

SEQ ID NO: 262386 - DNA, 25 bp, Artificial
  Probe
gttcggttcctaactgtgatgatga

SEQ ID NO: 262387 - DNA, 25 bp, Artificial
  Probe
ttgttgtgaacctcacaggaaggtt

SEQ ID NO: 262388 - DNA, 25 bp, Artificial
  Probe
aatgttctggcagatgctctcaaga

SEQ ID NO: 262389 - DNA, 25 bp, Artificial
  Probe
tcattgatgatcacagagctgggaa

SEQ ID NO: 262390 - DNA, 25 bp, Artificial
  Probe
gatcattgatgatcacagagctggg

SEQ ID NO: 262391 - DNA, 25 bp, Artificial
  Probe
tgaattcgagatcattgatgatcac

SEQ ID NO: 262392 - DNA, 25 bp, Artificial
  Probe
agattgttgtgaacctcacaggaag

SEQ ID NO: 262393 - DNA, 25 bp, Artificial
  Probe
atcgttcggttcctaactgtgatga

SEQ ID NO: 262394 - DNA, 25 bp, Artificial
  Probe
caagagcatcaacaacgcggagaag

SEQ ID NO: 262395 - DNA, 25 bp, Artificial
  Probe
gattgttgtgaacctcacaggaagg

SEQ ID NO: 262396 - DNA, 25 bp, Artificial
  Probe
agatttgatgttcaactcaaagacc

SEQ ID NO: 262397 - DNA, 25 bp, Artificial
  Probe
gagtcaccatggtgcgaatgaatgt

SEQ ID NO: 262398 - DNA, 25 bp, Artificial
  Probe
ttgatgttcaactcaaagacctaga

SEQ ID NO: 262399 - DNA, 25 bp, Artificial
  Probe
tttgatgttcaactcaaagacctag

SEQ ID NO: 262400 - DNA, 25 bp, Artificial
  Probe
gatttgatgttcaactcaaagacct

SEQ ID NO: 262401 - DNA, 25 bp, Artificial
  Probe
gttcaactcaaagacctagagaagt

SEQ ID NO: 262402 - DNA, 25 bp, Artificial
  Probe
aacctcacaggaaggttgaacaagt

SEQ ID NO: 262403 - DNA, 25 bp, Artificial
  Probe
gaaatctcggccctttgctatgacg

SEQ ID NO: 262404 - DNA, 25 bp, Artificial
  Probe
tcggccctttgctatgacgtacggc

SEQ ID NO: 262405 - DNA, 25 bp, Artificial
  Probe
tttgctatgacgtacggccgaggtg

SEQ ID NO: 262406 - DNA, 25 bp, Artificial
  Probe
caaccccagcgttttcagcttggtg

SEQ ID NO: 262407 - DNA, 25 bp, Artificial
  Probe
acgtacggccgaggtgggcttgaag

SEQ ID NO: 262408 - DNA, 25 bp, Artificial
  Probe
cggccctttgctatgacgtacggcc

SEQ ID NO: 262409 - DNA, 25 bp, Artificial
  Probe
tatgacgtacggccgaggtgggctt

SEQ ID NO: 262410 - DNA, 25 bp, Artificial
  Probe
cccagcgttttcagcttggtgctta

SEQ ID NO: 262411 - DNA, 25 bp, Artificial
  Probe
tccagaaatctcggccctttgctat

SEQ ID NO: 262412 - DNA, 25 bp, Artificial
  Probe
ttgctatgacgtacggccgaggtgg

SEQ ID NO: 262413 - DNA, 25 bp, Artificial
  Probe
tctcggccctttgctatgacgtacg

SEQ ID NO: 262414 - DNA, 25 bp, Artificial
  Probe
agaaatctcggccctttgctatgac

SEQ ID NO: 262415 - DNA, 25 bp, Artificial
  Probe
accccagcgttttcagcttggtgct

SEQ ID NO: 262416 - DNA, 25 bp, Artificial
  Probe
ccctttgctatgacgtacggccgag

SEQ ID NO: 262417 - DNA, 25 bp, Artificial
  Probe
gtacggccgaggtgggcttgaaggt

SEQ ID NO: 262418 - DNA, 25 bp, Artificial
  Probe
cggccgaggtgggcttgaaggttag

SEQ ID NO: 262419 - DNA, 25 bp, Artificial
  Probe
gcagctacaaccccagcgttttcag

SEQ ID NO: 262420 - DNA, 25 bp, Artificial
  Probe
gctatgacgtacggccgaggtgggc

SEQ ID NO: 262421 - DNA, 25 bp, Artificial
  Probe
aaatctcggccctttgctatgacgt

SEQ ID NO: 262422 - DNA, 25 bp, Artificial
  Probe
atgacgtacggccgaggtgggcttg

SEQ ID NO: 262423 - DNA, 25 bp, Artificial
  Probe
cctttgctatgacgtacggccgagg

SEQ ID NO: 262424 - DNA, 25 bp, Artificial
  Probe
ctttgctatgacgtacggccgaggt

SEQ ID NO: 262425 - DNA, 25 bp, Artificial
  Probe
accttccagaaatctcggccctttg

SEQ ID NO: 262426 - DNA, 25 bp, Artificial
  Probe
gccgaggtgggcttgaaggttagtt

SEQ ID NO: 262427 - DNA, 25 bp, Artificial
  Probe
caccttccagaaatctcggcccttt

SEQ ID NO: 262428 - DNA, 25 bp, Artificial
  Probe
ccagaaatctcggccctttgctatg

SEQ ID NO: 262429 - DNA, 25 bp, Artificial
  Probe
atctcggccctttgctatgacgtac

SEQ ID NO: 262430 - DNA, 25 bp, Artificial
  Probe
ttccagaaatctcggccctttgcta

SEQ ID NO: 262431 - DNA, 25 bp, Artificial
  Probe
cccgcagctacaaccccagcgtttt

SEQ ID NO: 262432 - DNA, 25 bp, Artificial
  Probe
cgcagctacaaccccagcgttttca

SEQ ID NO: 262433 - DNA, 25 bp, Artificial
  Probe
ggccctttgctatgacgtacggccg

SEQ ID NO: 262434 - DNA, 25 bp, Artificial
  Probe
ctatgacgtacggccgaggtgggct

SEQ ID NO: 262435 - DNA, 25 bp, Artificial
  Probe
gccctttgctatgacgtacggccga

SEQ ID NO: 262436 - DNA, 25 bp, Artificial
  Probe
ccccgcagctacaaccccagcgttt

SEQ ID NO: 262437 - DNA, 25 bp, Artificial
  Probe
ccccagcgttttcagcttggtgctt

SEQ ID NO: 262438 - DNA, 25 bp, Artificial
  Probe
ccagcgttttcagcttggtgcttag

SEQ ID NO: 262439 - DNA, 25 bp, Artificial
  Probe
ctcggccctttgctatgacgtacgg

SEQ ID NO: 262440 - DNA, 25 bp, Artificial
  Probe
agctacaaccccagcgttttcagct

SEQ ID NO: 262441 - DNA, 25 bp, Artificial
  Probe
tacaaccccagcgttttcagcttgg

SEQ ID NO: 262442 - DNA, 25 bp, Artificial
  Probe
ctacaaccccagcgttttcagcttg

SEQ ID NO: 262443 - DNA, 25 bp, Artificial
  Probe
tacggccgaggtgggcttgaaggtt

SEQ ID NO: 262444 - DNA, 25 bp, Artificial
  Probe
aatctcggccctttgctatgacgta

SEQ ID NO: 262445 - DNA, 25 bp, Artificial
  Probe
ggccgaggtgggcttgaaggttagt

SEQ ID NO: 262446 - DNA, 25 bp, Artificial
  Probe
aaccccagcgttttcagcttggtgc

SEQ ID NO: 262447 - DNA, 25 bp, Artificial
  Probe
acaaccccagcgttttcagcttggt

SEQ ID NO: 262448 - DNA, 25 bp, Artificial
  Probe
gacgtacggccgaggtgggcttgaa

SEQ ID NO: 262449 - DNA, 25 bp, Artificial
  Probe
attccttctcttttattgggaactg

SEQ ID NO: 262450 - DNA, 25 bp, Artificial
  Probe
ggaactgccaataaagtttgtactt

SEQ ID NO: 262451 - DNA, 25 bp, Artificial
  Probe
caacatcaggatggttctcctccac

SEQ ID NO: 262452 - DNA, 25 bp, Artificial
  Probe
gggaacatctgagtcacagacccat

SEQ ID NO: 262453 - DNA, 25 bp, Artificial
  Probe
cttctcttttattgggaactgccaa

SEQ ID NO: 262454 - DNA, 25 bp, Artificial
  Probe
gacttggtggcgtttacgtcaagca

SEQ ID NO: 262455 - DNA, 25 bp, Artificial
  Probe
aaatctggagtgacactggaatgcg

SEQ ID NO: 262456 - DNA, 25 bp, Artificial
  Probe
ttgctaaaattgtgcctgcaaataa

SEQ ID NO: 262457 - DNA, 25 bp, Artificial
  Probe
gctatcctgaaaccacagagatctc

SEQ ID NO: 262458 - DNA, 25 bp, Artificial
  Probe
ctactggaatactgctagaataata

SEQ ID NO: 262459 - DNA, 25 bp, Artificial
  Probe
aaccaagagacagctatagaagcca

SEQ ID NO: 262460 - DNA, 25 bp, Artificial
  Probe
acctccggatttataagaatatttg

SEQ ID NO: 262461 - DNA, 25 bp, Artificial
  Probe
ttctgcaaggacagatgatgaaatc

SEQ ID NO: 262462 - DNA, 25 bp, Artificial
  Probe
ctcccagaaagaactctggagtcct

SEQ ID NO: 262463 - DNA, 25 bp, Artificial
  Probe
cctcgccaagcattactgagtcctt

SEQ ID NO: 262464 - DNA, 25 bp, Artificial
  Probe
acagaatgtgttcagccaaaaaatt

SEQ ID NO: 262465 - DNA, 25 bp, Artificial
  Probe
ggaacccaccatcaacttggaatat

SEQ ID NO: 262466 - DNA, 25 bp, Artificial
  Probe
tccctgaacggacacctgagtcctt

SEQ ID NO: 262467 - DNA, 25 bp, Artificial
  Probe
agtccttcattgtggccgaagcagc

SEQ ID NO: 262468 - DNA, 25 bp, Artificial
  Probe
gtgtggaaacttccagcaatcatgt

SEQ ID NO: 262469 - DNA, 25 bp, Artificial
  Probe
agaactctggagtccttctttcttg

SEQ ID NO: 262470 - DNA, 25 bp, Artificial
  Probe
tgtggaactcggaagtcccaaatca

SEQ ID NO: 262471 - DNA, 25 bp, Artificial
  Probe
tctgtaatgacgacatattgtcaat

SEQ ID NO: 262472 - DNA, 25 bp, Artificial
  Probe
taaagctactggaatactgctagaa

SEQ ID NO: 262473 - DNA, 25 bp, Artificial
  Probe
ggaaacttccagcaatcatgtattt

SEQ ID NO: 262474 - DNA, 25 bp, Artificial
  Probe
acgtcaagcaagaatgtggaactcg

SEQ ID NO: 262475 - DNA, 25 bp, Artificial
  Probe
agcaaacattgaagaccccaggaaa

SEQ ID NO: 262476 - DNA, 25 bp, Artificial
  Probe
cccgccaataaaccaagagacagct

SEQ ID NO: 262477 - DNA, 25 bp, Artificial
  Probe
tcattgtggccgaagcagccggaga

SEQ ID NO: 262478 - DNA, 25 bp, Artificial
  Probe
aatctggagtgacactggaatgcgg

SEQ ID NO: 262479 - DNA, 25 bp, Artificial
  Probe
cctctggcaggaaaatctggagtga

SEQ ID NO: 262480 - DNA, 25 bp, Artificial
  Probe
tattagctatcctgaaaccacagag

SEQ ID NO: 262481 - DNA, 25 bp, Artificial
  Probe
gcaaacattgaagaccccaggaaaa

SEQ ID NO: 262482 - DNA, 25 bp, Artificial
  Probe
gtgttcagccaaaaaattccagctc

SEQ ID NO: 262483 - DNA, 25 bp, Artificial
  Probe
caaaggaccaaggaacccaccatca

SEQ ID NO: 262484 - DNA, 25 bp, Artificial
  Probe
gacagctatagaagccacttctgca

SEQ ID NO: 262485 - DNA, 25 bp, Artificial
  Probe
gaacggacacctgagtccttcattg

SEQ ID NO: 262486 - DNA, 25 bp, Artificial
  Probe
cccagaaagaactctggagtccttc

SEQ ID NO: 262487 - DNA, 25 bp, Artificial
  Probe
cctcaccaagcaagcctacagaatg

SEQ ID NO: 262488 - DNA, 25 bp, Artificial
  Probe
tggagagcactctaaccagctttcc

SEQ ID NO: 262489 - DNA, 25 bp, Artificial
  Probe
cctgcaaataaagctactggaatac

SEQ ID NO: 262490 - DNA, 25 bp, Artificial
  Probe
accaaggaacccaccatcaacttgg

SEQ ID NO: 262491 - DNA, 25 bp, Artificial
  Probe
tgacgaggactgtatacaggcccaa

SEQ ID NO: 262492 - DNA, 25 bp, Artificial
  Probe
tttgctaaaattgtgcctgcaaata

SEQ ID NO: 262493 - DNA, 25 bp, Artificial
  Probe
atatctgtaatgacgacatctgtaa

SEQ ID NO: 262494 - DNA, 25 bp, Artificial
  Probe
aaattgtgcctgcaaataaagctac

SEQ ID NO: 262495 - DNA, 25 bp, Artificial
  Probe
ggaactacctggagactgttcgtaa

SEQ ID NO: 262496 - DNA, 25 bp, Artificial
  Probe
gcatcggacctgagagaggaactac

SEQ ID NO: 262497 - DNA, 25 bp, Artificial
  Probe
cctgtgggccactgtgcatggcatc

SEQ ID NO: 262498 - DNA, 25 bp, Artificial
  Probe
tgagtttatcagtgagcctgtgggc

SEQ ID NO: 262499 - DNA, 25 bp, Artificial
  Probe
gacactttgagtttatcagtgagcc

SEQ ID NO: 262500 - DNA, 25 bp, Artificial
  Probe
gtgatgtgtggctaaccatgtgaca

SEQ ID NO: 262501 - DNA, 25 bp, Artificial
  Probe
tcagtgagcctgtgggccactgtgc

SEQ ID NO: 262502 - DNA, 25 bp, Artificial
  Probe
ggagactgttcgtaaccatgtccaa

SEQ ID NO: 262503 - DNA, 25 bp, Artificial
  Probe
ttcgtaaccatgtccaacaacatgg

SEQ ID NO: 262504 - DNA, 25 bp, Artificial
  Probe
agactgttcgtaaccatgtccaaca

SEQ ID NO: 262505 - DNA, 25 bp, Artificial
  Probe
tgggccactgtgcatggcatcggac

SEQ ID NO: 262506 - DNA, 25 bp, Artificial
  Probe
agaggaactacctggagactgttcg

SEQ ID NO: 262507 - DNA, 25 bp, Artificial
  Probe
catggcatcggacctgagagaggaa

SEQ ID NO: 262508 - DNA, 25 bp, Artificial
  Probe
actacctggagactgttcgtaacca

SEQ ID NO: 262509 - DNA, 25 bp, Artificial
  Probe
ctaaccatgtgacactttgagttta

SEQ ID NO: 262510 - DNA, 25 bp, Artificial
  Probe
tgatgtgtggctaaccatgtgacac

SEQ ID NO: 262511 - DNA, 25 bp, Artificial
  Probe
tggctaaccatgtgacactttgagt

SEQ ID NO: 262512 - DNA, 25 bp, Artificial
  Probe
actgtgcatggcatcggacctgaga

SEQ ID NO: 262513 - DNA, 25 bp, Artificial
  Probe
cactttgagtttatcagtgagcctg

SEQ ID NO: 262514 - DNA, 25 bp, Artificial
  Probe
agagaggaactacctggagactgtt

SEQ ID NO: 262515 - DNA, 25 bp, Artificial
  Probe
ctgtgcatggcatcggacctgagag

SEQ ID NO: 262516 - DNA, 25 bp, Artificial
  Probe
gcctgtgggccactgtgcatggcat

SEQ ID NO: 262517 - DNA, 25 bp, Artificial
  Probe
ggcatcggacctgagagaggaacta

SEQ ID NO: 262518 - DNA, 25 bp, Artificial
  Probe
taaccatgtgacactttgagtttat

SEQ ID NO: 262519 - DNA, 25 bp, Artificial
  Probe
gaactacctggagactgttcgtaac

SEQ ID NO: 262520 - DNA, 25 bp, Artificial
  Probe
ctgtgggccactgtgcatggcatcg

SEQ ID NO: 262521 - DNA, 25 bp, Artificial
  Probe
agtttatcagtgagcctgtgggcca

SEQ ID NO: 262522 - DNA, 25 bp, Artificial
  Probe
gtgtggctaaccatgtgacactttg

SEQ ID NO: 262523 - DNA, 25 bp, Artificial
  Probe
acactttgagtttatcagtgagcct

SEQ ID NO: 262524 - DNA, 25 bp, Artificial
  Probe
ctacctggagactgttcgtaaccat

SEQ ID NO: 262525 - DNA, 25 bp, Artificial
  Probe
atcggacctgagagaggaactacct

SEQ ID NO: 262526 - DNA, 25 bp, Artificial
  Probe
agcctgtgggccactgtgcatggca

SEQ ID NO: 262527 - DNA, 25 bp, Artificial
  Probe
ggccactgtgcatggcatcggacct

SEQ ID NO: 262528 - DNA, 25 bp, Artificial
  Probe
actttgagtttatcagtgagcctgt

SEQ ID NO: 262529 - DNA, 25 bp, Artificial
  Probe
ccatgtgacactttgagtttatcag

SEQ ID NO: 262530 - DNA, 25 bp, Artificial
  Probe
gactgttcgtaaccatgtccaacaa

SEQ ID NO: 262531 - DNA, 25 bp, Artificial
  Probe
ctggagactgttcgtaaccatgtcc

SEQ ID NO: 262532 - DNA, 25 bp, Artificial
  Probe
gtggctaaccatgtgacactttgag

SEQ ID NO: 262533 - DNA, 25 bp, Artificial
  Probe
gttcgtaaccatgtccaacaacatg

SEQ ID NO: 262534 - DNA, 25 bp, Artificial
  Probe
catgtgacactttgagtttatcagt

SEQ ID NO: 262535 - DNA, 25 bp, Artificial
  Probe
aaccatgtgacactttgagtttatc

SEQ ID NO: 262536 - DNA, 25 bp, Artificial
  Probe
gatgtgtggctaaccatgtgacact

SEQ ID NO: 262537 - DNA, 25 bp, Artificial
  Probe
tgacactttgagtttatcagtgagc

SEQ ID NO: 262538 - DNA, 25 bp, Artificial
  Probe
acctggagactgttcgtaaccatgt

SEQ ID NO: 262539 - DNA, 25 bp, Artificial
  Probe
atggcatcggacctgagagaggaac

SEQ ID NO: 262540 - DNA, 25 bp, Artificial
  Probe
tggcatcggacctgagagaggaact

SEQ ID NO: 262541 - DNA, 25 bp, Artificial
  Probe
cagaccgagcaagtggagtagctga

SEQ ID NO: 262542 - DNA, 25 bp, Artificial
  Probe
tggaaccattcagttttacaccacg

SEQ ID NO: 262543 - DNA, 25 bp, Artificial
  Probe
ggatatgatccatacgccaatcccc

SEQ ID NO: 262544 - DNA, 25 bp, Artificial
  Probe
ttcccacgagtgagggacaactgct

SEQ ID NO: 262545 - DNA, 25 bp, Artificial
  Probe
tgccaaactgggatatgatccatac

SEQ ID NO: 262546 - DNA, 25 bp, Artificial
  Probe
accaagtcatcaagcccgtcaatgt

SEQ ID NO: 262547 - DNA, 25 bp, Artificial
  Probe
cttacaccctgaacggtggatgagg

SEQ ID NO: 262548 - DNA, 25 bp, Artificial
  Probe
ctgaacggtggatgaggacgctctt

SEQ ID NO: 262549 - DNA, 25 bp, Artificial
  Probe
gaagatacccccagatgtcttacaa

SEQ ID NO: 262550 - DNA, 25 bp, Artificial
  Probe
accacgaagagatgatcgggaaagc

SEQ ID NO: 262551 - DNA, 25 bp, Artificial
  Probe
gtgatcgcgcccatgcttgccaaac

SEQ ID NO: 262552 - DNA, 25 bp, Artificial
  Probe
caaccagtgtatggaagttggctat

SEQ ID NO: 262553 - DNA, 25 bp, Artificial
  Probe
cgtaacttcccacgagtgagggaca

SEQ ID NO: 262554 - DNA, 25 bp, Artificial
  Probe
tgttggtccactatgaacagctggt

SEQ ID NO: 262555 - DNA, 25 bp, Artificial
  Probe
ggggcgtttctctgtcaaaagtgga

SEQ ID NO: 262556 - DNA, 25 bp, Artificial
  Probe
ccattcagttttacaccacgaagag

SEQ ID NO: 262557 - DNA, 25 bp, Artificial
  Probe
aggagagtttcagctacctgacttt

SEQ ID NO: 262558 - DNA, 25 bp, Artificial
  Probe
cagctacctgactttctgaaagaaa

SEQ ID NO: 262559 - DNA, 25 bp, Artificial
  Probe
aaccccagaccgagcaagtggagta

SEQ ID NO: 262560 - DNA, 25 bp, Artificial
  Probe
acaccaggagggtccataaaggaga

SEQ ID NO: 262561 - DNA, 25 bp, Artificial
  Probe
tggaaccgggccatagagaccatgt

SEQ ID NO: 262562 - DNA, 25 bp, Artificial
  Probe
gaaagatcaacagaccaagtcatca

SEQ ID NO: 262563 - DNA, 25 bp, Artificial
  Probe
acccccagatgtcttacaagacatg

SEQ ID NO: 262564 - DNA, 25 bp, Artificial
  Probe
gatgtcttacaagacatggcagtga

SEQ ID NO: 262565 - DNA, 25 bp, Artificial
  Probe
caccctgaacggtggatgaggacgc

SEQ ID NO: 262566 - DNA, 25 bp, Artificial
  Probe
tcttacaagacatggcagtgatcgc

SEQ ID NO: 262567 - DNA, 25 bp, Artificial
  Probe
agctggtcttacaccctgaacggtg

SEQ ID NO: 262568 - DNA, 25 bp, Artificial
  Probe
cgcgcccatgcttgccaaactggga

SEQ ID NO: 262569 - DNA, 25 bp, Artificial
  Probe
accaggagggtccataaaggagagt

SEQ ID NO: 262570 - DNA, 25 bp, Artificial
  Probe
gtggagtagctgagcccgtaacttc

SEQ ID NO: 262571 - DNA, 25 bp, Artificial
  Probe
ccccaagatccttgaaaacaccagg

SEQ ID NO: 262572 - DNA, 25 bp, Artificial
  Probe
tgaaaacaccaggagggtccataaa

SEQ ID NO: 262573 - DNA, 25 bp, Artificial
  Probe
tagctgagcccgtaacttcccacga

SEQ ID NO: 262574 - DNA, 25 bp, Artificial
  Probe
ggacgctcttaaagttcctccatat

SEQ ID NO: 262575 - DNA, 25 bp, Artificial
  Probe
cccatgcttgccaaactgggatatg

SEQ ID NO: 262576 - DNA, 25 bp, Artificial
  Probe
tgcttgccaaactgggatatgatcc

SEQ ID NO: 262577 - DNA, 25 bp, Artificial
  Probe
tgaccaagtggaaccgggccataga

SEQ ID NO: 262578 - DNA, 25 bp, Artificial
  Probe
gagcccgtaacttcccacgagtgag

SEQ ID NO: 262579 - DNA, 25 bp, Artificial
  Probe
ggatgaggacgctcttaaagttcct

SEQ ID NO: 262580 - DNA, 25 bp, Artificial
  Probe
ggaaccattcagttttacaccacga

SEQ ID NO: 262581 - DNA, 25 bp, Artificial
  Probe
ggtcttacaccctgaacggtggatg

SEQ ID NO: 262582 - DNA, 25 bp, Artificial
  Probe
acaagacatggcagtgatcgcgccc

SEQ ID NO: 262583 - DNA, 25 bp, Artificial
  Probe
aagtggagtagctgagcccgtaact

SEQ ID NO: 262584 - DNA, 25 bp, Artificial
  Probe
gacatggcagtgatcgcgcccatgc

SEQ ID NO: 262585 - DNA, 25 bp, Artificial
  Probe
gagggacaactgctgccctgtctac

SEQ ID NO: 262586 - DNA, 25 bp, Artificial
  Probe
tttctctgtcaaaagtggaaagatc

SEQ ID NO: 262587 - DNA, 25 bp, Artificial
  Probe
ctgaagaatcactgggcattaaacc

SEQ ID NO: 262588 - DNA, 25 bp, Artificial
  Probe
gcccattaggttactggacctaaag

SEQ ID NO: 262589 - DNA, 25 bp, Artificial
  Probe
ttgaaactgcccattaggttactgg

SEQ ID NO: 262590 - DNA, 25 bp, Artificial
  Probe
aaattaaggcagttacctctagagt

SEQ ID NO: 262591 - DNA, 25 bp, Artificial
  Probe
agatttctgtccatcagaaacgcac

SEQ ID NO: 262592 - DNA, 25 bp, Artificial
  Probe
agctgatcgggcatgctgatcgttc

SEQ ID NO: 262593 - DNA, 25 bp, Artificial
  Probe
aactgttagttaaccacgtgaagtg

SEQ ID NO: 262594 - DNA, 25 bp, Artificial
  Probe
atcttttacagtgattgcttgaaac

SEQ ID NO: 262595 - DNA, 25 bp, Artificial
  Probe
tccctagtagttaagagtgctaact

SEQ ID NO: 262596 - DNA, 25 bp, Artificial
  Probe
gaatcactgggcattaaacctttgg

SEQ ID NO: 262597 - DNA, 25 bp, Artificial
  Probe
agtccagctgggagctattttgcca

SEQ ID NO: 262598 - DNA, 25 bp, Artificial
  Probe
cgttcgttgggtgctgcagttattt

SEQ ID NO: 262599 - DNA, 25 bp, Artificial
  Probe
attgcttgaaactgcccattaggtt

SEQ ID NO: 262600 - DNA, 25 bp, Artificial
  Probe
ttccctagtagttaagagtgctaac

SEQ ID NO: 262601 - DNA, 25 bp, Artificial
  Probe
tagaattctgagctgatcgggcatg

SEQ ID NO: 262602 - DNA, 25 bp, Artificial
  Probe
ataacagatgtgtctttttagcact

SEQ ID NO: 262603 - DNA, 25 bp, Artificial
  Probe
cctgaagaatcactgggcattaaac

SEQ ID NO: 262604 - DNA, 25 bp, Artificial
  Probe
agctattttgccaacatgtcgcagc

SEQ ID NO: 262605 - DNA, 25 bp, Artificial
  Probe
cagaaacgcacaggaagcgtgggca

SEQ ID NO: 262606 - DNA, 25 bp, Artificial
  Probe
gtgccctcagtcagtacctgctctt

SEQ ID NO: 262607 - DNA, 25 bp, Artificial
  Probe
tagagcagatttctgtccatcagaa

SEQ ID NO: 262608 - DNA, 25 bp, Artificial
  Probe
ctagagtatttcagagctgtaatcc

SEQ ID NO: 262609 - DNA, 25 bp, Artificial
  Probe
cctacagaacgttttaagtgtcaca

SEQ ID NO: 262610 - DNA, 25 bp, Artificial
  Probe
agctgggagctattttgccaacatg

SEQ ID NO: 262611 - DNA, 25 bp, Artificial
  Probe
tccaggtgccctcagtcagtacctg

SEQ ID NO: 262612 - DNA, 25 bp, Artificial
  Probe
tggcggactctggttggaccctgcc

SEQ ID NO: 262613 - DNA, 25 bp, Artificial
  Probe
gtatttcagagctgtaatccatttc

SEQ ID NO: 262614 - DNA, 25 bp, Artificial
  Probe
tacacattagtgatgggctgatggc

SEQ ID NO: 262615 - DNA, 25 bp, Artificial
  Probe
aacgttttaagtgtcacacaagaat

SEQ ID NO: 262616 - DNA, 25 bp, Artificial
  Probe
tcttttcagtgatcttttacagtga

SEQ ID NO: 262617 - DNA, 25 bp, Artificial
  Probe
attctgagctgatcgggcatgctga

SEQ ID NO: 262618 - DNA, 25 bp, Artificial
  Probe
tttgccaacatgtcgcagcaatctg

SEQ ID NO: 262619 - DNA, 25 bp, Artificial
  Probe
atcgggcatgctgatcgttcgttgg

SEQ ID NO: 262620 - DNA, 25 bp, Artificial
  Probe
cgttttaagtgtcacacaagaatgg

SEQ ID NO: 262621 - DNA, 25 bp, Artificial
  Probe
cagtgatcttttacagtgattgctt

SEQ ID NO: 262622 - DNA, 25 bp, Artificial
  Probe
ggacttgaaattcttttcagtgatc

SEQ ID NO: 262623 - DNA, 25 bp, Artificial
  Probe
gatgtgtctttttagcacttgatac

SEQ ID NO: 262624 - DNA, 25 bp, Artificial
  Probe
acagtgattgcttgaaactgcccat

SEQ ID NO: 262625 - DNA, 25 bp, Artificial
  Probe
ctacagaacgttttaagtgtcacac

SEQ ID NO: 262626 - DNA, 25 bp, Artificial
  Probe
cctttggataacagatgtgtctttt

SEQ ID NO: 262627 - DNA, 25 bp, Artificial
  Probe
tctagtcagcactctgagaagccgg

SEQ ID NO: 262628 - DNA, 25 bp, Artificial
  Probe
ctgatcgttcgttgggtgctgcagt

SEQ ID NO: 262629 - DNA, 25 bp, Artificial
  Probe
ctgatggcggactctggttggaccc

SEQ ID NO: 262630 - DNA, 25 bp, Artificial
  Probe
gcatgctgatcgttcgttgggtgct

SEQ ID NO: 262631 - DNA, 25 bp, Artificial
  Probe
acgtgaagtgcctcatctgctcaga

SEQ ID NO: 262632 - DNA, 25 bp, Artificial
  Probe
acacattagtgatgggctgatggcg

SEQ ID NO: 262633 - DNA, 25 bp, Artificial
  Probe
ggttttgaccagaccattaacttga

SEQ ID NO: 262634 - DNA, 25 bp, Artificial
  Probe
tccgggcccagcagcatgacgtctg

SEQ ID NO: 262635 - DNA, 25 bp, Artificial
  Probe
tgccttggagaactacatcaaccga

SEQ ID NO: 262636 - DNA, 25 bp, Artificial
  Probe
cttctgatggcagaatgatcgtggg

SEQ ID NO: 262637 - DNA, 25 bp, Artificial
  Probe
cggtgttttgtctccttgttgctga

SEQ ID NO: 262638 - DNA, 25 bp, Artificial
  Probe
gggcccagcagcatgacgtctgcct

SEQ ID NO: 262639 - DNA, 25 bp, Artificial
  Probe
gattcctctcagattcccggaacct

SEQ ID NO: 262640 - DNA, 25 bp, Artificial
  Probe
gttttgaccagaccattaacttgat

SEQ ID NO: 262641 - DNA, 25 bp, Artificial
  Probe
gccacgagcgggtgttcagctcttc

SEQ ID NO: 262642 - DNA, 25 bp, Artificial
  Probe
cgaatctgtacgtgtttctagcggg

SEQ ID NO: 262643 - DNA, 25 bp, Artificial
  Probe
ttcttatgctcagagtgatgtctag

SEQ ID NO: 262644 - DNA, 25 bp, Artificial
  Probe
tgcagtaataacttctgatggcaga

SEQ ID NO: 262645 - DNA, 25 bp, Artificial
  Probe
cagcatgacgtctgccttggagaac

SEQ ID NO: 262646 - DNA, 25 bp, Artificial
  Probe
acttctgatggcagaatgatcgtgg

SEQ ID NO: 262647 - DNA, 25 bp, Artificial
  Probe
aggttttgaccagaccattaacttg

SEQ ID NO: 262648 - DNA, 25 bp, Artificial
  Probe
cacgagggcgaatctgtacgtgttt

SEQ ID NO: 262649 - DNA, 25 bp, Artificial
  Probe
agcgggtgttcagctcttctcaggg

SEQ ID NO: 262650 - DNA, 25 bp, Artificial
  Probe
attctgcactcgacttggggaacat

SEQ ID NO: 262651 - DNA, 25 bp, Artificial
  Probe
acttggggaacatccgagcagaacc

SEQ ID NO: 262652 - DNA, 25 bp, Artificial
  Probe
ctgcactcgacttggggaacatccg

SEQ ID NO: 262653 - DNA, 25 bp, Artificial
  Probe
agaactacatcaaccgaactgttgc

SEQ ID NO: 262654 - DNA, 25 bp, Artificial
  Probe
tacagagacttcttatgctcagagt

SEQ ID NO: 262655 - DNA, 25 bp, Artificial
  Probe
aatcctgtacagagacttcttatgc

SEQ ID NO: 262656 - DNA, 25 bp, Artificial
  Probe
ttggagaactacatcaaccgaactg

SEQ ID NO: 262657 - DNA, 25 bp, Artificial
  Probe
cgagggcgaatctgtacgtgtttct

SEQ ID NO: 262658 - DNA, 25 bp, Artificial
  Probe
ctgtacagagacttcttatgctcag

SEQ ID NO: 262659 - DNA, 25 bp, Artificial
  Probe
atggcagaatgatcgtgggaaccct

SEQ ID NO: 262660 - DNA, 25 bp, Artificial
  Probe
aatctgtacgtgtttctagcgggcg

SEQ ID NO: 262661 - DNA, 25 bp, Artificial
  Probe
cttatgctcagagtgatgtctagat

SEQ ID NO: 262662 - DNA, 25 bp, Artificial
  Probe
ctcgacttggggaacatccgagcag

SEQ ID NO: 262663 - DNA, 25 bp, Artificial
  Probe
aaccgaactgttgcagtaataactt

SEQ ID NO: 262664 - DNA, 25 bp, Artificial
  Probe
tcagctcttctcagggagtagaaca

SEQ ID NO: 262665 - DNA, 25 bp, Artificial
  Probe
cgggtgttcagctcttctcagggag

SEQ ID NO: 262666 - DNA, 25 bp, Artificial
  Probe
agcttagtgtgcaggagacgtctgt

SEQ ID NO: 262667 - DNA, 25 bp, Artificial
  Probe
accagaccattaacttgattctgga

SEQ ID NO: 262668 - DNA, 25 bp, Artificial
  Probe
tgatggcagaatgatcgtgggaacc

SEQ ID NO: 262669 - DNA, 25 bp, Artificial
  Probe
tcaaccgaactgttgcagtaataac

SEQ ID NO: 262670 - DNA, 25 bp, Artificial
  Probe
acatcaaccgaactgttgcagtaat

SEQ ID NO: 262671 - DNA, 25 bp, Artificial
  Probe
tgtctccttgttgctgattcctctc

SEQ ID NO: 262672 - DNA, 25 bp, Artificial
  Probe
tgaccagaccattaacttgattctg

SEQ ID NO: 262673 - DNA, 25 bp, Artificial
  Probe
ccgaactgttgcagtaataacttct

SEQ ID NO: 262674 - DNA, 25 bp, Artificial
  Probe
gacgtctgccttggagaactacatc

SEQ ID NO: 262675 - DNA, 25 bp, Artificial
  Probe
gttattgtaacttagacatgcaact

SEQ ID NO: 262676 - DNA, 25 bp, Artificial
  Probe
tgttgcagtaataacttctgatggc

SEQ ID NO: 262677 - DNA, 25 bp, Artificial
  Probe
cagtaataacttctgatggcagaat

SEQ ID NO: 262678 - DNA, 25 bp, Artificial
  Probe
ggcggtgttttgtctccttgttgct

SEQ ID NO: 262679 - DNA, 25 bp, Artificial
  Probe
ctgggctgcctgattcgcccatgct

SEQ ID NO: 262680 - DNA, 25 bp, Artificial
  Probe
ggaggctctcactgggctgcctgat

SEQ ID NO: 262681 - DNA, 25 bp, Artificial
  Probe
agctctgctgacctctctctagagt

SEQ ID NO: 262682 - DNA, 25 bp, Artificial
  Probe
ccggccgcaagcttattccctttag

SEQ ID NO: 262683 - DNA, 25 bp, Artificial
  Probe
gcccatgctctgcttttgctcattt

SEQ ID NO: 262684 - DNA, 25 bp, Artificial
  Probe
gctctgctgacctctctctagagtg

SEQ ID NO: 262685 - DNA, 25 bp, Artificial
  Probe
cgcccatgctctgcttttgctcatt

SEQ ID NO: 262686 - DNA, 25 bp, Artificial
  Probe
tctgctgacctctctctagagtgtt

SEQ ID NO: 262687 - DNA, 25 bp, Artificial
  Probe
acctctctctagagtgttgggattc

SEQ ID NO: 262688 - DNA, 25 bp, Artificial
  Probe
tgattcgcccatgctctgcttttgc

SEQ ID NO: 262689 - DNA, 25 bp, Artificial
  Probe
actgggctgcctgattcgcccatgc

SEQ ID NO: 262690 - DNA, 25 bp, Artificial
  Probe
ccctggagtaactcatggaatcatc

SEQ ID NO: 262691 - DNA, 25 bp, Artificial
  Probe
cctgattcgcccatgctctgctttt

SEQ ID NO: 262692 - DNA, 25 bp, Artificial
  Probe
tgctgacctctctctagagtgttgg

SEQ ID NO: 262693 - DNA, 25 bp, Artificial
  Probe
ctctctagagtgttgggattccctc

SEQ ID NO: 262694 - DNA, 25 bp, Artificial
  Probe
gccgcaagcttattccctttagtga

SEQ ID NO: 262695 - DNA, 25 bp, Artificial
  Probe
ctccctggagtaactcatggaatca

SEQ ID NO: 262696 - DNA, 25 bp, Artificial
  Probe
cggccgcaagcttattccctttagt

SEQ ID NO: 262697 - DNA, 25 bp, Artificial
  Probe
ctctgctgacctctctctagagtgt

SEQ ID NO: 262698 - DNA, 25 bp, Artificial
  Probe
tccctggagtaactcatggaatcat

SEQ ID NO: 262699 - DNA, 25 bp, Artificial
  Probe
tctctagagtgttgggattccctca

SEQ ID NO: 262700 - DNA, 25 bp, Artificial
  Probe
cctctctctagagtgttgggattcc

SEQ ID NO: 262701 - DNA, 25 bp, Artificial
  Probe
gattcgcccatgctctgcttttgct

SEQ ID NO: 262702 - DNA, 25 bp, Artificial
  Probe
gggctgcctgattcgcccatgctct

SEQ ID NO: 262703 - DNA, 25 bp, Artificial
  Probe
cctccctggagtaactcatggaatc

SEQ ID NO: 262704 - DNA, 25 bp, Artificial
  Probe
ctgctgacctctctctagagtgttg

SEQ ID NO: 262705 - DNA, 25 bp, Artificial
  Probe
ggccgcaagcttattccctttagtg

SEQ ID NO: 262706 - DNA, 25 bp, Artificial
  Probe
tcctccctggagtaactcatggaat

SEQ ID NO: 262707 - DNA, 25 bp, Artificial
  Probe
tgacctctctctagagtgttgggat

SEQ ID NO: 262708 - DNA, 25 bp, Artificial
  Probe
gacctctctctagagtgttgggatt

SEQ ID NO: 262709 - DNA, 25 bp, Artificial
  Probe
tctctctagagtgttgggattccct

SEQ ID NO: 262710 - DNA, 25 bp, Artificial
  Probe
ctctctctagagtgttgggattccc

SEQ ID NO: 262711 - DNA, 25 bp, Artificial
  Probe
gctgacctctctctagagtgttggg

SEQ ID NO: 262712 - DNA, 25 bp, Artificial
  Probe
ctgacctctctctagagtgttggga

SEQ ID NO: 262713 - DNA, 25 bp, Artificial
  Probe
cagctctgctgacctctctctagag

SEQ ID NO: 262714 - DNA, 25 bp, Artificial
  Probe
ctgattcgcccatgctctgcttttg

SEQ ID NO: 262715 - DNA, 25 bp, Artificial
  Probe
attcgcccatgctctgcttttgctc

SEQ ID NO: 262716 - DNA, 25 bp, Artificial
  Probe
tcgcccatgctctgcttttgctcat

SEQ ID NO: 262717 - DNA, 25 bp, Artificial
  Probe
tgggctgcctgattcgcccatgctc

SEQ ID NO: 262718 - DNA, 25 bp, Artificial
  Probe
ccgcaagcttattccctttagtgag

SEQ ID NO: 262719 - DNA, 25 bp, Artificial
  Probe
ttcgcccatgctctgcttttgctca

SEQ ID NO: 262720 - DNA, 25 bp, Artificial
  Probe
gtgcagcttgaatcttacggttgta

SEQ ID NO: 262721 - DNA, 25 bp, Artificial
  Probe
cggttgtagactttggcccagaagt

SEQ ID NO: 262722 - DNA, 25 bp, Artificial
  Probe
ttcagtgcagcttgaatcttacggt

SEQ ID NO: 262723 - DNA, 25 bp, Artificial
  Probe
acacgaggtgacaacctcagaagtg

SEQ ID NO: 262724 - DNA, 25 bp, Artificial
  Probe
ggaagggccagactttagatccttt

SEQ ID NO: 262725 - DNA, 25 bp, Artificial
  Probe
gaacctgctgtcgtaggcctttcag

SEQ ID NO: 262726 - DNA, 25 bp, Artificial
  Probe
gaatcttacggttgtagactttggc

SEQ ID NO: 262727 - DNA, 25 bp, Artificial
  Probe
tcgtaggcctttcagtgcagcttga

SEQ ID NO: 262728 - DNA, 25 bp, Artificial
  Probe
ggttataatacacgaggtgacaacc

SEQ ID NO: 262729 - DNA, 25 bp, Artificial
  Probe
acctgctgtcgtaggcctttcagtg

SEQ ID NO: 262730 - DNA, 25 bp, Artificial
  Probe
tcagtgcagcttgaatcttacggtt

SEQ ID NO: 262731 - DNA, 25 bp, Artificial
  Probe
gccagactttagatcctttggaacc

SEQ ID NO: 262732 - DNA, 25 bp, Artificial
  Probe
tgcactttgcagaagtctcaccttt

SEQ ID NO: 262733 - DNA, 25 bp, Artificial
  Probe
agggccagactttagatcctttgga

SEQ ID NO: 262734 - DNA, 25 bp, Artificial
  Probe
cttacggttgtagactttggcccag

SEQ ID NO: 262735 - DNA, 25 bp, Artificial
  Probe
tagatcctttggaacctgctgtcgt

SEQ ID NO: 262736 - DNA, 25 bp, Artificial
  Probe
tcctttggaacctgctgtcgtaggc

SEQ ID NO: 262737 - DNA, 25 bp, Artificial
  Probe
gatcctttggaacctgctgtcgtag

SEQ ID NO: 262738 - DNA, 25 bp, Artificial
  Probe
tagttggtccaccaggggaacgaga

SEQ ID NO: 262739 - DNA, 25 bp, Artificial
  Probe
gtgacaacctcagaagtgtaaagac

SEQ ID NO: 262740 - DNA, 25 bp, Artificial
  Probe
aagggccagactttagatcctttgg

SEQ ID NO: 262741 - DNA, 25 bp, Artificial
  Probe
ttggaacctgctgtcgtaggccttt

SEQ ID NO: 262742 - DNA, 25 bp, Artificial
  Probe
ataatacacgaggtgacaacctcag

SEQ ID NO: 262743 - DNA, 25 bp, Artificial
  Probe
gtaggcctttcagtgcagcttgaat

SEQ ID NO: 262744 - DNA, 25 bp, Artificial
  Probe
agcttgaatcttacggttgtagact

SEQ ID NO: 262745 - DNA, 25 bp, Artificial
  Probe
acgaggtgacaacctcagaagtgta

SEQ ID NO: 262746 - DNA, 25 bp, Artificial
  Probe
ggttgtagactttggcccagaagta

SEQ ID NO: 262747 - DNA, 25 bp, Artificial
  Probe
tcttacggttgtagactttggccca

SEQ ID NO: 262748 - DNA, 25 bp, Artificial
  Probe
gacaacctcagaagtgtaaagactg

SEQ ID NO: 262749 - DNA, 25 bp, Artificial
  Probe
ttataatacacgaggtgacaacctc

SEQ ID NO: 262750 - DNA, 25 bp, Artificial
  Probe
tttagatcctttggaacctgctgtc

SEQ ID NO: 262751 - DNA, 25 bp, Artificial
  Probe
agtgcagcttgaatcttacggttgt

SEQ ID NO: 262752 - DNA, 25 bp, Artificial
  Probe
actttagatcctttggaacctgctg

SEQ ID NO: 262753 - DNA, 25 bp, Artificial
  Probe
ctttgcagaagtctcaccttttccg

SEQ ID NO: 262754 - DNA, 25 bp, Artificial
  Probe
atacacgaggtgacaacctcagaag

SEQ ID NO: 262755 - DNA, 25 bp, Artificial
  Probe
cctttcagtgcagcttgaatcttac

SEQ ID NO: 262756 - DNA, 25 bp, Artificial
  Probe
gaggtgacaacctcagaagtgtaaa

SEQ ID NO: 262757 - DNA, 25 bp, Artificial
  Probe
aacctgctgtcgtaggcctttcagt

SEQ ID NO: 262758 - DNA, 25 bp, Artificial
  Probe
aggaagggccagactttagatcctt

SEQ ID NO: 262759 - DNA, 25 bp, Artificial
  Probe
gactttggcccagaagtaaagtttg

SEQ ID NO: 262760 - DNA, 25 bp, Artificial
  Probe
caacctcagaagtgtaaagactgaa

SEQ ID NO: 262761 - DNA, 25 bp, Artificial
  Probe
ggcctttcagtgcagcttgaatctt

SEQ ID NO: 262762 - DNA, 25 bp, Artificial
  Probe
ctgtcgtaggcctttcagtgcagct

SEQ ID NO: 262763 - DNA, 25 bp, Artificial
  Probe
cagactttagatcctttggaacctg

SEQ ID NO: 262764 - DNA, 25 bp, Artificial
  Probe
gcactttgcagaagtctcacctttt

SEQ ID NO: 262765 - DNA, 25 bp, Artificial
  Probe
gcagcttgaatcttacggttgtaga

SEQ ID NO: 262766 - DNA, 25 bp, Artificial
  Probe
tccaacaaaagcagtattagtagca

SEQ ID NO: 262767 - DNA, 25 bp, Artificial
  Probe
cagttgcagaactctaagctgtgtc

SEQ ID NO: 262768 - DNA, 25 bp, Artificial
  Probe
ttccagatccggagaagaacagata

SEQ ID NO: 262769 - DNA, 25 bp, Artificial
  Probe
ataatgcagttgcagaactctaagc

SEQ ID NO: 262770 - DNA, 25 bp, Artificial
  Probe
ttgtacattggactgctgtagttac

SEQ ID NO: 262771 - DNA, 25 bp, Artificial
  Probe
agatgggaagacctccgtctggatt

SEQ ID NO: 262772 - DNA, 25 bp, Artificial
  Probe
ctcagcaataatgcagttgcagaac

SEQ ID NO: 262773 - DNA, 25 bp, Artificial
  Probe
tccagatccggagaagaacagatat

SEQ ID NO: 262774 - DNA, 25 bp, Artificial
  Probe
tggggtccaaatctgggtccaacaa

SEQ ID NO: 262775 - DNA, 25 bp, Artificial
  Probe
ggaagacctccgtctggatttaatc

SEQ ID NO: 262776 - DNA, 25 bp, Artificial
  Probe
aatctgggtccaacaaaagcagtat

SEQ ID NO: 262777 - DNA, 25 bp, Artificial
  Probe
tgatccaaactcaggggactgaaag

SEQ ID NO: 262778 - DNA, 25 bp, Artificial
  Probe
taaacatctggctctggttatcttc

SEQ ID NO: 262779 - DNA, 25 bp, Artificial
  Probe
caaactcaggggactgaaagtggat

SEQ ID NO: 262780 - DNA, 25 bp, Artificial
  Probe
gatgctgttggctcgtgatccaaac

SEQ ID NO: 262781 - DNA, 25 bp, Artificial
  Probe
ttatcttcagggatgctgttggctc

SEQ ID NO: 262782 - DNA, 25 bp, Artificial
  Probe
ttgagtaaacatctggctctggtta

SEQ ID NO: 262783 - DNA, 25 bp, Artificial
  Probe
cccattgagtaaacatctggctctg

SEQ ID NO: 262784 - DNA, 25 bp, Artificial
  Probe
tgagtaaacatctggctctggttat

SEQ ID NO: 262785 - DNA, 25 bp, Artificial
  Probe
aacttgctgaatgatgactcccatt

SEQ ID NO: 262786 - DNA, 25 bp, Artificial
  Probe
cacagtgttcccaggcacaggttct

SEQ ID NO: 262787 - DNA, 25 bp, Artificial
  Probe
taatgcagttgcagaactctaagct

SEQ ID NO: 262788 - DNA, 25 bp, Artificial
  Probe
aacatctggctctggttatcttcag

SEQ ID NO: 262789 - DNA, 25 bp, Artificial
  Probe
tgctgttggctcgtgatccaaactc

SEQ ID NO: 262790 - DNA, 25 bp, Artificial
  Probe
cagggatgctgttggctcgtgatcc

SEQ ID NO: 262791 - DNA, 25 bp, Artificial
  Probe
ctggttatcttcagggatgctgttg

SEQ ID NO: 262792 - DNA, 25 bp, Artificial
  Probe
tagcaaatcaggagatgggaagacc

SEQ ID NO: 262793 - DNA, 25 bp, Artificial
  Probe
tgggcttaaagcttgggtttccata

SEQ ID NO: 262794 - DNA, 25 bp, Artificial
  Probe
tccaaatctgggtccaacaaaagca

SEQ ID NO: 262795 - DNA, 25 bp, Artificial
  Probe
gatgggaagacctccgtctggattt

SEQ ID NO: 262796 - DNA, 25 bp, Artificial
  Probe
agcaataatgcagttgcagaactct

SEQ ID NO: 262797 - DNA, 25 bp, Artificial
  Probe
tgcagttgcagaactctaagctgtg

SEQ ID NO: 262798 - DNA, 25 bp, Artificial
  Probe
gtgttcccaggcacaggttctcagc

SEQ ID NO: 262799 - DNA, 25 bp, Artificial
  Probe
ctgaatgatgactcccattgagtaa

SEQ ID NO: 262800 - DNA, 25 bp, Artificial
  Probe
actcaggggactgaaagtggatctg

SEQ ID NO: 262801 - DNA, 25 bp, Artificial
  Probe
ttgctgaatgatgactcccattgag

SEQ ID NO: 262802 - DNA, 25 bp, Artificial
  Probe
cgtctggatttaatcttggttgggc

SEQ ID NO: 262803 - DNA, 25 bp, Artificial
  Probe
cagcaataatgcagttgcagaactc

SEQ ID NO: 262804 - DNA, 25 bp, Artificial
  Probe
ttgggcttaaagcttgggtttccat

SEQ ID NO: 262805 - DNA, 25 bp, Artificial
  Probe
atgatgactcccattgagtaaacat

SEQ ID NO: 262806 - DNA, 25 bp, Artificial
  Probe
gaaacacagtgttcccaggcacagg

SEQ ID NO: 262807 - DNA, 25 bp, Artificial
  Probe
tttccatagtttatggtaagcagca

SEQ ID NO: 262808 - DNA, 25 bp, Artificial
  Probe
cgggaaacacagtgttcccaggcac

SEQ ID NO: 262809 - DNA, 25 bp, Artificial
  Probe
atggtaagcagcaacttgctgaatg

SEQ ID NO: 262810 - DNA, 25 bp, Artificial
  Probe
tgtgtcttccagatccggagaagaa

SEQ ID NO: 262811 - DNA, 25 bp, Artificial
  Probe
ttatggtaagcagcaacttgctgaa

SEQ ID NO: 262812 - DNA, 25 bp, Artificial
  Probe
caatccagaagagttgtcagtattg

SEQ ID NO: 262813 - DNA, 25 bp, Artificial
  Probe
tccctgagcatgctcaatggtatgt

SEQ ID NO: 262814 - DNA, 25 bp, Artificial
  Probe
gttcgtagactgtaaccctgccaag

SEQ ID NO: 262815 - DNA, 25 bp, Artificial
  Probe
gagtttcttccaaggcgcatgcaga

SEQ ID NO: 262816 - DNA, 25 bp, Artificial
  Probe
atctgtatccatcacagcattaggc

SEQ ID NO: 262817 - DNA, 25 bp, Artificial
  Probe
tgaactttgctaagatctcctggcc

SEQ ID NO: 262818 - DNA, 25 bp, Artificial
  Probe
gccttgtattatagctacttgtgca

SEQ ID NO: 262819 - DNA, 25 bp, Artificial
  Probe
tagctacttgtgcacttgtcctatg

SEQ ID NO: 262820 - DNA, 25 bp, Artificial
  Probe
tgcaatggtcaatccagaagagttg

SEQ ID NO: 262821 - DNA, 25 bp, Artificial
  Probe
caagggcaggcactgttttattcat

SEQ ID NO: 262822 - DNA, 25 bp, Artificial
  Probe
accacctgagtagtggtctcctctc

SEQ ID NO: 262823 - DNA, 25 bp, Artificial
  Probe
caaggcgcatgcagagaccacatcc

SEQ ID NO: 262824 - DNA, 25 bp, Artificial
  Probe
gtgcctttggccttgcagtttgcat

SEQ ID NO: 262825 - DNA, 25 bp, Artificial
  Probe
agggcaggcactgttttattcatct

SEQ ID NO: 262826 - DNA, 25 bp, Artificial
  Probe
cagcattaggcgtggtgcatagcac

SEQ ID NO: 262827 - DNA, 25 bp, Artificial
  Probe
ggcactgttttattcatctgtatcc

SEQ ID NO: 262828 - DNA, 25 bp, Artificial
  Probe
tgtaaccctgccaagggcaggcact

SEQ ID NO: 262829 - DNA, 25 bp, Artificial
  Probe
ctgccttgtattatagctacttgtg

SEQ ID NO: 262830 - DNA, 25 bp, Artificial
  Probe
ttctgccttgtattatagctacttg

SEQ ID NO: 262831 - DNA, 25 bp, Artificial
  Probe
tcgtagactgtaaccctgccaaggg

SEQ ID NO: 262832 - DNA, 25 bp, Artificial
  Probe
gcccacaaaaatgtgcctgtcttta

SEQ ID NO: 262833 - DNA, 25 bp, Artificial
  Probe
ggtatgtaactccagctcttcgtga

SEQ ID NO: 262834 - DNA, 25 bp, Artificial
  Probe
agactgtaaccctgccaagggcagg

SEQ ID NO: 262835 - DNA, 25 bp, Artificial
  Probe
catcacagcattaggcgtggtgcat

SEQ ID NO: 262836 - DNA, 25 bp, Artificial
  Probe
cgtgaactttgctaagatctcctgg

SEQ ID NO: 262837 - DNA, 25 bp, Artificial
  Probe
gtgcctgtctttatcctgacattac

SEQ ID NO: 262838 - DNA, 25 bp, Artificial
  Probe
atgctcaatggtatgtaactccagc

SEQ ID NO: 262839 - DNA, 25 bp, Artificial
  Probe
ttgtattatagctacttgtgcactt

SEQ ID NO: 262840 - DNA, 25 bp, Artificial
  Probe
gtattatagctacttgtgcacttgt

SEQ ID NO: 262841 - DNA, 25 bp, Artificial
  Probe
tctcctggcccacaaaaatgtgcct

SEQ ID NO: 262842 - DNA, 25 bp, Artificial
  Probe
cctggcccacaaaaatgtgcctgtc

SEQ ID NO: 262843 - DNA, 25 bp, Artificial
  Probe
acggcacttaccatattctgccttg

SEQ ID NO: 262844 - DNA, 25 bp, Artificial
  Probe
tatgtaactccagctcttcgtgaac

SEQ ID NO: 262845 - DNA, 25 bp, Artificial
  Probe
cctgccaagggcaggcactgtttta

SEQ ID NO: 262846 - DNA, 25 bp, Artificial
  Probe
gtaaccctgccaagggcaggcactg

SEQ ID NO: 262847 - DNA, 25 bp, Artificial
  Probe
ggcacttaccatattctgccttgta

SEQ ID NO: 262848 - DNA, 25 bp, Artificial
  Probe
tcaatggtatgtaactccagctctt

SEQ ID NO: 262849 - DNA, 25 bp, Artificial
  Probe
atggtatgtaactccagctcttcgt

SEQ ID NO: 262850 - DNA, 25 bp, Artificial
  Probe
atgtaactccagctcttcgtgaact

SEQ ID NO: 262851 - DNA, 25 bp, Artificial
  Probe
gctaagatctcctggcccacaaaaa

SEQ ID NO: 262852 - DNA, 25 bp, Artificial
  Probe
taactccagctcttcgtgaactttg

SEQ ID NO: 262853 - DNA, 25 bp, Artificial
  Probe
cctttggccttgcagtttgcatctt

SEQ ID NO: 262854 - DNA, 25 bp, Artificial
  Probe
atctcctggcccacaaaaatgtgcc

SEQ ID NO: 262855 - DNA, 25 bp, Artificial
  Probe
atcattcttgagtttcttccaaggc

SEQ ID NO: 262856 - DNA, 25 bp, Artificial
  Probe
aaatgtgcctgtctttatcctgaca

SEQ ID NO: 262857 - DNA, 25 bp, Artificial
  Probe
cttccaaggcgcatgcagagaccac

SEQ ID NO: 262858 - DNA, 25 bp, Artificial
  Probe
gcaaagctgcccagtgggaagctgc

SEQ ID NO: 262859 - DNA, 25 bp, Artificial
  Probe
ctgcctccctggacgcctttgtttt

SEQ ID NO: 262860 - DNA, 25 bp, Artificial
  Probe
agctgcaggcccaccttcgggggct

SEQ ID NO: 262861 - DNA, 25 bp, Artificial
  Probe
tgcaggcaaagctgcccagtgggaa

SEQ ID NO: 262862 - DNA, 25 bp, Artificial
  Probe
ccgggatgcaactgacgtgccaccg

SEQ ID NO: 262863 - DNA, 25 bp, Artificial
  Probe
ggggctgcagaacctctgtgtctac

SEQ ID NO: 262864 - DNA, 25 bp, Artificial
  Probe
caggccctgagaccgaggaggaacc

SEQ ID NO: 262865 - DNA, 25 bp, Artificial
  Probe
cccagtgggaagctgcaggcccacc

SEQ ID NO: 262866 - DNA, 25 bp, Artificial
  Probe
tgcccagtgggaagctgcaggccca

SEQ ID NO: 262867 - DNA, 25 bp, Artificial
  Probe
tgctgcaggcaaagctgcccagtgg

SEQ ID NO: 262868 - DNA, 25 bp, Artificial
  Probe
aaagctgcccagtgggaagctgcag

SEQ ID NO: 262869 - DNA, 25 bp, Artificial
  Probe
tgcctccctggacgcctttgttttt

SEQ ID NO: 262870 - DNA, 25 bp, Artificial
  Probe
actgacgtgccaccgcctccatgcc

SEQ ID NO: 262871 - DNA, 25 bp, Artificial
  Probe
gcagaacctctgtgtctactgcacc

SEQ ID NO: 262872 - DNA, 25 bp, Artificial
  Probe
ttggagatgcccctgcctccctgga

SEQ ID NO: 262873 - DNA, 25 bp, Artificial
  Probe
ggacgcctttgtttttagccatttg

SEQ ID NO: 262874 - DNA, 25 bp, Artificial
  Probe
tttccccgggatgcaactgacgtgc

SEQ ID NO: 262875 - DNA, 25 bp, Artificial
  Probe
ccagtgggaagctgcaggcccacct

SEQ ID NO: 262876 - DNA, 25 bp, Artificial
  Probe
cctgagaccgaggaggaaccatacc

SEQ ID NO: 262877 - DNA, 25 bp, Artificial
  Probe
gcccagtgggaagctgcaggcccac

SEQ ID NO: 262878 - DNA, 25 bp, Artificial
  Probe
ctgcccagtgggaagctgcaggccc

SEQ ID NO: 262879 - DNA, 25 bp, Artificial
  Probe
gtgtctactgcacccacatcctcaa

SEQ ID NO: 262880 - DNA, 25 bp, Artificial
  Probe
ttccccgggatgcaactgacgtgcc

SEQ ID NO: 262881 - DNA, 25 bp, Artificial
  Probe
gccctgagaccgaggaggaaccata

SEQ ID NO: 262882 - DNA, 25 bp, Artificial
  Probe
tcaacctctactttccccgggatgc

SEQ ID NO: 262883 - DNA, 25 bp, Artificial
  Probe
ggctgcagaacctctgtgtctactg

SEQ ID NO: 262884 - DNA, 25 bp, Artificial
  Probe
ccaccttcgggggctgcagaacctc

SEQ ID NO: 262885 - DNA, 25 bp, Artificial
  Probe
agaacctctgtgtctactgcaccca

SEQ ID NO: 262886 - DNA, 25 bp, Artificial
  Probe
tccccgggatgcaactgacgtgcca

SEQ ID NO: 262887 - DNA, 25 bp, Artificial
  Probe
tactttccccgggatgcaactgacg

SEQ ID NO: 262888 - DNA, 25 bp, Artificial
  Probe
cctggacgcctttgtttttagccat

SEQ ID NO: 262889 - DNA, 25 bp, Artificial
  Probe
caaagctgcccagtgggaagctgca

SEQ ID NO: 262890 - DNA, 25 bp, Artificial
  Probe
gggaagctgcaggcccaccttcggg

SEQ ID NO: 262891 - DNA, 25 bp, Artificial
  Probe
ctttccccgggatgcaactgacgtg

SEQ ID NO: 262892 - DNA, 25 bp, Artificial
  Probe
ccccgggatgcaactgacgtgccac

SEQ ID NO: 262893 - DNA, 25 bp, Artificial
  Probe
ctgcagaacctctgtgtctactgca

SEQ ID NO: 262894 - DNA, 25 bp, Artificial
  Probe
cgggggctgcagaacctctgtgtct

SEQ ID NO: 262895 - DNA, 25 bp, Artificial
  Probe
ctgcaggcaaagctgcccagtggga

SEQ ID NO: 262896 - DNA, 25 bp, Artificial
  Probe
gggctgcagaacctctgtgtctact

SEQ ID NO: 262897 - DNA, 25 bp, Artificial
  Probe
cagtgggaagctgcaggcccacctt

SEQ ID NO: 262898 - DNA, 25 bp, Artificial
  Probe
gctgcagaacctctgtgtctactgc

SEQ ID NO: 262899 - DNA, 25 bp, Artificial
  Probe
actttccccgggatgcaactgacgt

SEQ ID NO: 262900 - DNA, 25 bp, Artificial
  Probe
ctgctgcaggcaaagctgcccagtg

SEQ ID NO: 262901 - DNA, 25 bp, Artificial
  Probe
gctgcaggcaaagctgcccagtggg

SEQ ID NO: 262902 - DNA, 25 bp, Artificial
  Probe
ccctgagaccgaggaggaaccatac

SEQ ID NO: 262903 - DNA, 25 bp, Artificial
  Probe
agtgggaagctgcaggcccaccttc

SEQ ID NO: 262904 - DNA, 25 bp, Artificial
  Probe
ccaggccatatgtgcgatggacgat

SEQ ID NO: 262905 - DNA, 25 bp, Artificial
  Probe
atggcataaagtcactgccaagaag

SEQ ID NO: 262906 - DNA, 25 bp, Artificial
  Probe
tggcggtttcccagatggcctcaat

SEQ ID NO: 262907 - DNA, 25 bp, Artificial
  Probe
caggcaagccgctggaggttaattt

SEQ ID NO: 262908 - DNA, 25 bp, Artificial
  Probe
gcctccacatcagcagatacaaacg

SEQ ID NO: 262909 - DNA, 25 bp, Artificial
  Probe
tgcggtctacgatgctgggagccca

SEQ ID NO: 262910 - DNA, 25 bp, Artificial
  Probe
tccgaggctgcatccgatctctgaa

SEQ ID NO: 262911 - DNA, 25 bp, Artificial
  Probe
ccaacgttaggttccgaggctgcat

SEQ ID NO: 262912 - DNA, 25 bp, Artificial
  Probe
aggcaagccgctggaggttaatttt

SEQ ID NO: 262913 - DNA, 25 bp, Artificial
  Probe
gaaccaggtggatgcccagagccca

SEQ ID NO: 262914 - DNA, 25 bp, Artificial
  Probe
gagcccaggccatatgtgcgatgga

SEQ ID NO: 262915 - DNA, 25 bp, Artificial
  Probe
gcataaagtcactgccaagaagatc

SEQ ID NO: 262916 - DNA, 25 bp, Artificial
  Probe
ttttgttggcggtttcccagatggc

SEQ ID NO: 262917 - DNA, 25 bp, Artificial
  Probe
ggaaccaggtggatgcccagagccc

SEQ ID NO: 262918 - DNA, 25 bp, Artificial
  Probe
tcagtttggcctgaccaccaacgtt

SEQ ID NO: 262919 - DNA, 25 bp, Artificial
  Probe
ttcaatccggagaagaattcaccaa

SEQ ID NO: 262920 - DNA, 25 bp, Artificial
  Probe
gaagaattcaccaagacaagtatat

SEQ ID NO: 262921 - DNA, 25 bp, Artificial
  Probe
aaacccgccttgagctggtggtaga

SEQ ID NO: 262922 - DNA, 25 bp, Artificial
  Probe
gtgcgatggacgatggcataaagtc

SEQ ID NO: 262923 - DNA, 25 bp, Artificial
  Probe
tcaccaaagggacaggcaagccgct

SEQ ID NO: 262924 - DNA, 25 bp, Artificial
  Probe
cggtttcccagatggcctcaatcag

SEQ ID NO: 262925 - DNA, 25 bp, Artificial
  Probe
tcccagatggcctcaatcagtttgg

SEQ ID NO: 262926 - DNA, 25 bp, Artificial
  Probe
acatcagcagatacaaacgaccctg

SEQ ID NO: 262927 - DNA, 25 bp, Artificial
  Probe
tgctgggagcccaggccatatgtgc

SEQ ID NO: 262928 - DNA, 25 bp, Artificial
  Probe
acccgccttgagctggtggtagatg

SEQ ID NO: 262929 - DNA, 25 bp, Artificial
  Probe
gattcactgcggtctacgatgctgg

SEQ ID NO: 262930 - DNA, 25 bp, Artificial
  Probe
tacgatgctgggagcccaggccata

SEQ ID NO: 262931 - DNA, 25 bp, Artificial
  Probe
tagatgggaaccaggtggatgccca

SEQ ID NO: 262932 - DNA, 25 bp, Artificial
  Probe
catatgtgcgatggacgatggcata

SEQ ID NO: 262933 - DNA, 25 bp, Artificial
  Probe
cactgccaagaagatcaaaaacccg

SEQ ID NO: 262934 - DNA, 25 bp, Artificial
  Probe
gaagctcaccaaagggacaggcaag

SEQ ID NO: 262935 - DNA, 25 bp, Artificial
  Probe
aggttccgaggctgcatccgatctc

SEQ ID NO: 262936 - DNA, 25 bp, Artificial
  Probe
tgcagcctccacatcagcagataca

SEQ ID NO: 262937 - DNA, 25 bp, Artificial
  Probe
cagatacaaacgaccctgtttttgt

SEQ ID NO: 262938 - DNA, 25 bp, Artificial
  Probe
gcctcaatcagtttggcctgaccac

SEQ ID NO: 262939 - DNA, 25 bp, Artificial
  Probe
ctcaccaaagggacaggcaagccgc

SEQ ID NO: 262940 - DNA, 25 bp, Artificial
  Probe
cgttaggttccgaggctgcatccga

SEQ ID NO: 262941 - DNA, 25 bp, Artificial
  Probe
agaagatcaaaaacccgccttgagc

SEQ ID NO: 262942 - DNA, 25 bp, Artificial
  Probe
aggctgcatccgatctctgaagctc

SEQ ID NO: 262943 - DNA, 25 bp, Artificial
  Probe
gccatatgtgcgatggacgatggca

SEQ ID NO: 262944 - DNA, 25 bp, Artificial
  Probe
gtcactgccaagaagatcaaaaacc

SEQ ID NO: 262945 - DNA, 25 bp, Artificial
  Probe
ttgttggcggtttcccagatggcct

SEQ ID NO: 262946 - DNA, 25 bp, Artificial
  Probe
agttcaatccggagaagaattcacc

SEQ ID NO: 262947 - DNA, 25 bp, Artificial
  Probe
gtggatgcccagagcccaaatgcag

SEQ ID NO: 262948 - DNA, 25 bp, Artificial
  Probe
cgagggattcactgcggtctacgat

SEQ ID NO: 262949 - DNA, 25 bp, Artificial
  Probe
aggtggatgcccagagcccaaatgc

SEQ ID NO: 262950 - DNA, 25 bp, Artificial
  Probe
tgattccaaggcaagagacgggagt

SEQ ID NO: 262951 - DNA, 25 bp, Artificial
  Probe
acttgggatcccagtggtacatgac

SEQ ID NO: 262952 - DNA, 25 bp, Artificial
  Probe
tgcccttgagaaatagcagcatccc

SEQ ID NO: 262953 - DNA, 25 bp, Artificial
  Probe
ccaagaacaatatctgtacaaaggg

SEQ ID NO: 262954 - DNA, 25 bp, Artificial
  Probe
attgctacagtctctaatggggctg

SEQ ID NO: 262955 - DNA, 25 bp, Artificial
  Probe
gtgggtctagcagtacttgggatcc

SEQ ID NO: 262956 - DNA, 25 bp, Artificial
  Probe
tccaaggcaagagacgggagtaaga

SEQ ID NO: 262957 - DNA, 25 bp, Artificial
  Probe
gtttctgcagaagaggagtaactac

SEQ ID NO: 262958 - DNA, 25 bp, Artificial
  Probe
agagattgctacagtctctaatggg

SEQ ID NO: 262959 - DNA, 25 bp, Artificial
  Probe
tactccgggtaccttgatatttgta

SEQ ID NO: 262960 - DNA, 25 bp, Artificial
  Probe
tttctgcagaagaggagtaactact

SEQ ID NO: 262961 - DNA, 25 bp, Artificial
  Probe
agcagcatcccaagaacaatatctg

SEQ ID NO: 262962 - DNA, 25 bp, Artificial
  Probe
cgtcagtgtcgtactgtatgtgatg

SEQ ID NO: 262963 - DNA, 25 bp, Artificial
  Probe
tgatatttgtacagcctagagacca

SEQ ID NO: 262964 - DNA, 25 bp, Artificial
  Probe
tctagcagtacttgggatcccagtg

SEQ ID NO: 262965 - DNA, 25 bp, Artificial
  Probe
taaagagcacagcaactgtagtgag

SEQ ID NO: 262966 - DNA, 25 bp, Artificial
  Probe
gcagcatcccaagaacaatatctgt

SEQ ID NO: 262967 - DNA, 25 bp, Artificial
  Probe
gaagaccccgaattccgttctcata

SEQ ID NO: 262968 - DNA, 25 bp, Artificial
  Probe
ctgtagtgagccaacagctattttg

SEQ ID NO: 262969 - DNA, 25 bp, Artificial
  Probe
cagtacttgggatcccagtggtaca

SEQ ID NO: 262970 - DNA, 25 bp, Artificial
  Probe
gggcccatttctcaagattaatatc

SEQ ID NO: 262971 - DNA, 25 bp, Artificial
  Probe
gagaaatagcagcatcccaagaaca

SEQ ID NO: 262972 - DNA, 25 bp, Artificial
  Probe
agagaccaacactgcgggcgtgtga

SEQ ID NO: 262973 - DNA, 25 bp, Artificial
  Probe
aagagcacagcaactgtagtgagcc

SEQ ID NO: 262974 - DNA, 25 bp, Artificial
  Probe
ggtaccttgatatttgtacagccta

SEQ ID NO: 262975 - DNA, 25 bp, Artificial
  Probe
ctccgggtaccttgatatttgtaca

SEQ ID NO: 262976 - DNA, 25 bp, Artificial
  Probe
atttcttcctgattccaaggcaaga

SEQ ID NO: 262977 - DNA, 25 bp, Artificial
  Probe
tgggatcccagtggtacatgaccct

SEQ ID NO: 262978 - DNA, 25 bp, Artificial
  Probe
gcagtacttgggatcccagtggtac

SEQ ID NO: 262979 - DNA, 25 bp, Artificial
  Probe
cagcactttccgtcagtgtcgtact

SEQ ID NO: 262980 - DNA, 25 bp, Artificial
  Probe
actactccgggtaccttgatatttg

SEQ ID NO: 262981 - DNA, 25 bp, Artificial
  Probe
gcactttccgtcagtgtcgtactgt

SEQ ID NO: 262982 - DNA, 25 bp, Artificial
  Probe
gatctaaggaagaccccgaattccg

SEQ ID NO: 262983 - DNA, 25 bp, Artificial
  Probe
tcttcctgattccaaggcaagagac

SEQ ID NO: 262984 - DNA, 25 bp, Artificial
  Probe
gaaatagcagcatcccaagaacaat

SEQ ID NO: 262985 - DNA, 25 bp, Artificial
  Probe
atttgtacagcctagagaccaacac

SEQ ID NO: 262986 - DNA, 25 bp, Artificial
  Probe
ggaagaccccgaattccgttctcat

SEQ ID NO: 262987 - DNA, 25 bp, Artificial
  Probe
cagtgtcgtactgtatgtgatgaac

SEQ ID NO: 262988 - DNA, 25 bp, Artificial
  Probe
cccaagaacaatatctgtacaaagg

SEQ ID NO: 262989 - DNA, 25 bp, Artificial
  Probe
ttcctgattccaaggcaagagacgg

SEQ ID NO: 262990 - DNA, 25 bp, Artificial
  Probe
tttcttcctgattccaaggcaagag

SEQ ID NO: 262991 - DNA, 25 bp, Artificial
  Probe
cgggtaccttgatatttgtacagcc

SEQ ID NO: 262992 - DNA, 25 bp, Artificial
  Probe
gcaactgtagtgagccaacagctat

SEQ ID NO: 262993 - DNA, 25 bp, Artificial
  Probe
cctgcccttgagaaatagcagcatc

SEQ ID NO: 262994 - DNA, 25 bp, Artificial
  Probe
acactgcgggcgtgtgactctttat

SEQ ID NO: 262995 - DNA, 25 bp, Artificial
  Probe
caacagctattttggccttttgggt

SEQ ID NO: 262996 - DNA, 25 bp, Artificial
  Probe
gctgacccattcttgaagtatcttc

SEQ ID NO: 262997 - DNA, 25 bp, Artificial
  Probe
gaaagtcctggcattcgatctgacc

SEQ ID NO: 262998 - DNA, 25 bp, Artificial
  Probe
aatttggccaagtatgttgcagaac

SEQ ID NO: 262999 - DNA, 25 bp, Artificial
  Probe
ctggcttcgaaatacgaagagatat

SEQ ID NO: 263000 - DNA, 25 bp, Artificial
  Probe
atgagtttgtctacatcaccaacga

SEQ ID NO: 263001 - DNA, 25 bp, Artificial
  Probe
aattgcagcttgtcgggacagcagc

SEQ ID NO: 263002 - DNA, 25 bp, Artificial
  Probe
tgaggatggagcatctgctgctgaa

SEQ ID NO: 263003 - DNA, 25 bp, Artificial
  Probe
gcccgtagttcttcccctgcagtga

SEQ ID NO: 263004 - DNA, 25 bp, Artificial
  Probe
cctgttacagttttctgcgggtcgg

SEQ ID NO: 263005 - DNA, 25 bp, Artificial
  Probe
gaacgggtcagctcaacagccacac

SEQ ID NO: 263006 - DNA, 25 bp, Artificial
  Probe
ccgcccgatgtcgatgagtttgtct

SEQ ID NO: 263007 - DNA, 25 bp, Artificial
  Probe
acacgtacacaaagcgacagctact

SEQ ID NO: 263008 - DNA, 25 bp, Artificial
  Probe
tgtgcatcaggactgagaatttggc

SEQ ID NO: 263009 - DNA, 25 bp, Artificial
  Probe
ggtcgggccaactaatgtcagttgt

SEQ ID NO: 263010 - DNA, 25 bp, Artificial
  Probe
gtgtccctcatggagccgcccgtag

SEQ ID NO: 263011 - DNA, 25 bp, Artificial
  Probe
tacctgcacgtgtccctcatggagc

SEQ ID NO: 263012 - DNA, 25 bp, Artificial
  Probe
tcaccaacgacacgtacacaaagcg

SEQ ID NO: 263013 - DNA, 25 bp, Artificial
  Probe
cccctgcagtgaacgggtcagctca

SEQ ID NO: 263014 - DNA, 25 bp, Artificial
  Probe
tggccaagtatgttgcagaactgag

SEQ ID NO: 263015 - DNA, 25 bp, Artificial
  Probe
agccacaccagcaggcttactctga

SEQ ID NO: 263016 - DNA, 25 bp, Artificial
  Probe
gtctggcaaactatattgtgaacag

SEQ ID NO: 263017 - DNA, 25 bp, Artificial
  Probe
tagttcttcccctgcagtgaacggg

SEQ ID NO: 263018 - DNA, 25 bp, Artificial
  Probe
gcttgtcgggacagcagctattctc

SEQ ID NO: 263019 - DNA, 25 bp, Artificial
  Probe
gcattcgatctgaccgttccaacca

SEQ ID NO: 263020 - DNA, 25 bp, Artificial
  Probe
agctactgaggatggagcatctgct

SEQ ID NO: 263021 - DNA, 25 bp, Artificial
  Probe
cagaactgagccttctggaagctga

SEQ ID NO: 263022 - DNA, 25 bp, Artificial
  Probe
ctaatgtcagttgtagatgtcacct

SEQ ID NO: 263023 - DNA, 25 bp, Artificial
  Probe
ccagttcctccttcagtacttaagg

SEQ ID NO: 263024 - DNA, 25 bp, Artificial
  Probe
cagcagcagcttactgtctggcaaa

SEQ ID NO: 263025 - DNA, 25 bp, Artificial
  Probe
atattgtgaacagacacttctgggt

SEQ ID NO: 263026 - DNA, 25 bp, Artificial
  Probe
cagcttactgtctggcaaactatat

SEQ ID NO: 263027 - DNA, 25 bp, Artificial
  Probe
gtttgtctacatcaccaacgacacg

SEQ ID NO: 263028 - DNA, 25 bp, Artificial
  Probe
tcagttgtagatgtcaccttcaaca

SEQ ID NO: 263029 - DNA, 25 bp, Artificial
  Probe
aacagacacttctgggtacctgcac

SEQ ID NO: 263030 - DNA, 25 bp, Artificial
  Probe
gcagtgaacgggtcagctcaacagc

SEQ ID NO: 263031 - DNA, 25 bp, Artificial
  Probe
tgctgaaagtcctggcattcgatct

SEQ ID NO: 263032 - DNA, 25 bp, Artificial
  Probe
ttctggaagctgacccattcttgaa

SEQ ID NO: 263033 - DNA, 25 bp, Artificial
  Probe
tgtccctcatggagccgcccgtagt

SEQ ID NO: 263034 - DNA, 25 bp, Artificial
  Probe
catcaggactgagaatttggccaag

SEQ ID NO: 263035 - DNA, 25 bp, Artificial
  Probe
tgctgctgaaagtcctggcattcga

SEQ ID NO: 263036 - DNA, 25 bp, Artificial
  Probe
aagtatgttgcagaactgagccttc

SEQ ID NO: 263037 - DNA, 25 bp, Artificial
  Probe
tgtcgatgagtttgtctacatcacc

SEQ ID NO: 263038 - DNA, 25 bp, Artificial
  Probe
cttcagtacttaaggcggcaagggg

SEQ ID NO: 263039 - DNA, 25 bp, Artificial
  Probe
ttcttgaagtatcttccttccttgg

SEQ ID NO: 263040 - DNA, 25 bp, Artificial
  Probe
tggtagcagcagcagcttactgtct

SEQ ID NO: 263041 - DNA, 25 bp, Artificial
  Probe
tattctcctggcttcgaaatacgaa

SEQ ID NO: 263042 - DNA, 25 bp, Artificial
  Probe
atatggttcagtgactgtatggcgc

SEQ ID NO: 263043 - DNA, 25 bp, Artificial
  Probe
ctgtgtgcatggaggtctttcccct

SEQ ID NO: 263044 - DNA, 25 bp, Artificial
  Probe
ctgagatctttgactacctcagcct

SEQ ID NO: 263045 - DNA, 25 bp, Artificial
  Probe
attgatatgatctgccgtgcccacc

SEQ ID NO: 263046 - DNA, 25 bp, Artificial
  Probe
tgcccaccaattggtgatggaaggt

SEQ ID NO: 263047 - DNA, 25 bp, Artificial
  Probe
tacccaggtctatgggttctatgat

SEQ ID NO: 263048 - DNA, 25 bp, Artificial
  Probe
atcctgaccgaatcactttgatccg

SEQ ID NO: 263049 - DNA, 25 bp, Artificial
  Probe
agtaggtggcgatgtccctgagacc

SEQ ID NO: 263050 - DNA, 25 bp, Artificial
  Probe
ccaccaattggtgatggaaggttac

SEQ ID NO: 263051 - DNA, 25 bp, Artificial
  Probe
tttgactacctcagcctgtctgcca

SEQ ID NO: 263052 - DNA, 25 bp, Artificial
  Probe
ccttctatccagaccttggaccaga

SEQ ID NO: 263053 - DNA, 25 bp, Artificial
  Probe
tctgccgtgcccaccaattggtgat

SEQ ID NO: 263054 - DNA, 25 bp, Artificial
  Probe
ttcagtgactgtatggcgctactgt

SEQ ID NO: 263055 - DNA, 25 bp, Artificial
  Probe
ctcaaggagctgttcagagtaggtg

SEQ ID NO: 263056 - DNA, 25 bp, Artificial
  Probe
tcctgtggtctgaccctgaagacac

SEQ ID NO: 263057 - DNA, 25 bp, Artificial
  Probe
atgtggtcgcccagttcaatgcagc

SEQ ID NO: 263058 - DNA, 25 bp, Artificial
  Probe
cctgtctgccatcattgatggcaag

SEQ ID NO: 263059 - DNA, 25 bp, Artificial
  Probe
aaagcaagaggtaccccatgatgga

SEQ ID NO: 263060 - DNA, 25 bp, Artificial
  Probe
gccaacgacattgatatgatctgcc

SEQ ID NO: 263061 - DNA, 25 bp, Artificial
  Probe
gaccagatccggacaattgaccgaa

SEQ ID NO: 263062 - DNA, 25 bp, Artificial
  Probe
tcttaaggttcgatatcctgaccga

SEQ ID NO: 263063 - DNA, 25 bp, Artificial
  Probe
gttcagagtaggtggcgatgtccct

SEQ ID NO: 263064 - DNA, 25 bp, Artificial
  Probe
tggcaagatcttctgtgtgcatgga

SEQ ID NO: 263065 - DNA, 25 bp, Artificial
  Probe
ttgaccgaaagcaagaggtacccca

SEQ ID NO: 263066 - DNA, 25 bp, Artificial
  Probe
gattacccaggtctatgggttctat

SEQ ID NO: 263067 - DNA, 25 bp, Artificial
  Probe
tggcgatgtccctgagaccaactac

SEQ ID NO: 263068 - DNA, 25 bp, Artificial
  Probe
gaccctgaagacacaacaggctggg

SEQ ID NO: 263069 - DNA, 25 bp, Artificial
  Probe
gcagtgatgtggtcgcccagttcaa

SEQ ID NO: 263070 - DNA, 25 bp, Artificial
  Probe
ccagttcaatgcagccaacgacatt

SEQ ID NO: 263071 - DNA, 25 bp, Artificial
  Probe
catggaggtctttccccttctatcc

SEQ ID NO: 263072 - DNA, 25 bp, Artificial
  Probe
gacattgatatgatctgccgtgccc

SEQ ID NO: 263073 - DNA, 25 bp, Artificial
  Probe
ttgatccggggcaatcatgagagtc

SEQ ID NO: 263074 - DNA, 25 bp, Artificial
  Probe
ccttggaccagatccggacaattga

SEQ ID NO: 263075 - DNA, 25 bp, Artificial
  Probe
gaatcactttgatccggggcaatca

SEQ ID NO: 263076 - DNA, 25 bp, Artificial
  Probe
tgatccggggcaatcatgagagtcg

SEQ ID NO: 263077 - DNA, 25 bp, Artificial
  Probe
cctcctgtggtctgaccctgaagac

SEQ ID NO: 263078 - DNA, 25 bp, Artificial
  Probe
gatgtccctgagaccaactacctct

SEQ ID NO: 263079 - DNA, 25 bp, Artificial
  Probe
atgatggacccatgtgtgacctcct

SEQ ID NO: 263080 - DNA, 25 bp, Artificial
  Probe
tacctcagcctgtctgccatcattg

SEQ ID NO: 263081 - DNA, 25 bp, Artificial
  Probe
ggcaggctacctgtttggcagtgat

SEQ ID NO: 263082 - DNA, 25 bp, Artificial
  Probe
cttcatgggagactttgtggaccgt

SEQ ID NO: 263083 - DNA, 25 bp, Artificial
  Probe
tatgatctgccgtgcccaccaattg

SEQ ID NO: 263084 - DNA, 25 bp, Artificial
  Probe
gttcgatatcctgaccgaatcactt

SEQ ID NO: 263085 - DNA, 25 bp, Artificial
  Probe
ctgttcagagtaggtggcgatgtcc

SEQ ID NO: 263086 - DNA, 25 bp, Artificial
  Probe
gttacaagtggcacttcaatgagac

SEQ ID NO: 263087 - DNA, 25 bp, Artificial
  Probe
ctgccatcattgatggcaagatctt

SEQ ID NO: 263088 - DNA, 25 bp, Artificial
  Probe
ccagagtgacttctataagaccaaa

SEQ ID NO: 263089 - DNA, 25 bp, Artificial
  Probe
taggctgtcagctcgcagaggcaga

SEQ ID NO: 263090 - DNA, 25 bp, Artificial
  Probe
tggagacctttccaggctggcttga

SEQ ID NO: 263091 - DNA, 25 bp, Artificial
  Probe
accacaggttcaggagaagactcac

SEQ ID NO: 263092 - DNA, 25 bp, Artificial
  Probe
cgaggcttttgactcaaggaagcgg

SEQ ID NO: 263093 - DNA, 25 bp, Artificial
  Probe
ggagacctttccaggctggcttgag

SEQ ID NO: 263094 - DNA, 25 bp, Artificial
  Probe
ggaaagccatgtatcggaaatacag

SEQ ID NO: 263095 - DNA, 25 bp, Artificial
  Probe
tcgcagaggcagaagcagcgatgta

SEQ ID NO: 263096 - DNA, 25 bp, Artificial
  Probe
attactccagagtgacttctataag

SEQ ID NO: 263097 - DNA, 25 bp, Artificial
  Probe
catcaccacaggttcaggagaagac

SEQ ID NO: 263098 - DNA, 25 bp, Artificial
  Probe
gtcagctcgcagaggcagaagcagc

SEQ ID NO: 263099 - DNA, 25 bp, Artificial
  Probe
gcctgccagcagagaggcaggctca

SEQ ID NO: 263100 - DNA, 25 bp, Artificial
  Probe
agccatctaccaaaacaggcggcct

SEQ ID NO: 263101 - DNA, 25 bp, Artificial
  Probe
ctgacgtcatttttaggctgtcagc

SEQ ID NO: 263102 - DNA, 25 bp, Artificial
  Probe
tccccaatctgacgtcatttttagg

SEQ ID NO: 263103 - DNA, 25 bp, Artificial
  Probe
caccacaggttcaggagaagactca

SEQ ID NO: 263104 - DNA, 25 bp, Artificial
  Probe
gtaactttttcatctgcttagtgat

SEQ ID NO: 263105 - DNA, 25 bp, Artificial
  Probe
caatctgacgtcatttttaggctgt

SEQ ID NO: 263106 - DNA, 25 bp, Artificial
  Probe
tcatttttaggctgtcagctcgcag

SEQ ID NO: 263107 - DNA, 25 bp, Artificial
  Probe
ccgccatcaccacaggttcaggaga

SEQ ID NO: 263108 - DNA, 25 bp, Artificial
  Probe
ccctagacaggctgtagatcgcaga

SEQ ID NO: 263109 - DNA, 25 bp, Artificial
  Probe
atgtaactttttcatctgcttagtg

SEQ ID NO: 263110 - DNA, 25 bp, Artificial
  Probe
cagagccaaggttagcttcacctca

SEQ ID NO: 263111 - DNA, 25 bp, Artificial
  Probe
gctgtagatcgcagagccaaggtta

SEQ ID NO: 263112 - DNA, 25 bp, Artificial
  Probe
ctgccagcagagaggcaggctcaga

SEQ ID NO: 263113 - DNA, 25 bp, Artificial
  Probe
atcgcagagccaaggttagcttcac

SEQ ID NO: 263114 - DNA, 25 bp, Artificial
  Probe
caataatgaggctgactggtgagcc

SEQ ID NO: 263115 - DNA, 25 bp, Artificial
  Probe
agagccgccatcaccacaggttcag

SEQ ID NO: 263116 - DNA, 25 bp, Artificial
  Probe
gaaagccatgtatcggaaatacagt

SEQ ID NO: 263117 - DNA, 25 bp, Artificial
  Probe
acctttccaggctggcttgagggga

SEQ ID NO: 263118 - DNA, 25 bp, Artificial
  Probe
gatcgcagagccaaggttagcttca

SEQ ID NO: 263119 - DNA, 25 bp, Artificial
  Probe
ttgactcaaggaagcggccatcctt

SEQ ID NO: 263120 - DNA, 25 bp, Artificial
  Probe
ctgtcagctcgcagaggcagaagca

SEQ ID NO: 263121 - DNA, 25 bp, Artificial
  Probe
gacgtcatttttaggctgtcagctc

SEQ ID NO: 263122 - DNA, 25 bp, Artificial
  Probe
agtgacttctataagaccaaaccgc

SEQ ID NO: 263123 - DNA, 25 bp, Artificial
  Probe
ctgtctgccattactccagagtgac

SEQ ID NO: 263124 - DNA, 25 bp, Artificial
  Probe
tgtagatcgcagagccaaggttagc

SEQ ID NO: 263125 - DNA, 25 bp, Artificial
  Probe
acaggctgtagatcgcagagccaag

SEQ ID NO: 263126 - DNA, 25 bp, Artificial
  Probe
gccatctaccaaaacaggcggcctg

SEQ ID NO: 263127 - DNA, 25 bp, Artificial
  Probe
atttttaggctgtcagctcgcagag

SEQ ID NO: 263128 - DNA, 25 bp, Artificial
  Probe
gccattactccagagtgacttctat

SEQ ID NO: 263129 - DNA, 25 bp, Artificial
  Probe
agaagcagcgatgtatcagaacatg

SEQ ID NO: 263130 - DNA, 25 bp, Artificial
  Probe
ggcgatgtcccactggagcacccag

SEQ ID NO: 263131 - DNA, 25 bp, Artificial
  Probe
gtgacttctataagaccaaaccgct

SEQ ID NO: 263132 - DNA, 25 bp, Artificial
  Probe
atctaccaaaacaggcggcctgcca

SEQ ID NO: 263133 - DNA, 25 bp, Artificial
  Probe
ctcgcagaggcagaagcagcgatgt

SEQ ID NO: 263134 - DNA, 25 bp, Artificial
  Probe
tcttcaaacatggaacctagccttg

SEQ ID NO: 263135 - DNA, 25 bp, Artificial
  Probe
acctagccttggattttcattatgc

SEQ ID NO: 263136 - DNA, 25 bp, Artificial
  Probe
tgcttgtttagcttcaaatgttcct

SEQ ID NO: 263137 - DNA, 25 bp, Artificial
  Probe
agctgtggctgactcctcctgcaca

SEQ ID NO: 263138 - DNA, 25 bp, Artificial
  Probe
ccatccctggttagtgaacgcatca

SEQ ID NO: 263139 - DNA, 25 bp, Artificial
  Probe
acgcatcacaaagagaacaagccat

SEQ ID NO: 263140 - DNA, 25 bp, Artificial
  Probe
aaatgtgctgttacttcctcccttg

SEQ ID NO: 263141 - DNA, 25 bp, Artificial
  Probe
tggaacctagccttggattttcatt

SEQ ID NO: 263142 - DNA, 25 bp, Artificial
  Probe
gtttgtaatctttcattcccagctg

SEQ ID NO: 263143 - DNA, 25 bp, Artificial
  Probe
gtgctgttacttcctcccttggaaa

SEQ ID NO: 263144 - DNA, 25 bp, Artificial
  Probe
gaacgcatcacaaagagaacaagcc

SEQ ID NO: 263145 - DNA, 25 bp, Artificial
  Probe
ccctggttagtgaacgcatcacaaa

SEQ ID NO: 263146 - DNA, 25 bp, Artificial
  Probe
cctagccttggattttcattatgca

SEQ ID NO: 263147 - DNA, 25 bp, Artificial
  Probe
gaaccagcgtttgtaatctttcatt

SEQ ID NO: 263148 - DNA, 25 bp, Artificial
  Probe
ttacttgcttgtttagcttcaaatg

SEQ ID NO: 263149 - DNA, 25 bp, Artificial
  Probe
gaacctagccttggattttcattat

SEQ ID NO: 263150 - DNA, 25 bp, Artificial
  Probe
tccctggttagtgaacgcatcacaa

SEQ ID NO: 263151 - DNA, 25 bp, Artificial
  Probe
catccctggttagtgaacgcatcac

SEQ ID NO: 263152 - DNA, 25 bp, Artificial
  Probe
ccttggattttcattatgcatgagg

SEQ ID NO: 263153 - DNA, 25 bp, Artificial
  Probe
gaagaaccagcgtttgtaatctttc

SEQ ID NO: 263154 - DNA, 25 bp, Artificial
  Probe
acttgcttgtttagcttcaaatgtt

SEQ ID NO: 263155 - DNA, 25 bp, Artificial
  Probe
agcgtttgtaatctttcattcccag

SEQ ID NO: 263156 - DNA, 25 bp, Artificial
  Probe
acattccatccctggttagtgaacg

SEQ ID NO: 263157 - DNA, 25 bp, Artificial
  Probe
tcctcgaagaaccagcgtttgtaat

SEQ ID NO: 263158 - DNA, 25 bp, Artificial
  Probe
aacatggaacctagccttggatttt

SEQ ID NO: 263159 - DNA, 25 bp, Artificial
  Probe
ttcaaacatggaacctagccttgga

SEQ ID NO: 263160 - DNA, 25 bp, Artificial
  Probe
tcctgcacattccatccctggttag

SEQ ID NO: 263161 - DNA, 25 bp, Artificial
  Probe
gtgaacgcatcacaaagagaacaag

SEQ ID NO: 263162 - DNA, 25 bp, Artificial
  Probe
cgcatcacaaagagaacaagccatt

SEQ ID NO: 263163 - DNA, 25 bp, Artificial
  Probe
gttagtgaacgcatcacaaagagaa

SEQ ID NO: 263164 - DNA, 25 bp, Artificial
  Probe
cctcctcgaagaaccagcgtttgta

SEQ ID NO: 263165 - DNA, 25 bp, Artificial
  Probe
tttcattcccagctgtggctgactc

SEQ ID NO: 263166 - DNA, 25 bp, Artificial
  Probe
ctgcacattccatccctggttagtg

SEQ ID NO: 263167 - DNA, 25 bp, Artificial
  Probe
gcttgtttagcttcaaatgttccta

SEQ ID NO: 263168 - DNA, 25 bp, Artificial
  Probe
agaaccagcgtttgtaatctttcat

SEQ ID NO: 263169 - DNA, 25 bp, Artificial
  Probe
cctcgaagaaccagcgtttgtaatc

SEQ ID NO: 263170 - DNA, 25 bp, Artificial
  Probe
gctgtggctgactcctcctgcacat

SEQ ID NO: 263171 - DNA, 25 bp, Artificial
  Probe
caaacatggaacctagccttggatt

SEQ ID NO: 263172 - DNA, 25 bp, Artificial
  Probe
ctgtggctgactcctcctgcacatt

SEQ ID NO: 263173 - DNA, 25 bp, Artificial
  Probe
tagtgaacgcatcacaaagagaaca

SEQ ID NO: 263174 - DNA, 25 bp, Artificial
  Probe
cccctcatctgtatagaaaaatgtg

SEQ ID NO: 263175 - DNA, 25 bp, Artificial
  Probe
atgtgctgttacttcctcccttgga

SEQ ID NO: 263176 - DNA, 25 bp, Artificial
  Probe
ccctcatctgtatagaaaaatgtgc

SEQ ID NO: 263177 - DNA, 25 bp, Artificial
  Probe
cttcaaacatggaacctagccttgg

SEQ ID NO: 263178 - DNA, 25 bp, Artificial
  Probe
ttcattcccagctgtggctgactcc

SEQ ID NO: 263179 - DNA, 25 bp, Artificial
  Probe
tgtggctgactcctcctgcacattc

SEQ ID NO: 263180 - DNA, 25 bp, Artificial
  Probe
gccggacgggggcgaggtcaagttg

SEQ ID NO: 263181 - DNA, 25 bp, Artificial
  Probe
tgtggacccaacaaggagttggatg

SEQ ID NO: 263182 - DNA, 25 bp, Artificial
  Probe
tgtggaccccacaaagagctagata

SEQ ID NO: 263183 - DNA, 25 bp, Artificial
  Probe
atccagctgtggaccccacaaagag

SEQ ID NO: 263184 - DNA, 25 bp, Artificial
  Probe
tccgcgcgaggcgcccgccaccgtc

SEQ ID NO: 263185 - DNA, 25 bp, Artificial
  Probe
ggcttcgaccatccagctgtggacc

SEQ ID NO: 263186 - DNA, 25 bp, Artificial
  Probe
gcttcgaccatccagctgtggaccc

SEQ ID NO: 263187 - DNA, 25 bp, Artificial
  Probe
cccacaaagagctagatagagactc

SEQ ID NO: 263188 - DNA, 25 bp, Artificial
  Probe
ttccatgatgtctgtggacccaaca

SEQ ID NO: 263189 - DNA, 25 bp, Artificial
  Probe
ggacccaacaaggagttggatgaag

SEQ ID NO: 263190 - DNA, 25 bp, Artificial
  Probe
gatgtctgtggacccaacaaggagt

SEQ ID NO: 263191 - DNA, 25 bp, Artificial
  Probe
ggggcttcgaccatccagctgtgga

SEQ ID NO: 263192 - DNA, 25 bp, Artificial
  Probe
gtctgtggacccaacaaggagttgg

SEQ ID NO: 263193 - DNA, 25 bp, Artificial
  Probe
acccaacaaggagttggatgaagac

SEQ ID NO: 263194 - DNA, 25 bp, Artificial
  Probe
tctgtggacccaacaaggagttgga

SEQ ID NO: 263195 - DNA, 25 bp, Artificial
  Probe
actgggcttctcggaagcagagccg

SEQ ID NO: 263196 - DNA, 25 bp, Artificial
  Probe
gggcttcgaccatccagctgtggac

SEQ ID NO: 263197 - DNA, 25 bp, Artificial
  Probe
tccatgatgtctgtggacccaacaa

SEQ ID NO: 263198 - DNA, 25 bp, Artificial
  Probe
cgtcgccgccttcgagtcgggactg

SEQ ID NO: 263199 - DNA, 25 bp, Artificial
  Probe
accccacaaagagctagatagagac

SEQ ID NO: 263200 - DNA, 25 bp, Artificial
  Probe
gattccatgatgtctgtggacccaa

SEQ ID NO: 263201 - DNA, 25 bp, Artificial
  Probe
attccatgatgtctgtggacccaac

SEQ ID NO: 263202 - DNA, 25 bp, Artificial
  Probe
cttcgagtcgggactgggcttctcg

SEQ ID NO: 263203 - DNA, 25 bp, Artificial
  Probe
tggacccaacaaggagttggatgaa

SEQ ID NO: 263204 - DNA, 25 bp, Artificial
  Probe
tggaccccacaaagagctagataga

SEQ ID NO: 263205 - DNA, 25 bp, Artificial
  Probe
tgtctgtggacccaacaaggagttg

SEQ ID NO: 263206 - DNA, 25 bp, Artificial
  Probe
gacccaacaaggagttggatgaaga

SEQ ID NO: 263207 - DNA, 25 bp, Artificial
  Probe
gaccccacaaagagctagatagaga

SEQ ID NO: 263208 - DNA, 25 bp, Artificial
  Probe
gctgtggaccccacaaagagctaga

SEQ ID NO: 263209 - DNA, 25 bp, Artificial
  Probe
ccatgatgtctgtggacccaacaag

SEQ ID NO: 263210 - DNA, 25 bp, Artificial
  Probe
agctgtggaccccacaaagagctag

SEQ ID NO: 263211 - DNA, 25 bp, Artificial
  Probe
cccaacaaggagttggatgaagaca

SEQ ID NO: 263212 - DNA, 25 bp, Artificial
  Probe
cctgccagtgtgtctgcaagggggg

SEQ ID NO: 263213 - DNA, 25 bp, Artificial
  Probe
ggattccatgatgtctgtggaccca

SEQ ID NO: 263214 - DNA, 25 bp, Artificial
  Probe
agtcgggactgggcttctcggaagc

SEQ ID NO: 263215 - DNA, 25 bp, Artificial
  Probe
gtggacccaacaaggagttggatga

SEQ ID NO: 263216 - DNA, 25 bp, Artificial
  Probe
gtggaccccacaaagagctagatag

SEQ ID NO: 263217 - DNA, 25 bp, Artificial
  Probe
catccagctgtggaccccacaaaga

SEQ ID NO: 263218 - DNA, 25 bp, Artificial
  Probe
ccccacaaagagctagatagagact

SEQ ID NO: 263219 - DNA, 25 bp, Artificial
  Probe
tgcaagggggggcttcgaccatcca

SEQ ID NO: 263220 - DNA, 25 bp, Artificial
  Probe
catgatgtctgtggacccaacaagg

SEQ ID NO: 263221 - DNA, 25 bp, Artificial
  Probe
ctgtggaccccacaaagagctagat

SEQ ID NO: 263222 - DNA, 25 bp, Artificial
  Probe
ctgtggacccaacaaggagttggat

SEQ ID NO: 263223 - DNA, 25 bp, Artificial
  Probe
gatggctgcgctgatccccggtccg

SEQ ID NO: 263224 - DNA, 25 bp, Artificial
  Probe
ggaccccacaaagagctagatagag

SEQ ID NO: 263225 - DNA, 25 bp, Artificial
  Probe
atgccagtgtgtctgtaaaaacaaa

SEQ ID NO: 263226 - DNA, 25 bp, Artificial
  Probe
cacaagaatgtatcacgccgggaag

SEQ ID NO: 263227 - DNA, 25 bp, Artificial
  Probe
gacagtgccaacagccccagtggcg

SEQ ID NO: 263228 - DNA, 25 bp, Artificial
  Probe
agagggcccttgtgcccttgttcct

SEQ ID NO: 263229 - DNA, 25 bp, Artificial
  Probe
agaagcccctcaagggctgaagatc

SEQ ID NO: 263230 - DNA, 25 bp, Artificial
  Probe
actctattccccagagggcccttgt

SEQ ID NO: 263231 - DNA, 25 bp, Artificial
  Probe
gcccttgttcctgaattacacaaga

SEQ ID NO: 263232 - DNA, 25 bp, Artificial
  Probe
tgggtccatccctgtcctgcttgga

SEQ ID NO: 263233 - DNA, 25 bp, Artificial
  Probe
caagaatgtatcacgccgggaagcc

SEQ ID NO: 263234 - DNA, 25 bp, Artificial
  Probe
tatcacgccgggaagccagagacct

SEQ ID NO: 263235 - DNA, 25 bp, Artificial
  Probe
gctctgttggtctcaccagttttta

SEQ ID NO: 263236 - DNA, 25 bp, Artificial
  Probe
tcaggccttgaatggggcaacagtg

SEQ ID NO: 263237 - DNA, 25 bp, Artificial
  Probe
tgagaagcccctcaagggctgaaga

SEQ ID NO: 263238 - DNA, 25 bp, Artificial
  Probe
ctgtcctgcttggagtccacaggga

SEQ ID NO: 263239 - DNA, 25 bp, Artificial
  Probe
agagcctgcgcaggaagaaaagtga

SEQ ID NO: 263240 - DNA, 25 bp, Artificial
  Probe
aagccagagacctgctggggcctcc

SEQ ID NO: 263241 - DNA, 25 bp, Artificial
  Probe
gaacatgcggctcagctccttggcc

SEQ ID NO: 263242 - DNA, 25 bp, Artificial
  Probe
ctcaagggctgaagatctgggctga

SEQ ID NO: 263243 - DNA, 25 bp, Artificial
  Probe
ccagagacctgctggggcctccaag

SEQ ID NO: 263244 - DNA, 25 bp, Artificial
  Probe
atcacgccgggaagccagagacctg

SEQ ID NO: 263245 - DNA, 25 bp, Artificial
  Probe
agtgacagtgccaacagccccagtg

SEQ ID NO: 263246 - DNA, 25 bp, Artificial
  Probe
cagcactggttcaggccttgaatgg

SEQ ID NO: 263247 - DNA, 25 bp, Artificial
  Probe
aattacacaagaatgtatcacgccg

SEQ ID NO: 263248 - DNA, 25 bp, Artificial
  Probe
tgcctggtggactgctctgttggtc

SEQ ID NO: 263249 - DNA, 25 bp, Artificial
  Probe
ctgaattacacaagaatgtatcacg

SEQ ID NO: 263250 - DNA, 25 bp, Artificial
  Probe
tctattccccagagggcccttgtgc

SEQ ID NO: 263251 - DNA, 25 bp, Artificial
  Probe
ctggttcaggccttgaatggggcaa

SEQ ID NO: 263252 - DNA, 25 bp, Artificial
  Probe
gtgagattgggtccatccctgtcct

SEQ ID NO: 263253 - DNA, 25 bp, Artificial
  Probe
agcctgcgcaggaagaaaagtgaca

SEQ ID NO: 263254 - DNA, 25 bp, Artificial
  Probe
agattgggtccatccctgtcctgct

SEQ ID NO: 263255 - DNA, 25 bp, Artificial
  Probe
caggggcagcactggttcaggcctt

SEQ ID NO: 263256 - DNA, 25 bp, Artificial
  Probe
gagtccacagggagactgtaatctc

SEQ ID NO: 263257 - DNA, 25 bp, Artificial
  Probe
gcctggtggactgctctgttggtct

SEQ ID NO: 263258 - DNA, 25 bp, Artificial
  Probe
gttcctgaattacacaagaatgtat

SEQ ID NO: 263259 - DNA, 25 bp, Artificial
  Probe
atccctgtcctgcttggagtccaca

SEQ ID NO: 263260 - DNA, 25 bp, Artificial
  Probe
cccctcaagggctgaagatctgggc

SEQ ID NO: 263261 - DNA, 25 bp, Artificial
  Probe
gcccttgtgcccttgttcctgaatt

SEQ ID NO: 263262 - DNA, 25 bp, Artificial
  Probe
gggcagcactggttcaggccttgaa

SEQ ID NO: 263263 - DNA, 25 bp, Artificial
  Probe
tcctgcttggagtccacagggagac

SEQ ID NO: 263264 - DNA, 25 bp, Artificial
  Probe
cttgttcctgaattacacaagaatg

SEQ ID NO: 263265 - DNA, 25 bp, Artificial
  Probe
ctgttggtctcaccagtttttagaa

SEQ ID NO: 263266 - DNA, 25 bp, Artificial
  Probe
cctcaggggcagcactggttcaggc

SEQ ID NO: 263267 - DNA, 25 bp, Artificial
  Probe
gtccacagggagactgtaatctcca

SEQ ID NO: 263268 - DNA, 25 bp, Artificial
  Probe
ttacacaagaatgtatcacgccggg

SEQ ID NO: 263269 - DNA, 25 bp, Artificial
  Probe
cttggagtccacagggagactgtaa

SEQ ID NO: 263270 - DNA, 25 bp, Artificial
  Probe
ctcatatcatcgtatgtcctcttgg

SEQ ID NO: 263271 - DNA, 25 bp, Artificial
  Probe
cccagagggcccttgtgcccttgtt

SEQ ID NO: 263272 - DNA, 25 bp, Artificial
  Probe
catatatgttaactacaatgcagaa

SEQ ID NO: 263273 - DNA, 25 bp, Artificial
  Probe
atatgttaactacaatgcagaaaat

SEQ ID NO: 263274 - DNA, 25 bp, Artificial
  Probe
tatgttaactacaatgcagaaaata

SEQ ID NO: 263275 - DNA, 25 bp, Artificial
  Probe
tgttaactacaatgcagaaaatata

SEQ ID NO: 263276 - DNA, 25 bp, Artificial
  Probe
aacatatcactacttcaagaaaaac

SEQ ID NO: 263277 - DNA, 25 bp, Artificial
  Probe
gactcaaagacagtacacaaagtac

SEQ ID NO: 263278 - DNA, 25 bp, Artificial
  Probe
atgttaactacaatgcagaaaatat

SEQ ID NO: 263279 - DNA, 25 bp, Artificial
  Probe
gttaactacaatgcagaaaatatat

SEQ ID NO: 263280 - DNA, 25 bp, Artificial
  Probe
catatcactacttcaagaaaaacaa

SEQ ID NO: 263281 - DNA, 25 bp, Artificial
  Probe
tatatgttaactacaatgcagaaaa

SEQ ID NO: 263282 - DNA, 25 bp, Artificial
  Probe
ttaactacaatgcagaaaatatatt

SEQ ID NO: 263283 - DNA, 25 bp, Artificial
  Probe
tatcactacttcaagaaaaacaagg

SEQ ID NO: 263284 - DNA, 25 bp, Artificial
  Probe
tcactacttcaagaaaaacaaggtg

SEQ ID NO: 263285 - DNA, 25 bp, Artificial
  Probe
ctacttcaagaaaaacaaggtgact

SEQ ID NO: 263286 - DNA, 25 bp, Artificial
  Probe
atataacatatcactacttcaagaa

SEQ ID NO: 263287 - DNA, 25 bp, Artificial
  Probe
ctcaaagacagtacacaaagtacat

SEQ ID NO: 263288 - DNA, 25 bp, Artificial
  Probe
aactacaatgcagaaaatatattaa

SEQ ID NO: 263289 - DNA, 25 bp, Artificial
  Probe
cactacttcaagaaaaacaaggtga

SEQ ID NO: 263290 - DNA, 25 bp, Artificial
  Probe
actcaaagacagtacacaaagtaca

SEQ ID NO: 263291 - DNA, 25 bp, Artificial
  Probe
ataacatatcactacttcaagaaaa

SEQ ID NO: 263292 - DNA, 25 bp, Artificial
  Probe
tgactcaaagacagtacacaaagta

SEQ ID NO: 263293 - DNA, 25 bp, Artificial
  Probe
agtacacaaagtacatatatgttaa

SEQ ID NO: 263294 - DNA, 25 bp, Artificial
  Probe
atatcactacttcaagaaaaacaag

SEQ ID NO: 263295 - DNA, 25 bp, Artificial
  Probe
atcactacttcaagaaaaacaaggt

SEQ ID NO: 263296 - DNA, 25 bp, Artificial
  Probe
aatataacatatcactacttcaaga

SEQ ID NO: 263297 - DNA, 25 bp, Artificial
  Probe
ctgaatataacatatcactacttca

SEQ ID NO: 263298 - DNA, 25 bp, Artificial
  Probe
taacatatcactacttcaagaaaaa

SEQ ID NO: 263299 - DNA, 25 bp, Artificial
  Probe
taactacaatgcagaaaatatatta

SEQ ID NO: 263300 - DNA, 25 bp, Artificial
  Probe
acatatcactacttcaagaaaaaca

SEQ ID NO: 263301 - DNA, 25 bp, Artificial
  Probe
cagtacacaaagtacatatatgtta

SEQ ID NO: 263302 - DNA, 25 bp, Artificial
  Probe
tacacaaagtacatatatgttaact

SEQ ID NO: 263303 - DNA, 25 bp, Artificial
  Probe
tgaatataacatatcactacttcaa

SEQ ID NO: 263304 - DNA, 25 bp, Artificial
  Probe
gaatataacatatcactacttcaag

SEQ ID NO: 263305 - DNA, 25 bp, Artificial
  Probe
tataacatatcactacttcaagaaa

SEQ ID NO: 263306 - DNA, 25 bp, Artificial
  Probe
tcatcttccacatcgagatgctgaa

SEQ ID NO: 263307 - DNA, 25 bp, Artificial
  Probe
ttccacatcgagatgctgaaggtgt

SEQ ID NO: 263308 - DNA, 25 bp, Artificial
  Probe
tggagctcatcatcggcaagaagtt

SEQ ID NO: 263309 - DNA, 25 bp, Artificial
  Probe
cgctgcatagtgacccggagggctc

SEQ ID NO: 263310 - DNA, 25 bp, Artificial
  Probe
atgacagccgagcacgcggcaagcc

SEQ ID NO: 263311 - DNA, 25 bp, Artificial
  Probe
ttgctgtggaattgctcaaatgcat

SEQ ID NO: 263312 - DNA, 25 bp, Artificial
  Probe
gcctccgcaacatcgctgagggcaa

SEQ ID NO: 263313 - DNA, 25 bp, Artificial
  Probe
gaccatcgtgcgtaccatgcgtgag

SEQ ID NO: 263314 - DNA, 25 bp, Artificial
  Probe
agttcctctgcgatgtcaagcacac

SEQ ID NO: 263315 - DNA, 25 bp, Artificial
  Probe
cctgtgtgggagaccatcgtgcgta

SEQ ID NO: 263316 - DNA, 25 bp, Artificial
  Probe
tccgtcatagatgacagccgagcac

SEQ ID NO: 263317 - DNA, 25 bp, Artificial
  Probe
gatgtcaagcacacagtcctgtatc

SEQ ID NO: 263318 - DNA, 25 bp, Artificial
  Probe
tcatcggcaagaagttcaagctgcc

SEQ ID NO: 263319 - DNA, 25 bp, Artificial
  Probe
gttcaagctgcctgtgtgggagacc

SEQ ID NO: 263320 - DNA, 25 bp, Artificial
  Probe
tggaattgctcaaatgcatgagcat

SEQ ID NO: 263321 - DNA, 25 bp, Artificial
  Probe
agatgacagccgagcacgcggcaag

SEQ ID NO: 263322 - DNA, 25 bp, Artificial
  Probe
gcgatgtcaagcacacagtcctgta

SEQ ID NO: 263323 - DNA, 25 bp, Artificial
  Probe
ccatcgtgcgtaccatgcgtgaggg

SEQ ID NO: 263324 - DNA, 25 bp, Artificial
  Probe
gcaacatcgctgagggcaaggaccc

SEQ ID NO: 263325 - DNA, 25 bp, Artificial
  Probe
tgggtcatgcggacctggacgccct

SEQ ID NO: 263326 - DNA, 25 bp, Artificial
  Probe
ccgcaacatcgctgagggcaaggac

SEQ ID NO: 263327 - DNA, 25 bp, Artificial
  Probe
tgctcaaatgcatgagcatagctcc

SEQ ID NO: 263328 - DNA, 25 bp, Artificial
  Probe
gccagcggcattgctgtggaattgc

SEQ ID NO: 263329 - DNA, 25 bp, Artificial
  Probe
ctcatcatcggcaagaagttcaagc

SEQ ID NO: 263330 - DNA, 25 bp, Artificial
  Probe
ctctggtggccaagagcctccgcaa

SEQ ID NO: 263331 - DNA, 25 bp, Artificial
  Probe
gggagaccatcgtgcgtaccatgcg

SEQ ID NO: 263332 - DNA, 25 bp, Artificial
  Probe
gtcatagatgacagccgagcacgcg

SEQ ID NO: 263333 - DNA, 25 bp, Artificial
  Probe
tcgctgagggcaaggaccccttgga

SEQ ID NO: 263334 - DNA, 25 bp, Artificial
  Probe
cgagcacgcggcaagcccatggagc

SEQ ID NO: 263335 - DNA, 25 bp, Artificial
  Probe
caagcacacagtcctgtatcctctg

SEQ ID NO: 263336 - DNA, 25 bp, Artificial
  Probe
cctcatcttccacatcgagatgctg

SEQ ID NO: 263337 - DNA, 25 bp, Artificial
  Probe
gggagacggcccagttcctctgcga

SEQ ID NO: 263338 - DNA, 25 bp, Artificial
  Probe
tgtatcctctggtggccaagagcct

SEQ ID NO: 263339 - DNA, 25 bp, Artificial
  Probe
aagagcctccgcaacatcgctgagg

SEQ ID NO: 263340 - DNA, 25 bp, Artificial
  Probe
atcgctgagggcaaggaccccttgg

SEQ ID NO: 263341 - DNA, 25 bp, Artificial
  Probe
gagcacgcggcaagcccatggagct

SEQ ID NO: 263342 - DNA, 25 bp, Artificial
  Probe
aagctgcctgtgtgggagaccatcg

SEQ ID NO: 263343 - DNA, 25 bp, Artificial
  Probe
ggagggctccgtcatagatgacagc

SEQ ID NO: 263344 - DNA, 25 bp, Artificial
  Probe
caagaagttcaagctgcctgtgtgg

SEQ ID NO: 263345 - DNA, 25 bp, Artificial
  Probe
cgcggcaagcccatggagctcatca

SEQ ID NO: 263346 - DNA, 25 bp, Artificial
  Probe
cggagggctccgtcatagatgacag

SEQ ID NO: 263347 - DNA, 25 bp, Artificial
  Probe
agaagttcaagctgcctgtgtggga

SEQ ID NO: 263348 - DNA, 25 bp, Artificial
  Probe
atgcggacctggacgccctgcagca

SEQ ID NO: 263349 - DNA, 25 bp, Artificial
  Probe
gacccggagggctccgtcatagatg

SEQ ID NO: 263350 - DNA, 25 bp, Artificial
  Probe
ctggtggccaagagcctccgcaaca

SEQ ID NO: 263351 - DNA, 25 bp, Artificial
  Probe
gcccagttcctctgcgatgtcaagc

SEQ ID NO: 263352 - DNA, 25 bp, Artificial
  Probe
agactgagtggttgacagactcaag

SEQ ID NO: 263353 - DNA, 25 bp, Artificial
  Probe
cacaactaccgaaggaaaaaatctg

SEQ ID NO: 263354 - DNA, 25 bp, Artificial
  Probe
cagactgacagcagtgggagactga

SEQ ID NO: 263355 - DNA, 25 bp, Artificial
  Probe
aggataatcagcagccttgtctgcc

SEQ ID NO: 263356 - DNA, 25 bp, Artificial
  Probe
taatcagcagccttgtctgccatct

SEQ ID NO: 263357 - DNA, 25 bp, Artificial
  Probe
gccatctggactctagcagcccagt

SEQ ID NO: 263358 - DNA, 25 bp, Artificial
  Probe
acattgagacggtttaacagtgctt

SEQ ID NO: 263359 - DNA, 25 bp, Artificial
  Probe
tgatagcctccaaggcaaaagcact

SEQ ID NO: 263360 - DNA, 25 bp, Artificial
  Probe
gtttaacagtgctttctatgttcat

SEQ ID NO: 263361 - DNA, 25 bp, Artificial
  Probe
tataccactggctgtttgtacattg

SEQ ID NO: 263362 - DNA, 25 bp, Artificial
  Probe
cagtgctttctatgttcatatactg

SEQ ID NO: 263363 - DNA, 25 bp, Artificial
  Probe
aaatctgcagtcatgatagcctcca

SEQ ID NO: 263364 - DNA, 25 bp, Artificial
  Probe
tgttcacaagccattggagagatat

SEQ ID NO: 263365 - DNA, 25 bp, Artificial
  Probe
agatatcacaggataatcagcagcc

SEQ ID NO: 263366 - DNA, 25 bp, Artificial
  Probe
agcagccttgtctgccatctggact

SEQ ID NO: 263367 - DNA, 25 bp, Artificial
  Probe
tacctgttcacaagccattggagag

SEQ ID NO: 263368 - DNA, 25 bp, Artificial
  Probe
acaggataatcagcagccttgtctg

SEQ ID NO: 263369 - DNA, 25 bp, Artificial
  Probe
acaagccattggagagatatcacag

SEQ ID NO: 263370 - DNA, 25 bp, Artificial
  Probe
taaatgtgtttacctgttcacaagc

SEQ ID NO: 263371 - DNA, 25 bp, Artificial
  Probe
atcacaggataatcagcagccttgt

SEQ ID NO: 263372 - DNA, 25 bp, Artificial
  Probe
gcaaaagcactgtccagtgttagta

SEQ ID NO: 263373 - DNA, 25 bp, Artificial
  Probe
tgatgacacaactaccgaaggaaaa

SEQ ID NO: 263374 - DNA, 25 bp, Artificial
  Probe
agcctccaaggcaaaagcactgtcc

SEQ ID NO: 263375 - DNA, 25 bp, Artificial
  Probe
gttctgagttctcatgtaagcacta

SEQ ID NO: 263376 - DNA, 25 bp, Artificial
  Probe
aaagtggtttgttccttgatgacac

SEQ ID NO: 263377 - DNA, 25 bp, Artificial
  Probe
ccatggagtctcctggcaaagaata

SEQ ID NO: 263378 - DNA, 25 bp, Artificial
  Probe
ttagtaaatgtgtttacctgttcac

SEQ ID NO: 263379 - DNA, 25 bp, Artificial
  Probe
tgtcagtgtaactgccagttcagtt

SEQ ID NO: 263380 - DNA, 25 bp, Artificial
  Probe
ggaaaaaatctgcagtcatgatagc

SEQ ID NO: 263381 - DNA, 25 bp, Artificial
  Probe
attgagacggtttaacagtgctttc

SEQ ID NO: 263382 - DNA, 25 bp, Artificial
  Probe
cactgtccagtgttagtaaatgtgt

SEQ ID NO: 263383 - DNA, 25 bp, Artificial
  Probe
agtgctttctatgttcatatactgt

SEQ ID NO: 263384 - DNA, 25 bp, Artificial
  Probe
agcactagtggaactttcattgttt

SEQ ID NO: 263385 - DNA, 25 bp, Artificial
  Probe
attagcaaaggtctgtgctatacca

SEQ ID NO: 263386 - DNA, 25 bp, Artificial
  Probe
gtaactgccagttcagttaatccaa

SEQ ID NO: 263387 - DNA, 25 bp, Artificial
  Probe
gttcagttaatccaatgtcattgtt

SEQ ID NO: 263388 - DNA, 25 bp, Artificial
  Probe
atgtcattgttcaattgctaatgtc

SEQ ID NO: 263389 - DNA, 25 bp, Artificial
  Probe
gtcatgatagcctccaaggcaaaag

SEQ ID NO: 263390 - DNA, 25 bp, Artificial
  Probe
gtgctataccactggctgtttgtac

SEQ ID NO: 263391 - DNA, 25 bp, Artificial
  Probe
agacggtttaacagtgctttctatg

SEQ ID NO: 263392 - DNA, 25 bp, Artificial
  Probe
gccttgtctgccatctggactctag

SEQ ID NO: 263393 - DNA, 25 bp, Artificial
  Probe
tgcagtcatgatagcctccaaggca

SEQ ID NO: 263394 - DNA, 25 bp, Artificial
  Probe
ctggctgtttgtacattgagacggt

SEQ ID NO: 263395 - DNA, 25 bp, Artificial
  Probe
tggccttgttcaatcactatgatgc

SEQ ID NO: 263396 - DNA, 25 bp, Artificial
  Probe
ttgttccttgatgacacaactaccg

SEQ ID NO: 263397 - DNA, 25 bp, Artificial
  Probe
atgatgcagactgacagcagtggga

SEQ ID NO: 263398 - DNA, 25 bp, Artificial
  Probe
tctggttctttcaaagtttgtgttt

SEQ ID NO: 263399 - DNA, 25 bp, Artificial
  Probe
taaagccatacaaataagagtgcta

SEQ ID NO: 263400 - DNA, 25 bp, Artificial
  Probe
gaaaaaattcatttccatctgtggt

SEQ ID NO: 263401 - DNA, 25 bp, Artificial
  Probe
ataaagtgctctggtacttggtatt

SEQ ID NO: 263402 - DNA, 25 bp, Artificial
  Probe
gagaacttgcactagtattttacca

SEQ ID NO: 263403 - DNA, 25 bp, Artificial
  Probe
tcattttcctttaagttacattgaa

SEQ ID NO: 263404 - DNA, 25 bp, Artificial
  Probe
agctgagcatcattttaaaattaat

SEQ ID NO: 263405 - DNA, 25 bp, Artificial
  Probe
gtgctctggtacttggtatttttgc

SEQ ID NO: 263406 - DNA, 25 bp, Artificial
  Probe
atataatatatcaggctttgttttg

SEQ ID NO: 263407 - DNA, 25 bp, Artificial
  Probe
tgtccccacaacagaaacggtggtg

SEQ ID NO: 263408 - DNA, 25 bp, Artificial
  Probe
gtattttaccaccagatgggaaaag

SEQ ID NO: 263409 - DNA, 25 bp, Artificial
  Probe
tctctggttctttcaaagtttgtgt

SEQ ID NO: 263410 - DNA, 25 bp, Artificial
  Probe
tttaccaccagatgggaaaagatta

SEQ ID NO: 263411 - DNA, 25 bp, Artificial
  Probe
tttaaagccatacaaataagagtgc

SEQ ID NO: 263412 - DNA, 25 bp, Artificial
  Probe
gcataaagtgctctggtacttggta

SEQ ID NO: 263413 - DNA, 25 bp, Artificial
  Probe
ccatctgtggtaaactttattttga

SEQ ID NO: 263414 - DNA, 25 bp, Artificial
  Probe
ctagtattttaccaccagatgggaa

SEQ ID NO: 263415 - DNA, 25 bp, Artificial
  Probe
tgagaacttgcactagtattttacc

SEQ ID NO: 263416 - DNA, 25 bp, Artificial
  Probe
gctgtccccacaacagaaacggtgg

SEQ ID NO: 263417 - DNA, 25 bp, Artificial
  Probe
cagcataaagtgctctggtacttgg

SEQ ID NO: 263418 - DNA, 25 bp, Artificial
  Probe
acatctctggttctttcaaagtttg

SEQ ID NO: 263419 - DNA, 25 bp, Artificial
  Probe
agcataaagtgctctggtacttggt

SEQ ID NO: 263420 - DNA, 25 bp, Artificial
  Probe
ttttaccaccagatgggaaaagatt

SEQ ID NO: 263421 - DNA, 25 bp, Artificial
  Probe
actagtattttaccaccagatggga

SEQ ID NO: 263422 - DNA, 25 bp, Artificial
  Probe
catctctggttctttcaaagtttgt

SEQ ID NO: 263423 - DNA, 25 bp, Artificial
  Probe
tcatttaacggcggctaaagggcca

SEQ ID NO: 263424 - DNA, 25 bp, Artificial
  Probe
gcactagtattttaccaccagatgg

SEQ ID NO: 263425 - DNA, 25 bp, Artificial
  Probe
tgctgtccccacaacagaaacggtg

SEQ ID NO: 263426 - DNA, 25 bp, Artificial
  Probe
tagtattttaccaccagatgggaaa

SEQ ID NO: 263427 - DNA, 25 bp, Artificial
  Probe
cataaagtgctctggtacttggtat

SEQ ID NO: 263428 - DNA, 25 bp, Artificial
  Probe
ggctaaagggccattttcaatggaa

SEQ ID NO: 263429 - DNA, 25 bp, Artificial
  Probe
ggaaaaaattcatttccatctgtgg

SEQ ID NO: 263430 - DNA, 25 bp, Artificial
  Probe
gcagcataaagtgctctggtacttg

SEQ ID NO: 263431 - DNA, 25 bp, Artificial
  Probe
gctaaagggccattttcaatggaaa

SEQ ID NO: 263432 - DNA, 25 bp, Artificial
  Probe
gaaacggtggtggcagaatttctag

SEQ ID NO: 263433 - DNA, 25 bp, Artificial
  Probe
tgcactagtattttaccaccagatg

SEQ ID NO: 263434 - DNA, 25 bp, Artificial
  Probe
atctctggttctttcaaagtttgtg

SEQ ID NO: 263435 - DNA, 25 bp, Artificial
  Probe
tgctaaactgtggacttaaaagtag

SEQ ID NO: 263436 - DNA, 25 bp, Artificial
  Probe
ctgtccccacaacagaaacggtggt

SEQ ID NO: 263437 - DNA, 25 bp, Artificial
  Probe
ttaaagccatacaaataagagtgct

SEQ ID NO: 263438 - DNA, 25 bp, Artificial
  Probe
atgagaacttgcactagtattttac

SEQ ID NO: 263439 - DNA, 25 bp, Artificial
  Probe
cactagtattttaccaccagatggg

SEQ ID NO: 263440 - DNA, 25 bp, Artificial
  Probe
tatttttaatcagtattacttggaa

SEQ ID NO: 263441 - DNA, 25 bp, Artificial
  Probe
agcagcataaagtgctctggtactt

SEQ ID NO: 263442 - DNA, 25 bp, Artificial
  Probe
cggctaaagggccattttcaatgga

SEQ ID NO: 263443 - DNA, 25 bp, Artificial
  Probe
ccaacaaaacttcagaaaaacatct

SEQ ID NO: 263444 - DNA, 25 bp, Artificial
  Probe
atcaacctgacagatcctatgttca

SEQ ID NO: 263445 - DNA, 25 bp, Artificial
  Probe
gaatcaacctgacagatcctatgtt

SEQ ID NO: 263446 - DNA, 25 bp, Artificial
  Probe
tcaagttcgtggatattggaatcaa

SEQ ID NO: 263447 - DNA, 25 bp, Artificial
  Probe
gaatttataggggcatgcagaagca

SEQ ID NO: 263448 - DNA, 25 bp, Artificial
  Probe
tcaacctgacagatcctatgttcag

SEQ ID NO: 263449 - DNA, 25 bp, Artificial
  Probe
acctgacagatcctatgttcagagg

SEQ ID NO: 263450 - DNA, 25 bp, Artificial
  Probe
gctgtccagattggtgttaaaaagc

SEQ ID NO: 263451 - DNA, 25 bp, Artificial
  Probe
tgttaaaaagctctctgaaaactga

SEQ ID NO: 263452 - DNA, 25 bp, Artificial
  Probe
cctatgttcagaggaatttataggg

SEQ ID NO: 263453 - DNA, 25 bp, Artificial
  Probe
taatagggagagctgtccagattgg

SEQ ID NO: 263454 - DNA, 25 bp, Artificial
  Probe
tcctatgttcagaggaatttatagg

SEQ ID NO: 263455 - DNA, 25 bp, Artificial
  Probe
tattggaatcaacctgacagatcct

SEQ ID NO: 263456 - DNA, 25 bp, Artificial
  Probe
acgaggttcaagttcgtggatattg

SEQ ID NO: 263457 - DNA, 25 bp, Artificial
  Probe
ttataggggcatgcagaagcatcaa

SEQ ID NO: 263458 - DNA, 25 bp, Artificial
  Probe
tttataggggcatgcagaagcatca

SEQ ID NO: 263459 - DNA, 25 bp, Artificial
  Probe
agatcctatgttcagaggaatttat

SEQ ID NO: 263460 - DNA, 25 bp, Artificial
  Probe
acagatcctatgttcagaggaattt

SEQ ID NO: 263461 - DNA, 25 bp, Artificial
  Probe
ggaatcaacctgacagatcctatgt

SEQ ID NO: 263462 - DNA, 25 bp, Artificial
  Probe
agctgtccagattggtgttaaaaag

SEQ ID NO: 263463 - DNA, 25 bp, Artificial
  Probe
atttataggggcatgcagaagcatc

SEQ ID NO: 263464 - DNA, 25 bp, Artificial
  Probe
caccattaaaatattcttttcctga

SEQ ID NO: 263465 - DNA, 25 bp, Artificial
  Probe
agcatcaagatgacttacaagatgt

SEQ ID NO: 263466 - DNA, 25 bp, Artificial
  Probe
catgcagaagcatcaagatgactta

SEQ ID NO: 263467 - DNA, 25 bp, Artificial
  Probe
attggaatcaacctgacagatccta

SEQ ID NO: 263468 - DNA, 25 bp, Artificial
  Probe
ttggaatcaacctgacagatcctat

SEQ ID NO: 263469 - DNA, 25 bp, Artificial
  Probe
cagatcctatgttcagaggaattta

SEQ ID NO: 263470 - DNA, 25 bp, Artificial
  Probe
cctgacagatcctatgttcagagga

SEQ ID NO: 263471 - DNA, 25 bp, Artificial
  Probe
gtgttaaaaagctctctgaaaactg

SEQ ID NO: 263472 - DNA, 25 bp, Artificial
  Probe
atagggagagctgtccagattggtg

SEQ ID NO: 263473 - DNA, 25 bp, Artificial
  Probe
agggagagctgtccagattggtgtt

SEQ ID NO: 263474 - DNA, 25 bp, Artificial
  Probe
ctgacagatcctatgttcagaggaa

SEQ ID NO: 263475 - DNA, 25 bp, Artificial
  Probe
ctgtccagattggtgttaaaaagct

SEQ ID NO: 263476 - DNA, 25 bp, Artificial
  Probe
aacctgacagatcctatgttcagag

SEQ ID NO: 263477 - DNA, 25 bp, Artificial
  Probe
tgtccagattggtgttaaaaagctc

SEQ ID NO: 263478 - DNA, 25 bp, Artificial
  Probe
aatttataggggcatgcagaagcat

SEQ ID NO: 263479 - DNA, 25 bp, Artificial
  Probe
tggaatcaacctgacagatcctatg

SEQ ID NO: 263480 - DNA, 25 bp, Artificial
  Probe
aatcaacctgacagatcctatgttc

SEQ ID NO: 263481 - DNA, 25 bp, Artificial
  Probe
caacctgacagatcctatgttcaga

SEQ ID NO: 263482 - DNA, 25 bp, Artificial
  Probe
gagctgtccagattggtgttaaaaa

SEQ ID NO: 263483 - DNA, 25 bp, Artificial
  Probe
tgacagatcctatgttcagaggaat

SEQ ID NO: 263484 - DNA, 25 bp, Artificial
  Probe
catcaagatgacttacaagatgtaa

SEQ ID NO: 263485 - DNA, 25 bp, Artificial
  Probe
cacgaggttcaagttcgtggatatt

SEQ ID NO: 263486 - DNA, 25 bp, Artificial
  Probe
gcatcaagatgacttacaagatgta

SEQ ID NO: 263487 - DNA, 25 bp, Artificial
  Probe
gacagatcctatgttcagaggaatt

SEQ ID NO: 263488 - DNA, 25 bp, Artificial
  Probe
atattggaatcaacctgacagatcc

SEQ ID NO: 263489 - DNA, 25 bp, Artificial
  Probe
caagttcgtggatattggaatcaac

SEQ ID NO: 263490 - DNA, 25 bp, Artificial
  Probe
ctaaatcagcaggaacaagaagact

SEQ ID NO: 263491 - DNA, 25 bp, Artificial
  Probe
aaatcagcaggaacaagaagacttg

SEQ ID NO: 263492 - DNA, 25 bp, Artificial
  Probe
aagagcagaggctcgccagactaaa

SEQ ID NO: 263493 - DNA, 25 bp, Artificial
  Probe
tcagagatctcagaagcatgaagag

SEQ ID NO: 263494 - DNA, 25 bp, Artificial
  Probe
agccgcacatgctcttcctgaatac

SEQ ID NO: 263495 - DNA, 25 bp, Artificial
  Probe
aacagctttgcctagaaaaatcagt

SEQ ID NO: 263496 - DNA, 25 bp, Artificial
  Probe
aataccgaagctgtttaccatgtgc

SEQ ID NO: 263497 - DNA, 25 bp, Artificial
  Probe
acttagcaaatcagagatctcagaa

SEQ ID NO: 263498 - DNA, 25 bp, Artificial
  Probe
tagcaaatcagagatctcagaagca

SEQ ID NO: 263499 - DNA, 25 bp, Artificial
  Probe
acaagaagacttggaactggccatt

SEQ ID NO: 263500 - DNA, 25 bp, Artificial
  Probe
ttggaactggccattgcacttagca

SEQ ID NO: 263501 - DNA, 25 bp, Artificial
  Probe
gcagtaccctaattaaacagctttg

SEQ ID NO: 263502 - DNA, 25 bp, Artificial
  Probe
ttcctgtaaatgtgacaagtctagt

SEQ ID NO: 263503 - DNA, 25 bp, Artificial
  Probe
gcacttagcaaatcagagatctcag

SEQ ID NO: 263504 - DNA, 25 bp, Artificial
  Probe
ggccattgcacttagcaaatcagag

SEQ ID NO: 263505 - DNA, 25 bp, Artificial
  Probe
cagaggctcgccagactaaatcagc

SEQ ID NO: 263506 - DNA, 25 bp, Artificial
  Probe
cctgaataccgaagctgtttaccat

SEQ ID NO: 263507 - DNA, 25 bp, Artificial
  Probe
agaagacttggaactggccattgca

SEQ ID NO: 263508 - DNA, 25 bp, Artificial
  Probe
aagcatgaagagtcctctgtccccg

SEQ ID NO: 263509 - DNA, 25 bp, Artificial
  Probe
gtgcatccaactacctatgagcatg

SEQ ID NO: 263510 - DNA, 25 bp, Artificial
  Probe
ccaactacctatgagcatgggatac

SEQ ID NO: 263511 - DNA, 25 bp, Artificial
  Probe
gccattgcacttagcaaatcagaga

SEQ ID NO: 263512 - DNA, 25 bp, Artificial
  Probe
gcacatgctcttcctgaataccgaa

SEQ ID NO: 263513 - DNA, 25 bp, Artificial
  Probe
caaaggtttgcgattcctgtaaatg

SEQ ID NO: 263514 - DNA, 25 bp, Artificial
  Probe
cgcacatgctcttcctgaataccga

SEQ ID NO: 263515 - DNA, 25 bp, Artificial
  Probe
gctttgcctagaaaaatcagtttta

SEQ ID NO: 263516 - DNA, 25 bp, Artificial
  Probe
tacctatgagcatgggatacaaagg

SEQ ID NO: 263517 - DNA, 25 bp, Artificial
  Probe
cctgtatccctctgaagaagacatg

SEQ ID NO: 263518 - DNA, 25 bp, Artificial
  Probe
tcctgaataccgaagctgtttacca

SEQ ID NO: 263519 - DNA, 25 bp, Artificial
  Probe
tgaagagtcctctgtccccgtcagc

SEQ ID NO: 263520 - DNA, 25 bp, Artificial
  Probe
gatctcagaagcatgaagagtcctc

SEQ ID NO: 263521 - DNA, 25 bp, Artificial
  Probe
ttagcaaatcagagatctcagaagc

SEQ ID NO: 263522 - DNA, 25 bp, Artificial
  Probe
ggtttgcgattcctgtaaatgtgac

SEQ ID NO: 263523 - DNA, 25 bp, Artificial
  Probe
atctcagaagcatgaagagtcctct

SEQ ID NO: 263524 - DNA, 25 bp, Artificial
  Probe
ccagactaaatcagcaggaacaaga

SEQ ID NO: 263525 - DNA, 25 bp, Artificial
  Probe
aactggccattgcacttagcaaatc

SEQ ID NO: 263526 - DNA, 25 bp, Artificial
  Probe
ctcttcctgaataccgaagctgttt

SEQ ID NO: 263527 - DNA, 25 bp, Artificial
  Probe
ccatgtgcatccaactacctatgag

SEQ ID NO: 263528 - DNA, 25 bp, Artificial
  Probe
gagatctcagaagcatgaagagtcc

SEQ ID NO: 263529 - DNA, 25 bp, Artificial
  Probe
aatcagagatctcagaagcatgaag

SEQ ID NO: 263530 - DNA, 25 bp, Artificial
  Probe
caactacctatgagcatgggataca

SEQ ID NO: 263531 - DNA, 25 bp, Artificial
  Probe
gtcagccgcacatgctcttcctgaa

SEQ ID NO: 263532 - DNA, 25 bp, Artificial
  Probe
cccctgtatccctctgaagaagaca

SEQ ID NO: 263533 - DNA, 25 bp, Artificial
  Probe
gctgtttaccatgtgcatccaacta

SEQ ID NO: 263534 - DNA, 25 bp, Artificial
  Probe
ccctctgaagaagacatgattgagt

SEQ ID NO: 263535 - DNA, 25 bp, Artificial
  Probe
aagacttggaactggccattgcact

SEQ ID NO: 263536 - DNA, 25 bp, Artificial
  Probe
aaagctcaacttgtctcaagttaga

SEQ ID NO: 263537 - DNA, 25 bp, Artificial
  Probe
ccaaagtcagcatgtgatggttagc

SEQ ID NO: 263538 - DNA, 25 bp, Artificial
  Probe
ctggtcctggatgaagcagtaggtt

SEQ ID NO: 263539 - DNA, 25 bp, Artificial
  Probe
tgccaaagtcagcatgtgatggtta

SEQ ID NO: 263540 - DNA, 25 bp, Artificial
  Probe
gttagcgttatctctccataatgac

SEQ ID NO: 263541 - DNA, 25 bp, Artificial
  Probe
ttggtgtcaactggaaagctcaact

SEQ ID NO: 263542 - DNA, 25 bp, Artificial
  Probe
atgcttttgttaagacctataaagc

SEQ ID NO: 263543 - DNA, 25 bp, Artificial
  Probe
agcatgtgatggttagcgttatctc

SEQ ID NO: 263544 - DNA, 25 bp, Artificial
  Probe
tgatggttagcgttatctctccata

SEQ ID NO: 263545 - DNA, 25 bp, Artificial
  Probe
tcagcatgtgatggttagcgttatc

SEQ ID NO: 263546 - DNA, 25 bp, Artificial
  Probe
gtttgccccgggtgttgcttatgtc

SEQ ID NO: 263547 - DNA, 25 bp, Artificial
  Probe
gttgatattgtcgtcggtactccag

SEQ ID NO: 263548 - DNA, 25 bp, Artificial
  Probe
caacttgtctcaagttagattcctg

SEQ ID NO: 263549 - DNA, 25 bp, Artificial
  Probe
gtgtcaactggaaagctcaacttgt

SEQ ID NO: 263550 - DNA, 25 bp, Artificial
  Probe
tcggtactccaggaagattagatga

SEQ ID NO: 263551 - DNA, 25 bp, Artificial
  Probe
cctggtcctggatgaagcagtaggt

SEQ ID NO: 263552 - DNA, 25 bp, Artificial
  Probe
gttagattcctggtcctggatgaag

SEQ ID NO: 263553 - DNA, 25 bp, Artificial
  Probe
caaagtcagcatgtgatggttagcg

SEQ ID NO: 263554 - DNA, 25 bp, Artificial
  Probe
tggcactatttcagtgttcacatgt

SEQ ID NO: 263555 - DNA, 25 bp, Artificial
  Probe
cgggtgttgcttatgtcttcaggtt

SEQ ID NO: 263556 - DNA, 25 bp, Artificial
  Probe
tattgtcgtcggtactccaggaaga

SEQ ID NO: 263557 - DNA, 25 bp, Artificial
  Probe
ttgatattgtcgtcggtactccagg

SEQ ID NO: 263558 - DNA, 25 bp, Artificial
  Probe
tgatttggtgtcaactggaaagctc

SEQ ID NO: 263559 - DNA, 25 bp, Artificial
  Probe
tcaggttgatattgtcgtcggtact

SEQ ID NO: 263560 - DNA, 25 bp, Artificial
  Probe
ccccgggtgttgcttatgtcttcag

SEQ ID NO: 263561 - DNA, 25 bp, Artificial
  Probe
cttcaggttgatattgtcgtcggta

SEQ ID NO: 263562 - DNA, 25 bp, Artificial
  Probe
tctcaagttagattcctggtcctgg

SEQ ID NO: 263563 - DNA, 25 bp, Artificial
  Probe
aatatcctttgcattgactggcact

SEQ ID NO: 263564 - DNA, 25 bp, Artificial
  Probe
tcaactggaaagctcaacttgtctc

SEQ ID NO: 263565 - DNA, 25 bp, Artificial
  Probe
ctttgcattgactggcactatttca

SEQ ID NO: 263566 - DNA, 25 bp, Artificial
  Probe
atgtcttcaggttgatattgtcgtc

SEQ ID NO: 263567 - DNA, 25 bp, Artificial
  Probe
cttatgtcttcaggttgatattgtc

SEQ ID NO: 263568 - DNA, 25 bp, Artificial
  Probe
tggaaagctcaacttgtctcaagtt

SEQ ID NO: 263569 - DNA, 25 bp, Artificial
  Probe
gcttttgttaagacctataaagcaa

SEQ ID NO: 263570 - DNA, 25 bp, Artificial
  Probe
gactggcactatttcagtgttcaca

SEQ ID NO: 263571 - DNA, 25 bp, Artificial
  Probe
cggtactccaggaagattagatgat

SEQ ID NO: 263572 - DNA, 25 bp, Artificial
  Probe
actatttcagtgttcacatgtttgt

SEQ ID NO: 263573 - DNA, 25 bp, Artificial
  Probe
aactggaaagctcaacttgtctcaa

SEQ ID NO: 263574 - DNA, 25 bp, Artificial
  Probe
ttcctggtcctggatgaagcagtag

SEQ ID NO: 263575 - DNA, 25 bp, Artificial
  Probe
gattcctggtcctggatgaagcagt

SEQ ID NO: 263576 - DNA, 25 bp, Artificial
  Probe
gctgccaaagtcagcatgtgatggt

SEQ ID NO: 263577 - DNA, 25 bp, Artificial
  Probe
atggttagcgttatctctccataat

SEQ ID NO: 263578 - DNA, 25 bp, Artificial
  Probe
ggtgtcaactggaaagctcaacttg

SEQ ID NO: 263579 - DNA, 25 bp, Artificial
  Probe
taaatatcctttgcattgactggca

SEQ ID NO: 263580 - DNA, 25 bp, Artificial
  Probe
gcattgactggcactatttcagtgt

SEQ ID NO: 263581 - DNA, 25 bp, Artificial
  Probe
cagcatgtgatggttagcgttatct

SEQ ID NO: 263582 - DNA, 25 bp, Artificial
  Probe
tgattggatacagtgcagcggaact

SEQ ID NO: 263583 - DNA, 25 bp, Artificial
  Probe
tatgagaaacttagccgtgcattac

SEQ ID NO: 263584 - DNA, 25 bp, Artificial
  Probe
ctctgattggatacagtgcagcgga

SEQ ID NO: 263585 - DNA, 25 bp, Artificial
  Probe
tcaagctaaatcagcctgaattagt

SEQ ID NO: 263586 - DNA, 25 bp, Artificial
  Probe
cagatccaactatggcagtttttgc

SEQ ID NO: 263587 - DNA, 25 bp, Artificial
  Probe
acaatggtcagatccaactatggca

SEQ ID NO: 263588 - DNA, 25 bp, Artificial
  Probe
acgggattgctcagccagtcacagc

SEQ ID NO: 263589 - DNA, 25 bp, Artificial
  Probe
tccaactatggcagtttttgcttga

SEQ ID NO: 263590 - DNA, 25 bp, Artificial
  Probe
ggtcagatccaactatggcagtttt

SEQ ID NO: 263591 - DNA, 25 bp, Artificial
  Probe
cagcctgaattagttgcacaaaaat

SEQ ID NO: 263592 - DNA, 25 bp, Artificial
  Probe
gaactgaaccgcttggtcacagaat

SEQ ID NO: 263593 - DNA, 25 bp, Artificial
  Probe
acttagccgtgcattacggtattat

SEQ ID NO: 263594 - DNA, 25 bp, Artificial
  Probe
ttagccgtgcattacggtattatta

SEQ ID NO: 263595 - DNA, 25 bp, Artificial
  Probe
ttgccaagatgcagctccacgggat

SEQ ID NO: 263596 - DNA, 25 bp, Artificial
  Probe
gcttgccaagatgcagctccacggg

SEQ ID NO: 263597 - DNA, 25 bp, Artificial
  Probe
cttcttactgacaaggatgctcgag

SEQ ID NO: 263598 - DNA, 25 bp, Artificial
  Probe
gaaacaatggtcagatccaactatg

SEQ ID NO: 263599 - DNA, 25 bp, Artificial
  Probe
agatgcagctccacgggattgctca

SEQ ID NO: 263600 - DNA, 25 bp, Artificial
  Probe
aacagaagaagcttgccaagatgca

SEQ ID NO: 263601 - DNA, 25 bp, Artificial
  Probe
gattgctcagccagtcacagccgtg

SEQ ID NO: 263602 - DNA, 25 bp, Artificial
  Probe
ctcgagactgtatttcttgggttgg

SEQ ID NO: 263603 - DNA, 25 bp, Artificial
  Probe
tggctgctgcctctctccagacaga

SEQ ID NO: 263604 - DNA, 25 bp, Artificial
  Probe
tgaagactctgattggatacagtgc

SEQ ID NO: 263605 - DNA, 25 bp, Artificial
  Probe
tcagccagtcacagccgtggcactg

SEQ ID NO: 263606 - DNA, 25 bp, Artificial
  Probe
tgctcagccagtcacagccgtggca

SEQ ID NO: 263607 - DNA, 25 bp, Artificial
  Probe
gacttgaagactctgattggataca

SEQ ID NO: 263608 - DNA, 25 bp, Artificial
  Probe
ttagttgcacaaaaatggggacaac

SEQ ID NO: 263609 - DNA, 25 bp, Artificial
  Probe
acagtgcagcggaactgaaccgctt

SEQ ID NO: 263610 - DNA, 25 bp, Artificial
  Probe
cagctccacgggattgctcagccag

SEQ ID NO: 263611 - DNA, 25 bp, Artificial
  Probe
tttgcttgaacttcttactgacaag

SEQ ID NO: 263612 - DNA, 25 bp, Artificial
  Probe
ttcaagctaaatcagcctgaattag

SEQ ID NO: 263613 - DNA, 25 bp, Artificial
  Probe
gctaaatcagcctgaattagttgca

SEQ ID NO: 263614 - DNA, 25 bp, Artificial
  Probe
tagttgcacaaaaatggggacaacg

SEQ ID NO: 263615 - DNA, 25 bp, Artificial
  Probe
tgacttgaagactctgattggatac

SEQ ID NO: 263616 - DNA, 25 bp, Artificial
  Probe
actatgagaaacttagccgtgcatt

SEQ ID NO: 263617 - DNA, 25 bp, Artificial
  Probe
aagactctgattggatacagtgcag

SEQ ID NO: 263618 - DNA, 25 bp, Artificial
  Probe
gtttttgcttgaacttcttactgac

SEQ ID NO: 263619 - DNA, 25 bp, Artificial
  Probe
acagccgtggcactggctgctgcct

SEQ ID NO: 263620 - DNA, 25 bp, Artificial
  Probe
gaaacttagccgtgcattacggtat

SEQ ID NO: 263621 - DNA, 25 bp, Artificial
  Probe
cagcggaactgaaccgcttggtcac

SEQ ID NO: 263622 - DNA, 25 bp, Artificial
  Probe
tggatacagtgcagcggaactgaac

SEQ ID NO: 263623 - DNA, 25 bp, Artificial
  Probe
gcttggtcacagaatgtgaacagaa

SEQ ID NO: 263624 - DNA, 25 bp, Artificial
  Probe
ctgtgacttgaagactctgattgga

SEQ ID NO: 263625 - DNA, 25 bp, Artificial
  Probe
atggtcagatccaactatggcagtt

SEQ ID NO: 263626 - DNA, 25 bp, Artificial
  Probe
caaatttgtctgtgacttgaagact

SEQ ID NO: 263627 - DNA, 25 bp, Artificial
  Probe
cttgaagactctgattggatacagt

SEQ ID NO: 263628 - DNA, 25 bp, Artificial
  Probe
catccaactgctacagtgcgctggg

SEQ ID NO: 263629 - DNA, 25 bp, Artificial
  Probe
ctggtttgtgcatgtattcacagct

SEQ ID NO: 263630 - DNA, 25 bp, Artificial
  Probe
ggggagcccaactgaccacacaagt

SEQ ID NO: 263631 - DNA, 25 bp, Artificial
  Probe
tattccatccaactgctacagtgcg

SEQ ID NO: 263632 - DNA, 25 bp, Artificial
  Probe
ttctcttgcaaatggggagcccaac

SEQ ID NO: 263633 - DNA, 25 bp, Artificial
  Probe
ttccatccaactgctacagtgcgct

SEQ ID NO: 263634 - DNA, 25 bp, Artificial
  Probe
ttgcaaatggggagcccaactgacc

SEQ ID NO: 263635 - DNA, 25 bp, Artificial
  Probe
agtattccatccaactgctacagtg

SEQ ID NO: 263636 - DNA, 25 bp, Artificial
  Probe
tccatccaactgctacagtgcgctg

SEQ ID NO: 263637 - DNA, 25 bp, Artificial
  Probe
gaatagtcattttctcttgcaaatg

SEQ ID NO: 263638 - DNA, 25 bp, Artificial
  Probe
tcattttctcttgcaaatggggagc

SEQ ID NO: 263639 - DNA, 25 bp, Artificial
  Probe
aatggggagcccaactgaccacaca

SEQ ID NO: 263640 - DNA, 25 bp, Artificial
  Probe
gtaaccaaacagtgggacataacta

SEQ ID NO: 263641 - DNA, 25 bp, Artificial
  Probe
ccccagctggtttgtgcatgtattc

SEQ ID NO: 263642 - DNA, 25 bp, Artificial
  Probe
tgcatttccaagattcagaatagtc

SEQ ID NO: 263643 - DNA, 25 bp, Artificial
  Probe
gggacataactaactccacatgaaa

SEQ ID NO: 263644 - DNA, 25 bp, Artificial
  Probe
agctggtttgtgcatgtattcacag

SEQ ID NO: 263645 - DNA, 25 bp, Artificial
  Probe
tggtttgtgcatgtattcacagctt

SEQ ID NO: 263646 - DNA, 25 bp, Artificial
  Probe
tagtcattttctcttgcaaatgggg

SEQ ID NO: 263647 - DNA, 25 bp, Artificial
  Probe
tgtgccttttctgttaaccctaatg

SEQ ID NO: 263648 - DNA, 25 bp, Artificial
  Probe
gcatttccaagattcagaatagtca

SEQ ID NO: 263649 - DNA, 25 bp, Artificial
  Probe
tgggacataactaactccacatgaa

SEQ ID NO: 263650 - DNA, 25 bp, Artificial
  Probe
tccaactgctacagtgcgctgggat

SEQ ID NO: 263651 - DNA, 25 bp, Artificial
  Probe
ttttctcttgcaaatggggagccca

SEQ ID NO: 263652 - DNA, 25 bp, Artificial
  Probe
ggagcccaactgaccacacaagtat

SEQ ID NO: 263653 - DNA, 25 bp, Artificial
  Probe
agaccccagctggtttgtgcatgta

SEQ ID NO: 263654 - DNA, 25 bp, Artificial
  Probe
gccctctctgggaaccggggaaatg

SEQ ID NO: 263655 - DNA, 25 bp, Artificial
  Probe
gtgccttttctgttaaccctaatgc

SEQ ID NO: 263656 - DNA, 25 bp, Artificial
  Probe
gagcccaactgaccacacaagtatt

SEQ ID NO: 263657 - DNA, 25 bp, Artificial
  Probe
attttctcttgcaaatggggagccc

SEQ ID NO: 263658 - DNA, 25 bp, Artificial
  Probe
gaccccagctggtttgtgcatgtat

SEQ ID NO: 263659 - DNA, 25 bp, Artificial
  Probe
atccaactgctacagtgcgctggga

SEQ ID NO: 263660 - DNA, 25 bp, Artificial
  Probe
ccagaccccagctggtttgtgcatg

SEQ ID NO: 263661 - DNA, 25 bp, Artificial
  Probe
accccagctggtttgtgcatgtatt

SEQ ID NO: 263662 - DNA, 25 bp, Artificial
  Probe
cattttctcttgcaaatggggagcc

SEQ ID NO: 263663 - DNA, 25 bp, Artificial
  Probe
tcccagaccccagctggtttgtgca

SEQ ID NO: 263664 - DNA, 25 bp, Artificial
  Probe
gtattccatccaactgctacagtgc

SEQ ID NO: 263665 - DNA, 25 bp, Artificial
  Probe
cagaccccagctggtttgtgcatgt

SEQ ID NO: 263666 - DNA, 25 bp, Artificial
  Probe
atgcatttccaagattcagaatagt

SEQ ID NO: 263667 - DNA, 25 bp, Artificial
  Probe
aatagtcattttctcttgcaaatgg

SEQ ID NO: 263668 - DNA, 25 bp, Artificial
  Probe
aatgcatttccaagattcagaatag

SEQ ID NO: 263669 - DNA, 25 bp, Artificial
  Probe
cagctggtttgtgcatgtattcaca

SEQ ID NO: 263670 - DNA, 25 bp, Artificial
  Probe
agtaaccaaacagtgggacataact

SEQ ID NO: 263671 - DNA, 25 bp, Artificial
  Probe
tttgtgcatgtattcacagcttcct

SEQ ID NO: 263672 - DNA, 25 bp, Artificial
  Probe
gtttgtgcatgtattcacagcttcc

SEQ ID NO: 263673 - DNA, 25 bp, Artificial
  Probe
atggggagcccaactgaccacacaa

SEQ ID NO: 263674 - DNA, 25 bp, Artificial
  Probe
cagtcgctggaagaccagcaagtac

SEQ ID NO: 263675 - DNA, 25 bp, Artificial
  Probe
agcaccagtcgctggaagaccagca

SEQ ID NO: 263676 - DNA, 25 bp, Artificial
  Probe
ccagtcgctggaagaccagcaagta

SEQ ID NO: 263677 - DNA, 25 bp, Artificial
  Probe
ctgtacaacatggacatgttttatt

SEQ ID NO: 263678 - DNA, 25 bp, Artificial
  Probe
acagacgtgtgtgacagcgactaca

SEQ ID NO: 263679 - DNA, 25 bp, Artificial
  Probe
cctacatcattcgaggtatggcacc

SEQ ID NO: 263680 - DNA, 25 bp, Artificial
  Probe
caagtactacctgcacggactcgtc

SEQ ID NO: 263681 - DNA, 25 bp, Artificial
  Probe
agcgactacagcaccagtcgctgga

SEQ ID NO: 263682 - DNA, 25 bp, Artificial
  Probe
actacagcaccagtcgctggaagac

SEQ ID NO: 263683 - DNA, 25 bp, Artificial
  Probe
agcacagacgtgtgtgacagcgact

SEQ ID NO: 263684 - DNA, 25 bp, Artificial
  Probe
gacagcgactacagcaccagtcgct

SEQ ID NO: 263685 - DNA, 25 bp, Artificial
  Probe
tgtgtgacagcgactacagcaccag

SEQ ID NO: 263686 - DNA, 25 bp, Artificial
  Probe
gactacagcaccagtcgctggaaga

SEQ ID NO: 263687 - DNA, 25 bp, Artificial
  Probe
agtactacctgcacggactcgtcct

SEQ ID NO: 263688 - DNA, 25 bp, Artificial
  Probe
gccctacatcattcgaggtatggca

SEQ ID NO: 263689 - DNA, 25 bp, Artificial
  Probe
tgacagcgactacagcaccagtcgc

SEQ ID NO: 263690 - DNA, 25 bp, Artificial
  Probe
ctccctgtacaacatggacatgttt

SEQ ID NO: 263691 - DNA, 25 bp, Artificial
  Probe
accagcaagtactacctgcacggac

SEQ ID NO: 263692 - DNA, 25 bp, Artificial
  Probe
caccttgcagcacagacgtgtgtga

SEQ ID NO: 263693 - DNA, 25 bp, Artificial
  Probe
gcaccagtcgctggaagaccagcaa

SEQ ID NO: 263694 - DNA, 25 bp, Artificial
  Probe
gcagcacagacgtgtgtgacagcga

SEQ ID NO: 263695 - DNA, 25 bp, Artificial
  Probe
ccttgcagcacagacgtgtgtgaca

SEQ ID NO: 263696 - DNA, 25 bp, Artificial
  Probe
cgctggaagaccagcaagtactacc

SEQ ID NO: 263697 - DNA, 25 bp, Artificial
  Probe
ggaagaccagcaagtactacctgca

SEQ ID NO: 263698 - DNA, 25 bp, Artificial
  Probe
tggaagaccagcaagtactacctgc

SEQ ID NO: 263699 - DNA, 25 bp, Artificial
  Probe
agaccagcaagtactacctgcacgg

SEQ ID NO: 263700 - DNA, 25 bp, Artificial
  Probe
agcaagtactacctgcacggactcg

SEQ ID NO: 263701 - DNA, 25 bp, Artificial
  Probe
cacagacgtgtgtgacagcgactac

SEQ ID NO: 263702 - DNA, 25 bp, Artificial
  Probe
gcaagtactacctgcacggactcgt

SEQ ID NO: 263703 - DNA, 25 bp, Artificial
  Probe
gtcgctggaagaccagcaagtacta

SEQ ID NO: 263704 - DNA, 25 bp, Artificial
  Probe
cctccctgtacaacatggacatgtt

SEQ ID NO: 263705 - DNA, 25 bp, Artificial
  Probe
ccagcaagtactacctgcacggact

SEQ ID NO: 263706 - DNA, 25 bp, Artificial
  Probe
acaacaccttgcagcacagacgtgt

SEQ ID NO: 263707 - DNA, 25 bp, Artificial
  Probe
cagcaagtactacctgcacggactc

SEQ ID NO: 263708 - DNA, 25 bp, Artificial
  Probe
ctacagcaccagtcgctggaagacc

SEQ ID NO: 263709 - DNA, 25 bp, Artificial
  Probe
gtgacagcgactacagcaccagtcg

SEQ ID NO: 263710 - DNA, 25 bp, Artificial
  Probe
tacatcattcgaggtatggcacccc

SEQ ID NO: 263711 - DNA, 25 bp, Artificial
  Probe
gaccagcaagtactacctgcacgga

SEQ ID NO: 263712 - DNA, 25 bp, Artificial
  Probe
cgactacagcaccagtcgctggaag

SEQ ID NO: 263713 - DNA, 25 bp, Artificial
  Probe
tgtgacagcgactacagcaccagtc

SEQ ID NO: 263714 - DNA, 25 bp, Artificial
  Probe
aagtactacctgcacggactcgtcc

SEQ ID NO: 263715 - DNA, 25 bp, Artificial
  Probe
acgaggatcctgaacccatcaccgt

SEQ ID NO: 263716 - DNA, 25 bp, Artificial
  Probe
ccctacatcattcgaggtatggcac

SEQ ID NO: 263717 - DNA, 25 bp, Artificial
  Probe
tcgctggaagaccagcaagtactac

SEQ ID NO: 263718 - DNA, 25 bp, Artificial
  Probe
gcacagacgtgtgtgacagcgacta

SEQ ID NO: 263719 - DNA, 25 bp, Artificial
  Probe
caacaacaccttgcagcacagacgt

SEQ ID NO: 263720 - DNA, 25 bp, Artificial
  Probe
accccggggatttgcgacacctcag

SEQ ID NO: 263721 - DNA, 25 bp, Artificial
  Probe
ctcggagctcataagcaagaactaa

SEQ ID NO: 263722 - DNA, 25 bp, Artificial
  Probe
tggtgctcaaggaaccccggggatt

SEQ ID NO: 263723 - DNA, 25 bp, Artificial
  Probe
aaacccagcatctgggaggattggt

SEQ ID NO: 263724 - DNA, 25 bp, Artificial
  Probe
taccgagggcctcaaggtgtgcctg

SEQ ID NO: 263725 - DNA, 25 bp, Artificial
  Probe
aaagtcaggtcctcggagctcataa

SEQ ID NO: 263726 - DNA, 25 bp, Artificial
  Probe
gagataaaaacactcaagagacttg

SEQ ID NO: 263727 - DNA, 25 bp, Artificial
  Probe
agctagtccttcctggcctgctgct

SEQ ID NO: 263728 - DNA, 25 bp, Artificial
  Probe
tcgagatggtgctcatggtgagcct

SEQ ID NO: 263729 - DNA, 25 bp, Artificial
  Probe
caaagatggtcgagatggtgctcat

SEQ ID NO: 263730 - DNA, 25 bp, Artificial
  Probe
agctcataagcaagaactaaagtag

SEQ ID NO: 263731 - DNA, 25 bp, Artificial
  Probe
cagcctgccaaggagctgtgttagg

SEQ ID NO: 263732 - DNA, 25 bp, Artificial
  Probe
gtgagcctggccttcctggtgatcc

SEQ ID NO: 263733 - DNA, 25 bp, Artificial
  Probe
ctggcctgctgcttggccccaagag

SEQ ID NO: 263734 - DNA, 25 bp, Artificial
  Probe
gtgctcatggtgagcctggccttcc

SEQ ID NO: 263735 - DNA, 25 bp, Artificial
  Probe
cagaccttagggatggagactttaa

SEQ ID NO: 263736 - DNA, 25 bp, Artificial
  Probe
ctccagcaggcagcagggatgagca

SEQ ID NO: 263737 - DNA, 25 bp, Artificial
  Probe
tctattggcgccactgtcactgtcc

SEQ ID NO: 263738 - DNA, 25 bp, Artificial
  Probe
agggcctcaaggtgtgcctggcatc

SEQ ID NO: 263739 - DNA, 25 bp, Artificial
  Probe
ggcctcaaggtgtgcctggcatcag

SEQ ID NO: 263740 - DNA, 25 bp, Artificial
  Probe
atggtgctcatggtgagcctggcct

SEQ ID NO: 263741 - DNA, 25 bp, Artificial
  Probe
tgtcactgtcccatcttcaggattt

SEQ ID NO: 263742 - DNA, 25 bp, Artificial
  Probe
taaacccagcatctgggaggattgg

SEQ ID NO: 263743 - DNA, 25 bp, Artificial
  Probe
ctcataagcaagaactaaagtagga

SEQ ID NO: 263744 - DNA, 25 bp, Artificial
  Probe
gaaatgacagagcactccagcaggc

SEQ ID NO: 263745 - DNA, 25 bp, Artificial
  Probe
tggagactttaaacccagcatctgg

SEQ ID NO: 263746 - DNA, 25 bp, Artificial
  Probe
gacacctcagcctgccaaggagctg

SEQ ID NO: 263747 - DNA, 25 bp, Artificial
  Probe
gataaaaacactcaagagacttgtt

SEQ ID NO: 263748 - DNA, 25 bp, Artificial
  Probe
caggaatggacagtggctggctaca

SEQ ID NO: 263749 - DNA, 25 bp, Artificial
  Probe
tgagcctggccttcctggtgatcct

SEQ ID NO: 263750 - DNA, 25 bp, Artificial
  Probe
agcaaagatggtcgagatggtgctc

SEQ ID NO: 263751 - DNA, 25 bp, Artificial
  Probe
gcccattcatctgtgacagcatacc

SEQ ID NO: 263752 - DNA, 25 bp, Artificial
  Probe
tcaaggtgtgcctggcatcagcaaa

SEQ ID NO: 263753 - DNA, 25 bp, Artificial
  Probe
agcctatgacagactaccaataaag

SEQ ID NO: 263754 - DNA, 25 bp, Artificial
  Probe
ttatggcagcccattcatctgtgac

SEQ ID NO: 263755 - DNA, 25 bp, Artificial
  Probe
atggacagtggctggctacagtcag

SEQ ID NO: 263756 - DNA, 25 bp, Artificial
  Probe
aagagcatctattggcgccactgtc

SEQ ID NO: 263757 - DNA, 25 bp, Artificial
  Probe
ctgcttggccccaagagcatctatt

SEQ ID NO: 263758 - DNA, 25 bp, Artificial
  Probe
aggatttatggcagcccattcatct

SEQ ID NO: 263759 - DNA, 25 bp, Artificial
  Probe
tggcctgctgcttggccccaagagc

SEQ ID NO: 263760 - DNA, 25 bp, Artificial
  Probe
attggcgccactgtcactgtcccat

SEQ ID NO: 263761 - DNA, 25 bp, Artificial
  Probe
tttgcgacacctcagcctgccaagg

SEQ ID NO: 263762 - DNA, 25 bp, Artificial
  Probe
ccagcatctgggaggattggtgtta

SEQ ID NO: 263763 - DNA, 25 bp, Artificial
  Probe
gggaaaagtcaggtcctcggagctc

SEQ ID NO: 263764 - DNA, 25 bp, Artificial
  Probe
ggagctgctggtgctcaaggaaccc

SEQ ID NO: 263765 - DNA, 25 bp, Artificial
  Probe
cttcaggatttatggcagcccattc

SEQ ID NO: 263766 - DNA, 25 bp, Artificial
  Probe
acatttcattattttgcagcaggtt

SEQ ID NO: 263767 - DNA, 25 bp, Artificial
  Probe
agaagaggtctgcttttctgtcgca

SEQ ID NO: 263768 - DNA, 25 bp, Artificial
  Probe
tctgcttttctgtcgcattttcaga

SEQ ID NO: 263769 - DNA, 25 bp, Artificial
  Probe
ggagatggcgactctttttatagcg

SEQ ID NO: 263770 - DNA, 25 bp, Artificial
  Probe
atgtctgtgttcatgtgtgtgtcct

SEQ ID NO: 263771 - DNA, 25 bp, Artificial
  Probe
ctggagatggcgactctttttatag

SEQ ID NO: 263772 - DNA, 25 bp, Artificial
  Probe
agatttgatcatgtagaccattatc

SEQ ID NO: 263773 - DNA, 25 bp, Artificial
  Probe
gtctgtgttcatgtgtgtgtcctgt

SEQ ID NO: 263774 - DNA, 25 bp, Artificial
  Probe
acttcaaaatgtcatatgctcagga

SEQ ID NO: 263775 - DNA, 25 bp, Artificial
  Probe
agcgactttcctcctggaggcagcg

SEQ ID NO: 263776 - DNA, 25 bp, Artificial
  Probe
ttattttgcagcaggtttgactact

SEQ ID NO: 263777 - DNA, 25 bp, Artificial
  Probe
acctcatgtgttatagatttgatca

SEQ ID NO: 263778 - DNA, 25 bp, Artificial
  Probe
cttcaaaatgtcatatgctcaggac

SEQ ID NO: 263779 - DNA, 25 bp, Artificial
  Probe
tacttcaaaatgtcatatgctcagg

SEQ ID NO: 263780 - DNA, 25 bp, Artificial
  Probe
cgactttcctcctggaggcagcgca

SEQ ID NO: 263781 - DNA, 25 bp, Artificial
  Probe
cagcaggtttgactacttcttcctt

SEQ ID NO: 263782 - DNA, 25 bp, Artificial
  Probe
gtcctgttttctgactttgaaatgt

SEQ ID NO: 263783 - DNA, 25 bp, Artificial
  Probe
cattattttgcagcaggtttgacta

SEQ ID NO: 263784 - DNA, 25 bp, Artificial
  Probe
atctagttctaagaagaggtctgct

SEQ ID NO: 263785 - DNA, 25 bp, Artificial
  Probe
tggaggcagcgcagactcagcatct

SEQ ID NO: 263786 - DNA, 25 bp, Artificial
  Probe
gtaaaaaagcctggagatggcgact

SEQ ID NO: 263787 - DNA, 25 bp, Artificial
  Probe
tcaaaatgtcatatgctcaggacca

SEQ ID NO: 263788 - DNA, 25 bp, Artificial
  Probe
agaacatttcattattttgcagcag

SEQ ID NO: 263789 - DNA, 25 bp, Artificial
  Probe
gtcgcattttcagatttccacctgc

SEQ ID NO: 263790 - DNA, 25 bp, Artificial
  Probe
gcaggtttgactacttcttccttct

SEQ ID NO: 263791 - DNA, 25 bp, Artificial
  Probe
tcatgtgtgtgtcctgttttctgac

SEQ ID NO: 263792 - DNA, 25 bp, Artificial
  Probe
gaggcagcgcagactcagcatctag

SEQ ID NO: 263793 - DNA, 25 bp, Artificial
  Probe
aaagcctggagatggcgactctttt

SEQ ID NO: 263794 - DNA, 25 bp, Artificial
  Probe
catttcattattttgcagcaggttt

SEQ ID NO: 263795 - DNA, 25 bp, Artificial
  Probe
ttcattattttgcagcaggtttgac

SEQ ID NO: 263796 - DNA, 25 bp, Artificial
  Probe
ctcagcatctagttctaagaagagg

SEQ ID NO: 263797 - DNA, 25 bp, Artificial
  Probe
tgtcgcattttcagatttccacctg

SEQ ID NO: 263798 - DNA, 25 bp, Artificial
  Probe
catctttccatatttctcctggggg

SEQ ID NO: 263799 - DNA, 25 bp, Artificial
  Probe
tatgtctgtgttcatgtgtgtgtcc

SEQ ID NO: 263800 - DNA, 25 bp, Artificial
  Probe
gcgactctttttatagcgactttcc

SEQ ID NO: 263801 - DNA, 25 bp, Artificial
  Probe
ctttttatagcgactttcctcctgg

SEQ ID NO: 263802 - DNA, 25 bp, Artificial
  Probe
ctttcctcctggaggcagcgcagac

SEQ ID NO: 263803 - DNA, 25 bp, Artificial
  Probe
gtcagaacatttcattattttgcag

SEQ ID NO: 263804 - DNA, 25 bp, Artificial
  Probe
catgtgtgtgtcctgttttctgact

SEQ ID NO: 263805 - DNA, 25 bp, Artificial
  Probe
aaatgtcatatgctcaggaccagat

SEQ ID NO: 263806 - DNA, 25 bp, Artificial
  Probe
cctcctggaggcagcgcagactcag

SEQ ID NO: 263807 - DNA, 25 bp, Artificial
  Probe
cagcatctagttctaagaagaggtc

SEQ ID NO: 263808 - DNA, 25 bp, Artificial
  Probe
actttcctcctggaggcagcgcaga

SEQ ID NO: 263809 - DNA, 25 bp, Artificial
  Probe
gtgtgtcctgttttctgactttgaa

SEQ ID NO: 263810 - DNA, 25 bp, Artificial
  Probe
tgcagcaggtttgactacttcttcc

SEQ ID NO: 263811 - DNA, 25 bp, Artificial
  Probe
gacctcatgtgttatagatttgatc

SEQ ID NO: 263812 - DNA, 25 bp, Artificial
  Probe
cgaggctgaccccagggtctgagtc

SEQ ID NO: 263813 - DNA, 25 bp, Artificial
  Probe
tccgcgaggcagttgagaggaagag

SEQ ID NO: 263814 - DNA, 25 bp, Artificial
  Probe
cacgaggctgaccccagggtctgag

SEQ ID NO: 263815 - DNA, 25 bp, Artificial
  Probe
catccgcgaggcagttgagaggaag

SEQ ID NO: 263816 - DNA, 25 bp, Artificial
  Probe
agagtgcggtgtgacggccccgggg

SEQ ID NO: 263817 - DNA, 25 bp, Artificial
  Probe
gaggctgaccccagggtctgagtcg

SEQ ID NO: 263818 - DNA, 25 bp, Artificial
  Probe
tgaccccagggtctgagtcgccgct

SEQ ID NO: 263819 - DNA, 25 bp, Artificial
  Probe
ccagggtctgagtcgccgctgccgc

SEQ ID NO: 263820 - DNA, 25 bp, Artificial
  Probe
ggggccgaggagggacccagacatg

SEQ ID NO: 263821 - DNA, 25 bp, Artificial
  Probe
cggggccgaggagggacccagacat

SEQ ID NO: 263822 - DNA, 25 bp, Artificial
  Probe
cagggtctgagtcgccgctgccgcc

SEQ ID NO: 263823 - DNA, 25 bp, Artificial
  Probe
aagagtgcggtgtgacggccccggg

SEQ ID NO: 263824 - DNA, 25 bp, Artificial
  Probe
gaagagtgcggtgtgacggccccgg

SEQ ID NO: 263825 - DNA, 25 bp, Artificial
  Probe
atccgcgaggcagttgagaggaaga

SEQ ID NO: 263826 - DNA, 25 bp, Artificial
  Probe
ctgccaccatccgcgaggcagttga

SEQ ID NO: 263827 - DNA, 25 bp, Artificial
  Probe
gggtctgagtcgccgctgccgccgc

SEQ ID NO: 263828 - DNA, 25 bp, Artificial
  Probe
tgcggtgtgacggccccggggccga

SEQ ID NO: 263829 - DNA, 25 bp, Artificial
  Probe
ggtctgagtcgccgctgccgccgct

SEQ ID NO: 263830 - DNA, 25 bp, Artificial
  Probe
aggaagagtgcggtgtgacggcccc

SEQ ID NO: 263831 - DNA, 25 bp, Artificial
  Probe
gtctgagtcgccgctgccgccgctg

SEQ ID NO: 263832 - DNA, 25 bp, Artificial
  Probe
cgctgccaccatccgcgaggcagtt

SEQ ID NO: 263833 - DNA, 25 bp, Artificial
  Probe
acgaggctgaccccagggtctgagt

SEQ ID NO: 263834 - DNA, 25 bp, Artificial
  Probe
ggctgaccccagggtctgagtcgcc

SEQ ID NO: 263835 - DNA, 25 bp, Artificial
  Probe
caccatccgcgaggcagttgagagg

SEQ ID NO: 263836 - DNA, 25 bp, Artificial
  Probe
accatccgcgaggcagttgagagga

SEQ ID NO: 263837 - DNA, 25 bp, Artificial
  Probe
aggctgaccccagggtctgagtcgc

SEQ ID NO: 263838 - DNA, 25 bp, Artificial
  Probe
ccccagggtctgagtcgccgctgcc

SEQ ID NO: 263839 - DNA, 25 bp, Artificial
  Probe
ccgcgaggcagttgagaggaagagt

SEQ ID NO: 263840 - DNA, 25 bp, Artificial
  Probe
tgccaccatccgcgaggcagttgag

SEQ ID NO: 263841 - DNA, 25 bp, Artificial
  Probe
ggaagagtgcggtgtgacggccccg

SEQ ID NO: 263842 - DNA, 25 bp, Artificial
  Probe
gctgaccccagggtctgagtcgccg

SEQ ID NO: 263843 - DNA, 25 bp, Artificial
  Probe
agggtctgagtcgccgctgccgccg

SEQ ID NO: 263844 - DNA, 25 bp, Artificial
  Probe
cccagggtctgagtcgccgctgccg

SEQ ID NO: 263845 - DNA, 25 bp, Artificial
  Probe
ccatccgcgaggcagttgagaggaa

SEQ ID NO: 263846 - DNA, 25 bp, Artificial
  Probe
ctgaccccagggtctgagtcgccgc

SEQ ID NO: 263847 - DNA, 25 bp, Artificial
  Probe
gggccgaggagggacccagacatgg

SEQ ID NO: 263848 - DNA, 25 bp, Artificial
  Probe
accccagggtctgagtcgccgctgc

SEQ ID NO: 263849 - DNA, 25 bp, Artificial
  Probe
gaccccagggtctgagtcgccgctg

SEQ ID NO: 263850 - DNA, 25 bp, Artificial
  Probe
tgacataagcccttggaagaaaaga

SEQ ID NO: 263851 - DNA, 25 bp, Artificial
  Probe
gaggcaactcccaaatttacaaggg

SEQ ID NO: 263852 - DNA, 25 bp, Artificial
  Probe
atggacgccaggtcaggcgccacca

SEQ ID NO: 263853 - DNA, 25 bp, Artificial
  Probe
ccttcgcccaggaaaacatcaagct

SEQ ID NO: 263854 - DNA, 25 bp, Artificial
  Probe
gaggaacgtgcgtctcaagacacca

SEQ ID NO: 263855 - DNA, 25 bp, Artificial
  Probe
atggtacaggttttactatggacgc

SEQ ID NO: 263856 - DNA, 25 bp, Artificial
  Probe
ttcctgttgatgacataagcccttg

SEQ ID NO: 263857 - DNA, 25 bp, Artificial
  Probe
tgaagtgacattttacccagggtgt

SEQ ID NO: 263858 - DNA, 25 bp, Artificial
  Probe
ccttgctcccaaactccttgtggtt

SEQ ID NO: 263859 - DNA, 25 bp, Artificial
  Probe
aaatgtgtcaagtccccttcgccca

SEQ ID NO: 263860 - DNA, 25 bp, Artificial
  Probe
gacattttacccagggtgtgccatt

SEQ ID NO: 263861 - DNA, 25 bp, Artificial
  Probe
attctggtatctcagcctctcagcc

SEQ ID NO: 263862 - DNA, 25 bp, Artificial
  Probe
gctcccaaactccttgtggttttat

SEQ ID NO: 263863 - DNA, 25 bp, Artificial
  Probe
gccaccacgcagaacaaagccagtt

SEQ ID NO: 263864 - DNA, 25 bp, Artificial
  Probe
accctccttggttccttctgaatgt

SEQ ID NO: 263865 - DNA, 25 bp, Artificial
  Probe
tgaccaaatggtacaggttttacta

SEQ ID NO: 263866 - DNA, 25 bp, Artificial
  Probe
ctcccaaatttacaagggaatagat

SEQ ID NO: 263867 - DNA, 25 bp, Artificial
  Probe
tcaagctttggcagctgttctccag

SEQ ID NO: 263868 - DNA, 25 bp, Artificial
  Probe
aagccagttccgtaagctgcctccg

SEQ ID NO: 263869 - DNA, 25 bp, Artificial
  Probe
caatcctgaatggagaattttcaca

SEQ ID NO: 263870 - DNA, 25 bp, Artificial
  Probe
actatggacgccaggtcaggcgcca

SEQ ID NO: 263871 - DNA, 25 bp, Artificial
  Probe
tctcagcccttcctgttgatgacat

SEQ ID NO: 263872 - DNA, 25 bp, Artificial
  Probe
tctttggcttctcttctgccagttc

SEQ ID NO: 263873 - DNA, 25 bp, Artificial
  Probe
cataagcccttggaagaaaagagaa

SEQ ID NO: 263874 - DNA, 25 bp, Artificial
  Probe
gcaactcccaaatttacaagggaat

SEQ ID NO: 263875 - DNA, 25 bp, Artificial
  Probe
gaatagattctggtatctcagcctc

SEQ ID NO: 263876 - DNA, 25 bp, Artificial
  Probe
gaaatgtgtcaagtccccttcgccc

SEQ ID NO: 263877 - DNA, 25 bp, Artificial
  Probe
gttgatgacataagcccttggaaga

SEQ ID NO: 263878 - DNA, 25 bp, Artificial
  Probe
ctgccagttctgaggcaaagacacg

SEQ ID NO: 263879 - DNA, 25 bp, Artificial
  Probe
ccagttccgtaagctgcctccgata

SEQ ID NO: 263880 - DNA, 25 bp, Artificial
  Probe
tacaggttttactatggacgccagg

SEQ ID NO: 263881 - DNA, 25 bp, Artificial
  Probe
cctccttggttccttctgaatgttt

SEQ ID NO: 263882 - DNA, 25 bp, Artificial
  Probe
ccagggtgtgccattgcagtgatac

SEQ ID NO: 263883 - DNA, 25 bp, Artificial
  Probe
tggcttctcttctgccagttctgag

SEQ ID NO: 263884 - DNA, 25 bp, Artificial
  Probe
gaacaaagccagttccgtaagctgc

SEQ ID NO: 263885 - DNA, 25 bp, Artificial
  Probe
ctcttctgccagttctgaggcaaag

SEQ ID NO: 263886 - DNA, 25 bp, Artificial
  Probe
agttctgaggcaaagacacgacaaa

SEQ ID NO: 263887 - DNA, 25 bp, Artificial
  Probe
gcacggaggaacgtgcgtctcaaga

SEQ ID NO: 263888 - DNA, 25 bp, Artificial
  Probe
agacaccagctctgcagagcccttg

SEQ ID NO: 263889 - DNA, 25 bp, Artificial
  Probe
tacgtcactgctgcatccatgtggc

SEQ ID NO: 263890 - DNA, 25 bp, Artificial
  Probe
tcaggcgccaccacgcagaacaaag

SEQ ID NO: 263891 - DNA, 25 bp, Artificial
  Probe
aacatcaagctttggcagctgttct

SEQ ID NO: 263892 - DNA, 25 bp, Artificial
  Probe
ttctccagttgcacggaggaacgtg

SEQ ID NO: 263893 - DNA, 25 bp, Artificial
  Probe
gttctgaggcaaagacacgacaaaa

SEQ ID NO: 263894 - DNA, 25 bp, Artificial
  Probe
gttttactatggacgccaggtcagg

SEQ ID NO: 263895 - DNA, 25 bp, Artificial
  Probe
aggtcaggcgccaccacgcagaaca

SEQ ID NO: 263896 - DNA, 25 bp, Artificial
  Probe
tgcatgtcacaagtctcagatcatt

SEQ ID NO: 263897 - DNA, 25 bp, Artificial
  Probe
ctctgtagctgtgtaagttttgaca

SEQ ID NO: 263898 - DNA, 25 bp, Artificial
  Probe
tttctgtcaaactgtaagagtagga

SEQ ID NO: 263899 - DNA, 25 bp, Artificial
  Probe
gtatctcgtggaatcagtggttagc

SEQ ID NO: 263900 - DNA, 25 bp, Artificial
  Probe
tatctcgtggaatcagtggttagca

SEQ ID NO: 263901 - DNA, 25 bp, Artificial
  Probe
acaaatagtgtatctcgtggaatca

SEQ ID NO: 263902 - DNA, 25 bp, Artificial
  Probe
tttcaccatgctgtctcagagtcag

SEQ ID NO: 263903 - DNA, 25 bp, Artificial
  Probe
tttactgtgcaatttacttttggac

SEQ ID NO: 263904 - DNA, 25 bp, Artificial
  Probe
gtctcattttttccttgcatgtcac

SEQ ID NO: 263905 - DNA, 25 bp, Artificial
  Probe
ctttcaccatgctgtctcagagtca

SEQ ID NO: 263906 - DNA, 25 bp, Artificial
  Probe
aatatctatgttaatttctttcacc

SEQ ID NO: 263907 - DNA, 25 bp, Artificial
  Probe
ttcaccatgctgtctcagagtcagc

SEQ ID NO: 263908 - DNA, 25 bp, Artificial
  Probe
cgatactctgtagctgtgtaagttt

SEQ ID NO: 263909 - DNA, 25 bp, Artificial
  Probe
tccttgcatgtcacaagtctcagat

SEQ ID NO: 263910 - DNA, 25 bp, Artificial
  Probe
ttctttcaccatgctgtctcagagt

SEQ ID NO: 263911 - DNA, 25 bp, Artificial
  Probe
actctgtagctgtgtaagttttgac

SEQ ID NO: 263912 - DNA, 25 bp, Artificial
  Probe
tctgtcaaactgtaagagtaggact

SEQ ID NO: 263913 - DNA, 25 bp, Artificial
  Probe
tcaccatgctgtctcagagtcagca

SEQ ID NO: 263914 - DNA, 25 bp, Artificial
  Probe
tactgtgcaatttacttttggacat

SEQ ID NO: 263915 - DNA, 25 bp, Artificial
  Probe
tgtcaaactgtaagagtaggactca

SEQ ID NO: 263916 - DNA, 25 bp, Artificial
  Probe
ttccttgcatgtcacaagtctcaga

SEQ ID NO: 263917 - DNA, 25 bp, Artificial
  Probe
caaatagtgtatctcgtggaatcag

SEQ ID NO: 263918 - DNA, 25 bp, Artificial
  Probe
tcatttctgtcaaactgtaagagta

SEQ ID NO: 263919 - DNA, 25 bp, Artificial
  Probe
tagtttttaacattggactgttatt

SEQ ID NO: 263920 - DNA, 25 bp, Artificial
  Probe
ctgtagctgtgtaagttttgacaaa

SEQ ID NO: 263921 - DNA, 25 bp, Artificial
  Probe
gcatgtcacaagtctcagatcattt

SEQ ID NO: 263922 - DNA, 25 bp, Artificial
  Probe
ttgcatgtcacaagtctcagatcat

SEQ ID NO: 263923 - DNA, 25 bp, Artificial
  Probe
tctttcaccatgctgtctcagagtc

SEQ ID NO: 263924 - DNA, 25 bp, Artificial
  Probe
ctgtgcaatttacttttggacattg

SEQ ID NO: 263925 - DNA, 25 bp, Artificial
  Probe
attcatttctgtcaaactgtaagag

SEQ ID NO: 263926 - DNA, 25 bp, Artificial
  Probe
actgtgcaatttacttttggacatt

SEQ ID NO: 263927 - DNA, 25 bp, Artificial
  Probe
tttccttgcatgtcacaagtctcag

SEQ ID NO: 263928 - DNA, 25 bp, Artificial
  Probe
ctgtcaaactgtaagagtaggactc

SEQ ID NO: 263929 - DNA, 25 bp, Artificial
  Probe
tttctttcaccatgctgtctcagag

SEQ ID NO: 263930 - DNA, 25 bp, Artificial
  Probe
catttctgtcaaactgtaagagtag

SEQ ID NO: 263931 - DNA, 25 bp, Artificial
  Probe
tgtatctcgtggaatcagtggttag

SEQ ID NO: 263932 - DNA, 25 bp, Artificial
  Probe
cttgcatgtcacaagtctcagatca

SEQ ID NO: 263933 - DNA, 25 bp, Artificial
  Probe
tagagttctctatctctaaatattt

SEQ ID NO: 263934 - DNA, 25 bp, Artificial
  Probe
gatactctgtagctgtgtaagtttt

SEQ ID NO: 263935 - DNA, 25 bp, Artificial
  Probe
ttataatacattaacagtaaataat

SEQ ID NO: 263936 - DNA, 25 bp, Artificial
  Probe
ttactgtgcaatttacttttggaca

SEQ ID NO: 263937 - DNA, 25 bp, Artificial
  Probe
ccttgcatgtcacaagtctcagatc

SEQ ID NO: 263938 - DNA, 25 bp, Artificial
  Probe
ttctgtcaaactgtaagagtaggac

SEQ ID NO: 263939 - DNA, 25 bp, Artificial
  Probe
gacaaatagtgtatctcgtggaatc

SEQ ID NO: 263940 - DNA, 25 bp, Artificial
  Probe
ttcatttctgtcaaactgtaagagt

SEQ ID NO: 263941 - DNA, 25 bp, Artificial
  Probe
gactgttatttcatttagagttctc

SEQ ID NO: 263942 - DNA, 25 bp, Artificial
  Probe
aatacaagagtaacttcatggcagc

SEQ ID NO: 263943 - DNA, 25 bp, Artificial
  Probe
acgaatcggagtcatactcattgga

SEQ ID NO: 263944 - DNA, 25 bp, Artificial
  Probe
tggcagcgggttttacaacatttga

SEQ ID NO: 263945 - DNA, 25 bp, Artificial
  Probe
tgtttgtcacagtgggtgactggct

SEQ ID NO: 263946 - DNA, 25 bp, Artificial
  Probe
accgacttcctgctccaatgggctg

SEQ ID NO: 263947 - DNA, 25 bp, Artificial
  Probe
ctggtgatgttcctgaatatccact

SEQ ID NO: 263948 - DNA, 25 bp, Artificial
  Probe
atattagacgaatcggagtcatact

SEQ ID NO: 263949 - DNA, 25 bp, Artificial
  Probe
cctgaatatccactgtttgtcacag

SEQ ID NO: 263950 - DNA, 25 bp, Artificial
  Probe
gctatcgcctacaggaaattctcct

SEQ ID NO: 263951 - DNA, 25 bp, Artificial
  Probe
ttcaagaatgagcatcgacgatatt

SEQ ID NO: 263952 - DNA, 25 bp, Artificial
  Probe
cgcctacaggaaattctcctcagcg

SEQ ID NO: 263953 - DNA, 25 bp, Artificial
  Probe
tgagcatcgacgatattagacgaat

SEQ ID NO: 263954 - DNA, 25 bp, Artificial
  Probe
agaatcccctggtgatgttcctgaa

SEQ ID NO: 263955 - DNA, 25 bp, Artificial
  Probe
cgatattagacgaatcggagtcata

SEQ ID NO: 263956 - DNA, 25 bp, Artificial
  Probe
taacttcatggcagcgggttttaca

SEQ ID NO: 263957 - DNA, 25 bp, Artificial
  Probe
aggccaaaattcactgacatcgtca

SEQ ID NO: 263958 - DNA, 25 bp, Artificial
  Probe
agaatgagcatcgacgatattagac

SEQ ID NO: 263959 - DNA, 25 bp, Artificial
  Probe
agaaggttaccgacttcctgctcca

SEQ ID NO: 263960 - DNA, 25 bp, Artificial
  Probe
tcatactcattggacatcagagacg

SEQ ID NO: 263961 - DNA, 25 bp, Artificial
  Probe
gtgatgttcctgaatatccactgtt

SEQ ID NO: 263962 - DNA, 25 bp, Artificial
  Probe
gagagaaaccacaggccaaaattca

SEQ ID NO: 263963 - DNA, 25 bp, Artificial
  Probe
ccccagaagctatcgcctacaggaa

SEQ ID NO: 263964 - DNA, 25 bp, Artificial
  Probe
atcgcctacaggaaattctcctcag

SEQ ID NO: 263965 - DNA, 25 bp, Artificial
  Probe
gtaatgccagaatcccctggtgatg

SEQ ID NO: 263966 - DNA, 25 bp, Artificial
  Probe
cctacaggaaattctcctcagcgag

SEQ ID NO: 263967 - DNA, 25 bp, Artificial
  Probe
gaagctatcgcctacaggaaattct

SEQ ID NO: 263968 - DNA, 25 bp, Artificial
  Probe
catggcagcgggttttacaacattt

SEQ ID NO: 263969 - DNA, 25 bp, Artificial
  Probe
atttcaagaatgagcatcgacgata

SEQ ID NO: 263970 - DNA, 25 bp, Artificial
  Probe
ttttatccattgaagaaggttaccg

SEQ ID NO: 263971 - DNA, 25 bp, Artificial
  Probe
cactgctggcagaaggagagaaacc

SEQ ID NO: 263972 - DNA, 25 bp, Artificial
  Probe
ggacaaactgattcgcaaccccagc

SEQ ID NO: 263973 - DNA, 25 bp, Artificial
  Probe
catcgtcagcttcctggacaaactg

SEQ ID NO: 263974 - DNA, 25 bp, Artificial
  Probe
gccagaatcccctggtgatgttcct

SEQ ID NO: 263975 - DNA, 25 bp, Artificial
  Probe
ttatccattgaagaaggttaccgac

SEQ ID NO: 263976 - DNA, 25 bp, Artificial
  Probe
agacgaatcggagtcatactcattg

SEQ ID NO: 263977 - DNA, 25 bp, Artificial
  Probe
gtggaggacatcctcgtaatgccag

SEQ ID NO: 263978 - DNA, 25 bp, Artificial
  Probe
cctcgtaatgccagaatcccctggt

SEQ ID NO: 263979 - DNA, 25 bp, Artificial
  Probe
gcatcgacgatattagacgaatcgg

SEQ ID NO: 263980 - DNA, 25 bp, Artificial
  Probe
cgtcagcttcctggacaaactgatt

SEQ ID NO: 263981 - DNA, 25 bp, Artificial
  Probe
gttcctgaatatccactgtttgtca

SEQ ID NO: 263982 - DNA, 25 bp, Artificial
  Probe
attcactgacatcgtcagcttcctg

SEQ ID NO: 263983 - DNA, 25 bp, Artificial
  Probe
atacaagagtaacttcatggcagcg

SEQ ID NO: 263984 - DNA, 25 bp, Artificial
  Probe
tccactgctggcagaaggagagaaa

SEQ ID NO: 263985 - DNA, 25 bp, Artificial
  Probe
agagtaacttcatggcagcgggttt

SEQ ID NO: 263986 - DNA, 25 bp, Artificial
  Probe
gacatcctcgtaatgccagaatccc

SEQ ID NO: 263987 - DNA, 25 bp, Artificial
  Probe
gatgctccactgctggcagaaggag

SEQ ID NO: 263988 - DNA, 25 bp, Artificial
  Probe
acgtctggataacagcctatttgaa

SEQ ID NO: 263989 - DNA, 25 bp, Artificial
  Probe
attttgcatttcatatgaacgtctg

SEQ ID NO: 263990 - DNA, 25 bp, Artificial
  Probe
taatgttacgtagacgtcattcctc

SEQ ID NO: 263991 - DNA, 25 bp, Artificial
  Probe
ttttgcatttcatatgaacgtctgg

SEQ ID NO: 263992 - DNA, 25 bp, Artificial
  Probe
ccttaccataggtaatgttacgtag

SEQ ID NO: 263993 - DNA, 25 bp, Artificial
  Probe
tgaaccaagcactccttaccatagg

SEQ ID NO: 263994 - DNA, 25 bp, Artificial
  Probe
catttcatatgaacgtctggataac

SEQ ID NO: 263995 - DNA, 25 bp, Artificial
  Probe
gttacgtagacgtcattcctcttgt

SEQ ID NO: 263996 - DNA, 25 bp, Artificial
  Probe
gctttagccctgagcgggatctgcg

SEQ ID NO: 263997 - DNA, 25 bp, Artificial
  Probe
agacgtcattcctcttgtgacttac

SEQ ID NO: 263998 - DNA, 25 bp, Artificial
  Probe
cttaccataggtaatgttacgtaga

SEQ ID NO: 263999 - DNA, 25 bp, Artificial
  Probe
ttgcatttcatatgaacgtctggat

SEQ ID NO: 264000 - DNA, 25 bp, Artificial
  Probe
ttaccataggtaatgttacgtagac

SEQ ID NO: 264001 - DNA, 25 bp, Artificial
  Probe
ctgcctgcgagtctctgctgtgccg

SEQ ID NO: 264002 - DNA, 25 bp, Artificial
  Probe
gcatttcatatgaacgtctggataa

SEQ ID NO: 264003 - DNA, 25 bp, Artificial
  Probe
tgcgagtctctgctgtgccgaccct

SEQ ID NO: 264004 - DNA, 25 bp, Artificial
  Probe
catatgaacgtctggataacagcct

SEQ ID NO: 264005 - DNA, 25 bp, Artificial
  Probe
gcctgcgagtctctgctgtgccgac

SEQ ID NO: 264006 - DNA, 25 bp, Artificial
  Probe
tctgcggctgcctgcgagtctctgc

SEQ ID NO: 264007 - DNA, 25 bp, Artificial
  Probe
aatgttacgtagacgtcattcctct

SEQ ID NO: 264008 - DNA, 25 bp, Artificial
  Probe
tgaacgtctggataacagcctattt

SEQ ID NO: 264009 - DNA, 25 bp, Artificial
  Probe
ccctgagcgggatctgcggctgcct

SEQ ID NO: 264010 - DNA, 25 bp, Artificial
  Probe
ttacgtagacgtcattcctcttgtg

SEQ ID NO: 264011 - DNA, 25 bp, Artificial
  Probe
aagcactccttaccataggtaatgt

SEQ ID NO: 264012 - DNA, 25 bp, Artificial
  Probe
gaaccaagcactccttaccataggt

SEQ ID NO: 264013 - DNA, 25 bp, Artificial
  Probe
tccttaccataggtaatgttacgta

SEQ ID NO: 264014 - DNA, 25 bp, Artificial
  Probe
aacgtctggataacagcctatttga

SEQ ID NO: 264015 - DNA, 25 bp, Artificial
  Probe
cgtctggataacagcctatttgaat

SEQ ID NO: 264016 - DNA, 25 bp, Artificial
  Probe
acgtagacgtcattcctcttgtgac

SEQ ID NO: 264017 - DNA, 25 bp, Artificial
  Probe
tatgaacgtctggataacagcctat

SEQ ID NO: 264018 - DNA, 25 bp, Artificial
  Probe
tttcatatgaacgtctggataacag

SEQ ID NO: 264019 - DNA, 25 bp, Artificial
  Probe
ttcatatgaacgtctggataacagc

SEQ ID NO: 264020 - DNA, 25 bp, Artificial
  Probe
gcactccttaccataggtaatgtta

SEQ ID NO: 264021 - DNA, 25 bp, Artificial
  Probe
tcatatgaacgtctggataacagcc

SEQ ID NO: 264022 - DNA, 25 bp, Artificial
  Probe
gtagacgtcattcctcttgtgactt

SEQ ID NO: 264023 - DNA, 25 bp, Artificial
  Probe
ccgctttagccctgagcgggatctg

SEQ ID NO: 264024 - DNA, 25 bp, Artificial
  Probe
atttcatatgaacgtctggataaca

SEQ ID NO: 264025 - DNA, 25 bp, Artificial
  Probe
gacgtcattcctcttgtgacttact

SEQ ID NO: 264026 - DNA, 25 bp, Artificial
  Probe
ctccttaccataggtaatgttacgt

SEQ ID NO: 264027 - DNA, 25 bp, Artificial
  Probe
cgtagacgtcattcctcttgtgact

SEQ ID NO: 264028 - DNA, 25 bp, Artificial
  Probe
actccttaccataggtaatgttacg

SEQ ID NO: 264029 - DNA, 25 bp, Artificial
  Probe
tacgtagacgtcattcctcttgtga

SEQ ID NO: 264030 - DNA, 25 bp, Artificial
  Probe
agcactccttaccataggtaatgtt

SEQ ID NO: 264031 - DNA, 25 bp, Artificial
  Probe
caagcactccttaccataggtaatg

SEQ ID NO: 264032 - DNA, 25 bp, Artificial
  Probe
tggagcactagtgaagtcagtaaca

SEQ ID NO: 264033 - DNA, 25 bp, Artificial
  Probe
gcgagtctctgctgtgccgaccctt

SEQ ID NO: 264034 - DNA, 25 bp, Artificial
  Probe
cagattcttctggagatttttcaga

SEQ ID NO: 264035 - DNA, 25 bp, Artificial
  Probe
gagagaaacacagcttccgtgggag

SEQ ID NO: 264036 - DNA, 25 bp, Artificial
  Probe
gtctgtttcccgttccatctgcgct

SEQ ID NO: 264037 - DNA, 25 bp, Artificial
  Probe
gaccttctacggtgtctggaaggaa

SEQ ID NO: 264038 - DNA, 25 bp, Artificial
  Probe
cacagccttccaggatgcctgaagg

SEQ ID NO: 264039 - DNA, 25 bp, Artificial
  Probe
ccagtgaaaacctgaatctagccac

SEQ ID NO: 264040 - DNA, 25 bp, Artificial
  Probe
aatactgactcacctagatatggtg

SEQ ID NO: 264041 - DNA, 25 bp, Artificial
  Probe
ctggggcagctgctccagattcttc

SEQ ID NO: 264042 - DNA, 25 bp, Artificial
  Probe
ggtggtgacagctctctctgtgact

SEQ ID NO: 264043 - DNA, 25 bp, Artificial
  Probe
ccaggatgcctgaaggccatcttcc

SEQ ID NO: 264044 - DNA, 25 bp, Artificial
  Probe
ctgaactcactggagaagatatcaa

SEQ ID NO: 264045 - DNA, 25 bp, Artificial
  Probe
tgtgactcttatcctgaactcactg

SEQ ID NO: 264046 - DNA, 25 bp, Artificial
  Probe
gatgctcaaaggactccaagcagag

SEQ ID NO: 264047 - DNA, 25 bp, Artificial
  Probe
tgaaaacctgaatctagccacgtcc

SEQ ID NO: 264048 - DNA, 25 bp, Artificial
  Probe
ttccatctgcgctgagttttctgat

SEQ ID NO: 264049 - DNA, 25 bp, Artificial
  Probe
cggtctgggagcaaaccctagctca

SEQ ID NO: 264050 - DNA, 25 bp, Artificial
  Probe
tgcctgaaggccatcttcctgacat

SEQ ID NO: 264051 - DNA, 25 bp, Artificial
  Probe
acgccgatacggtctgggagcaaac

SEQ ID NO: 264052 - DNA, 25 bp, Artificial
  Probe
cccgagctgcccttggctgtgggct

SEQ ID NO: 264053 - DNA, 25 bp, Artificial
  Probe
tctggacacgcctctggtgagtctt

SEQ ID NO: 264054 - DNA, 25 bp, Artificial
  Probe
tctgatgcagaatcctctgggtggt

SEQ ID NO: 264055 - DNA, 25 bp, Artificial
  Probe
tgatgcctggcctctgatgcagaat

SEQ ID NO: 264056 - DNA, 25 bp, Artificial
  Probe
ccatcttcctgacatggaggtgtgg

SEQ ID NO: 264057 - DNA, 25 bp, Artificial
  Probe
ttttctgatgcctggcctctgatgc

SEQ ID NO: 264058 - DNA, 25 bp, Artificial
  Probe
gggctgcattctacggctacccttc

SEQ ID NO: 264059 - DNA, 25 bp, Artificial
  Probe
aaatgaaagctcaacatctgtggat

SEQ ID NO: 264060 - DNA, 25 bp, Artificial
  Probe
tctttgggtctgtttcccgttccat

SEQ ID NO: 264061 - DNA, 25 bp, Artificial
  Probe
tgcccttggctgtgggctgcattct

SEQ ID NO: 264062 - DNA, 25 bp, Artificial
  Probe
tgaatctagccacgtccacagcctt

SEQ ID NO: 264063 - DNA, 25 bp, Artificial
  Probe
ctcttatcctgaactcactggagaa

SEQ ID NO: 264064 - DNA, 25 bp, Artificial
  Probe
gccagtcttctttgggtctgtttcc

SEQ ID NO: 264065 - DNA, 25 bp, Artificial
  Probe
acacagcttccgtgggagacgcgat

SEQ ID NO: 264066 - DNA, 25 bp, Artificial
  Probe
ttggctgtgggctgcattctacggc

SEQ ID NO: 264067 - DNA, 25 bp, Artificial
  Probe
gctgcccttggctgtgggctgcatt

SEQ ID NO: 264068 - DNA, 25 bp, Artificial
  Probe
tttgggtctgtttcccgttccatct

SEQ ID NO: 264069 - DNA, 25 bp, Artificial
  Probe
aaaggactccaagcagagagggctg

SEQ ID NO: 264070 - DNA, 25 bp, Artificial
  Probe
ctagatatggtgacgccgatacggt

SEQ ID NO: 264071 - DNA, 25 bp, Artificial
  Probe
gctctctctgtgactcttatcctga

SEQ ID NO: 264072 - DNA, 25 bp, Artificial
  Probe
acccttcaggagagaaacacagctt

SEQ ID NO: 264073 - DNA, 25 bp, Artificial
  Probe
gaactcactggagaagatatcaatt

SEQ ID NO: 264074 - DNA, 25 bp, Artificial
  Probe
cttccgtgggagacgcgatgccagt

SEQ ID NO: 264075 - DNA, 25 bp, Artificial
  Probe
gtccacagccttccaggatgcctga

SEQ ID NO: 264076 - DNA, 25 bp, Artificial
  Probe
cttctggagatttttcagaaaatac

SEQ ID NO: 264077 - DNA, 25 bp, Artificial
  Probe
ttccaggatgcctgaaggccatctt

SEQ ID NO: 264078 - DNA, 25 bp, Artificial
  Probe
tccaatggtggtcaggatctggctg

SEQ ID NO: 264079 - DNA, 25 bp, Artificial
  Probe
gtgggagacgcgatgccagtcttct

SEQ ID NO: 264080 - DNA, 25 bp, Artificial
  Probe
gtcttgaggttttgttcatgccccc

SEQ ID NO: 264081 - DNA, 25 bp, Artificial
  Probe
ctcatgtcttgaggttttgttcatg

SEQ ID NO: 264082 - DNA, 25 bp, Artificial
  Probe
cacatctgtaaatgactatatggtt

SEQ ID NO: 264083 - DNA, 25 bp, Artificial
  Probe
atcttggcagacataagaggacaca

SEQ ID NO: 264084 - DNA, 25 bp, Artificial
  Probe
tgcacatctgtaaatgactatatgg

SEQ ID NO: 264085 - DNA, 25 bp, Artificial
  Probe
ttgcactttgccactcaatgttgta

SEQ ID NO: 264086 - DNA, 25 bp, Artificial
  Probe
gcactttgccactcaatgttgtacc

SEQ ID NO: 264087 - DNA, 25 bp, Artificial
  Probe
ccctatgactgaccaatgtgataag

SEQ ID NO: 264088 - DNA, 25 bp, Artificial
  Probe
cgagggacatttgcactttgccact

SEQ ID NO: 264089 - DNA, 25 bp, Artificial
  Probe
cctaccctctcagatggtggaatct

SEQ ID NO: 264090 - DNA, 25 bp, Artificial
  Probe
ctctcagatggtggaatctttgggg

SEQ ID NO: 264091 - DNA, 25 bp, Artificial
  Probe
tcttggcagacataagaggacacaa

SEQ ID NO: 264092 - DNA, 25 bp, Artificial
  Probe
atctttggaatgcatgccggtaatg

SEQ ID NO: 264093 - DNA, 25 bp, Artificial
  Probe
ctttgccactcaatgttgtacctcg

SEQ ID NO: 264094 - DNA, 25 bp, Artificial
  Probe
tcctaccctctcagatggtggaatc

SEQ ID NO: 264095 - DNA, 25 bp, Artificial
  Probe
gacatttgcactttgccactcaatg

SEQ ID NO: 264096 - DNA, 25 bp, Artificial
  Probe
cttaaagaccaaaaactgtgctaag

SEQ ID NO: 264097 - DNA, 25 bp, Artificial
  Probe
ccaaaaactgtgctaagaagatatg

SEQ ID NO: 264098 - DNA, 25 bp, Artificial
  Probe
ctttggaatgcatgccggtaatgta

SEQ ID NO: 264099 - DNA, 25 bp, Artificial
  Probe
tgactgaccaatgtgataaggactt

SEQ ID NO: 264100 - DNA, 25 bp, Artificial
  Probe
ttgaatgccctgttttcatagaatc

SEQ ID NO: 264101 - DNA, 25 bp, Artificial
  Probe
tgatctttggaatgcatgccggtaa

SEQ ID NO: 264102 - DNA, 25 bp, Artificial
  Probe
agaccaaaaactgtgctaagaagat

SEQ ID NO: 264103 - DNA, 25 bp, Artificial
  Probe
tttgaatgccctgttttcatagaat

SEQ ID NO: 264104 - DNA, 25 bp, Artificial
  Probe
tatgactgaccaatgtgataaggac

SEQ ID NO: 264105 - DNA, 25 bp, Artificial
  Probe
aatgcatgccggtaatgtattttac

SEQ ID NO: 264106 - DNA, 25 bp, Artificial
  Probe
gcccccatgcacatctgtaaatgac

SEQ ID NO: 264107 - DNA, 25 bp, Artificial
  Probe
catgccggtaatgtattttacagta

SEQ ID NO: 264108 - DNA, 25 bp, Artificial
  Probe
ttaaagaccaaaaactgtgctaaga

SEQ ID NO: 264109 - DNA, 25 bp, Artificial
  Probe
ccccctatgactgaccaatgtgata

SEQ ID NO: 264110 - DNA, 25 bp, Artificial
  Probe
cccacctatctttggtacacggtag

SEQ ID NO: 264111 - DNA, 25 bp, Artificial
  Probe
gttgtacctcggttcactgtttgtt

SEQ ID NO: 264112 - DNA, 25 bp, Artificial
  Probe
taagaggacacaagcccccatgcac

SEQ ID NO: 264113 - DNA, 25 bp, Artificial
  Probe
agggacatttgcactttgccactca

SEQ ID NO: 264114 - DNA, 25 bp, Artificial
  Probe
atgcacatctgtaaatgactatatg

SEQ ID NO: 264115 - DNA, 25 bp, Artificial
  Probe
ctatctttggtacacggtaggtgtt

SEQ ID NO: 264116 - DNA, 25 bp, Artificial
  Probe
ctatgactgaccaatgtgataagga

SEQ ID NO: 264117 - DNA, 25 bp, Artificial
  Probe
caatgttgtacctcggttcactgtt

SEQ ID NO: 264118 - DNA, 25 bp, Artificial
  Probe
aagcccccatgcacatctgtaaatg

SEQ ID NO: 264119 - DNA, 25 bp, Artificial
  Probe
gaccaaaaactgtgctaagaagata

SEQ ID NO: 264120 - DNA, 25 bp, Artificial
  Probe
ataagaggacacaagcccccatgca

SEQ ID NO: 264121 - DNA, 25 bp, Artificial
  Probe
aggtcttgatctttggaatgcatgc

SEQ ID NO: 264122 - DNA, 25 bp, Artificial
  Probe
gaatgccctgttttcatagaatcct

SEQ ID NO: 264123 - DNA, 25 bp, Artificial
  Probe
taccctctcagatggtggaatcttt

SEQ ID NO: 264124 - DNA, 25 bp, Artificial
  Probe
ttttgaatgccctgttttcatagaa

SEQ ID NO: 264125 - DNA, 25 bp, Artificial
  Probe
tgcatgccggtaatgtattttacag

SEQ ID NO: 264126 - DNA, 25 bp, Artificial
  Probe
aggtcctcctgatggccagcaagat

SEQ ID NO: 264127 - DNA, 25 bp, Artificial
  Probe
tcttcagcatcaagactccagttgt

SEQ ID NO: 264128 - DNA, 25 bp, Artificial
  Probe
acaccagaaatttggtgagctcagt

SEQ ID NO: 264129 - DNA, 25 bp, Artificial
  Probe
tgatgcaagcgctaaacaccctttc

SEQ ID NO: 264130 - DNA, 25 bp, Artificial
  Probe
ggccatcttggcaagaagcaaactg

SEQ ID NO: 264131 - DNA, 25 bp, Artificial
  Probe
agggaacacagcaaggccatcttgg

SEQ ID NO: 264132 - DNA, 25 bp, Artificial
  Probe
tgaagattcttcagaagaagcatgc

SEQ ID NO: 264133 - DNA, 25 bp, Artificial
  Probe
cacagcaaggccatcttggcaagaa

SEQ ID NO: 264134 - DNA, 25 bp, Artificial
  Probe
cctttcaaccccagaggaaaagctg

SEQ ID NO: 264135 - DNA, 25 bp, Artificial
  Probe
tcagaagaagcatgcccagatcgtg

SEQ ID NO: 264136 - DNA, 25 bp, Artificial
  Probe
tgactttgtaacgaacaccagaaat

SEQ ID NO: 264137 - DNA, 25 bp, Artificial
  Probe
gtacaactaagaagcattcactgga

SEQ ID NO: 264138 - DNA, 25 bp, Artificial
  Probe
aagttcaccttcaaagggaacacag

SEQ ID NO: 264139 - DNA, 25 bp, Artificial
  Probe
gttcaccttcaaagggaacacagca

SEQ ID NO: 264140 - DNA, 25 bp, Artificial
  Probe
atttggtgagctcagtattctgtac

SEQ ID NO: 264141 - DNA, 25 bp, Artificial
  Probe
agcaaactggagtctctttgcaggg

SEQ ID NO: 264142 - DNA, 25 bp, Artificial
  Probe
gggaacacagcaaggccatcttggc

SEQ ID NO: 264143 - DNA, 25 bp, Artificial
  Probe
aaggcagtgactttgtaacgaacac

SEQ ID NO: 264144 - DNA, 25 bp, Artificial
  Probe
agaagcatgcccagatcgtgaaaga

SEQ ID NO: 264145 - DNA, 25 bp, Artificial
  Probe
aactaagaagcattcactggaaggg

SEQ ID NO: 264146 - DNA, 25 bp, Artificial
  Probe
aagttttattactgatgcaagcgct

SEQ ID NO: 264147 - DNA, 25 bp, Artificial
  Probe
ccttcaaagggaacacagcaaggcc

SEQ ID NO: 264148 - DNA, 25 bp, Artificial
  Probe
agaagaaattcctggacgagaagct

SEQ ID NO: 264149 - DNA, 25 bp, Artificial
  Probe
tcagtattctgtacccaggagacaa

SEQ ID NO: 264150 - DNA, 25 bp, Artificial
  Probe
ctctttgcagggaacttcaacgtca

SEQ ID NO: 264151 - DNA, 25 bp, Artificial
  Probe
gtacccaggagacaagagaagaaat

SEQ ID NO: 264152 - DNA, 25 bp, Artificial
  Probe
acgaggtgattcttcagcatcaaga

SEQ ID NO: 264153 - DNA, 25 bp, Artificial
  Probe
tctcctggaagaaagcaggaatgtt

SEQ ID NO: 264154 - DNA, 25 bp, Artificial
  Probe
gaaatatgctgatctcctggaagaa

SEQ ID NO: 264155 - DNA, 25 bp, Artificial
  Probe
accttcaaagggaacacagcaaggc

SEQ ID NO: 264156 - DNA, 25 bp, Artificial
  Probe
ccagttgtggtggtacaactaagaa

SEQ ID NO: 264157 - DNA, 25 bp, Artificial
  Probe
agtgctgcaggaacaaagagaagac

SEQ ID NO: 264158 - DNA, 25 bp, Artificial
  Probe
atggccagcaagattcagagtgctg

SEQ ID NO: 264159 - DNA, 25 bp, Artificial
  Probe
tgcccagatcgtgaaagagaaagtt

SEQ ID NO: 264160 - DNA, 25 bp, Artificial
  Probe
aggcagtgactttgtaacgaacacc

SEQ ID NO: 264161 - DNA, 25 bp, Artificial
  Probe
aaagctggcggctctgtgtaagaaa

SEQ ID NO: 264162 - DNA, 25 bp, Artificial
  Probe
ggacgagaagctcgaacaggtcctc

SEQ ID NO: 264163 - DNA, 25 bp, Artificial
  Probe
ccatcttggcaagaagcaaactgga

SEQ ID NO: 264164 - DNA, 25 bp, Artificial
  Probe
ggcggctctgtgtaagaaatatgct

SEQ ID NO: 264165 - DNA, 25 bp, Artificial
  Probe
gatgcaagcgctaaacaccctttca

SEQ ID NO: 264166 - DNA, 25 bp, Artificial
  Probe
attactgatgcaagcgctaaacacc

SEQ ID NO: 264167 - DNA, 25 bp, Artificial
  Probe
gcaaggccatcttggcaagaagcaa

SEQ ID NO: 264168 - DNA, 25 bp, Artificial
  Probe
accccagaggaaaagctggcggctc

SEQ ID NO: 264169 - DNA, 25 bp, Artificial
  Probe
tcctggacgagaagctcgaacaggt

SEQ ID NO: 264170 - DNA, 25 bp, Artificial
  Probe
gagtctctttgcagggaacttcaac

SEQ ID NO: 264171 - DNA, 25 bp, Artificial
  Probe
tattctgtacccaggagacaagaga

SEQ ID NO: 264172 - DNA, 25 bp, Artificial
  Probe
agtaatgatgacttatcccttaggt

SEQ ID NO: 264173 - DNA, 25 bp, Artificial
  Probe
ataccaagatctgtaagaaccaaga

SEQ ID NO: 264174 - DNA, 25 bp, Artificial
  Probe
ccaaggagttcacactggtacaaaa

SEQ ID NO: 264175 - DNA, 25 bp, Artificial
  Probe
agtggtcctagtcagcagcggaaga

SEQ ID NO: 264176 - DNA, 25 bp, Artificial
  Probe
tcagcaccaaggagttcacactggt

SEQ ID NO: 264177 - DNA, 25 bp, Artificial
  Probe
ttatcccttaggtctactcggtaag

SEQ ID NO: 264178 - DNA, 25 bp, Artificial
  Probe
agagtgtaagttccacactttctca

SEQ ID NO: 264179 - DNA, 25 bp, Artificial
  Probe
aatgatgacttatcccttaggtcta

SEQ ID NO: 264180 - DNA, 25 bp, Artificial
  Probe
tggcatccactaacgataccaagat

SEQ ID NO: 264181 - DNA, 25 bp, Artificial
  Probe
gttccacactttctcagcaccaagg

SEQ ID NO: 264182 - DNA, 25 bp, Artificial
  Probe
agtcagcagcggaagaaccacacca

SEQ ID NO: 264183 - DNA, 25 bp, Artificial
  Probe
gaagaaccacaccagcgagaagtcc

SEQ ID NO: 264184 - DNA, 25 bp, Artificial
  Probe
accacaccagcgagaagtcctataa

SEQ ID NO: 264185 - DNA, 25 bp, Artificial
  Probe
tccacactttctcagcaccaaggag

SEQ ID NO: 264186 - DNA, 25 bp, Artificial
  Probe
caccagcgagaagtcctataagtgc

SEQ ID NO: 264187 - DNA, 25 bp, Artificial
  Probe
atcttaagagtatgtgccatttgct

SEQ ID NO: 264188 - DNA, 25 bp, Artificial
  Probe
tacaaaaccctatgaatgcagtgat

SEQ ID NO: 264189 - DNA, 25 bp, Artificial
  Probe
taacgataccaagatctgtaagaac

SEQ ID NO: 264190 - DNA, 25 bp, Artificial
  Probe
acaccagcgagaagtcctataagtg

SEQ ID NO: 264191 - DNA, 25 bp, Artificial
  Probe
ggcatccactaacgataccaagatc

SEQ ID NO: 264192 - DNA, 25 bp, Artificial
  Probe
ggtacaaaaccctatgaatgcagtg

SEQ ID NO: 264193 - DNA, 25 bp, Artificial
  Probe
tctcagcaccaaggagttcacactg

SEQ ID NO: 264194 - DNA, 25 bp, Artificial
  Probe
atgacttatcccttaggtctactcg

SEQ ID NO: 264195 - DNA, 25 bp, Artificial
  Probe
cagcaccaaggagttcacactggta

SEQ ID NO: 264196 - DNA, 25 bp, Artificial
  Probe
agctatgatggcatccactaacgat

SEQ ID NO: 264197 - DNA, 25 bp, Artificial
  Probe
cagcggaagaaccacaccagcgaga

SEQ ID NO: 264198 - DNA, 25 bp, Artificial
  Probe
tatcccttaggtctactcggtaaga

SEQ ID NO: 264199 - DNA, 25 bp, Artificial
  Probe
gaaacccatcacaaggagaaactct

SEQ ID NO: 264200 - DNA, 25 bp, Artificial
  Probe
caggaaacccatcacaaggagaaac

SEQ ID NO: 264201 - DNA, 25 bp, Artificial
  Probe
gacttatcccttaggtctactcggt

SEQ ID NO: 264202 - DNA, 25 bp, Artificial
  Probe
tatgatggcatccactaacgatacc

SEQ ID NO: 264203 - DNA, 25 bp, Artificial
  Probe
acccatcaggaaacccatcacaagg

SEQ ID NO: 264204 - DNA, 25 bp, Artificial
  Probe
cactaacgataccaagatctgtaag

SEQ ID NO: 264205 - DNA, 25 bp, Artificial
  Probe
gtcctagtcagcagcggaagaacca

SEQ ID NO: 264206 - DNA, 25 bp, Artificial
  Probe
atctgtaagaaccaagatggacttt

SEQ ID NO: 264207 - DNA, 25 bp, Artificial
  Probe
tatatagctatgatggcatccacta

SEQ ID NO: 264208 - DNA, 25 bp, Artificial
  Probe
ggagttcacactggtacaaaaccct

SEQ ID NO: 264209 - DNA, 25 bp, Artificial
  Probe
atatagctatgatggcatccactaa

SEQ ID NO: 264210 - DNA, 25 bp, Artificial
  Probe
gagtgtaagttccacactttctcag

SEQ ID NO: 264211 - DNA, 25 bp, Artificial
  Probe
gtgtaagttccacactttctcagca

SEQ ID NO: 264212 - DNA, 25 bp, Artificial
  Probe
atcaggaaacccatcacaaggagaa

SEQ ID NO: 264213 - DNA, 25 bp, Artificial
  Probe
caccaaggagttcacactggtacaa

SEQ ID NO: 264214 - DNA, 25 bp, Artificial
  Probe
gtggtcctagtcagcagcggaagaa

SEQ ID NO: 264215 - DNA, 25 bp, Artificial
  Probe
caaggagttcacactggtacaaaac

SEQ ID NO: 264216 - DNA, 25 bp, Artificial
  Probe
ccagcgagaagtcctataagtgcag

SEQ ID NO: 264217 - DNA, 25 bp, Artificial
  Probe
tcagcagcggaagaaccacaccagc

SEQ ID NO: 264218 - DNA, 25 bp, Artificial
  Probe
gccctatgctgcaaccctgacttgg

SEQ ID NO: 264219 - DNA, 25 bp, Artificial
  Probe
gccaccagcgggaccgcaccgggcc

SEQ ID NO: 264220 - DNA, 25 bp, Artificial
  Probe
gcagtttggctgagagggtcaatct

SEQ ID NO: 264221 - DNA, 25 bp, Artificial
  Probe
gaactttactgctaggatttccaat

SEQ ID NO: 264222 - DNA, 25 bp, Artificial
  Probe
ttactgctaggatttccaattgtta

SEQ ID NO: 264223 - DNA, 25 bp, Artificial
  Probe
ttagaaacgccgttagcgcgcggga

SEQ ID NO: 264224 - DNA, 25 bp, Artificial
  Probe
ggagaactttactgctaggatttcc

SEQ ID NO: 264225 - DNA, 25 bp, Artificial
  Probe
gctcctttctacggatggggggttg

SEQ ID NO: 264226 - DNA, 25 bp, Artificial
  Probe
tactgctaggatttccaattgttag

SEQ ID NO: 264227 - DNA, 25 bp, Artificial
  Probe
atcttggaccagaccgtgttgggcg

SEQ ID NO: 264228 - DNA, 25 bp, Artificial
  Probe
cttcggaatcttggaccagaccgtg

SEQ ID NO: 264229 - DNA, 25 bp, Artificial
  Probe
ctttactgctaggatttccaattgt

SEQ ID NO: 264230 - DNA, 25 bp, Artificial
  Probe
gggtcaatctatttatgcaaaatcg

SEQ ID NO: 264231 - DNA, 25 bp, Artificial
  Probe
cagtttggctgagagggtcaatcta

SEQ ID NO: 264232 - DNA, 25 bp, Artificial
  Probe
ttcggaatcttggaccagaccgtgt

SEQ ID NO: 264233 - DNA, 25 bp, Artificial
  Probe
aatcttggaccagaccgtgttgggc

SEQ ID NO: 264234 - DNA, 25 bp, Artificial
  Probe
cacttcggaatcttggaccagaccg

SEQ ID NO: 264235 - DNA, 25 bp, Artificial
  Probe
ctgctaggatttccaattgttagaa

SEQ ID NO: 264236 - DNA, 25 bp, Artificial
  Probe
gagaactttactgctaggatttcca

SEQ ID NO: 264237 - DNA, 25 bp, Artificial
  Probe
ggccctcggcgacctcgcgccccca

SEQ ID NO: 264238 - DNA, 25 bp, Artificial
  Probe
tgctgcaaccctgacttggcctcgt

SEQ ID NO: 264239 - DNA, 25 bp, Artificial
  Probe
tccaattgttagaaacgccgttagc

SEQ ID NO: 264240 - DNA, 25 bp, Artificial
  Probe
tggagaactttactgctaggatttc

SEQ ID NO: 264241 - DNA, 25 bp, Artificial
  Probe
actgctaggatttccaattgttaga

SEQ ID NO: 264242 - DNA, 25 bp, Artificial
  Probe
cgccgccgcggctgctgcctcctcc

SEQ ID NO: 264243 - DNA, 25 bp, Artificial
  Probe
tcggaatcttggaccagaccgtgtt

SEQ ID NO: 264244 - DNA, 25 bp, Artificial
  Probe
gctaggatttccaattgttagaaac

SEQ ID NO: 264245 - DNA, 25 bp, Artificial
  Probe
gaatcttggaccagaccgtgttggg

SEQ ID NO: 264246 - DNA, 25 bp, Artificial
  Probe
acttcggaatcttggaccagaccgt

SEQ ID NO: 264247 - DNA, 25 bp, Artificial
  Probe
caattgttagaaacgccgttagcgc

SEQ ID NO: 264248 - DNA, 25 bp, Artificial
  Probe
cggaatcttggaccagaccgtgttg

SEQ ID NO: 264249 - DNA, 25 bp, Artificial
  Probe
ggaatcttggaccagaccgtgttgg

SEQ ID NO: 264250 - DNA, 25 bp, Artificial
  Probe
aaatcgccctatgctgcaaccctga

SEQ ID NO: 264251 - DNA, 25 bp, Artificial
  Probe
cgcagtttggctgagagggtcaatc

SEQ ID NO: 264252 - DNA, 25 bp, Artificial
  Probe
actttactgctaggatttccaattg

SEQ ID NO: 264253 - DNA, 25 bp, Artificial
  Probe
tttactgctaggatttccaattgtt

SEQ ID NO: 264254 - DNA, 25 bp, Artificial
  Probe
ggatttccaattgttagaaacgccg

SEQ ID NO: 264255 - DNA, 25 bp, Artificial
  Probe
gctgcaaccctgacttggcctcgtg

SEQ ID NO: 264256 - DNA, 25 bp, Artificial
  Probe
taggatttccaattgttagaaacgc

SEQ ID NO: 264257 - DNA, 25 bp, Artificial
  Probe
atttatgcaaaatcgccctatgctg

SEQ ID NO: 264258 - DNA, 25 bp, Artificial
  Probe
atgctgcaaccctgacttggcctcg

SEQ ID NO: 264259 - DNA, 25 bp, Artificial
  Probe
gatttccaattgttagaaacgccgt

SEQ ID NO: 264260 - DNA, 25 bp, Artificial
  Probe
agaactttactgctaggatttccaa

SEQ ID NO: 264261 - DNA, 25 bp, Artificial
  Probe
ctaggatttccaattgttagaaacg

SEQ ID NO: 264262 - DNA, 25 bp, Artificial
  Probe
ccaattgttagaaacgccgttagcg

SEQ ID NO: 264263 - DNA, 25 bp, Artificial
  Probe
ggtcaatctatttatgcaaaatcgc

SEQ ID NO: 264264 - DNA, 25 bp, Artificial
  Probe
agatcaccacctgcaagcatacagg

SEQ ID NO: 264265 - DNA, 25 bp, Artificial
  Probe
ttgcctgtccactttgatgagtctt

SEQ ID NO: 264266 - DNA, 25 bp, Artificial
  Probe
aacacctttatccatggcaacaagg

SEQ ID NO: 264267 - DNA, 25 bp, Artificial
  Probe
caacaagggcagcatcaaggccatc

SEQ ID NO: 264268 - DNA, 25 bp, Artificial
  Probe
agcatcaaggccatctgtggcgcga

SEQ ID NO: 264269 - DNA, 25 bp, Artificial
  Probe
caaggccatctgtggcgcgaatgga

SEQ ID NO: 264270 - DNA, 25 bp, Artificial
  Probe
agggttcagacatgttgttattgcc

SEQ ID NO: 264271 - DNA, 25 bp, Artificial
  Probe
ttgcctgtgaaaatggcttgcctgt

SEQ ID NO: 264272 - DNA, 25 bp, Artificial
  Probe
ccgagcctctgcagggttcagacat

SEQ ID NO: 264273 - DNA, 25 bp, Artificial
  Probe
tcagcactatgatgccaagcccaag

SEQ ID NO: 264274 - DNA, 25 bp, Artificial
  Probe
tgcaagcatacaggagggtctcccc

SEQ ID NO: 264275 - DNA, 25 bp, Artificial
  Probe
ctttgatgagtcttttatcagtctc

SEQ ID NO: 264276 - DNA, 25 bp, Artificial
  Probe
ttcagacatgttgttattgcctgtg

SEQ ID NO: 264277 - DNA, 25 bp, Artificial
  Probe
aagaggtcaacacctttatccatgg

SEQ ID NO: 264278 - DNA, 25 bp, Artificial
  Probe
tcgccctgcaaagaggtcaacacct

SEQ ID NO: 264279 - DNA, 25 bp, Artificial
  Probe
caagcatacaggagggtctccccgg

SEQ ID NO: 264280 - DNA, 25 bp, Artificial
  Probe
gcctctgcagggttcagacatgttg

SEQ ID NO: 264281 - DNA, 25 bp, Artificial
  Probe
actatgatgccaagcccaagggtcg

SEQ ID NO: 264282 - DNA, 25 bp, Artificial
  Probe
cactgacatccattgtcaggggcta

SEQ ID NO: 264283 - DNA, 25 bp, Artificial
  Probe
ggcaacaagggcagcatcaaggcca

SEQ ID NO: 264284 - DNA, 25 bp, Artificial
  Probe
tggcgcgaatggaagcccttacgga

SEQ ID NO: 264285 - DNA, 25 bp, Artificial
  Probe
ctgcagggttcagacatgttgttat

SEQ ID NO: 264286 - DNA, 25 bp, Artificial
  Probe
cccggcgcagacttaactctgttct

SEQ ID NO: 264287 - DNA, 25 bp, Artificial
  Probe
ccagaacactgacatccattgtcag

SEQ ID NO: 264288 - DNA, 25 bp, Artificial
  Probe
cactatgatgccaagcccaagggtc

SEQ ID NO: 264289 - DNA, 25 bp, Artificial
  Probe
agggcagcatcaaggccatctgtgg

SEQ ID NO: 264290 - DNA, 25 bp, Artificial
  Probe
ctgtggcgcgaatggaagcccttac

SEQ ID NO: 264291 - DNA, 25 bp, Artificial
  Probe
tgtctcccgacttacaaaacacagg

SEQ ID NO: 264292 - DNA, 25 bp, Artificial
  Probe
gcaaagaggtcaacacctttatcca

SEQ ID NO: 264293 - DNA, 25 bp, Artificial
  Probe
tgcaaagaggtcaacacctttatcc

SEQ ID NO: 264294 - DNA, 25 bp, Artificial
  Probe
aaatggcttgcctgtccactttgat

SEQ ID NO: 264295 - DNA, 25 bp, Artificial
  Probe
cactttgatgagtcttttatcagtc

SEQ ID NO: 264296 - DNA, 25 bp, Artificial
  Probe
cggtaccgagcctctgcagggttca

SEQ ID NO: 264297 - DNA, 25 bp, Artificial
  Probe
gcgcagacttaactctgttctcttt

SEQ ID NO: 264298 - DNA, 25 bp, Artificial
  Probe
tatcagtctctagtcagcaggcccc

SEQ ID NO: 264299 - DNA, 25 bp, Artificial
  Probe
acatccattgtcaggggctagaaaa

SEQ ID NO: 264300 - DNA, 25 bp, Artificial
  Probe
ggtcaacacctttatccatggcaac

SEQ ID NO: 264301 - DNA, 25 bp, Artificial
  Probe
tgtgaaaatggcttgcctgtccact

SEQ ID NO: 264302 - DNA, 25 bp, Artificial
  Probe
gtgaaaatggcttgcctgtccactt

SEQ ID NO: 264303 - DNA, 25 bp, Artificial
  Probe
tttatccatggcaacaagggcagca

SEQ ID NO: 264304 - DNA, 25 bp, Artificial
  Probe
ccctgcaaagaggtcaacaccttta

SEQ ID NO: 264305 - DNA, 25 bp, Artificial
  Probe
ttatccatggcaacaagggcagcat

SEQ ID NO: 264306 - DNA, 25 bp, Artificial
  Probe
atctgtggcgcgaatggaagccctt

SEQ ID NO: 264307 - DNA, 25 bp, Artificial
  Probe
gttattgcctgtgaaaatggcttgc

SEQ ID NO: 264308 - DNA, 25 bp, Artificial
  Probe
ggcttgcctgtccactttgatgagt

SEQ ID NO: 264309 - DNA, 25 bp, Artificial
  Probe
ttgccggtaccgagcctctgcaggg

SEQ ID NO: 264310 - DNA, 25 bp, Artificial
  Probe
atagggagtctgaacttggaagcca

SEQ ID NO: 264311 - DNA, 25 bp, Artificial
  Probe
aacttggaagccaatgtgacagcag

SEQ ID NO: 264312 - DNA, 25 bp, Artificial
  Probe
gagttacgatccaagacacgctcaa

SEQ ID NO: 264313 - DNA, 25 bp, Artificial
  Probe
gcccagcaagctgatgccagagcca

SEQ ID NO: 264314 - DNA, 25 bp, Artificial
  Probe
ctggtgattactgaagcccagcaag

SEQ ID NO: 264315 - DNA, 25 bp, Artificial
  Probe
cacccaacgggcaaagaacgcagct

SEQ ID NO: 264316 - DNA, 25 bp, Artificial
  Probe
atcctgcgcctaatagaccagcctg

SEQ ID NO: 264317 - DNA, 25 bp, Artificial
  Probe
caatgtgacagcagatggggccttg

SEQ ID NO: 264318 - DNA, 25 bp, Artificial
  Probe
tggccaggaaggagcttgagttcca

SEQ ID NO: 264319 - DNA, 25 bp, Artificial
  Probe
caagagcacgggagttacgatccaa

SEQ ID NO: 264320 - DNA, 25 bp, Artificial
  Probe
cagcaagcagaaacggccctgggga

SEQ ID NO: 264321 - DNA, 25 bp, Artificial
  Probe
gcctaatagaccagcctgatgctgt

SEQ ID NO: 264322 - DNA, 25 bp, Artificial
  Probe
atgccagagccaagagcacgggagt

SEQ ID NO: 264323 - DNA, 25 bp, Artificial
  Probe
agatgccagtgacaagacccagcaa

SEQ ID NO: 264324 - DNA, 25 bp, Artificial
  Probe
acgcagctacggaggccctagagat

SEQ ID NO: 264325 - DNA, 25 bp, Artificial
  Probe
gttgcagatgccagtgacaagaccc

SEQ ID NO: 264326 - DNA, 25 bp, Artificial
  Probe
tctgaacttggaagccaatgtgaca

SEQ ID NO: 264327 - DNA, 25 bp, Artificial
  Probe
ggcaaagaacgcagctacggaggcc

SEQ ID NO: 264328 - DNA, 25 bp, Artificial
  Probe
ttggccaggaaggagcttgagttcc

SEQ ID NO: 264329 - DNA, 25 bp, Artificial
  Probe
tccaagacacgctcaacacattgga

SEQ ID NO: 264330 - DNA, 25 bp, Artificial
  Probe
ctctcctatattagccagaaggttg

SEQ ID NO: 264331 - DNA, 25 bp, Artificial
  Probe
gttacgatccaagacacgctcaaca

SEQ ID NO: 264332 - DNA, 25 bp, Artificial
  Probe
gaaggttgcagatgccagtgacaag

SEQ ID NO: 264333 - DNA, 25 bp, Artificial
  Probe
aagccaatgtgacagcagatggggc

SEQ ID NO: 264334 - DNA, 25 bp, Artificial
  Probe
caaagaacgcagctacggaggccct

SEQ ID NO: 264335 - DNA, 25 bp, Artificial
  Probe
gtgacaagacccagcaagcagaaac

SEQ ID NO: 264336 - DNA, 25 bp, Artificial
  Probe
ccaacgggcaaagaacgcagctacg

SEQ ID NO: 264337 - DNA, 25 bp, Artificial
  Probe
ctgctgacacccaacgggcaaagaa

SEQ ID NO: 264338 - DNA, 25 bp, Artificial
  Probe
tgcagctggtgattactgaagccca

SEQ ID NO: 264339 - DNA, 25 bp, Artificial
  Probe
tactgaagcccagcaagctgatgcc

SEQ ID NO: 264340 - DNA, 25 bp, Artificial
  Probe
gagcttgagttccacacggataaag

SEQ ID NO: 264341 - DNA, 25 bp, Artificial
  Probe
agctgatgccagagccaagagcacg

SEQ ID NO: 264342 - DNA, 25 bp, Artificial
  Probe
tgctgacacccaacgggcaaagaac

SEQ ID NO: 264343 - DNA, 25 bp, Artificial
  Probe
cagatggggccttggccatggaaaa

SEQ ID NO: 264344 - DNA, 25 bp, Artificial
  Probe
ccagcaagctgatgccagagccaag

SEQ ID NO: 264345 - DNA, 25 bp, Artificial
  Probe
caagctgatgccagagccaagagca

SEQ ID NO: 264346 - DNA, 25 bp, Artificial
  Probe
agagccaagagcacgggagttacga

SEQ ID NO: 264347 - DNA, 25 bp, Artificial
  Probe
atgccagtgacaagacccagcaagc

SEQ ID NO: 264348 - DNA, 25 bp, Artificial
  Probe
tgaagcccagcaagctgatgccaga

SEQ ID NO: 264349 - DNA, 25 bp, Artificial
  Probe
tggaaggcatcctgcgcctaataga

SEQ ID NO: 264350 - DNA, 25 bp, Artificial
  Probe
gagtctgaacttggaagccaatgtg

SEQ ID NO: 264351 - DNA, 25 bp, Artificial
  Probe
ggtgattactgaagcccagcaagct

SEQ ID NO: 264352 - DNA, 25 bp, Artificial
  Probe
cccagcaagcagaaacggccctggg

SEQ ID NO: 264353 - DNA, 25 bp, Artificial
  Probe
agttccacacggataaagactcctt

SEQ ID NO: 264354 - DNA, 25 bp, Artificial
  Probe
cacgggagttacgatccaagacacg

SEQ ID NO: 264355 - DNA, 25 bp, Artificial
  Probe
aagagcacgggagttacgatccaag

SEQ ID NO: 264356 - DNA, 25 bp, Artificial
  Probe
caaacaacgcaagaagggttcacat

SEQ ID NO: 264357 - DNA, 25 bp, Artificial
  Probe
gtgactgtgcaaagggcctgtcctg

SEQ ID NO: 264358 - DNA, 25 bp, Artificial
  Probe
ctggagattttccagaggtgtgact

SEQ ID NO: 264359 - DNA, 25 bp, Artificial
  Probe
gttttgttgtgctcgccacttctgg

SEQ ID NO: 264360 - DNA, 25 bp, Artificial
  Probe
aatctgcaaaccagtgctccatcag

SEQ ID NO: 264361 - DNA, 25 bp, Artificial
  Probe
ctcggcatagggatcgcaaccatgg

SEQ ID NO: 264362 - DNA, 25 bp, Artificial
  Probe
tcctgcaaagtgtggaaggatgcta

SEQ ID NO: 264363 - DNA, 25 bp, Artificial
  Probe
tggtcactattccaaccatgacctg

SEQ ID NO: 264364 - DNA, 25 bp, Artificial
  Probe
cacgagcagactgtgaatttgtgta

SEQ ID NO: 264365 - DNA, 25 bp, Artificial
  Probe
gtgcaaagggcctgtcctgcaaagt

SEQ ID NO: 264366 - DNA, 25 bp, Artificial
  Probe
tgtgccagaagatctgataaacact

SEQ ID NO: 264367 - DNA, 25 bp, Artificial
  Probe
tccatgtgtgccagaagatctgata

SEQ ID NO: 264368 - DNA, 25 bp, Artificial
  Probe
cattgatgggttttgttgtgctcgc

SEQ ID NO: 264369 - DNA, 25 bp, Artificial
  Probe
gatcgcaaccatggtcactattcca

SEQ ID NO: 264370 - DNA, 25 bp, Artificial
  Probe
gaaggagacccctgtctgcggtcat

SEQ ID NO: 264371 - DNA, 25 bp, Artificial
  Probe
ttctggaccaaaatctgcaaaccag

SEQ ID NO: 264372 - DNA, 25 bp, Artificial
  Probe
acctgggatggcagaatctaggaag

SEQ ID NO: 264373 - DNA, 25 bp, Artificial
  Probe
ctccaagatgcctcatataaaggga

SEQ ID NO: 264374 - DNA, 25 bp, Artificial
  Probe
acgcaagaagggttcacatgggctg

SEQ ID NO: 264375 - DNA, 25 bp, Artificial
  Probe
catagggatcgcaaccatggtcact

SEQ ID NO: 264376 - DNA, 25 bp, Artificial
  Probe
ccaaccatgacctgggatggcagaa

SEQ ID NO: 264377 - DNA, 25 bp, Artificial
  Probe
ggatgctacctactcttccaaagcc

SEQ ID NO: 264378 - DNA, 25 bp, Artificial
  Probe
ggaaggatgctacctactcttccaa

SEQ ID NO: 264379 - DNA, 25 bp, Artificial
  Probe
tgcattatggtgtgatggaaaaccc

SEQ ID NO: 264380 - DNA, 25 bp, Artificial
  Probe
catcagactgcattgatgggttttg

SEQ ID NO: 264381 - DNA, 25 bp, Artificial
  Probe
gtgtgactgtgcaaagggcctgtcc

SEQ ID NO: 264382 - DNA, 25 bp, Artificial
  Probe
cacatgggctggagattttccagag

SEQ ID NO: 264383 - DNA, 25 bp, Artificial
  Probe
ctgtaccaaacaacgcaagaagggt

SEQ ID NO: 264384 - DNA, 25 bp, Artificial
  Probe
ggccacactccaagatgcctcatat

SEQ ID NO: 264385 - DNA, 25 bp, Artificial
  Probe
gaagtctgtaccaaacaacgcaaga

SEQ ID NO: 264386 - DNA, 25 bp, Artificial
  Probe
gttgtgctcgccacttctggaccaa

SEQ ID NO: 264387 - DNA, 25 bp, Artificial
  Probe
gagacccctgtctgcggtcatcaga

SEQ ID NO: 264388 - DNA, 25 bp, Artificial
  Probe
cagactccatgtgtgccagaagatc

SEQ ID NO: 264389 - DNA, 25 bp, Artificial
  Probe
tctaggaaggccacactccaagatg

SEQ ID NO: 264390 - DNA, 25 bp, Artificial
  Probe
ttccagaggtgtgactgtgcaaagg

SEQ ID NO: 264391 - DNA, 25 bp, Artificial
  Probe
acactggaagagtcatcacgagcag

SEQ ID NO: 264392 - DNA, 25 bp, Artificial
  Probe
tgcctcatataaagggacatgaagg

SEQ ID NO: 264393 - DNA, 25 bp, Artificial
  Probe
caaaccagtgctccatcagggggaa

SEQ ID NO: 264394 - DNA, 25 bp, Artificial
  Probe
ccctgtctgcggtcatcagactgca

SEQ ID NO: 264395 - DNA, 25 bp, Artificial
  Probe
ctgataaacactggaagagtcatca

SEQ ID NO: 264396 - DNA, 25 bp, Artificial
  Probe
gccacttctggaccaaaatctgcaa

SEQ ID NO: 264397 - DNA, 25 bp, Artificial
  Probe
gttcacatgggctggagattttcca

SEQ ID NO: 264398 - DNA, 25 bp, Artificial
  Probe
ggaccaaaatctgcaaaccagtgct

SEQ ID NO: 264399 - DNA, 25 bp, Artificial
  Probe
tcttccaaagccagactccatgtgt

SEQ ID NO: 264400 - DNA, 25 bp, Artificial
  Probe
ccaaacaacgcaagaagggttcaca

SEQ ID NO: 264401 - DNA, 25 bp, Artificial
  Probe
agatctgataaacactggaagagtc

SEQ ID NO: 264402 - DNA, 25 bp, Artificial
  Probe
ctgagatgctgactgtccctgcagg

SEQ ID NO: 264403 - DNA, 25 bp, Artificial
  Probe
taaagccctacagaagcagtttccc

SEQ ID NO: 264404 - DNA, 25 bp, Artificial
  Probe
gtctccgtgagctctcctgggcctt

SEQ ID NO: 264405 - DNA, 25 bp, Artificial
  Probe
atgaagccctgttgcccctgtcagc

SEQ ID NO: 264406 - DNA, 25 bp, Artificial
  Probe
agagtctccgtgagctctcctgggc

SEQ ID NO: 264407 - DNA, 25 bp, Artificial
  Probe
tgcgtctagctgagatgctgactgt

SEQ ID NO: 264408 - DNA, 25 bp, Artificial
  Probe
gtttcccaatgaagccctgttgccc

SEQ ID NO: 264409 - DNA, 25 bp, Artificial
  Probe
cttctggggccctttcattgtcttc

SEQ ID NO: 264410 - DNA, 25 bp, Artificial
  Probe
accagtgagagacacggatgacccc

SEQ ID NO: 264411 - DNA, 25 bp, Artificial
  Probe
acagaagcagtttcccaatgaagcc

SEQ ID NO: 264412 - DNA, 25 bp, Artificial
  Probe
gtccctgcagggaaagagttagaat

SEQ ID NO: 264413 - DNA, 25 bp, Artificial
  Probe
ctggggccctttcattgtcttcgtt

SEQ ID NO: 264414 - DNA, 25 bp, Artificial
  Probe
aagcagtttcccaatgaagccctgt

SEQ ID NO: 264415 - DNA, 25 bp, Artificial
  Probe
ggagagtctccgtgagctctcctgg

SEQ ID NO: 264416 - DNA, 25 bp, Artificial
  Probe
taatcctcagccaaagaagggatgc

SEQ ID NO: 264417 - DNA, 25 bp, Artificial
  Probe
tttactggcatggtatcattcctag

SEQ ID NO: 264418 - DNA, 25 bp, Artificial
  Probe
cctgtcagctaatcctcagccaaag

SEQ ID NO: 264419 - DNA, 25 bp, Artificial
  Probe
gggtttactggcatggtatcattcc

SEQ ID NO: 264420 - DNA, 25 bp, Artificial
  Probe
agaataaagccctacagaagcagtt

SEQ ID NO: 264421 - DNA, 25 bp, Artificial
  Probe
tcaccagtgagagacacggatgacc

SEQ ID NO: 264422 - DNA, 25 bp, Artificial
  Probe
ttctggggccctttcattgtcttcg

SEQ ID NO: 264423 - DNA, 25 bp, Artificial
  Probe
aaagccctacagaagcagtttccca

SEQ ID NO: 264424 - DNA, 25 bp, Artificial
  Probe
caatgaagccctgttgcccctgtca

SEQ ID NO: 264425 - DNA, 25 bp, Artificial
  Probe
tttccatggagtcaccagtgagaga

SEQ ID NO: 264426 - DNA, 25 bp, Artificial
  Probe
ctcagccaaagaagggatgcttgac

SEQ ID NO: 264427 - DNA, 25 bp, Artificial
  Probe
tccctgcagggaaagagttagaatg

SEQ ID NO: 264428 - DNA, 25 bp, Artificial
  Probe
agtttcccaatgaagccctgttgcc

SEQ ID NO: 264429 - DNA, 25 bp, Artificial
  Probe
gttccctctgaattttagtctctgt

SEQ ID NO: 264430 - DNA, 25 bp, Artificial
  Probe
gactgtccctgcagggaaagagtta

SEQ ID NO: 264431 - DNA, 25 bp, Artificial
  Probe
gagacacggatgaccccatgggcag

SEQ ID NO: 264432 - DNA, 25 bp, Artificial
  Probe
tgttgcccctgtcagctaatcctca

SEQ ID NO: 264433 - DNA, 25 bp, Artificial
  Probe
agatgctgactgtccctgcagggaa

SEQ ID NO: 264434 - DNA, 25 bp, Artificial
  Probe
tccgtgagctctcctgggccttcgt

SEQ ID NO: 264435 - DNA, 25 bp, Artificial
  Probe
agttccctctgaattttagtctctg

SEQ ID NO: 264436 - DNA, 25 bp, Artificial
  Probe
ggatgcttgactcaatttccatgga

SEQ ID NO: 264437 - DNA, 25 bp, Artificial
  Probe
gttgcccctgtcagctaatcctcag

SEQ ID NO: 264438 - DNA, 25 bp, Artificial
  Probe
cagctaatcctcagccaaagaaggg

SEQ ID NO: 264439 - DNA, 25 bp, Artificial
  Probe
tgactgtccctgcagggaaagagtt

SEQ ID NO: 264440 - DNA, 25 bp, Artificial
  Probe
ctcaatttccatggagtcaccagtg

SEQ ID NO: 264441 - DNA, 25 bp, Artificial
  Probe
cgtctagctgagatgctgactgtcc

SEQ ID NO: 264442 - DNA, 25 bp, Artificial
  Probe
gagagacacggatgaccccatgggc

SEQ ID NO: 264443 - DNA, 25 bp, Artificial
  Probe
gatgcttgactcaatttccatggag

SEQ ID NO: 264444 - DNA, 25 bp, Artificial
  Probe
agtcaccagtgagagacacggatga

SEQ ID NO: 264445 - DNA, 25 bp, Artificial
  Probe
agtgggagagtctccgtgagctctc

SEQ ID NO: 264446 - DNA, 25 bp, Artificial
  Probe
tggcatggtatcattcctaggaaga

SEQ ID NO: 264447 - DNA, 25 bp, Artificial
  Probe
gaataaagccctacagaagcagttt

SEQ ID NO: 264448 - DNA, 25 bp, Artificial
  Probe
caagaaaccggtacgccagccagtg

SEQ ID NO: 264449 - DNA, 25 bp, Artificial
  Probe
ccacagcaagaaaccggtacgccag

SEQ ID NO: 264450 - DNA, 25 bp, Artificial
  Probe
atcggggatctgcagattcactgcg

SEQ ID NO: 264451 - DNA, 25 bp, Artificial
  Probe
agagtgcttcatatccgacacgtcc

SEQ ID NO: 264452 - DNA, 25 bp, Artificial
  Probe
ctacaggctccgtggacaaggaaag

SEQ ID NO: 264453 - DNA, 25 bp, Artificial
  Probe
ttccaaaggcccatcggccaggcga

SEQ ID NO: 264454 - DNA, 25 bp, Artificial
  Probe
ggtacgccagccagtggaccctcaa

SEQ ID NO: 264455 - DNA, 25 bp, Artificial
  Probe
acactctcaccacagactggagact

SEQ ID NO: 264456 - DNA, 25 bp, Artificial
  Probe
acgtcctccgagcagctgacggcag

SEQ ID NO: 264457 - DNA, 25 bp, Artificial
  Probe
tcgtgtggtgaacatggcggttcca

SEQ ID NO: 264458 - DNA, 25 bp, Artificial
  Probe
ccaaacctcaggatggaggtcgtgt

SEQ ID NO: 264459 - DNA, 25 bp, Artificial
  Probe
gagtgcttcatatccgacacgtcct

SEQ ID NO: 264460 - DNA, 25 bp, Artificial
  Probe
gtctccacagaaagtgcctcctcta

SEQ ID NO: 264461 - DNA, 25 bp, Artificial
  Probe
agctacagcgtcagcccatcacaag

SEQ ID NO: 264462 - DNA, 25 bp, Artificial
  Probe
cagaaagtgcctcctctacctacga

SEQ ID NO: 264463 - DNA, 25 bp, Artificial
  Probe
ctccgtggacaaggaaagtgacagc

SEQ ID NO: 264464 - DNA, 25 bp, Artificial
  Probe
aaagtgacagctacagcgtcagccc

SEQ ID NO: 264465 - DNA, 25 bp, Artificial
  Probe
acgagcatgccaagatggaggagca

SEQ ID NO: 264466 - DNA, 25 bp, Artificial
  Probe
ctgacggcagggacaaacgagtaca

SEQ ID NO: 264467 - DNA, 25 bp, Artificial
  Probe
cgtgtggtgaacatggcggttccaa

SEQ ID NO: 264468 - DNA, 25 bp, Artificial
  Probe
tgcctcctctacctacgaagaactg

SEQ ID NO: 264469 - DNA, 25 bp, Artificial
  Probe
tcagaatcggggatctgcagattca

SEQ ID NO: 264470 - DNA, 25 bp, Artificial
  Probe
accccttcagaatcggggatctgca

SEQ ID NO: 264471 - DNA, 25 bp, Artificial
  Probe
tgcctccatacctgcgaatggactt

SEQ ID NO: 264472 - DNA, 25 bp, Artificial
  Probe
tccgagcagctgacggcagggacaa

SEQ ID NO: 264473 - DNA, 25 bp, Artificial
  Probe
agcagctgaggcacgccaagttcac

SEQ ID NO: 264474 - DNA, 25 bp, Artificial
  Probe
tcaccacagactggagactgcctac

SEQ ID NO: 264475 - DNA, 25 bp, Artificial
  Probe
ctccagtaccccttcagaatcgggg

SEQ ID NO: 264476 - DNA, 25 bp, Artificial
  Probe
gacaaacgagtacacggacagtctg

SEQ ID NO: 264477 - DNA, 25 bp, Artificial
  Probe
acctgcctccatacctgcgaatgga

SEQ ID NO: 264478 - DNA, 25 bp, Artificial
  Probe
tgacggcagggacaaacgagtacac

SEQ ID NO: 264479 - DNA, 25 bp, Artificial
  Probe
agcgtcagcccatcacaagacacag

SEQ ID NO: 264480 - DNA, 25 bp, Artificial
  Probe
acagaaagtgcctcctctacctacg

SEQ ID NO: 264481 - DNA, 25 bp, Artificial
  Probe
gggacaaacgagtacacggacagtc

SEQ ID NO: 264482 - DNA, 25 bp, Artificial
  Probe
gaagaactggccagggcctacgagc

SEQ ID NO: 264483 - DNA, 25 bp, Artificial
  Probe
caagttcaccatcacagagtgcttc

SEQ ID NO: 264484 - DNA, 25 bp, Artificial
  Probe
gatctgcagattcactgcgtctccc

SEQ ID NO: 264485 - DNA, 25 bp, Artificial
  Probe
cccccaaacctcaggatggaggtcg

SEQ ID NO: 264486 - DNA, 25 bp, Artificial
  Probe
tggcggttccaaaggcccatcggcc

SEQ ID NO: 264487 - DNA, 25 bp, Artificial
  Probe
tgaacatggcggttccaaaggccca

SEQ ID NO: 264488 - DNA, 25 bp, Artificial
  Probe
ctggccagggcctacgagcatgcca

SEQ ID NO: 264489 - DNA, 25 bp, Artificial
  Probe
acacggacagtctgacctccagtac

SEQ ID NO: 264490 - DNA, 25 bp, Artificial
  Probe
acacagacagagcaaggagcagcat

SEQ ID NO: 264491 - DNA, 25 bp, Artificial
  Probe
acagagcaaggagcagcatggtctc

SEQ ID NO: 264492 - DNA, 25 bp, Artificial
  Probe
aagtgacagctacagcgtcagccca

SEQ ID NO: 264493 - DNA, 25 bp, Artificial
  Probe
aaggagcagcatggtctccacagaa

SEQ ID NO: 264494 - DNA, 25 bp, Artificial
  Probe
agctcttcggagacctcaggtggtg

SEQ ID NO: 264495 - DNA, 25 bp, Artificial
  Probe
ccacctaaatgacgatgacgtcact

SEQ ID NO: 264496 - DNA, 25 bp, Artificial
  Probe
taaatgacgatgacgtcactgggtc

SEQ ID NO: 264497 - DNA, 25 bp, Artificial
  Probe
tctacggggaccatctggaccaaga

SEQ ID NO: 264498 - DNA, 25 bp, Artificial
  Probe
catgttcagaatcaggtggacgaag

SEQ ID NO: 264499 - DNA, 25 bp, Artificial
  Probe
cctaaatgacgatgacgtcactggg

SEQ ID NO: 264500 - DNA, 25 bp, Artificial
  Probe
gacgtcactgggtctgtgaaaagtg

SEQ ID NO: 264501 - DNA, 25 bp, Artificial
  Probe
aactacaggacaaatcagaaagctt

SEQ ID NO: 264502 - DNA, 25 bp, Artificial
  Probe
tacttattctgttgggaaatacagc

SEQ ID NO: 264503 - DNA, 25 bp, Artificial
  Probe
aaagcttatcggataatgcaactgc

SEQ ID NO: 264504 - DNA, 25 bp, Artificial
  Probe
cgatgacgtcactgggtctgtgaaa

SEQ ID NO: 264505 - DNA, 25 bp, Artificial
  Probe
agcagggactgctgcccggagctct

SEQ ID NO: 264506 - DNA, 25 bp, Artificial
  Probe
ggataatgcaactgctttcagcaac

SEQ ID NO: 264507 - DNA, 25 bp, Artificial
  Probe
gctttcagcaacagatccaaacagc

SEQ ID NO: 264508 - DNA, 25 bp, Artificial
  Probe
agttcaagcgccacctaaatgacga

SEQ ID NO: 264509 - DNA, 25 bp, Artificial
  Probe
aagcttatcggataatgcaactgct

SEQ ID NO: 264510 - DNA, 25 bp, Artificial
  Probe
ttttctacggggaccatctggacca

SEQ ID NO: 264511 - DNA, 25 bp, Artificial
  Probe
gggaccatctggaccaagatttgga

SEQ ID NO: 264512 - DNA, 25 bp, Artificial
  Probe
actgctgcccggagctcttcggaga

SEQ ID NO: 264513 - DNA, 25 bp, Artificial
  Probe
gcccggagctcttcggagacctcag

SEQ ID NO: 264514 - DNA, 25 bp, Artificial
  Probe
tcattcttatagttgtgaaataccg

SEQ ID NO: 264515 - DNA, 25 bp, Artificial
  Probe
cgtcactgggtctgtgaaaagtgag

SEQ ID NO: 264516 - DNA, 25 bp, Artificial
  Probe
tcaagcgccacctaaatgacgatga

SEQ ID NO: 264517 - DNA, 25 bp, Artificial
  Probe
gctgcccggagctcttcggagacct

SEQ ID NO: 264518 - DNA, 25 bp, Artificial
  Probe
atcagaaagcttatcggataatgca

SEQ ID NO: 264519 - DNA, 25 bp, Artificial
  Probe
ccagcagggactgctgcccggagct

SEQ ID NO: 264520 - DNA, 25 bp, Artificial
  Probe
tacggggaccatctggaccaagatt

SEQ ID NO: 264521 - DNA, 25 bp, Artificial
  Probe
ttatcggataatgcaactgctttca

SEQ ID NO: 264522 - DNA, 25 bp, Artificial
  Probe
cttatcggataatgcaactgctttc

SEQ ID NO: 264523 - DNA, 25 bp, Artificial
  Probe
tgcgctgccagcagggactgctgcc

SEQ ID NO: 264524 - DNA, 25 bp, Artificial
  Probe
tgcccggagctcttcggagacctca

SEQ ID NO: 264525 - DNA, 25 bp, Artificial
  Probe
gataatgcaactgctttcagcaaca

SEQ ID NO: 264526 - DNA, 25 bp, Artificial
  Probe
gtatgcctcccaagttcaagcgcca

SEQ ID NO: 264527 - DNA, 25 bp, Artificial
  Probe
ccatctggaccaagatttggaccca

SEQ ID NO: 264528 - DNA, 25 bp, Artificial
  Probe
cagcagggactgctgcccggagctc

SEQ ID NO: 264529 - DNA, 25 bp, Artificial
  Probe
caaatcagaaagcttatcggataat

SEQ ID NO: 264530 - DNA, 25 bp, Artificial
  Probe
agtatgcctcccaagttcaagcgcc

SEQ ID NO: 264531 - DNA, 25 bp, Artificial
  Probe
aatcagaaagcttatcggataatgc

SEQ ID NO: 264532 - DNA, 25 bp, Artificial
  Probe
gagctcttcggagacctcaggtggt

SEQ ID NO: 264533 - DNA, 25 bp, Artificial
  Probe
ctgccagcagggactgctgcccgga

SEQ ID NO: 264534 - DNA, 25 bp, Artificial
  Probe
taagcatgttcagaatcaggtggac

SEQ ID NO: 264535 - DNA, 25 bp, Artificial
  Probe
tgaactacaggacaaatcagaaagc

SEQ ID NO: 264536 - DNA, 25 bp, Artificial
  Probe
gcaactgctttcagcaacagatcca

SEQ ID NO: 264537 - DNA, 25 bp, Artificial
  Probe
atcggataatgcaactgctttcagc

SEQ ID NO: 264538 - DNA, 25 bp, Artificial
  Probe
tgctttcagcaacagatccaaacag

SEQ ID NO: 264539 - DNA, 25 bp, Artificial
  Probe
acgatgacgtcactgggtctgtgaa

SEQ ID NO: 264540 - DNA, 25 bp, Artificial
  Probe
aagagaggcagctccgcttcggcca

SEQ ID NO: 264541 - DNA, 25 bp, Artificial
  Probe
tgcaacgggccgaggcccaagaaga

SEQ ID NO: 264542 - DNA, 25 bp, Artificial
  Probe
ctatgcactcggatttgggcgcgaa

SEQ ID NO: 264543 - DNA, 25 bp, Artificial
  Probe
taccagtccttctgttctcccggga

SEQ ID NO: 264544 - DNA, 25 bp, Artificial
  Probe
agaagagaggcagctccgcttcggc

SEQ ID NO: 264545 - DNA, 25 bp, Artificial
  Probe
gtttggtaacctccatgtccaccca

SEQ ID NO: 264546 - DNA, 25 bp, Artificial
  Probe
gtgtatcagttgctgcaacacccct

SEQ ID NO: 264547 - DNA, 25 bp, Artificial
  Probe
ggcagctccgcttcggccattaggc

SEQ ID NO: 264548 - DNA, 25 bp, Artificial
  Probe
atctccgagatcagggaataagaac

SEQ ID NO: 264549 - DNA, 25 bp, Artificial
  Probe
actgaactccgtgtgtatcagttgc

SEQ ID NO: 264550 - DNA, 25 bp, Artificial
  Probe
gactgcagatctcataagctaacct

SEQ ID NO: 264551 - DNA, 25 bp, Artificial
  Probe
tatcagcaactagaattgctgttgg

SEQ ID NO: 264552 - DNA, 25 bp, Artificial
  Probe
gcctcagctgggtaccagtccttct

SEQ ID NO: 264553 - DNA, 25 bp, Artificial
  Probe
tcatcgcctcagctgggtaccagtc

SEQ ID NO: 264554 - DNA, 25 bp, Artificial
  Probe
gtgcatcgtcagcagcctgcctcat

SEQ ID NO: 264555 - DNA, 25 bp, Artificial
  Probe
gttgcagggatcatgtaccggaagt

SEQ ID NO: 264556 - DNA, 25 bp, Artificial
  Probe
aaagctatgcactcggatttgggcg

SEQ ID NO: 264557 - DNA, 25 bp, Artificial
  Probe
ccgaggcccaagaagagaggcagct

SEQ ID NO: 264558 - DNA, 25 bp, Artificial
  Probe
cctctgcttggcacactgctgaagc

SEQ ID NO: 264559 - DNA, 25 bp, Artificial
  Probe
ctgttggaacaacgttcaccatagg

SEQ ID NO: 264560 - DNA, 25 bp, Artificial
  Probe
aggaaaagctatgcactcggatttg

SEQ ID NO: 264561 - DNA, 25 bp, Artificial
  Probe
gttcttcaacttagccctctgcttg

SEQ ID NO: 264562 - DNA, 25 bp, Artificial
  Probe
atgcactcggatttgggcgcgaaga

SEQ ID NO: 264563 - DNA, 25 bp, Artificial
  Probe
cagggatcatgtaccggaagtcgtg

SEQ ID NO: 264564 - DNA, 25 bp, Artificial
  Probe
tgaactctgagaattcttacccctg

SEQ ID NO: 264565 - DNA, 25 bp, Artificial
  Probe
gaactcccaggctccatgaactctg

SEQ ID NO: 264566 - DNA, 25 bp, Artificial
  Probe
gggaaactgaactccgtgtgtatca

SEQ ID NO: 264567 - DNA, 25 bp, Artificial
  Probe
gtccttctgttctcccgggaaactg

SEQ ID NO: 264568 - DNA, 25 bp, Artificial
  Probe
tctggccctgtgttgcagggatcat

SEQ ID NO: 264569 - DNA, 25 bp, Artificial
  Probe
ctcatcgcctcagctgggtaccagt

SEQ ID NO: 264570 - DNA, 25 bp, Artificial
  Probe
attgctgttggaacaacgttcacca

SEQ ID NO: 264571 - DNA, 25 bp, Artificial
  Probe
gagccatctccgagatcagggaata

SEQ ID NO: 264572 - DNA, 25 bp, Artificial
  Probe
atcatgtaccggaagtcgtgtgcat

SEQ ID NO: 264573 - DNA, 25 bp, Artificial
  Probe
tcaacttagccctctgcttggcaca

SEQ ID NO: 264574 - DNA, 25 bp, Artificial
  Probe
atggatatcagcaactagaattgct

SEQ ID NO: 264575 - DNA, 25 bp, Artificial
  Probe
atgtccacccaaaagaactcccagg

SEQ ID NO: 264576 - DNA, 25 bp, Artificial
  Probe
agagatggctagactgcagatctca

SEQ ID NO: 264577 - DNA, 25 bp, Artificial
  Probe
tgttctcccgggaaactgaactccg

SEQ ID NO: 264578 - DNA, 25 bp, Artificial
  Probe
gccctgtgttgcagggatcatgtac

SEQ ID NO: 264579 - DNA, 25 bp, Artificial
  Probe
ctgagaattcttacccctgagccat

SEQ ID NO: 264580 - DNA, 25 bp, Artificial
  Probe
gctccatgaactctgagaattctta

SEQ ID NO: 264581 - DNA, 25 bp, Artificial
  Probe
ggtaacctccatgtccacccaaaag

SEQ ID NO: 264582 - DNA, 25 bp, Artificial
  Probe
tgtgtatcagttgctgcaacacccc

SEQ ID NO: 264583 - DNA, 25 bp, Artificial
  Probe
tgtgttgcagggatcatgtaccgga

SEQ ID NO: 264584 - DNA, 25 bp, Artificial
  Probe
aggcccaagaagagaggcagctccg

SEQ ID NO: 264585 - DNA, 25 bp, Artificial
  Probe
tagccctctgcttggcacactgctg

SEQ ID NO: 264586 - DNA, 25 bp, Artificial
  Probe
tgacagcttctaaggcagtgaaact

SEQ ID NO: 264587 - DNA, 25 bp, Artificial
  Probe
gcctttttacctgagcagaacataa

SEQ ID NO: 264588 - DNA, 25 bp, Artificial
  Probe
ttacctgagcagaacataagagtgg

SEQ ID NO: 264589 - DNA, 25 bp, Artificial
  Probe
ctccatgattcatgtggaaatattt

SEQ ID NO: 264590 - DNA, 25 bp, Artificial
  Probe
ttctaaggcagtgaaactcagaact

SEQ ID NO: 264591 - DNA, 25 bp, Artificial
  Probe
aactccatgattcatgtggaaatat

SEQ ID NO: 264592 - DNA, 25 bp, Artificial
  Probe
tttacctgagcagaacataagagtg

SEQ ID NO: 264593 - DNA, 25 bp, Artificial
  Probe
atgtaatttccatctgaacaactgg

SEQ ID NO: 264594 - DNA, 25 bp, Artificial
  Probe
ttgcttgaggtgtttatgccatcac

SEQ ID NO: 264595 - DNA, 25 bp, Artificial
  Probe
agtgaaactcagaactccatgattc

SEQ ID NO: 264596 - DNA, 25 bp, Artificial
  Probe
gcttctaaggcagtgaaactcagaa

SEQ ID NO: 264597 - DNA, 25 bp, Artificial
  Probe
ttttacctgagcagaacataagagt

SEQ ID NO: 264598 - DNA, 25 bp, Artificial
  Probe
cagaactccatgattcatgtggaaa

SEQ ID NO: 264599 - DNA, 25 bp, Artificial
  Probe
ataatcactaggagtttcttcaaag

SEQ ID NO: 264600 - DNA, 25 bp, Artificial
  Probe
catctgaacaactggaatatagttt

SEQ ID NO: 264601 - DNA, 25 bp, Artificial
  Probe
ttgcctttttacctgagcagaacat

SEQ ID NO: 264602 - DNA, 25 bp, Artificial
  Probe
tacctgagcagaacataagagtggt

SEQ ID NO: 264603 - DNA, 25 bp, Artificial
  Probe
ttccatctgaacaactggaatatag

SEQ ID NO: 264604 - DNA, 25 bp, Artificial
  Probe
gaaactcagaactccatgattcatg

SEQ ID NO: 264605 - DNA, 25 bp, Artificial
  Probe
aactcagaactccatgattcatgtg

SEQ ID NO: 264606 - DNA, 25 bp, Artificial
  Probe
attttgttgcctttttacctgagca

SEQ ID NO: 264607 - DNA, 25 bp, Artificial
  Probe
ctcagaactccatgattcatgtgga

SEQ ID NO: 264608 - DNA, 25 bp, Artificial
  Probe
acgttattctgtggatgtaatttcc

SEQ ID NO: 264609 - DNA, 25 bp, Artificial
  Probe
cacgttattctgtggatgtaatttc

SEQ ID NO: 264610 - DNA, 25 bp, Artificial
  Probe
gttgcctttttacctgagcagaaca

SEQ ID NO: 264611 - DNA, 25 bp, Artificial
  Probe
gtaatttccatctgaacaactggaa

SEQ ID NO: 264612 - DNA, 25 bp, Artificial
  Probe
aaatgacagcttctaaggcagtgaa

SEQ ID NO: 264613 - DNA, 25 bp, Artificial
  Probe
tcagaactccatgattcatgtggaa

SEQ ID NO: 264614 - DNA, 25 bp, Artificial
  Probe
ttttgcttgaggtgtttatgccatc

SEQ ID NO: 264615 - DNA, 25 bp, Artificial
  Probe
ttattctgtggatgtaatttccatc

SEQ ID NO: 264616 - DNA, 25 bp, Artificial
  Probe
agcttctaaggcagtgaaactcaga

SEQ ID NO: 264617 - DNA, 25 bp, Artificial
  Probe
cgttattctgtggatgtaatttcca

SEQ ID NO: 264618 - DNA, 25 bp, Artificial
  Probe
tccatctgaacaactggaatatagt

SEQ ID NO: 264619 - DNA, 25 bp, Artificial
  Probe
aatgacagcttctaaggcagtgaaa

SEQ ID NO: 264620 - DNA, 25 bp, Artificial
  Probe
gtttatgccatcacaaagttgtaaa

SEQ ID NO: 264621 - DNA, 25 bp, Artificial
  Probe
ttttgttgcctttttacctgagcag

SEQ ID NO: 264622 - DNA, 25 bp, Artificial
  Probe
tgtaatttccatctgaacaactgga

SEQ ID NO: 264623 - DNA, 25 bp, Artificial
  Probe
gtgtttatgccatcacaaagttgta

SEQ ID NO: 264624 - DNA, 25 bp, Artificial
  Probe
cacgaggccttttgatgaatgtatt

SEQ ID NO: 264625 - DNA, 25 bp, Artificial
  Probe
cagtgaaactcagaactccatgatt

SEQ ID NO: 264626 - DNA, 25 bp, Artificial
  Probe
tggatgtaatttccatctgaacaac

SEQ ID NO: 264627 - DNA, 25 bp, Artificial
  Probe
tttttacctgagcagaacataagag

SEQ ID NO: 264628 - DNA, 25 bp, Artificial
  Probe
tgcttgaggtgtttatgccatcaca

SEQ ID NO: 264629 - DNA, 25 bp, Artificial
  Probe
tgtttatgccatcacaaagttgtaa

SEQ ID NO: 264630 - DNA, 25 bp, Artificial
  Probe
actccatgattcatgtggaaatatt

SEQ ID NO: 264631 - DNA, 25 bp, Artificial
  Probe
ggtgtttatgccatcacaaagttgt

SEQ ID NO: 264632 - DNA, 25 bp, Artificial
  Probe
acacggagcaagatcggttttggca

SEQ ID NO: 264633 - DNA, 25 bp, Artificial
  Probe
gactttgagcgctcaaggctgctgc

SEQ ID NO: 264634 - DNA, 25 bp, Artificial
  Probe
tgttcgactttgagcgctcaaggct

SEQ ID NO: 264635 - DNA, 25 bp, Artificial
  Probe
tcaacctggagcagcgcagtgagtc

SEQ ID NO: 264636 - DNA, 25 bp, Artificial
  Probe
tcttacactgaaaccgaggccacca

SEQ ID NO: 264637 - DNA, 25 bp, Artificial
  Probe
catactgggagcaccggacacgcgt

SEQ ID NO: 264638 - DNA, 25 bp, Artificial
  Probe
tttggcatcctgctcagcaaggagc

SEQ ID NO: 264639 - DNA, 25 bp, Artificial
  Probe
gcggcttctgcctgggccagctcaa

SEQ ID NO: 264640 - DNA, 25 bp, Artificial
  Probe
tccgggtgaattctcagatgccagc

SEQ ID NO: 264641 - DNA, 25 bp, Artificial
  Probe
caggctgtcagcatcttctacgacc

SEQ ID NO: 264642 - DNA, 25 bp, Artificial
  Probe
cggcgcacacggagcaagatcggtt

SEQ ID NO: 264643 - DNA, 25 bp, Artificial
  Probe
tttgagcgctcaaggctgctgcagc

SEQ ID NO: 264644 - DNA, 25 bp, Artificial
  Probe
tcgtgcgcaaggtgccaccgggcta

SEQ ID NO: 264645 - DNA, 25 bp, Artificial
  Probe
tctgcctgggccagctcaacctgga

SEQ ID NO: 264646 - DNA, 25 bp, Artificial
  Probe
tccctcatcactgctccgggtgaat

SEQ ID NO: 264647 - DNA, 25 bp, Artificial
  Probe
cggtgtatgaccaggctgtcagcat

SEQ ID NO: 264648 - DNA, 25 bp, Artificial
  Probe
caaggctgctgcagcacgcagacgc

SEQ ID NO: 264649 - DNA, 25 bp, Artificial
  Probe
agcatgtctccagatgccaccaagc

SEQ ID NO: 264650 - DNA, 25 bp, Artificial
  Probe
tacattgtcttacactgaaaccgag

SEQ ID NO: 264651 - DNA, 25 bp, Artificial
  Probe
ccaagccaagccactggtgcagcgt

SEQ ID NO: 264652 - DNA, 25 bp, Artificial
  Probe
cagcatgtctccagatgccaccaag

SEQ ID NO: 264653 - DNA, 25 bp, Artificial
  Probe
gggccgcctctatgcggtgtatgac

SEQ ID NO: 264654 - DNA, 25 bp, Artificial
  Probe
tggatctgtccgattctacattgtc

SEQ ID NO: 264655 - DNA, 25 bp, Artificial
  Probe
agcgctcaaggctgctgcagcacgc

SEQ ID NO: 264656 - DNA, 25 bp, Artificial
  Probe
gtgccaccgggctactccatcaagg

SEQ ID NO: 264657 - DNA, 25 bp, Artificial
  Probe
cactgctccgggtgaattctcagat

SEQ ID NO: 264658 - DNA, 25 bp, Artificial
  Probe
tggcatactgggagcaccggacacg

SEQ ID NO: 264659 - DNA, 25 bp, Artificial
  Probe
atcggttttggcatcctgctcagca

SEQ ID NO: 264660 - DNA, 25 bp, Artificial
  Probe
agcccgatggcgtgtgggcctacaa

SEQ ID NO: 264661 - DNA, 25 bp, Artificial
  Probe
gatctgtccgattctacattgtctt

SEQ ID NO: 264662 - DNA, 25 bp, Artificial
  Probe
agccactggtgcagcgtggcatact

SEQ ID NO: 264663 - DNA, 25 bp, Artificial
  Probe
tgcagcacgcagacgccgctcatgg

SEQ ID NO: 264664 - DNA, 25 bp, Artificial
  Probe
gcatcctgctcagcaaggagcccga

SEQ ID NO: 264665 - DNA, 25 bp, Artificial
  Probe
tgctcagcaaggagcccgatggcgt

SEQ ID NO: 264666 - DNA, 25 bp, Artificial
  Probe
ttctacgacctacctcagggcagcg

SEQ ID NO: 264667 - DNA, 25 bp, Artificial
  Probe
gatgccagcatgtctccagatgcca

SEQ ID NO: 264668 - DNA, 25 bp, Artificial
  Probe
tgcagcgtggcatactgggagcacc

SEQ ID NO: 264669 - DNA, 25 bp, Artificial
  Probe
ttctcagatgccagcatgtctccag

SEQ ID NO: 264670 - DNA, 25 bp, Artificial
  Probe
tgaattctcagatgccagcatgtct

SEQ ID NO: 264671 - DNA, 25 bp, Artificial
  Probe
acgacctacctcagggcagcggctt

SEQ ID NO: 264672 - DNA, 25 bp, Artificial
  Probe
cccgatggcgtgtgggcctacaacc

SEQ ID NO: 264673 - DNA, 25 bp, Artificial
  Probe
cctcatcactgctccgggtgaattc

SEQ ID NO: 264674 - DNA, 25 bp, Artificial
  Probe
tgggccgcctctatgcggtgtatga

SEQ ID NO: 264675 - DNA, 25 bp, Artificial
  Probe
gcctctatgcggtgtatgaccaggc

SEQ ID NO: 264676 - DNA, 25 bp, Artificial
  Probe
gtatgaccaggctgtcagcatcttc

SEQ ID NO: 264677 - DNA, 25 bp, Artificial
  Probe
ggtgaattctcagatgccagcatgt

SEQ ID NO: 264678 - DNA, 25 bp, Artificial
  Probe
gaaagacaccaatccagggcagaac

SEQ ID NO: 264679 - DNA, 25 bp, Artificial
  Probe
agccagaaggactcgtaagacaatc

SEQ ID NO: 264680 - DNA, 25 bp, Artificial
  Probe
ctcctcagtgggtgaactctcttag

SEQ ID NO: 264681 - DNA, 25 bp, Artificial
  Probe
agtccaacagggaaggcaggctcct

SEQ ID NO: 264682 - DNA, 25 bp, Artificial
  Probe
tggtttctatgtgcttctatgactg

SEQ ID NO: 264683 - DNA, 25 bp, Artificial
  Probe
gagtttctaggcactgtgatgacat

SEQ ID NO: 264684 - DNA, 25 bp, Artificial
  Probe
tacctgggcaagtgggagacagata

SEQ ID NO: 264685 - DNA, 25 bp, Artificial
  Probe
ttatacctgggcaagtgggagacag

SEQ ID NO: 264686 - DNA, 25 bp, Artificial
  Probe
acagagtccaacagggaaggcaggc

SEQ ID NO: 264687 - DNA, 25 bp, Artificial
  Probe
aggactcgtaagacaatcttgtgcc

SEQ ID NO: 264688 - DNA, 25 bp, Artificial
  Probe
aatccagggcagaactacccttcca

SEQ ID NO: 264689 - DNA, 25 bp, Artificial
  Probe
cttagaaacacgaggcagagggagc

SEQ ID NO: 264690 - DNA, 25 bp, Artificial
  Probe
ggaagtttcttccttggtttctatg

SEQ ID NO: 264691 - DNA, 25 bp, Artificial
  Probe
cactgtgatgacattatctgtaagt

SEQ ID NO: 264692 - DNA, 25 bp, Artificial
  Probe
agacaccaatccagggcagaactac

SEQ ID NO: 264693 - DNA, 25 bp, Artificial
  Probe
gaagaaacaccaagaagatgctacg

SEQ ID NO: 264694 - DNA, 25 bp, Artificial
  Probe
ttctatgactgttccccaagtgaca

SEQ ID NO: 264695 - DNA, 25 bp, Artificial
  Probe
gttggcagctcttcggttttcccct

SEQ ID NO: 264696 - DNA, 25 bp, Artificial
  Probe
aacacgaggcagagggagccttgct

SEQ ID NO: 264697 - DNA, 25 bp, Artificial
  Probe
aagacaatcttgtgcccattttttg

SEQ ID NO: 264698 - DNA, 25 bp, Artificial
  Probe
tgactgttccccaagtgacagagtc

SEQ ID NO: 264699 - DNA, 25 bp, Artificial
  Probe
ctatgtgcttctatgactgttcccc

SEQ ID NO: 264700 - DNA, 25 bp, Artificial
  Probe
aggtcgaccagttggcagctcttcg

SEQ ID NO: 264701 - DNA, 25 bp, Artificial
  Probe
taggcactgtgatgacattatctgt

SEQ ID NO: 264702 - DNA, 25 bp, Artificial
  Probe
ggagccttgctttgtggaaagaaac

SEQ ID NO: 264703 - DNA, 25 bp, Artificial
  Probe
gatatccaggaagtttcttccttgg

SEQ ID NO: 264704 - DNA, 25 bp, Artificial
  Probe
aaggcaggctcctcagtgggtgaac

SEQ ID NO: 264705 - DNA, 25 bp, Artificial
  Probe
agacagatatccaggaagtttcttc

SEQ ID NO: 264706 - DNA, 25 bp, Artificial
  Probe
cagtttgagtttctaggcactgtga

SEQ ID NO: 264707 - DNA, 25 bp, Artificial
  Probe
caccaagaagatgctacggtatatt

SEQ ID NO: 264708 - DNA, 25 bp, Artificial
  Probe
cgaccagttggcagctcttcggttt

SEQ ID NO: 264709 - DNA, 25 bp, Artificial
  Probe
gtccaacagggaaggcaggctcctc

SEQ ID NO: 264710 - DNA, 25 bp, Artificial
  Probe
caggctcctcagtgggtgaactctc

SEQ ID NO: 264711 - DNA, 25 bp, Artificial
  Probe
cagagggagccttgctttgtggaaa

SEQ ID NO: 264712 - DNA, 25 bp, Artificial
  Probe
gcagctcttcggttttcccctcttt

SEQ ID NO: 264713 - DNA, 25 bp, Artificial
  Probe
caggtcgaccagttggcagctcttc

SEQ ID NO: 264714 - DNA, 25 bp, Artificial
  Probe
ccttgctttgtggaaagaaacgtga

SEQ ID NO: 264715 - DNA, 25 bp, Artificial
  Probe
cagggcagaactacccttccaggtc

SEQ ID NO: 264716 - DNA, 25 bp, Artificial
  Probe
atctgtaagtgctggcatttggacc

SEQ ID NO: 264717 - DNA, 25 bp, Artificial
  Probe
gaaacaccaagaagatgctacggta

SEQ ID NO: 264718 - DNA, 25 bp, Artificial
  Probe
gatgacattatctgtaagtgctggc

SEQ ID NO: 264719 - DNA, 25 bp, Artificial
  Probe
ctctttagtgtttgttatacctggg

SEQ ID NO: 264720 - DNA, 25 bp, Artificial
  Probe
ctacccttccaggtcgaccagttgg

SEQ ID NO: 264721 - DNA, 25 bp, Artificial
  Probe
ccctctttagtgtttgttatacctg

SEQ ID NO: 264722 - DNA, 25 bp, Artificial
  Probe
cttggtttctatgtgcttctatgac

SEQ ID NO: 264723 - DNA, 25 bp, Artificial
  Probe
tattacagtttgagtttctaggcac

SEQ ID NO: 264724 - DNA, 25 bp, Artificial
  Probe
ctggaggaattccttagggaacaag

SEQ ID NO: 264725 - DNA, 25 bp, Artificial
  Probe
atgcgcctccaggacatcactcagt

SEQ ID NO: 264726 - DNA, 25 bp, Artificial
  Probe
agataggtcatgttacgtatgtcac

SEQ ID NO: 264727 - DNA, 25 bp, Artificial
  Probe
tcctgaggctggaggaattccttag

SEQ ID NO: 264728 - DNA, 25 bp, Artificial
  Probe
catgcttttacctagccgtctactg

SEQ ID NO: 264729 - DNA, 25 bp, Artificial
  Probe
aattccttagggaacaagcacttgg

SEQ ID NO: 264730 - DNA, 25 bp, Artificial
  Probe
tctgcaattcagcaccatgaaaatg

SEQ ID NO: 264731 - DNA, 25 bp, Artificial
  Probe
ctccaggacatcactcagtcatcgg

SEQ ID NO: 264732 - DNA, 25 bp, Artificial
  Probe
ccgagtgcatactgcctggacacca

SEQ ID NO: 264733 - DNA, 25 bp, Artificial
  Probe
aacagaaggccgagtgcatactgcc

SEQ ID NO: 264734 - DNA, 25 bp, Artificial
  Probe
tccttgcaatactgggggaacagac

SEQ ID NO: 264735 - DNA, 25 bp, Artificial
  Probe
tttccaactggacagccccgggaca

SEQ ID NO: 264736 - DNA, 25 bp, Artificial
  Probe
tccaaaagcaatcagtatgtttatg

SEQ ID NO: 264737 - DNA, 25 bp, Artificial
  Probe
acacacaaagataggtcatgttacg

SEQ ID NO: 264738 - DNA, 25 bp, Artificial
  Probe
cccacacacaaagataggtcatgtt

SEQ ID NO: 264739 - DNA, 25 bp, Artificial
  Probe
gacaccactggctcctgaggctgga

SEQ ID NO: 264740 - DNA, 25 bp, Artificial
  Probe
gctgaatatgtcatctacagagggg

SEQ ID NO: 264741 - DNA, 25 bp, Artificial
  Probe
gcctggacaccactggctcctgagg

SEQ ID NO: 264742 - DNA, 25 bp, Artificial
  Probe
atgcttttacctagccgtctactga

SEQ ID NO: 264743 - DNA, 25 bp, Artificial
  Probe
gagctcccttttccaactggacagc

SEQ ID NO: 264744 - DNA, 25 bp, Artificial
  Probe
gcatactgcctggacaccactggct

SEQ ID NO: 264745 - DNA, 25 bp, Artificial
  Probe
tggaggaattccttagggaacaagc

SEQ ID NO: 264746 - DNA, 25 bp, Artificial
  Probe
tgcctggacaccactggctcctgag

SEQ ID NO: 264747 - DNA, 25 bp, Artificial
  Probe
gtagagtgacccttggaaagtcttt

SEQ ID NO: 264748 - DNA, 25 bp, Artificial
  Probe
gtgcatactgcctggacaccactgg

SEQ ID NO: 264749 - DNA, 25 bp, Artificial
  Probe
accaagtgtcaatgggctggcgtat

SEQ ID NO: 264750 - DNA, 25 bp, Artificial
  Probe
caatgagctcccttttccaactgga

SEQ ID NO: 264751 - DNA, 25 bp, Artificial
  Probe
gtcttttctgcaattcagcaccatg

SEQ ID NO: 264752 - DNA, 25 bp, Artificial
  Probe
gaaagtcttttctgcaattcagcac

SEQ ID NO: 264753 - DNA, 25 bp, Artificial
  Probe
tgaaaatggcccatgcgcctccagg

SEQ ID NO: 264754 - DNA, 25 bp, Artificial
  Probe
gtctactgaacagattctgtactct

SEQ ID NO: 264755 - DNA, 25 bp, Artificial
  Probe
ttccaactggacagccccgggacat

SEQ ID NO: 264756 - DNA, 25 bp, Artificial
  Probe
tttacctagccgtctactgaacaga

SEQ ID NO: 264757 - DNA, 25 bp, Artificial
  Probe
tgggctggcgtatgctgaatatgtc

SEQ ID NO: 264758 - DNA, 25 bp, Artificial
  Probe
gtgacgataccttgcccctaaaggc

SEQ ID NO: 264759 - DNA, 25 bp, Artificial
  Probe
gcaccatgaaaatggcccatgcgcc

SEQ ID NO: 264760 - DNA, 25 bp, Artificial
  Probe
tgggggaacagacctctgtgcttat

SEQ ID NO: 264761 - DNA, 25 bp, Artificial
  Probe
gacagccccgggacatccattgact

SEQ ID NO: 264762 - DNA, 25 bp, Artificial
  Probe
gaacagacctctgtgcttatctcta

SEQ ID NO: 264763 - DNA, 25 bp, Artificial
  Probe
ccctaaaggcggtcttccttgcaat

SEQ ID NO: 264764 - DNA, 25 bp, Artificial
  Probe
ctcagtcatcggtagaccaagtgtc

SEQ ID NO: 264765 - DNA, 25 bp, Artificial
  Probe
ctggcgtatgctgaatatgtcatct

SEQ ID NO: 264766 - DNA, 25 bp, Artificial
  Probe
atgtcacagacaaatgcttttctgt

SEQ ID NO: 264767 - DNA, 25 bp, Artificial
  Probe
acagacaaatgcttttctgtagagt

SEQ ID NO: 264768 - DNA, 25 bp, Artificial
  Probe
cactggctcctgaggctggaggaat

SEQ ID NO: 264769 - DNA, 25 bp, Artificial
  Probe
tgtcatctacagaggggaacagaag

SEQ ID NO: 264770 - DNA, 25 bp, Artificial
  Probe
tgctttggagactcgggccagccct

SEQ ID NO: 264771 - DNA, 25 bp, Artificial
  Probe
catcacgggctcaggggttctccga

SEQ ID NO: 264772 - DNA, 25 bp, Artificial
  Probe
gctctggcaccatggcgagcacggc

SEQ ID NO: 264773 - DNA, 25 bp, Artificial
  Probe
agctggggctgaagctgctctatgc

SEQ ID NO: 264774 - DNA, 25 bp, Artificial
  Probe
ggcggctgagccagcaaagcgcatc

SEQ ID NO: 264775 - DNA, 25 bp, Artificial
  Probe
ctacctgctgggtgaccgggactcc

SEQ ID NO: 264776 - DNA, 25 bp, Artificial
  Probe
caggctgatttgcatatcggggaag

SEQ ID NO: 264777 - DNA, 25 bp, Artificial
  Probe
ggtgaacacccactgccatgctgat

SEQ ID NO: 264778 - DNA, 25 bp, Artificial
  Probe
cgcctcagcggagctcaggctgatt

SEQ ID NO: 264779 - DNA, 25 bp, Artificial
  Probe
tgggctctggcaccatggcgagcac

SEQ ID NO: 264780 - DNA, 25 bp, Artificial
  Probe
accatggcgagcacggccgtcagag

SEQ ID NO: 264781 - DNA, 25 bp, Artificial
  Probe
cagcaaagcgcatccggagcgccgg

SEQ ID NO: 264782 - DNA, 25 bp, Artificial
  Probe
atgaccagagcatggctttcactgg

SEQ ID NO: 264783 - DNA, 25 bp, Artificial
  Probe
cgggctcaggggttctccgatccct

SEQ ID NO: 264784 - DNA, 25 bp, Artificial
  Probe
ccatcctgatcgaccctgttctgga

SEQ ID NO: 264785 - DNA, 25 bp, Artificial
  Probe
cggtgaacacccactgccatgctga

SEQ ID NO: 264786 - DNA, 25 bp, Artificial
  Probe
agcgccggtcctcctgcgtcagatg

SEQ ID NO: 264787 - DNA, 25 bp, Artificial
  Probe
gatgccctactgatccgagggtgtg

SEQ ID NO: 264788 - DNA, 25 bp, Artificial
  Probe
catcccctttggacgctttgctttg

SEQ ID NO: 264789 - DNA, 25 bp, Artificial
  Probe
acctgctgggtgaccgggactcccg

SEQ ID NO: 264790 - DNA, 25 bp, Artificial
  Probe
tgctctatgcggtgaacacccactg

SEQ ID NO: 264791 - DNA, 25 bp, Artificial
  Probe
atgtttgagcccaagagctgcacct

SEQ ID NO: 264792 - DNA, 25 bp, Artificial
  Probe
ggtcctcctgcgtcagatgtttgag

SEQ ID NO: 264793 - DNA, 25 bp, Artificial
  Probe
actgccatgctgatcacatcacggg

SEQ ID NO: 264794 - DNA, 25 bp, Artificial
  Probe
ctcagctgattaaggagctggggct

SEQ ID NO: 264795 - DNA, 25 bp, Artificial
  Probe
cctgatcgaccctgttctggagaca

SEQ ID NO: 264796 - DNA, 25 bp, Artificial
  Probe
cgagaggccatcctgatcgaccctg

SEQ ID NO: 264797 - DNA, 25 bp, Artificial
  Probe
atctctcgcctcagcggagctcagg

SEQ ID NO: 264798 - DNA, 25 bp, Artificial
  Probe
gaagctgctctatgcggtgaacacc

SEQ ID NO: 264799 - DNA, 25 bp, Artificial
  Probe
tgttctggagacagcgcaccgggat

SEQ ID NO: 264800 - DNA, 25 bp, Artificial
  Probe
gggactcccgagaggccatcctgat

SEQ ID NO: 264801 - DNA, 25 bp, Artificial
  Probe
gctgatcacatcacgggctcagggg

SEQ ID NO: 264802 - DNA, 25 bp, Artificial
  Probe
ggctgaagctgctctatgcggtgaa

SEQ ID NO: 264803 - DNA, 25 bp, Artificial
  Probe
gtttgagcccaagagctgcacctac

SEQ ID NO: 264804 - DNA, 25 bp, Artificial
  Probe
tcagcggagctcaggctgatttgca

SEQ ID NO: 264805 - DNA, 25 bp, Artificial
  Probe
ggcaccatggcgagcacggccgtca

SEQ ID NO: 264806 - DNA, 25 bp, Artificial
  Probe
cagcgcaccgggatgctcagctgat

SEQ ID NO: 264807 - DNA, 25 bp, Artificial
  Probe
cgggactcccgagaggccatcctga

SEQ ID NO: 264808 - DNA, 25 bp, Artificial
  Probe
gtcagatgtttgagcccaagagctg

SEQ ID NO: 264809 - DNA, 25 bp, Artificial
  Probe
acaccccaggctgtgtcacctttgt

SEQ ID NO: 264810 - DNA, 25 bp, Artificial
  Probe
gggctcaggggttctccgatccctc

SEQ ID NO: 264811 - DNA, 25 bp, Artificial
  Probe
tggagacagcgcaccgggatgctca

SEQ ID NO: 264812 - DNA, 25 bp, Artificial
  Probe
gtggacgaacagacttccaacaagg

SEQ ID NO: 264813 - DNA, 25 bp, Artificial
  Probe
ccctttggacgctttgctttggaga

SEQ ID NO: 264814 - DNA, 25 bp, Artificial
  Probe
cacatcacgggctcaggggttctcc

SEQ ID NO: 264815 - DNA, 25 bp, Artificial
  Probe
ctgagccagcaaagcgcatccggag

SEQ ID NO: 264816 - DNA, 25 bp, Artificial
  Probe
aaaccaactggatgggatacacctt

SEQ ID NO: 264817 - DNA, 25 bp, Artificial
  Probe
caggccactggctgaaccacgggaa

SEQ ID NO: 264818 - DNA, 25 bp, Artificial
  Probe
ggagacattgagagccgtggctcca

SEQ ID NO: 264819 - DNA, 25 bp, Artificial
  Probe
gacgagatcatctgggtgaagacca

SEQ ID NO: 264820 - DNA, 25 bp, Artificial
  Probe
catcatcaggacaggccggacaggc

SEQ ID NO: 264821 - DNA, 25 bp, Artificial
  Probe
agccgtggctccacaggctgcctga

SEQ ID NO: 264822 - DNA, 25 bp, Artificial
  Probe
ggtgtcatctctaaacctaagaact

SEQ ID NO: 264823 - DNA, 25 bp, Artificial
  Probe
cccggtttaagcacaggtatccaga

SEQ ID NO: 264824 - DNA, 25 bp, Artificial
  Probe
aacctaagaacttataggagacatt

SEQ ID NO: 264825 - DNA, 25 bp, Artificial
  Probe
ggtgaagaccaatcagctgcagcgc

SEQ ID NO: 264826 - DNA, 25 bp, Artificial
  Probe
tcatctgggtgaagaccaatcagct

SEQ ID NO: 264827 - DNA, 25 bp, Artificial
  Probe
tacaccttctggacccagatgtggt

SEQ ID NO: 264828 - DNA, 25 bp, Artificial
  Probe
gtgtcaaaggaaatccccaaggctt

SEQ ID NO: 264829 - DNA, 25 bp, Artificial
  Probe
actggctgaaccacgggaaggagca

SEQ ID NO: 264830 - DNA, 25 bp, Artificial
  Probe
agtcacaaaccagatgaaatatatg

SEQ ID NO: 264831 - DNA, 25 bp, Artificial
  Probe
gtgattgtagctgaggttcgttcca

SEQ ID NO: 264832 - DNA, 25 bp, Artificial
  Probe
ctctaaacctaagaacttataggag

SEQ ID NO: 264833 - DNA, 25 bp, Artificial
  Probe
tcacaaaccagatgaaatatatggc

SEQ ID NO: 264834 - DNA, 25 bp, Artificial
  Probe
cggacaggccactggctgaaccacg

SEQ ID NO: 264835 - DNA, 25 bp, Artificial
  Probe
agatcatctgggtgaagaccaatca

SEQ ID NO: 264836 - DNA, 25 bp, Artificial
  Probe
cattgagagccgtggctccacaggc

SEQ ID NO: 264837 - DNA, 25 bp, Artificial
  Probe
atgtctgaacctctggggttacgag

SEQ ID NO: 264838 - DNA, 25 bp, Artificial
  Probe
agaagtgcttatgcagtgtccccca

SEQ ID NO: 264839 - DNA, 25 bp, Artificial
  Probe
ccttctggacccagatgtggttgcc

SEQ ID NO: 264840 - DNA, 25 bp, Artificial
  Probe
tggacgagatcatctgggtgaagac

SEQ ID NO: 264841 - DNA, 25 bp, Artificial
  Probe
tggatgggatacaccttctggaccc

SEQ ID NO: 264842 - DNA, 25 bp, Artificial
  Probe
cccagatgtggttgcccggtttaag

SEQ ID NO: 264843 - DNA, 25 bp, Artificial
  Probe
ccctggcacccgaaagattgagtta

SEQ ID NO: 264844 - DNA, 25 bp, Artificial
  Probe
gacgaccacacaatgtgcagcccaa

SEQ ID NO: 264845 - DNA, 25 bp, Artificial
  Probe
aatgtgcagcccaactggattactc

SEQ ID NO: 264846 - DNA, 25 bp, Artificial
  Probe
aggaaatccccaaggcttcaaccag

SEQ ID NO: 264847 - DNA, 25 bp, Artificial
  Probe
agagaatgtctgaacctctggggtt

SEQ ID NO: 264848 - DNA, 25 bp, Artificial
  Probe
gttccaccagtcacaaaccagatga

SEQ ID NO: 264849 - DNA, 25 bp, Artificial
  Probe
aggctgcctgaagagaagtgcttat

SEQ ID NO: 264850 - DNA, 25 bp, Artificial
  Probe
acaggctgcctgaagagaagtgctt

SEQ ID NO: 264851 - DNA, 25 bp, Artificial
  Probe
agagaagtgcttatgcagtgtcccc

SEQ ID NO: 264852 - DNA, 25 bp, Artificial
  Probe
cacacaatgtgcagcccaactggat

SEQ ID NO: 264853 - DNA, 25 bp, Artificial
  Probe
ccaatcagctgcagcgcatcatcag

SEQ ID NO: 264854 - DNA, 25 bp, Artificial
  Probe
tgtcaaaggaaatccccaaggcttc

SEQ ID NO: 264855 - DNA, 25 bp, Artificial
  Probe
gcacccgaaagattgagttatttgg

SEQ ID NO: 264856 - DNA, 25 bp, Artificial
  Probe
gtggttgcccggtttaagcacaggt

SEQ ID NO: 264857 - DNA, 25 bp, Artificial
  Probe
cagctgcagcgcatcatcaggacag

SEQ ID NO: 264858 - DNA, 25 bp, Artificial
  Probe
gagttatttggacgaccacacaatg

SEQ ID NO: 264859 - DNA, 25 bp, Artificial
  Probe
cctctgggtcacaggcagggccatg

SEQ ID NO: 264860 - DNA, 25 bp, Artificial
  Probe
gccggacaggccactggctgaacca

SEQ ID NO: 264861 - DNA, 25 bp, Artificial
  Probe
cgttccaccagtcacaaaccagatg

SEQ ID NO: 264862 - DNA, 25 bp, Artificial
  Probe
tcctgtgcatatcagtatcatggag

SEQ ID NO: 264863 - DNA, 25 bp, Artificial
  Probe
tactatgatccactgcagtccaggg

SEQ ID NO: 264864 - DNA, 25 bp, Artificial
  Probe
ctcctcctgtgcatatcagtatcat

SEQ ID NO: 264865 - DNA, 25 bp, Artificial
  Probe
tctatacccatggtgacagccctgc

SEQ ID NO: 264866 - DNA, 25 bp, Artificial
  Probe
gcagtccagggaccaatctataccc

SEQ ID NO: 264867 - DNA, 25 bp, Artificial
  Probe
gcatatcagtatcatggagggacat

SEQ ID NO: 264868 - DNA, 25 bp, Artificial
  Probe
agtccagggaccaatctatacccat

SEQ ID NO: 264869 - DNA, 25 bp, Artificial
  Probe
tcctcctgtgcatatcagtatcatg

SEQ ID NO: 264870 - DNA, 25 bp, Artificial
  Probe
cctgctcctcctgtgcatatcagta

SEQ ID NO: 264871 - DNA, 25 bp, Artificial
  Probe
atgatccactgcagtccagggacca

SEQ ID NO: 264872 - DNA, 25 bp, Artificial
  Probe
tgcagtccagggaccaatctatacc

SEQ ID NO: 264873 - DNA, 25 bp, Artificial
  Probe
gtccagggaccaatctatacccatg

SEQ ID NO: 264874 - DNA, 25 bp, Artificial
  Probe
ttactatgatccactgcagtccagg

SEQ ID NO: 264875 - DNA, 25 bp, Artificial
  Probe
gggaccaatctatacccatggtgac

SEQ ID NO: 264876 - DNA, 25 bp, Artificial
  Probe
ggaccaatctatacccatggtgaca

SEQ ID NO: 264877 - DNA, 25 bp, Artificial
  Probe
gatccactgcagtccagggaccaat

SEQ ID NO: 264878 - DNA, 25 bp, Artificial
  Probe
cctgtgcatatcagtatcatggagg

SEQ ID NO: 264879 - DNA, 25 bp, Artificial
  Probe
caatctatacccatggtgacagccc

SEQ ID NO: 264880 - DNA, 25 bp, Artificial
  Probe
tatcagtatcatggagggacattac

SEQ ID NO: 264881 - DNA, 25 bp, Artificial
  Probe
gacattactatgatccactgcagtc

SEQ ID NO: 264882 - DNA, 25 bp, Artificial
  Probe
gtgcatatcagtatcatggagggac

SEQ ID NO: 264883 - DNA, 25 bp, Artificial
  Probe
atccactgcagtccagggaccaatc

SEQ ID NO: 264884 - DNA, 25 bp, Artificial
  Probe
tgcatatcagtatcatggagggaca

SEQ ID NO: 264885 - DNA, 25 bp, Artificial
  Probe
ctcctgtgcatatcagtatcatgga

SEQ ID NO: 264886 - DNA, 25 bp, Artificial
  Probe
actatgatccactgcagtccaggga

SEQ ID NO: 264887 - DNA, 25 bp, Artificial
  Probe
agggaccaatctatacccatggtga

SEQ ID NO: 264888 - DNA, 25 bp, Artificial
  Probe
tccagggaccaatctatacccatgg

SEQ ID NO: 264889 - DNA, 25 bp, Artificial
  Probe
tccactgcagtccagggaccaatct

SEQ ID NO: 264890 - DNA, 25 bp, Artificial
  Probe
tatgatccactgcagtccagggacc

SEQ ID NO: 264891 - DNA, 25 bp, Artificial
  Probe
catatcagtatcatggagggacatt

SEQ ID NO: 264892 - DNA, 25 bp, Artificial
  Probe
gctcctcctgtgcatatcagtatca

SEQ ID NO: 264893 - DNA, 25 bp, Artificial
  Probe
ctatgatccactgcagtccagggac

SEQ ID NO: 264894 - DNA, 25 bp, Artificial
  Probe
cctcctgtgcatatcagtatcatgg

SEQ ID NO: 264895 - DNA, 25 bp, Artificial
  Probe
atcagtatcatggagggacattact

SEQ ID NO: 264896 - DNA, 25 bp, Artificial
  Probe
aatctatacccatggtgacagccct

SEQ ID NO: 264897 - DNA, 25 bp, Artificial
  Probe
atctatacccatggtgacagccctg

SEQ ID NO: 264898 - DNA, 25 bp, Artificial
  Probe
cagggaccaatctatacccatggtg

SEQ ID NO: 264899 - DNA, 25 bp, Artificial
  Probe
tgctcctcctgtgcatatcagtatc

SEQ ID NO: 264900 - DNA, 25 bp, Artificial
  Probe
ccagggaccaatctatacccatggt

SEQ ID NO: 264901 - DNA, 25 bp, Artificial
  Probe
ggacattactatgatccactgcagt

SEQ ID NO: 264902 - DNA, 25 bp, Artificial
  Probe
cagtccagggaccaatctataccca

SEQ ID NO: 264903 - DNA, 25 bp, Artificial
  Probe
attactatgatccactgcagtccag

SEQ ID NO: 264904 - DNA, 25 bp, Artificial
  Probe
tcagtatcatggagggacattacta

SEQ ID NO: 264905 - DNA, 25 bp, Artificial
  Probe
ctgtgcatatcagtatcatggaggg

SEQ ID NO: 264906 - DNA, 25 bp, Artificial
  Probe
tgatccactgcagtccagggaccaa

SEQ ID NO: 264907 - DNA, 25 bp, Artificial
  Probe
ctgctcctcctgtgcatatcagtat

SEQ ID NO: 264908 - DNA, 25 bp, Artificial
  Probe
gggtcttcctgactgttgaactctg

SEQ ID NO: 264909 - DNA, 25 bp, Artificial
  Probe
aaatgttacataaccacaagggagg

SEQ ID NO: 264910 - DNA, 25 bp, Artificial
  Probe
ctgactgttgaactctgaccccaag

SEQ ID NO: 264911 - DNA, 25 bp, Artificial
  Probe
tctgccatccctgatttgtatggtt

SEQ ID NO: 264912 - DNA, 25 bp, Artificial
  Probe
attgtggtttgtcttatctcctgcc

SEQ ID NO: 264913 - DNA, 25 bp, Artificial
  Probe
tcacatgggctgtgtatctgccatc

SEQ ID NO: 264914 - DNA, 25 bp, Artificial
  Probe
gatcttccatgtcatttcccagtgg

SEQ ID NO: 264915 - DNA, 25 bp, Artificial
  Probe
tctccactttgagaacgcttgaact

SEQ ID NO: 264916 - DNA, 25 bp, Artificial
  Probe
tgtgtatctgccatccctgatttgt

SEQ ID NO: 264917 - DNA, 25 bp, Artificial
  Probe
gatggggattctcaatcaggacttt

SEQ ID NO: 264918 - DNA, 25 bp, Artificial
  Probe
ggaagacttctccactttgagaacg

SEQ ID NO: 264919 - DNA, 25 bp, Artificial
  Probe
atggggattctcaatcaggactttc

SEQ ID NO: 264920 - DNA, 25 bp, Artificial
  Probe
atctgccatccctgatttgtatggt

SEQ ID NO: 264921 - DNA, 25 bp, Artificial
  Probe
gtggtttgtcttatctcctgccttg

SEQ ID NO: 264922 - DNA, 25 bp, Artificial
  Probe
gggctgtgtatctgccatccctgat

SEQ ID NO: 264923 - DNA, 25 bp, Artificial
  Probe
tgttgaactctgaccccaagtctct

SEQ ID NO: 264924 - DNA, 25 bp, Artificial
  Probe
aggaatgggtcttcctgactgttga

SEQ ID NO: 264925 - DNA, 25 bp, Artificial
  Probe
tccactttgagaacgcttgaactat

SEQ ID NO: 264926 - DNA, 25 bp, Artificial
  Probe
aatgttacataaccacaagggaggc

SEQ ID NO: 264927 - DNA, 25 bp, Artificial
  Probe
gagaacgcttgaactatccttttcc

SEQ ID NO: 264928 - DNA, 25 bp, Artificial
  Probe
agacttctttagagggaagacttct

SEQ ID NO: 264929 - DNA, 25 bp, Artificial
  Probe
cacatgggctgtgtatctgccatcc

SEQ ID NO: 264930 - DNA, 25 bp, Artificial
  Probe
ttacataaccacaagggaggcctaa

SEQ ID NO: 264931 - DNA, 25 bp, Artificial
  Probe
tgatcttccatgtcatttcccagtg

SEQ ID NO: 264932 - DNA, 25 bp, Artificial
  Probe
gagggaagacttctccactttgaga

SEQ ID NO: 264933 - DNA, 25 bp, Artificial
  Probe
ccatccctgatttgtatggtttctt

SEQ ID NO: 264934 - DNA, 25 bp, Artificial
  Probe
ttccatgtcatttcccagtgggcaa

SEQ ID NO: 264935 - DNA, 25 bp, Artificial
  Probe
cttcctgactgttgaactctgaccc

SEQ ID NO: 264936 - DNA, 25 bp, Artificial
  Probe
gacttctccactttgagaacgcttg

SEQ ID NO: 264937 - DNA, 25 bp, Artificial
  Probe
tgagaacgcttgaactatccttttc

SEQ ID NO: 264938 - DNA, 25 bp, Artificial
  Probe
ggggattctcaatcaggactttccc

SEQ ID NO: 264939 - DNA, 25 bp, Artificial
  Probe
gtttgtcttatctcctgccttgatc

SEQ ID NO: 264940 - DNA, 25 bp, Artificial
  Probe
gtgtatctgccatccctgatttgta

SEQ ID NO: 264941 - DNA, 25 bp, Artificial
  Probe
tctcaatcaggactttcccagcgtg

SEQ ID NO: 264942 - DNA, 25 bp, Artificial
  Probe
agattgtggtttgtcttatctcctg

SEQ ID NO: 264943 - DNA, 25 bp, Artificial
  Probe
gaagacttctccactttgagaacgc

SEQ ID NO: 264944 - DNA, 25 bp, Artificial
  Probe
tgccatccctgatttgtatggtttc

SEQ ID NO: 264945 - DNA, 25 bp, Artificial
  Probe
ctttgagaacgcttgaactatcctt

SEQ ID NO: 264946 - DNA, 25 bp, Artificial
  Probe
ttgtatgcattcatgattcacatgg

SEQ ID NO: 264947 - DNA, 25 bp, Artificial
  Probe
tgggtcttcctgactgttgaactct

SEQ ID NO: 264948 - DNA, 25 bp, Artificial
  Probe
attcacatgggctgtgtatctgcca

SEQ ID NO: 264949 - DNA, 25 bp, Artificial
  Probe
cctgactgttgaactctgaccccaa

SEQ ID NO: 264950 - DNA, 25 bp, Artificial
  Probe
tgggtagacatgaccactctagcat

SEQ ID NO: 264951 - DNA, 25 bp, Artificial
  Probe
ttctcaatcaggactttcccagcgt

SEQ ID NO: 264952 - DNA, 25 bp, Artificial
  Probe
ctgccatccctgatttgtatggttt

SEQ ID NO: 264953 - DNA, 25 bp, Artificial
  Probe
tttgagaacgcttgaactatccttt

SEQ ID NO: 264954 - DNA, 25 bp, Artificial
  Probe
ttgtatatcctatctgagccatgtc

SEQ ID NO: 264955 - DNA, 25 bp, Artificial
  Probe
cgtgcccaaaggtaaacaggagaca

SEQ ID NO: 264956 - DNA, 25 bp, Artificial
  Probe
tcggaagcacgtctccgttgtgttt

SEQ ID NO: 264957 - DNA, 25 bp, Artificial
  Probe
tagaactctgctctgctcgtttgct

SEQ ID NO: 264958 - DNA, 25 bp, Artificial
  Probe
ccatacgtgcccaaaggtaaacagg

SEQ ID NO: 264959 - DNA, 25 bp, Artificial
  Probe
gtatatcctatctgagccatgtcgg

SEQ ID NO: 264960 - DNA, 25 bp, Artificial
  Probe
tcctggccttgtatatcctatctga

SEQ ID NO: 264961 - DNA, 25 bp, Artificial
  Probe
cactgtactctgtcgccttcagcga

SEQ ID NO: 264962 - DNA, 25 bp, Artificial
  Probe
cagtcggttgattttggagcaatct

SEQ ID NO: 264963 - DNA, 25 bp, Artificial
  Probe
agacacaaggacaaacactgcggtt

SEQ ID NO: 264964 - DNA, 25 bp, Artificial
  Probe
gctcgtttgctttgcctggctgtct

SEQ ID NO: 264965 - DNA, 25 bp, Artificial
  Probe
ccatgtcggaagcacgtctccgttg

SEQ ID NO: 264966 - DNA, 25 bp, Artificial
  Probe
ccttgtatatcctatctgagccatg

SEQ ID NO: 264967 - DNA, 25 bp, Artificial
  Probe
ctttgcctggctgtctttcctggcc

SEQ ID NO: 264968 - DNA, 25 bp, Artificial
  Probe
cctggctgtctttcctggccttgta

SEQ ID NO: 264969 - DNA, 25 bp, Artificial
  Probe
ctgctcgtttgctttgcctggctgt

SEQ ID NO: 264970 - DNA, 25 bp, Artificial
  Probe
aactctgctctgctcgtttgctttg

SEQ ID NO: 264971 - DNA, 25 bp, Artificial
  Probe
ctatctgagccatgtcggaagcacg

SEQ ID NO: 264972 - DNA, 25 bp, Artificial
  Probe
aatctagaactctgctctgctcgtt

SEQ ID NO: 264973 - DNA, 25 bp, Artificial
  Probe
tgattttggagcaatctagaactct

SEQ ID NO: 264974 - DNA, 25 bp, Artificial
  Probe
ttgattttggagcaatctagaactc

SEQ ID NO: 264975 - DNA, 25 bp, Artificial
  Probe
gcaatctagaactctgctctgctcg

SEQ ID NO: 264976 - DNA, 25 bp, Artificial
  Probe
atgtcggaagcacgtctccgttgtg

SEQ ID NO: 264977 - DNA, 25 bp, Artificial
  Probe
atctgagccatgtcggaagcacgtc

SEQ ID NO: 264978 - DNA, 25 bp, Artificial
  Probe
ctctgctctgctcgtttgctttgcc

SEQ ID NO: 264979 - DNA, 25 bp, Artificial
  Probe
gcagtcggttgattttggagcaatc

SEQ ID NO: 264980 - DNA, 25 bp, Artificial
  Probe
gtgcccaaaggtaaacaggagacac

SEQ ID NO: 264981 - DNA, 25 bp, Artificial
  Probe
tgtatatcctatctgagccatgtcg

SEQ ID NO: 264982 - DNA, 25 bp, Artificial
  Probe
tgcctggctgtctttcctggccttg

SEQ ID NO: 264983 - DNA, 25 bp, Artificial
  Probe
acactgcggtttaaccttcttattg

SEQ ID NO: 264984 - DNA, 25 bp, Artificial
  Probe
cctatctgagccatgtcggaagcac

SEQ ID NO: 264985 - DNA, 25 bp, Artificial
  Probe
ttcctggccttgtatatcctatctg

SEQ ID NO: 264986 - DNA, 25 bp, Artificial
  Probe
gctttgcctggctgtctttcctggc

SEQ ID NO: 264987 - DNA, 25 bp, Artificial
  Probe
gtttgctttgcctggctgtctttcc

SEQ ID NO: 264988 - DNA, 25 bp, Artificial
  Probe
cggaagcacgtctccgttgtgttta

SEQ ID NO: 264989 - DNA, 25 bp, Artificial
  Probe
ggctgtctttcctggccttgtatat

SEQ ID NO: 264990 - DNA, 25 bp, Artificial
  Probe
gagccatgtcggaagcacgtctccg

SEQ ID NO: 264991 - DNA, 25 bp, Artificial
  Probe
tggagcaatctagaactctgctctg

SEQ ID NO: 264992 - DNA, 25 bp, Artificial
  Probe
atatcctatctgagccatgtcggaa

SEQ ID NO: 264993 - DNA, 25 bp, Artificial
  Probe
cagagcagtcggttgattttggagc

SEQ ID NO: 264994 - DNA, 25 bp, Artificial
  Probe
cactgcggtttaaccttcttattgt

SEQ ID NO: 264995 - DNA, 25 bp, Artificial
  Probe
cacaaggacaaacactgcggtttaa

SEQ ID NO: 264996 - DNA, 25 bp, Artificial
  Probe
agcacgtctccgttgtgtttaattt

SEQ ID NO: 264997 - DNA, 25 bp, Artificial
  Probe
ctgctctgctcgtttgctttgcctg

SEQ ID NO: 264998 - DNA, 25 bp, Artificial
  Probe
tgtcggaagcacgtctccgttgtgt

SEQ ID NO: 264999 - DNA, 25 bp, Artificial
  Probe
ctctgctcgtttgctttgcctggct

SEQ ID NO: 265000 - DNA, 25 bp, Artificial
  Probe
ttgacgagcgggagctgctctttga

SEQ ID NO: 265001 - DNA, 25 bp, Artificial
  Probe
gagtcatcacctagcacttcaggat

SEQ ID NO: 265002 - DNA, 25 bp, Artificial
  Probe
gtgtcttgccgatgtgaacgtgcca

SEQ ID NO: 265003 - DNA, 25 bp, Artificial
  Probe
cccacacgcacaagatcgtagttga

SEQ ID NO: 265004 - DNA, 25 bp, Artificial
  Probe
cttgccgatgtgaacgtgccactct

SEQ ID NO: 265005 - DNA, 25 bp, Artificial
  Probe
gactcacacttcttgatgtcggagt

SEQ ID NO: 265006 - DNA, 25 bp, Artificial
  Probe
ccaggcttctgataaccggtcgtca

SEQ ID NO: 265007 - DNA, 25 bp, Artificial
  Probe
tcacctagcacttcaggatgggtgt

SEQ ID NO: 265008 - DNA, 25 bp, Artificial
  Probe
gagagcgagtcatcacctagcactt

SEQ ID NO: 265009 - DNA, 25 bp, Artificial
  Probe
gggcccacacgcacaagatcgtagt

SEQ ID NO: 265010 - DNA, 25 bp, Artificial
  Probe
atgggtgtcagctcataccccgtgt

SEQ ID NO: 265011 - DNA, 25 bp, Artificial
  Probe
agtgcgagagcgagtcatcacctag

SEQ ID NO: 265012 - DNA, 25 bp, Artificial
  Probe
cgtgtctgtccaccagggtcgagag

SEQ ID NO: 265013 - DNA, 25 bp, Artificial
  Probe
caggcttctgataaccggtcgtcag

SEQ ID NO: 265014 - DNA, 25 bp, Artificial
  Probe
gagggcaaaccgtcagaagtcctgc

SEQ ID NO: 265015 - DNA, 25 bp, Artificial
  Probe
agctgctctttgagacgagtgaggt

SEQ ID NO: 265016 - DNA, 25 bp, Artificial
  Probe
ataccccgtgtctgtccaccagggt

SEQ ID NO: 265017 - DNA, 25 bp, Artificial
  Probe
acgagcgggagctgctctttgagac

SEQ ID NO: 265018 - DNA, 25 bp, Artificial
  Probe
agtcctgcagtatgagcacatcctc

SEQ ID NO: 265019 - DNA, 25 bp, Artificial
  Probe
tgtccaccagggtcgagagggcaaa

SEQ ID NO: 265020 - DNA, 25 bp, Artificial
  Probe
cacttcttgatgtcggagtgcgaga

SEQ ID NO: 265021 - DNA, 25 bp, Artificial
  Probe
cccgtgtctgtccaccagggtcgag

SEQ ID NO: 265022 - DNA, 25 bp, Artificial
  Probe
aaactcagctgtccaggcttctgat

SEQ ID NO: 265023 - DNA, 25 bp, Artificial
  Probe
agcacttcaggatgggtgtcagctc

SEQ ID NO: 265024 - DNA, 25 bp, Artificial
  Probe
tcagaagtcctgcagtatgagcaca

SEQ ID NO: 265025 - DNA, 25 bp, Artificial
  Probe
gagccaagcccacgtgtcttgccga

SEQ ID NO: 265026 - DNA, 25 bp, Artificial
  Probe
aggatgggtgtcagctcataccccg

SEQ ID NO: 265027 - DNA, 25 bp, Artificial
  Probe
tccaccagggtcgagagggcaaacc

SEQ ID NO: 265028 - DNA, 25 bp, Artificial
  Probe
ttaaaaatcctagatgagaacttgc

SEQ ID NO: 265029 - DNA, 25 bp, Artificial
  Probe
tgagcacatcctctcgttcggggcc

SEQ ID NO: 265030 - DNA, 25 bp, Artificial
  Probe
gcacaagatcgtagttgacgagcgg

SEQ ID NO: 265031 - DNA, 25 bp, Artificial
  Probe
gtccaggcttctgataaccggtcgt

SEQ ID NO: 265032 - DNA, 25 bp, Artificial
  Probe
acaagatcgtagttgacgagcggga

SEQ ID NO: 265033 - DNA, 25 bp, Artificial
  Probe
aaatcctagatgagaacttgcctta

SEQ ID NO: 265034 - DNA, 25 bp, Artificial
  Probe
gcccacgtgtcttgccgatgtgaac

SEQ ID NO: 265035 - DNA, 25 bp, Artificial
  Probe
gtgtcagctcataccccgtgtctgt

SEQ ID NO: 265036 - DNA, 25 bp, Artificial
  Probe
cagtatgagcacatcctctcgttcg

SEQ ID NO: 265037 - DNA, 25 bp, Artificial
  Probe
cgtgtcttgccgatgtgaacgtgcc

SEQ ID NO: 265038 - DNA, 25 bp, Artificial
  Probe
aaaccgtcagaagtcctgcagtatg

SEQ ID NO: 265039 - DNA, 25 bp, Artificial
  Probe
ccacacgcacaagatcgtagttgac

SEQ ID NO: 265040 - DNA, 25 bp, Artificial
  Probe
actcagctgtccaggcttctgataa

SEQ ID NO: 265041 - DNA, 25 bp, Artificial
  Probe
cttcaggatgggtgtcagctcatac

SEQ ID NO: 265042 - DNA, 25 bp, Artificial
  Probe
tcaggatgggtgtcagctcataccc

SEQ ID NO: 265043 - DNA, 25 bp, Artificial
  Probe
acgcacaagatcgtagttgacgagc

SEQ ID NO: 265044 - DNA, 25 bp, Artificial
  Probe
cgagagcgagtcatcacctagcact

SEQ ID NO: 265045 - DNA, 25 bp, Artificial
  Probe
caccagggtcgagagggcaaaccgt

SEQ ID NO: 265046 - DNA, 25 bp, Artificial
  Probe
ttcagcttgtgtcctgggcaagatc

SEQ ID NO: 265047 - DNA, 25 bp, Artificial
  Probe
agctgttgctgtacccctgaagctc

SEQ ID NO: 265048 - DNA, 25 bp, Artificial
  Probe
tcctgggcaagatcatgtacatttt

SEQ ID NO: 265049 - DNA, 25 bp, Artificial
  Probe
gaagctcagccagctctgactttat

SEQ ID NO: 265050 - DNA, 25 bp, Artificial
  Probe
gctggccgactgctcttgtcttcat

SEQ ID NO: 265051 - DNA, 25 bp, Artificial
  Probe
ggacattcagcttgtgtcctgggca

SEQ ID NO: 265052 - DNA, 25 bp, Artificial
  Probe
cagcttgtgtcctgggcaagatcat

SEQ ID NO: 265053 - DNA, 25 bp, Artificial
  Probe
ttgctgtacccctgaagctcagcca

SEQ ID NO: 265054 - DNA, 25 bp, Artificial
  Probe
cccttccttgagctgttgctgtacc

SEQ ID NO: 265055 - DNA, 25 bp, Artificial
  Probe
gactgctcttgtcttcattgcccct

SEQ ID NO: 265056 - DNA, 25 bp, Artificial
  Probe
agctcagccagctctgactttataa

SEQ ID NO: 265057 - DNA, 25 bp, Artificial
  Probe
ccttccttgagctgttgctgtaccc

SEQ ID NO: 265058 - DNA, 25 bp, Artificial
  Probe
gtcctgggcaagatcatgtacattt

SEQ ID NO: 265059 - DNA, 25 bp, Artificial
  Probe
tcacccttccttgagctgttgctgt

SEQ ID NO: 265060 - DNA, 25 bp, Artificial
  Probe
tggccgactgctcttgtcttcattg

SEQ ID NO: 265061 - DNA, 25 bp, Artificial
  Probe
ggatggacattcagcttgtgtcctg

SEQ ID NO: 265062 - DNA, 25 bp, Artificial
  Probe
gatatgaacagctggccgactgctc

SEQ ID NO: 265063 - DNA, 25 bp, Artificial
  Probe
agctggccgactgctcttgtcttca

SEQ ID NO: 265064 - DNA, 25 bp, Artificial
  Probe
aagctcagccagctctgactttata

SEQ ID NO: 265065 - DNA, 25 bp, Artificial
  Probe
ttgagctgttgctgtacccctgaag

SEQ ID NO: 265066 - DNA, 25 bp, Artificial
  Probe
gcccgggatggacattcagcttgtg

SEQ ID NO: 265067 - DNA, 25 bp, Artificial
  Probe
cattcagcttgtgtcctgggcaaga

SEQ ID NO: 265068 - DNA, 25 bp, Artificial
  Probe
aacagctggccgactgctcttgtct

SEQ ID NO: 265069 - DNA, 25 bp, Artificial
  Probe
actgctcttgtcttcattgcccctg

SEQ ID NO: 265070 - DNA, 25 bp, Artificial
  Probe
attcagcttgtgtcctgggcaagat

SEQ ID NO: 265071 - DNA, 25 bp, Artificial
  Probe
ggccgactgctcttgtcttcattgc

SEQ ID NO: 265072 - DNA, 25 bp, Artificial
  Probe
tgctgtacccctgaagctcagccag

SEQ ID NO: 265073 - DNA, 25 bp, Artificial
  Probe
tttggaccctggactcagtatacct

SEQ ID NO: 265074 - DNA, 25 bp, Artificial
  Probe
tgtgtcctgggcaagatcatgtaca

SEQ ID NO: 265075 - DNA, 25 bp, Artificial
  Probe
ggcccgggatggacattcagcttgt

SEQ ID NO: 265076 - DNA, 25 bp, Artificial
  Probe
tgtcctgggcaagatcatgtacatt

SEQ ID NO: 265077 - DNA, 25 bp, Artificial
  Probe
ccctttggaccctggactcagtata

SEQ ID NO: 265078 - DNA, 25 bp, Artificial
  Probe
acagctggccgactgctcttgtctt

SEQ ID NO: 265079 - DNA, 25 bp, Artificial
  Probe
cttcacccttccttgagctgttgct

SEQ ID NO: 265080 - DNA, 25 bp, Artificial
  Probe
gatggacattcagcttgtgtcctgg

SEQ ID NO: 265081 - DNA, 25 bp, Artificial
  Probe
tccttgagctgttgctgtacccctg

SEQ ID NO: 265082 - DNA, 25 bp, Artificial
  Probe
cctttggaccctggactcagtatac

SEQ ID NO: 265083 - DNA, 25 bp, Artificial
  Probe
tgaagctcagccagctctgacttta

SEQ ID NO: 265084 - DNA, 25 bp, Artificial
  Probe
tggacattcagcttgtgtcctgggc

SEQ ID NO: 265085 - DNA, 25 bp, Artificial
  Probe
cacccttccttgagctgttgctgta

SEQ ID NO: 265086 - DNA, 25 bp, Artificial
  Probe
cttgagctgttgctgtacccctgaa

SEQ ID NO: 265087 - DNA, 25 bp, Artificial
  Probe
ggatatgaacagctggccgactgct

SEQ ID NO: 265088 - DNA, 25 bp, Artificial
  Probe
gccgactgctcttgtcttcattgcc

SEQ ID NO: 265089 - DNA, 25 bp, Artificial
  Probe
acattcagcttgtgtcctgggcaag

SEQ ID NO: 265090 - DNA, 25 bp, Artificial
  Probe
cttccttgagctgttgctgtacccc

SEQ ID NO: 265091 - DNA, 25 bp, Artificial
  Probe
tgagctgttgctgtacccctgaagc

SEQ ID NO: 265092 - DNA, 25 bp, Artificial
  Probe
tactatgccatgttggctaaaactg

SEQ ID NO: 265093 - DNA, 25 bp, Artificial
  Probe
cgaaattggttatcctcgccaacaa

SEQ ID NO: 265094 - DNA, 25 bp, Artificial
  Probe
gtccatcactacagtggcaataaca

SEQ ID NO: 265095 - DNA, 25 bp, Artificial
  Probe
gtacaaacagactctgaagatgatc

SEQ ID NO: 265096 - DNA, 25 bp, Artificial
  Probe
aaactggtgtccatcactacagtgg

SEQ ID NO: 265097 - DNA, 25 bp, Artificial
  Probe
gctaaaactggtgtccatcactaca

SEQ ID NO: 265098 - DNA, 25 bp, Artificial
  Probe
aatagaatactatgccatgttggct

SEQ ID NO: 265099 - DNA, 25 bp, Artificial
  Probe
gggtacaaacagactctgaagatga

SEQ ID NO: 265100 - DNA, 25 bp, Artificial
  Probe
ccatgttggctaaaactggtgtcca

SEQ ID NO: 265101 - DNA, 25 bp, Artificial
  Probe
ctggtgtccatcactacagtggcaa

SEQ ID NO: 265102 - DNA, 25 bp, Artificial
  Probe
ccaacaactgtccagctttgaggaa

SEQ ID NO: 265103 - DNA, 25 bp, Artificial
  Probe
gccaacaactgtccagctttgagga

SEQ ID NO: 265104 - DNA, 25 bp, Artificial
  Probe
aactgtccagctttgaggaaatctg

SEQ ID NO: 265105 - DNA, 25 bp, Artificial
  Probe
agcgaaattggttatcctcgccaac

SEQ ID NO: 265106 - DNA, 25 bp, Artificial
  Probe
tccagctttgaggaaatctgaaata

SEQ ID NO: 265107 - DNA, 25 bp, Artificial
  Probe
ccagaacagactggtgagaagtaaa

SEQ ID NO: 265108 - DNA, 25 bp, Artificial
  Probe
catgccagaacagactggtgagaag

SEQ ID NO: 265109 - DNA, 25 bp, Artificial
  Probe
gaatactatgccatgttggctaaaa

SEQ ID NO: 265110 - DNA, 25 bp, Artificial
  Probe
cgaaaaagtctctggagtcaatcaa

SEQ ID NO: 265111 - DNA, 25 bp, Artificial
  Probe
actacagtggcaataacattgaatt

SEQ ID NO: 265112 - DNA, 25 bp, Artificial
  Probe
tagaagcatgccagaacagactggt

SEQ ID NO: 265113 - DNA, 25 bp, Artificial
  Probe
agcatgccagaacagactggtgaga

SEQ ID NO: 265114 - DNA, 25 bp, Artificial
  Probe
ctaaaactggtgtccatcactacag

SEQ ID NO: 265115 - DNA, 25 bp, Artificial
  Probe
aagcatgccagaacagactggtgag

SEQ ID NO: 265116 - DNA, 25 bp, Artificial
  Probe
tgccatgttggctaaaactggtgtc

SEQ ID NO: 265117 - DNA, 25 bp, Artificial
  Probe
caacaactgtccagctttgaggaaa

SEQ ID NO: 265118 - DNA, 25 bp, Artificial
  Probe
actatgccatgttggctaaaactgg

SEQ ID NO: 265119 - DNA, 25 bp, Artificial
  Probe
ggtacaaacagactctgaagatgat

SEQ ID NO: 265120 - DNA, 25 bp, Artificial
  Probe
cactacagtggcaataacattgaat

SEQ ID NO: 265121 - DNA, 25 bp, Artificial
  Probe
gccatgttggctaaaactggtgtcc

SEQ ID NO: 265122 - DNA, 25 bp, Artificial
  Probe
atacgactcactatagggaatttgg

SEQ ID NO: 265123 - DNA, 25 bp, Artificial
  Probe
tattattagaagcatgccagaacag

SEQ ID NO: 265124 - DNA, 25 bp, Artificial
  Probe
ccagctttgaggaaatctgaaatag

SEQ ID NO: 265125 - DNA, 25 bp, Artificial
  Probe
tggctaaaactggtgtccatcacta

SEQ ID NO: 265126 - DNA, 25 bp, Artificial
  Probe
ggctccaacttgttatgaaaagtgg

SEQ ID NO: 265127 - DNA, 25 bp, Artificial
  Probe
gaaattggttatcctcgccaacaac

SEQ ID NO: 265128 - DNA, 25 bp, Artificial
  Probe
ttattagaagcatgccagaacagac

SEQ ID NO: 265129 - DNA, 25 bp, Artificial
  Probe
atgttggctaaaactggtgtccatc

SEQ ID NO: 265130 - DNA, 25 bp, Artificial
  Probe
atactatgccatgttggctaaaact

SEQ ID NO: 265131 - DNA, 25 bp, Artificial
  Probe
gttatcctcgccaacaactgtccag

SEQ ID NO: 265132 - DNA, 25 bp, Artificial
  Probe
acaactgtccagctttgaggaaatc

SEQ ID NO: 265133 - DNA, 25 bp, Artificial
  Probe
ttggctaaaactggtgtccatcact

SEQ ID NO: 265134 - DNA, 25 bp, Artificial
  Probe
actgtccagctttgaggaaatctga

SEQ ID NO: 265135 - DNA, 25 bp, Artificial
  Probe
aattggttatcctcgccaacaactg

SEQ ID NO: 265136 - DNA, 25 bp, Artificial
  Probe
ctcgccaacaactgtccagctttga

SEQ ID NO: 265137 - DNA, 25 bp, Artificial
  Probe
tgtccatcactacagtggcaataac

SEQ ID NO: 265138 - DNA, 25 bp, Artificial
  Probe
atttcacgaggaatatacctgacga

SEQ ID NO: 265139 - DNA, 25 bp, Artificial
  Probe
atgcagaaagccttcagttttaatg

SEQ ID NO: 265140 - DNA, 25 bp, Artificial
  Probe
tcagctagataacattactgattga

SEQ ID NO: 265141 - DNA, 25 bp, Artificial
  Probe
gaatatacctgacgagtacctctca

SEQ ID NO: 265142 - DNA, 25 bp, Artificial
  Probe
gtttccatgatcacttgatgtaaat

SEQ ID NO: 265143 - DNA, 25 bp, Artificial
  Probe
tgttttcaggtactgttgacataca

SEQ ID NO: 265144 - DNA, 25 bp, Artificial
  Probe
tcaaatgcagaaagccttcagtttt

SEQ ID NO: 265145 - DNA, 25 bp, Artificial
  Probe
gagtacctctcaagctagtttttct

SEQ ID NO: 265146 - DNA, 25 bp, Artificial
  Probe
gttgaaaatcagctgcaatgacaac

SEQ ID NO: 265147 - DNA, 25 bp, Artificial
  Probe
ggaaaagtactctgctatctattat

SEQ ID NO: 265148 - DNA, 25 bp, Artificial
  Probe
atatacctgacgagtacctctcaag

SEQ ID NO: 265149 - DNA, 25 bp, Artificial
  Probe
cagaaagccttcagttttaatggat

SEQ ID NO: 265150 - DNA, 25 bp, Artificial
  Probe
tctttgtttccatgatcacttgatg

SEQ ID NO: 265151 - DNA, 25 bp, Artificial
  Probe
ggattagtagcttttccctttcatt

SEQ ID NO: 265152 - DNA, 25 bp, Artificial
  Probe
aaatcagctgcaatgacaacttcgt

SEQ ID NO: 265153 - DNA, 25 bp, Artificial
  Probe
tgcagggtacccattctttcagcta

SEQ ID NO: 265154 - DNA, 25 bp, Artificial
  Probe
ggtacccattctttcagctagataa

SEQ ID NO: 265155 - DNA, 25 bp, Artificial
  Probe
ttcaggtactgttgacatacatttt

SEQ ID NO: 265156 - DNA, 25 bp, Artificial
  Probe
tataatgcagggtacccattctttc

SEQ ID NO: 265157 - DNA, 25 bp, Artificial
  Probe
tgaaaatcagctgcaatgacaactt

SEQ ID NO: 265158 - DNA, 25 bp, Artificial
  Probe
ctttcattacagatgtcaagatgtt

SEQ ID NO: 265159 - DNA, 25 bp, Artificial
  Probe
gacaacttcgtgtgacaagaactag

SEQ ID NO: 265160 - DNA, 25 bp, Artificial
  Probe
acctgacgagtacctctcaagctag

SEQ ID NO: 265161 - DNA, 25 bp, Artificial
  Probe
atcagctgcaatgacaacttcgtgt

SEQ ID NO: 265162 - DNA, 25 bp, Artificial
  Probe
tccatgatcacttgatgtaaattag

SEQ ID NO: 265163 - DNA, 25 bp, Artificial
  Probe
ttgttttcaggtactgttgacatac

SEQ ID NO: 265164 - DNA, 25 bp, Artificial
  Probe
ccctttcattacagatgtcaagatg

SEQ ID NO: 265165 - DNA, 25 bp, Artificial
  Probe
ggtactgttgacatacattttctat

SEQ ID NO: 265166 - DNA, 25 bp, Artificial
  Probe
ccatgatcacttgatgtaaattaga

SEQ ID NO: 265167 - DNA, 25 bp, Artificial
  Probe
caagctagtttttctagctgaataa

SEQ ID NO: 265168 - DNA, 25 bp, Artificial
  Probe
cttcgtgtgacaagaactaggatta

SEQ ID NO: 265169 - DNA, 25 bp, Artificial
  Probe
tcattacagatgtcaagatgttaac

SEQ ID NO: 265170 - DNA, 25 bp, Artificial
  Probe
cctctcaagctagtttttctagctg

SEQ ID NO: 265171 - DNA, 25 bp, Artificial
  Probe
ttgaactggcattgtttggtacaac

SEQ ID NO: 265172 - DNA, 25 bp, Artificial
  Probe
aggtactgttgacatacattttcta

SEQ ID NO: 265173 - DNA, 25 bp, Artificial
  Probe
gtacctctcaagctagtttttctag

SEQ ID NO: 265174 - DNA, 25 bp, Artificial
  Probe
ttatttcacgaggaatatacctgac

SEQ ID NO: 265175 - DNA, 25 bp, Artificial
  Probe
ttcacgaggaatatacctgacgagt

SEQ ID NO: 265176 - DNA, 25 bp, Artificial
  Probe
tatacctgacgagtacctctcaagc

SEQ ID NO: 265177 - DNA, 25 bp, Artificial
  Probe
actggcattgtttggtacaacatta

SEQ ID NO: 265178 - DNA, 25 bp, Artificial
  Probe
aggattagtagcttttccctttcat

SEQ ID NO: 265179 - DNA, 25 bp, Artificial
  Probe
ataatgcagggtacccattctttca

SEQ ID NO: 265180 - DNA, 25 bp, Artificial
  Probe
aggaatatacctgacgagtacctct

SEQ ID NO: 265181 - DNA, 25 bp, Artificial
  Probe
cattacagatgtcaagatgttaaca

SEQ ID NO: 265182 - DNA, 25 bp, Artificial
  Probe
atacctgacgagtacctctcaagct

SEQ ID NO: 265183 - DNA, 25 bp, Artificial
  Probe
attttcaaatgcagaaagccttcag

SEQ ID NO: 265184 - DNA, 25 bp, Artificial
  Probe
gatttccattggttatgcttcccac

SEQ ID NO: 265185 - DNA, 25 bp, Artificial
  Probe
tgacaggaggacgtctccatatcgt

SEQ ID NO: 265186 - DNA, 25 bp, Artificial
  Probe
ggtcctaccatgtggagaactaggg

SEQ ID NO: 265187 - DNA, 25 bp, Artificial
  Probe
tggtccctttctttgatggtgcttg

SEQ ID NO: 265188 - DNA, 25 bp, Artificial
  Probe
aaccccagtgtaaaatgtacttgca

SEQ ID NO: 265189 - DNA, 25 bp, Artificial
  Probe
taccatgtggagaactagggaaaac

SEQ ID NO: 265190 - DNA, 25 bp, Artificial
  Probe
cactcgagtctgtttattgaatttt

SEQ ID NO: 265191 - DNA, 25 bp, Artificial
  Probe
gacaggaggacgtctccatatcgta

SEQ ID NO: 265192 - DNA, 25 bp, Artificial
  Probe
acactcgagtctgtttattgaattt

SEQ ID NO: 265193 - DNA, 25 bp, Artificial
  Probe
caggaggacgtctccatatcgtaat

SEQ ID NO: 265194 - DNA, 25 bp, Artificial
  Probe
cgtaatactctctgtaaccccagtg

SEQ ID NO: 265195 - DNA, 25 bp, Artificial
  Probe
agggtcctaccatgtggagaactag

SEQ ID NO: 265196 - DNA, 25 bp, Artificial
  Probe
cttccgatttccattggttatgctt

SEQ ID NO: 265197 - DNA, 25 bp, Artificial
  Probe
ggacgtctccatatcgtaatactct

SEQ ID NO: 265198 - DNA, 25 bp, Artificial
  Probe
gtctgtataccagtacaagtttatt

SEQ ID NO: 265199 - DNA, 25 bp, Artificial
  Probe
gcagaaacagacaccaaaacttggg

SEQ ID NO: 265200 - DNA, 25 bp, Artificial
  Probe
gtcctaccatgtggagaactaggga

SEQ ID NO: 265201 - DNA, 25 bp, Artificial
  Probe
ttgtctgtataccagtacaagttta

SEQ ID NO: 265202 - DNA, 25 bp, Artificial
  Probe
taaattgtctgtataccagtacaag

SEQ ID NO: 265203 - DNA, 25 bp, Artificial
  Probe
tctttgatggtgcttgcaggttttc

SEQ ID NO: 265204 - DNA, 25 bp, Artificial
  Probe
ctattttctaatcgtggtgtgtcta

SEQ ID NO: 265205 - DNA, 25 bp, Artificial
  Probe
ttatggtccctttctttgatggtgc

SEQ ID NO: 265206 - DNA, 25 bp, Artificial
  Probe
tgtctgtataccagtacaagtttat

SEQ ID NO: 265207 - DNA, 25 bp, Artificial
  Probe
ctcgtgacaggaggacgtctccata

SEQ ID NO: 265208 - DNA, 25 bp, Artificial
  Probe
ccctttctttgatggtgcttgcagg

SEQ ID NO: 265209 - DNA, 25 bp, Artificial
  Probe
tctcgtgacaggaggacgtctccat

SEQ ID NO: 265210 - DNA, 25 bp, Artificial
  Probe
agagctttttctcgtgacaggagga

SEQ ID NO: 265211 - DNA, 25 bp, Artificial
  Probe
gctttttctcgtgacaggaggacgt

SEQ ID NO: 265212 - DNA, 25 bp, Artificial
  Probe
gtaaaatgtacttgcactagctttt

SEQ ID NO: 265213 - DNA, 25 bp, Artificial
  Probe
tcctaccatgtggagaactagggaa

SEQ ID NO: 265214 - DNA, 25 bp, Artificial
  Probe
ctctgtaaccccagtgtaaaatgta

SEQ ID NO: 265215 - DNA, 25 bp, Artificial
  Probe
tttccattggttatgcttcccacag

SEQ ID NO: 265216 - DNA, 25 bp, Artificial
  Probe
cagaaacagacaccaaaacttgggc

SEQ ID NO: 265217 - DNA, 25 bp, Artificial
  Probe
ctttgatggtgcttgcaggttttct

SEQ ID NO: 265218 - DNA, 25 bp, Artificial
  Probe
cgatttccattggttatgcttccca

SEQ ID NO: 265219 - DNA, 25 bp, Artificial
  Probe
tctgtaaccccagtgtaaaatgtac

SEQ ID NO: 265220 - DNA, 25 bp, Artificial
  Probe
aggacgtctccatatcgtaatactc

SEQ ID NO: 265221 - DNA, 25 bp, Artificial
  Probe
catattctattttctaatcgtggtg

SEQ ID NO: 265222 - DNA, 25 bp, Artificial
  Probe
ctttctttgatggtgcttgcaggtt

SEQ ID NO: 265223 - DNA, 25 bp, Artificial
  Probe
gtaatactctctgtaaccccagtgt

SEQ ID NO: 265224 - DNA, 25 bp, Artificial
  Probe
atggtccctttctttgatggtgctt

SEQ ID NO: 265225 - DNA, 25 bp, Artificial
  Probe
aaccttccgatttccattggttatg

SEQ ID NO: 265226 - DNA, 25 bp, Artificial
  Probe
tgtaaccccagtgtaaaatgtactt

SEQ ID NO: 265227 - DNA, 25 bp, Artificial
  Probe
taaccccagtgtaaaatgtacttgc

SEQ ID NO: 265228 - DNA, 25 bp, Artificial
  Probe
tttttctcgtgacaggaggacgtct

SEQ ID NO: 265229 - DNA, 25 bp, Artificial
  Probe
accatgtggagaactagggaaaaca

SEQ ID NO: 265230 - DNA, 25 bp, Artificial
  Probe
ttgggcagtttgcacttcttggtta

SEQ ID NO: 265231 - DNA, 25 bp, Artificial
  Probe
ccatcattggaggaccttgagcagg

SEQ ID NO: 265232 - DNA, 25 bp, Artificial
  Probe
gtaaggtgacagcaacccagttcca

SEQ ID NO: 265233 - DNA, 25 bp, Artificial
  Probe
agcatcacaacagacaccagcttgc

SEQ ID NO: 265234 - DNA, 25 bp, Artificial
  Probe
gaagaggcctgcatccagccattta

SEQ ID NO: 265235 - DNA, 25 bp, Artificial
  Probe
cttcttggttacttgctcctggggc

SEQ ID NO: 265236 - DNA, 25 bp, Artificial
  Probe
aggcctgcatccagccatttatcgc

SEQ ID NO: 265237 - DNA, 25 bp, Artificial
  Probe
gccacaggtccgagccgtggtgaaa

SEQ ID NO: 265238 - DNA, 25 bp, Artificial
  Probe
tgcccagggaagaggcctgcatcca

SEQ ID NO: 265239 - DNA, 25 bp, Artificial
  Probe
gcctgcccagggaagaggcctgcat

SEQ ID NO: 265240 - DNA, 25 bp, Artificial
  Probe
ccatttatcgccttgggcagtttgc

SEQ ID NO: 265241 - DNA, 25 bp, Artificial
  Probe
gacagcaacccagttccatcattgg

SEQ ID NO: 265242 - DNA, 25 bp, Artificial
  Probe
agcttgctgatgcaagtaaggtgac

SEQ ID NO: 265243 - DNA, 25 bp, Artificial
  Probe
ctggccatgttgttagcagtagaga

SEQ ID NO: 265244 - DNA, 25 bp, Artificial
  Probe
acaacagacaccagcttgctgatgc

SEQ ID NO: 265245 - DNA, 25 bp, Artificial
  Probe
gcatcacaacagacaccagcttgct

SEQ ID NO: 265246 - DNA, 25 bp, Artificial
  Probe
ttggttacttgctcctggggctcct

SEQ ID NO: 265247 - DNA, 25 bp, Artificial
  Probe
gggctcctggccatgttgttagcag

SEQ ID NO: 265248 - DNA, 25 bp, Artificial
  Probe
ggttacttgctcctggggctcctgg

SEQ ID NO: 265249 - DNA, 25 bp, Artificial
  Probe
atcgccttgggcagtttgcacttct

SEQ ID NO: 265250 - DNA, 25 bp, Artificial
  Probe
tccagccatttatcgccttgggcag

SEQ ID NO: 265251 - DNA, 25 bp, Artificial
  Probe
gcttgctgatgcaagtaaggtgaca

SEQ ID NO: 265252 - DNA, 25 bp, Artificial
  Probe
tcacaacagacaccagcttgctgat

SEQ ID NO: 265253 - DNA, 25 bp, Artificial
  Probe
catttatcgccttgggcagtttgca

SEQ ID NO: 265254 - DNA, 25 bp, Artificial
  Probe
agctgccacaggtccgagccgtggt

SEQ ID NO: 265255 - DNA, 25 bp, Artificial
  Probe
tgctgcctgcccagggaagaggcct

SEQ ID NO: 265256 - DNA, 25 bp, Artificial
  Probe
ttgcacttcttggttacttgctcct

SEQ ID NO: 265257 - DNA, 25 bp, Artificial
  Probe
tagagacgttctcagagctgccaca

SEQ ID NO: 265258 - DNA, 25 bp, Artificial
  Probe
gcttcggctcactcagcactatcgg

SEQ ID NO: 265259 - DNA, 25 bp, Artificial
  Probe
agatgagctggctctgagcaccatg

SEQ ID NO: 265260 - DNA, 25 bp, Artificial
  Probe
tcagagctgccacaggtccgagccg

SEQ ID NO: 265261 - DNA, 25 bp, Artificial
  Probe
atgagctggctctgagcaccatgcc

SEQ ID NO: 265262 - DNA, 25 bp, Artificial
  Probe
tttgcttcggctcactcagcactat

SEQ ID NO: 265263 - DNA, 25 bp, Artificial
  Probe
tccgagccgtggtgaaattctttgg

SEQ ID NO: 265264 - DNA, 25 bp, Artificial
  Probe
catgttgttagcagtagagacgttc

SEQ ID NO: 265265 - DNA, 25 bp, Artificial
  Probe
cgttctcagagctgccacaggtccg

SEQ ID NO: 265266 - DNA, 25 bp, Artificial
  Probe
aaggtgacagcaacccagttccatc

SEQ ID NO: 265267 - DNA, 25 bp, Artificial
  Probe
cagacaccagcttgctgatgcaagt

SEQ ID NO: 265268 - DNA, 25 bp, Artificial
  Probe
cagtagagacgttctcagagctgcc

SEQ ID NO: 265269 - DNA, 25 bp, Artificial
  Probe
aggtccgagccgtggtgaaattctt

SEQ ID NO: 265270 - DNA, 25 bp, Artificial
  Probe
ctgcatccagccatttatcgccttg

SEQ ID NO: 265271 - DNA, 25 bp, Artificial
  Probe
agcagtagagacgttctcagagctg

SEQ ID NO: 265272 - DNA, 25 bp, Artificial
  Probe
gggaagaggcctgcatccagccatt

SEQ ID NO: 265273 - DNA, 25 bp, Artificial
  Probe
agacaccagcttgctgatgcaagta

SEQ ID NO: 265274 - DNA, 25 bp, Artificial
  Probe
tgacagcaacccagttccatcattg

SEQ ID NO: 265275 - DNA, 25 bp, Artificial
  Probe
taggagacttgctgcctgcccaggg

SEQ ID NO: 265276 - DNA, 25 bp, Artificial
  Probe
ctttagcccagcagaagcgctggga

SEQ ID NO: 265277 - DNA, 25 bp, Artificial
  Probe
agactttagcccagcagaagcgctg

SEQ ID NO: 265278 - DNA, 25 bp, Artificial
  Probe
agcgctcagaccagctcctggacat

SEQ ID NO: 265279 - DNA, 25 bp, Artificial
  Probe
cagctcctggacatgagttctgcct

SEQ ID NO: 265280 - DNA, 25 bp, Artificial
  Probe
gccttcagcaagacaaccaagactt

SEQ ID NO: 265281 - DNA, 25 bp, Artificial
  Probe
tctgccttcagcaagacaaccaaga

SEQ ID NO: 265282 - DNA, 25 bp, Artificial
  Probe
ttcagcaagacaaccaagactttag

SEQ ID NO: 265283 - DNA, 25 bp, Artificial
  Probe
atcatgctcaacaatttcgacaagg

SEQ ID NO: 265284 - DNA, 25 bp, Artificial
  Probe
aagctgtcagagttgcagcagcgct

SEQ ID NO: 265285 - DNA, 25 bp, Artificial
  Probe
gaccagctcctggacatgagttctg

SEQ ID NO: 265286 - DNA, 25 bp, Artificial
  Probe
tgccttcagcaagacaaccaagact

SEQ ID NO: 265287 - DNA, 25 bp, Artificial
  Probe
cagagttgcagcagcgctcagacca

SEQ ID NO: 265288 - DNA, 25 bp, Artificial
  Probe
ccagcggcaggcagaccaagtgacg

SEQ ID NO: 265289 - DNA, 25 bp, Artificial
  Probe
tcatgctcaacaatttcgacaaggt

SEQ ID NO: 265290 - DNA, 25 bp, Artificial
  Probe
agcagcgctcagaccagctcctgga

SEQ ID NO: 265291 - DNA, 25 bp, Artificial
  Probe
ttctgccttcagcaagacaaccaag

SEQ ID NO: 265292 - DNA, 25 bp, Artificial
  Probe
gcaagacaaccaagactttagccca

SEQ ID NO: 265293 - DNA, 25 bp, Artificial
  Probe
aagacaaccaagactttagcccagc

SEQ ID NO: 265294 - DNA, 25 bp, Artificial
  Probe
accaagtgacggaaatcatgctcaa

SEQ ID NO: 265295 - DNA, 25 bp, Artificial
  Probe
tgtcagagttgcagcagcgctcaga

SEQ ID NO: 265296 - DNA, 25 bp, Artificial
  Probe
ggcagaccaagtgacggaaatcatg

SEQ ID NO: 265297 - DNA, 25 bp, Artificial
  Probe
ggacatgagttctgccttcagcaag

SEQ ID NO: 265298 - DNA, 25 bp, Artificial
  Probe
tagcccagcagaagcgctgggagaa

SEQ ID NO: 265299 - DNA, 25 bp, Artificial
  Probe
cggcaggcagaccaagtgacggaaa

SEQ ID NO: 265300 - DNA, 25 bp, Artificial
  Probe
gctcaacaatttcgacaaggtcctg

SEQ ID NO: 265301 - DNA, 25 bp, Artificial
  Probe
gcgctcagaccagctcctggacatg

SEQ ID NO: 265302 - DNA, 25 bp, Artificial
  Probe
gactttagcccagcagaagcgctgg

SEQ ID NO: 265303 - DNA, 25 bp, Artificial
  Probe
ctcctggacatgagttctgccttca

SEQ ID NO: 265304 - DNA, 25 bp, Artificial
  Probe
aaccaagactttagcccagcagaag

SEQ ID NO: 265305 - DNA, 25 bp, Artificial
  Probe
ctcaacaatttcgacaaggtcctgg

SEQ ID NO: 265306 - DNA, 25 bp, Artificial
  Probe
cagcagaagcgctgggagaatatcc

SEQ ID NO: 265307 - DNA, 25 bp, Artificial
  Probe
agttctgccttcagcaagacaacca

SEQ ID NO: 265308 - DNA, 25 bp, Artificial
  Probe
gctcctggacatgagttctgccttc

SEQ ID NO: 265309 - DNA, 25 bp, Artificial
  Probe
acaaccaagactttagcccagcaga

SEQ ID NO: 265310 - DNA, 25 bp, Artificial
  Probe
gatgccagcggcaggcagaccaagt

SEQ ID NO: 265311 - DNA, 25 bp, Artificial
  Probe
caggcagaccaagtgacggaaatca

SEQ ID NO: 265312 - DNA, 25 bp, Artificial
  Probe
tcagaccagctcctggacatgagtt

SEQ ID NO: 265313 - DNA, 25 bp, Artificial
  Probe
tttagcccagcagaagcgctgggag

SEQ ID NO: 265314 - DNA, 25 bp, Artificial
  Probe
caacaatttcgacaaggtcctggaa

SEQ ID NO: 265315 - DNA, 25 bp, Artificial
  Probe
cagcaagacaaccaagactttagcc

SEQ ID NO: 265316 - DNA, 25 bp, Artificial
  Probe
cgctcagaccagctcctggacatga

SEQ ID NO: 265317 - DNA, 25 bp, Artificial
  Probe
ccagctcctggacatgagttctgcc

SEQ ID NO: 265318 - DNA, 25 bp, Artificial
  Probe
gctgtcagagttgcagcagcgctca

SEQ ID NO: 265319 - DNA, 25 bp, Artificial
  Probe
atgagttctgccttcagcaagacaa

SEQ ID NO: 265320 - DNA, 25 bp, Artificial
  Probe
tgagttctgccttcagcaagacaac

SEQ ID NO: 265321 - DNA, 25 bp, Artificial
  Probe
cagaccagctcctggacatgagttc

SEQ ID NO: 265322 - DNA, 25 bp, Artificial
  Probe
acgtcttgctgattggagttggcta

SEQ ID NO: 265323 - DNA, 25 bp, Artificial
  Probe
cgacgtcttgctgattggagttggc

SEQ ID NO: 265324 - DNA, 25 bp, Artificial
  Probe
atcgcttctacctgggccagtggcg

SEQ ID NO: 265325 - DNA, 25 bp, Artificial
  Probe
tcttcagctttggtggtctgggaat

SEQ ID NO: 265326 - DNA, 25 bp, Artificial
  Probe
ctgtgcgcgaccacattcattgctt

SEQ ID NO: 265327 - DNA, 25 bp, Artificial
  Probe
gaccctaatcgacgtcttgctgatt

SEQ ID NO: 265328 - DNA, 25 bp, Artificial
  Probe
gaggctacaagtggtcgacggctct

SEQ ID NO: 265329 - DNA, 25 bp, Artificial
  Probe
gctcttcagctttggtggtctggga

SEQ ID NO: 265330 - DNA, 25 bp, Artificial
  Probe
gaatatggaccctaatcgacgtctt

SEQ ID NO: 265331 - DNA, 25 bp, Artificial
  Probe
cttcagctttggtggtctgggaata

SEQ ID NO: 265332 - DNA, 25 bp, Artificial
  Probe
cctcggcaagctcttcagctttggt

SEQ ID NO: 265333 - DNA, 25 bp, Artificial
  Probe
aggctacaagtggtcgacggctctg

SEQ ID NO: 265334 - DNA, 25 bp, Artificial
  Probe
cttccactattgttacatgagggta

SEQ ID NO: 265335 - DNA, 25 bp, Artificial
  Probe
cactgtgcgcgaccacattcattgc

SEQ ID NO: 265336 - DNA, 25 bp, Artificial
  Probe
gcagcgctactttgccaactgcact

SEQ ID NO: 265337 - DNA, 25 bp, Artificial
  Probe
tcattgcttgggtaaccggactttc

SEQ ID NO: 265338 - DNA, 25 bp, Artificial
  Probe
atatggaccctaatcgacgtcttgc

SEQ ID NO: 265339 - DNA, 25 bp, Artificial
  Probe
aagctcttcagctttggtggtctgg

SEQ ID NO: 265340 - DNA, 25 bp, Artificial
  Probe
cgtcttgctgattggagttggctat

SEQ ID NO: 265341 - DNA, 25 bp, Artificial
  Probe
ccacattcattgcttgggtaaccgg

SEQ ID NO: 265342 - DNA, 25 bp, Artificial
  Probe
tccactattgttacatgagggtaac

SEQ ID NO: 265343 - DNA, 25 bp, Artificial
  Probe
gagcatcacccttgggggctttgga

SEQ ID NO: 265344 - DNA, 25 bp, Artificial
  Probe
ccagcggatggctctttgtacattt

SEQ ID NO: 265345 - DNA, 25 bp, Artificial
  Probe
tatgtgcttcagagagcagtgcgta

SEQ ID NO: 265346 - DNA, 25 bp, Artificial
  Probe
actgtgcgcgaccacattcattgct

SEQ ID NO: 265347 - DNA, 25 bp, Artificial
  Probe
ctcggcagcgctactttgccaactg

SEQ ID NO: 265348 - DNA, 25 bp, Artificial
  Probe
cactattgttacatgagggtaacaa

SEQ ID NO: 265349 - DNA, 25 bp, Artificial
  Probe
caactggactggaggctacaagtgg

SEQ ID NO: 265350 - DNA, 25 bp, Artificial
  Probe
taatcgacgtcttgctgattggagt

SEQ ID NO: 265351 - DNA, 25 bp, Artificial
  Probe
tgtactgcaactggactggaggcta

SEQ ID NO: 265352 - DNA, 25 bp, Artificial
  Probe
tggtggtctgggaatatggacccta

SEQ ID NO: 265353 - DNA, 25 bp, Artificial
  Probe
tactgcaactggactggaggctaca

SEQ ID NO: 265354 - DNA, 25 bp, Artificial
  Probe
cggatggctctttgtacatttagtg

SEQ ID NO: 265355 - DNA, 25 bp, Artificial
  Probe
ctacaagtggtcgacggctctggct

SEQ ID NO: 265356 - DNA, 25 bp, Artificial
  Probe
gaaggcctcggcaagctcttcagct

SEQ ID NO: 265357 - DNA, 25 bp, Artificial
  Probe
cgctactttgccaactgcactgtgc

SEQ ID NO: 265358 - DNA, 25 bp, Artificial
  Probe
atacttccactattgttacatgagg

SEQ ID NO: 265359 - DNA, 25 bp, Artificial
  Probe
ttgccaactgcactgtgcgcgacca

SEQ ID NO: 265360 - DNA, 25 bp, Artificial
  Probe
aggcctcggcaagctcttcagcttt

SEQ ID NO: 265361 - DNA, 25 bp, Artificial
  Probe
gcactgtgcgcgaccacattcattg

SEQ ID NO: 265362 - DNA, 25 bp, Artificial
  Probe
atcgacgtcttgctgattggagttg

SEQ ID NO: 265363 - DNA, 25 bp, Artificial
  Probe
tgcaactggactggaggctacaagt

SEQ ID NO: 265364 - DNA, 25 bp, Artificial
  Probe
gctacaagtggtcgacggctctggc

SEQ ID NO: 265365 - DNA, 25 bp, Artificial
  Probe
ggcgtgaaggcctcggcaagctctt

SEQ ID NO: 265366 - DNA, 25 bp, Artificial
  Probe
acattcattgcttgggtaaccggac

SEQ ID NO: 265367 - DNA, 25 bp, Artificial
  Probe
tgagcatcacccttgggggctttgg

SEQ ID NO: 265368 - DNA, 25 bp, Artificial
  Probe
agacacactggttacgtcattgaac

SEQ ID NO: 265369 - DNA, 25 bp, Artificial
  Probe
acgtcattgaactgcagcatgttgt

SEQ ID NO: 265370 - DNA, 25 bp, Artificial
  Probe
gttacgtcattgaactgcagcatgt

SEQ ID NO: 265371 - DNA, 25 bp, Artificial
  Probe
ttacgtcattgaactgcagcatgtt

SEQ ID NO: 265372 - DNA, 25 bp, Artificial
  Probe
tggttacgtcattgaactgcagcat

SEQ ID NO: 265373 - DNA, 25 bp, Artificial
  Probe
cactggttacgtcattgaactgcag

SEQ ID NO: 265374 - DNA, 25 bp, Artificial
  Probe
gggcctgagacacactggttacgtc

SEQ ID NO: 265375 - DNA, 25 bp, Artificial
  Probe
acacactggttacgtcattgaactg

SEQ ID NO: 265376 - DNA, 25 bp, Artificial
  Probe
ggcctgagacacactggttacgtca

SEQ ID NO: 265377 - DNA, 25 bp, Artificial
  Probe
acactggttacgtcattgaactgca

SEQ ID NO: 265378 - DNA, 25 bp, Artificial
  Probe
tcattgaactgcagcatgttgtcag

SEQ ID NO: 265379 - DNA, 25 bp, Artificial
  Probe
tgaactgcagcatgttgtcaggggc

SEQ ID NO: 265380 - DNA, 25 bp, Artificial
  Probe
ctgagacacactggttacgtcattg

SEQ ID NO: 265381 - DNA, 25 bp, Artificial
  Probe
attgaactgcagcatgttgtcaggg

SEQ ID NO: 265382 - DNA, 25 bp, Artificial
  Probe
cacactggttacgtcattgaactgc

SEQ ID NO: 265383 - DNA, 25 bp, Artificial
  Probe
ctgtgggcctgagacacactggtta

SEQ ID NO: 265384 - DNA, 25 bp, Artificial
  Probe
tgagacacactggttacgtcattga

SEQ ID NO: 265385 - DNA, 25 bp, Artificial
  Probe
actggttacgtcattgaactgcagc

SEQ ID NO: 265386 - DNA, 25 bp, Artificial
  Probe
gtcattgaactgcagcatgttgtca

SEQ ID NO: 265387 - DNA, 25 bp, Artificial
  Probe
gaactgcagcatgttgtcaggggct

SEQ ID NO: 265388 - DNA, 25 bp, Artificial
  Probe
cattgaactgcagcatgttgtcagg

SEQ ID NO: 265389 - DNA, 25 bp, Artificial
  Probe
actgcagcatgttgtcaggggctcc

SEQ ID NO: 265390 - DNA, 25 bp, Artificial
  Probe
tacgtcattgaactgcagcatgttg

SEQ ID NO: 265391 - DNA, 25 bp, Artificial
  Probe
gtgggcctgagacacactggttacg

SEQ ID NO: 265392 - DNA, 25 bp, Artificial
  Probe
gcctgagacacactggttacgtcat

SEQ ID NO: 265393 - DNA, 25 bp, Artificial
  Probe
ctggttacgtcattgaactgcagca

SEQ ID NO: 265394 - DNA, 25 bp, Artificial
  Probe
gacacactggttacgtcattgaact

SEQ ID NO: 265395 - DNA, 25 bp, Artificial
  Probe
ggttacgtcattgaactgcagcatg

SEQ ID NO: 265396 - DNA, 25 bp, Artificial
  Probe
cctgagacacactggttacgtcatt

SEQ ID NO: 265397 - DNA, 25 bp, Artificial
  Probe
gagacacactggttacgtcattgaa

SEQ ID NO: 265398 - DNA, 25 bp, Artificial
  Probe
cgtcattgaactgcagcatgttgtc

SEQ ID NO: 265399 - DNA, 25 bp, Artificial
  Probe
tgtgggcctgagacacactggttac

SEQ ID NO: 265400 - DNA, 25 bp, Artificial
  Probe
tgggcctgagacacactggttacgt

SEQ ID NO: 265401 - DNA, 25 bp, Artificial
  Probe
ttgaactgcagcatgttgtcagggg

SEQ ID NO: 265402 - DNA, 25 bp, Artificial
  Probe
gcacccttagtgaacttctgttgtc

SEQ ID NO: 265403 - DNA, 25 bp, Artificial
  Probe
tgcacccttagtgaacttctgttgt

SEQ ID NO: 265404 - DNA, 25 bp, Artificial
  Probe
tagtgaacttctgttgtcctccagc

SEQ ID NO: 265405 - DNA, 25 bp, Artificial
  Probe
gttgtcctccagcatggtctttcta

SEQ ID NO: 265406 - DNA, 25 bp, Artificial
  Probe
tgtaaattatggtgctcagtttgcc

SEQ ID NO: 265407 - DNA, 25 bp, Artificial
  Probe
attatggtgctcagtttgcctctgt

SEQ ID NO: 265408 - DNA, 25 bp, Artificial
  Probe
agtattgtctcagaaatctatatga

SEQ ID NO: 265409 - DNA, 25 bp, Artificial
  Probe
tgttgtcctccagcatggtctttct

SEQ ID NO: 265410 - DNA, 25 bp, Artificial
  Probe
cttagtgaacttctgttgtcctcca

SEQ ID NO: 265411 - DNA, 25 bp, Artificial
  Probe
taaattatggtgctcagtttgcctc

SEQ ID NO: 265412 - DNA, 25 bp, Artificial
  Probe
taatagtgtgaacctcctttcaaga

SEQ ID NO: 265413 - DNA, 25 bp, Artificial
  Probe
aatagtgtgaacctcctttcaagat

SEQ ID NO: 265414 - DNA, 25 bp, Artificial
  Probe
tgtgcacccttagtgaacttctgtt

SEQ ID NO: 265415 - DNA, 25 bp, Artificial
  Probe
aacttctgttgtcctccagcatggt

SEQ ID NO: 265416 - DNA, 25 bp, Artificial
  Probe
tcctccagcatggtctttctatttg

SEQ ID NO: 265417 - DNA, 25 bp, Artificial
  Probe
cagcatggtctttctatttgtaaat

SEQ ID NO: 265418 - DNA, 25 bp, Artificial
  Probe
gaaattcactgttgatgtaatagtg

SEQ ID NO: 265419 - DNA, 25 bp, Artificial
  Probe
agtgaacttctgttgtcctccagca

SEQ ID NO: 265420 - DNA, 25 bp, Artificial
  Probe
cagtattgtctcagaaatctatatg

SEQ ID NO: 265421 - DNA, 25 bp, Artificial
  Probe
tcactgttgatgtaatagtgtgaac

SEQ ID NO: 265422 - DNA, 25 bp, Artificial
  Probe
ttcactgttgatgtaatagtgtgaa

SEQ ID NO: 265423 - DNA, 25 bp, Artificial
  Probe
tctgttgtcctccagcatggtcttt

SEQ ID NO: 265424 - DNA, 25 bp, Artificial
  Probe
aattatggtgctcagtttgcctctg

SEQ ID NO: 265425 - DNA, 25 bp, Artificial
  Probe
acccttagtgaacttctgttgtcct

SEQ ID NO: 265426 - DNA, 25 bp, Artificial
  Probe
tgtcctccagcatggtctttctatt

SEQ ID NO: 265427 - DNA, 25 bp, Artificial
  Probe
acttctgttgtcctccagcatggtc

SEQ ID NO: 265428 - DNA, 25 bp, Artificial
  Probe
ttatggtgctcagtttgcctctgtc

SEQ ID NO: 265429 - DNA, 25 bp, Artificial
  Probe
tttctatttgtaaattatggtgctc

SEQ ID NO: 265430 - DNA, 25 bp, Artificial
  Probe
tccagcatggtctttctatttgtaa

SEQ ID NO: 265431 - DNA, 25 bp, Artificial
  Probe
tgaacttctgttgtcctccagcatg

SEQ ID NO: 265432 - DNA, 25 bp, Artificial
  Probe
cacccttagtgaacttctgttgtcc

SEQ ID NO: 265433 - DNA, 25 bp, Artificial
  Probe
gtcctccagcatggtctttctattt

SEQ ID NO: 265434 - DNA, 25 bp, Artificial
  Probe
ccttagtgaacttctgttgtcctcc

SEQ ID NO: 265435 - DNA, 25 bp, Artificial
  Probe
ggtctttctatttgtaaattatggt

SEQ ID NO: 265436 - DNA, 25 bp, Artificial
  Probe
aaattatggtgctcagtttgcctct

SEQ ID NO: 265437 - DNA, 25 bp, Artificial
  Probe
gtaaattatggtgctcagtttgcct

SEQ ID NO: 265438 - DNA, 25 bp, Artificial
  Probe
ccagcatggtctttctatttgtaaa

SEQ ID NO: 265439 - DNA, 25 bp, Artificial
  Probe
ctgttgtcctccagcatggtctttc

SEQ ID NO: 265440 - DNA, 25 bp, Artificial
  Probe
cccttagtgaacttctgttgtcctc

SEQ ID NO: 265441 - DNA, 25 bp, Artificial
  Probe
ttagtgaacttctgttgtcctccag

SEQ ID NO: 265442 - DNA, 25 bp, Artificial
  Probe
ttgtcctccagcatggtctttctat

SEQ ID NO: 265443 - DNA, 25 bp, Artificial
  Probe
cttctgttgtcctccagcatggtct

SEQ ID NO: 265444 - DNA, 25 bp, Artificial
  Probe
gtgaacttctgttgtcctccagcat

SEQ ID NO: 265445 - DNA, 25 bp, Artificial
  Probe
ttctgttgtcctccagcatggtctt

SEQ ID NO: 265446 - DNA, 25 bp, Artificial
  Probe
gtaatagtgtgaacctcctttcaag

SEQ ID NO: 265447 - DNA, 25 bp, Artificial
  Probe
gtgcacccttagtgaacttctgttg

SEQ ID NO: 265448 - DNA, 25 bp, Artificial
  Probe
caaacactcactgaaacagatgccg

SEQ ID NO: 265449 - DNA, 25 bp, Artificial
  Probe
agacattgtggactagcaacggtat

SEQ ID NO: 265450 - DNA, 25 bp, Artificial
  Probe
ctatctaaaccctagagtaaagaag

SEQ ID NO: 265451 - DNA, 25 bp, Artificial
  Probe
gccttggccatgtcctatgtgaatc

SEQ ID NO: 265452 - DNA, 25 bp, Artificial
  Probe
gggaaagtaactctctccaacacca

SEQ ID NO: 265453 - DNA, 25 bp, Artificial
  Probe
cactcactgaaacagatgccgatat

SEQ ID NO: 265454 - DNA, 25 bp, Artificial
  Probe
gacattgtggactagcaacggtatg

SEQ ID NO: 265455 - DNA, 25 bp, Artificial
  Probe
gtaaacttaggctggacccaagaat

SEQ ID NO: 265456 - DNA, 25 bp, Artificial
  Probe
taagatccctgttgagtgtaaactt

SEQ ID NO: 265457 - DNA, 25 bp, Artificial
  Probe
acacacagtctaaggggctatggga

SEQ ID NO: 265458 - DNA, 25 bp, Artificial
  Probe
aaaccctagagtaaagaagacattg

SEQ ID NO: 265459 - DNA, 25 bp, Artificial
  Probe
ccagccttaagatccctgttgagtg

SEQ ID NO: 265460 - DNA, 25 bp, Artificial
  Probe
aacagatgccgatatgagccttggc

SEQ ID NO: 265461 - DNA, 25 bp, Artificial
  Probe
ccgatatgagccttggccatgtcct

SEQ ID NO: 265462 - DNA, 25 bp, Artificial
  Probe
ccttaagatccctgttgagtgtaaa

SEQ ID NO: 265463 - DNA, 25 bp, Artificial
  Probe
tctaaaccctagagtaaagaagaca

SEQ ID NO: 265464 - DNA, 25 bp, Artificial
  Probe
accagccttaagatccctgttgagt

SEQ ID NO: 265465 - DNA, 25 bp, Artificial
  Probe
aacttaggctggacccaagaattca

SEQ ID NO: 265466 - DNA, 25 bp, Artificial
  Probe
tgggaaagtaactctctccaacacc

SEQ ID NO: 265467 - DNA, 25 bp, Artificial
  Probe
ctaaaccctagagtaaagaagacat

SEQ ID NO: 265468 - DNA, 25 bp, Artificial
  Probe
cactgaaacagatgccgatatgagc

SEQ ID NO: 265469 - DNA, 25 bp, Artificial
  Probe
ggttcacatatactcagcaagcaca

SEQ ID NO: 265470 - DNA, 25 bp, Artificial
  Probe
tatctaaaccctagagtaaagaaga

SEQ ID NO: 265471 - DNA, 25 bp, Artificial
  Probe
caggttcacatatactcagcaagca

SEQ ID NO: 265472 - DNA, 25 bp, Artificial
  Probe
gagccttggccatgtcctatgtgaa

SEQ ID NO: 265473 - DNA, 25 bp, Artificial
  Probe
tctacacacagtctaaggggctatg

SEQ ID NO: 265474 - DNA, 25 bp, Artificial
  Probe
cagatgccgatatgagccttggcca

SEQ ID NO: 265475 - DNA, 25 bp, Artificial
  Probe
ccctctacacacagtctaaggggct

SEQ ID NO: 265476 - DNA, 25 bp, Artificial
  Probe
acattgtggactagcaacggtatgg

SEQ ID NO: 265477 - DNA, 25 bp, Artificial
  Probe
cattgtggactagcaacggtatggt

SEQ ID NO: 265478 - DNA, 25 bp, Artificial
  Probe
cgatatgagccttggccatgtccta

SEQ ID NO: 265479 - DNA, 25 bp, Artificial
  Probe
tggccatgtcctatgtgaatccagt

SEQ ID NO: 265480 - DNA, 25 bp, Artificial
  Probe
gactagcaacggtatggttgaacag

SEQ ID NO: 265481 - DNA, 25 bp, Artificial
  Probe
tgagccttggccatgtcctatgtga

SEQ ID NO: 265482 - DNA, 25 bp, Artificial
  Probe
tggttgaacaggttcacatatactc

SEQ ID NO: 265483 - DNA, 25 bp, Artificial
  Probe
taaacttaggctggacccaagaatt

SEQ ID NO: 265484 - DNA, 25 bp, Artificial
  Probe
taggctggacccaagaattcagata

SEQ ID NO: 265485 - DNA, 25 bp, Artificial
  Probe
tgaacaggttcacatatactcagca

SEQ ID NO: 265486 - DNA, 25 bp, Artificial
  Probe
ctagcaacggtatggttgaacaggt

SEQ ID NO: 265487 - DNA, 25 bp, Artificial
  Probe
acagatgccgatatgagccttggcc

SEQ ID NO: 265488 - DNA, 25 bp, Artificial
  Probe
aacactcactgaaacagatgccgat

SEQ ID NO: 265489 - DNA, 25 bp, Artificial
  Probe
tccctgttgagtgtaaacttaggct

SEQ ID NO: 265490 - DNA, 25 bp, Artificial
  Probe
ttaagatccctgttgagtgtaaact

SEQ ID NO: 265491 - DNA, 25 bp, Artificial
  Probe
gatgccgatatgagccttggccatg

SEQ ID NO: 265492 - DNA, 25 bp, Artificial
  Probe
tgagtgtaaacttaggctggaccca

SEQ ID NO: 265493 - DNA, 25 bp, Artificial
  Probe
atccctgttgagtgtaaacttaggc

SEQ ID NO: 265494 - DNA, 25 bp, Artificial
  Probe
tataaactaatttgtttcagtttgt

SEQ ID NO: 265495 - DNA, 25 bp, Artificial
  Probe
tacactaagatatccctaaggcgct

SEQ ID NO: 265496 - DNA, 25 bp, Artificial
  Probe
ctaagatatccctaaggcgctttat

SEQ ID NO: 265497 - DNA, 25 bp, Artificial
  Probe
tccctaaggcgctttatgtttgtaa

SEQ ID NO: 265498 - DNA, 25 bp, Artificial
  Probe
ctgccagattatcagacatgtgaac

SEQ ID NO: 265499 - DNA, 25 bp, Artificial
  Probe
ctctctttgaaaaattataaactat

SEQ ID NO: 265500 - DNA, 25 bp, Artificial
  Probe
taaaacttaacatatgacctaaact

SEQ ID NO: 265501 - DNA, 25 bp, Artificial
  Probe
accagactgccagattatcagacat

SEQ ID NO: 265502 - DNA, 25 bp, Artificial
  Probe
tacttatacattaaatattttaagt

SEQ ID NO: 265503 - DNA, 25 bp, Artificial
  Probe
gtggtaccagactgccagattatca

SEQ ID NO: 265504 - DNA, 25 bp, Artificial
  Probe
agactgccagattatcagacatgtg

SEQ ID NO: 265505 - DNA, 25 bp, Artificial
  Probe
tccttttgtgtatcacaatttgggt

SEQ ID NO: 265506 - DNA, 25 bp, Artificial
  Probe
aagtggtaccagactgccagattat

SEQ ID NO: 265507 - DNA, 25 bp, Artificial
  Probe
ttaatactgtttacttttagcccat

SEQ ID NO: 265508 - DNA, 25 bp, Artificial
  Probe
agtggtaccagactgccagattatc

SEQ ID NO: 265509 - DNA, 25 bp, Artificial
  Probe
ccttttgtgtatcacaatttgggta

SEQ ID NO: 265510 - DNA, 25 bp, Artificial
  Probe
attacactaagatatccctaaggcg

SEQ ID NO: 265511 - DNA, 25 bp, Artificial
  Probe
acatgtgaacctttgtctctctttg

SEQ ID NO: 265512 - DNA, 25 bp, Artificial
  Probe
tcagacatgtgaacctttgtctctc

SEQ ID NO: 265513 - DNA, 25 bp, Artificial
  Probe
aaagtggtaccagactgccagatta

SEQ ID NO: 265514 - DNA, 25 bp, Artificial
  Probe
ccagattatcagacatgtgaacctt

SEQ ID NO: 265515 - DNA, 25 bp, Artificial
  Probe
gccagattatcagacatgtgaacct

SEQ ID NO: 265516 - DNA, 25 bp, Artificial
  Probe
tgccagattatcagacatgtgaacc

SEQ ID NO: 265517 - DNA, 25 bp, Artificial
  Probe
ttacactaagatatccctaaggcgc

SEQ ID NO: 265518 - DNA, 25 bp, Artificial
  Probe
actgccagattatcagacatgtgaa

SEQ ID NO: 265519 - DNA, 25 bp, Artificial
  Probe
tgtgaacctttgtctctctttgaaa

SEQ ID NO: 265520 - DNA, 25 bp, Artificial
  Probe
agacatgtgaacctttgtctctctt

SEQ ID NO: 265521 - DNA, 25 bp, Artificial
  Probe
aagatatccctaaggcgctttatgt

SEQ ID NO: 265522 - DNA, 25 bp, Artificial
  Probe
atccttttgtgtatcacaatttggg

SEQ ID NO: 265523 - DNA, 25 bp, Artificial
  Probe
taccagactgccagattatcagaca

SEQ ID NO: 265524 - DNA, 25 bp, Artificial
  Probe
gactgccagattatcagacatgtga

SEQ ID NO: 265525 - DNA, 25 bp, Artificial
  Probe
ttatcagacatgtgaacctttgtct

SEQ ID NO: 265526 - DNA, 25 bp, Artificial
  Probe
tggtggtccatttttaatattatga

SEQ ID NO: 265527 - DNA, 25 bp, Artificial
  Probe
ccagactgccagattatcagacatg

SEQ ID NO: 265528 - DNA, 25 bp, Artificial
  Probe
catgtgaacctttgtctctctttga

SEQ ID NO: 265529 - DNA, 25 bp, Artificial
  Probe
atcagacatgtgaacctttgtctct

SEQ ID NO: 265530 - DNA, 25 bp, Artificial
  Probe
atgtgaacctttgtctctctttgaa

SEQ ID NO: 265531 - DNA, 25 bp, Artificial
  Probe
cagactgccagattatcagacatgt

SEQ ID NO: 265532 - DNA, 25 bp, Artificial
  Probe
taagatatccctaaggcgctttatg

SEQ ID NO: 265533 - DNA, 25 bp, Artificial
  Probe
gtgaacctttgtctctctttgaaaa

SEQ ID NO: 265534 - DNA, 25 bp, Artificial
  Probe
gacatgtgaacctttgtctctcttt

SEQ ID NO: 265535 - DNA, 25 bp, Artificial
  Probe
attatcagacatgtgaacctttgtc

SEQ ID NO: 265536 - DNA, 25 bp, Artificial
  Probe
tatcagacatgtgaacctttgtctc

SEQ ID NO: 265537 - DNA, 25 bp, Artificial
  Probe
cagacatgtgaacctttgtctctct

SEQ ID NO: 265538 - DNA, 25 bp, Artificial
  Probe
ataaaagtggtaccagactgccaga

SEQ ID NO: 265539 - DNA, 25 bp, Artificial
  Probe
cagattatcagacatgtgaaccttt

SEQ ID NO: 265540 - DNA, 25 bp, Artificial
  Probe
gacagctctgtctggcctgaaactc

SEQ ID NO: 265541 - DNA, 25 bp, Artificial
  Probe
atcatcaaatggtcttagacgttgt

SEQ ID NO: 265542 - DNA, 25 bp, Artificial
  Probe
ttagacagctctgtctggcctgaaa

SEQ ID NO: 265543 - DNA, 25 bp, Artificial
  Probe
gtagctgagcacactgccagcaggg

SEQ ID NO: 265544 - DNA, 25 bp, Artificial
  Probe
ttgcatccagtagctgagcacactg

SEQ ID NO: 265545 - DNA, 25 bp, Artificial
  Probe
tcatcaaatggtcttagacgttgtt

SEQ ID NO: 265546 - DNA, 25 bp, Artificial
  Probe
gtcacgaaggccactagacagttaa

SEQ ID NO: 265547 - DNA, 25 bp, Artificial
  Probe
catccagtagctgagcacactgcca

SEQ ID NO: 265548 - DNA, 25 bp, Artificial
  Probe
tggcggcagacacagcaggcatcta

SEQ ID NO: 265549 - DNA, 25 bp, Artificial
  Probe
agcaggcatctatatcatcaaatgg

SEQ ID NO: 265550 - DNA, 25 bp, Artificial
  Probe
ccagtagctgagcacactgccagca

SEQ ID NO: 265551 - DNA, 25 bp, Artificial
  Probe
tgcatccaagtcctgttgcatccag

SEQ ID NO: 265552 - DNA, 25 bp, Artificial
  Probe
cctgttgcatccagtagctgagcac

SEQ ID NO: 265553 - DNA, 25 bp, Artificial
  Probe
gacacagcaggcatctatatcatca

SEQ ID NO: 265554 - DNA, 25 bp, Artificial
  Probe
agtagctgagcacactgccagcagg

SEQ ID NO: 265555 - DNA, 25 bp, Artificial
  Probe
tagctgagcacactgccagcagggg

SEQ ID NO: 265556 - DNA, 25 bp, Artificial
  Probe
aggccactagacagttaaagactca

SEQ ID NO: 265557 - DNA, 25 bp, Artificial
  Probe
gtgcacctgcatccaagtcctgttg

SEQ ID NO: 265558 - DNA, 25 bp, Artificial
  Probe
ccacataggtcttagagattgtttt

SEQ ID NO: 265559 - DNA, 25 bp, Artificial
  Probe
gaaggccactagacagttaaagact

SEQ ID NO: 265560 - DNA, 25 bp, Artificial
  Probe
atcaaatggtcttagacgttgtttc

SEQ ID NO: 265561 - DNA, 25 bp, Artificial
  Probe
tcacgaaggccactagacagttaaa

SEQ ID NO: 265562 - DNA, 25 bp, Artificial
  Probe
ggccactagacagttaaagactcag

SEQ ID NO: 265563 - DNA, 25 bp, Artificial
  Probe
acctgcatccaagtcctgttgcatc

SEQ ID NO: 265564 - DNA, 25 bp, Artificial
  Probe
ctatatcatcaaatggtcttagacg

SEQ ID NO: 265565 - DNA, 25 bp, Artificial
  Probe
aggcatctatatcatcaaatggtct

SEQ ID NO: 265566 - DNA, 25 bp, Artificial
  Probe
atggtcttagacgttgtttctgctt

SEQ ID NO: 265567 - DNA, 25 bp, Artificial
  Probe
gcaggcatctatatcatcaaatggt

SEQ ID NO: 265568 - DNA, 25 bp, Artificial
  Probe
tgcatccagtagctgagcacactgc

SEQ ID NO: 265569 - DNA, 25 bp, Artificial
  Probe
cagcaggcatctatatcatcaaatg

SEQ ID NO: 265570 - DNA, 25 bp, Artificial
  Probe
gtggcggcagacacagcaggcatct

SEQ ID NO: 265571 - DNA, 25 bp, Artificial
  Probe
gtcctgttgcatccagtagctgagc

SEQ ID NO: 265572 - DNA, 25 bp, Artificial
  Probe
ggcatctatatcatcaaatggtctt

SEQ ID NO: 265573 - DNA, 25 bp, Artificial
  Probe
ggtcttagacgttgtttctgctttg

SEQ ID NO: 265574 - DNA, 25 bp, Artificial
  Probe
tgatgcttgtgattcttataagctc

SEQ ID NO: 265575 - DNA, 25 bp, Artificial
  Probe
atgcttgtgattcttataagctctt

SEQ ID NO: 265576 - DNA, 25 bp, Artificial
  Probe
ccccacataggtcttagagattgtt

SEQ ID NO: 265577 - DNA, 25 bp, Artificial
  Probe
catccaagtcctgttgcatccagta

SEQ ID NO: 265578 - DNA, 25 bp, Artificial
  Probe
aatggtcttagacgttgtttctgct

SEQ ID NO: 265579 - DNA, 25 bp, Artificial
  Probe
ctgcatccaagtcctgttgcatcca

SEQ ID NO: 265580 - DNA, 25 bp, Artificial
  Probe
aagaggtcacgaaggccactagaca

SEQ ID NO: 265581 - DNA, 25 bp, Artificial
  Probe
gggtgcacctgcatccaagtcctgt

SEQ ID NO: 265582 - DNA, 25 bp, Artificial
  Probe
cccacataggtcttagagattgttt

SEQ ID NO: 265583 - DNA, 25 bp, Artificial
  Probe
cggcagacacagcaggcatctatat

SEQ ID NO: 265584 - DNA, 25 bp, Artificial
  Probe
caagtcctgttgcatccagtagctg

SEQ ID NO: 265585 - DNA, 25 bp, Artificial
  Probe
aagtcctgttgcatccagtagctga

SEQ ID NO: 265586 - DNA, 25 bp, Artificial
  Probe
ttggtgttctgtaccccgattgaga

SEQ ID NO: 265587 - DNA, 25 bp, Artificial
  Probe
tgaggaaatgccacacagcatgaat

SEQ ID NO: 265588 - DNA, 25 bp, Artificial
  Probe
ctcatgctgtgaaagttctaaatgt

SEQ ID NO: 265589 - DNA, 25 bp, Artificial
  Probe
cctttgggcatttccctcatgctgt

SEQ ID NO: 265590 - DNA, 25 bp, Artificial
  Probe
gttatcactgtagctctgcttcctt

SEQ ID NO: 265591 - DNA, 25 bp, Artificial
  Probe
ggcaacaccgggaagcatttatgag

SEQ ID NO: 265592 - DNA, 25 bp, Artificial
  Probe
taaagcagactctgcggctatcctt

SEQ ID NO: 265593 - DNA, 25 bp, Artificial
  Probe
agcccttgagccactgacaacagtg

SEQ ID NO: 265594 - DNA, 25 bp, Artificial
  Probe
tgtttgtatgcctttgggcatttcc

SEQ ID NO: 265595 - DNA, 25 bp, Artificial
  Probe
agatattgctgtaaagcagactctg

SEQ ID NO: 265596 - DNA, 25 bp, Artificial
  Probe
cagtagcccttgagccactgacaac

SEQ ID NO: 265597 - DNA, 25 bp, Artificial
  Probe
caccgggaagcatttatgaggaaat

SEQ ID NO: 265598 - DNA, 25 bp, Artificial
  Probe
aaagcttacagctagacttctgttg

SEQ ID NO: 265599 - DNA, 25 bp, Artificial
  Probe
atccttgaagccttgtgtttgtatg

SEQ ID NO: 265600 - DNA, 25 bp, Artificial
  Probe
ccttctaaataaagctcattgttgg

SEQ ID NO: 265601 - DNA, 25 bp, Artificial
  Probe
ccccgattgagatgcagtatttgat

SEQ ID NO: 265602 - DNA, 25 bp, Artificial
  Probe
tctggcaaagtcttttgatttgttc

SEQ ID NO: 265603 - DNA, 25 bp, Artificial
  Probe
ccactgacaacagtgctcttctggc

SEQ ID NO: 265604 - DNA, 25 bp, Artificial
  Probe
aaggggcacactggagtcagtagcc

SEQ ID NO: 265605 - DNA, 25 bp, Artificial
  Probe
ggcacactggagtcagtagcccttg

SEQ ID NO: 265606 - DNA, 25 bp, Artificial
  Probe
gttaaggggcacactggagtcagta

SEQ ID NO: 265607 - DNA, 25 bp, Artificial
  Probe
agactctgcggctatccttgaagcc

SEQ ID NO: 265608 - DNA, 25 bp, Artificial
  Probe
tgctcttctggcaaagtcttttgat

SEQ ID NO: 265609 - DNA, 25 bp, Artificial
  Probe
ggctatccttgaagccttgtgtttg

SEQ ID NO: 265610 - DNA, 25 bp, Artificial
  Probe
tgtaaagcagactctgcggctatcc

SEQ ID NO: 265611 - DNA, 25 bp, Artificial
  Probe
tccttgaagccttgtgtttgtatgc

SEQ ID NO: 265612 - DNA, 25 bp, Artificial
  Probe
ctaaataaagctcattgttggacgc

SEQ ID NO: 265613 - DNA, 25 bp, Artificial
  Probe
taaataaagctcattgttggacgcc

SEQ ID NO: 265614 - DNA, 25 bp, Artificial
  Probe
tattttcaagattggcaggcagcaa

SEQ ID NO: 265615 - DNA, 25 bp, Artificial
  Probe
attgctgtaaagcagactctgcggc

SEQ ID NO: 265616 - DNA, 25 bp, Artificial
  Probe
actggagtcagtagcccttgagcca

SEQ ID NO: 265617 - DNA, 25 bp, Artificial
  Probe
gaaatgccacacagcatgaattatt

SEQ ID NO: 265618 - DNA, 25 bp, Artificial
  Probe
aagtatgcatgtgtgcaccagggtg

SEQ ID NO: 265619 - DNA, 25 bp, Artificial
  Probe
tcagtagcccttgagccactgacaa

SEQ ID NO: 265620 - DNA, 25 bp, Artificial
  Probe
tgggcatttccctcatgctgtgaaa

SEQ ID NO: 265621 - DNA, 25 bp, Artificial
  Probe
cttctggcaaagtcttttgatttgt

SEQ ID NO: 265622 - DNA, 25 bp, Artificial
  Probe
tttgtatgcctttgggcatttccct

SEQ ID NO: 265623 - DNA, 25 bp, Artificial
  Probe
atgcctttgggcatttccctcatgc

SEQ ID NO: 265624 - DNA, 25 bp, Artificial
  Probe
tttgcctggttaaggggcacactgg

SEQ ID NO: 265625 - DNA, 25 bp, Artificial
  Probe
atattttgcctggttaaggggcaca

SEQ ID NO: 265626 - DNA, 25 bp, Artificial
  Probe
acagtgctcttctggcaaagtcttt

SEQ ID NO: 265627 - DNA, 25 bp, Artificial
  Probe
attattttcaagattggcaggcagc

SEQ ID NO: 265628 - DNA, 25 bp, Artificial
  Probe
ggaaatgccacacagcatgaattat

SEQ ID NO: 265629 - DNA, 25 bp, Artificial
  Probe
ttcaagattggcaggcagcaaaata

SEQ ID NO: 265630 - DNA, 25 bp, Artificial
  Probe
cttgtgtttgtatgcctttgggcat

SEQ ID NO: 265631 - DNA, 25 bp, Artificial
  Probe
ttctgtaccccgattgagatgcagt

SEQ ID NO: 265632 - DNA, 25 bp, Artificial
  Probe
cttaggagagactgatcctgaggtg

SEQ ID NO: 265633 - DNA, 25 bp, Artificial
  Probe
aatgggcttaggagagactgatcct

SEQ ID NO: 265634 - DNA, 25 bp, Artificial
  Probe
cggtggcaaatgggtcagtggcttg

SEQ ID NO: 265635 - DNA, 25 bp, Artificial
  Probe
tagtaaaggcgctcaatcctcaaaa

SEQ ID NO: 265636 - DNA, 25 bp, Artificial
  Probe
gagtctatggcagctgcctccaggg

SEQ ID NO: 265637 - DNA, 25 bp, Artificial
  Probe
tctatggcagctgcctccagggaga

SEQ ID NO: 265638 - DNA, 25 bp, Artificial
  Probe
gatccttgttcaaattagtaaaggc

SEQ ID NO: 265639 - DNA, 25 bp, Artificial
  Probe
agtaaaggcgctcaatcctcaaaaa

SEQ ID NO: 265640 - DNA, 25 bp, Artificial
  Probe
agtctatggcagctgcctccaggga

SEQ ID NO: 265641 - DNA, 25 bp, Artificial
  Probe
tgagtgagtttgcctcattctggcc

SEQ ID NO: 265642 - DNA, 25 bp, Artificial
  Probe
cagaaagagacagcccaacatgcag

SEQ ID NO: 265643 - DNA, 25 bp, Artificial
  Probe
agagactgatcctgaggtggagcat

SEQ ID NO: 265644 - DNA, 25 bp, Artificial
  Probe
cacccttagcaaaatgtattaaaag

SEQ ID NO: 265645 - DNA, 25 bp, Artificial
  Probe
ttaggagagactgatcctgaggtgg

SEQ ID NO: 265646 - DNA, 25 bp, Artificial
  Probe
caacatgcaggcaggagaaatgggc

SEQ ID NO: 265647 - DNA, 25 bp, Artificial
  Probe
gagacagcccaacatgcaggcagga

SEQ ID NO: 265648 - DNA, 25 bp, Artificial
  Probe
tcccttacagggagtgaagggagtt

SEQ ID NO: 265649 - DNA, 25 bp, Artificial
  Probe
cctccagggagatggggggctacat

SEQ ID NO: 265650 - DNA, 25 bp, Artificial
  Probe
acccgtcttcacccttagcaaaatg

SEQ ID NO: 265651 - DNA, 25 bp, Artificial
  Probe
agaatggctcacagaggacaaaatg

SEQ ID NO: 265652 - DNA, 25 bp, Artificial
  Probe
cagcccaacatgcaggcaggagaaa

SEQ ID NO: 265653 - DNA, 25 bp, Artificial
  Probe
atccttgttcaaattagtaaaggcg

SEQ ID NO: 265654 - DNA, 25 bp, Artificial
  Probe
acagcccaacatgcaggcaggagaa

SEQ ID NO: 265655 - DNA, 25 bp, Artificial
  Probe
gacagcccaacatgcaggcaggaga

SEQ ID NO: 265656 - DNA, 25 bp, Artificial
  Probe
gcttgggcgagggagaatggctcac

SEQ ID NO: 265657 - DNA, 25 bp, Artificial
  Probe
tccttgttcaaattagtaaaggcgc

SEQ ID NO: 265658 - DNA, 25 bp, Artificial
  Probe
tgagtctatggcagctgcctccagg

SEQ ID NO: 265659 - DNA, 25 bp, Artificial
  Probe
agcccaacatgcaggcaggagaaat

SEQ ID NO: 265660 - DNA, 25 bp, Artificial
  Probe
atgcaggcaggagaaatgggcttag

SEQ ID NO: 265661 - DNA, 25 bp, Artificial
  Probe
agagacagcccaacatgcaggcagg

SEQ ID NO: 265662 - DNA, 25 bp, Artificial
  Probe
agacagcccaacatgcaggcaggag

SEQ ID NO: 265663 - DNA, 25 bp, Artificial
  Probe
aacatgcaggcaggagaaatgggct

SEQ ID NO: 265664 - DNA, 25 bp, Artificial
  Probe
ggctcacagaggacaaaatggagaa

SEQ ID NO: 265665 - DNA, 25 bp, Artificial
  Probe
ttcccttacagggagtgaagggagt

SEQ ID NO: 265666 - DNA, 25 bp, Artificial
  Probe
atggctcacagaggacaaaatggag

SEQ ID NO: 265667 - DNA, 25 bp, Artificial
  Probe
aatggctcacagaggacaaaatgga

SEQ ID NO: 265668 - DNA, 25 bp, Artificial
  Probe
aagagacagcccaacatgcaggcag

SEQ ID NO: 265669 - DNA, 25 bp, Artificial
  Probe
gtctatggcagctgcctccagggag

SEQ ID NO: 265670 - DNA, 25 bp, Artificial
  Probe
gtaaaggcgctcaatcctcaaaaaa

SEQ ID NO: 265671 - DNA, 25 bp, Artificial
  Probe
ccatccaagtgaccagatacccaac

SEQ ID NO: 265672 - DNA, 25 bp, Artificial
  Probe
catgcaggcaggagaaatgggctta

SEQ ID NO: 265673 - DNA, 25 bp, Artificial
  Probe
acatgcaggcaggagaaatgggctt

SEQ ID NO: 265674 - DNA, 25 bp, Artificial
  Probe
ctgttcccttacagggagtgaaggg

SEQ ID NO: 265675 - DNA, 25 bp, Artificial
  Probe
gaatggctcacagaggacaaaatgg

SEQ ID NO: 265676 - DNA, 25 bp, Artificial
  Probe
gctcacagaggacaaaatggagaaa

SEQ ID NO: 265677 - DNA, 25 bp, Artificial
  Probe
tggctcacagaggacaaaatggaga

SEQ ID NO: 265678 - DNA, 25 bp, Artificial
  Probe
gctcatcttttacatcctggagaac

SEQ ID NO: 265679 - DNA, 25 bp, Artificial
  Probe
tacatgaaggatctggacagtgcct

SEQ ID NO: 265680 - DNA, 25 bp, Artificial
  Probe
ggatctggacagtgccttggtgcct

SEQ ID NO: 265681 - DNA, 25 bp, Artificial
  Probe
tcctggagaacatcgcgtagatggc

SEQ ID NO: 265682 - DNA, 25 bp, Artificial
  Probe
tctgttctgttcagacctgcagcag

SEQ ID NO: 265683 - DNA, 25 bp, Artificial
  Probe
ccctcgcagtacatgaaggatctgg

SEQ ID NO: 265684 - DNA, 25 bp, Artificial
  Probe
atcttttacatcctggagaacatcg

SEQ ID NO: 265685 - DNA, 25 bp, Artificial
  Probe
acatcgcgtagatggcactccgtct

SEQ ID NO: 265686 - DNA, 25 bp, Artificial
  Probe
gagaacatcgcgtagatggcactcc

SEQ ID NO: 265687 - DNA, 25 bp, Artificial
  Probe
ggcatcgagctcatcttttacatcc

SEQ ID NO: 265688 - DNA, 25 bp, Artificial
  Probe
catccatggaggagcctgccagctc

SEQ ID NO: 265689 - DNA, 25 bp, Artificial
  Probe
tcagacctgcagcagcagtcatatc

SEQ ID NO: 265690 - DNA, 25 bp, Artificial
  Probe
gtgcctgtcatccatggaggagcct

SEQ ID NO: 265691 - DNA, 25 bp, Artificial
  Probe
catgaaggatctggacagtgccttg

SEQ ID NO: 265692 - DNA, 25 bp, Artificial
  Probe
agctcatcttttacatcctggagaa

SEQ ID NO: 265693 - DNA, 25 bp, Artificial
  Probe
tgttcagacctgcagcagcagtcat

SEQ ID NO: 265694 - DNA, 25 bp, Artificial
  Probe
acctgcagcagcagtcatatccaaa

SEQ ID NO: 265695 - DNA, 25 bp, Artificial
  Probe
gatggcactccgtctgttctgttca

SEQ ID NO: 265696 - DNA, 25 bp, Artificial
  Probe
gccttggtgcctgtcatccatggag

SEQ ID NO: 265697 - DNA, 25 bp, Artificial
  Probe
ttacatcctggagaacatcgcgtag

SEQ ID NO: 265698 - DNA, 25 bp, Artificial
  Probe
gcagtacatgaaggatctggacagt

SEQ ID NO: 265699 - DNA, 25 bp, Artificial
  Probe
ctcgcagtacatgaaggatctggac

SEQ ID NO: 265700 - DNA, 25 bp, Artificial
  Probe
tggtgcctgtcatccatggaggagc

SEQ ID NO: 265701 - DNA, 25 bp, Artificial
  Probe
actccgtctgttctgttcagacctg

SEQ ID NO: 265702 - DNA, 25 bp, Artificial
  Probe
acatcctggagaacatcgcgtagat

SEQ ID NO: 265703 - DNA, 25 bp, Artificial
  Probe
cgcgtagatggcactccgtctgttc

SEQ ID NO: 265704 - DNA, 25 bp, Artificial
  Probe
gcagcagtcatatccaaaccatttg

SEQ ID NO: 265705 - DNA, 25 bp, Artificial
  Probe
ccagtcggcatcgagctcatctttt

SEQ ID NO: 265706 - DNA, 25 bp, Artificial
  Probe
tgcctgtcatccatggaggagcctg

SEQ ID NO: 265707 - DNA, 25 bp, Artificial
  Probe
ggcccagtcggcatcgagctcatct

SEQ ID NO: 265708 - DNA, 25 bp, Artificial
  Probe
aaggatctggacagtgccttggtgc

SEQ ID NO: 265709 - DNA, 25 bp, Artificial
  Probe
cgtagatggcactccgtctgttctg

SEQ ID NO: 265710 - DNA, 25 bp, Artificial
  Probe
ttttacatcctggagaacatcgcgt

SEQ ID NO: 265711 - DNA, 25 bp, Artificial
  Probe
cactccgtctgttctgttcagacct

SEQ ID NO: 265712 - DNA, 25 bp, Artificial
  Probe
tcgagctcatcttttacatcctgga

SEQ ID NO: 265713 - DNA, 25 bp, Artificial
  Probe
cagacctgcagcagcagtcatatcc

SEQ ID NO: 265714 - DNA, 25 bp, Artificial
  Probe
tacatcctggagaacatcgcgtaga

SEQ ID NO: 265715 - DNA, 25 bp, Artificial
  Probe
atcctggagaacatcgcgtagatgg

SEQ ID NO: 265716 - DNA, 25 bp, Artificial
  Probe
catggaggagcctgccagctcagcg

SEQ ID NO: 265717 - DNA, 25 bp, Artificial
  Probe
gcagcagcagtcatatccaaaccat

SEQ ID NO: 265718 - DNA, 25 bp, Artificial
  Probe
atcgagctcatcttttacatcctgg

SEQ ID NO: 265719 - DNA, 25 bp, Artificial
  Probe
ggcactccgtctgttctgttcagac

SEQ ID NO: 265720 - DNA, 25 bp, Artificial
  Probe
cagtcggcatcgagctcatctttta

SEQ ID NO: 265721 - DNA, 25 bp, Artificial
  Probe
cttggtgcctgtcatccatggagga

SEQ ID NO: 265722 - DNA, 25 bp, Artificial
  Probe
gcccagtcggcatcgagctcatctt

SEQ ID NO: 265723 - DNA, 25 bp, Artificial
  Probe
ctgttctgttcagacctgcagcagc

SEQ ID NO: 265724 - DNA, 25 bp, Artificial
  Probe
ttataccagttttctttatgatgat

SEQ ID NO: 265725 - DNA, 25 bp, Artificial
  Probe
ctcaaacttttgaaagatgtatggg

SEQ ID NO: 265726 - DNA, 25 bp, Artificial
  Probe
gtgtttcctcatcaatggttctaaa

SEQ ID NO: 265727 - DNA, 25 bp, Artificial
  Probe
atccagcagtttctcccgagctgac

SEQ ID NO: 265728 - DNA, 25 bp, Artificial
  Probe
tccagcagtttctcccgagctgaca

SEQ ID NO: 265729 - DNA, 25 bp, Artificial
  Probe
cagtttctcccgagctgacacgtca

SEQ ID NO: 265730 - DNA, 25 bp, Artificial
  Probe
attgtgtatattacaccaatgccac

SEQ ID NO: 265731 - DNA, 25 bp, Artificial
  Probe
actaaacgcggcatccagcagtttc

SEQ ID NO: 265732 - DNA, 25 bp, Artificial
  Probe
aactaaacgcggcatccagcagttt

SEQ ID NO: 265733 - DNA, 25 bp, Artificial
  Probe
tgtgtttcctcatcaatggttctaa

SEQ ID NO: 265734 - DNA, 25 bp, Artificial
  Probe
tgccactgtgtttcctcatcaatgg

SEQ ID NO: 265735 - DNA, 25 bp, Artificial
  Probe
cgttctgatatgtgatttgtttgtg

SEQ ID NO: 265736 - DNA, 25 bp, Artificial
  Probe
cagcaagacgtctcttgccttttgt

SEQ ID NO: 265737 - DNA, 25 bp, Artificial
  Probe
ataaattacaattgatctgtcaaaa

SEQ ID NO: 265738 - DNA, 25 bp, Artificial
  Probe
taaacgcggcatccagcagtttctc

SEQ ID NO: 265739 - DNA, 25 bp, Artificial
  Probe
ggcatccagcagtttctcccgagct

SEQ ID NO: 265740 - DNA, 25 bp, Artificial
  Probe
gtatattacaccaatgccactgtgt

SEQ ID NO: 265741 - DNA, 25 bp, Artificial
  Probe
tgtatattacaccaatgccactgtg

SEQ ID NO: 265742 - DNA, 25 bp, Artificial
  Probe
agcaagacgtctcttgccttttgtt

SEQ ID NO: 265743 - DNA, 25 bp, Artificial
  Probe
tatttgatgtacattacagattaaa

SEQ ID NO: 265744 - DNA, 25 bp, Artificial
  Probe
acagcaagacgtctcttgccttttg

SEQ ID NO: 265745 - DNA, 25 bp, Artificial
  Probe
ccactgtgtttcctcatcaatggtt

SEQ ID NO: 265746 - DNA, 25 bp, Artificial
  Probe
acgtctcttgccttttgttaatgca

SEQ ID NO: 265747 - DNA, 25 bp, Artificial
  Probe
tacagcaagacgtctcttgcctttt

SEQ ID NO: 265748 - DNA, 25 bp, Artificial
  Probe
catccagcagtttctcccgagctga

SEQ ID NO: 265749 - DNA, 25 bp, Artificial
  Probe
ttctttatgatgatacagtgttaaa

SEQ ID NO: 265750 - DNA, 25 bp, Artificial
  Probe
gccactgtgtttcctcatcaatggt

SEQ ID NO: 265751 - DNA, 25 bp, Artificial
  Probe
cgtctcttgccttttgttaatgcat

SEQ ID NO: 265752 - DNA, 25 bp, Artificial
  Probe
gtttctcccgagctgacacgtcatt

SEQ ID NO: 265753 - DNA, 25 bp, Artificial
  Probe
gcggcatccagcagtttctcccgag

SEQ ID NO: 265754 - DNA, 25 bp, Artificial
  Probe
gcaagacgtctcttgccttttgtta

SEQ ID NO: 265755 - DNA, 25 bp, Artificial
  Probe
gtgtatattacaccaatgccactgt

SEQ ID NO: 265756 - DNA, 25 bp, Artificial
  Probe
tctttctcccagtatgttttaacaa

SEQ ID NO: 265757 - DNA, 25 bp, Artificial
  Probe
agtttctcccgagctgacacgtcat

SEQ ID NO: 265758 - DNA, 25 bp, Artificial
  Probe
tgtgtatattacaccaatgccactg

SEQ ID NO: 265759 - DNA, 25 bp, Artificial
  Probe
actgtgtttcctcatcaatggttct

SEQ ID NO: 265760 - DNA, 25 bp, Artificial
  Probe
ctaaacgcggcatccagcagtttct

SEQ ID NO: 265761 - DNA, 25 bp, Artificial
  Probe
cactgtgtttcctcatcaatggttc

SEQ ID NO: 265762 - DNA, 25 bp, Artificial
  Probe
atgccactgtgtttcctcatcaatg

SEQ ID NO: 265763 - DNA, 25 bp, Artificial
  Probe
aaacgcggcatccagcagtttctcc

SEQ ID NO: 265764 - DNA, 25 bp, Artificial
  Probe
tttctcccgagctgacacgtcattc

SEQ ID NO: 265765 - DNA, 25 bp, Artificial
  Probe
ctgtgtttcctcatcaatggttcta

SEQ ID NO: 265766 - DNA, 25 bp, Artificial
  Probe
caagacgtctcttgccttttgttaa

SEQ ID NO: 265767 - DNA, 25 bp, Artificial
  Probe
actgcctaaaattttagatgtagat

SEQ ID NO: 265768 - DNA, 25 bp, Artificial
  Probe
atatttagcagtattgttcgttctg

SEQ ID NO: 265769 - DNA, 25 bp, Artificial
  Probe
gcatccagcagtttctcccgagctg

SEQ ID NO: 265770 - DNA, 25 bp, Artificial
  Probe
ctctttgcaaaaacagatggagcat

SEQ ID NO: 265771 - DNA, 25 bp, Artificial
  Probe
ccctctctttgcaaaaacagatgga

SEQ ID NO: 265772 - DNA, 25 bp, Artificial
  Probe
gctccctgtacagatacaagcagcc

SEQ ID NO: 265773 - DNA, 25 bp, Artificial
  Probe
agacagggttcctccagcccggtag

SEQ ID NO: 265774 - DNA, 25 bp, Artificial
  Probe
agccacaaccttatgcagtgcatgg

SEQ ID NO: 265775 - DNA, 25 bp, Artificial
  Probe
ccacaaccttatgcagtgcatggcc

SEQ ID NO: 265776 - DNA, 25 bp, Artificial
  Probe
cagctccctgtacagatacaagcag

SEQ ID NO: 265777 - DNA, 25 bp, Artificial
  Probe
cagccacaaccttatgcagtgcatg

SEQ ID NO: 265778 - DNA, 25 bp, Artificial
  Probe
accttatgcagtgcatggccacttt

SEQ ID NO: 265779 - DNA, 25 bp, Artificial
  Probe
agcatgccaaccagcagactagctt

SEQ ID NO: 265780 - DNA, 25 bp, Artificial
  Probe
tttcagcccactcagacagggttcc

SEQ ID NO: 265781 - DNA, 25 bp, Artificial
  Probe
ttatgcagtgcatggccactttcag

SEQ ID NO: 265782 - DNA, 25 bp, Artificial
  Probe
acagggttcctccagcccggtagtg

SEQ ID NO: 265783 - DNA, 25 bp, Artificial
  Probe
gtgtcccaaacgaataaaatgtaca

SEQ ID NO: 265784 - DNA, 25 bp, Artificial
  Probe
ccttatgcagtgcatggccactttc

SEQ ID NO: 265785 - DNA, 25 bp, Artificial
  Probe
aaccttatgcagtgcatggccactt

SEQ ID NO: 265786 - DNA, 25 bp, Artificial
  Probe
cttatgcagtgcatggccactttca

SEQ ID NO: 265787 - DNA, 25 bp, Artificial
  Probe
ttcagcccactcagacagggttcct

SEQ ID NO: 265788 - DNA, 25 bp, Artificial
  Probe
ccggtagtgccctctctttgcaaaa

SEQ ID NO: 265789 - DNA, 25 bp, Artificial
  Probe
ggagcatgccaaccagcagactagc

SEQ ID NO: 265790 - DNA, 25 bp, Artificial
  Probe
cagggttcctccagcccggtagtgc

SEQ ID NO: 265791 - DNA, 25 bp, Artificial
  Probe
tctctttgcaaaaacagatggagca

SEQ ID NO: 265792 - DNA, 25 bp, Artificial
  Probe
tggagcatgccaaccagcagactag

SEQ ID NO: 265793 - DNA, 25 bp, Artificial
  Probe
atgtgtcccaaacgaataaaatgta

SEQ ID NO: 265794 - DNA, 25 bp, Artificial
  Probe
cctctctttgcaaaaacagatggag

SEQ ID NO: 265795 - DNA, 25 bp, Artificial
  Probe
caaccttatgcagtgcatggccact

SEQ ID NO: 265796 - DNA, 25 bp, Artificial
  Probe
tgccctctctttgcaaaaacagatg

SEQ ID NO: 265797 - DNA, 25 bp, Artificial
  Probe
tcagacagggttcctccagcccggt

SEQ ID NO: 265798 - DNA, 25 bp, Artificial
  Probe
tgtgtcccaaacgaataaaatgtac

SEQ ID NO: 265799 - DNA, 25 bp, Artificial
  Probe
agctccctgtacagatacaagcagc

SEQ ID NO: 265800 - DNA, 25 bp, Artificial
  Probe
tagtgccctctctttgcaaaaacag

SEQ ID NO: 265801 - DNA, 25 bp, Artificial
  Probe
tccctgtacagatacaagcagccgg

SEQ ID NO: 265802 - DNA, 25 bp, Artificial
  Probe
gccctctctttgcaaaaacagatgg

SEQ ID NO: 265803 - DNA, 25 bp, Artificial
  Probe
gacagggttcctccagcccggtagt

SEQ ID NO: 265804 - DNA, 25 bp, Artificial
  Probe
cacaaccttatgcagtgcatggcca

SEQ ID NO: 265805 - DNA, 25 bp, Artificial
  Probe
cagacagggttcctccagcccggta

SEQ ID NO: 265806 - DNA, 25 bp, Artificial
  Probe
gccacaaccttatgcagtgcatggc

SEQ ID NO: 265807 - DNA, 25 bp, Artificial
  Probe
atggagcatgccaaccagcagacta

SEQ ID NO: 265808 - DNA, 25 bp, Artificial
  Probe
agtgcatggccactttcagcccact

SEQ ID NO: 265809 - DNA, 25 bp, Artificial
  Probe
ctttgcaaaaacagatggagcatgc

SEQ ID NO: 265810 - DNA, 25 bp, Artificial
  Probe
tcagctccctgtacagatacaagca

SEQ ID NO: 265811 - DNA, 25 bp, Artificial
  Probe
ggtagtgccctctctttgcaaaaac

SEQ ID NO: 265812 - DNA, 25 bp, Artificial
  Probe
ctctctttgcaaaaacagatggagc

SEQ ID NO: 265813 - DNA, 25 bp, Artificial
  Probe
agtgccctctctttgcaaaaacaga

SEQ ID NO: 265814 - DNA, 25 bp, Artificial
  Probe
cggtagtgccctctctttgcaaaaa

SEQ ID NO: 265815 - DNA, 25 bp, Artificial
  Probe
acagccacaaccttatgcagtgcat

SEQ ID NO: 265816 - DNA, 25 bp, Artificial
  Probe
aaatgaccgagtcaggaacctgcag

SEQ ID NO: 265817 - DNA, 25 bp, Artificial
  Probe
ggaaatgaccgagtcaggaacctgc

SEQ ID NO: 265818 - DNA, 25 bp, Artificial
  Probe
agtgccggaaatgaccgagtcagga

SEQ ID NO: 265819 - DNA, 25 bp, Artificial
  Probe
gaagttctgctttgagaggcccaag

SEQ ID NO: 265820 - DNA, 25 bp, Artificial
  Probe
cagactaggcgaagttctgctttga

SEQ ID NO: 265821 - DNA, 25 bp, Artificial
  Probe
tttgagaggcccaagtgctccgaga

SEQ ID NO: 265822 - DNA, 25 bp, Artificial
  Probe
aggcccaagtgctccgagacatgga

SEQ ID NO: 265823 - DNA, 25 bp, Artificial
  Probe
tgaccgagtcaggaacctgcagagt

SEQ ID NO: 265824 - DNA, 25 bp, Artificial
  Probe
gaccctgtttgtggctgggaaactg

SEQ ID NO: 265825 - DNA, 25 bp, Artificial
  Probe
acagactaggcgaagttctgctttg

SEQ ID NO: 265826 - DNA, 25 bp, Artificial
  Probe
ggaccctgtttgtggctgggaaact

SEQ ID NO: 265827 - DNA, 25 bp, Artificial
  Probe
ttctgctttgagaggcccaagtgct

SEQ ID NO: 265828 - DNA, 25 bp, Artificial
  Probe
ccgagtcaggaacctgcagagtgag

SEQ ID NO: 265829 - DNA, 25 bp, Artificial
  Probe
gaaatgaccgagtcaggaacctgca

SEQ ID NO: 265830 - DNA, 25 bp, Artificial
  Probe
tgccccagaagttccttgatcccct

SEQ ID NO: 265831 - DNA, 25 bp, Artificial
  Probe
gactaggcgaagttctgctttgaga

SEQ ID NO: 265832 - DNA, 25 bp, Artificial
  Probe
cctgtttgtggctgggaaactgctg

SEQ ID NO: 265833 - DNA, 25 bp, Artificial
  Probe
actaggcgaagttctgctttgagag

SEQ ID NO: 265834 - DNA, 25 bp, Artificial
  Probe
taggcgaagttctgctttgagaggc

SEQ ID NO: 265835 - DNA, 25 bp, Artificial
  Probe
caagtgctccgagacatggaggcca

SEQ ID NO: 265836 - DNA, 25 bp, Artificial
  Probe
tgcagagtgaggtggagggagtcaa

SEQ ID NO: 265837 - DNA, 25 bp, Artificial
  Probe
gaggcccaagtgctccgagacatgg

SEQ ID NO: 265838 - DNA, 25 bp, Artificial
  Probe
ctaggcgaagttctgctttgagagg

SEQ ID NO: 265839 - DNA, 25 bp, Artificial
  Probe
agtgctccgagacatggaggccagt

SEQ ID NO: 265840 - DNA, 25 bp, Artificial
  Probe
aggcgaagttctgctttgagaggcc

SEQ ID NO: 265841 - DNA, 25 bp, Artificial
  Probe
agaggcccaagtgctccgagacatg

SEQ ID NO: 265842 - DNA, 25 bp, Artificial
  Probe
accgagtcaggaacctgcagagtga

SEQ ID NO: 265843 - DNA, 25 bp, Artificial
  Probe
gactgtggctgcacctcatggtcct

SEQ ID NO: 265844 - DNA, 25 bp, Artificial
  Probe
aatgaccgagtcaggaacctgcaga

SEQ ID NO: 265845 - DNA, 25 bp, Artificial
  Probe
ggactgtggctgcacctcatggtcc

SEQ ID NO: 265846 - DNA, 25 bp, Artificial
  Probe
atgaccgagtcaggaacctgcagag

SEQ ID NO: 265847 - DNA, 25 bp, Artificial
  Probe
agactaggcgaagttctgctttgag

SEQ ID NO: 265848 - DNA, 25 bp, Artificial
  Probe
aagttctgctttgagaggcccaagt

SEQ ID NO: 265849 - DNA, 25 bp, Artificial
  Probe
cggaaatgaccgagtcaggaacctg

SEQ ID NO: 265850 - DNA, 25 bp, Artificial
  Probe
ggcccgaggggagaacctggaccat

SEQ ID NO: 265851 - DNA, 25 bp, Artificial
  Probe
gcgaagttctgctttgagaggccca

SEQ ID NO: 265852 - DNA, 25 bp, Artificial
  Probe
ccaagtgctccgagacatggaggcc

SEQ ID NO: 265853 - DNA, 25 bp, Artificial
  Probe
cgaagttctgctttgagaggcccaa

SEQ ID NO: 265854 - DNA, 25 bp, Artificial
  Probe
aagtgctccgagacatggaggccag

SEQ ID NO: 265855 - DNA, 25 bp, Artificial
  Probe
gagaggcccaagtgctccgagacat

SEQ ID NO: 265856 - DNA, 25 bp, Artificial
  Probe
tgagaggcccaagtgctccgagaca

SEQ ID NO: 265857 - DNA, 25 bp, Artificial
  Probe
agaatgtggagcggatcttggcccg

SEQ ID NO: 265858 - DNA, 25 bp, Artificial
  Probe
gaccgagtcaggaacctgcagagtg

SEQ ID NO: 265859 - DNA, 25 bp, Artificial
  Probe
ggcgaagttctgctttgagaggccc

SEQ ID NO: 265860 - DNA, 25 bp, Artificial
  Probe
cccagaagttccttgatcccctggg

SEQ ID NO: 265861 - DNA, 25 bp, Artificial
  Probe
ttgagaggcccaagtgctccgagac

SEQ ID NO: 265862 - DNA, 25 bp, Artificial
  Probe
gatgagcggcggagccaatactatg

SEQ ID NO: 265863 - DNA, 25 bp, Artificial
  Probe
atcccagctgggtaccatggtgatc

SEQ ID NO: 265864 - DNA, 25 bp, Artificial
  Probe
cattgccatcccagctgggtaccat

SEQ ID NO: 265865 - DNA, 25 bp, Artificial
  Probe
tgacacattgccatcccagctgggt

SEQ ID NO: 265866 - DNA, 25 bp, Artificial
  Probe
gattgagcacggtgacacattgcca

SEQ ID NO: 265867 - DNA, 25 bp, Artificial
  Probe
acgagaccacattccgtaagcccga

SEQ ID NO: 265868 - DNA, 25 bp, Artificial
  Probe
tgtctggtaaaaagcccggagcaga

SEQ ID NO: 265869 - DNA, 25 bp, Artificial
  Probe
cgtgaagcagtgtctggtaaaaagc

SEQ ID NO: 265870 - DNA, 25 bp, Artificial
  Probe
gacatgggcactgtccgagtagcca

SEQ ID NO: 265871 - DNA, 25 bp, Artificial
  Probe
ccgagtagccagcacgatgagcggc

SEQ ID NO: 265872 - DNA, 25 bp, Artificial
  Probe
gaccaggacgacgatgagaactcag

SEQ ID NO: 265873 - DNA, 25 bp, Artificial
  Probe
aaagcccggagcagagagccacagc

SEQ ID NO: 265874 - DNA, 25 bp, Artificial
  Probe
aactgaagcgccaggaagcccagca

SEQ ID NO: 265875 - DNA, 25 bp, Artificial
  Probe
ctccagcacccgtttgttaagagcg

SEQ ID NO: 265876 - DNA, 25 bp, Artificial
  Probe
ccacattccgtaagcccgaggtgtg

SEQ ID NO: 265877 - DNA, 25 bp, Artificial
  Probe
ccagctgggtaccatggtgatcaac

SEQ ID NO: 265878 - DNA, 25 bp, Artificial
  Probe
gatgacatgggcactgtccgagtag

SEQ ID NO: 265879 - DNA, 25 bp, Artificial
  Probe
gagcggccatactgcgagacttaat

SEQ ID NO: 265880 - DNA, 25 bp, Artificial
  Probe
aggtgtggtcggacaacttcatgga

SEQ ID NO: 265881 - DNA, 25 bp, Artificial
  Probe
acttaattaacgaggccatggacgt

SEQ ID NO: 265882 - DNA, 25 bp, Artificial
  Probe
tgaagcgccaggaagcccagcagcg

SEQ ID NO: 265883 - DNA, 25 bp, Artificial
  Probe
ctctggcacgatggttcgagctgcg

SEQ ID NO: 265884 - DNA, 25 bp, Artificial
  Probe
cagtggaccaggacgacgatgagaa

SEQ ID NO: 265885 - DNA, 25 bp, Artificial
  Probe
aagcagtgtctggtaaaaagcccgg

SEQ ID NO: 265886 - DNA, 25 bp, Artificial
  Probe
ggcacgagaccacattccgtaagcc

SEQ ID NO: 265887 - DNA, 25 bp, Artificial
  Probe
tgaaatggactctggcacgatggtt

SEQ ID NO: 265888 - DNA, 25 bp, Artificial
  Probe
acgtgaaactgaagcgccaggaagc

SEQ ID NO: 265889 - DNA, 25 bp, Artificial
  Probe
gacacattgccatcccagctgggta

SEQ ID NO: 265890 - DNA, 25 bp, Artificial
  Probe
gagatgagaccatgcagcctgcaaa

SEQ ID NO: 265891 - DNA, 25 bp, Artificial
  Probe
atgagaccatgcagcctgcaaaacc

SEQ ID NO: 265892 - DNA, 25 bp, Artificial
  Probe
gggcactgtccgagtagccagcacg

SEQ ID NO: 265893 - DNA, 25 bp, Artificial
  Probe
ccgtttgttaagagcgccaagggag

SEQ ID NO: 265894 - DNA, 25 bp, Artificial
  Probe
gacttaattaacgaggccatggacg

SEQ ID NO: 265895 - DNA, 25 bp, Artificial
  Probe
ggagcggccatactgcgagacttaa

SEQ ID NO: 265896 - DNA, 25 bp, Artificial
  Probe
cactgtccgagtagccagcacgatg

SEQ ID NO: 265897 - DNA, 25 bp, Artificial
  Probe
atactgcgagacttaattaacgagg

SEQ ID NO: 265898 - DNA, 25 bp, Artificial
  Probe
gaccatgcagcctgcaaaaccgtct

SEQ ID NO: 265899 - DNA, 25 bp, Artificial
  Probe
agcggcggagccaatactatgattg

SEQ ID NO: 265900 - DNA, 25 bp, Artificial
  Probe
attaacgaggccatggacgtgaaac

SEQ ID NO: 265901 - DNA, 25 bp, Artificial
  Probe
catggatttcgtgaagcagtgtctg

SEQ ID NO: 265902 - DNA, 25 bp, Artificial
  Probe
acggtgacacattgccatcccagct

SEQ ID NO: 265903 - DNA, 25 bp, Artificial
  Probe
gtggtcggacaacttcatggatttc

SEQ ID NO: 265904 - DNA, 25 bp, Artificial
  Probe
atgaaatggactctggcacgatggt

SEQ ID NO: 265905 - DNA, 25 bp, Artificial
  Probe
ggccatggacgtgaaactgaagcgc

SEQ ID NO: 265906 - DNA, 25 bp, Artificial
  Probe
taagcccgaggtgtggtcggacaac

SEQ ID NO: 265907 - DNA, 25 bp, Artificial
  Probe
aagcccggagcagagagccacagcc

SEQ ID NO: 265908 - DNA, 25 bp, Artificial
  Probe
gagctgagccctacgcccacagagg

SEQ ID NO: 265909 - DNA, 25 bp, Artificial
  Probe
acgagctcaagcaggcctgtgccaa

SEQ ID NO: 265910 - DNA, 25 bp, Artificial
  Probe
tacggcaccggcatgaggctctggc

SEQ ID NO: 265911 - DNA, 25 bp, Artificial
  Probe
atgtcgtgggtgcaccgctcacacc

SEQ ID NO: 265912 - DNA, 25 bp, Artificial
  Probe
tgcccagctctgtgggtcagaagaa

SEQ ID NO: 265913 - DNA, 25 bp, Artificial
  Probe
gtctgctgagccaacagtgtctgaa

SEQ ID NO: 265914 - DNA, 25 bp, Artificial
  Probe
gaacttggtgtggagctgagcccta

SEQ ID NO: 265915 - DNA, 25 bp, Artificial
  Probe
ctctgtgggtcagaagaagatcaag

SEQ ID NO: 265916 - DNA, 25 bp, Artificial
  Probe
gtgccaactgtgaatatgagctgca

SEQ ID NO: 265917 - DNA, 25 bp, Artificial
  Probe
gctcacacccaattcgcggaaacga

SEQ ID NO: 265918 - DNA, 25 bp, Artificial
  Probe
caagaaaccataaggggccatcaga

SEQ ID NO: 265919 - DNA, 25 bp, Artificial
  Probe
atgaagctgcccagctctgtgggtc

SEQ ID NO: 265920 - DNA, 25 bp, Artificial
  Probe
tcattgatgtcgtgggtgcaccgct

SEQ ID NO: 265921 - DNA, 25 bp, Artificial
  Probe
cggcaccggcatgaggctctggctc

SEQ ID NO: 265922 - DNA, 25 bp, Artificial
  Probe
gctgcagatgctacggcaccggcat

SEQ ID NO: 265923 - DNA, 25 bp, Artificial
  Probe
caggcctgtgccaactgtgaatatg

SEQ ID NO: 265924 - DNA, 25 bp, Artificial
  Probe
ttcgcggaaacgacgggaatcagcc

SEQ ID NO: 265925 - DNA, 25 bp, Artificial
  Probe
caaggcgctggaacagatgctgctg

SEQ ID NO: 265926 - DNA, 25 bp, Artificial
  Probe
ggtgtggagctgagccctacgccca

SEQ ID NO: 265927 - DNA, 25 bp, Artificial
  Probe
aagccaagaaaccataaggggccat

SEQ ID NO: 265928 - DNA, 25 bp, Artificial
  Probe
gagcggatgaagctgcccagctctg

SEQ ID NO: 265929 - DNA, 25 bp, Artificial
  Probe
ctcaagcaggcctgtgccaactgtg

SEQ ID NO: 265930 - DNA, 25 bp, Artificial
  Probe
tctgctgagccaacagtgtctgaat

SEQ ID NO: 265931 - DNA, 25 bp, Artificial
  Probe
atgttcaatgagttgcggagtgacc

SEQ ID NO: 265932 - DNA, 25 bp, Artificial
  Probe
ggagctgagccctacgcccacagag

SEQ ID NO: 265933 - DNA, 25 bp, Artificial
  Probe
caattcgcggaaacgacgggaatca

SEQ ID NO: 265934 - DNA, 25 bp, Artificial
  Probe
tgttcaatgagttgcggagtgacct

SEQ ID NO: 265935 - DNA, 25 bp, Artificial
  Probe
aaacgacgggaatcagcctccagct

SEQ ID NO: 265936 - DNA, 25 bp, Artificial
  Probe
cagcgtctgctgagccaacagtgtc

SEQ ID NO: 265937 - DNA, 25 bp, Artificial
  Probe
agttgcggagtgacctggtgttact

SEQ ID NO: 265938 - DNA, 25 bp, Artificial
  Probe
agatcaaggcgctggaacagatgct

SEQ ID NO: 265939 - DNA, 25 bp, Artificial
  Probe
tacgagctcaagcaggcctgtgcca

SEQ ID NO: 265940 - DNA, 25 bp, Artificial
  Probe
gacttggtcttgaccctagcaagga

SEQ ID NO: 265941 - DNA, 25 bp, Artificial
  Probe
tcttctgtgaagaaagccaagaaac

SEQ ID NO: 265942 - DNA, 25 bp, Artificial
  Probe
gcgctggaacagatgctgctggaac

SEQ ID NO: 265943 - DNA, 25 bp, Artificial
  Probe
agatgctacggcaccggcatgaggc

SEQ ID NO: 265944 - DNA, 25 bp, Artificial
  Probe
cgggaatcagcctccagctcatctt

SEQ ID NO: 265945 - DNA, 25 bp, Artificial
  Probe
tggtcttgaccctagcaaggacacc

SEQ ID NO: 265946 - DNA, 25 bp, Artificial
  Probe
cccagcgtctgctgagccaacagtg

SEQ ID NO: 265947 - DNA, 25 bp, Artificial
  Probe
tgatgtcgtgggtgcaccgctcaca

SEQ ID NO: 265948 - DNA, 25 bp, Artificial
  Probe
acagatgctgctggaacttggtgtg

SEQ ID NO: 265949 - DNA, 25 bp, Artificial
  Probe
ccataaggggccatcagagttggtg

SEQ ID NO: 265950 - DNA, 25 bp, Artificial
  Probe
tgaatatgagctgcagatgctacgg

SEQ ID NO: 265951 - DNA, 25 bp, Artificial
  Probe
acgacgggaatcagcctccagctca

SEQ ID NO: 265952 - DNA, 25 bp, Artificial
  Probe
cagctctgtgggtcagaagaagatc

SEQ ID NO: 265953 - DNA, 25 bp, Artificial
  Probe
caagcaggcctgtgccaactgtgaa

SEQ ID NO: 265954 - DNA, 25 bp, Artificial
  Probe
gccggtcactgaaccccagtagggt

SEQ ID NO: 265955 - DNA, 25 bp, Artificial
  Probe
ttgtctccgatgcattccacaaagc

SEQ ID NO: 265956 - DNA, 25 bp, Artificial
  Probe
ttactggccggtcactgaaccccag

SEQ ID NO: 265957 - DNA, 25 bp, Artificial
  Probe
agtagggtgaccttcaaggccaaca

SEQ ID NO: 265958 - DNA, 25 bp, Artificial
  Probe
gacctctttgtctccgatgcattcc

SEQ ID NO: 265959 - DNA, 25 bp, Artificial
  Probe
tcatgcttgtggtccacgtgccccg

SEQ ID NO: 265960 - DNA, 25 bp, Artificial
  Probe
tctcttcagccctgagaagtcccaa

SEQ ID NO: 265961 - DNA, 25 bp, Artificial
  Probe
aagacatgggccttgttgatctctt

SEQ ID NO: 265962 - DNA, 25 bp, Artificial
  Probe
cccagggatcattgctgaaggcagg

SEQ ID NO: 265963 - DNA, 25 bp, Artificial
  Probe
tcttcagccctgagaagtcccaact

SEQ ID NO: 265964 - DNA, 25 bp, Artificial
  Probe
ctgagaagtcccaactcccagggat

SEQ ID NO: 265965 - DNA, 25 bp, Artificial
  Probe
tagggtgaccttcaaggccaacagg

SEQ ID NO: 265966 - DNA, 25 bp, Artificial
  Probe
ctgaaccccagtagggtgaccttca

SEQ ID NO: 265967 - DNA, 25 bp, Artificial
  Probe
gaagtcgcactgaacactattatat

SEQ ID NO: 265968 - DNA, 25 bp, Artificial
  Probe
ttcctggttcttataagggaagtcg

SEQ ID NO: 265969 - DNA, 25 bp, Artificial
  Probe
agtgtctaatccttgtgtgaactaa

SEQ ID NO: 265970 - DNA, 25 bp, Artificial
  Probe
attactggccggtcactgaacccca

SEQ ID NO: 265971 - DNA, 25 bp, Artificial
  Probe
gaagcagcagcgagtacttctgtcg

SEQ ID NO: 265972 - DNA, 25 bp, Artificial
  Probe
ttcttataagggaagtcgcactgaa

SEQ ID NO: 265973 - DNA, 25 bp, Artificial
  Probe
cagtgaagcagcagcgagtacttct

SEQ ID NO: 265974 - DNA, 25 bp, Artificial
  Probe
gggaagtcgcactgaacactattat

SEQ ID NO: 265975 - DNA, 25 bp, Artificial
  Probe
caggcccttcctggttcttataagg

SEQ ID NO: 265976 - DNA, 25 bp, Artificial
  Probe
tcaccccggagctgctgcaggagtg

SEQ ID NO: 265977 - DNA, 25 bp, Artificial
  Probe
atgcttgtggtccacgtgccccgct

SEQ ID NO: 265978 - DNA, 25 bp, Artificial
  Probe
tcactgaaccccagtagggtgacct

SEQ ID NO: 265979 - DNA, 25 bp, Artificial
  Probe
agctgcaagacatgggccttgttga

SEQ ID NO: 265980 - DNA, 25 bp, Artificial
  Probe
cggaggtcatgcttgtggtccacgt

SEQ ID NO: 265981 - DNA, 25 bp, Artificial
  Probe
gggtgaccttcaaggccaacaggcc

SEQ ID NO: 265982 - DNA, 25 bp, Artificial
  Probe
tgaaggcagggacgacctctttgtc

SEQ ID NO: 265983 - DNA, 25 bp, Artificial
  Probe
ggcagtgaagcagcagcgagtactt

SEQ ID NO: 265984 - DNA, 25 bp, Artificial
  Probe
gatcattgctgaaggcagggacgac

SEQ ID NO: 265985 - DNA, 25 bp, Artificial
  Probe
agaagtcccaactcccagggatcat

SEQ ID NO: 265986 - DNA, 25 bp, Artificial
  Probe
gttgatctcttcagccctgagaagt

SEQ ID NO: 265987 - DNA, 25 bp, Artificial
  Probe
gtcccaactcccagggatcattgct

SEQ ID NO: 265988 - DNA, 25 bp, Artificial
  Probe
tttgtctccgatgcattccacaaag

SEQ ID NO: 265989 - DNA, 25 bp, Artificial
  Probe
cctggttcttataagggaagtcgca

SEQ ID NO: 265990 - DNA, 25 bp, Artificial
  Probe
aaggagcagctgcaagacatgggcc

SEQ ID NO: 265991 - DNA, 25 bp, Artificial
  Probe
caactcccagggatcattgctgaag

SEQ ID NO: 265992 - DNA, 25 bp, Artificial
  Probe
ctggccggtcactgaaccccagtag

SEQ ID NO: 265993 - DNA, 25 bp, Artificial
  Probe
cactgaaccccagtagggtgacctt

SEQ ID NO: 265994 - DNA, 25 bp, Artificial
  Probe
gcttcagtctgaaggagcagctgca

SEQ ID NO: 265995 - DNA, 25 bp, Artificial
  Probe
attgctgaaggcagggacgacctct

SEQ ID NO: 265996 - DNA, 25 bp, Artificial
  Probe
ctgtcggaggtcatgcttgtggtcc

SEQ ID NO: 265997 - DNA, 25 bp, Artificial
  Probe
atgagctgtcggaggtcatgcttgt

SEQ ID NO: 265998 - DNA, 25 bp, Artificial
  Probe
gccaacaggcccttcctggttctta

SEQ ID NO: 265999 - DNA, 25 bp, Artificial
  Probe
tgtcgtgattactggccggtcactg

SEQ ID NO: 266000 - DNA, 25 bp, Artificial
  Probe
ttcttccagggcatctgcgaatatt

SEQ ID NO: 266001 - DNA, 25 bp, Artificial
  Probe
atggagcctgcagattacaactctc

SEQ ID NO: 266002 - DNA, 25 bp, Artificial
  Probe
gaacacatgaaaccaaatcgaactg

SEQ ID NO: 266003 - DNA, 25 bp, Artificial
  Probe
ttccagggcatctgcgaatattaac

SEQ ID NO: 266004 - DNA, 25 bp, Artificial
  Probe
actgtttcttccagggcatctgcga

SEQ ID NO: 266005 - DNA, 25 bp, Artificial
  Probe
cctgtctgtcctataggaatgaatc

SEQ ID NO: 266006 - DNA, 25 bp, Artificial
  Probe
ggtctcattggcaacgtacggatcg

SEQ ID NO: 266007 - DNA, 25 bp, Artificial
  Probe
caaatcgaactgtttcttccagggc

SEQ ID NO: 266008 - DNA, 25 bp, Artificial
  Probe
tctcggaacacatgaaaccaaatcg

SEQ ID NO: 266009 - DNA, 25 bp, Artificial
  Probe
tgttcttcaaaggtctcattggcaa

SEQ ID NO: 266010 - DNA, 25 bp, Artificial
  Probe
taccgttccttctcggaacacatga

SEQ ID NO: 266011 - DNA, 25 bp, Artificial
  Probe
gatcgacagtgtcatcccacacatt

SEQ ID NO: 266012 - DNA, 25 bp, Artificial
  Probe
tcaccctgctccaggctaagtttac

SEQ ID NO: 266013 - DNA, 25 bp, Artificial
  Probe
ggcaacgtacggatcgacagtgtca

SEQ ID NO: 266014 - DNA, 25 bp, Artificial
  Probe
gctccaggctaagtttaccgttcct

SEQ ID NO: 266015 - DNA, 25 bp, Artificial
  Probe
tgaaagtggaggtcaccctgctcca

SEQ ID NO: 266016 - DNA, 25 bp, Artificial
  Probe
tcaggaattatactaccctgtctgt

SEQ ID NO: 266017 - DNA, 25 bp, Artificial
  Probe
agggcatctgcgaatattaacttta

SEQ ID NO: 266018 - DNA, 25 bp, Artificial
  Probe
accaaatcgaactgtttcttccagg

SEQ ID NO: 266019 - DNA, 25 bp, Artificial
  Probe
tacggatcgacagtgtcatcccaca

SEQ ID NO: 266020 - DNA, 25 bp, Artificial
  Probe
ctgctccaggctaagtttaccgttc

SEQ ID NO: 266021 - DNA, 25 bp, Artificial
  Probe
ttaccgttccttctcggaacacatg

SEQ ID NO: 266022 - DNA, 25 bp, Artificial
  Probe
catctgcgaatattaactttaagag

SEQ ID NO: 266023 - DNA, 25 bp, Artificial
  Probe
tggaggtcaccctgctccaggctaa

SEQ ID NO: 266024 - DNA, 25 bp, Artificial
  Probe
caggaattatactaccctgtctgtc

SEQ ID NO: 266025 - DNA, 25 bp, Artificial
  Probe
atcaacaatggtacggggctgttct

SEQ ID NO: 266026 - DNA, 25 bp, Artificial
  Probe
gcatctgcgaatattaactttaaga

SEQ ID NO: 266027 - DNA, 25 bp, Artificial
  Probe
aaagtggaggtcaccctgctccagg

SEQ ID NO: 266028 - DNA, 25 bp, Artificial
  Probe
gtctgtcctataggaatgaatcaac

SEQ ID NO: 266029 - DNA, 25 bp, Artificial
  Probe
cctgctccaggctaagtttaccgtt

SEQ ID NO: 266030 - DNA, 25 bp, Artificial
  Probe
tctgtcctataggaatgaatcaaca

SEQ ID NO: 266031 - DNA, 25 bp, Artificial
  Probe
cgtacggatcgacagtgtcatccca

SEQ ID NO: 266032 - DNA, 25 bp, Artificial
  Probe
aggaattatactaccctgtctgtcc

SEQ ID NO: 266033 - DNA, 25 bp, Artificial
  Probe
gaggtcaccctgctccaggctaagt

SEQ ID NO: 266034 - DNA, 25 bp, Artificial
  Probe
atgaatcaacaatggtacggggctg

SEQ ID NO: 266035 - DNA, 25 bp, Artificial
  Probe
gttccttctcggaacacatgaaacc

SEQ ID NO: 266036 - DNA, 25 bp, Artificial
  Probe
ttcttcaaaggtctcattggcaacg

SEQ ID NO: 266037 - DNA, 25 bp, Artificial
  Probe
attgttcttcaaaggtctcattggc

SEQ ID NO: 266038 - DNA, 25 bp, Artificial
  Probe
ggatgacacttaagactctctcctc

SEQ ID NO: 266039 - DNA, 25 bp, Artificial
  Probe
gagcctgcagattacaactctcaaa

SEQ ID NO: 266040 - DNA, 25 bp, Artificial
  Probe
tatactaccctgtctgtcctatagg

SEQ ID NO: 266041 - DNA, 25 bp, Artificial
  Probe
caaaggtctcattggcaacgtacgg

SEQ ID NO: 266042 - DNA, 25 bp, Artificial
  Probe
cattggcaacgtacggatcgacagt

SEQ ID NO: 266043 - DNA, 25 bp, Artificial
  Probe
ctcggaacacatgaaaccaaatcga

SEQ ID NO: 266044 - DNA, 25 bp, Artificial
  Probe
acggatcgacagtgtcatcccacac

SEQ ID NO: 266045 - DNA, 25 bp, Artificial
  Probe
aaatggagcctgcagattacaactc

SEQ ID NO: 266046 - DNA, 25 bp, Artificial
  Probe
cagcaacttcagtgtcaatgttttt

SEQ ID NO: 266047 - DNA, 25 bp, Artificial
  Probe
acagacctgtttccagcaacttcag

SEQ ID NO: 266048 - DNA, 25 bp, Artificial
  Probe
gtttccagcaacttcagtgtcaatg

SEQ ID NO: 266049 - DNA, 25 bp, Artificial
  Probe
ttgtaatatttctgtacagacctgt

SEQ ID NO: 266050 - DNA, 25 bp, Artificial
  Probe
ccagcaacttcagtgtcaatgtttt

SEQ ID NO: 266051 - DNA, 25 bp, Artificial
  Probe
agcaacttcagtgtcaatgtttttg

SEQ ID NO: 266052 - DNA, 25 bp, Artificial
  Probe
cactgctttcctggtggatgagact

SEQ ID NO: 266053 - DNA, 25 bp, Artificial
  Probe
tcactgctttcctggtggatgagac

SEQ ID NO: 266054 - DNA, 25 bp, Artificial
  Probe
tgtaatatttctgtacagacctgtt

SEQ ID NO: 266055 - DNA, 25 bp, Artificial
  Probe
atttctgtacagacctgtttccagc

SEQ ID NO: 266056 - DNA, 25 bp, Artificial
  Probe
ttaggaaggacgtgctgggcttcca

SEQ ID NO: 266057 - DNA, 25 bp, Artificial
  Probe
tgtacagacctgtttccagcaactt

SEQ ID NO: 266058 - DNA, 25 bp, Artificial
  Probe
ctttcctggtggatgagactttctt

SEQ ID NO: 266059 - DNA, 25 bp, Artificial
  Probe
agacctgtttccagcaacttcagtg

SEQ ID NO: 266060 - DNA, 25 bp, Artificial
  Probe
ctgtttccagcaacttcagtgtcaa

SEQ ID NO: 266061 - DNA, 25 bp, Artificial
  Probe
gacctgtttccagcaacttcagtgt

SEQ ID NO: 266062 - DNA, 25 bp, Artificial
  Probe
cctgtttccagcaacttcagtgtca

SEQ ID NO: 266063 - DNA, 25 bp, Artificial
  Probe
ttccagcaacttcagtgtcaatgtt

SEQ ID NO: 266064 - DNA, 25 bp, Artificial
  Probe
caacttcagtgtcaatgtttttgat

SEQ ID NO: 266065 - DNA, 25 bp, Artificial
  Probe
tctgtacagacctgtttccagcaac

SEQ ID NO: 266066 - DNA, 25 bp, Artificial
  Probe
tttctgtacagacctgtttccagca

SEQ ID NO: 266067 - DNA, 25 bp, Artificial
  Probe
gtactcaagtctcttgggtagagat

SEQ ID NO: 266068 - DNA, 25 bp, Artificial
  Probe
gtaatatttctgtacagacctgttt

SEQ ID NO: 266069 - DNA, 25 bp, Artificial
  Probe
tttccagcaacttcagtgtcaatgt

SEQ ID NO: 266070 - DNA, 25 bp, Artificial
  Probe
ttcctggtggatgagactttcttag

SEQ ID NO: 266071 - DNA, 25 bp, Artificial
  Probe
tgctttcctggtggatgagactttc

SEQ ID NO: 266072 - DNA, 25 bp, Artificial
  Probe
gctttcctggtggatgagactttct

SEQ ID NO: 266073 - DNA, 25 bp, Artificial
  Probe
tttcctggtggatgagactttctta

SEQ ID NO: 266074 - DNA, 25 bp, Artificial
  Probe
tccagcaacttcagtgtcaatgttt

SEQ ID NO: 266075 - DNA, 25 bp, Artificial
  Probe
ctgtacagacctgtttccagcaact

SEQ ID NO: 266076 - DNA, 25 bp, Artificial
  Probe
gtacagacctgtttccagcaacttc

SEQ ID NO: 266077 - DNA, 25 bp, Artificial
  Probe
tgtttccagcaacttcagtgtcaat

SEQ ID NO: 266078 - DNA, 25 bp, Artificial
  Probe
acctgtttccagcaacttcagtgtc

SEQ ID NO: 266079 - DNA, 25 bp, Artificial
  Probe
actgctttcctggtggatgagactt

SEQ ID NO: 266080 - DNA, 25 bp, Artificial
  Probe
ctgctttcctggtggatgagacttt

SEQ ID NO: 266081 - DNA, 25 bp, Artificial
  Probe
cagacctgtttccagcaacttcagt

SEQ ID NO: 266082 - DNA, 25 bp, Artificial
  Probe
gcaacttcagtgtcaatgtttttga

SEQ ID NO: 266083 - DNA, 25 bp, Artificial
  Probe
tatttctgtacagacctgtttccag

SEQ ID NO: 266084 - DNA, 25 bp, Artificial
  Probe
ggagacactacttccagaataccca

SEQ ID NO: 266085 - DNA, 25 bp, Artificial
  Probe
gaatgctgctgagatcacagacaag

SEQ ID NO: 266086 - DNA, 25 bp, Artificial
  Probe
ggatgctgtgctgcttgtgtttgca

SEQ ID NO: 266087 - DNA, 25 bp, Artificial
  Probe
aatacccaaggcttgatatttgtgg

SEQ ID NO: 266088 - DNA, 25 bp, Artificial
  Probe
caaacaaacaggatttgccgaatgc

SEQ ID NO: 266089 - DNA, 25 bp, Artificial
  Probe
ctgcgccaccgcaattggtacattc

SEQ ID NO: 266090 - DNA, 25 bp, Artificial
  Probe
tacttccagaatacccaaggcttga

SEQ ID NO: 266091 - DNA, 25 bp, Artificial
  Probe
tccgggatgctgtgctgcttgtgtt

SEQ ID NO: 266092 - DNA, 25 bp, Artificial
  Probe
gaatgctatgaatgctgctgagatc

SEQ ID NO: 266093 - DNA, 25 bp, Artificial
  Probe
agattcggcccctctggagacacta

SEQ ID NO: 266094 - DNA, 25 bp, Artificial
  Probe
ccaaggcttgatatttgtggttgac

SEQ ID NO: 266095 - DNA, 25 bp, Artificial
  Probe
tggccaggacaagattcggcccctc

SEQ ID NO: 266096 - DNA, 25 bp, Artificial
  Probe
gacgggctctatgaaggcttggact

SEQ ID NO: 266097 - DNA, 25 bp, Artificial
  Probe
tcacagacaagctgggcctgcactc

SEQ ID NO: 266098 - DNA, 25 bp, Artificial
  Probe
gacactacttccagaatacccaagg

SEQ ID NO: 266099 - DNA, 25 bp, Artificial
  Probe
ccaggacaagattcggcccctctgg

SEQ ID NO: 266100 - DNA, 25 bp, Artificial
  Probe
acaagctgggcctgcactctctgcg

SEQ ID NO: 266101 - DNA, 25 bp, Artificial
  Probe
gaaggcttggactggctggccaatc

SEQ ID NO: 266102 - DNA, 25 bp, Artificial
  Probe
attggtacattcaggccacctgtgc

SEQ ID NO: 266103 - DNA, 25 bp, Artificial
  Probe
acgtaggtggccaggacaagattcg

SEQ ID NO: 266104 - DNA, 25 bp, Artificial
  Probe
gtgctgcttgtgtttgcaaacaaac

SEQ ID NO: 266105 - DNA, 25 bp, Artificial
  Probe
gactggctggccaatcagctcaaaa

SEQ ID NO: 266106 - DNA, 25 bp, Artificial
  Probe
tgcttgtgtttgcaaacaaacagga

SEQ ID NO: 266107 - DNA, 25 bp, Artificial
  Probe
atatttgtggttgacagcaatgacc

SEQ ID NO: 266108 - DNA, 25 bp, Artificial
  Probe
taggtggccaggacaagattcggcc

SEQ ID NO: 266109 - DNA, 25 bp, Artificial
  Probe
attcggcccctctggagacactact

SEQ ID NO: 266110 - DNA, 25 bp, Artificial
  Probe
tatgaatgctgctgagatcacagac

SEQ ID NO: 266111 - DNA, 25 bp, Artificial
  Probe
ccagaatacccaaggcttgatattt

SEQ ID NO: 266112 - DNA, 25 bp, Artificial
  Probe
agctccgggatgctgtgctgcttgt

SEQ ID NO: 266113 - DNA, 25 bp, Artificial
  Probe
tttgtggttgacagcaatgaccggg

SEQ ID NO: 266114 - DNA, 25 bp, Artificial
  Probe
ctacttccagaatacccaaggcttg

SEQ ID NO: 266115 - DNA, 25 bp, Artificial
  Probe
gtgtttgcaaacaaacaggatttgc

SEQ ID NO: 266116 - DNA, 25 bp, Artificial
  Probe
ttgacagcaatgaccgggagcgagt

SEQ ID NO: 266117 - DNA, 25 bp, Artificial
  Probe
ttgcaaacaaacaggatttgccgaa

SEQ ID NO: 266118 - DNA, 25 bp, Artificial
  Probe
ctccgggatgctgtgctgcttgtgt

SEQ ID NO: 266119 - DNA, 25 bp, Artificial
  Probe
ttcggcccctctggagacactactt

SEQ ID NO: 266120 - DNA, 25 bp, Artificial
  Probe
caggatttgccgaatgctatgaatg

SEQ ID NO: 266121 - DNA, 25 bp, Artificial
  Probe
aatgctgctgagatcacagacaagc

SEQ ID NO: 266122 - DNA, 25 bp, Artificial
  Probe
tgtttgcaaacaaacaggatttgcc

SEQ ID NO: 266123 - DNA, 25 bp, Artificial
  Probe
atgagctccgggatgctgtgctgct

SEQ ID NO: 266124 - DNA, 25 bp, Artificial
  Probe
ctctatgaaggcttggactggctgg

SEQ ID NO: 266125 - DNA, 25 bp, Artificial
  Probe
caattggtacattcaggccacctgt

SEQ ID NO: 266126 - DNA, 25 bp, Artificial
  Probe
atttgccgaatgctatgaatgctgc

SEQ ID NO: 266127 - DNA, 25 bp, Artificial
  Probe
gtggccaggacaagattcggcccct

SEQ ID NO: 266128 - DNA, 25 bp, Artificial
  Probe
acgggctctatgaaggcttggactg

SEQ ID NO: 266129 - DNA, 25 bp, Artificial
  Probe
ccctctggagacactacttccagaa

SEQ ID NO: 266130 - DNA, 25 bp, Artificial
  Probe
ccattaggagctattggttacacca

SEQ ID NO: 266131 - DNA, 25 bp, Artificial
  Probe
ttagctaggttttcagtaggaagcc

SEQ ID NO: 266132 - DNA, 25 bp, Artificial
  Probe
ccatgagttcactaaccctgaatag

SEQ ID NO: 266133 - DNA, 25 bp, Artificial
  Probe
cctggtttccattttgttgagtgga

SEQ ID NO: 266134 - DNA, 25 bp, Artificial
  Probe
cagtaggaagcctggtttccatttt

SEQ ID NO: 266135 - DNA, 25 bp, Artificial
  Probe
ggctcttaatctctgagtcctctct

SEQ ID NO: 266136 - DNA, 25 bp, Artificial
  Probe
agctattggttacaccaaccatgcc

SEQ ID NO: 266137 - DNA, 25 bp, Artificial
  Probe
acccaggtcctctgtgagggcagaa

SEQ ID NO: 266138 - DNA, 25 bp, Artificial
  Probe
cagttactgcaccagatcaacaacg

SEQ ID NO: 266139 - DNA, 25 bp, Artificial
  Probe
ctcattcctgaaattgaaggatttt

SEQ ID NO: 266140 - DNA, 25 bp, Artificial
  Probe
ttttcagtaggaagcctggtttcca

SEQ ID NO: 266141 - DNA, 25 bp, Artificial
  Probe
gttactgcaccagatcaacaacgaa

SEQ ID NO: 266142 - DNA, 25 bp, Artificial
  Probe
attggttacaccaaccatgccattg

SEQ ID NO: 266143 - DNA, 25 bp, Artificial
  Probe
ggttacaccaaccatgccattgcta

SEQ ID NO: 266144 - DNA, 25 bp, Artificial
  Probe
aaagcaggtttctcattcctgaaat

SEQ ID NO: 266145 - DNA, 25 bp, Artificial
  Probe
cattgtcagcccagataagaagatt

SEQ ID NO: 266146 - DNA, 25 bp, Artificial
  Probe
tcaacaacgaaaagcaggtttctca

SEQ ID NO: 266147 - DNA, 25 bp, Artificial
  Probe
tgctgacgagcatgaagtaatactt

SEQ ID NO: 266148 - DNA, 25 bp, Artificial
  Probe
taaccctgaatagttagctaggttt

SEQ ID NO: 266149 - DNA, 25 bp, Artificial
  Probe
ctttcctttcatactagctgtgctg

SEQ ID NO: 266150 - DNA, 25 bp, Artificial
  Probe
ctctgtgagggcagaatggctctta

SEQ ID NO: 266151 - DNA, 25 bp, Artificial
  Probe
aaatgctggaacagaacccaggtcc

SEQ ID NO: 266152 - DNA, 25 bp, Artificial
  Probe
actgcaccagatcaacaacgaaaag

SEQ ID NO: 266153 - DNA, 25 bp, Artificial
  Probe
tctgtgagggcagaatggctcttaa

SEQ ID NO: 266154 - DNA, 25 bp, Artificial
  Probe
gtggatttcaagtcccattaggagc

SEQ ID NO: 266155 - DNA, 25 bp, Artificial
  Probe
ccaggtcctctgtgagggcagaatg

SEQ ID NO: 266156 - DNA, 25 bp, Artificial
  Probe
atttcaagtcccattaggagctatt

SEQ ID NO: 266157 - DNA, 25 bp, Artificial
  Probe
gttaggtgatctttgactcttgatc

SEQ ID NO: 266158 - DNA, 25 bp, Artificial
  Probe
ggttctctcacatccatgagttcac

SEQ ID NO: 266159 - DNA, 25 bp, Artificial
  Probe
ttcttggagccgtgtagctgtggat

SEQ ID NO: 266160 - DNA, 25 bp, Artificial
  Probe
cagaatggctcttaatctctgagtc

SEQ ID NO: 266161 - DNA, 25 bp, Artificial
  Probe
atgaagtaatactttcttggagccg

SEQ ID NO: 266162 - DNA, 25 bp, Artificial
  Probe
agtggatttcaagtcccattaggag

SEQ ID NO: 266163 - DNA, 25 bp, Artificial
  Probe
acagaacccaggtcctctgtgaggg

SEQ ID NO: 266164 - DNA, 25 bp, Artificial
  Probe
cgaaaagcaggtttctcattcctga

SEQ ID NO: 266165 - DNA, 25 bp, Artificial
  Probe
ttgatcattgtcagcccagataaga

SEQ ID NO: 266166 - DNA, 25 bp, Artificial
  Probe
tttgttgagtggatttcaagtccca

SEQ ID NO: 266167 - DNA, 25 bp, Artificial
  Probe
gagccgtgtagctgtggattatgct

SEQ ID NO: 266168 - DNA, 25 bp, Artificial
  Probe
gttcactaaccctgaatagttagct

SEQ ID NO: 266169 - DNA, 25 bp, Artificial
  Probe
atactttcttggagccgtgtagctg

SEQ ID NO: 266170 - DNA, 25 bp, Artificial
  Probe
cagaacccaggtcctctgtgagggc

SEQ ID NO: 266171 - DNA, 25 bp, Artificial
  Probe
gtgatggtttgtggttctctcacat

SEQ ID NO: 266172 - DNA, 25 bp, Artificial
  Probe
gctaggttttcagtaggaagcctgg

SEQ ID NO: 266173 - DNA, 25 bp, Artificial
  Probe
atgagttcactaaccctgaatagtt

SEQ ID NO: 266174 - DNA, 25 bp, Artificial
  Probe
cttggagccgtgtagctgtggatta

SEQ ID NO: 266175 - DNA, 25 bp, Artificial
  Probe
ccgtgtagctgtggattatgctaat

SEQ ID NO: 266176 - DNA, 25 bp, Artificial
  Probe
gcccctccactgaggacgcctctcc

SEQ ID NO: 266177 - DNA, 25 bp, Artificial
  Probe
tcgctgtcagggcaagcccctccac

SEQ ID NO: 266178 - DNA, 25 bp, Artificial
  Probe
tccccaagctgctggaagcgaacat

SEQ ID NO: 266179 - DNA, 25 bp, Artificial
  Probe
gtctccccaagctgctggaagcgaa

SEQ ID NO: 266180 - DNA, 25 bp, Artificial
  Probe
tctcccccaaattccagttcttact

SEQ ID NO: 266181 - DNA, 25 bp, Artificial
  Probe
tcccccaaattccagttcttacttg

SEQ ID NO: 266182 - DNA, 25 bp, Artificial
  Probe
aacattcgctgtcagggcaagcccc

SEQ ID NO: 266183 - DNA, 25 bp, Artificial
  Probe
actgaggacgcctctcccccaaatt

SEQ ID NO: 266184 - DNA, 25 bp, Artificial
  Probe
tcttacttgattttaaccattcaac

SEQ ID NO: 266185 - DNA, 25 bp, Artificial
  Probe
ctggtctccccaagctgctggaagc

SEQ ID NO: 266186 - DNA, 25 bp, Artificial
  Probe
ttgattttaaccattcaacttgctg

SEQ ID NO: 266187 - DNA, 25 bp, Artificial
  Probe
gttggccctggtctccccaagctgc

SEQ ID NO: 266188 - DNA, 25 bp, Artificial
  Probe
caaattccagttcttacttgatttt

SEQ ID NO: 266189 - DNA, 25 bp, Artificial
  Probe
cattcgctgtcagggcaagcccctc

SEQ ID NO: 266190 - DNA, 25 bp, Artificial
  Probe
tcagggcaagcccctccactgagga

SEQ ID NO: 266191 - DNA, 25 bp, Artificial
  Probe
cactgaggacgcctctcccccaaat

SEQ ID NO: 266192 - DNA, 25 bp, Artificial
  Probe
agctgctggaagcgaacattcgctg

SEQ ID NO: 266193 - DNA, 25 bp, Artificial
  Probe
tggccctggtctccccaagctgctg

SEQ ID NO: 266194 - DNA, 25 bp, Artificial
  Probe
ttcgctgtcagggcaagcccctcca

SEQ ID NO: 266195 - DNA, 25 bp, Artificial
  Probe
ggccctggtctccccaagctgctgg

SEQ ID NO: 266196 - DNA, 25 bp, Artificial
  Probe
aagctgctggaagcgaacattcgct

SEQ ID NO: 266197 - DNA, 25 bp, Artificial
  Probe
cagttcttacttgattttaaccatt

SEQ ID NO: 266198 - DNA, 25 bp, Artificial
  Probe
gcgaacattcgctgtcagggcaagc

SEQ ID NO: 266199 - DNA, 25 bp, Artificial
  Probe
gttcttacttgattttaaccattca

SEQ ID NO: 266200 - DNA, 25 bp, Artificial
  Probe
ggtctccccaagctgctggaagcga

SEQ ID NO: 266201 - DNA, 25 bp, Artificial
  Probe
ccccaagctgctggaagcgaacatt

SEQ ID NO: 266202 - DNA, 25 bp, Artificial
  Probe
agcgaacattcgctgtcagggcaag

SEQ ID NO: 266203 - DNA, 25 bp, Artificial
  Probe
gtcagggcaagcccctccactgagg

SEQ ID NO: 266204 - DNA, 25 bp, Artificial
  Probe
ctgctggaagcgaacattcgctgtc

SEQ ID NO: 266205 - DNA, 25 bp, Artificial
  Probe
agcccctccactgaggacgcctctc

SEQ ID NO: 266206 - DNA, 25 bp, Artificial
  Probe
tacttgattttaaccattcaacttg

SEQ ID NO: 266207 - DNA, 25 bp, Artificial
  Probe
tccagttcttacttgattttaacca

SEQ ID NO: 266208 - DNA, 25 bp, Artificial
  Probe
ctggaagcgaacattcgctgtcagg

SEQ ID NO: 266209 - DNA, 25 bp, Artificial
  Probe
cccaagctgctggaagcgaacattc

SEQ ID NO: 266210 - DNA, 25 bp, Artificial
  Probe
ctccccaagctgctggaagcgaaca

SEQ ID NO: 266211 - DNA, 25 bp, Artificial
  Probe
tggtctccccaagctgctggaagcg

SEQ ID NO: 266212 - DNA, 25 bp, Artificial
  Probe
ccccaaattccagttcttacttgat

SEQ ID NO: 266213 - DNA, 25 bp, Artificial
  Probe
cctccactgaggacgcctctccccc

SEQ ID NO: 266214 - DNA, 25 bp, Artificial
  Probe
ccactgaggacgcctctcccccaaa

SEQ ID NO: 266215 - DNA, 25 bp, Artificial
  Probe
ccaagctgctggaagcgaacattcg

SEQ ID NO: 266216 - DNA, 25 bp, Artificial
  Probe
acattcgctgtcagggcaagcccct

SEQ ID NO: 266217 - DNA, 25 bp, Artificial
  Probe
caagctgctggaagcgaacattcgc

SEQ ID NO: 266218 - DNA, 25 bp, Artificial
  Probe
cgaacattcgctgtcagggcaagcc

SEQ ID NO: 266219 - DNA, 25 bp, Artificial
  Probe
gaacattcgctgtcagggcaagccc

SEQ ID NO: 266220 - DNA, 25 bp, Artificial
  Probe
tctccccaagctgctggaagcgaac

SEQ ID NO: 266221 - DNA, 25 bp, Artificial
  Probe
aagcgaacattcgctgtcagggcaa

SEQ ID NO: 266222 - DNA, 25 bp, Artificial
  Probe
atggagatccacgaagatcccaaat

SEQ ID NO: 266223 - DNA, 25 bp, Artificial
  Probe
agaggccaccctaagcccaaggtgg

SEQ ID NO: 266224 - DNA, 25 bp, Artificial
  Probe
gcagggacctattcctgccgtgcct

SEQ ID NO: 266225 - DNA, 25 bp, Artificial
  Probe
caccctaagcccaaggtggtgtgga

SEQ ID NO: 266226 - DNA, 25 bp, Artificial
  Probe
ctaagcccaaggtggtgtggatgaa

SEQ ID NO: 266227 - DNA, 25 bp, Artificial
  Probe
gccacaccagctgtacggtgtctga

SEQ ID NO: 266228 - DNA, 25 bp, Artificial
  Probe
cgccaggtgtctccaagaacacagc

SEQ ID NO: 266229 - DNA, 25 bp, Artificial
  Probe
cagaacctggacaccagtcctggaa

SEQ ID NO: 266230 - DNA, 25 bp, Artificial
  Probe
gaacctggacaccagtcctggaacc

SEQ ID NO: 266231 - DNA, 25 bp, Artificial
  Probe
tcctggaacccttgggatgacagtc

SEQ ID NO: 266232 - DNA, 25 bp, Artificial
  Probe
ggaacccttgggatgacagtcatct

SEQ ID NO: 266233 - DNA, 25 bp, Artificial
  Probe
tccaagaacacagctcggatcctca

SEQ ID NO: 266234 - DNA, 25 bp, Artificial
  Probe
caagaacacagctcggatcctcaag

SEQ ID NO: 266235 - DNA, 25 bp, Artificial
  Probe
gatcctcaagacaggaatcacctta

SEQ ID NO: 266236 - DNA, 25 bp, Artificial
  Probe
accagtcctggaacccttgggatga

SEQ ID NO: 266237 - DNA, 25 bp, Artificial
  Probe
cacagctcggatcctcaagacagga

SEQ ID NO: 266238 - DNA, 25 bp, Artificial
  Probe
gacagctcatcacctgttaagtcat

SEQ ID NO: 266239 - DNA, 25 bp, Artificial
  Probe
ggagatccacgaagatcccaaattc

SEQ ID NO: 266240 - DNA, 25 bp, Artificial
  Probe
caggaatcaccttaaaacccatgga

SEQ ID NO: 266241 - DNA, 25 bp, Artificial
  Probe
cccaaggtggtgtggatgaagaaca

SEQ ID NO: 266242 - DNA, 25 bp, Artificial
  Probe
ccaggtgtctccaagaacacagctc

SEQ ID NO: 266243 - DNA, 25 bp, Artificial
  Probe
tctccaagaacacagctcggatcct

SEQ ID NO: 266244 - DNA, 25 bp, Artificial
  Probe
caaagagcatgatttccggacagcc

SEQ ID NO: 266245 - DNA, 25 bp, Artificial
  Probe
gtcctggaacccttgggatgacagt

SEQ ID NO: 266246 - DNA, 25 bp, Artificial
  Probe
cagtgacagctcatcacctgttaag

SEQ ID NO: 266247 - DNA, 25 bp, Artificial
  Probe
tcgccacaccagctgtacggtgtct

SEQ ID NO: 266248 - DNA, 25 bp, Artificial
  Probe
cagtgactcgccaggtgtctccaag

SEQ ID NO: 266249 - DNA, 25 bp, Artificial
  Probe
ctgtacggtgtctgacctcattgtg

SEQ ID NO: 266250 - DNA, 25 bp, Artificial
  Probe
ctggacaccagtcctggaacccttg

SEQ ID NO: 266251 - DNA, 25 bp, Artificial
  Probe
accctaagcccaaggtggtgtggat

SEQ ID NO: 266252 - DNA, 25 bp, Artificial
  Probe
atcagaacctggacaccagtcctgg

SEQ ID NO: 266253 - DNA, 25 bp, Artificial
  Probe
cctcattgtgggtaatgagtactac

SEQ ID NO: 266254 - DNA, 25 bp, Artificial
  Probe
tcacctgttaagtcatcagaacctg

SEQ ID NO: 266255 - DNA, 25 bp, Artificial
  Probe
ctgtgcagtcagaggccaccctaag

SEQ ID NO: 266256 - DNA, 25 bp, Artificial
  Probe
cacaccagctgtacggtgtctgacc

SEQ ID NO: 266257 - DNA, 25 bp, Artificial
  Probe
ctcattgtgggtaatgagtactact

SEQ ID NO: 266258 - DNA, 25 bp, Artificial
  Probe
gtcatcagaacctggacaccagtcc

SEQ ID NO: 266259 - DNA, 25 bp, Artificial
  Probe
gacaggaatcaccttaaaacccatg

SEQ ID NO: 266260 - DNA, 25 bp, Artificial
  Probe
ctgacctcattgtgggtaatgagta

SEQ ID NO: 266261 - DNA, 25 bp, Artificial
  Probe
aggtgtctccaagaacacagctcgg

SEQ ID NO: 266262 - DNA, 25 bp, Artificial
  Probe
gatgcagggacctattcctgccgtg

SEQ ID NO: 266263 - DNA, 25 bp, Artificial
  Probe
gaggccaccctaagcccaaggtggt

SEQ ID NO: 266264 - DNA, 25 bp, Artificial
  Probe
aacacagctcggatcctcaagacag

SEQ ID NO: 266265 - DNA, 25 bp, Artificial
  Probe
ccagctgtacggtgtctgacctcat

SEQ ID NO: 266266 - DNA, 25 bp, Artificial
  Probe
tcaactgtgcagtcagaggccaccc

SEQ ID NO: 266267 - DNA, 25 bp, Artificial
  Probe
tgtctgacctcattgtgggtaatga

SEQ ID NO: 266268 - DNA, 25 bp, Artificial
  Probe
aaagtgttcagttaattgtgttatt

SEQ ID NO: 266269 - DNA, 25 bp, Artificial
  Probe
gttaattgtgttattccttcagcaa

SEQ ID NO: 266270 - DNA, 25 bp, Artificial
  Probe
tagtcccctggccagccagcctgta

SEQ ID NO: 266271 - DNA, 25 bp, Artificial
  Probe
cagccagcctgtagttatctgtgta

SEQ ID NO: 266272 - DNA, 25 bp, Artificial
  Probe
gtcccctggccagccagcctgtagt

SEQ ID NO: 266273 - DNA, 25 bp, Artificial
  Probe
taggttagtcccctggccagccagc

SEQ ID NO: 266274 - DNA, 25 bp, Artificial
  Probe
ctgtagttatctgtgtacacagttt

SEQ ID NO: 266275 - DNA, 25 bp, Artificial
  Probe
tgtgtacacagtttacaggtacaaa

SEQ ID NO: 266276 - DNA, 25 bp, Artificial
  Probe
gtagttatctgtgtacacagtttac

SEQ ID NO: 266277 - DNA, 25 bp, Artificial
  Probe
cagcctgtagttatctgtgtacaca

SEQ ID NO: 266278 - DNA, 25 bp, Artificial
  Probe
ttatctgtgtacacagtttacaggt

SEQ ID NO: 266279 - DNA, 25 bp, Artificial
  Probe
ggccagccagcctgtagttatctgt

SEQ ID NO: 266280 - DNA, 25 bp, Artificial
  Probe
aggttagtcccctggccagccagcc

SEQ ID NO: 266281 - DNA, 25 bp, Artificial
  Probe
agccagcctgtagttatctgtgtac

SEQ ID NO: 266282 - DNA, 25 bp, Artificial
  Probe
ttgtgttattccttcagcaaatatt

SEQ ID NO: 266283 - DNA, 25 bp, Artificial
  Probe
gccagccagcctgtagttatctgtg

SEQ ID NO: 266284 - DNA, 25 bp, Artificial
  Probe
ctgtgtacacagtttacaggtacaa

SEQ ID NO: 266285 - DNA, 25 bp, Artificial
  Probe
taattgtgttattccttcagcaaat

SEQ ID NO: 266286 - DNA, 25 bp, Artificial
  Probe
tggccagccagcctgtagttatctg

SEQ ID NO: 266287 - DNA, 25 bp, Artificial
  Probe
atttattacagaaaagtgttcagtt

SEQ ID NO: 266288 - DNA, 25 bp, Artificial
  Probe
ccagcctgtagttatctgtgtacac

SEQ ID NO: 266289 - DNA, 25 bp, Artificial
  Probe
tctgtgtacacagtttacaggtaca

SEQ ID NO: 266290 - DNA, 25 bp, Artificial
  Probe
ccagccagcctgtagttatctgtgt

SEQ ID NO: 266291 - DNA, 25 bp, Artificial
  Probe
cctgtagttatctgtgtacacagtt

SEQ ID NO: 266292 - DNA, 25 bp, Artificial
  Probe
aattgtgttattccttcagcaaata

SEQ ID NO: 266293 - DNA, 25 bp, Artificial
  Probe
tcccctggccagccagcctgtagtt

SEQ ID NO: 266294 - DNA, 25 bp, Artificial
  Probe
cccctggccagccagcctgtagtta

SEQ ID NO: 266295 - DNA, 25 bp, Artificial
  Probe
attgtgttattccttcagcaaatat

SEQ ID NO: 266296 - DNA, 25 bp, Artificial
  Probe
ttaattgtgttattccttcagcaaa

SEQ ID NO: 266297 - DNA, 25 bp, Artificial
  Probe
tatctgtgtacacagtttacaggta

SEQ ID NO: 266298 - DNA, 25 bp, Artificial
  Probe
agttatctgtgtacacagtttacag

SEQ ID NO: 266299 - DNA, 25 bp, Artificial
  Probe
ttagtcccctggccagccagcctgt

SEQ ID NO: 266300 - DNA, 25 bp, Artificial
  Probe
gttatctgtgtacacagtttacagg

SEQ ID NO: 266301 - DNA, 25 bp, Artificial
  Probe
atctgtgtacacagtttacaggtac

SEQ ID NO: 266302 - DNA, 25 bp, Artificial
  Probe
ccctggccagccagcctgtagttat

SEQ ID NO: 266303 - DNA, 25 bp, Artificial
  Probe
tgtacacagtttacaggtacaaaaa

SEQ ID NO: 266304 - DNA, 25 bp, Artificial
  Probe
ttaggttagtcccctggccagccag

SEQ ID NO: 266305 - DNA, 25 bp, Artificial
  Probe
gccagcctgtagttatctgtgtaca

SEQ ID NO: 266306 - DNA, 25 bp, Artificial
  Probe
tagttatctgtgtacacagtttaca

SEQ ID NO: 266307 - DNA, 25 bp, Artificial
  Probe
gcctgtagttatctgtgtacacagt

SEQ ID NO: 266308 - DNA, 25 bp, Artificial
  Probe
gtgtacacagtttacaggtacaaaa

SEQ ID NO: 266309 - DNA, 25 bp, Artificial
  Probe
tacacagtttacaggtacaaaaact

SEQ ID NO: 266310 - DNA, 25 bp, Artificial
  Probe
agcctgtagttatctgtgtacacag

SEQ ID NO: 266311 - DNA, 25 bp, Artificial
  Probe
tgtagttatctgtgtacacagttta

SEQ ID NO: 266312 - DNA, 25 bp, Artificial
  Probe
cctggccagccagcctgtagttatc

SEQ ID NO: 266313 - DNA, 25 bp, Artificial
  Probe
gttaggttagtcccctggccagcca

SEQ ID NO: 266314 - DNA, 25 bp, Artificial
  Probe
ttcagtggccgtggtcaaagccgga

SEQ ID NO: 266315 - DNA, 25 bp, Artificial
  Probe
ttctattgcctccaaggtggcatct

SEQ ID NO: 266316 - DNA, 25 bp, Artificial
  Probe
attgtctggcacaggtacgctggtg

SEQ ID NO: 266317 - DNA, 25 bp, Artificial
  Probe
ctattgcctccaaggtggcatcttc

SEQ ID NO: 266318 - DNA, 25 bp, Artificial
  Probe
acgctggtggcttctattgcctcca

SEQ ID NO: 266319 - DNA, 25 bp, Artificial
  Probe
ccatggcattgtctggcacaggtac

SEQ ID NO: 266320 - DNA, 25 bp, Artificial
  Probe
catggcattgtctggcacaggtacg

SEQ ID NO: 266321 - DNA, 25 bp, Artificial
  Probe
tacgctggtggcttctattgcctcc

SEQ ID NO: 266322 - DNA, 25 bp, Artificial
  Probe
cattgtctggcacaggtacgctggt

SEQ ID NO: 266323 - DNA, 25 bp, Artificial
  Probe
gcattgtctggcacaggtacgctgg

SEQ ID NO: 266324 - DNA, 25 bp, Artificial
  Probe
tctattgcctccaaggtggcatctt

SEQ ID NO: 266325 - DNA, 25 bp, Artificial
  Probe
cccatggcattgtctggcacaggta

SEQ ID NO: 266326 - DNA, 25 bp, Artificial
  Probe
acaccggtccccatggcattgtctg

SEQ ID NO: 266327 - DNA, 25 bp, Artificial
  Probe
gtccccatggcattgtctggcacag

SEQ ID NO: 266328 - DNA, 25 bp, Artificial
  Probe
tccccatggcattgtctggcacagg

SEQ ID NO: 266329 - DNA, 25 bp, Artificial
  Probe
ccccatggcattgtctggcacaggt

SEQ ID NO: 266330 - DNA, 25 bp, Artificial
  Probe
tggcatcttcagtggccgtggtcaa

SEQ ID NO: 266331 - DNA, 25 bp, Artificial
  Probe
gctcctatctggaacgcacaccggt

SEQ ID NO: 266332 - DNA, 25 bp, Artificial
  Probe
ccaaggtggcatcttcagtggccgt

SEQ ID NO: 266333 - DNA, 25 bp, Artificial
  Probe
ggtccccatggcattgtctggcaca

SEQ ID NO: 266334 - DNA, 25 bp, Artificial
  Probe
ttgcctccaaggtggcatcttcagt

SEQ ID NO: 266335 - DNA, 25 bp, Artificial
  Probe
gcttctattgcctccaaggtggcat

SEQ ID NO: 266336 - DNA, 25 bp, Artificial
  Probe
tctggcacaggtacgctggtggctt

SEQ ID NO: 266337 - DNA, 25 bp, Artificial
  Probe
tttggctcctatctggaacgcacac

SEQ ID NO: 266338 - DNA, 25 bp, Artificial
  Probe
caaggtggcatcttcagtggccgtg

SEQ ID NO: 266339 - DNA, 25 bp, Artificial
  Probe
cacaggtacgctggtggcttctatt

SEQ ID NO: 266340 - DNA, 25 bp, Artificial
  Probe
gtggcatcttcagtggccgtggtca

SEQ ID NO: 266341 - DNA, 25 bp, Artificial
  Probe
ctccaaggtggcatcttcagtggcc

SEQ ID NO: 266342 - DNA, 25 bp, Artificial
  Probe
cgctggtggcttctattgcctccaa

SEQ ID NO: 266343 - DNA, 25 bp, Artificial
  Probe
ggtttggctcctatctggaacgcac

SEQ ID NO: 266344 - DNA, 25 bp, Artificial
  Probe
ggtggcttctattgcctccaaggtg

SEQ ID NO: 266345 - DNA, 25 bp, Artificial
  Probe
attgcctccaaggtggcatcttcag

SEQ ID NO: 266346 - DNA, 25 bp, Artificial
  Probe
tccaaggtggcatcttcagtggccg

SEQ ID NO: 266347 - DNA, 25 bp, Artificial
  Probe
ctggtggcttctattgcctccaagg

SEQ ID NO: 266348 - DNA, 25 bp, Artificial
  Probe
gtttggctcctatctggaacgcaca

SEQ ID NO: 266349 - DNA, 25 bp, Artificial
  Probe
gcacaggtacgctggtggcttctat

SEQ ID NO: 266350 - DNA, 25 bp, Artificial
  Probe
caccggtccccatggcattgtctgg

SEQ ID NO: 266351 - DNA, 25 bp, Artificial
  Probe
caggtacgctggtggcttctattgc

SEQ ID NO: 266352 - DNA, 25 bp, Artificial
  Probe
gggcggtatccagcaccatcctagc

SEQ ID NO: 266353 - DNA, 25 bp, Artificial
  Probe
tggctcctatctggaacgcacaccg

SEQ ID NO: 266354 - DNA, 25 bp, Artificial
  Probe
ggcggtatccagcaccatcctagct

SEQ ID NO: 266355 - DNA, 25 bp, Artificial
  Probe
tggtggcttctattgcctccaaggt

SEQ ID NO: 266356 - DNA, 25 bp, Artificial
  Probe
gctggtggcttctattgcctccaag

SEQ ID NO: 266357 - DNA, 25 bp, Artificial
  Probe
cttcagtggccgtggtcaaagccgg

SEQ ID NO: 266358 - DNA, 25 bp, Artificial
  Probe
tattgcctccaaggtggcatcttca

SEQ ID NO: 266359 - DNA, 25 bp, Artificial
  Probe
ttggctcctatctggaacgcacacc

SEQ ID NO: 266360 - DNA, 25 bp, Artificial
  Probe
tgaccctcttagtgcccgtgctggt

SEQ ID NO: 266361 - DNA, 25 bp, Artificial
  Probe
agtagacagcgcacagatgcccctc

SEQ ID NO: 266362 - DNA, 25 bp, Artificial
  Probe
tagtccacttggacctctggctcca

SEQ ID NO: 266363 - DNA, 25 bp, Artificial
  Probe
tcttagtgcccgtgctggtggctct

SEQ ID NO: 266364 - DNA, 25 bp, Artificial
  Probe
tgctggtttacattatgtgctgtcg

SEQ ID NO: 266365 - DNA, 25 bp, Artificial
  Probe
gatgccttggtgaccctcttagtgc

SEQ ID NO: 266366 - DNA, 25 bp, Artificial
  Probe
ttcaacgtgcgtacaggagagcggt

SEQ ID NO: 266367 - DNA, 25 bp, Artificial
  Probe
ccagttgcaccactcagagctgctg

SEQ ID NO: 266368 - DNA, 25 bp, Artificial
  Probe
agctgctgacctgtgaacatagcta

SEQ ID NO: 266369 - DNA, 25 bp, Artificial
  Probe
tagacagcgcacagatgcccctcat

SEQ ID NO: 266370 - DNA, 25 bp, Artificial
  Probe
tgctgacctgtgaacatagctacga

SEQ ID NO: 266371 - DNA, 25 bp, Artificial
  Probe
tgctgctcaccctgttgctggttta

SEQ ID NO: 266372 - DNA, 25 bp, Artificial
  Probe
tgcccgtgctggtggctctgctgct

SEQ ID NO: 266373 - DNA, 25 bp, Artificial
  Probe
accactcagagctgctgacctgtga

SEQ ID NO: 266374 - DNA, 25 bp, Artificial
  Probe
cgtgctggtggctctgctgctcacc

SEQ ID NO: 266375 - DNA, 25 bp, Artificial
  Probe
ctgacatccagatgtttcaccactg

SEQ ID NO: 266376 - DNA, 25 bp, Artificial
  Probe
ctccaaacaggcagatggatggtag

SEQ ID NO: 266377 - DNA, 25 bp, Artificial
  Probe
atccacgggaatacggaagagcttc

SEQ ID NO: 266378 - DNA, 25 bp, Artificial
  Probe
gctccagttgcaccactcagagctg

SEQ ID NO: 266379 - DNA, 25 bp, Artificial
  Probe
agttgcaccactcagagctgctgac

SEQ ID NO: 266380 - DNA, 25 bp, Artificial
  Probe
ctccccgagtagacagcgcacagat

SEQ ID NO: 266381 - DNA, 25 bp, Artificial
  Probe
ctggtttacattatgtgctgtcggc

SEQ ID NO: 266382 - DNA, 25 bp, Artificial
  Probe
tggacctctggctccaaacaggcag

SEQ ID NO: 266383 - DNA, 25 bp, Artificial
  Probe
ccccgagtagacagcgcacagatgc

SEQ ID NO: 266384 - DNA, 25 bp, Artificial
  Probe
ttgctggtttacattatgtgctgtc

SEQ ID NO: 266385 - DNA, 25 bp, Artificial
  Probe
tccatccacgggaatacggaagagc

SEQ ID NO: 266386 - DNA, 25 bp, Artificial
  Probe
acctgtgaacatagctacgactgat

SEQ ID NO: 266387 - DNA, 25 bp, Artificial
  Probe
ctggctccaaacaggcagatggatg

SEQ ID NO: 266388 - DNA, 25 bp, Artificial
  Probe
gctggtggctctgctgctcaccctg

SEQ ID NO: 266389 - DNA, 25 bp, Artificial
  Probe
agctcctagtccacttggacctctg

SEQ ID NO: 266390 - DNA, 25 bp, Artificial
  Probe
tcctagtccacttggacctctggct

SEQ ID NO: 266391 - DNA, 25 bp, Artificial
  Probe
gaatacggaagagcttcggcagatg

SEQ ID NO: 266392 - DNA, 25 bp, Artificial
  Probe
gctcctagtccacttggacctctgg

SEQ ID NO: 266393 - DNA, 25 bp, Artificial
  Probe
actgctccatccacgggaatacgga

SEQ ID NO: 266394 - DNA, 25 bp, Artificial
  Probe
ccttggtgaccctcttagtgcccgt

SEQ ID NO: 266395 - DNA, 25 bp, Artificial
  Probe
caccttgcccatgttcaacgtgcgt

SEQ ID NO: 266396 - DNA, 25 bp, Artificial
  Probe
cattatgtgctgtcggcgtgaagga

SEQ ID NO: 266397 - DNA, 25 bp, Artificial
  Probe
tagtgcccgtgctggtggctctgct

SEQ ID NO: 266398 - DNA, 25 bp, Artificial
  Probe
ccatgttcaacgtgcgtacaggaga

SEQ ID NO: 266399 - DNA, 25 bp, Artificial
  Probe
tgcgtacaggagagcggttacctcc

SEQ ID NO: 266400 - DNA, 25 bp, Artificial
  Probe
gagagccctgccagctccagttgca

SEQ ID NO: 266401 - DNA, 25 bp, Artificial
  Probe
ctgttgctggtttacattatgtgct

SEQ ID NO: 266402 - DNA, 25 bp, Artificial
  Probe
tccagttgcaccactcagagctgct

SEQ ID NO: 266403 - DNA, 25 bp, Artificial
  Probe
tacggaagagcttcggcagatggca

SEQ ID NO: 266404 - DNA, 25 bp, Artificial
  Probe
gcaccactcagagctgctgacctgt

SEQ ID NO: 266405 - DNA, 25 bp, Artificial
  Probe
gacatccagatgtttcaccactgct

SEQ ID NO: 266406 - DNA, 25 bp, Artificial
  Probe
ctcctccagttccttgggtaagtgt

SEQ ID NO: 266407 - DNA, 25 bp, Artificial
  Probe
atttgctcttcagttcgtgtgctct

SEQ ID NO: 266408 - DNA, 25 bp, Artificial
  Probe
tgctcttcagttcgtgtgctcttga

SEQ ID NO: 266409 - DNA, 25 bp, Artificial
  Probe
gctcgggacatttgctcttcagttc

SEQ ID NO: 266410 - DNA, 25 bp, Artificial
  Probe
gtgctcttgagcacggtctgtctct

SEQ ID NO: 266411 - DNA, 25 bp, Artificial
  Probe
caatacccgggttctcttctctggg

SEQ ID NO: 266412 - DNA, 25 bp, Artificial
  Probe
ttcagttcgtgtgctcttgagcacg

SEQ ID NO: 266413 - DNA, 25 bp, Artificial
  Probe
ggacatttgctcttcagttcgtgtg

SEQ ID NO: 266414 - DNA, 25 bp, Artificial
  Probe
ctcgggacatttgctcttcagttcg

SEQ ID NO: 266415 - DNA, 25 bp, Artificial
  Probe
cgaccgccttgtttcttgttctctt

SEQ ID NO: 266416 - DNA, 25 bp, Artificial
  Probe
ggttctcttctctggggttctctcg

SEQ ID NO: 266417 - DNA, 25 bp, Artificial
  Probe
gacatttgctcttcagttcgtgtgc

SEQ ID NO: 266418 - DNA, 25 bp, Artificial
  Probe
ttcgtgtgctcttgagcacggtctg

SEQ ID NO: 266419 - DNA, 25 bp, Artificial
  Probe
tcttcagttcgtgtgctcttgagca

SEQ ID NO: 266420 - DNA, 25 bp, Artificial
  Probe
cgtgtgctcttgagcacggtctgtc

SEQ ID NO: 266421 - DNA, 25 bp, Artificial
  Probe
tctggggttctctcgggaagcctcg

SEQ ID NO: 266422 - DNA, 25 bp, Artificial
  Probe
cgggttctcttctctggggttctct

SEQ ID NO: 266423 - DNA, 25 bp, Artificial
  Probe
cagttcgtgtgctcttgagcacggt

SEQ ID NO: 266424 - DNA, 25 bp, Artificial
  Probe
gcaatacccgggttctcttctctgg

SEQ ID NO: 266425 - DNA, 25 bp, Artificial
  Probe
gtgtgctcttgagcacggtctgtct

SEQ ID NO: 266426 - DNA, 25 bp, Artificial
  Probe
tgtgtactcttcctcgaccgccttg

SEQ ID NO: 266427 - DNA, 25 bp, Artificial
  Probe
catttgctcttcagttcgtgtgctc

SEQ ID NO: 266428 - DNA, 25 bp, Artificial
  Probe
tcgtgtgctcttgagcacggtctgt

SEQ ID NO: 266429 - DNA, 25 bp, Artificial
  Probe
gggttctcttctctggggttctctc

SEQ ID NO: 266430 - DNA, 25 bp, Artificial
  Probe
agctcgggacatttgctcttcagtt

SEQ ID NO: 266431 - DNA, 25 bp, Artificial
  Probe
ctcgaccgccttgtttcttgttctc

SEQ ID NO: 266432 - DNA, 25 bp, Artificial
  Probe
gttcgtgtgctcttgagcacggtct

SEQ ID NO: 266433 - DNA, 25 bp, Artificial
  Probe
tcagttcgtgtgctcttgagcacgg

SEQ ID NO: 266434 - DNA, 25 bp, Artificial
  Probe
gaagctcgggacatttgctcttcag

SEQ ID NO: 266435 - DNA, 25 bp, Artificial
  Probe
gtgtactcttcctcgaccgccttgt

SEQ ID NO: 266436 - DNA, 25 bp, Artificial
  Probe
tcctccagttccttgggtaagtgtg

SEQ ID NO: 266437 - DNA, 25 bp, Artificial
  Probe
cctccagttccttgggtaagtgtgt

SEQ ID NO: 266438 - DNA, 25 bp, Artificial
  Probe
tcgaccgccttgtttcttgttctct

SEQ ID NO: 266439 - DNA, 25 bp, Artificial
  Probe
cctcgaccgccttgtttcttgttct

SEQ ID NO: 266440 - DNA, 25 bp, Artificial
  Probe
tcctcgaccgccttgtttcttgttc

SEQ ID NO: 266441 - DNA, 25 bp, Artificial
  Probe
ctgaagctcgggacatttgctcttc

SEQ ID NO: 266442 - DNA, 25 bp, Artificial
  Probe
acatttgctcttcagttcgtgtgct

SEQ ID NO: 266443 - DNA, 25 bp, Artificial
  Probe
tgtgctcttgagcacggtctgtctc

SEQ ID NO: 266444 - DNA, 25 bp, Artificial
  Probe
gggacatttgctcttcagttcgtgt

SEQ ID NO: 266445 - DNA, 25 bp, Artificial
  Probe
aagctcgggacatttgctcttcagt

SEQ ID NO: 266446 - DNA, 25 bp, Artificial
  Probe
cttcagttcgtgtgctcttgagcac

SEQ ID NO: 266447 - DNA, 25 bp, Artificial
  Probe
tgaagctcgggacatttgctcttca

SEQ ID NO: 266448 - DNA, 25 bp, Artificial
  Probe
ttgctcttcagttcgtgtgctcttg

SEQ ID NO: 266449 - DNA, 25 bp, Artificial
  Probe
gctcttcagttcgtgtgctcttgag

SEQ ID NO: 266450 - DNA, 25 bp, Artificial
  Probe
tcgggacatttgctcttcagttcgt

SEQ ID NO: 266451 - DNA, 25 bp, Artificial
  Probe
cgggacatttgctcttcagttcgtg

SEQ ID NO: 266452 - DNA, 25 bp, Artificial
  Probe
tgctttaccggaccaccatggctct

SEQ ID NO: 266453 - DNA, 25 bp, Artificial
  Probe
accgaccaaactgacctccagtgtg

SEQ ID NO: 266454 - DNA, 25 bp, Artificial
  Probe
cagcatatgactatgctgggaagaa

SEQ ID NO: 266455 - DNA, 25 bp, Artificial
  Probe
ctacatggcctcgaagcccaaaaac

SEQ ID NO: 266456 - DNA, 25 bp, Artificial
  Probe
tgacagcatatgactatgctgggaa

SEQ ID NO: 266457 - DNA, 25 bp, Artificial
  Probe
ctctacatggcctcgaagcccaaaa

SEQ ID NO: 266458 - DNA, 25 bp, Artificial
  Probe
gctacagagattcttccagaaggct

SEQ ID NO: 266459 - DNA, 25 bp, Artificial
  Probe
tccagtgtgacagcatatgactatg

SEQ ID NO: 266460 - DNA, 25 bp, Artificial
  Probe
tacagagattcttccagaaggctga

SEQ ID NO: 266461 - DNA, 25 bp, Artificial
  Probe
gaaggctgacggtgtgcccatccac

SEQ ID NO: 266462 - DNA, 25 bp, Artificial
  Probe
aaactgacctccagtgtgacagcat

SEQ ID NO: 266463 - DNA, 25 bp, Artificial
  Probe
gattcttccagaaggctgacggtgt

SEQ ID NO: 266464 - DNA, 25 bp, Artificial
  Probe
gaccaaatgctttaccggaccacca

SEQ ID NO: 266465 - DNA, 25 bp, Artificial
  Probe
accaccatggctctcacagtgggag

SEQ ID NO: 266466 - DNA, 25 bp, Artificial
  Probe
agtgcttgggcttcggaagcctata

SEQ ID NO: 266467 - DNA, 25 bp, Artificial
  Probe
accaaactgacctccagtgtgacag

SEQ ID NO: 266468 - DNA, 25 bp, Artificial
  Probe
gatcgccctctacatggcctcgaag

SEQ ID NO: 266469 - DNA, 25 bp, Artificial
  Probe
atccacctgaaacgaggccttccgg

SEQ ID NO: 266470 - DNA, 25 bp, Artificial
  Probe
cttccagaaggctgacggtgtgccc

SEQ ID NO: 266471 - DNA, 25 bp, Artificial
  Probe
taaagttccagagctacagagattc

SEQ ID NO: 266472 - DNA, 25 bp, Artificial
  Probe
agattcttccagaaggctgacggtg

SEQ ID NO: 266473 - DNA, 25 bp, Artificial
  Probe
tccagaaggctgacggtgtgcccat

SEQ ID NO: 266474 - DNA, 25 bp, Artificial
  Probe
aaggctgacggtgtgcccatccacc

SEQ ID NO: 266475 - DNA, 25 bp, Artificial
  Probe
tgtgacagcatatgactatgctggg

SEQ ID NO: 266476 - DNA, 25 bp, Artificial
  Probe
gaagcaccgcctatcatatttgcca

SEQ ID NO: 266477 - DNA, 25 bp, Artificial
  Probe
ccagagctacagagattcttccaga

SEQ ID NO: 266478 - DNA, 25 bp, Artificial
  Probe
agagattcttccagaaggctgacgg

SEQ ID NO: 266479 - DNA, 25 bp, Artificial
  Probe
tgaaacgaggccttccggaccaaat

SEQ ID NO: 266480 - DNA, 25 bp, Artificial
  Probe
gaccaccatggctctcacagtggga

SEQ ID NO: 266481 - DNA, 25 bp, Artificial
  Probe
aaagttccagagctacagagattct

SEQ ID NO: 266482 - DNA, 25 bp, Artificial
  Probe
gccttccggaccaaatgctttaccg

SEQ ID NO: 266483 - DNA, 25 bp, Artificial
  Probe
atgctttaccggaccaccatggctc

SEQ ID NO: 266484 - DNA, 25 bp, Artificial
  Probe
gagctacagagattcttccagaagg

SEQ ID NO: 266485 - DNA, 25 bp, Artificial
  Probe
ttgggcttcggaagcctatactccg

SEQ ID NO: 266486 - DNA, 25 bp, Artificial
  Probe
gttccagagctacagagattcttcc

SEQ ID NO: 266487 - DNA, 25 bp, Artificial
  Probe
ctccagtgtgacagcatatgactat

SEQ ID NO: 266488 - DNA, 25 bp, Artificial
  Probe
ggtgtgcccatccacctgaaacgag

SEQ ID NO: 266489 - DNA, 25 bp, Artificial
  Probe
gaggccttccggaccaaatgcttta

SEQ ID NO: 266490 - DNA, 25 bp, Artificial
  Probe
ctgacctccagtgtgacagcatatg

SEQ ID NO: 266491 - DNA, 25 bp, Artificial
  Probe
gacggtgtgcccatccacctgaaac

SEQ ID NO: 266492 - DNA, 25 bp, Artificial
  Probe
tccacctgaaacgaggccttccgga

SEQ ID NO: 266493 - DNA, 25 bp, Artificial
  Probe
ccgaccaaactgacctccagtgtga

SEQ ID NO: 266494 - DNA, 25 bp, Artificial
  Probe
tgtgcccatccacctgaaacgaggc

SEQ ID NO: 266495 - DNA, 25 bp, Artificial
  Probe
tgatcgccctctacatggcctcgaa

SEQ ID NO: 266496 - DNA, 25 bp, Artificial
  Probe
cttgggcttcggaagcctatactcc

SEQ ID NO: 266497 - DNA, 25 bp, Artificial
  Probe
gaaacgaggccttccggaccaaatg

SEQ ID NO: 266498 - DNA, 25 bp, Artificial
  Probe
ctcccttgggcgcctatgagggcac

SEQ ID NO: 266499 - DNA, 25 bp, Artificial
  Probe
tggagccagtccagtccagggatgg

SEQ ID NO: 266500 - DNA, 25 bp, Artificial
  Probe
ctgcaagtgtgtgctgtcctgacac

SEQ ID NO: 266501 - DNA, 25 bp, Artificial
  Probe
caatttgaacagactgtcatgaact

SEQ ID NO: 266502 - DNA, 25 bp, Artificial
  Probe
accttcgcatggacaatttgaacag

SEQ ID NO: 266503 - DNA, 25 bp, Artificial
  Probe
tgcaagtgtgtgctgtcctgacacc

SEQ ID NO: 266504 - DNA, 25 bp, Artificial
  Probe
ccagtccagggatggtggacagatg

SEQ ID NO: 266505 - DNA, 25 bp, Artificial
  Probe
tcccttgggcgcctatgagggcaca

SEQ ID NO: 266506 - DNA, 25 bp, Artificial
  Probe
cagtccagtccagggatggtggaca

SEQ ID NO: 266507 - DNA, 25 bp, Artificial
  Probe
ctatgagggcacatgttgaatcaca

SEQ ID NO: 266508 - DNA, 25 bp, Artificial
  Probe
tgggcgcctatgagggcacatgttg

SEQ ID NO: 266509 - DNA, 25 bp, Artificial
  Probe
cccttgggcgcctatgagggcacat

SEQ ID NO: 266510 - DNA, 25 bp, Artificial
  Probe
tatgagggcacatgttgaatcacag

SEQ ID NO: 266511 - DNA, 25 bp, Artificial
  Probe
gctggagccagtccagtccagggat

SEQ ID NO: 266512 - DNA, 25 bp, Artificial
  Probe
aacagactgtcatgaactatccctg

SEQ ID NO: 266513 - DNA, 25 bp, Artificial
  Probe
gggcgcctatgagggcacatgttga

SEQ ID NO: 266514 - DNA, 25 bp, Artificial
  Probe
acaatttgaacagactgtcatgaac

SEQ ID NO: 266515 - DNA, 25 bp, Artificial
  Probe
ccttgggcgcctatgagggcacatg

SEQ ID NO: 266516 - DNA, 25 bp, Artificial
  Probe
gcaagtgtgtgctgtcctgacacca

SEQ ID NO: 266517 - DNA, 25 bp, Artificial
  Probe
gccagtccagtccagggatggtgga

SEQ ID NO: 266518 - DNA, 25 bp, Artificial
  Probe
gaaacgatgctggagccagtccagt

SEQ ID NO: 266519 - DNA, 25 bp, Artificial
  Probe
atttgaacagactgtcatgaactat

SEQ ID NO: 266520 - DNA, 25 bp, Artificial
  Probe
gcctatgagggcacatgttgaatca

SEQ ID NO: 266521 - DNA, 25 bp, Artificial
  Probe
gtccagtccagggatggtggacaga

SEQ ID NO: 266522 - DNA, 25 bp, Artificial
  Probe
aatttgaacagactgtcatgaacta

SEQ ID NO: 266523 - DNA, 25 bp, Artificial
  Probe
aacgatgctggagccagtccagtcc

SEQ ID NO: 266524 - DNA, 25 bp, Artificial
  Probe
agtccagggatggtggacagatgtg

SEQ ID NO: 266525 - DNA, 25 bp, Artificial
  Probe
ttgaacagactgtcatgaactatcc

SEQ ID NO: 266526 - DNA, 25 bp, Artificial
  Probe
ggcacatgttgaatcacagtaaatt

SEQ ID NO: 266527 - DNA, 25 bp, Artificial
  Probe
agtccagtccagggatggtggacag

SEQ ID NO: 266528 - DNA, 25 bp, Artificial
  Probe
ggaaacgatgctggagccagtccag

SEQ ID NO: 266529 - DNA, 25 bp, Artificial
  Probe
tccagtccagggatggtggacagat

SEQ ID NO: 266530 - DNA, 25 bp, Artificial
  Probe
gaacagactgtcatgaactatccct

SEQ ID NO: 266531 - DNA, 25 bp, Artificial
  Probe
ttgggcgcctatgagggcacatgtt

SEQ ID NO: 266532 - DNA, 25 bp, Artificial
  Probe
gaccttcgcatggacaatttgaaca

SEQ ID NO: 266533 - DNA, 25 bp, Artificial
  Probe
cttcgcatggacaatttgaacagac

SEQ ID NO: 266534 - DNA, 25 bp, Artificial
  Probe
ccttcgcatggacaatttgaacaga

SEQ ID NO: 266535 - DNA, 25 bp, Artificial
  Probe
cttgggcgcctatgagggcacatgt

SEQ ID NO: 266536 - DNA, 25 bp, Artificial
  Probe
caagtgtgtgctgtcctgacaccag

SEQ ID NO: 266537 - DNA, 25 bp, Artificial
  Probe
tttgaacagactgtcatgaactatc

SEQ ID NO: 266538 - DNA, 25 bp, Artificial
  Probe
aaacgatgctggagccagtccagtc

SEQ ID NO: 266539 - DNA, 25 bp, Artificial
  Probe
ctggagccagtccagtccagggatg

SEQ ID NO: 266540 - DNA, 25 bp, Artificial
  Probe
cctatgagggcacatgttgaatcac

SEQ ID NO: 266541 - DNA, 25 bp, Artificial
  Probe
cgatgctggagccagtccagtccag

SEQ ID NO: 266542 - DNA, 25 bp, Artificial
  Probe
tgaacagactgtcatgaactatccc

SEQ ID NO: 266543 - DNA, 25 bp, Artificial
  Probe
atgctggagccagtccagtccaggg

SEQ ID NO: 266544 - DNA, 25 bp, Artificial
  Probe
actgcctgctcatctgtgggctgag

SEQ ID NO: 266545 - DNA, 25 bp, Artificial
  Probe
ctgcctgctcatctgtgggctgagg

SEQ ID NO: 266546 - DNA, 25 bp, Artificial
  Probe
cctgctcatctgtgggctgagggaa

SEQ ID NO: 266547 - DNA, 25 bp, Artificial
  Probe
tgctcatctgtgggctgagggaagg

SEQ ID NO: 266548 - DNA, 25 bp, Artificial
  Probe
tgacctgacccgtccttctgctgac

SEQ ID NO: 266549 - DNA, 25 bp, Artificial
  Probe
atctgtgggctgagggaagggagag

SEQ ID NO: 266550 - DNA, 25 bp, Artificial
  Probe
acccgtccttctgctgactgcctgc

SEQ ID NO: 266551 - DNA, 25 bp, Artificial
  Probe
ctgtgggctgagggaagggagagga

SEQ ID NO: 266552 - DNA, 25 bp, Artificial
  Probe
gttcatcttgtgacctgacccgtcc

SEQ ID NO: 266553 - DNA, 25 bp, Artificial
  Probe
tcatcttgtgacctgacccgtcctt

SEQ ID NO: 266554 - DNA, 25 bp, Artificial
  Probe
gcctgctcatctgtgggctgaggga

SEQ ID NO: 266555 - DNA, 25 bp, Artificial
  Probe
tcttgtgacctgacccgtccttctg

SEQ ID NO: 266556 - DNA, 25 bp, Artificial
  Probe
tctgctgactgcctgctcatctgtg

SEQ ID NO: 266557 - DNA, 25 bp, Artificial
  Probe
ttcatcttgtgacctgacccgtcct

SEQ ID NO: 266558 - DNA, 25 bp, Artificial
  Probe
tcatctgtgggctgagggaagggag

SEQ ID NO: 266559 - DNA, 25 bp, Artificial
  Probe
tctgtgggctgagggaagggagagg

SEQ ID NO: 266560 - DNA, 25 bp, Artificial
  Probe
gactgcctgctcatctgtgggctga

SEQ ID NO: 266561 - DNA, 25 bp, Artificial
  Probe
cgttcatcttgtgacctgacccgtc

SEQ ID NO: 266562 - DNA, 25 bp, Artificial
  Probe
ctgctgactgcctgctcatctgtgg

SEQ ID NO: 266563 - DNA, 25 bp, Artificial
  Probe
gctgactgcctgctcatctgtgggc

SEQ ID NO: 266564 - DNA, 25 bp, Artificial
  Probe
tgtgggctgagggaagggagaggag

SEQ ID NO: 266565 - DNA, 25 bp, Artificial
  Probe
ctcatctgtgggctgagggaaggga

SEQ ID NO: 266566 - DNA, 25 bp, Artificial
  Probe
catcttgtgacctgacccgtccttc

SEQ ID NO: 266567 - DNA, 25 bp, Artificial
  Probe
tgtgacctgacccgtccttctgctg

SEQ ID NO: 266568 - DNA, 25 bp, Artificial
  Probe
tccttctgctgactgcctgctcatc

SEQ ID NO: 266569 - DNA, 25 bp, Artificial
  Probe
cgtccttctgctgactgcctgctca

SEQ ID NO: 266570 - DNA, 25 bp, Artificial
  Probe
tgcctgctcatctgtgggctgaggg

SEQ ID NO: 266571 - DNA, 25 bp, Artificial
  Probe
atcttgtgacctgacccgtccttct

SEQ ID NO: 266572 - DNA, 25 bp, Artificial
  Probe
ccgtccttctgctgactgcctgctc

SEQ ID NO: 266573 - DNA, 25 bp, Artificial
  Probe
gtccttctgctgactgcctgctcat

SEQ ID NO: 266574 - DNA, 25 bp, Artificial
  Probe
gacccgtccttctgctgactgcctg

SEQ ID NO: 266575 - DNA, 25 bp, Artificial
  Probe
tgctgactgcctgctcatctgtggg

SEQ ID NO: 266576 - DNA, 25 bp, Artificial
  Probe
ttgtgacctgacccgtccttctgct

SEQ ID NO: 266577 - DNA, 25 bp, Artificial
  Probe
cccgtccttctgctgactgcctgct

SEQ ID NO: 266578 - DNA, 25 bp, Artificial
  Probe
cctgacccgtccttctgctgactgc

SEQ ID NO: 266579 - DNA, 25 bp, Artificial
  Probe
gtgacctgacccgtccttctgctga

SEQ ID NO: 266580 - DNA, 25 bp, Artificial
  Probe
ctgctcatctgtgggctgagggaag

SEQ ID NO: 266581 - DNA, 25 bp, Artificial
  Probe
cttgtgacctgacccgtccttctgc

SEQ ID NO: 266582 - DNA, 25 bp, Artificial
  Probe
ctgactgcctgctcatctgtgggct

SEQ ID NO: 266583 - DNA, 25 bp, Artificial
  Probe
ctgacccgtccttctgctgactgcc

SEQ ID NO: 266584 - DNA, 25 bp, Artificial
  Probe
cttctgctgactgcctgctcatctg

SEQ ID NO: 266585 - DNA, 25 bp, Artificial
  Probe
tgactgcctgctcatctgtgggctg

SEQ ID NO: 266586 - DNA, 25 bp, Artificial
  Probe
catctgtgggctgagggaagggaga

SEQ ID NO: 266587 - DNA, 25 bp, Artificial
  Probe
ccttctgctgactgcctgctcatct

SEQ ID NO: 266588 - DNA, 25 bp, Artificial
  Probe
tgacccgtccttctgctgactgcct

SEQ ID NO: 266589 - DNA, 25 bp, Artificial
  Probe
ttctgctgactgcctgctcatctgt

SEQ ID NO: 266590 - DNA, 25 bp, Artificial
  Probe
cagcaaacagcattgtggcctctcc

SEQ ID NO: 266591 - DNA, 25 bp, Artificial
  Probe
gacgtactctaaaatgagcttcaca

SEQ ID NO: 266592 - DNA, 25 bp, Artificial
  Probe
tgagttcagcaaacagcattgtggc

SEQ ID NO: 266593 - DNA, 25 bp, Artificial
  Probe
tcctcagtggccagagtgtaagtga

SEQ ID NO: 266594 - DNA, 25 bp, Artificial
  Probe
agcattgtggcctctccattgatta

SEQ ID NO: 266595 - DNA, 25 bp, Artificial
  Probe
attgattatatcgatgacagactca

SEQ ID NO: 266596 - DNA, 25 bp, Artificial
  Probe
cgatacgttcagcttcctcagtggc

SEQ ID NO: 266597 - DNA, 25 bp, Artificial
  Probe
tctccattgattatatcgatgacag

SEQ ID NO: 266598 - DNA, 25 bp, Artificial
  Probe
accgatacgttcagcttcctcagtg

SEQ ID NO: 266599 - DNA, 25 bp, Artificial
  Probe
tcttgatggcgctgtgctgagctat

SEQ ID NO: 266600 - DNA, 25 bp, Artificial
  Probe
atcgatgacagactcaaaaacgccc

SEQ ID NO: 266601 - DNA, 25 bp, Artificial
  Probe
caaacagcattgtggcctctccatt

SEQ ID NO: 266602 - DNA, 25 bp, Artificial
  Probe
ttcagcttcctcagtggccagagtg

SEQ ID NO: 266603 - DNA, 25 bp, Artificial
  Probe
gttcagcaaacagcattgtggcctc

SEQ ID NO: 266604 - DNA, 25 bp, Artificial
  Probe
cctgtagctgtcatccgggccacat

SEQ ID NO: 266605 - DNA, 25 bp, Artificial
  Probe
cagtggccagagtgtaagtgagttc

SEQ ID NO: 266606 - DNA, 25 bp, Artificial
  Probe
tgacagactcaaaaacgccctcgtg

SEQ ID NO: 266607 - DNA, 25 bp, Artificial
  Probe
cattgtggcctctccattgattata

SEQ ID NO: 266608 - DNA, 25 bp, Artificial
  Probe
acgttcagcttcctcagtggccaga

SEQ ID NO: 266609 - DNA, 25 bp, Artificial
  Probe
ggccttgacgtactctaaaatgagc

SEQ ID NO: 266610 - DNA, 25 bp, Artificial
  Probe
ttcagcaaacagcattgtggcctct

SEQ ID NO: 266611 - DNA, 25 bp, Artificial
  Probe
atgacagactcaaaaacgccctcgt

SEQ ID NO: 266612 - DNA, 25 bp, Artificial
  Probe
gcattgtggcctctccattgattat

SEQ ID NO: 266613 - DNA, 25 bp, Artificial
  Probe
cagcttcctcagtggccagagtgta

SEQ ID NO: 266614 - DNA, 25 bp, Artificial
  Probe
ttgattatatcgatgacagactcaa

SEQ ID NO: 266615 - DNA, 25 bp, Artificial
  Probe
ggcctctccattgattatatcgatg

SEQ ID NO: 266616 - DNA, 25 bp, Artificial
  Probe
aggccttgacgtactctaaaatgag

SEQ ID NO: 266617 - DNA, 25 bp, Artificial
  Probe
tccattgattatatcgatgacagac

SEQ ID NO: 266618 - DNA, 25 bp, Artificial
  Probe
gcctgtagctgtcatccgggccaca

SEQ ID NO: 266619 - DNA, 25 bp, Artificial
  Probe
gacgttgaacttgttcacaaactgg

SEQ ID NO: 266620 - DNA, 25 bp, Artificial
  Probe
cctcagtggccagagtgtaagtgag

SEQ ID NO: 266621 - DNA, 25 bp, Artificial
  Probe
cttgatggcgctgtgctgagctatg

SEQ ID NO: 266622 - DNA, 25 bp, Artificial
  Probe
agttcagcaaacagcattgtggcct

SEQ ID NO: 266623 - DNA, 25 bp, Artificial
  Probe
ctcagtggccagagtgtaagtgagt

SEQ ID NO: 266624 - DNA, 25 bp, Artificial
  Probe
ttgtggcctctccattgattatatc

SEQ ID NO: 266625 - DNA, 25 bp, Artificial
  Probe
agtgagttcagcaaacagcattgtg

SEQ ID NO: 266626 - DNA, 25 bp, Artificial
  Probe
tatatcgatgacagactcaaaaacg

SEQ ID NO: 266627 - DNA, 25 bp, Artificial
  Probe
tgacgtactctaaaatgagcttcac

SEQ ID NO: 266628 - DNA, 25 bp, Artificial
  Probe
gcctctccattgattatatcgatga

SEQ ID NO: 266629 - DNA, 25 bp, Artificial
  Probe
ccgatacgttcagcttcctcagtgg

SEQ ID NO: 266630 - DNA, 25 bp, Artificial
  Probe
tatcgatgacagactcaaaaacgcc

SEQ ID NO: 266631 - DNA, 25 bp, Artificial
  Probe
ccactgcctgtagctgtcatccggg

SEQ ID NO: 266632 - DNA, 25 bp, Artificial
  Probe
ttgatggcgctgtgctgagctatga

SEQ ID NO: 266633 - DNA, 25 bp, Artificial
  Probe
gccttgacgtactctaaaatgagct

SEQ ID NO: 266634 - DNA, 25 bp, Artificial
  Probe
gcaaacagcattgtggcctctccat

SEQ ID NO: 266635 - DNA, 25 bp, Artificial
  Probe
cgatgacagactcaaaaacgccctc

SEQ ID NO: 266636 - DNA, 25 bp, Artificial
  Probe
tcaagaccctgaacaagaagaggtg

SEQ ID NO: 266637 - DNA, 25 bp, Artificial
  Probe
caggcccggaccagcacaggactaa

SEQ ID NO: 266638 - DNA, 25 bp, Artificial
  Probe
agatggagctgctgacatccaagat

SEQ ID NO: 266639 - DNA, 25 bp, Artificial
  Probe
ctttattcagttctgtacatatggg

SEQ ID NO: 266640 - DNA, 25 bp, Artificial
  Probe
gtacatatggggacattggcccaag

SEQ ID NO: 266641 - DNA, 25 bp, Artificial
  Probe
catggacccagaacatgtggagctg

SEQ ID NO: 266642 - DNA, 25 bp, Artificial
  Probe
ccccatggacccagaacatgtggag

SEQ ID NO: 266643 - DNA, 25 bp, Artificial
  Probe
accctgaacaagaagaggtggaact

SEQ ID NO: 266644 - DNA, 25 bp, Artificial
  Probe
ccagaacatgtggagctggtgaaga

SEQ ID NO: 266645 - DNA, 25 bp, Artificial
  Probe
tgacatccaagatcggatccaggcc

SEQ ID NO: 266646 - DNA, 25 bp, Artificial
  Probe
aagatcggatccaggccctggggct

SEQ ID NO: 266647 - DNA, 25 bp, Artificial
  Probe
cccggaccagcacaggactaacagt

SEQ ID NO: 266648 - DNA, 25 bp, Artificial
  Probe
ccctgcctggaagtgaccactcaga

SEQ ID NO: 266649 - DNA, 25 bp, Artificial
  Probe
agtgaccactcagagagctagctgc

SEQ ID NO: 266650 - DNA, 25 bp, Artificial
  Probe
tattcagttctgtacatatggggac

SEQ ID NO: 266651 - DNA, 25 bp, Artificial
  Probe
atcaagaccctgaacaagaagaggt

SEQ ID NO: 266652 - DNA, 25 bp, Artificial
  Probe
gctgacatccaagatcggatccagg

SEQ ID NO: 266653 - DNA, 25 bp, Artificial
  Probe
gagacccactttattcagttctgta

SEQ ID NO: 266654 - DNA, 25 bp, Artificial
  Probe
tggacccagaacatgtggagctggt

SEQ ID NO: 266655 - DNA, 25 bp, Artificial
  Probe
gacccagaacatgtggagctggtga

SEQ ID NO: 266656 - DNA, 25 bp, Artificial
  Probe
cagttctgtacatatggggacattg

SEQ ID NO: 266657 - DNA, 25 bp, Artificial
  Probe
atccaagatcggatccaggccctgg

SEQ ID NO: 266658 - DNA, 25 bp, Artificial
  Probe
agggagctgcagcattgagcagcca

SEQ ID NO: 266659 - DNA, 25 bp, Artificial
  Probe
agctgctgacatccaagatcggatc

SEQ ID NO: 266660 - DNA, 25 bp, Artificial
  Probe
tggagctgctgacatccaagatcgg

SEQ ID NO: 266661 - DNA, 25 bp, Artificial
  Probe
gctgcagcattgagcagccacagct

SEQ ID NO: 266662 - DNA, 25 bp, Artificial
  Probe
gcagcattgagcagccacagctcca

SEQ ID NO: 266663 - DNA, 25 bp, Artificial
  Probe
ccctgaacaagaagaggtggaactg

SEQ ID NO: 266664 - DNA, 25 bp, Artificial
  Probe
gttctgtacatatggggacattggc

SEQ ID NO: 266665 - DNA, 25 bp, Artificial
  Probe
tcagttctgtacatatggggacatt

SEQ ID NO: 266666 - DNA, 25 bp, Artificial
  Probe
tggaagtgaccactcagagagctag

SEQ ID NO: 266667 - DNA, 25 bp, Artificial
  Probe
cccagaacatgtggagctggtgaag

SEQ ID NO: 266668 - DNA, 25 bp, Artificial
  Probe
tgcagcattgagcagccacagctcc

SEQ ID NO: 266669 - DNA, 25 bp, Artificial
  Probe
ctgctgacatccaagatcggatcca

SEQ ID NO: 266670 - DNA, 25 bp, Artificial
  Probe
acatatggggacattggcccaagcc

SEQ ID NO: 266671 - DNA, 25 bp, Artificial
  Probe
caatcaagaccctgaacaagaagag

SEQ ID NO: 266672 - DNA, 25 bp, Artificial
  Probe
ggatccaggccctggggcttcactt

SEQ ID NO: 266673 - DNA, 25 bp, Artificial
  Probe
ctggaagtgaccactcagagagcta

SEQ ID NO: 266674 - DNA, 25 bp, Artificial
  Probe
cctggaagtgaccactcagagagct

SEQ ID NO: 266675 - DNA, 25 bp, Artificial
  Probe
ccggaccagcacaggactaacagtt

SEQ ID NO: 266676 - DNA, 25 bp, Artificial
  Probe
atggagctgctgacatccaagatcg

SEQ ID NO: 266677 - DNA, 25 bp, Artificial
  Probe
gggagctgcagcattgagcagccac

SEQ ID NO: 266678 - DNA, 25 bp, Artificial
  Probe
aagatggagctgctgacatccaaga

SEQ ID NO: 266679 - DNA, 25 bp, Artificial
  Probe
aggcccggaccagcacaggactaac

SEQ ID NO: 266680 - DNA, 25 bp, Artificial
  Probe
cagagacccactttattcagttctg

SEQ ID NO: 266681 - DNA, 25 bp, Artificial
  Probe
actttattcagttctgtacatatgg

SEQ ID NO: 266682 - DNA, 25 bp, Artificial
  Probe
agagttgctccctatgaaggacgtc

SEQ ID NO: 266683 - DNA, 25 bp, Artificial
  Probe
tggtgccctcctatgcccgggactt

SEQ ID NO: 266684 - DNA, 25 bp, Artificial
  Probe
tggatgtctgcaaagacccgaggcg

SEQ ID NO: 266685 - DNA, 25 bp, Artificial
  Probe
gggtagatccctatgctgaccccaa

SEQ ID NO: 266686 - DNA, 25 bp, Artificial
  Probe
aatctcttccaggtgctgccctggc

SEQ ID NO: 266687 - DNA, 25 bp, Artificial
  Probe
gttcacaagagaagccgcttcattc

SEQ ID NO: 266688 - DNA, 25 bp, Artificial
  Probe
tgcaaagacccgaggcggcaacagt

SEQ ID NO: 266689 - DNA, 25 bp, Artificial
  Probe
gaaggtcaaagttgcctctgaggtg

SEQ ID NO: 266690 - DNA, 25 bp, Artificial
  Probe
gctgaccccaacacatgcaaaggag

SEQ ID NO: 266691 - DNA, 25 bp, Artificial
  Probe
gtcaaagttgcctctgaggtggtca

SEQ ID NO: 266692 - DNA, 25 bp, Artificial
  Probe
agtagtggatgtctgcaaagacccg

SEQ ID NO: 266693 - DNA, 25 bp, Artificial
  Probe
gacccggaaggaggtgtacatcaag

SEQ ID NO: 266694 - DNA, 25 bp, Artificial
  Probe
aagttgcctctgaggtggtcacccc

SEQ ID NO: 266695 - DNA, 25 bp, Artificial
  Probe
cagttggtgccctcctatgcccggg

SEQ ID NO: 266696 - DNA, 25 bp, Artificial
  Probe
gctctgtttgtatccgaggaaggga

SEQ ID NO: 266697 - DNA, 25 bp, Artificial
  Probe
caaacagcacaaggaagagttgctc

SEQ ID NO: 266698 - DNA, 25 bp, Artificial
  Probe
tgaaggacgtcaaagctctgtttgt

SEQ ID NO: 266699 - DNA, 25 bp, Artificial
  Probe
ctatgcccgggacttccacatcaat

SEQ ID NO: 266700 - DNA, 25 bp, Artificial
  Probe
aaggaagagttgctccctatgaagg

SEQ ID NO: 266701 - DNA, 25 bp, Artificial
  Probe
atgctgaccccaacacatgcaaagg

SEQ ID NO: 266702 - DNA, 25 bp, Artificial
  Probe
agacagccacctgcaaacagcacaa

SEQ ID NO: 266703 - DNA, 25 bp, Artificial
  Probe
aacacatgcaaaggagactccgggg

SEQ ID NO: 266704 - DNA, 25 bp, Artificial
  Probe
acagagggaaccacccgagccttgc

SEQ ID NO: 266705 - DNA, 25 bp, Artificial
  Probe
ggccctctcattgttcacaagagaa

SEQ ID NO: 266706 - DNA, 25 bp, Artificial
  Probe
tccgggggccctctcattgttcaca

SEQ ID NO: 266707 - DNA, 25 bp, Artificial
  Probe
aagccagttgtgagagagatgctac

SEQ ID NO: 266708 - DNA, 25 bp, Artificial
  Probe
ccgaggcggcaacagttggtgccct

SEQ ID NO: 266709 - DNA, 25 bp, Artificial
  Probe
gtagatccctatgctgaccccaaca

SEQ ID NO: 266710 - DNA, 25 bp, Artificial
  Probe
cccaacacatgcaaaggagactccg

SEQ ID NO: 266711 - DNA, 25 bp, Artificial
  Probe
agttggtgccctcctatgcccggga

SEQ ID NO: 266712 - DNA, 25 bp, Artificial
  Probe
aggacgtcaaagctctgtttgtatc

SEQ ID NO: 266713 - DNA, 25 bp, Artificial
  Probe
ggcaacagttggtgccctcctatgc

SEQ ID NO: 266714 - DNA, 25 bp, Artificial
  Probe
cattcaagttggtgtgatcagctgg

SEQ ID NO: 266715 - DNA, 25 bp, Artificial
  Probe
ttggtgccctcctatgcccgggact

SEQ ID NO: 266716 - DNA, 25 bp, Artificial
  Probe
tctcattgttcacaagagaagccgc

SEQ ID NO: 266717 - DNA, 25 bp, Artificial
  Probe
accccaacacatgcaaaggagactc

SEQ ID NO: 266718 - DNA, 25 bp, Artificial
  Probe
atgtctgcaaagacccgaggcggca

SEQ ID NO: 266719 - DNA, 25 bp, Artificial
  Probe
aggaagagttgctccctatgaagga

SEQ ID NO: 266720 - DNA, 25 bp, Artificial
  Probe
aagagaagccgcttcattcaagttg

SEQ ID NO: 266721 - DNA, 25 bp, Artificial
  Probe
ccccaggttcctgtgcaccggaggg

SEQ ID NO: 266722 - DNA, 25 bp, Artificial
  Probe
acccgaggcggcaacagttggtgcc

SEQ ID NO: 266723 - DNA, 25 bp, Artificial
  Probe
aagctgacccggaaggaggtgtaca

SEQ ID NO: 266724 - DNA, 25 bp, Artificial
  Probe
tatgctgaccccaacacatgcaaag

SEQ ID NO: 266725 - DNA, 25 bp, Artificial
  Probe
attgttcacaagagaagccgcttca

SEQ ID NO: 266726 - DNA, 25 bp, Artificial
  Probe
ccctatgaaggacgtcaaagctctg

SEQ ID NO: 266727 - DNA, 25 bp, Artificial
  Probe
gagccttgcggcttcctcagacagc

SEQ ID NO: 266728 - DNA, 25 bp, Artificial
  Probe
ttgcctggtaccaaaggtgataagg

SEQ ID NO: 266729 - DNA, 25 bp, Artificial
  Probe
agaggattgcctggtaccaaaggtg

SEQ ID NO: 266730 - DNA, 25 bp, Artificial
  Probe
ccagggtttcccaggaatgagagga

SEQ ID NO: 266731 - DNA, 25 bp, Artificial
  Probe
gatcacctgggctctctgctccgat

SEQ ID NO: 266732 - DNA, 25 bp, Artificial
  Probe
tcctgctcgcactgagaggaaggac

SEQ ID NO: 266733 - DNA, 25 bp, Artificial
  Probe
ttgaagctcctgctcgcactgagag

SEQ ID NO: 266734 - DNA, 25 bp, Artificial
  Probe
ccgatagcccgagaaggacgccagg

SEQ ID NO: 266735 - DNA, 25 bp, Artificial
  Probe
ggacgccagggtttcccaggaatga

SEQ ID NO: 266736 - DNA, 25 bp, Artificial
  Probe
gtttcccaggaatgagaggattgcc

SEQ ID NO: 266737 - DNA, 25 bp, Artificial
  Probe
ccagcaaggcattcctgggatccct

SEQ ID NO: 266738 - DNA, 25 bp, Artificial
  Probe
tcctcaagggcctccaggttatggc

SEQ ID NO: 266739 - DNA, 25 bp, Artificial
  Probe
aggattgcctggtaccaaaggtgat

SEQ ID NO: 266740 - DNA, 25 bp, Artificial
  Probe
tgggctctctgctccgatagcccga

SEQ ID NO: 266741 - DNA, 25 bp, Artificial
  Probe
ggtttcccaggaatgagaggattgc

SEQ ID NO: 266742 - DNA, 25 bp, Artificial
  Probe
agcaaggcattcctgggatccctgg

SEQ ID NO: 266743 - DNA, 25 bp, Artificial
  Probe
gattgcctggtaccaaaggtgataa

SEQ ID NO: 266744 - DNA, 25 bp, Artificial
  Probe
gttgaagctcctgctcgcactgaga

SEQ ID NO: 266745 - DNA, 25 bp, Artificial
  Probe
gctccaggatcacctgggctctctg

SEQ ID NO: 266746 - DNA, 25 bp, Artificial
  Probe
tccgatagcccgagaaggacgccag

SEQ ID NO: 266747 - DNA, 25 bp, Artificial
  Probe
aggacgccagggtttcccaggaatg

SEQ ID NO: 266748 - DNA, 25 bp, Artificial
  Probe
tgcctggtaccaaaggtgataaggg

SEQ ID NO: 266749 - DNA, 25 bp, Artificial
  Probe
gtgctccaggatcacctgggctctc

SEQ ID NO: 266750 - DNA, 25 bp, Artificial
  Probe
ctctgctccgatagcccgagaagga

SEQ ID NO: 266751 - DNA, 25 bp, Artificial
  Probe
cgaggcgtgctccaggatcacctgg

SEQ ID NO: 266752 - DNA, 25 bp, Artificial
  Probe
ttcccaggaatgagaggattgcctg

SEQ ID NO: 266753 - DNA, 25 bp, Artificial
  Probe
cagggtttcccaggaatgagaggat

SEQ ID NO: 266754 - DNA, 25 bp, Artificial
  Probe
tcacctgggctctctgctccgatag

SEQ ID NO: 266755 - DNA, 25 bp, Artificial
  Probe
ggcgtgctccaggatcacctgggct

SEQ ID NO: 266756 - DNA, 25 bp, Artificial
  Probe
ccttttggttgaagctcctgctcgc

SEQ ID NO: 266757 - DNA, 25 bp, Artificial
  Probe
cctggtaccaaaggtgataagggag

SEQ ID NO: 266758 - DNA, 25 bp, Artificial
  Probe
cttttggttgaagctcctgctcgca

SEQ ID NO: 266759 - DNA, 25 bp, Artificial
  Probe
aggcgtgctccaggatcacctgggc

SEQ ID NO: 266760 - DNA, 25 bp, Artificial
  Probe
tccaggtcctcaagggcctccaggt

SEQ ID NO: 266761 - DNA, 25 bp, Artificial
  Probe
tagcccgagaaggacgccagggttt

SEQ ID NO: 266762 - DNA, 25 bp, Artificial
  Probe
ggcacgaggcgtgctccaggatcac

SEQ ID NO: 266763 - DNA, 25 bp, Artificial
  Probe
tgaagctcctgctcgcactgagagg

SEQ ID NO: 266764 - DNA, 25 bp, Artificial
  Probe
gacgccagggtttcccaggaatgag

SEQ ID NO: 266765 - DNA, 25 bp, Artificial
  Probe
ggttgaagctcctgctcgcactgag

SEQ ID NO: 266766 - DNA, 25 bp, Artificial
  Probe
tttggttgaagctcctgctcgcact

SEQ ID NO: 266767 - DNA, 25 bp, Artificial
  Probe
atagcccgagaaggacgccagggtt

SEQ ID NO: 266768 - DNA, 25 bp, Artificial
  Probe
ctctctgctccgatagcccgagaag

SEQ ID NO: 266769 - DNA, 25 bp, Artificial
  Probe
tccaggatcacctgggctctctgct

SEQ ID NO: 266770 - DNA, 25 bp, Artificial
  Probe
cctcaagggcctccaggttatggca

SEQ ID NO: 266771 - DNA, 25 bp, Artificial
  Probe
tctctgctccgatagcccgagaagg

SEQ ID NO: 266772 - DNA, 25 bp, Artificial
  Probe
cgtgctccaggatcacctgggctct

SEQ ID NO: 266773 - DNA, 25 bp, Artificial
  Probe
cacgaggcgtgctccaggatcacct

SEQ ID NO: 266774 - DNA, 25 bp, Artificial
  Probe
tctggcctttctcctggaaatagct

SEQ ID NO: 266775 - DNA, 25 bp, Artificial
  Probe
ggatgtcgacccaggaatagtggac

SEQ ID NO: 266776 - DNA, 25 bp, Artificial
  Probe
tcctggaaatagctggggcatttgg

SEQ ID NO: 266777 - DNA, 25 bp, Artificial
  Probe
tcctcacaaaagatagagccagggc

SEQ ID NO: 266778 - DNA, 25 bp, Artificial
  Probe
tgattcctcctcacaaaagatagag

SEQ ID NO: 266779 - DNA, 25 bp, Artificial
  Probe
tcaggactgaggtggcatttctatg

SEQ ID NO: 266780 - DNA, 25 bp, Artificial
  Probe
ccttgggagaacctgtttgtcagga

SEQ ID NO: 266781 - DNA, 25 bp, Artificial
  Probe
gactgaggtggcatttctatgtgca

SEQ ID NO: 266782 - DNA, 25 bp, Artificial
  Probe
agctgggatgccacctttctggcct

SEQ ID NO: 266783 - DNA, 25 bp, Artificial
  Probe
catttgggtggctttcaagactggg

SEQ ID NO: 266784 - DNA, 25 bp, Artificial
  Probe
ccgtggtttctacttctcctgggat

SEQ ID NO: 266785 - DNA, 25 bp, Artificial
  Probe
ggctttcaagactggggcatggtaa

SEQ ID NO: 266786 - DNA, 25 bp, Artificial
  Probe
cctttctggcctttctcctggaaat

SEQ ID NO: 266787 - DNA, 25 bp, Artificial
  Probe
gttgattcctcctcacaaaagatag

SEQ ID NO: 266788 - DNA, 25 bp, Artificial
  Probe
ttggtgtttcccttcctaagtggct

SEQ ID NO: 266789 - DNA, 25 bp, Artificial
  Probe
gcagcaacccttggtgtttcccttc

SEQ ID NO: 266790 - DNA, 25 bp, Artificial
  Probe
gcatggtaaaccagggccagagttg

SEQ ID NO: 266791 - DNA, 25 bp, Artificial
  Probe
ggatgccacctttctggcctttctc

SEQ ID NO: 266792 - DNA, 25 bp, Artificial
  Probe
acttctcctgggatgtcgacccagg

SEQ ID NO: 266793 - DNA, 25 bp, Artificial
  Probe
caagactggggcatggtaaaccagg

SEQ ID NO: 266794 - DNA, 25 bp, Artificial
  Probe
ctatgtgcagcaacccttggtgttt

SEQ ID NO: 266795 - DNA, 25 bp, Artificial
  Probe
tgaggtggcatttctatgtgcagca

SEQ ID NO: 266796 - DNA, 25 bp, Artificial
  Probe
ctcctgggatgtcgacccaggaata

SEQ ID NO: 266797 - DNA, 25 bp, Artificial
  Probe
cgacccaggaatagtggacatggtc

SEQ ID NO: 266798 - DNA, 25 bp, Artificial
  Probe
gtttcccttcctaagtggctctggg

SEQ ID NO: 266799 - DNA, 25 bp, Artificial
  Probe
cctgggatgtcgacccaggaatagt

SEQ ID NO: 266800 - DNA, 25 bp, Artificial
  Probe
tcctcctcacaaaagatagagccag

SEQ ID NO: 266801 - DNA, 25 bp, Artificial
  Probe
tggctttcaagactggggcatggta

SEQ ID NO: 266802 - DNA, 25 bp, Artificial
  Probe
agaacctgtttgtcaggactgaggt

SEQ ID NO: 266803 - DNA, 25 bp, Artificial
  Probe
tttgtcaggactgaggtggcatttc

SEQ ID NO: 266804 - DNA, 25 bp, Artificial
  Probe
ccacaacgtgtgctgtgtgattgtg

SEQ ID NO: 266805 - DNA, 25 bp, Artificial
  Probe
ccattgctgtcttccccagctggga

SEQ ID NO: 266806 - DNA, 25 bp, Artificial
  Probe
agccagggcgagtgaatcaggcaaa

SEQ ID NO: 266807 - DNA, 25 bp, Artificial
  Probe
ctcacaaaagatagagccagggcga

SEQ ID NO: 266808 - DNA, 25 bp, Artificial
  Probe
tggcctttctcctggaaatagctgg

SEQ ID NO: 266809 - DNA, 25 bp, Artificial
  Probe
gattcctcctcacaaaagatagagc

SEQ ID NO: 266810 - DNA, 25 bp, Artificial
  Probe
cttctcctgggatgtcgacccagga

SEQ ID NO: 266811 - DNA, 25 bp, Artificial
  Probe
ggtgttgattcctcctcacaaaaga

SEQ ID NO: 266812 - DNA, 25 bp, Artificial
  Probe
gtgcagcaacccttggtgtttccct

SEQ ID NO: 266813 - DNA, 25 bp, Artificial
  Probe
gtgttgattcctcctcacaaaagat

SEQ ID NO: 266814 - DNA, 25 bp, Artificial
  Probe
tgaatcaggcaaagtgcttaccaca

SEQ ID NO: 266815 - DNA, 25 bp, Artificial
  Probe
ttctacttctcctgggatgtcgacc

SEQ ID NO: 266816 - DNA, 25 bp, Artificial
  Probe
gctgtcttccccagctgggatgcca

SEQ ID NO: 266817 - DNA, 25 bp, Artificial
  Probe
aggtggcatttctatgtgcagcaac

SEQ ID NO: 266818 - DNA, 25 bp, Artificial
  Probe
atagtggacatggtcacatcctctg

SEQ ID NO: 266819 - DNA, 25 bp, Artificial
  Probe
atcaggcaaagtgcttaccacaacg

SEQ ID NO: 266820 - DNA, 25 bp, Artificial
  Probe
gtaaattggtctgtggcacagtgac

SEQ ID NO: 266821 - DNA, 25 bp, Artificial
  Probe
ctggctattaagagcttggacagtc

SEQ ID NO: 266822 - DNA, 25 bp, Artificial
  Probe
caaagaggtcagttgggctagcatg

SEQ ID NO: 266823 - DNA, 25 bp, Artificial
  Probe
ccagccacctgtgtttggaacttcc

SEQ ID NO: 266824 - DNA, 25 bp, Artificial
  Probe
cataatctactgtgcgggtaaccac

SEQ ID NO: 266825 - DNA, 25 bp, Artificial
  Probe
tggtctcctacagtgcctctgctac

SEQ ID NO: 266826 - DNA, 25 bp, Artificial
  Probe
ctattaagagcttggacagtcagtg

SEQ ID NO: 266827 - DNA, 25 bp, Artificial
  Probe
gtgacaagtttccactatggaagac

SEQ ID NO: 266828 - DNA, 25 bp, Artificial
  Probe
cagctccagtgcaggcctccgttgg

SEQ ID NO: 266829 - DNA, 25 bp, Artificial
  Probe
catgctttcctgttaagccccagct

SEQ ID NO: 266830 - DNA, 25 bp, Artificial
  Probe
cgttagctgtgtgctaggtgacaag

SEQ ID NO: 266831 - DNA, 25 bp, Artificial
  Probe
tgcgggtaaccacctcaaacctgta

SEQ ID NO: 266832 - DNA, 25 bp, Artificial
  Probe
gacgttagctgtgtgctaggtgaca

SEQ ID NO: 266833 - DNA, 25 bp, Artificial
  Probe
taggtgacaagtttccactatggaa

SEQ ID NO: 266834 - DNA, 25 bp, Artificial
  Probe
gcaggcctccgttggcacactggct

SEQ ID NO: 266835 - DNA, 25 bp, Artificial
  Probe
tgcaaaccagctccagtgcaggcct

SEQ ID NO: 266836 - DNA, 25 bp, Artificial
  Probe
gctattaagagcttggacagtcagt

SEQ ID NO: 266837 - DNA, 25 bp, Artificial
  Probe
cggccctgtggtcgtagcatagcat

SEQ ID NO: 266838 - DNA, 25 bp, Artificial
  Probe
tggctcccagccacctgtgtttgga

SEQ ID NO: 266839 - DNA, 25 bp, Artificial
  Probe
ggtaaccacctcaaacctgtaatga

SEQ ID NO: 266840 - DNA, 25 bp, Artificial
  Probe
ccactatggaagactagtgaacaga

SEQ ID NO: 266841 - DNA, 25 bp, Artificial
  Probe
cgtagcatagcatcaaaagtttaca

SEQ ID NO: 266842 - DNA, 25 bp, Artificial
  Probe
tacagtgcctctgctacccatgctt

SEQ ID NO: 266843 - DNA, 25 bp, Artificial
  Probe
ggccaaagtgctgatcaggaatgtg

SEQ ID NO: 266844 - DNA, 25 bp, Artificial
  Probe
tgcaggcctccgttggcacactggc

SEQ ID NO: 266845 - DNA, 25 bp, Artificial
  Probe
agtttccactatggaagactagtga

SEQ ID NO: 266846 - DNA, 25 bp, Artificial
  Probe
gtgaacagagccaagtgttgaaagc

SEQ ID NO: 266847 - DNA, 25 bp, Artificial
  Probe
taaattggtctgtggcacagtgaca

SEQ ID NO: 266848 - DNA, 25 bp, Artificial
  Probe
ctgagtctggtctcctacagtgcct

SEQ ID NO: 266849 - DNA, 25 bp, Artificial
  Probe
agctgtgtgctaggtgacaagtttc

SEQ ID NO: 266850 - DNA, 25 bp, Artificial
  Probe
gggtaaccacctcaaacctgtaatg

SEQ ID NO: 266851 - DNA, 25 bp, Artificial
  Probe
gctacccatgctttcctgttaagcc

SEQ ID NO: 266852 - DNA, 25 bp, Artificial
  Probe
ctactgtgcgggtaaccacctcaaa

SEQ ID NO: 266853 - DNA, 25 bp, Artificial
  Probe
ctaggtgacaagtttccactatgga

SEQ ID NO: 266854 - DNA, 25 bp, Artificial
  Probe
ccaaagaggtcagttgggctagcat

SEQ ID NO: 266855 - DNA, 25 bp, Artificial
  Probe
atgctttcctgttaagccccagctc

SEQ ID NO: 266856 - DNA, 25 bp, Artificial
  Probe
tgtgtgctaggtgacaagtttccac

SEQ ID NO: 266857 - DNA, 25 bp, Artificial
  Probe
ccagtgtgtttgctcataatctact

SEQ ID NO: 266858 - DNA, 25 bp, Artificial
  Probe
taagggaccctgcaaaccagctcca

SEQ ID NO: 266859 - DNA, 25 bp, Artificial
  Probe
aagctgtaggccaaagtgctgatca

SEQ ID NO: 266860 - DNA, 25 bp, Artificial
  Probe
acagtgcctctgctacccatgcttt

SEQ ID NO: 266861 - DNA, 25 bp, Artificial
  Probe
catcctgcccaccagtgtgtttgct

SEQ ID NO: 266862 - DNA, 25 bp, Artificial
  Probe
acagagccaagtgttgaaagctgta

SEQ ID NO: 266863 - DNA, 25 bp, Artificial
  Probe
actagtgaacagagccaagtgttga

SEQ ID NO: 266864 - DNA, 25 bp, Artificial
  Probe
cctcaaacctgtaatgagttataag

SEQ ID NO: 266865 - DNA, 25 bp, Artificial
  Probe
ctgctacccatgctttcctgttaag

SEQ ID NO: 266866 - DNA, 25 bp, Artificial
  Probe
cctgcggagcgtgtggatacagctc

SEQ ID NO: 266867 - DNA, 25 bp, Artificial
  Probe
cttggagaccacagcctgcggagcg

SEQ ID NO: 266868 - DNA, 25 bp, Artificial
  Probe
ctgtccctctgcaaggaaggcagct

SEQ ID NO: 266869 - DNA, 25 bp, Artificial
  Probe
ctctggccctggagaagcagccgtg

SEQ ID NO: 266870 - DNA, 25 bp, Artificial
  Probe
tccctctgcaaggaaggcagctacc

SEQ ID NO: 266871 - DNA, 25 bp, Artificial
  Probe
gctaagcgagaccagggctcaggac

SEQ ID NO: 266872 - DNA, 25 bp, Artificial
  Probe
cgtgtggatacagctctggccctgg

SEQ ID NO: 266873 - DNA, 25 bp, Artificial
  Probe
gtggtttcatggtcccctgagccga

SEQ ID NO: 266874 - DNA, 25 bp, Artificial
  Probe
tgtggatacagctctggccctggag

SEQ ID NO: 266875 - DNA, 25 bp, Artificial
  Probe
ggaaggcagctaccttgtgcggcta

SEQ ID NO: 266876 - DNA, 25 bp, Artificial
  Probe
agcgtgtggatacagctctggccct

SEQ ID NO: 266877 - DNA, 25 bp, Artificial
  Probe
tcatggtcccctgagccgagtggag

SEQ ID NO: 266878 - DNA, 25 bp, Artificial
  Probe
ccgtggtttcatggtcccctgagcc

SEQ ID NO: 266879 - DNA, 25 bp, Artificial
  Probe
ccttctgtccctctgcaaggaaggc

SEQ ID NO: 266880 - DNA, 25 bp, Artificial
  Probe
catgctccaccaaggagccttggag

SEQ ID NO: 266881 - DNA, 25 bp, Artificial
  Probe
cacagcctgcggagcgtgtggatac

SEQ ID NO: 266882 - DNA, 25 bp, Artificial
  Probe
tgtccctctgcaaggaaggcagcta

SEQ ID NO: 266883 - DNA, 25 bp, Artificial
  Probe
gccttggagaccacagcctgcggag

SEQ ID NO: 266884 - DNA, 25 bp, Artificial
  Probe
ccttgtgcggctaagcgagaccagg

SEQ ID NO: 266885 - DNA, 25 bp, Artificial
  Probe
tggatacagctctggccctggagaa

SEQ ID NO: 266886 - DNA, 25 bp, Artificial
  Probe
ggcagctaccttgtgcggctaagcg

SEQ ID NO: 266887 - DNA, 25 bp, Artificial
  Probe
accttgtgcggctaagcgagaccag

SEQ ID NO: 266888 - DNA, 25 bp, Artificial
  Probe
ctgcggagcgtgtggatacagctct

SEQ ID NO: 266889 - DNA, 25 bp, Artificial
  Probe
cgtggtttcatggtcccctgagccg

SEQ ID NO: 266890 - DNA, 25 bp, Artificial
  Probe
caccaaggagccttggagaccacag

SEQ ID NO: 266891 - DNA, 25 bp, Artificial
  Probe
cagctctggccctggagaagcagcc

SEQ ID NO: 266892 - DNA, 25 bp, Artificial
  Probe
gctctggccctggagaagcagccgt

SEQ ID NO: 266893 - DNA, 25 bp, Artificial
  Probe
aggagccttggagaccacagcctgc

SEQ ID NO: 266894 - DNA, 25 bp, Artificial
  Probe
accttctgtccctctgcaaggaagg

SEQ ID NO: 266895 - DNA, 25 bp, Artificial
  Probe
tgcggctaagcgagaccagggctca

SEQ ID NO: 266896 - DNA, 25 bp, Artificial
  Probe
tggaggccgagaaccttctgtccct

SEQ ID NO: 266897 - DNA, 25 bp, Artificial
  Probe
ccctggagaagcagccgtggtttca

SEQ ID NO: 266898 - DNA, 25 bp, Artificial
  Probe
agcagccgtggtttcatggtcccct

SEQ ID NO: 266899 - DNA, 25 bp, Artificial
  Probe
ccatgctccaccaaggagccttgga

SEQ ID NO: 266900 - DNA, 25 bp, Artificial
  Probe
gagccttggagaccacagcctgcgg

SEQ ID NO: 266901 - DNA, 25 bp, Artificial
  Probe
aagcagccgtggtttcatggtcccc

SEQ ID NO: 266902 - DNA, 25 bp, Artificial
  Probe
ttctgtccctctgcaaggaaggcag

SEQ ID NO: 266903 - DNA, 25 bp, Artificial
  Probe
gcagccgtggtttcatggtcccctg

SEQ ID NO: 266904 - DNA, 25 bp, Artificial
  Probe
ccctctgcaaggaaggcagctacct

SEQ ID NO: 266905 - DNA, 25 bp, Artificial
  Probe
accaaggagccttggagaccacagc

SEQ ID NO: 266906 - DNA, 25 bp, Artificial
  Probe
gcagctaccttgtgcggctaagcga

SEQ ID NO: 266907 - DNA, 25 bp, Artificial
  Probe
aggaaggcagctaccttgtgcggct

SEQ ID NO: 266908 - DNA, 25 bp, Artificial
  Probe
gccctggagaagcagccgtggtttc

SEQ ID NO: 266909 - DNA, 25 bp, Artificial
  Probe
caaggagccttggagaccacagcct

SEQ ID NO: 266910 - DNA, 25 bp, Artificial
  Probe
ggaggccgagaaccttctgtccctc

SEQ ID NO: 266911 - DNA, 25 bp, Artificial
  Probe
ttcatggtcccctgagccgagtgga

SEQ ID NO: 266912 - DNA, 25 bp, Artificial
  Probe
gatctttgtatcctcaaagcccagc

SEQ ID NO: 266913 - DNA, 25 bp, Artificial
  Probe
agtccgcgctaaggtgaccgtgccc

SEQ ID NO: 266914 - DNA, 25 bp, Artificial
  Probe
catagaagtgtactttctgtctctc

SEQ ID NO: 266915 - DNA, 25 bp, Artificial
  Probe
tagaagtgtactttctgtctctcca

SEQ ID NO: 266916 - DNA, 25 bp, Artificial
  Probe
ctgagtccgcgctaaggtgaccgtg

SEQ ID NO: 266917 - DNA, 25 bp, Artificial
  Probe
tgtaactatacctggctgctcactg

SEQ ID NO: 266918 - DNA, 25 bp, Artificial
  Probe
tctgtaagtccctgagtccgcgcta

SEQ ID NO: 266919 - DNA, 25 bp, Artificial
  Probe
cgcttctgtaagtccctgagtccgc

SEQ ID NO: 266920 - DNA, 25 bp, Artificial
  Probe
gccctttttctgtaactatacctgg

SEQ ID NO: 266921 - DNA, 25 bp, Artificial
  Probe
gcagtatttatcttaggctgtcttt

SEQ ID NO: 266922 - DNA, 25 bp, Artificial
  Probe
tcctcaaagcccagcacatagtaag

SEQ ID NO: 266923 - DNA, 25 bp, Artificial
  Probe
gctcactgcgctgctatgagactag

SEQ ID NO: 266924 - DNA, 25 bp, Artificial
  Probe
tgacagctactgtacattatgtatg

SEQ ID NO: 266925 - DNA, 25 bp, Artificial
  Probe
gtctctccatgctgaaaccctttcg

SEQ ID NO: 266926 - DNA, 25 bp, Artificial
  Probe
ggctcactgccctttttctgtaact

SEQ ID NO: 266927 - DNA, 25 bp, Artificial
  Probe
ccgcgcttctgtaagtccctgagtc

SEQ ID NO: 266928 - DNA, 25 bp, Artificial
  Probe
ctactgtacattatgtatgaaatgc

SEQ ID NO: 266929 - DNA, 25 bp, Artificial
  Probe
ctttttctgtaactatacctggctg

SEQ ID NO: 266930 - DNA, 25 bp, Artificial
  Probe
agatctttgtatcctcaaagcccag

SEQ ID NO: 266931 - DNA, 25 bp, Artificial
  Probe
cagctactgtacattatgtatgaaa

SEQ ID NO: 266932 - DNA, 25 bp, Artificial
  Probe
cctcaaagcccagcacatagtaagt

SEQ ID NO: 266933 - DNA, 25 bp, Artificial
  Probe
tggactcctccagacagcatggagg

SEQ ID NO: 266934 - DNA, 25 bp, Artificial
  Probe
gactcctccagacagcatggaggaa

SEQ ID NO: 266935 - DNA, 25 bp, Artificial
  Probe
gagtccgcgctaaggtgaccgtgcc

SEQ ID NO: 266936 - DNA, 25 bp, Artificial
  Probe
tgattcgggcagcatgtagcagtat

SEQ ID NO: 266937 - DNA, 25 bp, Artificial
  Probe
attgccctggaaaaatgaaatgtac

SEQ ID NO: 266938 - DNA, 25 bp, Artificial
  Probe
ctatacctggctgctcactgcgctg

SEQ ID NO: 266939 - DNA, 25 bp, Artificial
  Probe
cgctgctatgagactaggggtcctg

SEQ ID NO: 266940 - DNA, 25 bp, Artificial
  Probe
tcgggcagcatgtagcagtatttat

SEQ ID NO: 266941 - DNA, 25 bp, Artificial
  Probe
tgtgaggctcactgccctttttctg

SEQ ID NO: 266942 - DNA, 25 bp, Artificial
  Probe
ctggctgctcactgcgctgctatga

SEQ ID NO: 266943 - DNA, 25 bp, Artificial
  Probe
aatgacagctactgtacattatgta

SEQ ID NO: 266944 - DNA, 25 bp, Artificial
  Probe
taagtccctgagtccgcgctaaggt

SEQ ID NO: 266945 - DNA, 25 bp, Artificial
  Probe
gacagctactgtacattatgtatga

SEQ ID NO: 266946 - DNA, 25 bp, Artificial
  Probe
cccagcacatagtaagtattcagta

SEQ ID NO: 266947 - DNA, 25 bp, Artificial
  Probe
ctccatgctgaaaccctttcggaaa

SEQ ID NO: 266948 - DNA, 25 bp, Artificial
  Probe
tgctgaaaccctttcggaaaccacg

SEQ ID NO: 266949 - DNA, 25 bp, Artificial
  Probe
gtactttctgtctctccatgctgaa

SEQ ID NO: 266950 - DNA, 25 bp, Artificial
  Probe
gtttctccgcgcttctgtaagtccc

SEQ ID NO: 266951 - DNA, 25 bp, Artificial
  Probe
ctgctatgagactaggggtcctgtg

SEQ ID NO: 266952 - DNA, 25 bp, Artificial
  Probe
caaagcccagcacatagtaagtatt

SEQ ID NO: 266953 - DNA, 25 bp, Artificial
  Probe
actgcgctgctatgagactaggggt

SEQ ID NO: 266954 - DNA, 25 bp, Artificial
  Probe
agcccagcacatagtaagtattcag

SEQ ID NO: 266955 - DNA, 25 bp, Artificial
  Probe
actatacctggctgctcactgcgct

SEQ ID NO: 266956 - DNA, 25 bp, Artificial
  Probe
tgctatgagactaggggtcctgtgc

SEQ ID NO: 266957 - DNA, 25 bp, Artificial
  Probe
ggatttcgtttctccgcgcttctgt

SEQ ID NO: 266958 - DNA, 25 bp, Artificial
  Probe
gtcactctttatctaagtttgtaga

SEQ ID NO: 266959 - DNA, 25 bp, Artificial
  Probe
cccaccttcctgtggaatcctggga

SEQ ID NO: 266960 - DNA, 25 bp, Artificial
  Probe
tggtgcatctatagggctcttctgt

SEQ ID NO: 266961 - DNA, 25 bp, Artificial
  Probe
tttatagaccactggccctgtagtc

SEQ ID NO: 266962 - DNA, 25 bp, Artificial
  Probe
gactctttcttcttcgtgtcgactt

SEQ ID NO: 266963 - DNA, 25 bp, Artificial
  Probe
gtattatgaagacctgtccacatgg

SEQ ID NO: 266964 - DNA, 25 bp, Artificial
  Probe
gacctgtccacatggactctttctt

SEQ ID NO: 266965 - DNA, 25 bp, Artificial
  Probe
ggtcaacccagtgagccagccagct

SEQ ID NO: 266966 - DNA, 25 bp, Artificial
  Probe
tcctgtggaatcctgggagcacccc

SEQ ID NO: 266967 - DNA, 25 bp, Artificial
  Probe
cttagcacatcagcattcgtgagac

SEQ ID NO: 266968 - DNA, 25 bp, Artificial
  Probe
gtgcagtgcccctaggacagatgtt

SEQ ID NO: 266969 - DNA, 25 bp, Artificial
  Probe
gtctccctgcaaatgaagcattact

SEQ ID NO: 266970 - DNA, 25 bp, Artificial
  Probe
catgtctcagctgtcccaggaactc

SEQ ID NO: 266971 - DNA, 25 bp, Artificial
  Probe
tcaaggggaccagtattatgaagac

SEQ ID NO: 266972 - DNA, 25 bp, Artificial
  Probe
agatgtttgggaatcagcggcctcc

SEQ ID NO: 266973 - DNA, 25 bp, Artificial
  Probe
taaacgaccgtaaggagcagttggg

SEQ ID NO: 266974 - DNA, 25 bp, Artificial
  Probe
ggctcagtgctgacggatatgagaa

SEQ ID NO: 266975 - DNA, 25 bp, Artificial
  Probe
cttcggaacgaggagtgagaaccct

SEQ ID NO: 266976 - DNA, 25 bp, Artificial
  Probe
cagtgctgacggatatgagaaatct

SEQ ID NO: 266977 - DNA, 25 bp, Artificial
  Probe
agcccagaaccttgcggtcactctt

SEQ ID NO: 266978 - DNA, 25 bp, Artificial
  Probe
agacctgtccacatggactctttct

SEQ ID NO: 266979 - DNA, 25 bp, Artificial
  Probe
gggctcaaggggaccagtattatga

SEQ ID NO: 266980 - DNA, 25 bp, Artificial
  Probe
gccatgtctcagctgtcccaggaac

SEQ ID NO: 266981 - DNA, 25 bp, Artificial
  Probe
agggctcttctgtctacctttcact

SEQ ID NO: 266982 - DNA, 25 bp, Artificial
  Probe
cttcttcgtgtcgacttcttcaatg

SEQ ID NO: 266983 - DNA, 25 bp, Artificial
  Probe
agccagctgccgtggggcaccagtc

SEQ ID NO: 266984 - DNA, 25 bp, Artificial
  Probe
tgagacttgcccttgtaacccctga

SEQ ID NO: 266985 - DNA, 25 bp, Artificial
  Probe
ctcagctgtcccaggaactctggtg

SEQ ID NO: 266986 - DNA, 25 bp, Artificial
  Probe
cctgtagtcaccatcacctgctgat

SEQ ID NO: 266987 - DNA, 25 bp, Artificial
  Probe
agaggtcaacccagtgagccagcca

SEQ ID NO: 266988 - DNA, 25 bp, Artificial
  Probe
agaaccttgcggtcactctttatct

SEQ ID NO: 266989 - DNA, 25 bp, Artificial
  Probe
catctatagggctcttctgtctacc

SEQ ID NO: 266990 - DNA, 25 bp, Artificial
  Probe
catgcctcctgcttatgtcacactg

SEQ ID NO: 266991 - DNA, 25 bp, Artificial
  Probe
cctaggacagatgtttgggaatcag

SEQ ID NO: 266992 - DNA, 25 bp, Artificial
  Probe
attcgtgagacttgcccttgtaacc

SEQ ID NO: 266993 - DNA, 25 bp, Artificial
  Probe
tcaatgaaacgtctccctgcaaatg

SEQ ID NO: 266994 - DNA, 25 bp, Artificial
  Probe
tggggcatagtgacttccagaaacc

SEQ ID NO: 266995 - DNA, 25 bp, Artificial
  Probe
gtcgacttcttcaatgaaacgtctc

SEQ ID NO: 266996 - DNA, 25 bp, Artificial
  Probe
ttcagcccagaaccttgcggtcact

SEQ ID NO: 266997 - DNA, 25 bp, Artificial
  Probe
aatcttcggaacgaggagtgagaac

SEQ ID NO: 266998 - DNA, 25 bp, Artificial
  Probe
gtccacatggactctttcttcttcg

SEQ ID NO: 266999 - DNA, 25 bp, Artificial
  Probe
ccgaggcccatagttccaggacaca

SEQ ID NO: 267000 - DNA, 25 bp, Artificial
  Probe
agacttgcccttgtaacccctgact

SEQ ID NO: 267001 - DNA, 25 bp, Artificial
  Probe
aggacacagccatgtctcagctgtc

SEQ ID NO: 267002 - DNA, 25 bp, Artificial
  Probe
tgtagtcaccatcacctgctgatcc

SEQ ID NO: 267003 - DNA, 25 bp, Artificial
  Probe
cagcaactgtccttgtgggtcttga

SEQ ID NO: 267004 - DNA, 25 bp, Artificial
  Probe
cctgtggagcaacatgcccaagttt

SEQ ID NO: 267005 - DNA, 25 bp, Artificial
  Probe
cggcctgtggagcaacatgcccaag

SEQ ID NO: 267006 - DNA, 25 bp, Artificial
  Probe
cctgattgacaaaacaacggctgca

SEQ ID NO: 267007 - DNA, 25 bp, Artificial
  Probe
ccaacggcctgtggagcaacatgcc

SEQ ID NO: 267008 - DNA, 25 bp, Artificial
  Probe
gccaacggcctgtggagcaacatgc

SEQ ID NO: 267009 - DNA, 25 bp, Artificial
  Probe
tgtgactactgtgatacgtatctta

SEQ ID NO: 267010 - DNA, 25 bp, Artificial
  Probe
gcccagagcctgattgacaaaacaa

SEQ ID NO: 267011 - DNA, 25 bp, Artificial
  Probe
tgcccaagttttattgtgactactg

SEQ ID NO: 267012 - DNA, 25 bp, Artificial
  Probe
aacggcctgtggagcaacatgccca

SEQ ID NO: 267013 - DNA, 25 bp, Artificial
  Probe
caacggcctgtggagcaacatgccc

SEQ ID NO: 267014 - DNA, 25 bp, Artificial
  Probe
ctgtgatacgtatcttacccacgat

SEQ ID NO: 267015 - DNA, 25 bp, Artificial
  Probe
ctgtggagcaacatgcccaagtttt

SEQ ID NO: 267016 - DNA, 25 bp, Artificial
  Probe
gactactgtgatacgtatcttaccc

SEQ ID NO: 267017 - DNA, 25 bp, Artificial
  Probe
gtgatacgtatcttacccacgattc

SEQ ID NO: 267018 - DNA, 25 bp, Artificial
  Probe
gcaacatgcccaagttttattgtga

SEQ ID NO: 267019 - DNA, 25 bp, Artificial
  Probe
gtgactactgtgatacgtatcttac

SEQ ID NO: 267020 - DNA, 25 bp, Artificial
  Probe
attgacaaaacaacggctgcatttc

SEQ ID NO: 267021 - DNA, 25 bp, Artificial
  Probe
agcaacatgcccaagttttattgtg

SEQ ID NO: 267022 - DNA, 25 bp, Artificial
  Probe
tgactactgtgatacgtatcttacc

SEQ ID NO: 267023 - DNA, 25 bp, Artificial
  Probe
tgtgatacgtatcttacccacgatt

SEQ ID NO: 267024 - DNA, 25 bp, Artificial
  Probe
acatgcccaagttttattgtgacta

SEQ ID NO: 267025 - DNA, 25 bp, Artificial
  Probe
catgcccaagttttattgtgactac

SEQ ID NO: 267026 - DNA, 25 bp, Artificial
  Probe
acggcctgtggagcaacatgcccaa

SEQ ID NO: 267027 - DNA, 25 bp, Artificial
  Probe
ccagagcctgattgacaaaacaacg

SEQ ID NO: 267028 - DNA, 25 bp, Artificial
  Probe
aggcccagagcctgattgacaaaac

SEQ ID NO: 267029 - DNA, 25 bp, Artificial
  Probe
tattgtgactactgtgatacgtatc

SEQ ID NO: 267030 - DNA, 25 bp, Artificial
  Probe
agccaacggcctgtggagcaacatg

SEQ ID NO: 267031 - DNA, 25 bp, Artificial
  Probe
ttgtgactactgtgatacgtatctt

SEQ ID NO: 267032 - DNA, 25 bp, Artificial
  Probe
caacatgcccaagttttattgtgac

SEQ ID NO: 267033 - DNA, 25 bp, Artificial
  Probe
ggcccagagcctgattgacaaaaca

SEQ ID NO: 267034 - DNA, 25 bp, Artificial
  Probe
aacatgcccaagttttattgtgact

SEQ ID NO: 267035 - DNA, 25 bp, Artificial
  Probe
tactgtgatacgtatcttacccacg

SEQ ID NO: 267036 - DNA, 25 bp, Artificial
  Probe
cccagagcctgattgacaaaacaac

SEQ ID NO: 267037 - DNA, 25 bp, Artificial
  Probe
actgtgatacgtatcttacccacga

SEQ ID NO: 267038 - DNA, 25 bp, Artificial
  Probe
atgcccaagttttattgtgactact

SEQ ID NO: 267039 - DNA, 25 bp, Artificial
  Probe
tgtggagcaacatgcccaagtttta

SEQ ID NO: 267040 - DNA, 25 bp, Artificial
  Probe
gattgacaaaacaacggctgcattt

SEQ ID NO: 267041 - DNA, 25 bp, Artificial
  Probe
attgtgactactgtgatacgtatct

SEQ ID NO: 267042 - DNA, 25 bp, Artificial
  Probe
tagccaacggcctgtggagcaacat

SEQ ID NO: 267043 - DNA, 25 bp, Artificial
  Probe
accctatatacctgtgcatggacct

SEQ ID NO: 267044 - DNA, 25 bp, Artificial
  Probe
gtgcctccacagtgcacctatgtga

SEQ ID NO: 267045 - DNA, 25 bp, Artificial
  Probe
cagtgcctccacagtgcacctatgt

SEQ ID NO: 267046 - DNA, 25 bp, Artificial
  Probe
ccacagtgcacctatgtgagtgcat

SEQ ID NO: 267047 - DNA, 25 bp, Artificial
  Probe
tcctttgggaaatcccttttgccag

SEQ ID NO: 267048 - DNA, 25 bp, Artificial
  Probe
ggaccctatatacctgtgcatggac

SEQ ID NO: 267049 - DNA, 25 bp, Artificial
  Probe
gtaattggaccctatatacctgtgc

SEQ ID NO: 267050 - DNA, 25 bp, Artificial
  Probe
agtgcatgtagctacattgggaacc

SEQ ID NO: 267051 - DNA, 25 bp, Artificial
  Probe
gttaccacattatctcctttgggaa

SEQ ID NO: 267052 - DNA, 25 bp, Artificial
  Probe
gcctccacagtgcacctatgtgagt

SEQ ID NO: 267053 - DNA, 25 bp, Artificial
  Probe
cacctatgtgagtgcatgtagctac

SEQ ID NO: 267054 - DNA, 25 bp, Artificial
  Probe
cctatatacctgtgcatggaccttt

SEQ ID NO: 267055 - DNA, 25 bp, Artificial
  Probe
agagccggccagtgcctccacagtg

SEQ ID NO: 267056 - DNA, 25 bp, Artificial
  Probe
tgcacctatgtgagtgcatgtagct

SEQ ID NO: 267057 - DNA, 25 bp, Artificial
  Probe
atacctgtgcatggacctttttata

SEQ ID NO: 267058 - DNA, 25 bp, Artificial
  Probe
ctccacagtgcacctatgtgagtgc

SEQ ID NO: 267059 - DNA, 25 bp, Artificial
  Probe
gtgcacctatgtgagtgcatgtagc

SEQ ID NO: 267060 - DNA, 25 bp, Artificial
  Probe
gtgcatgtagctacattgggaaccg

SEQ ID NO: 267061 - DNA, 25 bp, Artificial
  Probe
tatatacctgtgcatggaccttttt

SEQ ID NO: 267062 - DNA, 25 bp, Artificial
  Probe
ctatgtgagtgcatgtagctacatt

SEQ ID NO: 267063 - DNA, 25 bp, Artificial
  Probe
gaccctatatacctgtgcatggacc

SEQ ID NO: 267064 - DNA, 25 bp, Artificial
  Probe
tggaccctatatacctgtgcatgga

SEQ ID NO: 267065 - DNA, 25 bp, Artificial
  Probe
tttgccagtgggatatacgagagcc

SEQ ID NO: 267066 - DNA, 25 bp, Artificial
  Probe
agtgcacctatgtgagtgcatgtag

SEQ ID NO: 267067 - DNA, 25 bp, Artificial
  Probe
gcgttaccacattatctcctttggg

SEQ ID NO: 267068 - DNA, 25 bp, Artificial
  Probe
cagtgcacctatgtgagtgcatgta

SEQ ID NO: 267069 - DNA, 25 bp, Artificial
  Probe
cccttttgccagtgggatatacgag

SEQ ID NO: 267070 - DNA, 25 bp, Artificial
  Probe
tgcatgtagctacattgggaaccgg

SEQ ID NO: 267071 - DNA, 25 bp, Artificial
  Probe
tggcgttaccacattatctcctttg

SEQ ID NO: 267072 - DNA, 25 bp, Artificial
  Probe
attggaccctatatacctgtgcatg

SEQ ID NO: 267073 - DNA, 25 bp, Artificial
  Probe
agctacattgggaaccggtaattgg

SEQ ID NO: 267074 - DNA, 25 bp, Artificial
  Probe
ctatatacctgtgcatggacctttt

SEQ ID NO: 267075 - DNA, 25 bp, Artificial
  Probe
cgttaccacattatctcctttggga

SEQ ID NO: 267076 - DNA, 25 bp, Artificial
  Probe
cctatgtgagtgcatgtagctacat

SEQ ID NO: 267077 - DNA, 25 bp, Artificial
  Probe
gagagccggccagtgcctccacagt

SEQ ID NO: 267078 - DNA, 25 bp, Artificial
  Probe
taattggaccctatatacctgtgca

SEQ ID NO: 267079 - DNA, 25 bp, Artificial
  Probe
gctacattgggaaccggtaattgga

SEQ ID NO: 267080 - DNA, 25 bp, Artificial
  Probe
ttgccagtgggatatacgagagccg

SEQ ID NO: 267081 - DNA, 25 bp, Artificial
  Probe
ggcgttaccacattatctcctttgg

SEQ ID NO: 267082 - DNA, 25 bp, Artificial
  Probe
aattggaccctatatacctgtgcat

SEQ ID NO: 267083 - DNA, 25 bp, Artificial
  Probe
atgtagctacattgggaaccggtaa

SEQ ID NO: 267084 - DNA, 25 bp, Artificial
  Probe
gagtgcatgtagctacattgggaac

SEQ ID NO: 267085 - DNA, 25 bp, Artificial
  Probe
atatacctgtgcatggaccttttta

SEQ ID NO: 267086 - DNA, 25 bp, Artificial
  Probe
gcacctatgtgagtgcatgtagcta

SEQ ID NO: 267087 - DNA, 25 bp, Artificial
  Probe
catgtagctacattgggaaccggta

SEQ ID NO: 267088 - DNA, 25 bp, Artificial
  Probe
agtgcctccacagtgcacctatgtg

SEQ ID NO: 267089 - DNA, 25 bp, Artificial
  Probe
tggggcaaatcctcaggctccaggg

SEQ ID NO: 267090 - DNA, 25 bp, Artificial
  Probe
agttcttgcagccagctttgcgttc

SEQ ID NO: 267091 - DNA, 25 bp, Artificial
  Probe
gcagacctctgcagctccagcctca

SEQ ID NO: 267092 - DNA, 25 bp, Artificial
  Probe
aatcctcaggctccagggcatcgtt

SEQ ID NO: 267093 - DNA, 25 bp, Artificial
  Probe
gcgcactggagacggcaggacagca

SEQ ID NO: 267094 - DNA, 25 bp, Artificial
  Probe
caaatcctcaggctccagggcatcg

SEQ ID NO: 267095 - DNA, 25 bp, Artificial
  Probe
tgggttcgagttggcagacctctgc

SEQ ID NO: 267096 - DNA, 25 bp, Artificial
  Probe
actggagacggcaggacagcatctc

SEQ ID NO: 267097 - DNA, 25 bp, Artificial
  Probe
ggctgggttcgagttggcagacctc

SEQ ID NO: 267098 - DNA, 25 bp, Artificial
  Probe
tgctcagctgcctggggcaaatcct

SEQ ID NO: 267099 - DNA, 25 bp, Artificial
  Probe
cgagctctccacggtctcccctttt

SEQ ID NO: 267100 - DNA, 25 bp, Artificial
  Probe
gttcgagttggcagacctctgcagc

SEQ ID NO: 267101 - DNA, 25 bp, Artificial
  Probe
tcctcaggctccagggcatcgttct

SEQ ID NO: 267102 - DNA, 25 bp, Artificial
  Probe
gctgggttcgagttggcagacctct

SEQ ID NO: 267103 - DNA, 25 bp, Artificial
  Probe
tcgagttggcagacctctgcagctc

SEQ ID NO: 267104 - DNA, 25 bp, Artificial
  Probe
gggcaaatcctcaggctccagggca

SEQ ID NO: 267105 - DNA, 25 bp, Artificial
  Probe
agttggcagacctctgcagctccag

SEQ ID NO: 267106 - DNA, 25 bp, Artificial
  Probe
gctgcctggggcaaatcctcaggct

SEQ ID NO: 267107 - DNA, 25 bp, Artificial
  Probe
gttggcagacctctgcagctccagc

SEQ ID NO: 267108 - DNA, 25 bp, Artificial
  Probe
atcctcaggctccagggcatcgttc

SEQ ID NO: 267109 - DNA, 25 bp, Artificial
  Probe
gcctggggcaaatcctcaggctcca

SEQ ID NO: 267110 - DNA, 25 bp, Artificial
  Probe
agaagttcttgcagccagctttgcg

SEQ ID NO: 267111 - DNA, 25 bp, Artificial
  Probe
ctgggttcgagttggcagacctctg

SEQ ID NO: 267112 - DNA, 25 bp, Artificial
  Probe
gttcttgcagccagctttgcgttcc

SEQ ID NO: 267113 - DNA, 25 bp, Artificial
  Probe
gtctcccctttttaactctctctct

SEQ ID NO: 267114 - DNA, 25 bp, Artificial
  Probe
ctggggcaaatcctcaggctccagg

SEQ ID NO: 267115 - DNA, 25 bp, Artificial
  Probe
ttggcagacctctgcagctccagcc

SEQ ID NO: 267116 - DNA, 25 bp, Artificial
  Probe
ctggagacggcaggacagcatctcc

SEQ ID NO: 267117 - DNA, 25 bp, Artificial
  Probe
cagcgcgcactggagacggcaggac

SEQ ID NO: 267118 - DNA, 25 bp, Artificial
  Probe
cctcaggctccagggcatcgttctc

SEQ ID NO: 267119 - DNA, 25 bp, Artificial
  Probe
gagttggcagacctctgcagctcca

SEQ ID NO: 267120 - DNA, 25 bp, Artificial
  Probe
cctggggcaaatcctcaggctccag

SEQ ID NO: 267121 - DNA, 25 bp, Artificial
  Probe
taactctctctctgacgtcagcaag

SEQ ID NO: 267122 - DNA, 25 bp, Artificial
  Probe
agctgcctggggcaaatcctcaggc

SEQ ID NO: 267123 - DNA, 25 bp, Artificial
  Probe
cactggagacggcaggacagcatct

SEQ ID NO: 267124 - DNA, 25 bp, Artificial
  Probe
tgcctggggcaaatcctcaggctcc

SEQ ID NO: 267125 - DNA, 25 bp, Artificial
  Probe
ggggcaaatcctcaggctccagggc

SEQ ID NO: 267126 - DNA, 25 bp, Artificial
  Probe
tctccttcagccgctatcgagctct

SEQ ID NO: 267127 - DNA, 25 bp, Artificial
  Probe
ggcaaatcctcaggctccagggcat

SEQ ID NO: 267128 - DNA, 25 bp, Artificial
  Probe
aaatcctcaggctccagggcatcgt

SEQ ID NO: 267129 - DNA, 25 bp, Artificial
  Probe
agccgctatcgagctctccacggtc

SEQ ID NO: 267130 - DNA, 25 bp, Artificial
  Probe
ttcagccgctatcgagctctccacg

SEQ ID NO: 267131 - DNA, 25 bp, Artificial
  Probe
ttcgagttggcagacctctgcagct

SEQ ID NO: 267132 - DNA, 25 bp, Artificial
  Probe
gctcagctgcctggggcaaatcctc

SEQ ID NO: 267133 - DNA, 25 bp, Artificial
  Probe
ctgcctggggcaaatcctcaggctc

SEQ ID NO: 267134 - DNA, 25 bp, Artificial
  Probe
ggggtgccatggctgggttcgagtt

SEQ ID NO: 267135 - DNA, 25 bp, Artificial
  Probe
aggaagtcctgcagagagtggcatt

SEQ ID NO: 267136 - DNA, 25 bp, Artificial
  Probe
tcagagatgcccagtacagtgtccg

SEQ ID NO: 267137 - DNA, 25 bp, Artificial
  Probe
ctattgtcgtgctatgaggagcaag

SEQ ID NO: 267138 - DNA, 25 bp, Artificial
  Probe
atccagcgttgctgttccaagtagc

SEQ ID NO: 267139 - DNA, 25 bp, Artificial
  Probe
cccaagatgccctaacgtaactagc

SEQ ID NO: 267140 - DNA, 25 bp, Artificial
  Probe
gcgactcatgtgtctattgtcgtgc

SEQ ID NO: 267141 - DNA, 25 bp, Artificial
  Probe
gtgaatccagcgttgctgttccaag

SEQ ID NO: 267142 - DNA, 25 bp, Artificial
  Probe
gcagctggctcctgtgtgatctcca

SEQ ID NO: 267143 - DNA, 25 bp, Artificial
  Probe
tcaaccaattggtgccctatgttca

SEQ ID NO: 267144 - DNA, 25 bp, Artificial
  Probe
atgaacttggacttttattgatgcc

SEQ ID NO: 267145 - DNA, 25 bp, Artificial
  Probe
agcgttgctgttccaagtagccttg

SEQ ID NO: 267146 - DNA, 25 bp, Artificial
  Probe
catgttagcagctggctcctgtgtg

SEQ ID NO: 267147 - DNA, 25 bp, Artificial
  Probe
catcaaacatcgaagtgaatccagc

SEQ ID NO: 267148 - DNA, 25 bp, Artificial
  Probe
ggcatgttagcagctggctcctgtg

SEQ ID NO: 267149 - DNA, 25 bp, Artificial
  Probe
aagacatcaaacatcgaagtgaatc

SEQ ID NO: 267150 - DNA, 25 bp, Artificial
  Probe
gacatcaaacatcgaagtgaatcca

SEQ ID NO: 267151 - DNA, 25 bp, Artificial
  Probe
agtcctgcagagagtggcattctgg

SEQ ID NO: 267152 - DNA, 25 bp, Artificial
  Probe
tgtctattgtcgtgctatgaggagc

SEQ ID NO: 267153 - DNA, 25 bp, Artificial
  Probe
gatgccctaacgtaactagcaaatt

SEQ ID NO: 267154 - DNA, 25 bp, Artificial
  Probe
tcatgtgtctattgtcgtgctatga

SEQ ID NO: 267155 - DNA, 25 bp, Artificial
  Probe
caaacatcgaagtgaatccagcgtt

SEQ ID NO: 267156 - DNA, 25 bp, Artificial
  Probe
agttcttgacaagatgtttcccaat

SEQ ID NO: 267157 - DNA, 25 bp, Artificial
  Probe
cgttgctgttccaagtagccttggt

SEQ ID NO: 267158 - DNA, 25 bp, Artificial
  Probe
tggtgccctatgttcagagatgccc

SEQ ID NO: 267159 - DNA, 25 bp, Artificial
  Probe
gggcatgttagcagctggctcctgt

SEQ ID NO: 267160 - DNA, 25 bp, Artificial
  Probe
gatgtttcccaatacccaagatgcc

SEQ ID NO: 267161 - DNA, 25 bp, Artificial
  Probe
tggggcatgttagcagctggctcct

SEQ ID NO: 267162 - DNA, 25 bp, Artificial
  Probe
cgaagtgaatccagcgttgctgttc

SEQ ID NO: 267163 - DNA, 25 bp, Artificial
  Probe
atcaaccaattggtgccctatgttc

SEQ ID NO: 267164 - DNA, 25 bp, Artificial
  Probe
agacatcaaacatcgaagtgaatcc

SEQ ID NO: 267165 - DNA, 25 bp, Artificial
  Probe
atcaaacatcgaagtgaatccagcg

SEQ ID NO: 267166 - DNA, 25 bp, Artificial
  Probe
aagatgtttcccaatacccaagatg

SEQ ID NO: 267167 - DNA, 25 bp, Artificial
  Probe
ttagcagctggctcctgtgtgatct

SEQ ID NO: 267168 - DNA, 25 bp, Artificial
  Probe
tcgaagtgaatccagcgttgctgtt

SEQ ID NO: 267169 - DNA, 25 bp, Artificial
  Probe
aaggaagtcctgcagagagtggcat

SEQ ID NO: 267170 - DNA, 25 bp, Artificial
  Probe
aacatcgaagtgaatccagcgttgc

SEQ ID NO: 267171 - DNA, 25 bp, Artificial
  Probe
tgccctatgttcagagatgcccagt

SEQ ID NO: 267172 - DNA, 25 bp, Artificial
  Probe
ctatgttcagagatgcccagtacag

SEQ ID NO: 267173 - DNA, 25 bp, Artificial
  Probe
agctggctcctgtgtgatctccagc

SEQ ID NO: 267174 - DNA, 25 bp, Artificial
  Probe
gaacttggacttttattgatgccct

SEQ ID NO: 267175 - DNA, 25 bp, Artificial
  Probe
actcatgtgtctattgtcgtgctat

SEQ ID NO: 267176 - DNA, 25 bp, Artificial
  Probe
tgagttcttgacaagatgtttccca

SEQ ID NO: 267177 - DNA, 25 bp, Artificial
  Probe
tatgttcagagatgcccagtacagt

SEQ ID NO: 267178 - DNA, 25 bp, Artificial
  Probe
catgtgtctattgtcgtgctatgag

SEQ ID NO: 267179 - DNA, 25 bp, Artificial
  Probe
gttcttgacaagatgtttcccaata

SEQ ID NO: 267180 - DNA, 25 bp, Artificial
  Probe
caattggtgccctatgttcagagat

SEQ ID NO: 267181 - DNA, 25 bp, Artificial
  Probe
tggctgtgaccctggttggaaatta

SEQ ID NO: 267182 - DNA, 25 bp, Artificial
  Probe
tgacctttcctacttagatgctagt

SEQ ID NO: 267183 - DNA, 25 bp, Artificial
  Probe
ctgacctttcctacttagatgctag

SEQ ID NO: 267184 - DNA, 25 bp, Artificial
  Probe
tctatccttgctcagaaatgtggat

SEQ ID NO: 267185 - DNA, 25 bp, Artificial
  Probe
tgctgtctctggaatgtagactgta

SEQ ID NO: 267186 - DNA, 25 bp, Artificial
  Probe
tttttgctgtctctggaatgtagac

SEQ ID NO: 267187 - DNA, 25 bp, Artificial
  Probe
tgctagttccagataagttgtgtac

SEQ ID NO: 267188 - DNA, 25 bp, Artificial
  Probe
ttttgctgtctctggaatgtagact

SEQ ID NO: 267189 - DNA, 25 bp, Artificial
  Probe
cctacttagatgctagttccagata

SEQ ID NO: 267190 - DNA, 25 bp, Artificial
  Probe
tccttgctcagaaatgtggataatg

SEQ ID NO: 267191 - DNA, 25 bp, Artificial
  Probe
tatccttgctcagaaatgtggataa

SEQ ID NO: 267192 - DNA, 25 bp, Artificial
  Probe
gctagttccagataagttgtgtaca

SEQ ID NO: 267193 - DNA, 25 bp, Artificial
  Probe
ccttgctcagaaatgtggataatgc

SEQ ID NO: 267194 - DNA, 25 bp, Artificial
  Probe
ttctctatccttgctcagaaatgtg

SEQ ID NO: 267195 - DNA, 25 bp, Artificial
  Probe
ctacttagatgctagttccagataa

SEQ ID NO: 267196 - DNA, 25 bp, Artificial
  Probe
ctgtctctggaatgtagactgtacg

SEQ ID NO: 267197 - DNA, 25 bp, Artificial
  Probe
aatgcaatggctgtgaccctggttg

SEQ ID NO: 267198 - DNA, 25 bp, Artificial
  Probe
ggctgtgaccctggttggaaattaa

SEQ ID NO: 267199 - DNA, 25 bp, Artificial
  Probe
taatgcaatggctgtgaccctggtt

SEQ ID NO: 267200 - DNA, 25 bp, Artificial
  Probe
ctatccttgctcagaaatgtggata

SEQ ID NO: 267201 - DNA, 25 bp, Artificial
  Probe
cttagatgctagttccagataagtt

SEQ ID NO: 267202 - DNA, 25 bp, Artificial
  Probe
atgcaatggctgtgaccctggttgg

SEQ ID NO: 267203 - DNA, 25 bp, Artificial
  Probe
ctctatccttgctcagaaatgtgga

SEQ ID NO: 267204 - DNA, 25 bp, Artificial
  Probe
tgaccctggttggaaattaaacttg

SEQ ID NO: 267205 - DNA, 25 bp, Artificial
  Probe
tgtgaccctggttggaaattaaact

SEQ ID NO: 267206 - DNA, 25 bp, Artificial
  Probe
tacttagatgctagttccagataag

SEQ ID NO: 267207 - DNA, 25 bp, Artificial
  Probe
tctctatccttgctcagaaatgtgg

SEQ ID NO: 267208 - DNA, 25 bp, Artificial
  Probe
ctagttccagataagttgtgtacat

SEQ ID NO: 267209 - DNA, 25 bp, Artificial
  Probe
gctgtgaccctggttggaaattaaa

SEQ ID NO: 267210 - DNA, 25 bp, Artificial
  Probe
ttgctgtctctggaatgtagactgt

SEQ ID NO: 267211 - DNA, 25 bp, Artificial
  Probe
ataagttgtgtacattgcagacttc

SEQ ID NO: 267212 - DNA, 25 bp, Artificial
  Probe
tttgctgtctctggaatgtagactg

SEQ ID NO: 267213 - DNA, 25 bp, Artificial
  Probe
gctgtctctggaatgtagactgtac

SEQ ID NO: 267214 - DNA, 25 bp, Artificial
  Probe
tgcaatggctgtgaccctggttgga

SEQ ID NO: 267215 - DNA, 25 bp, Artificial
  Probe
atccttgctcagaaatgtggataat

SEQ ID NO: 267216 - DNA, 25 bp, Artificial
  Probe
gcaatggctgtgaccctggttggaa

SEQ ID NO: 267217 - DNA, 25 bp, Artificial
  Probe
cttgctcagaaatgtggataatgca

SEQ ID NO: 267218 - DNA, 25 bp, Artificial
  Probe
tcatagtttgtttccagactgagaa

SEQ ID NO: 267219 - DNA, 25 bp, Artificial
  Probe
gtgtctgctgaatgtggttgccctg

SEQ ID NO: 267220 - DNA, 25 bp, Artificial
  Probe
tttccagactgagaaattacactag

SEQ ID NO: 267221 - DNA, 25 bp, Artificial
  Probe
cattcacgtgaaagatgtaggtgtc

SEQ ID NO: 267222 - DNA, 25 bp, Artificial
  Probe
gcactttaccctgtgttgccccaaa

SEQ ID NO: 267223 - DNA, 25 bp, Artificial
  Probe
gtgttatgtgcactcattgaatcgc

SEQ ID NO: 267224 - DNA, 25 bp, Artificial
  Probe
gtctgctgaatgtggttgccctgta

SEQ ID NO: 267225 - DNA, 25 bp, Artificial
  Probe
gcactcattgaatcgcatgttttgt

SEQ ID NO: 267226 - DNA, 25 bp, Artificial
  Probe
aggtgtctgctgaatgtggttgccc

SEQ ID NO: 267227 - DNA, 25 bp, Artificial
  Probe
ataaggctgtgctggagttgaaccc

SEQ ID NO: 267228 - DNA, 25 bp, Artificial
  Probe
cctgacagcccatggtctttttacc

SEQ ID NO: 267229 - DNA, 25 bp, Artificial
  Probe
ggttgccctgtattaaagcttgtct

SEQ ID NO: 267230 - DNA, 25 bp, Artificial
  Probe
atgtggttgccctgtattaaagctt

SEQ ID NO: 267231 - DNA, 25 bp, Artificial
  Probe
aatcatagtttgtttccagactgag

SEQ ID NO: 267232 - DNA, 25 bp, Artificial
  Probe
taaagcttgtctcaactgaaagaaa

SEQ ID NO: 267233 - DNA, 25 bp, Artificial
  Probe
atccatgaggtgttatgtgcactca

SEQ ID NO: 267234 - DNA, 25 bp, Artificial
  Probe
tgcactttaccctgtgttgccccaa

SEQ ID NO: 267235 - DNA, 25 bp, Artificial
  Probe
ctgtgctggagttgaacccagggac

SEQ ID NO: 267236 - DNA, 25 bp, Artificial
  Probe
cctcgccgtgggttgttatttggtg

SEQ ID NO: 267237 - DNA, 25 bp, Artificial
  Probe
gatatgcactttaccctgtgttgcc

SEQ ID NO: 267238 - DNA, 25 bp, Artificial
  Probe
ctccaagttgtttcaaattgttgtt

SEQ ID NO: 267239 - DNA, 25 bp, Artificial
  Probe
tgtgcactcattgaatcgcatgttt

SEQ ID NO: 267240 - DNA, 25 bp, Artificial
  Probe
cacatgaagtgctacgtccatccat

SEQ ID NO: 267241 - DNA, 25 bp, Artificial
  Probe
tgccctgtattaaagcttgtctcaa

SEQ ID NO: 267242 - DNA, 25 bp, Artificial
  Probe
ctcattcacgtgaaagatgtaggtg

SEQ ID NO: 267243 - DNA, 25 bp, Artificial
  Probe
gctgaatgtggttgccctgtattaa

SEQ ID NO: 267244 - DNA, 25 bp, Artificial
  Probe
gacagcccatggtctttttaccaat

SEQ ID NO: 267245 - DNA, 25 bp, Artificial
  Probe
tgctggagttgaacccagggacctc

SEQ ID NO: 267246 - DNA, 25 bp, Artificial
  Probe
ccctccaagttgtttcaaattgttg

SEQ ID NO: 267247 - DNA, 25 bp, Artificial
  Probe
aaggctgtgctggagttgaacccag

SEQ ID NO: 267248 - DNA, 25 bp, Artificial
  Probe
gacctcacatgaagtgctacgtcca

SEQ ID NO: 267249 - DNA, 25 bp, Artificial
  Probe
gtttgtttccagactgagaaattac

SEQ ID NO: 267250 - DNA, 25 bp, Artificial
  Probe
tacgtccatccatgaggtgttatgt

SEQ ID NO: 267251 - DNA, 25 bp, Artificial
  Probe
aggtgttatgtgcactcattgaatc

SEQ ID NO: 267252 - DNA, 25 bp, Artificial
  Probe
tgaagtgctacgtccatccatgagg

SEQ ID NO: 267253 - DNA, 25 bp, Artificial
  Probe
ccagggacctcacatgaagtgctac

SEQ ID NO: 267254 - DNA, 25 bp, Artificial
  Probe
ttgtttccagactgagaaattacac

SEQ ID NO: 267255 - DNA, 25 bp, Artificial
  Probe
taatcatagtttgtttccagactga

SEQ ID NO: 267256 - DNA, 25 bp, Artificial
  Probe
tccatgaggtgttatgtgcactcat

SEQ ID NO: 267257 - DNA, 25 bp, Artificial
  Probe
taggtgtctgctgaatgtggttgcc

SEQ ID NO: 267258 - DNA, 25 bp, Artificial
  Probe
catagtttgtttccagactgagaaa

SEQ ID NO: 267259 - DNA, 25 bp, Artificial
  Probe
ctgtattaaagcttgtctcaactga

SEQ ID NO: 267260 - DNA, 25 bp, Artificial
  Probe
gttatgtgcactcattgaatcgcat

SEQ ID NO: 267261 - DNA, 25 bp, Artificial
  Probe
ttgaacccagggacctcacatgaag

SEQ ID NO: 267262 - DNA, 25 bp, Artificial
  Probe
ggagttgaacccagggacctcacat

SEQ ID NO: 267263 - DNA, 25 bp, Artificial
  Probe
atcctcattcacgtgaaagatgtag

SEQ ID NO: 267264 - DNA, 25 bp, Artificial
  Probe
cttcttcagaatctgaacaaggcga

SEQ ID NO: 267265 - DNA, 25 bp, Artificial
  Probe
ccctgataaagtctggaagatctcc

SEQ ID NO: 267266 - DNA, 25 bp, Artificial
  Probe
acacagaccccttcaagttcgagat

SEQ ID NO: 267267 - DNA, 25 bp, Artificial
  Probe
acctgcccatcatggtgacggattc

SEQ ID NO: 267268 - DNA, 25 bp, Artificial
  Probe
ctgaagcttgactccccggttgcca

SEQ ID NO: 267269 - DNA, 25 bp, Artificial
  Probe
ttggaccgggagtctccattcgtcc

SEQ ID NO: 267270 - DNA, 25 bp, Artificial
  Probe
ttgactccccggttgccatagcaac

SEQ ID NO: 267271 - DNA, 25 bp, Artificial
  Probe
cccatcatggtgacggattcaggga

SEQ ID NO: 267272 - DNA, 25 bp, Artificial
  Probe
tccaaagtggactgcaatgcggcgg

SEQ ID NO: 267273 - DNA, 25 bp, Artificial
  Probe
tcagggtgcaggtgtgctcttgcaa

SEQ ID NO: 267274 - DNA, 25 bp, Artificial
  Probe
cgagattcataaacagaccgtccct

SEQ ID NO: 267275 - DNA, 25 bp, Artificial
  Probe
ttcaagttcgagattcataaacaga

SEQ ID NO: 267276 - DNA, 25 bp, Artificial
  Probe
tacaacctgcccatcatggtgacgg

SEQ ID NO: 267277 - DNA, 25 bp, Artificial
  Probe
ctgaacaaggcgaactacaacctgc

SEQ ID NO: 267278 - DNA, 25 bp, Artificial
  Probe
ggtgcaggtgtgctcttgcaagaac

SEQ ID NO: 267279 - DNA, 25 bp, Artificial
  Probe
cttcaagttcgagattcataaacag

SEQ ID NO: 267280 - DNA, 25 bp, Artificial
  Probe
gggcttcagacaaggaccttcaccc

SEQ ID NO: 267281 - DNA, 25 bp, Artificial
  Probe
gacacatctgaagcttgactccccg

SEQ ID NO: 267282 - DNA, 25 bp, Artificial
  Probe
gattcataaacagaccgtccctgat

SEQ ID NO: 267283 - DNA, 25 bp, Artificial
  Probe
ctcttcgtggccatcgacagcggca

SEQ ID NO: 267284 - DNA, 25 bp, Artificial
  Probe
tctctctcctcagcttattgtcagg

SEQ ID NO: 267285 - DNA, 25 bp, Artificial
  Probe
tcagaatctgaacaaggcgaactac

SEQ ID NO: 267286 - DNA, 25 bp, Artificial
  Probe
gaccccttcaagttcgagattcata

SEQ ID NO: 267287 - DNA, 25 bp, Artificial
  Probe
tcatggtgacggattcagggaagcc

SEQ ID NO: 267288 - DNA, 25 bp, Artificial
  Probe
atcctgggggcttcagacaaggacc

SEQ ID NO: 267289 - DNA, 25 bp, Artificial
  Probe
gagccttcttcagaatctgaacaag

SEQ ID NO: 267290 - DNA, 25 bp, Artificial
  Probe
ctgggggcttcagacaaggaccttc

SEQ ID NO: 267291 - DNA, 25 bp, Artificial
  Probe
ccctcgtgagccttcttcagaatct

SEQ ID NO: 267292 - DNA, 25 bp, Artificial
  Probe
acagaccgtccctgataaagtctgg

SEQ ID NO: 267293 - DNA, 25 bp, Artificial
  Probe
gccagaaacctcagcgtggtcatcc

SEQ ID NO: 267294 - DNA, 25 bp, Artificial
  Probe
ttgcaagaactccaaagtggactgc

SEQ ID NO: 267295 - DNA, 25 bp, Artificial
  Probe
gaaacctcagcgtggtcatcctggg

SEQ ID NO: 267296 - DNA, 25 bp, Artificial
  Probe
tcagcttattgtcaggtctgtgaga

SEQ ID NO: 267297 - DNA, 25 bp, Artificial
  Probe
tgcgacgacgccagaaacctcagcg

SEQ ID NO: 267298 - DNA, 25 bp, Artificial
  Probe
ttcagggaagccacccatgacgaac

SEQ ID NO: 267299 - DNA, 25 bp, Artificial
  Probe
cacaacagtgtgtacactgccctct

SEQ ID NO: 267300 - DNA, 25 bp, Artificial
  Probe
cgaactacaacctgcccatcatggt

SEQ ID NO: 267301 - DNA, 25 bp, Artificial
  Probe
tccacaacagtgtgtacactgccct

SEQ ID NO: 267302 - DNA, 25 bp, Artificial
  Probe
acaaggcgaactacaacctgcccat

SEQ ID NO: 267303 - DNA, 25 bp, Artificial
  Probe
tggtgacggattcagggaagccacc

SEQ ID NO: 267304 - DNA, 25 bp, Artificial
  Probe
cagtgtgtacactgccctcttcgtg

SEQ ID NO: 267305 - DNA, 25 bp, Artificial
  Probe
ttcgtggccatcgacagcggcaacc

SEQ ID NO: 267306 - DNA, 25 bp, Artificial
  Probe
agtctggaagatctccaaaatcaac

SEQ ID NO: 267307 - DNA, 25 bp, Artificial
  Probe
aaagtctggaagatctccaaaatca

SEQ ID NO: 267308 - DNA, 25 bp, Artificial
  Probe
gacctcagggtgcaggtgtgctctt

SEQ ID NO: 267309 - DNA, 25 bp, Artificial
  Probe
cagcgtggtcatcctgggggcttca

SEQ ID NO: 267310 - DNA, 25 bp, Artificial
  Probe
cataagttgactgtcaccagaggca

SEQ ID NO: 267311 - DNA, 25 bp, Artificial
  Probe
gtgcctcagctctacggctttctca

SEQ ID NO: 267312 - DNA, 25 bp, Artificial
  Probe
ttgactgtcaccagaggcatgcaga

SEQ ID NO: 267313 - DNA, 25 bp, Artificial
  Probe
atgtggacttcctggggatctacgc

SEQ ID NO: 267314 - DNA, 25 bp, Artificial
  Probe
acataagttgactgtcaccagaggc

SEQ ID NO: 267315 - DNA, 25 bp, Artificial
  Probe
cggctttctcaaacggccttaatgg

SEQ ID NO: 267316 - DNA, 25 bp, Artificial
  Probe
acggctttctcaaacggccttaatg

SEQ ID NO: 267317 - DNA, 25 bp, Artificial
  Probe
agggtttcatcgacggacattacaa

SEQ ID NO: 267318 - DNA, 25 bp, Artificial
  Probe
acattacaaggattatttcgtgcct

SEQ ID NO: 267319 - DNA, 25 bp, Artificial
  Probe
ccctgctggttcgtacacaacagtg

SEQ ID NO: 267320 - DNA, 25 bp, Artificial
  Probe
cagacgttccctgctggttcgtaca

SEQ ID NO: 267321 - DNA, 25 bp, Artificial
  Probe
agttgactgtcaccagaggcatgca

SEQ ID NO: 267322 - DNA, 25 bp, Artificial
  Probe
tttcatcgacggacattacaaggat

SEQ ID NO: 267323 - DNA, 25 bp, Artificial
  Probe
agttcatgcatgaaccagacatcca

SEQ ID NO: 267324 - DNA, 25 bp, Artificial
  Probe
cagctctacggctttctcaaacggc

SEQ ID NO: 267325 - DNA, 25 bp, Artificial
  Probe
tcgtgcctcagctctacggctttct

SEQ ID NO: 267326 - DNA, 25 bp, Artificial
  Probe
ttatttcgtgcctcagctctacggc

SEQ ID NO: 267327 - DNA, 25 bp, Artificial
  Probe
gtgtgcatggactgttagttcatgc

SEQ ID NO: 267328 - DNA, 25 bp, Artificial
  Probe
ttaatgtggacttcctggggatcta

SEQ ID NO: 267329 - DNA, 25 bp, Artificial
  Probe
tggaacagacgttccctgctggttc

SEQ ID NO: 267330 - DNA, 25 bp, Artificial
  Probe
accagaagcgagcatggaagtgaaa

SEQ ID NO: 267331 - DNA, 25 bp, Artificial
  Probe
accagaggcatgcagaaagactaca

SEQ ID NO: 267332 - DNA, 25 bp, Artificial
  Probe
tctcaaacggccttaatggctttgg

SEQ ID NO: 267333 - DNA, 25 bp, Artificial
  Probe
gtttggaacagacgttccctgctgg

SEQ ID NO: 267334 - DNA, 25 bp, Artificial
  Probe
tcaccagaggcatgcagaaagacta

SEQ ID NO: 267335 - DNA, 25 bp, Artificial
  Probe
tcacctagtgtgcatggactgttag

SEQ ID NO: 267336 - DNA, 25 bp, Artificial
  Probe
caaggattatttcgtgcctcagctc

SEQ ID NO: 267337 - DNA, 25 bp, Artificial
  Probe
tggttcgtacacaacagtgggaagg

SEQ ID NO: 267338 - DNA, 25 bp, Artificial
  Probe
catcgacggacattacaaggattat

SEQ ID NO: 267339 - DNA, 25 bp, Artificial
  Probe
attacaaggattatttcgtgcctca

SEQ ID NO: 267340 - DNA, 25 bp, Artificial
  Probe
cggttaatgtggacttcctggggat

SEQ ID NO: 267341 - DNA, 25 bp, Artificial
  Probe
gcatggactgttagttcatgcatga

SEQ ID NO: 267342 - DNA, 25 bp, Artificial
  Probe
tcgacggacattacaaggattattt

SEQ ID NO: 267343 - DNA, 25 bp, Artificial
  Probe
ctagtgtgcatggactgttagttca

SEQ ID NO: 267344 - DNA, 25 bp, Artificial
  Probe
ctgctggttcgtacacaacagtggg

SEQ ID NO: 267345 - DNA, 25 bp, Artificial
  Probe
tctacggctttctcaaacggcctta

SEQ ID NO: 267346 - DNA, 25 bp, Artificial
  Probe
atccggttaatgtggacttcctggg

SEQ ID NO: 267347 - DNA, 25 bp, Artificial
  Probe
ttagttcatgcatgaaccagacatc

SEQ ID NO: 267348 - DNA, 25 bp, Artificial
  Probe
ggaagggtttcatcgacggacatta

SEQ ID NO: 267349 - DNA, 25 bp, Artificial
  Probe
ggactgttagttcatgcatgaacca

SEQ ID NO: 267350 - DNA, 25 bp, Artificial
  Probe
cccgacagacaagttctcacctagt

SEQ ID NO: 267351 - DNA, 25 bp, Artificial
  Probe
acagacgttccctgctggttcgtac

SEQ ID NO: 267352 - DNA, 25 bp, Artificial
  Probe
gacaagttctcacctagtgtgcatg

SEQ ID NO: 267353 - DNA, 25 bp, Artificial
  Probe
aaccagaagcgagcatggaagtgaa

SEQ ID NO: 267354 - DNA, 25 bp, Artificial
  Probe
tacggctttctcaaacggccttaat

SEQ ID NO: 267355 - DNA, 25 bp, Artificial
  Probe
aggattatttcgtgcctcagctcta

SEQ ID NO: 267356 - DNA, 25 bp, Artificial
  Probe
cttaacgacctgatccagcggctgc

SEQ ID NO: 267357 - DNA, 25 bp, Artificial
  Probe
agcacagtcggcaagtttgaagacg

SEQ ID NO: 267358 - DNA, 25 bp, Artificial
  Probe
ttctacagacatacgcgcgaggccg

SEQ ID NO: 267359 - DNA, 25 bp, Artificial
  Probe
ctcatcaccatctgccgtgagtaca

SEQ ID NO: 267360 - DNA, 25 bp, Artificial
  Probe
cctgcttgccctccatgtatagcta

SEQ ID NO: 267361 - DNA, 25 bp, Artificial
  Probe
atcctggtgctgaggacagccctca

SEQ ID NO: 267362 - DNA, 25 bp, Artificial
  Probe
atcctactcagtgtgccccttcttg

SEQ ID NO: 267363 - DNA, 25 bp, Artificial
  Probe
acgacctgatccagcggctgcagct

SEQ ID NO: 267364 - DNA, 25 bp, Artificial
  Probe
tcctactcagtgtgccccttcttgt

SEQ ID NO: 267365 - DNA, 25 bp, Artificial
  Probe
aagcaactgtttctacagacatacg

SEQ ID NO: 267366 - DNA, 25 bp, Artificial
  Probe
agtagtccagtttggcccctataag

SEQ ID NO: 267367 - DNA, 25 bp, Artificial
  Probe
agctcatcaccatctgccgtgagta

SEQ ID NO: 267368 - DNA, 25 bp, Artificial
  Probe
aggagattgcagaggcccagcagct

SEQ ID NO: 267369 - DNA, 25 bp, Artificial
  Probe
agctcagcacagtcggcaagtttga

SEQ ID NO: 267370 - DNA, 25 bp, Artificial
  Probe
gccccttcttgtggtggacaataaa

SEQ ID NO: 267371 - DNA, 25 bp, Artificial
  Probe
tcagtgtgccccttcttgtggtgga

SEQ ID NO: 267372 - DNA, 25 bp, Artificial
  Probe
cagtttggcccctataagcaactgt

SEQ ID NO: 267373 - DNA, 25 bp, Artificial
  Probe
gaagaagctacctaaggagacccta

SEQ ID NO: 267374 - DNA, 25 bp, Artificial
  Probe
atcgcaattggaaggacgcagggct

SEQ ID NO: 267375 - DNA, 25 bp, Artificial
  Probe
cttcttgtggtggacaataaacagg

SEQ ID NO: 267376 - DNA, 25 bp, Artificial
  Probe
gatccagcggctgcagctctgttac

SEQ ID NO: 267377 - DNA, 25 bp, Artificial
  Probe
tgagatggcggcttatttcacacac

SEQ ID NO: 267378 - DNA, 25 bp, Artificial
  Probe
agcagctcatcaccatctgccgtga

SEQ ID NO: 267379 - DNA, 25 bp, Artificial
  Probe
ggcccctataagcaactgtttctac

SEQ ID NO: 267380 - DNA, 25 bp, Artificial
  Probe
caagcttaacgacctgatccagcgg

SEQ ID NO: 267381 - DNA, 25 bp, Artificial
  Probe
acagtcggcaagtttgaagacgctg

SEQ ID NO: 267382 - DNA, 25 bp, Artificial
  Probe
accctagaccagcagaagcgcatct

SEQ ID NO: 267383 - DNA, 25 bp, Artificial
  Probe
gtatagctaccctaatcgcaattgg

SEQ ID NO: 267384 - DNA, 25 bp, Artificial
  Probe
taccctaatcgcaattggaaggacg

SEQ ID NO: 267385 - DNA, 25 bp, Artificial
  Probe
ctaaggagaccctagaccagcagaa

SEQ ID NO: 267386 - DNA, 25 bp, Artificial
  Probe
tgaagacgctgtggagaaattccgc

SEQ ID NO: 267387 - DNA, 25 bp, Artificial
  Probe
tccagcggctgcagctctgttacca

SEQ ID NO: 267388 - DNA, 25 bp, Artificial
  Probe
agtcggcaagtttgaagacgctgtg

SEQ ID NO: 267389 - DNA, 25 bp, Artificial
  Probe
tagctaccctaatcgcaattggaag

SEQ ID NO: 267390 - DNA, 25 bp, Artificial
  Probe
tgcttgccctccatgtatagctacc

SEQ ID NO: 267391 - DNA, 25 bp, Artificial
  Probe
gctgtgggcctcaagcttaacgacc

SEQ ID NO: 267392 - DNA, 25 bp, Artificial
  Probe
ctacctaaggagaccctagaccagc

SEQ ID NO: 267393 - DNA, 25 bp, Artificial
  Probe
ggaagaagctacctaaggagaccct

SEQ ID NO: 267394 - DNA, 25 bp, Artificial
  Probe
ctgcagctctgttaccagctcagca

SEQ ID NO: 267395 - DNA, 25 bp, Artificial
  Probe
ggcggcttatttcacacactcaaac

SEQ ID NO: 267396 - DNA, 25 bp, Artificial
  Probe
tttgaagacgctgtggagaaattcc

SEQ ID NO: 267397 - DNA, 25 bp, Artificial
  Probe
tgaggacagccctcaacctcttctt

SEQ ID NO: 267398 - DNA, 25 bp, Artificial
  Probe
taaacaggagattgcagaggcccag

SEQ ID NO: 267399 - DNA, 25 bp, Artificial
  Probe
aaacctgcagcctgtgcacatgatc

SEQ ID NO: 267400 - DNA, 25 bp, Artificial
  Probe
ttgcagaggcccagcagctcatcac

SEQ ID NO: 267401 - DNA, 25 bp, Artificial
  Probe
actcaaacctgcagcctgtgcacat

SEQ ID NO: 267402 - DNA, 25 bp, Artificial
  Probe
aagtgggttcgcatggccgtgatac

SEQ ID NO: 267403 - DNA, 25 bp, Artificial
  Probe
agtctttgggaatcccttaccacat

SEQ ID NO: 267404 - DNA, 25 bp, Artificial
  Probe
tgattgccacctcagaacagcccat

SEQ ID NO: 267405 - DNA, 25 bp, Artificial
  Probe
agtgggttcgcatggccgtgatacc

SEQ ID NO: 267406 - DNA, 25 bp, Artificial
  Probe
ccgtgatacccgtggtatctttcga

SEQ ID NO: 267407 - DNA, 25 bp, Artificial
  Probe
gctgccagcaagaagcttgacctgg

SEQ ID NO: 267408 - DNA, 25 bp, Artificial
  Probe
agaattctatcagtctttgggaatc

SEQ ID NO: 267409 - DNA, 25 bp, Artificial
  Probe
tgatgagatgatcaccaccgcagaa

SEQ ID NO: 267410 - DNA, 25 bp, Artificial
  Probe
gaatattgtctcaggctctttgaat

SEQ ID NO: 267411 - DNA, 25 bp, Artificial
  Probe
tacttgattgccacctcagaacagc

SEQ ID NO: 267412 - DNA, 25 bp, Artificial
  Probe
tggctgcggccagaggatctgccca

SEQ ID NO: 267413 - DNA, 25 bp, Artificial
  Probe
gcttctccacctgctttcggcagga

SEQ ID NO: 267414 - DNA, 25 bp, Artificial
  Probe
ccaccgcagaagaattctatcagtc

SEQ ID NO: 267415 - DNA, 25 bp, Artificial
  Probe
tcgcagctctgcaccgggacgagtg

SEQ ID NO: 267416 - DNA, 25 bp, Artificial
  Probe
gttcgtgtactcatcacctcatgac

SEQ ID NO: 267417 - DNA, 25 bp, Artificial
  Probe
cctgctttcggcaggaagtgggttc

SEQ ID NO: 267418 - DNA, 25 bp, Artificial
  Probe
taccacattgtgaatattgtctcag

SEQ ID NO: 267419 - DNA, 25 bp, Artificial
  Probe
ggaatcccttaccacattgtgaata

SEQ ID NO: 267420 - DNA, 25 bp, Artificial
  Probe
gaggatctgcccatcaagtacgccg

SEQ ID NO: 267421 - DNA, 25 bp, Artificial
  Probe
gagatgatcaccaccgcagaagaat

SEQ ID NO: 267422 - DNA, 25 bp, Artificial
  Probe
aagattgaacagttcgtgtactcat

SEQ ID NO: 267423 - DNA, 25 bp, Artificial
  Probe
catcgcagctctgcaccgggacgag

SEQ ID NO: 267424 - DNA, 25 bp, Artificial
  Probe
tttgggaatcccttaccacattgtg

SEQ ID NO: 267425 - DNA, 25 bp, Artificial
  Probe
atcacctcatgacaacaagtcatgg

SEQ ID NO: 267426 - DNA, 25 bp, Artificial
  Probe
agaagtacttgattgccacctcaga

SEQ ID NO: 267427 - DNA, 25 bp, Artificial
  Probe
aagagcgatgacagctcctatgacg

SEQ ID NO: 267428 - DNA, 25 bp, Artificial
  Probe
ggccagaggatctgcccatcaagta

SEQ ID NO: 267429 - DNA, 25 bp, Artificial
  Probe
catggccgtgatacccgtggtatct

SEQ ID NO: 267430 - DNA, 25 bp, Artificial
  Probe
ccagcaagaagcttgacctggaggc

SEQ ID NO: 267431 - DNA, 25 bp, Artificial
  Probe
catgacaacaagtcatgggagatgt

SEQ ID NO: 267432 - DNA, 25 bp, Artificial
  Probe
ttcgcatggccgtgatacccgtggt

SEQ ID NO: 267433 - DNA, 25 bp, Artificial
  Probe
cctatgacgagaagtacttgattgc

SEQ ID NO: 267434 - DNA, 25 bp, Artificial
  Probe
ctataaggtgattggcaagggcagc

SEQ ID NO: 267435 - DNA, 25 bp, Artificial
  Probe
catgctgccagcaagaagcttgacc

SEQ ID NO: 267436 - DNA, 25 bp, Artificial
  Probe
gaagtacttgattgccacctcagaa

SEQ ID NO: 267437 - DNA, 25 bp, Artificial
  Probe
ccatcagtttgagaagattgaacag

SEQ ID NO: 267438 - DNA, 25 bp, Artificial
  Probe
tcagtctttgggaatcccttaccac

SEQ ID NO: 267439 - DNA, 25 bp, Artificial
  Probe
attgtctcaggctctttgaatcatg

SEQ ID NO: 267440 - DNA, 25 bp, Artificial
  Probe
tctatcagtctttgggaatccctta

SEQ ID NO: 267441 - DNA, 25 bp, Artificial
  Probe
atctgcccatcaagtacgccggctt

SEQ ID NO: 267442 - DNA, 25 bp, Artificial
  Probe
ctttcggcaggaagtgggttcgcat

SEQ ID NO: 267443 - DNA, 25 bp, Artificial
  Probe
aatcatgctgccagcaagaagcttg

SEQ ID NO: 267444 - DNA, 25 bp, Artificial
  Probe
tttgaatcatgctgccagcaagaag

SEQ ID NO: 267445 - DNA, 25 bp, Artificial
  Probe
attgtgaatattgtctcaggctctt

SEQ ID NO: 267446 - DNA, 25 bp, Artificial
  Probe
gatcaccaccgcagaagaattctat

SEQ ID NO: 267447 - DNA, 25 bp, Artificial
  Probe
ctccacctgctttcggcaggaagtg

SEQ ID NO: 267448 - DNA, 25 bp, Artificial
  Probe
gtattcagtgtgatatatcgtgcta

SEQ ID NO: 267449 - DNA, 25 bp, Artificial
  Probe
acaaaaatcggggggcgaagcatag

SEQ ID NO: 267450 - DNA, 25 bp, Artificial
  Probe
atgatggataggggggcttaaagta

SEQ ID NO: 267451 - DNA, 25 bp, Artificial
  Probe
aaaatcggggggcgaagcatagtgt

SEQ ID NO: 267452 - DNA, 25 bp, Artificial
  Probe
gctacttacaattgcgggaaatgat

SEQ ID NO: 267453 - DNA, 25 bp, Artificial
  Probe
acaagtggttctatagatggtaata

SEQ ID NO: 267454 - DNA, 25 bp, Artificial
  Probe
aaaaatcggggggcgaagcatagtg

SEQ ID NO: 267455 - DNA, 25 bp, Artificial
  Probe
aatgataactggaggggcccgggag

SEQ ID NO: 267456 - DNA, 25 bp, Artificial
  Probe
gtaataaccaacttgtaatcaaagg

SEQ ID NO: 267457 - DNA, 25 bp, Artificial
  Probe
tgctacttacaattgcgggaaatga

SEQ ID NO: 267458 - DNA, 25 bp, Artificial
  Probe
tgcagatacggtattcagtgtgata

SEQ ID NO: 267459 - DNA, 25 bp, Artificial
  Probe
tatatcgtgctacttacaattgcgg

SEQ ID NO: 267460 - DNA, 25 bp, Artificial
  Probe
gatatatcgtgctacttacaattgc

SEQ ID NO: 267461 - DNA, 25 bp, Artificial
  Probe
aaatcggggggcgaagcatagtgta

SEQ ID NO: 267462 - DNA, 25 bp, Artificial
  Probe
ggtaataaccaacttgtaatcaaag

SEQ ID NO: 267463 - DNA, 25 bp, Artificial
  Probe
agatacggtattcagtgtgatatat

SEQ ID NO: 267464 - DNA, 25 bp, Artificial
  Probe
atggtaataaccaacttgtaatcaa

SEQ ID NO: 267465 - DNA, 25 bp, Artificial
  Probe
atcttgcagatacggtattcagtgt

SEQ ID NO: 267466 - DNA, 25 bp, Artificial
  Probe
tacaagtggttctatagatggtaat

SEQ ID NO: 267467 - DNA, 25 bp, Artificial
  Probe
gtgatatatcgtgctacttacaatt

SEQ ID NO: 267468 - DNA, 25 bp, Artificial
  Probe
tcgtgctacttacaattgcgggaaa

SEQ ID NO: 267469 - DNA, 25 bp, Artificial
  Probe
tcttgcagatacggtattcagtgtg

SEQ ID NO: 267470 - DNA, 25 bp, Artificial
  Probe
atatatcgtgctacttacaattgcg

SEQ ID NO: 267471 - DNA, 25 bp, Artificial
  Probe
gtgctacttacaattgcgggaaatg

SEQ ID NO: 267472 - DNA, 25 bp, Artificial
  Probe
ttacaattgcgggaaatgatggata

SEQ ID NO: 267473 - DNA, 25 bp, Artificial
  Probe
atatcgtgctacttacaattgcggg

SEQ ID NO: 267474 - DNA, 25 bp, Artificial
  Probe
aatcttgcagatacggtattcagtg

SEQ ID NO: 267475 - DNA, 25 bp, Artificial
  Probe
cagatacggtattcagtgtgatata

SEQ ID NO: 267476 - DNA, 25 bp, Artificial
  Probe
atacggtattcagtgtgatatatcg

SEQ ID NO: 267477 - DNA, 25 bp, Artificial
  Probe
aatctgttaggagtattagttttca

SEQ ID NO: 267478 - DNA, 25 bp, Artificial
  Probe
cgtgctacttacaattgcgggaaat

SEQ ID NO: 267479 - DNA, 25 bp, Artificial
  Probe
tatcgtgctacttacaattgcggga

SEQ ID NO: 267480 - DNA, 25 bp, Artificial
  Probe
aaatcttgcagatacggtattcagt

SEQ ID NO: 267481 - DNA, 25 bp, Artificial
  Probe
agtataaatctgttaggagtattag

SEQ ID NO: 267482 - DNA, 25 bp, Artificial
  Probe
tgatatatcgtgctacttacaattg

SEQ ID NO: 267483 - DNA, 25 bp, Artificial
  Probe
tgataactggaggggcccgggagat

SEQ ID NO: 267484 - DNA, 25 bp, Artificial
  Probe
tggtaataaccaacttgtaatcaaa

SEQ ID NO: 267485 - DNA, 25 bp, Artificial
  Probe
attcagtgtgatatatcgtgctact

SEQ ID NO: 267486 - DNA, 25 bp, Artificial
  Probe
tgtgatatatcgtgctacttacaat

SEQ ID NO: 267487 - DNA, 25 bp, Artificial
  Probe
acttacaattgcgggaaatgatgga

SEQ ID NO: 267488 - DNA, 25 bp, Artificial
  Probe
atcggggggcgaagcatagtgtaat

SEQ ID NO: 267489 - DNA, 25 bp, Artificial
  Probe
ctacttacaattgcgggaaatgatg

SEQ ID NO: 267490 - DNA, 25 bp, Artificial
  Probe
acaattgcgggaaatgatggatagg

SEQ ID NO: 267491 - DNA, 25 bp, Artificial
  Probe
tacggtattcagtgtgatatatcgt

SEQ ID NO: 267492 - DNA, 25 bp, Artificial
  Probe
caaaaatcggggggcgaagcatagt

SEQ ID NO: 267493 - DNA, 25 bp, Artificial
  Probe
atcgtgctacttacaattgcgggaa

SEQ ID NO: 267494 - DNA, 25 bp, Artificial
  Probe
gagcggtttgttctgtttcgaaggc

SEQ ID NO: 267495 - DNA, 25 bp, Artificial
  Probe
tgttaaccaaagcaaatgtgagatc

SEQ ID NO: 267496 - DNA, 25 bp, Artificial
  Probe
agctggcatcctgttaatagctatt

SEQ ID NO: 267497 - DNA, 25 bp, Artificial
  Probe
aatcccgtcagttcgactatgctgt

SEQ ID NO: 267498 - DNA, 25 bp, Artificial
  Probe
gccaactggtgatcctgggctgtgt

SEQ ID NO: 267499 - DNA, 25 bp, Artificial
  Probe
cccgtcagttcgactatgctgttag

SEQ ID NO: 267500 - DNA, 25 bp, Artificial
  Probe
aactggtgatcctgggctgtgttaa

SEQ ID NO: 267501 - DNA, 25 bp, Artificial
  Probe
aaatgccaacggagttcggattatg

SEQ ID NO: 267502 - DNA, 25 bp, Artificial
  Probe
actttgttacagattgggcgtacta

SEQ ID NO: 267503 - DNA, 25 bp, Artificial
  Probe
attgaaatgccaacggagttcggat

SEQ ID NO: 267504 - DNA, 25 bp, Artificial
  Probe
tcctgggctgtgttaaccaaagcaa

SEQ ID NO: 267505 - DNA, 25 bp, Artificial
  Probe
aaggcaatcccgtcagttcgactat

SEQ ID NO: 267506 - DNA, 25 bp, Artificial
  Probe
tgctcttttgactgtttccttagga

SEQ ID NO: 267507 - DNA, 25 bp, Artificial
  Probe
gtttgttctgtttcgaaggcaatcc

SEQ ID NO: 267508 - DNA, 25 bp, Artificial
  Probe
tcagctggcatcctgttaatagcta

SEQ ID NO: 267509 - DNA, 25 bp, Artificial
  Probe
tattgaaatgccaacggagttcgga

SEQ ID NO: 267510 - DNA, 25 bp, Artificial
  Probe
ttgttctgtttcgaaggcaatcccg

SEQ ID NO: 267511 - DNA, 25 bp, Artificial
  Probe
aaatgtgagatcagctggcatcctg

SEQ ID NO: 267512 - DNA, 25 bp, Artificial
  Probe
agattgggcgtactaaatgctcttt

SEQ ID NO: 267513 - DNA, 25 bp, Artificial
  Probe
agatcagctggcatcctgttaatag

SEQ ID NO: 267514 - DNA, 25 bp, Artificial
  Probe
ctttgttacagattgggcgtactaa

SEQ ID NO: 267515 - DNA, 25 bp, Artificial
  Probe
tcagttcgactatgctgttagtagg

SEQ ID NO: 267516 - DNA, 25 bp, Artificial
  Probe
cctgagcggtttgttctgtttcgaa

SEQ ID NO: 267517 - DNA, 25 bp, Artificial
  Probe
atgtgagatcagctggcatcctgtt

SEQ ID NO: 267518 - DNA, 25 bp, Artificial
  Probe
tgtttcgaaggcaatcccgtcagtt

SEQ ID NO: 267519 - DNA, 25 bp, Artificial
  Probe
ctgagcggtttgttctgtttcgaag

SEQ ID NO: 267520 - DNA, 25 bp, Artificial
  Probe
cttttgactgtttccttaggaatat

SEQ ID NO: 267521 - DNA, 25 bp, Artificial
  Probe
ggcgtactaaatgctcttttgactg

SEQ ID NO: 267522 - DNA, 25 bp, Artificial
  Probe
cagattgggcgtactaaatgctctt

SEQ ID NO: 267523 - DNA, 25 bp, Artificial
  Probe
aaagtaatttcattacatggcttgc

SEQ ID NO: 267524 - DNA, 25 bp, Artificial
  Probe
agcggtttgttctgtttcgaaggca

SEQ ID NO: 267525 - DNA, 25 bp, Artificial
  Probe
ctgggctgtgttaaccaaagcaaat

SEQ ID NO: 267526 - DNA, 25 bp, Artificial
  Probe
tttcgaaggcaatcccgtcagttcg

SEQ ID NO: 267527 - DNA, 25 bp, Artificial
  Probe
ttaaccaaagcaaatgtgagatcag

SEQ ID NO: 267528 - DNA, 25 bp, Artificial
  Probe
ctcttttgactgtttccttaggaat

SEQ ID NO: 267529 - DNA, 25 bp, Artificial
  Probe
gttctgtttcgaaggcaatcccgtc

SEQ ID NO: 267530 - DNA, 25 bp, Artificial
  Probe
gtgatcctgggctgtgttaaccaaa

SEQ ID NO: 267531 - DNA, 25 bp, Artificial
  Probe
atcagctggcatcctgttaatagct

SEQ ID NO: 267532 - DNA, 25 bp, Artificial
  Probe
ttccctgagcggtttgttctgtttc

SEQ ID NO: 267533 - DNA, 25 bp, Artificial
  Probe
cagttcgactatgctgttagtaggg

SEQ ID NO: 267534 - DNA, 25 bp, Artificial
  Probe
tgtgagatcagctggcatcctgtta

SEQ ID NO: 267535 - DNA, 25 bp, Artificial
  Probe
gtcagttcgactatgctgttagtag

SEQ ID NO: 267536 - DNA, 25 bp, Artificial
  Probe
caacaaaccatattttgggcctttg

SEQ ID NO: 267537 - DNA, 25 bp, Artificial
  Probe
aatgctcttttgactgtttccttag

SEQ ID NO: 267538 - DNA, 25 bp, Artificial
  Probe
gtactaaatgctcttttgactgttt

SEQ ID NO: 267539 - DNA, 25 bp, Artificial
  Probe
ggcatcctgttaatagctatttcaa

SEQ ID NO: 267540 - DNA, 25 bp, Artificial
  Probe
ctaacagatgggagcaacaggttgg

SEQ ID NO: 267541 - DNA, 25 bp, Artificial
  Probe
ggttcctatttgagccactttgctt

SEQ ID NO: 267542 - DNA, 25 bp, Artificial
  Probe
tccatttaacactgggagagtttaa

SEQ ID NO: 267543 - DNA, 25 bp, Artificial
  Probe
acattttacaaagttacaggcaagc

SEQ ID NO: 267544 - DNA, 25 bp, Artificial
  Probe
gcttggttcctatttgagccacttt

SEQ ID NO: 267545 - DNA, 25 bp, Artificial
  Probe
gcagccttccatttaacactgggag

SEQ ID NO: 267546 - DNA, 25 bp, Artificial
  Probe
cagccttccatttaacactgggaga

SEQ ID NO: 267547 - DNA, 25 bp, Artificial
  Probe
cttccatttaacactgggagagttt

SEQ ID NO: 267548 - DNA, 25 bp, Artificial
  Probe
attgtgacaatatctccatccatgg

SEQ ID NO: 267549 - DNA, 25 bp, Artificial
  Probe
cttggttcctatttgagccactttg

SEQ ID NO: 267550 - DNA, 25 bp, Artificial
  Probe
tgatgggcctggaactccagcaggc

SEQ ID NO: 267551 - DNA, 25 bp, Artificial
  Probe
tgagccactttgcttctttaaagag

SEQ ID NO: 267552 - DNA, 25 bp, Artificial
  Probe
agccactttgcttctttaaagagaa

SEQ ID NO: 267553 - DNA, 25 bp, Artificial
  Probe
gccttccatttaacactgggagagt

SEQ ID NO: 267554 - DNA, 25 bp, Artificial
  Probe
atggcagccttccatttaacactgg

SEQ ID NO: 267555 - DNA, 25 bp, Artificial
  Probe
ttttacaaagttacaggcaagcatg

SEQ ID NO: 267556 - DNA, 25 bp, Artificial
  Probe
gccactttgcttctttaaagagaaa

SEQ ID NO: 267557 - DNA, 25 bp, Artificial
  Probe
gtgacaatatctccatccatggcag

SEQ ID NO: 267558 - DNA, 25 bp, Artificial
  Probe
gagccactttgcttctttaaagaga

SEQ ID NO: 267559 - DNA, 25 bp, Artificial
  Probe
agaacctggatgtgatgatgggcct

SEQ ID NO: 267560 - DNA, 25 bp, Artificial
  Probe
agcttggttcctatttgagccactt

SEQ ID NO: 267561 - DNA, 25 bp, Artificial
  Probe
tggcagccttccatttaacactggg

SEQ ID NO: 267562 - DNA, 25 bp, Artificial
  Probe
tgacaatatctccatccatggcagc

SEQ ID NO: 267563 - DNA, 25 bp, Artificial
  Probe
catggcagccttccatttaacactg

SEQ ID NO: 267564 - DNA, 25 bp, Artificial
  Probe
ccttccatttaacactgggagagtt

SEQ ID NO: 267565 - DNA, 25 bp, Artificial
  Probe
tgtgacaatatctccatccatggca

SEQ ID NO: 267566 - DNA, 25 bp, Artificial
  Probe
ccactttgcttctttaaagagaaag

SEQ ID NO: 267567 - DNA, 25 bp, Artificial
  Probe
tttacaaagttacaggcaagcatga

SEQ ID NO: 267568 - DNA, 25 bp, Artificial
  Probe
agccttccatttaacactgggagag

SEQ ID NO: 267569 - DNA, 25 bp, Artificial
  Probe
ttccatttaacactgggagagttta

SEQ ID NO: 267570 - DNA, 25 bp, Artificial
  Probe
gatgatgggcctggaactccagcag

SEQ ID NO: 267571 - DNA, 25 bp, Artificial
  Probe
aaatgctaacagatgggagcaacag

SEQ ID NO: 267572 - DNA, 25 bp, Artificial
  Probe
tggttcctatttgagccactttgct

SEQ ID NO: 267573 - DNA, 25 bp, Artificial
  Probe
attttacaaagttacaggcaagcat

SEQ ID NO: 267574 - DNA, 25 bp, Artificial
  Probe
atgatgggcctggaactccagcagg

SEQ ID NO: 267575 - DNA, 25 bp, Artificial
  Probe
tgatgatgggcctggaactccagca

SEQ ID NO: 267576 - DNA, 25 bp, Artificial
  Probe
aatgctaacagatgggagcaacagg

SEQ ID NO: 267577 - DNA, 25 bp, Artificial
  Probe
ttgtgacaatatctccatccatggc

SEQ ID NO: 267578 - DNA, 25 bp, Artificial
  Probe
ttggttcctatttgagccactttgc

SEQ ID NO: 267579 - DNA, 25 bp, Artificial
  Probe
tttgagccactttgcttctttaaag

SEQ ID NO: 267580 - DNA, 25 bp, Artificial
  Probe
ttgagccactttgcttctttaaaga

SEQ ID NO: 267581 - DNA, 25 bp, Artificial
  Probe
aacattttacaaagttacaggcaag

SEQ ID NO: 267582 - DNA, 25 bp, Artificial
  Probe
gacaatatctccatccatggcagcc

SEQ ID NO: 267583 - DNA, 25 bp, Artificial
  Probe
gatgggcctggaactccagcaggcc

SEQ ID NO: 267584 - DNA, 25 bp, Artificial
  Probe
cattttacaaagttacaggcaagca

SEQ ID NO: 267585 - DNA, 25 bp, Artificial
  Probe
ggcagccttccatttaacactggga

SEQ ID NO: 267586 - DNA, 25 bp, Artificial
  Probe
ctgctgagcgagaaaggggaattca

SEQ ID NO: 267587 - DNA, 25 bp, Artificial
  Probe
ctacacgtggaagaagttgttccga

SEQ ID NO: 267588 - DNA, 25 bp, Artificial
  Probe
atcgagattgttggatgtgctgacc

SEQ ID NO: 267589 - DNA, 25 bp, Artificial
  Probe
ttggccttggcgttttggcaattac

SEQ ID NO: 267590 - DNA, 25 bp, Artificial
  Probe
acatggtcagtgtgaagagattcca

SEQ ID NO: 267591 - DNA, 25 bp, Artificial
  Probe
aagttgttccgagtgtaattgagcc

SEQ ID NO: 267592 - DNA, 25 bp, Artificial
  Probe
cttgttgagacttggccttggcgtt

SEQ ID NO: 267593 - DNA, 25 bp, Artificial
  Probe
taccgagatggagctgctgctgagc

SEQ ID NO: 267594 - DNA, 25 bp, Artificial
  Probe
gtaattgagccctcttttggcctga

SEQ ID NO: 267595 - DNA, 25 bp, Artificial
  Probe
tgctggagtacctcggcgcctgcga

SEQ ID NO: 267596 - DNA, 25 bp, Artificial
  Probe
gacatggtcagtgtgaagagattcc

SEQ ID NO: 267597 - DNA, 25 bp, Artificial
  Probe
tgttccgagtgtaattgagccctct

SEQ ID NO: 267598 - DNA, 25 bp, Artificial
  Probe
tcaaatgttctgtcctttcactgag

SEQ ID NO: 267599 - DNA, 25 bp, Artificial
  Probe
tgataagcccctgaaagagcccaaa

SEQ ID NO: 267600 - DNA, 25 bp, Artificial
  Probe
agcagagaacgttcttcagtttccc

SEQ ID NO: 267601 - DNA, 25 bp, Artificial
  Probe
atgtgctgaccgatcctgctatgac

SEQ ID NO: 267602 - DNA, 25 bp, Artificial
  Probe
agagattccagaaaacactacacgt

SEQ ID NO: 267603 - DNA, 25 bp, Artificial
  Probe
tggacttttgatacccgtggaccaa

SEQ ID NO: 267604 - DNA, 25 bp, Artificial
  Probe
tgatacccgtggaccaaggaaccct

SEQ ID NO: 267605 - DNA, 25 bp, Artificial
  Probe
cgctattgcaggaacttgttgagac

SEQ ID NO: 267606 - DNA, 25 bp, Artificial
  Probe
agatgcaaagctggtgctggagtac

SEQ ID NO: 267607 - DNA, 25 bp, Artificial
  Probe
atgacctctcctgtcatgctcgagc

SEQ ID NO: 267608 - DNA, 25 bp, Artificial
  Probe
tcactattgaaactgaaggaaaaac

SEQ ID NO: 267609 - DNA, 25 bp, Artificial
  Probe
atattggaacatacattccacggtc

SEQ ID NO: 267610 - DNA, 25 bp, Artificial
  Probe
ggatcatgtataccatattggaaca

SEQ ID NO: 267611 - DNA, 25 bp, Artificial
  Probe
gtcctttcactgagcccaaaccaag

SEQ ID NO: 267612 - DNA, 25 bp, Artificial
  Probe
ctggtggctgataagcccctgaaag

SEQ ID NO: 267613 - DNA, 25 bp, Artificial
  Probe
cctatggctggatcgagattgttgg

SEQ ID NO: 267614 - DNA, 25 bp, Artificial
  Probe
ttttggcaattaccattggactttt

SEQ ID NO: 267615 - DNA, 25 bp, Artificial
  Probe
aacatacattccacggtccggaggg

SEQ ID NO: 267616 - DNA, 25 bp, Artificial
  Probe
tcctgtcatgctcgagccaccaaag

SEQ ID NO: 267617 - DNA, 25 bp, Artificial
  Probe
gccttggcgttttggcaattaccat

SEQ ID NO: 267618 - DNA, 25 bp, Artificial
  Probe
attaccattggacttttgatacccg

SEQ ID NO: 267619 - DNA, 25 bp, Artificial
  Probe
gctgctccattcaaatgttctgtcc

SEQ ID NO: 267620 - DNA, 25 bp, Artificial
  Probe
attgttggatgtgctgaccgatcct

SEQ ID NO: 267621 - DNA, 25 bp, Artificial
  Probe
ctgtcatgctcgagccaccaaagtc

SEQ ID NO: 267622 - DNA, 25 bp, Artificial
  Probe
acagttaacgttgtacagtttgagc

SEQ ID NO: 267623 - DNA, 25 bp, Artificial
  Probe
gcctgagcaggatcatgtataccat

SEQ ID NO: 267624 - DNA, 25 bp, Artificial
  Probe
gatcatgtataccatattggaacat

SEQ ID NO: 267625 - DNA, 25 bp, Artificial
  Probe
tttgagcccaacaagggagccgtgg

SEQ ID NO: 267626 - DNA, 25 bp, Artificial
  Probe
tcgagccaccaaagtcccgctggtg

SEQ ID NO: 267627 - DNA, 25 bp, Artificial
  Probe
tacctcggcgcctgcgatgagtgct

SEQ ID NO: 267628 - DNA, 25 bp, Artificial
  Probe
acatttcagttaacaaaagacatgg

SEQ ID NO: 267629 - DNA, 25 bp, Artificial
  Probe
ctgaaagagcccaaaacagttaacg

SEQ ID NO: 267630 - DNA, 25 bp, Artificial
  Probe
ttcactgagcccaaaccaagagttt

SEQ ID NO: 267631 - DNA, 25 bp, Artificial
  Probe
gcccaaaacagttaacgttgtacag

SEQ ID NO: 267632 - DNA, 25 bp, Artificial
  Probe
gaaccagaaggcttcgaaaagcagc

SEQ ID NO: 267633 - DNA, 25 bp, Artificial
  Probe
gccctctctgccatgcaagacaaaa

SEQ ID NO: 267634 - DNA, 25 bp, Artificial
  Probe
tcatggccgtcatgcccagcataac

SEQ ID NO: 267635 - DNA, 25 bp, Artificial
  Probe
ttgcccaggggcaaatccttcagaa

SEQ ID NO: 267636 - DNA, 25 bp, Artificial
  Probe
cgaggatcaagctggacctgttctc

SEQ ID NO: 267637 - DNA, 25 bp, Artificial
  Probe
tctgcactcggtgatgcaaagcggc

SEQ ID NO: 267638 - DNA, 25 bp, Artificial
  Probe
tttggaaccagaaggcttcgaaaag

SEQ ID NO: 267639 - DNA, 25 bp, Artificial
  Probe
cactcggtgatgcaaagcggcagct

SEQ ID NO: 267640 - DNA, 25 bp, Artificial
  Probe
ccaagtctgattagaaccgcccatc

SEQ ID NO: 267641 - DNA, 25 bp, Artificial
  Probe
aaccagaaggcttcgaaaagcagcg

SEQ ID NO: 267642 - DNA, 25 bp, Artificial
  Probe
agagacgaggatcaagctggacctg

SEQ ID NO: 267643 - DNA, 25 bp, Artificial
  Probe
tagagaacagcctcagtgcagagac

SEQ ID NO: 267644 - DNA, 25 bp, Artificial
  Probe
cacctagagaacagcctcagtgcag

SEQ ID NO: 267645 - DNA, 25 bp, Artificial
  Probe
ctcagtgcagagacgaggatcaagc

SEQ ID NO: 267646 - DNA, 25 bp, Artificial
  Probe
aaacgcaacacctagagaacagcct

SEQ ID NO: 267647 - DNA, 25 bp, Artificial
  Probe
gaaataacatccaagtctgattaga

SEQ ID NO: 267648 - DNA, 25 bp, Artificial
  Probe
atccttcagaaagaccaggaaatca

SEQ ID NO: 267649 - DNA, 25 bp, Artificial
  Probe
atgaaggccaactgtgtgtttgccc

SEQ ID NO: 267650 - DNA, 25 bp, Artificial
  Probe
aaatccttcagaaagaccaggaaat

SEQ ID NO: 267651 - DNA, 25 bp, Artificial
  Probe
aatgaaggccaactgtgtgtttgcc

SEQ ID NO: 267652 - DNA, 25 bp, Artificial
  Probe
atgcaaagcggcagctcgagattgc

SEQ ID NO: 267653 - DNA, 25 bp, Artificial
  Probe
agtttttagaagacctcacaggact

SEQ ID NO: 267654 - DNA, 25 bp, Artificial
  Probe
gatagctgaagtcatggccgtcatg

SEQ ID NO: 267655 - DNA, 25 bp, Artificial
  Probe
tgttctctgcactcggtgatgcaaa

SEQ ID NO: 267656 - DNA, 25 bp, Artificial
  Probe
tcggtgatgcaaagcggcagctcga

SEQ ID NO: 267657 - DNA, 25 bp, Artificial
  Probe
gccatgcaagacaaaacgcaacacc

SEQ ID NO: 267658 - DNA, 25 bp, Artificial
  Probe
tccttcagaaagaccaggaaatcaa

SEQ ID NO: 267659 - DNA, 25 bp, Artificial
  Probe
aagtctgattagaaccgcccatcag

SEQ ID NO: 267660 - DNA, 25 bp, Artificial
  Probe
gcccctctggacttgatcctaatgc

SEQ ID NO: 267661 - DNA, 25 bp, Artificial
  Probe
atgcccagcataacatacagtgccg

SEQ ID NO: 267662 - DNA, 25 bp, Artificial
  Probe
ggaaataacatccaagtctgattag

SEQ ID NO: 267663 - DNA, 25 bp, Artificial
  Probe
atgcaagacaaaacgcaacacctag

SEQ ID NO: 267664 - DNA, 25 bp, Artificial
  Probe
agtctgattagaaccgcccatcagt

SEQ ID NO: 267665 - DNA, 25 bp, Artificial
  Probe
gcagctcgagattgcccaggggcaa

SEQ ID NO: 267666 - DNA, 25 bp, Artificial
  Probe
ttagaaccgcccatcagttgttctt

SEQ ID NO: 267667 - DNA, 25 bp, Artificial
  Probe
tcaaggacctaaaacagaagatagc

SEQ ID NO: 267668 - DNA, 25 bp, Artificial
  Probe
taacatccaagtctgattagaaccg

SEQ ID NO: 267669 - DNA, 25 bp, Artificial
  Probe
catttggaaccagaaggcttcgaaa

SEQ ID NO: 267670 - DNA, 25 bp, Artificial
  Probe
ccatcagttgttcttggaagttttt

SEQ ID NO: 267671 - DNA, 25 bp, Artificial
  Probe
aagcggcagctcgagattgcccagg

SEQ ID NO: 267672 - DNA, 25 bp, Artificial
  Probe
gccgtcatgcccagcataacataca

SEQ ID NO: 267673 - DNA, 25 bp, Artificial
  Probe
acatttggaaccagaaggcttcgaa

SEQ ID NO: 267674 - DNA, 25 bp, Artificial
  Probe
ctctgcactcggtgatgcaaagcgg

SEQ ID NO: 267675 - DNA, 25 bp, Artificial
  Probe
cagcccctctggacttgatcctaat

SEQ ID NO: 267676 - DNA, 25 bp, Artificial
  Probe
aagtcatggccgtcatgcccagcat

SEQ ID NO: 267677 - DNA, 25 bp, Artificial
  Probe
tagctgaagtcatggccgtcatgcc

SEQ ID NO: 267678 - DNA, 25 bp, Artificial
  Probe
tttggagaacattcccttttgccag

SEQ ID NO: 267679 - DNA, 25 bp, Artificial
  Probe
acattcccttttgccaggtgtgcga

SEQ ID NO: 267680 - DNA, 25 bp, Artificial
  Probe
aaggccggcaccatggcctttccaa

SEQ ID NO: 267681 - DNA, 25 bp, Artificial
  Probe
caatcccactaataataaacaaaat

SEQ ID NO: 267682 - DNA, 25 bp, Artificial
  Probe
tgccaggtgtgcgaattgcaagaag

SEQ ID NO: 267683 - DNA, 25 bp, Artificial
  Probe
caagaaggccggcaccatggccttt

SEQ ID NO: 267684 - DNA, 25 bp, Artificial
  Probe
atagtgggcggtttacaattacttg

SEQ ID NO: 267685 - DNA, 25 bp, Artificial
  Probe
cggaacccaaatagccttatagtgg

SEQ ID NO: 267686 - DNA, 25 bp, Artificial
  Probe
aacattcccttttgccaggtgtgcg

SEQ ID NO: 267687 - DNA, 25 bp, Artificial
  Probe
agaacattcccttttgccaggtgtg

SEQ ID NO: 267688 - DNA, 25 bp, Artificial
  Probe
cgaattgcaagaaggccggcaccat

SEQ ID NO: 267689 - DNA, 25 bp, Artificial
  Probe
gaattgcaagaaggccggcaccatg

SEQ ID NO: 267690 - DNA, 25 bp, Artificial
  Probe
cactaataataaacaaaatacactc

SEQ ID NO: 267691 - DNA, 25 bp, Artificial
  Probe
agttgcgacacttgattggaattgg

SEQ ID NO: 267692 - DNA, 25 bp, Artificial
  Probe
gaaggccggcaccatggcctttcca

SEQ ID NO: 267693 - DNA, 25 bp, Artificial
  Probe
ggagaacattcccttttgccaggtg

SEQ ID NO: 267694 - DNA, 25 bp, Artificial
  Probe
acacttgattggaattggaaaatgg

SEQ ID NO: 267695 - DNA, 25 bp, Artificial
  Probe
caaatagccttatagtgggcggttt

SEQ ID NO: 267696 - DNA, 25 bp, Artificial
  Probe
tacaattacttgccggcgttttaca

SEQ ID NO: 267697 - DNA, 25 bp, Artificial
  Probe
cgacacttgattggaattggaaaat

SEQ ID NO: 267698 - DNA, 25 bp, Artificial
  Probe
tttgccaggtgtgcgaattgcaaga

SEQ ID NO: 267699 - DNA, 25 bp, Artificial
  Probe
ttttgccaggtgtgcgaattgcaag

SEQ ID NO: 267700 - DNA, 25 bp, Artificial
  Probe
ccggaacccaaatagccttatagtg

SEQ ID NO: 267701 - DNA, 25 bp, Artificial
  Probe
gagaacattcccttttgccaggtgt

SEQ ID NO: 267702 - DNA, 25 bp, Artificial
  Probe
ttcccttttgccaggtgtgcgaatt

SEQ ID NO: 267703 - DNA, 25 bp, Artificial
  Probe
tcccttttgccaggtgtgcgaattg

SEQ ID NO: 267704 - DNA, 25 bp, Artificial
  Probe
cttttgccaggtgtgcgaattgcaa

SEQ ID NO: 267705 - DNA, 25 bp, Artificial
  Probe
ccaggtgtgcgaattgcaagaaggc

SEQ ID NO: 267706 - DNA, 25 bp, Artificial
  Probe
ctttggagaacattcccttttgcca

SEQ ID NO: 267707 - DNA, 25 bp, Artificial
  Probe
cgctttggagaacattcccttttgc

SEQ ID NO: 267708 - DNA, 25 bp, Artificial
  Probe
tcccactaataataaacaaaataca

SEQ ID NO: 267709 - DNA, 25 bp, Artificial
  Probe
caacagttgcgacacttgattggaa

SEQ ID NO: 267710 - DNA, 25 bp, Artificial
  Probe
gccttatagtgggcggtttacaatt

SEQ ID NO: 267711 - DNA, 25 bp, Artificial
  Probe
ttgccaggtgtgcgaattgcaagaa

SEQ ID NO: 267712 - DNA, 25 bp, Artificial
  Probe
ccttttgccaggtgtgcgaattgca

SEQ ID NO: 267713 - DNA, 25 bp, Artificial
  Probe
gaacattcccttttgccaggtgtgc

SEQ ID NO: 267714 - DNA, 25 bp, Artificial
  Probe
ttatagtgggcggtttacaattact

SEQ ID NO: 267715 - DNA, 25 bp, Artificial
  Probe
acagttgcgacacttgattggaatt

SEQ ID NO: 267716 - DNA, 25 bp, Artificial
  Probe
atagccttatagtgggcggtttaca

SEQ ID NO: 267717 - DNA, 25 bp, Artificial
  Probe
cagttgcgacacttgattggaattg

SEQ ID NO: 267718 - DNA, 25 bp, Artificial
  Probe
tggcctttccaacagttgcgacact

SEQ ID NO: 267719 - DNA, 25 bp, Artificial
  Probe
taataaacaaaatacactcggggtg

SEQ ID NO: 267720 - DNA, 25 bp, Artificial
  Probe
gctttggagaacattcccttttgcc

SEQ ID NO: 267721 - DNA, 25 bp, Artificial
  Probe
aacagttgcgacacttgattggaat

SEQ ID NO: 267722 - DNA, 25 bp, Artificial
  Probe
ttggagaacattcccttttgccagg

SEQ ID NO: 267723 - DNA, 25 bp, Artificial
  Probe
ggaacccaaatagccttatagtggg

SEQ ID NO: 267724 - DNA, 25 bp, Artificial
  Probe
ccccaagaggagcatcaagcctgct

SEQ ID NO: 267725 - DNA, 25 bp, Artificial
  Probe
ggctaagcacctagggagccccaag

SEQ ID NO: 267726 - DNA, 25 bp, Artificial
  Probe
gagcatcaagcctgctgctggggaa

SEQ ID NO: 267727 - DNA, 25 bp, Artificial
  Probe
gccccaagaggagcatcaagcctgc

SEQ ID NO: 267728 - DNA, 25 bp, Artificial
  Probe
ggattcgtgctgttctacaataaca

SEQ ID NO: 267729 - DNA, 25 bp, Artificial
  Probe
atcaagcctgctgctggggaacagt

SEQ ID NO: 267730 - DNA, 25 bp, Artificial
  Probe
actgaggctccctgcggagcggaca

SEQ ID NO: 267731 - DNA, 25 bp, Artificial
  Probe
aggctaagcacctagggagccccaa

SEQ ID NO: 267732 - DNA, 25 bp, Artificial
  Probe
gaggctaagcacctagggagcccca

SEQ ID NO: 267733 - DNA, 25 bp, Artificial
  Probe
acacacaaatcctgtgaggctgatt

SEQ ID NO: 267734 - DNA, 25 bp, Artificial
  Probe
tcttggattcgtgctgttctacaat

SEQ ID NO: 267735 - DNA, 25 bp, Artificial
  Probe
agccagaaggcagtcacctgagact

SEQ ID NO: 267736 - DNA, 25 bp, Artificial
  Probe
gattcgtgctgttctacaataacac

SEQ ID NO: 267737 - DNA, 25 bp, Artificial
  Probe
cttccgaggctaagcacctagggag

SEQ ID NO: 267738 - DNA, 25 bp, Artificial
  Probe
cacaaatcctgtgaggctgattagg

SEQ ID NO: 267739 - DNA, 25 bp, Artificial
  Probe
aggtccagtgccttccgaggctaag

SEQ ID NO: 267740 - DNA, 25 bp, Artificial
  Probe
agcactgaggtccagtgccttccga

SEQ ID NO: 267741 - DNA, 25 bp, Artificial
  Probe
acacaaatcctgtgaggctgattag

SEQ ID NO: 267742 - DNA, 25 bp, Artificial
  Probe
ggagccccaagaggagcatcaagcc

SEQ ID NO: 267743 - DNA, 25 bp, Artificial
  Probe
agccccaagaggagcatcaagcctg

SEQ ID NO: 267744 - DNA, 25 bp, Artificial
  Probe
tagggagccccaagaggagcatcaa

SEQ ID NO: 267745 - DNA, 25 bp, Artificial
  Probe
ggtccagtgccttccgaggctaagc

SEQ ID NO: 267746 - DNA, 25 bp, Artificial
  Probe
ataacacacaaatcctgtgaggctg

SEQ ID NO: 267747 - DNA, 25 bp, Artificial
  Probe
agaggagcatcaagcctgctgctgg

SEQ ID NO: 267748 - DNA, 25 bp, Artificial
  Probe
actgaggtccagtgccttccgaggc

SEQ ID NO: 267749 - DNA, 25 bp, Artificial
  Probe
tcagcactgaggtccagtgccttcc

SEQ ID NO: 267750 - DNA, 25 bp, Artificial
  Probe
cttggattcgtgctgttctacaata

SEQ ID NO: 267751 - DNA, 25 bp, Artificial
  Probe
gcactgaggtccagtgccttccgag

SEQ ID NO: 267752 - DNA, 25 bp, Artificial
  Probe
ctagggagccccaagaggagcatca

SEQ ID NO: 267753 - DNA, 25 bp, Artificial
  Probe
tccgaggctaagcacctagggagcc

SEQ ID NO: 267754 - DNA, 25 bp, Artificial
  Probe
aagccagaaggcagtcacctgagac

SEQ ID NO: 267755 - DNA, 25 bp, Artificial
  Probe
caagcctgctgctggggaacagttg

SEQ ID NO: 267756 - DNA, 25 bp, Artificial
  Probe
tcaagcctgctgctggggaacagtt

SEQ ID NO: 267757 - DNA, 25 bp, Artificial
  Probe
caataacacacaaatcctgtgaggc

SEQ ID NO: 267758 - DNA, 25 bp, Artificial
  Probe
gccttccgaggctaagcacctaggg

SEQ ID NO: 267759 - DNA, 25 bp, Artificial
  Probe
gggagccccaagaggagcatcaagc

SEQ ID NO: 267760 - DNA, 25 bp, Artificial
  Probe
ttccgaggctaagcacctagggagc

SEQ ID NO: 267761 - DNA, 25 bp, Artificial
  Probe
aagcacctagggagccccaagagga

SEQ ID NO: 267762 - DNA, 25 bp, Artificial
  Probe
acagttggaggagactgaggctccc

SEQ ID NO: 267763 - DNA, 25 bp, Artificial
  Probe
acaataacacacaaatcctgtgagg

SEQ ID NO: 267764 - DNA, 25 bp, Artificial
  Probe
gcatcaagcctgctgctggggaaca

SEQ ID NO: 267765 - DNA, 25 bp, Artificial
  Probe
taacacacaaatcctgtgaggctga

SEQ ID NO: 267766 - DNA, 25 bp, Artificial
  Probe
gcggacacggagctgtcgctgcatt

SEQ ID NO: 267767 - DNA, 25 bp, Artificial
  Probe
aacacacaaatcctgtgaggctgat

SEQ ID NO: 267768 - DNA, 25 bp, Artificial
  Probe
cggacacggagctgtcgctgcattg

SEQ ID NO: 267769 - DNA, 25 bp, Artificial
  Probe
gacacggagctgtcgctgcattgcc

SEQ ID NO: 267770 - DNA, 25 bp, Artificial
  Probe
gttcttagctggacggtttagccat

SEQ ID NO: 267771 - DNA, 25 bp, Artificial
  Probe
gtttctgagtgatgcgtccgtcaca

SEQ ID NO: 267772 - DNA, 25 bp, Artificial
  Probe
ccacggctttgtaggaagatactgc

SEQ ID NO: 267773 - DNA, 25 bp, Artificial
  Probe
gtcacagtggcctgcacctaaatcc

SEQ ID NO: 267774 - DNA, 25 bp, Artificial
  Probe
aaatgtcatgaccttgaagtttctg

SEQ ID NO: 267775 - DNA, 25 bp, Artificial
  Probe
atttgtagcttttggacctcatttg

SEQ ID NO: 267776 - DNA, 25 bp, Artificial
  Probe
gctactggcacatccggctcaagta

SEQ ID NO: 267777 - DNA, 25 bp, Artificial
  Probe
aagatactgcggtgatgaacttcca

SEQ ID NO: 267778 - DNA, 25 bp, Artificial
  Probe
caggtttgctactggcacatccggc

SEQ ID NO: 267779 - DNA, 25 bp, Artificial
  Probe
ccagattaaatacgtcacagtggcc

SEQ ID NO: 267780 - DNA, 25 bp, Artificial
  Probe
tcaagtacggtcagcgaattcacct

SEQ ID NO: 267781 - DNA, 25 bp, Artificial
  Probe
tttgctactggcacatccggctcaa

SEQ ID NO: 267782 - DNA, 25 bp, Artificial
  Probe
tgaacatgatccaggctgtttggct

SEQ ID NO: 267783 - DNA, 25 bp, Artificial
  Probe
ttacagacccgaagcgaatctttaa

SEQ ID NO: 267784 - DNA, 25 bp, Artificial
  Probe
tccggctcaagtacggtcagcgaat

SEQ ID NO: 267785 - DNA, 25 bp, Artificial
  Probe
aatacgtcacagtggcctgcaccta

SEQ ID NO: 267786 - DNA, 25 bp, Artificial
  Probe
gcctgcacctaaatccaatcaaggc

SEQ ID NO: 267787 - DNA, 25 bp, Artificial
  Probe
catgatccaggctgtttggctgact

SEQ ID NO: 267788 - DNA, 25 bp, Artificial
  Probe
ttagctggacggtttagccatctat

SEQ ID NO: 267789 - DNA, 25 bp, Artificial
  Probe
atatgacagttatgacgatgtccac

SEQ ID NO: 267790 - DNA, 25 bp, Artificial
  Probe
tttacagacccgaagcgaatcttta

SEQ ID NO: 267791 - DNA, 25 bp, Artificial
  Probe
acagttatgacgatgtccacggctt

SEQ ID NO: 267792 - DNA, 25 bp, Artificial
  Probe
aagcgaatctttaaatccccaggct

SEQ ID NO: 267793 - DNA, 25 bp, Artificial
  Probe
agttcttagctggacggtttagcca

SEQ ID NO: 267794 - DNA, 25 bp, Artificial
  Probe
cccaggcttcccaaatgagtatgac

SEQ ID NO: 267795 - DNA, 25 bp, Artificial
  Probe
ggcacatccggctcaagtacggtca

SEQ ID NO: 267796 - DNA, 25 bp, Artificial
  Probe
ttcccaaatgagtatgacgacaacc

SEQ ID NO: 267797 - DNA, 25 bp, Artificial
  Probe
agctggacggtttagccatctataa

SEQ ID NO: 267798 - DNA, 25 bp, Artificial
  Probe
tttttggactttgaccttgaacatg

SEQ ID NO: 267799 - DNA, 25 bp, Artificial
  Probe
atgagtatgacgacaaccaggtttg

SEQ ID NO: 267800 - DNA, 25 bp, Artificial
  Probe
gcgaatctttaaatccccaggcttc

SEQ ID NO: 267801 - DNA, 25 bp, Artificial
  Probe
tcagcacaggaaatgtcatgacctt

SEQ ID NO: 267802 - DNA, 25 bp, Artificial
  Probe
gtacggtcagcgaattcacctgagc

SEQ ID NO: 267803 - DNA, 25 bp, Artificial
  Probe
gacggtttagccatctataattctt

SEQ ID NO: 267804 - DNA, 25 bp, Artificial
  Probe
gatgtccacggctttgtaggaagat

SEQ ID NO: 267805 - DNA, 25 bp, Artificial
  Probe
tggacctcatttgttctcaattttg

SEQ ID NO: 267806 - DNA, 25 bp, Artificial
  Probe
atatatgacagttatgacgatgtcc

SEQ ID NO: 267807 - DNA, 25 bp, Artificial
  Probe
aaatccccaggcttcccaaatgagt

SEQ ID NO: 267808 - DNA, 25 bp, Artificial
  Probe
cggtgatgaacttccagaagacatc

SEQ ID NO: 267809 - DNA, 25 bp, Artificial
  Probe
gtgtctttacagacccgaagcgaat

SEQ ID NO: 267810 - DNA, 25 bp, Artificial
  Probe
gcttttggacctcatttgttctcaa

SEQ ID NO: 267811 - DNA, 25 bp, Artificial
  Probe
atgacgatgtccacggctttgtagg

SEQ ID NO: 267812 - DNA, 25 bp, Artificial
  Probe
ggactttgaccttgaacatgatcca

SEQ ID NO: 267813 - DNA, 25 bp, Artificial
  Probe
ggcttccagattaaatacgtcacag

SEQ ID NO: 267814 - DNA, 25 bp, Artificial
  Probe
ttatatttgtagcttttggacctca

SEQ ID NO: 267815 - DNA, 25 bp, Artificial
  Probe
atccaggctgtttggctgactatgt

SEQ ID NO: 267816 - DNA, 25 bp, Artificial
  Probe
ccagcatgacggtgatggaagccca

SEQ ID NO: 267817 - DNA, 25 bp, Artificial
  Probe
gcgtgctctggaagccctaaggacg

SEQ ID NO: 267818 - DNA, 25 bp, Artificial
  Probe
atgaggcgacccttgtgcgtgctct

SEQ ID NO: 267819 - DNA, 25 bp, Artificial
  Probe
cttctgtggagtcgattcagattgt

SEQ ID NO: 267820 - DNA, 25 bp, Artificial
  Probe
cgcctgcacaaacagtccagcatga

SEQ ID NO: 267821 - DNA, 25 bp, Artificial
  Probe
gctctctgggtctggccttctgccg

SEQ ID NO: 267822 - DNA, 25 bp, Artificial
  Probe
cctggggctctctgggtctggcctt

SEQ ID NO: 267823 - DNA, 25 bp, Artificial
  Probe
tactgtcagcgatgggcgaagagtt

SEQ ID NO: 267824 - DNA, 25 bp, Artificial
  Probe
ttactgtcagcgatgggcgaagagt

SEQ ID NO: 267825 - DNA, 25 bp, Artificial
  Probe
ctctggaagccctaaggacgagcac

SEQ ID NO: 267826 - DNA, 25 bp, Artificial
  Probe
tcatgtggcggaagccagaaaaatg

SEQ ID NO: 267827 - DNA, 25 bp, Artificial
  Probe
gctcttcaacaacgtcaagctacag

SEQ ID NO: 267828 - DNA, 25 bp, Artificial
  Probe
aatgtgttgtgacttcacacactca

SEQ ID NO: 267829 - DNA, 25 bp, Artificial
  Probe
gacccttgtgcgtgctctggaagcc

SEQ ID NO: 267830 - DNA, 25 bp, Artificial
  Probe
tcacacactcaaagggtcaaagctc

SEQ ID NO: 267831 - DNA, 25 bp, Artificial
  Probe
ttatcaatgggttttcacgaatggc

SEQ ID NO: 267832 - DNA, 25 bp, Artificial
  Probe
gttgtgacttcacacactcaaaggg

SEQ ID NO: 267833 - DNA, 25 bp, Artificial
  Probe
ggttttcacgaatggccagaataac

SEQ ID NO: 267834 - DNA, 25 bp, Artificial
  Probe
cttcacacactcaaagggtcaaagc

SEQ ID NO: 267835 - DNA, 25 bp, Artificial
  Probe
agctacagcgggaaacttctgtgga

SEQ ID NO: 267836 - DNA, 25 bp, Artificial
  Probe
tcaccctgtatgaactgaccagtgg

SEQ ID NO: 267837 - DNA, 25 bp, Artificial
  Probe
aactaatggcccacagaatgtgttg

SEQ ID NO: 267838 - DNA, 25 bp, Artificial
  Probe
tcttctaacaaagaactgggttcct

SEQ ID NO: 267839 - DNA, 25 bp, Artificial
  Probe
aacagtccagcatgacggtgatgga

SEQ ID NO: 267840 - DNA, 25 bp, Artificial
  Probe
acgtcaagctacagcgggaaacttc

SEQ ID NO: 267841 - DNA, 25 bp, Artificial
  Probe
aggagagcccgctcttcaacaacgt

SEQ ID NO: 267842 - DNA, 25 bp, Artificial
  Probe
gagcccgctcttcaacaacgtcaag

SEQ ID NO: 267843 - DNA, 25 bp, Artificial
  Probe
attcatgggctggatgaggcgaccc

SEQ ID NO: 267844 - DNA, 25 bp, Artificial
  Probe
aggcgacccttgtgcgtgctctgga

SEQ ID NO: 267845 - DNA, 25 bp, Artificial
  Probe
tttctgatcatgtggcggaagccag

SEQ ID NO: 267846 - DNA, 25 bp, Artificial
  Probe
cccacagaatgtgttgtgacttcac

SEQ ID NO: 267847 - DNA, 25 bp, Artificial
  Probe
ctgcacaaacagtccagcatgacgg

SEQ ID NO: 267848 - DNA, 25 bp, Artificial
  Probe
tcatgggctggatgaggcgaccctt

SEQ ID NO: 267849 - DNA, 25 bp, Artificial
  Probe
ctcatttatcaatgggttttcacga

SEQ ID NO: 267850 - DNA, 25 bp, Artificial
  Probe
atcatgtggcggaagccagaaaaat

SEQ ID NO: 267851 - DNA, 25 bp, Artificial
  Probe
ctaaggacgagcacaagggtgagat

SEQ ID NO: 267852 - DNA, 25 bp, Artificial
  Probe
actcatttatcaatgggttttcacg

SEQ ID NO: 267853 - DNA, 25 bp, Artificial
  Probe
gagacacacgaggagaagagattca

SEQ ID NO: 267854 - DNA, 25 bp, Artificial
  Probe
aaagtctagctttctgatcatgtgg

SEQ ID NO: 267855 - DNA, 25 bp, Artificial
  Probe
cagcatgacggtgatggaagcccag

SEQ ID NO: 267856 - DNA, 25 bp, Artificial
  Probe
gggctctctgggtctggccttctgc

SEQ ID NO: 267857 - DNA, 25 bp, Artificial
  Probe
tgatggaagcccaggagagcccgct

SEQ ID NO: 267858 - DNA, 25 bp, Artificial
  Probe
acactcaaagggtcaaagctcagag

SEQ ID NO: 267859 - DNA, 25 bp, Artificial
  Probe
agacacacgaggagaagagattcat

SEQ ID NO: 267860 - DNA, 25 bp, Artificial
  Probe
gaagcccaggagagcccgctcttca

SEQ ID NO: 267861 - DNA, 25 bp, Artificial
  Probe
attattactgtcagcgatgggcgaa

SEQ ID NO: 267862 - DNA, 25 bp, Artificial
  Probe
ccggtccaattcgctaaagagccga

SEQ ID NO: 267863 - DNA, 25 bp, Artificial
  Probe
cgcaggaaactcgtccattttcctt

SEQ ID NO: 267864 - DNA, 25 bp, Artificial
  Probe
ggtccaattcgctaaagagccgata

SEQ ID NO: 267865 - DNA, 25 bp, Artificial
  Probe
agccgcaggaaactcgtccattttc

SEQ ID NO: 267866 - DNA, 25 bp, Artificial
  Probe
aacacacaacaaacataactacaaa

SEQ ID NO: 267867 - DNA, 25 bp, Artificial
  Probe
aatcaggcgggataaagccgcagga

SEQ ID NO: 267868 - DNA, 25 bp, Artificial
  Probe
gtccaattcgctaaagagccgataa

SEQ ID NO: 267869 - DNA, 25 bp, Artificial
  Probe
gccgcaggaaactcgtccattttcc

SEQ ID NO: 267870 - DNA, 25 bp, Artificial
  Probe
aagccgcaggaaactcgtccatttt

SEQ ID NO: 267871 - DNA, 25 bp, Artificial
  Probe
gcaggaaactcgtccattttccttg

SEQ ID NO: 267872 - DNA, 25 bp, Artificial
  Probe
aacaaacataactacaaactccgag

SEQ ID NO: 267873 - DNA, 25 bp, Artificial
  Probe
ggataaagccgcaggaaactcgtcc

SEQ ID NO: 267874 - DNA, 25 bp, Artificial
  Probe
gagccgataatcaggcgggataaag

SEQ ID NO: 267875 - DNA, 25 bp, Artificial
  Probe
cgataatcaggcgggataaagccgc

SEQ ID NO: 267876 - DNA, 25 bp, Artificial
  Probe
ataaagccgcaggaaactcgtccat

SEQ ID NO: 267877 - DNA, 25 bp, Artificial
  Probe
ctaaagagccgataatcaggcggga

SEQ ID NO: 267878 - DNA, 25 bp, Artificial
  Probe
gggcccggtccaattcgctaaagag

SEQ ID NO: 267879 - DNA, 25 bp, Artificial
  Probe
tccgaggggcccggtccaattcgct

SEQ ID NO: 267880 - DNA, 25 bp, Artificial
  Probe
tccaattcgctaaagagccgataat

SEQ ID NO: 267881 - DNA, 25 bp, Artificial
  Probe
gcccggtccaattcgctaaagagcc

SEQ ID NO: 267882 - DNA, 25 bp, Artificial
  Probe
gccgataatcaggcgggataaagcc

SEQ ID NO: 267883 - DNA, 25 bp, Artificial
  Probe
cccggtccaattcgctaaagagccg

SEQ ID NO: 267884 - DNA, 25 bp, Artificial
  Probe
acaacacacaacaaacataactaca

SEQ ID NO: 267885 - DNA, 25 bp, Artificial
  Probe
caaacataactacaaactccgaggg

SEQ ID NO: 267886 - DNA, 25 bp, Artificial
  Probe
acacaacaaacataactacaaactc

SEQ ID NO: 267887 - DNA, 25 bp, Artificial
  Probe
agccgataatcaggcgggataaagc

SEQ ID NO: 267888 - DNA, 25 bp, Artificial
  Probe
taatcaggcgggataaagccgcagg

SEQ ID NO: 267889 - DNA, 25 bp, Artificial
  Probe
ataatcaggcgggataaagccgcag

SEQ ID NO: 267890 - DNA, 25 bp, Artificial
  Probe
attcgctaaagagccgataatcagg

SEQ ID NO: 267891 - DNA, 25 bp, Artificial
  Probe
agagccgataatcaggcgggataaa

SEQ ID NO: 267892 - DNA, 25 bp, Artificial
  Probe
ccaattcgctaaagagccgataatc

SEQ ID NO: 267893 - DNA, 25 bp, Artificial
  Probe
gataaagccgcaggaaactcgtcca

SEQ ID NO: 267894 - DNA, 25 bp, Artificial
  Probe
ccgcaggaaactcgtccattttcct

SEQ ID NO: 267895 - DNA, 25 bp, Artificial
  Probe
cggtccaattcgctaaagagccgat

SEQ ID NO: 267896 - DNA, 25 bp, Artificial
  Probe
aaagagccgataatcaggcgggata

SEQ ID NO: 267897 - DNA, 25 bp, Artificial
  Probe
ggcccggtccaattcgctaaagagc

SEQ ID NO: 267898 - DNA, 25 bp, Artificial
  Probe
aattcgctaaagagccgataatcag

SEQ ID NO: 267899 - DNA, 25 bp, Artificial
  Probe
caattcgctaaagagccgataatca

SEQ ID NO: 267900 - DNA, 25 bp, Artificial
  Probe
acaaacataactacaaactccgagg

SEQ ID NO: 267901 - DNA, 25 bp, Artificial
  Probe
ttcgctaaagagccgataatcaggc

SEQ ID NO: 267902 - DNA, 25 bp, Artificial
  Probe
acaacaaacataactacaaactccg

SEQ ID NO: 267903 - DNA, 25 bp, Artificial
  Probe
aggcgggataaagccgcaggaaact

SEQ ID NO: 267904 - DNA, 25 bp, Artificial
  Probe
cacacaacaaacataactacaaact

SEQ ID NO: 267905 - DNA, 25 bp, Artificial
  Probe
taaagccgcaggaaactcgtccatt

SEQ ID NO: 267906 - DNA, 25 bp, Artificial
  Probe
aaagccgcaggaaactcgtccattt

SEQ ID NO: 267907 - DNA, 25 bp, Artificial
  Probe
aagagccgataatcaggcgggataa

SEQ ID NO: 267908 - DNA, 25 bp, Artificial
  Probe
gacctttactgtgttagcttttgaa

SEQ ID NO: 267909 - DNA, 25 bp, Artificial
  Probe
tttgggacttgctaacctatactca

SEQ ID NO: 267910 - DNA, 25 bp, Artificial
  Probe
tctttgggacttgctaacctatact

SEQ ID NO: 267911 - DNA, 25 bp, Artificial
  Probe
attcgcatgacctttactgtgttag

SEQ ID NO: 267912 - DNA, 25 bp, Artificial
  Probe
gtgaagattccttacctgacttaat

SEQ ID NO: 267913 - DNA, 25 bp, Artificial
  Probe
atgtgaagattccttacctgactta

SEQ ID NO: 267914 - DNA, 25 bp, Artificial
  Probe
atagagcgcgcctttatcatgattc

SEQ ID NO: 267915 - DNA, 25 bp, Artificial
  Probe
ttcgcatgacctttactgtgttagc

SEQ ID NO: 267916 - DNA, 25 bp, Artificial
  Probe
gggacttgctaacctatactcagcc

SEQ ID NO: 267917 - DNA, 25 bp, Artificial
  Probe
gagcgcgcctttatcatgattcact

SEQ ID NO: 267918 - DNA, 25 bp, Artificial
  Probe
atgacctttactgtgttagcttttg

SEQ ID NO: 267919 - DNA, 25 bp, Artificial
  Probe
agcgcgcctttatcatgattcactg

SEQ ID NO: 267920 - DNA, 25 bp, Artificial
  Probe
tgggacttgctaacctatactcagc

SEQ ID NO: 267921 - DNA, 25 bp, Artificial
  Probe
agaattcgcatgacctttactgtgt

SEQ ID NO: 267922 - DNA, 25 bp, Artificial
  Probe
aattcgcatgacctttactgtgtta

SEQ ID NO: 267923 - DNA, 25 bp, Artificial
  Probe
ctttgggacttgctaacctatactc

SEQ ID NO: 267924 - DNA, 25 bp, Artificial
  Probe
ttgggacttgctaacctatactcag

SEQ ID NO: 267925 - DNA, 25 bp, Artificial
  Probe
gaattcgcatgacctttactgtgtt

SEQ ID NO: 267926 - DNA, 25 bp, Artificial
  Probe
tcaaagctgccacctgagaacatca

SEQ ID NO: 267927 - DNA, 25 bp, Artificial
  Probe
tagagcgcgcctttatcatgattca

SEQ ID NO: 267928 - DNA, 25 bp, Artificial
  Probe
agagcgcgcctttatcatgattcac

SEQ ID NO: 267929 - DNA, 25 bp, Artificial
  Probe
tgacctttactgtgttagcttttga

SEQ ID NO: 267930 - DNA, 25 bp, Artificial
  Probe
acctttactgtgttagcttttgaat

SEQ ID NO: 267931 - DNA, 25 bp, Artificial
  Probe
catgacctttactgtgttagctttt

SEQ ID NO: 267932 - DNA, 25 bp, Artificial
  Probe
aatgtgaagattccttacctgactt

SEQ ID NO: 267933 - DNA, 25 bp, Artificial
  Probe
tgtgaagattccttacctgacttaa

SEQ ID NO: 267934 - DNA, 25 bp, Artificial
  Probe
cgcatgacctttactgtgttagctt

SEQ ID NO: 267935 - DNA, 25 bp, Artificial
  Probe
tagaattcgcatgacctttactgtg

SEQ ID NO: 267936 - DNA, 25 bp, Artificial
  Probe
gcatgacctttactgtgttagcttt

SEQ ID NO: 267937 - DNA, 25 bp, Artificial
  Probe
tcgcatgacctttactgtgttagct

SEQ ID NO: 267938 - DNA, 25 bp, Artificial
  Probe
ggacttgctaacctatactcagcca

SEQ ID NO: 267939 - DNA, 25 bp, Artificial
  Probe
tctgtcctgggttgtctgtggttgt

SEQ ID NO: 267940 - DNA, 25 bp, Artificial
  Probe
agacgtgttttcagatgttacttca

SEQ ID NO: 267941 - DNA, 25 bp, Artificial
  Probe
ctctcagacatagtgctttgtcttc

SEQ ID NO: 267942 - DNA, 25 bp, Artificial
  Probe
ctggctgttgcactctcatccctgt

SEQ ID NO: 267943 - DNA, 25 bp, Artificial
  Probe
taagcagcaccctggctgttgcact

SEQ ID NO: 267944 - DNA, 25 bp, Artificial
  Probe
ctgggttgtctgtggttgtcaccca

SEQ ID NO: 267945 - DNA, 25 bp, Artificial
  Probe
agacacacacgtataagcagcaccc

SEQ ID NO: 267946 - DNA, 25 bp, Artificial
  Probe
tggctgttgcactctcatccctgta

SEQ ID NO: 267947 - DNA, 25 bp, Artificial
  Probe
gatgttacttcagtaagcttccaat

SEQ ID NO: 267948 - DNA, 25 bp, Artificial
  Probe
cagatgttacttcagtaagcttcca

SEQ ID NO: 267949 - DNA, 25 bp, Artificial
  Probe
tcagcagaagcgagacgtgttttca

SEQ ID NO: 267950 - DNA, 25 bp, Artificial
  Probe
cgtgttttcagatgttacttcagta

SEQ ID NO: 267951 - DNA, 25 bp, Artificial
  Probe
tgacgcttgcacatgcgcacacgtg

SEQ ID NO: 267952 - DNA, 25 bp, Artificial
  Probe
gaagaatcacagacttgttcctgca

SEQ ID NO: 267953 - DNA, 25 bp, Artificial
  Probe
ttttcagatgttacttcagtaagct

SEQ ID NO: 267954 - DNA, 25 bp, Artificial
  Probe
attgaagaatcacagacttgttcct

SEQ ID NO: 267955 - DNA, 25 bp, Artificial
  Probe
tcctctcagacatagtgctttgtct

SEQ ID NO: 267956 - DNA, 25 bp, Artificial
  Probe
cgagacgtgttttcagatgttactt

SEQ ID NO: 267957 - DNA, 25 bp, Artificial
  Probe
gacttgttcctgcaccatctctctg

SEQ ID NO: 267958 - DNA, 25 bp, Artificial
  Probe
ggctgttgcactctcatccctgtac

SEQ ID NO: 267959 - DNA, 25 bp, Artificial
  Probe
agaatcacagacttgttcctgcacc

SEQ ID NO: 267960 - DNA, 25 bp, Artificial
  Probe
ctgcaccatctctctgtcctgggtt

SEQ ID NO: 267961 - DNA, 25 bp, Artificial
  Probe
gtcctgggttgtctgtggttgtcac

SEQ ID NO: 267962 - DNA, 25 bp, Artificial
  Probe
cacacagacacacacgtataagcag

SEQ ID NO: 267963 - DNA, 25 bp, Artificial
  Probe
tcctgggttgtctgtggttgtcacc

SEQ ID NO: 267964 - DNA, 25 bp, Artificial
  Probe
gtcttcagcagaagcgagacgtgtt

SEQ ID NO: 267965 - DNA, 25 bp, Artificial
  Probe
caccatctctctgtcctgggttgtc

SEQ ID NO: 267966 - DNA, 25 bp, Artificial
  Probe
tcctcctctcagacatagtgctttg

SEQ ID NO: 267967 - DNA, 25 bp, Artificial
  Probe
gttttcagatgttacttcagtaagc

SEQ ID NO: 267968 - DNA, 25 bp, Artificial
  Probe
ctttgtcttcagcagaagcgagacg

SEQ ID NO: 267969 - DNA, 25 bp, Artificial
  Probe
tttttacctggcatgcagttattaa

SEQ ID NO: 267970 - DNA, 25 bp, Artificial
  Probe
tgaagaatcacagacttgttcctgc

SEQ ID NO: 267971 - DNA, 25 bp, Artificial
  Probe
tagtgctttgtcttcagcagaagcg

SEQ ID NO: 267972 - DNA, 25 bp, Artificial
  Probe
cgtataagcagcaccctggctgttg

SEQ ID NO: 267973 - DNA, 25 bp, Artificial
  Probe
aggaaaccccatattgaagaatcac

SEQ ID NO: 267974 - DNA, 25 bp, Artificial
  Probe
gaaaccccatattgaagaatcacag

SEQ ID NO: 267975 - DNA, 25 bp, Artificial
  Probe
acacacgtataagcagcaccctggc

SEQ ID NO: 267976 - DNA, 25 bp, Artificial
  Probe
tcagacatagtgctttgtcttcagc

SEQ ID NO: 267977 - DNA, 25 bp, Artificial
  Probe
tctcagacatagtgctttgtcttca

SEQ ID NO: 267978 - DNA, 25 bp, Artificial
  Probe
atctctctgtcctgggttgtctgtg

SEQ ID NO: 267979 - DNA, 25 bp, Artificial
  Probe
gtgctttgtcttcagcagaagcgag

SEQ ID NO: 267980 - DNA, 25 bp, Artificial
  Probe
ctctgtcctgggttgtctgtggttg

SEQ ID NO: 267981 - DNA, 25 bp, Artificial
  Probe
agcaccctggctgttgcactctcat

SEQ ID NO: 267982 - DNA, 25 bp, Artificial
  Probe
agcgagacgtgttttcagatgttac

SEQ ID NO: 267983 - DNA, 25 bp, Artificial
  Probe
gacacacacgtataagcagcaccct

SEQ ID NO: 267984 - DNA, 25 bp, Artificial
  Probe
gaatcacagacttgttcctgcacca

SEQ ID NO: 267985 - DNA, 25 bp, Artificial
  Probe
gctcttttccttctaaccatcgtta

SEQ ID NO: 267986 - DNA, 25 bp, Artificial
  Probe
cagcacgactacccgtcgcccacac

SEQ ID NO: 267987 - DNA, 25 bp, Artificial
  Probe
tcccgtccgcaacacagcccacagc

SEQ ID NO: 267988 - DNA, 25 bp, Artificial
  Probe
acacgtaacccgtgcagagacatac

SEQ ID NO: 267989 - DNA, 25 bp, Artificial
  Probe
ctaaaagcgctctgcacacgtaacc

SEQ ID NO: 267990 - DNA, 25 bp, Artificial
  Probe
gatatttgacctatagtttgcctct

SEQ ID NO: 267991 - DNA, 25 bp, Artificial
  Probe
ccatcgttatctaaaatttatattt

SEQ ID NO: 267992 - DNA, 25 bp, Artificial
  Probe
cgtaacccgtgcagagacatacaat

SEQ ID NO: 267993 - DNA, 25 bp, Artificial
  Probe
taacccgtgcagagacatacaatat

SEQ ID NO: 267994 - DNA, 25 bp, Artificial
  Probe
tatctctgttttagatccggcgggt

SEQ ID NO: 267995 - DNA, 25 bp, Artificial
  Probe
acccgtgcagagacatacaatatct

SEQ ID NO: 267996 - DNA, 25 bp, Artificial
  Probe
tgacctatagtttgcctctactcga

SEQ ID NO: 267997 - DNA, 25 bp, Artificial
  Probe
tgtgacccgcctgcacaaattacaa

SEQ ID NO: 267998 - DNA, 25 bp, Artificial
  Probe
actaaaagcgctctgcacacgtaac

SEQ ID NO: 267999 - DNA, 25 bp, Artificial
  Probe
tcgcccgcctgcagctccggcttag

SEQ ID NO: 268000 - DNA, 25 bp, Artificial
  Probe
tcgctatcttactaaaagcgctctg

SEQ ID NO: 268001 - DNA, 25 bp, Artificial
  Probe
ctatagtttgcctctactcgacccg

SEQ ID NO: 268002 - DNA, 25 bp, Artificial
  Probe
aagcgctctgcacacgtaacccgtg

SEQ ID NO: 268003 - DNA, 25 bp, Artificial
  Probe
tctgcacacgtaacccgtgcagaga

SEQ ID NO: 268004 - DNA, 25 bp, Artificial
  Probe
ccggcttagctcgccctcccgtccg

SEQ ID NO: 268005 - DNA, 25 bp, Artificial
  Probe
aaagcgctctgcacacgtaacccgt

SEQ ID NO: 268006 - DNA, 25 bp, Artificial
  Probe
tcgcccacacctatctttgtgaccc

SEQ ID NO: 268007 - DNA, 25 bp, Artificial
  Probe
gctatcttactaaaagcgctctgca

SEQ ID NO: 268008 - DNA, 25 bp, Artificial
  Probe
tcgatatttgacctatagtttgcct

SEQ ID NO: 268009 - DNA, 25 bp, Artificial
  Probe
tatcgatatttgacctatagtttgc

SEQ ID NO: 268010 - DNA, 25 bp, Artificial
  Probe
acctatctctgttttagatccggcg

SEQ ID NO: 268011 - DNA, 25 bp, Artificial
  Probe
tatagtttgcctctactcgacccgc

SEQ ID NO: 268012 - DNA, 25 bp, Artificial
  Probe
cgctatcttactaaaagcgctctgc

SEQ ID NO: 268013 - DNA, 25 bp, Artificial
  Probe
tacctatctctgttttagatccggc

SEQ ID NO: 268014 - DNA, 25 bp, Artificial
  Probe
atagtttgcctctactcgacccgca

SEQ ID NO: 268015 - DNA, 25 bp, Artificial
  Probe
acgtaacccgtgcagagacatacaa

SEQ ID NO: 268016 - DNA, 25 bp, Artificial
  Probe
cctatctctgttttagatccggcgg

SEQ ID NO: 268017 - DNA, 25 bp, Artificial
  Probe
tagtttgcctctactcgacccgcaa

SEQ ID NO: 268018 - DNA, 25 bp, Artificial
  Probe
ttgacctatagtttgcctctactcg

SEQ ID NO: 268019 - DNA, 25 bp, Artificial
  Probe
atcgatatttgacctatagtttgcc

SEQ ID NO: 268020 - DNA, 25 bp, Artificial
  Probe
cgatatttgacctatagtttgcctc

SEQ ID NO: 268021 - DNA, 25 bp, Artificial
  Probe
aacccgtgcagagacatacaatatc

SEQ ID NO: 268022 - DNA, 25 bp, Artificial
  Probe
gctctgcacacgtaacccgtgcaga

SEQ ID NO: 268023 - DNA, 25 bp, Artificial
  Probe
gtaacccgtgcagagacatacaata

SEQ ID NO: 268024 - DNA, 25 bp, Artificial
  Probe
gagacatacaatatctacctatctc

SEQ ID NO: 268025 - DNA, 25 bp, Artificial
  Probe
cacgtaacccgtgcagagacataca

SEQ ID NO: 268026 - DNA, 25 bp, Artificial
  Probe
ctacctatctctgttttagatccgg

SEQ ID NO: 268027 - DNA, 25 bp, Artificial
  Probe
tactaaaagcgctctgcacacgtaa

SEQ ID NO: 268028 - DNA, 25 bp, Artificial
  Probe
gtgacccgcctgcacaaattacaat

SEQ ID NO: 268029 - DNA, 25 bp, Artificial
  Probe
ctatctctgttttagatccggcggg

SEQ ID NO: 268030 - DNA, 25 bp, Artificial
  Probe
cccgtgcagagacatacaatatcta

SEQ ID NO: 268031 - DNA, 25 bp, Artificial
  Probe
aaggaacggcctcaactcacgcgcg

SEQ ID NO: 268032 - DNA, 25 bp, Artificial
  Probe
tgcacacacctcagaaaaggcaaga

SEQ ID NO: 268033 - DNA, 25 bp, Artificial
  Probe
agacttgaaagttctgacgaattgc

SEQ ID NO: 268034 - DNA, 25 bp, Artificial
  Probe
gcacacacctcagaaaaggcaagac

SEQ ID NO: 268035 - DNA, 25 bp, Artificial
  Probe
aggaacggcctcaactcacgcgcgt

SEQ ID NO: 268036 - DNA, 25 bp, Artificial
  Probe
gtgcgtgcacacacctcagaaaagg

SEQ ID NO: 268037 - DNA, 25 bp, Artificial
  Probe
gacttttgtgtcagccgaggttata

SEQ ID NO: 268038 - DNA, 25 bp, Artificial
  Probe
gcgtgcacacacctcagaaaaggca

SEQ ID NO: 268039 - DNA, 25 bp, Artificial
  Probe
gcgtgcgtgcacacacctcagaaaa

SEQ ID NO: 268040 - DNA, 25 bp, Artificial
  Probe
tgataaaacgagttccagtaaccca

SEQ ID NO: 268041 - DNA, 25 bp, Artificial
  Probe
aagtagacttttgtgtcagccgagg

SEQ ID NO: 268042 - DNA, 25 bp, Artificial
  Probe
ggaacggcctcaactcacgcgcgtg

SEQ ID NO: 268043 - DNA, 25 bp, Artificial
  Probe
gtgcacacacctcagaaaaggcaag

SEQ ID NO: 268044 - DNA, 25 bp, Artificial
  Probe
gcgcgtgcgtgcacacacctcagaa

SEQ ID NO: 268045 - DNA, 25 bp, Artificial
  Probe
gaagtagacttttgtgtcagccgag

SEQ ID NO: 268046 - DNA, 25 bp, Artificial
  Probe
cgtgcacacacctcagaaaaggcaa

SEQ ID NO: 268047 - DNA, 25 bp, Artificial
  Probe
cgtgcgtgcacacacctcagaaaag

SEQ ID NO: 268048 - DNA, 25 bp, Artificial
  Probe
agtagacttttgtgtcagccgaggt

SEQ ID NO: 268049 - DNA, 25 bp, Artificial
  Probe
tgcgtgcacacacctcagaaaaggc

SEQ ID NO: 268050 - DNA, 25 bp, Artificial
  Probe
acacacctcagaaaaggcaagactt

SEQ ID NO: 268051 - DNA, 25 bp, Artificial
  Probe
agacttttgtgtcagccgaggttat

SEQ ID NO: 268052 - DNA, 25 bp, Artificial
  Probe
gacttgaaagttctgacgaattgcc

SEQ ID NO: 268053 - DNA, 25 bp, Artificial
  Probe
cgcgtgcgtgcacacacctcagaaa

SEQ ID NO: 268054 - DNA, 25 bp, Artificial
  Probe
cacacacctcagaaaaggcaagact

SEQ ID NO: 268055 - DNA, 25 bp, Artificial
  Probe
cacacctcagaaaaggcaagacttg

SEQ ID NO: 268056 - DNA, 25 bp, Artificial
  Probe
tagacttttgtgtcagccgaggtta

SEQ ID NO: 268057 - DNA, 25 bp, Artificial
  Probe
acacctcagaaaaggcaagacttga

SEQ ID NO: 268058 - DNA, 25 bp, Artificial
  Probe
gtagacttttgtgtcagccgaggtt

SEQ ID NO: 268059 - DNA, 25 bp, Artificial
  Probe
atatttcctgcagatgcatccagat

SEQ ID NO: 268060 - DNA, 25 bp, Artificial
  Probe
atccaaggtgtgaaagccagccttt

SEQ ID NO: 268061 - DNA, 25 bp, Artificial
  Probe
gaaggctatctctacagctcagatg

SEQ ID NO: 268062 - DNA, 25 bp, Artificial
  Probe
agccagcagggatatttcctgcaga

SEQ ID NO: 268063 - DNA, 25 bp, Artificial
  Probe
tacagctcagatgtttttaccccag

SEQ ID NO: 268064 - DNA, 25 bp, Artificial
  Probe
gcagatgcatccagatggtaccatt

SEQ ID NO: 268065 - DNA, 25 bp, Artificial
  Probe
cagccagcagggatatttcctgcag

SEQ ID NO: 268066 - DNA, 25 bp, Artificial
  Probe
agatggtaccattgatgggaccaag

SEQ ID NO: 268067 - DNA, 25 bp, Artificial
  Probe
ctcttcaatctaattcctgtgggac

SEQ ID NO: 268068 - DNA, 25 bp, Artificial
  Probe
aggctatctctacagctcagatgtt

SEQ ID NO: 268069 - DNA, 25 bp, Artificial
  Probe
gccagcagggatatttcctgcagat

SEQ ID NO: 268070 - DNA, 25 bp, Artificial
  Probe
tattcagccagcagggatatttcct

SEQ ID NO: 268071 - DNA, 25 bp, Artificial
  Probe
tgacaaggttattcagccagcaggg

SEQ ID NO: 268072 - DNA, 25 bp, Artificial
  Probe
tttcctgcagatgcatccagatggt

SEQ ID NO: 268073 - DNA, 25 bp, Artificial
  Probe
gctatctctacagctcagatgtttt

SEQ ID NO: 268074 - DNA, 25 bp, Artificial
  Probe
agctcagatgtttttaccccagaat

SEQ ID NO: 268075 - DNA, 25 bp, Artificial
  Probe
cagatgcatccagatggtaccattg

SEQ ID NO: 268076 - DNA, 25 bp, Artificial
  Probe
ggccatccaaggtgtgaaagccagc

SEQ ID NO: 268077 - DNA, 25 bp, Artificial
  Probe
atttcctgcagatgcatccagatgg

SEQ ID NO: 268078 - DNA, 25 bp, Artificial
  Probe
gcagggatatttcctgcagatgcat

SEQ ID NO: 268079 - DNA, 25 bp, Artificial
  Probe
ggatatttcctgcagatgcatccag

SEQ ID NO: 268080 - DNA, 25 bp, Artificial
  Probe
ttattcagccagcagggatatttcc

SEQ ID NO: 268081 - DNA, 25 bp, Artificial
  Probe
acaaggttattcagccagcagggat

SEQ ID NO: 268082 - DNA, 25 bp, Artificial
  Probe
ccatccaaggtgtgaaagccagcct

SEQ ID NO: 268083 - DNA, 25 bp, Artificial
  Probe
ctcagatgtttttaccccagaatgc

SEQ ID NO: 268084 - DNA, 25 bp, Artificial
  Probe
caggaatcccccagggagagagaga

SEQ ID NO: 268085 - DNA, 25 bp, Artificial
  Probe
cagggatatttcctgcagatgcatc

SEQ ID NO: 268086 - DNA, 25 bp, Artificial
  Probe
tggtggccatccaaggtgtgaaagc

SEQ ID NO: 268087 - DNA, 25 bp, Artificial
  Probe
cagctcagatgtttttaccccagaa

SEQ ID NO: 268088 - DNA, 25 bp, Artificial
  Probe
agcagggatatttcctgcagatgca

SEQ ID NO: 268089 - DNA, 25 bp, Artificial
  Probe
tatttcctgcagatgcatccagatg

SEQ ID NO: 268090 - DNA, 25 bp, Artificial
  Probe
gggatatttcctgcagatgcatcca

SEQ ID NO: 268091 - DNA, 25 bp, Artificial
  Probe
gccatccaaggtgtgaaagccagcc

SEQ ID NO: 268092 - DNA, 25 bp, Artificial
  Probe
gatgcatccagatggtaccattgat

SEQ ID NO: 268093 - DNA, 25 bp, Artificial
  Probe
ttcctgcagatgcatccagatggta

SEQ ID NO: 268094 - DNA, 25 bp, Artificial
  Probe
cctcttcaatctaattcctgtggga

SEQ ID NO: 268095 - DNA, 25 bp, Artificial
  Probe
gttattcagccagcagggatatttc

SEQ ID NO: 268096 - DNA, 25 bp, Artificial
  Probe
gtggccatccaaggtgtgaaagcca

SEQ ID NO: 268097 - DNA, 25 bp, Artificial
  Probe
cagatggtaccattgatgggaccaa

SEQ ID NO: 268098 - DNA, 25 bp, Artificial
  Probe
ccctcttcaatctaattcctgtggg

SEQ ID NO: 268099 - DNA, 25 bp, Artificial
  Probe
tggccatccaaggtgtgaaagccag

SEQ ID NO: 268100 - DNA, 25 bp, Artificial
  Probe
ggctatctctacagctcagatgttt

SEQ ID NO: 268101 - DNA, 25 bp, Artificial
  Probe
ggtgtgaaagccagcctttatgtgg

SEQ ID NO: 268102 - DNA, 25 bp, Artificial
  Probe
cttcaatctaattcctgtgggactg

SEQ ID NO: 268103 - DNA, 25 bp, Artificial
  Probe
atccagatggtaccattgatgggac

SEQ ID NO: 268104 - DNA, 25 bp, Artificial
  Probe
ggttattcagccagcagggatattt

SEQ ID NO: 268105 - DNA, 25 bp, Artificial
  Probe
cctctgataagatgtcgccctgtgt

SEQ ID NO: 268106 - DNA, 25 bp, Artificial
  Probe
caagtaccctctgataagatgtcgc

SEQ ID NO: 268107 - DNA, 25 bp, Artificial
  Probe
ccctctgataagatgtcgccctgtg

SEQ ID NO: 268108 - DNA, 25 bp, Artificial
  Probe
attgtccttcaagtaccctctgata

SEQ ID NO: 268109 - DNA, 25 bp, Artificial
  Probe
gaattgtccttcaagtaccctctga

SEQ ID NO: 268110 - DNA, 25 bp, Artificial
  Probe
aattgtccttcaagtaccctctgat

SEQ ID NO: 268111 - DNA, 25 bp, Artificial
  Probe
gtccttcaagtaccctctgataaga

SEQ ID NO: 268112 - DNA, 25 bp, Artificial
  Probe
gtaccctctgataagatgtcgccct

SEQ ID NO: 268113 - DNA, 25 bp, Artificial
  Probe
atgagaattgtccttcaagtaccct

SEQ ID NO: 268114 - DNA, 25 bp, Artificial
  Probe
agtaccctctgataagatgtcgccc

SEQ ID NO: 268115 - DNA, 25 bp, Artificial
  Probe
ccttcaagtaccctctgataagatg

SEQ ID NO: 268116 - DNA, 25 bp, Artificial
  Probe
aagtaccctctgataagatgtcgcc

SEQ ID NO: 268117 - DNA, 25 bp, Artificial
  Probe
tccttcaagtaccctctgataagat

SEQ ID NO: 268118 - DNA, 25 bp, Artificial
  Probe
gagaattgtccttcaagtaccctct

SEQ ID NO: 268119 - DNA, 25 bp, Artificial
  Probe
ttcaagtaccctctgataagatgtc

SEQ ID NO: 268120 - DNA, 25 bp, Artificial
  Probe
accctctgataagatgtcgccctgt

SEQ ID NO: 268121 - DNA, 25 bp, Artificial
  Probe
agcatcgacaggataaaggtgtcca

SEQ ID NO: 268122 - DNA, 25 bp, Artificial
  Probe
tcaagtaccctctgataagatgtcg

SEQ ID NO: 268123 - DNA, 25 bp, Artificial
  Probe
cttcaagtaccctctgataagatgt

SEQ ID NO: 268124 - DNA, 25 bp, Artificial
  Probe
tgtccttcaagtaccctctgataag

SEQ ID NO: 268125 - DNA, 25 bp, Artificial
  Probe
agaattgtccttcaagtaccctctg

SEQ ID NO: 268126 - DNA, 25 bp, Artificial
  Probe
tgagaattgtccttcaagtaccctc

SEQ ID NO: 268127 - DNA, 25 bp, Artificial
  Probe
aatgagaattgtccttcaagtaccc

SEQ ID NO: 268128 - DNA, 25 bp, Artificial
  Probe
ctctgataagatgtcgccctgtgta

SEQ ID NO: 268129 - DNA, 25 bp, Artificial
  Probe
taccctctgataagatgtcgccctg

SEQ ID NO: 268130 - DNA, 25 bp, Artificial
  Probe
ttgtccttcaagtaccctctgataa

SEQ ID NO: 268131 - DNA, 25 bp, Artificial
  Probe
ctgggacggctcctccaatgtaggg

SEQ ID NO: 268132 - DNA, 25 bp, Artificial
  Probe
cccatacatctttgcttgaggaaac

SEQ ID NO: 268133 - DNA, 25 bp, Artificial
  Probe
ccccatacatctttgcttgaggaaa

SEQ ID NO: 268134 - DNA, 25 bp, Artificial
  Probe
catctttgcttgaggaaacttttag

SEQ ID NO: 268135 - DNA, 25 bp, Artificial
  Probe
tgtagggctcttgatcagtgtgctg

SEQ ID NO: 268136 - DNA, 25 bp, Artificial
  Probe
cttatcttctgttggctgctcactt

SEQ ID NO: 268137 - DNA, 25 bp, Artificial
  Probe
tcactttaagcactgccctctttgg

SEQ ID NO: 268138 - DNA, 25 bp, Artificial
  Probe
tagggctcttgatcagtgtgctgac

SEQ ID NO: 268139 - DNA, 25 bp, Artificial
  Probe
cactttaagcactgccctctttgga

SEQ ID NO: 268140 - DNA, 25 bp, Artificial
  Probe
gctcttgatcagtgtgctgacccca

SEQ ID NO: 268141 - DNA, 25 bp, Artificial
  Probe
cactgccctctttggaaatactatg

SEQ ID NO: 268142 - DNA, 25 bp, Artificial
  Probe
gctcctccaatgtagggctcttgat

SEQ ID NO: 268143 - DNA, 25 bp, Artificial
  Probe
ggctcttgatcagtgtgctgacccc

SEQ ID NO: 268144 - DNA, 25 bp, Artificial
  Probe
cactgggacggctcctccaatgtag

SEQ ID NO: 268145 - DNA, 25 bp, Artificial
  Probe
tcttctgttggctgctcactttaag

SEQ ID NO: 268146 - DNA, 25 bp, Artificial
  Probe
ttggctgctcactttaagcactgcc

SEQ ID NO: 268147 - DNA, 25 bp, Artificial
  Probe
agcactgccctctttggaaatacta

SEQ ID NO: 268148 - DNA, 25 bp, Artificial
  Probe
ttctgttggctgctcactttaagca

SEQ ID NO: 268149 - DNA, 25 bp, Artificial
  Probe
cttctgttggctgctcactttaagc

SEQ ID NO: 268150 - DNA, 25 bp, Artificial
  Probe
ctgccctctttggaaatactatgta

SEQ ID NO: 268151 - DNA, 25 bp, Artificial
  Probe
ggacggctcctccaatgtagggctc

SEQ ID NO: 268152 - DNA, 25 bp, Artificial
  Probe
tcttatcttctgttggctgctcact

SEQ ID NO: 268153 - DNA, 25 bp, Artificial
  Probe
ccatacatctttgcttgaggaaact

SEQ ID NO: 268154 - DNA, 25 bp, Artificial
  Probe
cggctcctccaatgtagggctcttg

SEQ ID NO: 268155 - DNA, 25 bp, Artificial
  Probe
tgggacggctcctccaatgtagggc

SEQ ID NO: 268156 - DNA, 25 bp, Artificial
  Probe
tgttggctgctcactttaagcactg

SEQ ID NO: 268157 - DNA, 25 bp, Artificial
  Probe
gccctctttggaaatactatgtaaa

SEQ ID NO: 268158 - DNA, 25 bp, Artificial
  Probe
gtggagctgctcaacttagagtgaa

SEQ ID NO: 268159 - DNA, 25 bp, Artificial
  Probe
caatgtagggctcttgatcagtgtg

SEQ ID NO: 268160 - DNA, 25 bp, Artificial
  Probe
tggctgctcactttaagcactgccc

SEQ ID NO: 268161 - DNA, 25 bp, Artificial
  Probe
gacggctcctccaatgtagggctct

SEQ ID NO: 268162 - DNA, 25 bp, Artificial
  Probe
ccaatgtagggctcttgatcagtgt

SEQ ID NO: 268163 - DNA, 25 bp, Artificial
  Probe
atgtagggctcttgatcagtgtgct

SEQ ID NO: 268164 - DNA, 25 bp, Artificial
  Probe
cactttcttatcttctgttggctgc

SEQ ID NO: 268165 - DNA, 25 bp, Artificial
  Probe
ctcttgatcagtgtgctgaccccac

SEQ ID NO: 268166 - DNA, 25 bp, Artificial
  Probe
taagcactgccctctttggaaatac

SEQ ID NO: 268167 - DNA, 25 bp, Artificial
  Probe
tacatctttgcttgaggaaactttt

SEQ ID NO: 268168 - DNA, 25 bp, Artificial
  Probe
gagccagttacctttgctgtcactt

SEQ ID NO: 268169 - DNA, 25 bp, Artificial
  Probe
ggctgctcactttaagcactgccct

SEQ ID NO: 268170 - DNA, 25 bp, Artificial
  Probe
agggctcttgatcagtgtgctgacc

SEQ ID NO: 268171 - DNA, 25 bp, Artificial
  Probe
ctcctccaatgtagggctcttgatc

SEQ ID NO: 268172 - DNA, 25 bp, Artificial
  Probe
ttcttatcttctgttggctgctcac

SEQ ID NO: 268173 - DNA, 25 bp, Artificial
  Probe
gccagttacctttgctgtcactttc

SEQ ID NO: 268174 - DNA, 25 bp, Artificial
  Probe
tgagccagttacctttgctgtcact

SEQ ID NO: 268175 - DNA, 25 bp, Artificial
  Probe
actgccctctttggaaatactatgt

SEQ ID NO: 268176 - DNA, 25 bp, Artificial
  Probe
atacatctttgcttgaggaaacttt

SEQ ID NO: 268177 - DNA, 25 bp, Artificial
  Probe
ccagcatgtacctggcaacattcat

SEQ ID NO: 268178 - DNA, 25 bp, Artificial
  Probe
cctacaagattcaggcatgttgccc

SEQ ID NO: 268179 - DNA, 25 bp, Artificial
  Probe
gctctgtctgaaacatttctttgta

SEQ ID NO: 268180 - DNA, 25 bp, Artificial
  Probe
gcattgcccgggaccactgtttggc

SEQ ID NO: 268181 - DNA, 25 bp, Artificial
  Probe
ggcatgttgccctcacggttttccc

SEQ ID NO: 268182 - DNA, 25 bp, Artificial
  Probe
ctttcgtaatgctggcattccaggc

SEQ ID NO: 268183 - DNA, 25 bp, Artificial
  Probe
ctgtatgcattccttagacctttcg

SEQ ID NO: 268184 - DNA, 25 bp, Artificial
  Probe
cctgtatgctttagcccacacttag

SEQ ID NO: 268185 - DNA, 25 bp, Artificial
  Probe
gaaggacctatttatctgaaaccct

SEQ ID NO: 268186 - DNA, 25 bp, Artificial
  Probe
tcttgcacctttccaaagttagctg

SEQ ID NO: 268187 - DNA, 25 bp, Artificial
  Probe
tggcctggaagctcccttgttgtca

SEQ ID NO: 268188 - DNA, 25 bp, Artificial
  Probe
attcctattggcttcaatgtcgact

SEQ ID NO: 268189 - DNA, 25 bp, Artificial
  Probe
tagttaacatgtaccccgtagactg

SEQ ID NO: 268190 - DNA, 25 bp, Artificial
  Probe
catgtacctggcaacattcatgtgt

SEQ ID NO: 268191 - DNA, 25 bp, Artificial
  Probe
aacctggaagtgatcgtttgcactg

SEQ ID NO: 268192 - DNA, 25 bp, Artificial
  Probe
caagattcaggcatgttgccctcac

SEQ ID NO: 268193 - DNA, 25 bp, Artificial
  Probe
ttgtattcctattggcttcaatgtc

SEQ ID NO: 268194 - DNA, 25 bp, Artificial
  Probe
acatagttaacatgtaccccgtaga

SEQ ID NO: 268195 - DNA, 25 bp, Artificial
  Probe
ctttgtattcctattggcttcaatg

SEQ ID NO: 268196 - DNA, 25 bp, Artificial
  Probe
gaagtgatcgtttgcactggagtgc

SEQ ID NO: 268197 - DNA, 25 bp, Artificial
  Probe
gcataaggggccagcatgtacctgg

SEQ ID NO: 268198 - DNA, 25 bp, Artificial
  Probe
gtgaacatactgtatgcattcctta

SEQ ID NO: 268199 - DNA, 25 bp, Artificial
  Probe
tgccctgtatgctttagcccacact

SEQ ID NO: 268200 - DNA, 25 bp, Artificial
  Probe
tagctggttcgcaggtcgtgttgtc

SEQ ID NO: 268201 - DNA, 25 bp, Artificial
  Probe
aagttagctggttcgcaggtcgtgt

SEQ ID NO: 268202 - DNA, 25 bp, Artificial
  Probe
agacgtgtggccattaacctggaag

SEQ ID NO: 268203 - DNA, 25 bp, Artificial
  Probe
accgtttaaccgtgctctgtctgaa

SEQ ID NO: 268204 - DNA, 25 bp, Artificial
  Probe
gagtgctacactcttgcacctttcc

SEQ ID NO: 268205 - DNA, 25 bp, Artificial
  Probe
ctggaagctcccttgttgtcatccc

SEQ ID NO: 268206 - DNA, 25 bp, Artificial
  Probe
agactgtcaccgtttaaccgtgctc

SEQ ID NO: 268207 - DNA, 25 bp, Artificial
  Probe
ctgtttggcataaggggccagcatg

SEQ ID NO: 268208 - DNA, 25 bp, Artificial
  Probe
gaacatactgtatgcattccttaga

SEQ ID NO: 268209 - DNA, 25 bp, Artificial
  Probe
cttagagacgtgtggccattaacct

SEQ ID NO: 268210 - DNA, 25 bp, Artificial
  Probe
tgctggcattccaggcaaacatagt

SEQ ID NO: 268211 - DNA, 25 bp, Artificial
  Probe
tagactgtggcctggaagctccctt

SEQ ID NO: 268212 - DNA, 25 bp, Artificial
  Probe
ggcattccaggcaaacatagttaac

SEQ ID NO: 268213 - DNA, 25 bp, Artificial
  Probe
ccccgtagactgtggcctggaagct

SEQ ID NO: 268214 - DNA, 25 bp, Artificial
  Probe
ccactgtttggcataaggggccagc

SEQ ID NO: 268215 - DNA, 25 bp, Artificial
  Probe
tggaagctcccttgttgtcatcccc

SEQ ID NO: 268216 - DNA, 25 bp, Artificial
  Probe
acatgtaccccgtagactgtggcct

SEQ ID NO: 268217 - DNA, 25 bp, Artificial
  Probe
ttccaggcaaacatagttaacatgt

SEQ ID NO: 268218 - DNA, 25 bp, Artificial
  Probe
ccgggaccactgtttggcataaggg

SEQ ID NO: 268219 - DNA, 25 bp, Artificial
  Probe
attcaggcatgttgccctcacggtt

SEQ ID NO: 268220 - DNA, 25 bp, Artificial
  Probe
atgctttagcccacacttagagacg

SEQ ID NO: 268221 - DNA, 25 bp, Artificial
  Probe
cgtaatgctggcattccaggcaaac

SEQ ID NO: 268222 - DNA, 25 bp, Artificial
  Probe
tgtcaccgtttaaccgtgctctgtc

SEQ ID NO: 268223 - DNA, 25 bp, Artificial
  Probe
agttcaaagggcagatctgcagggt

SEQ ID NO: 268224 - DNA, 25 bp, Artificial
  Probe
ttcaaagggcagatctgcagggtca

SEQ ID NO: 268225 - DNA, 25 bp, Artificial
  Probe
tgtctgcctgtgagaaaaaccccac

SEQ ID NO: 268226 - DNA, 25 bp, Artificial
  Probe
gagaagtgtccactcagtggggcct

SEQ ID NO: 268227 - DNA, 25 bp, Artificial
  Probe
ggaaaatcttgtctgcctgtgagaa

SEQ ID NO: 268228 - DNA, 25 bp, Artificial
  Probe
tcttaccggcccatctaccgtggaa

SEQ ID NO: 268229 - DNA, 25 bp, Artificial
  Probe
tgtgattggtctgaggatcagtcct

SEQ ID NO: 268230 - DNA, 25 bp, Artificial
  Probe
tgcagggtcactacagtgacagaga

SEQ ID NO: 268231 - DNA, 25 bp, Artificial
  Probe
gggcagatctgcagggtcactacag

SEQ ID NO: 268232 - DNA, 25 bp, Artificial
  Probe
cagatgcctgccagctcaattatga

SEQ ID NO: 268233 - DNA, 25 bp, Artificial
  Probe
atcttgtctgcctgtgagaaaaacc

SEQ ID NO: 268234 - DNA, 25 bp, Artificial
  Probe
aaggaaaatcttgtctgcctgtgag

SEQ ID NO: 268235 - DNA, 25 bp, Artificial
  Probe
gtttcgctaaggttctcccttcacg

SEQ ID NO: 268236 - DNA, 25 bp, Artificial
  Probe
accgtggaaaaccagtggagaagtg

SEQ ID NO: 268237 - DNA, 25 bp, Artificial
  Probe
tgaagtagcccaacagacaaggaaa

SEQ ID NO: 268238 - DNA, 25 bp, Artificial
  Probe
agtgtccactcagtggggcctgcta

SEQ ID NO: 268239 - DNA, 25 bp, Artificial
  Probe
tattcccctgagttcaaagggcaga

SEQ ID NO: 268240 - DNA, 25 bp, Artificial
  Probe
cagtttcgctaaggttctcccttca

SEQ ID NO: 268241 - DNA, 25 bp, Artificial
  Probe
atgtgattggtctgaggatcagtcc

SEQ ID NO: 268242 - DNA, 25 bp, Artificial
  Probe
gcccaacagacaaggaaaatcttgt

SEQ ID NO: 268243 - DNA, 25 bp, Artificial
  Probe
ggcccaaacctgaagtagcccaaca

SEQ ID NO: 268244 - DNA, 25 bp, Artificial
  Probe
gatctgcagggtcactacagtgaca

SEQ ID NO: 268245 - DNA, 25 bp, Artificial
  Probe
gtgtccactcagtggggcctgctat

SEQ ID NO: 268246 - DNA, 25 bp, Artificial
  Probe
tcaaagggcagatctgcagggtcac

SEQ ID NO: 268247 - DNA, 25 bp, Artificial
  Probe
gcccatctaccgtggaaaaccagtg

SEQ ID NO: 268248 - DNA, 25 bp, Artificial
  Probe
gagaaaaaccccacagatgcctgcc

SEQ ID NO: 268249 - DNA, 25 bp, Artificial
  Probe
agtagcccaacagacaaggaaaatc

SEQ ID NO: 268250 - DNA, 25 bp, Artificial
  Probe
ttcccctgagttcaaagggcagatc

SEQ ID NO: 268251 - DNA, 25 bp, Artificial
  Probe
ctacagtgacagagattggcaaaga

SEQ ID NO: 268252 - DNA, 25 bp, Artificial
  Probe
atctgcagggtcactacagtgacag

SEQ ID NO: 268253 - DNA, 25 bp, Artificial
  Probe
aaagggcagatctgcagggtcacta

SEQ ID NO: 268254 - DNA, 25 bp, Artificial
  Probe
tagcccaacagacaaggaaaatctt

SEQ ID NO: 268255 - DNA, 25 bp, Artificial
  Probe
tcctcttcagtttcgctaaggttct

SEQ ID NO: 268256 - DNA, 25 bp, Artificial
  Probe
tgggcccaaacctgaagtagcccaa

SEQ ID NO: 268257 - DNA, 25 bp, Artificial
  Probe
caaacctgaagtagcccaacagaca

SEQ ID NO: 268258 - DNA, 25 bp, Artificial
  Probe
cttcagtttcgctaaggttctccct

SEQ ID NO: 268259 - DNA, 25 bp, Artificial
  Probe
gtggggcctgctattcccctgagtt

SEQ ID NO: 268260 - DNA, 25 bp, Artificial
  Probe
gccagctcaattatgacatgcacaa

SEQ ID NO: 268261 - DNA, 25 bp, Artificial
  Probe
ctgctattcccctgagttcaaaggg

SEQ ID NO: 268262 - DNA, 25 bp, Artificial
  Probe
ctcagtggggcctgctattcccctg

SEQ ID NO: 268263 - DNA, 25 bp, Artificial
  Probe
cagtggggcctgctattcccctgag

SEQ ID NO: 268264 - DNA, 25 bp, Artificial
  Probe
ggggcctgctattcccctgagttca

SEQ ID NO: 268265 - DNA, 25 bp, Artificial
  Probe
ctgaagtagcccaacagacaaggaa

SEQ ID NO: 268266 - DNA, 25 bp, Artificial
  Probe
ccctgagttcaaagggcagatctgc

SEQ ID NO: 268267 - DNA, 25 bp, Artificial
  Probe
atgcacaacccctttgacatttgtg

SEQ ID NO: 268268 - DNA, 25 bp, Artificial
  Probe
gtgctgcatcttaccggcccatcta

SEQ ID NO: 268269 - DNA, 25 bp, Artificial
  Probe
gtagaccggtgctgtcaagcccttt

SEQ ID NO: 268270 - DNA, 25 bp, Artificial
  Probe
aagacgtagaccggtgctgtcaagc

SEQ ID NO: 268271 - DNA, 25 bp, Artificial
  Probe
gacgtagaccggtgctgtcaagccc

SEQ ID NO: 268272 - DNA, 25 bp, Artificial
  Probe
ccggtgctgtcaagccctttcccaa

SEQ ID NO: 268273 - DNA, 25 bp, Artificial
  Probe
acgtagaccggtgctgtcaagccct

SEQ ID NO: 268274 - DNA, 25 bp, Artificial
  Probe
aagatgaaagccattggatggggta

SEQ ID NO: 268275 - DNA, 25 bp, Artificial
  Probe
gatgaaagccattggatggggtaac

SEQ ID NO: 268276 - DNA, 25 bp, Artificial
  Probe
cggtgctgtcaagccctttcccaaa

SEQ ID NO: 268277 - DNA, 25 bp, Artificial
  Probe
ggtgctgtcaagccctttcccaaag

SEQ ID NO: 268278 - DNA, 25 bp, Artificial
  Probe
gtgctgtcaagccctttcccaaaga

SEQ ID NO: 268279 - DNA, 25 bp, Artificial
  Probe
ttagaagacgtagaccggtgctgtc

SEQ ID NO: 268280 - DNA, 25 bp, Artificial
  Probe
gaccggtgctgtcaagccctttccc

SEQ ID NO: 268281 - DNA, 25 bp, Artificial
  Probe
tcccaaagactgggaacacaacctt

SEQ ID NO: 268282 - DNA, 25 bp, Artificial
  Probe
atgaaagccattggatggggtaaca

SEQ ID NO: 268283 - DNA, 25 bp, Artificial
  Probe
aaagccattggatggggtaacaaga

SEQ ID NO: 268284 - DNA, 25 bp, Artificial
  Probe
accggtgctgtcaagccctttccca

SEQ ID NO: 268285 - DNA, 25 bp, Artificial
  Probe
tgaaagccattggatggggtaacaa

SEQ ID NO: 268286 - DNA, 25 bp, Artificial
  Probe
ttcccaaagactgggaacacaacct

SEQ ID NO: 268287 - DNA, 25 bp, Artificial
  Probe
agaagacgtagaccggtgctgtcaa

SEQ ID NO: 268288 - DNA, 25 bp, Artificial
  Probe
cgtagaccggtgctgtcaagccctt

SEQ ID NO: 268289 - DNA, 25 bp, Artificial
  Probe
tgtcaagccctttcccaaagactgg

SEQ ID NO: 268290 - DNA, 25 bp, Artificial
  Probe
tcaagccctttcccaaagactggga

SEQ ID NO: 268291 - DNA, 25 bp, Artificial
  Probe
agccattggatggggtaacaagacc

SEQ ID NO: 268292 - DNA, 25 bp, Artificial
  Probe
agacgtagaccggtgctgtcaagcc

SEQ ID NO: 268293 - DNA, 25 bp, Artificial
  Probe
agatgaaagccattggatggggtaa

SEQ ID NO: 268294 - DNA, 25 bp, Artificial
  Probe
aagccattggatggggtaacaagac

SEQ ID NO: 268295 - DNA, 25 bp, Artificial
  Probe
tagaccggtgctgtcaagccctttc

SEQ ID NO: 268296 - DNA, 25 bp, Artificial
  Probe
gaaagccattggatggggtaacaag

SEQ ID NO: 268297 - DNA, 25 bp, Artificial
  Probe
gaagacgtagaccggtgctgtcaag

SEQ ID NO: 268298 - DNA, 25 bp, Artificial
  Probe
gctgtcaagccctttcccaaagact

SEQ ID NO: 268299 - DNA, 25 bp, Artificial
  Probe
tgctgtcaagccctttcccaaagac

SEQ ID NO: 268300 - DNA, 25 bp, Artificial
  Probe
gtcaagccctttcccaaagactggg

SEQ ID NO: 268301 - DNA, 25 bp, Artificial
  Probe
agaccggtgctgtcaagccctttcc

SEQ ID NO: 268302 - DNA, 25 bp, Artificial
  Probe
ctgtcaagccctttcccaaagactg

SEQ ID NO: 268303 - DNA, 25 bp, Artificial
  Probe
tttatgctgccagaccctcagaata

SEQ ID NO: 268304 - DNA, 25 bp, Artificial
  Probe
agaactttcttatgagagacagtac

SEQ ID NO: 268305 - DNA, 25 bp, Artificial
  Probe
aatatttctcttagaagatgacggc

SEQ ID NO: 268306 - DNA, 25 bp, Artificial
  Probe
agtcagggctgacttagctagtccc

SEQ ID NO: 268307 - DNA, 25 bp, Artificial
  Probe
gaactttcttatgagagacagtaca

SEQ ID NO: 268308 - DNA, 25 bp, Artificial
  Probe
ggtgctgatttcattcctgaaagat

SEQ ID NO: 268309 - DNA, 25 bp, Artificial
  Probe
ttgcttgcaaatatagttagcctag

SEQ ID NO: 268310 - DNA, 25 bp, Artificial
  Probe
tggaaacactatattgcttgcaaat

SEQ ID NO: 268311 - DNA, 25 bp, Artificial
  Probe
ttctttcagaacaaaacctcggatg

SEQ ID NO: 268312 - DNA, 25 bp, Artificial
  Probe
ctcatcagcgtgcttcgtcttttat

SEQ ID NO: 268313 - DNA, 25 bp, Artificial
  Probe
atttatgctgccagaccctcagaat

SEQ ID NO: 268314 - DNA, 25 bp, Artificial
  Probe
ctcagaatatttctcttagaagatg

SEQ ID NO: 268315 - DNA, 25 bp, Artificial
  Probe
atattgcttgcaaatatagttagcc

SEQ ID NO: 268316 - DNA, 25 bp, Artificial
  Probe
ggaaacactatattgcttgcaaata

SEQ ID NO: 268317 - DNA, 25 bp, Artificial
  Probe
tggatgcaaggctcatcagcgtgct

SEQ ID NO: 268318 - DNA, 25 bp, Artificial
  Probe
acggccacccttcttggtgctgatt

SEQ ID NO: 268319 - DNA, 25 bp, Artificial
  Probe
taccgacggatttatgctgccagac

SEQ ID NO: 268320 - DNA, 25 bp, Artificial
  Probe
cagaatatttctcttagaagatgac

SEQ ID NO: 268321 - DNA, 25 bp, Artificial
  Probe
acctcggatggaaacactatattgc

SEQ ID NO: 268322 - DNA, 25 bp, Artificial
  Probe
aagatgacggccacccttcttggtg

SEQ ID NO: 268323 - DNA, 25 bp, Artificial
  Probe
cagaacaaaacctcggatggaaaca

SEQ ID NO: 268324 - DNA, 25 bp, Artificial
  Probe
atcagcgtgcttcgtcttttatctc

SEQ ID NO: 268325 - DNA, 25 bp, Artificial
  Probe
ggatgcaaggctcatcagcgtgctt

SEQ ID NO: 268326 - DNA, 25 bp, Artificial
  Probe
acggatttatgctgccagaccctca

SEQ ID NO: 268327 - DNA, 25 bp, Artificial
  Probe
atttctcttagaagatgacggccac

SEQ ID NO: 268328 - DNA, 25 bp, Artificial
  Probe
ttcagaacaaaacctcggatggaaa

SEQ ID NO: 268329 - DNA, 25 bp, Artificial
  Probe
ttagcctagaactttcttatgagag

SEQ ID NO: 268330 - DNA, 25 bp, Artificial
  Probe
attcctgaaagattggatgcaaggc

SEQ ID NO: 268331 - DNA, 25 bp, Artificial
  Probe
ctagaactttcttatgagagacagt

SEQ ID NO: 268332 - DNA, 25 bp, Artificial
  Probe
gcaaggctcatcagcgtgcttcgtc

SEQ ID NO: 268333 - DNA, 25 bp, Artificial
  Probe
tcattcctgaaagattggatgcaag

SEQ ID NO: 268334 - DNA, 25 bp, Artificial
  Probe
ggtagtcagggctgacttagctagt

SEQ ID NO: 268335 - DNA, 25 bp, Artificial
  Probe
tttcattcctgaaagattggatgca

SEQ ID NO: 268336 - DNA, 25 bp, Artificial
  Probe
ctcttagaagatgacggccaccctt

SEQ ID NO: 268337 - DNA, 25 bp, Artificial
  Probe
agggctgacttagctagtcccaacc

SEQ ID NO: 268338 - DNA, 25 bp, Artificial
  Probe
tgacggccacccttcttggtgctga

SEQ ID NO: 268339 - DNA, 25 bp, Artificial
  Probe
atttcattcctgaaagattggatgc

SEQ ID NO: 268340 - DNA, 25 bp, Artificial
  Probe
ttatgctgccagaccctcagaatat

SEQ ID NO: 268341 - DNA, 25 bp, Artificial
  Probe
ctttcagaacaaaacctcggatgga

SEQ ID NO: 268342 - DNA, 25 bp, Artificial
  Probe
ctgatttcattcctgaaagattgga

SEQ ID NO: 268343 - DNA, 25 bp, Artificial
  Probe
ccacccttcttggtgctgatttcat

SEQ ID NO: 268344 - DNA, 25 bp, Artificial
  Probe
ggctcatcagcgtgcttcgtctttt

SEQ ID NO: 268345 - DNA, 25 bp, Artificial
  Probe
cttggtgctgatttcattcctgaaa

SEQ ID NO: 268346 - DNA, 25 bp, Artificial
  Probe
gctgccagaccctcagaatatttct

SEQ ID NO: 268347 - DNA, 25 bp, Artificial
  Probe
aaacctcggatggaaacactatatt

SEQ ID NO: 268348 - DNA, 25 bp, Artificial
  Probe
atagttagcctagaactttcttatg

SEQ ID NO: 268349 - DNA, 25 bp, Artificial
  Probe
ttagtcgatggtgtgctttcactgt

SEQ ID NO: 268350 - DNA, 25 bp, Artificial
  Probe
ttagtcattctaagacagagaagtg

SEQ ID NO: 268351 - DNA, 25 bp, Artificial
  Probe
gatggtgtgctttcactgtgatttt

SEQ ID NO: 268352 - DNA, 25 bp, Artificial
  Probe
ttggcgacccgtgtgttaattatcc

SEQ ID NO: 268353 - DNA, 25 bp, Artificial
  Probe
ttctcataaaggggtagttagtcat

SEQ ID NO: 268354 - DNA, 25 bp, Artificial
  Probe
cgatggtgtgctttcactgtgattt

SEQ ID NO: 268355 - DNA, 25 bp, Artificial
  Probe
tcgatggtgtgctttcactgtgatt

SEQ ID NO: 268356 - DNA, 25 bp, Artificial
  Probe
gaaattggcgacccgtgtgttaatt

SEQ ID NO: 268357 - DNA, 25 bp, Artificial
  Probe
tggtgtgctttcactgtgatttttt

SEQ ID NO: 268358 - DNA, 25 bp, Artificial
  Probe
tcactgtgattttttggataaactt

SEQ ID NO: 268359 - DNA, 25 bp, Artificial
  Probe
tttcactgtgattttttggataaac

SEQ ID NO: 268360 - DNA, 25 bp, Artificial
  Probe
tcattctaagacagagaagtggaat

SEQ ID NO: 268361 - DNA, 25 bp, Artificial
  Probe
atatttagtcgatggtgtgctttca

SEQ ID NO: 268362 - DNA, 25 bp, Artificial
  Probe
tgtgctttcactgtgattttttgga

SEQ ID NO: 268363 - DNA, 25 bp, Artificial
  Probe
tggataaacttctcataaaggggta

SEQ ID NO: 268364 - DNA, 25 bp, Artificial
  Probe
tagtcattctaagacagagaagtgg

SEQ ID NO: 268365 - DNA, 25 bp, Artificial
  Probe
ttttttggataaacttctcataaag

SEQ ID NO: 268366 - DNA, 25 bp, Artificial
  Probe
cttctcataaaggggtagttagtca

SEQ ID NO: 268367 - DNA, 25 bp, Artificial
  Probe
tatatttagtcgatggtgtgctttc

SEQ ID NO: 268368 - DNA, 25 bp, Artificial
  Probe
ggcgacccgtgtgttaattatccaa

SEQ ID NO: 268369 - DNA, 25 bp, Artificial
  Probe
ttctaagacagagaagtggaatatt

SEQ ID NO: 268370 - DNA, 25 bp, Artificial
  Probe
agaaattggcgacccgtgtgttaat

SEQ ID NO: 268371 - DNA, 25 bp, Artificial
  Probe
tggcgacccgtgtgttaattatcca

SEQ ID NO: 268372 - DNA, 25 bp, Artificial
  Probe
attggcgacccgtgtgttaattatc

SEQ ID NO: 268373 - DNA, 25 bp, Artificial
  Probe
atttagtcgatggtgtgctttcact

SEQ ID NO: 268374 - DNA, 25 bp, Artificial
  Probe
gttatatttagtcgatggtgtgctt

SEQ ID NO: 268375 - DNA, 25 bp, Artificial
  Probe
agtcattctaagacagagaagtgga

SEQ ID NO: 268376 - DNA, 25 bp, Artificial
  Probe
gaagaaattggcgacccgtgtgtta

SEQ ID NO: 268377 - DNA, 25 bp, Artificial
  Probe
aattggcgacccgtgtgttaattat

SEQ ID NO: 268378 - DNA, 25 bp, Artificial
  Probe
tctcataaaggggtagttagtcatt

SEQ ID NO: 268379 - DNA, 25 bp, Artificial
  Probe
gtgttatatttagtcgatggtgtgc

SEQ ID NO: 268380 - DNA, 25 bp, Artificial
  Probe
tgaagaaattggcgacccgtgtgtt

SEQ ID NO: 268381 - DNA, 25 bp, Artificial
  Probe
agttagtcattctaagacagagaag

SEQ ID NO: 268382 - DNA, 25 bp, Artificial
  Probe
tttttggataaacttctcataaagg

SEQ ID NO: 268383 - DNA, 25 bp, Artificial
  Probe
tagttagtcattctaagacagagaa

SEQ ID NO: 268384 - DNA, 25 bp, Artificial
  Probe
gcgacccgtgtgttaattatccaaa

SEQ ID NO: 268385 - DNA, 25 bp, Artificial
  Probe
tttagtcgatggtgtgctttcactg

SEQ ID NO: 268386 - DNA, 25 bp, Artificial
  Probe
agtcgatggtgtgctttcactgtga

SEQ ID NO: 268387 - DNA, 25 bp, Artificial
  Probe
gataaacttctcataaaggggtagt

SEQ ID NO: 268388 - DNA, 25 bp, Artificial
  Probe
tagtcgatggtgtgctttcactgtg

SEQ ID NO: 268389 - DNA, 25 bp, Artificial
  Probe
gtcgatggtgtgctttcactgtgat

SEQ ID NO: 268390 - DNA, 25 bp, Artificial
  Probe
gtgtgctttcactgtgattttttgg

SEQ ID NO: 268391 - DNA, 25 bp, Artificial
  Probe
tttggataaacttctcataaagggg

SEQ ID NO: 268392 - DNA, 25 bp, Artificial
  Probe
gtgctttcactgtgattttttggat

SEQ ID NO: 268393 - DNA, 25 bp, Artificial
  Probe
attctaagacagagaagtggaatat

SEQ ID NO: 268394 - DNA, 25 bp, Artificial
  Probe
tatttagtcgatggtgtgctttcac

SEQ ID NO: 268395 - DNA, 25 bp, Artificial
  Probe
ctcacatacgccattgctgcattgc

SEQ ID NO: 268396 - DNA, 25 bp, Artificial
  Probe
acagcactgatcagaaataacagat

SEQ ID NO: 268397 - DNA, 25 bp, Artificial
  Probe
gacgctgctcacatacgccattgct

SEQ ID NO: 268398 - DNA, 25 bp, Artificial
  Probe
acgacacacgaggaccacagcactg

SEQ ID NO: 268399 - DNA, 25 bp, Artificial
  Probe
acaggcgaaaaaaccacgcatacgg

SEQ ID NO: 268400 - DNA, 25 bp, Artificial
  Probe
ccactgatacgcaatatgagacaca

SEQ ID NO: 268401 - DNA, 25 bp, Artificial
  Probe
atgagacacaaatacacgtgacgat

SEQ ID NO: 268402 - DNA, 25 bp, Artificial
  Probe
acgctgctcacatacgccattgctg

SEQ ID NO: 268403 - DNA, 25 bp, Artificial
  Probe
ggaataggacacgacacacgaggac

SEQ ID NO: 268404 - DNA, 25 bp, Artificial
  Probe
ggaacaccgcgatcccataaccgta

SEQ ID NO: 268405 - DNA, 25 bp, Artificial
  Probe
acgagcgacgacaccgataggaata

SEQ ID NO: 268406 - DNA, 25 bp, Artificial
  Probe
cgcacacgagcgacgacaccgatag

SEQ ID NO: 268407 - DNA, 25 bp, Artificial
  Probe
agaacgcacacgagcgacgacaccg

SEQ ID NO: 268408 - DNA, 25 bp, Artificial
  Probe
ataaccgtagaactcccttcaagtg

SEQ ID NO: 268409 - DNA, 25 bp, Artificial
  Probe
agaactcccttcaagtgaagcgaag

SEQ ID NO: 268410 - DNA, 25 bp, Artificial
  Probe
cgtagaactcccttcaagtgaagcg

SEQ ID NO: 268411 - DNA, 25 bp, Artificial
  Probe
cgacaccgataggaataggacacga

SEQ ID NO: 268412 - DNA, 25 bp, Artificial
  Probe
cagtccactgatacgcaatatgaga

SEQ ID NO: 268413 - DNA, 25 bp, Artificial
  Probe
cccttcaagtgaagcgaagcgacgc

SEQ ID NO: 268414 - DNA, 25 bp, Artificial
  Probe
tgaagcgaagcgacgctgctcacat

SEQ ID NO: 268415 - DNA, 25 bp, Artificial
  Probe
ataacagatacagaccacgcgcaaa

SEQ ID NO: 268416 - DNA, 25 bp, Artificial
  Probe
cacatacgccattgctgcattgcta

SEQ ID NO: 268417 - DNA, 25 bp, Artificial
  Probe
ttgctaactcagtccactgatacgc

SEQ ID NO: 268418 - DNA, 25 bp, Artificial
  Probe
gacacgacacacgaggaccacagca

SEQ ID NO: 268419 - DNA, 25 bp, Artificial
  Probe
cactgatacgcaatatgagacacaa

SEQ ID NO: 268420 - DNA, 25 bp, Artificial
  Probe
tacacgtgacgatacctgcactcgc

SEQ ID NO: 268421 - DNA, 25 bp, Artificial
  Probe
tttagagaacgcacacgagcgacga

SEQ ID NO: 268422 - DNA, 25 bp, Artificial
  Probe
ccacagcactgatcagaaataacag

SEQ ID NO: 268423 - DNA, 25 bp, Artificial
  Probe
agaccacgcgcaaacatcggacact

SEQ ID NO: 268424 - DNA, 25 bp, Artificial
  Probe
gcgaagcgacgctgctcacatacgc

SEQ ID NO: 268425 - DNA, 25 bp, Artificial
  Probe
taaccgtagaactcccttcaagtga

SEQ ID NO: 268426 - DNA, 25 bp, Artificial
  Probe
actcagtccactgatacgcaatatg

SEQ ID NO: 268427 - DNA, 25 bp, Artificial
  Probe
accgcgatcccataaccgtagaact

SEQ ID NO: 268428 - DNA, 25 bp, Artificial
  Probe
gctaactcagtccactgatacgcaa

SEQ ID NO: 268429 - DNA, 25 bp, Artificial
  Probe
ccgcttttagagaacgcacacgagc

SEQ ID NO: 268430 - DNA, 25 bp, Artificial
  Probe
gacgatacctgcactcgcctctttt

SEQ ID NO: 268431 - DNA, 25 bp, Artificial
  Probe
taagaatcacatcaacacaggcgaa

SEQ ID NO: 268432 - DNA, 25 bp, Artificial
  Probe
caggcgaaaaaaccacgcatacgga

SEQ ID NO: 268433 - DNA, 25 bp, Artificial
  Probe
cataagaatcacatcaacacaggcg

SEQ ID NO: 268434 - DNA, 25 bp, Artificial
  Probe
acagatacagaccacgcgcaaacat

SEQ ID NO: 268435 - DNA, 25 bp, Artificial
  Probe
gtgacgatacctgcactcgcctctt

SEQ ID NO: 268436 - DNA, 25 bp, Artificial
  Probe
tctcctctccgcttttagagaacgc

SEQ ID NO: 268437 - DNA, 25 bp, Artificial
  Probe
gcgacgacaccgataggaataggac

SEQ ID NO: 268438 - DNA, 25 bp, Artificial
  Probe
atatgagacacaaatacacgtgacg

SEQ ID NO: 268439 - DNA, 25 bp, Artificial
  Probe
gaccggaaaccaacacaccataaga

SEQ ID NO: 268440 - DNA, 25 bp, Artificial
  Probe
caaatacacgtgacgatacctgcac

SEQ ID NO: 268441 - DNA, 25 bp, Artificial
  Probe
gcactttgcccttttcatttagtgt

SEQ ID NO: 268442 - DNA, 25 bp, Artificial
  Probe
tagacttctgggtgccctggaaaag

SEQ ID NO: 268443 - DNA, 25 bp, Artificial
  Probe
tctcacactgtctaggccagacact

SEQ ID NO: 268444 - DNA, 25 bp, Artificial
  Probe
ctactcaaagggaggccatgggtcc

SEQ ID NO: 268445 - DNA, 25 bp, Artificial
  Probe
cgagtttgtgtctactcaaagggag

SEQ ID NO: 268446 - DNA, 25 bp, Artificial
  Probe
gccttgtatctccatggcagaagca

SEQ ID NO: 268447 - DNA, 25 bp, Artificial
  Probe
aagagaactgcctcatttctaggtt

SEQ ID NO: 268448 - DNA, 25 bp, Artificial
  Probe
gtgtctactcaaagggaggccatgg

SEQ ID NO: 268449 - DNA, 25 bp, Artificial
  Probe
ggccatttctgtttcttccttgact

SEQ ID NO: 268450 - DNA, 25 bp, Artificial
  Probe
tataaagtgtgtactcaccgagttt

SEQ ID NO: 268451 - DNA, 25 bp, Artificial
  Probe
ctcacactgtctaggccagacactt

SEQ ID NO: 268452 - DNA, 25 bp, Artificial
  Probe
ccatgggtccccagggtcactgagt

SEQ ID NO: 268453 - DNA, 25 bp, Artificial
  Probe
atctaaagatccataaagagaactg

SEQ ID NO: 268454 - DNA, 25 bp, Artificial
  Probe
gcctgtatctgtagacatcatttat

SEQ ID NO: 268455 - DNA, 25 bp, Artificial
  Probe
gaactgcctcatttctaggttttct

SEQ ID NO: 268456 - DNA, 25 bp, Artificial
  Probe
aattacttattacaggttgtccctg

SEQ ID NO: 268457 - DNA, 25 bp, Artificial
  Probe
gctctaattacttattacaggttgt

SEQ ID NO: 268458 - DNA, 25 bp, Artificial
  Probe
gactgatctaaagatccataaagag

SEQ ID NO: 268459 - DNA, 25 bp, Artificial
  Probe
ctaggcacctctcacactgtctagg

SEQ ID NO: 268460 - DNA, 25 bp, Artificial
  Probe
actgtctaggccagacacttgctgc

SEQ ID NO: 268461 - DNA, 25 bp, Artificial
  Probe
aaatctggggccatttctgtttctt

SEQ ID NO: 268462 - DNA, 25 bp, Artificial
  Probe
ccagacacttgctgcctgtatctgt

SEQ ID NO: 268463 - DNA, 25 bp, Artificial
  Probe
aactgtacgttttctatgcactttg

SEQ ID NO: 268464 - DNA, 25 bp, Artificial
  Probe
tattacaggttgtccctggtaatgt

SEQ ID NO: 268465 - DNA, 25 bp, Artificial
  Probe
ctcctagacttctgggtgccctgga

SEQ ID NO: 268466 - DNA, 25 bp, Artificial
  Probe
tatctccatggcagaagcaaatctg

SEQ ID NO: 268467 - DNA, 25 bp, Artificial
  Probe
cagaagcaaatctggggccatttct

SEQ ID NO: 268468 - DNA, 25 bp, Artificial
  Probe
gtgccctggaaaagcccgttagctc

SEQ ID NO: 268469 - DNA, 25 bp, Artificial
  Probe
agatgctctaattacttattacagg

SEQ ID NO: 268470 - DNA, 25 bp, Artificial
  Probe
cccagggtcactgagtcaacccagt

SEQ ID NO: 268471 - DNA, 25 bp, Artificial
  Probe
ctgagtcaacccagtaccaaggtgg

SEQ ID NO: 268472 - DNA, 25 bp, Artificial
  Probe
tggaaaagcccgttagctctgtgtg

SEQ ID NO: 268473 - DNA, 25 bp, Artificial
  Probe
tgcactttgcccttttcatttagtg

SEQ ID NO: 268474 - DNA, 25 bp, Artificial
  Probe
gtacgttttctatgcactttgccct

SEQ ID NO: 268475 - DNA, 25 bp, Artificial
  Probe
atggcagaagcaaatctggggccat

SEQ ID NO: 268476 - DNA, 25 bp, Artificial
  Probe
ctccatggcagaagcaaatctgggg

SEQ ID NO: 268477 - DNA, 25 bp, Artificial
  Probe
ttctgggtgccctggaaaagcccgt

SEQ ID NO: 268478 - DNA, 25 bp, Artificial
  Probe
gggtcactgagtcaacccagtacca

SEQ ID NO: 268479 - DNA, 25 bp, Artificial
  Probe
gcttccagactgatctaaagatcca

SEQ ID NO: 268480 - DNA, 25 bp, Artificial
  Probe
ctgtctttcctaaatggtataggaa

SEQ ID NO: 268481 - DNA, 25 bp, Artificial
  Probe
caaggtggagccttgtatctccatg

SEQ ID NO: 268482 - DNA, 25 bp, Artificial
  Probe
tctaggcacctctcacactgtctag

SEQ ID NO: 268483 - DNA, 25 bp, Artificial
  Probe
tgtattgatacttatgctgcttcca

SEQ ID NO: 268484 - DNA, 25 bp, Artificial
  Probe
cccagtaccaaggtggagccttgta

SEQ ID NO: 268485 - DNA, 25 bp, Artificial
  Probe
gcccttttcatttagtgtattgata

SEQ ID NO: 268486 - DNA, 25 bp, Artificial
  Probe
gtgtactcaccgagtttgtgtctac

SEQ ID NO: 268487 - DNA, 25 bp, Artificial
  Probe
aagacccgtctggacgtcgtcagca

SEQ ID NO: 268488 - DNA, 25 bp, Artificial
  Probe
aggattatctgctctacaagcagat

SEQ ID NO: 268489 - DNA, 25 bp, Artificial
  Probe
acagagcactacaaccccgagcagg

SEQ ID NO: 268490 - DNA, 25 bp, Artificial
  Probe
acgtttgggcaaatgttctgcgagg

SEQ ID NO: 268491 - DNA, 25 bp, Artificial
  Probe
caaccccgagcaggaaggagaggaa

SEQ ID NO: 268492 - DNA, 25 bp, Artificial
  Probe
atgaagcaactgaagacccgtctgg

SEQ ID NO: 268493 - DNA, 25 bp, Artificial
  Probe
gaagacccgtctggacgtcgtcagc

SEQ ID NO: 268494 - DNA, 25 bp, Artificial
  Probe
ctgataatcaaggtcacattgaccc

SEQ ID NO: 268495 - DNA, 25 bp, Artificial
  Probe
tacaaccccgagcaggaaggagagg

SEQ ID NO: 268496 - DNA, 25 bp, Artificial
  Probe
tctgctctacaagcagatgaagcaa

SEQ ID NO: 268497 - DNA, 25 bp, Artificial
  Probe
gaagccggagaacaccgtcgtctcc

SEQ ID NO: 268498 - DNA, 25 bp, Artificial
  Probe
cgaggtggacctggtgtttagcaca

SEQ ID NO: 268499 - DNA, 25 bp, Artificial
  Probe
tggacctggtgtttagcacagagca

SEQ ID NO: 268500 - DNA, 25 bp, Artificial
  Probe
gtttagcacagagcactacaacccc

SEQ ID NO: 268501 - DNA, 25 bp, Artificial
  Probe
actgaagacccgtctggacgtcgtc

SEQ ID NO: 268502 - DNA, 25 bp, Artificial
  Probe
tcaaggtcacattgacccttcactg

SEQ ID NO: 268503 - DNA, 25 bp, Artificial
  Probe
ggagaacaccgtcgtctccgggcag

SEQ ID NO: 268504 - DNA, 25 bp, Artificial
  Probe
gataatcaaggtcacattgaccctt

SEQ ID NO: 268505 - DNA, 25 bp, Artificial
  Probe
aaaggattatctgctctacaagcag

SEQ ID NO: 268506 - DNA, 25 bp, Artificial
  Probe
aggtggacctggtgtttagcacaga

SEQ ID NO: 268507 - DNA, 25 bp, Artificial
  Probe
cagagcactacaaccccgagcagga

SEQ ID NO: 268508 - DNA, 25 bp, Artificial
  Probe
gcatacctgataatcaaggtcacat

SEQ ID NO: 268509 - DNA, 25 bp, Artificial
  Probe
ggattatctgctctacaagcagatg

SEQ ID NO: 268510 - DNA, 25 bp, Artificial
  Probe
ctggacgtcgtcagcatacctgata

SEQ ID NO: 268511 - DNA, 25 bp, Artificial
  Probe
ctggtgtttagcacagagcactaca

SEQ ID NO: 268512 - DNA, 25 bp, Artificial
  Probe
aagcaactgaagacccgtctggacg

SEQ ID NO: 268513 - DNA, 25 bp, Artificial
  Probe
tcagcatacctgataatcaaggtca

SEQ ID NO: 268514 - DNA, 25 bp, Artificial
  Probe
ggacctggtgtttagcacagagcac

SEQ ID NO: 268515 - DNA, 25 bp, Artificial
  Probe
gagaacaccgtcgtctccgggcagc

SEQ ID NO: 268516 - DNA, 25 bp, Artificial
  Probe
ctgccacgcgggatcctgcagctgg

SEQ ID NO: 268517 - DNA, 25 bp, Artificial
  Probe
tctacaagcagatgaagcaactgaa

SEQ ID NO: 268518 - DNA, 25 bp, Artificial
  Probe
ccgtctggacgtcgtcagcatacct

SEQ ID NO: 268519 - DNA, 25 bp, Artificial
  Probe
atctgctctacaagcagatgaagca

SEQ ID NO: 268520 - DNA, 25 bp, Artificial
  Probe
tgaagcaactgaagacccgtctgga

SEQ ID NO: 268521 - DNA, 25 bp, Artificial
  Probe
tagcacagagcactacaaccccgag

SEQ ID NO: 268522 - DNA, 25 bp, Artificial
  Probe
atacctgataatcaaggtcacattg

SEQ ID NO: 268523 - DNA, 25 bp, Artificial
  Probe
acctgataatcaaggtcacattgac

SEQ ID NO: 268524 - DNA, 25 bp, Artificial
  Probe
acccgtctggacgtcgtcagcatac

SEQ ID NO: 268525 - DNA, 25 bp, Artificial
  Probe
cgtcagcatacctgataatcaaggt

SEQ ID NO: 268526 - DNA, 25 bp, Artificial
  Probe
agacccgtctggacgtcgtcagcat

SEQ ID NO: 268527 - DNA, 25 bp, Artificial
  Probe
cgtcgtcagcatacctgataatcaa

SEQ ID NO: 268528 - DNA, 25 bp, Artificial
  Probe
ctacaaccccgagcaggaaggagag

SEQ ID NO: 268529 - DNA, 25 bp, Artificial
  Probe
cctggtgtttagcacagagcactac

SEQ ID NO: 268530 - DNA, 25 bp, Artificial
  Probe
cggagaacaccgtcgtctccgggca

SEQ ID NO: 268531 - DNA, 25 bp, Artificial
  Probe
ggtgtttagcacagagcactacaac

SEQ ID NO: 268532 - DNA, 25 bp, Artificial
  Probe
gtcagcatacctgataatcaaggtc

SEQ ID NO: 268533 - DNA, 25 bp, Artificial
  Probe
gagagagcacccgatacaaaagagg

SEQ ID NO: 268534 - DNA, 25 bp, Artificial
  Probe
gagagcacccgatacaaaagagggc

SEQ ID NO: 268535 - DNA, 25 bp, Artificial
  Probe
ctttgtgtatggtccaagggggctc

SEQ ID NO: 268536 - DNA, 25 bp, Artificial
  Probe
acaacgtcgaaatgccgcgaatcta

SEQ ID NO: 268537 - DNA, 25 bp, Artificial
  Probe
aacttccgcctttgtgtatggtcca

SEQ ID NO: 268538 - DNA, 25 bp, Artificial
  Probe
aatgccgcgaatctacacaacaaga

SEQ ID NO: 268539 - DNA, 25 bp, Artificial
  Probe
aaatgccgcgaatctacacaacaag

SEQ ID NO: 268540 - DNA, 25 bp, Artificial
  Probe
cttgtgagagagcacccgatacaaa

SEQ ID NO: 268541 - DNA, 25 bp, Artificial
  Probe
acccgatacaaaagagggcacaacg

SEQ ID NO: 268542 - DNA, 25 bp, Artificial
  Probe
aattaaacttccgcctttgtgtatg

SEQ ID NO: 268543 - DNA, 25 bp, Artificial
  Probe
cacccgatacaaaagagggcacaac

SEQ ID NO: 268544 - DNA, 25 bp, Artificial
  Probe
tgccgcgaatctacacaacaagagg

SEQ ID NO: 268545 - DNA, 25 bp, Artificial
  Probe
acttccgcctttgtgtatggtccaa

SEQ ID NO: 268546 - DNA, 25 bp, Artificial
  Probe
agagggcacaacgtcgaaatgccgc

SEQ ID NO: 268547 - DNA, 25 bp, Artificial
  Probe
gcacaacgtcgaaatgccgcgaatc

SEQ ID NO: 268548 - DNA, 25 bp, Artificial
  Probe
tccgcctttgtgtatggtccaaggg

SEQ ID NO: 268549 - DNA, 25 bp, Artificial
  Probe
gtcttgtgagagagcacccgataca

SEQ ID NO: 268550 - DNA, 25 bp, Artificial
  Probe
gaaatgccgcgaatctacacaacaa

SEQ ID NO: 268551 - DNA, 25 bp, Artificial
  Probe
aagagggcacaacgtcgaaatgccg

SEQ ID NO: 268552 - DNA, 25 bp, Artificial
  Probe
tcttgtgagagagcacccgatacaa

SEQ ID NO: 268553 - DNA, 25 bp, Artificial
  Probe
ttccgcctttgtgtatggtccaagg

SEQ ID NO: 268554 - DNA, 25 bp, Artificial
  Probe
agcacccgatacaaaagagggcaca

SEQ ID NO: 268555 - DNA, 25 bp, Artificial
  Probe
cttccgcctttgtgtatggtccaag

SEQ ID NO: 268556 - DNA, 25 bp, Artificial
  Probe
gagcacccgatacaaaagagggcac

SEQ ID NO: 268557 - DNA, 25 bp, Artificial
  Probe
gcacccgatacaaaagagggcacaa

SEQ ID NO: 268558 - DNA, 25 bp, Artificial
  Probe
cgaaatgccgcgaatctacacaaca

SEQ ID NO: 268559 - DNA, 25 bp, Artificial
  Probe
ttgtgagagagcacccgatacaaaa

SEQ ID NO: 268560 - DNA, 25 bp, Artificial
  Probe
ggcacaacgtcgaaatgccgcgaat

SEQ ID NO: 268561 - DNA, 25 bp, Artificial
  Probe
aaaagagggcacaacgtcgaaatgc

SEQ ID NO: 268562 - DNA, 25 bp, Artificial
  Probe
gccgcgaatctacacaacaagaggg

SEQ ID NO: 268563 - DNA, 25 bp, Artificial
  Probe
taaacttccgcctttgtgtatggtc

SEQ ID NO: 268564 - DNA, 25 bp, Artificial
  Probe
ccgcgaatctacacaacaagagggg

SEQ ID NO: 268565 - DNA, 25 bp, Artificial
  Probe
agcgtcttgtgagagagcacccgat

SEQ ID NO: 268566 - DNA, 25 bp, Artificial
  Probe
ggaagcgtcttgtgagagagcaccc

SEQ ID NO: 268567 - DNA, 25 bp, Artificial
  Probe
agggcacaacgtcgaaatgccgcga

SEQ ID NO: 268568 - DNA, 25 bp, Artificial
  Probe
cacaacgtcgaaatgccgcgaatct

SEQ ID NO: 268569 - DNA, 25 bp, Artificial
  Probe
cctttgtgtatggtccaagggggct

SEQ ID NO: 268570 - DNA, 25 bp, Artificial
  Probe
agagagcacccgatacaaaagaggg

SEQ ID NO: 268571 - DNA, 25 bp, Artificial
  Probe
atgccgcgaatctacacaacaagag

SEQ ID NO: 268572 - DNA, 25 bp, Artificial
  Probe
tttgtgtatggtccaagggggctcc

SEQ ID NO: 268573 - DNA, 25 bp, Artificial
  Probe
ttcagggcagggtacctacccaaat

SEQ ID NO: 268574 - DNA, 25 bp, Artificial
  Probe
gagggcacaacgtcgaaatgccgcg

SEQ ID NO: 268575 - DNA, 25 bp, Artificial
  Probe
gggcacaacgtcgaaatgccgcgaa

SEQ ID NO: 268576 - DNA, 25 bp, Artificial
  Probe
aagcgtcttgtgagagagcacccga

SEQ ID NO: 268577 - DNA, 25 bp, Artificial
  Probe
agagcacccgatacaaaagagggca

SEQ ID NO: 268578 - DNA, 25 bp, Artificial
  Probe
gaagcgtcttgtgagagagcacccg

SEQ ID NO: 268579 - DNA, 25 bp, Artificial
  Probe
gatggttacagtcacgggcgcgttt

SEQ ID NO: 268580 - DNA, 25 bp, Artificial
  Probe
tgatggttacagtcacgggcgcgtt

SEQ ID NO: 268581 - DNA, 25 bp, Artificial
  Probe
agtcacgggcgcgtttaacgtctga

SEQ ID NO: 268582 - DNA, 25 bp, Artificial
  Probe
aattggccatagtgatggttacagt

SEQ ID NO: 268583 - DNA, 25 bp, Artificial
  Probe
gtcacgggcgcgtttaacgtctgaa

SEQ ID NO: 268584 - DNA, 25 bp, Artificial
  Probe
tggttacagtcacgggcgcgtttaa

SEQ ID NO: 268585 - DNA, 25 bp, Artificial
  Probe
ccaattggccatagtgatggttaca

SEQ ID NO: 268586 - DNA, 25 bp, Artificial
  Probe
gggtaccaattggccatagtgatgg

SEQ ID NO: 268587 - DNA, 25 bp, Artificial
  Probe
attggccatagtgatggttacagtc

SEQ ID NO: 268588 - DNA, 25 bp, Artificial
  Probe
tttaacgtctgaatggaaacctggg

SEQ ID NO: 268589 - DNA, 25 bp, Artificial
  Probe
cgggcgcgtttaacgtctgaatgga

SEQ ID NO: 268590 - DNA, 25 bp, Artificial
  Probe
gttacagtcacgggcgcgtttaacg

SEQ ID NO: 268591 - DNA, 25 bp, Artificial
  Probe
acgggcgcgtttaacgtctgaatgg

SEQ ID NO: 268592 - DNA, 25 bp, Artificial
  Probe
taccaattggccatagtgatggtta

SEQ ID NO: 268593 - DNA, 25 bp, Artificial
  Probe
tacagtcacgggcgcgtttaacgtc

SEQ ID NO: 268594 - DNA, 25 bp, Artificial
  Probe
ggcgggtaccaattggccatagtga

SEQ ID NO: 268595 - DNA, 25 bp, Artificial
  Probe
caattggccatagtgatggttacag

SEQ ID NO: 268596 - DNA, 25 bp, Artificial
  Probe
gggcgcgtttaacgtctgaatggaa

SEQ ID NO: 268597 - DNA, 25 bp, Artificial
  Probe
gtttaacgtctgaatggaaacctgg

SEQ ID NO: 268598 - DNA, 25 bp, Artificial
  Probe
ttggccatagtgatggttacagtca

SEQ ID NO: 268599 - DNA, 25 bp, Artificial
  Probe
acagtcacgggcgcgtttaacgtct

SEQ ID NO: 268600 - DNA, 25 bp, Artificial
  Probe
accaattggccatagtgatggttac

SEQ ID NO: 268601 - DNA, 25 bp, Artificial
  Probe
gtaccaattggccatagtgatggtt

SEQ ID NO: 268602 - DNA, 25 bp, Artificial
  Probe
gggcgggtaccaattggccatagtg

SEQ ID NO: 268603 - DNA, 25 bp, Artificial
  Probe
cgggtaccaattggccatagtgatg

SEQ ID NO: 268604 - DNA, 25 bp, Artificial
  Probe
agtgatggttacagtcacgggcgcg

SEQ ID NO: 268605 - DNA, 25 bp, Artificial
  Probe
gtgatggttacagtcacgggcgcgt

SEQ ID NO: 268606 - DNA, 25 bp, Artificial
  Probe
gcgcgtttaacgtctgaatggaaac

SEQ ID NO: 268607 - DNA, 25 bp, Artificial
  Probe
cagtcacgggcgcgtttaacgtctg

SEQ ID NO: 268608 - DNA, 25 bp, Artificial
  Probe
cgtctgaatggaaacctgggttcca

SEQ ID NO: 268609 - DNA, 25 bp, Artificial
  Probe
cgtttaacgtctgaatggaaacctg

SEQ ID NO: 268610 - DNA, 25 bp, Artificial
  Probe
gcgtttaacgtctgaatggaaacct

SEQ ID NO: 268611 - DNA, 25 bp, Artificial
  Probe
atggttacagtcacgggcgcgttta

SEQ ID NO: 268612 - DNA, 25 bp, Artificial
  Probe
tcacgggcgcgtttaacgtctgaat

SEQ ID NO: 268613 - DNA, 25 bp, Artificial
  Probe
ggcgcgtttaacgtctgaatggaaa

SEQ ID NO: 268614 - DNA, 25 bp, Artificial
  Probe
gcgggtaccaattggccatagtgat

SEQ ID NO: 268615 - DNA, 25 bp, Artificial
  Probe
cacgggcgcgtttaacgtctgaatg

SEQ ID NO: 268616 - DNA, 25 bp, Artificial
  Probe
ttacagtcacgggcgcgtttaacgt

SEQ ID NO: 268617 - DNA, 25 bp, Artificial
  Probe
ggtaccaattggccatagtgatggt

SEQ ID NO: 268618 - DNA, 25 bp, Artificial
  Probe
tggctgtcctccaacgtgttctccc

SEQ ID NO: 268619 - DNA, 25 bp, Artificial
  Probe
tgttctccctgtgccaagtagcctg

SEQ ID NO: 268620 - DNA, 25 bp, Artificial
  Probe
ttctccctgtgccaagtagcctgcc

SEQ ID NO: 268621 - DNA, 25 bp, Artificial
  Probe
tctccctgtgccaagtagcctgcct

SEQ ID NO: 268622 - DNA, 25 bp, Artificial
  Probe
catgtactggctgtcctccaacgtg

SEQ ID NO: 268623 - DNA, 25 bp, Artificial
  Probe
tcatgtactggctgtcctccaacgt

SEQ ID NO: 268624 - DNA, 25 bp, Artificial
  Probe
cctccaacgtgttctccctgtgcca

SEQ ID NO: 268625 - DNA, 25 bp, Artificial
  Probe
caacgtgttctccctgtgccaagta

SEQ ID NO: 268626 - DNA, 25 bp, Artificial
  Probe
cgtgttctccctgtgccaagtagcc

SEQ ID NO: 268627 - DNA, 25 bp, Artificial
  Probe
tgtactggctgtcctccaacgtgtt

SEQ ID NO: 268628 - DNA, 25 bp, Artificial
  Probe
ttcatgtactggctgtcctccaacg

SEQ ID NO: 268629 - DNA, 25 bp, Artificial
  Probe
ccctgtgccaagtagcctgcctccg

SEQ ID NO: 268630 - DNA, 25 bp, Artificial
  Probe
cctgtgccaagtagcctgcctccgg

SEQ ID NO: 268631 - DNA, 25 bp, Artificial
  Probe
aacgtgttctccctgtgccaagtag

SEQ ID NO: 268632 - DNA, 25 bp, Artificial
  Probe
acgtgttctccctgtgccaagtagc

SEQ ID NO: 268633 - DNA, 25 bp, Artificial
  Probe
ctccaacgtgttctccctgtgccaa

SEQ ID NO: 268634 - DNA, 25 bp, Artificial
  Probe
tccaacgtgttctccctgtgccaag

SEQ ID NO: 268635 - DNA, 25 bp, Artificial
  Probe
ctccctgtgccaagtagcctgcctc

SEQ ID NO: 268636 - DNA, 25 bp, Artificial
  Probe
gtcctccaacgtgttctccctgtgc

SEQ ID NO: 268637 - DNA, 25 bp, Artificial
  Probe
ccaacgtgttctccctgtgccaagt

SEQ ID NO: 268638 - DNA, 25 bp, Artificial
  Probe
tcctccaacgtgttctccctgtgcc

SEQ ID NO: 268639 - DNA, 25 bp, Artificial
  Probe
ctgtgccaagtagcctgcctccggt

SEQ ID NO: 268640 - DNA, 25 bp, Artificial
  Probe
gtgttctccctgtgccaagtagcct

SEQ ID NO: 268641 - DNA, 25 bp, Artificial
  Probe
tgtgccaagtagcctgcctccggtt

SEQ ID NO: 268642 - DNA, 25 bp, Artificial
  Probe
ctggctgtcctccaacgtgttctcc

SEQ ID NO: 268643 - DNA, 25 bp, Artificial
  Probe
actggctgtcctccaacgtgttctc

SEQ ID NO: 268644 - DNA, 25 bp, Artificial
  Probe
atgtactggctgtcctccaacgtgt

SEQ ID NO: 268645 - DNA, 25 bp, Artificial
  Probe
ggctgtcctccaacgtgttctccct

SEQ ID NO: 268646 - DNA, 25 bp, Artificial
  Probe
gttctccctgtgccaagtagcctgc

SEQ ID NO: 268647 - DNA, 25 bp, Artificial
  Probe
gctgtcctccaacgtgttctccctg

SEQ ID NO: 268648 - DNA, 25 bp, Artificial
  Probe
tccctgtgccaagtagcctgcctcc

SEQ ID NO: 268649 - DNA, 25 bp, Artificial
  Probe
ctgtcctccaacgtgttctccctgt

SEQ ID NO: 268650 - DNA, 25 bp, Artificial
  Probe
tgtcctccaacgtgttctccctgtg

SEQ ID NO: 268651 - DNA, 25 bp, Artificial
  Probe
ccttaccaaagaatatgaccgtctg

SEQ ID NO: 268652 - DNA, 25 bp, Artificial
  Probe
cctcagacaagaaggaggagtaaag

SEQ ID NO: 268653 - DNA, 25 bp, Artificial
  Probe
ctcagtacgtggtccctcagacaag

SEQ ID NO: 268654 - DNA, 25 bp, Artificial
  Probe
agggccttaccaaagaatatgaccg

SEQ ID NO: 268655 - DNA, 25 bp, Artificial
  Probe
ggcctcagtacgtggtccctcagac

SEQ ID NO: 268656 - DNA, 25 bp, Artificial
  Probe
tccctcagacaagaaggaggagtaa

SEQ ID NO: 268657 - DNA, 25 bp, Artificial
  Probe
gtggtccctcagacaagaaggagga

SEQ ID NO: 268658 - DNA, 25 bp, Artificial
  Probe
gggccttaccaaagaatatgaccgt

SEQ ID NO: 268659 - DNA, 25 bp, Artificial
  Probe
gagcacgccaagctgcaggcctcag

SEQ ID NO: 268660 - DNA, 25 bp, Artificial
  Probe
ggccttaccaaagaatatgaccgtc

SEQ ID NO: 268661 - DNA, 25 bp, Artificial
  Probe
ctgcaggcctcagtacgtggtccct

SEQ ID NO: 268662 - DNA, 25 bp, Artificial
  Probe
cgtggtccctcagacaagaaggagg

SEQ ID NO: 268663 - DNA, 25 bp, Artificial
  Probe
aggcctcagtacgtggtccctcaga

SEQ ID NO: 268664 - DNA, 25 bp, Artificial
  Probe
gcctcagtacgtggtccctcagaca

SEQ ID NO: 268665 - DNA, 25 bp, Artificial
  Probe
acgccaagctgcaggcctcagtacg

SEQ ID NO: 268666 - DNA, 25 bp, Artificial
  Probe
acgtggtccctcagacaagaaggag

SEQ ID NO: 268667 - DNA, 25 bp, Artificial
  Probe
tgcaggcctcagtacgtggtccctc

SEQ ID NO: 268668 - DNA, 25 bp, Artificial
  Probe
cctcagtacgtggtccctcagacaa

SEQ ID NO: 268669 - DNA, 25 bp, Artificial
  Probe
caggcctcagtacgtggtccctcag

SEQ ID NO: 268670 - DNA, 25 bp, Artificial
  Probe
gtccctcagacaagaaggaggagta

SEQ ID NO: 268671 - DNA, 25 bp, Artificial
  Probe
cttaccaaagaatatgaccgtctgc

SEQ ID NO: 268672 - DNA, 25 bp, Artificial
  Probe
aagctgcaggcctcagtacgtggtc

SEQ ID NO: 268673 - DNA, 25 bp, Artificial
  Probe
tggtccctcagacaagaaggaggag

SEQ ID NO: 268674 - DNA, 25 bp, Artificial
  Probe
ggtccctcagacaagaaggaggagt

SEQ ID NO: 268675 - DNA, 25 bp, Artificial
  Probe
tacgtggtccctcagacaagaagga

SEQ ID NO: 268676 - DNA, 25 bp, Artificial
  Probe
aagagcacgccaagctgcaggcctc

SEQ ID NO: 268677 - DNA, 25 bp, Artificial
  Probe
gctgcaggcctcagtacgtggtccc

SEQ ID NO: 268678 - DNA, 25 bp, Artificial
  Probe
ccctcagacaagaaggaggagtaaa

SEQ ID NO: 268679 - DNA, 25 bp, Artificial
  Probe
agctgcaggcctcagtacgtggtcc

SEQ ID NO: 268680 - DNA, 25 bp, Artificial
  Probe
gcaggcctcagtacgtggtccctca

SEQ ID NO: 268681 - DNA, 25 bp, Artificial
  Probe
gtacgtggtccctcagacaagaagg

SEQ ID NO: 268682 - DNA, 25 bp, Artificial
  Probe
ccactcctagaagtgtagaaaagca

SEQ ID NO: 268683 - DNA, 25 bp, Artificial
  Probe
agcacgccaagctgcaggcctcagt

SEQ ID NO: 268684 - DNA, 25 bp, Artificial
  Probe
agagcacgccaagctgcaggcctca

SEQ ID NO: 268685 - DNA, 25 bp, Artificial
  Probe
gccttaccaaagaatatgaccgtct

SEQ ID NO: 268686 - DNA, 25 bp, Artificial
  Probe
gcacgccaagctgcaggcctcagta

SEQ ID NO: 268687 - DNA, 25 bp, Artificial
  Probe
agacgggctacaattggaatccaga

SEQ ID NO: 268688 - DNA, 25 bp, Artificial
  Probe
tccagccggcactatacgggagtac

SEQ ID NO: 268689 - DNA, 25 bp, Artificial
  Probe
ggctacaattggaatccagagcacg

SEQ ID NO: 268690 - DNA, 25 bp, Artificial
  Probe
gcgcagcccagtcttgaactggttt

SEQ ID NO: 268691 - DNA, 25 bp, Artificial
  Probe
agcccagtcttgaactggtttccag

SEQ ID NO: 268692 - DNA, 25 bp, Artificial
  Probe
acaagagcccccagggcggctatct

SEQ ID NO: 268693 - DNA, 25 bp, Artificial
  Probe
ttaagagccacgaggaatacaagta

SEQ ID NO: 268694 - DNA, 25 bp, Artificial
  Probe
agtacggctgacagataaagacggg

SEQ ID NO: 268695 - DNA, 25 bp, Artificial
  Probe
gaactggtttccagccggcactata

SEQ ID NO: 268696 - DNA, 25 bp, Artificial
  Probe
ggagtacggctgacagataaagacg

SEQ ID NO: 268697 - DNA, 25 bp, Artificial
  Probe
ctatacgggagtacggctgacagat

SEQ ID NO: 268698 - DNA, 25 bp, Artificial
  Probe
aagacgggctacaattggaatccag

SEQ ID NO: 268699 - DNA, 25 bp, Artificial
  Probe
agccggcactatacgggagtacggc

SEQ ID NO: 268700 - DNA, 25 bp, Artificial
  Probe
cttgaactggtttccagccggcact

SEQ ID NO: 268701 - DNA, 25 bp, Artificial
  Probe
cgggagtacggctgacagataaaga

SEQ ID NO: 268702 - DNA, 25 bp, Artificial
  Probe
cactatacgggagtacggctgacag

SEQ ID NO: 268703 - DNA, 25 bp, Artificial
  Probe
gctacaattggaatccagagcacgg

SEQ ID NO: 268704 - DNA, 25 bp, Artificial
  Probe
gtacggctgacagataaagacgggc

SEQ ID NO: 268705 - DNA, 25 bp, Artificial
  Probe
caattggaatccagagcacgggatt

SEQ ID NO: 268706 - DNA, 25 bp, Artificial
  Probe
ccagccggcactatacgggagtacg

SEQ ID NO: 268707 - DNA, 25 bp, Artificial
  Probe
taagagccacgaggaatacaagtaa

SEQ ID NO: 268708 - DNA, 25 bp, Artificial
  Probe
tgaactggtttccagccggcactat

SEQ ID NO: 268709 - DNA, 25 bp, Artificial
  Probe
ttgaactggtttccagccggcacta

SEQ ID NO: 268710 - DNA, 25 bp, Artificial
  Probe
ccagagcacgggattaagagccacg

SEQ ID NO: 268711 - DNA, 25 bp, Artificial
  Probe
attaagagccacgaggaatacaagt

SEQ ID NO: 268712 - DNA, 25 bp, Artificial
  Probe
agtcttgaactggtttccagccggc

SEQ ID NO: 268713 - DNA, 25 bp, Artificial
  Probe
tggaatccagagcacgggattaaga

SEQ ID NO: 268714 - DNA, 25 bp, Artificial
  Probe
cgcagcccagtcttgaactggtttc

SEQ ID NO: 268715 - DNA, 25 bp, Artificial
  Probe
ggaatccagagcacgggattaagag

SEQ ID NO: 268716 - DNA, 25 bp, Artificial
  Probe
actatacgggagtacggctgacaga

SEQ ID NO: 268717 - DNA, 25 bp, Artificial
  Probe
tttccagccggcactatacgggagt

SEQ ID NO: 268718 - DNA, 25 bp, Artificial
  Probe
tacaattggaatccagagcacggga

SEQ ID NO: 268719 - DNA, 25 bp, Artificial
  Probe
ctacaattggaatccagagcacggg

SEQ ID NO: 268720 - DNA, 25 bp, Artificial
  Probe
ggattaagagccacgaggaatacaa

SEQ ID NO: 268721 - DNA, 25 bp, Artificial
  Probe
gccgagaacaagagcccccagggcg

SEQ ID NO: 268722 - DNA, 25 bp, Artificial
  Probe
gcgccgagaacaagagcccccaggg

SEQ ID NO: 268723 - DNA, 25 bp, Artificial
  Probe
cagtcttgaactggtttccagccgg

SEQ ID NO: 268724 - DNA, 25 bp, Artificial
  Probe
ttggaatccagagcacgggattaag

SEQ ID NO: 268725 - DNA, 25 bp, Artificial
  Probe
taaagacgggctacaattggaatcc

SEQ ID NO: 268726 - DNA, 25 bp, Artificial
  Probe
gcactatacgggagtacggctgaca

SEQ ID NO: 268727 - DNA, 25 bp, Artificial
  Probe
cagcccagtcttgaactggtttcca

SEQ ID NO: 268728 - DNA, 25 bp, Artificial
  Probe
gatgcgcagcccagtcttgaactgg

SEQ ID NO: 268729 - DNA, 25 bp, Artificial
  Probe
tcttgaactggtttccagccggcac

SEQ ID NO: 268730 - DNA, 25 bp, Artificial
  Probe
atgcgcagcccagtcttgaactggt

SEQ ID NO: 268731 - DNA, 25 bp, Artificial
  Probe
gcccagtcttgaactggtttccagc

SEQ ID NO: 268732 - DNA, 25 bp, Artificial
  Probe
cccagtcttgaactggtttccagcc

SEQ ID NO: 268733 - DNA, 25 bp, Artificial
  Probe
ccttcactcagagaacagttatgtt

SEQ ID NO: 268734 - DNA, 25 bp, Artificial
  Probe
tttaagaaaacctatttgcataaat

SEQ ID NO: 268735 - DNA, 25 bp, Artificial
  Probe
taatttaactaagttgcttctaaag

SEQ ID NO: 268736 - DNA, 25 bp, Artificial
  Probe
cttcactcagagaacagttatgttg

SEQ ID NO: 268737 - DNA, 25 bp, Artificial
  Probe
taagttgcttctaaagtgtttacac

SEQ ID NO: 268738 - DNA, 25 bp, Artificial
  Probe
tatccttaaggcttggcttgtttaa

SEQ ID NO: 268739 - DNA, 25 bp, Artificial
  Probe
gtacacatcatatccttaaggcttg

SEQ ID NO: 268740 - DNA, 25 bp, Artificial
  Probe
aaccttcactcagagaacagttatg

SEQ ID NO: 268741 - DNA, 25 bp, Artificial
  Probe
atgatgttacttttaactgaacaat

SEQ ID NO: 268742 - DNA, 25 bp, Artificial
  Probe
ctactggtagtttgtacacatcata

SEQ ID NO: 268743 - DNA, 25 bp, Artificial
  Probe
aaaccttcactcagagaacagttat

SEQ ID NO: 268744 - DNA, 25 bp, Artificial
  Probe
atccttaaggcttggcttgtttaag

SEQ ID NO: 268745 - DNA, 25 bp, Artificial
  Probe
atacactactggtagtttgtacaca

SEQ ID NO: 268746 - DNA, 25 bp, Artificial
  Probe
cactcagagaacagttatgttgtat

SEQ ID NO: 268747 - DNA, 25 bp, Artificial
  Probe
tacacatcatatccttaaggcttgg

SEQ ID NO: 268748 - DNA, 25 bp, Artificial
  Probe
cacatcatatccttaaggcttggct

SEQ ID NO: 268749 - DNA, 25 bp, Artificial
  Probe
tatttttacatgtaagtttgaaaat

SEQ ID NO: 268750 - DNA, 25 bp, Artificial
  Probe
gtagtttgtacacatcatatcctta

SEQ ID NO: 268751 - DNA, 25 bp, Artificial
  Probe
ctaagttgcttctaaagtgtttaca

SEQ ID NO: 268752 - DNA, 25 bp, Artificial
  Probe
tttgaaaattcaggagcctgttatg

SEQ ID NO: 268753 - DNA, 25 bp, Artificial
  Probe
tacactactggtagtttgtacacat

SEQ ID NO: 268754 - DNA, 25 bp, Artificial
  Probe
acatcatatccttaaggcttggctt

SEQ ID NO: 268755 - DNA, 25 bp, Artificial
  Probe
aatatacactactggtagtttgtac

SEQ ID NO: 268756 - DNA, 25 bp, Artificial
  Probe
agttgcttctaaagtgtttacacct

SEQ ID NO: 268757 - DNA, 25 bp, Artificial
  Probe
tttggaatatacactactggtagtt

SEQ ID NO: 268758 - DNA, 25 bp, Artificial
  Probe
tccttaaggcttggcttgtttaaga

SEQ ID NO: 268759 - DNA, 25 bp, Artificial
  Probe
acactactggtagtttgtacacatc

SEQ ID NO: 268760 - DNA, 25 bp, Artificial
  Probe
tgttacttttaactgaacaataatt

SEQ ID NO: 268761 - DNA, 25 bp, Artificial
  Probe
tatacactactggtagtttgtacac

SEQ ID NO: 268762 - DNA, 25 bp, Artificial
  Probe
gtttgtacacatcatatccttaagg

SEQ ID NO: 268763 - DNA, 25 bp, Artificial
  Probe
gaatatacactactggtagtttgta

SEQ ID NO: 268764 - DNA, 25 bp, Artificial
  Probe
actactggtagtttgtacacatcat

SEQ ID NO: 268765 - DNA, 25 bp, Artificial
  Probe
acacatcatatccttaaggcttggc

SEQ ID NO: 268766 - DNA, 25 bp, Artificial
  Probe
atatttgaatattgttcatgttaaa

SEQ ID NO: 268767 - DNA, 25 bp, Artificial
  Probe
accttcactcagagaacagttatgt

SEQ ID NO: 268768 - DNA, 25 bp, Artificial
  Probe
tgcttctaaagtgtttacaccttaa

SEQ ID NO: 268769 - DNA, 25 bp, Artificial
  Probe
atatacactactggtagtttgtaca

SEQ ID NO: 268770 - DNA, 25 bp, Artificial
  Probe
tgtacacatcatatccttaaggctt

SEQ ID NO: 268771 - DNA, 25 bp, Artificial
  Probe
taaacttaacataaaccttcactca

SEQ ID NO: 268772 - DNA, 25 bp, Artificial
  Probe
agcctgttatgagatgatgttactt

SEQ ID NO: 268773 - DNA, 25 bp, Artificial
  Probe
catcatatccttaaggcttggcttg

SEQ ID NO: 268774 - DNA, 25 bp, Artificial
  Probe
tcactcagagaacagttatgttgta

SEQ ID NO: 268775 - DNA, 25 bp, Artificial
  Probe
tttgcataaatcatatttagaaaaa

SEQ ID NO: 268776 - DNA, 25 bp, Artificial
  Probe
ttcactcagagaacagttatgttgt

SEQ ID NO: 268777 - DNA, 25 bp, Artificial
  Probe
atcatatccttaaggcttggcttgt

SEQ ID NO: 268778 - DNA, 25 bp, Artificial
  Probe
cactactggtagtttgtacacatca

SEQ ID NO: 268779 - DNA, 25 bp, Artificial
  Probe
gttcgttctcgctttcgaccgtgtc

SEQ ID NO: 268780 - DNA, 25 bp, Artificial
  Probe
cgctttcgaccgtgtccttgctggc

SEQ ID NO: 268781 - DNA, 25 bp, Artificial
  Probe
gatttctcaccgtgctgcacgcggt

SEQ ID NO: 268782 - DNA, 25 bp, Artificial
  Probe
tcgttctcgctttcgaccgtgtcct

SEQ ID NO: 268783 - DNA, 25 bp, Artificial
  Probe
cgcacacactagtcgggcactctga

SEQ ID NO: 268784 - DNA, 25 bp, Artificial
  Probe
actagtcgggcactctgaggttcgg

SEQ ID NO: 268785 - DNA, 25 bp, Artificial
  Probe
ttctcgctttcgaccgtgtccttgc

SEQ ID NO: 268786 - DNA, 25 bp, Artificial
  Probe
tcaccgtgctgcacgcggttcgttc

SEQ ID NO: 268787 - DNA, 25 bp, Artificial
  Probe
tctggtccgctgttacctccttgca

SEQ ID NO: 268788 - DNA, 25 bp, Artificial
  Probe
gtacccgtaccagagtgttcctcgc

SEQ ID NO: 268789 - DNA, 25 bp, Artificial
  Probe
tctctctgtgggtgctttcccgcgg

SEQ ID NO: 268790 - DNA, 25 bp, Artificial
  Probe
ggtgctctctggtccgctgttacct

SEQ ID NO: 268791 - DNA, 25 bp, Artificial
  Probe
ggagtacccgtaccagagtgttcct

SEQ ID NO: 268792 - DNA, 25 bp, Artificial
  Probe
caggtctctctgtgggtgctttccc

SEQ ID NO: 268793 - DNA, 25 bp, Artificial
  Probe
aatgtcgtgctccaggtctctctgt

SEQ ID NO: 268794 - DNA, 25 bp, Artificial
  Probe
ctggtccgctgttacctccttgcat

SEQ ID NO: 268795 - DNA, 25 bp, Artificial
  Probe
cgcggttcgttctcgctttcgaccg

SEQ ID NO: 268796 - DNA, 25 bp, Artificial
  Probe
gcttcctgtctttatctcaatgtcg

SEQ ID NO: 268797 - DNA, 25 bp, Artificial
  Probe
gaccgtgtccttgctggcacgcaca

SEQ ID NO: 268798 - DNA, 25 bp, Artificial
  Probe
tgctgcacgcggttcgttctcgctt

SEQ ID NO: 268799 - DNA, 25 bp, Artificial
  Probe
gtccgctgttacctccttgcatgtc

SEQ ID NO: 268800 - DNA, 25 bp, Artificial
  Probe
tctctggtccgctgttacctccttg

SEQ ID NO: 268801 - DNA, 25 bp, Artificial
  Probe
tggtggtgctctctggtccgctgtt

SEQ ID NO: 268802 - DNA, 25 bp, Artificial
  Probe
tcaatgtcgtgctccaggtctctct

SEQ ID NO: 268803 - DNA, 25 bp, Artificial
  Probe
atgtccgccctgatttctcaccgtg

SEQ ID NO: 268804 - DNA, 25 bp, Artificial
  Probe
tcgaccgtgtccttgctggcacgca

SEQ ID NO: 268805 - DNA, 25 bp, Artificial
  Probe
cgcggttccctggtggtgctctctg

SEQ ID NO: 268806 - DNA, 25 bp, Artificial
  Probe
gtggtgctctctggtccgctgttac

SEQ ID NO: 268807 - DNA, 25 bp, Artificial
  Probe
tgttcctcgccgtggattgctggat

SEQ ID NO: 268808 - DNA, 25 bp, Artificial
  Probe
ggcacgcacacactagtcgggcact

SEQ ID NO: 268809 - DNA, 25 bp, Artificial
  Probe
cggttaccaacttatggcttgcagg

SEQ ID NO: 268810 - DNA, 25 bp, Artificial
  Probe
cggttccctggtggtgctctctggt

SEQ ID NO: 268811 - DNA, 25 bp, Artificial
  Probe
acgcacacactagtcgggcactctg

SEQ ID NO: 268812 - DNA, 25 bp, Artificial
  Probe
tggtccgggagtacccgtaccagag

SEQ ID NO: 268813 - DNA, 25 bp, Artificial
  Probe
ttcctgtctttatctcaatgtcgtg

SEQ ID NO: 268814 - DNA, 25 bp, Artificial
  Probe
ccagagtgttcctcgccgtggattg

SEQ ID NO: 268815 - DNA, 25 bp, Artificial
  Probe
gcactctgaggttcgggacagctga

SEQ ID NO: 268816 - DNA, 25 bp, Artificial
  Probe
cactagtcgggcactctgaggttcg

SEQ ID NO: 268817 - DNA, 25 bp, Artificial
  Probe
gcgcttcctgtctttatctcaatgt

SEQ ID NO: 268818 - DNA, 25 bp, Artificial
  Probe
gctttcccgcggttccctggtggtg

SEQ ID NO: 268819 - DNA, 25 bp, Artificial
  Probe
gtccttgctggcacgcacacactag

SEQ ID NO: 268820 - DNA, 25 bp, Artificial
  Probe
cacgcggttcgttctcgctttcgac

SEQ ID NO: 268821 - DNA, 25 bp, Artificial
  Probe
tctgtgggtgctttcccgcggttcc

SEQ ID NO: 268822 - DNA, 25 bp, Artificial
  Probe
ttgctggcacgcacacactagtcgg

SEQ ID NO: 268823 - DNA, 25 bp, Artificial
  Probe
ccgcggttccctggtggtgctctct

SEQ ID NO: 268824 - DNA, 25 bp, Artificial
  Probe
ccgtaccagagtgttcctcgccgtg

SEQ ID NO: 268825 - DNA, 25 bp, Artificial
  Probe
gagcctcggtgaacgtcggcattta

SEQ ID NO: 268826 - DNA, 25 bp, Artificial
  Probe
gcatcgtaagcatgtgtgtaatacg

SEQ ID NO: 268827 - DNA, 25 bp, Artificial
  Probe
acatactcctgcagacatctgggcc

SEQ ID NO: 268828 - DNA, 25 bp, Artificial
  Probe
ggaattcgagcctcggtgaacgtcg

SEQ ID NO: 268829 - DNA, 25 bp, Artificial
  Probe
tcgagcctcggtgaacgtcggcatt

SEQ ID NO: 268830 - DNA, 25 bp, Artificial
  Probe
cactgttgggctttgaaagcattgc

SEQ ID NO: 268831 - DNA, 25 bp, Artificial
  Probe
tactcctgcagacatctgggcctgg

SEQ ID NO: 268832 - DNA, 25 bp, Artificial
  Probe
tcactgttgggctttgaaagcattg

SEQ ID NO: 268833 - DNA, 25 bp, Artificial
  Probe
aacgtcggcatttactataaaggag

SEQ ID NO: 268834 - DNA, 25 bp, Artificial
  Probe
agcctcggtgaacgtcggcatttac

SEQ ID NO: 268835 - DNA, 25 bp, Artificial
  Probe
ttcgagcctcggtgaacgtcggcat

SEQ ID NO: 268836 - DNA, 25 bp, Artificial
  Probe
ctgttgggctttgaaagcattgcaa

SEQ ID NO: 268837 - DNA, 25 bp, Artificial
  Probe
cgtcggcatttactataaaggagtt

SEQ ID NO: 268838 - DNA, 25 bp, Artificial
  Probe
cctcggtgaacgtcggcatttacta

SEQ ID NO: 268839 - DNA, 25 bp, Artificial
  Probe
atactcctgcagacatctgggcctg

SEQ ID NO: 268840 - DNA, 25 bp, Artificial
  Probe
accacaggaattcgagcctcggtga

SEQ ID NO: 268841 - DNA, 25 bp, Artificial
  Probe
ctcctgcagacatctgggcctggaa

SEQ ID NO: 268842 - DNA, 25 bp, Artificial
  Probe
ccacaggaattcgagcctcggtgaa

SEQ ID NO: 268843 - DNA, 25 bp, Artificial
  Probe
tcctgcagacatctgggcctggaat

SEQ ID NO: 268844 - DNA, 25 bp, Artificial
  Probe
cgagcctcggtgaacgtcggcattt

SEQ ID NO: 268845 - DNA, 25 bp, Artificial
  Probe
actcctgcagacatctgggcctgga

SEQ ID NO: 268846 - DNA, 25 bp, Artificial
  Probe
catactcctgcagacatctgggcct

SEQ ID NO: 268847 - DNA, 25 bp, Artificial
  Probe
cacaggaattcgagcctcggtgaac

SEQ ID NO: 268848 - DNA, 25 bp, Artificial
  Probe
cctgcagacatctgggcctggaatt

SEQ ID NO: 268849 - DNA, 25 bp, Artificial
  Probe
gtgaacgtcggcatttactataaag

SEQ ID NO: 268850 - DNA, 25 bp, Artificial
  Probe
actgttgggctttgaaagcattgca

SEQ ID NO: 268851 - DNA, 25 bp, Artificial
  Probe
catcgtaagcatgtgtgtaatacgt

SEQ ID NO: 268852 - DNA, 25 bp, Artificial
  Probe
tgaacgtcggcatttactataaagg

SEQ ID NO: 268853 - DNA, 25 bp, Artificial
  Probe
gaacgtcggcatttactataaagga

SEQ ID NO: 268854 - DNA, 25 bp, Artificial
  Probe
gcctcggtgaacgtcggcatttact

SEQ ID NO: 268855 - DNA, 25 bp, Artificial
  Probe
ctctgttataacatcgtagcgagcg

SEQ ID NO: 268856 - DNA, 25 bp, Artificial
  Probe
tctctgttataacatcgtagcgagc

SEQ ID NO: 268857 - DNA, 25 bp, Artificial
  Probe
acgatctcgcgtgcacaacagagta

SEQ ID NO: 268858 - DNA, 25 bp, Artificial
  Probe
tggctcactcagcagcttgctgcta

SEQ ID NO: 268859 - DNA, 25 bp, Artificial
  Probe
agcggagacacaaaaccagaagcgg

SEQ ID NO: 268860 - DNA, 25 bp, Artificial
  Probe
ttctctgttataacatcgtagcgag

SEQ ID NO: 268861 - DNA, 25 bp, Artificial
  Probe
cgaagggaatcattctccagtatcc

SEQ ID NO: 268862 - DNA, 25 bp, Artificial
  Probe
gtatccgcgaactctggccggaatt

SEQ ID NO: 268863 - DNA, 25 bp, Artificial
  Probe
cattctccagtatccgcgaactctg

SEQ ID NO: 268864 - DNA, 25 bp, Artificial
  Probe
ctggcggacttgtggctcactcagc

SEQ ID NO: 268865 - DNA, 25 bp, Artificial
  Probe
accgggcgcaaacacgatctcgcgt

SEQ ID NO: 268866 - DNA, 25 bp, Artificial
  Probe
gtagcgagcggagacacaaaaccag

SEQ ID NO: 268867 - DNA, 25 bp, Artificial
  Probe
gagacacaaaaccagaagcggcgga

SEQ ID NO: 268868 - DNA, 25 bp, Artificial
  Probe
agacacaaaaccagaagcggcggac

SEQ ID NO: 268869 - DNA, 25 bp, Artificial
  Probe
tcgcgtgcacaacagagtaaaaaac

SEQ ID NO: 268870 - DNA, 25 bp, Artificial
  Probe
atccgcgaactctggccggaattcc

SEQ ID NO: 268871 - DNA, 25 bp, Artificial
  Probe
gcttgctgctaagctcgaagggaat

SEQ ID NO: 268872 - DNA, 25 bp, Artificial
  Probe
ctttctctgttataacatcgtagcg

SEQ ID NO: 268873 - DNA, 25 bp, Artificial
  Probe
cgcgtgcacaacagagtaaaaaacc

SEQ ID NO: 268874 - DNA, 25 bp, Artificial
  Probe
gcaaacacgatctcgcgtgcacaac

SEQ ID NO: 268875 - DNA, 25 bp, Artificial
  Probe
cggacttgtggctcactcagcagct

SEQ ID NO: 268876 - DNA, 25 bp, Artificial
  Probe
tgtggctcactcagcagcttgctgc

SEQ ID NO: 268877 - DNA, 25 bp, Artificial
  Probe
cgggcgcaaacacgatctcgcgtgc

SEQ ID NO: 268878 - DNA, 25 bp, Artificial
  Probe
gcgcggaacgccagaaggagaaaca

SEQ ID NO: 268879 - DNA, 25 bp, Artificial
  Probe
agcagcttgctgctaagctcgaagg

SEQ ID NO: 268880 - DNA, 25 bp, Artificial
  Probe
cggagacacaaaaccagaagcggcg

SEQ ID NO: 268881 - DNA, 25 bp, Artificial
  Probe
aactctggccggaattcctctacgc

SEQ ID NO: 268882 - DNA, 25 bp, Artificial
  Probe
gacttgtggctcactcagcagcttg

SEQ ID NO: 268883 - DNA, 25 bp, Artificial
  Probe
cagtatccgcgaactctggccggaa

SEQ ID NO: 268884 - DNA, 25 bp, Artificial
  Probe
cagaagcggcggactcctaaaaccg

SEQ ID NO: 268885 - DNA, 25 bp, Artificial
  Probe
ccagtatccgcgaactctggccgga

SEQ ID NO: 268886 - DNA, 25 bp, Artificial
  Probe
agcttgctgctaagctcgaagggaa

SEQ ID NO: 268887 - DNA, 25 bp, Artificial
  Probe
gaatcattctccagtatccgcgaac

SEQ ID NO: 268888 - DNA, 25 bp, Artificial
  Probe
ggctcactcagcagcttgctgctaa

SEQ ID NO: 268889 - DNA, 25 bp, Artificial
  Probe
tgctaagctcgaagggaatcattct

SEQ ID NO: 268890 - DNA, 25 bp, Artificial
  Probe
cacaaaaccagaagcggcggactcc

SEQ ID NO: 268891 - DNA, 25 bp, Artificial
  Probe
tggccggaattcctctacgcccttt

SEQ ID NO: 268892 - DNA, 25 bp, Artificial
  Probe
aacatcgtagcgagcggagacacaa

SEQ ID NO: 268893 - DNA, 25 bp, Artificial
  Probe
cacgatctcgcgtgcacaacagagt

SEQ ID NO: 268894 - DNA, 25 bp, Artificial
  Probe
cgtagcgagcggagacacaaaacca

SEQ ID NO: 268895 - DNA, 25 bp, Artificial
  Probe
agggaatcattctccagtatccgcg

SEQ ID NO: 268896 - DNA, 25 bp, Artificial
  Probe
cagcagcttgctgctaagctcgaag

SEQ ID NO: 268897 - DNA, 25 bp, Artificial
  Probe
cgatctcgcgtgcacaacagagtaa

SEQ ID NO: 268898 - DNA, 25 bp, Artificial
  Probe
ttataacatcgtagcgagcggagac

SEQ ID NO: 268899 - DNA, 25 bp, Artificial
  Probe
ttgctgctaagctcgaagggaatca

SEQ ID NO: 268900 - DNA, 25 bp, Artificial
  Probe
aaaccgggcgcaaacacgatctcgc

SEQ ID NO: 268901 - DNA, 25 bp, Artificial
  Probe
cgatccaatcactggacggcgttaa

SEQ ID NO: 268902 - DNA, 25 bp, Artificial
  Probe
cgcccgatagcgagtcgatccaatc

SEQ ID NO: 268903 - DNA, 25 bp, Artificial
  Probe
aaggaaccttatcaaatacgagtgg

SEQ ID NO: 268904 - DNA, 25 bp, Artificial
  Probe
cgcacgtacttggtgaccccgtact

SEQ ID NO: 268905 - DNA, 25 bp, Artificial
  Probe
aatccctgtgccagagggtaatgaa

SEQ ID NO: 268906 - DNA, 25 bp, Artificial
  Probe
cacgcacgtacttggtgaccccgta

SEQ ID NO: 268907 - DNA, 25 bp, Artificial
  Probe
gccgccgatggaaggacacgcacgt

SEQ ID NO: 268908 - DNA, 25 bp, Artificial
  Probe
atcaaatacgagtgggtgcctgcaa

SEQ ID NO: 268909 - DNA, 25 bp, Artificial
  Probe
agagatgggtccacggcaatacttt

SEQ ID NO: 268910 - DNA, 25 bp, Artificial
  Probe
cgtgaccacttatcgctgcaggaat

SEQ ID NO: 268911 - DNA, 25 bp, Artificial
  Probe
cggcgtgaccacttatcgctgcagg

SEQ ID NO: 268912 - DNA, 25 bp, Artificial
  Probe
caatggccgccgatggaaggacacg

SEQ ID NO: 268913 - DNA, 25 bp, Artificial
  Probe
cgagagatgggtccacggcaatact

SEQ ID NO: 268914 - DNA, 25 bp, Artificial
  Probe
gatggctcccaatggccgccgatgg

SEQ ID NO: 268915 - DNA, 25 bp, Artificial
  Probe
ggcgacgatggctcccaatggccgc

SEQ ID NO: 268916 - DNA, 25 bp, Artificial
  Probe
atgcgcatcgcgagagatgggtcca

SEQ ID NO: 268917 - DNA, 25 bp, Artificial
  Probe
acgatggctcccaatggccgccgat

SEQ ID NO: 268918 - DNA, 25 bp, Artificial
  Probe
tccctgtgccagagggtaatgaaga

SEQ ID NO: 268919 - DNA, 25 bp, Artificial
  Probe
accacttatcgctgcaggaatccct

SEQ ID NO: 268920 - DNA, 25 bp, Artificial
  Probe
tgcgcatcgcgagagatgggtccac

SEQ ID NO: 268921 - DNA, 25 bp, Artificial
  Probe
ccgccgatggaaggacacgcacgta

SEQ ID NO: 268922 - DNA, 25 bp, Artificial
  Probe
aatccgcccgatagcgagtcgatcc

SEQ ID NO: 268923 - DNA, 25 bp, Artificial
  Probe
cactggacggcgttaacagcgcgtg

SEQ ID NO: 268924 - DNA, 25 bp, Artificial
  Probe
aatacgagtgggtgcctgcaaacaa

SEQ ID NO: 268925 - DNA, 25 bp, Artificial
  Probe
cgatagcgagtcgatccaatcactg

SEQ ID NO: 268926 - DNA, 25 bp, Artificial
  Probe
catcgcgagagatgggtccacggca

SEQ ID NO: 268927 - DNA, 25 bp, Artificial
  Probe
ggacacgcacgtacttggtgacccc

SEQ ID NO: 268928 - DNA, 25 bp, Artificial
  Probe
tgaagaggcgacgatggctcccaat

SEQ ID NO: 268929 - DNA, 25 bp, Artificial
  Probe
gcccgatagcgagtcgatccaatca

SEQ ID NO: 268930 - DNA, 25 bp, Artificial
  Probe
ggaaggacacgcacgtacttggtga

SEQ ID NO: 268931 - DNA, 25 bp, Artificial
  Probe
tccaatcactggacggcgttaacag

SEQ ID NO: 268932 - DNA, 25 bp, Artificial
  Probe
taacagcgcgtgacgggaaaaccgg

SEQ ID NO: 268933 - DNA, 25 bp, Artificial
  Probe
gtgaccccgtactcggaacaggcgt

SEQ ID NO: 268934 - DNA, 25 bp, Artificial
  Probe
cgggcagacacactggcgggcacat

SEQ ID NO: 268935 - DNA, 25 bp, Artificial
  Probe
ttggtgaccccgtactcggaacagg

SEQ ID NO: 268936 - DNA, 25 bp, Artificial
  Probe
ctggacggcgttaacagcgcgtgac

SEQ ID NO: 268937 - DNA, 25 bp, Artificial
  Probe
gtcgatccaatcactggacggcgtt

SEQ ID NO: 268938 - DNA, 25 bp, Artificial
  Probe
ttaacagcgcgtgacgggaaaaccg

SEQ ID NO: 268939 - DNA, 25 bp, Artificial
  Probe
cttatcgctgcaggaatccctgtgc

SEQ ID NO: 268940 - DNA, 25 bp, Artificial
  Probe
cgagtcgatccaatcactggacggc

SEQ ID NO: 268941 - DNA, 25 bp, Artificial
  Probe
accttatcaaatacgagtgggtgcc

SEQ ID NO: 268942 - DNA, 25 bp, Artificial
  Probe
aaggacacgcacgtacttggtgacc

SEQ ID NO: 268943 - DNA, 25 bp, Artificial
  Probe
tcgctgcaggaatccctgtgccaga

SEQ ID NO: 268944 - DNA, 25 bp, Artificial
  Probe
ttatcaaatacgagtgggtgcctgc

SEQ ID NO: 268945 - DNA, 25 bp, Artificial
  Probe
aatggccgccgatggaaggacacgc

SEQ ID NO: 268946 - DNA, 25 bp, Artificial
  Probe
tggccgccgatggaaggacacgcac

SEQ ID NO: 268947 - DNA, 25 bp, Artificial
  Probe
atgaggaagcttaggactggagaac

SEQ ID NO: 268948 - DNA, 25 bp, Artificial
  Probe
tcatgtcgacagagatataggactc

SEQ ID NO: 268949 - DNA, 25 bp, Artificial
  Probe
gaaccaccagataggacggaaaaca

SEQ ID NO: 268950 - DNA, 25 bp, Artificial
  Probe
aggtgcaacaaacaacacctcgaaa

SEQ ID NO: 268951 - DNA, 25 bp, Artificial
  Probe
agcttaggactggagaaccaccaga

SEQ ID NO: 268952 - DNA, 25 bp, Artificial
  Probe
gacgaggccacaaatgacccaggac

SEQ ID NO: 268953 - DNA, 25 bp, Artificial
  Probe
atactgagactgctctggggcagta

SEQ ID NO: 268954 - DNA, 25 bp, Artificial
  Probe
ggagaaccaccagataggacggaaa

SEQ ID NO: 268955 - DNA, 25 bp, Artificial
  Probe
gactggagaaccaccagataggacg

SEQ ID NO: 268956 - DNA, 25 bp, Artificial
  Probe
cagagcccacatgaggaagcttagg

SEQ ID NO: 268957 - DNA, 25 bp, Artificial
  Probe
cggaccaaaagacgaggccacaaat

SEQ ID NO: 268958 - DNA, 25 bp, Artificial
  Probe
aggccacaaatgacccaggacgcac

SEQ ID NO: 268959 - DNA, 25 bp, Artificial
  Probe
accagagcccacatgaggaagctta

SEQ ID NO: 268960 - DNA, 25 bp, Artificial
  Probe
actgagactgctctggggcagtata

SEQ ID NO: 268961 - DNA, 25 bp, Artificial
  Probe
ctgagactgctctggggcagtatat

SEQ ID NO: 268962 - DNA, 25 bp, Artificial
  Probe
gagcccacatgaggaagcttaggac

SEQ ID NO: 268963 - DNA, 25 bp, Artificial
  Probe
taccagagcccacatgaggaagctt

SEQ ID NO: 268964 - DNA, 25 bp, Artificial
  Probe
aactcaaggaggtgcaacaaacaac

SEQ ID NO: 268965 - DNA, 25 bp, Artificial
  Probe
agaatactgagactgctctggggca

SEQ ID NO: 268966 - DNA, 25 bp, Artificial
  Probe
acgaggccacaaatgacccaggacg

SEQ ID NO: 268967 - DNA, 25 bp, Artificial
  Probe
ccacatgaggaagcttaggactgga

SEQ ID NO: 268968 - DNA, 25 bp, Artificial
  Probe
agagcccacatgaggaagcttagga

SEQ ID NO: 268969 - DNA, 25 bp, Artificial
  Probe
tactgagactgctctggggcagtat

SEQ ID NO: 268970 - DNA, 25 bp, Artificial
  Probe
ccagagcccacatgaggaagcttag

SEQ ID NO: 268971 - DNA, 25 bp, Artificial
  Probe
ctaccagagcccacatgaggaagct

SEQ ID NO: 268972 - DNA, 25 bp, Artificial
  Probe
aggaagcttaggactggagaaccac

SEQ ID NO: 268973 - DNA, 25 bp, Artificial
  Probe
gagaaccaccagataggacggaaaa

SEQ ID NO: 268974 - DNA, 25 bp, Artificial
  Probe
caaactcaaggaggtgcaacaaaca

SEQ ID NO: 268975 - DNA, 25 bp, Artificial
  Probe
ggactggagaaccaccagataggac

SEQ ID NO: 268976 - DNA, 25 bp, Artificial
  Probe
tcgaaaaaagccgacgacccaccag

SEQ ID NO: 268977 - DNA, 25 bp, Artificial
  Probe
agcccacatgaggaagcttaggact

SEQ ID NO: 268978 - DNA, 25 bp, Artificial
  Probe
actggagaaccaccagataggacgg

SEQ ID NO: 268979 - DNA, 25 bp, Artificial
  Probe
cccacatgaggaagcttaggactgg

SEQ ID NO: 268980 - DNA, 25 bp, Artificial
  Probe
gaggccacaaatgacccaggacgca

SEQ ID NO: 268981 - DNA, 25 bp, Artificial
  Probe
gaatactgagactgctctggggcag

SEQ ID NO: 268982 - DNA, 25 bp, Artificial
  Probe
ggtgcaacaaacaacacctcgaaac

SEQ ID NO: 268983 - DNA, 25 bp, Artificial
  Probe
gcccacatgaggaagcttaggactg

SEQ ID NO: 268984 - DNA, 25 bp, Artificial
  Probe
aatactgagactgctctggggcagt

SEQ ID NO: 268985 - DNA, 25 bp, Artificial
  Probe
cgaggccacaaatgacccaggacgc

SEQ ID NO: 268986 - DNA, 25 bp, Artificial
  Probe
aggactggagaaccaccagatagga

SEQ ID NO: 268987 - DNA, 25 bp, Artificial
  Probe
taggactggagaaccaccagatagg

SEQ ID NO: 268988 - DNA, 25 bp, Artificial
  Probe
tggagaaccaccagataggacggaa

SEQ ID NO: 268989 - DNA, 25 bp, Artificial
  Probe
ctggagaaccaccagataggacgga

SEQ ID NO: 268990 - DNA, 25 bp, Artificial
  Probe
gaccaaaagacgaggccacaaatga

SEQ ID NO: 268991 - DNA, 25 bp, Artificial
  Probe
aagaatactgagactgctctggggc

SEQ ID NO: 268992 - DNA, 25 bp, Artificial
  Probe
catgtcgacagagatataggactcg

SEQ ID NO: 268993 - DNA, 25 bp, Artificial
  Probe
ccagtagcgagactggaagccttta

SEQ ID NO: 268994 - DNA, 25 bp, Artificial
  Probe
caagactaacgacacggtgagtgtc

SEQ ID NO: 268995 - DNA, 25 bp, Artificial
  Probe
agtagcgagactggaagcctttacc

SEQ ID NO: 268996 - DNA, 25 bp, Artificial
  Probe
gaacaacgccatataaccagtagcg

SEQ ID NO: 268997 - DNA, 25 bp, Artificial
  Probe
ccaagactaacgacacggtgagtgt

SEQ ID NO: 268998 - DNA, 25 bp, Artificial
  Probe
gacacggtgagtgtccctggccagc

SEQ ID NO: 268999 - DNA, 25 bp, Artificial
  Probe
caacgccatataaccagtagcgaga

SEQ ID NO: 269000 - DNA, 25 bp, Artificial
  Probe
acaacgccatataaccagtagcgag

SEQ ID NO: 269001 - DNA, 25 bp, Artificial
  Probe
aacgacacggtgagtgtccctggcc

SEQ ID NO: 269002 - DNA, 25 bp, Artificial
  Probe
agcctttaccaagactaacgacacg

SEQ ID NO: 269003 - DNA, 25 bp, Artificial
  Probe
gactggaagcctttaccaagactaa

SEQ ID NO: 269004 - DNA, 25 bp, Artificial
  Probe
aatggtagccgtaccatcggtcaac

SEQ ID NO: 269005 - DNA, 25 bp, Artificial
  Probe
taccaagactaacgacacggtgagt

SEQ ID NO: 269006 - DNA, 25 bp, Artificial
  Probe
gccatataaccagtagcgagactgg

SEQ ID NO: 269007 - DNA, 25 bp, Artificial
  Probe
gtgtccctggccagcccataaaacg

SEQ ID NO: 269008 - DNA, 25 bp, Artificial
  Probe
acgacacggtgagtgtccctggcca

SEQ ID NO: 269009 - DNA, 25 bp, Artificial
  Probe
taacttcgggaacaacgccatataa

SEQ ID NO: 269010 - DNA, 25 bp, Artificial
  Probe
aacgccatataaccagtagcgagac

SEQ ID NO: 269011 - DNA, 25 bp, Artificial
  Probe
gggaacaacgccatataaccagtag

SEQ ID NO: 269012 - DNA, 25 bp, Artificial
  Probe
catataaccagtagcgagactggaa

SEQ ID NO: 269013 - DNA, 25 bp, Artificial
  Probe
gcctttaccaagactaacgacacgg

SEQ ID NO: 269014 - DNA, 25 bp, Artificial
  Probe
aaccagtagcgagactggaagcctt

SEQ ID NO: 269015 - DNA, 25 bp, Artificial
  Probe
acacggtgagtgtccctggccagcc

SEQ ID NO: 269016 - DNA, 25 bp, Artificial
  Probe
ctaacttcgggaacaacgccatata

SEQ ID NO: 269017 - DNA, 25 bp, Artificial
  Probe
gaagcctttaccaagactaacgaca

SEQ ID NO: 269018 - DNA, 25 bp, Artificial
  Probe
atggtagccgtaccatcggtcaacc

SEQ ID NO: 269019 - DNA, 25 bp, Artificial
  Probe
ggtagccgtaccatcggtcaacccg

SEQ ID NO: 269020 - DNA, 25 bp, Artificial
  Probe
gtagccgtaccatcggtcaacccgg

SEQ ID NO: 269021 - DNA, 25 bp, Artificial
  Probe
aagactaacgacacggtgagtgtcc

SEQ ID NO: 269022 - DNA, 25 bp, Artificial
  Probe
cgccatataaccagtagcgagactg

SEQ ID NO: 269023 - DNA, 25 bp, Artificial
  Probe
taaccagtagcgagactggaagcct

SEQ ID NO: 269024 - DNA, 25 bp, Artificial
  Probe
taacgacacggtgagtgtccctggc

SEQ ID NO: 269025 - DNA, 25 bp, Artificial
  Probe
gctaacttcgggaacaacgccatat

SEQ ID NO: 269026 - DNA, 25 bp, Artificial
  Probe
ctaacgacacggtgagtgtccctgg

SEQ ID NO: 269027 - DNA, 25 bp, Artificial
  Probe
agcgagactggaagcctttaccaag

SEQ ID NO: 269028 - DNA, 25 bp, Artificial
  Probe
ttaccaagactaacgacacggtgag

SEQ ID NO: 269029 - DNA, 25 bp, Artificial
  Probe
ggaacaacgccatataaccagtagc

SEQ ID NO: 269030 - DNA, 25 bp, Artificial
  Probe
tttaccaagactaacgacacggtga

SEQ ID NO: 269031 - DNA, 25 bp, Artificial
  Probe
aaatggtagccgtaccatcggtcaa

SEQ ID NO: 269032 - DNA, 25 bp, Artificial
  Probe
ctggaagcctttaccaagactaacg

SEQ ID NO: 269033 - DNA, 25 bp, Artificial
  Probe
agactggaagcctttaccaagacta

SEQ ID NO: 269034 - DNA, 25 bp, Artificial
  Probe
ccatataaccagtagcgagactgga

SEQ ID NO: 269035 - DNA, 25 bp, Artificial
  Probe
ctttaccaagactaacgacacggtg

SEQ ID NO: 269036 - DNA, 25 bp, Artificial
  Probe
accaagactaacgacacggtgagtg

SEQ ID NO: 269037 - DNA, 25 bp, Artificial
  Probe
tggaagcctttaccaagactaacga

SEQ ID NO: 269038 - DNA, 25 bp, Artificial
  Probe
tagcgagactggaagcctttaccaa

SEQ ID NO: 269039 - DNA, 25 bp, Artificial
  Probe
cactaccgttgagatcctataaagg

SEQ ID NO: 269040 - DNA, 25 bp, Artificial
  Probe
ggtccaatgccttaggagagatcaa

SEQ ID NO: 269041 - DNA, 25 bp, Artificial
  Probe
cataaacatggctctgtgcagaaca

SEQ ID NO: 269042 - DNA, 25 bp, Artificial
  Probe
cgttgagatcctataaaggaagaag

SEQ ID NO: 269043 - DNA, 25 bp, Artificial
  Probe
atcacataaacatggctctgtgcag

SEQ ID NO: 269044 - DNA, 25 bp, Artificial
  Probe
caatgccttaggagagatcaatacc

SEQ ID NO: 269045 - DNA, 25 bp, Artificial
  Probe
ctccgctccgagagtaacaggacta

SEQ ID NO: 269046 - DNA, 25 bp, Artificial
  Probe
aggcttatcacataaacatggctct

SEQ ID NO: 269047 - DNA, 25 bp, Artificial
  Probe
gttaggcttatcacataaacatggc

SEQ ID NO: 269048 - DNA, 25 bp, Artificial
  Probe
tccaatgccttaggagagatcaata

SEQ ID NO: 269049 - DNA, 25 bp, Artificial
  Probe
aggtagaaacctgtgtcacactacc

SEQ ID NO: 269050 - DNA, 25 bp, Artificial
  Probe
acctgtgtcacactaccgttgagat

SEQ ID NO: 269051 - DNA, 25 bp, Artificial
  Probe
aaacctgtgtcacactaccgttgag

SEQ ID NO: 269052 - DNA, 25 bp, Artificial
  Probe
ccaatgccttaggagagatcaatac

SEQ ID NO: 269053 - DNA, 25 bp, Artificial
  Probe
ggtagaaacctgtgtcacactaccg

SEQ ID NO: 269054 - DNA, 25 bp, Artificial
  Probe
taccgttgagatcctataaaggaag

SEQ ID NO: 269055 - DNA, 25 bp, Artificial
  Probe
ttatcacataaacatggctctgtgc

SEQ ID NO: 269056 - DNA, 25 bp, Artificial
  Probe
agttaggcttatcacataaacatgg

SEQ ID NO: 269057 - DNA, 25 bp, Artificial
  Probe
accgttgagatcctataaaggaaga

SEQ ID NO: 269058 - DNA, 25 bp, Artificial
  Probe
gtagaaacctgtgtcacactaccgt

SEQ ID NO: 269059 - DNA, 25 bp, Artificial
  Probe
aacctgtgtcacactaccgttgaga

SEQ ID NO: 269060 - DNA, 25 bp, Artificial
  Probe
actaccgttgagatcctataaagga

SEQ ID NO: 269061 - DNA, 25 bp, Artificial
  Probe
ccgttgagatcctataaaggaagaa

SEQ ID NO: 269062 - DNA, 25 bp, Artificial
  Probe
acactaccgttgagatcctataaag

SEQ ID NO: 269063 - DNA, 25 bp, Artificial
  Probe
ctgtgtcacactaccgttgagatcc

SEQ ID NO: 269064 - DNA, 25 bp, Artificial
  Probe
aatgccttaggagagatcaataccg

SEQ ID NO: 269065 - DNA, 25 bp, Artificial
  Probe
tctccgctccgagagtaacaggact

SEQ ID NO: 269066 - DNA, 25 bp, Artificial
  Probe
ctctccgctccgagagtaacaggac

SEQ ID NO: 269067 - DNA, 25 bp, Artificial
  Probe
taggcttatcacataaacatggctc

SEQ ID NO: 269068 - DNA, 25 bp, Artificial
  Probe
atattcaagtcatatgataaacgaa

SEQ ID NO: 269069 - DNA, 25 bp, Artificial
  Probe
tagaaacctgtgtcacactaccgtt

SEQ ID NO: 269070 - DNA, 25 bp, Artificial
  Probe
tatcacataaacatggctctgtgca

SEQ ID NO: 269071 - DNA, 25 bp, Artificial
  Probe
gaaacctgtgtcacactaccgttga

SEQ ID NO: 269072 - DNA, 25 bp, Artificial
  Probe
agcttcaacaaagataacacgtttt

SEQ ID NO: 269073 - DNA, 25 bp, Artificial
  Probe
cggtccaatgccttaggagagatca

SEQ ID NO: 269074 - DNA, 25 bp, Artificial
  Probe
cttatcacataaacatggctctgtg

SEQ ID NO: 269075 - DNA, 25 bp, Artificial
  Probe
ttaggcttatcacataaacatggct

SEQ ID NO: 269076 - DNA, 25 bp, Artificial
  Probe
gtcacactaccgttgagatcctata

SEQ ID NO: 269077 - DNA, 25 bp, Artificial
  Probe
tgagttaggcttatcacataaacat

SEQ ID NO: 269078 - DNA, 25 bp, Artificial
  Probe
taaacatggctctgtgcagaacaaa

SEQ ID NO: 269079 - DNA, 25 bp, Artificial
  Probe
ctaccgttgagatcctataaaggaa

SEQ ID NO: 269080 - DNA, 25 bp, Artificial
  Probe
actttggatgagttaggcttatcac

SEQ ID NO: 269081 - DNA, 25 bp, Artificial
  Probe
gtccaatgccttaggagagatcaat

SEQ ID NO: 269082 - DNA, 25 bp, Artificial
  Probe
cctgtgtcacactaccgttgagatc

SEQ ID NO: 269083 - DNA, 25 bp, Artificial
  Probe
ggcttatcacataaacatggctctg

SEQ ID NO: 269084 - DNA, 25 bp, Artificial
  Probe
gcttatcacataaacatggctctgt

SEQ ID NO: 269085 - DNA, 25 bp, Artificial
  Probe
gattcttacttgagtatcatcatag

SEQ ID NO: 269086 - DNA, 25 bp, Artificial
  Probe
cttacttgagtatcatcatagattg

SEQ ID NO: 269087 - DNA, 25 bp, Artificial
  Probe
catcacatggcatggatcatcattg

SEQ ID NO: 269088 - DNA, 25 bp, Artificial
  Probe
agtatctcaataaagcacgcagtta

SEQ ID NO: 269089 - DNA, 25 bp, Artificial
  Probe
aagcattatcatcacatggcatgga

SEQ ID NO: 269090 - DNA, 25 bp, Artificial
  Probe
atggcatggatcatcattgtctcca

SEQ ID NO: 269091 - DNA, 25 bp, Artificial
  Probe
atcagtgtaactgaagcattatcat

SEQ ID NO: 269092 - DNA, 25 bp, Artificial
  Probe
gagtatctcaataaagcacgcagtt

SEQ ID NO: 269093 - DNA, 25 bp, Artificial
  Probe
gtatctcaataaagcacgcagttac

SEQ ID NO: 269094 - DNA, 25 bp, Artificial
  Probe
taaagcacgcagttacgtttcaaaa

SEQ ID NO: 269095 - DNA, 25 bp, Artificial
  Probe
tcattctaatatccaaggtagatag

SEQ ID NO: 269096 - DNA, 25 bp, Artificial
  Probe
gcacgcagttacgtttcaaaattta

SEQ ID NO: 269097 - DNA, 25 bp, Artificial
  Probe
tgctaatcattatcagtgtaactga

SEQ ID NO: 269098 - DNA, 25 bp, Artificial
  Probe
ggttcctttctatcctactaagacg

SEQ ID NO: 269099 - DNA, 25 bp, Artificial
  Probe
tccagggactggattcttacttgag

SEQ ID NO: 269100 - DNA, 25 bp, Artificial
  Probe
tttggacatcatttcgcgttcttta

SEQ ID NO: 269101 - DNA, 25 bp, Artificial
  Probe
gcattatcatcacatggcatggatc

SEQ ID NO: 269102 - DNA, 25 bp, Artificial
  Probe
ttatcagtgtaactgaagcattatc

SEQ ID NO: 269103 - DNA, 25 bp, Artificial
  Probe
ttactgagtatctcaataaagcacg

SEQ ID NO: 269104 - DNA, 25 bp, Artificial
  Probe
tgggttcctttctatcctactaaga

SEQ ID NO: 269105 - DNA, 25 bp, Artificial
  Probe
atcattgtctccagggactggattc

SEQ ID NO: 269106 - DNA, 25 bp, Artificial
  Probe
ggatcatcattgtctccagggactg

SEQ ID NO: 269107 - DNA, 25 bp, Artificial
  Probe
ctccagggactggattcttacttga

SEQ ID NO: 269108 - DNA, 25 bp, Artificial
  Probe
tcatcattgtctccagggactggat

SEQ ID NO: 269109 - DNA, 25 bp, Artificial
  Probe
tctcaataaagcacgcagttacgtt

SEQ ID NO: 269110 - DNA, 25 bp, Artificial
  Probe
tcattatcagtgtaactgaagcatt

SEQ ID NO: 269111 - DNA, 25 bp, Artificial
  Probe
gggactggattcttacttgagtatc

SEQ ID NO: 269112 - DNA, 25 bp, Artificial
  Probe
agtttcattctaatatccaaggtag

SEQ ID NO: 269113 - DNA, 25 bp, Artificial
  Probe
ttggacatcatttcgcgttctttat

SEQ ID NO: 269114 - DNA, 25 bp, Artificial
  Probe
aactgaagcattatcatcacatggc

SEQ ID NO: 269115 - DNA, 25 bp, Artificial
  Probe
tcatcacatggcatggatcatcatt

SEQ ID NO: 269116 - DNA, 25 bp, Artificial
  Probe
cattatcagtgtaactgaagcatta

SEQ ID NO: 269117 - DNA, 25 bp, Artificial
  Probe
gctaatcattatcagtgtaactgaa

SEQ ID NO: 269118 - DNA, 25 bp, Artificial
  Probe
ttgtctccagggactggattcttac

SEQ ID NO: 269119 - DNA, 25 bp, Artificial
  Probe
aatcattatcagtgtaactgaagca

SEQ ID NO: 269120 - DNA, 25 bp, Artificial
  Probe
ctaatatccaaggtagatagagtgc

SEQ ID NO: 269121 - DNA, 25 bp, Artificial
  Probe
gcatggatcatcattgtctccaggg

SEQ ID NO: 269122 - DNA, 25 bp, Artificial
  Probe
ctgaagcattatcatcacatggcat

SEQ ID NO: 269123 - DNA, 25 bp, Artificial
  Probe
gtctccagggactggattcttactt

SEQ ID NO: 269124 - DNA, 25 bp, Artificial
  Probe
tcacatggcatggatcatcattgtc

SEQ ID NO: 269125 - DNA, 25 bp, Artificial
  Probe
cattatcatcacatggcatggatca

SEQ ID NO: 269126 - DNA, 25 bp, Artificial
  Probe
taatcattatcagtgtaactgaagc

SEQ ID NO: 269127 - DNA, 25 bp, Artificial
  Probe
cattctaatatccaaggtagataga

SEQ ID NO: 269128 - DNA, 25 bp, Artificial
  Probe
tactgagtatctcaataaagcacgc

SEQ ID NO: 269129 - DNA, 25 bp, Artificial
  Probe
gtttcattctaatatccaaggtaga

SEQ ID NO: 269130 - DNA, 25 bp, Artificial
  Probe
ataatttggacatcatttcgcgttc

SEQ ID NO: 269131 - DNA, 25 bp, Artificial
  Probe
agaagctcactttgttgtctgatgc

SEQ ID NO: 269132 - DNA, 25 bp, Artificial
  Probe
atgttttgaatactgctccttactg

SEQ ID NO: 269133 - DNA, 25 bp, Artificial
  Probe
tcctgagtagctatgctattttgtg

SEQ ID NO: 269134 - DNA, 25 bp, Artificial
  Probe
tacatgtaggcgttcttctctacag

SEQ ID NO: 269135 - DNA, 25 bp, Artificial
  Probe
tgctattttgtgagctatcacatgg

SEQ ID NO: 269136 - DNA, 25 bp, Artificial
  Probe
ctactgttgttaagaagtcgatcta

SEQ ID NO: 269137 - DNA, 25 bp, Artificial
  Probe
catttgatttaaccttgcaaaagga

SEQ ID NO: 269138 - DNA, 25 bp, Artificial
  Probe
tttaagtatacatgatcttgcctag

SEQ ID NO: 269139 - DNA, 25 bp, Artificial
  Probe
ttgaagtcagtgtggctatacctaa

SEQ ID NO: 269140 - DNA, 25 bp, Artificial
  Probe
tatcacatggttacatagcatgtaa

SEQ ID NO: 269141 - DNA, 25 bp, Artificial
  Probe
ccttgcaaaaggatcccaaataatg

SEQ ID NO: 269142 - DNA, 25 bp, Artificial
  Probe
tttgaatactgctccttactgactg

SEQ ID NO: 269143 - DNA, 25 bp, Artificial
  Probe
gcgttcttctctacagtttaagtat

SEQ ID NO: 269144 - DNA, 25 bp, Artificial
  Probe
ctattttgtgagctatcacatggtt

SEQ ID NO: 269145 - DNA, 25 bp, Artificial
  Probe
tagctatgctattttgtgagctatc

SEQ ID NO: 269146 - DNA, 25 bp, Artificial
  Probe
cactttgttgtctgatgcatcttga

SEQ ID NO: 269147 - DNA, 25 bp, Artificial
  Probe
ctaatggtcttctccattgaagatt

SEQ ID NO: 269148 - DNA, 25 bp, Artificial
  Probe
attttgtgagctatcacatggttac

SEQ ID NO: 269149 - DNA, 25 bp, Artificial
  Probe
cgatctactgatagggccatggtat

SEQ ID NO: 269150 - DNA, 25 bp, Artificial
  Probe
catgatcttgcctagactcctgagt

SEQ ID NO: 269151 - DNA, 25 bp, Artificial
  Probe
cacatggttacatagcatgtaatta

SEQ ID NO: 269152 - DNA, 25 bp, Artificial
  Probe
tcacatggttacatagcatgtaatt

SEQ ID NO: 269153 - DNA, 25 bp, Artificial
  Probe
atctactgttgttaagaagtcgatc

SEQ ID NO: 269154 - DNA, 25 bp, Artificial
  Probe
ctgatgcatcttgaatgatggctct

SEQ ID NO: 269155 - DNA, 25 bp, Artificial
  Probe
agtatacatgatcttgcctagactc

SEQ ID NO: 269156 - DNA, 25 bp, Artificial
  Probe
taagtatacatgatcttgcctagac

SEQ ID NO: 269157 - DNA, 25 bp, Artificial
  Probe
aatggtcttctccattgaagattag

SEQ ID NO: 269158 - DNA, 25 bp, Artificial
  Probe
acatttgatttaaccttgcaaaagg

SEQ ID NO: 269159 - DNA, 25 bp, Artificial
  Probe
gtatacatgatcttgcctagactcc

SEQ ID NO: 269160 - DNA, 25 bp, Artificial
  Probe
tttgatttaaccttgcaaaaggatc

SEQ ID NO: 269161 - DNA, 25 bp, Artificial
  Probe
ggatcccaaataatgctttttactg

SEQ ID NO: 269162 - DNA, 25 bp, Artificial
  Probe
ttgaatgatggctctttgctataca

SEQ ID NO: 269163 - DNA, 25 bp, Artificial
  Probe
gttttgaatactgctccttactgac

SEQ ID NO: 269164 - DNA, 25 bp, Artificial
  Probe
catgtaggcgttcttctctacagtt

SEQ ID NO: 269165 - DNA, 25 bp, Artificial
  Probe
gaagctcactttgttgtctgatgca

SEQ ID NO: 269166 - DNA, 25 bp, Artificial
  Probe
gaatactgctccttactgactgact

SEQ ID NO: 269167 - DNA, 25 bp, Artificial
  Probe
tcttgaagtcagtgtggctatacct

SEQ ID NO: 269168 - DNA, 25 bp, Artificial
  Probe
agtcagtgtggctatacctaatgtg

SEQ ID NO: 269169 - DNA, 25 bp, Artificial
  Probe
taagaagtcgatctactgatagggc

SEQ ID NO: 269170 - DNA, 25 bp, Artificial
  Probe
agaagtcgatctactgatagggcca

SEQ ID NO: 269171 - DNA, 25 bp, Artificial
  Probe
cttctccattgaagattagtagaat

SEQ ID NO: 269172 - DNA, 25 bp, Artificial
  Probe
gctccttactgactgactcaatatg

SEQ ID NO: 269173 - DNA, 25 bp, Artificial
  Probe
ctttgttgtctgatgcatcttgaat

SEQ ID NO: 269174 - DNA, 25 bp, Artificial
  Probe
cttgcaaaaggatcccaaataatgc

SEQ ID NO: 269175 - DNA, 25 bp, Artificial
  Probe
tgctatacatgtaggcgttcttctc

SEQ ID NO: 269176 - DNA, 25 bp, Artificial
  Probe
gatttaaccttgcaaaaggatccca

SEQ ID NO: 269177 - DNA, 25 bp, Artificial
  Probe
cttgaaggtcctctccatttatgag

SEQ ID NO: 269178 - DNA, 25 bp, Artificial
  Probe
ctccatttatgaggtagcagttact

SEQ ID NO: 269179 - DNA, 25 bp, Artificial
  Probe
tgctgggcagatttgcctctcagga

SEQ ID NO: 269180 - DNA, 25 bp, Artificial
  Probe
agggctcctctggtagggcattttc

SEQ ID NO: 269181 - DNA, 25 bp, Artificial
  Probe
ggctcctctggtagggcattttctg

SEQ ID NO: 269182 - DNA, 25 bp, Artificial
  Probe
tccctgggcttgaaggtcctctcca

SEQ ID NO: 269183 - DNA, 25 bp, Artificial
  Probe
atccctgggcttgaaggtcctctcc

SEQ ID NO: 269184 - DNA, 25 bp, Artificial
  Probe
tataatcttgacatggaatccctag

SEQ ID NO: 269185 - DNA, 25 bp, Artificial
  Probe
cctctccatttatgaggtagcagtt

SEQ ID NO: 269186 - DNA, 25 bp, Artificial
  Probe
ctctccatttatgaggtagcagtta

SEQ ID NO: 269187 - DNA, 25 bp, Artificial
  Probe
gtagggcattttctgctgggcagat

SEQ ID NO: 269188 - DNA, 25 bp, Artificial
  Probe
cttgacatggaatccctagctctct

SEQ ID NO: 269189 - DNA, 25 bp, Artificial
  Probe
gggcttgaaggtcctctccatttat

SEQ ID NO: 269190 - DNA, 25 bp, Artificial
  Probe
cagcctcgcctctgcttgggtgtgt

SEQ ID NO: 269191 - DNA, 25 bp, Artificial
  Probe
gcagttactttataatcttgacatg

SEQ ID NO: 269192 - DNA, 25 bp, Artificial
  Probe
tcttgacatggaatccctagctctc

SEQ ID NO: 269193 - DNA, 25 bp, Artificial
  Probe
gactgccagaacttatgcttgggag

SEQ ID NO: 269194 - DNA, 25 bp, Artificial
  Probe
acatggaatccctagctctctaagc

SEQ ID NO: 269195 - DNA, 25 bp, Artificial
  Probe
ctctcaggaggctgacccagacttg

SEQ ID NO: 269196 - DNA, 25 bp, Artificial
  Probe
gggctcctctggtagggcattttct

SEQ ID NO: 269197 - DNA, 25 bp, Artificial
  Probe
ctctggtagggcattttctgctggg

SEQ ID NO: 269198 - DNA, 25 bp, Artificial
  Probe
ggcagatttgcctctcaggaggctg

SEQ ID NO: 269199 - DNA, 25 bp, Artificial
  Probe
ggcattttctgctgggcagatttgc

SEQ ID NO: 269200 - DNA, 25 bp, Artificial
  Probe
tttctgctgggcagatttgcctctc

SEQ ID NO: 269201 - DNA, 25 bp, Artificial
  Probe
cttcactatctctctgccaagggag

SEQ ID NO: 269202 - DNA, 25 bp, Artificial
  Probe
aagggctcctctggtagggcatttt

SEQ ID NO: 269203 - DNA, 25 bp, Artificial
  Probe
tttgcctctcaggaggctgacccag

SEQ ID NO: 269204 - DNA, 25 bp, Artificial
  Probe
gtagaggtcttcactatctctctgc

SEQ ID NO: 269205 - DNA, 25 bp, Artificial
  Probe
acgagcccgaaggtccccagaagca

SEQ ID NO: 269206 - DNA, 25 bp, Artificial
  Probe
ctcaggaggctgacccagacttgac

SEQ ID NO: 269207 - DNA, 25 bp, Artificial
  Probe
ggactgccagaacttatgcttggga

SEQ ID NO: 269208 - DNA, 25 bp, Artificial
  Probe
gtatccctgggcttgaaggtcctct

SEQ ID NO: 269209 - DNA, 25 bp, Artificial
  Probe
atggaatccctagctctctaagcac

SEQ ID NO: 269210 - DNA, 25 bp, Artificial
  Probe
cgagcccgaaggtccccagaagcag

SEQ ID NO: 269211 - DNA, 25 bp, Artificial
  Probe
gtcctctccatttatgaggtagcag

SEQ ID NO: 269212 - DNA, 25 bp, Artificial
  Probe
ggaatccctagctctctaagcacac

SEQ ID NO: 269213 - DNA, 25 bp, Artificial
  Probe
tggaatccctagctctctaagcaca

SEQ ID NO: 269214 - DNA, 25 bp, Artificial
  Probe
cagatttgcctctcaggaggctgac

SEQ ID NO: 269215 - DNA, 25 bp, Artificial
  Probe
gggcattttctgctgggcagatttg

SEQ ID NO: 269216 - DNA, 25 bp, Artificial
  Probe
cgaaggtccccagaagcagcggcca

SEQ ID NO: 269217 - DNA, 25 bp, Artificial
  Probe
tctcaggaggctgacccagacttga

SEQ ID NO: 269218 - DNA, 25 bp, Artificial
  Probe
ctggtagggcattttctgctgggca

SEQ ID NO: 269219 - DNA, 25 bp, Artificial
  Probe
ttgaaggtcctctccatttatgagg

SEQ ID NO: 269220 - DNA, 25 bp, Artificial
  Probe
ttcactatctctctgccaagggagg

SEQ ID NO: 269221 - DNA, 25 bp, Artificial
  Probe
cagttactttataatcttgacatgg

SEQ ID NO: 269222 - DNA, 25 bp, Artificial
  Probe
ttgcctctcaggaggctgacccaga

SEQ ID NO: 269223 - DNA, 25 bp, Artificial
  Probe
gagcaatgagccaacggcacggaaa

SEQ ID NO: 269224 - DNA, 25 bp, Artificial
  Probe
tccgaatatggttcgcattcttgct

SEQ ID NO: 269225 - DNA, 25 bp, Artificial
  Probe
ccagtgagcatgttaacctaaaaat

SEQ ID NO: 269226 - DNA, 25 bp, Artificial
  Probe
gtcagagttcactttctccatagtg

SEQ ID NO: 269227 - DNA, 25 bp, Artificial
  Probe
cttttagggtgatcagagttagcca

SEQ ID NO: 269228 - DNA, 25 bp, Artificial
  Probe
tgtgaatacctgtgcccgtcctctc

SEQ ID NO: 269229 - DNA, 25 bp, Artificial
  Probe
atccatccgatagttctctcagttg

SEQ ID NO: 269230 - DNA, 25 bp, Artificial
  Probe
taatgttatccgaatatggttcgca

SEQ ID NO: 269231 - DNA, 25 bp, Artificial
  Probe
ttatgagaagctattgccttggttc

SEQ ID NO: 269232 - DNA, 25 bp, Artificial
  Probe
gtcaccgtccagtcttgattttatc

SEQ ID NO: 269233 - DNA, 25 bp, Artificial
  Probe
tacagggctccagttccctgtctgg

SEQ ID NO: 269234 - DNA, 25 bp, Artificial
  Probe
cagttccctgtctggcagatgtgaa

SEQ ID NO: 269235 - DNA, 25 bp, Artificial
  Probe
ccgagcctgcggtacagggctccag

SEQ ID NO: 269236 - DNA, 25 bp, Artificial
  Probe
agatgtgaatacctgtgcccgtcct

SEQ ID NO: 269237 - DNA, 25 bp, Artificial
  Probe
ggttcgcattcttgctcaccataaa

SEQ ID NO: 269238 - DNA, 25 bp, Artificial
  Probe
tctataaaggctatgctaagttctt

SEQ ID NO: 269239 - DNA, 25 bp, Artificial
  Probe
ttaaaaaggtacttcctgcaagcca

SEQ ID NO: 269240 - DNA, 25 bp, Artificial
  Probe
aatatggttcgcattcttgctcacc

SEQ ID NO: 269241 - DNA, 25 bp, Artificial
  Probe
caatggtatttgcttgccactttat

SEQ ID NO: 269242 - DNA, 25 bp, Artificial
  Probe
aaacccaatggtatttgcttgccac

SEQ ID NO: 269243 - DNA, 25 bp, Artificial
  Probe
ttcttaaaaaggtacttcctgcaag

SEQ ID NO: 269244 - DNA, 25 bp, Artificial
  Probe
gaagctattgccttggttcaacttt

SEQ ID NO: 269245 - DNA, 25 bp, Artificial
  Probe
caaggtaaacaccaatgggtgttat

SEQ ID NO: 269246 - DNA, 25 bp, Artificial
  Probe
cgcgcatgagcaatgagccaacggc

SEQ ID NO: 269247 - DNA, 25 bp, Artificial
  Probe
gctccagttccctgtctggcagatg

SEQ ID NO: 269248 - DNA, 25 bp, Artificial
  Probe
aggtacttcctgcaagccaccagtc

SEQ ID NO: 269249 - DNA, 25 bp, Artificial
  Probe
agcctgcggtacagggctccagttc

SEQ ID NO: 269250 - DNA, 25 bp, Artificial
  Probe
tcagagttagccaggcatggtcacc

SEQ ID NO: 269251 - DNA, 25 bp, Artificial
  Probe
cgatagttctctcagttgaaaagaa

SEQ ID NO: 269252 - DNA, 25 bp, Artificial
  Probe
gttcactttctccatagtggcaaag

SEQ ID NO: 269253 - DNA, 25 bp, Artificial
  Probe
aaaggtacttcctgcaagccaccag

SEQ ID NO: 269254 - DNA, 25 bp, Artificial
  Probe
cttggttcaactttatctgatatgg

SEQ ID NO: 269255 - DNA, 25 bp, Artificial
  Probe
gtgatcagagttagccaggcatggt

SEQ ID NO: 269256 - DNA, 25 bp, Artificial
  Probe
ccctaatgagtactggcttatgtgc

SEQ ID NO: 269257 - DNA, 25 bp, Artificial
  Probe
cagggctccagttccctgtctggca

SEQ ID NO: 269258 - DNA, 25 bp, Artificial
  Probe
aaatcccgcgcatgagcaatgagcc

SEQ ID NO: 269259 - DNA, 25 bp, Artificial
  Probe
ccaggcatggtcaccgtccagtctt

SEQ ID NO: 269260 - DNA, 25 bp, Artificial
  Probe
tgattttatcgttggccagccgagc

SEQ ID NO: 269261 - DNA, 25 bp, Artificial
  Probe
tgtgcccgtcctctctgtctataaa

SEQ ID NO: 269262 - DNA, 25 bp, Artificial
  Probe
gatccctaatgagtactggcttatg

SEQ ID NO: 269263 - DNA, 25 bp, Artificial
  Probe
ttatcgttggccagccgagcctgcg

SEQ ID NO: 269264 - DNA, 25 bp, Artificial
  Probe
tgtctggcagatgtgaatacctgtg

SEQ ID NO: 269265 - DNA, 25 bp, Artificial
  Probe
gtctataaaggctatgctaagttct

SEQ ID NO: 269266 - DNA, 25 bp, Artificial
  Probe
gcggtacagggctccagttccctgt

SEQ ID NO: 269267 - DNA, 25 bp, Artificial
  Probe
gttggccagccgagcctgcggtaca

SEQ ID NO: 269268 - DNA, 25 bp, Artificial
  Probe
cctcccagtgagcatgttaacctaa

SEQ ID NO: 269269 - DNA, 25 bp, Artificial
  Probe
atgcgaccacaatttctgggaagga

SEQ ID NO: 269270 - DNA, 25 bp, Artificial
  Probe
gggcaagccatgttaactggactct

SEQ ID NO: 269271 - DNA, 25 bp, Artificial
  Probe
agaattgatctgaccaagtctcttg

SEQ ID NO: 269272 - DNA, 25 bp, Artificial
  Probe
aaactatataaggttctgagcaacg

SEQ ID NO: 269273 - DNA, 25 bp, Artificial
  Probe
actggactctgatgatgtaattgac

SEQ ID NO: 269274 - DNA, 25 bp, Artificial
  Probe
ctgaatagttacaccaataggtaga

SEQ ID NO: 269275 - DNA, 25 bp, Artificial
  Probe
aattgatctgaccaagtctcttggt

SEQ ID NO: 269276 - DNA, 25 bp, Artificial
  Probe
ttaaatttagggccaaacattatat

SEQ ID NO: 269277 - DNA, 25 bp, Artificial
  Probe
tatataatgcgaccacaatttctgg

SEQ ID NO: 269278 - DNA, 25 bp, Artificial
  Probe
agccatgttaactggactctgatga

SEQ ID NO: 269279 - DNA, 25 bp, Artificial
  Probe
catgttaactggactctgatgatgt

SEQ ID NO: 269280 - DNA, 25 bp, Artificial
  Probe
cgaccacaatttctgggaaggactg

SEQ ID NO: 269281 - DNA, 25 bp, Artificial
  Probe
atgttaactggactctgatgatgta

SEQ ID NO: 269282 - DNA, 25 bp, Artificial
  Probe
tataaggttctgagcaacgcttttt

SEQ ID NO: 269283 - DNA, 25 bp, Artificial
  Probe
ggactctgatgatgtaattgactgg

SEQ ID NO: 269284 - DNA, 25 bp, Artificial
  Probe
gccatgttaactggactctgatgat

SEQ ID NO: 269285 - DNA, 25 bp, Artificial
  Probe
ggcaagccatgttaactggactctg

SEQ ID NO: 269286 - DNA, 25 bp, Artificial
  Probe
tgcgaccacaatttctgggaaggac

SEQ ID NO: 269287 - DNA, 25 bp, Artificial
  Probe
ttatgtggagtcctagaaaacacgg

SEQ ID NO: 269288 - DNA, 25 bp, Artificial
  Probe
tgatctgaccaagtctcttggtttc

SEQ ID NO: 269289 - DNA, 25 bp, Artificial
  Probe
gcaagccatgttaactggactctga

SEQ ID NO: 269290 - DNA, 25 bp, Artificial
  Probe
gaattgatctgaccaagtctcttgg

SEQ ID NO: 269291 - DNA, 25 bp, Artificial
  Probe
atataaggttctgagcaacgctttt

SEQ ID NO: 269292 - DNA, 25 bp, Artificial
  Probe
aagccatgttaactggactctgatg

SEQ ID NO: 269293 - DNA, 25 bp, Artificial
  Probe
atataatgcgaccacaatttctggg

SEQ ID NO: 269294 - DNA, 25 bp, Artificial
  Probe
attgatctgaccaagtctcttggtt

SEQ ID NO: 269295 - DNA, 25 bp, Artificial
  Probe
caagccatgttaactggactctgat

SEQ ID NO: 269296 - DNA, 25 bp, Artificial
  Probe
tagaattgatctgaccaagtctctt

SEQ ID NO: 269297 - DNA, 25 bp, Artificial
  Probe
tataatgcgaccacaatttctggga

SEQ ID NO: 269298 - DNA, 25 bp, Artificial
  Probe
gcgaccacaatttctgggaaggact

SEQ ID NO: 269299 - DNA, 25 bp, Artificial
  Probe
gaccacaatttctgggaaggactga

SEQ ID NO: 269300 - DNA, 25 bp, Artificial
  Probe
actgaatagttacaccaataggtag

SEQ ID NO: 269301 - DNA, 25 bp, Artificial
  Probe
tggagtcctagaaaacacggagggt

SEQ ID NO: 269302 - DNA, 25 bp, Artificial
  Probe
gttatgtggagtcctagaaaacacg

SEQ ID NO: 269303 - DNA, 25 bp, Artificial
  Probe
aggttatgtggagtcctagaaaaca

SEQ ID NO: 269304 - DNA, 25 bp, Artificial
  Probe
catttcagaatcttaagaacatcgt

SEQ ID NO: 269305 - DNA, 25 bp, Artificial
  Probe
actatataaggttctgagcaacgct

SEQ ID NO: 269306 - DNA, 25 bp, Artificial
  Probe
aatgcgaccacaatttctgggaagg

SEQ ID NO: 269307 - DNA, 25 bp, Artificial
  Probe
taatgcgaccacaatttctgggaag

SEQ ID NO: 269308 - DNA, 25 bp, Artificial
  Probe
ttagaattgatctgaccaagtctct

SEQ ID NO: 269309 - DNA, 25 bp, Artificial
  Probe
ataaggttctgagcaacgcttttta

SEQ ID NO: 269310 - DNA, 25 bp, Artificial
  Probe
ccatgttaactggactctgatgatg

SEQ ID NO: 269311 - DNA, 25 bp, Artificial
  Probe
ttgatctgaccaagtctcttggttt

SEQ ID NO: 269312 - DNA, 25 bp, Artificial
  Probe
gtactaatagtggtttgatgttgta

SEQ ID NO: 269313 - DNA, 25 bp, Artificial
  Probe
ataatgcgaccacaatttctgggaa

SEQ ID NO: 269314 - DNA, 25 bp, Artificial
  Probe
ctggactctgatgatgtaattgact

SEQ ID NO: 269315 - DNA, 25 bp, Artificial
  Probe
ctgtctgtccctttgtgccagcact

SEQ ID NO: 269316 - DNA, 25 bp, Artificial
  Probe
catgtctgaagaactgtgtgattca

SEQ ID NO: 269317 - DNA, 25 bp, Artificial
  Probe
gcactgtatgtttgcaagacacgaa

SEQ ID NO: 269318 - DNA, 25 bp, Artificial
  Probe
ctgtatgtttgcaagacacgaataa

SEQ ID NO: 269319 - DNA, 25 bp, Artificial
  Probe
cgccaggaagttgatggtgatccag

SEQ ID NO: 269320 - DNA, 25 bp, Artificial
  Probe
gtctgtccctttgtgccagcactgt

SEQ ID NO: 269321 - DNA, 25 bp, Artificial
  Probe
gagatgctgtctgtccctttgtgcc

SEQ ID NO: 269322 - DNA, 25 bp, Artificial
  Probe
agtatcaacgtgaatatccaattct

SEQ ID NO: 269323 - DNA, 25 bp, Artificial
  Probe
agcactgtatgtttgcaagacacga

SEQ ID NO: 269324 - DNA, 25 bp, Artificial
  Probe
tttacaggatgtttattggaaaagg

SEQ ID NO: 269325 - DNA, 25 bp, Artificial
  Probe
tgtgattcagtgatgacttgttctg

SEQ ID NO: 269326 - DNA, 25 bp, Artificial
  Probe
cagcactgtatgtttgcaagacacg

SEQ ID NO: 269327 - DNA, 25 bp, Artificial
  Probe
ggagatgctgtctgtccctttgtgc

SEQ ID NO: 269328 - DNA, 25 bp, Artificial
  Probe
tgtttgcaagacacgaataaactgc

SEQ ID NO: 269329 - DNA, 25 bp, Artificial
  Probe
taaactgccgcttttgcccaaacga

SEQ ID NO: 269330 - DNA, 25 bp, Artificial
  Probe
gaaactatttatggctggttttaag

SEQ ID NO: 269331 - DNA, 25 bp, Artificial
  Probe
taaagtgttttgacggtgtaagtcg

SEQ ID NO: 269332 - DNA, 25 bp, Artificial
  Probe
tgcaagacacgaataaactgccgct

SEQ ID NO: 269333 - DNA, 25 bp, Artificial
  Probe
tgtctgtccctttgtgccagcactg

SEQ ID NO: 269334 - DNA, 25 bp, Artificial
  Probe
atgtttgcaagacacgaataaactg

SEQ ID NO: 269335 - DNA, 25 bp, Artificial
  Probe
gccagcactgtatgtttgcaagaca

SEQ ID NO: 269336 - DNA, 25 bp, Artificial
  Probe
tctgtccctttgtgccagcactgta

SEQ ID NO: 269337 - DNA, 25 bp, Artificial
  Probe
acacgaataaactgccgcttttgcc

SEQ ID NO: 269338 - DNA, 25 bp, Artificial
  Probe
gacacgaataaactgccgcttttgc

SEQ ID NO: 269339 - DNA, 25 bp, Artificial
  Probe
aagacacgaataaactgccgctttt

SEQ ID NO: 269340 - DNA, 25 bp, Artificial
  Probe
agcgccaggaagttgatggtgatcc

SEQ ID NO: 269341 - DNA, 25 bp, Artificial
  Probe
ccagcactgtatgtttgcaagacac

SEQ ID NO: 269342 - DNA, 25 bp, Artificial
  Probe
gtgccagcactgtatgtttgcaaga

SEQ ID NO: 269343 - DNA, 25 bp, Artificial
  Probe
gtatcaacgtgaatatccaattctg

SEQ ID NO: 269344 - DNA, 25 bp, Artificial
  Probe
ctttgtgccagcactgtatgtttgc

SEQ ID NO: 269345 - DNA, 25 bp, Artificial
  Probe
agacacgaataaactgccgcttttg

SEQ ID NO: 269346 - DNA, 25 bp, Artificial
  Probe
ttgtgccagcactgtatgtttgcaa

SEQ ID NO: 269347 - DNA, 25 bp, Artificial
  Probe
tgattcagtgatgacttgttctgac

SEQ ID NO: 269348 - DNA, 25 bp, Artificial
  Probe
cactgtatgtttgcaagacacgaat

SEQ ID NO: 269349 - DNA, 25 bp, Artificial
  Probe
tgccagcactgtatgtttgcaagac

SEQ ID NO: 269350 - DNA, 25 bp, Artificial
  Probe
agatgctgtctgtccctttgtgcca

SEQ ID NO: 269351 - DNA, 25 bp, Artificial
  Probe
tttgtgccagcactgtatgtttgca

SEQ ID NO: 269352 - DNA, 25 bp, Artificial
  Probe
ccctttgtgccagcactgtatgttt

SEQ ID NO: 269353 - DNA, 25 bp, Artificial
  Probe
tatgtttgcaagacacgaataaact

SEQ ID NO: 269354 - DNA, 25 bp, Artificial
  Probe
gggagatgctgtctgtccctttgtg

SEQ ID NO: 269355 - DNA, 25 bp, Artificial
  Probe
gctgtctgtccctttgtgccagcac

SEQ ID NO: 269356 - DNA, 25 bp, Artificial
  Probe
cctttgtgccagcactgtatgtttg

SEQ ID NO: 269357 - DNA, 25 bp, Artificial
  Probe
tccctttgtgccagcactgtatgtt

SEQ ID NO: 269358 - DNA, 25 bp, Artificial
  Probe
tgtgccagcactgtatgtttgcaag

SEQ ID NO: 269359 - DNA, 25 bp, Artificial
  Probe
gcgccaggaagttgatggtgatcca

SEQ ID NO: 269360 - DNA, 25 bp, Artificial
  Probe
ccatgtctgaagaactgtgtgattc

SEQ ID NO: 269361 - DNA, 25 bp, Artificial
  Probe
ctcatcctattgacaacagaattta

SEQ ID NO: 269362 - DNA, 25 bp, Artificial
  Probe
tatgaaatcaactgacaagaaaact

SEQ ID NO: 269363 - DNA, 25 bp, Artificial
  Probe
caagaaaactcatcctattgacaac

SEQ ID NO: 269364 - DNA, 25 bp, Artificial
  Probe
atatattttcagtatattcaattgc

SEQ ID NO: 269365 - DNA, 25 bp, Artificial
  Probe
atattttcagtatattcaattgcca

SEQ ID NO: 269366 - DNA, 25 bp, Artificial
  Probe
caaaaacgctgactgacgtgtctta

SEQ ID NO: 269367 - DNA, 25 bp, Artificial
  Probe
actgacaagaaaactcatcctattg

SEQ ID NO: 269368 - DNA, 25 bp, Artificial
  Probe
gcaaaaacgctgactgacgtgtctt

SEQ ID NO: 269369 - DNA, 25 bp, Artificial
  Probe
aaacgctgactgacgtgtcttaaac

SEQ ID NO: 269370 - DNA, 25 bp, Artificial
  Probe
aaaaacgctgactgacgtgtcttaa

SEQ ID NO: 269371 - DNA, 25 bp, Artificial
  Probe
tgactgacgtgtcttaaactttgaa

SEQ ID NO: 269372 - DNA, 25 bp, Artificial
  Probe
aatcaactgacaagaaaactcatcc

SEQ ID NO: 269373 - DNA, 25 bp, Artificial
  Probe
ttttcagtatattcaattgccaaag

SEQ ID NO: 269374 - DNA, 25 bp, Artificial
  Probe
acgctgactgacgtgtcttaaactt

SEQ ID NO: 269375 - DNA, 25 bp, Artificial
  Probe
gaaaactcatcctattgacaacaga

SEQ ID NO: 269376 - DNA, 25 bp, Artificial
  Probe
gctgactgacgtgtcttaaactttg

SEQ ID NO: 269377 - DNA, 25 bp, Artificial
  Probe
tcctattgacaacagaatttaactg

SEQ ID NO: 269378 - DNA, 25 bp, Artificial
  Probe
aagaaaactcatcctattgacaaca

SEQ ID NO: 269379 - DNA, 25 bp, Artificial
  Probe
tgctgtctcggaaaaggaactatga

SEQ ID NO: 269380 - DNA, 25 bp, Artificial
  Probe
gactgacgtgtcttaaactttgaaa

SEQ ID NO: 269381 - DNA, 25 bp, Artificial
  Probe
tatattttcagtatattcaattgcc

SEQ ID NO: 269382 - DNA, 25 bp, Artificial
  Probe
ctgacaagaaaactcatcctattga

SEQ ID NO: 269383 - DNA, 25 bp, Artificial
  Probe
tgaaatcaactgacaagaaaactca

SEQ ID NO: 269384 - DNA, 25 bp, Artificial
  Probe
aactatgaaatcaactgacaagaaa

SEQ ID NO: 269385 - DNA, 25 bp, Artificial
  Probe
tgacgtgtcttaaactttgaaaata

SEQ ID NO: 269386 - DNA, 25 bp, Artificial
  Probe
ctattgacaacagaatttaactgga

SEQ ID NO: 269387 - DNA, 25 bp, Artificial
  Probe
ctgactgacgtgtcttaaactttga

SEQ ID NO: 269388 - DNA, 25 bp, Artificial
  Probe
aactgacaagaaaactcatcctatt

SEQ ID NO: 269389 - DNA, 25 bp, Artificial
  Probe
aaaacgctgactgacgtgtcttaaa

SEQ ID NO: 269390 - DNA, 25 bp, Artificial
  Probe
acaagaaaactcatcctattgacaa

SEQ ID NO: 269391 - DNA, 25 bp, Artificial
  Probe
cagcaaaaacgctgactgacgtgtc

SEQ ID NO: 269392 - DNA, 25 bp, Artificial
  Probe
gaaatcaactgacaagaaaactcat

SEQ ID NO: 269393 - DNA, 25 bp, Artificial
  Probe
agcaaaaacgctgactgacgtgtct

SEQ ID NO: 269394 - DNA, 25 bp, Artificial
  Probe
attttcagtatattcaattgccaaa

SEQ ID NO: 269395 - DNA, 25 bp, Artificial
  Probe
cctattgacaacagaatttaactgg

SEQ ID NO: 269396 - DNA, 25 bp, Artificial
  Probe
aacgctgactgacgtgtcttaaact

SEQ ID NO: 269397 - DNA, 25 bp, Artificial
  Probe
tttgctgtctcggaaaaggaactat

SEQ ID NO: 269398 - DNA, 25 bp, Artificial
  Probe
atcctattgacaacagaatttaact

SEQ ID NO: 269399 - DNA, 25 bp, Artificial
  Probe
gacgtgtcttaaactttgaaaatat

SEQ ID NO: 269400 - DNA, 25 bp, Artificial
  Probe
tcaactgacaagaaaactcatccta

SEQ ID NO: 269401 - DNA, 25 bp, Artificial
  Probe
aactcatcctattgacaacagaatt

SEQ ID NO: 269402 - DNA, 25 bp, Artificial
  Probe
acagcaaaaacgctgactgacgtgt

SEQ ID NO: 269403 - DNA, 25 bp, Artificial
  Probe
ctgacgtgtcttaaactttgaaaat

SEQ ID NO: 269404 - DNA, 25 bp, Artificial
  Probe
actcatcctattgacaacagaattt

SEQ ID NO: 269405 - DNA, 25 bp, Artificial
  Probe
ttgctgtctcggaaaaggaactatg

SEQ ID NO: 269406 - DNA, 25 bp, Artificial
  Probe
cgctgactgacgtgtcttaaacttt

SEQ ID NO: 269407 - DNA, 25 bp, Artificial
  Probe
agcaagggggccaaagtggatccct

SEQ ID NO: 269408 - DNA, 25 bp, Artificial
  Probe
cttgggactgccaccgagtgggaca

SEQ ID NO: 269409 - DNA, 25 bp, Artificial
  Probe
tcactgggatatgctagagatcgac

SEQ ID NO: 269410 - DNA, 25 bp, Artificial
  Probe
acagacactgaggttagaatcatga

SEQ ID NO: 269411 - DNA, 25 bp, Artificial
  Probe
taccctcgtcactgggatatgctag

SEQ ID NO: 269412 - DNA, 25 bp, Artificial
  Probe
tcagaacgagcaagggggccaaagt

SEQ ID NO: 269413 - DNA, 25 bp, Artificial
  Probe
taatgacctctgctctccaccagag

SEQ ID NO: 269414 - DNA, 25 bp, Artificial
  Probe
accgagtgggacagacactgaggtt

SEQ ID NO: 269415 - DNA, 25 bp, Artificial
  Probe
atcaagcttttgagaacaaacaagt

SEQ ID NO: 269416 - DNA, 25 bp, Artificial
  Probe
agcctcttagggacagctcatcaag

SEQ ID NO: 269417 - DNA, 25 bp, Artificial
  Probe
accactcaccgagtgcattacctga

SEQ ID NO: 269418 - DNA, 25 bp, Artificial
  Probe
tggaacagagcctcttagggacagc

SEQ ID NO: 269419 - DNA, 25 bp, Artificial
  Probe
aggatcttgggactgccaccgagtg

SEQ ID NO: 269420 - DNA, 25 bp, Artificial
  Probe
caggatcttgggactgccaccgagt

SEQ ID NO: 269421 - DNA, 25 bp, Artificial
  Probe
ttgatcaccactcaccgagtgcatt

SEQ ID NO: 269422 - DNA, 25 bp, Artificial
  Probe
agatacagatctggaacagagcctc

SEQ ID NO: 269423 - DNA, 25 bp, Artificial
  Probe
agaacaaacaagtggcctcggtaag

SEQ ID NO: 269424 - DNA, 25 bp, Artificial
  Probe
agtcacattgggttggctgttaccc

SEQ ID NO: 269425 - DNA, 25 bp, Artificial
  Probe
ctcgtcactgggatatgctagagat

SEQ ID NO: 269426 - DNA, 25 bp, Artificial
  Probe
ggccaaagtggatccctgagccatt

SEQ ID NO: 269427 - DNA, 25 bp, Artificial
  Probe
gtcacattgggttggctgttaccct

SEQ ID NO: 269428 - DNA, 25 bp, Artificial
  Probe
gggttggctgttaccctcgtcactg

SEQ ID NO: 269429 - DNA, 25 bp, Artificial
  Probe
agagatcgacttcaatactctcaga

SEQ ID NO: 269430 - DNA, 25 bp, Artificial
  Probe
gacatatgtctttgcaagattctcc

SEQ ID NO: 269431 - DNA, 25 bp, Artificial
  Probe
ccaccgagtgggacagacactgagg

SEQ ID NO: 269432 - DNA, 25 bp, Artificial
  Probe
tgggacagacactgaggttagaatc

SEQ ID NO: 269433 - DNA, 25 bp, Artificial
  Probe
gggacaggatcttgggactgccacc

SEQ ID NO: 269434 - DNA, 25 bp, Artificial
  Probe
taatttgatcaccactcaccgagtg

SEQ ID NO: 269435 - DNA, 25 bp, Artificial
  Probe
catgtgagacccaaaggatgtttca

SEQ ID NO: 269436 - DNA, 25 bp, Artificial
  Probe
acccctctgctctgtgagtctttac

SEQ ID NO: 269437 - DNA, 25 bp, Artificial
  Probe
gatctggaacagagcctcttaggga

SEQ ID NO: 269438 - DNA, 25 bp, Artificial
  Probe
ggggccaaagtggatccctgagcca

SEQ ID NO: 269439 - DNA, 25 bp, Artificial
  Probe
aaagtggatccctgagccattcata

SEQ ID NO: 269440 - DNA, 25 bp, Artificial
  Probe
cattgggttggctgttaccctcgtc

SEQ ID NO: 269441 - DNA, 25 bp, Artificial
  Probe
tgctgcctgcccaggacatatgtct

SEQ ID NO: 269442 - DNA, 25 bp, Artificial
  Probe
tgctagagatcgacttcaatactct

SEQ ID NO: 269443 - DNA, 25 bp, Artificial
  Probe
aagtggcctcggtaagatctctatc

SEQ ID NO: 269444 - DNA, 25 bp, Artificial
  Probe
tggctgttaccctcgtcactgggat

SEQ ID NO: 269445 - DNA, 25 bp, Artificial
  Probe
ctgtcatgtgagacccaaaggatgt

SEQ ID NO: 269446 - DNA, 25 bp, Artificial
  Probe
tttcacacttgctgcctgcccagga

SEQ ID NO: 269447 - DNA, 25 bp, Artificial
  Probe
aaccttgtgattaggagagtcacat

SEQ ID NO: 269448 - DNA, 25 bp, Artificial
  Probe
atatgctagagatcgacttcaatac

SEQ ID NO: 269449 - DNA, 25 bp, Artificial
  Probe
ggactgccaccgagtgggacagaca

SEQ ID NO: 269450 - DNA, 25 bp, Artificial
  Probe
actgccaccgagtgggacagacact

SEQ ID NO: 269451 - DNA, 25 bp, Artificial
  Probe
gacccaaaggatgtttcacacttgc

SEQ ID NO: 269452 - DNA, 25 bp, Artificial
  Probe
agtggatccctgagccattcataat

SEQ ID NO: 269453 - DNA, 25 bp, Artificial
  Probe
gtacgatgcgacctgtctcgtgaag

SEQ ID NO: 269454 - DNA, 25 bp, Artificial
  Probe
tgtatctgcatttgctccaatttgc

SEQ ID NO: 269455 - DNA, 25 bp, Artificial
  Probe
cacggagctctgatttgcgctttga

SEQ ID NO: 269456 - DNA, 25 bp, Artificial
  Probe
tcactccatgggaggtcacggagct

SEQ ID NO: 269457 - DNA, 25 bp, Artificial
  Probe
atttgctccaatttgcaaccctgtg

SEQ ID NO: 269458 - DNA, 25 bp, Artificial
  Probe
acgatgcgacctgtctcgtgaagtc

SEQ ID NO: 269459 - DNA, 25 bp, Artificial
  Probe
gaaggcgtacgatgcgacctgtctc

SEQ ID NO: 269460 - DNA, 25 bp, Artificial
  Probe
cactccatgggaggtcacggagctc

SEQ ID NO: 269461 - DNA, 25 bp, Artificial
  Probe
gaggtcacggagctctgatttgcgc

SEQ ID NO: 269462 - DNA, 25 bp, Artificial
  Probe
ccatgggaggtcacggagctctgat

SEQ ID NO: 269463 - DNA, 25 bp, Artificial
  Probe
tcacggagctctgatttgcgctttg

SEQ ID NO: 269464 - DNA, 25 bp, Artificial
  Probe
agatctgtatctgcatttgctccaa

SEQ ID NO: 269465 - DNA, 25 bp, Artificial
  Probe
tttgctccaatttgcaaccctgtgc

SEQ ID NO: 269466 - DNA, 25 bp, Artificial
  Probe
gcatttgctccaatttgcaaccctg

SEQ ID NO: 269467 - DNA, 25 bp, Artificial
  Probe
tttgcgctttgaaaaatcctggaaa

SEQ ID NO: 269468 - DNA, 25 bp, Artificial
  Probe
gcgtacgatgcgacctgtctcgtga

SEQ ID NO: 269469 - DNA, 25 bp, Artificial
  Probe
ctccatgggaggtcacggagctctg

SEQ ID NO: 269470 - DNA, 25 bp, Artificial
  Probe
gatgcgacctgtctcgtgaagtcct

SEQ ID NO: 269471 - DNA, 25 bp, Artificial
  Probe
cgtacgatgcgacctgtctcgtgaa

SEQ ID NO: 269472 - DNA, 25 bp, Artificial
  Probe
cagatctgtatctgcatttgctcca

SEQ ID NO: 269473 - DNA, 25 bp, Artificial
  Probe
aggtcacggagctctgatttgcgct

SEQ ID NO: 269474 - DNA, 25 bp, Artificial
  Probe
atgcgacctgtctcgtgaagtccta

SEQ ID NO: 269475 - DNA, 25 bp, Artificial
  Probe
tgatttgcgctttgaaaaatcctgg

SEQ ID NO: 269476 - DNA, 25 bp, Artificial
  Probe
gtatctgcatttgctccaatttgca

SEQ ID NO: 269477 - DNA, 25 bp, Artificial
  Probe
tccatgggaggtcacggagctctga

SEQ ID NO: 269478 - DNA, 25 bp, Artificial
  Probe
tggaaggcgtacgatgcgacctgtc

SEQ ID NO: 269479 - DNA, 25 bp, Artificial
  Probe
ggtcacggagctctgatttgcgctt

SEQ ID NO: 269480 - DNA, 25 bp, Artificial
  Probe
gtcacggagctctgatttgcgcttt

SEQ ID NO: 269481 - DNA, 25 bp, Artificial
  Probe
ttgcgctttgaaaaatcctggaaaa

SEQ ID NO: 269482 - DNA, 25 bp, Artificial
  Probe
tgcgctttgaaaaatcctggaaaat

SEQ ID NO: 269483 - DNA, 25 bp, Artificial
  Probe
cggagctctgatttgcgctttgaaa

SEQ ID NO: 269484 - DNA, 25 bp, Artificial
  Probe
atttgcgctttgaaaaatcctggaa

SEQ ID NO: 269485 - DNA, 25 bp, Artificial
  Probe
actccatgggaggtcacggagctct

SEQ ID NO: 269486 - DNA, 25 bp, Artificial
  Probe
ctgtatctgcatttgctccaatttg

SEQ ID NO: 269487 - DNA, 25 bp, Artificial
  Probe
aatggaaggcgtacgatgcgacctg

SEQ ID NO: 269488 - DNA, 25 bp, Artificial
  Probe
tgctccaatttgcaaccctgtgctc

SEQ ID NO: 269489 - DNA, 25 bp, Artificial
  Probe
gctccaatttgcaaccctgtgctct

SEQ ID NO: 269490 - DNA, 25 bp, Artificial
  Probe
gatctgtatctgcatttgctccaat

SEQ ID NO: 269491 - DNA, 25 bp, Artificial
  Probe
cgatgcgacctgtctcgtgaagtcc

SEQ ID NO: 269492 - DNA, 25 bp, Artificial
  Probe
tacgatgcgacctgtctcgtgaagt

SEQ ID NO: 269493 - DNA, 25 bp, Artificial
  Probe
gatttgcgctttgaaaaatcctgga

SEQ ID NO: 269494 - DNA, 25 bp, Artificial
  Probe
ggagctctgatttgcgctttgaaaa

SEQ ID NO: 269495 - DNA, 25 bp, Artificial
  Probe
ctccaatttgcaaccctgtgctctg

SEQ ID NO: 269496 - DNA, 25 bp, Artificial
  Probe
acggagctctgatttgcgctttgaa

SEQ ID NO: 269497 - DNA, 25 bp, Artificial
  Probe
atggaaggcgtacgatgcgacctgt

SEQ ID NO: 269498 - DNA, 25 bp, Artificial
  Probe
ttgctccaatttgcaaccctgtgct

SEQ ID NO: 269499 - DNA, 25 bp, Artificial
  Probe
tgacgggacttttgtaactggcaaa

SEQ ID NO: 269500 - DNA, 25 bp, Artificial
  Probe
caacagtttttcaagccttaagtga

SEQ ID NO: 269501 - DNA, 25 bp, Artificial
  Probe
accagagattcagatgtgggattgc

SEQ ID NO: 269502 - DNA, 25 bp, Artificial
  Probe
tggctttcttacaaaaacatttagg

SEQ ID NO: 269503 - DNA, 25 bp, Artificial
  Probe
atcaaggcttccttggctttcttac

SEQ ID NO: 269504 - DNA, 25 bp, Artificial
  Probe
tccgtggatgtttcccgtgagtgag

SEQ ID NO: 269505 - DNA, 25 bp, Artificial
  Probe
atcgagaacctcatcccggggtcac

SEQ ID NO: 269506 - DNA, 25 bp, Artificial
  Probe
aagactttgatcagtgggactgtct

SEQ ID NO: 269507 - DNA, 25 bp, Artificial
  Probe
acgatcaagggctcagtgcaccaga

SEQ ID NO: 269508 - DNA, 25 bp, Artificial
  Probe
tgattacgatcaagggctcagtgca

SEQ ID NO: 269509 - DNA, 25 bp, Artificial
  Probe
agaagagcttgttacacagttgcct

SEQ ID NO: 269510 - DNA, 25 bp, Artificial
  Probe
tttgatgtagtcacccagtccccgg

SEQ ID NO: 269511 - DNA, 25 bp, Artificial
  Probe
catttaggacttcataaagactttg

SEQ ID NO: 269512 - DNA, 25 bp, Artificial
  Probe
atgtttcccgtgagtgaggagctgt

SEQ ID NO: 269513 - DNA, 25 bp, Artificial
  Probe
ttcagatgtgggattgcccttgatc

SEQ ID NO: 269514 - DNA, 25 bp, Artificial
  Probe
gtgggattgcccttgatccgtggat

SEQ ID NO: 269515 - DNA, 25 bp, Artificial
  Probe
cttctaccagcctgacaaggaaagg

SEQ ID NO: 269516 - DNA, 25 bp, Artificial
  Probe
ccagagattcagatgtgggattgcc

SEQ ID NO: 269517 - DNA, 25 bp, Artificial
  Probe
ctcaaccagaattagaagagcttgt

SEQ ID NO: 269518 - DNA, 25 bp, Artificial
  Probe
taccggatcactcaaccagaattag

SEQ ID NO: 269519 - DNA, 25 bp, Artificial
  Probe
tttgctgacgggacttttgtaactg

SEQ ID NO: 269520 - DNA, 25 bp, Artificial
  Probe
gagttctaccggatcactcaaccag

SEQ ID NO: 269521 - DNA, 25 bp, Artificial
  Probe
cagtccccggctctgcagagttcta

SEQ ID NO: 269522 - DNA, 25 bp, Artificial
  Probe
agagatcgagaacctcatcccgggg

SEQ ID NO: 269523 - DNA, 25 bp, Artificial
  Probe
cccggctctgcagagttctaccgga

SEQ ID NO: 269524 - DNA, 25 bp, Artificial
  Probe
agtccccggctctgcagagttctac

SEQ ID NO: 269525 - DNA, 25 bp, Artificial
  Probe
agccttaagtgaagaccagagattc

SEQ ID NO: 269526 - DNA, 25 bp, Artificial
  Probe
ctgcagagttctaccggatcactca

SEQ ID NO: 269527 - DNA, 25 bp, Artificial
  Probe
cagatgtgggattgcccttgatccg

SEQ ID NO: 269528 - DNA, 25 bp, Artificial
  Probe
tgtactccagagttcctcagcctct

SEQ ID NO: 269529 - DNA, 25 bp, Artificial
  Probe
tctgccgaattccagactccaaagg

SEQ ID NO: 269530 - DNA, 25 bp, Artificial
  Probe
gactttgatcagtgggactgtctgg

SEQ ID NO: 269531 - DNA, 25 bp, Artificial
  Probe
aggagcaacagtttttcaagcctta

SEQ ID NO: 269532 - DNA, 25 bp, Artificial
  Probe
ctgtcactgaaaggagacatagact

SEQ ID NO: 269533 - DNA, 25 bp, Artificial
  Probe
tcaaggcttccttggctttcttaca

SEQ ID NO: 269534 - DNA, 25 bp, Artificial
  Probe
ctcatcccggggtcaccctttgatg

SEQ ID NO: 269535 - DNA, 25 bp, Artificial
  Probe
agtgaggagctgtactccagagttc

SEQ ID NO: 269536 - DNA, 25 bp, Artificial
  Probe
aaatgattacgatcaagggctcagt

SEQ ID NO: 269537 - DNA, 25 bp, Artificial
  Probe
ctctgccgaattccagactccaaag

SEQ ID NO: 269538 - DNA, 25 bp, Artificial
  Probe
cagcctgacaaggaaaggaaaatga

SEQ ID NO: 269539 - DNA, 25 bp, Artificial
  Probe
tcttttggaggagcaacagtttttc

SEQ ID NO: 269540 - DNA, 25 bp, Artificial
  Probe
aggacttcataaagactttgatcag

SEQ ID NO: 269541 - DNA, 25 bp, Artificial
  Probe
caagctgtcactgaaaggagacata

SEQ ID NO: 269542 - DNA, 25 bp, Artificial
  Probe
cccgtgagtgaggagctgtactcca

SEQ ID NO: 269543 - DNA, 25 bp, Artificial
  Probe
cagaattttgctgacgggacttttg

SEQ ID NO: 269544 - DNA, 25 bp, Artificial
  Probe
tttttcaagccttaagtgaagacca

SEQ ID NO: 269545 - DNA, 25 bp, Artificial
  Probe
aggagtcccatgtaagaaaaatcac

SEQ ID NO: 269546 - DNA, 25 bp, Artificial
  Probe
tcccaccctgttcgtttcaaatagg

SEQ ID NO: 269547 - DNA, 25 bp, Artificial
  Probe
tcgaggcctattttgccgtacaacc

SEQ ID NO: 269548 - DNA, 25 bp, Artificial
  Probe
agaacgtggtgcgggtgtggttttg

SEQ ID NO: 269549 - DNA, 25 bp, Artificial
  Probe
cctcccttggagaacatgaagttgt

SEQ ID NO: 269550 - DNA, 25 bp, Artificial
  Probe
ctcccttggagaacatgaagttgtt

SEQ ID NO: 269551 - DNA, 25 bp, Artificial
  Probe
ttgggggcaggagtcccatgtaaga

SEQ ID NO: 269552 - DNA, 25 bp, Artificial
  Probe
cctgttcgtttcaaataggtctgca

SEQ ID NO: 269553 - DNA, 25 bp, Artificial
  Probe
ctaaaatcccagaagaaaggaagag

SEQ ID NO: 269554 - DNA, 25 bp, Artificial
  Probe
tctccctcccttggagaacatgaag

SEQ ID NO: 269555 - DNA, 25 bp, Artificial
  Probe
aaagcagaagtgtttccctgttgtt

SEQ ID NO: 269556 - DNA, 25 bp, Artificial
  Probe
tgcgggtgtggttttgcaaccagag

SEQ ID NO: 269557 - DNA, 25 bp, Artificial
  Probe
ctcccaccctgttcgtttcaaatag

SEQ ID NO: 269558 - DNA, 25 bp, Artificial
  Probe
tggttttgcaaccagagacagaagc

SEQ ID NO: 269559 - DNA, 25 bp, Artificial
  Probe
atttgggggcaggagtcccatgtaa

SEQ ID NO: 269560 - DNA, 25 bp, Artificial
  Probe
ctcatactaataatccaaactgctg

SEQ ID NO: 269561 - DNA, 25 bp, Artificial
  Probe
caaaaagaacgtggtgcgggtgtgg

SEQ ID NO: 269562 - DNA, 25 bp, Artificial
  Probe
ctgagaagtttctgctttcatttgg

SEQ ID NO: 269563 - DNA, 25 bp, Artificial
  Probe
gaaactggacctcaaaaagaacgtg

SEQ ID NO: 269564 - DNA, 25 bp, Artificial
  Probe
gtggtgcgggtgtggttttgcaacc

SEQ ID NO: 269565 - DNA, 25 bp, Artificial
  Probe
actggacctcaaaaagaacgtggtg

SEQ ID NO: 269566 - DNA, 25 bp, Artificial
  Probe
cctcgaggcctattttgccgtacaa

SEQ ID NO: 269567 - DNA, 25 bp, Artificial
  Probe
taagaaaaatcacctaaaatcccag

SEQ ID NO: 269568 - DNA, 25 bp, Artificial
  Probe
ctccctcgaggcctattttgccgta

SEQ ID NO: 269569 - DNA, 25 bp, Artificial
  Probe
ccctcccttggagaacatgaagttg

SEQ ID NO: 269570 - DNA, 25 bp, Artificial
  Probe
ggtatctcatactaataatccaaac

SEQ ID NO: 269571 - DNA, 25 bp, Artificial
  Probe
ctcgaggcctattttgccgtacaac

SEQ ID NO: 269572 - DNA, 25 bp, Artificial
  Probe
ccctcgaggcctattttgccgtaca

SEQ ID NO: 269573 - DNA, 25 bp, Artificial
  Probe
aaatcccagaagaaaggaagagatt

SEQ ID NO: 269574 - DNA, 25 bp, Artificial
  Probe
tatccgggaaagcagaagtgtttcc

SEQ ID NO: 269575 - DNA, 25 bp, Artificial
  Probe
ccctgttcgtttcaaataggtctgc

SEQ ID NO: 269576 - DNA, 25 bp, Artificial
  Probe
ttatccgggaaagcagaagtgtttc

SEQ ID NO: 269577 - DNA, 25 bp, Artificial
  Probe
tccctcgaggcctattttgccgtac

SEQ ID NO: 269578 - DNA, 25 bp, Artificial
  Probe
gaagtttctgctttcatttgggggc

SEQ ID NO: 269579 - DNA, 25 bp, Artificial
  Probe
caccctgttcgtttcaaataggtct

SEQ ID NO: 269580 - DNA, 25 bp, Artificial
  Probe
tgagaagtttctgctttcatttggg

SEQ ID NO: 269581 - DNA, 25 bp, Artificial
  Probe
aagtttctgctttcatttgggggca

SEQ ID NO: 269582 - DNA, 25 bp, Artificial
  Probe
agcgctccctcgaggcctattttgc

SEQ ID NO: 269583 - DNA, 25 bp, Artificial
  Probe
ttctgctttcatttgggggcaggag

SEQ ID NO: 269584 - DNA, 25 bp, Artificial
  Probe
accctgttcgtttcaaataggtctg

SEQ ID NO: 269585 - DNA, 25 bp, Artificial
  Probe
atggtatctcatactaataatccaa

SEQ ID NO: 269586 - DNA, 25 bp, Artificial
  Probe
tcccttggagaacatgaagttgttg

SEQ ID NO: 269587 - DNA, 25 bp, Artificial
  Probe
gaaaaatcacctaaaatcccagaag

SEQ ID NO: 269588 - DNA, 25 bp, Artificial
  Probe
ggtgtggttttgcaaccagagacag

SEQ ID NO: 269589 - DNA, 25 bp, Artificial
  Probe
agtttctgctttcatttgggggcag

SEQ ID NO: 269590 - DNA, 25 bp, Artificial
  Probe
gtggttttgcaaccagagacagaag

SEQ ID NO: 269591 - DNA, 25 bp, Artificial
  Probe
tgaactgtgcctgtcactgtaacac

SEQ ID NO: 269592 - DNA, 25 bp, Artificial
  Probe
aactacttagacatcaaaggtttgc

SEQ ID NO: 269593 - DNA, 25 bp, Artificial
  Probe
acactttttgaacttattctggctg

SEQ ID NO: 269594 - DNA, 25 bp, Artificial
  Probe
gaattcctgaaagttgaccaaggaa

SEQ ID NO: 269595 - DNA, 25 bp, Artificial
  Probe
actacttagacatcaaaggtttgct

SEQ ID NO: 269596 - DNA, 25 bp, Artificial
  Probe
ggtttgcttgatgtcacctgcaaga

SEQ ID NO: 269597 - DNA, 25 bp, Artificial
  Probe
tcctgaaagttgaccaaggaacact

SEQ ID NO: 269598 - DNA, 25 bp, Artificial
  Probe
tttgaacttattctggctgcaaact

SEQ ID NO: 269599 - DNA, 25 bp, Artificial
  Probe
aaactacttagacatcaaaggtttg

SEQ ID NO: 269600 - DNA, 25 bp, Artificial
  Probe
ggaacactttttgaacttattctgg

SEQ ID NO: 269601 - DNA, 25 bp, Artificial
  Probe
ctgtgcctgtcactgtaacactaga

SEQ ID NO: 269602 - DNA, 25 bp, Artificial
  Probe
attctggctgcaaactacttagaca

SEQ ID NO: 269603 - DNA, 25 bp, Artificial
  Probe
gcaaactacttagacatcaaaggtt

SEQ ID NO: 269604 - DNA, 25 bp, Artificial
  Probe
tcacctgcaagactgtggctaatat

SEQ ID NO: 269605 - DNA, 25 bp, Artificial
  Probe
cttgatgtcacctgcaagactgtgg

SEQ ID NO: 269606 - DNA, 25 bp, Artificial
  Probe
tgcttgatgtcacctgcaagactgt

SEQ ID NO: 269607 - DNA, 25 bp, Artificial
  Probe
gaactgtgcctgtcactgtaacact

SEQ ID NO: 269608 - DNA, 25 bp, Artificial
  Probe
actgtgcctgtcactgtaacactag

SEQ ID NO: 269609 - DNA, 25 bp, Artificial
  Probe
gtgaactgtgcctgtcactgtaaca

SEQ ID NO: 269610 - DNA, 25 bp, Artificial
  Probe
aggaacactttttgaacttattctg

SEQ ID NO: 269611 - DNA, 25 bp, Artificial
  Probe
tgcaaactacttagacatcaaaggt

SEQ ID NO: 269612 - DNA, 25 bp, Artificial
  Probe
cctgcaagactgtggctaatatgat

SEQ ID NO: 269613 - DNA, 25 bp, Artificial
  Probe
cactttttgaacttattctggctgc

SEQ ID NO: 269614 - DNA, 25 bp, Artificial
  Probe
tttgcttgatgtcacctgcaagact

SEQ ID NO: 269615 - DNA, 25 bp, Artificial
  Probe
ttattctggctgcaaactacttaga

SEQ ID NO: 269616 - DNA, 25 bp, Artificial
  Probe
attcctgaaagttgaccaaggaaca

SEQ ID NO: 269617 - DNA, 25 bp, Artificial
  Probe
aaggtttgcttgatgtcacctgcaa

SEQ ID NO: 269618 - DNA, 25 bp, Artificial
  Probe
ttgaacttattctggctgcaaacta

SEQ ID NO: 269619 - DNA, 25 bp, Artificial
  Probe
gaacactttttgaacttattctggc

SEQ ID NO: 269620 - DNA, 25 bp, Artificial
  Probe
ttgatgtcacctgcaagactgtggc

SEQ ID NO: 269621 - DNA, 25 bp, Artificial
  Probe
ctttttgaacttattctggctgcaa

SEQ ID NO: 269622 - DNA, 25 bp, Artificial
  Probe
tgatgtcacctgcaagactgtggct

SEQ ID NO: 269623 - DNA, 25 bp, Artificial
  Probe
ttctggctgcaaactacttagacat

SEQ ID NO: 269624 - DNA, 25 bp, Artificial
  Probe
tacttagacatcaaaggtttgcttg

SEQ ID NO: 269625 - DNA, 25 bp, Artificial
  Probe
tgaccaaggaacactttttgaactt

SEQ ID NO: 269626 - DNA, 25 bp, Artificial
  Probe
cacctgcaagactgtggctaatatg

SEQ ID NO: 269627 - DNA, 25 bp, Artificial
  Probe
ctggctgcaaactacttagacatca

SEQ ID NO: 269628 - DNA, 25 bp, Artificial
  Probe
acgcctgaggagattcgtaaaacct

SEQ ID NO: 269629 - DNA, 25 bp, Artificial
  Probe
tttttgaacttattctggctgcaaa

SEQ ID NO: 269630 - DNA, 25 bp, Artificial
  Probe
acttagacatcaaaggtttgcttga

SEQ ID NO: 269631 - DNA, 25 bp, Artificial
  Probe
tggctgcaaactacttagacatcaa

SEQ ID NO: 269632 - DNA, 25 bp, Artificial
  Probe
cttattctggctgcaaactacttag

SEQ ID NO: 269633 - DNA, 25 bp, Artificial
  Probe
ttgaccaaggaacactttttgaact

SEQ ID NO: 269634 - DNA, 25 bp, Artificial
  Probe
tgtcacctgcaagactgtggctaat

SEQ ID NO: 269635 - DNA, 25 bp, Artificial
  Probe
atgtcacctgcaagactgtggctaa

SEQ ID NO: 269636 - DNA, 25 bp, Artificial
  Probe
aggtttgcttgatgtcacctgcaag

SEQ ID NO: 269637 - DNA, 25 bp, Artificial
  Probe
gcccttttgtatgtaccgagaacca

SEQ ID NO: 269638 - DNA, 25 bp, Artificial
  Probe
tctctctctagtaggctggattatc

SEQ ID NO: 269639 - DNA, 25 bp, Artificial
  Probe
tttaattcccaactccatgtgtgtg

SEQ ID NO: 269640 - DNA, 25 bp, Artificial
  Probe
gtgcttctgcaaagggacttttttg

SEQ ID NO: 269641 - DNA, 25 bp, Artificial
  Probe
ctgtcatcgtgtaagtcagagggag

SEQ ID NO: 269642 - DNA, 25 bp, Artificial
  Probe
tctgcaaagggacttttttgaattc

SEQ ID NO: 269643 - DNA, 25 bp, Artificial
  Probe
aagcatctgagtccacttaccagac

SEQ ID NO: 269644 - DNA, 25 bp, Artificial
  Probe
ctttcttgtagtgcttctgcaaagg

SEQ ID NO: 269645 - DNA, 25 bp, Artificial
  Probe
ttaattcccaactccatgtgtgtgc

SEQ ID NO: 269646 - DNA, 25 bp, Artificial
  Probe
actccatgtgtgtgcgagcacgcgt

SEQ ID NO: 269647 - DNA, 25 bp, Artificial
  Probe
ctctagtaggctggattatcattct

SEQ ID NO: 269648 - DNA, 25 bp, Artificial
  Probe
tgagtccacttaccagacacccagg

SEQ ID NO: 269649 - DNA, 25 bp, Artificial
  Probe
ttcttgtagtgcttctgcaaaggga

SEQ ID NO: 269650 - DNA, 25 bp, Artificial
  Probe
ttcgctctacagagagaaagtgctg

SEQ ID NO: 269651 - DNA, 25 bp, Artificial
  Probe
tacctgtcatcgtgtaagtcagagg

SEQ ID NO: 269652 - DNA, 25 bp, Artificial
  Probe
ctgcccttttgtatgtaccgagaac

SEQ ID NO: 269653 - DNA, 25 bp, Artificial
  Probe
agcatctctctctagtaggctggat

SEQ ID NO: 269654 - DNA, 25 bp, Artificial
  Probe
cttgtagtgcttctgcaaagggact

SEQ ID NO: 269655 - DNA, 25 bp, Artificial
  Probe
acttttttgaattctcagtggcatt

SEQ ID NO: 269656 - DNA, 25 bp, Artificial
  Probe
ttgtagtgcttctgcaaagggactt

SEQ ID NO: 269657 - DNA, 25 bp, Artificial
  Probe
gccacagcatctctctctagtaggc

SEQ ID NO: 269658 - DNA, 25 bp, Artificial
  Probe
ccctgaagcatctgagtccacttac

SEQ ID NO: 269659 - DNA, 25 bp, Artificial
  Probe
gcatctgagtccacttaccagacac

SEQ ID NO: 269660 - DNA, 25 bp, Artificial
  Probe
tctctgcccttttgtatgtaccgag

SEQ ID NO: 269661 - DNA, 25 bp, Artificial
  Probe
tctctagtaggctggattatcattc

SEQ ID NO: 269662 - DNA, 25 bp, Artificial
  Probe
gaagcatctgagtccacttaccaga

SEQ ID NO: 269663 - DNA, 25 bp, Artificial
  Probe
ttcactcatgcatggccacagcatc

SEQ ID NO: 269664 - DNA, 25 bp, Artificial
  Probe
tagtgcttctgcaaagggacttttt

SEQ ID NO: 269665 - DNA, 25 bp, Artificial
  Probe
acctgtcatcgtgtaagtcagaggg

SEQ ID NO: 269666 - DNA, 25 bp, Artificial
  Probe
gctggattatcattctctctgccct

SEQ ID NO: 269667 - DNA, 25 bp, Artificial
  Probe
acgtggattcatacctgtcatcgtg

SEQ ID NO: 269668 - DNA, 25 bp, Artificial
  Probe
ccttttgtatgtaccgagaaccaca

SEQ ID NO: 269669 - DNA, 25 bp, Artificial
  Probe
gtatctgacgagactctttaattcc

SEQ ID NO: 269670 - DNA, 25 bp, Artificial
  Probe
ggccacagcatctctctctagtagg

SEQ ID NO: 269671 - DNA, 25 bp, Artificial
  Probe
tggccacagcatctctctctagtag

SEQ ID NO: 269672 - DNA, 25 bp, Artificial
  Probe
cacgtggattcatacctgtcatcgt

SEQ ID NO: 269673 - DNA, 25 bp, Artificial
  Probe
tcatgcatggccacagcatctctct

SEQ ID NO: 269674 - DNA, 25 bp, Artificial
  Probe
ggattcatacctgtcatcgtgtaag

SEQ ID NO: 269675 - DNA, 25 bp, Artificial
  Probe
tctctctgcccttttgtatgtaccg

SEQ ID NO: 269676 - DNA, 25 bp, Artificial
  Probe
agtgcttctgcaaagggactttttt

SEQ ID NO: 269677 - DNA, 25 bp, Artificial
  Probe
ccaactccatgtgtgtgcgagcacg

SEQ ID NO: 269678 - DNA, 25 bp, Artificial
  Probe
atgcatggccacagcatctctctct

SEQ ID NO: 269679 - DNA, 25 bp, Artificial
  Probe
cttggacaactaacaatatttgtag

SEQ ID NO: 269680 - DNA, 25 bp, Artificial
  Probe
ggacttttttgaattctcagtggca

SEQ ID NO: 269681 - DNA, 25 bp, Artificial
  Probe
gcatggccacagcatctctctctag

SEQ ID NO: 269682 - DNA, 25 bp, Artificial
  Probe
atctctctctagtaggctggattat

SEQ ID NO: 269683 - DNA, 25 bp, Artificial
  Probe
tgggggtcctaccaccacaagatct

SEQ ID NO: 269684 - DNA, 25 bp, Artificial
  Probe
tcccttcctggtgtgtatcaacatt

SEQ ID NO: 269685 - DNA, 25 bp, Artificial
  Probe
aaccattgtggatttttgctgctcc

SEQ ID NO: 269686 - DNA, 25 bp, Artificial
  Probe
gacctccagttgtgggtctttattt

SEQ ID NO: 269687 - DNA, 25 bp, Artificial
  Probe
cacctactgacctccagttgtgggt

SEQ ID NO: 269688 - DNA, 25 bp, Artificial
  Probe
cacaccaggcttattaaagagtact

SEQ ID NO: 269689 - DNA, 25 bp, Artificial
  Probe
ccacaagatctaaagctgtggccac

SEQ ID NO: 269690 - DNA, 25 bp, Artificial
  Probe
tggccacctactgacctccagttgt

SEQ ID NO: 269691 - DNA, 25 bp, Artificial
  Probe
ggccacctactgacctccagttgtg

SEQ ID NO: 269692 - DNA, 25 bp, Artificial
  Probe
tgtggccacctactgacctccagtt

SEQ ID NO: 269693 - DNA, 25 bp, Artificial
  Probe
agtgccaccaaaccattgtggattt

SEQ ID NO: 269694 - DNA, 25 bp, Artificial
  Probe
taccaccacaagatctaaagctgtg

SEQ ID NO: 269695 - DNA, 25 bp, Artificial
  Probe
aagatctaaagctgtggccacctac

SEQ ID NO: 269696 - DNA, 25 bp, Artificial
  Probe
cctactgacctccagttgtgggtct

SEQ ID NO: 269697 - DNA, 25 bp, Artificial
  Probe
ccagatcccttcctggtgtgtatca

SEQ ID NO: 269698 - DNA, 25 bp, Artificial
  Probe
gggggtcctaccaccacaagatcta

SEQ ID NO: 269699 - DNA, 25 bp, Artificial
  Probe
ccaccacaagatctaaagctgtggc

SEQ ID NO: 269700 - DNA, 25 bp, Artificial
  Probe
caaaccattgtggatttttgctgct

SEQ ID NO: 269701 - DNA, 25 bp, Artificial
  Probe
gtggccacctactgacctccagttg

SEQ ID NO: 269702 - DNA, 25 bp, Artificial
  Probe
acaccaggcttattaaagagtactt

SEQ ID NO: 269703 - DNA, 25 bp, Artificial
  Probe
tgccaccaaaccattgtggattttt

SEQ ID NO: 269704 - DNA, 25 bp, Artificial
  Probe
gggtcctaccaccacaagatctaaa

SEQ ID NO: 269705 - DNA, 25 bp, Artificial
  Probe
ggggtcctaccaccacaagatctaa

SEQ ID NO: 269706 - DNA, 25 bp, Artificial
  Probe
gagaagaatcacagccaattcccca

SEQ ID NO: 269707 - DNA, 25 bp, Artificial
  Probe
cagatcccttcctggtgtgtatcaa

SEQ ID NO: 269708 - DNA, 25 bp, Artificial
  Probe
tactgacctccagttgtgggtcttt

SEQ ID NO: 269709 - DNA, 25 bp, Artificial
  Probe
ttccccaactgttttgtcccagctg

SEQ ID NO: 269710 - DNA, 25 bp, Artificial
  Probe
cccagatcccttcctggtgtgtatc

SEQ ID NO: 269711 - DNA, 25 bp, Artificial
  Probe
caccaggcttattaaagagtacttt

SEQ ID NO: 269712 - DNA, 25 bp, Artificial
  Probe
gatctaaagctgtggccacctactg

SEQ ID NO: 269713 - DNA, 25 bp, Artificial
  Probe
caccaaaccattgtggatttttgct

SEQ ID NO: 269714 - DNA, 25 bp, Artificial
  Probe
ccttcctggtgtgtatcaacattac

SEQ ID NO: 269715 - DNA, 25 bp, Artificial
  Probe
gtgccaccaaaccattgtggatttt

SEQ ID NO: 269716 - DNA, 25 bp, Artificial
  Probe
tctttttaacggagaagaatcacag

SEQ ID NO: 269717 - DNA, 25 bp, Artificial
  Probe
atgatgtgcctttccttgcccagat

SEQ ID NO: 269718 - DNA, 25 bp, Artificial
  Probe
gtgtgtatcaacattactcactgtc

SEQ ID NO: 269719 - DNA, 25 bp, Artificial
  Probe
tgacctccagttgtgggtctttatt

SEQ ID NO: 269720 - DNA, 25 bp, Artificial
  Probe
ccattgtggatttttgctgctcccc

SEQ ID NO: 269721 - DNA, 25 bp, Artificial
  Probe
gtactatatgggaggtcctatcaat

SEQ ID NO: 269722 - DNA, 25 bp, Artificial
  Probe
cccttcctggtgtgtatcaacatta

SEQ ID NO: 269723 - DNA, 25 bp, Artificial
  Probe
gatgtgcctttccttgcccagatcc

SEQ ID NO: 269724 - DNA, 25 bp, Artificial
  Probe
acaagatctaaagctgtggccacct

SEQ ID NO: 269725 - DNA, 25 bp, Artificial
  Probe
aaagtgtgactcagtactttcttac

SEQ ID NO: 269726 - DNA, 25 bp, Artificial
  Probe
tgcccagatcccttcctggtgtgta

SEQ ID NO: 269727 - DNA, 25 bp, Artificial
  Probe
aaagctgtggccacctactgacctc

SEQ ID NO: 269728 - DNA, 25 bp, Artificial
  Probe
aaatgatgtgcctttccttgcccag

SEQ ID NO: 269729 - DNA, 25 bp, Artificial
  Probe
tcaaggccagtgtgaggatatcggc

SEQ ID NO: 269730 - DNA, 25 bp, Artificial
  Probe
acaacgggggtctgcctcagctcgc

SEQ ID NO: 269731 - DNA, 25 bp, Artificial
  Probe
gatatcggcctgacaacgggggtct

SEQ ID NO: 269732 - DNA, 25 bp, Artificial
  Probe
ctcgcttatgatttgtatccttgag

SEQ ID NO: 269733 - DNA, 25 bp, Artificial
  Probe
gacatattctcttttcagtgcgcgg

SEQ ID NO: 269734 - DNA, 25 bp, Artificial
  Probe
ttaatttcaggctgttctcatgtca

SEQ ID NO: 269735 - DNA, 25 bp, Artificial
  Probe
cgcttatgatttgtatccttgagtt

SEQ ID NO: 269736 - DNA, 25 bp, Artificial
  Probe
ttcccccaagaatgtgatgtacgca

SEQ ID NO: 269737 - DNA, 25 bp, Artificial
  Probe
gttctcatgtcaaggccagtgtgag

SEQ ID NO: 269738 - DNA, 25 bp, Artificial
  Probe
cagctcgcttatgatttgtatcctt

SEQ ID NO: 269739 - DNA, 25 bp, Artificial
  Probe
tacttttgggagacgatgggctgct

SEQ ID NO: 269740 - DNA, 25 bp, Artificial
  Probe
caggctgttctcatgtcaaggccag

SEQ ID NO: 269741 - DNA, 25 bp, Artificial
  Probe
gcctcagctcgcttatgatttgtat

SEQ ID NO: 269742 - DNA, 25 bp, Artificial
  Probe
tgtcaaggccagtgtgaggatatcg

SEQ ID NO: 269743 - DNA, 25 bp, Artificial
  Probe
tgacaacgggggtctgcctcagctc

SEQ ID NO: 269744 - DNA, 25 bp, Artificial
  Probe
acactgctccaacgaagtctggagg

SEQ ID NO: 269745 - DNA, 25 bp, Artificial
  Probe
tgtgatgtacgcagacatgctcatg

SEQ ID NO: 269746 - DNA, 25 bp, Artificial
  Probe
taaacactgctccaacgaagtctgg

SEQ ID NO: 269747 - DNA, 25 bp, Artificial
  Probe
atgtcaaggccagtgtgaggatatc

SEQ ID NO: 269748 - DNA, 25 bp, Artificial
  Probe
gtctgcctcagctcgcttatgattt

SEQ ID NO: 269749 - DNA, 25 bp, Artificial
  Probe
gcacccagttaatttcaggctgttc

SEQ ID NO: 269750 - DNA, 25 bp, Artificial
  Probe
caaggccagtgtgaggatatcggcc

SEQ ID NO: 269751 - DNA, 25 bp, Artificial
  Probe
agtgtgaggatatcggcctgacaac

SEQ ID NO: 269752 - DNA, 25 bp, Artificial
  Probe
cactgctccaacgaagtctggaggt

SEQ ID NO: 269753 - DNA, 25 bp, Artificial
  Probe
cccccaagaatgtgatgtacgcaga

SEQ ID NO: 269754 - DNA, 25 bp, Artificial
  Probe
tatccttgagtttggtatctttggc

SEQ ID NO: 269755 - DNA, 25 bp, Artificial
  Probe
tccaacgaagtctggaggtactaaa

SEQ ID NO: 269756 - DNA, 25 bp, Artificial
  Probe
atcggcctgacaacgggggtctgcc

SEQ ID NO: 269757 - DNA, 25 bp, Artificial
  Probe
atgtacgcagacatgctcatgtgaa

SEQ ID NO: 269758 - DNA, 25 bp, Artificial
  Probe
agtctggaggtactaaaccgacata

SEQ ID NO: 269759 - DNA, 25 bp, Artificial
  Probe
catgtcaaggccagtgtgaggatat

SEQ ID NO: 269760 - DNA, 25 bp, Artificial
  Probe
taagcagcacccagttaatttcagg

SEQ ID NO: 269761 - DNA, 25 bp, Artificial
  Probe
gctgctgtgcccacctgtgtttaat

SEQ ID NO: 269762 - DNA, 25 bp, Artificial
  Probe
gaaactaagcagcacccagttaatt

SEQ ID NO: 269763 - DNA, 25 bp, Artificial
  Probe
cgatgggctgctgtgcccacctgtg

SEQ ID NO: 269764 - DNA, 25 bp, Artificial
  Probe
cagtacctgaaactaagcagcaccc

SEQ ID NO: 269765 - DNA, 25 bp, Artificial
  Probe
accgacatattctcttttcagtgcg

SEQ ID NO: 269766 - DNA, 25 bp, Artificial
  Probe
gagacgatgggctgctgtgcccacc

SEQ ID NO: 269767 - DNA, 25 bp, Artificial
  Probe
gtcagtacctgaaactaagcagcac

SEQ ID NO: 269768 - DNA, 25 bp, Artificial
  Probe
agaagtaaacactgctccaacgaag

SEQ ID NO: 269769 - DNA, 25 bp, Artificial
  Probe
agctcgcttatgatttgtatccttg

SEQ ID NO: 269770 - DNA, 25 bp, Artificial
  Probe
aacactgctccaacgaagtctggag

SEQ ID NO: 269771 - DNA, 25 bp, Artificial
  Probe
gctcgcttatgatttgtatccttga

SEQ ID NO: 269772 - DNA, 25 bp, Artificial
  Probe
ggggtctgcctcagctcgcttatga

SEQ ID NO: 269773 - DNA, 25 bp, Artificial
  Probe
aagcagcacccagttaatttcaggc

SEQ ID NO: 269774 - DNA, 25 bp, Artificial
  Probe
ccagttaatttcaggctgttctcat

SEQ ID NO: 269775 - DNA, 25 bp, Artificial
  Probe
aggcatttgtgtccaagaaaggctg

SEQ ID NO: 269776 - DNA, 25 bp, Artificial
  Probe
actagaaatgctgctcgtggcacag

SEQ ID NO: 269777 - DNA, 25 bp, Artificial
  Probe
cagtcctgaaagtcactgcccgaag

SEQ ID NO: 269778 - DNA, 25 bp, Artificial
  Probe
gtggcacagtcctgaaagtcactgc

SEQ ID NO: 269779 - DNA, 25 bp, Artificial
  Probe
tacccatttatcatgtgccctggag

SEQ ID NO: 269780 - DNA, 25 bp, Artificial
  Probe
gctgctcgtggcacagtcctgaaag

SEQ ID NO: 269781 - DNA, 25 bp, Artificial
  Probe
ctcaaaactagaaatgctgctcgtg

SEQ ID NO: 269782 - DNA, 25 bp, Artificial
  Probe
cacagtcctgaaagtcactgcccga

SEQ ID NO: 269783 - DNA, 25 bp, Artificial
  Probe
gtcctgaaagtcactgcccgaagag

SEQ ID NO: 269784 - DNA, 25 bp, Artificial
  Probe
tgtgtccaagaaaggctggcctttg

SEQ ID NO: 269785 - DNA, 25 bp, Artificial
  Probe
tgccctggagcttaaaagagttgtg

SEQ ID NO: 269786 - DNA, 25 bp, Artificial
  Probe
cctcaaaactagaaatgctgctcgt

SEQ ID NO: 269787 - DNA, 25 bp, Artificial
  Probe
ggcatttgtgtccaagaaaggctgg

SEQ ID NO: 269788 - DNA, 25 bp, Artificial
  Probe
agtcactgcccgaagagaacaccca

SEQ ID NO: 269789 - DNA, 25 bp, Artificial
  Probe
cgtggcacagtcctgaaagtcactg

SEQ ID NO: 269790 - DNA, 25 bp, Artificial
  Probe
tgtgccctggagcttaaaagagttg

SEQ ID NO: 269791 - DNA, 25 bp, Artificial
  Probe
tcatgtgccctggagcttaaaagag

SEQ ID NO: 269792 - DNA, 25 bp, Artificial
  Probe
aaaggcatttgtgtccaagaaaggc

SEQ ID NO: 269793 - DNA, 25 bp, Artificial
  Probe
ggcacagtcctgaaagtcactgccc

SEQ ID NO: 269794 - DNA, 25 bp, Artificial
  Probe
aactagaaatgctgctcgtggcaca

SEQ ID NO: 269795 - DNA, 25 bp, Artificial
  Probe
gaaatgctgctcgtggcacagtcct

SEQ ID NO: 269796 - DNA, 25 bp, Artificial
  Probe
aaactagaaatgctgctcgtggcac

SEQ ID NO: 269797 - DNA, 25 bp, Artificial
  Probe
gccctggagcttaaaagagttgtgg

SEQ ID NO: 269798 - DNA, 25 bp, Artificial
  Probe
atttgtgtccaagaaaggctggcct

SEQ ID NO: 269799 - DNA, 25 bp, Artificial
  Probe
tccaagaaaggctggcctttggcag

SEQ ID NO: 269800 - DNA, 25 bp, Artificial
  Probe
agtcctgaaagtcactgcccgaaga

SEQ ID NO: 269801 - DNA, 25 bp, Artificial
  Probe
aaatgctgctcgtggcacagtcctg

SEQ ID NO: 269802 - DNA, 25 bp, Artificial
  Probe
tttacccatttatcatgtgccctgg

SEQ ID NO: 269803 - DNA, 25 bp, Artificial
  Probe
cctgaaagtcactgcccgaagagaa

SEQ ID NO: 269804 - DNA, 25 bp, Artificial
  Probe
atcatgtgccctggagcttaaaaga

SEQ ID NO: 269805 - DNA, 25 bp, Artificial
  Probe
tagaaatgctgctcgtggcacagtc

SEQ ID NO: 269806 - DNA, 25 bp, Artificial
  Probe
acccatttatcatgtgccctggagc

SEQ ID NO: 269807 - DNA, 25 bp, Artificial
  Probe
ttgtgtccaagaaaggctggccttt

SEQ ID NO: 269808 - DNA, 25 bp, Artificial
  Probe
ctgctcgtggcacagtcctgaaagt

SEQ ID NO: 269809 - DNA, 25 bp, Artificial
  Probe
tatcatgtgccctggagcttaaaag

SEQ ID NO: 269810 - DNA, 25 bp, Artificial
  Probe
catgtgccctggagcttaaaagagt

SEQ ID NO: 269811 - DNA, 25 bp, Artificial
  Probe
ctcgtggcacagtcctgaaagtcac

SEQ ID NO: 269812 - DNA, 25 bp, Artificial
  Probe
gcatttgtgtccaagaaaggctggc

SEQ ID NO: 269813 - DNA, 25 bp, Artificial
  Probe
gcacagtcctgaaagtcactgcccg

SEQ ID NO: 269814 - DNA, 25 bp, Artificial
  Probe
tttgtgtccaagaaaggctggcctt

SEQ ID NO: 269815 - DNA, 25 bp, Artificial
  Probe
ccaatggcagaggtgaagtgtctga

SEQ ID NO: 269816 - DNA, 25 bp, Artificial
  Probe
gtcactgcccgaagagaacacccag

SEQ ID NO: 269817 - DNA, 25 bp, Artificial
  Probe
tcgtggcacagtcctgaaagtcact

SEQ ID NO: 269818 - DNA, 25 bp, Artificial
  Probe
ccatttatcatgtgccctggagctt

SEQ ID NO: 269819 - DNA, 25 bp, Artificial
  Probe
gctcgtggcacagtcctgaaagtca

SEQ ID NO: 269820 - DNA, 25 bp, Artificial
  Probe
gtgccctggagcttaaaagagttgt

SEQ ID NO: 269821 - DNA, 25 bp, Artificial
  Probe
cttaacacacacgactgacagagaa

SEQ ID NO: 269822 - DNA, 25 bp, Artificial
  Probe
ctgctcgtctagcacggcatagctt

SEQ ID NO: 269823 - DNA, 25 bp, Artificial
  Probe
gtcgtagctacactgcaagtttccg

SEQ ID NO: 269824 - DNA, 25 bp, Artificial
  Probe
acggcgctgctcgtctagcacggca

SEQ ID NO: 269825 - DNA, 25 bp, Artificial
  Probe
cacatcgaggaacgaagtcgcaggc

SEQ ID NO: 269826 - DNA, 25 bp, Artificial
  Probe
agcacatcgaggaacgaagtcgcag

SEQ ID NO: 269827 - DNA, 25 bp, Artificial
  Probe
agacagacagagagccgcagaagaa

SEQ ID NO: 269828 - DNA, 25 bp, Artificial
  Probe
gaacgaagtcgcaggcagaacacag

SEQ ID NO: 269829 - DNA, 25 bp, Artificial
  Probe
agaagacgacgacagcaacagcaac

SEQ ID NO: 269830 - DNA, 25 bp, Artificial
  Probe
gaagcaagcagcaaagcacacagag

SEQ ID NO: 269831 - DNA, 25 bp, Artificial
  Probe
aagacagacagagagccgcagaaga

SEQ ID NO: 269832 - DNA, 25 bp, Artificial
  Probe
cacagcacactggagaagacagaca

SEQ ID NO: 269833 - DNA, 25 bp, Artificial
  Probe
agtcgcaggcagaacacagcacact

SEQ ID NO: 269834 - DNA, 25 bp, Artificial
  Probe
gaagacgacgacagcaacagcaaca

SEQ ID NO: 269835 - DNA, 25 bp, Artificial
  Probe
agcagcaaagcacacagagagagag

SEQ ID NO: 269836 - DNA, 25 bp, Artificial
  Probe
cgactgacagagaaggcggtcctct

SEQ ID NO: 269837 - DNA, 25 bp, Artificial
  Probe
gcagcaaagcacacagagagagaga

SEQ ID NO: 269838 - DNA, 25 bp, Artificial
  Probe
agagccgcagaagaacgaagcaagc

SEQ ID NO: 269839 - DNA, 25 bp, Artificial
  Probe
agcaagcagcaaagcacacagagag

SEQ ID NO: 269840 - DNA, 25 bp, Artificial
  Probe
agcaacgaagcatagcacatcgagg

SEQ ID NO: 269841 - DNA, 25 bp, Artificial
  Probe
agcaacagcaacaagagaatcagcg

SEQ ID NO: 269842 - DNA, 25 bp, Artificial
  Probe
cgcaggcagaacacagcacactgga

SEQ ID NO: 269843 - DNA, 25 bp, Artificial
  Probe
cgacagcaacagcaacaagagaatc

SEQ ID NO: 269844 - DNA, 25 bp, Artificial
  Probe
acacagcacactggagaagacagac

SEQ ID NO: 269845 - DNA, 25 bp, Artificial
  Probe
agagaatcagcgacactaacagcca

SEQ ID NO: 269846 - DNA, 25 bp, Artificial
  Probe
acgccggtcgtagctacactgcaag

SEQ ID NO: 269847 - DNA, 25 bp, Artificial
  Probe
tcacggcgctgctcgtctagcacgg

SEQ ID NO: 269848 - DNA, 25 bp, Artificial
  Probe
tcgaggaacgaagtcgcaggcagaa

SEQ ID NO: 269849 - DNA, 25 bp, Artificial
  Probe
gcaacagcaacaagagaatcagcga

SEQ ID NO: 269850 - DNA, 25 bp, Artificial
  Probe
caagcagcaaagcacacagagagag

SEQ ID NO: 269851 - DNA, 25 bp, Artificial
  Probe
gcgctgctcgtctagcacggcatag

SEQ ID NO: 269852 - DNA, 25 bp, Artificial
  Probe
ggctgacgccggtcgtagctacact

SEQ ID NO: 269853 - DNA, 25 bp, Artificial
  Probe
atcagcgacactaacagccagcaca

SEQ ID NO: 269854 - DNA, 25 bp, Artificial
  Probe
gcaagtttccgcaactttaaggagt

SEQ ID NO: 269855 - DNA, 25 bp, Artificial
  Probe
tggtcacggcgctgctcgtctagca

SEQ ID NO: 269856 - DNA, 25 bp, Artificial
  Probe
agacgacgacagcaacagcaacaag

SEQ ID NO: 269857 - DNA, 25 bp, Artificial
  Probe
agcacactggagaagacagacagag

SEQ ID NO: 269858 - DNA, 25 bp, Artificial
  Probe
acagagagccgcagaagaacgaagc

SEQ ID NO: 269859 - DNA, 25 bp, Artificial
  Probe
cgacgacagcaacagcaacaagaga

SEQ ID NO: 269860 - DNA, 25 bp, Artificial
  Probe
tgctcgtctagcacggcatagcttt

SEQ ID NO: 269861 - DNA, 25 bp, Artificial
  Probe
atcgaggaacgaagtcgcaggcaga

SEQ ID NO: 269862 - DNA, 25 bp, Artificial
  Probe
gctacactgcaagtttccgcaactt

SEQ ID NO: 269863 - DNA, 25 bp, Artificial
  Probe
cagcacactggagaagacagacaga

SEQ ID NO: 269864 - DNA, 25 bp, Artificial
  Probe
caacgaagcatagcacatcgaggaa

SEQ ID NO: 269865 - DNA, 25 bp, Artificial
  Probe
cgtagctacactgcaagtttccgca

SEQ ID NO: 269866 - DNA, 25 bp, Artificial
  Probe
gaagtcgcaggcagaacacagcaca

SEQ ID NO: 269867 - DNA, 25 bp, Artificial
  Probe
ccttatcataggtctgaaggatatg

SEQ ID NO: 269868 - DNA, 25 bp, Artificial
  Probe
taattgaagggtgtgtactgctcct

SEQ ID NO: 269869 - DNA, 25 bp, Artificial
  Probe
gaatgcatccccaaaagcgtgagct

SEQ ID NO: 269870 - DNA, 25 bp, Artificial
  Probe
tccccaaaagcgtgagcttaagaca

SEQ ID NO: 269871 - DNA, 25 bp, Artificial
  Probe
atatgattctcatgccgaacctgca

SEQ ID NO: 269872 - DNA, 25 bp, Artificial
  Probe
cgtgcgaacattaaatcgtgcagct

SEQ ID NO: 269873 - DNA, 25 bp, Artificial
  Probe
agggatatctactagctgagcccag

SEQ ID NO: 269874 - DNA, 25 bp, Artificial
  Probe
gtgctcaggatacttgactgcctag

SEQ ID NO: 269875 - DNA, 25 bp, Artificial
  Probe
ccatactgagccacatggattattt

SEQ ID NO: 269876 - DNA, 25 bp, Artificial
  Probe
gcgactatctctatattgaccgata

SEQ ID NO: 269877 - DNA, 25 bp, Artificial
  Probe
gccacatggattatttgcgactatc

SEQ ID NO: 269878 - DNA, 25 bp, Artificial
  Probe
gctgcaatgccgatggccttctatc

SEQ ID NO: 269879 - DNA, 25 bp, Artificial
  Probe
caccctgcgtattgggccagggtca

SEQ ID NO: 269880 - DNA, 25 bp, Artificial
  Probe
attctcatgccgaacctgcaccgtt

SEQ ID NO: 269881 - DNA, 25 bp, Artificial
  Probe
ctgcctagagggatatctactagct

SEQ ID NO: 269882 - DNA, 25 bp, Artificial
  Probe
ggattatttgcgactatctctatat

SEQ ID NO: 269883 - DNA, 25 bp, Artificial
  Probe
ttattggagatactctacttggcac

SEQ ID NO: 269884 - DNA, 25 bp, Artificial
  Probe
ctgcaatgccgatggccttctatct

SEQ ID NO: 269885 - DNA, 25 bp, Artificial
  Probe
gaccttagtcccagccaaggctgtc

SEQ ID NO: 269886 - DNA, 25 bp, Artificial
  Probe
agctggctgcaatgccgatggcctt

SEQ ID NO: 269887 - DNA, 25 bp, Artificial
  Probe
gggtcagcacctaccgatactgctg

SEQ ID NO: 269888 - DNA, 25 bp, Artificial
  Probe
aaatcgtgcagctcggtcgactgtc

SEQ ID NO: 269889 - DNA, 25 bp, Artificial
  Probe
gatgcagagtgctcaggatacttga

SEQ ID NO: 269890 - DNA, 25 bp, Artificial
  Probe
cctgagaatgcatccccaaaagcgt

SEQ ID NO: 269891 - DNA, 25 bp, Artificial
  Probe
ctgtccttgaaggactaattgaagg

SEQ ID NO: 269892 - DNA, 25 bp, Artificial
  Probe
cgtgagcttaagacacacgactgca

SEQ ID NO: 269893 - DNA, 25 bp, Artificial
  Probe
ccaccctgcgtattgggccagggtc

SEQ ID NO: 269894 - DNA, 25 bp, Artificial
  Probe
gcgtattgggccagggtcagcacct

SEQ ID NO: 269895 - DNA, 25 bp, Artificial
  Probe
cgaacattaaatcgtgcagctcggt

SEQ ID NO: 269896 - DNA, 25 bp, Artificial
  Probe
tctcaccgtgcgaacattaaatcgt

SEQ ID NO: 269897 - DNA, 25 bp, Artificial
  Probe
tagtcccagccaaggctgtcatgac

SEQ ID NO: 269898 - DNA, 25 bp, Artificial
  Probe
tctgtctcaccgtgcgaacattaaa

SEQ ID NO: 269899 - DNA, 25 bp, Artificial
  Probe
aggatatgattctcatgccgaacct

SEQ ID NO: 269900 - DNA, 25 bp, Artificial
  Probe
ctccaggattgagatcagttttatt

SEQ ID NO: 269901 - DNA, 25 bp, Artificial
  Probe
aagggtgtgtactgctccttacctg

SEQ ID NO: 269902 - DNA, 25 bp, Artificial
  Probe
gtatatcatggagtttcctctacta

SEQ ID NO: 269903 - DNA, 25 bp, Artificial
  Probe
cagccaaggctgtcatgacaagctg

SEQ ID NO: 269904 - DNA, 25 bp, Artificial
  Probe
atgccgatggccttctatctagatg

SEQ ID NO: 269905 - DNA, 25 bp, Artificial
  Probe
aaggctgtcatgacaagctggctgc

SEQ ID NO: 269906 - DNA, 25 bp, Artificial
  Probe
gctatcgcccatactgagccacatg

SEQ ID NO: 269907 - DNA, 25 bp, Artificial
  Probe
tgatgaccttagtcccagccaaggc

SEQ ID NO: 269908 - DNA, 25 bp, Artificial
  Probe
tttgcgactatctctatattgaccg

SEQ ID NO: 269909 - DNA, 25 bp, Artificial
  Probe
ccaaaagcgtgagcttaagacacac

SEQ ID NO: 269910 - DNA, 25 bp, Artificial
  Probe
gtcatgacaagctggctgcaatgcc

SEQ ID NO: 269911 - DNA, 25 bp, Artificial
  Probe
ctgtgctatgacaggtatatcatgg

SEQ ID NO: 269912 - DNA, 25 bp, Artificial
  Probe
agagtgctcaggatacttgactgcc

SEQ ID NO: 269913 - DNA, 25 bp, Artificial
  Probe
ccagctgccaaaatggcaaatgact

SEQ ID NO: 269914 - DNA, 25 bp, Artificial
  Probe
taccgacagggttgaacatacaata

SEQ ID NO: 269915 - DNA, 25 bp, Artificial
  Probe
aatactatcaagacccaactggaag

SEQ ID NO: 269916 - DNA, 25 bp, Artificial
  Probe
aggtatgcgccacctgtatgatcaa

SEQ ID NO: 269917 - DNA, 25 bp, Artificial
  Probe
agcatggaggccagagacatgactc

SEQ ID NO: 269918 - DNA, 25 bp, Artificial
  Probe
ataccttgaggatgggatccaaatc

SEQ ID NO: 269919 - DNA, 25 bp, Artificial
  Probe
ggatcgatattctaagcagttttct

SEQ ID NO: 269920 - DNA, 25 bp, Artificial
  Probe
catggcatcgcgtctgagcacaggt

SEQ ID NO: 269921 - DNA, 25 bp, Artificial
  Probe
ttatgtattttgagcgcacctgtat

SEQ ID NO: 269922 - DNA, 25 bp, Artificial
  Probe
ccactcatggcatcgcgtctgagca

SEQ ID NO: 269923 - DNA, 25 bp, Artificial
  Probe
atttctcgtggctgaagatcaactt

SEQ ID NO: 269924 - DNA, 25 bp, Artificial
  Probe
gcagttttctcatcattttcgactg

SEQ ID NO: 269925 - DNA, 25 bp, Artificial
  Probe
accactcatggcatcgcgtctgagc

SEQ ID NO: 269926 - DNA, 25 bp, Artificial
  Probe
tcttctacacggtcagattcagttc

SEQ ID NO: 269927 - DNA, 25 bp, Artificial
  Probe
aaagtattccataataccttgagga

SEQ ID NO: 269928 - DNA, 25 bp, Artificial
  Probe
cacgaagtgggctgtgggctttacc

SEQ ID NO: 269929 - DNA, 25 bp, Artificial
  Probe
aggccagagacatgactcttctaca

SEQ ID NO: 269930 - DNA, 25 bp, Artificial
  Probe
tctcgtggctgaagatcaactttat

SEQ ID NO: 269931 - DNA, 25 bp, Artificial
  Probe
cgcaaggtccgcttgtatttctcgt

SEQ ID NO: 269932 - DNA, 25 bp, Artificial
  Probe
tattttgagcgcacctgtattttgt

SEQ ID NO: 269933 - DNA, 25 bp, Artificial
  Probe
aagcttggtgagagtccttgcaaag

SEQ ID NO: 269934 - DNA, 25 bp, Artificial
  Probe
tgcaccccatcacgaagtgggctgt

SEQ ID NO: 269935 - DNA, 25 bp, Artificial
  Probe
atgggatccaaatctaaacgcaagg

SEQ ID NO: 269936 - DNA, 25 bp, Artificial
  Probe
gcgccacctgtatgatcaatgctaa

SEQ ID NO: 269937 - DNA, 25 bp, Artificial
  Probe
gcacctgtattttgtctgcacccca

SEQ ID NO: 269938 - DNA, 25 bp, Artificial
  Probe
tgtattttgtctgcaccccatcacg

SEQ ID NO: 269939 - DNA, 25 bp, Artificial
  Probe
ctgagtgctcccagctgccaaaatg

SEQ ID NO: 269940 - DNA, 25 bp, Artificial
  Probe
tcgcactaggtatgcgccacctgta

SEQ ID NO: 269941 - DNA, 25 bp, Artificial
  Probe
ttaccgacagggttgaacatacaat

SEQ ID NO: 269942 - DNA, 25 bp, Artificial
  Probe
ctaaacgcaaggtccgcttgtattt

SEQ ID NO: 269943 - DNA, 25 bp, Artificial
  Probe
tgagcacaggtgttagattgcacag

SEQ ID NO: 269944 - DNA, 25 bp, Artificial
  Probe
aaatctaaacgcaaggtccgcttgt

SEQ ID NO: 269945 - DNA, 25 bp, Artificial
  Probe
ttatggtagcatggaggccagagac

SEQ ID NO: 269946 - DNA, 25 bp, Artificial
  Probe
gatcaactttatgtattttgagcgc

SEQ ID NO: 269947 - DNA, 25 bp, Artificial
  Probe
ggtcagattcagttcactaaataat

SEQ ID NO: 269948 - DNA, 25 bp, Artificial
  Probe
atggtagcatggaggccagagacat

SEQ ID NO: 269949 - DNA, 25 bp, Artificial
  Probe
tgactcttctacacggtcagattca

SEQ ID NO: 269950 - DNA, 25 bp, Artificial
  Probe
catggaggccagagacatgactctt

SEQ ID NO: 269951 - DNA, 25 bp, Artificial
  Probe
taggtatgcgccacctgtatgatca

SEQ ID NO: 269952 - DNA, 25 bp, Artificial
  Probe
cccatcacgaagtgggctgtgggct

SEQ ID NO: 269953 - DNA, 25 bp, Artificial
  Probe
gtattttgtctgcaccccatcacga

SEQ ID NO: 269954 - DNA, 25 bp, Artificial
  Probe
gaatgcttgtcagtacataccatca

SEQ ID NO: 269955 - DNA, 25 bp, Artificial
  Probe
gtgttagattgcacagtgcttctga

SEQ ID NO: 269956 - DNA, 25 bp, Artificial
  Probe
actggaagcttggtgagagtccttg

SEQ ID NO: 269957 - DNA, 25 bp, Artificial
  Probe
cgaagtgggctgtgggctttaccac

SEQ ID NO: 269958 - DNA, 25 bp, Artificial
  Probe
tgggctgtgggctttaccactcatg

SEQ ID NO: 269959 - DNA, 25 bp, Artificial
  Probe
ggaaaagcatttttctcaagcagaa

SEQ ID NO: 269960 - DNA, 25 bp, Artificial
  Probe
agaaagccttcatcacataccgaac

SEQ ID NO: 269961 - DNA, 25 bp, Artificial
  Probe
agccctttgaatgtgacaggtgtga

SEQ ID NO: 269962 - DNA, 25 bp, Artificial
  Probe
tcataaaagtgtacaccctggggag

SEQ ID NO: 269963 - DNA, 25 bp, Artificial
  Probe
ctcaagccttaaagtgcataaaaga

SEQ ID NO: 269964 - DNA, 25 bp, Artificial
  Probe
ctcctttctcaacacaaaagagttc

SEQ ID NO: 269965 - DNA, 25 bp, Artificial
  Probe
gcaagacgccctatacatgtgatga

SEQ ID NO: 269966 - DNA, 25 bp, Artificial
  Probe
ctctcataagccataagagagtcca

SEQ ID NO: 269967 - DNA, 25 bp, Artificial
  Probe
gcagaactctcataagccataagag

SEQ ID NO: 269968 - DNA, 25 bp, Artificial
  Probe
cataaaagtacacaccctggcaaga

SEQ ID NO: 269969 - DNA, 25 bp, Artificial
  Probe
gccctatacatgtgatgaatgcgga

SEQ ID NO: 269970 - DNA, 25 bp, Artificial
  Probe
cataaaagtgtacaccctggggaga

SEQ ID NO: 269971 - DNA, 25 bp, Artificial
  Probe
agcagaactctcataagccataaga

SEQ ID NO: 269972 - DNA, 25 bp, Artificial
  Probe
acgccctatacatgtgatgaatgcg

SEQ ID NO: 269973 - DNA, 25 bp, Artificial
  Probe
tctcataagccataagagagtccat

SEQ ID NO: 269974 - DNA, 25 bp, Artificial
  Probe
cagaaacaactcaagccttaaagtg

SEQ ID NO: 269975 - DNA, 25 bp, Artificial
  Probe
agaactctcataagccataagagag

SEQ ID NO: 269976 - DNA, 25 bp, Artificial
  Probe
caagacgccctatacatgtgatgaa

SEQ ID NO: 269977 - DNA, 25 bp, Artificial
  Probe
gacgccctatacatgtgatgaatgc

SEQ ID NO: 269978 - DNA, 25 bp, Artificial
  Probe
gtgagaaagccttcatcacataccg

SEQ ID NO: 269979 - DNA, 25 bp, Artificial
  Probe
aactcaagccttaaagtgcataaaa

SEQ ID NO: 269980 - DNA, 25 bp, Artificial
  Probe
agacgccctatacatgtgatgaatg

SEQ ID NO: 269981 - DNA, 25 bp, Artificial
  Probe
caagccttaaagtgcataaaagaat

SEQ ID NO: 269982 - DNA, 25 bp, Artificial
  Probe
ccataaaagtacacaccctggcaag

SEQ ID NO: 269983 - DNA, 25 bp, Artificial
  Probe
tgagaaagccttcatcacataccga

SEQ ID NO: 269984 - DNA, 25 bp, Artificial
  Probe
gagaaagccttcatcacataccgaa

SEQ ID NO: 269985 - DNA, 25 bp, Artificial
  Probe
aggtcttcagaaacaactcaagcct

SEQ ID NO: 269986 - DNA, 25 bp, Artificial
  Probe
aaggtcttcagaaacaactcaagcc

SEQ ID NO: 269987 - DNA, 25 bp, Artificial
  Probe
cgccctatacatgtgatgaatgcgg

SEQ ID NO: 269988 - DNA, 25 bp, Artificial
  Probe
tcataagccataagagagtccatct

SEQ ID NO: 269989 - DNA, 25 bp, Artificial
  Probe
taaaagtgtacaccctggggagaag

SEQ ID NO: 269990 - DNA, 25 bp, Artificial
  Probe
ataagccataagagagtccatcttg

SEQ ID NO: 269991 - DNA, 25 bp, Artificial
  Probe
ccctttgaatgtgacaggtgtgaga

SEQ ID NO: 269992 - DNA, 25 bp, Artificial
  Probe
cagaactctcataagccataagaga

SEQ ID NO: 269993 - DNA, 25 bp, Artificial
  Probe
cctttgaatgtgacaggtgtgagaa

SEQ ID NO: 269994 - DNA, 25 bp, Artificial
  Probe
gccctttgaatgtgacaggtgtgag

SEQ ID NO: 269995 - DNA, 25 bp, Artificial
  Probe
actcaagccttaaagtgcataaaag

SEQ ID NO: 269996 - DNA, 25 bp, Artificial
  Probe
ggtcttcagaaacaactcaagcctt

SEQ ID NO: 269997 - DNA, 25 bp, Artificial
  Probe
gtggaaaagcctacatctcacactc

SEQ ID NO: 269998 - DNA, 25 bp, Artificial
  Probe
atcataaaagtgtacaccctgggga

SEQ ID NO: 269999 - DNA, 25 bp, Artificial
  Probe
ggcaagacgccctatacatgtgatg

SEQ ID NO: 270000 - DNA, 25 bp, Artificial
  Probe
aagcagaactctcataagccataag

SEQ ID NO: 270001 - DNA, 25 bp, Artificial
  Probe
tggaaaagcctacatctcacactca

SEQ ID NO: 270002 - DNA, 25 bp, Artificial
  Probe
aagacgccctatacatgtgatgaat

SEQ ID NO: 270003 - DNA, 25 bp, Artificial
  Probe
ctcataagccataagagagtccatc

SEQ ID NO: 270004 - DNA, 25 bp, Artificial
  Probe
tcaagccttaaagtgcataaaagaa

SEQ ID NO: 270005 - DNA, 25 bp, Artificial
  Probe
taggaggacttccacttccgtctca

SEQ ID NO: 270006 - DNA, 25 bp, Artificial
  Probe
tctttaggaggacttccacttccgt

SEQ ID NO: 270007 - DNA, 25 bp, Artificial
  Probe
caaagcagagtcgtctccgttcagg

SEQ ID NO: 270008 - DNA, 25 bp, Artificial
  Probe
agcaaagcagagtcgtctccgttca

SEQ ID NO: 270009 - DNA, 25 bp, Artificial
  Probe
aggaggacttccacttccgtctcaa

SEQ ID NO: 270010 - DNA, 25 bp, Artificial
  Probe
tgaaatcctgacttcagaagcaggg

SEQ ID NO: 270011 - DNA, 25 bp, Artificial
  Probe
cgtctccgttcaggtgcaaacgggg

SEQ ID NO: 270012 - DNA, 25 bp, Artificial
  Probe
cagagtcgtctccgttcaggtgcaa

SEQ ID NO: 270013 - DNA, 25 bp, Artificial
  Probe
aaatcctgacttcagaagcagggct

SEQ ID NO: 270014 - DNA, 25 bp, Artificial
  Probe
agcagagtcgtctccgttcaggtgc

SEQ ID NO: 270015 - DNA, 25 bp, Artificial
  Probe
ggacttccacttccgtctcaacatc

SEQ ID NO: 270016 - DNA, 25 bp, Artificial
  Probe
tttgaaatcctgacttcagaagcag

SEQ ID NO: 270017 - DNA, 25 bp, Artificial
  Probe
tcgtctccgttcaggtgcaaacggg

SEQ ID NO: 270018 - DNA, 25 bp, Artificial
  Probe
gcagagtcgtctccgttcaggtgca

SEQ ID NO: 270019 - DNA, 25 bp, Artificial
  Probe
tttaggaggacttccacttccgtct

SEQ ID NO: 270020 - DNA, 25 bp, Artificial
  Probe
gagtcgtctccgttcaggtgcaaac

SEQ ID NO: 270021 - DNA, 25 bp, Artificial
  Probe
ttaggaggacttccacttccgtctc

SEQ ID NO: 270022 - DNA, 25 bp, Artificial
  Probe
tctccgttcaggtgcaaacggggtc

SEQ ID NO: 270023 - DNA, 25 bp, Artificial
  Probe
agagtcgtctccgttcaggtgcaaa

SEQ ID NO: 270024 - DNA, 25 bp, Artificial
  Probe
gaaatcctgacttcagaagcagggc

SEQ ID NO: 270025 - DNA, 25 bp, Artificial
  Probe
agtttgaaatcctgacttcagaagc

SEQ ID NO: 270026 - DNA, 25 bp, Artificial
  Probe
ggaggacttccacttccgtctcaac

SEQ ID NO: 270027 - DNA, 25 bp, Artificial
  Probe
aagcagagtcgtctccgttcaggtg

SEQ ID NO: 270028 - DNA, 25 bp, Artificial
  Probe
gtttgaaatcctgacttcagaagca

SEQ ID NO: 270029 - DNA, 25 bp, Artificial
  Probe
gtctccgttcaggtgcaaacggggt

SEQ ID NO: 270030 - DNA, 25 bp, Artificial
  Probe
cagcaaagcagagtcgtctccgttc

SEQ ID NO: 270031 - DNA, 25 bp, Artificial
  Probe
ctctttaggaggacttccacttccg

SEQ ID NO: 270032 - DNA, 25 bp, Artificial
  Probe
acttccacttccgtctcaacatccc

SEQ ID NO: 270033 - DNA, 25 bp, Artificial
  Probe
gtcgtctccgttcaggtgcaaacgg

SEQ ID NO: 270034 - DNA, 25 bp, Artificial
  Probe
atcctgacttcagaagcagggctca

SEQ ID NO: 270035 - DNA, 25 bp, Artificial
  Probe
agtcgtctccgttcaggtgcaaacg

SEQ ID NO: 270036 - DNA, 25 bp, Artificial
  Probe
ttttttgttacgtccaatcctcgtg

SEQ ID NO: 270037 - DNA, 25 bp, Artificial
  Probe
ttgaaatcctgacttcagaagcagg

SEQ ID NO: 270038 - DNA, 25 bp, Artificial
  Probe
aaagcagagtcgtctccgttcaggt

SEQ ID NO: 270039 - DNA, 25 bp, Artificial
  Probe
aatcctgacttcagaagcagggctc

SEQ ID NO: 270040 - DNA, 25 bp, Artificial
  Probe
gcaaagcagagtcgtctccgttcag

SEQ ID NO: 270041 - DNA, 25 bp, Artificial
  Probe
gaggacttccacttccgtctcaaca

SEQ ID NO: 270042 - DNA, 25 bp, Artificial
  Probe
ttggctgatcttatcgcccgaggtg

SEQ ID NO: 270043 - DNA, 25 bp, Artificial
  Probe
acattagactggttaacttctgctg

SEQ ID NO: 270044 - DNA, 25 bp, Artificial
  Probe
aacttctgctgctgaatgctgagct

SEQ ID NO: 270045 - DNA, 25 bp, Artificial
  Probe
tcgtgatcagtaatcacattagact

SEQ ID NO: 270046 - DNA, 25 bp, Artificial
  Probe
tgatcagtaatcacattagactggt

SEQ ID NO: 270047 - DNA, 25 bp, Artificial
  Probe
gctgctgaatgctgagctcaaactt

SEQ ID NO: 270048 - DNA, 25 bp, Artificial
  Probe
gggcctctgtgcttcggaatatcat

SEQ ID NO: 270049 - DNA, 25 bp, Artificial
  Probe
gaatgctgagctcaaacttggctga

SEQ ID NO: 270050 - DNA, 25 bp, Artificial
  Probe
gctgagctcaaacttggctgatctt

SEQ ID NO: 270051 - DNA, 25 bp, Artificial
  Probe
ctgtgcttcggaatatcattttccc

SEQ ID NO: 270052 - DNA, 25 bp, Artificial
  Probe
tctgctgctgaatgctgagctcaaa

SEQ ID NO: 270053 - DNA, 25 bp, Artificial
  Probe
actggttaacttctgctgctgaatg

SEQ ID NO: 270054 - DNA, 25 bp, Artificial
  Probe
tcacattagactggttaacttctgc

SEQ ID NO: 270055 - DNA, 25 bp, Artificial
  Probe
agaatattctcgtgatcagtaatca

SEQ ID NO: 270056 - DNA, 25 bp, Artificial
  Probe
tgctgctgaatgctgagctcaaact

SEQ ID NO: 270057 - DNA, 25 bp, Artificial
  Probe
tgctgagctcaaacttggctgatct

SEQ ID NO: 270058 - DNA, 25 bp, Artificial
  Probe
cattctcgatcatgaatgcaactag

SEQ ID NO: 270059 - DNA, 25 bp, Artificial
  Probe
taccccgagaccaaggaagcgacct

SEQ ID NO: 270060 - DNA, 25 bp, Artificial
  Probe
tgagctcaaacttggctgatcttat

SEQ ID NO: 270061 - DNA, 25 bp, Artificial
  Probe
attctcgatcatgaatgcaactaga

SEQ ID NO: 270062 - DNA, 25 bp, Artificial
  Probe
aatgctgagctcaaacttggctgat

SEQ ID NO: 270063 - DNA, 25 bp, Artificial
  Probe
acttggctgatcttatcgcccgagg

SEQ ID NO: 270064 - DNA, 25 bp, Artificial
  Probe
gtaatcacattagactggttaactt

SEQ ID NO: 270065 - DNA, 25 bp, Artificial
  Probe
gaatattctcgtgatcagtaatcac

SEQ ID NO: 270066 - DNA, 25 bp, Artificial
  Probe
ggcctcgggcctctgtgcttcggaa

SEQ ID NO: 270067 - DNA, 25 bp, Artificial
  Probe
tggctgatcttatcgcccgaggtgg

SEQ ID NO: 270068 - DNA, 25 bp, Artificial
  Probe
agagcaaactctgtattcattctcg

SEQ ID NO: 270069 - DNA, 25 bp, Artificial
  Probe
cgagaccaaggaagcgacctcccgg

SEQ ID NO: 270070 - DNA, 25 bp, Artificial
  Probe
aaacttggctgatcttatcgcccga

SEQ ID NO: 270071 - DNA, 25 bp, Artificial
  Probe
ttctcgtgatcagtaatcacattag

SEQ ID NO: 270072 - DNA, 25 bp, Artificial
  Probe
tctgtgcttcggaatatcattttcc

SEQ ID NO: 270073 - DNA, 25 bp, Artificial
  Probe
tgtattcattctcgatcatgaatgc

SEQ ID NO: 270074 - DNA, 25 bp, Artificial
  Probe
cgtgatcagtaatcacattagactg

SEQ ID NO: 270075 - DNA, 25 bp, Artificial
  Probe
tctcgatcatgaatgcaactagaat

SEQ ID NO: 270076 - DNA, 25 bp, Artificial
  Probe
ctcaaacttggctgatcttatcgcc

SEQ ID NO: 270077 - DNA, 25 bp, Artificial
  Probe
gagcaaactctgtattcattctcga

SEQ ID NO: 270078 - DNA, 25 bp, Artificial
  Probe
tcgatcatgaatgcaactagaatat

SEQ ID NO: 270079 - DNA, 25 bp, Artificial
  Probe
cgatcatgaatgcaactagaatatt

SEQ ID NO: 270080 - DNA, 25 bp, Artificial
  Probe
atcagtaatcacattagactggtta

SEQ ID NO: 270081 - DNA, 25 bp, Artificial
  Probe
attagactggttaacttctgctgct

SEQ ID NO: 270082 - DNA, 25 bp, Artificial
  Probe
ttaacttctgctgctgaatgctgag

SEQ ID NO: 270083 - DNA, 25 bp, Artificial
  Probe
caactagaatattctcgtgatcagt

SEQ ID NO: 270084 - DNA, 25 bp, Artificial
  Probe
ggcctctgtgcttcggaatatcatt

SEQ ID NO: 270085 - DNA, 25 bp, Artificial
  Probe
taacttctgctgctgaatgctgagc

SEQ ID NO: 270086 - DNA, 25 bp, Artificial
  Probe
gcaactagaatattctcgtgatcag

SEQ ID NO: 270087 - DNA, 25 bp, Artificial
  Probe
atcacattagactggttaacttctg

SEQ ID NO: 270088 - DNA, 25 bp, Artificial
  Probe
gatggccgcgaacttcctagattgt

SEQ ID NO: 270089 - DNA, 25 bp, Artificial
  Probe
gaactctaaagtgaatcgctgagca

SEQ ID NO: 270090 - DNA, 25 bp, Artificial
  Probe
gccactgagcattattagaattatg

SEQ ID NO: 270091 - DNA, 25 bp, Artificial
  Probe
taacttagccgaaccttgatttttg

SEQ ID NO: 270092 - DNA, 25 bp, Artificial
  Probe
tatacctgatatagcaaatcctgga

SEQ ID NO: 270093 - DNA, 25 bp, Artificial
  Probe
ccagttctgatcttaagccactgag

SEQ ID NO: 270094 - DNA, 25 bp, Artificial
  Probe
aagccactgagcattattagaatta

SEQ ID NO: 270095 - DNA, 25 bp, Artificial
  Probe
ttctacaggtaaatacaggggctaa

SEQ ID NO: 270096 - DNA, 25 bp, Artificial
  Probe
tattctacaggtaaatacaggggct

SEQ ID NO: 270097 - DNA, 25 bp, Artificial
  Probe
ttaagccactgagcattattagaat

SEQ ID NO: 270098 - DNA, 25 bp, Artificial
  Probe
cagttctgatcttaagccactgagc

SEQ ID NO: 270099 - DNA, 25 bp, Artificial
  Probe
cttaagccactgagcattattagaa

SEQ ID NO: 270100 - DNA, 25 bp, Artificial
  Probe
agcaaatcctggaatgtaagcgtaa

SEQ ID NO: 270101 - DNA, 25 bp, Artificial
  Probe
gttatacctgatatagcaaatcctg

SEQ ID NO: 270102 - DNA, 25 bp, Artificial
  Probe
ccgcgaacttcctagattgttaaat

SEQ ID NO: 270103 - DNA, 25 bp, Artificial
  Probe
agccactgagcattattagaattat

SEQ ID NO: 270104 - DNA, 25 bp, Artificial
  Probe
ctggaactgctgatggccgcgaact

SEQ ID NO: 270105 - DNA, 25 bp, Artificial
  Probe
ggccgcgaacttcctagattgttaa

SEQ ID NO: 270106 - DNA, 25 bp, Artificial
  Probe
tggccgcgaacttcctagattgtta

SEQ ID NO: 270107 - DNA, 25 bp, Artificial
  Probe
tgatggccgcgaacttcctagattg

SEQ ID NO: 270108 - DNA, 25 bp, Artificial
  Probe
tagccgaaccttgatttttgtaact

SEQ ID NO: 270109 - DNA, 25 bp, Artificial
  Probe
gatcttaagccactgagcattatta

SEQ ID NO: 270110 - DNA, 25 bp, Artificial
  Probe
atagcaaatcctggaatgtaagcgt

SEQ ID NO: 270111 - DNA, 25 bp, Artificial
  Probe
atatagcaaatcctggaatgtaagc

SEQ ID NO: 270112 - DNA, 25 bp, Artificial
  Probe
tgtttataacttagccgaaccttga

SEQ ID NO: 270113 - DNA, 25 bp, Artificial
  Probe
cctgatatagcaaatcctggaatgt

SEQ ID NO: 270114 - DNA, 25 bp, Artificial
  Probe
atacctgatatagcaaatcctggaa

SEQ ID NO: 270115 - DNA, 25 bp, Artificial
  Probe
atgtttataacttagccgaaccttg

SEQ ID NO: 270116 - DNA, 25 bp, Artificial
  Probe
caaatcctggaatgtaagcgtaaat

SEQ ID NO: 270117 - DNA, 25 bp, Artificial
  Probe
atattctacaggtaaatacaggggc

SEQ ID NO: 270118 - DNA, 25 bp, Artificial
  Probe
acctgatatagcaaatcctggaatg

SEQ ID NO: 270119 - DNA, 25 bp, Artificial
  Probe
ctgatatagcaaatcctggaatgta

SEQ ID NO: 270120 - DNA, 25 bp, Artificial
  Probe
tggaactgctgatggccgcgaactt

SEQ ID NO: 270121 - DNA, 25 bp, Artificial
  Probe
gccgaaccttgatttttgtaactca

SEQ ID NO: 270122 - DNA, 25 bp, Artificial
  Probe
gccgcgaacttcctagattgttaaa

SEQ ID NO: 270123 - DNA, 25 bp, Artificial
  Probe
tatagcaaatcctggaatgtaagcg

SEQ ID NO: 270124 - DNA, 25 bp, Artificial
  Probe
gaaccttgatttttgtaactcaaag

SEQ ID NO: 270125 - DNA, 25 bp, Artificial
  Probe
tgatcttaagccactgagcattatt

SEQ ID NO: 270126 - DNA, 25 bp, Artificial
  Probe
atggccgcgaacttcctagattgtt

SEQ ID NO: 270127 - DNA, 25 bp, Artificial
  Probe
attctacaggtaaatacaggggcta

SEQ ID NO: 270128 - DNA, 25 bp, Artificial
  Probe
taagccactgagcattattagaatt

SEQ ID NO: 270129 - DNA, 25 bp, Artificial
  Probe
ttatacctgatatagcaaatcctgg

SEQ ID NO: 270130 - DNA, 25 bp, Artificial
  Probe
tagcaaatcctggaatgtaagcgta

SEQ ID NO: 270131 - DNA, 25 bp, Artificial
  Probe
gttctgatcttaagccactgagcat

SEQ ID NO: 270132 - DNA, 25 bp, Artificial
  Probe
atcttaagccactgagcattattag

SEQ ID NO: 270133 - DNA, 25 bp, Artificial
  Probe
ctgatggccgcgaacttcctagatt

SEQ ID NO: 270134 - DNA, 25 bp, Artificial
  Probe
tctgcttatcccattagtgtgaata

SEQ ID NO: 270135 - DNA, 25 bp, Artificial
  Probe
ataacaaaagtcatttgcctctgga

SEQ ID NO: 270136 - DNA, 25 bp, Artificial
  Probe
aatccaagaagttctgataacaagg

SEQ ID NO: 270137 - DNA, 25 bp, Artificial
  Probe
caaaggtctgcattcctttatctgt

SEQ ID NO: 270138 - DNA, 25 bp, Artificial
  Probe
ggtctgcattcctttatctgtaatt

SEQ ID NO: 270139 - DNA, 25 bp, Artificial
  Probe
attgtggatctctgccttatgttaa

SEQ ID NO: 270140 - DNA, 25 bp, Artificial
  Probe
ctgaatctgcttatcccattagtgt

SEQ ID NO: 270141 - DNA, 25 bp, Artificial
  Probe
ttattttgttgcataaatattaatg

SEQ ID NO: 270142 - DNA, 25 bp, Artificial
  Probe
tgaatctgcttatcccattagtgtg

SEQ ID NO: 270143 - DNA, 25 bp, Artificial
  Probe
gattgtggatctctgccttatgtta

SEQ ID NO: 270144 - DNA, 25 bp, Artificial
  Probe
taataatatcacagagaggatgcct

SEQ ID NO: 270145 - DNA, 25 bp, Artificial
  Probe
acaaggttttcataagcttgataac

SEQ ID NO: 270146 - DNA, 25 bp, Artificial
  Probe
tagtctcaaaatccaagaagttctg

SEQ ID NO: 270147 - DNA, 25 bp, Artificial
  Probe
gtttcaaaggtctgcattcctttat

SEQ ID NO: 270148 - DNA, 25 bp, Artificial
  Probe
tctgccttatgttaaataatttaaa

SEQ ID NO: 270149 - DNA, 25 bp, Artificial
  Probe
aggtctgcattcctttatctgtaat

SEQ ID NO: 270150 - DNA, 25 bp, Artificial
  Probe
tcaaaggtctgcattcctttatctg

SEQ ID NO: 270151 - DNA, 25 bp, Artificial
  Probe
aagtttcaaaggtctgcattccttt

SEQ ID NO: 270152 - DNA, 25 bp, Artificial
  Probe
atgattattggggtgtgctgccaca

SEQ ID NO: 270153 - DNA, 25 bp, Artificial
  Probe
aggttttcataagcttgataacaaa

SEQ ID NO: 270154 - DNA, 25 bp, Artificial
  Probe
actgaatctgcttatcccattagtg

SEQ ID NO: 270155 - DNA, 25 bp, Artificial
  Probe
ttgtggatctctgccttatgttaaa

SEQ ID NO: 270156 - DNA, 25 bp, Artificial
  Probe
aaaggtctgcattcctttatctgta

SEQ ID NO: 270157 - DNA, 25 bp, Artificial
  Probe
tttcaaaggtctgcattcctttatc

SEQ ID NO: 270158 - DNA, 25 bp, Artificial
  Probe
taacaaaagtcatttgcctctggat

SEQ ID NO: 270159 - DNA, 25 bp, Artificial
  Probe
gaaatgcttttatattctagttttt

SEQ ID NO: 270160 - DNA, 25 bp, Artificial
  Probe
aagattgtggatctctgccttatgt

SEQ ID NO: 270161 - DNA, 25 bp, Artificial
  Probe
taatctgacactgaatctgcttatc

SEQ ID NO: 270162 - DNA, 25 bp, Artificial
  Probe
aaggtctgcattcctttatctgtaa

SEQ ID NO: 270163 - DNA, 25 bp, Artificial
  Probe
agattgtggatctctgccttatgtt

SEQ ID NO: 270164 - DNA, 25 bp, Artificial
  Probe
agtttcaaaggtctgcattccttta

SEQ ID NO: 270165 - DNA, 25 bp, Artificial
  Probe
ataatatcacagagaggatgcctgt

SEQ ID NO: 270166 - DNA, 25 bp, Artificial
  Probe
acaagtttcaaaggtctgcattcct

SEQ ID NO: 270167 - DNA, 25 bp, Artificial
  Probe
gtctcaaaatccaagaagttctgat

SEQ ID NO: 270168 - DNA, 25 bp, Artificial
  Probe
ctttctaaaatctgaaaatttctca

SEQ ID NO: 270169 - DNA, 25 bp, Artificial
  Probe
ttggggtgtgctgccacaaactctt

SEQ ID NO: 270170 - DNA, 25 bp, Artificial
  Probe
aaagtcatttgcctctggatgtatt

SEQ ID NO: 270171 - DNA, 25 bp, Artificial
  Probe
gcttatcccattagtgtgaatattc

SEQ ID NO: 270172 - DNA, 25 bp, Artificial
  Probe
tggatctctgccttatgttaaataa

SEQ ID NO: 270173 - DNA, 25 bp, Artificial
  Probe
agtctcaaaatccaagaagttctga

SEQ ID NO: 270174 - DNA, 25 bp, Artificial
  Probe
tgcttatcccattagtgtgaatatt

SEQ ID NO: 270175 - DNA, 25 bp, Artificial
  Probe
ttgtttaaacaatcttttatgtctt

SEQ ID NO: 270176 - DNA, 25 bp, Artificial
  Probe
cttgtttaaacaatcttttatgtct

SEQ ID NO: 270177 - DNA, 25 bp, Artificial
  Probe
caagtttcaaaggtctgcattcctt

SEQ ID NO: 270178 - DNA, 25 bp, Artificial
  Probe
aaatccaagaagttctgataacaag

SEQ ID NO: 270179 - DNA, 25 bp, Artificial
  Probe
ctgcttatcccattagtgtgaatat

SEQ ID NO: 270180 - DNA, 25 bp, Artificial
  Probe
ataaccgtgagctgtgcttgtgggt

SEQ ID NO: 270181 - DNA, 25 bp, Artificial
  Probe
acagtaacggacaaccatctgcaca

SEQ ID NO: 270182 - DNA, 25 bp, Artificial
  Probe
gtttgataaccgtgagctgtgcttg

SEQ ID NO: 270183 - DNA, 25 bp, Artificial
  Probe
agccgacgagacaacaggacacagc

SEQ ID NO: 270184 - DNA, 25 bp, Artificial
  Probe
agaagagccgcctgcagccgacgag

SEQ ID NO: 270185 - DNA, 25 bp, Artificial
  Probe
tgataaccgtgagctgtgcttgtgg

SEQ ID NO: 270186 - DNA, 25 bp, Artificial
  Probe
cagaacactggcactgcttgcggtt

SEQ ID NO: 270187 - DNA, 25 bp, Artificial
  Probe
agctggcgatgaacgtcctaggtcg

SEQ ID NO: 270188 - DNA, 25 bp, Artificial
  Probe
aacagtaacggacaaccatctgcac

SEQ ID NO: 270189 - DNA, 25 bp, Artificial
  Probe
catgagctggcgatgaacgtcctag

SEQ ID NO: 270190 - DNA, 25 bp, Artificial
  Probe
tcgccactaacaacgcgcggagaag

SEQ ID NO: 270191 - DNA, 25 bp, Artificial
  Probe
agggataccggcttagcgtaagatt

SEQ ID NO: 270192 - DNA, 25 bp, Artificial
  Probe
cgcctgcagccgacgagacaacagg

SEQ ID NO: 270193 - DNA, 25 bp, Artificial
  Probe
cttagcgtaagattgactgacaccg

SEQ ID NO: 270194 - DNA, 25 bp, Artificial
  Probe
gagctgtgcttgtgggtagacccta

SEQ ID NO: 270195 - DNA, 25 bp, Artificial
  Probe
tgcagccgacgagacaacaggacac

SEQ ID NO: 270196 - DNA, 25 bp, Artificial
  Probe
tctgcacagacaaagagaagagccg

SEQ ID NO: 270197 - DNA, 25 bp, Artificial
  Probe
ggtagaccctacagaacgattcaga

SEQ ID NO: 270198 - DNA, 25 bp, Artificial
  Probe
acaacgcgcggagaagaaacagtaa

SEQ ID NO: 270199 - DNA, 25 bp, Artificial
  Probe
taggtcgatgcgtagtctaaagggc

SEQ ID NO: 270200 - DNA, 25 bp, Artificial
  Probe
taaccgtgagctgtgcttgtgggta

SEQ ID NO: 270201 - DNA, 25 bp, Artificial
  Probe
cactgcttgcggtttgataaccgtg

SEQ ID NO: 270202 - DNA, 25 bp, Artificial
  Probe
gcttgcggtttgataaccgtgagct

SEQ ID NO: 270203 - DNA, 25 bp, Artificial
  Probe
actgcttgcggtttgataaccgtga

SEQ ID NO: 270204 - DNA, 25 bp, Artificial
  Probe
tgagctgtgcttgtgggtagaccct

SEQ ID NO: 270205 - DNA, 25 bp, Artificial
  Probe
gtgggtagaccctacagaacgattc

SEQ ID NO: 270206 - DNA, 25 bp, Artificial
  Probe
aacactggcactgcttgcggtttga

SEQ ID NO: 270207 - DNA, 25 bp, Artificial
  Probe
ctgtctccagaacactggcactgct

SEQ ID NO: 270208 - DNA, 25 bp, Artificial
  Probe
gacgagacaacaggacacagccacc

SEQ ID NO: 270209 - DNA, 25 bp, Artificial
  Probe
tctccagaacactggcactgcttgc

SEQ ID NO: 270210 - DNA, 25 bp, Artificial
  Probe
ccggcttagcgtaagattgactgac

SEQ ID NO: 270211 - DNA, 25 bp, Artificial
  Probe
tgagctggcgatgaacgtcctaggt

SEQ ID NO: 270212 - DNA, 25 bp, Artificial
  Probe
gctcgccactaacaacgcgcggaga

SEQ ID NO: 270213 - DNA, 25 bp, Artificial
  Probe
cattccactgtctccagaacactgg

SEQ ID NO: 270214 - DNA, 25 bp, Artificial
  Probe
ggataccggcttagcgtaagattga

SEQ ID NO: 270215 - DNA, 25 bp, Artificial
  Probe
accggcttagcgtaagattgactga

SEQ ID NO: 270216 - DNA, 25 bp, Artificial
  Probe
tgtgcttgtgggtagaccctacaga

SEQ ID NO: 270217 - DNA, 25 bp, Artificial
  Probe
aagagccgcctgcagccgacgagac

SEQ ID NO: 270218 - DNA, 25 bp, Artificial
  Probe
atgaacgtcctaggtcgatgcgtag

SEQ ID NO: 270219 - DNA, 25 bp, Artificial
  Probe
gccgacgagacaacaggacacagcc

SEQ ID NO: 270220 - DNA, 25 bp, Artificial
  Probe
gtaacggacaaccatctgcacagac

SEQ ID NO: 270221 - DNA, 25 bp, Artificial
  Probe
tgcggtttgataaccgtgagctgtg

SEQ ID NO: 270222 - DNA, 25 bp, Artificial
  Probe
agagccgcctgcagccgacgagaca

SEQ ID NO: 270223 - DNA, 25 bp, Artificial
  Probe
aaccatctgcacagacaaagagaag

SEQ ID NO: 270224 - DNA, 25 bp, Artificial
  Probe
actggcactgcttgcggtttgataa

SEQ ID NO: 270225 - DNA, 25 bp, Artificial
  Probe
gtcctaggtcgatgcgtagtctaaa

SEQ ID NO: 270226 - DNA, 25 bp, Artificial
  Probe
atgctggcagacctctgggaaaaaa

SEQ ID NO: 270227 - DNA, 25 bp, Artificial
  Probe
ggatcatgaggcttaacctaaacgc

SEQ ID NO: 270228 - DNA, 25 bp, Artificial
  Probe
acactcgggcccagctgctggagct

SEQ ID NO: 270229 - DNA, 25 bp, Artificial
  Probe
gtggagctggcagtgatgctcaact

SEQ ID NO: 270230 - DNA, 25 bp, Artificial
  Probe
acacagctctacaaggacccgtgcg

SEQ ID NO: 270231 - DNA, 25 bp, Artificial
  Probe
gaggacccgtacagcctacactcgg

SEQ ID NO: 270232 - DNA, 25 bp, Artificial
  Probe
ataacagccaccaggcgagctggac

SEQ ID NO: 270233 - DNA, 25 bp, Artificial
  Probe
taagaggacccgtacagcctacact

SEQ ID NO: 270234 - DNA, 25 bp, Artificial
  Probe
ggatgaaatccaccaaagctcacgc

SEQ ID NO: 270235 - DNA, 25 bp, Artificial
  Probe
gaggcttaacctaaacgccacacac

SEQ ID NO: 270236 - DNA, 25 bp, Artificial
  Probe
tacgcggccacacagctctacaagg

SEQ ID NO: 270237 - DNA, 25 bp, Artificial
  Probe
ctccctttcccgtggatgaaatcca

SEQ ID NO: 270238 - DNA, 25 bp, Artificial
  Probe
gtgcctttgactggtcggccgagca

SEQ ID NO: 270239 - DNA, 25 bp, Artificial
  Probe
gagtccgtgagctgcccagcgccta

SEQ ID NO: 270240 - DNA, 25 bp, Artificial
  Probe
tggaacagggaagtcccccggacat

SEQ ID NO: 270241 - DNA, 25 bp, Artificial
  Probe
cactcgggcccagctgctggagctg

SEQ ID NO: 270242 - DNA, 25 bp, Artificial
  Probe
aggttacaaacttgagcggtcccat

SEQ ID NO: 270243 - DNA, 25 bp, Artificial
  Probe
tcacgcgtggaaaagccagtgggca

SEQ ID NO: 270244 - DNA, 25 bp, Artificial
  Probe
ggtccggtgccagagttcagtgcta

SEQ ID NO: 270245 - DNA, 25 bp, Artificial
  Probe
cagtttgcaggctcgctgggaacgc

SEQ ID NO: 270246 - DNA, 25 bp, Artificial
  Probe
cccgtgcgcattccagaggggtccg

SEQ ID NO: 270247 - DNA, 25 bp, Artificial
  Probe
tgcccagcgcctaaggcctggcttg

SEQ ID NO: 270248 - DNA, 25 bp, Artificial
  Probe
cctttcccgaatggaaccgagactg

SEQ ID NO: 270249 - DNA, 25 bp, Artificial
  Probe
aggagcagtactacgcggccacaca

SEQ ID NO: 270250 - DNA, 25 bp, Artificial
  Probe
ggccgactgccttccggccttagtg

SEQ ID NO: 270251 - DNA, 25 bp, Artificial
  Probe
ttcccgaatggaaccgagactgggg

SEQ ID NO: 270252 - DNA, 25 bp, Artificial
  Probe
tacaaggacccgtgcgcattccaga

SEQ ID NO: 270253 - DNA, 25 bp, Artificial
  Probe
agccggagcaggattgtgccgtaac

SEQ ID NO: 270254 - DNA, 25 bp, Artificial
  Probe
gcgtgcctgtacatgggccgccagc

SEQ ID NO: 270255 - DNA, 25 bp, Artificial
  Probe
agagaatcaggctcccaactgagga

SEQ ID NO: 270256 - DNA, 25 bp, Artificial
  Probe
cagcagaaccggaggagaataagag

SEQ ID NO: 270257 - DNA, 25 bp, Artificial
  Probe
cctttcccgtggatgaaatccacca

SEQ ID NO: 270258 - DNA, 25 bp, Artificial
  Probe
aggtgcatacgcagcagaaccggag

SEQ ID NO: 270259 - DNA, 25 bp, Artificial
  Probe
actgcgaccgcaggaaccccggtga

SEQ ID NO: 270260 - DNA, 25 bp, Artificial
  Probe
cttgactgagagacacatcaaaatc

SEQ ID NO: 270261 - DNA, 25 bp, Artificial
  Probe
cccaactgaggacaatgaaaaggtt

SEQ ID NO: 270262 - DNA, 25 bp, Artificial
  Probe
ccagagttcagtgctaatccccctg

SEQ ID NO: 270263 - DNA, 25 bp, Artificial
  Probe
ccaccatgaatagtgaggagcagta

SEQ ID NO: 270264 - DNA, 25 bp, Artificial
  Probe
caccccagtttgcaggctcgctggg

SEQ ID NO: 270265 - DNA, 25 bp, Artificial
  Probe
aggattgtgccgtaacctcgggcga

SEQ ID NO: 270266 - DNA, 25 bp, Artificial
  Probe
aagacccgagcttctgaaaactttg

SEQ ID NO: 270267 - DNA, 25 bp, Artificial
  Probe
cgaagtgccggctgccaccatgaat

SEQ ID NO: 270268 - DNA, 25 bp, Artificial
  Probe
aaccccggtgaggaccgcaggctga

SEQ ID NO: 270269 - DNA, 25 bp, Artificial
  Probe
cctgggaccaatttagagaatcagg

SEQ ID NO: 270270 - DNA, 25 bp, Artificial
  Probe
cctaaacgccacacacaaggagaac

SEQ ID NO: 270271 - DNA, 25 bp, Artificial
  Probe
aaggcctggcttgtagctccctacc

SEQ ID NO: 270272 - DNA, 25 bp, Artificial
  Probe
agtgccttcaaaaatacagagatct

SEQ ID NO: 270273 - DNA, 25 bp, Artificial
  Probe
agagatctccttcaagttgggccag

SEQ ID NO: 270274 - DNA, 25 bp, Artificial
  Probe
aggataactgagctggcgcgcgcac

SEQ ID NO: 270275 - DNA, 25 bp, Artificial
  Probe
ctgacaacagaaaatccaagagcat

SEQ ID NO: 270276 - DNA, 25 bp, Artificial
  Probe
cacaacacaaacaccacacaggagg

SEQ ID NO: 270277 - DNA, 25 bp, Artificial
  Probe
tgacgctggagagaggctccttgaa

SEQ ID NO: 270278 - DNA, 25 bp, Artificial
  Probe
tggcatgttatccttcgtatcgata

SEQ ID NO: 270279 - DNA, 25 bp, Artificial
  Probe
agctgacaacagaaaatccaagagc

SEQ ID NO: 270280 - DNA, 25 bp, Artificial
  Probe
gtgatttcgacatttccgtttcatc

SEQ ID NO: 270281 - DNA, 25 bp, Artificial
  Probe
gttcaccgcagctggtggtttggtt

SEQ ID NO: 270282 - DNA, 25 bp, Artificial
  Probe
catcgtgacgctggagagaggctcc

SEQ ID NO: 270283 - DNA, 25 bp, Artificial
  Probe
tccaagagcatcgtgacgctggaga

SEQ ID NO: 270284 - DNA, 25 bp, Artificial
  Probe
aagactccattaaatcacgtgcgag

SEQ ID NO: 270285 - DNA, 25 bp, Artificial
  Probe
ctggtggtttggtttcttctggcct

SEQ ID NO: 270286 - DNA, 25 bp, Artificial
  Probe
gtgccttcaaaaatacagagatctc

SEQ ID NO: 270287 - DNA, 25 bp, Artificial
  Probe
aaatcacgtgcgagtgaagctaaaa

SEQ ID NO: 270288 - DNA, 25 bp, Artificial
  Probe
gacaacagaaaatccaagagcatcg

SEQ ID NO: 270289 - DNA, 25 bp, Artificial
  Probe
tcatgtcttggcatgttatccttcg

SEQ ID NO: 270290 - DNA, 25 bp, Artificial
  Probe
tcgtgacgctggagagaggctcctt

SEQ ID NO: 270291 - DNA, 25 bp, Artificial
  Probe
ggccttgccatatgttttatagcaa

SEQ ID NO: 270292 - DNA, 25 bp, Artificial
  Probe
agaggctccttgaagcaagtgcaga

SEQ ID NO: 270293 - DNA, 25 bp, Artificial
  Probe
ggctccttgaagcaagtgcagaagt

SEQ ID NO: 270294 - DNA, 25 bp, Artificial
  Probe
aaatccaagagcatcgtgacgctgg

SEQ ID NO: 270295 - DNA, 25 bp, Artificial
  Probe
gacatttccgtttcatcatgtcttg

SEQ ID NO: 270296 - DNA, 25 bp, Artificial
  Probe
tctggccttgccatatgttttatag

SEQ ID NO: 270297 - DNA, 25 bp, Artificial
  Probe
cttgccatatgttttatagcaaagg

SEQ ID NO: 270298 - DNA, 25 bp, Artificial
  Probe
gctgacaacagaaaatccaagagca

SEQ ID NO: 270299 - DNA, 25 bp, Artificial
  Probe
ttcatcatgtcttggcatgttatcc

SEQ ID NO: 270300 - DNA, 25 bp, Artificial
  Probe
gagactatatcaccattagaactga

SEQ ID NO: 270301 - DNA, 25 bp, Artificial
  Probe
ccttcgtatcgataagcaaagactc

SEQ ID NO: 270302 - DNA, 25 bp, Artificial
  Probe
cagaaaatccaagagcatcgtgacg

SEQ ID NO: 270303 - DNA, 25 bp, Artificial
  Probe
aatgtgatttcgacatttccgtttc

SEQ ID NO: 270304 - DNA, 25 bp, Artificial
  Probe
cattaaatcacgtgcgagtgaagct

SEQ ID NO: 270305 - DNA, 25 bp, Artificial
  Probe
tccgtttcatcatgtcttggcatgt

SEQ ID NO: 270306 - DNA, 25 bp, Artificial
  Probe
tgatgaaactacagctgacaacaga

SEQ ID NO: 270307 - DNA, 25 bp, Artificial
  Probe
tccattaaatcacgtgcgagtgaag

SEQ ID NO: 270308 - DNA, 25 bp, Artificial
  Probe
tttggtttcttctggccttgccata

SEQ ID NO: 270309 - DNA, 25 bp, Artificial
  Probe
aacagaaaatccaagagcatcgtga

SEQ ID NO: 270310 - DNA, 25 bp, Artificial
  Probe
agcaaagactccattaaatcacgtg

SEQ ID NO: 270311 - DNA, 25 bp, Artificial
  Probe
ggtggtttggtttcttctggccttg

SEQ ID NO: 270312 - DNA, 25 bp, Artificial
  Probe
caaagactccattaaatcacgtgcg

SEQ ID NO: 270313 - DNA, 25 bp, Artificial
  Probe
atcacgtgcgagtgaagctaaaaaa

SEQ ID NO: 270314 - DNA, 25 bp, Artificial
  Probe
gatgaaactacagctgacaacagaa

SEQ ID NO: 270315 - DNA, 25 bp, Artificial
  Probe
cttcgtatcgataagcaaagactcc

SEQ ID NO: 270316 - DNA, 25 bp, Artificial
  Probe
tggagagaggctccttgaagcaagt

SEQ ID NO: 270317 - DNA, 25 bp, Artificial
  Probe
gagagaggctccttgaagcaagtgc

SEQ ID NO: 270318 - DNA, 25 bp, Artificial
  Probe
cagatggctacatatacatagctga

SEQ ID NO: 270319 - DNA, 25 bp, Artificial
  Probe
tgctcagtccagtaaatccatggac

SEQ ID NO: 270320 - DNA, 25 bp, Artificial
  Probe
tttccactgtagctcttcgccttcg

SEQ ID NO: 270321 - DNA, 25 bp, Artificial
  Probe
atcccattgccaaaacagttagttg

SEQ ID NO: 270322 - DNA, 25 bp, Artificial
  Probe
ttccactgtagctcttcgccttcgt

SEQ ID NO: 270323 - DNA, 25 bp, Artificial
  Probe
tgccttgaggcaaaaccactcatcc

SEQ ID NO: 270324 - DNA, 25 bp, Artificial
  Probe
atttctgcctttatatgattggctg

SEQ ID NO: 270325 - DNA, 25 bp, Artificial
  Probe
tgaggcaaaaccactcatcccattg

SEQ ID NO: 270326 - DNA, 25 bp, Artificial
  Probe
gtgctgtgtcattccaaataaatct

SEQ ID NO: 270327 - DNA, 25 bp, Artificial
  Probe
cgctgctgcccctttggagagagca

SEQ ID NO: 270328 - DNA, 25 bp, Artificial
  Probe
tcttcgccttcgtcattgatacacg

SEQ ID NO: 270329 - DNA, 25 bp, Artificial
  Probe
cgtcattgatacacgcattgctctt

SEQ ID NO: 270330 - DNA, 25 bp, Artificial
  Probe
ttgatacacgcattgctcttattcg

SEQ ID NO: 270331 - DNA, 25 bp, Artificial
  Probe
ttgccaaaacagttagttgacagtg

SEQ ID NO: 270332 - DNA, 25 bp, Artificial
  Probe
acagatcattctaaaatgaacgagg

SEQ ID NO: 270333 - DNA, 25 bp, Artificial
  Probe
cagctgcagttttgccttgaggcaa

SEQ ID NO: 270334 - DNA, 25 bp, Artificial
  Probe
tgtgtcattccaaataaatctttgg

SEQ ID NO: 270335 - DNA, 25 bp, Artificial
  Probe
agcaactatgcagtcatcatttctg

SEQ ID NO: 270336 - DNA, 25 bp, Artificial
  Probe
agctagttcccatgcctgctggacc

SEQ ID NO: 270337 - DNA, 25 bp, Artificial
  Probe
ttgccttgaggcaaaaccactcatc

SEQ ID NO: 270338 - DNA, 25 bp, Artificial
  Probe
ttgtgttctcagtgctgtgtcattc

SEQ ID NO: 270339 - DNA, 25 bp, Artificial
  Probe
gaggcaaaaccactcatcccattgc

SEQ ID NO: 270340 - DNA, 25 bp, Artificial
  Probe
tatgcagatggctacatatacatag

SEQ ID NO: 270341 - DNA, 25 bp, Artificial
  Probe
gtatgctgtaccacaaaccatctgt

SEQ ID NO: 270342 - DNA, 25 bp, Artificial
  Probe
tgtatgctgtaccacaaaccatctg

SEQ ID NO: 270343 - DNA, 25 bp, Artificial
  Probe
cagtgtctacgctgctgcccctttg

SEQ ID NO: 270344 - DNA, 25 bp, Artificial
  Probe
agatggctacatatacatagctgat

SEQ ID NO: 270345 - DNA, 25 bp, Artificial
  Probe
gtgttctcagtgctgtgtcattcca

SEQ ID NO: 270346 - DNA, 25 bp, Artificial
  Probe
ccacaaaccatctgtaacagttgtg

SEQ ID NO: 270347 - DNA, 25 bp, Artificial
  Probe
cctatgtgtatgcagatggctacat

SEQ ID NO: 270348 - DNA, 25 bp, Artificial
  Probe
agttcccatgcctgctggacctatg

SEQ ID NO: 270349 - DNA, 25 bp, Artificial
  Probe
tgtctacgctgctgcccctttggag

SEQ ID NO: 270350 - DNA, 25 bp, Artificial
  Probe
cacagatcattctaaaatgaacgag

SEQ ID NO: 270351 - DNA, 25 bp, Artificial
  Probe
ggctacatatacatagctgattcct

SEQ ID NO: 270352 - DNA, 25 bp, Artificial
  Probe
cagatacagtgtctacgctgctgcc

SEQ ID NO: 270353 - DNA, 25 bp, Artificial
  Probe
atgcctgctggacctatgtgtatgc

SEQ ID NO: 270354 - DNA, 25 bp, Artificial
  Probe
tagctcttcgccttcgtcattgata

SEQ ID NO: 270355 - DNA, 25 bp, Artificial
  Probe
cccatgcctgctggacctatgtgta

SEQ ID NO: 270356 - DNA, 25 bp, Artificial
  Probe
gatacagtgtctacgctgctgcccc

SEQ ID NO: 270357 - DNA, 25 bp, Artificial
  Probe
aagctagttcccatgcctgctggac

SEQ ID NO: 270358 - DNA, 25 bp, Artificial
  Probe
atcatttctgcctttatatgattgg

SEQ ID NO: 270359 - DNA, 25 bp, Artificial
  Probe
cactgtagctcttcgccttcgtcat

SEQ ID NO: 270360 - DNA, 25 bp, Artificial
  Probe
gcaactatgcagtcatcatttctgc

SEQ ID NO: 270361 - DNA, 25 bp, Artificial
  Probe
cagttgtgttctcagtgctgtgtca

SEQ ID NO: 270362 - DNA, 25 bp, Artificial
  Probe
catctatacggacacacgagtcgca

SEQ ID NO: 270363 - DNA, 25 bp, Artificial
  Probe
gaccagcaactatgcagtcatcatt

SEQ ID NO: 270364 - DNA, 25 bp, Artificial
  Probe
agagccagtgtctaaagcctaattt

SEQ ID NO: 270365 - DNA, 25 bp, Artificial
  Probe
gaagagccagtgtctaaagcctaat

SEQ ID NO: 270366 - DNA, 25 bp, Artificial
  Probe
ttccagcagtggaggtgctgttaga

SEQ ID NO: 270367 - DNA, 25 bp, Artificial
  Probe
ttttttccagcagtggaggtgctgt

SEQ ID NO: 270368 - DNA, 25 bp, Artificial
  Probe
gatagcttagtgtttcgttttcctg

SEQ ID NO: 270369 - DNA, 25 bp, Artificial
  Probe
tagagtccagtgttctagaagagcc

SEQ ID NO: 270370 - DNA, 25 bp, Artificial
  Probe
gagtccagtgttctagaagagccag

SEQ ID NO: 270371 - DNA, 25 bp, Artificial
  Probe
agccagtgtctaaagcctaatttta

SEQ ID NO: 270372 - DNA, 25 bp, Artificial
  Probe
gtgtttcgttttcctgttgcatgac

SEQ ID NO: 270373 - DNA, 25 bp, Artificial
  Probe
gctgttagagtccagtgttctagaa

SEQ ID NO: 270374 - DNA, 25 bp, Artificial
  Probe
agtgtttcgttttcctgttgcatga

SEQ ID NO: 270375 - DNA, 25 bp, Artificial
  Probe
tcgttttcctgttgcatgacagaat

SEQ ID NO: 270376 - DNA, 25 bp, Artificial
  Probe
gagccagtgtctaaagcctaatttt

SEQ ID NO: 270377 - DNA, 25 bp, Artificial
  Probe
tctagaagagccagtgtctaaagcc

SEQ ID NO: 270378 - DNA, 25 bp, Artificial
  Probe
agaagagccagtgtctaaagcctaa

SEQ ID NO: 270379 - DNA, 25 bp, Artificial
  Probe
ggcttcctgtagttctattcaagtg

SEQ ID NO: 270380 - DNA, 25 bp, Artificial
  Probe
caagggcttcctgtagttctattca

SEQ ID NO: 270381 - DNA, 25 bp, Artificial
  Probe
tgccaagggcttcctgtagttctat

SEQ ID NO: 270382 - DNA, 25 bp, Artificial
  Probe
tcttttggtgaatgcggaaaacacc

SEQ ID NO: 270383 - DNA, 25 bp, Artificial
  Probe
ttttccagcagtggaggtgctgtta

SEQ ID NO: 270384 - DNA, 25 bp, Artificial
  Probe
gccaagggcttcctgtagttctatt

SEQ ID NO: 270385 - DNA, 25 bp, Artificial
  Probe
agtgccaagggcttcctgtagttct

SEQ ID NO: 270386 - DNA, 25 bp, Artificial
  Probe
tttcgttttcctgttgcatgacaga

SEQ ID NO: 270387 - DNA, 25 bp, Artificial
  Probe
gttttcctgttgcatgacagaattc

SEQ ID NO: 270388 - DNA, 25 bp, Artificial
  Probe
gggcttcctgtagttctattcaagt

SEQ ID NO: 270389 - DNA, 25 bp, Artificial
  Probe
agtccagtgttctagaagagccagt

SEQ ID NO: 270390 - DNA, 25 bp, Artificial
  Probe
gccagtgtctaaagcctaattttac

SEQ ID NO: 270391 - DNA, 25 bp, Artificial
  Probe
tttccagcagtggaggtgctgttag

SEQ ID NO: 270392 - DNA, 25 bp, Artificial
  Probe
cacctatttgggttcctttgaattg

SEQ ID NO: 270393 - DNA, 25 bp, Artificial
  Probe
cagtgttctagaagagccagtgtct

SEQ ID NO: 270394 - DNA, 25 bp, Artificial
  Probe
ttagagtccagtgttctagaagagc

SEQ ID NO: 270395 - DNA, 25 bp, Artificial
  Probe
aagggcttcctgtagttctattcaa

SEQ ID NO: 270396 - DNA, 25 bp, Artificial
  Probe
aggtgctgttagagtccagtgttct

SEQ ID NO: 270397 - DNA, 25 bp, Artificial
  Probe
tctatcagtgccaagggcttcctgt

SEQ ID NO: 270398 - DNA, 25 bp, Artificial
  Probe
cttcctgtagttctattcaagtgtt

SEQ ID NO: 270399 - DNA, 25 bp, Artificial
  Probe
agatagcttagtgtttcgttttcct

SEQ ID NO: 270400 - DNA, 25 bp, Artificial
  Probe
attttttccagcagtggaggtgctg

SEQ ID NO: 270401 - DNA, 25 bp, Artificial
  Probe
ctgttagagtccagtgttctagaag

SEQ ID NO: 270402 - DNA, 25 bp, Artificial
  Probe
gtgctgttagagtccagtgttctag

SEQ ID NO: 270403 - DNA, 25 bp, Artificial
  Probe
tgctgttagagtccagtgttctaga

SEQ ID NO: 270404 - DNA, 25 bp, Artificial
  Probe
gtgttctagaagagccagtgtctaa

SEQ ID NO: 270405 - DNA, 25 bp, Artificial
  Probe
agtgttctagaagagccagtgtcta

SEQ ID NO: 270406 - DNA, 25 bp, Artificial
  Probe
ttcttttggtgaatgcggaaaacac

SEQ ID NO: 270407 - DNA, 25 bp, Artificial
  Probe
gtttcgttttcctgttgcatgacag

SEQ ID NO: 270408 - DNA, 25 bp, Artificial
  Probe
tccagtgttctagaagagccagtgt

SEQ ID NO: 270409 - DNA, 25 bp, Artificial
  Probe
ctagaagagccagtgtctaaagcct

SEQ ID NO: 270410 - DNA, 25 bp, Artificial
  Probe
agctgaaggacacaacctttgccca

SEQ ID NO: 270411 - DNA, 25 bp, Artificial
  Probe
ctcaatgctgaactgtactggagaa

SEQ ID NO: 270412 - DNA, 25 bp, Artificial
  Probe
tagacaacctcaatgctgaactgta

SEQ ID NO: 270413 - DNA, 25 bp, Artificial
  Probe
gacaacctcaatgctgaactgtact

SEQ ID NO: 270414 - DNA, 25 bp, Artificial
  Probe
gaaggacacaacctttgcccaggtg

SEQ ID NO: 270415 - DNA, 25 bp, Artificial
  Probe
tttattgccgactgggaatagacaa

SEQ ID NO: 270416 - DNA, 25 bp, Artificial
  Probe
accccactgaggtgtgtgggctgac

SEQ ID NO: 270417 - DNA, 25 bp, Artificial
  Probe
aacagctcaggttttattgccgact

SEQ ID NO: 270418 - DNA, 25 bp, Artificial
  Probe
gcaaggtaccccactgaggtgtgtg

SEQ ID NO: 270419 - DNA, 25 bp, Artificial
  Probe
gctgactggaggtcctggatccccc

SEQ ID NO: 270420 - DNA, 25 bp, Artificial
  Probe
gggaatagacaacctcaatgctgaa

SEQ ID NO: 270421 - DNA, 25 bp, Artificial
  Probe
ggaaaacagctcaggttttattgcc

SEQ ID NO: 270422 - DNA, 25 bp, Artificial
  Probe
aggaaaacagctcaggttttattgc

SEQ ID NO: 270423 - DNA, 25 bp, Artificial
  Probe
ctcaggttttattgccgactgggaa

SEQ ID NO: 270424 - DNA, 25 bp, Artificial
  Probe
ctgactggaggtcctggatccccct

SEQ ID NO: 270425 - DNA, 25 bp, Artificial
  Probe
tactgctcccaggaattgggctcct

SEQ ID NO: 270426 - DNA, 25 bp, Artificial
  Probe
cctactgctcccaggaattgggctc

SEQ ID NO: 270427 - DNA, 25 bp, Artificial
  Probe
agacaacctcaatgctgaactgtac

SEQ ID NO: 270428 - DNA, 25 bp, Artificial
  Probe
cacagtaacactgtaggcatggaga

SEQ ID NO: 270429 - DNA, 25 bp, Artificial
  Probe
acctgggaccaaaccatgtggcttt

SEQ ID NO: 270430 - DNA, 25 bp, Artificial
  Probe
acctcaatgctgaactgtactggag

SEQ ID NO: 270431 - DNA, 25 bp, Artificial
  Probe
gtaatcacagtaacactgtaggcat

SEQ ID NO: 270432 - DNA, 25 bp, Artificial
  Probe
cagctcaggttttattgccgactgg

SEQ ID NO: 270433 - DNA, 25 bp, Artificial
  Probe
aacctcaatgctgaactgtactgga

SEQ ID NO: 270434 - DNA, 25 bp, Artificial
  Probe
caatgctgaactgtactggagaaaa

SEQ ID NO: 270435 - DNA, 25 bp, Artificial
  Probe
agctcaggttttattgccgactggg

SEQ ID NO: 270436 - DNA, 25 bp, Artificial
  Probe
ttttattgccgactgggaatagaca

SEQ ID NO: 270437 - DNA, 25 bp, Artificial
  Probe
caaggtaccccactgaggtgtgtgg

SEQ ID NO: 270438 - DNA, 25 bp, Artificial
  Probe
ttgccgactgggaatagacaacctc

SEQ ID NO: 270439 - DNA, 25 bp, Artificial
  Probe
ccccactgaggtgtgtgggctgact

SEQ ID NO: 270440 - DNA, 25 bp, Artificial
  Probe
gctcccaggaattgggctcctgaca

SEQ ID NO: 270441 - DNA, 25 bp, Artificial
  Probe
acaacctcaatgctgaactgtactg

SEQ ID NO: 270442 - DNA, 25 bp, Artificial
  Probe
actgctcccaggaattgggctcctg

SEQ ID NO: 270443 - DNA, 25 bp, Artificial
  Probe
tggtaatcacagtaacactgtaggc

SEQ ID NO: 270444 - DNA, 25 bp, Artificial
  Probe
ctgaactgtactggagaaaaggggc

SEQ ID NO: 270445 - DNA, 25 bp, Artificial
  Probe
gttttattgccgactgggaatagac

SEQ ID NO: 270446 - DNA, 25 bp, Artificial
  Probe
ggaatagacaacctcaatgctgaac

SEQ ID NO: 270447 - DNA, 25 bp, Artificial
  Probe
ctactgctcccaggaattgggctcc

SEQ ID NO: 270448 - DNA, 25 bp, Artificial
  Probe
gaatagacaacctcaatgctgaact

SEQ ID NO: 270449 - DNA, 25 bp, Artificial
  Probe
taatcacagtaacactgtaggcatg

SEQ ID NO: 270450 - DNA, 25 bp, Artificial
  Probe
cctgggaccaaaccatgtggctttt

SEQ ID NO: 270451 - DNA, 25 bp, Artificial
  Probe
agtctgctaccacagccccaggagg

SEQ ID NO: 270452 - DNA, 25 bp, Artificial
  Probe
ggtaatcacagtaacactgtaggca

SEQ ID NO: 270453 - DNA, 25 bp, Artificial
  Probe
atcacagtaacactgtaggcatgga

SEQ ID NO: 270454 - DNA, 25 bp, Artificial
  Probe
cacctgggaccaaaccatgtggctt

SEQ ID NO: 270455 - DNA, 25 bp, Artificial
  Probe
tgggaccaaaccatgtggctttttt

SEQ ID NO: 270456 - DNA, 25 bp, Artificial
  Probe
ttattctgctgagctgccctcgaat

SEQ ID NO: 270457 - DNA, 25 bp, Artificial
  Probe
ttcctggaactcacccgatgggagg

SEQ ID NO: 270458 - DNA, 25 bp, Artificial
  Probe
caccacgtctcttattctgctgagc

SEQ ID NO: 270459 - DNA, 25 bp, Artificial
  Probe
ctcatgggttgttctctgggctcta

SEQ ID NO: 270460 - DNA, 25 bp, Artificial
  Probe
gaacttagtcatcattccttgcagc

SEQ ID NO: 270461 - DNA, 25 bp, Artificial
  Probe
tctcttattctgctgagctgccctc

SEQ ID NO: 270462 - DNA, 25 bp, Artificial
  Probe
ctgagctgccctcgaataccctggt

SEQ ID NO: 270463 - DNA, 25 bp, Artificial
  Probe
gagaggccagttctcatgggttgtt

SEQ ID NO: 270464 - DNA, 25 bp, Artificial
  Probe
gtcatcattccttgcagccttggcg

SEQ ID NO: 270465 - DNA, 25 bp, Artificial
  Probe
accctggttgcatgcattgctgatt

SEQ ID NO: 270466 - DNA, 25 bp, Artificial
  Probe
ctctgggctctacataggaatacat

SEQ ID NO: 270467 - DNA, 25 bp, Artificial
  Probe
tctctgggctctacataggaataca

SEQ ID NO: 270468 - DNA, 25 bp, Artificial
  Probe
gattcctggaactcacccgatggga

SEQ ID NO: 270469 - DNA, 25 bp, Artificial
  Probe
atgggttgttctctgggctctacat

SEQ ID NO: 270470 - DNA, 25 bp, Artificial
  Probe
ttctcatgggttgttctctgggctc

SEQ ID NO: 270471 - DNA, 25 bp, Artificial
  Probe
tgttctctgggctctacataggaat

SEQ ID NO: 270472 - DNA, 25 bp, Artificial
  Probe
catgggttgttctctgggctctaca

SEQ ID NO: 270473 - DNA, 25 bp, Artificial
  Probe
tcttattctgctgagctgccctcga

SEQ ID NO: 270474 - DNA, 25 bp, Artificial
  Probe
tggcgcccagccagagttgagtctg

SEQ ID NO: 270475 - DNA, 25 bp, Artificial
  Probe
catgcattgctgatttggggaactt

SEQ ID NO: 270476 - DNA, 25 bp, Artificial
  Probe
agttctcatgggttgttctctgggc

SEQ ID NO: 270477 - DNA, 25 bp, Artificial
  Probe
ttagtcatcattccttgcagccttg

SEQ ID NO: 270478 - DNA, 25 bp, Artificial
  Probe
agaggccagttctcatgggttgttc

SEQ ID NO: 270479 - DNA, 25 bp, Artificial
  Probe
tcatcattccttgcagccttggcgc

SEQ ID NO: 270480 - DNA, 25 bp, Artificial
  Probe
tcgaataccctggttgcatgcattg

SEQ ID NO: 270481 - DNA, 25 bp, Artificial
  Probe
gaataccctggttgcatgcattgct

SEQ ID NO: 270482 - DNA, 25 bp, Artificial
  Probe
ataccctggttgcatgcattgctga

SEQ ID NO: 270483 - DNA, 25 bp, Artificial
  Probe
ggccagttctcatgggttgttctct

SEQ ID NO: 270484 - DNA, 25 bp, Artificial
  Probe
cgtctcttattctgctgagctgccc

SEQ ID NO: 270485 - DNA, 25 bp, Artificial
  Probe
acaccacgtctcttattctgctgag

SEQ ID NO: 270486 - DNA, 25 bp, Artificial
  Probe
cctcgaataccctggttgcatgcat

SEQ ID NO: 270487 - DNA, 25 bp, Artificial
  Probe
ggaacttagtcatcattccttgcag

SEQ ID NO: 270488 - DNA, 25 bp, Artificial
  Probe
gttctctgggctctacataggaata

SEQ ID NO: 270489 - DNA, 25 bp, Artificial
  Probe
cacgtctcttattctgctgagctgc

SEQ ID NO: 270490 - DNA, 25 bp, Artificial
  Probe
gctgccctcgaataccctggttgca

SEQ ID NO: 270491 - DNA, 25 bp, Artificial
  Probe
gctgagctgccctcgaataccctgg

SEQ ID NO: 270492 - DNA, 25 bp, Artificial
  Probe
attctgctgagctgccctcgaatac

SEQ ID NO: 270493 - DNA, 25 bp, Artificial
  Probe
tgggttgttctctgggctctacata

SEQ ID NO: 270494 - DNA, 25 bp, Artificial
  Probe
ctggttgcatgcattgctgatttgg

SEQ ID NO: 270495 - DNA, 25 bp, Artificial
  Probe
cctggttgcatgcattgctgatttg

SEQ ID NO: 270496 - DNA, 25 bp, Artificial
  Probe
gagctgccctcgaataccctggttg

SEQ ID NO: 270497 - DNA, 25 bp, Artificial
  Probe
ctgccctcgaataccctggttgcat

SEQ ID NO: 270498 - DNA, 25 bp, Artificial
  Probe
gccttggcgcccagccagagttgag

SEQ ID NO: 270499 - DNA, 25 bp, Artificial
  Probe
tgcatgcattgctgatttggggaac

SEQ ID NO: 270500 - DNA, 25 bp, Artificial
  Probe
ttgattcctggaactcacccgatgg

SEQ ID NO: 270501 - DNA, 25 bp, Artificial
  Probe
tagtcatcattccttgcagccttgg

SEQ ID NO: 270502 - DNA, 25 bp, Artificial
  Probe
cctgtcatggactgtggagtgccga

SEQ ID NO: 270503 - DNA, 25 bp, Artificial
  Probe
acccttcaacttgagcctcctggta

SEQ ID NO: 270504 - DNA, 25 bp, Artificial
  Probe
ctcgtacgggagattcgtaagaaag

SEQ ID NO: 270505 - DNA, 25 bp, Artificial
  Probe
atccgttgaaattagtgcggctatg

SEQ ID NO: 270506 - DNA, 25 bp, Artificial
  Probe
cacatttctccctgaacatgcttgg

SEQ ID NO: 270507 - DNA, 25 bp, Artificial
  Probe
ccaaaagcagcgtgtggaagaggct

SEQ ID NO: 270508 - DNA, 25 bp, Artificial
  Probe
ctgaagtcaccgttcaggaggaaga

SEQ ID NO: 270509 - DNA, 25 bp, Artificial
  Probe
accgttcaggaggaagaaggactca

SEQ ID NO: 270510 - DNA, 25 bp, Artificial
  Probe
ttctccctgaacatgcttggttccc

SEQ ID NO: 270511 - DNA, 25 bp, Artificial
  Probe
ctggctcgagaattcaattgtccct

SEQ ID NO: 270512 - DNA, 25 bp, Artificial
  Probe
cgagacttcgggttcaacaatgtgt

SEQ ID NO: 270513 - DNA, 25 bp, Artificial
  Probe
tccttagttgtcacattagaatttg

SEQ ID NO: 270514 - DNA, 25 bp, Artificial
  Probe
gtccactccttagttgtcacattag

SEQ ID NO: 270515 - DNA, 25 bp, Artificial
  Probe
agaaggactcagtgacctgagtgaa

SEQ ID NO: 270516 - DNA, 25 bp, Artificial
  Probe
agggattgtctctggctcgagaatt

SEQ ID NO: 270517 - DNA, 25 bp, Artificial
  Probe
ctcagtgacctgagtgaagtgggca

SEQ ID NO: 270518 - DNA, 25 bp, Artificial
  Probe
gggacttgcctactgggagttgtca

SEQ ID NO: 270519 - DNA, 25 bp, Artificial
  Probe
tggactcctgtcatggactgtggag

SEQ ID NO: 270520 - DNA, 25 bp, Artificial
  Probe
tccgttgaaattagtgcggctatgg

SEQ ID NO: 270521 - DNA, 25 bp, Artificial
  Probe
aaggctaagcccaaaagcagcgtgt

SEQ ID NO: 270522 - DNA, 25 bp, Artificial
  Probe
agcgctgtgagctgcagtgctcccc

SEQ ID NO: 270523 - DNA, 25 bp, Artificial
  Probe
cttactgtctaaagccctgtgctag

SEQ ID NO: 270524 - DNA, 25 bp, Artificial
  Probe
aattgtcccttttttgagacctctg

SEQ ID NO: 270525 - DNA, 25 bp, Artificial
  Probe
ccttagttgtcacattagaatttgg

SEQ ID NO: 270526 - DNA, 25 bp, Artificial
  Probe
gcagcgctgtgagctgcagtgctcc

SEQ ID NO: 270527 - DNA, 25 bp, Artificial
  Probe
agacaggagcacatttctccctgaa

SEQ ID NO: 270528 - DNA, 25 bp, Artificial
  Probe
tgcactagtgagcatgctgtttgct

SEQ ID NO: 270529 - DNA, 25 bp, Artificial
  Probe
cgagaattcaattgtcccttttttg

SEQ ID NO: 270530 - DNA, 25 bp, Artificial
  Probe
aattagtgcggctatggtacagctt

SEQ ID NO: 270531 - DNA, 25 bp, Artificial
  Probe
tcatgaactcatcagggcactgtcc

SEQ ID NO: 270532 - DNA, 25 bp, Artificial
  Probe
ccatgctctcgtacgggagattcgt

SEQ ID NO: 270533 - DNA, 25 bp, Artificial
  Probe
aagaggctgaagtcaccgttcagga

SEQ ID NO: 270534 - DNA, 25 bp, Artificial
  Probe
tcaacttgagcctcctggtaccgtc

SEQ ID NO: 270535 - DNA, 25 bp, Artificial
  Probe
actgtgcatcctagagacagcaaag

SEQ ID NO: 270536 - DNA, 25 bp, Artificial
  Probe
tcatcagggcactgtccactcctta

SEQ ID NO: 270537 - DNA, 25 bp, Artificial
  Probe
catgctgtttgctctcctgctatgt

SEQ ID NO: 270538 - DNA, 25 bp, Artificial
  Probe
gcacttgactgagtttacaaaggaa

SEQ ID NO: 270539 - DNA, 25 bp, Artificial
  Probe
tgagacctctgctgcctatcgttac

SEQ ID NO: 270540 - DNA, 25 bp, Artificial
  Probe
ggtaccgtctcacagaagaacctct

SEQ ID NO: 270541 - DNA, 25 bp, Artificial
  Probe
agaattcaattgtcccttttttgag

SEQ ID NO: 270542 - DNA, 25 bp, Artificial
  Probe
gtccacgagacttcgggttcaacaa

SEQ ID NO: 270543 - DNA, 25 bp, Artificial
  Probe
ctacagtgagcgagagaagtgcaca

SEQ ID NO: 270544 - DNA, 25 bp, Artificial
  Probe
tctgctgcctatcgttactacattg

SEQ ID NO: 270545 - DNA, 25 bp, Artificial
  Probe
gcttattctaaatgccactggcgag

SEQ ID NO: 270546 - DNA, 25 bp, Artificial
  Probe
gtctcacagaagaacctctgccttg

SEQ ID NO: 270547 - DNA, 25 bp, Artificial
  Probe
ccacgcagtcagtactctgcactag

SEQ ID NO: 270548 - DNA, 25 bp, Artificial
  Probe
tcacccgtgcggatcgcacatcatg

SEQ ID NO: 270549 - DNA, 25 bp, Artificial
  Probe
ttcatcggctcgagtagcagacact

SEQ ID NO: 270550 - DNA, 25 bp, Artificial
  Probe
ccaggcatagattcaaccttgacaa

SEQ ID NO: 270551 - DNA, 25 bp, Artificial
  Probe
gacccagattctgtatgttttcatt

SEQ ID NO: 270552 - DNA, 25 bp, Artificial
  Probe
cattgctgatcaggaggtattacat

SEQ ID NO: 270553 - DNA, 25 bp, Artificial
  Probe
tccacaggttcatcggctcgagtag

SEQ ID NO: 270554 - DNA, 25 bp, Artificial
  Probe
ggttcatcggctcgagtagcagaca

SEQ ID NO: 270555 - DNA, 25 bp, Artificial
  Probe
aaatctgattcttgccaggcataga

SEQ ID NO: 270556 - DNA, 25 bp, Artificial
  Probe
gttctcagataccactggatacttt

SEQ ID NO: 270557 - DNA, 25 bp, Artificial
  Probe
catcatgcttagtgctgtgtgaagt

SEQ ID NO: 270558 - DNA, 25 bp, Artificial
  Probe
cgtgcggatcgcacatcatgcttag

SEQ ID NO: 270559 - DNA, 25 bp, Artificial
  Probe
gaagttgcttgttttcagttccgaa

SEQ ID NO: 270560 - DNA, 25 bp, Artificial
  Probe
tcagtaagacccagattctgtatgt

SEQ ID NO: 270561 - DNA, 25 bp, Artificial
  Probe
tataaatgttctcagataccactgg

SEQ ID NO: 270562 - DNA, 25 bp, Artificial
  Probe
gcatagattcaaccttgacaagttt

SEQ ID NO: 270563 - DNA, 25 bp, Artificial
  Probe
aaatcctttgggttttgcaagagca

SEQ ID NO: 270564 - DNA, 25 bp, Artificial
  Probe
ttacattgataagtcacccgtgcgg

SEQ ID NO: 270565 - DNA, 25 bp, Artificial
  Probe
tgtgaagttgcttgttttcagttcc

SEQ ID NO: 270566 - DNA, 25 bp, Artificial
  Probe
tcgagtagcagacactggggaagta

SEQ ID NO: 270567 - DNA, 25 bp, Artificial
  Probe
aggttcatcggctcgagtagcagac

SEQ ID NO: 270568 - DNA, 25 bp, Artificial
  Probe
ttgccaggcatagattcaaccttga

SEQ ID NO: 270569 - DNA, 25 bp, Artificial
  Probe
atttggttcagtaagacccagattc

SEQ ID NO: 270570 - DNA, 25 bp, Artificial
  Probe
tggttcagtaagacccagattctgt

SEQ ID NO: 270571 - DNA, 25 bp, Artificial
  Probe
ttcagagggtttaggtgttgcaacc

SEQ ID NO: 270572 - DNA, 25 bp, Artificial
  Probe
ttagtttcagtcactatctagaaag

SEQ ID NO: 270573 - DNA, 25 bp, Artificial
  Probe
catgcttagtgctgtgtgaagttgc

SEQ ID NO: 270574 - DNA, 25 bp, Artificial
  Probe
cttgttttcagttccgaaatctgat

SEQ ID NO: 270575 - DNA, 25 bp, Artificial
  Probe
tttcagtcactatctagaaaggact

SEQ ID NO: 270576 - DNA, 25 bp, Artificial
  Probe
ataagtcacccgtgcggatcgcaca

SEQ ID NO: 270577 - DNA, 25 bp, Artificial
  Probe
tcactatctagaaaggactatcaga

SEQ ID NO: 270578 - DNA, 25 bp, Artificial
  Probe
ctgttgatgtcattgctgatcagga

SEQ ID NO: 270579 - DNA, 25 bp, Artificial
  Probe
ttaagtgttagtttcagtcactatc

SEQ ID NO: 270580 - DNA, 25 bp, Artificial
  Probe
agtgttagtttcagtcactatctag

SEQ ID NO: 270581 - DNA, 25 bp, Artificial
  Probe
cactatctagaaaggactatcagaa

SEQ ID NO: 270582 - DNA, 25 bp, Artificial
  Probe
gtggctgttgatgtcattgctgatc

SEQ ID NO: 270583 - DNA, 25 bp, Artificial
  Probe
ttcttgccaggcatagattcaacct

SEQ ID NO: 270584 - DNA, 25 bp, Artificial
  Probe
taaatgttctcagataccactggat

SEQ ID NO: 270585 - DNA, 25 bp, Artificial
  Probe
gtgttgcaacctctataaatgttct

SEQ ID NO: 270586 - DNA, 25 bp, Artificial
  Probe
cattgataagtcacccgtgcggatc

SEQ ID NO: 270587 - DNA, 25 bp, Artificial
  Probe
tttcagttccgaaatctgattcttg

SEQ ID NO: 270588 - DNA, 25 bp, Artificial
  Probe
ctcgagtagcagacactggggaagt

SEQ ID NO: 270589 - DNA, 25 bp, Artificial
  Probe
atcggctcgagtagcagacactggg

SEQ ID NO: 270590 - DNA, 25 bp, Artificial
  Probe
cagagtggctgttgatgtcattgct

SEQ ID NO: 270591 - DNA, 25 bp, Artificial
  Probe
gtcattgctgatcaggaggtattac

SEQ ID NO: 270592 - DNA, 25 bp, Artificial
  Probe
ccagattctgtatgttttcattatg

SEQ ID NO: 270593 - DNA, 25 bp, Artificial
  Probe
gtttaggtgttgcaacctctataaa

SEQ ID NO: 270594 - DNA, 25 bp, Artificial
  Probe
gtctacttccctattcctgagcctg

SEQ ID NO: 270595 - DNA, 25 bp, Artificial
  Probe
ccatccagaaagacaaggtctacag

SEQ ID NO: 270596 - DNA, 25 bp, Artificial
  Probe
agcacggccttggtccacggcatct

SEQ ID NO: 270597 - DNA, 25 bp, Artificial
  Probe
gtcctacagtgtcaacgtcaccttt

SEQ ID NO: 270598 - DNA, 25 bp, Artificial
  Probe
gaagagcgaatatccctctctaaaa

SEQ ID NO: 270599 - DNA, 25 bp, Artificial
  Probe
tacacaaaggccagtcctacagtgt

SEQ ID NO: 270600 - DNA, 25 bp, Artificial
  Probe
caaaggccagtcctacagtgtcaac

SEQ ID NO: 270601 - DNA, 25 bp, Artificial
  Probe
cagtcctacagtgtcaacgtcacct

SEQ ID NO: 270602 - DNA, 25 bp, Artificial
  Probe
acagtgtcaacgtcacctttactag

SEQ ID NO: 270603 - DNA, 25 bp, Artificial
  Probe
gctgccggtgaagagcgaatatccc

SEQ ID NO: 270604 - DNA, 25 bp, Artificial
  Probe
gcctgacggttgtaaatgtggaatc

SEQ ID NO: 270605 - DNA, 25 bp, Artificial
  Probe
cacaaaggccagtcctacagtgtca

SEQ ID NO: 270606 - DNA, 25 bp, Artificial
  Probe
ataagctgccggtgaagagcgaata

SEQ ID NO: 270607 - DNA, 25 bp, Artificial
  Probe
gtcacctttactagcggcactcagt

SEQ ID NO: 270608 - DNA, 25 bp, Artificial
  Probe
tttactagcggcactcagtcccaga

SEQ ID NO: 270609 - DNA, 25 bp, Artificial
  Probe
tgtcagctacacaaaggccagtcct

SEQ ID NO: 270610 - DNA, 25 bp, Artificial
  Probe
agcgaatatccctctctaaaactgg

SEQ ID NO: 270611 - DNA, 25 bp, Artificial
  Probe
acagcacggccttggtccacggcat

SEQ ID NO: 270612 - DNA, 25 bp, Artificial
  Probe
acgtcacctttactagcggcactca

SEQ ID NO: 270613 - DNA, 25 bp, Artificial
  Probe
tccctattcctgagcctgacggttg

SEQ ID NO: 270614 - DNA, 25 bp, Artificial
  Probe
caacgtcacctttactagcggcact

SEQ ID NO: 270615 - DNA, 25 bp, Artificial
  Probe
ggccagtcctacagtgtcaacgtca

SEQ ID NO: 270616 - DNA, 25 bp, Artificial
  Probe
agcggcactcagtcccagaacagca

SEQ ID NO: 270617 - DNA, 25 bp, Artificial
  Probe
gtctacagctacctgaataagctgc

SEQ ID NO: 270618 - DNA, 25 bp, Artificial
  Probe
tctacagctacctgaataagctgcc

SEQ ID NO: 270619 - DNA, 25 bp, Artificial
  Probe
aggccagtcctacagtgtcaacgtc

SEQ ID NO: 270620 - DNA, 25 bp, Artificial
  Probe
ctgccggtgaagagcgaatatccct

SEQ ID NO: 270621 - DNA, 25 bp, Artificial
  Probe
cggccttggtccacggcatcttggc

SEQ ID NO: 270622 - DNA, 25 bp, Artificial
  Probe
acctgaataagctgccggtgaagag

SEQ ID NO: 270623 - DNA, 25 bp, Artificial
  Probe
agccctgtcagctacacaaaggcca

SEQ ID NO: 270624 - DNA, 25 bp, Artificial
  Probe
aagacaaggtctacagctacctgaa

SEQ ID NO: 270625 - DNA, 25 bp, Artificial
  Probe
taagctgccggtgaagagcgaatat

SEQ ID NO: 270626 - DNA, 25 bp, Artificial
  Probe
tcagtcccagaacagcacggccttg

SEQ ID NO: 270627 - DNA, 25 bp, Artificial
  Probe
tcagctacacaaaggccagtcctac

SEQ ID NO: 270628 - DNA, 25 bp, Artificial
  Probe
cccatccagaaagacaaggtctaca

SEQ ID NO: 270629 - DNA, 25 bp, Artificial
  Probe
gctacctgaataagctgccggtgaa

SEQ ID NO: 270630 - DNA, 25 bp, Artificial
  Probe
caaggtctacagctacctgaataag

SEQ ID NO: 270631 - DNA, 25 bp, Artificial
  Probe
cctgacggttgtaaatgtggaatca

SEQ ID NO: 270632 - DNA, 25 bp, Artificial
  Probe
aacagcacggccttggtccacggca

SEQ ID NO: 270633 - DNA, 25 bp, Artificial
  Probe
caggggtcccagtctacttccctat

SEQ ID NO: 270634 - DNA, 25 bp, Artificial
  Probe
gtcccagaacagcacggccttggtc

SEQ ID NO: 270635 - DNA, 25 bp, Artificial
  Probe
ctagcggcactcagtcccagaacag

SEQ ID NO: 270636 - DNA, 25 bp, Artificial
  Probe
gcaggggtcccagtctacttcccta

SEQ ID NO: 270637 - DNA, 25 bp, Artificial
  Probe
cacggccttggtccacggcatcttg

SEQ ID NO: 270638 - DNA, 25 bp, Artificial
  Probe
tacttccctattcctgagcctgacg

SEQ ID NO: 270639 - DNA, 25 bp, Artificial
  Probe
gccagtcctacagtgtcaacgtcac

SEQ ID NO: 270640 - DNA, 25 bp, Artificial
  Probe
atactcacagggaaccacagaagca

SEQ ID NO: 270641 - DNA, 25 bp, Artificial
  Probe
tccctccatggctggaacaaagttt

SEQ ID NO: 270642 - DNA, 25 bp, Artificial
  Probe
gggaaccacagaagcactgtcctcc

SEQ ID NO: 270643 - DNA, 25 bp, Artificial
  Probe
aggtcagatcacaggcaggataccg

SEQ ID NO: 270644 - DNA, 25 bp, Artificial
  Probe
gggaagcatctctcagaggcccacc

SEQ ID NO: 270645 - DNA, 25 bp, Artificial
  Probe
cactgccaggagacccacagggaac

SEQ ID NO: 270646 - DNA, 25 bp, Artificial
  Probe
aaggccactgccaggagacccacag

SEQ ID NO: 270647 - DNA, 25 bp, Artificial
  Probe
tacagcaggagctctggagcctcgg

SEQ ID NO: 270648 - DNA, 25 bp, Artificial
  Probe
caggagacccacagggaaccacaga

SEQ ID NO: 270649 - DNA, 25 bp, Artificial
  Probe
ggcaggataccgtctccctgaaggc

SEQ ID NO: 270650 - DNA, 25 bp, Artificial
  Probe
tcacagggaaccacagaagcactgt

SEQ ID NO: 270651 - DNA, 25 bp, Artificial
  Probe
cacagactcctgtgggaagcatctc

SEQ ID NO: 270652 - DNA, 25 bp, Artificial
  Probe
tctactccacacagatgctgctcag

SEQ ID NO: 270653 - DNA, 25 bp, Artificial
  Probe
tgaatgaggtcacaggtcagatcac

SEQ ID NO: 270654 - DNA, 25 bp, Artificial
  Probe
tgtccttgtcttttctgctgagggg

SEQ ID NO: 270655 - DNA, 25 bp, Artificial
  Probe
acagaagcactgtcctccctgcagg

SEQ ID NO: 270656 - DNA, 25 bp, Artificial
  Probe
gggtttcccacagactcctgtggga

SEQ ID NO: 270657 - DNA, 25 bp, Artificial
  Probe
ccctgcctggatactcacagggaac

SEQ ID NO: 270658 - DNA, 25 bp, Artificial
  Probe
gaacaaagttttctacagcaggagc

SEQ ID NO: 270659 - DNA, 25 bp, Artificial
  Probe
tatacgtgcaagtgaatgaggtcac

SEQ ID NO: 270660 - DNA, 25 bp, Artificial
  Probe
tccctgaaggccactgccaggagac

SEQ ID NO: 270661 - DNA, 25 bp, Artificial
  Probe
ctggatactcacagggaaccacaga

SEQ ID NO: 270662 - DNA, 25 bp, Artificial
  Probe
gccaggagacccacagggaaccaca

SEQ ID NO: 270663 - DNA, 25 bp, Artificial
  Probe
agctctggagcctcgggcctcgtca

SEQ ID NO: 270664 - DNA, 25 bp, Artificial
  Probe
cgagcgcacagagatgtatacgtgc

SEQ ID NO: 270665 - DNA, 25 bp, Artificial
  Probe
agacccacagggaaccacagaagca

SEQ ID NO: 270666 - DNA, 25 bp, Artificial
  Probe
tctgggtttcccacagactcctgtg

SEQ ID NO: 270667 - DNA, 25 bp, Artificial
  Probe
gactcctgtgggaagcatctctcag

SEQ ID NO: 270668 - DNA, 25 bp, Artificial
  Probe
tcccacagactcctgtgggaagcat

SEQ ID NO: 270669 - DNA, 25 bp, Artificial
  Probe
gtattctgggtttcccacagactcc

SEQ ID NO: 270670 - DNA, 25 bp, Artificial
  Probe
caggataccgtctccctgaaggcca

SEQ ID NO: 270671 - DNA, 25 bp, Artificial
  Probe
ccgagtccctccatggctggaacaa

SEQ ID NO: 270672 - DNA, 25 bp, Artificial
  Probe
tgtaacacatgcagcgagcgcacag

SEQ ID NO: 270673 - DNA, 25 bp, Artificial
  Probe
cagatcacaggcaggataccgtctc

SEQ ID NO: 270674 - DNA, 25 bp, Artificial
  Probe
cgagtccctccatggctggaacaaa

SEQ ID NO: 270675 - DNA, 25 bp, Artificial
  Probe
cacaggcaggataccgtctccctga

SEQ ID NO: 270676 - DNA, 25 bp, Artificial
  Probe
tgcagcgagcgcacagagatgtata

SEQ ID NO: 270677 - DNA, 25 bp, Artificial
  Probe
acacatgcagcgagcgcacagagat

SEQ ID NO: 270678 - DNA, 25 bp, Artificial
  Probe
gagcctcgggcctcgtcatagcaat

SEQ ID NO: 270679 - DNA, 25 bp, Artificial
  Probe
gggtattctgggtttcccacagact

SEQ ID NO: 270680 - DNA, 25 bp, Artificial
  Probe
cacaggtcagatcacaggcaggata

SEQ ID NO: 270681 - DNA, 25 bp, Artificial
  Probe
cgttctactccacacagatgctgct

SEQ ID NO: 270682 - DNA, 25 bp, Artificial
  Probe
caggagctctggagcctcgggcctc

SEQ ID NO: 270683 - DNA, 25 bp, Artificial
  Probe
tacgtgcaagtgaatgaggtcacag

SEQ ID NO: 270684 - DNA, 25 bp, Artificial
  Probe
tccatggctggaacaaagttttcta

SEQ ID NO: 270685 - DNA, 25 bp, Artificial
  Probe
agggaaccacagaagcactgtcctt

SEQ ID NO: 270686 - DNA, 25 bp, Artificial
  Probe
cagggacaactctgggatgattgac

SEQ ID NO: 270687 - DNA, 25 bp, Artificial
  Probe
gtcaatcatttctatgtttgaccga

SEQ ID NO: 270688 - DNA, 25 bp, Artificial
  Probe
atcacaaagacatggcaaaagcatg

SEQ ID NO: 270689 - DNA, 25 bp, Artificial
  Probe
tggtacatggactccgtttaatcca

SEQ ID NO: 270690 - DNA, 25 bp, Artificial
  Probe
agctgcactgccagaccagagcttc

SEQ ID NO: 270691 - DNA, 25 bp, Artificial
  Probe
agatgttcaatcacaaagacatggc

SEQ ID NO: 270692 - DNA, 25 bp, Artificial
  Probe
ggaaaagcacaacaccacatccagg

SEQ ID NO: 270693 - DNA, 25 bp, Artificial
  Probe
tcgcgttcgatgacttcatccaggg

SEQ ID NO: 270694 - DNA, 25 bp, Artificial
  Probe
caggttttggctaccggctctctga

SEQ ID NO: 270695 - DNA, 25 bp, Artificial
  Probe
ttctgtgaaggcacatgaatgacag

SEQ ID NO: 270696 - DNA, 25 bp, Artificial
  Probe
tcacaggtgtgtggaagtatatcac

SEQ ID NO: 270697 - DNA, 25 bp, Artificial
  Probe
agaagaatcacatgcgagatgttca

SEQ ID NO: 270698 - DNA, 25 bp, Artificial
  Probe
actcttgagtgtgaagaagaatcac

SEQ ID NO: 270699 - DNA, 25 bp, Artificial
  Probe
cttcagtgaattcacaggtgtgtgg

SEQ ID NO: 270700 - DNA, 25 bp, Artificial
  Probe
tgacagctgctgcagtaaactcctg

SEQ ID NO: 270701 - DNA, 25 bp, Artificial
  Probe
gactgaagtctcacacaatagccaa

SEQ ID NO: 270702 - DNA, 25 bp, Artificial
  Probe
agacaggagcggagtgatttcagac

SEQ ID NO: 270703 - DNA, 25 bp, Artificial
  Probe
agaacaggtcgtgtagcataaacaa

SEQ ID NO: 270704 - DNA, 25 bp, Artificial
  Probe
cacatgaatgacagctgctgcagta

SEQ ID NO: 270705 - DNA, 25 bp, Artificial
  Probe
gaacttcagcaagcattatccaatg

SEQ ID NO: 270706 - DNA, 25 bp, Artificial
  Probe
tgatttcagacaatgaacttcagca

SEQ ID NO: 270707 - DNA, 25 bp, Artificial
  Probe
ataacgcagactgaagtctcacaca

SEQ ID NO: 270708 - DNA, 25 bp, Artificial
  Probe
tcttccagcgggttgataaagacag

SEQ ID NO: 270709 - DNA, 25 bp, Artificial
  Probe
atgagctcaaacaagcactctcagg

SEQ ID NO: 270710 - DNA, 25 bp, Artificial
  Probe
gaagtatatcacagactggcagaat

SEQ ID NO: 270711 - DNA, 25 bp, Artificial
  Probe
caccacatccaggaccaagtctatg

SEQ ID NO: 270712 - DNA, 25 bp, Artificial
  Probe
ctcctgtctgccatagctgggaaaa

SEQ ID NO: 270713 - DNA, 25 bp, Artificial
  Probe
tacgacagggacaactctgggatga

SEQ ID NO: 270714 - DNA, 25 bp, Artificial
  Probe
accaagtctatgtatgaagaacagg

SEQ ID NO: 270715 - DNA, 25 bp, Artificial
  Probe
gtaccctttgttaccactctagttg

SEQ ID NO: 270716 - DNA, 25 bp, Artificial
  Probe
ggactccgtttaatccagtgactgt

SEQ ID NO: 270717 - DNA, 25 bp, Artificial
  Probe
cactctagttgttgtgtgaacatgg

SEQ ID NO: 270718 - DNA, 25 bp, Artificial
  Probe
cacatgcgagatgttcaatcacaaa

SEQ ID NO: 270719 - DNA, 25 bp, Artificial
  Probe
ggcagaatgtcttccggacctacga

SEQ ID NO: 270720 - DNA, 25 bp, Artificial
  Probe
tctgtgaaggcacatgaatgacagc

SEQ ID NO: 270721 - DNA, 25 bp, Artificial
  Probe
ttccagcgggttgataaagacagga

SEQ ID NO: 270722 - DNA, 25 bp, Artificial
  Probe
ggaacgtcttccagcgggttgataa

SEQ ID NO: 270723 - DNA, 25 bp, Artificial
  Probe
tgaacttcagtgaattcacaggtgt

SEQ ID NO: 270724 - DNA, 25 bp, Artificial
  Probe
ccggctctctgatcagttccatgac

SEQ ID NO: 270725 - DNA, 25 bp, Artificial
  Probe
tgggaaaagcacaacaccacatcca

SEQ ID NO: 270726 - DNA, 25 bp, Artificial
  Probe
actctcaggttttggctaccggctc

SEQ ID NO: 270727 - DNA, 25 bp, Artificial
  Probe
gggcagatcgcgttcgatgacttca

SEQ ID NO: 270728 - DNA, 25 bp, Artificial
  Probe
gtctgccatagctgggaaaagcaca

SEQ ID NO: 270729 - DNA, 25 bp, Artificial
  Probe
gacaatgaacttcagcaagcattat

SEQ ID NO: 270730 - DNA, 25 bp, Artificial
  Probe
ttggctaccggctctctgatcagtt

SEQ ID NO: 270731 - DNA, 25 bp, Artificial
  Probe
catttctatgtttgaccgagaaaac

SEQ ID NO: 270732 - DNA, 25 bp, Artificial
  Probe
cccacgttattgcataagctaaagc

SEQ ID NO: 270733 - DNA, 25 bp, Artificial
  Probe
tgaatagcccttgcagagtttgtaa

SEQ ID NO: 270734 - DNA, 25 bp, Artificial
  Probe
aagttttctcttgtttgtgaatagc

SEQ ID NO: 270735 - DNA, 25 bp, Artificial
  Probe
ctcttgtttgtgaatagcccttgca

SEQ ID NO: 270736 - DNA, 25 bp, Artificial
  Probe
tttctcttgtttgtgaatagccctt

SEQ ID NO: 270737 - DNA, 25 bp, Artificial
  Probe
aaagcagcaaacacccccaggcgaa

SEQ ID NO: 270738 - DNA, 25 bp, Artificial
  Probe
gttttctcttgtttgtgaatagccc

SEQ ID NO: 270739 - DNA, 25 bp, Artificial
  Probe
ccccacgttattgcataagctaaag

SEQ ID NO: 270740 - DNA, 25 bp, Artificial
  Probe
agttggtggccccacgttattgcat

SEQ ID NO: 270741 - DNA, 25 bp, Artificial
  Probe
tcttgtttgtgaatagcccttgcag

SEQ ID NO: 270742 - DNA, 25 bp, Artificial
  Probe
tggccccacgttattgcataagcta

SEQ ID NO: 270743 - DNA, 25 bp, Artificial
  Probe
gcagatggctccccgacccctcctt

SEQ ID NO: 270744 - DNA, 25 bp, Artificial
  Probe
ttttctcttgtttgtgaatagccct

SEQ ID NO: 270745 - DNA, 25 bp, Artificial
  Probe
attgcataagctaaagcagcaaaca

SEQ ID NO: 270746 - DNA, 25 bp, Artificial
  Probe
aatagcccttgcagagtttgtaaat

SEQ ID NO: 270747 - DNA, 25 bp, Artificial
  Probe
ggtggccccacgttattgcataagc

SEQ ID NO: 270748 - DNA, 25 bp, Artificial
  Probe
tgtgaatagcccttgcagagtttgt

SEQ ID NO: 270749 - DNA, 25 bp, Artificial
  Probe
ttgtttgtgaatagcccttgcagag

SEQ ID NO: 270750 - DNA, 25 bp, Artificial
  Probe
ccaggcgaagttttctcttgtttgt

SEQ ID NO: 270751 - DNA, 25 bp, Artificial
  Probe
agttttctcttgtttgtgaatagcc

SEQ ID NO: 270752 - DNA, 25 bp, Artificial
  Probe
caggcgaagttttctcttgtttgtg

SEQ ID NO: 270753 - DNA, 25 bp, Artificial
  Probe
tggtggccccacgttattgcataag

SEQ ID NO: 270754 - DNA, 25 bp, Artificial
  Probe
ttggtggccccacgttattgcataa

SEQ ID NO: 270755 - DNA, 25 bp, Artificial
  Probe
ggccccacgttattgcataagctaa

SEQ ID NO: 270756 - DNA, 25 bp, Artificial
  Probe
gttggtggccccacgttattgcata

SEQ ID NO: 270757 - DNA, 25 bp, Artificial
  Probe
gtggccccacgttattgcataagct

SEQ ID NO: 270758 - DNA, 25 bp, Artificial
  Probe
tctcttgtttgtgaatagcccttgc

SEQ ID NO: 270759 - DNA, 25 bp, Artificial
  Probe
cacgttattgcataagctaaagcag

SEQ ID NO: 270760 - DNA, 25 bp, Artificial
  Probe
cccaggcgaagttttctcttgtttg

SEQ ID NO: 270761 - DNA, 25 bp, Artificial
  Probe
tgtttgtgaatagcccttgcagagt

SEQ ID NO: 270762 - DNA, 25 bp, Artificial
  Probe
ttctcttgtttgtgaatagcccttg

SEQ ID NO: 270763 - DNA, 25 bp, Artificial
  Probe
aggcgaagttttctcttgtttgtga

SEQ ID NO: 270764 - DNA, 25 bp, Artificial
  Probe
gccccacgttattgcataagctaaa

SEQ ID NO: 270765 - DNA, 25 bp, Artificial
  Probe
aagctaaagcagcaaacacccccag

SEQ ID NO: 270766 - DNA, 25 bp, Artificial
  Probe
gtgaatagcccttgcagagtttgta

SEQ ID NO: 270767 - DNA, 25 bp, Artificial
  Probe
cacccccaggcgaagttttctcttg

SEQ ID NO: 270768 - DNA, 25 bp, Artificial
  Probe
cgttattgcataagctaaagcagca

SEQ ID NO: 270769 - DNA, 25 bp, Artificial
  Probe
atagcccttgcagagtttgtaaatc

SEQ ID NO: 270770 - DNA, 25 bp, Artificial
  Probe
ttattgcataagctaaagcagcaaa

SEQ ID NO: 270771 - DNA, 25 bp, Artificial
  Probe
aagcagcaaacacccccaggcgaag

SEQ ID NO: 270772 - DNA, 25 bp, Artificial
  Probe
gaatagcccttgcagagtttgtaaa

SEQ ID NO: 270773 - DNA, 25 bp, Artificial
  Probe
ccacgttattgcataagctaaagca

SEQ ID NO: 270774 - DNA, 25 bp, Artificial
  Probe
cttgtttgtgaatagcccttgcaga

SEQ ID NO: 270775 - DNA, 25 bp, Artificial
  Probe
tattgcataagctaaagcagcaaac

SEQ ID NO: 270776 - DNA, 25 bp, Artificial
  Probe
ttgtgaatagcccttgcagagtttg

SEQ ID NO: 270777 - DNA, 25 bp, Artificial
  Probe
ggcgaagttttctcttgtttgtgaa

SEQ ID NO: 270778 - DNA, 25 bp, Artificial
  Probe
ctggtagtgaccacaagagctccag

SEQ ID NO: 270779 - DNA, 25 bp, Artificial
  Probe
actagaagggcttcaggcagtacct

SEQ ID NO: 270780 - DNA, 25 bp, Artificial
  Probe
atgggcagttcatccctgctgtcat

SEQ ID NO: 270781 - DNA, 25 bp, Artificial
  Probe
ctgctgtcatcagagccaccacaga

SEQ ID NO: 270782 - DNA, 25 bp, Artificial
  Probe
ctgcatgcaccgtcgggccaagaag

SEQ ID NO: 270783 - DNA, 25 bp, Artificial
  Probe
agatctataagaagcacctggactc

SEQ ID NO: 270784 - DNA, 25 bp, Artificial
  Probe
accatggcagcctctggtagtgacc

SEQ ID NO: 270785 - DNA, 25 bp, Artificial
  Probe
aggccacccatgacccaggtataca

SEQ ID NO: 270786 - DNA, 25 bp, Artificial
  Probe
aagaggccacccatgacccaggtat

SEQ ID NO: 270787 - DNA, 25 bp, Artificial
  Probe
gtgaccacaagagctccagcccagg

SEQ ID NO: 270788 - DNA, 25 bp, Artificial
  Probe
tcccaaccagccagtggagagtgat

SEQ ID NO: 270789 - DNA, 25 bp, Artificial
  Probe
caccgtcgggccaagaagaggccac

SEQ ID NO: 270790 - DNA, 25 bp, Artificial
  Probe
gaagtcccaaccagccagtggagag

SEQ ID NO: 270791 - DNA, 25 bp, Artificial
  Probe
tgctgtcatcagagccaccacagat

SEQ ID NO: 270792 - DNA, 25 bp, Artificial
  Probe
agagaggctagctgtacacaaggag

SEQ ID NO: 270793 - DNA, 25 bp, Artificial
  Probe
taccctgcattcctggcacttgact

SEQ ID NO: 270794 - DNA, 25 bp, Artificial
  Probe
ctaccagagaatcaagtttgaggag

SEQ ID NO: 270795 - DNA, 25 bp, Artificial
  Probe
acacaaggaggcactaccagagaat

SEQ ID NO: 270796 - DNA, 25 bp, Artificial
  Probe
tcatcgatgggcagttcatccctgc

SEQ ID NO: 270797 - DNA, 25 bp, Artificial
  Probe
ctggccagatctataagaagcacct

SEQ ID NO: 270798 - DNA, 25 bp, Artificial
  Probe
aaggctcatcgatgggcagttcatc

SEQ ID NO: 270799 - DNA, 25 bp, Artificial
  Probe
cagagaagtcccaaccagccagtgg

SEQ ID NO: 270800 - DNA, 25 bp, Artificial
  Probe
aagtttgaggagtggcccaggcttc

SEQ ID NO: 270801 - DNA, 25 bp, Artificial
  Probe
agtggcccaggcttccagcctacga

SEQ ID NO: 270802 - DNA, 25 bp, Artificial
  Probe
tgctaccctgcattcctggcacttg

SEQ ID NO: 270803 - DNA, 25 bp, Artificial
  Probe
gactagaagggcttcaggcagtacc

SEQ ID NO: 270804 - DNA, 25 bp, Artificial
  Probe
aggcttccagcctacgaccatggaa

SEQ ID NO: 270805 - DNA, 25 bp, Artificial
  Probe
gtcatcagagccaccacagatcatc

SEQ ID NO: 270806 - DNA, 25 bp, Artificial
  Probe
agaactcctacatgtccaccactgg

SEQ ID NO: 270807 - DNA, 25 bp, Artificial
  Probe
gcaactccagagaagtcccaaccag

SEQ ID NO: 270808 - DNA, 25 bp, Artificial
  Probe
tgcattcctggcacttgactccaga

SEQ ID NO: 270809 - DNA, 25 bp, Artificial
  Probe
tgacccaggtatacaagagactaga

SEQ ID NO: 270810 - DNA, 25 bp, Artificial
  Probe
cgtcgggccaagaagaggccaccca

SEQ ID NO: 270811 - DNA, 25 bp, Artificial
  Probe
ccacaggagaactcctacatgtcca

SEQ ID NO: 270812 - DNA, 25 bp, Artificial
  Probe
aagcacctggactccagacctgggc

SEQ ID NO: 270813 - DNA, 25 bp, Artificial
  Probe
ttcatccctgctgtcatcagagcca

SEQ ID NO: 270814 - DNA, 25 bp, Artificial
  Probe
tcctacatgtccaccactggcagtg

SEQ ID NO: 270815 - DNA, 25 bp, Artificial
  Probe
agcaactccagagaagtcccaacca

SEQ ID NO: 270816 - DNA, 25 bp, Artificial
  Probe
agtgatgagagtgttcctggcctct

SEQ ID NO: 270817 - DNA, 25 bp, Artificial
  Probe
tgggcctggccctggctcaactagc

SEQ ID NO: 270818 - DNA, 25 bp, Artificial
  Probe
gaatcaagtttgaggagtggcccag

SEQ ID NO: 270819 - DNA, 25 bp, Artificial
  Probe
ctggccctggctcaactagcttgct

SEQ ID NO: 270820 - DNA, 25 bp, Artificial
  Probe
tacgaccatggaaggctcatcgatg

SEQ ID NO: 270821 - DNA, 25 bp, Artificial
  Probe
atgaaccatggcagcctctggtagt

SEQ ID NO: 270822 - DNA, 25 bp, Artificial
  Probe
ttcctggcacttgactccagattcc

SEQ ID NO: 270823 - DNA, 25 bp, Artificial
  Probe
aaccagccagtggagagtgatgaga

SEQ ID NO: 270824 - DNA, 25 bp, Artificial
  Probe
ggaccagacaggagcacagaccctg

SEQ ID NO: 270825 - DNA, 25 bp, Artificial
  Probe
caccacgagacctcaagagagtacc

SEQ ID NO: 270826 - DNA, 25 bp, Artificial
  Probe
acctcaagagagtaccataccacag

SEQ ID NO: 270827 - DNA, 25 bp, Artificial
  Probe
tatactgcccgcagaagcgacacca

SEQ ID NO: 270828 - DNA, 25 bp, Artificial
  Probe
gacaggagcacagaccctgtacacg

SEQ ID NO: 270829 - DNA, 25 bp, Artificial
  Probe
aaccagcggaggatacgcacagcgg

SEQ ID NO: 270830 - DNA, 25 bp, Artificial
  Probe
caagagagtaccataccacaggcgg

SEQ ID NO: 270831 - DNA, 25 bp, Artificial
  Probe
gagagtaccataccacaggcggacc

SEQ ID NO: 270832 - DNA, 25 bp, Artificial
  Probe
agcaggaccagacaggagcacagac

SEQ ID NO: 270833 - DNA, 25 bp, Artificial
  Probe
aagagagtaccataccacaggcgga

SEQ ID NO: 270834 - DNA, 25 bp, Artificial
  Probe
acgaaccagcggaggatacgcacag

SEQ ID NO: 270835 - DNA, 25 bp, Artificial
  Probe
acgcctaagaccagacctcaacgaa

SEQ ID NO: 270836 - DNA, 25 bp, Artificial
  Probe
agaccagacctcaacgaaccagcgg

SEQ ID NO: 270837 - DNA, 25 bp, Artificial
  Probe
aagcaggaccagacaggagcacaga

SEQ ID NO: 270838 - DNA, 25 bp, Artificial
  Probe
aagaccagacctcaacgaaccagcg

SEQ ID NO: 270839 - DNA, 25 bp, Artificial
  Probe
cacgagacctcaagagagtaccata

SEQ ID NO: 270840 - DNA, 25 bp, Artificial
  Probe
ccagcggaggatacgcacagcggcc

SEQ ID NO: 270841 - DNA, 25 bp, Artificial
  Probe
accagacctcaacgaaccagcggag

SEQ ID NO: 270842 - DNA, 25 bp, Artificial
  Probe
gagcacagaccctgtacacgcgaca

SEQ ID NO: 270843 - DNA, 25 bp, Artificial
  Probe
agagtaccataccacaggcggaccc

SEQ ID NO: 270844 - DNA, 25 bp, Artificial
  Probe
agacaggagcacagaccctgtacac

SEQ ID NO: 270845 - DNA, 25 bp, Artificial
  Probe
gagacctcaagagagtaccatacca

SEQ ID NO: 270846 - DNA, 25 bp, Artificial
  Probe
acgcaccacgagacctcaagagagt

SEQ ID NO: 270847 - DNA, 25 bp, Artificial
  Probe
aggaccagacaggagcacagaccct

SEQ ID NO: 270848 - DNA, 25 bp, Artificial
  Probe
acgcgctctatactgcccgcagaag

SEQ ID NO: 270849 - DNA, 25 bp, Artificial
  Probe
cgagacctcaagagagtaccatacc

SEQ ID NO: 270850 - DNA, 25 bp, Artificial
  Probe
cggaggatacgcacagcggccgaca

SEQ ID NO: 270851 - DNA, 25 bp, Artificial
  Probe
ccacgagacctcaagagagtaccat

SEQ ID NO: 270852 - DNA, 25 bp, Artificial
  Probe
ccagacctcaacgaaccagcggagg

SEQ ID NO: 270853 - DNA, 25 bp, Artificial
  Probe
cacgcaccacgagacctcaagagag

SEQ ID NO: 270854 - DNA, 25 bp, Artificial
  Probe
ccagacaggagcacagaccctgtac

SEQ ID NO: 270855 - DNA, 25 bp, Artificial
  Probe
ccaagcaggaccagacaggagcaca

SEQ ID NO: 270856 - DNA, 25 bp, Artificial
  Probe
accagcggaggatacgcacagcggc

SEQ ID NO: 270857 - DNA, 25 bp, Artificial
  Probe
cgaaccagcggaggatacgcacagc

SEQ ID NO: 270858 - DNA, 25 bp, Artificial
  Probe
agacctcaacgaaccagcggaggat

SEQ ID NO: 270859 - DNA, 25 bp, Artificial
  Probe
ctaagaccagacctcaacgaaccag

SEQ ID NO: 270860 - DNA, 25 bp, Artificial
  Probe
gacctcaacgaaccagcggaggata

SEQ ID NO: 270861 - DNA, 25 bp, Artificial
  Probe
caggaccagacaggagcacagaccc

SEQ ID NO: 270862 - DNA, 25 bp, Artificial
  Probe
gaccagacctcaacgaaccagcgga

SEQ ID NO: 270863 - DNA, 25 bp, Artificial
  Probe
agcacgcaccacgagacctcaagag

SEQ ID NO: 270864 - DNA, 25 bp, Artificial
  Probe
gacctcaagagagtaccataccaca

SEQ ID NO: 270865 - DNA, 25 bp, Artificial
  Probe
cctcaacgaaccagcggaggatacg

SEQ ID NO: 270866 - DNA, 25 bp, Artificial
  Probe
aggacgcgcagcacgcaccacgaga

SEQ ID NO: 270867 - DNA, 25 bp, Artificial
  Probe
acaggagcacagaccctgtacacgc

SEQ ID NO: 270868 - DNA, 25 bp, Artificial
  Probe
gacctgcagccatgccatcgacagg

SEQ ID NO: 270869 - DNA, 25 bp, Artificial
  Probe
ctcaagagagtaccataccacaggc

SEQ ID NO: 270870 - DNA, 25 bp, Artificial
  Probe
gacgaagcacgacgagaaagaagat

SEQ ID NO: 270871 - DNA, 25 bp, Artificial
  Probe
catgtctaaattctgttttcagtag

SEQ ID NO: 270872 - DNA, 25 bp, Artificial
  Probe
cttgcgtggtctacaaggtcgcgag

SEQ ID NO: 270873 - DNA, 25 bp, Artificial
  Probe
gcgaatcaagcgaacgtatagtgcg

SEQ ID NO: 270874 - DNA, 25 bp, Artificial
  Probe
gatccccttgcgtggtctacaaggt

SEQ ID NO: 270875 - DNA, 25 bp, Artificial
  Probe
aactgagtacccatatgttgagatc

SEQ ID NO: 270876 - DNA, 25 bp, Artificial
  Probe
cccatatgttgagatccccttgcgt

SEQ ID NO: 270877 - DNA, 25 bp, Artificial
  Probe
tgacgcaaaacgagcagagacagga

SEQ ID NO: 270878 - DNA, 25 bp, Artificial
  Probe
acaaggtcgcgagctcaagggaccg

SEQ ID NO: 270879 - DNA, 25 bp, Artificial
  Probe
aatcaagcgaacgtatagtgcgaga

SEQ ID NO: 270880 - DNA, 25 bp, Artificial
  Probe
actgagtacccatatgttgagatcc

SEQ ID NO: 270881 - DNA, 25 bp, Artificial
  Probe
tccatcactggcagcgttcacagtg

SEQ ID NO: 270882 - DNA, 25 bp, Artificial
  Probe
tagacgaagcacgacgagaaagaag

SEQ ID NO: 270883 - DNA, 25 bp, Artificial
  Probe
acgaagcacgacgagaaagaagatg

SEQ ID NO: 270884 - DNA, 25 bp, Artificial
  Probe
cccttgcgtggtctacaaggtcgcg

SEQ ID NO: 270885 - DNA, 25 bp, Artificial
  Probe
gtggtctacaaggtcgcgagctcaa

SEQ ID NO: 270886 - DNA, 25 bp, Artificial
  Probe
gtgatccatcactggcagcgttcac

SEQ ID NO: 270887 - DNA, 25 bp, Artificial
  Probe
caagaggccacaagacaacatatga

SEQ ID NO: 270888 - DNA, 25 bp, Artificial
  Probe
actggcagcgttcacagtggactgg

SEQ ID NO: 270889 - DNA, 25 bp, Artificial
  Probe
tggtctacaaggtcgcgagctcaag

SEQ ID NO: 270890 - DNA, 25 bp, Artificial
  Probe
tgcgtggtctacaaggtcgcgagct

SEQ ID NO: 270891 - DNA, 25 bp, Artificial
  Probe
caaggtcgcgagctcaagggaccga

SEQ ID NO: 270892 - DNA, 25 bp, Artificial
  Probe
gatagacgaagcacgacgagaaaga

SEQ ID NO: 270893 - DNA, 25 bp, Artificial
  Probe
ctgagtacccatatgttgagatccc

SEQ ID NO: 270894 - DNA, 25 bp, Artificial
  Probe
gcacaagaggccacaagacaacata

SEQ ID NO: 270895 - DNA, 25 bp, Artificial
  Probe
tcactggcagcgttcacagtggact

SEQ ID NO: 270896 - DNA, 25 bp, Artificial
  Probe
agatgacgcaaaacgagcagagaca

SEQ ID NO: 270897 - DNA, 25 bp, Artificial
  Probe
aagcgaacgtatagtgcgagaggac

SEQ ID NO: 270898 - DNA, 25 bp, Artificial
  Probe
atataagcgaatcaagcgaacgtat

SEQ ID NO: 270899 - DNA, 25 bp, Artificial
  Probe
aatataagcgaatcaagcgaacgta

SEQ ID NO: 270900 - DNA, 25 bp, Artificial
  Probe
cactggcagcgttcacagtggactg

SEQ ID NO: 270901 - DNA, 25 bp, Artificial
  Probe
gtacccatatgttgagatccccttg

SEQ ID NO: 270902 - DNA, 25 bp, Artificial
  Probe
cagcgttcacagtggactgggaaac

SEQ ID NO: 270903 - DNA, 25 bp, Artificial
  Probe
aatgagcacaagaggccacaagaca

SEQ ID NO: 270904 - DNA, 25 bp, Artificial
  Probe
ataagcgaatcaagcgaacgtatag

SEQ ID NO: 270905 - DNA, 25 bp, Artificial
  Probe
gagtgatccatcactggcagcgttc

SEQ ID NO: 270906 - DNA, 25 bp, Artificial
  Probe
catatgttgagatccccttgcgtgg

SEQ ID NO: 270907 - DNA, 25 bp, Artificial
  Probe
atgacgcaaaacgagcagagacagg

SEQ ID NO: 270908 - DNA, 25 bp, Artificial
  Probe
gcaaaacgagcagagacaggaacag

SEQ ID NO: 270909 - DNA, 25 bp, Artificial
  Probe
cacaagaggccacaagacaacatat

SEQ ID NO: 270910 - DNA, 25 bp, Artificial
  Probe
gttgagatccccttgcgtggtctac

SEQ ID NO: 270911 - DNA, 25 bp, Artificial
  Probe
tacaaggtcgcgagctcaagggacc

SEQ ID NO: 270912 - DNA, 25 bp, Artificial
  Probe
gatgacgcaaaacgagcagagacag

SEQ ID NO: 270913 - DNA, 25 bp, Artificial
  Probe
cgcaaaacgagcagagacaggaaca

SEQ ID NO: 270914 - DNA, 25 bp, Artificial
  Probe
atccccttgcgtggtctacaaggtc

SEQ ID NO: 270915 - DNA, 25 bp, Artificial
  Probe
gagtacccatatgttgagatcccct

SEQ ID NO: 270916 - DNA, 25 bp, Artificial
  Probe
aaatcgggagtttctgtctaccact

SEQ ID NO: 270917 - DNA, 25 bp, Artificial
  Probe
tacaccgcacaagaacagccggaca

SEQ ID NO: 270918 - DNA, 25 bp, Artificial
  Probe
agacgatccgggtataccgagtgag

SEQ ID NO: 270919 - DNA, 25 bp, Artificial
  Probe
gaaacatttattcaaacagtgccag

SEQ ID NO: 270920 - DNA, 25 bp, Artificial
  Probe
cacaactcaaatcaggaaatggggg

SEQ ID NO: 270921 - DNA, 25 bp, Artificial
  Probe
gatcggcacaaccaaaaacatctga

SEQ ID NO: 270922 - DNA, 25 bp, Artificial
  Probe
ctgactttgaaaatcgggagtttct

SEQ ID NO: 270923 - DNA, 25 bp, Artificial
  Probe
ggagtttctgtctaccactaaaatc

SEQ ID NO: 270924 - DNA, 25 bp, Artificial
  Probe
agataaaacagaacgccttcatgcc

SEQ ID NO: 270925 - DNA, 25 bp, Artificial
  Probe
atatgtgataacacatctaaacagg

SEQ ID NO: 270926 - DNA, 25 bp, Artificial
  Probe
atctaaacagggttagtcagcaaaa

SEQ ID NO: 270927 - DNA, 25 bp, Artificial
  Probe
tcgggagtttctgtctaccactaaa

SEQ ID NO: 270928 - DNA, 25 bp, Artificial
  Probe
tgacagcagacaacttatccatctg

SEQ ID NO: 270929 - DNA, 25 bp, Artificial
  Probe
aatactgtggatgtccacaactcaa

SEQ ID NO: 270930 - DNA, 25 bp, Artificial
  Probe
aacagaacgccttcatgccttgaaa

SEQ ID NO: 270931 - DNA, 25 bp, Artificial
  Probe
atgtgataacacatctaaacagggt

SEQ ID NO: 270932 - DNA, 25 bp, Artificial
  Probe
acgtcaacactcacgcgtagggaaa

SEQ ID NO: 270933 - DNA, 25 bp, Artificial
  Probe
tctaaacagggttagtcagcaaaat

SEQ ID NO: 270934 - DNA, 25 bp, Artificial
  Probe
actatacaccgcacaagaacagccg

SEQ ID NO: 270935 - DNA, 25 bp, Artificial
  Probe
ggtataccgagtgaggatgctgaac

SEQ ID NO: 270936 - DNA, 25 bp, Artificial
  Probe
tgaaaatcgggagtttctgtctacc

SEQ ID NO: 270937 - DNA, 25 bp, Artificial
  Probe
gacagcagacaacttatccatctgt

SEQ ID NO: 270938 - DNA, 25 bp, Artificial
  Probe
aacactcacgcgtagggaaagatcg

SEQ ID NO: 270939 - DNA, 25 bp, Artificial
  Probe
ctcagaatcaccagcgagacgatcc

SEQ ID NO: 270940 - DNA, 25 bp, Artificial
  Probe
ggatgctgaacgtcaacactcacgc

SEQ ID NO: 270941 - DNA, 25 bp, Artificial
  Probe
aaactgaaatactgtggatgtccac

SEQ ID NO: 270942 - DNA, 25 bp, Artificial
  Probe
accgcacaagaacagccggacacaa

SEQ ID NO: 270943 - DNA, 25 bp, Artificial
  Probe
agaacgccttcatgccttgaaagaa

SEQ ID NO: 270944 - DNA, 25 bp, Artificial
  Probe
taacacatctaaacagggttagtca

SEQ ID NO: 270945 - DNA, 25 bp, Artificial
  Probe
taccgagtgaggatgctgaacgtca

SEQ ID NO: 270946 - DNA, 25 bp, Artificial
  Probe
gtcaaggacattcattgcacacctg

SEQ ID NO: 270947 - DNA, 25 bp, Artificial
  Probe
gaatcaccagcgagacgatccgggt

SEQ ID NO: 270948 - DNA, 25 bp, Artificial
  Probe
ccagcgagacgatccgggtataccg

SEQ ID NO: 270949 - DNA, 25 bp, Artificial
  Probe
aactgaaatactgtggatgtccaca

SEQ ID NO: 270950 - DNA, 25 bp, Artificial
  Probe
cctccaataagaaacgagttagata

SEQ ID NO: 270951 - DNA, 25 bp, Artificial
  Probe
gacctgactttgaaaatcgggagtt

SEQ ID NO: 270952 - DNA, 25 bp, Artificial
  Probe
cgatccgggtataccgagtgaggat

SEQ ID NO: 270953 - DNA, 25 bp, Artificial
  Probe
ttgaaaatcgggagtttctgtctac

SEQ ID NO: 270954 - DNA, 25 bp, Artificial
  Probe
acacatctaaacagggttagtcagc

SEQ ID NO: 270955 - DNA, 25 bp, Artificial
  Probe
ggccaactttgatgagacctgactt

SEQ ID NO: 270956 - DNA, 25 bp, Artificial
  Probe
acactcacgcgtagggaaagatcgg

SEQ ID NO: 270957 - DNA, 25 bp, Artificial
  Probe
agatcggcacaaccaaaaacatctg

SEQ ID NO: 270958 - DNA, 25 bp, Artificial
  Probe
tcacgcgtagggaaagatcggcaca

SEQ ID NO: 270959 - DNA, 25 bp, Artificial
  Probe
atcctgtaaactatgatgtattcag

SEQ ID NO: 270960 - DNA, 25 bp, Artificial
  Probe
ctgaaagatcctccaataagaaacg

SEQ ID NO: 270961 - DNA, 25 bp, Artificial
  Probe
cggcacaaccaaaaacatctgaaag

SEQ ID NO: 270962 - DNA, 25 bp, Artificial
  Probe
cggataaggcaactcctgagagaga

SEQ ID NO: 270963 - DNA, 25 bp, Artificial
  Probe
ccggtcaaaacgtgcaccttgacgg

SEQ ID NO: 270964 - DNA, 25 bp, Artificial
  Probe
aggcaactcctgagagagagtatta

SEQ ID NO: 270965 - DNA, 25 bp, Artificial
  Probe
cggtcaaaacgtgcaccttgacgga

SEQ ID NO: 270966 - DNA, 25 bp, Artificial
  Probe
ggcaactcctgagagagagtattag

SEQ ID NO: 270967 - DNA, 25 bp, Artificial
  Probe
actcctgagagagagtattaggtgg

SEQ ID NO: 270968 - DNA, 25 bp, Artificial
  Probe
caccttgacggataaggcaactcct

SEQ ID NO: 270969 - DNA, 25 bp, Artificial
  Probe
accggtcaaaacgtgcaccttgacg

SEQ ID NO: 270970 - DNA, 25 bp, Artificial
  Probe
tcaaaacgtgcaccttgacggataa

SEQ ID NO: 270971 - DNA, 25 bp, Artificial
  Probe
gggaccggtcaaaacgtgcaccttg

SEQ ID NO: 270972 - DNA, 25 bp, Artificial
  Probe
cataaacggcggacacgcgagggac

SEQ ID NO: 270973 - DNA, 25 bp, Artificial
  Probe
cggaccatggcagaggacataaacg

SEQ ID NO: 270974 - DNA, 25 bp, Artificial
  Probe
gcggaccatggcagaggacataaac

SEQ ID NO: 270975 - DNA, 25 bp, Artificial
  Probe
tgcaccttgacggataaggcaactc

SEQ ID NO: 270976 - DNA, 25 bp, Artificial
  Probe
taaggcaactcctgagagagagtat

SEQ ID NO: 270977 - DNA, 25 bp, Artificial
  Probe
cgcgagggaccggtcaaaacgtgca

SEQ ID NO: 270978 - DNA, 25 bp, Artificial
  Probe
agagtattaggtggcaccgcgaggg

SEQ ID NO: 270979 - DNA, 25 bp, Artificial
  Probe
gataaggcaactcctgagagagagt

SEQ ID NO: 270980 - DNA, 25 bp, Artificial
  Probe
acgtgcaccttgacggataaggcaa

SEQ ID NO: 270981 - DNA, 25 bp, Artificial
  Probe
acggataaggcaactcctgagagag

SEQ ID NO: 270982 - DNA, 25 bp, Artificial
  Probe
aacgtgcaccttgacggataaggca

SEQ ID NO: 270983 - DNA, 25 bp, Artificial
  Probe
gtcaaaacgtgcaccttgacggata

SEQ ID NO: 270984 - DNA, 25 bp, Artificial
  Probe
gaccggtcaaaacgtgcaccttgac

SEQ ID NO: 270985 - DNA, 25 bp, Artificial
  Probe
gcgagggaccggtcaaaacgtgcac

SEQ ID NO: 270986 - DNA, 25 bp, Artificial
  Probe
taaacggcggacacgcgagggaccg

SEQ ID NO: 270987 - DNA, 25 bp, Artificial
  Probe
accttgacggataaggcaactcctg

SEQ ID NO: 270988 - DNA, 25 bp, Artificial
  Probe
aaacgtgcaccttgacggataaggc

SEQ ID NO: 270989 - DNA, 25 bp, Artificial
  Probe
aggacataaacggcggacacgcgag

SEQ ID NO: 270990 - DNA, 25 bp, Artificial
  Probe
ggataaggcaactcctgagagagag

SEQ ID NO: 270991 - DNA, 25 bp, Artificial
  Probe
aaggcaactcctgagagagagtatt

SEQ ID NO: 270992 - DNA, 25 bp, Artificial
  Probe
caactcctgagagagagtattaggt

SEQ ID NO: 270993 - DNA, 25 bp, Artificial
  Probe
gacacgcgagggaccggtcaaaacg

SEQ ID NO: 270994 - DNA, 25 bp, Artificial
  Probe
aaacggggggcggaccatggcagag

SEQ ID NO: 270995 - DNA, 25 bp, Artificial
  Probe
gcaccttgacggataaggcaactcc

SEQ ID NO: 270996 - DNA, 25 bp, Artificial
  Probe
ggaccggtcaaaacgtgcaccttga

SEQ ID NO: 270997 - DNA, 25 bp, Artificial
  Probe
cacacaaacgacaacacaaagaaaa

SEQ ID NO: 270998 - DNA, 25 bp, Artificial
  Probe
ataaggcaactcctgagagagagta

SEQ ID NO: 270999 - DNA, 25 bp, Artificial
  Probe
ggcggaccatggcagaggacataaa

SEQ ID NO: 271000 - DNA, 25 bp, Artificial
  Probe
aactcctgagagagagtattaggtg

SEQ ID NO: 271001 - DNA, 25 bp, Artificial
  Probe
ggaccatggcagaggacataaacgg

SEQ ID NO: 271002 - DNA, 25 bp, Artificial
  Probe
gaccatggcagaggacataaacggc

SEQ ID NO: 271003 - DNA, 25 bp, Artificial
  Probe
gacggataaggcaactcctgagaga

SEQ ID NO: 271004 - DNA, 25 bp, Artificial
  Probe
ggtcaaaacgtgcaccttgacggat

SEQ ID NO: 271005 - DNA, 25 bp, Artificial
  Probe
cacgcgagggaccggtcaaaacgtg

SEQ ID NO: 271006 - DNA, 25 bp, Artificial
  Probe
gcaactcctgagagagagtattagg

SEQ ID NO: 271007 - DNA, 25 bp, Artificial
  Probe
gagggaccggtcaaaacgtgcacct

SEQ ID NO: 271008 - DNA, 25 bp, Artificial
  Probe
gggtgacactaatgcttttggatca

SEQ ID NO: 271009 - DNA, 25 bp, Artificial
  Probe
tccccggttcgaaacgtcagactct

SEQ ID NO: 271010 - DNA, 25 bp, Artificial
  Probe
atgaacattgcctctggctgtcccc

SEQ ID NO: 271011 - DNA, 25 bp, Artificial
  Probe
ggctaccggctctgtgccagagcgt

SEQ ID NO: 271012 - DNA, 25 bp, Artificial
  Probe
tacagtggccattcaggcagagggt

SEQ ID NO: 271013 - DNA, 25 bp, Artificial
  Probe
agccgctgtggctaccggctctgtg

SEQ ID NO: 271014 - DNA, 25 bp, Artificial
  Probe
ataccagccgctgtggctaccggct

SEQ ID NO: 271015 - DNA, 25 bp, Artificial
  Probe
ccttcaaagctgaccccaatagcag

SEQ ID NO: 271016 - DNA, 25 bp, Artificial
  Probe
ggaacacctacattaaagacgacac

SEQ ID NO: 271017 - DNA, 25 bp, Artificial
  Probe
tggctaccggctctgtgccagagcg

SEQ ID NO: 271018 - DNA, 25 bp, Artificial
  Probe
cggctctgtgccagagcgtacctga

SEQ ID NO: 271019 - DNA, 25 bp, Artificial
  Probe
ggccattcaggcagagggtgacact

SEQ ID NO: 271020 - DNA, 25 bp, Artificial
  Probe
cagcagcttcagaagaccggacggg

SEQ ID NO: 271021 - DNA, 25 bp, Artificial
  Probe
gagagttccaggaacacctacatta

SEQ ID NO: 271022 - DNA, 25 bp, Artificial
  Probe
gccgctgtggctaccggctctgtgc

SEQ ID NO: 271023 - DNA, 25 bp, Artificial
  Probe
attgcctctggctgtccccgctttg

SEQ ID NO: 271024 - DNA, 25 bp, Artificial
  Probe
aatgttaactgatagctccacacag

SEQ ID NO: 271025 - DNA, 25 bp, Artificial
  Probe
tgcctctggctgtccccgctttgtt

SEQ ID NO: 271026 - DNA, 25 bp, Artificial
  Probe
ccattcaggcagagggtgacactaa

SEQ ID NO: 271027 - DNA, 25 bp, Artificial
  Probe
aagacgacaccctattcttgaaagt

SEQ ID NO: 271028 - DNA, 25 bp, Artificial
  Probe
cgatgtgacaccttggatccttccc

SEQ ID NO: 271029 - DNA, 25 bp, Artificial
  Probe
cgctttgtttctcattctactctgg

SEQ ID NO: 271030 - DNA, 25 bp, Artificial
  Probe
gctgtccccgctttgtttctcattc

SEQ ID NO: 271031 - DNA, 25 bp, Artificial
  Probe
gtggccgtggatttaactgacttgg

SEQ ID NO: 271032 - DNA, 25 bp, Artificial
  Probe
gctccacacaggagccgatgtgact

SEQ ID NO: 271033 - DNA, 25 bp, Artificial
  Probe
tgaacattgcctctggctgtccccg

SEQ ID NO: 271034 - DNA, 25 bp, Artificial
  Probe
gagcatgcttttgttcttatcttcc

SEQ ID NO: 271035 - DNA, 25 bp, Artificial
  Probe
aaagctgaccccaatagcagcagct

SEQ ID NO: 271036 - DNA, 25 bp, Artificial
  Probe
gctctgtgccagagcgtacctgaac

SEQ ID NO: 271037 - DNA, 25 bp, Artificial
  Probe
gggtgagttcgactcactattacag

SEQ ID NO: 271038 - DNA, 25 bp, Artificial
  Probe
ctctggagagttccaggaacaccta

SEQ ID NO: 271039 - DNA, 25 bp, Artificial
  Probe
tcactattacagtggccattcaggc

SEQ ID NO: 271040 - DNA, 25 bp, Artificial
  Probe
ctaatgcttttggatcagagtggca

SEQ ID NO: 271041 - DNA, 25 bp, Artificial
  Probe
tcctttaagccatgccctttgggcg

SEQ ID NO: 271042 - DNA, 25 bp, Artificial
  Probe
tgccagagcgtacctgaacggggat

SEQ ID NO: 271043 - DNA, 25 bp, Artificial
  Probe
atcttcctgcctttaatgtccgatg

SEQ ID NO: 271044 - DNA, 25 bp, Artificial
  Probe
ggctgtccccgctttgtttctcatt

SEQ ID NO: 271045 - DNA, 25 bp, Artificial
  Probe
ctactctggagagttccaggaacac

SEQ ID NO: 271046 - DNA, 25 bp, Artificial
  Probe
gcggagcatgcttttgttcttatct

SEQ ID NO: 271047 - DNA, 25 bp, Artificial
  Probe
gcacctgtctttgtactttgtggtg

SEQ ID NO: 271048 - DNA, 25 bp, Artificial
  Probe
ctattcttgaaagtggccgtggatt

SEQ ID NO: 271049 - DNA, 25 bp, Artificial
  Probe
attacagtggccattcaggcagagg

SEQ ID NO: 271050 - DNA, 25 bp, Artificial
  Probe
acacaggagccgatgtgactgtcct

SEQ ID NO: 271051 - DNA, 25 bp, Artificial
  Probe
gcaagaagaaccacattgtggagac

SEQ ID NO: 271052 - DNA, 25 bp, Artificial
  Probe
gaagggaacgcacctgtctttgtac

SEQ ID NO: 271053 - DNA, 25 bp, Artificial
  Probe
gaaagtggccgtggatttaactgac

SEQ ID NO: 271054 - DNA, 25 bp, Artificial
  Probe
accacctgagttagaaatctaagca

SEQ ID NO: 271055 - DNA, 25 bp, Artificial
  Probe
cctgcagaacgtgtatgcacctgaa

SEQ ID NO: 271056 - DNA, 25 bp, Artificial
  Probe
gaggttagcagctgacaatgatgcg

SEQ ID NO: 271057 - DNA, 25 bp, Artificial
  Probe
ctcctttgaccaaaatgaggagctc

SEQ ID NO: 271058 - DNA, 25 bp, Artificial
  Probe
gggcactcacactgcagggttcttt

SEQ ID NO: 271059 - DNA, 25 bp, Artificial
  Probe
agctgacaatgatgcggctgcaggc

SEQ ID NO: 271060 - DNA, 25 bp, Artificial
  Probe
ggaaaccacctgagttagaaatcta

SEQ ID NO: 271061 - DNA, 25 bp, Artificial
  Probe
tgatgcggctgcaggcctactgtgc

SEQ ID NO: 271062 - DNA, 25 bp, Artificial
  Probe
tagagcggtacaagcgctcctttga

SEQ ID NO: 271063 - DNA, 25 bp, Artificial
  Probe
gctatgaggcagacctggccccaca

SEQ ID NO: 271064 - DNA, 25 bp, Artificial
  Probe
agacagagggctatgaggcagacct

SEQ ID NO: 271065 - DNA, 25 bp, Artificial
  Probe
cacctgaagatgacccggagatgaa

SEQ ID NO: 271066 - DNA, 25 bp, Artificial
  Probe
cacactgcagggttctttgttactg

SEQ ID NO: 271067 - DNA, 25 bp, Artificial
  Probe
ctgtgcttcttgaccttcctttggc

SEQ ID NO: 271068 - DNA, 25 bp, Artificial
  Probe
gcagaacgtgtatgcacctgaagat

SEQ ID NO: 271069 - DNA, 25 bp, Artificial
  Probe
gtagcagtgggcagcccacaggcca

SEQ ID NO: 271070 - DNA, 25 bp, Artificial
  Probe
agaaggctgagtgttcaagccctcc

SEQ ID NO: 271071 - DNA, 25 bp, Artificial
  Probe
gcctactgtgcttcttgaccttcct

SEQ ID NO: 271072 - DNA, 25 bp, Artificial
  Probe
cctcaatgacatgaagacagagggc

SEQ ID NO: 271073 - DNA, 25 bp, Artificial
  Probe
gggctatgaggcagacctggcccca

SEQ ID NO: 271074 - DNA, 25 bp, Artificial
  Probe
cggctgcaggcctactgtgcttctt

SEQ ID NO: 271075 - DNA, 25 bp, Artificial
  Probe
ccccacagcggtagcagtgggcagc

SEQ ID NO: 271076 - DNA, 25 bp, Artificial
  Probe
ctgcagggttctttgttactgttgg

SEQ ID NO: 271077 - DNA, 25 bp, Artificial
  Probe
tactgtgcttcttgaccttcctttg

SEQ ID NO: 271078 - DNA, 25 bp, Artificial
  Probe
acagcggtagcagtgggcagcccac

SEQ ID NO: 271079 - DNA, 25 bp, Artificial
  Probe
acctggccccacagcggtagcagtg

SEQ ID NO: 271080 - DNA, 25 bp, Artificial
  Probe
gttagaaatctaagcacacgaggtt

SEQ ID NO: 271081 - DNA, 25 bp, Artificial
  Probe
gaaatctaagcacacgaggttagca

SEQ ID NO: 271082 - DNA, 25 bp, Artificial
  Probe
ctccgtggtgaggaggaaaccacct

SEQ ID NO: 271083 - DNA, 25 bp, Artificial
  Probe
tcctccgtggtgaggaggaaaccac

SEQ ID NO: 271084 - DNA, 25 bp, Artificial
  Probe
ctgcagaacgtgtatgcacctgaag

SEQ ID NO: 271085 - DNA, 25 bp, Artificial
  Probe
ggcactcacactgcagggttctttg

SEQ ID NO: 271086 - DNA, 25 bp, Artificial
  Probe
tagaaatctaagcacacgaggttag

SEQ ID NO: 271087 - DNA, 25 bp, Artificial
  Probe
ggaggaaaccacctgagttagaaat

SEQ ID NO: 271088 - DNA, 25 bp, Artificial
  Probe
tatgaggcagacctggccccacagc

SEQ ID NO: 271089 - DNA, 25 bp, Artificial
  Probe
cagcggtagcagtgggcagcccaca

SEQ ID NO: 271090 - DNA, 25 bp, Artificial
  Probe
tgaccaaaatgaggagctcggcctc

SEQ ID NO: 271091 - DNA, 25 bp, Artificial
  Probe
cctttgaccaaaatgaggagctcgg

SEQ ID NO: 271092 - DNA, 25 bp, Artificial
  Probe
tgcagggcactcacactgcagggtt

SEQ ID NO: 271093 - DNA, 25 bp, Artificial
  Probe
caatgatgcggctgcaggcctactg

SEQ ID NO: 271094 - DNA, 25 bp, Artificial
  Probe
acgaggttagcagctgacaatgatg

SEQ ID NO: 271095 - DNA, 25 bp, Artificial
  Probe
ctcctccgtggtgaggaggaaacca

SEQ ID NO: 271096 - DNA, 25 bp, Artificial
  Probe
gcgctcctttgaccaaaatgaggag

SEQ ID NO: 271097 - DNA, 25 bp, Artificial
  Probe
atgaggcagacctggccccacagcg

SEQ ID NO: 271098 - DNA, 25 bp, Artificial
  Probe
cggtacaagcgctcctttgaccaaa

SEQ ID NO: 271099 - DNA, 25 bp, Artificial
  Probe
aggagctcggcctcaatgacatgaa

SEQ ID NO: 271100 - DNA, 25 bp, Artificial
  Probe
gtgctcttagcattctgtataaagc

SEQ ID NO: 271101 - DNA, 25 bp, Artificial
  Probe
aatcgggcaccaccttcgtcaggga

SEQ ID NO: 271102 - DNA, 25 bp, Artificial
  Probe
agcattctgtataaagcagtactgt

SEQ ID NO: 271103 - DNA, 25 bp, Artificial
  Probe
cccagaagccagaaagaagggcacg

SEQ ID NO: 271104 - DNA, 25 bp, Artificial
  Probe
ttagcattctgtataaagcagtact

SEQ ID NO: 271105 - DNA, 25 bp, Artificial
  Probe
tgcagtcacagaagttccaaatagg

SEQ ID NO: 271106 - DNA, 25 bp, Artificial
  Probe
ccctgcagtcacagaagttccaaat

SEQ ID NO: 271107 - DNA, 25 bp, Artificial
  Probe
gctcttagcattctgtataaagcag

SEQ ID NO: 271108 - DNA, 25 bp, Artificial
  Probe
gcagtcacagaagttccaaataggg

SEQ ID NO: 271109 - DNA, 25 bp, Artificial
  Probe
acccagaagccagaaagaagggcac

SEQ ID NO: 271110 - DNA, 25 bp, Artificial
  Probe
tagcattctgtataaagcagtactg

SEQ ID NO: 271111 - DNA, 25 bp, Artificial
  Probe
aaagtgctcttagcattctgtataa

SEQ ID NO: 271112 - DNA, 25 bp, Artificial
  Probe
tcacagaagttccaaataggggatt

SEQ ID NO: 271113 - DNA, 25 bp, Artificial
  Probe
cgagctgcagatctacacctggatg

SEQ ID NO: 271114 - DNA, 25 bp, Artificial
  Probe
caaatcgggcaccaccttcgtcagg

SEQ ID NO: 271115 - DNA, 25 bp, Artificial
  Probe
tacccagaagccagaaagaagggca

SEQ ID NO: 271116 - DNA, 25 bp, Artificial
  Probe
ttctcccgcgggaacgtgccttcga

SEQ ID NO: 271117 - DNA, 25 bp, Artificial
  Probe
gtcacagaagttccaaataggggat

SEQ ID NO: 271118 - DNA, 25 bp, Artificial
  Probe
agtgctcttagcattctgtataaag

SEQ ID NO: 271119 - DNA, 25 bp, Artificial
  Probe
ctcttagcattctgtataaagcagt

SEQ ID NO: 271120 - DNA, 25 bp, Artificial
  Probe
aagtctacccagaagccagaaagaa

SEQ ID NO: 271121 - DNA, 25 bp, Artificial
  Probe
ctgcagtcacagaagttccaaatag

SEQ ID NO: 271122 - DNA, 25 bp, Artificial
  Probe
cagtcacagaagttccaaatagggg

SEQ ID NO: 271123 - DNA, 25 bp, Artificial
  Probe
cacagaagttccaaataggggatta

SEQ ID NO: 271124 - DNA, 25 bp, Artificial
  Probe
cttagcattctgtataaagcagtac

SEQ ID NO: 271125 - DNA, 25 bp, Artificial
  Probe
cctgcagtcacagaagttccaaata

SEQ ID NO: 271126 - DNA, 25 bp, Artificial
  Probe
atcgggcaccaccttcgtcagggag

SEQ ID NO: 271127 - DNA, 25 bp, Artificial
  Probe
agtctacccagaagccagaaagaag

SEQ ID NO: 271128 - DNA, 25 bp, Artificial
  Probe
aagtgctcttagcattctgtataaa

SEQ ID NO: 271129 - DNA, 25 bp, Artificial
  Probe
tcgggcaccaccttcgtcagggagg

SEQ ID NO: 271130 - DNA, 25 bp, Artificial
  Probe
agtcacagaagttccaaatagggga

SEQ ID NO: 271131 - DNA, 25 bp, Artificial
  Probe
aaatcgggcaccaccttcgtcaggg

SEQ ID NO: 271132 - DNA, 25 bp, Artificial
  Probe
tcttagcattctgtataaagcagta

SEQ ID NO: 271133 - DNA, 25 bp, Artificial
  Probe
gctattttcccaagaagatctcaga

SEQ ID NO: 271134 - DNA, 25 bp, Artificial
  Probe
ctgagcaatctgaaggctccattgg

SEQ ID NO: 271135 - DNA, 25 bp, Artificial
  Probe
aacctgcttgggagctattttccca

SEQ ID NO: 271136 - DNA, 25 bp, Artificial
  Probe
cgaagccaacctgagcaatctgaag

SEQ ID NO: 271137 - DNA, 25 bp, Artificial
  Probe
ctcaacgaagccaacctgagcaatc

SEQ ID NO: 271138 - DNA, 25 bp, Artificial
  Probe
aaggagccagctctcaacgaagcca

SEQ ID NO: 271139 - DNA, 25 bp, Artificial
  Probe
agctattttcccaagaagatctcag

SEQ ID NO: 271140 - DNA, 25 bp, Artificial
  Probe
agagaacctgcttgggagctatttt

SEQ ID NO: 271141 - DNA, 25 bp, Artificial
  Probe
actgagggtccatcctgaagcccaa

SEQ ID NO: 271142 - DNA, 25 bp, Artificial
  Probe
aagacagagaacctgcttgggagct

SEQ ID NO: 271143 - DNA, 25 bp, Artificial
  Probe
cggctctggccatggctacactgag

SEQ ID NO: 271144 - DNA, 25 bp, Artificial
  Probe
agggtccatcctgaagcccaagcca

SEQ ID NO: 271145 - DNA, 25 bp, Artificial
  Probe
cctgcttgggagctattttcccaag

SEQ ID NO: 271146 - DNA, 25 bp, Artificial
  Probe
acctgagcaatctgaaggctccatt

SEQ ID NO: 271147 - DNA, 25 bp, Artificial
  Probe
cctgagcaatctgaaggctccattg

SEQ ID NO: 271148 - DNA, 25 bp, Artificial
  Probe
ttcccaagaagatctcagagttgga

SEQ ID NO: 271149 - DNA, 25 bp, Artificial
  Probe
tacactgagggtccatcctgaagcc

SEQ ID NO: 271150 - DNA, 25 bp, Artificial
  Probe
acgaagccaacctgagcaatctgaa

SEQ ID NO: 271151 - DNA, 25 bp, Artificial
  Probe
cagagaacctgcttgggagctattt

SEQ ID NO: 271152 - DNA, 25 bp, Artificial
  Probe
ccggctctggccatggctacactga

SEQ ID NO: 271153 - DNA, 25 bp, Artificial
  Probe
tattttcccaagaagatctcagagt

SEQ ID NO: 271154 - DNA, 25 bp, Artificial
  Probe
agctctcaacgaagccaacctgagc

SEQ ID NO: 271155 - DNA, 25 bp, Artificial
  Probe
ggagccagctctcaacgaagccaac

SEQ ID NO: 271156 - DNA, 25 bp, Artificial
  Probe
ttaaaggagccagctctcaacgaag

SEQ ID NO: 271157 - DNA, 25 bp, Artificial
  Probe
taagacagagaacctgcttgggagc

SEQ ID NO: 271158 - DNA, 25 bp, Artificial
  Probe
cttaaaggagccagctctcaacgaa

SEQ ID NO: 271159 - DNA, 25 bp, Artificial
  Probe
gccaacctgagcaatctgaaggctc

SEQ ID NO: 271160 - DNA, 25 bp, Artificial
  Probe
aacctgagcaatctgaaggctccat

SEQ ID NO: 271161 - DNA, 25 bp, Artificial
  Probe
tgggagctattttcccaagaagatc

SEQ ID NO: 271162 - DNA, 25 bp, Artificial
  Probe
tgagggtccatcctgaagcccaagc

SEQ ID NO: 271163 - DNA, 25 bp, Artificial
  Probe
agacagagaacctgcttgggagcta

SEQ ID NO: 271164 - DNA, 25 bp, Artificial
  Probe
tggccatggctacactgagggtcca

SEQ ID NO: 271165 - DNA, 25 bp, Artificial
  Probe
cagctctcaacgaagccaacctgag

SEQ ID NO: 271166 - DNA, 25 bp, Artificial
  Probe
tctggccatggctacactgagggtc

SEQ ID NO: 271167 - DNA, 25 bp, Artificial
  Probe
gcttgggagctattttcccaagaag

SEQ ID NO: 271168 - DNA, 25 bp, Artificial
  Probe
cactgagggtccatcctgaagccca

SEQ ID NO: 271169 - DNA, 25 bp, Artificial
  Probe
atggctacactgagggtccatcctg

SEQ ID NO: 271170 - DNA, 25 bp, Artificial
  Probe
ccatggctacactgagggtccatcc

SEQ ID NO: 271171 - DNA, 25 bp, Artificial
  Probe
tttcccaagaagatctcagagttgg

SEQ ID NO: 271172 - DNA, 25 bp, Artificial
  Probe
ggtccatcctgaagcccaagccaag

SEQ ID NO: 271173 - DNA, 25 bp, Artificial
  Probe
agccaacctgagcaatctgaaggct

SEQ ID NO: 271174 - DNA, 25 bp, Artificial
  Probe
aaaggagccagctctcaacgaagcc

SEQ ID NO: 271175 - DNA, 25 bp, Artificial
  Probe
acctgcttgggagctattttcccaa

SEQ ID NO: 271176 - DNA, 25 bp, Artificial
  Probe
ctacactgagggtccatcctgaagc

SEQ ID NO: 271177 - DNA, 25 bp, Artificial
  Probe
cttgggagctattttcccaagaaga

SEQ ID NO: 271178 - DNA, 25 bp, Artificial
  Probe
caacgaagccaacctgagcaatctg

SEQ ID NO: 271179 - DNA, 25 bp, Artificial
  Probe
gacaggatccacacgagttcctctc

SEQ ID NO: 271180 - DNA, 25 bp, Artificial
  Probe
agaagctctatgagaagctgctgac

SEQ ID NO: 271181 - DNA, 25 bp, Artificial
  Probe
tgctttaatcggattgacatcccac

SEQ ID NO: 271182 - DNA, 25 bp, Artificial
  Probe
ccaccctatgagtcctatgagaagc

SEQ ID NO: 271183 - DNA, 25 bp, Artificial
  Probe
aagcatatggcgtctgcgcgcctcc

SEQ ID NO: 271184 - DNA, 25 bp, Artificial
  Probe
aaacgcagccaggtttcgccctcaa

SEQ ID NO: 271185 - DNA, 25 bp, Artificial
  Probe
accagacccaaagcatatggcgtct

SEQ ID NO: 271186 - DNA, 25 bp, Artificial
  Probe
cagcccgtggccacatagtcttgct

SEQ ID NO: 271187 - DNA, 25 bp, Artificial
  Probe
accaccagacccaaagcatatggcg

SEQ ID NO: 271188 - DNA, 25 bp, Artificial
  Probe
ccatccaataaaacgcagccaggtt

SEQ ID NO: 271189 - DNA, 25 bp, Artificial
  Probe
aggcttcaaggctctgcaaggcgcg

SEQ ID NO: 271190 - DNA, 25 bp, Artificial
  Probe
gcactgtgtggcagacagcaacatc

SEQ ID NO: 271191 - DNA, 25 bp, Artificial
  Probe
acatcgtcaggtggttctggcaggc

SEQ ID NO: 271192 - DNA, 25 bp, Artificial
  Probe
acacgagttcctctccaaggcttca

SEQ ID NO: 271193 - DNA, 25 bp, Artificial
  Probe
ggccacatagtcttgctcacaacca

SEQ ID NO: 271194 - DNA, 25 bp, Artificial
  Probe
ctctccaaggcttcaaggctctgca

SEQ ID NO: 271195 - DNA, 25 bp, Artificial
  Probe
ctttgccgtggagtgaagagcagcc

SEQ ID NO: 271196 - DNA, 25 bp, Artificial
  Probe
acccatccaataaaacgcagccagg

SEQ ID NO: 271197 - DNA, 25 bp, Artificial
  Probe
gagattccagaaaccgagggaaaag

SEQ ID NO: 271198 - DNA, 25 bp, Artificial
  Probe
ggggactttcataggtggctcccac

SEQ ID NO: 271199 - DNA, 25 bp, Artificial
  Probe
gatccacacgagttcctctccaagg

SEQ ID NO: 271200 - DNA, 25 bp, Artificial
  Probe
tgattgacgccaacaccgacaacct

SEQ ID NO: 271201 - DNA, 25 bp, Artificial
  Probe
ttcaaggctctgcaaggcgcggcag

SEQ ID NO: 271202 - DNA, 25 bp, Artificial
  Probe
gctttaatcggattgacatcccacc

SEQ ID NO: 271203 - DNA, 25 bp, Artificial
  Probe
aggatccacacgagttcctctccaa

SEQ ID NO: 271204 - DNA, 25 bp, Artificial
  Probe
ggagagccaggctcctgcagtttgt

SEQ ID NO: 271205 - DNA, 25 bp, Artificial
  Probe
gtcctatgagaagctctatgagaag

SEQ ID NO: 271206 - DNA, 25 bp, Artificial
  Probe
atgagaagctgctgacagcggtaga

SEQ ID NO: 271207 - DNA, 25 bp, Artificial
  Probe
tcctgcagtttgtgacaggatccac

SEQ ID NO: 271208 - DNA, 25 bp, Artificial
  Probe
acccaaagcatatggcgtctgcgcg

SEQ ID NO: 271209 - DNA, 25 bp, Artificial
  Probe
tccaaggcttcaaggctctgcaagg

SEQ ID NO: 271210 - DNA, 25 bp, Artificial
  Probe
tagaggagacctgtggctttgccgt

SEQ ID NO: 271211 - DNA, 25 bp, Artificial
  Probe
gccaggggactttcataggtggctc

SEQ ID NO: 271212 - DNA, 25 bp, Artificial
  Probe
cacctgctttaatcggattgacatc

SEQ ID NO: 271213 - DNA, 25 bp, Artificial
  Probe
actgtgtggcagacagcaacatcgt

SEQ ID NO: 271214 - DNA, 25 bp, Artificial
  Probe
agaaggcaggccaggggactttcat

SEQ ID NO: 271215 - DNA, 25 bp, Artificial
  Probe
ccaataaaacgcagccaggtttcgc

SEQ ID NO: 271216 - DNA, 25 bp, Artificial
  Probe
gcggaggcctgagattccagaaacc

SEQ ID NO: 271217 - DNA, 25 bp, Artificial
  Probe
ccacacctgctttaatcggattgac

SEQ ID NO: 271218 - DNA, 25 bp, Artificial
  Probe
aagagcagcccgtggccacatagtc

SEQ ID NO: 271219 - DNA, 25 bp, Artificial
  Probe
ttgtgacaggatccacacgagttcc

SEQ ID NO: 271220 - DNA, 25 bp, Artificial
  Probe
tttgccgtggagtgaagagcagccc

SEQ ID NO: 271221 - DNA, 25 bp, Artificial
  Probe
tgtggcagacagcaacatcgtcagg

SEQ ID NO: 271222 - DNA, 25 bp, Artificial
  Probe
tgaagcactgtgtggcagacagcaa

SEQ ID NO: 271223 - DNA, 25 bp, Artificial
  Probe
cctcctttggagaaggcaggccagg

SEQ ID NO: 271224 - DNA, 25 bp, Artificial
  Probe
gattgacgccaacaccgacaacctg

SEQ ID NO: 271225 - DNA, 25 bp, Artificial
  Probe
tgtgcctggacttgtgcgctggccc

SEQ ID NO: 271226 - DNA, 25 bp, Artificial
  Probe
ctgctattcctgtctttcatgcatg

SEQ ID NO: 271227 - DNA, 25 bp, Artificial
  Probe
cgcctgaaacagagccgcgccatgg

SEQ ID NO: 271228 - DNA, 25 bp, Artificial
  Probe
acattgcccgtgaccccagggagcg

SEQ ID NO: 271229 - DNA, 25 bp, Artificial
  Probe
gaattcctgttccactactgcaatg

SEQ ID NO: 271230 - DNA, 25 bp, Artificial
  Probe
gattgacgggcgtgacttgatgccc

SEQ ID NO: 271231 - DNA, 25 bp, Artificial
  Probe
cttcgccaaccctgagtttgccggg

SEQ ID NO: 271232 - DNA, 25 bp, Artificial
  Probe
aacatgtgtatgctgagtacaaaac

SEQ ID NO: 271233 - DNA, 25 bp, Artificial
  Probe
caaccctgagtttgccgggcagagc

SEQ ID NO: 271234 - DNA, 25 bp, Artificial
  Probe
cgacattgcccgtgaccccagggag

SEQ ID NO: 271235 - DNA, 25 bp, Artificial
  Probe
tcgtccgtgtggaaggcgttttact

SEQ ID NO: 271236 - DNA, 25 bp, Artificial
  Probe
ctgccgactgacagggtgattgacg

SEQ ID NO: 271237 - DNA, 25 bp, Artificial
  Probe
catgtgtatgctgagtacaaaacac

SEQ ID NO: 271238 - DNA, 25 bp, Artificial
  Probe
cactggacaagctgggcctcgccaa

SEQ ID NO: 271239 - DNA, 25 bp, Artificial
  Probe
gctggggacttcctgcgcaggaaca

SEQ ID NO: 271240 - DNA, 25 bp, Artificial
  Probe
gccgcgccatggtgagatcctgcgc

SEQ ID NO: 271241 - DNA, 25 bp, Artificial
  Probe
agtacaaaacacaggaagagcccct

SEQ ID NO: 271242 - DNA, 25 bp, Artificial
  Probe
aggggctcacacagcgcctggcaag

SEQ ID NO: 271243 - DNA, 25 bp, Artificial
  Probe
tggccccaacggtgaacggcatggc

SEQ ID NO: 271244 - DNA, 25 bp, Artificial
  Probe
cagagctgccgactgacagggtgat

SEQ ID NO: 271245 - DNA, 25 bp, Artificial
  Probe
aggaagagcccctcagcatgaccct

SEQ ID NO: 271246 - DNA, 25 bp, Artificial
  Probe
aacagcccacggactacaaggggct

SEQ ID NO: 271247 - DNA, 25 bp, Artificial
  Probe
atgcatgtgcacacggcacacttcg

SEQ ID NO: 271248 - DNA, 25 bp, Artificial
  Probe
tgctgctggccatggcacttgcgcg

SEQ ID NO: 271249 - DNA, 25 bp, Artificial
  Probe
tactgcaatgcctacctcagcgctg

SEQ ID NO: 271250 - DNA, 25 bp, Artificial
  Probe
gttgggcatgccaaacacacaggta

SEQ ID NO: 271251 - DNA, 25 bp, Artificial
  Probe
gagcttggccccaacggtgaacggc

SEQ ID NO: 271252 - DNA, 25 bp, Artificial
  Probe
ggtcctgcccatgaatattctgggg

SEQ ID NO: 271253 - DNA, 25 bp, Artificial
  Probe
gggccgtaggccaggtccttgccac

SEQ ID NO: 271254 - DNA, 25 bp, Artificial
  Probe
gcggggcctatgtggccttcctcta

SEQ ID NO: 271255 - DNA, 25 bp, Artificial
  Probe
gtgctgctggccatggcacttgcgc

SEQ ID NO: 271256 - DNA, 25 bp, Artificial
  Probe
tcctgcgcaggaacagggacacgcc

SEQ ID NO: 271257 - DNA, 25 bp, Artificial
  Probe
tgctgcggcccgtgcacacgttgct

SEQ ID NO: 271258 - DNA, 25 bp, Artificial
  Probe
caagcatgggacactgtggcctggt

SEQ ID NO: 271259 - DNA, 25 bp, Artificial
  Probe
cccacaacagctcgtccgtgtggaa

SEQ ID NO: 271260 - DNA, 25 bp, Artificial
  Probe
tgtgcatgtgccacggccaccatgt

SEQ ID NO: 271261 - DNA, 25 bp, Artificial
  Probe
aagccatggctgcagctctgcctgc

SEQ ID NO: 271262 - DNA, 25 bp, Artificial
  Probe
ctgcaatgcctacctcagcgctgtg

SEQ ID NO: 271263 - DNA, 25 bp, Artificial
  Probe
gagcccacgagcaacatggacgtct

SEQ ID NO: 271264 - DNA, 25 bp, Artificial
  Probe
ccacacacgtgtgcatgtgccacgg

SEQ ID NO: 271265 - DNA, 25 bp, Artificial
  Probe
tgaactgatacctgacacaatcttg

SEQ ID NO: 271266 - DNA, 25 bp, Artificial
  Probe
cttgctgacatgtatgaaaacatat

SEQ ID NO: 271267 - DNA, 25 bp, Artificial
  Probe
gtggcatccgtgtgcctggacttgt

SEQ ID NO: 271268 - DNA, 25 bp, Artificial
  Probe
cgccaacaacacactcgtgtacttg

SEQ ID NO: 271269 - DNA, 25 bp, Artificial
  Probe
acatggacgtcttccccactgtggc

SEQ ID NO: 271270 - DNA, 25 bp, Artificial
  Probe
gtgatttcacctcctgaactgatac

SEQ ID NO: 271271 - DNA, 25 bp, Artificial
  Probe
cgaggcttgctttgaagggccaatg

SEQ ID NO: 271272 - DNA, 25 bp, Artificial
  Probe
acaatggcgtcagagacttttctac

SEQ ID NO: 271273 - DNA, 25 bp, Artificial
  Probe
agcagttccgggacccttgtccatg

SEQ ID NO: 271274 - DNA, 25 bp, Artificial
  Probe
agacggggacttatttctccacaga

SEQ ID NO: 271275 - DNA, 25 bp, Artificial
  Probe
aggcttgctttgaagggccaatgga

SEQ ID NO: 271276 - DNA, 25 bp, Artificial
  Probe
tctagatgagtctttcaacattggg

SEQ ID NO: 271277 - DNA, 25 bp, Artificial
  Probe
ctccacagaaggaggctatgtggtt

SEQ ID NO: 271278 - DNA, 25 bp, Artificial
  Probe
gctctcacctggttgaaggggattt

SEQ ID NO: 271279 - DNA, 25 bp, Artificial
  Probe
ggacccttgtccatggccacagtgt

SEQ ID NO: 271280 - DNA, 25 bp, Artificial
  Probe
ttctccacagaaggaggctatgtgg

SEQ ID NO: 271281 - DNA, 25 bp, Artificial
  Probe
aagcagaatctctgcgatggcagat

SEQ ID NO: 271282 - DNA, 25 bp, Artificial
  Probe
ttgtccatggccacagtgtcaacgg

SEQ ID NO: 271283 - DNA, 25 bp, Artificial
  Probe
acgtacacatgaaaagcggacaggt

SEQ ID NO: 271284 - DNA, 25 bp, Artificial
  Probe
acccccaagcagaatctctgcgatg

SEQ ID NO: 271285 - DNA, 25 bp, Artificial
  Probe
tcaataaatctgagactggctgctt

SEQ ID NO: 271286 - DNA, 25 bp, Artificial
  Probe
tgtccatggccacagtgtcaacggg

SEQ ID NO: 271287 - DNA, 25 bp, Artificial
  Probe
tttcaataaatctgagactggctgc

SEQ ID NO: 271288 - DNA, 25 bp, Artificial
  Probe
cccccaagcagaatctctgcgatgg

SEQ ID NO: 271289 - DNA, 25 bp, Artificial
  Probe
aacgtacacatgaaaagcggacagg

SEQ ID NO: 271290 - DNA, 25 bp, Artificial
  Probe
gagtctttcaacattgggctaaagt

SEQ ID NO: 271291 - DNA, 25 bp, Artificial
  Probe
tcaacaatggcgtcagagacttttc

SEQ ID NO: 271292 - DNA, 25 bp, Artificial
  Probe
gttattagagactccaacgtggttc

SEQ ID NO: 271293 - DNA, 25 bp, Artificial
  Probe
acggggacttatttctccacagaag

SEQ ID NO: 271294 - DNA, 25 bp, Artificial
  Probe
agagactccaacgtggttcagttgg

SEQ ID NO: 271295 - DNA, 25 bp, Artificial
  Probe
tacagaagctctcacctggttgaag

SEQ ID NO: 271296 - DNA, 25 bp, Artificial
  Probe
tagatgagtctttcaacattgggct

SEQ ID NO: 271297 - DNA, 25 bp, Artificial
  Probe
tctccacagaaggaggctatgtggt

SEQ ID NO: 271298 - DNA, 25 bp, Artificial
  Probe
gtgtcaacggggaatacctgaacgt

SEQ ID NO: 271299 - DNA, 25 bp, Artificial
  Probe
gaagctctcacctggttgaagggga

SEQ ID NO: 271300 - DNA, 25 bp, Artificial
  Probe
agttattagagactccaacgtggtt

SEQ ID NO: 271301 - DNA, 25 bp, Artificial
  Probe
gttctagatgagtctttcaacattg

SEQ ID NO: 271302 - DNA, 25 bp, Artificial
  Probe
agactccaacgtggttcagttggat

SEQ ID NO: 271303 - DNA, 25 bp, Artificial
  Probe
gacttatttctccacagaaggaggc

SEQ ID NO: 271304 - DNA, 25 bp, Artificial
  Probe
ctatgtggttctagatgagtctttc

SEQ ID NO: 271305 - DNA, 25 bp, Artificial
  Probe
gggaatacctgaacgtacacatgaa

SEQ ID NO: 271306 - DNA, 25 bp, Artificial
  Probe
acctgaacgtacacatgaaaagcgg

SEQ ID NO: 271307 - DNA, 25 bp, Artificial
  Probe
gttccgggacccttgtccatggcca

SEQ ID NO: 271308 - DNA, 25 bp, Artificial
  Probe
cgggacccttgtccatggccacagt

SEQ ID NO: 271309 - DNA, 25 bp, Artificial
  Probe
cttatttctccacagaaggaggcta

SEQ ID NO: 271310 - DNA, 25 bp, Artificial
  Probe
gatgagtctttcaacattgggctaa

SEQ ID NO: 271311 - DNA, 25 bp, Artificial
  Probe
ggaatacctgaacgtacacatgaaa

SEQ ID NO: 271312 - DNA, 25 bp, Artificial
  Probe
tcacctggttgaaggggatttcaat

SEQ ID NO: 271313 - DNA, 25 bp, Artificial
  Probe
tgaacgtacacatgaaaagcggaca

SEQ ID NO: 271314 - DNA, 25 bp, Artificial
  Probe
gccacagtgtcaacggggaatacct

SEQ ID NO: 271315 - DNA, 25 bp, Artificial
  Probe
caacaatggcgtcagagacttttct

SEQ ID NO: 271316 - DNA, 25 bp, Artificial
  Probe
aagcggacaggtcatagtgaaagtc

SEQ ID NO: 271317 - DNA, 25 bp, Artificial
  Probe
cagtaatcaaggaggtctggtgcac

SEQ ID NO: 271318 - DNA, 25 bp, Artificial
  Probe
tcattgacagcctcacatgagtcac

SEQ ID NO: 271319 - DNA, 25 bp, Artificial
  Probe
ttgacagcctcacatgagtcacctt

SEQ ID NO: 271320 - DNA, 25 bp, Artificial
  Probe
agtcaccttccgtgctgtcgtgtgg

SEQ ID NO: 271321 - DNA, 25 bp, Artificial
  Probe
tcagtaatcaaggaggtctggtgca

SEQ ID NO: 271322 - DNA, 25 bp, Artificial
  Probe
ccttccgtgctgtcgtgtgggctcc

SEQ ID NO: 271323 - DNA, 25 bp, Artificial
  Probe
gtcttcaagctgaatgaagccaaac

SEQ ID NO: 271324 - DNA, 25 bp, Artificial
  Probe
tgtgtcttcagtaatcaaggaggtc

SEQ ID NO: 271325 - DNA, 25 bp, Artificial
  Probe
ctcacatgagtcaccttccgtgctg

SEQ ID NO: 271326 - DNA, 25 bp, Artificial
  Probe
gtcttcagtaatcaaggaggtctgg

SEQ ID NO: 271327 - DNA, 25 bp, Artificial
  Probe
tcacatgagtcaccttccgtgctgt

SEQ ID NO: 271328 - DNA, 25 bp, Artificial
  Probe
agtaatcaaggaggtctggtgcacc

SEQ ID NO: 271329 - DNA, 25 bp, Artificial
  Probe
caccttccgtgctgtcgtgtgggct

SEQ ID NO: 271330 - DNA, 25 bp, Artificial
  Probe
gtcaccttccgtgctgtcgtgtggg

SEQ ID NO: 271331 - DNA, 25 bp, Artificial
  Probe
agtgtcttcaagctgaatgaagcca

SEQ ID NO: 271332 - DNA, 25 bp, Artificial
  Probe
accttccgtgctgtcgtgtgggctc

SEQ ID NO: 271333 - DNA, 25 bp, Artificial
  Probe
tcaccttccgtgctgtcgtgtgggc

SEQ ID NO: 271334 - DNA, 25 bp, Artificial
  Probe
caggttccccttgtggcaggcactg

SEQ ID NO: 271335 - DNA, 25 bp, Artificial
  Probe
tgacagcctcacatgagtcaccttc

SEQ ID NO: 271336 - DNA, 25 bp, Artificial
  Probe
cttccgtgctgtcgtgtgggctcct

SEQ ID NO: 271337 - DNA, 25 bp, Artificial
  Probe
tcttcagtaatcaaggaggtctggt

SEQ ID NO: 271338 - DNA, 25 bp, Artificial
  Probe
tcaggttccccttgtggcaggcact

SEQ ID NO: 271339 - DNA, 25 bp, Artificial
  Probe
ccgtgctgtcgtgtgggctcctgcc

SEQ ID NO: 271340 - DNA, 25 bp, Artificial
  Probe
tcaaggaggtctggtgcaccctaaa

SEQ ID NO: 271341 - DNA, 25 bp, Artificial
  Probe
tgtcttcagtaatcaaggaggtctg

SEQ ID NO: 271342 - DNA, 25 bp, Artificial
  Probe
tccgtgctgtcgtgtgggctcctgc

SEQ ID NO: 271343 - DNA, 25 bp, Artificial
  Probe
agagtgtcttcaagctgaatgaagc

SEQ ID NO: 271344 - DNA, 25 bp, Artificial
  Probe
actgtgtcttcagtaatcaaggagg

SEQ ID NO: 271345 - DNA, 25 bp, Artificial
  Probe
gtaatcaaggaggtctggtgcaccc

SEQ ID NO: 271346 - DNA, 25 bp, Artificial
  Probe
tgtcttcaagctgaatgaagccaaa

SEQ ID NO: 271347 - DNA, 25 bp, Artificial
  Probe
acatgagtcaccttccgtgctgtcg

SEQ ID NO: 271348 - DNA, 25 bp, Artificial
  Probe
ctgtgtcttcagtaatcaaggaggt

SEQ ID NO: 271349 - DNA, 25 bp, Artificial
  Probe
attgacagcctcacatgagtcacct

SEQ ID NO: 271350 - DNA, 25 bp, Artificial
  Probe
tactgtgtcttcagtaatcaaggag

SEQ ID NO: 271351 - DNA, 25 bp, Artificial
  Probe
atcaaggaggtctggtgcaccctaa

SEQ ID NO: 271352 - DNA, 25 bp, Artificial
  Probe
ctgtcagtggtggagagtgtcttca

SEQ ID NO: 271353 - DNA, 25 bp, Artificial
  Probe
gtgtcttcagtaatcaaggaggtct

SEQ ID NO: 271354 - DNA, 25 bp, Artificial
  Probe
cattgacagcctcacatgagtcacc

SEQ ID NO: 271355 - DNA, 25 bp, Artificial
  Probe
gtgtcttcaagctgaatgaagccaa

SEQ ID NO: 271356 - DNA, 25 bp, Artificial
  Probe
ttccgtgctgtcgtgtgggctcctg

SEQ ID NO: 271357 - DNA, 25 bp, Artificial
  Probe
cgtgctgtcgtgtgggctcctgcct

SEQ ID NO: 271358 - DNA, 25 bp, Artificial
  Probe
cacatgagtcaccttccgtgctgtc

SEQ ID NO: 271359 - DNA, 25 bp, Artificial
  Probe
catgagtcaccttccgtgctgtcgt

SEQ ID NO: 271360 - DNA, 25 bp, Artificial
  Probe
agcctcacatgagtcaccttccgtg

SEQ ID NO: 271361 - DNA, 25 bp, Artificial
  Probe
aatcaaggaggtctggtgcacccta

SEQ ID NO: 271362 - DNA, 25 bp, Artificial
  Probe
taatcaaggaggtctggtgcaccct

SEQ ID NO: 271363 - DNA, 25 bp, Artificial
  Probe
aaacctgagcccaacgacaattgag

SEQ ID NO: 271364 - DNA, 25 bp, Artificial
  Probe
atttcttcagctttgtaaataccgg

SEQ ID NO: 271365 - DNA, 25 bp, Artificial
  Probe
ctccccatgtcaccaagtgcatatg

SEQ ID NO: 271366 - DNA, 25 bp, Artificial
  Probe
aaagcctttggcaaacactacagct

SEQ ID NO: 271367 - DNA, 25 bp, Artificial
  Probe
actgcaatgaattccccgtattctg

SEQ ID NO: 271368 - DNA, 25 bp, Artificial
  Probe
actcttcaaagaaggaagcagagga

SEQ ID NO: 271369 - DNA, 25 bp, Artificial
  Probe
tccagataaacttgcaagaaaagac

SEQ ID NO: 271370 - DNA, 25 bp, Artificial
  Probe
agacaaagcctttggcaaacactac

SEQ ID NO: 271371 - DNA, 25 bp, Artificial
  Probe
cagcctggagtgctgtgattaaaat

SEQ ID NO: 271372 - DNA, 25 bp, Artificial
  Probe
gtttcaagaccgacagaacggggcg

SEQ ID NO: 271373 - DNA, 25 bp, Artificial
  Probe
acaattgagactgcaatgaattccc

SEQ ID NO: 271374 - DNA, 25 bp, Artificial
  Probe
caacaatccgaagtgattccacgga

SEQ ID NO: 271375 - DNA, 25 bp, Artificial
  Probe
agcctttggcaaacactacagctcc

SEQ ID NO: 271376 - DNA, 25 bp, Artificial
  Probe
agactgcaatgaattccccgtattc

SEQ ID NO: 271377 - DNA, 25 bp, Artificial
  Probe
aaatcaactcttcaaagaaggaagc

SEQ ID NO: 271378 - DNA, 25 bp, Artificial
  Probe
aaggaaacaagctccagataaactt

SEQ ID NO: 271379 - DNA, 25 bp, Artificial
  Probe
tatgctgtgctgagagaaaacctga

SEQ ID NO: 271380 - DNA, 25 bp, Artificial
  Probe
gtgattccacggagccacagtctcc

SEQ ID NO: 271381 - DNA, 25 bp, Artificial
  Probe
acagctttaagaaaccagtgttggt

SEQ ID NO: 271382 - DNA, 25 bp, Artificial
  Probe
ttcagctttgtaaataccggtttct

SEQ ID NO: 271383 - DNA, 25 bp, Artificial
  Probe
agctctcttctcacttggtgccact

SEQ ID NO: 271384 - DNA, 25 bp, Artificial
  Probe
aagacaaagcctttggcaaacacta

SEQ ID NO: 271385 - DNA, 25 bp, Artificial
  Probe
tgcatatgctgtgctgagagaaaac

SEQ ID NO: 271386 - DNA, 25 bp, Artificial
  Probe
cactcccagcctggagtgctgtgat

SEQ ID NO: 271387 - DNA, 25 bp, Artificial
  Probe
gagagaaaacctgagcccaacgaca

SEQ ID NO: 271388 - DNA, 25 bp, Artificial
  Probe
aacgacaattgagactgcaatgaat

SEQ ID NO: 271389 - DNA, 25 bp, Artificial
  Probe
gataaatcaactcttcaaagaagga

SEQ ID NO: 271390 - DNA, 25 bp, Artificial
  Probe
tcccaaagacaaagcctttggcaaa

SEQ ID NO: 271391 - DNA, 25 bp, Artificial
  Probe
gaaacaagctccagataaacttgca

SEQ ID NO: 271392 - DNA, 25 bp, Artificial
  Probe
gtcaccaagtgcatatgctgtgctg

SEQ ID NO: 271393 - DNA, 25 bp, Artificial
  Probe
taaatcaactcttcaaagaaggaag

SEQ ID NO: 271394 - DNA, 25 bp, Artificial
  Probe
cagctttgtaaataccggtttctag

SEQ ID NO: 271395 - DNA, 25 bp, Artificial
  Probe
tgataaatcaactcttcaaagaagg

SEQ ID NO: 271396 - DNA, 25 bp, Artificial
  Probe
ttcaacaatccgaagtgattccacg

SEQ ID NO: 271397 - DNA, 25 bp, Artificial
  Probe
aggaagttcgaagctctcttctcac

SEQ ID NO: 271398 - DNA, 25 bp, Artificial
  Probe
gcctggagtgctgtgattaaaatgc

SEQ ID NO: 271399 - DNA, 25 bp, Artificial
  Probe
caagtgcatatgctgtgctgagaga

SEQ ID NO: 271400 - DNA, 25 bp, Artificial
  Probe
atgaattccccgtattctgctgaat

SEQ ID NO: 271401 - DNA, 25 bp, Artificial
  Probe
acaagctccagataaacttgcaaga

SEQ ID NO: 271402 - DNA, 25 bp, Artificial
  Probe
acaatccgaagtgattccacggagc

SEQ ID NO: 271403 - DNA, 25 bp, Artificial
  Probe
aagaccgacagaacggggcgacaag

SEQ ID NO: 271404 - DNA, 25 bp, Artificial
  Probe
caccaagtgcatatgctgtgctgag

SEQ ID NO: 271405 - DNA, 25 bp, Artificial
  Probe
gtattctgctgaatgataaatcaac

SEQ ID NO: 271406 - DNA, 25 bp, Artificial
  Probe
tcttcagctttgtaaataccggttt

SEQ ID NO: 271407 - DNA, 25 bp, Artificial
  Probe
ggagccacagtctccttcagacctt

SEQ ID NO: 271408 - DNA, 25 bp, Artificial
  Probe
cgaagtgattccacggagccacagt

SEQ ID NO: 271409 - DNA, 25 bp, Artificial
  Probe
atggcagctctggtaccaagatcac

SEQ ID NO: 271410 - DNA, 25 bp, Artificial
  Probe
ttcctggtgctcatcttgttagtct

SEQ ID NO: 271411 - DNA, 25 bp, Artificial
  Probe
gatccccacgatagacaagacagga

SEQ ID NO: 271412 - DNA, 25 bp, Artificial
  Probe
tcctggtgctcatcttgttagtctc

SEQ ID NO: 271413 - DNA, 25 bp, Artificial
  Probe
tcagccctgatacctcttgtgtatc

SEQ ID NO: 271414 - DNA, 25 bp, Artificial
  Probe
atccccacgatagacaagacaggat

SEQ ID NO: 271415 - DNA, 25 bp, Artificial
  Probe
ttccttcctggtgctcatcttgtta

SEQ ID NO: 271416 - DNA, 25 bp, Artificial
  Probe
cttcagccctgatacctcttgtgta

SEQ ID NO: 271417 - DNA, 25 bp, Artificial
  Probe
agctctggtaccaagatcacttctt

SEQ ID NO: 271418 - DNA, 25 bp, Artificial
  Probe
ctggtgctcatcttgttagtctccc

SEQ ID NO: 271419 - DNA, 25 bp, Artificial
  Probe
gagatccccacgatagacaagacag

SEQ ID NO: 271420 - DNA, 25 bp, Artificial
  Probe
gtcttccttcctggtgctcatcttg

SEQ ID NO: 271421 - DNA, 25 bp, Artificial
  Probe
caagagatccccacgatagacaaga

SEQ ID NO: 271422 - DNA, 25 bp, Artificial
  Probe
tctggtaccaagatcacttcttccg

SEQ ID NO: 271423 - DNA, 25 bp, Artificial
  Probe
ggtgctcatcttgttagtctccctc

SEQ ID NO: 271424 - DNA, 25 bp, Artificial
  Probe
tggtaccaagatcacttcttccgcc

SEQ ID NO: 271425 - DNA, 25 bp, Artificial
  Probe
gctctggtaccaagatcacttcttc

SEQ ID NO: 271426 - DNA, 25 bp, Artificial
  Probe
tggtgctcatcttgttagtctccct

SEQ ID NO: 271427 - DNA, 25 bp, Artificial
  Probe
catcaccaagagatccccacgatag

SEQ ID NO: 271428 - DNA, 25 bp, Artificial
  Probe
tcttccttcctggtgctcatcttgt

SEQ ID NO: 271429 - DNA, 25 bp, Artificial
  Probe
tccccacgatagacaagacaggatc

SEQ ID NO: 271430 - DNA, 25 bp, Artificial
  Probe
gccttcagccctgatacctcttgtg

SEQ ID NO: 271431 - DNA, 25 bp, Artificial
  Probe
ctggtaccaagatcacttcttccgc

SEQ ID NO: 271432 - DNA, 25 bp, Artificial
  Probe
cttccttcctggtgctcatcttgtt

SEQ ID NO: 271433 - DNA, 25 bp, Artificial
  Probe
gcagctctggtaccaagatcacttc

SEQ ID NO: 271434 - DNA, 25 bp, Artificial
  Probe
tatggcagctctggtaccaagatca

SEQ ID NO: 271435 - DNA, 25 bp, Artificial
  Probe
ccttcagccctgatacctcttgtgt

SEQ ID NO: 271436 - DNA, 25 bp, Artificial
  Probe
atcaccaagagatccccacgataga

SEQ ID NO: 271437 - DNA, 25 bp, Artificial
  Probe
gccctgatacctcttgtgtatcctt

SEQ ID NO: 271438 - DNA, 25 bp, Artificial
  Probe
agccctgatacctcttgtgtatcct

SEQ ID NO: 271439 - DNA, 25 bp, Artificial
  Probe
ggcagctctggtaccaagatcactt

SEQ ID NO: 271440 - DNA, 25 bp, Artificial
  Probe
cagccctgatacctcttgtgtatcc

SEQ ID NO: 271441 - DNA, 25 bp, Artificial
  Probe
tccttcctggtgctcatcttgttag

SEQ ID NO: 271442 - DNA, 25 bp, Artificial
  Probe
ttatggcagctctggtaccaagatc

SEQ ID NO: 271443 - DNA, 25 bp, Artificial
  Probe
cttcctggtgctcatcttgttagtc

SEQ ID NO: 271444 - DNA, 25 bp, Artificial
  Probe
cagtcttccttcctggtgctcatct

SEQ ID NO: 271445 - DNA, 25 bp, Artificial
  Probe
cctggtgctcatcttgttagtctcc

SEQ ID NO: 271446 - DNA, 25 bp, Artificial
  Probe
agatccccacgatagacaagacagg

SEQ ID NO: 271447 - DNA, 25 bp, Artificial
  Probe
ccttcctggtgctcatcttgttagt

SEQ ID NO: 271448 - DNA, 25 bp, Artificial
  Probe
ggtaccaagatcacttcttccgcca

SEQ ID NO: 271449 - DNA, 25 bp, Artificial
  Probe
cagctctggtaccaagatcacttct

SEQ ID NO: 271450 - DNA, 25 bp, Artificial
  Probe
agtcttccttcctggtgctcatctt

SEQ ID NO: 271451 - DNA, 25 bp, Artificial
  Probe
aagagatccccacgatagacaagac

SEQ ID NO: 271452 - DNA, 25 bp, Artificial
  Probe
agagatccccacgatagacaagaca

SEQ ID NO: 271453 - DNA, 25 bp, Artificial
  Probe
tggcagctctggtaccaagatcact

SEQ ID NO: 271454 - DNA, 25 bp, Artificial
  Probe
ggccttcagccctgatacctcttgt

SEQ ID NO: 271455 - DNA, 25 bp, Artificial
  Probe
ttctccacgtgggtgacctacccca

SEQ ID NO: 271456 - DNA, 25 bp, Artificial
  Probe
tgacagtgatcaagggcaggaacac

SEQ ID NO: 271457 - DNA, 25 bp, Artificial
  Probe
tggacagtggcaccaagtgacagtg

SEQ ID NO: 271458 - DNA, 25 bp, Artificial
  Probe
ctaccccaagctttgtgatggacag

SEQ ID NO: 271459 - DNA, 25 bp, Artificial
  Probe
tggcaccaagtgacagtgatcaagg

SEQ ID NO: 271460 - DNA, 25 bp, Artificial
  Probe
agctttgtgatggacagtggcacca

SEQ ID NO: 271461 - DNA, 25 bp, Artificial
  Probe
tgacctaccccaagctttgtgatgg

SEQ ID NO: 271462 - DNA, 25 bp, Artificial
  Probe
gacagtggcaccaagtgacagtgat

SEQ ID NO: 271463 - DNA, 25 bp, Artificial
  Probe
tgatggggcaggggagttctccacg

SEQ ID NO: 271464 - DNA, 25 bp, Artificial
  Probe
gcaccaagtgacagtgatcaagggc

SEQ ID NO: 271465 - DNA, 25 bp, Artificial
  Probe
accaagtgacagtgatcaagggcag

SEQ ID NO: 271466 - DNA, 25 bp, Artificial
  Probe
acagtgatcaagggcaggaacacac

SEQ ID NO: 271467 - DNA, 25 bp, Artificial
  Probe
caggggagttctccacgtgggtgac

SEQ ID NO: 271468 - DNA, 25 bp, Artificial
  Probe
gggagttctccacgtgggtgaccta

SEQ ID NO: 271469 - DNA, 25 bp, Artificial
  Probe
aaatgatggggcaggggagttctcc

SEQ ID NO: 271470 - DNA, 25 bp, Artificial
  Probe
ggagttctccacgtgggtgacctac

SEQ ID NO: 271471 - DNA, 25 bp, Artificial
  Probe
cgtgggtgacctaccccaagctttg

SEQ ID NO: 271472 - DNA, 25 bp, Artificial
  Probe
caaatgatggggcaggggagttctc

SEQ ID NO: 271473 - DNA, 25 bp, Artificial
  Probe
gctttgtgatggacagtggcaccaa

SEQ ID NO: 271474 - DNA, 25 bp, Artificial
  Probe
accccaagctttgtgatggacagtg

SEQ ID NO: 271475 - DNA, 25 bp, Artificial
  Probe
ggcaccaagtgacagtgatcaaggg

SEQ ID NO: 271476 - DNA, 25 bp, Artificial
  Probe
caagtgacagtgatcaagggcagga

SEQ ID NO: 271477 - DNA, 25 bp, Artificial
  Probe
aagctttgtgatggacagtggcacc

SEQ ID NO: 271478 - DNA, 25 bp, Artificial
  Probe
tgggtgacctaccccaagctttgtg

SEQ ID NO: 271479 - DNA, 25 bp, Artificial
  Probe
aatgatggggcaggggagttctcca

SEQ ID NO: 271480 - DNA, 25 bp, Artificial
  Probe
cacgtgggtgacctaccccaagctt

SEQ ID NO: 271481 - DNA, 25 bp, Artificial
  Probe
acagtggcaccaagtgacagtgatc

SEQ ID NO: 271482 - DNA, 25 bp, Artificial
  Probe
cctaccccaagctttgtgatggaca

SEQ ID NO: 271483 - DNA, 25 bp, Artificial
  Probe
gacctaccccaagctttgtgatgga

SEQ ID NO: 271484 - DNA, 25 bp, Artificial
  Probe
gacagtgatcaagggcaggaacaca

SEQ ID NO: 271485 - DNA, 25 bp, Artificial
  Probe
cccaagctttgtgatggacagtggc

SEQ ID NO: 271486 - DNA, 25 bp, Artificial
  Probe
ctccacgtgggtgacctaccccaag

SEQ ID NO: 271487 - DNA, 25 bp, Artificial
  Probe
tgatcaagggcaggaacacactgcg

SEQ ID NO: 271488 - DNA, 25 bp, Artificial
  Probe
ggggagttctccacgtgggtgacct

SEQ ID NO: 271489 - DNA, 25 bp, Artificial
  Probe
ccaagctttgtgatggacagtggca

SEQ ID NO: 271490 - DNA, 25 bp, Artificial
  Probe
ccacgtgggtgacctaccccaagct

SEQ ID NO: 271491 - DNA, 25 bp, Artificial
  Probe
ccaagtgacagtgatcaagggcagg

SEQ ID NO: 271492 - DNA, 25 bp, Artificial
  Probe
ggtgacctaccccaagctttgtgat

SEQ ID NO: 271493 - DNA, 25 bp, Artificial
  Probe
ccccaagctttgtgatggacagtgg

SEQ ID NO: 271494 - DNA, 25 bp, Artificial
  Probe
cagtggcaccaagtgacagtgatca

SEQ ID NO: 271495 - DNA, 25 bp, Artificial
  Probe
caccaagtgacagtgatcaagggca

SEQ ID NO: 271496 - DNA, 25 bp, Artificial
  Probe
taccccaagctttgtgatggacagt

SEQ ID NO: 271497 - DNA, 25 bp, Artificial
  Probe
ggacagtggcaccaagtgacagtga

SEQ ID NO: 271498 - DNA, 25 bp, Artificial
  Probe
gagttctccacgtgggtgacctacc

SEQ ID NO: 271499 - DNA, 25 bp, Artificial
  Probe
gtggcaccaagtgacagtgatcaag

SEQ ID NO: 271500 - DNA, 25 bp, Artificial
  Probe
agtggcaccaagtgacagtgatcaa

SEQ ID NO: 271501 - DNA, 25 bp, Artificial
  Probe
ttcatcccagaatttgctgccagat

SEQ ID NO: 271502 - DNA, 25 bp, Artificial
  Probe
gctgccagatcgtacggctggatgt

SEQ ID NO: 271503 - DNA, 25 bp, Artificial
  Probe
gtaatcgggactctagcacatcttg

SEQ ID NO: 271504 - DNA, 25 bp, Artificial
  Probe
ccctgtgtttcatcccagaatttgc

SEQ ID NO: 271505 - DNA, 25 bp, Artificial
  Probe
agtaatcgggactctagcacatctt

SEQ ID NO: 271506 - DNA, 25 bp, Artificial
  Probe
catcccagaatttgctgccagatcg

SEQ ID NO: 271507 - DNA, 25 bp, Artificial
  Probe
atttgctgccagatcgtacggctgg

SEQ ID NO: 271508 - DNA, 25 bp, Artificial
  Probe
agcactcaactgagggcttgtgaga

SEQ ID NO: 271509 - DNA, 25 bp, Artificial
  Probe
ctctagcacatcttgacctggggtc

SEQ ID NO: 271510 - DNA, 25 bp, Artificial
  Probe
tcccagaatttgctgccagatcgta

SEQ ID NO: 271511 - DNA, 25 bp, Artificial
  Probe
aatcgggactctagcacatcttgac

SEQ ID NO: 271512 - DNA, 25 bp, Artificial
  Probe
tttgctgccagatcgtacggctgga

SEQ ID NO: 271513 - DNA, 25 bp, Artificial
  Probe
tttcatcccagaatttgctgccaga

SEQ ID NO: 271514 - DNA, 25 bp, Artificial
  Probe
ctagcacatcttgacctggggtcac

SEQ ID NO: 271515 - DNA, 25 bp, Artificial
  Probe
gacacttctgaggactccttgctta

SEQ ID NO: 271516 - DNA, 25 bp, Artificial
  Probe
cgggactctagcacatcttgacctg

SEQ ID NO: 271517 - DNA, 25 bp, Artificial
  Probe
gggacacttctgaggactccttgct

SEQ ID NO: 271518 - DNA, 25 bp, Artificial
  Probe
gtttcatcccagaatttgctgccag

SEQ ID NO: 271519 - DNA, 25 bp, Artificial
  Probe
gggactctagcacatcttgacctgg

SEQ ID NO: 271520 - DNA, 25 bp, Artificial
  Probe
ggactctagcacatcttgacctggg

SEQ ID NO: 271521 - DNA, 25 bp, Artificial
  Probe
tctagcacatcttgacctggggtca

SEQ ID NO: 271522 - DNA, 25 bp, Artificial
  Probe
cacttctgaggactccttgcttact

SEQ ID NO: 271523 - DNA, 25 bp, Artificial
  Probe
ctgccagatcgtacggctggatgtg

SEQ ID NO: 271524 - DNA, 25 bp, Artificial
  Probe
taatcgggactctagcacatcttga

SEQ ID NO: 271525 - DNA, 25 bp, Artificial
  Probe
aatttgctgccagatcgtacggctg

SEQ ID NO: 271526 - DNA, 25 bp, Artificial
  Probe
acttctgaggactccttgcttactt

SEQ ID NO: 271527 - DNA, 25 bp, Artificial
  Probe
taagtaatcgggactctagcacatc

SEQ ID NO: 271528 - DNA, 25 bp, Artificial
  Probe
gccctgtgtttcatcccagaatttg

SEQ ID NO: 271529 - DNA, 25 bp, Artificial
  Probe
gaatttgctgccagatcgtacggct

SEQ ID NO: 271530 - DNA, 25 bp, Artificial
  Probe
gtgtttcatcccagaatttgctgcc

SEQ ID NO: 271531 - DNA, 25 bp, Artificial
  Probe
tgtttcatcccagaatttgctgcca

SEQ ID NO: 271532 - DNA, 25 bp, Artificial
  Probe
tgctgccagatcgtacggctggatg

SEQ ID NO: 271533 - DNA, 25 bp, Artificial
  Probe
aagtaatcgggactctagcacatct

SEQ ID NO: 271534 - DNA, 25 bp, Artificial
  Probe
ttgctgccagatcgtacggctggat

SEQ ID NO: 271535 - DNA, 25 bp, Artificial
  Probe
tgggacacttctgaggactccttgc

SEQ ID NO: 271536 - DNA, 25 bp, Artificial
  Probe
atcccagaatttgctgccagatcgt

SEQ ID NO: 271537 - DNA, 25 bp, Artificial
  Probe
gactctagcacatcttgacctgggg

SEQ ID NO: 271538 - DNA, 25 bp, Artificial
  Probe
atcgggactctagcacatcttgacc

SEQ ID NO: 271539 - DNA, 25 bp, Artificial
  Probe
actctagcacatcttgacctggggt

SEQ ID NO: 271540 - DNA, 25 bp, Artificial
  Probe
cccagaatttgctgccagatcgtac

SEQ ID NO: 271541 - DNA, 25 bp, Artificial
  Probe
tcatcccagaatttgctgccagatc

SEQ ID NO: 271542 - DNA, 25 bp, Artificial
  Probe
cttctgaggactccttgcttactta

SEQ ID NO: 271543 - DNA, 25 bp, Artificial
  Probe
cagcactcaactgagggcttgtgag

SEQ ID NO: 271544 - DNA, 25 bp, Artificial
  Probe
tcgggactctagcacatcttgacct

SEQ ID NO: 271545 - DNA, 25 bp, Artificial
  Probe
acacttctgaggactccttgcttac

SEQ ID NO: 271546 - DNA, 25 bp, Artificial
  Probe
ggacacttctgaggactccttgctt

SEQ ID NO: 271547 - DNA, 25 bp, Artificial
  Probe
ccatggacaccaactgacgctgact

SEQ ID NO: 271548 - DNA, 25 bp, Artificial
  Probe
agtgcagccatgaagacccacctgc

SEQ ID NO: 271549 - DNA, 25 bp, Artificial
  Probe
accatggacaccaactgacgctgac

SEQ ID NO: 271550 - DNA, 25 bp, Artificial
  Probe
tagtgcagccatgaagacccacctg

SEQ ID NO: 271551 - DNA, 25 bp, Artificial
  Probe
gtagtgcagccatgaagacccacct

SEQ ID NO: 271552 - DNA, 25 bp, Artificial
  Probe
cagcgtcgggatgatgagtgtccca

SEQ ID NO: 271553 - DNA, 25 bp, Artificial
  Probe
atgaagacccacctgcagggctgct

SEQ ID NO: 271554 - DNA, 25 bp, Artificial
  Probe
agtagtgcagccatgaagacccacc

SEQ ID NO: 271555 - DNA, 25 bp, Artificial
  Probe
tcctgtgaggagtagtgcagccatg

SEQ ID NO: 271556 - DNA, 25 bp, Artificial
  Probe
catcctgtgaggagtagtgcagcca

SEQ ID NO: 271557 - DNA, 25 bp, Artificial
  Probe
aggcttacaccatggacaccaactg

SEQ ID NO: 271558 - DNA, 25 bp, Artificial
  Probe
tacaccatggacaccaactgacgct

SEQ ID NO: 271559 - DNA, 25 bp, Artificial
  Probe
caccatggacaccaactgacgctga

SEQ ID NO: 271560 - DNA, 25 bp, Artificial
  Probe
gaggcttacaccatggacaccaact

SEQ ID NO: 271561 - DNA, 25 bp, Artificial
  Probe
cttacaccatggacaccaactgacg

SEQ ID NO: 271562 - DNA, 25 bp, Artificial
  Probe
gtgcagccatgaagacccacctgca

SEQ ID NO: 271563 - DNA, 25 bp, Artificial
  Probe
ggcttacaccatggacaccaactga

SEQ ID NO: 271564 - DNA, 25 bp, Artificial
  Probe
gcagccatgaagacccacctgcagg

SEQ ID NO: 271565 - DNA, 25 bp, Artificial
  Probe
tgcagccatgaagacccacctgcag

SEQ ID NO: 271566 - DNA, 25 bp, Artificial
  Probe
ttacaccatggacaccaactgacgc

SEQ ID NO: 271567 - DNA, 25 bp, Artificial
  Probe
aggaggcttacaccatggacaccaa

SEQ ID NO: 271568 - DNA, 25 bp, Artificial
  Probe
ggaacatcctgtgaggagtagtgca

SEQ ID NO: 271569 - DNA, 25 bp, Artificial
  Probe
gaacatcctgtgaggagtagtgcag

SEQ ID NO: 271570 - DNA, 25 bp, Artificial
  Probe
atcctgtgaggagtagtgcagccat

SEQ ID NO: 271571 - DNA, 25 bp, Artificial
  Probe
aggaacatcctgtgaggagtagtgc

SEQ ID NO: 271572 - DNA, 25 bp, Artificial
  Probe
accagcgtcgggatgatgagtgtcc

SEQ ID NO: 271573 - DNA, 25 bp, Artificial
  Probe
agaggaggcttacaccatggacacc

SEQ ID NO: 271574 - DNA, 25 bp, Artificial
  Probe
acatcctgtgaggagtagtgcagcc

SEQ ID NO: 271575 - DNA, 25 bp, Artificial
  Probe
tcacctgtcagcttcccgggttctg

SEQ ID NO: 271576 - DNA, 25 bp, Artificial
  Probe
ggaggcttacaccatggacaccaac

SEQ ID NO: 271577 - DNA, 25 bp, Artificial
  Probe
ccagcgtcgggatgatgagtgtccc

SEQ ID NO: 271578 - DNA, 25 bp, Artificial
  Probe
aacatcctgtgaggagtagtgcagc

SEQ ID NO: 271579 - DNA, 25 bp, Artificial
  Probe
catgaagacccacctgcagggctgc

SEQ ID NO: 271580 - DNA, 25 bp, Artificial
  Probe
acaccatggacaccaactgacgctg

SEQ ID NO: 271581 - DNA, 25 bp, Artificial
  Probe
aagaggaggcttacaccatggacac

SEQ ID NO: 271582 - DNA, 25 bp, Artificial
  Probe
cacctgtcagcttcccgggttctga

SEQ ID NO: 271583 - DNA, 25 bp, Artificial
  Probe
gcttacaccatggacaccaactgac

SEQ ID NO: 271584 - DNA, 25 bp, Artificial
  Probe
ccatgaagacccacctgcagggctg

SEQ ID NO: 271585 - DNA, 25 bp, Artificial
  Probe
ccatggttagaatcacagggacagc

SEQ ID NO: 271586 - DNA, 25 bp, Artificial
  Probe
agcagtcagtctccagggacttcta

SEQ ID NO: 271587 - DNA, 25 bp, Artificial
  Probe
cagtctccagggacttctaagtagt

SEQ ID NO: 271588 - DNA, 25 bp, Artificial
  Probe
ctggaaaacagaaccctcagatggt

SEQ ID NO: 271589 - DNA, 25 bp, Artificial
  Probe
aactggaaaacagaaccctcagatg

SEQ ID NO: 271590 - DNA, 25 bp, Artificial
  Probe
agaatcacagggacagcatgcattc

SEQ ID NO: 271591 - DNA, 25 bp, Artificial
  Probe
ccctcagatggtgcagataaatccc

SEQ ID NO: 271592 - DNA, 25 bp, Artificial
  Probe
ggcaaaaatgcctacatctctggag

SEQ ID NO: 271593 - DNA, 25 bp, Artificial
  Probe
gagtagccaccaagcgggcgccatg

SEQ ID NO: 271594 - DNA, 25 bp, Artificial
  Probe
tccagggacttctaagtagtggtta

SEQ ID NO: 271595 - DNA, 25 bp, Artificial
  Probe
tctggagtagccaccaagcgggcgc

SEQ ID NO: 271596 - DNA, 25 bp, Artificial
  Probe
atttacctatctgacggcttagttt

SEQ ID NO: 271597 - DNA, 25 bp, Artificial
  Probe
cacatttacctatctgacggcttag

SEQ ID NO: 271598 - DNA, 25 bp, Artificial
  Probe
gcaccgctaaccaaccaaaggagac

SEQ ID NO: 271599 - DNA, 25 bp, Artificial
  Probe
caagcgggcgccatgtcagtgcatg

SEQ ID NO: 271600 - DNA, 25 bp, Artificial
  Probe
gacagcatgcattcggactctgtca

SEQ ID NO: 271601 - DNA, 25 bp, Artificial
  Probe
ggaccacattactcggagcacgttt

SEQ ID NO: 271602 - DNA, 25 bp, Artificial
  Probe
agctcagctgtcctggaaccacagc

SEQ ID NO: 271603 - DNA, 25 bp, Artificial
  Probe
aatcccgggaccacattactcggag

SEQ ID NO: 271604 - DNA, 25 bp, Artificial
  Probe
aaatgcctacatctctggagtagcc

SEQ ID NO: 271605 - DNA, 25 bp, Artificial
  Probe
tcatctggataagcacagttcgttg

SEQ ID NO: 271606 - DNA, 25 bp, Artificial
  Probe
aacagaaccctcagatggtgcagat

SEQ ID NO: 271607 - DNA, 25 bp, Artificial
  Probe
acagctcagctgtcctggaaccaca

SEQ ID NO: 271608 - DNA, 25 bp, Artificial
  Probe
cacattactcggagcacgtttctac

SEQ ID NO: 271609 - DNA, 25 bp, Artificial
  Probe
acaggttatcatctggataagcaca

SEQ ID NO: 271610 - DNA, 25 bp, Artificial
  Probe
ggttatcatctggataagcacagtt

SEQ ID NO: 271611 - DNA, 25 bp, Artificial
  Probe
tcccgggaccacattactcggagca

SEQ ID NO: 271612 - DNA, 25 bp, Artificial
  Probe
gactctgtcacaagcaagaatgtta

SEQ ID NO: 271613 - DNA, 25 bp, Artificial
  Probe
cagggacttctaagtagtggttaca

SEQ ID NO: 271614 - DNA, 25 bp, Artificial
  Probe
acagcagtcagtctccagggacttc

SEQ ID NO: 271615 - DNA, 25 bp, Artificial
  Probe
atggtgcagataaatcccgggacca

SEQ ID NO: 271616 - DNA, 25 bp, Artificial
  Probe
ctggaaccacagcagtcagtctcca

SEQ ID NO: 271617 - DNA, 25 bp, Artificial
  Probe
cgtttctacagtgtacacagacaca

SEQ ID NO: 271618 - DNA, 25 bp, Artificial
  Probe
aagcgggcgccatgtcagtgcatgt

SEQ ID NO: 271619 - DNA, 25 bp, Artificial
  Probe
gcattcggactctgtcacaagcaag

SEQ ID NO: 271620 - DNA, 25 bp, Artificial
  Probe
catctctggagtagccaccaagcgg

SEQ ID NO: 271621 - DNA, 25 bp, Artificial
  Probe
gcatgcattcggactctgtcacaag

SEQ ID NO: 271622 - DNA, 25 bp, Artificial
  Probe
cagtcagtctccagggacttctaag

SEQ ID NO: 271623 - DNA, 25 bp, Artificial
  Probe
taaatcccgggaccacattactcgg

SEQ ID NO: 271624 - DNA, 25 bp, Artificial
  Probe
tgcttgacatgttcatttggaaaca

SEQ ID NO: 271625 - DNA, 25 bp, Artificial
  Probe
ggtgcagataaatcccgggaccaca

SEQ ID NO: 271626 - DNA, 25 bp, Artificial
  Probe
catgcattcggactctgtcacaagc

SEQ ID NO: 271627 - DNA, 25 bp, Artificial
  Probe
tcctggaaccacagcagtcagtctc

SEQ ID NO: 271628 - DNA, 25 bp, Artificial
  Probe
gccatgtcagtgcatgtggagactg

SEQ ID NO: 271629 - DNA, 25 bp, Artificial
  Probe
gcaaaaatgcctacatctctggagt

SEQ ID NO: 271630 - DNA, 25 bp, Artificial
  Probe
gttacaggttatcatctggataagc

SEQ ID NO: 271631 - DNA, 25 bp, Artificial
  Probe
gctggaatgctcgaggagacaaagt

SEQ ID NO: 271632 - DNA, 25 bp, Artificial
  Probe
cattctaatggagcagcagtgaatg

SEQ ID NO: 271633 - DNA, 25 bp, Artificial
  Probe
agacaaagtgggtgccagtgcatct

SEQ ID NO: 271634 - DNA, 25 bp, Artificial
  Probe
cagccctgacggaaagtatttggcc

SEQ ID NO: 271635 - DNA, 25 bp, Artificial
  Probe
tccatccagaacaggctctaatgac

SEQ ID NO: 271636 - DNA, 25 bp, Artificial
  Probe
atctggaatactcagagtggaagtc

SEQ ID NO: 271637 - DNA, 25 bp, Artificial
  Probe
ctctgtctgtgttttagatctccga

SEQ ID NO: 271638 - DNA, 25 bp, Artificial
  Probe
ggaatatggtttctacctagaatgc

SEQ ID NO: 271639 - DNA, 25 bp, Artificial
  Probe
ctgtccctggccacaggattatttc

SEQ ID NO: 271640 - DNA, 25 bp, Artificial
  Probe
ctaccgaggaacaggcggcatattt

SEQ ID NO: 271641 - DNA, 25 bp, Artificial
  Probe
atggtacatggttggtttccatcca

SEQ ID NO: 271642 - DNA, 25 bp, Artificial
  Probe
tacctagaatgctcagctggggaag

SEQ ID NO: 271643 - DNA, 25 bp, Artificial
  Probe
ctgtgttttagatctccgaaagtaa

SEQ ID NO: 271644 - DNA, 25 bp, Artificial
  Probe
attgcagcaccctttcctatgatgg

SEQ ID NO: 271645 - DNA, 25 bp, Artificial
  Probe
tctggaatactcagagtggaagtct

SEQ ID NO: 271646 - DNA, 25 bp, Artificial
  Probe
tccagaacaggctctaatgactgaa

SEQ ID NO: 271647 - DNA, 25 bp, Artificial
  Probe
catatctggaatactcagagtggaa

SEQ ID NO: 271648 - DNA, 25 bp, Artificial
  Probe
tgtgggattgcagcaccctttccta

SEQ ID NO: 271649 - DNA, 25 bp, Artificial
  Probe
cctttcctatgatgggctccaaact

SEQ ID NO: 271650 - DNA, 25 bp, Artificial
  Probe
gcaagccatcagctacatggtacat

SEQ ID NO: 271651 - DNA, 25 bp, Artificial
  Probe
actcagagtggaagtctcgtccaca

SEQ ID NO: 271652 - DNA, 25 bp, Artificial
  Probe
tgaatgtgtgggattgcagcaccct

SEQ ID NO: 271653 - DNA, 25 bp, Artificial
  Probe
ccacagctaccgaggaacaggcggc

SEQ ID NO: 271654 - DNA, 25 bp, Artificial
  Probe
aagtatttggccagtggatcctttg

SEQ ID NO: 271655 - DNA, 25 bp, Artificial
  Probe
cctatgatgggctccaaactgtgtg

SEQ ID NO: 271656 - DNA, 25 bp, Artificial
  Probe
cgttcagccctgacggaaagtattt

SEQ ID NO: 271657 - DNA, 25 bp, Artificial
  Probe
agtgtagcgttcagccctgacggaa

SEQ ID NO: 271658 - DNA, 25 bp, Artificial
  Probe
aaaccattctaatggagcagcagtg

SEQ ID NO: 271659 - DNA, 25 bp, Artificial
  Probe
ggaaatcacctgtccctggccacag

SEQ ID NO: 271660 - DNA, 25 bp, Artificial
  Probe
aacaggcggcatatttgaggtgtgc

SEQ ID NO: 271661 - DNA, 25 bp, Artificial
  Probe
ccctgacggaaagtatttggccagt

SEQ ID NO: 271662 - DNA, 25 bp, Artificial
  Probe
acaggcggcatatttgaggtgtgct

SEQ ID NO: 271663 - DNA, 25 bp, Artificial
  Probe
tgggattgcagcaccctttcctatg

SEQ ID NO: 271664 - DNA, 25 bp, Artificial
  Probe
tgtatcacaggaatatggtttctac

SEQ ID NO: 271665 - DNA, 25 bp, Artificial
  Probe
tgtgaacttgacttgttcgagtcta

SEQ ID NO: 271666 - DNA, 25 bp, Artificial
  Probe
atgtgtgggattgcagcaccctttc

SEQ ID NO: 271667 - DNA, 25 bp, Artificial
  Probe
gtggaagtctcgtccacagctaccg

SEQ ID NO: 271668 - DNA, 25 bp, Artificial
  Probe
gtccctggccacaggattatttccc

SEQ ID NO: 271669 - DNA, 25 bp, Artificial
  Probe
aaagtgggtgccagtgcatctgatg

SEQ ID NO: 271670 - DNA, 25 bp, Artificial
  Probe
gagtggaagtctcgtccacagctac

SEQ ID NO: 271671 - DNA, 25 bp, Artificial
  Probe
tcgtccacagctaccgaggaacagg

SEQ ID NO: 271672 - DNA, 25 bp, Artificial
  Probe
aagccatcagctacatggtacatgg

SEQ ID NO: 271673 - DNA, 25 bp, Artificial
  Probe
agcgttcagccctgacggaaagtat

SEQ ID NO: 271674 - DNA, 25 bp, Artificial
  Probe
tgtgctggaatgctcgaggagacaa

SEQ ID NO: 271675 - DNA, 25 bp, Artificial
  Probe
aatactcagagtggaagtctcgtcc

SEQ ID NO: 271676 - DNA, 25 bp, Artificial
  Probe
acatggtacatggttggtttccatc

SEQ ID NO: 271677 - DNA, 25 bp, Artificial
  Probe
tctcaacagcaggatgtgggtgttc

SEQ ID NO: 271678 - DNA, 25 bp, Artificial
  Probe
gatgcaagcttgacatctttccaat

SEQ ID NO: 271679 - DNA, 25 bp, Artificial
  Probe
agctttgctctatccccggaggaaa

SEQ ID NO: 271680 - DNA, 25 bp, Artificial
  Probe
gcagagtcccagactccatcgacta

SEQ ID NO: 271681 - DNA, 25 bp, Artificial
  Probe
tcacctgggagacatgaccagcgaa

SEQ ID NO: 271682 - DNA, 25 bp, Artificial
  Probe
catctttccaattttacagcagagg

SEQ ID NO: 271683 - DNA, 25 bp, Artificial
  Probe
aaatttctgtccataatcttgaggc

SEQ ID NO: 271684 - DNA, 25 bp, Artificial
  Probe
agggccaactcaagaagaaaactgg

SEQ ID NO: 271685 - DNA, 25 bp, Artificial
  Probe
cgggtgccctggagggccaactcaa

SEQ ID NO: 271686 - DNA, 25 bp, Artificial
  Probe
aaggcagctaagtgcagagggtaca

SEQ ID NO: 271687 - DNA, 25 bp, Artificial
  Probe
tcagagtgccaccttcgcgttcctt

SEQ ID NO: 271688 - DNA, 25 bp, Artificial
  Probe
caacagcaaggtggatgaaatctct

SEQ ID NO: 271689 - DNA, 25 bp, Artificial
  Probe
agaagatgactggactcagagtgcc

SEQ ID NO: 271690 - DNA, 25 bp, Artificial
  Probe
aatggaggcattgactctgaagacg

SEQ ID NO: 271691 - DNA, 25 bp, Artificial
  Probe
agctggccatgaatcacctgggaga

SEQ ID NO: 271692 - DNA, 25 bp, Artificial
  Probe
acgagaaagccctgaagagagcagt

SEQ ID NO: 271693 - DNA, 25 bp, Artificial
  Probe
tgtactatgacgaaaactgcgaccg

SEQ ID NO: 271694 - DNA, 25 bp, Artificial
  Probe
gttgtatgtataacgccacggcaaa

SEQ ID NO: 271695 - DNA, 25 bp, Artificial
  Probe
acgaaaactgcgaccgtgataatgt

SEQ ID NO: 271696 - DNA, 25 bp, Artificial
  Probe
atgtataacgccacggcaaaggcag

SEQ ID NO: 271697 - DNA, 25 bp, Artificial
  Probe
ccccagagtgggaaggcagagtccc

SEQ ID NO: 271698 - DNA, 25 bp, Artificial
  Probe
tccctgtggggaacgagaaagccct

SEQ ID NO: 271699 - DNA, 25 bp, Artificial
  Probe
tgaccagcgaagaagtggttcagaa

SEQ ID NO: 271700 - DNA, 25 bp, Artificial
  Probe
aatcacctgggagacatgaccagcg

SEQ ID NO: 271701 - DNA, 25 bp, Artificial
  Probe
tccccggaggaaacgctggacacgc

SEQ ID NO: 271702 - DNA, 25 bp, Artificial
  Probe
ccctgtggggaacgagaaagccctg

SEQ ID NO: 271703 - DNA, 25 bp, Artificial
  Probe
ctctatccccggaggaaacgctgga

SEQ ID NO: 271704 - DNA, 25 bp, Artificial
  Probe
cagaatcttgtggactgtgtgtctg

SEQ ID NO: 271705 - DNA, 25 bp, Artificial
  Probe
caacagcaggatgtgggtgttcaag

SEQ ID NO: 271706 - DNA, 25 bp, Artificial
  Probe
cagtggctcgggtaggacccgtctc

SEQ ID NO: 271707 - DNA, 25 bp, Artificial
  Probe
gcgttccttcagtaatgacactctc

SEQ ID NO: 271708 - DNA, 25 bp, Artificial
  Probe
aggcggctatatgaccactgccttc

SEQ ID NO: 271709 - DNA, 25 bp, Artificial
  Probe
tggctcgggtaggacccgtctctgt

SEQ ID NO: 271710 - DNA, 25 bp, Artificial
  Probe
acatgaccagcgaagaagtggttca

SEQ ID NO: 271711 - DNA, 25 bp, Artificial
  Probe
atgaccactgccttccaatatgtgc

SEQ ID NO: 271712 - DNA, 25 bp, Artificial
  Probe
atcgactatcgaaagaaaggctatg

SEQ ID NO: 271713 - DNA, 25 bp, Artificial
  Probe
aaactggcaaactcttagctctgag

SEQ ID NO: 271714 - DNA, 25 bp, Artificial
  Probe
atgacactctctataccccagagtg

SEQ ID NO: 271715 - DNA, 25 bp, Artificial
  Probe
gccttccaatatgtgcagcagaatg

SEQ ID NO: 271716 - DNA, 25 bp, Artificial
  Probe
gtggatgaaatctctcggcgtttaa

SEQ ID NO: 271717 - DNA, 25 bp, Artificial
  Probe
ggaagaagacccacgggaagcagta

SEQ ID NO: 271718 - DNA, 25 bp, Artificial
  Probe
tacagcagaggtgtgtactatgacg

SEQ ID NO: 271719 - DNA, 25 bp, Artificial
  Probe
aagccctgaagagagcagtggctcg

SEQ ID NO: 271720 - DNA, 25 bp, Artificial
  Probe
gggtgttcaagtttttgctgctacc

SEQ ID NO: 271721 - DNA, 25 bp, Artificial
  Probe
ggatgaaatctctcggcgtttaatt

SEQ ID NO: 271722 - DNA, 25 bp, Artificial
  Probe
ctgaagacgcttacccgtatgtggg

SEQ ID NO: 271723 - DNA, 25 bp, Artificial
  Probe
tgaatgtattcctggaagagtggcc

SEQ ID NO: 271724 - DNA, 25 bp, Artificial
  Probe
cagctcactggtgactcggctgtcc

SEQ ID NO: 271725 - DNA, 25 bp, Artificial
  Probe
ctgagctgcgtgctgaacgtggacc

SEQ ID NO: 271726 - DNA, 25 bp, Artificial
  Probe
gaagagtggcccaagctcaattcag

SEQ ID NO: 271727 - DNA, 25 bp, Artificial
  Probe
cgtggaccacgtagcgcagctcact

SEQ ID NO: 271728 - DNA, 25 bp, Artificial
  Probe
gcggatgcatgtctctgagctgcgt

SEQ ID NO: 271729 - DNA, 25 bp, Artificial
  Probe
attaacaagataacccgtgaatgta

SEQ ID NO: 271730 - DNA, 25 bp, Artificial
  Probe
cgtagcgcagctcactggtgactcg

SEQ ID NO: 271731 - DNA, 25 bp, Artificial
  Probe
cccgtgaatgtattcctggaagagt

SEQ ID NO: 271732 - DNA, 25 bp, Artificial
  Probe
gctggatatgacacaccgaagaggg

SEQ ID NO: 271733 - DNA, 25 bp, Artificial
  Probe
cggagacaactaacccatacatgaa

SEQ ID NO: 271734 - DNA, 25 bp, Artificial
  Probe
caagctcaattcaggatctaacctg

SEQ ID NO: 271735 - DNA, 25 bp, Artificial
  Probe
gcgtgctgaacgtggaccacgtagc

SEQ ID NO: 271736 - DNA, 25 bp, Artificial
  Probe
gggccaacggagacaactaacccat

SEQ ID NO: 271737 - DNA, 25 bp, Artificial
  Probe
cggatgcatgtctctgagctgcgtg

SEQ ID NO: 271738 - DNA, 25 bp, Artificial
  Probe
agctcactggtgactcggctgtccc

SEQ ID NO: 271739 - DNA, 25 bp, Artificial
  Probe
gctgaacgtggaccacgtagcgcag

SEQ ID NO: 271740 - DNA, 25 bp, Artificial
  Probe
tggggaccaggctggatatgacaca

SEQ ID NO: 271741 - DNA, 25 bp, Artificial
  Probe
atactggggaccaggctggatatga

SEQ ID NO: 271742 - DNA, 25 bp, Artificial
  Probe
gatcgttgggccaacggagacaact

SEQ ID NO: 271743 - DNA, 25 bp, Artificial
  Probe
ggaccaggctggatatgacacaccg

SEQ ID NO: 271744 - DNA, 25 bp, Artificial
  Probe
ttcctggaagagtggcccaagctca

SEQ ID NO: 271745 - DNA, 25 bp, Artificial
  Probe
ccacgtagcgcagctcactggtgac

SEQ ID NO: 271746 - DNA, 25 bp, Artificial
  Probe
taagggtcgcaacaggcggatgcat

SEQ ID NO: 271747 - DNA, 25 bp, Artificial
  Probe
cgcaacaggcggatgcatgtctctg

SEQ ID NO: 271748 - DNA, 25 bp, Artificial
  Probe
cccatactggggaccaggctggata

SEQ ID NO: 271749 - DNA, 25 bp, Artificial
  Probe
gggcacactgagatcgttgggccaa

SEQ ID NO: 271750 - DNA, 25 bp, Artificial
  Probe
attcacgtcgtaagggtcgcaacag

SEQ ID NO: 271751 - DNA, 25 bp, Artificial
  Probe
cactgagatcgttgggccaacggag

SEQ ID NO: 271752 - DNA, 25 bp, Artificial
  Probe
gtagcgcagctcactggtgactcgg

SEQ ID NO: 271753 - DNA, 25 bp, Artificial
  Probe
gagtggcccaagctcaattcaggat

SEQ ID NO: 271754 - DNA, 25 bp, Artificial
  Probe
agataacccgtgaatgtattcctgg

SEQ ID NO: 271755 - DNA, 25 bp, Artificial
  Probe
aggcggatgcatgtctctgagctgc

SEQ ID NO: 271756 - DNA, 25 bp, Artificial
  Probe
tggtgactcggctgtccccatactg

SEQ ID NO: 271757 - DNA, 25 bp, Artificial
  Probe
tgggccaacggagacaactaaccca

SEQ ID NO: 271758 - DNA, 25 bp, Artificial
  Probe
atcgttgggccaacggagacaacta

SEQ ID NO: 271759 - DNA, 25 bp, Artificial
  Probe
accaggctggatatgacacaccgaa

SEQ ID NO: 271760 - DNA, 25 bp, Artificial
  Probe
tattaacaagataacccgtgaatgt

SEQ ID NO: 271761 - DNA, 25 bp, Artificial
  Probe
gcccaagctcaattcaggatctaac

SEQ ID NO: 271762 - DNA, 25 bp, Artificial
  Probe
caagataacccgtgaatgtattcct

SEQ ID NO: 271763 - DNA, 25 bp, Artificial
  Probe
aacggagacaactaacccatacatg

SEQ ID NO: 271764 - DNA, 25 bp, Artificial
  Probe
gtattcctggaagagtggcccaagc

SEQ ID NO: 271765 - DNA, 25 bp, Artificial
  Probe
atgtctctgagctgcgtgctgaacg

SEQ ID NO: 271766 - DNA, 25 bp, Artificial
  Probe
tcggctgtccccatactggggacca

SEQ ID NO: 271767 - DNA, 25 bp, Artificial
  Probe
ctctgagctgcgtgctgaacgtgga

SEQ ID NO: 271768 - DNA, 25 bp, Artificial
  Probe
ctggatatgacacaccgaagagggg

SEQ ID NO: 271769 - DNA, 25 bp, Artificial
  Probe
ccgcatgggtcagttttgtaaggga

SEQ ID NO: 271770 - DNA, 25 bp, Artificial
  Probe
aaccttcccgcatgggtcagttttg

SEQ ID NO: 271771 - DNA, 25 bp, Artificial
  Probe
tgaccacaaactctcagcttggcat

SEQ ID NO: 271772 - DNA, 25 bp, Artificial
  Probe
gcagtagccaagctgacagggtaaa

SEQ ID NO: 271773 - DNA, 25 bp, Artificial
  Probe
ttaataaagcgcaacacttggcgtt

SEQ ID NO: 271774 - DNA, 25 bp, Artificial
  Probe
ggccaccagcatcctttgggtcagc

SEQ ID NO: 271775 - DNA, 25 bp, Artificial
  Probe
gtttgcagacggaaccttcccgcat

SEQ ID NO: 271776 - DNA, 25 bp, Artificial
  Probe
aggccaccagcatcctttgggtcag

SEQ ID NO: 271777 - DNA, 25 bp, Artificial
  Probe
cagacggaaccttcccgcatgggtc

SEQ ID NO: 271778 - DNA, 25 bp, Artificial
  Probe
tagctgtttgccttaactttacagt

SEQ ID NO: 271779 - DNA, 25 bp, Artificial
  Probe
gctgtttgccttaactttacagtct

SEQ ID NO: 271780 - DNA, 25 bp, Artificial
  Probe
gagcatgtgctgacggagcacttga

SEQ ID NO: 271781 - DNA, 25 bp, Artificial
  Probe
tccccacagggaggttaataaagcg

SEQ ID NO: 271782 - DNA, 25 bp, Artificial
  Probe
tttgcagacggaaccttcccgcatg

SEQ ID NO: 271783 - DNA, 25 bp, Artificial
  Probe
cagtagccaagctgacagggtaaag

SEQ ID NO: 271784 - DNA, 25 bp, Artificial
  Probe
taactttacagtcttccccacaggg

SEQ ID NO: 271785 - DNA, 25 bp, Artificial
  Probe
tcccgcatgggtcagttttgtaagg

SEQ ID NO: 271786 - DNA, 25 bp, Artificial
  Probe
ctgctccggagcagtagccaagctg

SEQ ID NO: 271787 - DNA, 25 bp, Artificial
  Probe
ttgcagacggaaccttcccgcatgg

SEQ ID NO: 271788 - DNA, 25 bp, Artificial
  Probe
aggttccgctcttgctcctccgagg

SEQ ID NO: 271789 - DNA, 25 bp, Artificial
  Probe
agatgaccacaaactctcagcttgg

SEQ ID NO: 271790 - DNA, 25 bp, Artificial
  Probe
gagcagtagccaagctgacagggta

SEQ ID NO: 271791 - DNA, 25 bp, Artificial
  Probe
tagccaagctgacagggtaaaggga

SEQ ID NO: 271792 - DNA, 25 bp, Artificial
  Probe
gaaccttcccgcatgggtcagtttt

SEQ ID NO: 271793 - DNA, 25 bp, Artificial
  Probe
agccaagctgacagggtaaagggat

SEQ ID NO: 271794 - DNA, 25 bp, Artificial
  Probe
ctccggagcagtagccaagctgaca

SEQ ID NO: 271795 - DNA, 25 bp, Artificial
  Probe
agtagccaagctgacagggtaaagg

SEQ ID NO: 271796 - DNA, 25 bp, Artificial
  Probe
tgcagacggaaccttcccgcatggg

SEQ ID NO: 271797 - DNA, 25 bp, Artificial
  Probe
actttacagtcttccccacagggag

SEQ ID NO: 271798 - DNA, 25 bp, Artificial
  Probe
acaggccaccagcatcctttgggtc

SEQ ID NO: 271799 - DNA, 25 bp, Artificial
  Probe
agcagtagccaagctgacagggtaa

SEQ ID NO: 271800 - DNA, 25 bp, Artificial
  Probe
aggaggctctgctcagcctggctcc

SEQ ID NO: 271801 - DNA, 25 bp, Artificial
  Probe
cccgcatgggtcagttttgtaaggg

SEQ ID NO: 271802 - DNA, 25 bp, Artificial
  Probe
tcggcacagggctactgatgagaga

SEQ ID NO: 271803 - DNA, 25 bp, Artificial
  Probe
gctccggagcagtagccaagctgac

SEQ ID NO: 271804 - DNA, 25 bp, Artificial
  Probe
gcagacggaaccttcccgcatgggt

SEQ ID NO: 271805 - DNA, 25 bp, Artificial
  Probe
gaccacaaactctcagcttggcatc

SEQ ID NO: 271806 - DNA, 25 bp, Artificial
  Probe
ttcccgcatgggtcagttttgtaag

SEQ ID NO: 271807 - DNA, 25 bp, Artificial
  Probe
atgaccacaaactctcagcttggca

SEQ ID NO: 271808 - DNA, 25 bp, Artificial
  Probe
tgctccggagcagtagccaagctga

SEQ ID NO: 271809 - DNA, 25 bp, Artificial
  Probe
tgacaggccaccagcatcctttggg

SEQ ID NO: 271810 - DNA, 25 bp, Artificial
  Probe
gccaccagcatcctttgggtcagct

SEQ ID NO: 271811 - DNA, 25 bp, Artificial
  Probe
agctgtttgccttaactttacagtc

SEQ ID NO: 271812 - DNA, 25 bp, Artificial
  Probe
gaggctctgctcagcctggctccag

SEQ ID NO: 271813 - DNA, 25 bp, Artificial
  Probe
caggccaccagcatcctttgggtca

SEQ ID NO: 271814 - DNA, 25 bp, Artificial
  Probe
ggaggctctgctcagcctggctcca

SEQ ID NO: 271815 - DNA, 25 bp, Artificial
  Probe
agatgctcgggtttccattttgttg

SEQ ID NO: 271816 - DNA, 25 bp, Artificial
  Probe
gagtttcattttgaggaaggcaagt

SEQ ID NO: 271817 - DNA, 25 bp, Artificial
  Probe
aaccctaacctcatattgttgctga

SEQ ID NO: 271818 - DNA, 25 bp, Artificial
  Probe
tgattttctttcctttaatgtagat

SEQ ID NO: 271819 - DNA, 25 bp, Artificial
  Probe
aacctcatattgttgctgagtttca

SEQ ID NO: 271820 - DNA, 25 bp, Artificial
  Probe
ctaacctcatattgttgctgagttt

SEQ ID NO: 271821 - DNA, 25 bp, Artificial
  Probe
tttaatgtagatgctcgggtttcca

SEQ ID NO: 271822 - DNA, 25 bp, Artificial
  Probe
gatgctcgggtttccattttgttgc

SEQ ID NO: 271823 - DNA, 25 bp, Artificial
  Probe
atgtagatgctcgggtttccatttt

SEQ ID NO: 271824 - DNA, 25 bp, Artificial
  Probe
gagtttgtacataaccctaacctca

SEQ ID NO: 271825 - DNA, 25 bp, Artificial
  Probe
aatgtagatgctcgggtttccattt

SEQ ID NO: 271826 - DNA, 25 bp, Artificial
  Probe
atgctcgggtttccattttgttgct

SEQ ID NO: 271827 - DNA, 25 bp, Artificial
  Probe
ttaatgtagatgctcgggtttccat

SEQ ID NO: 271828 - DNA, 25 bp, Artificial
  Probe
attttctttcctttaatgtagatgc

SEQ ID NO: 271829 - DNA, 25 bp, Artificial
  Probe
ctcatattgttgctgagtttcattt

SEQ ID NO: 271830 - DNA, 25 bp, Artificial
  Probe
tagatgctcgggtttccattttgtt

SEQ ID NO: 271831 - DNA, 25 bp, Artificial
  Probe
ctcgggtttccattttgttgctgca

SEQ ID NO: 271832 - DNA, 25 bp, Artificial
  Probe
taaccctaacctcatattgttgctg

SEQ ID NO: 271833 - DNA, 25 bp, Artificial
  Probe
tgtacataaccctaacctcatattg

SEQ ID NO: 271834 - DNA, 25 bp, Artificial
  Probe
tttctttcctttaatgtagatgctc

SEQ ID NO: 271835 - DNA, 25 bp, Artificial
  Probe
ttgctgagtttcattttgaggaagg

SEQ ID NO: 271836 - DNA, 25 bp, Artificial
  Probe
tcatattgttgctgagtttcatttt

SEQ ID NO: 271837 - DNA, 25 bp, Artificial
  Probe
tttcctttaatgtagatgctcgggt

SEQ ID NO: 271838 - DNA, 25 bp, Artificial
  Probe
ccctaacctcatattgttgctgagt

SEQ ID NO: 271839 - DNA, 25 bp, Artificial
  Probe
tgtagatgctcgggtttccattttg

SEQ ID NO: 271840 - DNA, 25 bp, Artificial
  Probe
ctttaatgtagatgctcgggtttcc

SEQ ID NO: 271841 - DNA, 25 bp, Artificial
  Probe
taacctcatattgttgctgagtttc

SEQ ID NO: 271842 - DNA, 25 bp, Artificial
  Probe
taatgtagatgctcgggtttccatt

SEQ ID NO: 271843 - DNA, 25 bp, Artificial
  Probe
tcctttaatgtagatgctcgggttt

SEQ ID NO: 271844 - DNA, 25 bp, Artificial
  Probe
tctttcctttaatgtagatgctcgg

SEQ ID NO: 271845 - DNA, 25 bp, Artificial
  Probe
tgctcgggtttccattttgttgctg

SEQ ID NO: 271846 - DNA, 25 bp, Artificial
  Probe
atattgttgctgagtttcattttga

SEQ ID NO: 271847 - DNA, 25 bp, Artificial
  Probe
cctaacctcatattgttgctgagtt

SEQ ID NO: 271848 - DNA, 25 bp, Artificial
  Probe
ctttcctttaatgtagatgctcggg

SEQ ID NO: 271849 - DNA, 25 bp, Artificial
  Probe
gtacataaccctaacctcatattgt

SEQ ID NO: 271850 - DNA, 25 bp, Artificial
  Probe
cctttaatgtagatgctcgggtttc

SEQ ID NO: 271851 - DNA, 25 bp, Artificial
  Probe
accctaacctcatattgttgctgag

SEQ ID NO: 271852 - DNA, 25 bp, Artificial
  Probe
acctcatattgttgctgagtttcat

SEQ ID NO: 271853 - DNA, 25 bp, Artificial
  Probe
acataaccctaacctcatattgttg

SEQ ID NO: 271854 - DNA, 25 bp, Artificial
  Probe
cctcatattgttgctgagtttcatt

SEQ ID NO: 271855 - DNA, 25 bp, Artificial
  Probe
gctcgggtttccattttgttgctgc

SEQ ID NO: 271856 - DNA, 25 bp, Artificial
  Probe
ttcctttaatgtagatgctcgggtt

SEQ ID NO: 271857 - DNA, 25 bp, Artificial
  Probe
tgctgagtttcattttgaggaaggc

SEQ ID NO: 271858 - DNA, 25 bp, Artificial
  Probe
tgtctgtgagtttgtacataaccct

SEQ ID NO: 271859 - DNA, 25 bp, Artificial
  Probe
ttctttcctttaatgtagatgctcg

SEQ ID NO: 271860 - DNA, 25 bp, Artificial
  Probe
tgttgctgagtttcattttgaggaa

SEQ ID NO: 271861 - DNA, 25 bp, Artificial
  Probe
cattttctggccttccggacagaga

SEQ ID NO: 271862 - DNA, 25 bp, Artificial
  Probe
gccacggagcagaaggaggccctcc

SEQ ID NO: 271863 - DNA, 25 bp, Artificial
  Probe
acaaggctgacctggccacggagca

SEQ ID NO: 271864 - DNA, 25 bp, Artificial
  Probe
ttaccgtggcatctgtggctccagt

SEQ ID NO: 271865 - DNA, 25 bp, Artificial
  Probe
tagtcaggacactgaaaggttaccg

SEQ ID NO: 271866 - DNA, 25 bp, Artificial
  Probe
ctagcacagcgctacaaggctgacc

SEQ ID NO: 271867 - DNA, 25 bp, Artificial
  Probe
aggcgtgagcttcagagtgcagtcc

SEQ ID NO: 271868 - DNA, 25 bp, Artificial
  Probe
ccgtgctttggcaccagtgcctact

SEQ ID NO: 271869 - DNA, 25 bp, Artificial
  Probe
ttcagagtgcagtccccagagatgt

SEQ ID NO: 271870 - DNA, 25 bp, Artificial
  Probe
accagtgcctactgacactagcaca

SEQ ID NO: 271871 - DNA, 25 bp, Artificial
  Probe
tagcacagcgctacaaggctgacct

SEQ ID NO: 271872 - DNA, 25 bp, Artificial
  Probe
gttgtcaccatggaatgagaacagt

SEQ ID NO: 271873 - DNA, 25 bp, Artificial
  Probe
ggaggaccccagctggtgtagttaa

SEQ ID NO: 271874 - DNA, 25 bp, Artificial
  Probe
ggttaccgtggcatctgtggctcca

SEQ ID NO: 271875 - DNA, 25 bp, Artificial
  Probe
attttctggccttccggacagagaa

SEQ ID NO: 271876 - DNA, 25 bp, Artificial
  Probe
ctactgacactagcacagcgctaca

SEQ ID NO: 271877 - DNA, 25 bp, Artificial
  Probe
ctctggtcttccattttctggcctt

SEQ ID NO: 271878 - DNA, 25 bp, Artificial
  Probe
agtccccagagatgtggaagatgtt

SEQ ID NO: 271879 - DNA, 25 bp, Artificial
  Probe
gttgttgtcaccatggaatgagaac

SEQ ID NO: 271880 - DNA, 25 bp, Artificial
  Probe
gctgcccgtgctttggcaccagtgc

SEQ ID NO: 271881 - DNA, 25 bp, Artificial
  Probe
tgacactagcacagcgctacaaggc

SEQ ID NO: 271882 - DNA, 25 bp, Artificial
  Probe
gacactgaaaggttaccgtggcatc

SEQ ID NO: 271883 - DNA, 25 bp, Artificial
  Probe
aggtactgtgtaagctcactgggtt

SEQ ID NO: 271884 - DNA, 25 bp, Artificial
  Probe
gaaaggttaccgtggcatctgtggc

SEQ ID NO: 271885 - DNA, 25 bp, Artificial
  Probe
tgtcaccatggaatgagaacagtca

SEQ ID NO: 271886 - DNA, 25 bp, Artificial
  Probe
ctttggcaccagtgcctactgacac

SEQ ID NO: 271887 - DNA, 25 bp, Artificial
  Probe
ggccctcctagaactgcttcggctg

SEQ ID NO: 271888 - DNA, 25 bp, Artificial
  Probe
cacagcgctacaaggctgacctggc

SEQ ID NO: 271889 - DNA, 25 bp, Artificial
  Probe
cagctgcccgtgctttggcaccagt

SEQ ID NO: 271890 - DNA, 25 bp, Artificial
  Probe
tcttccattttctggccttccggac

SEQ ID NO: 271891 - DNA, 25 bp, Artificial
  Probe
agtcaggacactgaaaggttaccgt

SEQ ID NO: 271892 - DNA, 25 bp, Artificial
  Probe
gtccccagagatgtggaagatgttg

SEQ ID NO: 271893 - DNA, 25 bp, Artificial
  Probe
gccttccggacagagaagcgccagc

SEQ ID NO: 271894 - DNA, 25 bp, Artificial
  Probe
cttcagagtgcagtccccagagatg

SEQ ID NO: 271895 - DNA, 25 bp, Artificial
  Probe
cctcctagaactgcttcggctgcag

SEQ ID NO: 271896 - DNA, 25 bp, Artificial
  Probe
gcctactgacactagcacagcgcta

SEQ ID NO: 271897 - DNA, 25 bp, Artificial
  Probe
agaaggaggccctcctagaactgct

SEQ ID NO: 271898 - DNA, 25 bp, Artificial
  Probe
ccgtggcatctgtggctccagtctt

SEQ ID NO: 271899 - DNA, 25 bp, Artificial
  Probe
cactgaaaggttaccgtggcatctg

SEQ ID NO: 271900 - DNA, 25 bp, Artificial
  Probe
tcctagaactgcttcggctgcagcc

SEQ ID NO: 271901 - DNA, 25 bp, Artificial
  Probe
agtgcagtccccagagatgtggaag

SEQ ID NO: 271902 - DNA, 25 bp, Artificial
  Probe
agctgcccgtgctttggcaccagtg

SEQ ID NO: 271903 - DNA, 25 bp, Artificial
  Probe
agagaagcgccagctgcccgtgctt

SEQ ID NO: 271904 - DNA, 25 bp, Artificial
  Probe
tccggacagagaagcgccagctgcc

SEQ ID NO: 271905 - DNA, 25 bp, Artificial
  Probe
gcgctacaaggctgacctggccacg

SEQ ID NO: 271906 - DNA, 25 bp, Artificial
  Probe
aggaggccctcctagaactgcttcg

SEQ ID NO: 271907 - DNA, 25 bp, Artificial
  Probe
tcaagatcctggagccagaagaggg

SEQ ID NO: 271908 - DNA, 25 bp, Artificial
  Probe
agcggtcactcagctcacagtggta

SEQ ID NO: 271909 - DNA, 25 bp, Artificial
  Probe
gctcacagtggtaccagtcggggcc

SEQ ID NO: 271910 - DNA, 25 bp, Artificial
  Probe
acctgcgttctcacgtaaagaccgt

SEQ ID NO: 271911 - DNA, 25 bp, Artificial
  Probe
taaagaccgtgcatcagggcaaggc

SEQ ID NO: 271912 - DNA, 25 bp, Artificial
  Probe
caaccgggtagacaacctgcgttct

SEQ ID NO: 271913 - DNA, 25 bp, Artificial
  Probe
atcaagatcctggagccagaagagg

SEQ ID NO: 271914 - DNA, 25 bp, Artificial
  Probe
tcagctcacagtggtaccagtcggg

SEQ ID NO: 271915 - DNA, 25 bp, Artificial
  Probe
gacatggtcacactggccactgagg

SEQ ID NO: 271916 - DNA, 25 bp, Artificial
  Probe
ccactgaggcactggcagcgacagc

SEQ ID NO: 271917 - DNA, 25 bp, Artificial
  Probe
gggtagacaacctgcgttctcacgt

SEQ ID NO: 271918 - DNA, 25 bp, Artificial
  Probe
gacagcggtcactcagctcacagtg

SEQ ID NO: 271919 - DNA, 25 bp, Artificial
  Probe
ttcaaccgggtagacaacctgcgtt

SEQ ID NO: 271920 - DNA, 25 bp, Artificial
  Probe
acgacatggtcacactggccactga

SEQ ID NO: 271921 - DNA, 25 bp, Artificial
  Probe
gtcacactggccactgaggcactgg

SEQ ID NO: 271922 - DNA, 25 bp, Artificial
  Probe
actggcagcgacagcggtcactcag

SEQ ID NO: 271923 - DNA, 25 bp, Artificial
  Probe
tcacactggccactgaggcactggc

SEQ ID NO: 271924 - DNA, 25 bp, Artificial
  Probe
tcactcagctcacagtggtaccagt

SEQ ID NO: 271925 - DNA, 25 bp, Artificial
  Probe
agcgacagcggtcactcagctcaca

SEQ ID NO: 271926 - DNA, 25 bp, Artificial
  Probe
ggccactgaggcactggcagcgaca

SEQ ID NO: 271927 - DNA, 25 bp, Artificial
  Probe
acgtaaagaccgtgcatcagggcaa

SEQ ID NO: 271928 - DNA, 25 bp, Artificial
  Probe
ttctcacgtaaagaccgtgcatcag

SEQ ID NO: 271929 - DNA, 25 bp, Artificial
  Probe
cgggtagacaacctgcgttctcacg

SEQ ID NO: 271930 - DNA, 25 bp, Artificial
  Probe
acaacctgcgttctcacgtaaagac

SEQ ID NO: 271931 - DNA, 25 bp, Artificial
  Probe
gtttcaaccgggtagacaacctgcg

SEQ ID NO: 271932 - DNA, 25 bp, Artificial
  Probe
ggcatcaagatcctggagccagaag

SEQ ID NO: 271933 - DNA, 25 bp, Artificial
  Probe
gcactggcagcgacagcggtcactc

SEQ ID NO: 271934 - DNA, 25 bp, Artificial
  Probe
tcagcgtggtcactgtggacgacat

SEQ ID NO: 271935 - DNA, 25 bp, Artificial
  Probe
gcggtcactcagctcacagtggtac

SEQ ID NO: 271936 - DNA, 25 bp, Artificial
  Probe
tgcatcagggcaaggcgggcatcaa

SEQ ID NO: 271937 - DNA, 25 bp, Artificial
  Probe
gtggacgacatggtcacactggcca

SEQ ID NO: 271938 - DNA, 25 bp, Artificial
  Probe
tcactgtggacgacatggtcacact

SEQ ID NO: 271939 - DNA, 25 bp, Artificial
  Probe
gtcagcgtggtcactgtggacgaca

SEQ ID NO: 271940 - DNA, 25 bp, Artificial
  Probe
actgtggacgacatggtcacactgg

SEQ ID NO: 271941 - DNA, 25 bp, Artificial
  Probe
tctcacgtaaagaccgtgcatcagg

SEQ ID NO: 271942 - DNA, 25 bp, Artificial
  Probe
cagcgtggtcactgtggacgacatg

SEQ ID NO: 271943 - DNA, 25 bp, Artificial
  Probe
accgggtagacaacctgcgttctca

SEQ ID NO: 271944 - DNA, 25 bp, Artificial
  Probe
gggcatcaagatcctggagccagaa

SEQ ID NO: 271945 - DNA, 25 bp, Artificial
  Probe
ctcagctcacagtggtaccagtcgg

SEQ ID NO: 271946 - DNA, 25 bp, Artificial
  Probe
acatggtcacactggccactgaggc

SEQ ID NO: 271947 - DNA, 25 bp, Artificial
  Probe
aggcgggcatcaagatcctggagcc

SEQ ID NO: 271948 - DNA, 25 bp, Artificial
  Probe
caagtgtggccgtggtttcaaccgg

SEQ ID NO: 271949 - DNA, 25 bp, Artificial
  Probe
agacaacctgcgttctcacgtaaag

SEQ ID NO: 271950 - DNA, 25 bp, Artificial
  Probe
gtcactcagctcacagtggtaccag

SEQ ID NO: 271951 - DNA, 25 bp, Artificial
  Probe
cactggccactgaggcactggcagc

SEQ ID NO: 271952 - DNA, 25 bp, Artificial
  Probe
cgtggtcactgtggacgacatggtc

SEQ ID NO: 271953 - DNA, 25 bp, Artificial
  Probe
ccaagccagaaaacctgctcaggga

SEQ ID NO: 271954 - DNA, 25 bp, Artificial
  Probe
ctttgttctctttggctaccccaag

SEQ ID NO: 271955 - DNA, 25 bp, Artificial
  Probe
gtggcctcctggttctctcctggct

SEQ ID NO: 271956 - DNA, 25 bp, Artificial
  Probe
agatgaggatgctgcccagctcctg

SEQ ID NO: 271957 - DNA, 25 bp, Artificial
  Probe
atagactacgacttcgtggggaagc

SEQ ID NO: 271958 - DNA, 25 bp, Artificial
  Probe
cagcctgtactcatgggacactgtg

SEQ ID NO: 271959 - DNA, 25 bp, Artificial
  Probe
accctagatgaggatgctgcccagc

SEQ ID NO: 271960 - DNA, 25 bp, Artificial
  Probe
ttctctttggctaccccaagccaga

SEQ ID NO: 271961 - DNA, 25 bp, Artificial
  Probe
cttcgtggggaagctggagacccta

SEQ ID NO: 271962 - DNA, 25 bp, Artificial
  Probe
cagaaaacctgctcagggactgagc

SEQ ID NO: 271963 - DNA, 25 bp, Artificial
  Probe
tcacgctgccacaagaaactgagat

SEQ ID NO: 271964 - DNA, 25 bp, Artificial
  Probe
gagatggtcctttgagaatgggacc

SEQ ID NO: 271965 - DNA, 25 bp, Artificial
  Probe
acttcgtggggaagctggagaccct

SEQ ID NO: 271966 - DNA, 25 bp, Artificial
  Probe
tggtcctttgagaatgggaccccgt

SEQ ID NO: 271967 - DNA, 25 bp, Artificial
  Probe
gaggatgacacaacccaagcacctc

SEQ ID NO: 271968 - DNA, 25 bp, Artificial
  Probe
ttgcaatctgggtttgtttactcca

SEQ ID NO: 271969 - DNA, 25 bp, Artificial
  Probe
ggatgctgcccagctcctgaggtcc

SEQ ID NO: 271970 - DNA, 25 bp, Artificial
  Probe
ggtccctcaaggtagactcccaact

SEQ ID NO: 271971 - DNA, 25 bp, Artificial
  Probe
tactccacagcctgtactcatggga

SEQ ID NO: 271972 - DNA, 25 bp, Artificial
  Probe
ctggcttcctgtaccttccctggtg

SEQ ID NO: 271973 - DNA, 25 bp, Artificial
  Probe
agctggagaccctagatgaggatgc

SEQ ID NO: 271974 - DNA, 25 bp, Artificial
  Probe
agcctgtactcatgggacactgtgt

SEQ ID NO: 271975 - DNA, 25 bp, Artificial
  Probe
ttggctaccccaagccagaaaacct

SEQ ID NO: 271976 - DNA, 25 bp, Artificial
  Probe
gttctctttggctaccccaagccag

SEQ ID NO: 271977 - DNA, 25 bp, Artificial
  Probe
ccagctcctgaggtccctcaaggta

SEQ ID NO: 271978 - DNA, 25 bp, Artificial
  Probe
gcttcctgtaccttccctggtgtag

SEQ ID NO: 271979 - DNA, 25 bp, Artificial
  Probe
tggcctcctggttctctcctggctt

SEQ ID NO: 271980 - DNA, 25 bp, Artificial
  Probe
tttgagaatgggaccccgtggcctc

SEQ ID NO: 271981 - DNA, 25 bp, Artificial
  Probe
cctcacgctgccacaagaaactgag

SEQ ID NO: 271982 - DNA, 25 bp, Artificial
  Probe
gaggtccctcaaggtagactcccaa

SEQ ID NO: 271983 - DNA, 25 bp, Artificial
  Probe
ctagttaccggaacaggaccgccag

SEQ ID NO: 271984 - DNA, 25 bp, Artificial
  Probe
ctagatgaggatgctgcccagctcc

SEQ ID NO: 271985 - DNA, 25 bp, Artificial
  Probe
gactttgttctctttggctacccca

SEQ ID NO: 271986 - DNA, 25 bp, Artificial
  Probe
gccacccgtgccagatagactacga

SEQ ID NO: 271987 - DNA, 25 bp, Artificial
  Probe
tccctggtgtagacaggcagaggat

SEQ ID NO: 271988 - DNA, 25 bp, Artificial
  Probe
ctggttctctcctggcttcctgtac

SEQ ID NO: 271989 - DNA, 25 bp, Artificial
  Probe
tcctgaggtccctcaaggtagactc

SEQ ID NO: 271990 - DNA, 25 bp, Artificial
  Probe
acctgctcagggactgagctcccat

SEQ ID NO: 271991 - DNA, 25 bp, Artificial
  Probe
actacgacttcgtggggaagctgga

SEQ ID NO: 271992 - DNA, 25 bp, Artificial
  Probe
ctgtaccttccctggtgtagacagg

SEQ ID NO: 271993 - DNA, 25 bp, Artificial
  Probe
cagaggatgacacaacccaagcacc

SEQ ID NO: 271994 - DNA, 25 bp, Artificial
  Probe
tgtactcatgggacactgtgttaat

SEQ ID NO: 271995 - DNA, 25 bp, Artificial
  Probe
cagggactgagctcccataagccct

SEQ ID NO: 271996 - DNA, 25 bp, Artificial
  Probe
ggtttgtttactccacagcctgtac

SEQ ID NO: 271997 - DNA, 25 bp, Artificial
  Probe
taccggaacaggaccgccagcagct

SEQ ID NO: 271998 - DNA, 25 bp, Artificial
  Probe
aggatgctgcccagctcctgaggtc

SEQ ID NO: 271999 - DNA, 25 bp, Artificial
  Probe
gcaagcagtgacgaacttcggtgct

SEQ ID NO: 272000 - DNA, 25 bp, Artificial
  Probe
tcacagcactgcaagcagtgacgaa

SEQ ID NO: 272001 - DNA, 25 bp, Artificial
  Probe
cactgcaagcagtgacgaacttcgg

SEQ ID NO: 272002 - DNA, 25 bp, Artificial
  Probe
cgaacttcggtgctccggctgaagt

SEQ ID NO: 272003 - DNA, 25 bp, Artificial
  Probe
agcactgcaagcagtgacgaacttc

SEQ ID NO: 272004 - DNA, 25 bp, Artificial
  Probe
acagcactgcaagcagtgacgaact

SEQ ID NO: 272005 - DNA, 25 bp, Artificial
  Probe
aagcagtgacgaacttcggtgctcc

SEQ ID NO: 272006 - DNA, 25 bp, Artificial
  Probe
ctcacagcactgcaagcagtgacga

SEQ ID NO: 272007 - DNA, 25 bp, Artificial
  Probe
agtgacgaacttcggtgctccggct

SEQ ID NO: 272008 - DNA, 25 bp, Artificial
  Probe
cttcggtgctccggctgaagtcttc

SEQ ID NO: 272009 - DNA, 25 bp, Artificial
  Probe
gctccggctgaagtcttcgactcgg

SEQ ID NO: 272010 - DNA, 25 bp, Artificial
  Probe
gtgacgaacttcggtgctccggctg

SEQ ID NO: 272011 - DNA, 25 bp, Artificial
  Probe
gcagtgacgaacttcggtgctccgg

SEQ ID NO: 272012 - DNA, 25 bp, Artificial
  Probe
agcagtgacgaacttcggtgctccg

SEQ ID NO: 272013 - DNA, 25 bp, Artificial
  Probe
acgaacttcggtgctccggctgaag

SEQ ID NO: 272014 - DNA, 25 bp, Artificial
  Probe
acttcggtgctccggctgaagtctt

SEQ ID NO: 272015 - DNA, 25 bp, Artificial
  Probe
ctgcaagcagtgacgaacttcggtg

SEQ ID NO: 272016 - DNA, 25 bp, Artificial
  Probe
gcactgcaagcagtgacgaacttcg

SEQ ID NO: 272017 - DNA, 25 bp, Artificial
  Probe
caagcagtgacgaacttcggtgctc

SEQ ID NO: 272018 - DNA, 25 bp, Artificial
  Probe
tgctccggctgaagtcttcgactcg

SEQ ID NO: 272019 - DNA, 25 bp, Artificial
  Probe
actgcaagcagtgacgaacttcggt

SEQ ID NO: 272020 - DNA, 25 bp, Artificial
  Probe
cagtgacgaacttcggtgctccggc

SEQ ID NO: 272021 - DNA, 25 bp, Artificial
  Probe
cacagcactgcaagcagtgacgaac

SEQ ID NO: 272022 - DNA, 25 bp, Artificial
  Probe
tcggtgctccggctgaagtcttcga

SEQ ID NO: 272023 - DNA, 25 bp, Artificial
  Probe
cagcactgcaagcagtgacgaactt

SEQ ID NO: 272024 - DNA, 25 bp, Artificial
  Probe
tgacgaacttcggtgctccggctga

SEQ ID NO: 272025 - DNA, 25 bp, Artificial
  Probe
ttcggtgctccggctgaagtcttcg

SEQ ID NO: 272026 - DNA, 25 bp, Artificial
  Probe
aacttcggtgctccggctgaagtct

SEQ ID NO: 272027 - DNA, 25 bp, Artificial
  Probe
gaacttcggtgctccggctgaagtc

SEQ ID NO: 272028 - DNA, 25 bp, Artificial
  Probe
ggtgctccggctgaagtcttcgact

SEQ ID NO: 272029 - DNA, 25 bp, Artificial
  Probe
gtgctccggctgaagtcttcgactc

SEQ ID NO: 272030 - DNA, 25 bp, Artificial
  Probe
cggtgctccggctgaagtcttcgac

SEQ ID NO: 272031 - DNA, 25 bp, Artificial
  Probe
gacgaacttcggtgctccggctgaa

SEQ ID NO: 272032 - DNA, 25 bp, Artificial
  Probe
tgggtcatactagtgaccttcctca

SEQ ID NO: 272033 - DNA, 25 bp, Artificial
  Probe
acacaattctggagtcactgtcccg

SEQ ID NO: 272034 - DNA, 25 bp, Artificial
  Probe
tcaggcccatttggtggctgatacc

SEQ ID NO: 272035 - DNA, 25 bp, Artificial
  Probe
caggcccatttggtggctgatacct

SEQ ID NO: 272036 - DNA, 25 bp, Artificial
  Probe
tgctcctggcctctaagcagctggg

SEQ ID NO: 272037 - DNA, 25 bp, Artificial
  Probe
ggcctctaagcagctgggttcaccc

SEQ ID NO: 272038 - DNA, 25 bp, Artificial
  Probe
ctggcctctaagcagctgggttcac

SEQ ID NO: 272039 - DNA, 25 bp, Artificial
  Probe
aacacaattctggagtcactgtccc

SEQ ID NO: 272040 - DNA, 25 bp, Artificial
  Probe
acttgcaacacaattctggagtcac

SEQ ID NO: 272041 - DNA, 25 bp, Artificial
  Probe
aggttcggagcctcagacacaacaa

SEQ ID NO: 272042 - DNA, 25 bp, Artificial
  Probe
tccacttgcaacacaattctggagt

SEQ ID NO: 272043 - DNA, 25 bp, Artificial
  Probe
ctgggttcacccactactgaccttg

SEQ ID NO: 272044 - DNA, 25 bp, Artificial
  Probe
tggcctctaagcagctgggttcacc

SEQ ID NO: 272045 - DNA, 25 bp, Artificial
  Probe
cttgcaacacaattctggagtcact

SEQ ID NO: 272046 - DNA, 25 bp, Artificial
  Probe
tcctggcctctaagcagctgggttc

SEQ ID NO: 272047 - DNA, 25 bp, Artificial
  Probe
tgggttcacccactactgaccttgc

SEQ ID NO: 272048 - DNA, 25 bp, Artificial
  Probe
ctttcaggcccatttggtggctgat

SEQ ID NO: 272049 - DNA, 25 bp, Artificial
  Probe
tcatactagtgaccttcctcaggac

SEQ ID NO: 272050 - DNA, 25 bp, Artificial
  Probe
gcctccacttgcaacacaattctgg

SEQ ID NO: 272051 - DNA, 25 bp, Artificial
  Probe
gctcctggcctctaagcagctgggt

SEQ ID NO: 272052 - DNA, 25 bp, Artificial
  Probe
tcagaaaaggtctctcacctagagt

SEQ ID NO: 272053 - DNA, 25 bp, Artificial
  Probe
cacaattctggagtcactgtcccgg

SEQ ID NO: 272054 - DNA, 25 bp, Artificial
  Probe
gcaacacaattctggagtcactgtc

SEQ ID NO: 272055 - DNA, 25 bp, Artificial
  Probe
gagatcgcctccacttgcaacacaa

SEQ ID NO: 272056 - DNA, 25 bp, Artificial
  Probe
cacttgcaacacaattctggagtca

SEQ ID NO: 272057 - DNA, 25 bp, Artificial
  Probe
tcagagatcgcctccacttgcaaca

SEQ ID NO: 272058 - DNA, 25 bp, Artificial
  Probe
gcctctaagcagctgggttcaccca

SEQ ID NO: 272059 - DNA, 25 bp, Artificial
  Probe
gagaccccaaggaaacttcaaagtg

SEQ ID NO: 272060 - DNA, 25 bp, Artificial
  Probe
gtcagaaaaggtctctcacctagag

SEQ ID NO: 272061 - DNA, 25 bp, Artificial
  Probe
gctttcaggcccatttggtggctga

SEQ ID NO: 272062 - DNA, 25 bp, Artificial
  Probe
catactagtgaccttcctcaggacg

SEQ ID NO: 272063 - DNA, 25 bp, Artificial
  Probe
ggttcggagcctcagacacaacaac

SEQ ID NO: 272064 - DNA, 25 bp, Artificial
  Probe
cctggcctctaagcagctgggttca

SEQ ID NO: 272065 - DNA, 25 bp, Artificial
  Probe
ctccacttgcaacacaattctggag

SEQ ID NO: 272066 - DNA, 25 bp, Artificial
  Probe
cagaaaaggtctctcacctagagtc

SEQ ID NO: 272067 - DNA, 25 bp, Artificial
  Probe
atactagtgaccttcctcaggacgt

SEQ ID NO: 272068 - DNA, 25 bp, Artificial
  Probe
gttcggagcctcagacacaacaacc

SEQ ID NO: 272069 - DNA, 25 bp, Artificial
  Probe
agagatcgcctccacttgcaacaca

SEQ ID NO: 272070 - DNA, 25 bp, Artificial
  Probe
actagtgaccttcctcaggacgtct

SEQ ID NO: 272071 - DNA, 25 bp, Artificial
  Probe
tggagaccccaaggaaacttcaaag

SEQ ID NO: 272072 - DNA, 25 bp, Artificial
  Probe
tactagtgaccttcctcaggacgtc

SEQ ID NO: 272073 - DNA, 25 bp, Artificial
  Probe
ggtcatactagtgaccttcctcagg

SEQ ID NO: 272074 - DNA, 25 bp, Artificial
  Probe
ttgcaacacaattctggagtcactg

SEQ ID NO: 272075 - DNA, 25 bp, Artificial
  Probe
tgcaacacaattctggagtcactgt

SEQ ID NO: 272076 - DNA, 25 bp, Artificial
  Probe
ccacttgcaacacaattctggagtc

SEQ ID NO: 272077 - DNA, 25 bp, Artificial
  Probe
gggtcatactagtgaccttcctcag

SEQ ID NO: 272078 - DNA, 25 bp, Artificial
  Probe
tgctgctgctctggggctagacgct

SEQ ID NO: 272079 - DNA, 25 bp, Artificial
  Probe
gcagattgctgctgctctggggcta

SEQ ID NO: 272080 - DNA, 25 bp, Artificial
  Probe
gctagacgctgtcctctctgctgct

SEQ ID NO: 272081 - DNA, 25 bp, Artificial
  Probe
gagcagattgctgctgctctggggc

SEQ ID NO: 272082 - DNA, 25 bp, Artificial
  Probe
ggagcagattgctgctgctctgggg

SEQ ID NO: 272083 - DNA, 25 bp, Artificial
  Probe
tgctgctctggggctagacgctgtc

SEQ ID NO: 272084 - DNA, 25 bp, Artificial
  Probe
ctgctgctctggggctagacgctgt

SEQ ID NO: 272085 - DNA, 25 bp, Artificial
  Probe
cagattgctgctgctctggggctag

SEQ ID NO: 272086 - DNA, 25 bp, Artificial
  Probe
aggagcagattgctgctgctctggg

SEQ ID NO: 272087 - DNA, 25 bp, Artificial
  Probe
caggagcagattgctgctgctctgg

SEQ ID NO: 272088 - DNA, 25 bp, Artificial
  Probe
tctggggctagacgctgtcctctct

SEQ ID NO: 272089 - DNA, 25 bp, Artificial
  Probe
gctctggggctagacgctgtcctct

SEQ ID NO: 272090 - DNA, 25 bp, Artificial
  Probe
gattgctgctgctctggggctagac

SEQ ID NO: 272091 - DNA, 25 bp, Artificial
  Probe
ctggggctagacgctgtcctctctg

SEQ ID NO: 272092 - DNA, 25 bp, Artificial
  Probe
agacaggagcagattgctgctgctc

SEQ ID NO: 272093 - DNA, 25 bp, Artificial
  Probe
ggctagacgctgtcctctctgctgc

SEQ ID NO: 272094 - DNA, 25 bp, Artificial
  Probe
attgctgctgctctggggctagacg

SEQ ID NO: 272095 - DNA, 25 bp, Artificial
  Probe
ttgctgctgctctggggctagacgc

SEQ ID NO: 272096 - DNA, 25 bp, Artificial
  Probe
gctgctctggggctagacgctgtcc

SEQ ID NO: 272097 - DNA, 25 bp, Artificial
  Probe
ggggctagacgctgtcctctctgct

SEQ ID NO: 272098 - DNA, 25 bp, Artificial
  Probe
tgctctggggctagacgctgtcctc

SEQ ID NO: 272099 - DNA, 25 bp, Artificial
  Probe
ctagacgctgtcctctctgctgctt

SEQ ID NO: 272100 - DNA, 25 bp, Artificial
  Probe
ctctggggctagacgctgtcctctc

SEQ ID NO: 272101 - DNA, 25 bp, Artificial
  Probe
gctgctgctctggggctagacgctg

SEQ ID NO: 272102 - DNA, 25 bp, Artificial
  Probe
acaggagcagattgctgctgctctg

SEQ ID NO: 272103 - DNA, 25 bp, Artificial
  Probe
gggctagacgctgtcctctctgctg

SEQ ID NO: 272104 - DNA, 25 bp, Artificial
  Probe
agattgctgctgctctggggctaga

SEQ ID NO: 272105 - DNA, 25 bp, Artificial
  Probe
agcagattgctgctgctctggggct

SEQ ID NO: 272106 - DNA, 25 bp, Artificial
  Probe
ctgctctggggctagacgctgtcct

SEQ ID NO: 272107 - DNA, 25 bp, Artificial
  Probe
tggggctagacgctgtcctctctgc

SEQ ID NO: 272108 - DNA, 25 bp, Artificial
  Probe
ctagcctttgaaatgaacagttata

SEQ ID NO: 272109 - DNA, 25 bp, Artificial
  Probe
ggaactatagctagcctgaggaact

SEQ ID NO: 272110 - DNA, 25 bp, Artificial
  Probe
cacagtgcatctacatgatgtgaaa

SEQ ID NO: 272111 - DNA, 25 bp, Artificial
  Probe
tctagcctttgaaatgaacagttat

SEQ ID NO: 272112 - DNA, 25 bp, Artificial
  Probe
ctatagctagcctgaggaactcagg

SEQ ID NO: 272113 - DNA, 25 bp, Artificial
  Probe
ggctggaacacactctctacccttg

SEQ ID NO: 272114 - DNA, 25 bp, Artificial
  Probe
ctctagcctttgaaatgaacagtta

SEQ ID NO: 272115 - DNA, 25 bp, Artificial
  Probe
gcatctacatgatgtgaaactggaa

SEQ ID NO: 272116 - DNA, 25 bp, Artificial
  Probe
actcccacagtgcatctacatgatg

SEQ ID NO: 272117 - DNA, 25 bp, Artificial
  Probe
gactctagcctttgaaatgaacagt

SEQ ID NO: 272118 - DNA, 25 bp, Artificial
  Probe
cccacagtgcatctacatgatgtga

SEQ ID NO: 272119 - DNA, 25 bp, Artificial
  Probe
agcaaaagttccaggtggtcaagca

SEQ ID NO: 272120 - DNA, 25 bp, Artificial
  Probe
agttccaggtggtcaagcatgtgcg

SEQ ID NO: 272121 - DNA, 25 bp, Artificial
  Probe
tgcatctacatgatgtgaaactgga

SEQ ID NO: 272122 - DNA, 25 bp, Artificial
  Probe
actggaactatagctagcctgagga

SEQ ID NO: 272123 - DNA, 25 bp, Artificial
  Probe
gatacaggccaagatatgcaaactg

SEQ ID NO: 272124 - DNA, 25 bp, Artificial
  Probe
ctacccttgggactctagcctttga

SEQ ID NO: 272125 - DNA, 25 bp, Artificial
  Probe
tcagtgtggctggaacacactctct

SEQ ID NO: 272126 - DNA, 25 bp, Artificial
  Probe
tagctagcctgaggaactcagggcg

SEQ ID NO: 272127 - DNA, 25 bp, Artificial
  Probe
caaactggaactatagctagcctga

SEQ ID NO: 272128 - DNA, 25 bp, Artificial
  Probe
aagatacaggccaagatatgcaaac

SEQ ID NO: 272129 - DNA, 25 bp, Artificial
  Probe
ctggaacacactctctacccttggg

SEQ ID NO: 272130 - DNA, 25 bp, Artificial
  Probe
ccacagtgcatctacatgatgtgaa

SEQ ID NO: 272131 - DNA, 25 bp, Artificial
  Probe
atagctagcctgaggaactcagggc

SEQ ID NO: 272132 - DNA, 25 bp, Artificial
  Probe
tcccacagtgcatctacatgatgtg

SEQ ID NO: 272133 - DNA, 25 bp, Artificial
  Probe
gcaaaagttccaggtggtcaagcat

SEQ ID NO: 272134 - DNA, 25 bp, Artificial
  Probe
tacaggccaagatatgcaaactgga

SEQ ID NO: 272135 - DNA, 25 bp, Artificial
  Probe
tctacccttgggactctagcctttg

SEQ ID NO: 272136 - DNA, 25 bp, Artificial
  Probe
tccaggtggtcaagcatgtgcgtag

SEQ ID NO: 272137 - DNA, 25 bp, Artificial
  Probe
aaagttccaggtggtcaagcatgtg

SEQ ID NO: 272138 - DNA, 25 bp, Artificial
  Probe
tggctggaacacactctctaccctt

SEQ ID NO: 272139 - DNA, 25 bp, Artificial
  Probe
atatgcaaactggaactatagctag

SEQ ID NO: 272140 - DNA, 25 bp, Artificial
  Probe
tatagctagcctgaggaactcaggg

SEQ ID NO: 272141 - DNA, 25 bp, Artificial
  Probe
tatgcaaactggaactatagctagc

SEQ ID NO: 272142 - DNA, 25 bp, Artificial
  Probe
gtggtcaagcatgtgcgtaggcacc

SEQ ID NO: 272143 - DNA, 25 bp, Artificial
  Probe
actctagcctttgaaatgaacagtt

SEQ ID NO: 272144 - DNA, 25 bp, Artificial
  Probe
caaccaaggtgttggcaaagaccct

SEQ ID NO: 272145 - DNA, 25 bp, Artificial
  Probe
catctacatgatgtgaaactggaag

SEQ ID NO: 272146 - DNA, 25 bp, Artificial
  Probe
tgtcagtgtggctggaacacactct

SEQ ID NO: 272147 - DNA, 25 bp, Artificial
  Probe
cagtgtggctggaacacactctcta

SEQ ID NO: 272148 - DNA, 25 bp, Artificial
  Probe
gggactctagcctttgaaatgaaca

SEQ ID NO: 272149 - DNA, 25 bp, Artificial
  Probe
ggactctagcctttgaaatgaacag

SEQ ID NO: 272150 - DNA, 25 bp, Artificial
  Probe
ctggaactatagctagcctgaggaa

SEQ ID NO: 272151 - DNA, 25 bp, Artificial
  Probe
tggaacacactctctacccttggga

SEQ ID NO: 272152 - DNA, 25 bp, Artificial
  Probe
tgtggctggaacacactctctaccc

SEQ ID NO: 272153 - DNA, 25 bp, Artificial
  Probe
agtgcatctacatgatgtgaaactg

SEQ ID NO: 272154 - DNA, 25 bp, Artificial
  Probe
gataaatccagaaaggtctgggtct

SEQ ID NO: 272155 - DNA, 25 bp, Artificial
  Probe
tccatctcagtccacactggaagct

SEQ ID NO: 272156 - DNA, 25 bp, Artificial
  Probe
tcagtccacactggaagctaatctg

SEQ ID NO: 272157 - DNA, 25 bp, Artificial
  Probe
tccctgcccgaggaggagcagctaa

SEQ ID NO: 272158 - DNA, 25 bp, Artificial
  Probe
tgtccatctcagtccacactggaag

SEQ ID NO: 272159 - DNA, 25 bp, Artificial
  Probe
cctgcccgaggaggagcagctaaag

SEQ ID NO: 272160 - DNA, 25 bp, Artificial
  Probe
ttgtccatctcagtccacactggaa

SEQ ID NO: 272161 - DNA, 25 bp, Artificial
  Probe
tctgggtctcccccttgtccatctc

SEQ ID NO: 272162 - DNA, 25 bp, Artificial
  Probe
acttccctgcccgaggaggagcagc

SEQ ID NO: 272163 - DNA, 25 bp, Artificial
  Probe
tctcagtccacactggaagctaatc

SEQ ID NO: 272164 - DNA, 25 bp, Artificial
  Probe
ccttgtccatctcagtccacactgg

SEQ ID NO: 272165 - DNA, 25 bp, Artificial
  Probe
gtctgggtctcccccttgtccatct

SEQ ID NO: 272166 - DNA, 25 bp, Artificial
  Probe
atctcagtccacactggaagctaat

SEQ ID NO: 272167 - DNA, 25 bp, Artificial
  Probe
taaagatgtggtcgcaactaaaaaa

SEQ ID NO: 272168 - DNA, 25 bp, Artificial
  Probe
cccccttgtccatctcagtccacac

SEQ ID NO: 272169 - DNA, 25 bp, Artificial
  Probe
ccatctcagtccacactggaagcta

SEQ ID NO: 272170 - DNA, 25 bp, Artificial
  Probe
ctgcccgaggaggagcagctaaagg

SEQ ID NO: 272171 - DNA, 25 bp, Artificial
  Probe
tccagaaaggtctgggtctccccct

SEQ ID NO: 272172 - DNA, 25 bp, Artificial
  Probe
gcccgaggaggagcagctaaaggtc

SEQ ID NO: 272173 - DNA, 25 bp, Artificial
  Probe
ctcagtccacactggaagctaatct

SEQ ID NO: 272174 - DNA, 25 bp, Artificial
  Probe
ccccttgtccatctcagtccacact

SEQ ID NO: 272175 - DNA, 25 bp, Artificial
  Probe
ccctgcccgaggaggagcagctaaa

SEQ ID NO: 272176 - DNA, 25 bp, Artificial
  Probe
ataaatccagaaaggtctgggtctc

SEQ ID NO: 272177 - DNA, 25 bp, Artificial
  Probe
ttccctgcccgaggaggagcagcta

SEQ ID NO: 272178 - DNA, 25 bp, Artificial
  Probe
tcccccttgtccatctcagtccaca

SEQ ID NO: 272179 - DNA, 25 bp, Artificial
  Probe
cagaaaggtctgggtctcccccttg

SEQ ID NO: 272180 - DNA, 25 bp, Artificial
  Probe
cttgtccatctcagtccacactgga

SEQ ID NO: 272181 - DNA, 25 bp, Artificial
  Probe
cttccctgcccgaggaggagcagct

SEQ ID NO: 272182 - DNA, 25 bp, Artificial
  Probe
tgcccgaggaggagcagctaaaggt

SEQ ID NO: 272183 - DNA, 25 bp, Artificial
  Probe
taaatccagaaaggtctgggtctcc

SEQ ID NO: 272184 - DNA, 25 bp, Artificial
  Probe
ggtctgggtctcccccttgtccatc

SEQ ID NO: 272185 - DNA, 25 bp, Artificial
  Probe
aggtctgggtctcccccttgtccat

SEQ ID NO: 272186 - DNA, 25 bp, Artificial
  Probe
gtccatctcagtccacactggaagc

SEQ ID NO: 272187 - DNA, 25 bp, Artificial
  Probe
cccttgtccatctcagtccacactg

SEQ ID NO: 272188 - DNA, 25 bp, Artificial
  Probe
catctcagtccacactggaagctaa

SEQ ID NO: 272189 - DNA, 25 bp, Artificial
  Probe
agcacagcccacagggggattaatg

SEQ ID NO: 272190 - DNA, 25 bp, Artificial
  Probe
ggagggcatccatctctttcccata

SEQ ID NO: 272191 - DNA, 25 bp, Artificial
  Probe
tctctttcccatagttttggggcct

SEQ ID NO: 272192 - DNA, 25 bp, Artificial
  Probe
ctaacttcgccgagggacaagcctt

SEQ ID NO: 272193 - DNA, 25 bp, Artificial
  Probe
cctctgacctatgaacctgggaggt

SEQ ID NO: 272194 - DNA, 25 bp, Artificial
  Probe
gcccacagggggattaatgtggcct

SEQ ID NO: 272195 - DNA, 25 bp, Artificial
  Probe
ctcagtggcccctcaggattggaat

SEQ ID NO: 272196 - DNA, 25 bp, Artificial
  Probe
cagtggcccctcaggattggaatgg

SEQ ID NO: 272197 - DNA, 25 bp, Artificial
  Probe
ccctttattcaagacagtgggatct

SEQ ID NO: 272198 - DNA, 25 bp, Artificial
  Probe
gtgggatctacctgtggcctggcct

SEQ ID NO: 272199 - DNA, 25 bp, Artificial
  Probe
aagacagtgggatctacctgtggcc

SEQ ID NO: 272200 - DNA, 25 bp, Artificial
  Probe
tccctagtgtcattcacattgaatg

SEQ ID NO: 272201 - DNA, 25 bp, Artificial
  Probe
cgccgagggacaagccttagagcac

SEQ ID NO: 272202 - DNA, 25 bp, Artificial
  Probe
cgagctgtgggctggaaatgtcctt

SEQ ID NO: 272203 - DNA, 25 bp, Artificial
  Probe
tcatagagccatatatgagcccgag

SEQ ID NO: 272204 - DNA, 25 bp, Artificial
  Probe
tagagccatatatgagcccgagctg

SEQ ID NO: 272205 - DNA, 25 bp, Artificial
  Probe
ggccctttgctgtggcccctttatt

SEQ ID NO: 272206 - DNA, 25 bp, Artificial
  Probe
acagttgctcatagagccatatatg

SEQ ID NO: 272207 - DNA, 25 bp, Artificial
  Probe
caatgcctacccatgagagggccct

SEQ ID NO: 272208 - DNA, 25 bp, Artificial
  Probe
gccttagagcacagcccacaggggg

SEQ ID NO: 272209 - DNA, 25 bp, Artificial
  Probe
agttgctcatagagccatatatgag

SEQ ID NO: 272210 - DNA, 25 bp, Artificial
  Probe
tgctgtggcccctttattcaagaca

SEQ ID NO: 272211 - DNA, 25 bp, Artificial
  Probe
cctacccatgagagggccctttgct

SEQ ID NO: 272212 - DNA, 25 bp, Artificial
  Probe
tgcctacccatgagagggccctttg

SEQ ID NO: 272213 - DNA, 25 bp, Artificial
  Probe
cttcgccgagggacaagccttagag

SEQ ID NO: 272214 - DNA, 25 bp, Artificial
  Probe
agggacaagccttagagcacagccc

SEQ ID NO: 272215 - DNA, 25 bp, Artificial
  Probe
agagcacagcccacagggggattaa

SEQ ID NO: 272216 - DNA, 25 bp, Artificial
  Probe
gggcatccatctctttcccatagtt

SEQ ID NO: 272217 - DNA, 25 bp, Artificial
  Probe
tgaggtcagacagttgctcatagag

SEQ ID NO: 272218 - DNA, 25 bp, Artificial
  Probe
tgtggcctggcctccctagtgtcat

SEQ ID NO: 272219 - DNA, 25 bp, Artificial
  Probe
gagccatatatgagcccgagctgtg

SEQ ID NO: 272220 - DNA, 25 bp, Artificial
  Probe
catctctttcccatagttttggggc

SEQ ID NO: 272221 - DNA, 25 bp, Artificial
  Probe
tgagagggccctttgctgtggcccc

SEQ ID NO: 272222 - DNA, 25 bp, Artificial
  Probe
cccacagggggattaatgtggcctg

SEQ ID NO: 272223 - DNA, 25 bp, Artificial
  Probe
ctggcctccctagtgtcattcacat

SEQ ID NO: 272224 - DNA, 25 bp, Artificial
  Probe
ccctcaggattggaatggccgaaag

SEQ ID NO: 272225 - DNA, 25 bp, Artificial
  Probe
gtggcccctcaggattggaatggcc

SEQ ID NO: 272226 - DNA, 25 bp, Artificial
  Probe
ctagtgtcattcacattgaatgggg

SEQ ID NO: 272227 - DNA, 25 bp, Artificial
  Probe
gaggtcagacagttgctcatagagc

SEQ ID NO: 272228 - DNA, 25 bp, Artificial
  Probe
atgagagggccctttgctgtggccc

SEQ ID NO: 272229 - DNA, 25 bp, Artificial
  Probe
gcctccctagtgtcattcacattga

SEQ ID NO: 272230 - DNA, 25 bp, Artificial
  Probe
gtcagacagttgctcatagagccat

SEQ ID NO: 272231 - DNA, 25 bp, Artificial
  Probe
gctcatagagccatatatgagcccg

SEQ ID NO: 272232 - DNA, 25 bp, Artificial
  Probe
gtacctctgacctatgaacctggga

SEQ ID NO: 272233 - DNA, 25 bp, Artificial
  Probe
tattcaagacagtgggatctacctg

SEQ ID NO: 272234 - DNA, 25 bp, Artificial
  Probe
gggatctacctgtggcctggcctcc

SEQ ID NO: 272235 - DNA, 25 bp, Artificial
  Probe
gtgtcgtccatgcacggagacatgc

SEQ ID NO: 272236 - DNA, 25 bp, Artificial
  Probe
aggttgactggctgacagagaaaat

SEQ ID NO: 272237 - DNA, 25 bp, Artificial
  Probe
cgtccatgcacggagacatgcccca

SEQ ID NO: 272238 - DNA, 25 bp, Artificial
  Probe
ccaatttcacagtgtcgtccatgca

SEQ ID NO: 272239 - DNA, 25 bp, Artificial
  Probe
ggttgactggctgacagagaaaatg

SEQ ID NO: 272240 - DNA, 25 bp, Artificial
  Probe
tgactggctgacagagaaaatgaga

SEQ ID NO: 272241 - DNA, 25 bp, Artificial
  Probe
aagccaatttcacagtgtcgtccat

SEQ ID NO: 272242 - DNA, 25 bp, Artificial
  Probe
agtgtcgtccatgcacggagacatg

SEQ ID NO: 272243 - DNA, 25 bp, Artificial
  Probe
gagaagccaatttcacagtgtcgtc

SEQ ID NO: 272244 - DNA, 25 bp, Artificial
  Probe
gaagccaatttcacagtgtcgtcca

SEQ ID NO: 272245 - DNA, 25 bp, Artificial
  Probe
cagtgtcgtccatgcacggagacat

SEQ ID NO: 272246 - DNA, 25 bp, Artificial
  Probe
acagtgtcgtccatgcacggagaca

SEQ ID NO: 272247 - DNA, 25 bp, Artificial
  Probe
cacagtgtcgtccatgcacggagac

SEQ ID NO: 272248 - DNA, 25 bp, Artificial
  Probe
ttcacagtgtcgtccatgcacggag

SEQ ID NO: 272249 - DNA, 25 bp, Artificial
  Probe
gtcgtccatgcacggagacatgccc

SEQ ID NO: 272250 - DNA, 25 bp, Artificial
  Probe
agagaagccaatttcacagtgtcgt

SEQ ID NO: 272251 - DNA, 25 bp, Artificial
  Probe
tcacagtgtcgtccatgcacggaga

SEQ ID NO: 272252 - DNA, 25 bp, Artificial
  Probe
gagagaagccaatttcacagtgtcg

SEQ ID NO: 272253 - DNA, 25 bp, Artificial
  Probe
tgtcgtccatgcacggagacatgcc

SEQ ID NO: 272254 - DNA, 25 bp, Artificial
  Probe
gttgactggctgacagagaaaatga

SEQ ID NO: 272255 - DNA, 25 bp, Artificial
  Probe
caatttcacagtgtcgtccatgcac

SEQ ID NO: 272256 - DNA, 25 bp, Artificial
  Probe
tcgtccatgcacggagacatgcccc

SEQ ID NO: 272257 - DNA, 25 bp, Artificial
  Probe
agccaatttcacagtgtcgtccatg

SEQ ID NO: 272258 - DNA, 25 bp, Artificial
  Probe
agaagccaatttcacagtgtcgtcc

SEQ ID NO: 272259 - DNA, 25 bp, Artificial
  Probe
tttcacagtgtcgtccatgcacgga

SEQ ID NO: 272260 - DNA, 25 bp, Artificial
  Probe
ttgactggctgacagagaaaatgag

SEQ ID NO: 272261 - DNA, 25 bp, Artificial
  Probe
aatttcacagtgtcgtccatgcacg

SEQ ID NO: 272262 - DNA, 25 bp, Artificial
  Probe
aaggttgactggctgacagagaaaa

SEQ ID NO: 272263 - DNA, 25 bp, Artificial
  Probe
gaaggttgactggctgacagagaaa

SEQ ID NO: 272264 - DNA, 25 bp, Artificial
  Probe
atttcacagtgtcgtccatgcacgg

SEQ ID NO: 272265 - DNA, 25 bp, Artificial
  Probe
gccaatttcacagtgtcgtccatgc

SEQ ID NO: 272266 - DNA, 25 bp, Artificial
  Probe
ggcaccccgaaagcttgatcgaaga

SEQ ID NO: 272267 - DNA, 25 bp, Artificial
  Probe
gaggcaccccgaaagcttgatcgaa

SEQ ID NO: 272268 - DNA, 25 bp, Artificial
  Probe
aggcaccccgaaagcttgatcgaag

SEQ ID NO: 272269 - DNA, 25 bp, Artificial
  Probe
cgctcggtcatggtcttggctgagc

SEQ ID NO: 272270 - DNA, 25 bp, Artificial
  Probe
aaagcttgatcgaagaggcggctgt

SEQ ID NO: 272271 - DNA, 25 bp, Artificial
  Probe
aagcttgatcgaagaggcggctgtg

SEQ ID NO: 272272 - DNA, 25 bp, Artificial
  Probe
ggagcgtgtatttccgggtgaagca

SEQ ID NO: 272273 - DNA, 25 bp, Artificial
  Probe
tgtgggcagggtaccagtcccggaa

SEQ ID NO: 272274 - DNA, 25 bp, Artificial
  Probe
gaagaggcggctgtgggcagggtac

SEQ ID NO: 272275 - DNA, 25 bp, Artificial
  Probe
gcaccccgaaagcttgatcgaagag

SEQ ID NO: 272276 - DNA, 25 bp, Artificial
  Probe
agccgggccaaccagcggagctgaa

SEQ ID NO: 272277 - DNA, 25 bp, Artificial
  Probe
caccccgaaagcttgatcgaagagg

SEQ ID NO: 272278 - DNA, 25 bp, Artificial
  Probe
tcggtcatggtcttggctgagctgg

SEQ ID NO: 272279 - DNA, 25 bp, Artificial
  Probe
ctgagttgccggttgagcgcccggc

SEQ ID NO: 272280 - DNA, 25 bp, Artificial
  Probe
agggcgcacatagccgggccaacca

SEQ ID NO: 272281 - DNA, 25 bp, Artificial
  Probe
cgaaagcttgatcgaagaggcggct

SEQ ID NO: 272282 - DNA, 25 bp, Artificial
  Probe
ccgaggcaccccgaaagcttgatcg

SEQ ID NO: 272283 - DNA, 25 bp, Artificial
  Probe
atagccgggccaaccagcggagctg

SEQ ID NO: 272284 - DNA, 25 bp, Artificial
  Probe
tctgggcctccaatttgggcacggg

SEQ ID NO: 272285 - DNA, 25 bp, Artificial
  Probe
aaccagcggagctgaaccactgaga

SEQ ID NO: 272286 - DNA, 25 bp, Artificial
  Probe
ggcctccaatttgggcacgggcctc

SEQ ID NO: 272287 - DNA, 25 bp, Artificial
  Probe
accccgaaagcttgatcgaagaggc

SEQ ID NO: 272288 - DNA, 25 bp, Artificial
  Probe
cggttgagcgcccggctgaaggcgg

SEQ ID NO: 272289 - DNA, 25 bp, Artificial
  Probe
ctcggtcatggtcttggctgagctg

SEQ ID NO: 272290 - DNA, 25 bp, Artificial
  Probe
tgggcctccaatttgggcacgggcc

SEQ ID NO: 272291 - DNA, 25 bp, Artificial
  Probe
ctggggctccgcagtagcgagaagg

SEQ ID NO: 272292 - DNA, 25 bp, Artificial
  Probe
tagccgggccaaccagcggagctga

SEQ ID NO: 272293 - DNA, 25 bp, Artificial
  Probe
agggagcgtgtatttccgggtgaag

SEQ ID NO: 272294 - DNA, 25 bp, Artificial
  Probe
ccccgaaagcttgatcgaagaggcg

SEQ ID NO: 272295 - DNA, 25 bp, Artificial
  Probe
gccaaccagcggagctgaaccactg

SEQ ID NO: 272296 - DNA, 25 bp, Artificial
  Probe
caaccagcggagctgaaccactgag

SEQ ID NO: 272297 - DNA, 25 bp, Artificial
  Probe
catagccgggccaaccagcggagct

SEQ ID NO: 272298 - DNA, 25 bp, Artificial
  Probe
gccgggccaaccagcggagctgaac

SEQ ID NO: 272299 - DNA, 25 bp, Artificial
  Probe
ctgggcctccaatttgggcacgggc

SEQ ID NO: 272300 - DNA, 25 bp, Artificial
  Probe
gctcggtcatggtcttggctgagct

SEQ ID NO: 272301 - DNA, 25 bp, Artificial
  Probe
cttgatcgaagaggcggctgtgggc

SEQ ID NO: 272302 - DNA, 25 bp, Artificial
  Probe
actgctgcggggccctcggcggtcg

SEQ ID NO: 272303 - DNA, 25 bp, Artificial
  Probe
gcagggtaccagtcccggaacggct

SEQ ID NO: 272304 - DNA, 25 bp, Artificial
  Probe
ggtcttggctgagctggtcagggct

SEQ ID NO: 272305 - DNA, 25 bp, Artificial
  Probe
ggccaaccagcggagctgaaccact

SEQ ID NO: 272306 - DNA, 25 bp, Artificial
  Probe
gaaaccgaggcaccccgaaagcttg

SEQ ID NO: 272307 - DNA, 25 bp, Artificial
  Probe
gggcctccaatttgggcacgggcct

SEQ ID NO: 272308 - DNA, 25 bp, Artificial
  Probe
cactcatcgggaaaccgaggcaccc

SEQ ID NO: 272309 - DNA, 25 bp, Artificial
  Probe
cccgaaagcttgatcgaagaggcgg

SEQ ID NO: 272310 - DNA, 25 bp, Artificial
  Probe
ggccagggtcactgctgcggggccc

SEQ ID NO: 272311 - DNA, 25 bp, Artificial
  Probe
cgaggcaccccgaaagcttgatcga

SEQ ID NO: 272312 - DNA, 25 bp, Artificial
  Probe
caagacaccaaaaaatagcttggct

SEQ ID NO: 272313 - DNA, 25 bp, Artificial
  Probe
agacaccaaaaaatagcttggcttc

SEQ ID NO: 272314 - DNA, 25 bp, Artificial
  Probe
tcgttttgtatctatgacatccttg

SEQ ID NO: 272315 - DNA, 25 bp, Artificial
  Probe
tttgttatctacaaaaacaagacac

SEQ ID NO: 272316 - DNA, 25 bp, Artificial
  Probe
aacaagacaccaaaaaatagcttgg

SEQ ID NO: 272317 - DNA, 25 bp, Artificial
  Probe
atctatgacatccttggcctcagac

SEQ ID NO: 272318 - DNA, 25 bp, Artificial
  Probe
ggcctcagaccttgggcccatccct

SEQ ID NO: 272319 - DNA, 25 bp, Artificial
  Probe
tatctatgacatccttggcctcaga

SEQ ID NO: 272320 - DNA, 25 bp, Artificial
  Probe
gaccttgggcccatcccttccttat

SEQ ID NO: 272321 - DNA, 25 bp, Artificial
  Probe
catccttggcctcagaccttgggcc

SEQ ID NO: 272322 - DNA, 25 bp, Artificial
  Probe
tcagaccttgggcccatcccttcct

SEQ ID NO: 272323 - DNA, 25 bp, Artificial
  Probe
ttatacccagttttgttatctacaa

SEQ ID NO: 272324 - DNA, 25 bp, Artificial
  Probe
gacatccttggcctcagaccttggg

SEQ ID NO: 272325 - DNA, 25 bp, Artificial
  Probe
atccttggcctcagaccttgggccc

SEQ ID NO: 272326 - DNA, 25 bp, Artificial
  Probe
ttttgttatctacaaaaacaagaca

SEQ ID NO: 272327 - DNA, 25 bp, Artificial
  Probe
ctatgacatccttggcctcagacct

SEQ ID NO: 272328 - DNA, 25 bp, Artificial
  Probe
cttggcctcagaccttgggcccatc

SEQ ID NO: 272329 - DNA, 25 bp, Artificial
  Probe
tccttatacccagttttgttatcta

SEQ ID NO: 272330 - DNA, 25 bp, Artificial
  Probe
ttccttatacccagttttgttatct

SEQ ID NO: 272331 - DNA, 25 bp, Artificial
  Probe
acaagacaccaaaaaatagcttggc

SEQ ID NO: 272332 - DNA, 25 bp, Artificial
  Probe
tgttatctacaaaaacaagacacca

SEQ ID NO: 272333 - DNA, 25 bp, Artificial
  Probe
tatctacaaaaacaagacaccaaaa

SEQ ID NO: 272334 - DNA, 25 bp, Artificial
  Probe
aaacaagacaccaaaaaatagcttg

SEQ ID NO: 272335 - DNA, 25 bp, Artificial
  Probe
ccttggcctcagaccttgggcccat

SEQ ID NO: 272336 - DNA, 25 bp, Artificial
  Probe
tatgacatccttggcctcagacctt

SEQ ID NO: 272337 - DNA, 25 bp, Artificial
  Probe
tctatgacatccttggcctcagacc

SEQ ID NO: 272338 - DNA, 25 bp, Artificial
  Probe
gtatctatgacatccttggcctcag

SEQ ID NO: 272339 - DNA, 25 bp, Artificial
  Probe
cgttttgtatctatgacatccttgg

SEQ ID NO: 272340 - DNA, 25 bp, Artificial
  Probe
ctcagaccttgggcccatcccttcc

SEQ ID NO: 272341 - DNA, 25 bp, Artificial
  Probe
aagacaccaaaaaatagcttggctt

SEQ ID NO: 272342 - DNA, 25 bp, Artificial
  Probe
gcctcagaccttgggcccatccctt

SEQ ID NO: 272343 - DNA, 25 bp, Artificial
  Probe
tgtatctatgacatccttggcctca

SEQ ID NO: 272344 - DNA, 25 bp, Artificial
  Probe
tatacccagttttgttatctacaaa

SEQ ID NO: 272345 - DNA, 25 bp, Artificial
  Probe
ttttgtatctatgacatccttggcc

SEQ ID NO: 272346 - DNA, 25 bp, Artificial
  Probe
atgacatccttggcctcagaccttg

SEQ ID NO: 272347 - DNA, 25 bp, Artificial
  Probe
cagaccttgggcccatcccttcctt

SEQ ID NO: 272348 - DNA, 25 bp, Artificial
  Probe
cttatacccagttttgttatctaca

SEQ ID NO: 272349 - DNA, 25 bp, Artificial
  Probe
tggcctcagaccttgggcccatccc

SEQ ID NO: 272350 - DNA, 25 bp, Artificial
  Probe
tccttggcctcagaccttgggccca

SEQ ID NO: 272351 - DNA, 25 bp, Artificial
  Probe
gttttgtatctatgacatccttggc

SEQ ID NO: 272352 - DNA, 25 bp, Artificial
  Probe
ttgtatctatgacatccttggcctc

SEQ ID NO: 272353 - DNA, 25 bp, Artificial
  Probe
cctcagaccttgggcccatcccttc

SEQ ID NO: 272354 - DNA, 25 bp, Artificial
  Probe
tttgtatctatgacatccttggcct

SEQ ID NO: 272355 - DNA, 25 bp, Artificial
  Probe
catcccttccttatacccagttttg

SEQ ID NO: 272356 - DNA, 25 bp, Artificial
  Probe
ttatctacaaaaacaagacaccaaa

SEQ ID NO: 272357 - DNA, 25 bp, Artificial
  Probe
acatccttggcctcagaccttgggc

SEQ ID NO: 272358 - DNA, 25 bp, Artificial
  Probe
cgagggagctgcggctgagaggaaa

SEQ ID NO: 272359 - DNA, 25 bp, Artificial
  Probe
ctttcattcagcctgcgagggagct

SEQ ID NO: 272360 - DNA, 25 bp, Artificial
  Probe
ttcattcagcctgcgagggagctgc

SEQ ID NO: 272361 - DNA, 25 bp, Artificial
  Probe
gaggaaacgctgctttcagcactga

SEQ ID NO: 272362 - DNA, 25 bp, Artificial
  Probe
cagcctgcgagggagctgcggctga

SEQ ID NO: 272363 - DNA, 25 bp, Artificial
  Probe
cctttcattcagcctgcgagggagc

SEQ ID NO: 272364 - DNA, 25 bp, Artificial
  Probe
gctgcctttcattcagcctgcgagg

SEQ ID NO: 272365 - DNA, 25 bp, Artificial
  Probe
cttgtagctgcctttcattcagcct

SEQ ID NO: 272366 - DNA, 25 bp, Artificial
  Probe
gcctttcattcagcctgcgagggag

SEQ ID NO: 272367 - DNA, 25 bp, Artificial
  Probe
gagggagctgcggctgagaggaaac

SEQ ID NO: 272368 - DNA, 25 bp, Artificial
  Probe
cctgcgagggagctgcggctgagag

SEQ ID NO: 272369 - DNA, 25 bp, Artificial
  Probe
tagctgcctttcattcagcctgcga

SEQ ID NO: 272370 - DNA, 25 bp, Artificial
  Probe
ttcagcctgcgagggagctgcggct

SEQ ID NO: 272371 - DNA, 25 bp, Artificial
  Probe
gaaacgctgctttcagcactgaggc

SEQ ID NO: 272372 - DNA, 25 bp, Artificial
  Probe
agctgcctttcattcagcctgcgag

SEQ ID NO: 272373 - DNA, 25 bp, Artificial
  Probe
cattcagcctgcgagggagctgcgg

SEQ ID NO: 272374 - DNA, 25 bp, Artificial
  Probe
ggaaacgctgctttcagcactgagg

SEQ ID NO: 272375 - DNA, 25 bp, Artificial
  Probe
gggcttgtagctgcctttcattcag

SEQ ID NO: 272376 - DNA, 25 bp, Artificial
  Probe
gcctgcgagggagctgcggctgaga

SEQ ID NO: 272377 - DNA, 25 bp, Artificial
  Probe
gagggcttgtagctgcctttcattc

SEQ ID NO: 272378 - DNA, 25 bp, Artificial
  Probe
gtagctgcctttcattcagcctgcg

SEQ ID NO: 272379 - DNA, 25 bp, Artificial
  Probe
agcctgcgagggagctgcggctgag

SEQ ID NO: 272380 - DNA, 25 bp, Artificial
  Probe
agaggaaacgctgctttcagcactg

SEQ ID NO: 272381 - DNA, 25 bp, Artificial
  Probe
tttcattcagcctgcgagggagctg

SEQ ID NO: 272382 - DNA, 25 bp, Artificial
  Probe
aggaaacgctgctttcagcactgag

SEQ ID NO: 272383 - DNA, 25 bp, Artificial
  Probe
ctgcggctgagaggaaacgctgctt

SEQ ID NO: 272384 - DNA, 25 bp, Artificial
  Probe
gggagctgcggctgagaggaaacgc

SEQ ID NO: 272385 - DNA, 25 bp, Artificial
  Probe
tgcctttcattcagcctgcgaggga

SEQ ID NO: 272386 - DNA, 25 bp, Artificial
  Probe
tcattcagcctgcgagggagctgcg

SEQ ID NO: 272387 - DNA, 25 bp, Artificial
  Probe
agggagctgcggctgagaggaaacg

SEQ ID NO: 272388 - DNA, 25 bp, Artificial
  Probe
gagctgcggctgagaggaaacgctg

SEQ ID NO: 272389 - DNA, 25 bp, Artificial
  Probe
ggcttgtagctgcctttcattcagc

SEQ ID NO: 272390 - DNA, 25 bp, Artificial
  Probe
aaacgctgctttcagcactgaggct

SEQ ID NO: 272391 - DNA, 25 bp, Artificial
  Probe
gctgcggctgagaggaaacgctgct

SEQ ID NO: 272392 - DNA, 25 bp, Artificial
  Probe
agggcttgtagctgcctttcattca

SEQ ID NO: 272393 - DNA, 25 bp, Artificial
  Probe
agctgcggctgagaggaaacgctgc

SEQ ID NO: 272394 - DNA, 25 bp, Artificial
  Probe
ctgcctttcattcagcctgcgaggg

SEQ ID NO: 272395 - DNA, 25 bp, Artificial
  Probe
tgcgagggagctgcggctgagagga

SEQ ID NO: 272396 - DNA, 25 bp, Artificial
  Probe
ctgcgagggagctgcggctgagagg

SEQ ID NO: 272397 - DNA, 25 bp, Artificial
  Probe
tcagcctgcgagggagctgcggctg

SEQ ID NO: 272398 - DNA, 25 bp, Artificial
  Probe
ggagctgcggctgagaggaaacgct

SEQ ID NO: 272399 - DNA, 25 bp, Artificial
  Probe
gcttgtagctgcctttcattcagcc

SEQ ID NO: 272400 - DNA, 25 bp, Artificial
  Probe
gcgagggagctgcggctgagaggaa

SEQ ID NO: 272401 - DNA, 25 bp, Artificial
  Probe
tgtagctgcctttcattcagcctgc

SEQ ID NO: 272402 - DNA, 25 bp, Artificial
  Probe
attcagcctgcgagggagctgcggc

SEQ ID NO: 272403 - DNA, 25 bp, Artificial
  Probe
ttgtagctgcctttcattcagcctg

SEQ ID NO: 272404 - DNA, 25 bp, Artificial
  Probe
gatgattgtctgagcctcggccaag

SEQ ID NO: 272405 - DNA, 25 bp, Artificial
  Probe
attgtctgagcctcggccaaggtgg

SEQ ID NO: 272406 - DNA, 25 bp, Artificial
  Probe
atgcccggcagctggagatgattgt

SEQ ID NO: 272407 - DNA, 25 bp, Artificial
  Probe
gccagccagcagcagaagccagaag

SEQ ID NO: 272408 - DNA, 25 bp, Artificial
  Probe
gtgagtgtttcctcccagttgtcac

SEQ ID NO: 272409 - DNA, 25 bp, Artificial
  Probe
aggtgctcttctagccagctgtggg

SEQ ID NO: 272410 - DNA, 25 bp, Artificial
  Probe
aagcaccatgtgtctcagtttttaa

SEQ ID NO: 272411 - DNA, 25 bp, Artificial
  Probe
ggccctcaataaaggcagattaacc

SEQ ID NO: 272412 - DNA, 25 bp, Artificial
  Probe
tgggttttcagcatagctgcccagt

SEQ ID NO: 272413 - DNA, 25 bp, Artificial
  Probe
gggattgttttccagtgaagcacca

SEQ ID NO: 272414 - DNA, 25 bp, Artificial
  Probe
ttctgggtgagtgtttcctcccagt

SEQ ID NO: 272415 - DNA, 25 bp, Artificial
  Probe
gaagcaccatgtgtctcagttttta

SEQ ID NO: 272416 - DNA, 25 bp, Artificial
  Probe
tggccctcaataaaggcagattaac

SEQ ID NO: 272417 - DNA, 25 bp, Artificial
  Probe
gttttccagtgaagcaccatgtgtc

SEQ ID NO: 272418 - DNA, 25 bp, Artificial
  Probe
tggcccgcaggagagcacaggccct

SEQ ID NO: 272419 - DNA, 25 bp, Artificial
  Probe
ggccaggcaggtcatcgagtatgcc

SEQ ID NO: 272420 - DNA, 25 bp, Artificial
  Probe
gggccttctgggtgagtgtttcctc

SEQ ID NO: 272421 - DNA, 25 bp, Artificial
  Probe
cttctagccagctgtgggtgccttt

SEQ ID NO: 272422 - DNA, 25 bp, Artificial
  Probe
acgggctggccctcaataaaggcag

SEQ ID NO: 272423 - DNA, 25 bp, Artificial
  Probe
gccagctgtgggtgccttttggtac

SEQ ID NO: 272424 - DNA, 25 bp, Artificial
  Probe
ggcaggtcatcgagtatgcccggca

SEQ ID NO: 272425 - DNA, 25 bp, Artificial
  Probe
tctgggtgagtgtttcctcccagtt

SEQ ID NO: 272426 - DNA, 25 bp, Artificial
  Probe
tttcagcatagctgcccagtggccc

SEQ ID NO: 272427 - DNA, 25 bp, Artificial
  Probe
agatgattgtctgagcctcggccaa

SEQ ID NO: 272428 - DNA, 25 bp, Artificial
  Probe
gtgtttcctcccagttgtcactgct

SEQ ID NO: 272429 - DNA, 25 bp, Artificial
  Probe
gcccggcagctggagatgattgtct

SEQ ID NO: 272430 - DNA, 25 bp, Artificial
  Probe
tctagccagctgtgggtgccttttg

SEQ ID NO: 272431 - DNA, 25 bp, Artificial
  Probe
gtgaagcaccatgtgtctcagtttt

SEQ ID NO: 272432 - DNA, 25 bp, Artificial
  Probe
gcatagctgcccagtggcccgcagg

SEQ ID NO: 272433 - DNA, 25 bp, Artificial
  Probe
tatgcccggcagctggagatgattg

SEQ ID NO: 272434 - DNA, 25 bp, Artificial
  Probe
ggccttctgggtgagtgtttcctcc

SEQ ID NO: 272435 - DNA, 25 bp, Artificial
  Probe
gctcttctagccagctgtgggtgcc

SEQ ID NO: 272436 - DNA, 25 bp, Artificial
  Probe
gcccgcaggagagcacaggccctga

SEQ ID NO: 272437 - DNA, 25 bp, Artificial
  Probe
ggctggccctcaataaaggcagatt

SEQ ID NO: 272438 - DNA, 25 bp, Artificial
  Probe
agtgaagcaccatgtgtctcagttt

SEQ ID NO: 272439 - DNA, 25 bp, Artificial
  Probe
gggtgagtgtttcctcccagttgtc

SEQ ID NO: 272440 - DNA, 25 bp, Artificial
  Probe
agtatgcccggcagctggagatgat

SEQ ID NO: 272441 - DNA, 25 bp, Artificial
  Probe
atagctgcccagtggcccgcaggag

SEQ ID NO: 272442 - DNA, 25 bp, Artificial
  Probe
ttgccagccagcagcagaagccaga

SEQ ID NO: 272443 - DNA, 25 bp, Artificial
  Probe
ggtcatcgagtatgcccggcagctg

SEQ ID NO: 272444 - DNA, 25 bp, Artificial
  Probe
ggattgttttccagtgaagcaccat

SEQ ID NO: 272445 - DNA, 25 bp, Artificial
  Probe
ccaggcaggtcatcgagtatgcccg

SEQ ID NO: 272446 - DNA, 25 bp, Artificial
  Probe
gttttcagcatagctgcccagtggc

SEQ ID NO: 272447 - DNA, 25 bp, Artificial
  Probe
ttttccagtgaagcaccatgtgtct

SEQ ID NO: 272448 - DNA, 25 bp, Artificial
  Probe
ctcttctagccagctgtgggtgcct

SEQ ID NO: 272449 - DNA, 25 bp, Artificial
  Probe
cttctgggtgagtgtttcctcccag

SEQ ID NO: 272450 - DNA, 25 bp, Artificial
  Probe
acccttgaagttttggagcaccagg

SEQ ID NO: 272451 - DNA, 25 bp, Artificial
  Probe
tggagggattcttctggttttccaa

SEQ ID NO: 272452 - DNA, 25 bp, Artificial
  Probe
tctggttttccaaatcgttgccttt

SEQ ID NO: 272453 - DNA, 25 bp, Artificial
  Probe
gcagtctcagctctgggcatctggg

SEQ ID NO: 272454 - DNA, 25 bp, Artificial
  Probe
gctttcgcacccttgaagttttgga

SEQ ID NO: 272455 - DNA, 25 bp, Artificial
  Probe
catggggctccatggggcacaatcc

SEQ ID NO: 272456 - DNA, 25 bp, Artificial
  Probe
ctcttttgcctcttgggctacttgt

SEQ ID NO: 272457 - DNA, 25 bp, Artificial
  Probe
ttgcctctatgatctaattagtccg

SEQ ID NO: 272458 - DNA, 25 bp, Artificial
  Probe
gcctctatgatctaattagtccggc

SEQ ID NO: 272459 - DNA, 25 bp, Artificial
  Probe
tgatctaattagtccggctattgtg

SEQ ID NO: 272460 - DNA, 25 bp, Artificial
  Probe
gctccatggggctccatggggcaca

SEQ ID NO: 272461 - DNA, 25 bp, Artificial
  Probe
ttggagggattcttctggttttcca

SEQ ID NO: 272462 - DNA, 25 bp, Artificial
  Probe
tcagctctgggcatctggggaaccc

SEQ ID NO: 272463 - DNA, 25 bp, Artificial
  Probe
ctgcattgttggagggattcttctg

SEQ ID NO: 272464 - DNA, 25 bp, Artificial
  Probe
gctccatggggcacaatccagtcta

SEQ ID NO: 272465 - DNA, 25 bp, Artificial
  Probe
taagaaagcagagctccatggggct

SEQ ID NO: 272466 - DNA, 25 bp, Artificial
  Probe
tgcctcttgggctacttgttacagt

SEQ ID NO: 272467 - DNA, 25 bp, Artificial
  Probe
ctctgctttcgcacccttgaagttt

SEQ ID NO: 272468 - DNA, 25 bp, Artificial
  Probe
ttacagtatcgctgccttgcctcta

SEQ ID NO: 272469 - DNA, 25 bp, Artificial
  Probe
ggcatctggggaacccaagcggctt

SEQ ID NO: 272470 - DNA, 25 bp, Artificial
  Probe
agtatcgctgccttgcctctatgat

SEQ ID NO: 272471 - DNA, 25 bp, Artificial
  Probe
ttggagcaccaggaaaagagggcaa

SEQ ID NO: 272472 - DNA, 25 bp, Artificial
  Probe
cggctattgtgcttaagaaagcaga

SEQ ID NO: 272473 - DNA, 25 bp, Artificial
  Probe
gtatcgctgccttgcctctatgatc

SEQ ID NO: 272474 - DNA, 25 bp, Artificial
  Probe
agttttggcctagtttcagtatcca

SEQ ID NO: 272475 - DNA, 25 bp, Artificial
  Probe
gctctgggcatctggggaacccaag

SEQ ID NO: 272476 - DNA, 25 bp, Artificial
  Probe
tctggggaacccaagcggcttcgcc

SEQ ID NO: 272477 - DNA, 25 bp, Artificial
  Probe
ccctcttttgcctcttgggctactt

SEQ ID NO: 272478 - DNA, 25 bp, Artificial
  Probe
tggttttccaaatcgttgcctttct

SEQ ID NO: 272479 - DNA, 25 bp, Artificial
  Probe
aagctctgcattgttggagggattc

SEQ ID NO: 272480 - DNA, 25 bp, Artificial
  Probe
aatccagtctagtggcaaagagaaa

SEQ ID NO: 272481 - DNA, 25 bp, Artificial
  Probe
tttccaaatcgttgcctttctggtg

SEQ ID NO: 272482 - DNA, 25 bp, Artificial
  Probe
gaaagcagagctccatggggctcca

SEQ ID NO: 272483 - DNA, 25 bp, Artificial
  Probe
cttgatcggtaagtgtgagagctgc

SEQ ID NO: 272484 - DNA, 25 bp, Artificial
  Probe
cgctgccttgcctctatgatctaat

SEQ ID NO: 272485 - DNA, 25 bp, Artificial
  Probe
ttttggagcaccaggaaaagagggc

SEQ ID NO: 272486 - DNA, 25 bp, Artificial
  Probe
gggattcttctggttttccaaatcg

SEQ ID NO: 272487 - DNA, 25 bp, Artificial
  Probe
aagcagagctccatggggctccatg

SEQ ID NO: 272488 - DNA, 25 bp, Artificial
  Probe
tgccttgcctctatgatctaattag

SEQ ID NO: 272489 - DNA, 25 bp, Artificial
  Probe
cttgttacagtatcgctgccttgcc

SEQ ID NO: 272490 - DNA, 25 bp, Artificial
  Probe
aattagtccggctattgtgcttaag

SEQ ID NO: 272491 - DNA, 25 bp, Artificial
  Probe
cagtctcagctctgggcatctgggg

SEQ ID NO: 272492 - DNA, 25 bp, Artificial
  Probe
ccgcagtctcagctctgggcatctg

SEQ ID NO: 272493 - DNA, 25 bp, Artificial
  Probe
gctgccttgcctctatgatctaatt

SEQ ID NO: 272494 - DNA, 25 bp, Artificial
  Probe
tagaaaacatgagcaccaagaagct

SEQ ID NO: 272495 - DNA, 25 bp, Artificial
  Probe
gccttgcctctatgatctaattagt

SEQ ID NO: 272496 - DNA, 25 bp, Artificial
  Probe
cttgcagctgaagaaactcagaagg

SEQ ID NO: 272497 - DNA, 25 bp, Artificial
  Probe
cgctctgcattctccagtcacagaa

SEQ ID NO: 272498 - DNA, 25 bp, Artificial
  Probe
gtggcccgtgtccacagctacatgc

SEQ ID NO: 272499 - DNA, 25 bp, Artificial
  Probe
ttggcactggggaaacatggcttcc

SEQ ID NO: 272500 - DNA, 25 bp, Artificial
  Probe
acccccattctgcactaggaaatgg

SEQ ID NO: 272501 - DNA, 25 bp, Artificial
  Probe
tgcattctccagtcacagaagtggt

SEQ ID NO: 272502 - DNA, 25 bp, Artificial
  Probe
cacagaagtggttcttgcagctgaa

SEQ ID NO: 272503 - DNA, 25 bp, Artificial
  Probe
gggcttacacggtttgactggttgt

SEQ ID NO: 272504 - DNA, 25 bp, Artificial
  Probe
aggcggcgacatttcagttatcatg

SEQ ID NO: 272505 - DNA, 25 bp, Artificial
  Probe
cagaagtggttcttgcagctgaaga

SEQ ID NO: 272506 - DNA, 25 bp, Artificial
  Probe
tacatgccagaagtaacaattatga

SEQ ID NO: 272507 - DNA, 25 bp, Artificial
  Probe
ccacgggcttacacggtttgactgg

SEQ ID NO: 272508 - DNA, 25 bp, Artificial
  Probe
tcgcttcctcagaggcggcgacatt

SEQ ID NO: 272509 - DNA, 25 bp, Artificial
  Probe
aattcttggcactggggaaacatgg

SEQ ID NO: 272510 - DNA, 25 bp, Artificial
  Probe
ggcggcgacatttcagttatcatgg

SEQ ID NO: 272511 - DNA, 25 bp, Artificial
  Probe
cagtcacagaagtggttcttgcagc

SEQ ID NO: 272512 - DNA, 25 bp, Artificial
  Probe
agttatcatggtacggacaccgatc

SEQ ID NO: 272513 - DNA, 25 bp, Artificial
  Probe
cattctgcactaggaaatggcataa

SEQ ID NO: 272514 - DNA, 25 bp, Artificial
  Probe
gtcacagaagtggttcttgcagctg

SEQ ID NO: 272515 - DNA, 25 bp, Artificial
  Probe
ttctgcactaggaaatggcataaaa

SEQ ID NO: 272516 - DNA, 25 bp, Artificial
  Probe
gtgtccacagctacatgccagaagt

SEQ ID NO: 272517 - DNA, 25 bp, Artificial
  Probe
gctgtggcccgtgtccacagctaca

SEQ ID NO: 272518 - DNA, 25 bp, Artificial
  Probe
tccacagctacatgccagaagtaac

SEQ ID NO: 272519 - DNA, 25 bp, Artificial
  Probe
ttcagttatcatggtacggacaccg

SEQ ID NO: 272520 - DNA, 25 bp, Artificial
  Probe
cagaaggtcgcttcctcagaggcgg

SEQ ID NO: 272521 - DNA, 25 bp, Artificial
  Probe
cacagcagacaggacaagaggggca

SEQ ID NO: 272522 - DNA, 25 bp, Artificial
  Probe
cggcgacatttcagttatcatggta

SEQ ID NO: 272523 - DNA, 25 bp, Artificial
  Probe
ttcactgtctaaaagcacttgtatg

SEQ ID NO: 272524 - DNA, 25 bp, Artificial
  Probe
tcccacgggcttacacggtttgact

SEQ ID NO: 272525 - DNA, 25 bp, Artificial
  Probe
aggtcgcttcctcagaggcggcgac

SEQ ID NO: 272526 - DNA, 25 bp, Artificial
  Probe
agaaggtcgcttcctcagaggcggc

SEQ ID NO: 272527 - DNA, 25 bp, Artificial
  Probe
gaaactcagaaggtcgcttcctcag

SEQ ID NO: 272528 - DNA, 25 bp, Artificial
  Probe
cttacacggtttgactggttgtagc

SEQ ID NO: 272529 - DNA, 25 bp, Artificial
  Probe
cagctacatgccagaagtaacaatt

SEQ ID NO: 272530 - DNA, 25 bp, Artificial
  Probe
tcttgcagctgaagaaactcagaag

SEQ ID NO: 272531 - DNA, 25 bp, Artificial
  Probe
atcatggtacggacaccgatcacct

SEQ ID NO: 272532 - DNA, 25 bp, Artificial
  Probe
cacggtttgactggttgtagctgtg

SEQ ID NO: 272533 - DNA, 25 bp, Artificial
  Probe
tctgcactaggaaatggcataaaag

SEQ ID NO: 272534 - DNA, 25 bp, Artificial
  Probe
aaactcagaaggtcgcttcctcaga

SEQ ID NO: 272535 - DNA, 25 bp, Artificial
  Probe
catggtacggacaccgatcaccttc

SEQ ID NO: 272536 - DNA, 25 bp, Artificial
  Probe
aaggtcgcttcctcagaggcggcga

SEQ ID NO: 272537 - DNA, 25 bp, Artificial
  Probe
ccacagcagacaggacaagaggggc

SEQ ID NO: 272538 - DNA, 25 bp, Artificial
  Probe
agaattcttggcactggggaaacat

SEQ ID NO: 272539 - DNA, 25 bp, Artificial
  Probe
tcagaggcggcgacatttcagttat

SEQ ID NO: 272540 - DNA, 25 bp, Artificial
  Probe
ccgtgtccacagctacatgccagaa

SEQ ID NO: 272541 - DNA, 25 bp, Artificial
  Probe
ggttttaagcacttttcactgtcta

SEQ ID NO: 272542 - DNA, 25 bp, Artificial
  Probe
ttgtccatatgcttaatgccacaat

SEQ ID NO: 272543 - DNA, 25 bp, Artificial
  Probe
gagtttgtccatatgcttaatgcca

SEQ ID NO: 272544 - DNA, 25 bp, Artificial
  Probe
tcctggagaactaccagacagagaa

SEQ ID NO: 272545 - DNA, 25 bp, Artificial
  Probe
catcctggagaactaccagacagag

SEQ ID NO: 272546 - DNA, 25 bp, Artificial
  Probe
gcgccatcctggagaactaccagac

SEQ ID NO: 272547 - DNA, 25 bp, Artificial
  Probe
ggagaactaccagacagagaagggc

SEQ ID NO: 272548 - DNA, 25 bp, Artificial
  Probe
taatgccacaatgtgtgccaccacc

SEQ ID NO: 272549 - DNA, 25 bp, Artificial
  Probe
ttaatgccacaatgtgtgccaccac

SEQ ID NO: 272550 - DNA, 25 bp, Artificial
  Probe
cttaatgccacaatgtgtgccacca

SEQ ID NO: 272551 - DNA, 25 bp, Artificial
  Probe
cacaatgtgtgccaccacccggacc

SEQ ID NO: 272552 - DNA, 25 bp, Artificial
  Probe
gcttaatgccacaatgtgtgccacc

SEQ ID NO: 272553 - DNA, 25 bp, Artificial
  Probe
tatgcttaatgccacaatgtgtgcc

SEQ ID NO: 272554 - DNA, 25 bp, Artificial
  Probe
tgtccatatgcttaatgccacaatg

SEQ ID NO: 272555 - DNA, 25 bp, Artificial
  Probe
gtccatatgcttaatgccacaatgt

SEQ ID NO: 272556 - DNA, 25 bp, Artificial
  Probe
gagaactaccagacagagaagggca

SEQ ID NO: 272557 - DNA, 25 bp, Artificial
  Probe
ccatcctggagaactaccagacaga

SEQ ID NO: 272558 - DNA, 25 bp, Artificial
  Probe
cctggagaactaccagacagagaag

SEQ ID NO: 272559 - DNA, 25 bp, Artificial
  Probe
tttgtccatatgcttaatgccacaa

SEQ ID NO: 272560 - DNA, 25 bp, Artificial
  Probe
actaccagacagagaagggcatcgt

SEQ ID NO: 272561 - DNA, 25 bp, Artificial
  Probe
agaactaccagacagagaagggcat

SEQ ID NO: 272562 - DNA, 25 bp, Artificial
  Probe
atgccacaatgtgtgccaccacccg

SEQ ID NO: 272563 - DNA, 25 bp, Artificial
  Probe
tgcgccatcctggagaactaccaga

SEQ ID NO: 272564 - DNA, 25 bp, Artificial
  Probe
acaatgtgtgccaccacccggacca

SEQ ID NO: 272565 - DNA, 25 bp, Artificial
  Probe
tgcttaatgccacaatgtgtgccac

SEQ ID NO: 272566 - DNA, 25 bp, Artificial
  Probe
tgccacaatgtgtgccaccacccgg

SEQ ID NO: 272567 - DNA, 25 bp, Artificial
  Probe
atgcttaatgccacaatgtgtgcca

SEQ ID NO: 272568 - DNA, 25 bp, Artificial
  Probe
aatgccacaatgtgtgccaccaccc

SEQ ID NO: 272569 - DNA, 25 bp, Artificial
  Probe
gccatcctggagaactaccagacag

SEQ ID NO: 272570 - DNA, 25 bp, Artificial
  Probe
aactaccagacagagaagggcatcg

SEQ ID NO: 272571 - DNA, 25 bp, Artificial
  Probe
caatgtgtgccaccacccggaccat

SEQ ID NO: 272572 - DNA, 25 bp, Artificial
  Probe
catatgcttaatgccacaatgtgtg

SEQ ID NO: 272573 - DNA, 25 bp, Artificial
  Probe
tggagtttgtccatatgcttaatgc

SEQ ID NO: 272574 - DNA, 25 bp, Artificial
  Probe
agtttgtccatatgcttaatgccac

SEQ ID NO: 272575 - DNA, 25 bp, Artificial
  Probe
atcctggagaactaccagacagaga

SEQ ID NO: 272576 - DNA, 25 bp, Artificial
  Probe
gtttgtccatatgcttaatgccaca

SEQ ID NO: 272577 - DNA, 25 bp, Artificial
  Probe
tggagaactaccagacagagaaggg

SEQ ID NO: 272578 - DNA, 25 bp, Artificial
  Probe
tccatatgcttaatgccacaatgtg

SEQ ID NO: 272579 - DNA, 25 bp, Artificial
  Probe
ggagtttgtccatatgcttaatgcc

SEQ ID NO: 272580 - DNA, 25 bp, Artificial
  Probe
ctggagaactaccagacagagaagg

SEQ ID NO: 272581 - DNA, 25 bp, Artificial
  Probe
atatgcttaatgccacaatgtgtgc

SEQ ID NO: 272582 - DNA, 25 bp, Artificial
  Probe
gaactaccagacagagaagggcatc

SEQ ID NO: 272583 - DNA, 25 bp, Artificial
  Probe
ccatatgcttaatgccacaatgtgt

SEQ ID NO: 272584 - DNA, 25 bp, Artificial
  Probe
gccacaatgtgtgccaccacccgga

SEQ ID NO: 272585 - DNA, 25 bp, Artificial
  Probe
ccacaatgtgtgccaccacccggac

SEQ ID NO: 272586 - DNA, 25 bp, Artificial
  Probe
cgccatcctggagaactaccagaca

SEQ ID NO: 272587 - DNA, 25 bp, Artificial
  Probe
taggagacttggactccttaagcca

SEQ ID NO: 272588 - DNA, 25 bp, Artificial
  Probe
gcttccaccaagacacttgaagtga

SEQ ID NO: 272589 - DNA, 25 bp, Artificial
  Probe
gtggccctaatcttcattgtaatgt

SEQ ID NO: 272590 - DNA, 25 bp, Artificial
  Probe
tggagtcctgcttccctagatcacc

SEQ ID NO: 272591 - DNA, 25 bp, Artificial
  Probe
ctgtattgtgtagagccggtggccc

SEQ ID NO: 272592 - DNA, 25 bp, Artificial
  Probe
gctcccgctcagtagtgggaactgg

SEQ ID NO: 272593 - DNA, 25 bp, Artificial
  Probe
actggagtcctgcttccctagatca

SEQ ID NO: 272594 - DNA, 25 bp, Artificial
  Probe
tccacagcaggaagtgaccacggct

SEQ ID NO: 272595 - DNA, 25 bp, Artificial
  Probe
cccgctcagtagtgggaactggagt

SEQ ID NO: 272596 - DNA, 25 bp, Artificial
  Probe
gagacttggactccttaagccagtc

SEQ ID NO: 272597 - DNA, 25 bp, Artificial
  Probe
cagagcttccaccaagacacttgaa

SEQ ID NO: 272598 - DNA, 25 bp, Artificial
  Probe
tgtattgtgtagagccggtggccct

SEQ ID NO: 272599 - DNA, 25 bp, Artificial
  Probe
agacagggcttctcttaggctcact

SEQ ID NO: 272600 - DNA, 25 bp, Artificial
  Probe
ggccctaatcttcattgtaatgtac

SEQ ID NO: 272601 - DNA, 25 bp, Artificial
  Probe
ctcagtagtgggaactggagtcctg

SEQ ID NO: 272602 - DNA, 25 bp, Artificial
  Probe
gggaactggagtcctgcttccctag

SEQ ID NO: 272603 - DNA, 25 bp, Artificial
  Probe
ctccacagcaggaagtgaccacggc

SEQ ID NO: 272604 - DNA, 25 bp, Artificial
  Probe
gtaagacagggcttctcttaggctc

SEQ ID NO: 272605 - DNA, 25 bp, Artificial
  Probe
tcttaggctcactggccacaccagg

SEQ ID NO: 272606 - DNA, 25 bp, Artificial
  Probe
ttggactccttaagccagtctccca

SEQ ID NO: 272607 - DNA, 25 bp, Artificial
  Probe
cttccaccaagacacttgaagtgac

SEQ ID NO: 272608 - DNA, 25 bp, Artificial
  Probe
tcagtagtgggaactggagtcctgc

SEQ ID NO: 272609 - DNA, 25 bp, Artificial
  Probe
cggctcccgctcagtagtgggaact

SEQ ID NO: 272610 - DNA, 25 bp, Artificial
  Probe
acagcaggaagtgaccacggctccc

SEQ ID NO: 272611 - DNA, 25 bp, Artificial
  Probe
cacggctcccgctcagtagtgggaa

SEQ ID NO: 272612 - DNA, 25 bp, Artificial
  Probe
cacgctgtattgtgtagagccggtg

SEQ ID NO: 272613 - DNA, 25 bp, Artificial
  Probe
agtgaccacggctcccgctcagtag

SEQ ID NO: 272614 - DNA, 25 bp, Artificial
  Probe
actgcctcctgtcagtgggccaggg

SEQ ID NO: 272615 - DNA, 25 bp, Artificial
  Probe
aggagacttggactccttaagccag

SEQ ID NO: 272616 - DNA, 25 bp, Artificial
  Probe
cacagcaggaagtgaccacggctcc

SEQ ID NO: 272617 - DNA, 25 bp, Artificial
  Probe
accagagcttccaccaagacacttg

SEQ ID NO: 272618 - DNA, 25 bp, Artificial
  Probe
gacttggactccttaagccagtctc

SEQ ID NO: 272619 - DNA, 25 bp, Artificial
  Probe
acagggcttctcttaggctcactgg

SEQ ID NO: 272620 - DNA, 25 bp, Artificial
  Probe
tagtgggaactggagtcctgcttcc

SEQ ID NO: 272621 - DNA, 25 bp, Artificial
  Probe
ttccctacacgctgtattgtgtaga

SEQ ID NO: 272622 - DNA, 25 bp, Artificial
  Probe
tcccgctcagtagtgggaactggag

SEQ ID NO: 272623 - DNA, 25 bp, Artificial
  Probe
gtgtagagccggtggccctaatctt

SEQ ID NO: 272624 - DNA, 25 bp, Artificial
  Probe
acttggactccttaagccagtctcc

SEQ ID NO: 272625 - DNA, 25 bp, Artificial
  Probe
agccggtggccctaatcttcattgt

SEQ ID NO: 272626 - DNA, 25 bp, Artificial
  Probe
agcttccaccaagacacttgaagtg

SEQ ID NO: 272627 - DNA, 25 bp, Artificial
  Probe
ctacacgctgtattgtgtagagccg

SEQ ID NO: 272628 - DNA, 25 bp, Artificial
  Probe
taagacagggcttctcttaggctca

SEQ ID NO: 272629 - DNA, 25 bp, Artificial
  Probe
gaactggagtcctgcttccctagat

SEQ ID NO: 272630 - DNA, 25 bp, Artificial
  Probe
ccggtggccctaatcttcattgtaa

SEQ ID NO: 272631 - DNA, 25 bp, Artificial
  Probe
agtgggaactggagtcctgcttccc

SEQ ID NO: 272632 - DNA, 25 bp, Artificial
  Probe
tacacgctgtattgtgtagagccgg

SEQ ID NO: 272633 - DNA, 25 bp, Artificial
  Probe
caacccttcatacatcctagaggag

SEQ ID NO: 272634 - DNA, 25 bp, Artificial
  Probe
ttttactgactttaggcatggagac

SEQ ID NO: 272635 - DNA, 25 bp, Artificial
  Probe
taatgaccaggcagatgccttaaat

SEQ ID NO: 272636 - DNA, 25 bp, Artificial
  Probe
gactttaggcatggagacaattacc

SEQ ID NO: 272637 - DNA, 25 bp, Artificial
  Probe
cctggatgagtcttgaggtaatacc

SEQ ID NO: 272638 - DNA, 25 bp, Artificial
  Probe
tcctcacattggacattttctggct

SEQ ID NO: 272639 - DNA, 25 bp, Artificial
  Probe
ggctaccctgtaagaacaaatataa

SEQ ID NO: 272640 - DNA, 25 bp, Artificial
  Probe
ttgctaaggacatgttcctcacatt

SEQ ID NO: 272641 - DNA, 25 bp, Artificial
  Probe
caagggactgcttcaccctcgactt

SEQ ID NO: 272642 - DNA, 25 bp, Artificial
  Probe
cattttttactgactttaggcatgg

SEQ ID NO: 272643 - DNA, 25 bp, Artificial
  Probe
atatgcttgctaaggacatgttcct

SEQ ID NO: 272644 - DNA, 25 bp, Artificial
  Probe
ttctggcttgccattttttactgac

SEQ ID NO: 272645 - DNA, 25 bp, Artificial
  Probe
atgaccaggcagatgccttaaataa

SEQ ID NO: 272646 - DNA, 25 bp, Artificial
  Probe
actttaggcatggagacaattacct

SEQ ID NO: 272647 - DNA, 25 bp, Artificial
  Probe
tctaattcttgaactgttagcaaag

SEQ ID NO: 272648 - DNA, 25 bp, Artificial
  Probe
taccttgtgggactgcacggtttgg

SEQ ID NO: 272649 - DNA, 25 bp, Artificial
  Probe
ctaccttgtgggactgcacggtttg

SEQ ID NO: 272650 - DNA, 25 bp, Artificial
  Probe
cttgctaaggacatgttcctcacat

SEQ ID NO: 272651 - DNA, 25 bp, Artificial
  Probe
aaggacatgttcctcacattggaca

SEQ ID NO: 272652 - DNA, 25 bp, Artificial
  Probe
actacaaacttcacccaagggactg

SEQ ID NO: 272653 - DNA, 25 bp, Artificial
  Probe
ggcttgccattttttactgacttta

SEQ ID NO: 272654 - DNA, 25 bp, Artificial
  Probe
agggactgcttcaccctcgacttct

SEQ ID NO: 272655 - DNA, 25 bp, Artificial
  Probe
caaacttcacccaagggactgcttc

SEQ ID NO: 272656 - DNA, 25 bp, Artificial
  Probe
gctaccctgtaagaacaaatataag

SEQ ID NO: 272657 - DNA, 25 bp, Artificial
  Probe
aaacttcacccaagggactgcttca

SEQ ID NO: 272658 - DNA, 25 bp, Artificial
  Probe
tttactgactttaggcatggagaca

SEQ ID NO: 272659 - DNA, 25 bp, Artificial
  Probe
aatgaccaggcagatgccttaaata

SEQ ID NO: 272660 - DNA, 25 bp, Artificial
  Probe
tagaggctaccctgtaagaacaaat

SEQ ID NO: 272661 - DNA, 25 bp, Artificial
  Probe
tatgcttgctaaggacatgttcctc

SEQ ID NO: 272662 - DNA, 25 bp, Artificial
  Probe
ctgactttaggcatggagacaatta

SEQ ID NO: 272663 - DNA, 25 bp, Artificial
  Probe
cttgccattttttactgactttagg

SEQ ID NO: 272664 - DNA, 25 bp, Artificial
  Probe
aacccttcatacatcctagaggagg

SEQ ID NO: 272665 - DNA, 25 bp, Artificial
  Probe
gccattttttactgactttaggcat

SEQ ID NO: 272666 - DNA, 25 bp, Artificial
  Probe
gggacaactgctaccttgtgggact

SEQ ID NO: 272667 - DNA, 25 bp, Artificial
  Probe
agggacaactgctaccttgtgggac

SEQ ID NO: 272668 - DNA, 25 bp, Artificial
  Probe
aactgctaccttgtgggactgcacg

SEQ ID NO: 272669 - DNA, 25 bp, Artificial
  Probe
ctgttccccatatgcttgctaagga

SEQ ID NO: 272670 - DNA, 25 bp, Artificial
  Probe
ctaaggacatgttcctcacattgga

SEQ ID NO: 272671 - DNA, 25 bp, Artificial
  Probe
tgttcctcacattggacattttctg

SEQ ID NO: 272672 - DNA, 25 bp, Artificial
  Probe
ttgccattttttactgactttaggc

SEQ ID NO: 272673 - DNA, 25 bp, Artificial
  Probe
aagggactgcttcaccctcgacttc

SEQ ID NO: 272674 - DNA, 25 bp, Artificial
  Probe
gaactgttccccatatgcttgctaa

SEQ ID NO: 272675 - DNA, 25 bp, Artificial
  Probe
ctggcttgccattttttactgactt

SEQ ID NO: 272676 - DNA, 25 bp, Artificial
  Probe
actgctaccttgtgggactgcacgg

SEQ ID NO: 272677 - DNA, 25 bp, Artificial
  Probe
gagggacaactgctaccttgtggga

SEQ ID NO: 272678 - DNA, 25 bp, Artificial
  Probe
cccatatgcttgctaaggacatgtt

SEQ ID NO: 272679 - DNA, 25 bp, Artificial
  Probe
tgtgccgagagctactgcagcaggc

SEQ ID NO: 272680 - DNA, 25 bp, Artificial
  Probe
agccgcagaggacacacataccaca

SEQ ID NO: 272681 - DNA, 25 bp, Artificial
  Probe
gtgctcacccagtgctcaggaggcc

SEQ ID NO: 272682 - DNA, 25 bp, Artificial
  Probe
ctagaaaccacgatcctctcagtgg

SEQ ID NO: 272683 - DNA, 25 bp, Artificial
  Probe
tgacaccccgtgtgccgagagctac

SEQ ID NO: 272684 - DNA, 25 bp, Artificial
  Probe
agtgccgtcggatttagccgcagag

SEQ ID NO: 272685 - DNA, 25 bp, Artificial
  Probe
agagctactgcagcaggctgggcta

SEQ ID NO: 272686 - DNA, 25 bp, Artificial
  Probe
aaccacgatcctctcagtggtgagt

SEQ ID NO: 272687 - DNA, 25 bp, Artificial
  Probe
accacgatcctctcagtggtgagtg

SEQ ID NO: 272688 - DNA, 25 bp, Artificial
  Probe
ccccgtgtgccgagagctactgcag

SEQ ID NO: 272689 - DNA, 25 bp, Artificial
  Probe
tgccgtcggatttagccgcagagga

SEQ ID NO: 272690 - DNA, 25 bp, Artificial
  Probe
gtgccgagagctactgcagcaggct

SEQ ID NO: 272691 - DNA, 25 bp, Artificial
  Probe
gctacgaactatctagaaaccacga

SEQ ID NO: 272692 - DNA, 25 bp, Artificial
  Probe
ggatttagccgcagaggacacacat

SEQ ID NO: 272693 - DNA, 25 bp, Artificial
  Probe
gtgctacgaactatctagaaaccac

SEQ ID NO: 272694 - DNA, 25 bp, Artificial
  Probe
cctctcagtggtgagtgtgccacac

SEQ ID NO: 272695 - DNA, 25 bp, Artificial
  Probe
tgtctgcttcagtgccgtcggattt

SEQ ID NO: 272696 - DNA, 25 bp, Artificial
  Probe
cgtgtgccgagagctactgcagcag

SEQ ID NO: 272697 - DNA, 25 bp, Artificial
  Probe
cctgtctgcttcagtgccgtcggat

SEQ ID NO: 272698 - DNA, 25 bp, Artificial
  Probe
tcctctcagtggtgagtgtgccaca

SEQ ID NO: 272699 - DNA, 25 bp, Artificial
  Probe
tgctacgaactatctagaaaccacg

SEQ ID NO: 272700 - DNA, 25 bp, Artificial
  Probe
agctactgcagcaggctgggctatg

SEQ ID NO: 272701 - DNA, 25 bp, Artificial
  Probe
gatcctctcagtggtgagtgtgcca

SEQ ID NO: 272702 - DNA, 25 bp, Artificial
  Probe
ctgacaccccgtgtgccgagagcta

SEQ ID NO: 272703 - DNA, 25 bp, Artificial
  Probe
ttagccgcagaggacacacatacca

SEQ ID NO: 272704 - DNA, 25 bp, Artificial
  Probe
ctgtgctcacccagtgctcaggagg

SEQ ID NO: 272705 - DNA, 25 bp, Artificial
  Probe
gaaaccacgatcctctcagtggtga

SEQ ID NO: 272706 - DNA, 25 bp, Artificial
  Probe
tctagaaaccacgatcctctcagtg

SEQ ID NO: 272707 - DNA, 25 bp, Artificial
  Probe
cttcctgtctgcttcagtgccgtcg

SEQ ID NO: 272708 - DNA, 25 bp, Artificial
  Probe
tcagtggtgagtgtgccacactgtc

SEQ ID NO: 272709 - DNA, 25 bp, Artificial
  Probe
gagctactgcagcaggctgggctat

SEQ ID NO: 272710 - DNA, 25 bp, Artificial
  Probe
cagtgccgtcggatttagccgcaga

SEQ ID NO: 272711 - DNA, 25 bp, Artificial
  Probe
gaacaccaagtgctacgaactatct

SEQ ID NO: 272712 - DNA, 25 bp, Artificial
  Probe
gcagaggacacacataccacatacc

SEQ ID NO: 272713 - DNA, 25 bp, Artificial
  Probe
atttagccgcagaggacacacatac

SEQ ID NO: 272714 - DNA, 25 bp, Artificial
  Probe
cgcagaggacacacataccacatac

SEQ ID NO: 272715 - DNA, 25 bp, Artificial
  Probe
gcttcagtgccgtcggatttagccg

SEQ ID NO: 272716 - DNA, 25 bp, Artificial
  Probe
cgatcctctcagtggtgagtgtgcc

SEQ ID NO: 272717 - DNA, 25 bp, Artificial
  Probe
tagaaaccacgatcctctcagtggt

SEQ ID NO: 272718 - DNA, 25 bp, Artificial
  Probe
ttcctgtctgcttcagtgccgtcgg

SEQ ID NO: 272719 - DNA, 25 bp, Artificial
  Probe
gagtgtgccacactgtcaccgcctt

SEQ ID NO: 272720 - DNA, 25 bp, Artificial
  Probe
gccgtcggatttagccgcagaggac

SEQ ID NO: 272721 - DNA, 25 bp, Artificial
  Probe
gccgcagaggacacacataccacat

SEQ ID NO: 272722 - DNA, 25 bp, Artificial
  Probe
tgccgagagctactgcagcaggctg

SEQ ID NO: 272723 - DNA, 25 bp, Artificial
  Probe
gtgagtgtgccacactgtcaccgcc

SEQ ID NO: 272724 - DNA, 25 bp, Artificial
  Probe
acaccaagtgctacgaactatctag

SEQ ID NO: 272725 - DNA, 25 bp, Artificial
  Probe
cggcggctgctactctagcggtggt

SEQ ID NO: 272726 - DNA, 25 bp, Artificial
  Probe
cccacctggccgtgcaagtaaagtc

SEQ ID NO: 272727 - DNA, 25 bp, Artificial
  Probe
aaagtccccgggctgcagcggagac

SEQ ID NO: 272728 - DNA, 25 bp, Artificial
  Probe
ctggccgtgcaagtaaagtccccgg

SEQ ID NO: 272729 - DNA, 25 bp, Artificial
  Probe
ggtggcggcggcagcggtggctgcg

SEQ ID NO: 272730 - DNA, 25 bp, Artificial
  Probe
gggggcggctctggaggtggcaagg

SEQ ID NO: 272731 - DNA, 25 bp, Artificial
  Probe
ggaggcggcggtggctgtggcggcg

SEQ ID NO: 272732 - DNA, 25 bp, Artificial
  Probe
ccacctggccgtgcaagtaaagtcc

SEQ ID NO: 272733 - DNA, 25 bp, Artificial
  Probe
aggcggaggtggtagctgcggaggt

SEQ ID NO: 272734 - DNA, 25 bp, Artificial
  Probe
cagtcagacctcctgcgctccccag

SEQ ID NO: 272735 - DNA, 25 bp, Artificial
  Probe
cacctggccgtgcaagtaaagtccc

SEQ ID NO: 272736 - DNA, 25 bp, Artificial
  Probe
aagtccccgggctgcagcggagaca

SEQ ID NO: 272737 - DNA, 25 bp, Artificial
  Probe
atgcggaggcggctactccggaggt

SEQ ID NO: 272738 - DNA, 25 bp, Artificial
  Probe
tgcaagtaaagtccccgggctgcag

SEQ ID NO: 272739 - DNA, 25 bp, Artificial
  Probe
gcggcagcggtggctgcggtggagg

SEQ ID NO: 272740 - DNA, 25 bp, Artificial
  Probe
agctgcggaggtgctcctccggcgg

SEQ ID NO: 272741 - DNA, 25 bp, Artificial
  Probe
cctcacccccaagaagaagcctttg

SEQ ID NO: 272742 - DNA, 25 bp, Artificial
  Probe
cagcggcggctgctactctagcggt

SEQ ID NO: 272743 - DNA, 25 bp, Artificial
  Probe
ctggaggtggcaagggtgtgccagt

SEQ ID NO: 272744 - DNA, 25 bp, Artificial
  Probe
gtggctgtggcggcggctcttccgg

SEQ ID NO: 272745 - DNA, 25 bp, Artificial
  Probe
cctggccgtgcaagtaaagtccccg

SEQ ID NO: 272746 - DNA, 25 bp, Artificial
  Probe
tgcgctccccagcagagctacggag

SEQ ID NO: 272747 - DNA, 25 bp, Artificial
  Probe
ggtgtgccagtctgccaccagaccc

SEQ ID NO: 272748 - DNA, 25 bp, Artificial
  Probe
caagggtgtgccagtctgccaccag

SEQ ID NO: 272749 - DNA, 25 bp, Artificial
  Probe
attactcctcgcagcagtccagtca

SEQ ID NO: 272750 - DNA, 25 bp, Artificial
  Probe
gaggctactccggaggcggcggtgg

SEQ ID NO: 272751 - DNA, 25 bp, Artificial
  Probe
gaggcggctactccggaggtggtgg

SEQ ID NO: 272752 - DNA, 25 bp, Artificial
  Probe
gtgcaagtaaagtccccgggctgca

SEQ ID NO: 272753 - DNA, 25 bp, Artificial
  Probe
ccgtgcaagtaaagtccccgggctg

SEQ ID NO: 272754 - DNA, 25 bp, Artificial
  Probe
ctcctccggcggcggcggcggcggc

SEQ ID NO: 272755 - DNA, 25 bp, Artificial
  Probe
ctccggcggcggcggcggcggcagc

SEQ ID NO: 272756 - DNA, 25 bp, Artificial
  Probe
ccggaggtggtggcggcggttccag

SEQ ID NO: 272757 - DNA, 25 bp, Artificial
  Probe
tgtatcttgttctgtcgatttttcc

SEQ ID NO: 272758 - DNA, 25 bp, Artificial
  Probe
aagggtgtgccagtctgccaccaga

SEQ ID NO: 272759 - DNA, 25 bp, Artificial
  Probe
cgtgcaagtaaagtccccgggctgc

SEQ ID NO: 272760 - DNA, 25 bp, Artificial
  Probe
ctgcggtggaggctactccggaggc

SEQ ID NO: 272761 - DNA, 25 bp, Artificial
  Probe
tactccggaggtggtggcggcggtt

SEQ ID NO: 272762 - DNA, 25 bp, Artificial
  Probe
gcggaggtggtagctgcggaggtgc

SEQ ID NO: 272763 - DNA, 25 bp, Artificial
  Probe
cggcggcggcagcggcggctgctac

SEQ ID NO: 272764 - DNA, 25 bp, Artificial
  Probe
gaggggctcttcaggcggaggtggt

SEQ ID NO: 272765 - DNA, 25 bp, Artificial
  Probe
cggcggctcttccgggggcagcggc

SEQ ID NO: 272766 - DNA, 25 bp, Artificial
  Probe
gcggcggtggctgtggcggcggctc

SEQ ID NO: 272767 - DNA, 25 bp, Artificial
  Probe
tactcctcgcagcagtccagtcaga

SEQ ID NO: 272768 - DNA, 25 bp, Artificial
  Probe
cggaggggctcttcaggcggaggtg

SEQ ID NO: 272769 - DNA, 25 bp, Artificial
  Probe
agggtgtgccagtctgccaccagac

SEQ ID NO: 272770 - DNA, 25 bp, Artificial
  Probe
ttactcctcgcagcagtccagtcag

SEQ ID NO: 272771 - DNA, 25 bp, Artificial
  Probe
cagtcttatgtgcaaagatcctaaa

SEQ ID NO: 272772 - DNA, 25 bp, Artificial
  Probe
tccagcaaatgtccatttgtgtaaa

SEQ ID NO: 272773 - DNA, 25 bp, Artificial
  Probe
atgggcatcacatctgtaaagcaat

SEQ ID NO: 272774 - DNA, 25 bp, Artificial
  Probe
cttgtagtgactcttcgtgttttaa

SEQ ID NO: 272775 - DNA, 25 bp, Artificial
  Probe
gtctatagctgtagatgggcatcac

SEQ ID NO: 272776 - DNA, 25 bp, Artificial
  Probe
ggcatcacatctgtaaagcaatcaa

SEQ ID NO: 272777 - DNA, 25 bp, Artificial
  Probe
gtagatgggcatcacatctgtaaag

SEQ ID NO: 272778 - DNA, 25 bp, Artificial
  Probe
tgtgactccaatcagttcagatatg

SEQ ID NO: 272779 - DNA, 25 bp, Artificial
  Probe
tatagctgtagatgggcatcacatc

SEQ ID NO: 272780 - DNA, 25 bp, Artificial
  Probe
tcttatgtgcaaagatcctaaatgg

SEQ ID NO: 272781 - DNA, 25 bp, Artificial
  Probe
tgtagtgactcttcgtgttttaatc

SEQ ID NO: 272782 - DNA, 25 bp, Artificial
  Probe
gcctttcaggaggatggtagaacaa

SEQ ID NO: 272783 - DNA, 25 bp, Artificial
  Probe
tgatccaggagttgcattatagcca

SEQ ID NO: 272784 - DNA, 25 bp, Artificial
  Probe
gtgctccagcaaatgtccatttgtg

SEQ ID NO: 272785 - DNA, 25 bp, Artificial
  Probe
acattttatggcagtcttatgtgca

SEQ ID NO: 272786 - DNA, 25 bp, Artificial
  Probe
ttaaactgcttacaatgatccagga

SEQ ID NO: 272787 - DNA, 25 bp, Artificial
  Probe
tttaaactgcttacaatgatccagg

SEQ ID NO: 272788 - DNA, 25 bp, Artificial
  Probe
gatgtgtaccatactgtgtgctcca

SEQ ID NO: 272789 - DNA, 25 bp, Artificial
  Probe
cagcaaatgtccatttgtgtaaatg

SEQ ID NO: 272790 - DNA, 25 bp, Artificial
  Probe
gcagtcttatgtgcaaagatcctaa

SEQ ID NO: 272791 - DNA, 25 bp, Artificial
  Probe
gactccaatcagttcagatatgtaa

SEQ ID NO: 272792 - DNA, 25 bp, Artificial
  Probe
cattttatggcagtcttatgtgcaa

SEQ ID NO: 272793 - DNA, 25 bp, Artificial
  Probe
gtagtgactcttcgtgttttaatca

SEQ ID NO: 272794 - DNA, 25 bp, Artificial
  Probe
tgtgcaaagatcctaaatggacaaa

SEQ ID NO: 272795 - DNA, 25 bp, Artificial
  Probe
tcttcgtgttttaatcaagtcagat

SEQ ID NO: 272796 - DNA, 25 bp, Artificial
  Probe
tatggcagtcttatgtgcaaagatc

SEQ ID NO: 272797 - DNA, 25 bp, Artificial
  Probe
cttatgtgcaaagatcctaaatgga

SEQ ID NO: 272798 - DNA, 25 bp, Artificial
  Probe
tgatgtgtaccatactgtgtgctcc

SEQ ID NO: 272799 - DNA, 25 bp, Artificial
  Probe
ggctccttgtagtgactcttcgtgt

SEQ ID NO: 272800 - DNA, 25 bp, Artificial
  Probe
atgcctttcaggaggatggtagaac

SEQ ID NO: 272801 - DNA, 25 bp, Artificial
  Probe
tgtaccatactgtgtgctccagcaa

SEQ ID NO: 272802 - DNA, 25 bp, Artificial
  Probe
ctccagcaaatgtccatttgtgtaa

SEQ ID NO: 272803 - DNA, 25 bp, Artificial
  Probe
tgaaaccatgtctatagctgtagat

SEQ ID NO: 272804 - DNA, 25 bp, Artificial
  Probe
ctccttgtagtgactcttcgtgttt

SEQ ID NO: 272805 - DNA, 25 bp, Artificial
  Probe
actgtgtgctccagcaaatgtccat

SEQ ID NO: 272806 - DNA, 25 bp, Artificial
  Probe
ttgtgatgtgtaccatactgtgtgc

SEQ ID NO: 272807 - DNA, 25 bp, Artificial
  Probe
ttaagcatctctgtttacctgcctg

SEQ ID NO: 272808 - DNA, 25 bp, Artificial
  Probe
tgttttggctccttgtagtgactct

SEQ ID NO: 272809 - DNA, 25 bp, Artificial
  Probe
ataatgaaaccatgtctatagctgt

SEQ ID NO: 272810 - DNA, 25 bp, Artificial
  Probe
gtgactcttcgtgttttaatcaagt

SEQ ID NO: 272811 - DNA, 25 bp, Artificial
  Probe
atactgtgtgctccagcaaatgtcc

SEQ ID NO: 272812 - DNA, 25 bp, Artificial
  Probe
ttgttttggctccttgtagtgactc

SEQ ID NO: 272813 - DNA, 25 bp, Artificial
  Probe
ccttgtagtgactcttcgtgtttta

SEQ ID NO: 272814 - DNA, 25 bp, Artificial
  Probe
atgtgcaaagatcctaaatggacaa

SEQ ID NO: 272815 - DNA, 25 bp, Artificial
  Probe
atccaggagttgcattatagccaat

SEQ ID NO: 272816 - DNA, 25 bp, Artificial
  Probe
gatgggcatcacatctgtaaagcaa

SEQ ID NO: 272817 - DNA, 25 bp, Artificial
  Probe
agacattacttagacattagacatg

SEQ ID NO: 272818 - DNA, 25 bp, Artificial
  Probe
ctgtggcctttagtgcattcacact

SEQ ID NO: 272819 - DNA, 25 bp, Artificial
  Probe
ctggccccaggatgaaatctcatta

SEQ ID NO: 272820 - DNA, 25 bp, Artificial
  Probe
gtggcctttagtgcattcacactgt

SEQ ID NO: 272821 - DNA, 25 bp, Artificial
  Probe
tctgtggcctttagtgcattcacac

SEQ ID NO: 272822 - DNA, 25 bp, Artificial
  Probe
attctgtggcctttagtgcattcac

SEQ ID NO: 272823 - DNA, 25 bp, Artificial
  Probe
gccccaggatgaaatctcattaata

SEQ ID NO: 272824 - DNA, 25 bp, Artificial
  Probe
gcctttagtgcattcacactgttgt

SEQ ID NO: 272825 - DNA, 25 bp, Artificial
  Probe
tgtggcctttagtgcattcacactg

SEQ ID NO: 272826 - DNA, 25 bp, Artificial
  Probe
ctgttgtgtaatctcatccaagtca

SEQ ID NO: 272827 - DNA, 25 bp, Artificial
  Probe
ggcctttagtgcattcacactgttg

SEQ ID NO: 272828 - DNA, 25 bp, Artificial
  Probe
tggcctttagtgcattcacactgtt

SEQ ID NO: 272829 - DNA, 25 bp, Artificial
  Probe
tgcattcacactgttgtgtaatctc

SEQ ID NO: 272830 - DNA, 25 bp, Artificial
  Probe
cattcacactgttgtgtaatctcat

SEQ ID NO: 272831 - DNA, 25 bp, Artificial
  Probe
acactgttgtgtaatctcatccaag

SEQ ID NO: 272832 - DNA, 25 bp, Artificial
  Probe
cctggccccaggatgaaatctcatt

SEQ ID NO: 272833 - DNA, 25 bp, Artificial
  Probe
ggccccaggatgaaatctcattaat

SEQ ID NO: 272834 - DNA, 25 bp, Artificial
  Probe
cttcctggccccaggatgaaatctc

SEQ ID NO: 272835 - DNA, 25 bp, Artificial
  Probe
tgtattacaggaccgcatacagaga

SEQ ID NO: 272836 - DNA, 25 bp, Artificial
  Probe
tcacaaaagccaatttagaataaaa

SEQ ID NO: 272837 - DNA, 25 bp, Artificial
  Probe
tggccccaggatgaaatctcattaa

SEQ ID NO: 272838 - DNA, 25 bp, Artificial
  Probe
ttctgtggcctttagtgcattcaca

SEQ ID NO: 272839 - DNA, 25 bp, Artificial
  Probe
tgttgtgtaatctcatccaagtcat

SEQ ID NO: 272840 - DNA, 25 bp, Artificial
  Probe
tagacattagacatgcccttcctgg

SEQ ID NO: 272841 - DNA, 25 bp, Artificial
  Probe
gattctgtggcctttagtgcattca

SEQ ID NO: 272842 - DNA, 25 bp, Artificial
  Probe
gtgcattcacactgttgtgtaatct

SEQ ID NO: 272843 - DNA, 25 bp, Artificial
  Probe
gacattacttagacattagacatgc

SEQ ID NO: 272844 - DNA, 25 bp, Artificial
  Probe
gttgtgtaatctcatccaagtcatt

SEQ ID NO: 272845 - DNA, 25 bp, Artificial
  Probe
aaacattttccgttgagagacagaa

SEQ ID NO: 272846 - DNA, 25 bp, Artificial
  Probe
tatgtattacaggaccgcatacaga

SEQ ID NO: 272847 - DNA, 25 bp, Artificial
  Probe
ttagacattagacatgcccttcctg

SEQ ID NO: 272848 - DNA, 25 bp, Artificial
  Probe
cactgttgtgtaatctcatccaagt

SEQ ID NO: 272849 - DNA, 25 bp, Artificial
  Probe
aacattttccgttgagagacagaac

SEQ ID NO: 272850 - DNA, 25 bp, Artificial
  Probe
ttcctggccccaggatgaaatctca

SEQ ID NO: 272851 - DNA, 25 bp, Artificial
  Probe
agacattagacatgcccttcctggc

SEQ ID NO: 272852 - DNA, 25 bp, Artificial
  Probe
tacatctttatgaatatgtattaca

SEQ ID NO: 272853 - DNA, 25 bp, Artificial
  Probe
aatatgtattacaggaccgcataca

SEQ ID NO: 272854 - DNA, 25 bp, Artificial
  Probe
atgtattacaggaccgcatacagag

SEQ ID NO: 272855 - DNA, 25 bp, Artificial
  Probe
acattttccgttgagagacagaact

SEQ ID NO: 272856 - DNA, 25 bp, Artificial
  Probe
tgattctgtggcctttagtgcattc

SEQ ID NO: 272857 - DNA, 25 bp, Artificial
  Probe
agtcatttccagaacattccatcat

SEQ ID NO: 272858 - DNA, 25 bp, Artificial
  Probe
aactttaaagacattacttagacat

SEQ ID NO: 272859 - DNA, 25 bp, Artificial
  Probe
aatttgattctgtggcctttagtgc

SEQ ID NO: 272860 - DNA, 25 bp, Artificial
  Probe
tcctggccccaggatgaaatctcat

SEQ ID NO: 272861 - DNA, 25 bp, Artificial
  Probe
atatgtattacaggaccgcatacag

SEQ ID NO: 272862 - DNA, 25 bp, Artificial
  Probe
gcattcacactgttgtgtaatctca

SEQ ID NO: 272863 - DNA, 25 bp, Artificial
  Probe
ccaatcagggcaaggtgctctcaga

SEQ ID NO: 272864 - DNA, 25 bp, Artificial
  Probe
ggcaggtaccacactaggtctcctt

SEQ ID NO: 272865 - DNA, 25 bp, Artificial
  Probe
ctcctttatgctctaggatgacact

SEQ ID NO: 272866 - DNA, 25 bp, Artificial
  Probe
tgctctaggatgacacttgggctat

SEQ ID NO: 272867 - DNA, 25 bp, Artificial
  Probe
taggatgacacttgggctatttaac

SEQ ID NO: 272868 - DNA, 25 bp, Artificial
  Probe
aatcagggcaaggtgctctcagatg

SEQ ID NO: 272869 - DNA, 25 bp, Artificial
  Probe
aacccgccggccagaatccattgtt

SEQ ID NO: 272870 - DNA, 25 bp, Artificial
  Probe
tgacacttgggctatttaacccgcc

SEQ ID NO: 272871 - DNA, 25 bp, Artificial
  Probe
tcagatggcctagtggcttgaatgg

SEQ ID NO: 272872 - DNA, 25 bp, Artificial
  Probe
ctttatgctctaggatgacacttgg

SEQ ID NO: 272873 - DNA, 25 bp, Artificial
  Probe
ctctaggatgacacttgggctattt

SEQ ID NO: 272874 - DNA, 25 bp, Artificial
  Probe
ggccacccttcatggggacaggaac

SEQ ID NO: 272875 - DNA, 25 bp, Artificial
  Probe
tggccacccttcatggggacaggaa

SEQ ID NO: 272876 - DNA, 25 bp, Artificial
  Probe
agggcaaggtgctctcagatggcct

SEQ ID NO: 272877 - DNA, 25 bp, Artificial
  Probe
gcaaggtgctctcagatggcctagt

SEQ ID NO: 272878 - DNA, 25 bp, Artificial
  Probe
agcacagcctcaacatggactctac

SEQ ID NO: 272879 - DNA, 25 bp, Artificial
  Probe
actaggtctcctttatgctctagga

SEQ ID NO: 272880 - DNA, 25 bp, Artificial
  Probe
aggtctcctttatgctctaggatga

SEQ ID NO: 272881 - DNA, 25 bp, Artificial
  Probe
ccaggcaggtaccacactaggtctc

SEQ ID NO: 272882 - DNA, 25 bp, Artificial
  Probe
cctagtggcttgaatgggacactta

SEQ ID NO: 272883 - DNA, 25 bp, Artificial
  Probe
gttggccacccttcatggggacagg

SEQ ID NO: 272884 - DNA, 25 bp, Artificial
  Probe
ttatgctctaggatgacacttgggc

SEQ ID NO: 272885 - DNA, 25 bp, Artificial
  Probe
tcctttatgctctaggatgacactt

SEQ ID NO: 272886 - DNA, 25 bp, Artificial
  Probe
gacacttgggctatttaacccgccg

SEQ ID NO: 272887 - DNA, 25 bp, Artificial
  Probe
tatgctctaggatgacacttgggct

SEQ ID NO: 272888 - DNA, 25 bp, Artificial
  Probe
gtaccacactaggtctcctttatgc

SEQ ID NO: 272889 - DNA, 25 bp, Artificial
  Probe
ttgggctatttaacccgccggccag

SEQ ID NO: 272890 - DNA, 25 bp, Artificial
  Probe
caggcaggtaccacactaggtctcc

SEQ ID NO: 272891 - DNA, 25 bp, Artificial
  Probe
ggtaccacactaggtctcctttatg

SEQ ID NO: 272892 - DNA, 25 bp, Artificial
  Probe
gaatatttagcacagcctcaacatg

SEQ ID NO: 272893 - DNA, 25 bp, Artificial
  Probe
tctcagatggcctagtggcttgaat

SEQ ID NO: 272894 - DNA, 25 bp, Artificial
  Probe
tttagcacagcctcaacatggactc

SEQ ID NO: 272895 - DNA, 25 bp, Artificial
  Probe
acactaggtctcctttatgctctag

SEQ ID NO: 272896 - DNA, 25 bp, Artificial
  Probe
ctccagttggccacccttcatgggg

SEQ ID NO: 272897 - DNA, 25 bp, Artificial
  Probe
tggcctagtggcttgaatgggacac

SEQ ID NO: 272898 - DNA, 25 bp, Artificial
  Probe
ggcctagtggcttgaatgggacact

SEQ ID NO: 272899 - DNA, 25 bp, Artificial
  Probe
aatatttagcacagcctcaacatgg

SEQ ID NO: 272900 - DNA, 25 bp, Artificial
  Probe
ggcaaggtgctctcagatggcctag

SEQ ID NO: 272901 - DNA, 25 bp, Artificial
  Probe
aaggtgctctcagatggcctagtgg

SEQ ID NO: 272902 - DNA, 25 bp, Artificial
  Probe
tctcctttatgctctaggatgacac

SEQ ID NO: 272903 - DNA, 25 bp, Artificial
  Probe
agttggccacccttcatggggacag

SEQ ID NO: 272904 - DNA, 25 bp, Artificial
  Probe
tatcccaggcaggtaccacactagg

SEQ ID NO: 272905 - DNA, 25 bp, Artificial
  Probe
ctaggatgacacttgggctatttaa

SEQ ID NO: 272906 - DNA, 25 bp, Artificial
  Probe
tcagggcaaggtgctctcagatggc

SEQ ID NO: 272907 - DNA, 25 bp, Artificial
  Probe
tcccaggcaggtaccacactaggtc

SEQ ID NO: 272908 - DNA, 25 bp, Artificial
  Probe
ggtgctctcagatggcctagtggct

SEQ ID NO: 272909 - DNA, 25 bp, Artificial
  Probe
atgcagaacctggagatcgagctgc

SEQ ID NO: 272910 - DNA, 25 bp, Artificial
  Probe
ggcccagatccaggagatgatcggc

SEQ ID NO: 272911 - DNA, 25 bp, Artificial
  Probe
caaggtcatggatgtgcacgatggc

SEQ ID NO: 272912 - DNA, 25 bp, Artificial
  Probe
caccaagaactaaggctgctagatg

SEQ ID NO: 272913 - DNA, 25 bp, Artificial
  Probe
caggtcctgcgcaccaagaactaag

SEQ ID NO: 272914 - DNA, 25 bp, Artificial
  Probe
gcccagatccaggagatgatcggca

SEQ ID NO: 272915 - DNA, 25 bp, Artificial
  Probe
tccccaagacagagagctgaaccgc

SEQ ID NO: 272916 - DNA, 25 bp, Artificial
  Probe
ggcgcacgatgcagaacctggagat

SEQ ID NO: 272917 - DNA, 25 bp, Artificial
  Probe
aagagcgagatctccgagctccggc

SEQ ID NO: 272918 - DNA, 25 bp, Artificial
  Probe
cacgagcaggtcctgcgcaccaaga

SEQ ID NO: 272919 - DNA, 25 bp, Artificial
  Probe
cacgatgcagaacctggagatcgag

SEQ ID NO: 272920 - DNA, 25 bp, Artificial
  Probe
aatcatccagagatgtgacctccac

SEQ ID NO: 272921 - DNA, 25 bp, Artificial
  Probe
gagctccggcgcacgatgcagaacc

SEQ ID NO: 272922 - DNA, 25 bp, Artificial
  Probe
ctgaaccgcgagtggccaccaacag

SEQ ID NO: 272923 - DNA, 25 bp, Artificial
  Probe
gcaccaaggtcatggatgtgcacga

SEQ ID NO: 272924 - DNA, 25 bp, Artificial
  Probe
gcaagagcgagatctccgagctccg

SEQ ID NO: 272925 - DNA, 25 bp, Artificial
  Probe
ggcaagagcgagatctccgagctcc

SEQ ID NO: 272926 - DNA, 25 bp, Artificial
  Probe
agatccaggagatgatcggcagcgt

SEQ ID NO: 272927 - DNA, 25 bp, Artificial
  Probe
ccagatccgcaccaaggtcatggat

SEQ ID NO: 272928 - DNA, 25 bp, Artificial
  Probe
tcatggatgtgcacgatggcaaggt

SEQ ID NO: 272929 - DNA, 25 bp, Artificial
  Probe
ggatgctcacctttcatctgcccaa

SEQ ID NO: 272930 - DNA, 25 bp, Artificial
  Probe
cgcacgatgcagaacctggagatcg

SEQ ID NO: 272931 - DNA, 25 bp, Artificial
  Probe
tgcagagcggcaagagcgagatctc

SEQ ID NO: 272932 - DNA, 25 bp, Artificial
  Probe
aactaaggctgctagatgctgctca

SEQ ID NO: 272933 - DNA, 25 bp, Artificial
  Probe
ctccggcgcacgatgcagaacctgg

SEQ ID NO: 272934 - DNA, 25 bp, Artificial
  Probe
accaaggtcatggatgtgcacgatg

SEQ ID NO: 272935 - DNA, 25 bp, Artificial
  Probe
gctggcccagatccaggagatgatc

SEQ ID NO: 272936 - DNA, 25 bp, Artificial
  Probe
cctgcgcaccaagaactaaggctgc

SEQ ID NO: 272937 - DNA, 25 bp, Artificial
  Probe
gcagagcggcaagagcgagatctcc

SEQ ID NO: 272938 - DNA, 25 bp, Artificial
  Probe
gcgaggatgctcacctttcatctgc

SEQ ID NO: 272939 - DNA, 25 bp, Artificial
  Probe
agatctccgagctccggcgcacgat

SEQ ID NO: 272940 - DNA, 25 bp, Artificial
  Probe
agctccggcgcacgatgcagaacct

SEQ ID NO: 272941 - DNA, 25 bp, Artificial
  Probe
gtgcacgatggcaaggtggtctcca

SEQ ID NO: 272942 - DNA, 25 bp, Artificial
  Probe
agaactaaggctgctagatgctgct

SEQ ID NO: 272943 - DNA, 25 bp, Artificial
  Probe
acgagcaggtcctgcgcaccaagaa

SEQ ID NO: 272944 - DNA, 25 bp, Artificial
  Probe
cagatccaggagatgatcggcagcg

SEQ ID NO: 272945 - DNA, 25 bp, Artificial
  Probe
gcacgatggcaaggtggtctccacc

SEQ ID NO: 272946 - DNA, 25 bp, Artificial
  Probe
gcgcaccaagaactaaggctgctag

SEQ ID NO: 272947 - DNA, 25 bp, Artificial
  Probe
tcaatcatccagagatgtgacctcc

SEQ ID NO: 272948 - DNA, 25 bp, Artificial
  Probe
agctgaaccgcgagtggccaccaac

SEQ ID NO: 272949 - DNA, 25 bp, Artificial
  Probe
ccccaagacagagagctgaaccgcg

SEQ ID NO: 272950 - DNA, 25 bp, Artificial
  Probe
atccgcaccaaggtcatggatgtgc

SEQ ID NO: 272951 - DNA, 25 bp, Artificial
  Probe
cagatccgcaccaaggtcatggatg

SEQ ID NO: 272952 - DNA, 25 bp, Artificial
  Probe
aggtcatggatgtgcacgatggcaa

SEQ ID NO: 272953 - DNA, 25 bp, Artificial
  Probe
ccggcgcacgatgcagaacctggag

SEQ ID NO: 272954 - DNA, 25 bp, Artificial
  Probe
aggtcctgcgcaccaagaactaagg

SEQ ID NO: 272955 - DNA, 25 bp, Artificial
  Probe
tgaattctgtctctaagagctttac

SEQ ID NO: 272956 - DNA, 25 bp, Artificial
  Probe
gactcagctcctctggtgcagctct

SEQ ID NO: 272957 - DNA, 25 bp, Artificial
  Probe
tggtgcagctcttccaccatcaagt

SEQ ID NO: 272958 - DNA, 25 bp, Artificial
  Probe
acagcattggaggtgcttcagtgct

SEQ ID NO: 272959 - DNA, 25 bp, Artificial
  Probe
agcagtggactcagctcctctggtg

SEQ ID NO: 272960 - DNA, 25 bp, Artificial
  Probe
ctacaggccatgaattctgtctcta

SEQ ID NO: 272961 - DNA, 25 bp, Artificial
  Probe
catcagcagtggactcagctcctct

SEQ ID NO: 272962 - DNA, 25 bp, Artificial
  Probe
agtggactcagctcctctggtgcag

SEQ ID NO: 272963 - DNA, 25 bp, Artificial
  Probe
tggcagaggcatcagcagtggactc

SEQ ID NO: 272964 - DNA, 25 bp, Artificial
  Probe
gagctacaggccatgaattctgtct

SEQ ID NO: 272965 - DNA, 25 bp, Artificial
  Probe
ggtgcagctcttccaccatcaagta

SEQ ID NO: 272966 - DNA, 25 bp, Artificial
  Probe
tacaggccatgaattctgtctctaa

SEQ ID NO: 272967 - DNA, 25 bp, Artificial
  Probe
cagaggcatcagcagtggactcagc

SEQ ID NO: 272968 - DNA, 25 bp, Artificial
  Probe
agctacaggccatgaattctgtctc

SEQ ID NO: 272969 - DNA, 25 bp, Artificial
  Probe
ctccaccaggaagagctacaggcca

SEQ ID NO: 272970 - DNA, 25 bp, Artificial
  Probe
ggactcagctcctctggtgcagctc

SEQ ID NO: 272971 - DNA, 25 bp, Artificial
  Probe
atcagcagtggactcagctcctctg

SEQ ID NO: 272972 - DNA, 25 bp, Artificial
  Probe
gtgcagctcttccaccatcaagtac

SEQ ID NO: 272973 - DNA, 25 bp, Artificial
  Probe
ctggtgcagctcttccaccatcaag

SEQ ID NO: 272974 - DNA, 25 bp, Artificial
  Probe
tctggtgcagctcttccaccatcaa

SEQ ID NO: 272975 - DNA, 25 bp, Artificial
  Probe
cattggaggtgcttcagtgctggca

SEQ ID NO: 272976 - DNA, 25 bp, Artificial
  Probe
agaggcatcagcagtggactcagct

SEQ ID NO: 272977 - DNA, 25 bp, Artificial
  Probe
cacagcattggaggtgcttcagtgc

SEQ ID NO: 272978 - DNA, 25 bp, Artificial
  Probe
gcatcagcagtggactcagctcctc

SEQ ID NO: 272979 - DNA, 25 bp, Artificial
  Probe
aggaagagctacaggccatgaattc

SEQ ID NO: 272980 - DNA, 25 bp, Artificial
  Probe
atgaattctgtctctaagagcttta

SEQ ID NO: 272981 - DNA, 25 bp, Artificial
  Probe
gcagtggactcagctcctctggtgc

SEQ ID NO: 272982 - DNA, 25 bp, Artificial
  Probe
gtggactcagctcctctggtgcagc

SEQ ID NO: 272983 - DNA, 25 bp, Artificial
  Probe
tggactcagctcctctggtgcagct

SEQ ID NO: 272984 - DNA, 25 bp, Artificial
  Probe
actcagctcctctggtgcagctctt

SEQ ID NO: 272985 - DNA, 25 bp, Artificial
  Probe
gaggcatcagcagtggactcagctc

SEQ ID NO: 272986 - DNA, 25 bp, Artificial
  Probe
ccaccaggaagagctacaggccatg

SEQ ID NO: 272987 - DNA, 25 bp, Artificial
  Probe
ggcagaggcatcagcagtggactca

SEQ ID NO: 272988 - DNA, 25 bp, Artificial
  Probe
gccacagcattggaggtgcttcagt

SEQ ID NO: 272989 - DNA, 25 bp, Artificial
  Probe
tccaccaggaagagctacaggccat

SEQ ID NO: 272990 - DNA, 25 bp, Artificial
  Probe
cagcagtggactcagctcctctggt

SEQ ID NO: 272991 - DNA, 25 bp, Artificial
  Probe
tcagcagtggactcagctcctctgg

SEQ ID NO: 272992 - DNA, 25 bp, Artificial
  Probe
caccaggaagagctacaggccatga

SEQ ID NO: 272993 - DNA, 25 bp, Artificial
  Probe
gccatgaattctgtctctaagagct

SEQ ID NO: 272994 - DNA, 25 bp, Artificial
  Probe
caggccatgaattctgtctctaaga

SEQ ID NO: 272995 - DNA, 25 bp, Artificial
  Probe
catgaattctgtctctaagagcttt

SEQ ID NO: 272996 - DNA, 25 bp, Artificial
  Probe
gctacaggccatgaattctgtctct

SEQ ID NO: 272997 - DNA, 25 bp, Artificial
  Probe
aggcatcagcagtggactcagctcc

SEQ ID NO: 272998 - DNA, 25 bp, Artificial
  Probe
ggccatgaattctgtctctaagagc

SEQ ID NO: 272999 - DNA, 25 bp, Artificial
  Probe
aggccatgaattctgtctctaagag

SEQ ID NO: 273000 - DNA, 25 bp, Artificial
  Probe
ggcatcagcagtggactcagctcct

SEQ ID NO: 273001 - DNA, 25 bp, Artificial
  Probe
gtctcgggcccggtcccctgctcaa

SEQ ID NO: 273002 - DNA, 25 bp, Artificial
  Probe
aacacctaatttcagcgggacatca

SEQ ID NO: 273003 - DNA, 25 bp, Artificial
  Probe
cccagcagaaggtgcagatgccccg

SEQ ID NO: 273004 - DNA, 25 bp, Artificial
  Probe
acccagcagaaggtgcagatgcccc

SEQ ID NO: 273005 - DNA, 25 bp, Artificial
  Probe
cacctaatttcagcgggacatcaag

SEQ ID NO: 273006 - DNA, 25 bp, Artificial
  Probe
cctaatttcagcgggacatcaagtt

SEQ ID NO: 273007 - DNA, 25 bp, Artificial
  Probe
tgccccgcttggccgcccggtctcg

SEQ ID NO: 273008 - DNA, 25 bp, Artificial
  Probe
tcccctgctcaacacctaatttcag

SEQ ID NO: 273009 - DNA, 25 bp, Artificial
  Probe
cctgctcaacacctaatttcagcgg

SEQ ID NO: 273010 - DNA, 25 bp, Artificial
  Probe
acacctaatttcagcgggacatcaa

SEQ ID NO: 273011 - DNA, 25 bp, Artificial
  Probe
ccctgctcaacacctaatttcagcg

SEQ ID NO: 273012 - DNA, 25 bp, Artificial
  Probe
acctaatttcagcgggacatcaagt

SEQ ID NO: 273013 - DNA, 25 bp, Artificial
  Probe
aaggtgcagatgccccgcttggccg

SEQ ID NO: 273014 - DNA, 25 bp, Artificial
  Probe
aatttcagcgggacatcaagtttag

SEQ ID NO: 273015 - DNA, 25 bp, Artificial
  Probe
tgctcaacacctaatttcagcggga

SEQ ID NO: 273016 - DNA, 25 bp, Artificial
  Probe
ctcaacacctaatttcagcgggaca

SEQ ID NO: 273017 - DNA, 25 bp, Artificial
  Probe
caacacctaatttcagcgggacatc

SEQ ID NO: 273018 - DNA, 25 bp, Artificial
  Probe
gtgcagatgccccgcttggccgccc

SEQ ID NO: 273019 - DNA, 25 bp, Artificial
  Probe
ctcgggcccggtcccctgctcaaca

SEQ ID NO: 273020 - DNA, 25 bp, Artificial
  Probe
taatttcagcgggacatcaagttta

SEQ ID NO: 273021 - DNA, 25 bp, Artificial
  Probe
gcggacccagcagaaggtgcagatg

SEQ ID NO: 273022 - DNA, 25 bp, Artificial
  Probe
gccccgcttggccgcccggtctcgg

SEQ ID NO: 273023 - DNA, 25 bp, Artificial
  Probe
aggtgcagatgccccgcttggccgc

SEQ ID NO: 273024 - DNA, 25 bp, Artificial
  Probe
cccctgctcaacacctaatttcagc

SEQ ID NO: 273025 - DNA, 25 bp, Artificial
  Probe
ggacccagcagaaggtgcagatgcc

SEQ ID NO: 273026 - DNA, 25 bp, Artificial
  Probe
gaaggtgcagatgccccgcttggcc

SEQ ID NO: 273027 - DNA, 25 bp, Artificial
  Probe
cggacccagcagaaggtgcagatgc

SEQ ID NO: 273028 - DNA, 25 bp, Artificial
  Probe
agaaggtgcagatgccccgcttggc

SEQ ID NO: 273029 - DNA, 25 bp, Artificial
  Probe
ctgctcaacacctaatttcagcggg

SEQ ID NO: 273030 - DNA, 25 bp, Artificial
  Probe
tcaacacctaatttcagcgggacat

SEQ ID NO: 273031 - DNA, 25 bp, Artificial
  Probe
cagaaggtgcagatgccccgcttgg

SEQ ID NO: 273032 - DNA, 25 bp, Artificial
  Probe
gctcaacacctaatttcagcgggac

SEQ ID NO: 273033 - DNA, 25 bp, Artificial
  Probe
ctaatttcagcgggacatcaagttt

SEQ ID NO: 273034 - DNA, 25 bp, Artificial
  Probe
ggtgcagatgccccgcttggccgcc

SEQ ID NO: 273035 - DNA, 25 bp, Artificial
  Probe
tgcagatgccccgcttggccgcccg

SEQ ID NO: 273036 - DNA, 25 bp, Artificial
  Probe
gacccagcagaaggtgcagatgccc

SEQ ID NO: 273037 - DNA, 25 bp, Artificial
  Probe
atgagggtcacctcgatggacactc

SEQ ID NO: 273038 - DNA, 25 bp, Artificial
  Probe
ggatcaatggctttaacctcgggcg

SEQ ID NO: 273039 - DNA, 25 bp, Artificial
  Probe
ggacaccttcatccagtttcccgga

SEQ ID NO: 273040 - DNA, 25 bp, Artificial
  Probe
gagggtcacctcgatggacactcga

SEQ ID NO: 273041 - DNA, 25 bp, Artificial
  Probe
tcgatggacactcgaccttacgttc

SEQ ID NO: 273042 - DNA, 25 bp, Artificial
  Probe
acctcgggcgatactggcccacaaa

SEQ ID NO: 273043 - DNA, 25 bp, Artificial
  Probe
ctcgatggacactcgaccttacgtt

SEQ ID NO: 273044 - DNA, 25 bp, Artificial
  Probe
ctcgggcgatactggcccacaaagg

SEQ ID NO: 273045 - DNA, 25 bp, Artificial
  Probe
tcaatggctttaacctcgggcgata

SEQ ID NO: 273046 - DNA, 25 bp, Artificial
  Probe
gtcacctcgatggacactcgacctt

SEQ ID NO: 273047 - DNA, 25 bp, Artificial
  Probe
tttacgtgggcaacttctccatccc

SEQ ID NO: 273048 - DNA, 25 bp, Artificial
  Probe
gacaccttcatccagtttcccggat

SEQ ID NO: 273049 - DNA, 25 bp, Artificial
  Probe
tgccgcaggacaccttcatccagtt

SEQ ID NO: 273050 - DNA, 25 bp, Artificial
  Probe
gatgagggtcacctcgatggacact

SEQ ID NO: 273051 - DNA, 25 bp, Artificial
  Probe
acctcgatggacactcgaccttacg

SEQ ID NO: 273052 - DNA, 25 bp, Artificial
  Probe
gatggacactcgaccttacgttctt

SEQ ID NO: 273053 - DNA, 25 bp, Artificial
  Probe
catcttgggaactgggagcccgctg

SEQ ID NO: 273054 - DNA, 25 bp, Artificial
  Probe
gggtcacctcgatggacactcgacc

SEQ ID NO: 273055 - DNA, 25 bp, Artificial
  Probe
tggatcaatggctttaacctcgggc

SEQ ID NO: 273056 - DNA, 25 bp, Artificial
  Probe
ggtcacctcgatggacactcgacct

SEQ ID NO: 273057 - DNA, 25 bp, Artificial
  Probe
ggacactcgaccttacgttcttcaa

SEQ ID NO: 273058 - DNA, 25 bp, Artificial
  Probe
cccaagggccaagtatggatcaatg

SEQ ID NO: 273059 - DNA, 25 bp, Artificial
  Probe
aggacaccttcatccagtttcccgg

SEQ ID NO: 273060 - DNA, 25 bp, Artificial
  Probe
gatcaatggctttaacctcgggcga

SEQ ID NO: 273061 - DNA, 25 bp, Artificial
  Probe
cctcgggcgatactggcccacaaag

SEQ ID NO: 273062 - DNA, 25 bp, Artificial
  Probe
cgatggacactcgaccttacgttct

SEQ ID NO: 273063 - DNA, 25 bp, Artificial
  Probe
ctgatgagggtcacctcgatggaca

SEQ ID NO: 273064 - DNA, 25 bp, Artificial
  Probe
ggcccaagggccaagtatggatcaa

SEQ ID NO: 273065 - DNA, 25 bp, Artificial
  Probe
caccttcatccagtttcccggatgg

SEQ ID NO: 273066 - DNA, 25 bp, Artificial
  Probe
cgctgatgagggtcacctcgatgga

SEQ ID NO: 273067 - DNA, 25 bp, Artificial
  Probe
atggctttaacctcgggcgatactg

SEQ ID NO: 273068 - DNA, 25 bp, Artificial
  Probe
cccggatggcccaagggccaagtat

SEQ ID NO: 273069 - DNA, 25 bp, Artificial
  Probe
caatggctttaacctcgggcgatac

SEQ ID NO: 273070 - DNA, 25 bp, Artificial
  Probe
cctcgatggacactcgaccttacgt

SEQ ID NO: 273071 - DNA, 25 bp, Artificial
  Probe
ccggatggcccaagggccaagtatg

SEQ ID NO: 273072 - DNA, 25 bp, Artificial
  Probe
atggacactcgaccttacgttcttc

SEQ ID NO: 273073 - DNA, 25 bp, Artificial
  Probe
gctgatgagggtcacctcgatggac

SEQ ID NO: 273074 - DNA, 25 bp, Artificial
  Probe
agggtcacctcgatggacactcgac

SEQ ID NO: 273075 - DNA, 25 bp, Artificial
  Probe
tcacctcgatggacactcgacctta

SEQ ID NO: 273076 - DNA, 25 bp, Artificial
  Probe
aatggctttaacctcgggcgatact

SEQ ID NO: 273077 - DNA, 25 bp, Artificial
  Probe
accttcatccagtttcccggatggc

SEQ ID NO: 273078 - DNA, 25 bp, Artificial
  Probe
gcccaagggccaagtatggatcaat

SEQ ID NO: 273079 - DNA, 25 bp, Artificial
  Probe
tgagggtcacctcgatggacactcg

SEQ ID NO: 273080 - DNA, 25 bp, Artificial
  Probe
taacctcgggcgatactggcccaca

SEQ ID NO: 273081 - DNA, 25 bp, Artificial
  Probe
gccgcaggacaccttcatccagttt

SEQ ID NO: 273082 - DNA, 25 bp, Artificial
  Probe
ttttacgtgggcaacttctccatcc

SEQ ID NO: 273083 - DNA, 25 bp, Artificial
  Probe
gacaagtttgcgaaggccaaagagt

SEQ ID NO: 273084 - DNA, 25 bp, Artificial
  Probe
cgttggagccgctgattactcatgt

SEQ ID NO: 273085 - DNA, 25 bp, Artificial
  Probe
ttcagcatgcggtgtaagcgtcatt

SEQ ID NO: 273086 - DNA, 25 bp, Artificial
  Probe
acaagtttgcgaaggccaaagagtt

SEQ ID NO: 273087 - DNA, 25 bp, Artificial
  Probe
ttctccaggagatgactgatggagg

SEQ ID NO: 273088 - DNA, 25 bp, Artificial
  Probe
taagcgtcattgtcggggtgcctcc

SEQ ID NO: 273089 - DNA, 25 bp, Artificial
  Probe
agtttccgttggagccgctgattac

SEQ ID NO: 273090 - DNA, 25 bp, Artificial
  Probe
caaagacaagtttgcgaaggccaaa

SEQ ID NO: 273091 - DNA, 25 bp, Artificial
  Probe
catttgacctgctccgtgctggaaa

SEQ ID NO: 273092 - DNA, 25 bp, Artificial
  Probe
ccatccaggaagttctccaggagat

SEQ ID NO: 273093 - DNA, 25 bp, Artificial
  Probe
gagaacacatgaatgccttcccggt

SEQ ID NO: 273094 - DNA, 25 bp, Artificial
  Probe
agaacacatgaatgccttcccggtt

SEQ ID NO: 273095 - DNA, 25 bp, Artificial
  Probe
caaacccatccaggaagttctccag

SEQ ID NO: 273096 - DNA, 25 bp, Artificial
  Probe
aggaagttctccaggagatgactga

SEQ ID NO: 273097 - DNA, 25 bp, Artificial
  Probe
gcatgcggtgtaagcgtcattgtcg

SEQ ID NO: 273098 - DNA, 25 bp, Artificial
  Probe
taaatgaagcatttgacctgctccg

SEQ ID NO: 273099 - DNA, 25 bp, Artificial
  Probe
tgacttcatggctaagaagtttccg

SEQ ID NO: 273100 - DNA, 25 bp, Artificial
  Probe
acatgaatgccttcccggtttctga

SEQ ID NO: 273101 - DNA, 25 bp, Artificial
  Probe
tgttaagctgccattcagcatgcgg

SEQ ID NO: 273102 - DNA, 25 bp, Artificial
  Probe
ttgtcgctgacttcatggctaagaa

SEQ ID NO: 273103 - DNA, 25 bp, Artificial
  Probe
agaagtttccgttggagccgctgat

SEQ ID NO: 273104 - DNA, 25 bp, Artificial
  Probe
tgacttctgccctgttaagctgcca

SEQ ID NO: 273105 - DNA, 25 bp, Artificial
  Probe
tgccattcagcatgcggtgtaagcg

SEQ ID NO: 273106 - DNA, 25 bp, Artificial
  Probe
tggagccgctgattactcatgtttt

SEQ ID NO: 273107 - DNA, 25 bp, Artificial
  Probe
ctgccattcagcatgcggtgtaagc

SEQ ID NO: 273108 - DNA, 25 bp, Artificial
  Probe
catttgaagtcattggccgtcttga

SEQ ID NO: 273109 - DNA, 25 bp, Artificial
  Probe
atccaggaagttctccaggagatga

SEQ ID NO: 273110 - DNA, 25 bp, Artificial
  Probe
tcattgtcggggtgcctcccagtgc

SEQ ID NO: 273111 - DNA, 25 bp, Artificial
  Probe
cttctgccctgttaagctgccattc

SEQ ID NO: 273112 - DNA, 25 bp, Artificial
  Probe
gaatcaagcgccagccacatcacaa

SEQ ID NO: 273113 - DNA, 25 bp, Artificial
  Probe
acccatccaggaagttctccaggag

SEQ ID NO: 273114 - DNA, 25 bp, Artificial
  Probe
gacctgctccgtgctggaaagagta

SEQ ID NO: 273115 - DNA, 25 bp, Artificial
  Probe
cgttaaccccatgtcgctgctgctg

SEQ ID NO: 273116 - DNA, 25 bp, Artificial
  Probe
tgtaagcgtcattgtcggggtgcct

SEQ ID NO: 273117 - DNA, 25 bp, Artificial
  Probe
aaacttgtcgctgacttcatggcta

SEQ ID NO: 273118 - DNA, 25 bp, Artificial
  Probe
gccactgactgtatcaaccctcaag

SEQ ID NO: 273119 - DNA, 25 bp, Artificial
  Probe
tgacctgctccgtgctggaaagagt

SEQ ID NO: 273120 - DNA, 25 bp, Artificial
  Probe
acttcatggctaagaagtttccgtt

SEQ ID NO: 273121 - DNA, 25 bp, Artificial
  Probe
aacttgtcgctgacttcatggctaa

SEQ ID NO: 273122 - DNA, 25 bp, Artificial
  Probe
gccgctgattactcatgttttacct

SEQ ID NO: 273123 - DNA, 25 bp, Artificial
  Probe
tgagaacacatgaatgccttcccgg

SEQ ID NO: 273124 - DNA, 25 bp, Artificial
  Probe
tcaacaaagacaagtttgcgaaggc

SEQ ID NO: 273125 - DNA, 25 bp, Artificial
  Probe
aaacccatccaggaagttctccagg

SEQ ID NO: 273126 - DNA, 25 bp, Artificial
  Probe
gccctgttaagctgccattcagcat

SEQ ID NO: 273127 - DNA, 25 bp, Artificial
  Probe
gtgccactgactgtatcaaccctca

SEQ ID NO: 273128 - DNA, 25 bp, Artificial
  Probe
ggacttttcatttgaagtcattggc

SEQ ID NO: 273129 - DNA, 25 bp, Artificial
  Probe
cactggcggctgtccagccagttct

SEQ ID NO: 273130 - DNA, 25 bp, Artificial
  Probe
gggaacccttacaccgcacacgaga

SEQ ID NO: 273131 - DNA, 25 bp, Artificial
  Probe
gtgtcttaacacctgctctgagcag

SEQ ID NO: 273132 - DNA, 25 bp, Artificial
  Probe
ctcacggtgtcttaacacctgctct

SEQ ID NO: 273133 - DNA, 25 bp, Artificial
  Probe
tacagtctacagttggcagagaaag

SEQ ID NO: 273134 - DNA, 25 bp, Artificial
  Probe
cttacaccgcacacgagacaagaga

SEQ ID NO: 273135 - DNA, 25 bp, Artificial
  Probe
tgcctggcttcatttttggaaaatc

SEQ ID NO: 273136 - DNA, 25 bp, Artificial
  Probe
tcaacaagtctcacggtgtcttaac

SEQ ID NO: 273137 - DNA, 25 bp, Artificial
  Probe
aaattgcctggcttcatttttggaa

SEQ ID NO: 273138 - DNA, 25 bp, Artificial
  Probe
cacctgctctgagcagagtgggctc

SEQ ID NO: 273139 - DNA, 25 bp, Artificial
  Probe
accgcacacgagacaagagatggag

SEQ ID NO: 273140 - DNA, 25 bp, Artificial
  Probe
actcgaactcgctgagctagaggac

SEQ ID NO: 273141 - DNA, 25 bp, Artificial
  Probe
agtctcacggtgtcttaacacctgc

SEQ ID NO: 273142 - DNA, 25 bp, Artificial
  Probe
tgtccagccagttcttcagtatggg

SEQ ID NO: 273143 - DNA, 25 bp, Artificial
  Probe
acagtctacagttggcagagaaaga

SEQ ID NO: 273144 - DNA, 25 bp, Artificial
  Probe
agttacagtctacagttggcagaga

SEQ ID NO: 273145 - DNA, 25 bp, Artificial
  Probe
tctacagttggcagagaaagacaaa

SEQ ID NO: 273146 - DNA, 25 bp, Artificial
  Probe
gtatgggaacccttacaccgcacac

SEQ ID NO: 273147 - DNA, 25 bp, Artificial
  Probe
cagagccctcaacaagtctcacggt

SEQ ID NO: 273148 - DNA, 25 bp, Artificial
  Probe
caagtctcacggtgtcttaacacct

SEQ ID NO: 273149 - DNA, 25 bp, Artificial
  Probe
cagttacagtctacagttggcagag

SEQ ID NO: 273150 - DNA, 25 bp, Artificial
  Probe
tctctcaagggagaaggaacttaca

SEQ ID NO: 273151 - DNA, 25 bp, Artificial
  Probe
catttttggaaaatctctcaaggga

SEQ ID NO: 273152 - DNA, 25 bp, Artificial
  Probe
cagccagttcttcagtatgggaacc

SEQ ID NO: 273153 - DNA, 25 bp, Artificial
  Probe
atctctcaagggagaaggaacttac

SEQ ID NO: 273154 - DNA, 25 bp, Artificial
  Probe
ccctcaacaagtctcacggtgtctt

SEQ ID NO: 273155 - DNA, 25 bp, Artificial
  Probe
tggcttcatttttggaaaatctctc

SEQ ID NO: 273156 - DNA, 25 bp, Artificial
  Probe
cagttcttcagtatgggaaccctta

SEQ ID NO: 273157 - DNA, 25 bp, Artificial
  Probe
gcacacgagacaagagatggagcag

SEQ ID NO: 273158 - DNA, 25 bp, Artificial
  Probe
ctggcggctgtccagccagttcttc

SEQ ID NO: 273159 - DNA, 25 bp, Artificial
  Probe
cgctgagctagaggacagttacagt

SEQ ID NO: 273160 - DNA, 25 bp, Artificial
  Probe
cttcagtatgggaacccttacaccg

SEQ ID NO: 273161 - DNA, 25 bp, Artificial
  Probe
tatgggaacccttacaccgcacacg

SEQ ID NO: 273162 - DNA, 25 bp, Artificial
  Probe
tgctctgagcagagtgggctcctcc

SEQ ID NO: 273163 - DNA, 25 bp, Artificial
  Probe
actggcggctgtccagccagttctt

SEQ ID NO: 273164 - DNA, 25 bp, Artificial
  Probe
ttcagtatgggaacccttacaccgc

SEQ ID NO: 273165 - DNA, 25 bp, Artificial
  Probe
aggacagttacagtctacagttggc

SEQ ID NO: 273166 - DNA, 25 bp, Artificial
  Probe
gaactcgctgagctagaggacagtt

SEQ ID NO: 273167 - DNA, 25 bp, Artificial
  Probe
atggaaggccagagccctcaacaag

SEQ ID NO: 273168 - DNA, 25 bp, Artificial
  Probe
aacacctgctctgagcagagtgggc

SEQ ID NO: 273169 - DNA, 25 bp, Artificial
  Probe
ttaacacctgctctgagcagagtgg

SEQ ID NO: 273170 - DNA, 25 bp, Artificial
  Probe
ttcatttttggaaaatctctcaagg

SEQ ID NO: 273171 - DNA, 25 bp, Artificial
  Probe
ctacagttggcagagaaagacaaag

SEQ ID NO: 273172 - DNA, 25 bp, Artificial
  Probe
aaatggaaggccagagccctcaaca

SEQ ID NO: 273173 - DNA, 25 bp, Artificial
  Probe
gtaaaactcgaactcgctgagctag

SEQ ID NO: 273174 - DNA, 25 bp, Artificial
  Probe
aggccagagccctcaacaagtctca

SEQ ID NO: 273175 - DNA, 25 bp, Artificial
  Probe
gacagatatcacagagctccggcgc

SEQ ID NO: 273176 - DNA, 25 bp, Artificial
  Probe
gccctgcagctgcaacagatccagg

SEQ ID NO: 273177 - DNA, 25 bp, Artificial
  Probe
ccaggctctcatcagcagcatcgag

SEQ ID NO: 273178 - DNA, 25 bp, Artificial
  Probe
cctgcagctgcaacagatccaggct

SEQ ID NO: 273179 - DNA, 25 bp, Artificial
  Probe
ggaatacaagatgctgctggacatc

SEQ ID NO: 273180 - DNA, 25 bp, Artificial
  Probe
tgctgctggacatcaaaacacggct

SEQ ID NO: 273181 - DNA, 25 bp, Artificial
  Probe
agccggcctggaaagtaccttggca

SEQ ID NO: 273182 - DNA, 25 bp, Artificial
  Probe
agatgctgctggacatcaaaacacg

SEQ ID NO: 273183 - DNA, 25 bp, Artificial
  Probe
tgcaacagatccaggctctcatcag

SEQ ID NO: 273184 - DNA, 25 bp, Artificial
  Probe
cggcgcacactccagggcctggaga

SEQ ID NO: 273185 - DNA, 25 bp, Artificial
  Probe
agctgcaacagatccaggctctcat

SEQ ID NO: 273186 - DNA, 25 bp, Artificial
  Probe
atacaagatgctgctggacatcaaa

SEQ ID NO: 273187 - DNA, 25 bp, Artificial
  Probe
gcagagacggagtgccgctacgccc

SEQ ID NO: 273188 - DNA, 25 bp, Artificial
  Probe
tccaggctctcatcagcagcatcga

SEQ ID NO: 273189 - DNA, 25 bp, Artificial
  Probe
gaccagcaagacagatatcacagag

SEQ ID NO: 273190 - DNA, 25 bp, Artificial
  Probe
ggcgcacactccagggcctggagat

SEQ ID NO: 273191 - DNA, 25 bp, Artificial
  Probe
aagtaccttggcagagacggagtgc

SEQ ID NO: 273192 - DNA, 25 bp, Artificial
  Probe
gagaccagcaagacagatatcacag

SEQ ID NO: 273193 - DNA, 25 bp, Artificial
  Probe
cagctgcaacagatccaggctctca

SEQ ID NO: 273194 - DNA, 25 bp, Artificial
  Probe
gcagctgcaacagatccaggctctc

SEQ ID NO: 273195 - DNA, 25 bp, Artificial
  Probe
ccagggcctggagattgagctgcaa

SEQ ID NO: 273196 - DNA, 25 bp, Artificial
  Probe
gatccaggctctcatcagcagcatc

SEQ ID NO: 273197 - DNA, 25 bp, Artificial
  Probe
tctcatcagcagcatcgaggcccag

SEQ ID NO: 273198 - DNA, 25 bp, Artificial
  Probe
aggagaccagcaagacagatatcac

SEQ ID NO: 273199 - DNA, 25 bp, Artificial
  Probe
agtaccttggcagagacggagtgcc

SEQ ID NO: 273200 - DNA, 25 bp, Artificial
  Probe
aggctctcatcagcagcatcgaggc

SEQ ID NO: 273201 - DNA, 25 bp, Artificial
  Probe
ctccagggcctggagattgagctgc

SEQ ID NO: 273202 - DNA, 25 bp, Artificial
  Probe
gatatcacagagctccggcgcacac

SEQ ID NO: 273203 - DNA, 25 bp, Artificial
  Probe
atgctaagatgactggcttcaacac

SEQ ID NO: 273204 - DNA, 25 bp, Artificial
  Probe
agaccagcaagacagatatcacaga

SEQ ID NO: 273205 - DNA, 25 bp, Artificial
  Probe
aatcccagctgagcatgaaagccgg

SEQ ID NO: 273206 - DNA, 25 bp, Artificial
  Probe
atatcacagagctccggcgcacact

SEQ ID NO: 273207 - DNA, 25 bp, Artificial
  Probe
acagatccaggctctcatcagcagc

SEQ ID NO: 273208 - DNA, 25 bp, Artificial
  Probe
caagatgctgctggacatcaaaaca

SEQ ID NO: 273209 - DNA, 25 bp, Artificial
  Probe
atcccagctgagcatgaaagccggc

SEQ ID NO: 273210 - DNA, 25 bp, Artificial
  Probe
tgaaagccggcctggaaagtacctt

SEQ ID NO: 273211 - DNA, 25 bp, Artificial
  Probe
gccggcctggaaagtaccttggcag

SEQ ID NO: 273212 - DNA, 25 bp, Artificial
  Probe
gaaagccggcctggaaagtaccttg

SEQ ID NO: 273213 - DNA, 25 bp, Artificial
  Probe
aagacagatatcacagagctccggc

SEQ ID NO: 273214 - DNA, 25 bp, Artificial
  Probe
gatgctgctggacatcaaaacacgg

SEQ ID NO: 273215 - DNA, 25 bp, Artificial
  Probe
cactccagggcctggagattgagct

SEQ ID NO: 273216 - DNA, 25 bp, Artificial
  Probe
cctggaaagtaccttggcagagacg

SEQ ID NO: 273217 - DNA, 25 bp, Artificial
  Probe
cgaggagaccagcaagacagatatc

SEQ ID NO: 273218 - DNA, 25 bp, Artificial
  Probe
gctacgccctgcagctgcaacagat

SEQ ID NO: 273219 - DNA, 25 bp, Artificial
  Probe
aatacaagatgctgctggacatcaa

SEQ ID NO: 273220 - DNA, 25 bp, Artificial
  Probe
acagatatcacagagctccggcgca

SEQ ID NO: 273221 - DNA, 25 bp, Artificial
  Probe
cacctgctcaccaacaaggtgcagt

SEQ ID NO: 273222 - DNA, 25 bp, Artificial
  Probe
attcccacgtaccttctcaaggatg

SEQ ID NO: 273223 - DNA, 25 bp, Artificial
  Probe
cttgtcaccccgaattgagcatgcc

SEQ ID NO: 273224 - DNA, 25 bp, Artificial
  Probe
caggtgtaccccaagttgtacttgt

SEQ ID NO: 273225 - DNA, 25 bp, Artificial
  Probe
accccgaattgagcatgccctcggg

SEQ ID NO: 273226 - DNA, 25 bp, Artificial
  Probe
agtgtgccacctgctcaccaacaag

SEQ ID NO: 273227 - DNA, 25 bp, Artificial
  Probe
gttgtacttgtcaccccgaattgag

SEQ ID NO: 273228 - DNA, 25 bp, Artificial
  Probe
agaagatgtggctctcctttctgtc

SEQ ID NO: 273229 - DNA, 25 bp, Artificial
  Probe
gccacccaggtgtaccccaagttgt

SEQ ID NO: 273230 - DNA, 25 bp, Artificial
  Probe
gatgtaaacgaagatcccggagaag

SEQ ID NO: 273231 - DNA, 25 bp, Artificial
  Probe
aggatgtctcattgattatgtgcct

SEQ ID NO: 273232 - DNA, 25 bp, Artificial
  Probe
gttaccagtagatttcagcaacatt

SEQ ID NO: 273233 - DNA, 25 bp, Artificial
  Probe
gacgctcctggaagagcctcagtat

SEQ ID NO: 273234 - DNA, 25 bp, Artificial
  Probe
caaggctatcacaaaagaagagagt

SEQ ID NO: 273235 - DNA, 25 bp, Artificial
  Probe
caacaaggtgcagtatgtgattcaa

SEQ ID NO: 273236 - DNA, 25 bp, Artificial
  Probe
ctttggcacaggtgtcgtggaatat

SEQ ID NO: 273237 - DNA, 25 bp, Artificial
  Probe
tctgttgaagttaccagtagatttc

SEQ ID NO: 273238 - DNA, 25 bp, Artificial
  Probe
tcagctttgaggatactgaagccac

SEQ ID NO: 273239 - DNA, 25 bp, Artificial
  Probe
agcctcagtatggagagaacatgga

SEQ ID NO: 273240 - DNA, 25 bp, Artificial
  Probe
actggtgaattttcagctcgttttc

SEQ ID NO: 273241 - DNA, 25 bp, Artificial
  Probe
acaactggactggtgaattttcagc

SEQ ID NO: 273242 - DNA, 25 bp, Artificial
  Probe
catatccctgcttttccaggaggag

SEQ ID NO: 273243 - DNA, 25 bp, Artificial
  Probe
cttctcaaggatgtaaacgaagatc

SEQ ID NO: 273244 - DNA, 25 bp, Artificial
  Probe
aaacttacactgctgctgatgtgga

SEQ ID NO: 273245 - DNA, 25 bp, Artificial
  Probe
tgtaccccaagttgtacttgtcacc

SEQ ID NO: 273246 - DNA, 25 bp, Artificial
  Probe
aagtgtgccacctgctcaccaacaa

SEQ ID NO: 273247 - DNA, 25 bp, Artificial
  Probe
gatgcagaaggcttcacaaaactta

SEQ ID NO: 273248 - DNA, 25 bp, Artificial
  Probe
caactggactggtgaattttcagct

SEQ ID NO: 273249 - DNA, 25 bp, Artificial
  Probe
cacaaaacttacactgctgctgatg

SEQ ID NO: 273250 - DNA, 25 bp, Artificial
  Probe
cctggaagagcctcagtatggagag

SEQ ID NO: 273251 - DNA, 25 bp, Artificial
  Probe
gatactgaagccacccaggtgtacc

SEQ ID NO: 273252 - DNA, 25 bp, Artificial
  Probe
cgaagatcccggagaagatgtggct

SEQ ID NO: 273253 - DNA, 25 bp, Artificial
  Probe
gtgcctcaagtgtgccacctgctca

SEQ ID NO: 273254 - DNA, 25 bp, Artificial
  Probe
gcacaggtgtcgtggaatatgatgc

SEQ ID NO: 273255 - DNA, 25 bp, Artificial
  Probe
aagttaccagtagatttcagcaaca

SEQ ID NO: 273256 - DNA, 25 bp, Artificial
  Probe
atcccggagaagatgtggctctcct

SEQ ID NO: 273257 - DNA, 25 bp, Artificial
  Probe
tgtaaacgaagatcccggagaagat

SEQ ID NO: 273258 - DNA, 25 bp, Artificial
  Probe
cgttttctgttgaagttaccagtag

SEQ ID NO: 273259 - DNA, 25 bp, Artificial
  Probe
agtagatttcagcaacattcccacg

SEQ ID NO: 273260 - DNA, 25 bp, Artificial
  Probe
ccgtgagagctcacgcctcatgttt

SEQ ID NO: 273261 - DNA, 25 bp, Artificial
  Probe
cacaggtgtcgtggaatatgatgca

SEQ ID NO: 273262 - DNA, 25 bp, Artificial
  Probe
gtagatttcagcaacattcccacgt

SEQ ID NO: 273263 - DNA, 25 bp, Artificial
  Probe
agagtacatcgctgctttcctcagt

SEQ ID NO: 273264 - DNA, 25 bp, Artificial
  Probe
gtgattcaaggctatcacaaaagaa

SEQ ID NO: 273265 - DNA, 25 bp, Artificial
  Probe
ccaagttgtacttgtcaccccgaat

SEQ ID NO: 273266 - DNA, 25 bp, Artificial
  Probe
ctccatatccctgcttttccaggag

SEQ ID NO: 273267 - DNA, 25 bp, Artificial
  Probe
tttctccatggctgtcaggggcaac

SEQ ID NO: 273268 - DNA, 25 bp, Artificial
  Probe
tcctagcagagtgtgatacagtgga

SEQ ID NO: 273269 - DNA, 25 bp, Artificial
  Probe
catccagcagggttttctggctaag

SEQ ID NO: 273270 - DNA, 25 bp, Artificial
  Probe
ctctgcagacttgataggaaaataa

SEQ ID NO: 273271 - DNA, 25 bp, Artificial
  Probe
attgacacaatggtcctaccagaaa

SEQ ID NO: 273272 - DNA, 25 bp, Artificial
  Probe
caattgagcaattcatgaagatctt

SEQ ID NO: 273273 - DNA, 25 bp, Artificial
  Probe
cagcagggttttctggctaaggaat

SEQ ID NO: 273274 - DNA, 25 bp, Artificial
  Probe
taaagagctttctgacatccagcag

SEQ ID NO: 273275 - DNA, 25 bp, Artificial
  Probe
gctgtcaggggcaactagccaaatg

SEQ ID NO: 273276 - DNA, 25 bp, Artificial
  Probe
gttttctggctaaggaattacaagc

SEQ ID NO: 273277 - DNA, 25 bp, Artificial
  Probe
aagagctttctgacatccagcaggg

SEQ ID NO: 273278 - DNA, 25 bp, Artificial
  Probe
tccgtcggttctcaatgaaaaagta

SEQ ID NO: 273279 - DNA, 25 bp, Artificial
  Probe
gggcaactagccaaatgtaaatttc

SEQ ID NO: 273280 - DNA, 25 bp, Artificial
  Probe
tcaggggcaactagccaaatgtaaa

SEQ ID NO: 273281 - DNA, 25 bp, Artificial
  Probe
taaaggccacaattgagcaattcat

SEQ ID NO: 273282 - DNA, 25 bp, Artificial
  Probe
accacctggaagagttgaataaaga

SEQ ID NO: 273283 - DNA, 25 bp, Artificial
  Probe
gagaagacagctaaccacctggaag

SEQ ID NO: 273284 - DNA, 25 bp, Artificial
  Probe
tctccatggctgtcaggggcaacta

SEQ ID NO: 273285 - DNA, 25 bp, Artificial
  Probe
agattgacacaatggtcctaccaga

SEQ ID NO: 273286 - DNA, 25 bp, Artificial
  Probe
gacacaatggtcctaccagaaaact

SEQ ID NO: 273287 - DNA, 25 bp, Artificial
  Probe
ctcctccgtcggttctcaatgaaaa

SEQ ID NO: 273288 - DNA, 25 bp, Artificial
  Probe
cgtcggttctcaatgaaaaagtact

SEQ ID NO: 273289 - DNA, 25 bp, Artificial
  Probe
aattacaagcggaggctctctgcag

SEQ ID NO: 273290 - DNA, 25 bp, Artificial
  Probe
agcggaggctctctgcagacttgat

SEQ ID NO: 273291 - DNA, 25 bp, Artificial
  Probe
agagcaatccagaagaagaggctga

SEQ ID NO: 273292 - DNA, 25 bp, Artificial
  Probe
acaagcggaggctctctgcagactt

SEQ ID NO: 273293 - DNA, 25 bp, Artificial
  Probe
cacaattgagcaattcatgaagatc

SEQ ID NO: 273294 - DNA, 25 bp, Artificial
  Probe
cttgtttctccatggctgtcagggg

SEQ ID NO: 273295 - DNA, 25 bp, Artificial
  Probe
tttctgacatccagcagggttttct

SEQ ID NO: 273296 - DNA, 25 bp, Artificial
  Probe
aaaggttcaggtgttcctagcagag

SEQ ID NO: 273297 - DNA, 25 bp, Artificial
  Probe
actttaaagacagcaggctaaaaag

SEQ ID NO: 273298 - DNA, 25 bp, Artificial
  Probe
ctgacatccagcagggttttctggc

SEQ ID NO: 273299 - DNA, 25 bp, Artificial
  Probe
caatccagaagaagaggctgagttg

SEQ ID NO: 273300 - DNA, 25 bp, Artificial
  Probe
gcttgtttctccatggctgtcaggg

SEQ ID NO: 273301 - DNA, 25 bp, Artificial
  Probe
tccatggctgtcaggggcaactagc

SEQ ID NO: 273302 - DNA, 25 bp, Artificial
  Probe
aggttcaggtgttcctagcagagtg

SEQ ID NO: 273303 - DNA, 25 bp, Artificial
  Probe
ggcaactagccaaatgtaaatttcc

SEQ ID NO: 273304 - DNA, 25 bp, Artificial
  Probe
tgcttgtttctccatggctgtcagg

SEQ ID NO: 273305 - DNA, 25 bp, Artificial
  Probe
ttctccatggctgtcaggggcaact

SEQ ID NO: 273306 - DNA, 25 bp, Artificial
  Probe
ccacctggaagagttgaataaagag

SEQ ID NO: 273307 - DNA, 25 bp, Artificial
  Probe
cggaggctctctgcagacttgatag

SEQ ID NO: 273308 - DNA, 25 bp, Artificial
  Probe
aagagcaatccagaagaagaggctg

SEQ ID NO: 273309 - DNA, 25 bp, Artificial
  Probe
aggccacaattgagcaattcatgaa

SEQ ID NO: 273310 - DNA, 25 bp, Artificial
  Probe
ctttaaagacagcaggctaaaaagg

SEQ ID NO: 273311 - DNA, 25 bp, Artificial
  Probe
tgccaagagacagagcggctgcagt

SEQ ID NO: 273312 - DNA, 25 bp, Artificial
  Probe
tttctggctaaggaattacaagcgg

SEQ ID NO: 273313 - DNA, 25 bp, Artificial
  Probe
agaatgagggcttttctctgacagc

SEQ ID NO: 273314 - DNA, 25 bp, Artificial
  Probe
tagacaaggcttgtgagcctggagt

SEQ ID NO: 273315 - DNA, 25 bp, Artificial
  Probe
atgatccttgacatctgcaccaggt

SEQ ID NO: 273316 - DNA, 25 bp, Artificial
  Probe
cctgagacagccaagaagccccagg

SEQ ID NO: 273317 - DNA, 25 bp, Artificial
  Probe
ctcaacgacgaaagatactacggag

SEQ ID NO: 273318 - DNA, 25 bp, Artificial
  Probe
cccaactgtgtttcgcctgctatgg

SEQ ID NO: 273319 - DNA, 25 bp, Artificial
  Probe
gactacgtgtacaagaccaagctaa

SEQ ID NO: 273320 - DNA, 25 bp, Artificial
  Probe
tccaccagttctttaacgtgggact

SEQ ID NO: 273321 - DNA, 25 bp, Artificial
  Probe
cagctacatcattgggaaggacacg

SEQ ID NO: 273322 - DNA, 25 bp, Artificial
  Probe
acctcagggtcaccataaaaccagc

SEQ ID NO: 273323 - DNA, 25 bp, Artificial
  Probe
aacgaaggttcatcagccacgtcaa

SEQ ID NO: 273324 - DNA, 25 bp, Artificial
  Probe
ggaatgctgagcaagctgtgccaca

SEQ ID NO: 273325 - DNA, 25 bp, Artificial
  Probe
agaagccccaggatgccaagagttc

SEQ ID NO: 273326 - DNA, 25 bp, Artificial
  Probe
tctcctgagatcagaagagaccaag

SEQ ID NO: 273327 - DNA, 25 bp, Artificial
  Probe
atccggagaaggacgatggaatgct

SEQ ID NO: 273328 - DNA, 25 bp, Artificial
  Probe
gcctgtccttcaaagtccaccagtt

SEQ ID NO: 273329 - DNA, 25 bp, Artificial
  Probe
tccccaactgtgtttcgcctgctat

SEQ ID NO: 273330 - DNA, 25 bp, Artificial
  Probe
gcatcagtcacaggatcaggtcagc

SEQ ID NO: 273331 - DNA, 25 bp, Artificial
  Probe
ctagaaaagatctcacactccgaag

SEQ ID NO: 273332 - DNA, 25 bp, Artificial
  Probe
gtggttttcggctgccccaactgac

SEQ ID NO: 273333 - DNA, 25 bp, Artificial
  Probe
ggaagcagtacctcatgtggggcct

SEQ ID NO: 273334 - DNA, 25 bp, Artificial
  Probe
aaaggccaaggcacactgtcggtgg

SEQ ID NO: 273335 - DNA, 25 bp, Artificial
  Probe
ctgacagccaaaggaaaaggccaag

SEQ ID NO: 273336 - DNA, 25 bp, Artificial
  Probe
acgatggaatgctgagcaagctgtg

SEQ ID NO: 273337 - DNA, 25 bp, Artificial
  Probe
ggtggctatggctccacgcaggcta

SEQ ID NO: 273338 - DNA, 25 bp, Artificial
  Probe
gggtcggtcaaggtctactcctact

SEQ ID NO: 273339 - DNA, 25 bp, Artificial
  Probe
aagagaccaagcagaatgagggctt

SEQ ID NO: 273340 - DNA, 25 bp, Artificial
  Probe
attttgatgagtacatcatgaccat

SEQ ID NO: 273341 - DNA, 25 bp, Artificial
  Probe
atcagaagaaccagaaacagtgcga

SEQ ID NO: 273342 - DNA, 25 bp, Artificial
  Probe
caaagtccaccagttctttaacgtg

SEQ ID NO: 273343 - DNA, 25 bp, Artificial
  Probe
ctttaacgtgggacttatccagccg

SEQ ID NO: 273344 - DNA, 25 bp, Artificial
  Probe
cagccacgtcaagtgcagaaacgcc

SEQ ID NO: 273345 - DNA, 25 bp, Artificial
  Probe
agctctacaatgtggaggccacctc

SEQ ID NO: 273346 - DNA, 25 bp, Artificial
  Probe
tcctggccctgctgctgctgaaaga

SEQ ID NO: 273347 - DNA, 25 bp, Artificial
  Probe
tgagctctggagtagacagatacat

SEQ ID NO: 273348 - DNA, 25 bp, Artificial
  Probe
cagatacatttccaagtatgagatg

SEQ ID NO: 273349 - DNA, 25 bp, Artificial
  Probe
acatcattgggaaggacacgtgggt

SEQ ID NO: 273350 - DNA, 25 bp, Artificial
  Probe
tggcagtctcctgagatcagaagag

SEQ ID NO: 273351 - DNA, 25 bp, Artificial
  Probe
ggacttgaacatggatgtgtccctc

SEQ ID NO: 273352 - DNA, 25 bp, Artificial
  Probe
taacgtgggacttatccagccgggg

SEQ ID NO: 273353 - DNA, 25 bp, Artificial
  Probe
tatgtccatcctggacatctccatg

SEQ ID NO: 273354 - DNA, 25 bp, Artificial
  Probe
aggagaactgcttcatgcatcagtc

SEQ ID NO: 273355 - DNA, 25 bp, Artificial
  Probe
gtacttgggagacgtggatgctact

SEQ ID NO: 273356 - DNA, 25 bp, Artificial
  Probe
cttgtgagcctggagtggactacgt

SEQ ID NO: 273357 - DNA, 25 bp, Artificial
  Probe
caagtcaggctcagatgaggtgcag

SEQ ID NO: 273358 - DNA, 25 bp, Artificial
  Probe
gtagacagatacatttccaagtatg

SEQ ID NO: 273359 - DNA, 25 bp, Artificial
  Probe
tgattgggtgtgctcttgcacaaaa

SEQ ID NO: 273360 - DNA, 25 bp, Artificial
  Probe
gctcttgcacaaacccagccttgtg

SEQ ID NO: 273361 - DNA, 25 bp, Artificial
  Probe
tgtgctcttgcacaaaaagccactt

SEQ ID NO: 273362 - DNA, 25 bp, Artificial
  Probe
tgtgccccaagcaggtgagcagagt

SEQ ID NO: 273363 - DNA, 25 bp, Artificial
  Probe
aacccagccttgtgattgggtgtgc

SEQ ID NO: 273364 - DNA, 25 bp, Artificial
  Probe
caaatgcctgccaggttttcctcta

SEQ ID NO: 273365 - DNA, 25 bp, Artificial
  Probe
cttgtgattgggtgtgctcttgcac

SEQ ID NO: 273366 - DNA, 25 bp, Artificial
  Probe
agcccaaatgcctgccaggttttcc

SEQ ID NO: 273367 - DNA, 25 bp, Artificial
  Probe
ccaaacccaggcttgtgattgggtg

SEQ ID NO: 273368 - DNA, 25 bp, Artificial
  Probe
caggcttgtgattgggtgtgctctt

SEQ ID NO: 273369 - DNA, 25 bp, Artificial
  Probe
gggtccaaacccaggcttgtgattg

SEQ ID NO: 273370 - DNA, 25 bp, Artificial
  Probe
agccatggcagtggaaatcatagtc

SEQ ID NO: 273371 - DNA, 25 bp, Artificial
  Probe
cccaagcaggtgagcagagtcaggc

SEQ ID NO: 273372 - DNA, 25 bp, Artificial
  Probe
cagccttgtgattgggtgtgctctt

SEQ ID NO: 273373 - DNA, 25 bp, Artificial
  Probe
gtgcaaaagatcagccatggcagtg

SEQ ID NO: 273374 - DNA, 25 bp, Artificial
  Probe
caaacccagccttgtgattgggtgt

SEQ ID NO: 273375 - DNA, 25 bp, Artificial
  Probe
caaacccaggcttgtgattgggtgt

SEQ ID NO: 273376 - DNA, 25 bp, Artificial
  Probe
atgcctgccaggttttcctctaact

SEQ ID NO: 273377 - DNA, 25 bp, Artificial
  Probe
gcctgccaggttttcctctaactct

SEQ ID NO: 273378 - DNA, 25 bp, Artificial
  Probe
ctataactaggtgcaaaagatcagc

SEQ ID NO: 273379 - DNA, 25 bp, Artificial
  Probe
tgtgattgggtgtgctcttgcacaa

SEQ ID NO: 273380 - DNA, 25 bp, Artificial
  Probe
gtgattgggtgtgctcttgcacaaa

SEQ ID NO: 273381 - DNA, 25 bp, Artificial
  Probe
attgggtgtgctcttgcacaaaccc

SEQ ID NO: 273382 - DNA, 25 bp, Artificial
  Probe
atctgtgccccaagcaggtgagcag

SEQ ID NO: 273383 - DNA, 25 bp, Artificial
  Probe
ttgtgattgggtgtgctcttgcaca

SEQ ID NO: 273384 - DNA, 25 bp, Artificial
  Probe
ttgcacaaacccagccttgtgattg

SEQ ID NO: 273385 - DNA, 25 bp, Artificial
  Probe
ccagccttgtgattgggtgtgctct

SEQ ID NO: 273386 - DNA, 25 bp, Artificial
  Probe
aaatcatagtcttcggctggcgtgg

SEQ ID NO: 273387 - DNA, 25 bp, Artificial
  Probe
gtgtgctcttgcacaaaaagccact

SEQ ID NO: 273388 - DNA, 25 bp, Artificial
  Probe
atcagccatggcagtggaaatcata

SEQ ID NO: 273389 - DNA, 25 bp, Artificial
  Probe
gattgggtgtgctcttgcacaaacc

SEQ ID NO: 273390 - DNA, 25 bp, Artificial
  Probe
tcttcatgacatgattgaaaggggc

SEQ ID NO: 273391 - DNA, 25 bp, Artificial
  Probe
tgggtgtgctcttgcacaaaaagcc

SEQ ID NO: 273392 - DNA, 25 bp, Artificial
  Probe
tggaaatcatagtcttcggctggcg

SEQ ID NO: 273393 - DNA, 25 bp, Artificial
  Probe
gggtgtgctcttgcacaaacccagc

SEQ ID NO: 273394 - DNA, 25 bp, Artificial
  Probe
ggtgtgctcttgcacaaacccagcc

SEQ ID NO: 273395 - DNA, 25 bp, Artificial
  Probe
aggggcagatctgtgccccaagcag

SEQ ID NO: 273396 - DNA, 25 bp, Artificial
  Probe
gatctgtgccccaagcaggtgagca

SEQ ID NO: 273397 - DNA, 25 bp, Artificial
  Probe
gtactttctataactaggtgcaaaa

SEQ ID NO: 273398 - DNA, 25 bp, Artificial
  Probe
atgtactttctataactaggtgcaa

SEQ ID NO: 273399 - DNA, 25 bp, Artificial
  Probe
cttcatgacatgattgaaaggggca

SEQ ID NO: 273400 - DNA, 25 bp, Artificial
  Probe
tgctcttgcacaaacccagccttgt

SEQ ID NO: 273401 - DNA, 25 bp, Artificial
  Probe
gcgtgggtccaaacccaggcttgtg

SEQ ID NO: 273402 - DNA, 25 bp, Artificial
  Probe
ccccaagcaggtgagcagagtcagg

SEQ ID NO: 273403 - DNA, 25 bp, Artificial
  Probe
tgtgctcttgcacaaacccagcctt

SEQ ID NO: 273404 - DNA, 25 bp, Artificial
  Probe
ctgtgccccaagcaggtgagcagag

SEQ ID NO: 273405 - DNA, 25 bp, Artificial
  Probe
gtcatgggctcaccagctggggcca

SEQ ID NO: 273406 - DNA, 25 bp, Artificial
  Probe
aattgagctacatccccaggctgaa

SEQ ID NO: 273407 - DNA, 25 bp, Artificial
  Probe
ggactcgaaggttcccctggcatgg

SEQ ID NO: 273408 - DNA, 25 bp, Artificial
  Probe
taactgaggacaaccttgatcctcc

SEQ ID NO: 273409 - DNA, 25 bp, Artificial
  Probe
cttaagctggcctcaaacctgttct

SEQ ID NO: 273410 - DNA, 25 bp, Artificial
  Probe
gggatcaaggacgattctgggaccc

SEQ ID NO: 273411 - DNA, 25 bp, Artificial
  Probe
gccagcaccctacaaattgagctac

SEQ ID NO: 273412 - DNA, 25 bp, Artificial
  Probe
gggatcaagcccatggccctgtgta

SEQ ID NO: 273413 - DNA, 25 bp, Artificial
  Probe
gacccagaggattcccagaagagct

SEQ ID NO: 273414 - DNA, 25 bp, Artificial
  Probe
caaggacgattctgggacccagagg

SEQ ID NO: 273415 - DNA, 25 bp, Artificial
  Probe
attctgggacccagaggattcccag

SEQ ID NO: 273416 - DNA, 25 bp, Artificial
  Probe
tctatgcctgactggggcctgggct

SEQ ID NO: 273417 - DNA, 25 bp, Artificial
  Probe
agctggcctcaaacctgttctgtaa

SEQ ID NO: 273418 - DNA, 25 bp, Artificial
  Probe
accactcctggtttatggggtgctg

SEQ ID NO: 273419 - DNA, 25 bp, Artificial
  Probe
gaaggactcgaaggttcccctggca

SEQ ID NO: 273420 - DNA, 25 bp, Artificial
  Probe
ctacaaattgagctacatccccagg

SEQ ID NO: 273421 - DNA, 25 bp, Artificial
  Probe
cttcggtcagggatggtcttcctga

SEQ ID NO: 273422 - DNA, 25 bp, Artificial
  Probe
gaggacaaccttgatcctcctgcct

SEQ ID NO: 273423 - DNA, 25 bp, Artificial
  Probe
agcccatggccctgtgtacattaag

SEQ ID NO: 273424 - DNA, 25 bp, Artificial
  Probe
ttaaggagtgcgagttgccatggac

SEQ ID NO: 273425 - DNA, 25 bp, Artificial
  Probe
tgctggggatcaagcccatggccct

SEQ ID NO: 273426 - DNA, 25 bp, Artificial
  Probe
tcatgggctcaccagctggggccac

SEQ ID NO: 273427 - DNA, 25 bp, Artificial
  Probe
aagccagcaccctacaaattgagct

SEQ ID NO: 273428 - DNA, 25 bp, Artificial
  Probe
tgttctttcatgctgtgtcccaacc

SEQ ID NO: 273429 - DNA, 25 bp, Artificial
  Probe
cagaggattcccagaagagctggca

SEQ ID NO: 273430 - DNA, 25 bp, Artificial
  Probe
ggctgaacaggttttctatgcctga

SEQ ID NO: 273431 - DNA, 25 bp, Artificial
  Probe
ccttgccaccctttggctggttcta

SEQ ID NO: 273432 - DNA, 25 bp, Artificial
  Probe
cttgccaccctttggctggttctaa

SEQ ID NO: 273433 - DNA, 25 bp, Artificial
  Probe
gtgctggggatcaagcccatggccc

SEQ ID NO: 273434 - DNA, 25 bp, Artificial
  Probe
acttgtcttcctatgtgctgagatt

SEQ ID NO: 273435 - DNA, 25 bp, Artificial
  Probe
ctccaccactcctggtttatggggt

SEQ ID NO: 273436 - DNA, 25 bp, Artificial
  Probe
gggacccagaggattcccagaagag

SEQ ID NO: 273437 - DNA, 25 bp, Artificial
  Probe
gccctgtgtacattaagccagcacc

SEQ ID NO: 273438 - DNA, 25 bp, Artificial
  Probe
acaggttttctatgcctgactgggg

SEQ ID NO: 273439 - DNA, 25 bp, Artificial
  Probe
taagctggcctcaaacctgttctgt

SEQ ID NO: 273440 - DNA, 25 bp, Artificial
  Probe
caaattgagctacatccccaggctg

SEQ ID NO: 273441 - DNA, 25 bp, Artificial
  Probe
ggatcaagcccatggccctgtgtac

SEQ ID NO: 273442 - DNA, 25 bp, Artificial
  Probe
ctgtgtacattaagccagcacccta

SEQ ID NO: 273443 - DNA, 25 bp, Artificial
  Probe
gttttctatgcctgactggggcctg

SEQ ID NO: 273444 - DNA, 25 bp, Artificial
  Probe
cgaaggttcccctggcatggccctt

SEQ ID NO: 273445 - DNA, 25 bp, Artificial
  Probe
tttgtgtgacttaagctggcctcaa

SEQ ID NO: 273446 - DNA, 25 bp, Artificial
  Probe
tgaggacaaccttgatcctcctgcc

SEQ ID NO: 273447 - DNA, 25 bp, Artificial
  Probe
ctgggacccagaggattcccagaag

SEQ ID NO: 273448 - DNA, 25 bp, Artificial
  Probe
cccaggctgaacaggttttctatgc

SEQ ID NO: 273449 - DNA, 25 bp, Artificial
  Probe
acatccccaggctgaacaggttttc

SEQ ID NO: 273450 - DNA, 25 bp, Artificial
  Probe
ctgcctccacttgtcttcctatgtg

SEQ ID NO: 273451 - DNA, 25 bp, Artificial
  Probe
cacaagagccttgtgcaaaagctag

SEQ ID NO: 273452 - DNA, 25 bp, Artificial
  Probe
accaagacgcacactgtggccatgc

SEQ ID NO: 273453 - DNA, 25 bp, Artificial
  Probe
cacactgtggccatgccgagagctg

SEQ ID NO: 273454 - DNA, 25 bp, Artificial
  Probe
tgggccccacagcacggagatctgc

SEQ ID NO: 273455 - DNA, 25 bp, Artificial
  Probe
ttgggaacagttctcagagtcccca

SEQ ID NO: 273456 - DNA, 25 bp, Artificial
  Probe
gacagactggctgctgggaaatcag

SEQ ID NO: 273457 - DNA, 25 bp, Artificial
  Probe
aagtccatgatggatcaggcctgag

SEQ ID NO: 273458 - DNA, 25 bp, Artificial
  Probe
cacagcacggagatctgctctccag

SEQ ID NO: 273459 - DNA, 25 bp, Artificial
  Probe
gccatgccgagagctgaaagaagga

SEQ ID NO: 273460 - DNA, 25 bp, Artificial
  Probe
gagtcaagaaatctccacagacaga

SEQ ID NO: 273461 - DNA, 25 bp, Artificial
  Probe
tcctaaccacaagagccttgtgcaa

SEQ ID NO: 273462 - DNA, 25 bp, Artificial
  Probe
ctctgtgaagaacatgtgtgaaagc

SEQ ID NO: 273463 - DNA, 25 bp, Artificial
  Probe
tcaagaaatctccacagacagactg

SEQ ID NO: 273464 - DNA, 25 bp, Artificial
  Probe
ctttgccttttcttggcagccccga

SEQ ID NO: 273465 - DNA, 25 bp, Artificial
  Probe
atgtgactctcttgtctttcaatgg

SEQ ID NO: 273466 - DNA, 25 bp, Artificial
  Probe
acactgtggccatgccgagagctga

SEQ ID NO: 273467 - DNA, 25 bp, Artificial
  Probe
caagaaatctccacagacagactgg

SEQ ID NO: 273468 - DNA, 25 bp, Artificial
  Probe
gaaatctccacagacagactggctg

SEQ ID NO: 273469 - DNA, 25 bp, Artificial
  Probe
atattgggaacagttctcagagtcc

SEQ ID NO: 273470 - DNA, 25 bp, Artificial
  Probe
gacccagaggatgcaaaggctcgag

SEQ ID NO: 273471 - DNA, 25 bp, Artificial
  Probe
tccccaaggagtcaagaaatctcca

SEQ ID NO: 273472 - DNA, 25 bp, Artificial
  Probe
agtccatgatggatcaggcctgagg

SEQ ID NO: 273473 - DNA, 25 bp, Artificial
  Probe
cgttaggataccaagtccatgatgg

SEQ ID NO: 273474 - DNA, 25 bp, Artificial
  Probe
tattcctaaccacaagagccttgtg

SEQ ID NO: 273475 - DNA, 25 bp, Artificial
  Probe
agacagactggctgctgggaaatca

SEQ ID NO: 273476 - DNA, 25 bp, Artificial
  Probe
agacgcacactgtggccatgccgag

SEQ ID NO: 273477 - DNA, 25 bp, Artificial
  Probe
caccaagacgcacactgtggccatg

SEQ ID NO: 273478 - DNA, 25 bp, Artificial
  Probe
ctccgcagacccagaggatgcaaag

SEQ ID NO: 273479 - DNA, 25 bp, Artificial
  Probe
ctgctgggaaatcaggagtgacctt

SEQ ID NO: 273480 - DNA, 25 bp, Artificial
  Probe
cagttctcagagtccccaaggagtc

SEQ ID NO: 273481 - DNA, 25 bp, Artificial
  Probe
tgccgagagctgaaagaaggagaac

SEQ ID NO: 273482 - DNA, 25 bp, Artificial
  Probe
ccatgatggatcaggcctgaggtag

SEQ ID NO: 273483 - DNA, 25 bp, Artificial
  Probe
caagacgcacactgtggccatgccg

SEQ ID NO: 273484 - DNA, 25 bp, Artificial
  Probe
tttgccttttcttggcagccccgag

SEQ ID NO: 273485 - DNA, 25 bp, Artificial
  Probe
accaagtccatgatggatcaggcct

SEQ ID NO: 273486 - DNA, 25 bp, Artificial
  Probe
gtggccatgccgagagctgaaagaa

SEQ ID NO: 273487 - DNA, 25 bp, Artificial
  Probe
caggagtgacctttccctaacctat

SEQ ID NO: 273488 - DNA, 25 bp, Artificial
  Probe
tggccatgccgagagctgaaagaag

SEQ ID NO: 273489 - DNA, 25 bp, Artificial
  Probe
ctcagagtccccaaggagtcaagaa

SEQ ID NO: 273490 - DNA, 25 bp, Artificial
  Probe
gatctgctctccagcatggcactgc

SEQ ID NO: 273491 - DNA, 25 bp, Artificial
  Probe
ggaacagttctcagagtccccaagg

SEQ ID NO: 273492 - DNA, 25 bp, Artificial
  Probe
ccacaagagccttgtgcaaaagcta

SEQ ID NO: 273493 - DNA, 25 bp, Artificial
  Probe
atcaggagtgacctttccctaacct

SEQ ID NO: 273494 - DNA, 25 bp, Artificial
  Probe
catgccgagagctgaaagaaggaga

SEQ ID NO: 273495 - DNA, 25 bp, Artificial
  Probe
cttgtctttcaatggccagggagag

SEQ ID NO: 273496 - DNA, 25 bp, Artificial
  Probe
cagactggctgctgggaaatcagga

SEQ ID NO: 273497 - DNA, 25 bp, Artificial
  Probe
cgctgctggttttggggacagaata

SEQ ID NO: 273498 - DNA, 25 bp, Artificial
  Probe
gcttttcttcccagagacagcgcat

SEQ ID NO: 273499 - DNA, 25 bp, Artificial
  Probe
ggacagtcggccacagcgtggtctc

SEQ ID NO: 273500 - DNA, 25 bp, Artificial
  Probe
tccacttctttggaaatgagaccag

SEQ ID NO: 273501 - DNA, 25 bp, Artificial
  Probe
ataggttttaccacagggtggcatg

SEQ ID NO: 273502 - DNA, 25 bp, Artificial
  Probe
ctcaaaggacttcgtcatagacatt

SEQ ID NO: 273503 - DNA, 25 bp, Artificial
  Probe
taggttttaccacagggtggcatgg

SEQ ID NO: 273504 - DNA, 25 bp, Artificial
  Probe
cctctgacgctgctggttttgggga

SEQ ID NO: 273505 - DNA, 25 bp, Artificial
  Probe
cgagagcttttcttcccagagacag

SEQ ID NO: 273506 - DNA, 25 bp, Artificial
  Probe
ttctttggaaatgagaccagtcctg

SEQ ID NO: 273507 - DNA, 25 bp, Artificial
  Probe
gacttcgtcatagacattaaagttc

SEQ ID NO: 273508 - DNA, 25 bp, Artificial
  Probe
gagagcttttcttcccagagacagc

SEQ ID NO: 273509 - DNA, 25 bp, Artificial
  Probe
tactcaaaggacttcgtcatagaca

SEQ ID NO: 273510 - DNA, 25 bp, Artificial
  Probe
ttcttcccagagacagcgcatgagg

SEQ ID NO: 273511 - DNA, 25 bp, Artificial
  Probe
tttaccacagggtggcatgggactt

SEQ ID NO: 273512 - DNA, 25 bp, Artificial
  Probe
ccgagagcttttcttcccagagaca

SEQ ID NO: 273513 - DNA, 25 bp, Artificial
  Probe
gggcattactcaaaggacttcgtca

SEQ ID NO: 273514 - DNA, 25 bp, Artificial
  Probe
ggacttcgtcatagacattaaagtt

SEQ ID NO: 273515 - DNA, 25 bp, Artificial
  Probe
acgctgctggttttggggacagaat

SEQ ID NO: 273516 - DNA, 25 bp, Artificial
  Probe
gcattactcaaaggacttcgtcata

SEQ ID NO: 273517 - DNA, 25 bp, Artificial
  Probe
cacttctttggaaatgagaccagtc

SEQ ID NO: 273518 - DNA, 25 bp, Artificial
  Probe
ttttcttcccagagacagcgcatga

SEQ ID NO: 273519 - DNA, 25 bp, Artificial
  Probe
gacagtcggccacagcgtggtctcc

SEQ ID NO: 273520 - DNA, 25 bp, Artificial
  Probe
agcctgctagccacagactgataag

SEQ ID NO: 273521 - DNA, 25 bp, Artificial
  Probe
ctctgacgctgctggttttggggac

SEQ ID NO: 273522 - DNA, 25 bp, Artificial
  Probe
tcaaaggacttcgtcatagacatta

SEQ ID NO: 273523 - DNA, 25 bp, Artificial
  Probe
gctagccacagactgataaggggtg

SEQ ID NO: 273524 - DNA, 25 bp, Artificial
  Probe
ccacttctttggaaatgagaccagt

SEQ ID NO: 273525 - DNA, 25 bp, Artificial
  Probe
aggacttcgtcatagacattaaagt

SEQ ID NO: 273526 - DNA, 25 bp, Artificial
  Probe
gaataggttttaccacagggtggca

SEQ ID NO: 273527 - DNA, 25 bp, Artificial
  Probe
tctgacgctgctggttttggggaca

SEQ ID NO: 273528 - DNA, 25 bp, Artificial
  Probe
ttactcaaaggacttcgtcatagac

SEQ ID NO: 273529 - DNA, 25 bp, Artificial
  Probe
aaaggacttcgtcatagacattaaa

SEQ ID NO: 273530 - DNA, 25 bp, Artificial
  Probe
ctgctagccacagactgataagggg

SEQ ID NO: 273531 - DNA, 25 bp, Artificial
  Probe
cacagggtggcatgggacttatact

SEQ ID NO: 273532 - DNA, 25 bp, Artificial
  Probe
attactcaaaggacttcgtcataga

SEQ ID NO: 273533 - DNA, 25 bp, Artificial
  Probe
ccctggcctctgacgctgctggttt

SEQ ID NO: 273534 - DNA, 25 bp, Artificial
  Probe
cttcccagagacagcgcatgaggca

SEQ ID NO: 273535 - DNA, 25 bp, Artificial
  Probe
gccgagagcttttcttcccagagac

SEQ ID NO: 273536 - DNA, 25 bp, Artificial
  Probe
tttcttcccagagacagcgcatgag

SEQ ID NO: 273537 - DNA, 25 bp, Artificial
  Probe
cctgctagccacagactgataaggg

SEQ ID NO: 273538 - DNA, 25 bp, Artificial
  Probe
gcctgctagccacagactgataagg

SEQ ID NO: 273539 - DNA, 25 bp, Artificial
  Probe
ccacagggtggcatgggacttatac

SEQ ID NO: 273540 - DNA, 25 bp, Artificial
  Probe
caaaggacttcgtcatagacattaa

SEQ ID NO: 273541 - DNA, 25 bp, Artificial
  Probe
cattactcaaaggacttcgtcatag

SEQ ID NO: 273542 - DNA, 25 bp, Artificial
  Probe
ggcattactcaaaggacttcgtcat

SEQ ID NO: 273543 - DNA, 25 bp, Artificial
  Probe
gtgtccaacatcagggacgcctcag

SEQ ID NO: 273544 - DNA, 25 bp, Artificial
  Probe
cctgcagtgactactctgagatgcg

SEQ ID NO: 273545 - DNA, 25 bp, Artificial
  Probe
ttgtcttccagtgtccaacatcagg

SEQ ID NO: 273546 - DNA, 25 bp, Artificial
  Probe
cttgtcttccagtgtccaacatcag

SEQ ID NO: 273547 - DNA, 25 bp, Artificial
  Probe
atgctggctcccacagcttgtcttc

SEQ ID NO: 273548 - DNA, 25 bp, Artificial
  Probe
tatactgtgcgcagccacagggtgg

SEQ ID NO: 273549 - DNA, 25 bp, Artificial
  Probe
tgcagtgactactctgagatgcgag

SEQ ID NO: 273550 - DNA, 25 bp, Artificial
  Probe
cacagcttgtcttccagtgtccaac

SEQ ID NO: 273551 - DNA, 25 bp, Artificial
  Probe
acagggcctgcagtgactactctga

SEQ ID NO: 273552 - DNA, 25 bp, Artificial
  Probe
ctgtgcgcagccacagggtggttcc

SEQ ID NO: 273553 - DNA, 25 bp, Artificial
  Probe
actactctgagatgcgagcctccca

SEQ ID NO: 273554 - DNA, 25 bp, Artificial
  Probe
gggcctgcagtgactactctgagat

SEQ ID NO: 273555 - DNA, 25 bp, Artificial
  Probe
gtcttccagtgtccaacatcaggga

SEQ ID NO: 273556 - DNA, 25 bp, Artificial
  Probe
tcagggacgcctcagcctggacctg

SEQ ID NO: 273557 - DNA, 25 bp, Artificial
  Probe
ccacagggtggttccctgtggttct

SEQ ID NO: 273558 - DNA, 25 bp, Artificial
  Probe
tggacctgagccacagggcctgcag

SEQ ID NO: 273559 - DNA, 25 bp, Artificial
  Probe
cagtgtccaacatcagggacgcctc

SEQ ID NO: 273560 - DNA, 25 bp, Artificial
  Probe
gcctgcagtgactactctgagatgc

SEQ ID NO: 273561 - DNA, 25 bp, Artificial
  Probe
tgtcttccagtgtccaacatcaggg

SEQ ID NO: 273562 - DNA, 25 bp, Artificial
  Probe
ccacagggcctgcagtgactactct

SEQ ID NO: 273563 - DNA, 25 bp, Artificial
  Probe
agcttgtcttccagtgtccaacatc

SEQ ID NO: 273564 - DNA, 25 bp, Artificial
  Probe
cgtgatgctggctcccacagcttgt

SEQ ID NO: 273565 - DNA, 25 bp, Artificial
  Probe
tccagtgtccaacatcagggacgcc

SEQ ID NO: 273566 - DNA, 25 bp, Artificial
  Probe
gcagtgactactctgagatgcgagc

SEQ ID NO: 273567 - DNA, 25 bp, Artificial
  Probe
gccacagggcctgcagtgactactc

SEQ ID NO: 273568 - DNA, 25 bp, Artificial
  Probe
gctcccacagcttgtcttccagtgt

SEQ ID NO: 273569 - DNA, 25 bp, Artificial
  Probe
ccagtgtccaacatcagggacgcct

SEQ ID NO: 273570 - DNA, 25 bp, Artificial
  Probe
tggctcccacagcttgtcttccagt

SEQ ID NO: 273571 - DNA, 25 bp, Artificial
  Probe
atcagggacgcctcagcctggacct

SEQ ID NO: 273572 - DNA, 25 bp, Artificial
  Probe
ttccagtgtccaacatcagggacgc

SEQ ID NO: 273573 - DNA, 25 bp, Artificial
  Probe
acagcttgtcttccagtgtccaaca

SEQ ID NO: 273574 - DNA, 25 bp, Artificial
  Probe
gcccatttatactgtgcgcagccac

SEQ ID NO: 273575 - DNA, 25 bp, Artificial
  Probe
agtgactactctgagatgcgagcct

SEQ ID NO: 273576 - DNA, 25 bp, Artificial
  Probe
agccacagggcctgcagtgactact

SEQ ID NO: 273577 - DNA, 25 bp, Artificial
  Probe
tgactactctgagatgcgagcctcc

SEQ ID NO: 273578 - DNA, 25 bp, Artificial
  Probe
cagtgactactctgagatgcgagcc

SEQ ID NO: 273579 - DNA, 25 bp, Artificial
  Probe
ccatttatactgtgcgcagccacag

SEQ ID NO: 273580 - DNA, 25 bp, Artificial
  Probe
ggctcccacagcttgtcttccagtg

SEQ ID NO: 273581 - DNA, 25 bp, Artificial
  Probe
gtgcgcagccacagggtggttccct

SEQ ID NO: 273582 - DNA, 25 bp, Artificial
  Probe
agggcctgcagtgactactctgaga

SEQ ID NO: 273583 - DNA, 25 bp, Artificial
  Probe
ccacagcttgtcttccagtgtccaa

SEQ ID NO: 273584 - DNA, 25 bp, Artificial
  Probe
cccatttatactgtgcgcagccaca

SEQ ID NO: 273585 - DNA, 25 bp, Artificial
  Probe
gcttgtcttccagtgtccaacatca

SEQ ID NO: 273586 - DNA, 25 bp, Artificial
  Probe
cagggacgcctcagcctggacctga

SEQ ID NO: 273587 - DNA, 25 bp, Artificial
  Probe
agtgtccaacatcagggacgcctca

SEQ ID NO: 273588 - DNA, 25 bp, Artificial
  Probe
gacctgagccacagggcctgcagtg

SEQ ID NO: 273589 - DNA, 25 bp, Artificial
  Probe
gacacaacacacaaaaacccgacgg

SEQ ID NO: 273590 - DNA, 25 bp, Artificial
  Probe
gaaccccaatccaagcgaagaaccg

SEQ ID NO: 273591 - DNA, 25 bp, Artificial
  Probe
ctacagacagcgatacacatccagg

SEQ ID NO: 273592 - DNA, 25 bp, Artificial
  Probe
acaagcacagactggaaaccccgct

SEQ ID NO: 273593 - DNA, 25 bp, Artificial
  Probe
gcgaagaaccgttccgaaccatgtt

SEQ ID NO: 273594 - DNA, 25 bp, Artificial
  Probe
gcgccgaggcaccaaagtcacaaaa

SEQ ID NO: 273595 - DNA, 25 bp, Artificial
  Probe
taatacacaagcacagactggaaac

SEQ ID NO: 273596 - DNA, 25 bp, Artificial
  Probe
accgttccgaaccatgtttgaaatg

SEQ ID NO: 273597 - DNA, 25 bp, Artificial
  Probe
ccataccgcgcgtaaggaaaggcgc

SEQ ID NO: 273598 - DNA, 25 bp, Artificial
  Probe
caatccaagcgaagaaccgttccga

SEQ ID NO: 273599 - DNA, 25 bp, Artificial
  Probe
acacgcctacagacagcgatacaca

SEQ ID NO: 273600 - DNA, 25 bp, Artificial
  Probe
caatggaaccccaatccaagcgaag

SEQ ID NO: 273601 - DNA, 25 bp, Artificial
  Probe
ccgaaccatgtttgaaatgaagccc

SEQ ID NO: 273602 - DNA, 25 bp, Artificial
  Probe
cacgcctacagacagcgatacacat

SEQ ID NO: 273603 - DNA, 25 bp, Artificial
  Probe
gataatacacaagcacagactggaa

SEQ ID NO: 273604 - DNA, 25 bp, Artificial
  Probe
tggaaccccaatccaagcgaagaac

SEQ ID NO: 273605 - DNA, 25 bp, Artificial
  Probe
ggaaaggcgccgaggcaccaaagtc

SEQ ID NO: 273606 - DNA, 25 bp, Artificial
  Probe
ccgttccgaaccatgtttgaaatga

SEQ ID NO: 273607 - DNA, 25 bp, Artificial
  Probe
cgatacacatccaggccgataatac

SEQ ID NO: 273608 - DNA, 25 bp, Artificial
  Probe
agcgaagaaccgttccgaaccatgt

SEQ ID NO: 273609 - DNA, 25 bp, Artificial
  Probe
ccgaggcaccaaagtcacaaaacgc

SEQ ID NO: 273610 - DNA, 25 bp, Artificial
  Probe
acgcctacagacagcgatacacatc

SEQ ID NO: 273611 - DNA, 25 bp, Artificial
  Probe
aaccaggccgaaaggggacgtgcat

SEQ ID NO: 273612 - DNA, 25 bp, Artificial
  Probe
caagcacagactggaaaccccgcta

SEQ ID NO: 273613 - DNA, 25 bp, Artificial
  Probe
cagcgatacacatccaggccgataa

SEQ ID NO: 273614 - DNA, 25 bp, Artificial
  Probe
cgataatacacaagcacagactgga

SEQ ID NO: 273615 - DNA, 25 bp, Artificial
  Probe
gtcacaaaacgcagggcctgaccac

SEQ ID NO: 273616 - DNA, 25 bp, Artificial
  Probe
caaggcgcgccaaaccaggccgaaa

SEQ ID NO: 273617 - DNA, 25 bp, Artificial
  Probe
acacaagcacagactggaaaccccg

SEQ ID NO: 273618 - DNA, 25 bp, Artificial
  Probe
gttccgaaccatgtttgaaatgaag

SEQ ID NO: 273619 - DNA, 25 bp, Artificial
  Probe
tgaccacctcgacaacgccaatgga

SEQ ID NO: 273620 - DNA, 25 bp, Artificial
  Probe
agcacagactggaaaccccgctata

SEQ ID NO: 273621 - DNA, 25 bp, Artificial
  Probe
acagacagcgatacacatccaggcc

SEQ ID NO: 273622 - DNA, 25 bp, Artificial
  Probe
ccaaagtcacaaaacgcagggcctg

SEQ ID NO: 273623 - DNA, 25 bp, Artificial
  Probe
tcgacaacgccaatggaaccccaat

SEQ ID NO: 273624 - DNA, 25 bp, Artificial
  Probe
cacagactggaaaccccgctataca

SEQ ID NO: 273625 - DNA, 25 bp, Artificial
  Probe
aggcgccgaggcaccaaagtcacaa

SEQ ID NO: 273626 - DNA, 25 bp, Artificial
  Probe
catccaggccgataatacacaagca

SEQ ID NO: 273627 - DNA, 25 bp, Artificial
  Probe
gccgataatacacaagcacagactg

SEQ ID NO: 273628 - DNA, 25 bp, Artificial
  Probe
taccgcgcgtaaggaaaggcgccga

SEQ ID NO: 273629 - DNA, 25 bp, Artificial
  Probe
aggcgcgccaaaccaggccgaaagg

SEQ ID NO: 273630 - DNA, 25 bp, Artificial
  Probe
ccaggccgataatacacaagcacag

SEQ ID NO: 273631 - DNA, 25 bp, Artificial
  Probe
caaagtcacaaaacgcagggcctga

SEQ ID NO: 273632 - DNA, 25 bp, Artificial
  Probe
ccaatccaagcgaagaaccgttccg

SEQ ID NO: 273633 - DNA, 25 bp, Artificial
  Probe
aacgccaatggaaccccaatccaag

SEQ ID NO: 273634 - DNA, 25 bp, Artificial
  Probe
acatccaggccgataatacacaagc

SEQ ID NO: 273635 - DNA, 25 bp, Artificial
  Probe
ccagggctaatgactcactcattcc

SEQ ID NO: 273636 - DNA, 25 bp, Artificial
  Probe
ccacgtccttctgaatggaaggtga

SEQ ID NO: 273637 - DNA, 25 bp, Artificial
  Probe
gtccctcaggtcatgattaaacatt

SEQ ID NO: 273638 - DNA, 25 bp, Artificial
  Probe
gactcactcattcctggttgccttc

SEQ ID NO: 273639 - DNA, 25 bp, Artificial
  Probe
gaacacttgggcaagaagagctaaa

SEQ ID NO: 273640 - DNA, 25 bp, Artificial
  Probe
gagtcttgcttaactcctagcactg

SEQ ID NO: 273641 - DNA, 25 bp, Artificial
  Probe
cagtccctcaggtcatgattaaaca

SEQ ID NO: 273642 - DNA, 25 bp, Artificial
  Probe
ttgagtcttgcttaactcctagcac

SEQ ID NO: 273643 - DNA, 25 bp, Artificial
  Probe
ccccagtccctcaggtcatgattaa

SEQ ID NO: 273644 - DNA, 25 bp, Artificial
  Probe
gcctttgagtcttgcttaactccta

SEQ ID NO: 273645 - DNA, 25 bp, Artificial
  Probe
cccagtccctcaggtcatgattaaa

SEQ ID NO: 273646 - DNA, 25 bp, Artificial
  Probe
accccacgtccttctgaatggaagg

SEQ ID NO: 273647 - DNA, 25 bp, Artificial
  Probe
ctcattcctggttgccttctccagg

SEQ ID NO: 273648 - DNA, 25 bp, Artificial
  Probe
ccaggaccacccagggctaatgact

SEQ ID NO: 273649 - DNA, 25 bp, Artificial
  Probe
gtccttctgaatggaaggtgaagac

SEQ ID NO: 273650 - DNA, 25 bp, Artificial
  Probe
cctggttgccttctccaggaaggca

SEQ ID NO: 273651 - DNA, 25 bp, Artificial
  Probe
tcctggttgccttctccaggaaggc

SEQ ID NO: 273652 - DNA, 25 bp, Artificial
  Probe
tgtttcccaggaccacccagggcta

SEQ ID NO: 273653 - DNA, 25 bp, Artificial
  Probe
ccccacgtccttctgaatggaaggt

SEQ ID NO: 273654 - DNA, 25 bp, Artificial
  Probe
ccttctccaggaaggcaggctgagg

SEQ ID NO: 273655 - DNA, 25 bp, Artificial
  Probe
ttcctggttgccttctccaggaagg

SEQ ID NO: 273656 - DNA, 25 bp, Artificial
  Probe
taatgactcactcattcctggttgc

SEQ ID NO: 273657 - DNA, 25 bp, Artificial
  Probe
ctttgagtcttgcttaactcctagc

SEQ ID NO: 273658 - DNA, 25 bp, Artificial
  Probe
gggctaatgactcactcattcctgg

SEQ ID NO: 273659 - DNA, 25 bp, Artificial
  Probe
tttcccaggaccacccagggctaat

SEQ ID NO: 273660 - DNA, 25 bp, Artificial
  Probe
acccagggctaatgactcactcatt

SEQ ID NO: 273661 - DNA, 25 bp, Artificial
  Probe
acgtccttctgaatggaaggtgaag

SEQ ID NO: 273662 - DNA, 25 bp, Artificial
  Probe
ccttctgaatggaaggtgaagacct

SEQ ID NO: 273663 - DNA, 25 bp, Artificial
  Probe
tattgtggtggtgattagcttccca

SEQ ID NO: 273664 - DNA, 25 bp, Artificial
  Probe
aaagcctttgagtcttgcttaactc

SEQ ID NO: 273665 - DNA, 25 bp, Artificial
  Probe
atgactcactcattcctggttgcct

SEQ ID NO: 273666 - DNA, 25 bp, Artificial
  Probe
tggttgccttctccaggaaggcagg

SEQ ID NO: 273667 - DNA, 25 bp, Artificial
  Probe
agggctaatgactcactcattcctg

SEQ ID NO: 273668 - DNA, 25 bp, Artificial
  Probe
cacccagggctaatgactcactcat

SEQ ID NO: 273669 - DNA, 25 bp, Artificial
  Probe
gctaatgactcactcattcctggtt

SEQ ID NO: 273670 - DNA, 25 bp, Artificial
  Probe
cctcaggtcatgattaaacattttg

SEQ ID NO: 273671 - DNA, 25 bp, Artificial
  Probe
ctaaaagcctttgagtcttgcttaa

SEQ ID NO: 273672 - DNA, 25 bp, Artificial
  Probe
cgtccttctgaatggaaggtgaaga

SEQ ID NO: 273673 - DNA, 25 bp, Artificial
  Probe
agctaaaagcctttgagtcttgctt

SEQ ID NO: 273674 - DNA, 25 bp, Artificial
  Probe
actcattcctggttgccttctccag

SEQ ID NO: 273675 - DNA, 25 bp, Artificial
  Probe
acacttgggcaagaagagctaaaag

SEQ ID NO: 273676 - DNA, 25 bp, Artificial
  Probe
gagctaaaagcctttgagtcttgct

SEQ ID NO: 273677 - DNA, 25 bp, Artificial
  Probe
gtcttgcttaactcctagcactgtc

SEQ ID NO: 273678 - DNA, 25 bp, Artificial
  Probe
tgagtcttgcttaactcctagcact

SEQ ID NO: 273679 - DNA, 25 bp, Artificial
  Probe
cttctgaatggaaggtgaagacctc

SEQ ID NO: 273680 - DNA, 25 bp, Artificial
  Probe
ttgccttctccaggaaggcaggctg

SEQ ID NO: 273681 - DNA, 25 bp, Artificial
  Probe
gcctcctcaaccgggacactattac

SEQ ID NO: 273682 - DNA, 25 bp, Artificial
  Probe
tttggcttcatcacctatcagggat

SEQ ID NO: 273683 - DNA, 25 bp, Artificial
  Probe
cacctatcagggatctctcagcact

SEQ ID NO: 273684 - DNA, 25 bp, Artificial
  Probe
cggaatcctttggcttcatcaccta

SEQ ID NO: 273685 - DNA, 25 bp, Artificial
  Probe
ttggcttcatcacctatcagggatc

SEQ ID NO: 273686 - DNA, 25 bp, Artificial
  Probe
tatcagggatctctcagcactcctc

SEQ ID NO: 273687 - DNA, 25 bp, Artificial
  Probe
tcatcacctatcagggatctctcag

SEQ ID NO: 273688 - DNA, 25 bp, Artificial
  Probe
tggagctcctgttcccggaatcctt

SEQ ID NO: 273689 - DNA, 25 bp, Artificial
  Probe
cctttggcttcatcacctatcaggg

SEQ ID NO: 273690 - DNA, 25 bp, Artificial
  Probe
gcttcatcacctatcagggatctct

SEQ ID NO: 273691 - DNA, 25 bp, Artificial
  Probe
gttcccggaatcctttggcttcatc

SEQ ID NO: 273692 - DNA, 25 bp, Artificial
  Probe
ctgttcccggaatcctttggcttca

SEQ ID NO: 273693 - DNA, 25 bp, Artificial
  Probe
tcccggaatcctttggcttcatcac

SEQ ID NO: 273694 - DNA, 25 bp, Artificial
  Probe
tcacctatcagggatctctcagcac

SEQ ID NO: 273695 - DNA, 25 bp, Artificial
  Probe
gacactattacccgaatctcctaca

SEQ ID NO: 273696 - DNA, 25 bp, Artificial
  Probe
ctttggcttcatcacctatcaggga

SEQ ID NO: 273697 - DNA, 25 bp, Artificial
  Probe
aatcctttggcttcatcacctatca

SEQ ID NO: 273698 - DNA, 25 bp, Artificial
  Probe
gggacactattacccgaatctccta

SEQ ID NO: 273699 - DNA, 25 bp, Artificial
  Probe
tcaaccgggacactattacccgaat

SEQ ID NO: 273700 - DNA, 25 bp, Artificial
  Probe
cgggacactattacccgaatctcct

SEQ ID NO: 273701 - DNA, 25 bp, Artificial
  Probe
ctcctgttcccggaatcctttggct

SEQ ID NO: 273702 - DNA, 25 bp, Artificial
  Probe
agctcctgttcccggaatcctttgg

SEQ ID NO: 273703 - DNA, 25 bp, Artificial
  Probe
atcagggatctctcagcactcctcc

SEQ ID NO: 273704 - DNA, 25 bp, Artificial
  Probe
tcctcaaccgggacactattacccg

SEQ ID NO: 273705 - DNA, 25 bp, Artificial
  Probe
ggcttcatcacctatcagggatctc

SEQ ID NO: 273706 - DNA, 25 bp, Artificial
  Probe
catcacctatcagggatctctcagc

SEQ ID NO: 273707 - DNA, 25 bp, Artificial
  Probe
ttcatcacctatcagggatctctca

SEQ ID NO: 273708 - DNA, 25 bp, Artificial
  Probe
tcctttggcttcatcacctatcagg

SEQ ID NO: 273709 - DNA, 25 bp, Artificial
  Probe
cactattacccgaatctcctacaaa

SEQ ID NO: 273710 - DNA, 25 bp, Artificial
  Probe
ggagctcctgttcccggaatccttt

SEQ ID NO: 273711 - DNA, 25 bp, Artificial
  Probe
cttcatcacctatcagggatctctc

SEQ ID NO: 273712 - DNA, 25 bp, Artificial
  Probe
tcctgttcccggaatcctttggctt

SEQ ID NO: 273713 - DNA, 25 bp, Artificial
  Probe
tgttcccggaatcctttggcttcat

SEQ ID NO: 273714 - DNA, 25 bp, Artificial
  Probe
tccttagtcgcctcctcaaccggga

SEQ ID NO: 273715 - DNA, 25 bp, Artificial
  Probe
tcgcctcctcaaccgggacactatt

SEQ ID NO: 273716 - DNA, 25 bp, Artificial
  Probe
acctatcagggatctctcagcactc

SEQ ID NO: 273717 - DNA, 25 bp, Artificial
  Probe
atcctttggcttcatcacctatcag

SEQ ID NO: 273718 - DNA, 25 bp, Artificial
  Probe
ctatcagggatctctcagcactcct

SEQ ID NO: 273719 - DNA, 25 bp, Artificial
  Probe
tggcagctccaacccgttccttagt

SEQ ID NO: 273720 - DNA, 25 bp, Artificial
  Probe
tattacccgaatctcctacaaaaat

SEQ ID NO: 273721 - DNA, 25 bp, Artificial
  Probe
gctccaacccgttccttagtcgcct

SEQ ID NO: 273722 - DNA, 25 bp, Artificial
  Probe
cgcctcctcaaccgggacactatta

SEQ ID NO: 273723 - DNA, 25 bp, Artificial
  Probe
cctatcagggatctctcagcactcc

SEQ ID NO: 273724 - DNA, 25 bp, Artificial
  Probe
cgttccttagtcgcctcctcaaccg

SEQ ID NO: 273725 - DNA, 25 bp, Artificial
  Probe
cccggaatcctttggcttcatcacc

SEQ ID NO: 273726 - DNA, 25 bp, Artificial
  Probe
ttcccggaatcctttggcttcatca

SEQ ID NO: 273727 - DNA, 25 bp, Artificial
  Probe
ttcagcagtggaagtgctacagccc

SEQ ID NO: 273728 - DNA, 25 bp, Artificial
  Probe
tttcccgaggcctgagaactagaag

SEQ ID NO: 273729 - DNA, 25 bp, Artificial
  Probe
agcagagaacagtttcccgaggcct

SEQ ID NO: 273730 - DNA, 25 bp, Artificial
  Probe
cgctctgtacgaacaaatctacctg

SEQ ID NO: 273731 - DNA, 25 bp, Artificial
  Probe
gccacctcaagagcagagaacagtt

SEQ ID NO: 273732 - DNA, 25 bp, Artificial
  Probe
acacgccacctcaagagcagagaac

SEQ ID NO: 273733 - DNA, 25 bp, Artificial
  Probe
cccgaggcctgagaactagaagtcc

SEQ ID NO: 273734 - DNA, 25 bp, Artificial
  Probe
tgtcattgggcttctggtagcctcc

SEQ ID NO: 273735 - DNA, 25 bp, Artificial
  Probe
tctatgtattcagcagtggaagtgc

SEQ ID NO: 273736 - DNA, 25 bp, Artificial
  Probe
ctatgtattcagcagtggaagtgct

SEQ ID NO: 273737 - DNA, 25 bp, Artificial
  Probe
tacagccctcttttagagccacaag

SEQ ID NO: 273738 - DNA, 25 bp, Artificial
  Probe
gcagagaacagtttcccgaggcctg

SEQ ID NO: 273739 - DNA, 25 bp, Artificial
  Probe
gtagccctggggacttttgtcacac

SEQ ID NO: 273740 - DNA, 25 bp, Artificial
  Probe
tcattgggcttctggtagcctcctc

SEQ ID NO: 273741 - DNA, 25 bp, Artificial
  Probe
ctgtacgaacaaatctacctgtgtc

SEQ ID NO: 273742 - DNA, 25 bp, Artificial
  Probe
ctctctctctatgtattcagcagtg

SEQ ID NO: 273743 - DNA, 25 bp, Artificial
  Probe
tgtcccgagtactaggaataaagat

SEQ ID NO: 273744 - DNA, 25 bp, Artificial
  Probe
gagaactagaagtcccacagaccac

SEQ ID NO: 273745 - DNA, 25 bp, Artificial
  Probe
gctacagccctcttttagagccaca

SEQ ID NO: 273746 - DNA, 25 bp, Artificial
  Probe
cgaggcctgagaactagaagtccca

SEQ ID NO: 273747 - DNA, 25 bp, Artificial
  Probe
acctcaagagcagagaacagtttcc

SEQ ID NO: 273748 - DNA, 25 bp, Artificial
  Probe
gtgtcccgagtactaggaataaaga

SEQ ID NO: 273749 - DNA, 25 bp, Artificial
  Probe
cctgtgtcccgagtactaggaataa

SEQ ID NO: 273750 - DNA, 25 bp, Artificial
  Probe
caaatctacctgtgtcccgagtact

SEQ ID NO: 273751 - DNA, 25 bp, Artificial
  Probe
gccctcttttagagccacaagtatt

SEQ ID NO: 273752 - DNA, 25 bp, Artificial
  Probe
atatgcactcgctgtcattgggctt

SEQ ID NO: 273753 - DNA, 25 bp, Artificial
  Probe
aacagtttcccgaggcctgagaact

SEQ ID NO: 273754 - DNA, 25 bp, Artificial
  Probe
gaagtcccacagaccacctaagttt

SEQ ID NO: 273755 - DNA, 25 bp, Artificial
  Probe
gtgctacagccctcttttagagcca

SEQ ID NO: 273756 - DNA, 25 bp, Artificial
  Probe
atgtattcagcagtggaagtgctac

SEQ ID NO: 273757 - DNA, 25 bp, Artificial
  Probe
ctcagggccatgtggtgattaagga

SEQ ID NO: 273758 - DNA, 25 bp, Artificial
  Probe
tggaagtgctacagccctcttttag

SEQ ID NO: 273759 - DNA, 25 bp, Artificial
  Probe
agtggaagtgctacagccctctttt

SEQ ID NO: 273760 - DNA, 25 bp, Artificial
  Probe
gaacaaatctacctgtgtcccgagt

SEQ ID NO: 273761 - DNA, 25 bp, Artificial
  Probe
aatctacctgtgtcccgagtactag

SEQ ID NO: 273762 - DNA, 25 bp, Artificial
  Probe
cttctggtagcctcctctactatgt

SEQ ID NO: 273763 - DNA, 25 bp, Artificial
  Probe
attgggcttctggtagcctcctcta

SEQ ID NO: 273764 - DNA, 25 bp, Artificial
  Probe
gccacaagtattttctgctccctga

SEQ ID NO: 273765 - DNA, 25 bp, Artificial
  Probe
gacttttgtcacacgccacctcaag

SEQ ID NO: 273766 - DNA, 25 bp, Artificial
  Probe
ctgtcattgggcttctggtagcctc

SEQ ID NO: 273767 - DNA, 25 bp, Artificial
  Probe
acctgtgtcccgagtactaggaata

SEQ ID NO: 273768 - DNA, 25 bp, Artificial
  Probe
ctagaagtcccacagaccacctaag

SEQ ID NO: 273769 - DNA, 25 bp, Artificial
  Probe
cagagaacagtttcccgaggcctga

SEQ ID NO: 273770 - DNA, 25 bp, Artificial
  Probe
actcgctgtcattgggcttctggta

SEQ ID NO: 273771 - DNA, 25 bp, Artificial
  Probe
ttttagagccacaagtattttctgc

SEQ ID NO: 273772 - DNA, 25 bp, Artificial
  Probe
cttttagagccacaagtattttctg

SEQ ID NO: 273773 - DNA, 25 bp, Artificial
  Probe
taagacattctgctactgtgctgca

SEQ ID NO: 273774 - DNA, 25 bp, Artificial
  Probe
attctgctactgtgctgcaaagcca

SEQ ID NO: 273775 - DNA, 25 bp, Artificial
  Probe
actgtgctgcaaagccatagcagat

SEQ ID NO: 273776 - DNA, 25 bp, Artificial
  Probe
gtccgcttcggctccacgccgcccg

SEQ ID NO: 273777 - DNA, 25 bp, Artificial
  Probe
aaagccatagcagattcgagatgct

SEQ ID NO: 273778 - DNA, 25 bp, Artificial
  Probe
atattaagacattctgctactgtgc

SEQ ID NO: 273779 - DNA, 25 bp, Artificial
  Probe
tctccagtgagggaagtcctgttaa

SEQ ID NO: 273780 - DNA, 25 bp, Artificial
  Probe
tgcaaagccatagcagattcgagat

SEQ ID NO: 273781 - DNA, 25 bp, Artificial
  Probe
aagacattctgctactgtgctgcaa

SEQ ID NO: 273782 - DNA, 25 bp, Artificial
  Probe
attaagacattctgctactgtgctg

SEQ ID NO: 273783 - DNA, 25 bp, Artificial
  Probe
gccatagcagattcgagatgctgtt

SEQ ID NO: 273784 - DNA, 25 bp, Artificial
  Probe
agacattctgctactgtgctgcaaa

SEQ ID NO: 273785 - DNA, 25 bp, Artificial
  Probe
ttctgctactgtgctgcaaagccat

SEQ ID NO: 273786 - DNA, 25 bp, Artificial
  Probe
cattctgctactgtgctgcaaagcc

SEQ ID NO: 273787 - DNA, 25 bp, Artificial
  Probe
tctgctactgtgctgcaaagccata

SEQ ID NO: 273788 - DNA, 25 bp, Artificial
  Probe
tgctgcaaagccatagcagattcga

SEQ ID NO: 273789 - DNA, 25 bp, Artificial
  Probe
ctactgtgctgcaaagccatagcag

SEQ ID NO: 273790 - DNA, 25 bp, Artificial
  Probe
gggctggatttttctccagtgaggg

SEQ ID NO: 273791 - DNA, 25 bp, Artificial
  Probe
ggacgaagccgaacctctgaaccgc

SEQ ID NO: 273792 - DNA, 25 bp, Artificial
  Probe
caaagccatagcagattcgagatgc

SEQ ID NO: 273793 - DNA, 25 bp, Artificial
  Probe
gcaaagccatagcagattcgagatg

SEQ ID NO: 273794 - DNA, 25 bp, Artificial
  Probe
ctccagtgagggaagtcctgttaaa

SEQ ID NO: 273795 - DNA, 25 bp, Artificial
  Probe
gacgaagccgaacctctgaaccgcc

SEQ ID NO: 273796 - DNA, 25 bp, Artificial
  Probe
ttatatattaagacattctgctact

SEQ ID NO: 273797 - DNA, 25 bp, Artificial
  Probe
atagcagattcgagatgctgttggg

SEQ ID NO: 273798 - DNA, 25 bp, Artificial
  Probe
tactgtgctgcaaagccatagcaga

SEQ ID NO: 273799 - DNA, 25 bp, Artificial
  Probe
tatattaagacattctgctactgtg

SEQ ID NO: 273800 - DNA, 25 bp, Artificial
  Probe
ttaagacattctgctactgtgctgc

SEQ ID NO: 273801 - DNA, 25 bp, Artificial
  Probe
attaactctagaataggaattggtg

SEQ ID NO: 273802 - DNA, 25 bp, Artificial
  Probe
ttgggggtgggatttgcaagaattt

SEQ ID NO: 273803 - DNA, 25 bp, Artificial
  Probe
ctgctactgtgctgcaaagccatag

SEQ ID NO: 273804 - DNA, 25 bp, Artificial
  Probe
aactctagaataggaattggtgttg

SEQ ID NO: 273805 - DNA, 25 bp, Artificial
  Probe
gtgctgcaaagccatagcagattcg

SEQ ID NO: 273806 - DNA, 25 bp, Artificial
  Probe
acattctgctactgtgctgcaaagc

SEQ ID NO: 273807 - DNA, 25 bp, Artificial
  Probe
aagccatagcagattcgagatgctg

SEQ ID NO: 273808 - DNA, 25 bp, Artificial
  Probe
tattaagacattctgctactgtgct

SEQ ID NO: 273809 - DNA, 25 bp, Artificial
  Probe
gctgcaaagccatagcagattcgag

SEQ ID NO: 273810 - DNA, 25 bp, Artificial
  Probe
atatattaagacattctgctactgt

SEQ ID NO: 273811 - DNA, 25 bp, Artificial
  Probe
ccatagcagattcgagatgctgttg

SEQ ID NO: 273812 - DNA, 25 bp, Artificial
  Probe
tgctactgtgctgcaaagccatagc

SEQ ID NO: 273813 - DNA, 25 bp, Artificial
  Probe
taggaattggtgttgggggtgggat

SEQ ID NO: 273814 - DNA, 25 bp, Artificial
  Probe
gcgcaggagacaggagagggacgaa

SEQ ID NO: 273815 - DNA, 25 bp, Artificial
  Probe
gacattctgctactgtgctgcaaag

SEQ ID NO: 273816 - DNA, 25 bp, Artificial
  Probe
ctgcaaagccatagcagattcgaga

SEQ ID NO: 273817 - DNA, 25 bp, Artificial
  Probe
gggacgaagccgaacctctgaaccg

SEQ ID NO: 273818 - DNA, 25 bp, Artificial
  Probe
ggctggatttttctccagtgaggga

SEQ ID NO: 273819 - DNA, 25 bp, Artificial
  Probe
tgtgtttcgagtaggacggcataag

SEQ ID NO: 273820 - DNA, 25 bp, Artificial
  Probe
gacaaggacacaacgcccgggtctt

SEQ ID NO: 273821 - DNA, 25 bp, Artificial
  Probe
tgtttcgagtaggacggcataagca

SEQ ID NO: 273822 - DNA, 25 bp, Artificial
  Probe
ctgtgtttcgagtaggacggcataa

SEQ ID NO: 273823 - DNA, 25 bp, Artificial
  Probe
ggacaaggacacaacgcccgggtct

SEQ ID NO: 273824 - DNA, 25 bp, Artificial
  Probe
aggccctgagtgctccctgtgtttc

SEQ ID NO: 273825 - DNA, 25 bp, Artificial
  Probe
agtaggacggcataagcaaggacaa

SEQ ID NO: 273826 - DNA, 25 bp, Artificial
  Probe
ggacacaacgcccgggtcttcacgt

SEQ ID NO: 273827 - DNA, 25 bp, Artificial
  Probe
cgaaggccctgagtgctccctgtgt

SEQ ID NO: 273828 - DNA, 25 bp, Artificial
  Probe
aggccgaaggccctgagtgctccct

SEQ ID NO: 273829 - DNA, 25 bp, Artificial
  Probe
gtgctccctgtgtttcgagtaggac

SEQ ID NO: 273830 - DNA, 25 bp, Artificial
  Probe
gacacaacgcccgggtcttcacgtg

SEQ ID NO: 273831 - DNA, 25 bp, Artificial
  Probe
tgctccctgtgtttcgagtaggacg

SEQ ID NO: 273832 - DNA, 25 bp, Artificial
  Probe
ggccctgagtgctccctgtgtttcg

SEQ ID NO: 273833 - DNA, 25 bp, Artificial
  Probe
cgggtcttcacgtggccccccagag

SEQ ID NO: 273834 - DNA, 25 bp, Artificial
  Probe
ggccgaaggccctgagtgctccctg

SEQ ID NO: 273835 - DNA, 25 bp, Artificial
  Probe
acgaggccgaaggccctgagtgctc

SEQ ID NO: 273836 - DNA, 25 bp, Artificial
  Probe
gccgaaggccctgagtgctccctgt

SEQ ID NO: 273837 - DNA, 25 bp, Artificial
  Probe
gggtcttcacgtggccccccagagg

SEQ ID NO: 273838 - DNA, 25 bp, Artificial
  Probe
aaggccctgagtgctccctgtgttt

SEQ ID NO: 273839 - DNA, 25 bp, Artificial
  Probe
aggacacaacgcccgggtcttcacg

SEQ ID NO: 273840 - DNA, 25 bp, Artificial
  Probe
tccctgtgtttcgagtaggacggca

SEQ ID NO: 273841 - DNA, 25 bp, Artificial
  Probe
gtttcgagtaggacggcataagcaa

SEQ ID NO: 273842 - DNA, 25 bp, Artificial
  Probe
gagtgctccctgtgtttcgagtagg

SEQ ID NO: 273843 - DNA, 25 bp, Artificial
  Probe
agtgctccctgtgtttcgagtagga

SEQ ID NO: 273844 - DNA, 25 bp, Artificial
  Probe
ccctgtgtttcgagtaggacggcat

SEQ ID NO: 273845 - DNA, 25 bp, Artificial
  Probe
cacgaggccgaaggccctgagtgct

SEQ ID NO: 273846 - DNA, 25 bp, Artificial
  Probe
cacaacgcccgggtcttcacgtggc

SEQ ID NO: 273847 - DNA, 25 bp, Artificial
  Probe
gtgtttcgagtaggacggcataagc

SEQ ID NO: 273848 - DNA, 25 bp, Artificial
  Probe
gaggccgaaggccctgagtgctccc

SEQ ID NO: 273849 - DNA, 25 bp, Artificial
  Probe
gctccctgtgtttcgagtaggacgg

SEQ ID NO: 273850 - DNA, 25 bp, Artificial
  Probe
tgagtgctccctgtgtttcgagtag

SEQ ID NO: 273851 - DNA, 25 bp, Artificial
  Probe
ttcgagtaggacggcataagcaagg

SEQ ID NO: 273852 - DNA, 25 bp, Artificial
  Probe
tttcgagtaggacggcataagcaag

SEQ ID NO: 273853 - DNA, 25 bp, Artificial
  Probe
cctgagtgctccctgtgtttcgagt

SEQ ID NO: 273854 - DNA, 25 bp, Artificial
  Probe
gccctgagtgctccctgtgtttcga

SEQ ID NO: 273855 - DNA, 25 bp, Artificial
  Probe
cgaggccgaaggccctgagtgctcc

SEQ ID NO: 273856 - DNA, 25 bp, Artificial
  Probe
ctgagtgctccctgtgtttcgagta

SEQ ID NO: 273857 - DNA, 25 bp, Artificial
  Probe
cctgtgtttcgagtaggacggcata

SEQ ID NO: 273858 - DNA, 25 bp, Artificial
  Probe
acacaacgcccgggtcttcacgtgg

SEQ ID NO: 273859 - DNA, 25 bp, Artificial
  Probe
ccgaaggccctgagtgctccctgtg

SEQ ID NO: 273860 - DNA, 25 bp, Artificial
  Probe
caaggacacaacgcccgggtcttca

SEQ ID NO: 273861 - DNA, 25 bp, Artificial
  Probe
gaaggccctgagtgctccctgtgtt

SEQ ID NO: 273862 - DNA, 25 bp, Artificial
  Probe
ctccctgtgtttcgagtaggacggc

SEQ ID NO: 273863 - DNA, 25 bp, Artificial
  Probe
ccctgagtgctccctgtgtttcgag

SEQ ID NO: 273864 - DNA, 25 bp, Artificial
  Probe
agcccgcatagtgctggattctgtg

SEQ ID NO: 273865 - DNA, 25 bp, Artificial
  Probe
gatgatgatcccagactgccagcgc

SEQ ID NO: 273866 - DNA, 25 bp, Artificial
  Probe
cttacactgatctccggcagatact

SEQ ID NO: 273867 - DNA, 25 bp, Artificial
  Probe
atgatcccagactgccagcgccggt

SEQ ID NO: 273868 - DNA, 25 bp, Artificial
  Probe
ggctgcttacactgatctccggcag

SEQ ID NO: 273869 - DNA, 25 bp, Artificial
  Probe
tgcttacactgatctccggcagata

SEQ ID NO: 273870 - DNA, 25 bp, Artificial
  Probe
gcccgcatagtgctggattctgtga

SEQ ID NO: 273871 - DNA, 25 bp, Artificial
  Probe
gtcccggatgatgatcccagactgc

SEQ ID NO: 273872 - DNA, 25 bp, Artificial
  Probe
gatcctgcaagagtcccggatgatg

SEQ ID NO: 273873 - DNA, 25 bp, Artificial
  Probe
ttttcggccactgctgtgtttaata

SEQ ID NO: 273874 - DNA, 25 bp, Artificial
  Probe
caattcgtcattttcggccactgct

SEQ ID NO: 273875 - DNA, 25 bp, Artificial
  Probe
ccgcatagtgctggattctgtgaag

SEQ ID NO: 273876 - DNA, 25 bp, Artificial
  Probe
gcttacactgatctccggcagatac

SEQ ID NO: 273877 - DNA, 25 bp, Artificial
  Probe
tcccggatgatgatcccagactgcc

SEQ ID NO: 273878 - DNA, 25 bp, Artificial
  Probe
tgatgatcccagactgccagcgccg

SEQ ID NO: 273879 - DNA, 25 bp, Artificial
  Probe
gaagcccgcatagtgctggattctg

SEQ ID NO: 273880 - DNA, 25 bp, Artificial
  Probe
tcattttcggccactgctgtgttta

SEQ ID NO: 273881 - DNA, 25 bp, Artificial
  Probe
gctggattctgtgaagttagaggcc

SEQ ID NO: 273882 - DNA, 25 bp, Artificial
  Probe
aattcgtcattttcggccactgctg

SEQ ID NO: 273883 - DNA, 25 bp, Artificial
  Probe
agatcctgcaagagtcccggatgat

SEQ ID NO: 273884 - DNA, 25 bp, Artificial
  Probe
aagcccgcatagtgctggattctgt

SEQ ID NO: 273885 - DNA, 25 bp, Artificial
  Probe
cccgcatagtgctggattctgtgaa

SEQ ID NO: 273886 - DNA, 25 bp, Artificial
  Probe
acggcgtgattttttgcattaaatc

SEQ ID NO: 273887 - DNA, 25 bp, Artificial
  Probe
tcgcgtgaggcagatcaagatcaag

SEQ ID NO: 273888 - DNA, 25 bp, Artificial
  Probe
cgcatagtgctggattctgtgaagt

SEQ ID NO: 273889 - DNA, 25 bp, Artificial
  Probe
agagtcccggatgatgatcccagac

SEQ ID NO: 273890 - DNA, 25 bp, Artificial
  Probe
agtcccggatgatgatcccagactg

SEQ ID NO: 273891 - DNA, 25 bp, Artificial
  Probe
ggatcctcgcgtgaggcagatcaag

SEQ ID NO: 273892 - DNA, 25 bp, Artificial
  Probe
gagtcccggatgatgatcccagact

SEQ ID NO: 273893 - DNA, 25 bp, Artificial
  Probe
acaattcgtcattttcggccactgc

SEQ ID NO: 273894 - DNA, 25 bp, Artificial
  Probe
gatgatcccagactgccagcgccgg

SEQ ID NO: 273895 - DNA, 25 bp, Artificial
  Probe
atgatgatcccagactgccagcgcc

SEQ ID NO: 273896 - DNA, 25 bp, Artificial
  Probe
caagagtcccggatgatgatcccag

SEQ ID NO: 273897 - DNA, 25 bp, Artificial
  Probe
cggatcctcgcgtgaggcagatcaa

SEQ ID NO: 273898 - DNA, 25 bp, Artificial
  Probe
tacaattcgtcattttcggccactg

SEQ ID NO: 273899 - DNA, 25 bp, Artificial
  Probe
aagagtcccggatgatgatcccaga

SEQ ID NO: 273900 - DNA, 25 bp, Artificial
  Probe
gatcctcgcgtgaggcagatcaaga

SEQ ID NO: 273901 - DNA, 25 bp, Artificial
  Probe
cattttcggccactgctgtgtttaa

SEQ ID NO: 273902 - DNA, 25 bp, Artificial
  Probe
ctcgcgtgaggcagatcaagatcaa

SEQ ID NO: 273903 - DNA, 25 bp, Artificial
  Probe
attttcggccactgctgtgtttaat

SEQ ID NO: 273904 - DNA, 25 bp, Artificial
  Probe
gctgcttacactgatctccggcaga

SEQ ID NO: 273905 - DNA, 25 bp, Artificial
  Probe
cccggatgatgatcccagactgcca

SEQ ID NO: 273906 - DNA, 25 bp, Artificial
  Probe
ctgcttacactgatctccggcagat

SEQ ID NO: 273907 - DNA, 25 bp, Artificial
  Probe
tttcggccactgctgtgtttaataa

SEQ ID NO: 273908 - DNA, 25 bp, Artificial
  Probe
atcctgcaagagtcccggatgatga

SEQ ID NO: 273909 - DNA, 25 bp, Artificial
  Probe
aggctgcttacactgatctccggca

SEQ ID NO: 273910 - DNA, 25 bp, Artificial
  Probe
aaggagcctccagttggtcctcaac

SEQ ID NO: 273911 - DNA, 25 bp, Artificial
  Probe
gcctctcaagagagagcctcaagag

SEQ ID NO: 273912 - DNA, 25 bp, Artificial
  Probe
tcacattaggccagccagggccttc

SEQ ID NO: 273913 - DNA, 25 bp, Artificial
  Probe
ctggggatcttctcttgctgtattt

SEQ ID NO: 273914 - DNA, 25 bp, Artificial
  Probe
aatcaccatcacacagacaggcagg

SEQ ID NO: 273915 - DNA, 25 bp, Artificial
  Probe
gctggggatcttctcttgctgtatt

SEQ ID NO: 273916 - DNA, 25 bp, Artificial
  Probe
aaccagctggggatcttctcttgct

SEQ ID NO: 273917 - DNA, 25 bp, Artificial
  Probe
tcagaaagggcctctcaagagagag

SEQ ID NO: 273918 - DNA, 25 bp, Artificial
  Probe
ggcctctcaagagagagcctcaaga

SEQ ID NO: 273919 - DNA, 25 bp, Artificial
  Probe
caggaaggagcctccagttggtcct

SEQ ID NO: 273920 - DNA, 25 bp, Artificial
  Probe
aagagagagcctcaagagctgcacc

SEQ ID NO: 273921 - DNA, 25 bp, Artificial
  Probe
agcctcaagagctgcaccaggagca

SEQ ID NO: 273922 - DNA, 25 bp, Artificial
  Probe
cttgctgtattttctgtctggggaa

SEQ ID NO: 273923 - DNA, 25 bp, Artificial
  Probe
agagagcctcaagagctgcaccagg

SEQ ID NO: 273924 - DNA, 25 bp, Artificial
  Probe
aaagctattgtggacctgacaggac

SEQ ID NO: 273925 - DNA, 25 bp, Artificial
  Probe
caatcaccatcacacagacaggcag

SEQ ID NO: 273926 - DNA, 25 bp, Artificial
  Probe
agagagagcctcaagagctgcacca

SEQ ID NO: 273927 - DNA, 25 bp, Artificial
  Probe
tcaccatcacacagacaggcaggaa

SEQ ID NO: 273928 - DNA, 25 bp, Artificial
  Probe
aagctattgtggacctgacaggact

SEQ ID NO: 273929 - DNA, 25 bp, Artificial
  Probe
gagagagcctcaagagctgcaccag

SEQ ID NO: 273930 - DNA, 25 bp, Artificial
  Probe
cctctcaagagagagcctcaagagc

SEQ ID NO: 273931 - DNA, 25 bp, Artificial
  Probe
catcaaagctattgtggacctgaca

SEQ ID NO: 273932 - DNA, 25 bp, Artificial
  Probe
ctctcaagagagagcctcaagagct

SEQ ID NO: 273933 - DNA, 25 bp, Artificial
  Probe
aggtttggtgtgaatgccgaatgcc

SEQ ID NO: 273934 - DNA, 25 bp, Artificial
  Probe
acacagacaggcaggaaggagcctc

SEQ ID NO: 273935 - DNA, 25 bp, Artificial
  Probe
agccaatcaccatcacacagacagg

SEQ ID NO: 273936 - DNA, 25 bp, Artificial
  Probe
cagaaagggcctctcaagagagagc

SEQ ID NO: 273937 - DNA, 25 bp, Artificial
  Probe
gagcctcaagagctgcaccaggagc

SEQ ID NO: 273938 - DNA, 25 bp, Artificial
  Probe
atcaccatcacacagacaggcagga

SEQ ID NO: 273939 - DNA, 25 bp, Artificial
  Probe
agctggggatcttctcttgctgtat

SEQ ID NO: 273940 - DNA, 25 bp, Artificial
  Probe
caccatcacacagacaggcaggaag

SEQ ID NO: 273941 - DNA, 25 bp, Artificial
  Probe
ctcttgctgtattttctgtctgggg

SEQ ID NO: 273942 - DNA, 25 bp, Artificial
  Probe
gcctcaagagctgcaccaggagcaa

SEQ ID NO: 273943 - DNA, 25 bp, Artificial
  Probe
ggaaggagcctccagttggtcctca

SEQ ID NO: 273944 - DNA, 25 bp, Artificial
  Probe
accatcacacagacaggcaggaagg

SEQ ID NO: 273945 - DNA, 25 bp, Artificial
  Probe
cacagacaggcaggaaggagcctcc

SEQ ID NO: 273946 - DNA, 25 bp, Artificial
  Probe
tcaaagctattgtggacctgacagg

SEQ ID NO: 273947 - DNA, 25 bp, Artificial
  Probe
tcatcaaagctattgtggacctgac

SEQ ID NO: 273948 - DNA, 25 bp, Artificial
  Probe
aggacctcagcctaaagccaatcac

SEQ ID NO: 273949 - DNA, 25 bp, Artificial
  Probe
cagctggggatcttctcttgctgta

SEQ ID NO: 273950 - DNA, 25 bp, Artificial
  Probe
aggaaggagcctccagttggtcctc

SEQ ID NO: 273951 - DNA, 25 bp, Artificial
  Probe
ggggatcttctcttgctgtattttc

SEQ ID NO: 273952 - DNA, 25 bp, Artificial
  Probe
ggagcctccagttggtcctcaactg

SEQ ID NO: 273953 - DNA, 25 bp, Artificial
  Probe
catcacacagacaggcaggaaggag

SEQ ID NO: 273954 - DNA, 25 bp, Artificial
  Probe
agagcctcaagagctgcaccaggag

SEQ ID NO: 273955 - DNA, 25 bp, Artificial
  Probe
ccagctggggatcttctcttgctgt

SEQ ID NO: 273956 - DNA, 25 bp, Artificial
  Probe
tttcgtgcgtctgctgttgctgtcc

SEQ ID NO: 273957 - DNA, 25 bp, Artificial
  Probe
gctgttgctgtccacagcttttctt

SEQ ID NO: 273958 - DNA, 25 bp, Artificial
  Probe
cacagcttttcttgataggcctagt

SEQ ID NO: 273959 - DNA, 25 bp, Artificial
  Probe
tgcgtctgctgttgctgtccacagc

SEQ ID NO: 273960 - DNA, 25 bp, Artificial
  Probe
tgtccacagcttttcttgataggcc

SEQ ID NO: 273961 - DNA, 25 bp, Artificial
  Probe
tccacagcttttcttgataggccta

SEQ ID NO: 273962 - DNA, 25 bp, Artificial
  Probe
tctgctgttgctgtccacagctttt

SEQ ID NO: 273963 - DNA, 25 bp, Artificial
  Probe
gtgcgtctgctgttgctgtccacag

SEQ ID NO: 273964 - DNA, 25 bp, Artificial
  Probe
ctgctgttgctgtccacagcttttc

SEQ ID NO: 273965 - DNA, 25 bp, Artificial
  Probe
agcttttcttgataggcctagtaca

SEQ ID NO: 273966 - DNA, 25 bp, Artificial
  Probe
ttgctgtccacagcttttcttgata

SEQ ID NO: 273967 - DNA, 25 bp, Artificial
  Probe
acggttctgttatatctcatatatg

SEQ ID NO: 273968 - DNA, 25 bp, Artificial
  Probe
ttcgtgcgtctgctgttgctgtcca

SEQ ID NO: 273969 - DNA, 25 bp, Artificial
  Probe
gttgctgtccacagcttttcttgat

SEQ ID NO: 273970 - DNA, 25 bp, Artificial
  Probe
tgctgttgctgtccacagcttttct

SEQ ID NO: 273971 - DNA, 25 bp, Artificial
  Probe
ggttctgttatatctcatatatgac

SEQ ID NO: 273972 - DNA, 25 bp, Artificial
  Probe
cgtgcgtctgctgttgctgtccaca

SEQ ID NO: 273973 - DNA, 25 bp, Artificial
  Probe
gcttttcttgataggcctagtacaa

SEQ ID NO: 273974 - DNA, 25 bp, Artificial
  Probe
tcgtgcgtctgctgttgctgtccac

SEQ ID NO: 273975 - DNA, 25 bp, Artificial
  Probe
gtccacagcttttcttgataggcct

SEQ ID NO: 273976 - DNA, 25 bp, Artificial
  Probe
acagcttttcttgataggcctagta

SEQ ID NO: 273977 - DNA, 25 bp, Artificial
  Probe
tgttgctgtccacagcttttcttga

SEQ ID NO: 273978 - DNA, 25 bp, Artificial
  Probe
gctgtccacagcttttcttgatagg

SEQ ID NO: 273979 - DNA, 25 bp, Artificial
  Probe
gcgtctgctgttgctgtccacagct

SEQ ID NO: 273980 - DNA, 25 bp, Artificial
  Probe
cgtctgctgttgctgtccacagctt

SEQ ID NO: 273981 - DNA, 25 bp, Artificial
  Probe
gtctgctgttgctgtccacagcttt

SEQ ID NO: 273982 - DNA, 25 bp, Artificial
  Probe
cggttctgttatatctcatatatga

SEQ ID NO: 273983 - DNA, 25 bp, Artificial
  Probe
ccacagcttttcttgataggcctag

SEQ ID NO: 273984 - DNA, 25 bp, Artificial
  Probe
ctgttgctgtccacagcttttcttg

SEQ ID NO: 273985 - DNA, 25 bp, Artificial
  Probe
ctgtccacagcttttcttgataggc

SEQ ID NO: 273986 - DNA, 25 bp, Artificial
  Probe
tgctgtccacagcttttcttgatag

SEQ ID NO: 273987 - DNA, 25 bp, Artificial
  Probe
cagcttttcttgataggcctagtac

SEQ ID NO: 273988 - DNA, 25 bp, Artificial
  Probe
tccctgcaaagtaccgccaaaactg

SEQ ID NO: 273989 - DNA, 25 bp, Artificial
  Probe
gtattgcttatctgccgtgatttgc

SEQ ID NO: 273990 - DNA, 25 bp, Artificial
  Probe
atgacattggccaggttgccacgcc

SEQ ID NO: 273991 - DNA, 25 bp, Artificial
  Probe
cgctcgatgggtgctaccgccgtct

SEQ ID NO: 273992 - DNA, 25 bp, Artificial
  Probe
cacgccagaaggacaggactccctg

SEQ ID NO: 273993 - DNA, 25 bp, Artificial
  Probe
cgtgatttgcttgctggcgtgctgc

SEQ ID NO: 273994 - DNA, 25 bp, Artificial
  Probe
agggtacacaaagcacaaggatgtg

SEQ ID NO: 273995 - DNA, 25 bp, Artificial
  Probe
cttgctggcgtgctgcacctgcagc

SEQ ID NO: 273996 - DNA, 25 bp, Artificial
  Probe
aaagcacaaggatgtggccccagca

SEQ ID NO: 273997 - DNA, 25 bp, Artificial
  Probe
agcagcagcttgacccgctcgatgg

SEQ ID NO: 273998 - DNA, 25 bp, Artificial
  Probe
gacaggactccctgttccttgggga

SEQ ID NO: 273999 - DNA, 25 bp, Artificial
  Probe
cgcagtctatgatgcccttgtattg

SEQ ID NO: 274000 - DNA, 25 bp, Artificial
  Probe
catctgtcatgttgaagcaaaaaag

SEQ ID NO: 274001 - DNA, 25 bp, Artificial
  Probe
agcttgacccgctcgatgggtgcta

SEQ ID NO: 274002 - DNA, 25 bp, Artificial
  Probe
gactccctgttccttggggatacga

SEQ ID NO: 274003 - DNA, 25 bp, Artificial
  Probe
gcttatctgccgtgatttgcttgct

SEQ ID NO: 274004 - DNA, 25 bp, Artificial
  Probe
ttggcgaaggacacagcggcatctg

SEQ ID NO: 274005 - DNA, 25 bp, Artificial
  Probe
atctgatgacattggccaggttgcc

SEQ ID NO: 274006 - DNA, 25 bp, Artificial
  Probe
agcagcaccacctgatgccaggttc

SEQ ID NO: 274007 - DNA, 25 bp, Artificial
  Probe
ggacacagcggcatctgtcatgttg

SEQ ID NO: 274008 - DNA, 25 bp, Artificial
  Probe
ggttgccacgccagaaggacaggac

SEQ ID NO: 274009 - DNA, 25 bp, Artificial
  Probe
cagcagcaccacctgatgccaggtt

SEQ ID NO: 274010 - DNA, 25 bp, Artificial
  Probe
caggttccctgcaaagtaccgccaa

SEQ ID NO: 274011 - DNA, 25 bp, Artificial
  Probe
taccgccgtcttggagatggccgcg

SEQ ID NO: 274012 - DNA, 25 bp, Artificial
  Probe
caggcgactgcaggacaggactgcc

SEQ ID NO: 274013 - DNA, 25 bp, Artificial
  Probe
tctgcttgtatttatctttgaaggc

SEQ ID NO: 274014 - DNA, 25 bp, Artificial
  Probe
cacctgatgccaggttccctgcaaa

SEQ ID NO: 274015 - DNA, 25 bp, Artificial
  Probe
gtacaggcccttaatcccatcagat

SEQ ID NO: 274016 - DNA, 25 bp, Artificial
  Probe
actccaccagccaagaagtccttgg

SEQ ID NO: 274017 - DNA, 25 bp, Artificial
  Probe
ccgtcttggagatggccgcggccac

SEQ ID NO: 274018 - DNA, 25 bp, Artificial
  Probe
atcagctgctagacgggtacgggca

SEQ ID NO: 274019 - DNA, 25 bp, Artificial
  Probe
aagtatctgatgacattggccaggt

SEQ ID NO: 274020 - DNA, 25 bp, Artificial
  Probe
gtgctaccgccgtcttggagatggc

SEQ ID NO: 274021 - DNA, 25 bp, Artificial
  Probe
tctatgatgcccttgtattgcttat

SEQ ID NO: 274022 - DNA, 25 bp, Artificial
  Probe
cagaaggacaggactccctgttcct

SEQ ID NO: 274023 - DNA, 25 bp, Artificial
  Probe
tgccaggttccctgcaaagtaccgc

SEQ ID NO: 274024 - DNA, 25 bp, Artificial
  Probe
aagtccttggcgaaggacacagcgg

SEQ ID NO: 274025 - DNA, 25 bp, Artificial
  Probe
tgttccttggggatacgaaccacgc

SEQ ID NO: 274026 - DNA, 25 bp, Artificial
  Probe
gcccttaatcccatcagatttgtag

SEQ ID NO: 274027 - DNA, 25 bp, Artificial
  Probe
tgcagcagcagcttgacccgctcga

SEQ ID NO: 274028 - DNA, 25 bp, Artificial
  Probe
tgctagacgggtacgggcaaaatca

SEQ ID NO: 274029 - DNA, 25 bp, Artificial
  Probe
gtgctgcacctgcagcagcagcttg

SEQ ID NO: 274030 - DNA, 25 bp, Artificial
  Probe
ggccaggttgccacgccagaaggac

SEQ ID NO: 274031 - DNA, 25 bp, Artificial
  Probe
tgcttgctggcgtgctgcacctgca

SEQ ID NO: 274032 - DNA, 25 bp, Artificial
  Probe
cagctttgcccacatcagctgctag

SEQ ID NO: 274033 - DNA, 25 bp, Artificial
  Probe
tcgatgggtgctaccgccgtcttgg

SEQ ID NO: 274034 - DNA, 25 bp, Artificial
  Probe
cagtatgctggcaaatacatcctct

SEQ ID NO: 274035 - DNA, 25 bp, Artificial
  Probe
tggtaccaccggaccacagtcagca

SEQ ID NO: 274036 - DNA, 25 bp, Artificial
  Probe
ccaattatgcgctggtaccaccgga

SEQ ID NO: 274037 - DNA, 25 bp, Artificial
  Probe
ggccgcctcttttgggaacccatga

SEQ ID NO: 274038 - DNA, 25 bp, Artificial
  Probe
gcataccaattatgcgctggtacca

SEQ ID NO: 274039 - DNA, 25 bp, Artificial
  Probe
tggagcccttaccatcgatggggag

SEQ ID NO: 274040 - DNA, 25 bp, Artificial
  Probe
gcctggtcattctgggcttcccttg

SEQ ID NO: 274041 - DNA, 25 bp, Artificial
  Probe
agaacttggcccattcggcctggtc

SEQ ID NO: 274042 - DNA, 25 bp, Artificial
  Probe
tgcgctggtaccaccggaccacagt

SEQ ID NO: 274043 - DNA, 25 bp, Artificial
  Probe
tcaacgtagccagctactgaggtct

SEQ ID NO: 274044 - DNA, 25 bp, Artificial
  Probe
gtcagcaacgtgaagatggacatcc

SEQ ID NO: 274045 - DNA, 25 bp, Artificial
  Probe
ccaatttggcaaacaggagccaggc

SEQ ID NO: 274046 - DNA, 25 bp, Artificial
  Probe
catcctctttgtcaacgtagccagc

SEQ ID NO: 274047 - DNA, 25 bp, Artificial
  Probe
agtatggagcccttaccatcgatgg

SEQ ID NO: 274048 - DNA, 25 bp, Artificial
  Probe
gagaagtccaagacagactgccatg

SEQ ID NO: 274049 - DNA, 25 bp, Artificial
  Probe
gaccaataccttgaactgaatgcac

SEQ ID NO: 274050 - DNA, 25 bp, Artificial
  Probe
gctggcaaatacatcctctttgtca

SEQ ID NO: 274051 - DNA, 25 bp, Artificial
  Probe
aacttggcccattcggcctggtcat

SEQ ID NO: 274052 - DNA, 25 bp, Artificial
  Probe
gaggaatacattccttttaagcagt

SEQ ID NO: 274053 - DNA, 25 bp, Artificial
  Probe
acaagaagaacttggcccattcggc

SEQ ID NO: 274054 - DNA, 25 bp, Artificial
  Probe
gtctcaagtacgttcgaccgggtgg

SEQ ID NO: 274055 - DNA, 25 bp, Artificial
  Probe
tgtccctgctcctggccgggtttgt

SEQ ID NO: 274056 - DNA, 25 bp, Artificial
  Probe
ctgccatggcggtatgagcggtacc

SEQ ID NO: 274057 - DNA, 25 bp, Artificial
  Probe
ctttgtcaacgtagccagctactga

SEQ ID NO: 274058 - DNA, 25 bp, Artificial
  Probe
ccttttaagcagtatgctggcaaat

SEQ ID NO: 274059 - DNA, 25 bp, Artificial
  Probe
caaacaggagccaggcgagaactcg

SEQ ID NO: 274060 - DNA, 25 bp, Artificial
  Probe
actgcggaactcctgggctcacctg

SEQ ID NO: 274061 - DNA, 25 bp, Artificial
  Probe
ctgcggaactcctgggctcacctgg

SEQ ID NO: 274062 - DNA, 25 bp, Artificial
  Probe
catggcggtatgagcggtaccatct

SEQ ID NO: 274063 - DNA, 25 bp, Artificial
  Probe
gtaccatctacgagtatggagccct

SEQ ID NO: 274064 - DNA, 25 bp, Artificial
  Probe
agcggtaccatctacgagtatggag

SEQ ID NO: 274065 - DNA, 25 bp, Artificial
  Probe
gcccattcggcctggtcattctggg

SEQ ID NO: 274066 - DNA, 25 bp, Artificial
  Probe
atgcactacaagaagaacttggccc

SEQ ID NO: 274067 - DNA, 25 bp, Artificial
  Probe
gacagactgccatggcggtatgagc

SEQ ID NO: 274068 - DNA, 25 bp, Artificial
  Probe
caccggaccacagtcagcaacgtga

SEQ ID NO: 274069 - DNA, 25 bp, Artificial
  Probe
ctacgagtatggagcccttaccatc

SEQ ID NO: 274070 - DNA, 25 bp, Artificial
  Probe
ctggccgcctcttttgggaacccat

SEQ ID NO: 274071 - DNA, 25 bp, Artificial
  Probe
ggtaccaccggaccacagtcagcaa

SEQ ID NO: 274072 - DNA, 25 bp, Artificial
  Probe
gcactacaagaagaacttggcccat

SEQ ID NO: 274073 - DNA, 25 bp, Artificial
  Probe
gagccaggcgagaactcggagatcc

SEQ ID NO: 274074 - DNA, 25 bp, Artificial
  Probe
gcctcttttgggaacccatgaagat

SEQ ID NO: 274075 - DNA, 25 bp, Artificial
  Probe
aagatggacatcctgtcctatatga

SEQ ID NO: 274076 - DNA, 25 bp, Artificial
  Probe
ttgcaaccaatttggcaaacaggag

SEQ ID NO: 274077 - DNA, 25 bp, Artificial
  Probe
tacattccttttaagcagtatgctg

SEQ ID NO: 274078 - DNA, 25 bp, Artificial
  Probe
gggccagatggcataccaattatgc

SEQ ID NO: 274079 - DNA, 25 bp, Artificial
  Probe
cggtatgagcggtaccatctacgag

SEQ ID NO: 274080 - DNA, 25 bp, Artificial
  Probe
ggtggctacggcggcggaagttcca

SEQ ID NO: 274081 - DNA, 25 bp, Artificial
  Probe
ggcggtggtcacggcggcagttccg

SEQ ID NO: 274082 - DNA, 25 bp, Artificial
  Probe
cagcggcggtggtcacggcggcagt

SEQ ID NO: 274083 - DNA, 25 bp, Artificial
  Probe
cagagcggaagcggagggttcaaga

SEQ ID NO: 274084 - DNA, 25 bp, Artificial
  Probe
cggaagttccagcggcggtggtcac

SEQ ID NO: 274085 - DNA, 25 bp, Artificial
  Probe
cggaagttccagtggaggccagagc

SEQ ID NO: 274086 - DNA, 25 bp, Artificial
  Probe
agttccagtggaggccagagcggaa

SEQ ID NO: 274087 - DNA, 25 bp, Artificial
  Probe
gcggcagttccggtggtggctacgg

SEQ ID NO: 274088 - DNA, 25 bp, Artificial
  Probe
gcggcggaagttccagtggaggcca

SEQ ID NO: 274089 - DNA, 25 bp, Artificial
  Probe
gtggtcacggcggcagttccggtgg

SEQ ID NO: 274090 - DNA, 25 bp, Artificial
  Probe
cggcggtggtcacggcggcagttcc

SEQ ID NO: 274091 - DNA, 25 bp, Artificial
  Probe
tcacggcggcagttccggtggtggc

SEQ ID NO: 274092 - DNA, 25 bp, Artificial
  Probe
gtggctacggcggcggaagttccag

SEQ ID NO: 274093 - DNA, 25 bp, Artificial
  Probe
agttccagcggcggtggtcacggcg

SEQ ID NO: 274094 - DNA, 25 bp, Artificial
  Probe
gccagagcggaagcggagggttcaa

SEQ ID NO: 274095 - DNA, 25 bp, Artificial
  Probe
gaagttccagcggcggtggtcacgg

SEQ ID NO: 274096 - DNA, 25 bp, Artificial
  Probe
cacggcggcagttccggtggtggct

SEQ ID NO: 274097 - DNA, 25 bp, Artificial
  Probe
ggaggccagagcggaagcggagggt

SEQ ID NO: 274098 - DNA, 25 bp, Artificial
  Probe
ggcagttccggtggtggctacggcg

SEQ ID NO: 274099 - DNA, 25 bp, Artificial
  Probe
gtggtggctacggcggcggaagttc

SEQ ID NO: 274100 - DNA, 25 bp, Artificial
  Probe
ttccagcggcggtggtcacggcggc

SEQ ID NO: 274101 - DNA, 25 bp, Artificial
  Probe
gcagttccggtggtggctacggcgg

SEQ ID NO: 274102 - DNA, 25 bp, Artificial
  Probe
tccagcggcggtggtcacggcggca

SEQ ID NO: 274103 - DNA, 25 bp, Artificial
  Probe
tggtcacggcggcagttccggtggt

SEQ ID NO: 274104 - DNA, 25 bp, Artificial
  Probe
agtggaggccagagcggaagcggag

SEQ ID NO: 274105 - DNA, 25 bp, Artificial
  Probe
gctacggcggcggaagttccagcgg

SEQ ID NO: 274106 - DNA, 25 bp, Artificial
  Probe
aggccagagcggaagcggagggttc

SEQ ID NO: 274107 - DNA, 25 bp, Artificial
  Probe
ggctacggcggcggaagttccagtg

SEQ ID NO: 274108 - DNA, 25 bp, Artificial
  Probe
ggtcacggcggcagttccggtggtg

SEQ ID NO: 274109 - DNA, 25 bp, Artificial
  Probe
agcggcggtggtcacggcggcagtt

SEQ ID NO: 274110 - DNA, 25 bp, Artificial
  Probe
tccggtggtggctacggcggcggaa

SEQ ID NO: 274111 - DNA, 25 bp, Artificial
  Probe
gttccggtggtggctacggcggcgg

SEQ ID NO: 274112 - DNA, 25 bp, Artificial
  Probe
ttccagtggaggccagagcggaagc

SEQ ID NO: 274113 - DNA, 25 bp, Artificial
  Probe
gaagttccagtggaggccagagcgg

SEQ ID NO: 274114 - DNA, 25 bp, Artificial
  Probe
cggtggtggctacggcggcggaagt

SEQ ID NO: 274115 - DNA, 25 bp, Artificial
  Probe
cggcggaagttccagcggcggtggt

SEQ ID NO: 274116 - DNA, 25 bp, Artificial
  Probe
ggaagttccagtggaggccagagcg

SEQ ID NO: 274117 - DNA, 25 bp, Artificial
  Probe
ccagtggaggccagagcggaagcgg

SEQ ID NO: 274118 - DNA, 25 bp, Artificial
  Probe
tacggcggcggaagttccagtggag

SEQ ID NO: 274119 - DNA, 25 bp, Artificial
  Probe
tacggcggcggaagttccagcggcg

SEQ ID NO: 274120 - DNA, 25 bp, Artificial
  Probe
gtggaggccagagcggaagcggagg

SEQ ID NO: 274121 - DNA, 25 bp, Artificial
  Probe
cggcggcggaagttccagtggaggc

SEQ ID NO: 274122 - DNA, 25 bp, Artificial
  Probe
cggcggcggaagttccagcggcggt

SEQ ID NO: 274123 - DNA, 25 bp, Artificial
  Probe
ggcggaagttccagtggaggccaga

SEQ ID NO: 274124 - DNA, 25 bp, Artificial
  Probe
ggcggaagttccagcggcggtggtc

SEQ ID NO: 274125 - DNA, 25 bp, Artificial
  Probe
cggcggcagttccggtggtggctac

SEQ ID NO: 274126 - DNA, 25 bp, Artificial
  Probe
gacgggccccacgtgctactatact

SEQ ID NO: 274127 - DNA, 25 bp, Artificial
  Probe
accggatgaagttcgcctgctatta

SEQ ID NO: 274128 - DNA, 25 bp, Artificial
  Probe
cctcgacagcgaaggtcactggagc

SEQ ID NO: 274129 - DNA, 25 bp, Artificial
  Probe
cgcctgctattatccccgagtggag

SEQ ID NO: 274130 - DNA, 25 bp, Artificial
  Probe
ctcgacagcgaaggtcactggagcg

SEQ ID NO: 274131 - DNA, 25 bp, Artificial
  Probe
ctccataggtcagacccgcaacttt

SEQ ID NO: 274132 - DNA, 25 bp, Artificial
  Probe
tcctcgacagcgaaggtcactggag

SEQ ID NO: 274133 - DNA, 25 bp, Artificial
  Probe
gtgagtcactttgagaccgacgggc

SEQ ID NO: 274134 - DNA, 25 bp, Artificial
  Probe
atccccgagtggagtatggcttcca

SEQ ID NO: 274135 - DNA, 25 bp, Artificial
  Probe
ttgcgtgagtcactttgagaccgac

SEQ ID NO: 274136 - DNA, 25 bp, Artificial
  Probe
ctgaccgttgcgtgagtcactttga

SEQ ID NO: 274137 - DNA, 25 bp, Artificial
  Probe
tggttaccggatgaagttcgcctgc

SEQ ID NO: 274138 - DNA, 25 bp, Artificial
  Probe
ctctctgaccgttgcgtgagtcact

SEQ ID NO: 274139 - DNA, 25 bp, Artificial
  Probe
ggaagtgtcctcgacagcgaaggtc

SEQ ID NO: 274140 - DNA, 25 bp, Artificial
  Probe
ctatactttgactcggtcccgacca

SEQ ID NO: 274141 - DNA, 25 bp, Artificial
  Probe
cacgtgctactatactttgactcgg

SEQ ID NO: 274142 - DNA, 25 bp, Artificial
  Probe
tcgacagcgaaggtcactggagcga

SEQ ID NO: 274143 - DNA, 25 bp, Artificial
  Probe
atgaagttcgcctgctattatcccc

SEQ ID NO: 274144 - DNA, 25 bp, Artificial
  Probe
gatggttaccggatgaagttcgcct

SEQ ID NO: 274145 - DNA, 25 bp, Artificial
  Probe
gagtcactttgagaccgacgggccc

SEQ ID NO: 274146 - DNA, 25 bp, Artificial
  Probe
ccacgtgctactatactttgactcg

SEQ ID NO: 274147 - DNA, 25 bp, Artificial
  Probe
ccccgagtggagtatggcttccagg

SEQ ID NO: 274148 - DNA, 25 bp, Artificial
  Probe
cctgcctctctgaccgttgcgtgag

SEQ ID NO: 274149 - DNA, 25 bp, Artificial
  Probe
tcctgcatttcacaaaggatgccaa

SEQ ID NO: 274150 - DNA, 25 bp, Artificial
  Probe
cgtgctactatactttgactcggtc

SEQ ID NO: 274151 - DNA, 25 bp, Artificial
  Probe
gacctgcctctctgaccgttgcgtg

SEQ ID NO: 274152 - DNA, 25 bp, Artificial
  Probe
tccataggtcagacccgcaactttc

SEQ ID NO: 274153 - DNA, 25 bp, Artificial
  Probe
gccccacgtgctactatactttgac

SEQ ID NO: 274154 - DNA, 25 bp, Artificial
  Probe
cgttgcgtgagtcactttgagaccg

SEQ ID NO: 274155 - DNA, 25 bp, Artificial
  Probe
ctgcatttcacaaaggatgccaagg

SEQ ID NO: 274156 - DNA, 25 bp, Artificial
  Probe
ggccccacgtgctactatactttga

SEQ ID NO: 274157 - DNA, 25 bp, Artificial
  Probe
cctctctgaccgttgcgtgagtcac

SEQ ID NO: 274158 - DNA, 25 bp, Artificial
  Probe
taccggatgaagttcgcctgctatt

SEQ ID NO: 274159 - DNA, 25 bp, Artificial
  Probe
tgagtcactttgagaccgacgggcc

SEQ ID NO: 274160 - DNA, 25 bp, Artificial
  Probe
ttatccccgagtggagtatggcttc

SEQ ID NO: 274161 - DNA, 25 bp, Artificial
  Probe
agttcgcctgctattatccccgagt

SEQ ID NO: 274162 - DNA, 25 bp, Artificial
  Probe
ctttggagccttgcaagaggtggcc

SEQ ID NO: 274163 - DNA, 25 bp, Artificial
  Probe
ctattatccccgagtggagtatggc

SEQ ID NO: 274164 - DNA, 25 bp, Artificial
  Probe
tgacctgcctctctgaccgttgcgt

SEQ ID NO: 274165 - DNA, 25 bp, Artificial
  Probe
gcgtgagtcactttgagaccgacgg

SEQ ID NO: 274166 - DNA, 25 bp, Artificial
  Probe
aagtgtcctcgacagcgaaggtcac

SEQ ID NO: 274167 - DNA, 25 bp, Artificial
  Probe
tgaagttcgcctgctattatccccg

SEQ ID NO: 274168 - DNA, 25 bp, Artificial
  Probe
tctccaccttgtgctctgcagacgt

SEQ ID NO: 274169 - DNA, 25 bp, Artificial
  Probe
agctgacctgcctctctgaccgttg

SEQ ID NO: 274170 - DNA, 25 bp, Artificial
  Probe
ttaccggatgaagttcgcctgctat

SEQ ID NO: 274171 - DNA, 25 bp, Artificial
  Probe
tactatactttgactcggtcccgac

SEQ ID NO: 274172 - DNA, 25 bp, Artificial
  Probe
cttgcacggagaacgtcaagtggtt

SEQ ID NO: 274173 - DNA, 25 bp, Artificial
  Probe
aatggttaccgcaggacgcagcccc

SEQ ID NO: 274174 - DNA, 25 bp, Artificial
  Probe
ccccttgcacggagaacgtcaagtg

SEQ ID NO: 274175 - DNA, 25 bp, Artificial
  Probe
tggtttgtgtttcaggattccgcca

SEQ ID NO: 274176 - DNA, 25 bp, Artificial
  Probe
ttaacatccggaacatgtgcccgag

SEQ ID NO: 274177 - DNA, 25 bp, Artificial
  Probe
ccttgcacggagaacgtcaagtggt

SEQ ID NO: 274178 - DNA, 25 bp, Artificial
  Probe
accagaccattcgaaatggttaccg

SEQ ID NO: 274179 - DNA, 25 bp, Artificial
  Probe
acatccggaacatgtgcccgaggac

SEQ ID NO: 274180 - DNA, 25 bp, Artificial
  Probe
caaccagaccattcgaaatggttac

SEQ ID NO: 274181 - DNA, 25 bp, Artificial
  Probe
gtaatggatcaccacaaccagacca

SEQ ID NO: 274182 - DNA, 25 bp, Artificial
  Probe
tgcccgaggacattagacactacta

SEQ ID NO: 274183 - DNA, 25 bp, Artificial
  Probe
gttaacatccggaacatgtgcccga

SEQ ID NO: 274184 - DNA, 25 bp, Artificial
  Probe
cggtaatggatcaccacaaccagac

SEQ ID NO: 274185 - DNA, 25 bp, Artificial
  Probe
cccttgcacggagaacgtcaagtgg

SEQ ID NO: 274186 - DNA, 25 bp, Artificial
  Probe
aacatgtgcccgaggacattagaca

SEQ ID NO: 274187 - DNA, 25 bp, Artificial
  Probe
atgtgcccgaggacattagacacta

SEQ ID NO: 274188 - DNA, 25 bp, Artificial
  Probe
ccacaaccagaccattcgaaatggt

SEQ ID NO: 274189 - DNA, 25 bp, Artificial
  Probe
tgcacggagaacgtcaagtggtttg

SEQ ID NO: 274190 - DNA, 25 bp, Artificial
  Probe
aacatccggaacatgtgcccgagga

SEQ ID NO: 274191 - DNA, 25 bp, Artificial
  Probe
atggttaccgcaggacgcagcccct

SEQ ID NO: 274192 - DNA, 25 bp, Artificial
  Probe
acaaccagaccattcgaaatggtta

SEQ ID NO: 274193 - DNA, 25 bp, Artificial
  Probe
accacaaccagaccattcgaaatgg

SEQ ID NO: 274194 - DNA, 25 bp, Artificial
  Probe
cattcgaaatggttaccgcaggacg

SEQ ID NO: 274195 - DNA, 25 bp, Artificial
  Probe
caagtggtttgtgtttcaggattcc

SEQ ID NO: 274196 - DNA, 25 bp, Artificial
  Probe
agaccattcgaaatggttaccgcag

SEQ ID NO: 274197 - DNA, 25 bp, Artificial
  Probe
ttcgaaatggttaccgcaggacgca

SEQ ID NO: 274198 - DNA, 25 bp, Artificial
  Probe
agtggtttgtgtttcaggattccgc

SEQ ID NO: 274199 - DNA, 25 bp, Artificial
  Probe
ggatcaccacaaccagaccattcga

SEQ ID NO: 274200 - DNA, 25 bp, Artificial
  Probe
gcacggagaacgtcaagtggtttgt

SEQ ID NO: 274201 - DNA, 25 bp, Artificial
  Probe
tgtgcccgaggacattagacactac

SEQ ID NO: 274202 - DNA, 25 bp, Artificial
  Probe
gtgcccgaggacattagacactact

SEQ ID NO: 274203 - DNA, 25 bp, Artificial
  Probe
catccggaacatgtgcccgaggaca

SEQ ID NO: 274204 - DNA, 25 bp, Artificial
  Probe
ccagaccattcgaaatggttaccgc

SEQ ID NO: 274205 - DNA, 25 bp, Artificial
  Probe
ggtaatggatcaccacaaccagacc

SEQ ID NO: 274206 - DNA, 25 bp, Artificial
  Probe
ttgcacggagaacgtcaagtggttt

SEQ ID NO: 274207 - DNA, 25 bp, Artificial
  Probe
atccggaacatgtgcccgaggacat

SEQ ID NO: 274208 - DNA, 25 bp, Artificial
  Probe
ggtggaagccaatttcccatactcc

SEQ ID NO: 274209 - DNA, 25 bp, Artificial
  Probe
gtggaagccaatttcccatactccc

SEQ ID NO: 274210 - DNA, 25 bp, Artificial
  Probe
cagaccattcgaaatggttaccgca

SEQ ID NO: 274211 - DNA, 25 bp, Artificial
  Probe
tggatcaccacaaccagaccattcg

SEQ ID NO: 274212 - DNA, 25 bp, Artificial
  Probe
accattcgaaatggttaccgcagga

SEQ ID NO: 274213 - DNA, 25 bp, Artificial
  Probe
taacatccggaacatgtgcccgagg

SEQ ID NO: 274214 - DNA, 25 bp, Artificial
  Probe
cacaaccagaccattcgaaatggtt

SEQ ID NO: 274215 - DNA, 25 bp, Artificial
  Probe
tggtggaagccaatttcccatactc

SEQ ID NO: 274216 - DNA, 25 bp, Artificial
  Probe
catgtgcccgaggacattagacact

SEQ ID NO: 274217 - DNA, 25 bp, Artificial
  Probe
ccattcgaaatggttaccgcaggac

SEQ ID NO: 274218 - DNA, 25 bp, Artificial
  Probe
tgctatctactgtgagcccctttcc

SEQ ID NO: 274219 - DNA, 25 bp, Artificial
  Probe
ggttgttgggtccaggacagtacaa

SEQ ID NO: 274220 - DNA, 25 bp, Artificial
  Probe
gttgttgggtccaggacagtacaag

SEQ ID NO: 274221 - DNA, 25 bp, Artificial
  Probe
agtattgcacctgtagcaggaggta

SEQ ID NO: 274222 - DNA, 25 bp, Artificial
  Probe
tgtgctatctactgtgagccccttt

SEQ ID NO: 274223 - DNA, 25 bp, Artificial
  Probe
gtcctccagtattgcacctgtagca

SEQ ID NO: 274224 - DNA, 25 bp, Artificial
  Probe
tgggtccaggacagtacaagcccca

SEQ ID NO: 274225 - DNA, 25 bp, Artificial
  Probe
aatgtgctatctactgtgagcccct

SEQ ID NO: 274226 - DNA, 25 bp, Artificial
  Probe
cagtattgcacctgtagcaggaggt

SEQ ID NO: 274227 - DNA, 25 bp, Artificial
  Probe
ttccccctgggctgaccaaaaatgt

SEQ ID NO: 274228 - DNA, 25 bp, Artificial
  Probe
aaatgtgctatctactgtgagcccc

SEQ ID NO: 274229 - DNA, 25 bp, Artificial
  Probe
ctccagtattgcacctgtagcagga

SEQ ID NO: 274230 - DNA, 25 bp, Artificial
  Probe
tccccctgggctgaccaaaaatgtg

SEQ ID NO: 274231 - DNA, 25 bp, Artificial
  Probe
ccagtattgcacctgtagcaggagg

SEQ ID NO: 274232 - DNA, 25 bp, Artificial
  Probe
ccccctgggctgaccaaaaatgtgc

SEQ ID NO: 274233 - DNA, 25 bp, Artificial
  Probe
ttgttgggtccaggacagtacaagc

SEQ ID NO: 274234 - DNA, 25 bp, Artificial
  Probe
tatactgcaggcactagccatcctg

SEQ ID NO: 274235 - DNA, 25 bp, Artificial
  Probe
tcattagcagttcaggctggttgga

SEQ ID NO: 274236 - DNA, 25 bp, Artificial
  Probe
tcctccagtattgcacctgtagcag

SEQ ID NO: 274237 - DNA, 25 bp, Artificial
  Probe
ggagtatactgcaggcactagccat

SEQ ID NO: 274238 - DNA, 25 bp, Artificial
  Probe
actgcaggcactagccatcctggtc

SEQ ID NO: 274239 - DNA, 25 bp, Artificial
  Probe
cattagcagttcaggctggttggac

SEQ ID NO: 274240 - DNA, 25 bp, Artificial
  Probe
cctccagtattgcacctgtagcagg

SEQ ID NO: 274241 - DNA, 25 bp, Artificial
  Probe
gtattgcacctgtagcaggaggtag

SEQ ID NO: 274242 - DNA, 25 bp, Artificial
  Probe
accaaaaatgtgctatctactgtga

SEQ ID NO: 274243 - DNA, 25 bp, Artificial
  Probe
atactgcaggcactagccatcctgg

SEQ ID NO: 274244 - DNA, 25 bp, Artificial
  Probe
gtgctatctactgtgagcccctttc

SEQ ID NO: 274245 - DNA, 25 bp, Artificial
  Probe
tgaccaaaaatgtgctatctactgt

SEQ ID NO: 274246 - DNA, 25 bp, Artificial
  Probe
tactgcaggcactagccatcctggt

SEQ ID NO: 274247 - DNA, 25 bp, Artificial
  Probe
gttgggtccaggacagtacaagccc

SEQ ID NO: 274248 - DNA, 25 bp, Artificial
  Probe
tattgcacctgtagcaggaggtagg

SEQ ID NO: 274249 - DNA, 25 bp, Artificial
  Probe
gggtccaggacagtacaagccccaa

SEQ ID NO: 274250 - DNA, 25 bp, Artificial
  Probe
tgttgggtccaggacagtacaagcc

SEQ ID NO: 274251 - DNA, 25 bp, Artificial
  Probe
cctgggctgaccaaaaatgtgctat

SEQ ID NO: 274252 - DNA, 25 bp, Artificial
  Probe
atgtgctatctactgtgagcccctt

SEQ ID NO: 274253 - DNA, 25 bp, Artificial
  Probe
ccctgggctgaccaaaaatgtgcta

SEQ ID NO: 274254 - DNA, 25 bp, Artificial
  Probe
ttgggtccaggacagtacaagcccc

SEQ ID NO: 274255 - DNA, 25 bp, Artificial
  Probe
cccctgggctgaccaaaaatgtgct

SEQ ID NO: 274256 - DNA, 25 bp, Artificial
  Probe
ctgggctgaccaaaaatgtgctatc

SEQ ID NO: 274257 - DNA, 25 bp, Artificial
  Probe
tccagtattgcacctgtagcaggag

SEQ ID NO: 274258 - DNA, 25 bp, Artificial
  Probe
ttcattagcagttcaggctggttgg

SEQ ID NO: 274259 - DNA, 25 bp, Artificial
  Probe
gaacctctaagtctgggaagaaagg

SEQ ID NO: 274260 - DNA, 25 bp, Artificial
  Probe
atcgaggaacctctaagtctgggaa

SEQ ID NO: 274261 - DNA, 25 bp, Artificial
  Probe
acttcaacctgagtgcttcacagtc

SEQ ID NO: 274262 - DNA, 25 bp, Artificial
  Probe
aacctgagtgcttcacagtccaact

SEQ ID NO: 274263 - DNA, 25 bp, Artificial
  Probe
gaacttcaacctgagtgcttcacag

SEQ ID NO: 274264 - DNA, 25 bp, Artificial
  Probe
cagtccaactcacaggcaaagaggg

SEQ ID NO: 274265 - DNA, 25 bp, Artificial
  Probe
agtccaactcacaggcaaagaggga

SEQ ID NO: 274266 - DNA, 25 bp, Artificial
  Probe
agctatgcgcaaacccctgaggaag

SEQ ID NO: 274267 - DNA, 25 bp, Artificial
  Probe
ctgagtgcttcacagtccaactcac

SEQ ID NO: 274268 - DNA, 25 bp, Artificial
  Probe
ttcaacctgagtgcttcacagtcca

SEQ ID NO: 274269 - DNA, 25 bp, Artificial
  Probe
tctcagcctgagctatgcgcaaacc

SEQ ID NO: 274270 - DNA, 25 bp, Artificial
  Probe
gctccaaaggctgcaaggggactga

SEQ ID NO: 274271 - DNA, 25 bp, Artificial
  Probe
caactcacaggcaaagagggagcta

SEQ ID NO: 274272 - DNA, 25 bp, Artificial
  Probe
gtgcttcacagtccaactcacaggc

SEQ ID NO: 274273 - DNA, 25 bp, Artificial
  Probe
aacttcaacctgagtgcttcacagt

SEQ ID NO: 274274 - DNA, 25 bp, Artificial
  Probe
tgagctatgcgcaaacccctgagga

SEQ ID NO: 274275 - DNA, 25 bp, Artificial
  Probe
gcttcacagtccaactcacaggcaa

SEQ ID NO: 274276 - DNA, 25 bp, Artificial
  Probe
ggaacctctaagtctgggaagaaag

SEQ ID NO: 274277 - DNA, 25 bp, Artificial
  Probe
tccgtgaacttcaacctgagtgctt

SEQ ID NO: 274278 - DNA, 25 bp, Artificial
  Probe
aaactgcaggaagaatcgaggaacc

SEQ ID NO: 274279 - DNA, 25 bp, Artificial
  Probe
gaatcgaggaacctctaagtctggg

SEQ ID NO: 274280 - DNA, 25 bp, Artificial
  Probe
gaggaacctctaagtctgggaagaa

SEQ ID NO: 274281 - DNA, 25 bp, Artificial
  Probe
cgtgaacttcaacctgagtgcttca

SEQ ID NO: 274282 - DNA, 25 bp, Artificial
  Probe
tgcttcacagtccaactcacaggca

SEQ ID NO: 274283 - DNA, 25 bp, Artificial
  Probe
ctccgtgaacttcaacctgagtgct

SEQ ID NO: 274284 - DNA, 25 bp, Artificial
  Probe
gcgcaaacccctgaggaagcctggg

SEQ ID NO: 274285 - DNA, 25 bp, Artificial
  Probe
aatcgaggaacctctaagtctggga

SEQ ID NO: 274286 - DNA, 25 bp, Artificial
  Probe
cacagtccaactcacaggcaaagag

SEQ ID NO: 274287 - DNA, 25 bp, Artificial
  Probe
tcaacctgagtgcttcacagtccaa

SEQ ID NO: 274288 - DNA, 25 bp, Artificial
  Probe
cctccgtgaacttcaacctgagtgc

SEQ ID NO: 274289 - DNA, 25 bp, Artificial
  Probe
agtcctccgtgaacttcaacctgag

SEQ ID NO: 274290 - DNA, 25 bp, Artificial
  Probe
tccaaaggctgcaaggggactgaac

SEQ ID NO: 274291 - DNA, 25 bp, Artificial
  Probe
ccaaaggctgcaaggggactgaaca

SEQ ID NO: 274292 - DNA, 25 bp, Artificial
  Probe
aagtcctccgtgaacttcaacctga

SEQ ID NO: 274293 - DNA, 25 bp, Artificial
  Probe
ctccaaaggctgcaaggggactgaa

SEQ ID NO: 274294 - DNA, 25 bp, Artificial
  Probe
tgagtgcttcacagtccaactcaca

SEQ ID NO: 274295 - DNA, 25 bp, Artificial
  Probe
gagtgcttcacagtccaactcacag

SEQ ID NO: 274296 - DNA, 25 bp, Artificial
  Probe
ttcacagtccaactcacaggcaaag

SEQ ID NO: 274297 - DNA, 25 bp, Artificial
  Probe
cctgagtgcttcacagtccaactca

SEQ ID NO: 274298 - DNA, 25 bp, Artificial
  Probe
ccgtgaacttcaacctgagtgcttc

SEQ ID NO: 274299 - DNA, 25 bp, Artificial
  Probe
agtgcttcacagtccaactcacagg

SEQ ID NO: 274300 - DNA, 25 bp, Artificial
  Probe
cgaggaacctctaagtctgggaaga

SEQ ID NO: 274301 - DNA, 25 bp, Artificial
  Probe
agaatcgaggaacctctaagtctgg

SEQ ID NO: 274302 - DNA, 25 bp, Artificial
  Probe
gaagtcctccgtgaacttcaacctg

SEQ ID NO: 274303 - DNA, 25 bp, Artificial
  Probe
gagcagtcacctcatgctggccttg

SEQ ID NO: 274304 - DNA, 25 bp, Artificial
  Probe
tgcgcaaacccctgaggaagcctgg

SEQ ID NO: 274305 - DNA, 25 bp, Artificial
  Probe
agtcaagtcactggtctgtttgcat

SEQ ID NO: 274306 - DNA, 25 bp, Artificial
  Probe
tgacaacccgagttacctttctttg

SEQ ID NO: 274307 - DNA, 25 bp, Artificial
  Probe
caaatgatgccttgtttacaaaagt

SEQ ID NO: 274308 - DNA, 25 bp, Artificial
  Probe
tagcacactggctttaaaggacaca

SEQ ID NO: 274309 - DNA, 25 bp, Artificial
  Probe
gattatacatgacaacccgagttac

SEQ ID NO: 274310 - DNA, 25 bp, Artificial
  Probe
taccacaggttctagtagtgtgtaa

SEQ ID NO: 274311 - DNA, 25 bp, Artificial
  Probe
tttaaaggacacagccaggaagctg

SEQ ID NO: 274312 - DNA, 25 bp, Artificial
  Probe
agattatacatgacaacccgagtta

SEQ ID NO: 274313 - DNA, 25 bp, Artificial
  Probe
tgatgccttgtttacaaaagttctc

SEQ ID NO: 274314 - DNA, 25 bp, Artificial
  Probe
tcttgacagtgtttgtagacctttg

SEQ ID NO: 274315 - DNA, 25 bp, Artificial
  Probe
gatatcttgacagtgtttgtagacc

SEQ ID NO: 274316 - DNA, 25 bp, Artificial
  Probe
ctaccacaggttctagtagtgtgta

SEQ ID NO: 274317 - DNA, 25 bp, Artificial
  Probe
caagtcaagtcactggtctgtttgc

SEQ ID NO: 274318 - DNA, 25 bp, Artificial
  Probe
aatgatgccttgtttacaaaagttc

SEQ ID NO: 274319 - DNA, 25 bp, Artificial
  Probe
gatgccttgtttacaaaagttctct

SEQ ID NO: 274320 - DNA, 25 bp, Artificial
  Probe
ggacacagccaggaagctgatatct

SEQ ID NO: 274321 - DNA, 25 bp, Artificial
  Probe
tcataattagaaaacacctgtggat

SEQ ID NO: 274322 - DNA, 25 bp, Artificial
  Probe
gactttcattctggtcctacttctg

SEQ ID NO: 274323 - DNA, 25 bp, Artificial
  Probe
aaatggtcttacaaatgatgccttg

SEQ ID NO: 274324 - DNA, 25 bp, Artificial
  Probe
cacactggctttaaaggacacagcc

SEQ ID NO: 274325 - DNA, 25 bp, Artificial
  Probe
aaggacacagccaggaagctgatat

SEQ ID NO: 274326 - DNA, 25 bp, Artificial
  Probe
ccacaggttctagtagtgtgtaaag

SEQ ID NO: 274327 - DNA, 25 bp, Artificial
  Probe
acacagccaggaagctgatatcttg

SEQ ID NO: 274328 - DNA, 25 bp, Artificial
  Probe
tctctaccacaggttctagtagtgt

SEQ ID NO: 274329 - DNA, 25 bp, Artificial
  Probe
gtcagtttcttgcttgggtatcttg

SEQ ID NO: 274330 - DNA, 25 bp, Artificial
  Probe
gtcttacaaatgatgccttgtttac

SEQ ID NO: 274331 - DNA, 25 bp, Artificial
  Probe
gtgtcagtttcttgcttgggtatct

SEQ ID NO: 274332 - DNA, 25 bp, Artificial
  Probe
cacagccaggaagctgatatcttga

SEQ ID NO: 274333 - DNA, 25 bp, Artificial
  Probe
caagtcactggtctgtttgcatttg

SEQ ID NO: 274334 - DNA, 25 bp, Artificial
  Probe
tcaagtcactggtctgtttgcattt

SEQ ID NO: 274335 - DNA, 25 bp, Artificial
  Probe
atctcaagtcaagtcactggtctgt

SEQ ID NO: 274336 - DNA, 25 bp, Artificial
  Probe
gcacactggctttaaaggacacagc

SEQ ID NO: 274337 - DNA, 25 bp, Artificial
  Probe
agcctagcacactggctttaaagga

SEQ ID NO: 274338 - DNA, 25 bp, Artificial
  Probe
cataattagaaaacacctgtggata

SEQ ID NO: 274339 - DNA, 25 bp, Artificial
  Probe
aatgtcatctcaagtcaagtcactg

SEQ ID NO: 274340 - DNA, 25 bp, Artificial
  Probe
agtgtcagtttcttgcttgggtatc

SEQ ID NO: 274341 - DNA, 25 bp, Artificial
  Probe
gtcactggtctgtttgcatttgata

SEQ ID NO: 274342 - DNA, 25 bp, Artificial
  Probe
atcttgacagtgtttgtagaccttt

SEQ ID NO: 274343 - DNA, 25 bp, Artificial
  Probe
gctttaaaggacacagccaggaagc

SEQ ID NO: 274344 - DNA, 25 bp, Artificial
  Probe
gtcatctcaagtcaagtcactggtc

SEQ ID NO: 274345 - DNA, 25 bp, Artificial
  Probe
gtttaaaatgtcatctcaagtcaag

SEQ ID NO: 274346 - DNA, 25 bp, Artificial
  Probe
gtatgtgaaaccacaatctaagatt

SEQ ID NO: 274347 - DNA, 25 bp, Artificial
  Probe
tggtcttacaaatgatgccttgttt

SEQ ID NO: 274348 - DNA, 25 bp, Artificial
  Probe
aaagttctctaccacaggttctagt

SEQ ID NO: 274349 - DNA, 25 bp, Artificial
  Probe
gtttacaaaagttctctaccacagg

SEQ ID NO: 274350 - DNA, 25 bp, Artificial
  Probe
gttctctaccacaggttctagtagt

SEQ ID NO: 274351 - DNA, 25 bp, Artificial
  Probe
gctgacagcctaacctcaggtagag

SEQ ID NO: 274352 - DNA, 25 bp, Artificial
  Probe
ctaacctcaggtagagtgctacaga

SEQ ID NO: 274353 - DNA, 25 bp, Artificial
  Probe
tgacagcctaacctcaggtagagtg

SEQ ID NO: 274354 - DNA, 25 bp, Artificial
  Probe
gggcatagctggtgctcaagatttg

SEQ ID NO: 274355 - DNA, 25 bp, Artificial
  Probe
ggcatagctggtgctcaagatttgt

SEQ ID NO: 274356 - DNA, 25 bp, Artificial
  Probe
atggtttggccacagaaaagcctgg

SEQ ID NO: 274357 - DNA, 25 bp, Artificial
  Probe
cagggcatagctggtgctcaagatt

SEQ ID NO: 274358 - DNA, 25 bp, Artificial
  Probe
cctaacctcaggtagagtgctacag

SEQ ID NO: 274359 - DNA, 25 bp, Artificial
  Probe
cgctgacagcctaacctcaggtaga

SEQ ID NO: 274360 - DNA, 25 bp, Artificial
  Probe
ctggctttcagctgtcgtgaaaggg

SEQ ID NO: 274361 - DNA, 25 bp, Artificial
  Probe
ttggccacagaaaagcctggagggc

SEQ ID NO: 274362 - DNA, 25 bp, Artificial
  Probe
gcgctgacagcctaacctcaggtag

SEQ ID NO: 274363 - DNA, 25 bp, Artificial
  Probe
ctgacagcctaacctcaggtagagt

SEQ ID NO: 274364 - DNA, 25 bp, Artificial
  Probe
tcagctgtcgtgaaagggtagaagc

SEQ ID NO: 274365 - DNA, 25 bp, Artificial
  Probe
tgccagggcatagctggtgctcaag

SEQ ID NO: 274366 - DNA, 25 bp, Artificial
  Probe
ccagggcatagctggtgctcaagat

SEQ ID NO: 274367 - DNA, 25 bp, Artificial
  Probe
gccagggcatagctggtgctcaaga

SEQ ID NO: 274368 - DNA, 25 bp, Artificial
  Probe
ggtttggccacagaaaagcctggag

SEQ ID NO: 274369 - DNA, 25 bp, Artificial
  Probe
tttggccacagaaaagcctggaggg

SEQ ID NO: 274370 - DNA, 25 bp, Artificial
  Probe
ttgccagggcatagctggtgctcaa

SEQ ID NO: 274371 - DNA, 25 bp, Artificial
  Probe
cttctggctttcagctgtcgtgaaa

SEQ ID NO: 274372 - DNA, 25 bp, Artificial
  Probe
catagctggtgctcaagatttgtgg

SEQ ID NO: 274373 - DNA, 25 bp, Artificial
  Probe
gcatagctggtgctcaagatttgtg

SEQ ID NO: 274374 - DNA, 25 bp, Artificial
  Probe
gctttcagctgtcgtgaaagggtag

SEQ ID NO: 274375 - DNA, 25 bp, Artificial
  Probe
ttctggctttcagctgtcgtgaaag

SEQ ID NO: 274376 - DNA, 25 bp, Artificial
  Probe
agcttctggctttcagctgtcgtga

SEQ ID NO: 274377 - DNA, 25 bp, Artificial
  Probe
ccatgcctgagctgattggcaatgc

SEQ ID NO: 274378 - DNA, 25 bp, Artificial
  Probe
catgcctgagctgattggcaatgcc

SEQ ID NO: 274379 - DNA, 25 bp, Artificial
  Probe
tggctttcagctgtcgtgaaagggt

SEQ ID NO: 274380 - DNA, 25 bp, Artificial
  Probe
tggtttggccacagaaaagcctgga

SEQ ID NO: 274381 - DNA, 25 bp, Artificial
  Probe
gccatgcctgagctgattggcaatg

SEQ ID NO: 274382 - DNA, 25 bp, Artificial
  Probe
tttgccagggcatagctggtgctca

SEQ ID NO: 274383 - DNA, 25 bp, Artificial
  Probe
gtttggccacagaaaagcctggagg

SEQ ID NO: 274384 - DNA, 25 bp, Artificial
  Probe
agcctaacctcaggtagagtgctac

SEQ ID NO: 274385 - DNA, 25 bp, Artificial
  Probe
gcctaacctcaggtagagtgctaca

SEQ ID NO: 274386 - DNA, 25 bp, Artificial
  Probe
atttgccagggcatagctggtgctc

SEQ ID NO: 274387 - DNA, 25 bp, Artificial
  Probe
tagcttctggctttcagctgtcgtg

SEQ ID NO: 274388 - DNA, 25 bp, Artificial
  Probe
gcttctggctttcagctgtcgtgaa

SEQ ID NO: 274389 - DNA, 25 bp, Artificial
  Probe
gtagcttctggctttcagctgtcgt

SEQ ID NO: 274390 - DNA, 25 bp, Artificial
  Probe
gagggcgctgacagcctaacctcag

SEQ ID NO: 274391 - DNA, 25 bp, Artificial
  Probe
cagcctaacctcaggtagagtgcta

SEQ ID NO: 274392 - DNA, 25 bp, Artificial
  Probe
ggccatgcctgagctgattggcaat

SEQ ID NO: 274393 - DNA, 25 bp, Artificial
  Probe
ctttcagctgtcgtgaaagggtaga

SEQ ID NO: 274394 - DNA, 25 bp, Artificial
  Probe
ggctttcagctgtcgtgaaagggta

SEQ ID NO: 274395 - DNA, 25 bp, Artificial
  Probe
cagctgtcgtgaaagggtagaagca

SEQ ID NO: 274396 - DNA, 25 bp, Artificial
  Probe
tctggctttcagctgtcgtgaaagg

SEQ ID NO: 274397 - DNA, 25 bp, Artificial
  Probe
tttattgaatccattgtggatagat

SEQ ID NO: 274398 - DNA, 25 bp, Artificial
  Probe
agctgtcggggcctctcatctctga

SEQ ID NO: 274399 - DNA, 25 bp, Artificial
  Probe
aacggccagagagaacttgctgggc

SEQ ID NO: 274400 - DNA, 25 bp, Artificial
  Probe
ctgtcggggcctctcatctctgact

SEQ ID NO: 274401 - DNA, 25 bp, Artificial
  Probe
tgtcggggcctctcatctctgactt

SEQ ID NO: 274402 - DNA, 25 bp, Artificial
  Probe
tgaaggaccagcctctctcggggat

SEQ ID NO: 274403 - DNA, 25 bp, Artificial
  Probe
ctatcaagtgcgttttattgaatcc

SEQ ID NO: 274404 - DNA, 25 bp, Artificial
  Probe
atcaagaagctgtcggggcctctca

SEQ ID NO: 274405 - DNA, 25 bp, Artificial
  Probe
gcgaacggtgcgatcaagaagctgt

SEQ ID NO: 274406 - DNA, 25 bp, Artificial
  Probe
catctctgacttcttcgccaagcgc

SEQ ID NO: 274407 - DNA, 25 bp, Artificial
  Probe
tcatctctgacttcttcgccaagcg

SEQ ID NO: 274408 - DNA, 25 bp, Artificial
  Probe
gatgtccctgcagggtgtccctctc

SEQ ID NO: 274409 - DNA, 25 bp, Artificial
  Probe
agaaggacgaggagccggtggagga

SEQ ID NO: 274410 - DNA, 25 bp, Artificial
  Probe
agccggtcgaggagaaggacgagga

SEQ ID NO: 274411 - DNA, 25 bp, Artificial
  Probe
cgaacggtgcgatcaagaagctgtc

SEQ ID NO: 274412 - DNA, 25 bp, Artificial
  Probe
gcggccaatgcgaacggtgcgatca

SEQ ID NO: 274413 - DNA, 25 bp, Artificial
  Probe
ggtcgaggagcaggacgagaatcag

SEQ ID NO: 274414 - DNA, 25 bp, Artificial
  Probe
aacgatgtccctgcagggtgtccct

SEQ ID NO: 274415 - DNA, 25 bp, Artificial
  Probe
atcaagtgcgttttattgaatccat

SEQ ID NO: 274416 - DNA, 25 bp, Artificial
  Probe
agctgaaggaccagcctctctcggg

SEQ ID NO: 274417 - DNA, 25 bp, Artificial
  Probe
aaggacgaggagccagtcgaggggc

SEQ ID NO: 274418 - DNA, 25 bp, Artificial
  Probe
caatgcgaacggtgcgatcaagaag

SEQ ID NO: 274419 - DNA, 25 bp, Artificial
  Probe
cggccaatgcgaacggtgcgatcaa

SEQ ID NO: 274420 - DNA, 25 bp, Artificial
  Probe
gctgaaggaccagcctctctcgggg

SEQ ID NO: 274421 - DNA, 25 bp, Artificial
  Probe
gaaggaccagcctctctcggggatt

SEQ ID NO: 274422 - DNA, 25 bp, Artificial
  Probe
gagctgaaggaccagcctctctcgg

SEQ ID NO: 274423 - DNA, 25 bp, Artificial
  Probe
cgatcaagaagctgtcggggcctct

SEQ ID NO: 274424 - DNA, 25 bp, Artificial
  Probe
gtcggggcctctcatctctgacttc

SEQ ID NO: 274425 - DNA, 25 bp, Artificial
  Probe
gatcaagaagctgtcggggcctctc

SEQ ID NO: 274426 - DNA, 25 bp, Artificial
  Probe
tgcgatcaagaagctgtcggggcct

SEQ ID NO: 274427 - DNA, 25 bp, Artificial
  Probe
tcggggcctctcatctctgacttct

SEQ ID NO: 274428 - DNA, 25 bp, Artificial
  Probe
cgatgtccctgcagggtgtccctct

SEQ ID NO: 274429 - DNA, 25 bp, Artificial
  Probe
cggggcctctcatctctgacttctt

SEQ ID NO: 274430 - DNA, 25 bp, Artificial
  Probe
atcaggagctgaaggaccagcctct

SEQ ID NO: 274431 - DNA, 25 bp, Artificial
  Probe
taacggccagagagaacttgctggg

SEQ ID NO: 274432 - DNA, 25 bp, Artificial
  Probe
tgctgcggccaatgcgaacggtgcg

SEQ ID NO: 274433 - DNA, 25 bp, Artificial
  Probe
gcgatcaagaagctgtcggggcctc

SEQ ID NO: 274434 - DNA, 25 bp, Artificial
  Probe
acgatgtccctgcagggtgtccctc

SEQ ID NO: 274435 - DNA, 25 bp, Artificial
  Probe
tatcaagtgcgttttattgaatcca

SEQ ID NO: 274436 - DNA, 25 bp, Artificial
  Probe
aggagccagtcgaggggcagaacgg

SEQ ID NO: 274437 - DNA, 25 bp, Artificial
  Probe
gctatcaagtgcgttttattgaatc

SEQ ID NO: 274438 - DNA, 25 bp, Artificial
  Probe
gctgtcggggcctctcatctctgac

SEQ ID NO: 274439 - DNA, 25 bp, Artificial
  Probe
gagctggtcgaggagcaggacgaga

SEQ ID NO: 274440 - DNA, 25 bp, Artificial
  Probe
ggggcctctcatctctgacttcttc

SEQ ID NO: 274441 - DNA, 25 bp, Artificial
  Probe
gggcctctcatctctgacttcttcg

SEQ ID NO: 274442 - DNA, 25 bp, Artificial
  Probe
tcaagaagctgtcggggcctctcat

SEQ ID NO: 274443 - DNA, 25 bp, Artificial
  Probe
gtcattccatctacactggctgaaa

SEQ ID NO: 274444 - DNA, 25 bp, Artificial
  Probe
cctctgttggtgtcagtcagtgcgt

SEQ ID NO: 274445 - DNA, 25 bp, Artificial
  Probe
ggccctcagactgacggagtactcc

SEQ ID NO: 274446 - DNA, 25 bp, Artificial
  Probe
attccatctacactggctgaaaatg

SEQ ID NO: 274447 - DNA, 25 bp, Artificial
  Probe
ctctgttggtgtcagtcagtgcgtt

SEQ ID NO: 274448 - DNA, 25 bp, Artificial
  Probe
tggctgaaaatgctggcctgaatcc

SEQ ID NO: 274449 - DNA, 25 bp, Artificial
  Probe
agtcattccatctacactggctgaa

SEQ ID NO: 274450 - DNA, 25 bp, Artificial
  Probe
ggctgaaaatgctggcctgaatccc

SEQ ID NO: 274451 - DNA, 25 bp, Artificial
  Probe
atctacactggctgaaaatgctggc

SEQ ID NO: 274452 - DNA, 25 bp, Artificial
  Probe
acattctggaggaaatggttgtcca

SEQ ID NO: 274453 - DNA, 25 bp, Artificial
  Probe
actgacggagtactcccggacactg

SEQ ID NO: 274454 - DNA, 25 bp, Artificial
  Probe
actcccggacactgagtggcatgga

SEQ ID NO: 274455 - DNA, 25 bp, Artificial
  Probe
ggaaatggttgtccagcctctgttg

SEQ ID NO: 274456 - DNA, 25 bp, Artificial
  Probe
ggttgtccagcctctgttggtgtca

SEQ ID NO: 274457 - DNA, 25 bp, Artificial
  Probe
tactcccggacactgagtggcatgg

SEQ ID NO: 274458 - DNA, 25 bp, Artificial
  Probe
ttgtccagcctctgttggtgtcagt

SEQ ID NO: 274459 - DNA, 25 bp, Artificial
  Probe
ttccatctacactggctgaaaatgc

SEQ ID NO: 274460 - DNA, 25 bp, Artificial
  Probe
agctggccctcagactgacggagta

SEQ ID NO: 274461 - DNA, 25 bp, Artificial
  Probe
cccggacactgagtggcatggagtc

SEQ ID NO: 274462 - DNA, 25 bp, Artificial
  Probe
ctcccggacactgagtggcatggag

SEQ ID NO: 274463 - DNA, 25 bp, Artificial
  Probe
aacattctggaggaaatggttgtcc

SEQ ID NO: 274464 - DNA, 25 bp, Artificial
  Probe
agcctctgttggtgtcagtcagtgc

SEQ ID NO: 274465 - DNA, 25 bp, Artificial
  Probe
aagtcattccatctacactggctga

SEQ ID NO: 274466 - DNA, 25 bp, Artificial
  Probe
ctccaacattctggaggaaatggtt

SEQ ID NO: 274467 - DNA, 25 bp, Artificial
  Probe
gaaactgtgcggagcattctgaaaa

SEQ ID NO: 274468 - DNA, 25 bp, Artificial
  Probe
atctccaacattctggaggaaatgg

SEQ ID NO: 274469 - DNA, 25 bp, Artificial
  Probe
taagaaaccgccatgcccaaggaga

SEQ ID NO: 274470 - DNA, 25 bp, Artificial
  Probe
ctggccctcagactgacggagtact

SEQ ID NO: 274471 - DNA, 25 bp, Artificial
  Probe
ctgacggagtactcccggacactga

SEQ ID NO: 274472 - DNA, 25 bp, Artificial
  Probe
gcaactgaaactgtgcggagcattc

SEQ ID NO: 274473 - DNA, 25 bp, Artificial
  Probe
tgttggtgtcagtcagtgcgttgac

SEQ ID NO: 274474 - DNA, 25 bp, Artificial
  Probe
gtccagcctctgttggtgtcagtca

SEQ ID NO: 274475 - DNA, 25 bp, Artificial
  Probe
tcagactgacggagtactcccggac

SEQ ID NO: 274476 - DNA, 25 bp, Artificial
  Probe
tagcaactgaaactgtgcggagcat

SEQ ID NO: 274477 - DNA, 25 bp, Artificial
  Probe
cttattgcaggaggtgtgctccaga

SEQ ID NO: 274478 - DNA, 25 bp, Artificial
  Probe
attgcaggaggtgtgctccagaaat

SEQ ID NO: 274479 - DNA, 25 bp, Artificial
  Probe
gagtactcccggacactgagtggca

SEQ ID NO: 274480 - DNA, 25 bp, Artificial
  Probe
gttggtgtcagtcagtgcgttgacc

SEQ ID NO: 274481 - DNA, 25 bp, Artificial
  Probe
ttgcaggaggtgtgctccagaaata

SEQ ID NO: 274482 - DNA, 25 bp, Artificial
  Probe
aaatggttgtccagcctctgttggt

SEQ ID NO: 274483 - DNA, 25 bp, Artificial
  Probe
actgtgcggagcattctgaaaattg

SEQ ID NO: 274484 - DNA, 25 bp, Artificial
  Probe
gtactcccggacactgagtggcatg

SEQ ID NO: 274485 - DNA, 25 bp, Artificial
  Probe
cattctggaggaaatggttgtccag

SEQ ID NO: 274486 - DNA, 25 bp, Artificial
  Probe
tgtccagcctctgttggtgtcagtc

SEQ ID NO: 274487 - DNA, 25 bp, Artificial
  Probe
acactggctgaaaatgctggcctga

SEQ ID NO: 274488 - DNA, 25 bp, Artificial
  Probe
caactgaaactgtgcggagcattct

SEQ ID NO: 274489 - DNA, 25 bp, Artificial
  Probe
ccgtctaacagggtacaaagcggcg

SEQ ID NO: 274490 - DNA, 25 bp, Artificial
  Probe
ggtacaaagcggcgaggttccaatg

SEQ ID NO: 274491 - DNA, 25 bp, Artificial
  Probe
ggttccaatgggcacaggagaagac

SEQ ID NO: 274492 - DNA, 25 bp, Artificial
  Probe
agtggggcgttcaatactggcgggg

SEQ ID NO: 274493 - DNA, 25 bp, Artificial
  Probe
gtacaaagcggcgaggttccaatgg

SEQ ID NO: 274494 - DNA, 25 bp, Artificial
  Probe
ggaccattcgccatagtggggcgtt

SEQ ID NO: 274495 - DNA, 25 bp, Artificial
  Probe
cagggtacaaagcggcgaggttcca

SEQ ID NO: 274496 - DNA, 25 bp, Artificial
  Probe
tgggaagccggggtccacaaatggt

SEQ ID NO: 274497 - DNA, 25 bp, Artificial
  Probe
ccaatgggcacaggagaagacagaa

SEQ ID NO: 274498 - DNA, 25 bp, Artificial
  Probe
cgaggttccaatgggcacaggagaa

SEQ ID NO: 274499 - DNA, 25 bp, Artificial
  Probe
gggtacaaagcggcgaggttccaat

SEQ ID NO: 274500 - DNA, 25 bp, Artificial
  Probe
gtgtgggaagccggggtccacaaat

SEQ ID NO: 274501 - DNA, 25 bp, Artificial
  Probe
tacaaagcggcgaggttccaatggg

SEQ ID NO: 274502 - DNA, 25 bp, Artificial
  Probe
tactggcggggtaaacgcgtgtggg

SEQ ID NO: 274503 - DNA, 25 bp, Artificial
  Probe
ttccaatgggcacaggagaagacag

SEQ ID NO: 274504 - DNA, 25 bp, Artificial
  Probe
ggaagccggggtccacaaatggtgg

SEQ ID NO: 274505 - DNA, 25 bp, Artificial
  Probe
tggggcgttcaatactggcggggta

SEQ ID NO: 274506 - DNA, 25 bp, Artificial
  Probe
gtctaacagggtacaaagcggcgag

SEQ ID NO: 274507 - DNA, 25 bp, Artificial
  Probe
tgtgggaagccggggtccacaaatg

SEQ ID NO: 274508 - DNA, 25 bp, Artificial
  Probe
cggggaccattcgccatagtggggc

SEQ ID NO: 274509 - DNA, 25 bp, Artificial
  Probe
atagtggggcgttcaatactggcgg

SEQ ID NO: 274510 - DNA, 25 bp, Artificial
  Probe
gcgtgtgggaagccggggtccacaa

SEQ ID NO: 274511 - DNA, 25 bp, Artificial
  Probe
tggcggggtaaacgcgtgtgggaag

SEQ ID NO: 274512 - DNA, 25 bp, Artificial
  Probe
tcaatactggcggggtaaacgcgtg

SEQ ID NO: 274513 - DNA, 25 bp, Artificial
  Probe
aagcggcgaggttccaatgggcaca

SEQ ID NO: 274514 - DNA, 25 bp, Artificial
  Probe
gggaccattcgccatagtggggcgt

SEQ ID NO: 274515 - DNA, 25 bp, Artificial
  Probe
taacagggtacaaagcggcgaggtt

SEQ ID NO: 274516 - DNA, 25 bp, Artificial
  Probe
tctaacagggtacaaagcggcgagg

SEQ ID NO: 274517 - DNA, 25 bp, Artificial
  Probe
cgtctaacagggtacaaagcggcga

SEQ ID NO: 274518 - DNA, 25 bp, Artificial
  Probe
tccaatgggcacaggagaagacaga

SEQ ID NO: 274519 - DNA, 25 bp, Artificial
  Probe
caatactggcggggtaaacgcgtgt

SEQ ID NO: 274520 - DNA, 25 bp, Artificial
  Probe
agcggcgaggttccaatgggcacag

SEQ ID NO: 274521 - DNA, 25 bp, Artificial
  Probe
gttcaatactggcggggtaaacgcg

SEQ ID NO: 274522 - DNA, 25 bp, Artificial
  Probe
cgcgtgtgggaagccggggtccaca

SEQ ID NO: 274523 - DNA, 25 bp, Artificial
  Probe
gaagccggggtccacaaatggtggg

SEQ ID NO: 274524 - DNA, 25 bp, Artificial
  Probe
aaagcggcgaggttccaatgggcac

SEQ ID NO: 274525 - DNA, 25 bp, Artificial
  Probe
acaaagcggcgaggttccaatgggc

SEQ ID NO: 274526 - DNA, 25 bp, Artificial
  Probe
attcgccatagtggggcgttcaata

SEQ ID NO: 274527 - DNA, 25 bp, Artificial
  Probe
gcggggaccattcgccatagtgggg

SEQ ID NO: 274528 - DNA, 25 bp, Artificial
  Probe
gaggttccaatgggcacaggagaag

SEQ ID NO: 274529 - DNA, 25 bp, Artificial
  Probe
ccatagtggggcgttcaatactggc

SEQ ID NO: 274530 - DNA, 25 bp, Artificial
  Probe
ccattcgccatagtggggcgttcaa

SEQ ID NO: 274531 - DNA, 25 bp, Artificial
  Probe
cggcgaggttccaatgggcacagga

SEQ ID NO: 274532 - DNA, 25 bp, Artificial
  Probe
caaagcggcgaggttccaatgggca

SEQ ID NO: 274533 - DNA, 25 bp, Artificial
  Probe
gttccaatgggcacaggagaagaca

SEQ ID NO: 274534 - DNA, 25 bp, Artificial
  Probe
gcgttcaatactggcggggtaaacg

SEQ ID NO: 274535 - DNA, 25 bp, Artificial
  Probe
gcactgtggacgaagcctttggttt

SEQ ID NO: 274536 - DNA, 25 bp, Artificial
  Probe
tggacgaagcctttggttttccact

SEQ ID NO: 274537 - DNA, 25 bp, Artificial
  Probe
tgctttgtcctggactccactcagc

SEQ ID NO: 274538 - DNA, 25 bp, Artificial
  Probe
gtcctggactccactcagcctgagg

SEQ ID NO: 274539 - DNA, 25 bp, Artificial
  Probe
caaacagccacttagtgctttgtcc

SEQ ID NO: 274540 - DNA, 25 bp, Artificial
  Probe
ctggactggctgacaggccatgaga

SEQ ID NO: 274541 - DNA, 25 bp, Artificial
  Probe
gcctggactggctgacaggccatga

SEQ ID NO: 274542 - DNA, 25 bp, Artificial
  Probe
acagccacttagtgctttgtcctgg

SEQ ID NO: 274543 - DNA, 25 bp, Artificial
  Probe
atacctgctcataagacttgtatag

SEQ ID NO: 274544 - DNA, 25 bp, Artificial
  Probe
ctgtcctcaccaactctgggaagtc

SEQ ID NO: 274545 - DNA, 25 bp, Artificial
  Probe
agccacttagtgctttgtcctggac

SEQ ID NO: 274546 - DNA, 25 bp, Artificial
  Probe
tgcgtcctgctggttgacaaacaac

SEQ ID NO: 274547 - DNA, 25 bp, Artificial
  Probe
tgttttgtagcaaacagccacttag

SEQ ID NO: 274548 - DNA, 25 bp, Artificial
  Probe
accaactctgggaagtccgctcttc

SEQ ID NO: 274549 - DNA, 25 bp, Artificial
  Probe
gtcctgctggttgacaaacaacata

SEQ ID NO: 274550 - DNA, 25 bp, Artificial
  Probe
gatccctctggcatctccaggtgtt

SEQ ID NO: 274551 - DNA, 25 bp, Artificial
  Probe
tgctcataagacttgtatagcagtg

SEQ ID NO: 274552 - DNA, 25 bp, Artificial
  Probe
acctgctcataagacttgtatagca

SEQ ID NO: 274553 - DNA, 25 bp, Artificial
  Probe
ctggaggcactgtggacgaagcctt

SEQ ID NO: 274554 - DNA, 25 bp, Artificial
  Probe
acttgcagtgcgtcctgctggttga

SEQ ID NO: 274555 - DNA, 25 bp, Artificial
  Probe
caggccatgagatccctctggcatc

SEQ ID NO: 274556 - DNA, 25 bp, Artificial
  Probe
gtcctcaccaactctgggaagtccg

SEQ ID NO: 274557 - DNA, 25 bp, Artificial
  Probe
tccaggtgttttgtagcaaacagcc

SEQ ID NO: 274558 - DNA, 25 bp, Artificial
  Probe
tgtcctggactccactcagcctgag

SEQ ID NO: 274559 - DNA, 25 bp, Artificial
  Probe
atagcagacttgcagtgcgtcctgc

SEQ ID NO: 274560 - DNA, 25 bp, Artificial
  Probe
ggctgacaggccatgagatccctct

SEQ ID NO: 274561 - DNA, 25 bp, Artificial
  Probe
aacagccacttagtgctttgtcctg

SEQ ID NO: 274562 - DNA, 25 bp, Artificial
  Probe
tttgtagcaaacagccacttagtgc

SEQ ID NO: 274563 - DNA, 25 bp, Artificial
  Probe
taggaaggtctccatagcagacttg

SEQ ID NO: 274564 - DNA, 25 bp, Artificial
  Probe
tagtgctttgtcctggactccactc

SEQ ID NO: 274565 - DNA, 25 bp, Artificial
  Probe
gaagcctttggttttccactccata

SEQ ID NO: 274566 - DNA, 25 bp, Artificial
  Probe
aggcactgtggacgaagcctttggt

SEQ ID NO: 274567 - DNA, 25 bp, Artificial
  Probe
tctccaggtgttttgtagcaaacag

SEQ ID NO: 274568 - DNA, 25 bp, Artificial
  Probe
tgtatgactgtgtgactgggagcct

SEQ ID NO: 274569 - DNA, 25 bp, Artificial
  Probe
ggactggctgacaggccatgagatc

SEQ ID NO: 274570 - DNA, 25 bp, Artificial
  Probe
cactgtggacgaagcctttggtttt

SEQ ID NO: 274571 - DNA, 25 bp, Artificial
  Probe
catagcagacttgcagtgcgtcctg

SEQ ID NO: 274572 - DNA, 25 bp, Artificial
  Probe
gcagacttgcagtgcgtcctgctgg

SEQ ID NO: 274573 - DNA, 25 bp, Artificial
  Probe
tagcaaacagccacttagtgctttg

SEQ ID NO: 274574 - DNA, 25 bp, Artificial
  Probe
aaggtctccatagcagacttgcagt

SEQ ID NO: 274575 - DNA, 25 bp, Artificial
  Probe
acgctgtgtgtatgactgtgtgact

SEQ ID NO: 274576 - DNA, 25 bp, Artificial
  Probe
atgagatccctctggcatctccagg

SEQ ID NO: 274577 - DNA, 25 bp, Artificial
  Probe
caactctgggaagtccgctcttcct

SEQ ID NO: 274578 - DNA, 25 bp, Artificial
  Probe
tggaggcactgtggacgaagccttt

SEQ ID NO: 274579 - DNA, 25 bp, Artificial
  Probe
cgaagcctttggttttccactccat

SEQ ID NO: 274580 - DNA, 25 bp, Artificial
  Probe
tttgtcctggactccactcagcctg

SEQ ID NO: 274581 - DNA, 25 bp, Artificial
  Probe
gatggatctcccaggcagtagctgt

SEQ ID NO: 274582 - DNA, 25 bp, Artificial
  Probe
gagtcagcccggaccccaatcattg

SEQ ID NO: 274583 - DNA, 25 bp, Artificial
  Probe
cctcttggaaagtgcctgtgaaaag

SEQ ID NO: 274584 - DNA, 25 bp, Artificial
  Probe
cctgtggctctcaggagcaggtgct

SEQ ID NO: 274585 - DNA, 25 bp, Artificial
  Probe
caccctcttggaaagtgcctgtgaa

SEQ ID NO: 274586 - DNA, 25 bp, Artificial
  Probe
tgtagtgtcaggattgttgatccca

SEQ ID NO: 274587 - DNA, 25 bp, Artificial
  Probe
ggttctgcgttctctctgccgttcc

SEQ ID NO: 274588 - DNA, 25 bp, Artificial
  Probe
tgagatgtgccgtgttcactgcttc

SEQ ID NO: 274589 - DNA, 25 bp, Artificial
  Probe
caggtgctgttgatggatctcccag

SEQ ID NO: 274590 - DNA, 25 bp, Artificial
  Probe
tgtcaggattgttgatcccagggcg

SEQ ID NO: 274591 - DNA, 25 bp, Artificial
  Probe
acacgtcggcttctgagatgtgccg

SEQ ID NO: 274592 - DNA, 25 bp, Artificial
  Probe
gcttcttcagatgatgcagatccac

SEQ ID NO: 274593 - DNA, 25 bp, Artificial
  Probe
tcttcagatgatgcagatccacatc

SEQ ID NO: 274594 - DNA, 25 bp, Artificial
  Probe
tgttgatggatctcccaggcagtag

SEQ ID NO: 274595 - DNA, 25 bp, Artificial
  Probe
tccttaaacacgtcggcttctgaga

SEQ ID NO: 274596 - DNA, 25 bp, Artificial
  Probe
ctctcaggagcaggtgctgttgatg

SEQ ID NO: 274597 - DNA, 25 bp, Artificial
  Probe
tctgtagtgtcaggattgttgatcc

SEQ ID NO: 274598 - DNA, 25 bp, Artificial
  Probe
ccaggcagtagctgtcggaggaccc

SEQ ID NO: 274599 - DNA, 25 bp, Artificial
  Probe
gatggaagcgggttctgcgttctct

SEQ ID NO: 274600 - DNA, 25 bp, Artificial
  Probe
ttttactggttctgtgtttcacggg

SEQ ID NO: 274601 - DNA, 25 bp, Artificial
  Probe
cattggcgcctgtggctctcaggag

SEQ ID NO: 274602 - DNA, 25 bp, Artificial
  Probe
caggattgttgatcccagggcggcc

SEQ ID NO: 274603 - DNA, 25 bp, Artificial
  Probe
tcagatgatgcagatccacatcccg

SEQ ID NO: 274604 - DNA, 25 bp, Artificial
  Probe
cgagtgggagtcagcccggacccca

SEQ ID NO: 274605 - DNA, 25 bp, Artificial
  Probe
tcaggattgttgatcccagggcggc

SEQ ID NO: 274606 - DNA, 25 bp, Artificial
  Probe
tctcccaggcagtagctgtcggagg

SEQ ID NO: 274607 - DNA, 25 bp, Artificial
  Probe
ttcactgcttcttcagatgatgcag

SEQ ID NO: 274608 - DNA, 25 bp, Artificial
  Probe
aacacgtcggcttctgagatgtgcc

SEQ ID NO: 274609 - DNA, 25 bp, Artificial
  Probe
gctctcaggagcaggtgctgttgat

SEQ ID NO: 274610 - DNA, 25 bp, Artificial
  Probe
gagcaggtgctgttgatggatctcc

SEQ ID NO: 274611 - DNA, 25 bp, Artificial
  Probe
cggaccccaatcattggcgcctgtg

SEQ ID NO: 274612 - DNA, 25 bp, Artificial
  Probe
ggaagcgggttctgcgttctctctg

SEQ ID NO: 274613 - DNA, 25 bp, Artificial
  Probe
attgttgatcccagggcggcctctc

SEQ ID NO: 274614 - DNA, 25 bp, Artificial
  Probe
cgtgttcactgcttcttcagatgat

SEQ ID NO: 274615 - DNA, 25 bp, Artificial
  Probe
gttttactggttctgtgtttcacgg

SEQ ID NO: 274616 - DNA, 25 bp, Artificial
  Probe
gctctccttaaacacgtcggcttct

SEQ ID NO: 274617 - DNA, 25 bp, Artificial
  Probe
tgcttcttcagatgatgcagatcca

SEQ ID NO: 274618 - DNA, 25 bp, Artificial
  Probe
gcttctgagatgtgccgtgttcact

SEQ ID NO: 274619 - DNA, 25 bp, Artificial
  Probe
agatgatgcagatccacatcccgtg

SEQ ID NO: 274620 - DNA, 25 bp, Artificial
  Probe
atcattggcgcctgtggctctcagg

SEQ ID NO: 274621 - DNA, 25 bp, Artificial
  Probe
gcgggttctgcgttctctctgccgt

SEQ ID NO: 274622 - DNA, 25 bp, Artificial
  Probe
ctgcttcttcagatgatgcagatcc

SEQ ID NO: 274623 - DNA, 25 bp, Artificial
  Probe
gaccccaatcattggcgcctgtggc

SEQ ID NO: 274624 - DNA, 25 bp, Artificial
  Probe
tgtgccgtgttcactgcttcttcag

SEQ ID NO: 274625 - DNA, 25 bp, Artificial
  Probe
tgctgttgatggatctcccaggcag

SEQ ID NO: 274626 - DNA, 25 bp, Artificial
  Probe
gatctcccaggcagtagctgtcgga

SEQ ID NO: 274627 - DNA, 25 bp, Artificial
  Probe
gcttcacacaaggaaggactcaccc

SEQ ID NO: 274628 - DNA, 25 bp, Artificial
  Probe
tcgcttcacacaaggaaggactcac

SEQ ID NO: 274629 - DNA, 25 bp, Artificial
  Probe
caaggaaggactcacccgtgttact

SEQ ID NO: 274630 - DNA, 25 bp, Artificial
  Probe
aaggaaggactcacccgtgttactg

SEQ ID NO: 274631 - DNA, 25 bp, Artificial
  Probe
gcttcctgtcccagaggcatgtgcc

SEQ ID NO: 274632 - DNA, 25 bp, Artificial
  Probe
cgcttcacacaaggaaggactcacc

SEQ ID NO: 274633 - DNA, 25 bp, Artificial
  Probe
ggaaggactcacccgtgttactgcc

SEQ ID NO: 274634 - DNA, 25 bp, Artificial
  Probe
ctcccttccttgggcagaatggact

SEQ ID NO: 274635 - DNA, 25 bp, Artificial
  Probe
acggcactgtgccctccccctccct

SEQ ID NO: 274636 - DNA, 25 bp, Artificial
  Probe
gcattctgtcatttacacatgttgt

SEQ ID NO: 274637 - DNA, 25 bp, Artificial
  Probe
ttcacacaaggaaggactcacccgt

SEQ ID NO: 274638 - DNA, 25 bp, Artificial
  Probe
cattctgtcatttacacatgttgtt

SEQ ID NO: 274639 - DNA, 25 bp, Artificial
  Probe
ccagaggcatgtgccggccaaggcg

SEQ ID NO: 274640 - DNA, 25 bp, Artificial
  Probe
atgtgccggccaaggcggtggcccc

SEQ ID NO: 274641 - DNA, 25 bp, Artificial
  Probe
tgtcccagaggcatgtgccggccaa

SEQ ID NO: 274642 - DNA, 25 bp, Artificial
  Probe
aattcagtcgcttcacacaaggaag

SEQ ID NO: 274643 - DNA, 25 bp, Artificial
  Probe
ccatacgcaggactggggggcaggg

SEQ ID NO: 274644 - DNA, 25 bp, Artificial
  Probe
cagtcgcttcacacaaggaaggact

SEQ ID NO: 274645 - DNA, 25 bp, Artificial
  Probe
ttaattcagtcgcttcacacaagga

SEQ ID NO: 274646 - DNA, 25 bp, Artificial
  Probe
ttcagtcgcttcacacaaggaagga

SEQ ID NO: 274647 - DNA, 25 bp, Artificial
  Probe
ttcctgtcccagaggcatgtgccgg

SEQ ID NO: 274648 - DNA, 25 bp, Artificial
  Probe
ggcattctgtcatttacacatgttg

SEQ ID NO: 274649 - DNA, 25 bp, Artificial
  Probe
ttctgtcatttacacatgttgttcc

SEQ ID NO: 274650 - DNA, 25 bp, Artificial
  Probe
taattcagtcgcttcacacaaggaa

SEQ ID NO: 274651 - DNA, 25 bp, Artificial
  Probe
cggcattctgtcatttacacatgtt

SEQ ID NO: 274652 - DNA, 25 bp, Artificial
  Probe
ggcggcattctgtcatttacacatg

SEQ ID NO: 274653 - DNA, 25 bp, Artificial
  Probe
attcagtcgcttcacacaaggaagg

SEQ ID NO: 274654 - DNA, 25 bp, Artificial
  Probe
ccctcccttccttgggcagaatgga

SEQ ID NO: 274655 - DNA, 25 bp, Artificial
  Probe
gtcccagaggcatgtgccggccaag

SEQ ID NO: 274656 - DNA, 25 bp, Artificial
  Probe
agtcgcttcacacaaggaaggactc

SEQ ID NO: 274657 - DNA, 25 bp, Artificial
  Probe
ctgtcccagaggcatgtgccggcca

SEQ ID NO: 274658 - DNA, 25 bp, Artificial
  Probe
agaggcatgtgccggccaaggcggt

SEQ ID NO: 274659 - DNA, 25 bp, Artificial
  Probe
cttcctgtcccagaggcatgtgccg

SEQ ID NO: 274660 - DNA, 25 bp, Artificial
  Probe
tcagtcgcttcacacaaggaaggac

SEQ ID NO: 274661 - DNA, 25 bp, Artificial
  Probe
cccagaggcatgtgccggccaaggc

SEQ ID NO: 274662 - DNA, 25 bp, Artificial
  Probe
tgcttcctgtcccagaggcatgtgc

SEQ ID NO: 274663 - DNA, 25 bp, Artificial
  Probe
tcctgtcccagaggcatgtgccggc

SEQ ID NO: 274664 - DNA, 25 bp, Artificial
  Probe
gtcgcttcacacaaggaaggactca

SEQ ID NO: 274665 - DNA, 25 bp, Artificial
  Probe
ccggcacacggcactgtgccctccc

SEQ ID NO: 274666 - DNA, 25 bp, Artificial
  Probe
catacgcaggactggggggcagggg

SEQ ID NO: 274667 - DNA, 25 bp, Artificial
  Probe
aggaaggactcacccgtgttactgc

SEQ ID NO: 274668 - DNA, 25 bp, Artificial
  Probe
cttcacacaaggaaggactcacccg

SEQ ID NO: 274669 - DNA, 25 bp, Artificial
  Probe
cacaaggaaggactcacccgtgtta

SEQ ID NO: 274670 - DNA, 25 bp, Artificial
  Probe
tcccagaggcatgtgccggccaagg

SEQ ID NO: 274671 - DNA, 25 bp, Artificial
  Probe
gcggcattctgtcatttacacatgt

SEQ ID NO: 274672 - DNA, 25 bp, Artificial
  Probe
ggcacacggcactgtgccctccccc

SEQ ID NO: 274673 - DNA, 25 bp, Artificial
  Probe
tccctaatattcattgggctttcag

SEQ ID NO: 274674 - DNA, 25 bp, Artificial
  Probe
cagagctgtgccaagtgggatgtct

SEQ ID NO: 274675 - DNA, 25 bp, Artificial
  Probe
ctgtcctgacccaagtacaccatgg

SEQ ID NO: 274676 - DNA, 25 bp, Artificial
  Probe
aggaagattcttacgccatcctaat

SEQ ID NO: 274677 - DNA, 25 bp, Artificial
  Probe
gcttgtccagccattggccaaatca

SEQ ID NO: 274678 - DNA, 25 bp, Artificial
  Probe
tcacactctgccttggctgtgagtc

SEQ ID NO: 274679 - DNA, 25 bp, Artificial
  Probe
gcaaatccctgtcctgacccaagta

SEQ ID NO: 274680 - DNA, 25 bp, Artificial
  Probe
gccatcctaatagcaagaattagat

SEQ ID NO: 274681 - DNA, 25 bp, Artificial
  Probe
tgtcctgacccaagtacaccatggc

SEQ ID NO: 274682 - DNA, 25 bp, Artificial
  Probe
gaaagggtcacagagctgtgccaag

SEQ ID NO: 274683 - DNA, 25 bp, Artificial
  Probe
ctaacctccgatcgtggtctccaag

SEQ ID NO: 274684 - DNA, 25 bp, Artificial
  Probe
agaactctccctaatattcattggg

SEQ ID NO: 274685 - DNA, 25 bp, Artificial
  Probe
gagagcacggctatgagagaacaca

SEQ ID NO: 274686 - DNA, 25 bp, Artificial
  Probe
agagcgtcaggcttgtccagccatt

SEQ ID NO: 274687 - DNA, 25 bp, Artificial
  Probe
ctctgccttggctgtgagtcatcca

SEQ ID NO: 274688 - DNA, 25 bp, Artificial
  Probe
atccactgaatcagggtctttggag

SEQ ID NO: 274689 - DNA, 25 bp, Artificial
  Probe
gaagcttgcagactaggaagccccc

SEQ ID NO: 274690 - DNA, 25 bp, Artificial
  Probe
ttggattgcaaatccctgtcctgac

SEQ ID NO: 274691 - DNA, 25 bp, Artificial
  Probe
caagcctgaagaacatgacagaact

SEQ ID NO: 274692 - DNA, 25 bp, Artificial
  Probe
gattggattgcaaatccctgtcctg

SEQ ID NO: 274693 - DNA, 25 bp, Artificial
  Probe
ttgcaaatccctgtcctgacccaag

SEQ ID NO: 274694 - DNA, 25 bp, Artificial
  Probe
caccatggcccgagagcgtcaggct

SEQ ID NO: 274695 - DNA, 25 bp, Artificial
  Probe
tcagatgttcgttccctccatgctg

SEQ ID NO: 274696 - DNA, 25 bp, Artificial
  Probe
gaactctccctaatattcattgggc

SEQ ID NO: 274697 - DNA, 25 bp, Artificial
  Probe
cctaatattcattgggctttcagaa

SEQ ID NO: 274698 - DNA, 25 bp, Artificial
  Probe
tgaatcctaacctccgatcgtggtc

SEQ ID NO: 274699 - DNA, 25 bp, Artificial
  Probe
ttagctgataagcatcattatcagg

SEQ ID NO: 274700 - DNA, 25 bp, Artificial
  Probe
ttgtccagccattggccaaatcaga

SEQ ID NO: 274701 - DNA, 25 bp, Artificial
  Probe
tattcattgggctttcagaatcata

SEQ ID NO: 274702 - DNA, 25 bp, Artificial
  Probe
caaccatggatttctagcagtcgtc

SEQ ID NO: 274703 - DNA, 25 bp, Artificial
  Probe
ttgggctttcagaatcataaacgtt

SEQ ID NO: 274704 - DNA, 25 bp, Artificial
  Probe
tgggatgtctgtgacactcatttaa

SEQ ID NO: 274705 - DNA, 25 bp, Artificial
  Probe
tgacccaagtacaccatggcccgag

SEQ ID NO: 274706 - DNA, 25 bp, Artificial
  Probe
ggagagcacggctatgagagaacac

SEQ ID NO: 274707 - DNA, 25 bp, Artificial
  Probe
ggcccgagagcgtcaggcttgtcca

SEQ ID NO: 274708 - DNA, 25 bp, Artificial
  Probe
ccaagtacaccatggcccgagagcg

SEQ ID NO: 274709 - DNA, 25 bp, Artificial
  Probe
cagccattggccaaatcagatgttc

SEQ ID NO: 274710 - DNA, 25 bp, Artificial
  Probe
ggatgtctgtgacactcatttaaca

SEQ ID NO: 274711 - DNA, 25 bp, Artificial
  Probe
cctgagcatgaatcctaacctccga

SEQ ID NO: 274712 - DNA, 25 bp, Artificial
  Probe
aagggtcacagagctgtgccaagtg

SEQ ID NO: 274713 - DNA, 25 bp, Artificial
  Probe
gctttcagaatcataaacgtttgta

SEQ ID NO: 274714 - DNA, 25 bp, Artificial
  Probe
acgccatcctaatagcaagaattag

SEQ ID NO: 274715 - DNA, 25 bp, Artificial
  Probe
ggtctccaagcctgaagaacatgac

SEQ ID NO: 274716 - DNA, 25 bp, Artificial
  Probe
taacctccgatcgtggtctccaagc

SEQ ID NO: 274717 - DNA, 25 bp, Artificial
  Probe
gtcacagagctgtgccaagtgggat

SEQ ID NO: 274718 - DNA, 25 bp, Artificial
  Probe
cacactctgccttggctgtgagtca

SEQ ID NO: 274719 - DNA, 25 bp, Artificial
  Probe
cctcggcagacactaacgaccccat

SEQ ID NO: 274720 - DNA, 25 bp, Artificial
  Probe
aacgaccccatttatgtgggtggct

SEQ ID NO: 274721 - DNA, 25 bp, Artificial
  Probe
ccacctcggcagacactaacgaccc

SEQ ID NO: 274722 - DNA, 25 bp, Artificial
  Probe
atcgtcctgactgtggatggggacg

SEQ ID NO: 274723 - DNA, 25 bp, Artificial
  Probe
tcggcagacactaacgaccccattt

SEQ ID NO: 274724 - DNA, 25 bp, Artificial
  Probe
cgtcctgactgtggatggggacgcc

SEQ ID NO: 274725 - DNA, 25 bp, Artificial
  Probe
tcgtcctgactgtggatggggacgc

SEQ ID NO: 274726 - DNA, 25 bp, Artificial
  Probe
tcctgactgtggatggggacgccgt

SEQ ID NO: 274727 - DNA, 25 bp, Artificial
  Probe
cactaacgaccccatttatgtgggt

SEQ ID NO: 274728 - DNA, 25 bp, Artificial
  Probe
gacactaacgaccccatttatgtgg

SEQ ID NO: 274729 - DNA, 25 bp, Artificial
  Probe
acctcggcagacactaacgacccca

SEQ ID NO: 274730 - DNA, 25 bp, Artificial
  Probe
gcagacactaacgaccccatttatg

SEQ ID NO: 274731 - DNA, 25 bp, Artificial
  Probe
cgaccccatttatgtgggtggctac

SEQ ID NO: 274732 - DNA, 25 bp, Artificial
  Probe
acgaccccatttatgtgggtggcta

SEQ ID NO: 274733 - DNA, 25 bp, Artificial
  Probe
agacactaacgaccccatttatgtg

SEQ ID NO: 274734 - DNA, 25 bp, Artificial
  Probe
acactaacgaccccatttatgtggg

SEQ ID NO: 274735 - DNA, 25 bp, Artificial
  Probe
ctcggcagacactaacgaccccatt

SEQ ID NO: 274736 - DNA, 25 bp, Artificial
  Probe
taacgaccccatttatgtgggtggc

SEQ ID NO: 274737 - DNA, 25 bp, Artificial
  Probe
tccacctcggcagacactaacgacc

SEQ ID NO: 274738 - DNA, 25 bp, Artificial
  Probe
ctccacctcggcagacactaacgac

SEQ ID NO: 274739 - DNA, 25 bp, Artificial
  Probe
ggcagacactaacgaccccatttat

SEQ ID NO: 274740 - DNA, 25 bp, Artificial
  Probe
actccacctcggcagacactaacga

SEQ ID NO: 274741 - DNA, 25 bp, Artificial
  Probe
gtcctgactgtggatggggacgccg

SEQ ID NO: 274742 - DNA, 25 bp, Artificial
  Probe
ctaacgaccccatttatgtgggtgg

SEQ ID NO: 274743 - DNA, 25 bp, Artificial
  Probe
cagacactaacgaccccatttatgt

SEQ ID NO: 274744 - DNA, 25 bp, Artificial
  Probe
cacctcggcagacactaacgacccc

SEQ ID NO: 274745 - DNA, 25 bp, Artificial
  Probe
gaccccatttatgtgggtggctacc

SEQ ID NO: 274746 - DNA, 25 bp, Artificial
  Probe
actaacgaccccatttatgtgggtg

SEQ ID NO: 274747 - DNA, 25 bp, Artificial
  Probe
cggcagacactaacgaccccattta

SEQ ID NO: 274748 - DNA, 25 bp, Artificial
  Probe
ctcgctctcctgctgggccaggaag

SEQ ID NO: 274749 - DNA, 25 bp, Artificial
  Probe
tctcgctctcctgctgggccaggaa

SEQ ID NO: 274750 - DNA, 25 bp, Artificial
  Probe
tcggcaggcccgttagcctcctgaa

SEQ ID NO: 274751 - DNA, 25 bp, Artificial
  Probe
agaagaagccgaagtcctcagccat

SEQ ID NO: 274752 - DNA, 25 bp, Artificial
  Probe
gctctccgacgacgagaagaagccg

SEQ ID NO: 274753 - DNA, 25 bp, Artificial
  Probe
ccgaaacccgagtcattctcgatgc

SEQ ID NO: 274754 - DNA, 25 bp, Artificial
  Probe
tccattgactgtagtccccatgtcc

SEQ ID NO: 274755 - DNA, 25 bp, Artificial
  Probe
cgctctccgacgacgagaagaagcc

SEQ ID NO: 274756 - DNA, 25 bp, Artificial
  Probe
ctccgacgacgagaagaagccgaag

SEQ ID NO: 274757 - DNA, 25 bp, Artificial
  Probe
agtcattctcgatgccagcaatctc

SEQ ID NO: 274758 - DNA, 25 bp, Artificial
  Probe
atcttccccgcgtggctgctgtcag

SEQ ID NO: 274759 - DNA, 25 bp, Artificial
  Probe
cccgaaacccgagtcattctcgatg

SEQ ID NO: 274760 - DNA, 25 bp, Artificial
  Probe
gagtcattctcgatgccagcaatct

SEQ ID NO: 274761 - DNA, 25 bp, Artificial
  Probe
caggtgccccgaaacccgagtcatt

SEQ ID NO: 274762 - DNA, 25 bp, Artificial
  Probe
ccgagtcattctcgatgccagcaat

SEQ ID NO: 274763 - DNA, 25 bp, Artificial
  Probe
cccgagtcattctcgatgccagcaa

SEQ ID NO: 274764 - DNA, 25 bp, Artificial
  Probe
atctcgctctcctgctgggccagga

SEQ ID NO: 274765 - DNA, 25 bp, Artificial
  Probe
gtccgcctgggcaatcgcagcgtag

SEQ ID NO: 274766 - DNA, 25 bp, Artificial
  Probe
cattgactgtagtccccatgtcctc

SEQ ID NO: 274767 - DNA, 25 bp, Artificial
  Probe
gcaggtgccccgaaacccgagtcat

SEQ ID NO: 274768 - DNA, 25 bp, Artificial
  Probe
gtagccatcggcaggcccgttagcc

SEQ ID NO: 274769 - DNA, 25 bp, Artificial
  Probe
gaagaagccgaagtcctcagccatc

SEQ ID NO: 274770 - DNA, 25 bp, Artificial
  Probe
ttctcccactctgtgcctggggtct

SEQ ID NO: 274771 - DNA, 25 bp, Artificial
  Probe
gaaacacatctccattgactgtagt

SEQ ID NO: 274772 - DNA, 25 bp, Artificial
  Probe
aatctcgctctcctgctgggccagg

SEQ ID NO: 274773 - DNA, 25 bp, Artificial
  Probe
gaagccgaagtcctcagccatcttc

SEQ ID NO: 274774 - DNA, 25 bp, Artificial
  Probe
gcaatcgcagcgtagccatcggcag

SEQ ID NO: 274775 - DNA, 25 bp, Artificial
  Probe
ggcccgttagcctcctgaaacacat

SEQ ID NO: 274776 - DNA, 25 bp, Artificial
  Probe
acccgagtcattctcgatgccagca

SEQ ID NO: 274777 - DNA, 25 bp, Artificial
  Probe
gaaacccgagtcattctcgatgcca

SEQ ID NO: 274778 - DNA, 25 bp, Artificial
  Probe
gcagcgtagccatcggcaggcccgt

SEQ ID NO: 274779 - DNA, 25 bp, Artificial
  Probe
ttctcgatgccagcaatctcgctct

SEQ ID NO: 274780 - DNA, 25 bp, Artificial
  Probe
caatcgcagcgtagccatcggcagg

SEQ ID NO: 274781 - DNA, 25 bp, Artificial
  Probe
ctctccgacgacgagaagaagccga

SEQ ID NO: 274782 - DNA, 25 bp, Artificial
  Probe
atctccattgactgtagtccccatg

SEQ ID NO: 274783 - DNA, 25 bp, Artificial
  Probe
cccgctctccgacgacgagaagaag

SEQ ID NO: 274784 - DNA, 25 bp, Artificial
  Probe
agaagccgaagtcctcagccatctt

SEQ ID NO: 274785 - DNA, 25 bp, Artificial
  Probe
ctgggcaatcgcagcgtagccatcg

SEQ ID NO: 274786 - DNA, 25 bp, Artificial
  Probe
attctcgatgccagcaatctcgctc

SEQ ID NO: 274787 - DNA, 25 bp, Artificial
  Probe
tgaaacacatctccattgactgtag

SEQ ID NO: 274788 - DNA, 25 bp, Artificial
  Probe
ccattgactgtagtccccatgtcct

SEQ ID NO: 274789 - DNA, 25 bp, Artificial
  Probe
ctccattgactgtagtccccatgtc

SEQ ID NO: 274790 - DNA, 25 bp, Artificial
  Probe
ccgctctccgacgacgagaagaagc

SEQ ID NO: 274791 - DNA, 25 bp, Artificial
  Probe
aacctgtccgcctgggcaatcgcag

SEQ ID NO: 274792 - DNA, 25 bp, Artificial
  Probe
tccgcctgggcaatcgcagcgtagc

SEQ ID NO: 274793 - DNA, 25 bp, Artificial
  Probe
ggcaggcccgttagcctcctgaaac

SEQ ID NO: 274794 - DNA, 25 bp, Artificial
  Probe
cagctgacaaccttgtgctgaatct

SEQ ID NO: 274795 - DNA, 25 bp, Artificial
  Probe
ctgacaaccttgtgctgaatctgca

SEQ ID NO: 274796 - DNA, 25 bp, Artificial
  Probe
gatttcctgtagtgttgtccctctc

SEQ ID NO: 274797 - DNA, 25 bp, Artificial
  Probe
tgacccaagcatcatgtgatggatt

SEQ ID NO: 274798 - DNA, 25 bp, Artificial
  Probe
acagcctcattaagggtaagaagtg

SEQ ID NO: 274799 - DNA, 25 bp, Artificial
  Probe
tatcaagctccgaaagatccgggct

SEQ ID NO: 274800 - DNA, 25 bp, Artificial
  Probe
gcccagaacatctctaaaacgatcg

SEQ ID NO: 274801 - DNA, 25 bp, Artificial
  Probe
gctgcccagaacatctctaaaacga

SEQ ID NO: 274802 - DNA, 25 bp, Artificial
  Probe
gtgctgaatctgcaggatgaaagct

SEQ ID NO: 274803 - DNA, 25 bp, Artificial
  Probe
atggattcttctgtatctgctctct

SEQ ID NO: 274804 - DNA, 25 bp, Artificial
  Probe
cttctgtatctgctctcttggatta

SEQ ID NO: 274805 - DNA, 25 bp, Artificial
  Probe
gactgaagaccaaccctttcagagg

SEQ ID NO: 274806 - DNA, 25 bp, Artificial
  Probe
gaagtgacagcctcattaagggtaa

SEQ ID NO: 274807 - DNA, 25 bp, Artificial
  Probe
ctccttcttgtattggctgggaagg

SEQ ID NO: 274808 - DNA, 25 bp, Artificial
  Probe
ttcagaggggttttcctccttcttg

SEQ ID NO: 274809 - DNA, 25 bp, Artificial
  Probe
tcacagctgacaaccttgtgctgaa

SEQ ID NO: 274810 - DNA, 25 bp, Artificial
  Probe
gacagcctcattaagggtaagaagt

SEQ ID NO: 274811 - DNA, 25 bp, Artificial
  Probe
gggagataaccaccatgccaggaag

SEQ ID NO: 274812 - DNA, 25 bp, Artificial
  Probe
aaacgatcgccacatcacagaaccg

SEQ ID NO: 274813 - DNA, 25 bp, Artificial
  Probe
accttgtgctgaatctgcaggatga

SEQ ID NO: 274814 - DNA, 25 bp, Artificial
  Probe
cctggctatatcaagctccgaaaga

SEQ ID NO: 274815 - DNA, 25 bp, Artificial
  Probe
gaagactgaagaccaaccctttcag

SEQ ID NO: 274816 - DNA, 25 bp, Artificial
  Probe
tttcctccttcttgtattggctggg

SEQ ID NO: 274817 - DNA, 25 bp, Artificial
  Probe
gtgatttcctgtagtgttgtccctc

SEQ ID NO: 274818 - DNA, 25 bp, Artificial
  Probe
tgaatctgcaggatgaaagctttac

SEQ ID NO: 274819 - DNA, 25 bp, Artificial
  Probe
acagtgtgatttctcagtgatttcc

SEQ ID NO: 274820 - DNA, 25 bp, Artificial
  Probe
attcttctgtatctgctctcttgga

SEQ ID NO: 274821 - DNA, 25 bp, Artificial
  Probe
ttctcagtgatttcctgtagtgttg

SEQ ID NO: 274822 - DNA, 25 bp, Artificial
  Probe
atcatgtgatggattcttctgtatc

SEQ ID NO: 274823 - DNA, 25 bp, Artificial
  Probe
tcagaggggttttcctccttcttgt

SEQ ID NO: 274824 - DNA, 25 bp, Artificial
  Probe
cgatcgccacatcacagaaccggat

SEQ ID NO: 274825 - DNA, 25 bp, Artificial
  Probe
aaccaccatgccaggaagtctcaat

SEQ ID NO: 274826 - DNA, 25 bp, Artificial
  Probe
ggctgcccagaacatctctaaaacg

SEQ ID NO: 274827 - DNA, 25 bp, Artificial
  Probe
tccgggctgcccagaacatctctaa

SEQ ID NO: 274828 - DNA, 25 bp, Artificial
  Probe
caagcatcatgtgatggattcttct

SEQ ID NO: 274829 - DNA, 25 bp, Artificial
  Probe
agctccgaaagatccgggctgccca

SEQ ID NO: 274830 - DNA, 25 bp, Artificial
  Probe
tggcacacttctccagtttggaggg

SEQ ID NO: 274831 - DNA, 25 bp, Artificial
  Probe
tatctcacagctgacaaccttgtgc

SEQ ID NO: 274832 - DNA, 25 bp, Artificial
  Probe
gacaaccttgtgctgaatctgcagg

SEQ ID NO: 274833 - DNA, 25 bp, Artificial
  Probe
tgatggattcttctgtatctgctct

SEQ ID NO: 274834 - DNA, 25 bp, Artificial
  Probe
atttctcagtgatttcctgtagtgt

SEQ ID NO: 274835 - DNA, 25 bp, Artificial
  Probe
gacagtgtgatttctcagtgatttc

SEQ ID NO: 274836 - DNA, 25 bp, Artificial
  Probe
agataaccaccatgccaggaagtct

SEQ ID NO: 274837 - DNA, 25 bp, Artificial
  Probe
gctatatcaagctccgaaagatccg

SEQ ID NO: 274838 - DNA, 25 bp, Artificial
  Probe
ttctgtatctgctctcttggattaa

SEQ ID NO: 274839 - DNA, 25 bp, Artificial
  Probe
ggattcttctgtatctgctctcttg

SEQ ID NO: 274840 - DNA, 25 bp, Artificial
  Probe
atgaggattccgacagtgaccagcc

SEQ ID NO: 274841 - DNA, 25 bp, Artificial
  Probe
tggagcaatgagactcctgcgttgt

SEQ ID NO: 274842 - DNA, 25 bp, Artificial
  Probe
ccctccggaggctcagagaatgaga

SEQ ID NO: 274843 - DNA, 25 bp, Artificial
  Probe
cccacctgccatatgtgaaaactgc

SEQ ID NO: 274844 - DNA, 25 bp, Artificial
  Probe
cccttttgagttgagactgaaagtt

SEQ ID NO: 274845 - DNA, 25 bp, Artificial
  Probe
ggagtccgatgaggattccgacagt

SEQ ID NO: 274846 - DNA, 25 bp, Artificial
  Probe
caagagacatttcctgtgctggaga

SEQ ID NO: 274847 - DNA, 25 bp, Artificial
  Probe
caaatgttgcagaagccgagatata

SEQ ID NO: 274848 - DNA, 25 bp, Artificial
  Probe
gtccagtgtctgaccctggagcaat

SEQ ID NO: 274849 - DNA, 25 bp, Artificial
  Probe
cacctgccatatgtgaaaactgcag

SEQ ID NO: 274850 - DNA, 25 bp, Artificial
  Probe
ctctgaaaggcaggtgtttacagtg

SEQ ID NO: 274851 - DNA, 25 bp, Artificial
  Probe
gaggaagacatgtccctgtactgaa

SEQ ID NO: 274852 - DNA, 25 bp, Artificial
  Probe
gactaggttcatttcatcaaagact

SEQ ID NO: 274853 - DNA, 25 bp, Artificial
  Probe
gagagcgactcagatgacaaccaga

SEQ ID NO: 274854 - DNA, 25 bp, Artificial
  Probe
gcaggagtccgatgaggattccgac

SEQ ID NO: 274855 - DNA, 25 bp, Artificial
  Probe
accctggagcaatgagactcctgcg

SEQ ID NO: 274856 - DNA, 25 bp, Artificial
  Probe
aatgagaacgattctcgcccggttt

SEQ ID NO: 274857 - DNA, 25 bp, Artificial
  Probe
agtgtctgaccctggagcaatgaga

SEQ ID NO: 274858 - DNA, 25 bp, Artificial
  Probe
ccagaacaagtctggcagcgaggcg

SEQ ID NO: 274859 - DNA, 25 bp, Artificial
  Probe
tccggaggctcagagaatgagaacg

SEQ ID NO: 274860 - DNA, 25 bp, Artificial
  Probe
aagacatgtccctgtactgaactct

SEQ ID NO: 274861 - DNA, 25 bp, Artificial
  Probe
taacttccaagagacatttcctgtg

SEQ ID NO: 274862 - DNA, 25 bp, Artificial
  Probe
ccgacagtgaccagccgtccagaaa

SEQ ID NO: 274863 - DNA, 25 bp, Artificial
  Probe
tcggagagcgactcagatgacaacc

SEQ ID NO: 274864 - DNA, 25 bp, Artificial
  Probe
ctcgcccggtttctccaagtgcaga

SEQ ID NO: 274865 - DNA, 25 bp, Artificial
  Probe
agagacatttcctgtgctggagagt

SEQ ID NO: 274866 - DNA, 25 bp, Artificial
  Probe
attctcgcccggtttctccaagtgc

SEQ ID NO: 274867 - DNA, 25 bp, Artificial
  Probe
ccggttagcagcatgctgctatgta

SEQ ID NO: 274868 - DNA, 25 bp, Artificial
  Probe
gttgcaaacttgtaccaaatgttgc

SEQ ID NO: 274869 - DNA, 25 bp, Artificial
  Probe
agaggaagacatgtccctgtactga

SEQ ID NO: 274870 - DNA, 25 bp, Artificial
  Probe
ccgtccagaaagagaaggcgctccg

SEQ ID NO: 274871 - DNA, 25 bp, Artificial
  Probe
caatgagactcctgcgttgtggtgc

SEQ ID NO: 274872 - DNA, 25 bp, Artificial
  Probe
tccctgtactgaactctgaaaggca

SEQ ID NO: 274873 - DNA, 25 bp, Artificial
  Probe
gcaaacttgtaccaaatgttgcaga

SEQ ID NO: 274874 - DNA, 25 bp, Artificial
  Probe
accaaatgttgcagaagccgagata

SEQ ID NO: 274875 - DNA, 25 bp, Artificial
  Probe
agtgaccagccgtccagaaagagaa

SEQ ID NO: 274876 - DNA, 25 bp, Artificial
  Probe
ttgttcccttttgagttgagactga

SEQ ID NO: 274877 - DNA, 25 bp, Artificial
  Probe
ttttgttgcaaacttgtaccaaatg

SEQ ID NO: 274878 - DNA, 25 bp, Artificial
  Probe
ctgaactctgaaaggcaggtgttta

SEQ ID NO: 274879 - DNA, 25 bp, Artificial
  Probe
atgatagcgactaggttcatttcat

SEQ ID NO: 274880 - DNA, 25 bp, Artificial
  Probe
actcctgcgttgtggtgcagcccca

SEQ ID NO: 274881 - DNA, 25 bp, Artificial
  Probe
tgagaacgattctcgcccggtttct

SEQ ID NO: 274882 - DNA, 25 bp, Artificial
  Probe
aagagaaggcgctccggctctgagc

SEQ ID NO: 274883 - DNA, 25 bp, Artificial
  Probe
gacatgtccctgtactgaactctga

SEQ ID NO: 274884 - DNA, 25 bp, Artificial
  Probe
tccgatgaggattccgacagtgacc

SEQ ID NO: 274885 - DNA, 25 bp, Artificial
  Probe
gagactcctgcgttgtggtgcagcc

SEQ ID NO: 274886 - DNA, 25 bp, Artificial
  Probe
tctttcccagtttgatactgtagat

SEQ ID NO: 274887 - DNA, 25 bp, Artificial
  Probe
tgtcctccagatcctggggaatatg

SEQ ID NO: 274888 - DNA, 25 bp, Artificial
  Probe
gaaccatagccttggtaggtaatcc

SEQ ID NO: 274889 - DNA, 25 bp, Artificial
  Probe
ggaggcccagggtgccaacagcctc

SEQ ID NO: 274890 - DNA, 25 bp, Artificial
  Probe
aggaattgtgtcctccagatcctgg

SEQ ID NO: 274891 - DNA, 25 bp, Artificial
  Probe
cacttagaaagcactgttggaacca

SEQ ID NO: 274892 - DNA, 25 bp, Artificial
  Probe
agccaggcacttagaaagcactgtt

SEQ ID NO: 274893 - DNA, 25 bp, Artificial
  Probe
gcacttagaaagcactgttggaacc

SEQ ID NO: 274894 - DNA, 25 bp, Artificial
  Probe
ggaaccatagccttggtaggtaatc

SEQ ID NO: 274895 - DNA, 25 bp, Artificial
  Probe
tgttggaaccatagccttggtaggt

SEQ ID NO: 274896 - DNA, 25 bp, Artificial
  Probe
ggaattgtgtcctccagatcctggg

SEQ ID NO: 274897 - DNA, 25 bp, Artificial
  Probe
tttcccagtttgatactgtagatct

SEQ ID NO: 274898 - DNA, 25 bp, Artificial
  Probe
attgtgtcctccagatcctggggaa

SEQ ID NO: 274899 - DNA, 25 bp, Artificial
  Probe
gaaagcactgttggaaccatagcct

SEQ ID NO: 274900 - DNA, 25 bp, Artificial
  Probe
cagatcctggggaatatggtggaca

SEQ ID NO: 274901 - DNA, 25 bp, Artificial
  Probe
aaccatagccttggtaggtaatcca

SEQ ID NO: 274902 - DNA, 25 bp, Artificial
  Probe
tgaactacagccaggcacttagaaa

SEQ ID NO: 274903 - DNA, 25 bp, Artificial
  Probe
ccatagccttggtaggtaatccata

SEQ ID NO: 274904 - DNA, 25 bp, Artificial
  Probe
tagccttggtaggtaatccatattg

SEQ ID NO: 274905 - DNA, 25 bp, Artificial
  Probe
cactgttggaaccatagccttggta

SEQ ID NO: 274906 - DNA, 25 bp, Artificial
  Probe
ccaggcacttagaaagcactgttgg

SEQ ID NO: 274907 - DNA, 25 bp, Artificial
  Probe
ttcccagtttgatactgtagatctt

SEQ ID NO: 274908 - DNA, 25 bp, Artificial
  Probe
tcctccagatcctggggaatatggt

SEQ ID NO: 274909 - DNA, 25 bp, Artificial
  Probe
ggcacttagaaagcactgttggaac

SEQ ID NO: 274910 - DNA, 25 bp, Artificial
  Probe
gtgtcctccagatcctggggaatat

SEQ ID NO: 274911 - DNA, 25 bp, Artificial
  Probe
aggcacttagaaagcactgttggaa

SEQ ID NO: 274912 - DNA, 25 bp, Artificial
  Probe
caggcacttagaaagcactgttgga

SEQ ID NO: 274913 - DNA, 25 bp, Artificial
  Probe
agcactgttggaaccatagccttgg

SEQ ID NO: 274914 - DNA, 25 bp, Artificial
  Probe
ttagaaagcactgttggaaccatag

SEQ ID NO: 274915 - DNA, 25 bp, Artificial
  Probe
gaaggaattgtgtcctccagatcct

SEQ ID NO: 274916 - DNA, 25 bp, Artificial
  Probe
ctgttggaaccatagccttggtagg

SEQ ID NO: 274917 - DNA, 25 bp, Artificial
  Probe
gaattgtgtcctccagatcctgggg

SEQ ID NO: 274918 - DNA, 25 bp, Artificial
  Probe
atagccttggtaggtaatccatatt

SEQ ID NO: 274919 - DNA, 25 bp, Artificial
  Probe
tcccagtttgatactgtagatcttt

SEQ ID NO: 274920 - DNA, 25 bp, Artificial
  Probe
caggctgaactacagccaggcactt

SEQ ID NO: 274921 - DNA, 25 bp, Artificial
  Probe
ttttaactgaaggaattgtgtcctc

SEQ ID NO: 274922 - DNA, 25 bp, Artificial
  Probe
agccttggtaggtaatccatattgg

SEQ ID NO: 274923 - DNA, 25 bp, Artificial
  Probe
ctacagccaggcacttagaaagcac

SEQ ID NO: 274924 - DNA, 25 bp, Artificial
  Probe
atccatattggatatcaataaggac

SEQ ID NO: 274925 - DNA, 25 bp, Artificial
  Probe
ttgtgtcctccagatcctggggaat

SEQ ID NO: 274926 - DNA, 25 bp, Artificial
  Probe
tttctttcccagtttgatactgtag

SEQ ID NO: 274927 - DNA, 25 bp, Artificial
  Probe
actgttggaaccatagccttggtag

SEQ ID NO: 274928 - DNA, 25 bp, Artificial
  Probe
aaggaattgtgtcctccagatcctg

SEQ ID NO: 274929 - DNA, 25 bp, Artificial
  Probe
ttctttcccagtttgatactgtaga

SEQ ID NO: 274930 - DNA, 25 bp, Artificial
  Probe
tacagccaggcacttagaaagcact

SEQ ID NO: 274931 - DNA, 25 bp, Artificial
  Probe
cagccaggcacttagaaagcactgt

SEQ ID NO: 274932 - DNA, 25 bp, Artificial
  Probe
tggtgctctccacatccacagggac

SEQ ID NO: 274933 - DNA, 25 bp, Artificial
  Probe
ctagggcttagaccttttggagctg

SEQ ID NO: 274934 - DNA, 25 bp, Artificial
  Probe
gggacagcctctctgggtggctttt

SEQ ID NO: 274935 - DNA, 25 bp, Artificial
  Probe
actagggcttagaccttttggagct

SEQ ID NO: 274936 - DNA, 25 bp, Artificial
  Probe
gactagggcttagaccttttggagc

SEQ ID NO: 274937 - DNA, 25 bp, Artificial
  Probe
agacacagtggtgctctccacatcc

SEQ ID NO: 274938 - DNA, 25 bp, Artificial
  Probe
accactttgactctctgactagggc

SEQ ID NO: 274939 - DNA, 25 bp, Artificial
  Probe
gacacagtggtgctctccacatcca

SEQ ID NO: 274940 - DNA, 25 bp, Artificial
  Probe
ctgactagggcttagaccttttgga

SEQ ID NO: 274941 - DNA, 25 bp, Artificial
  Probe
gactctctgactagggcttagacct

SEQ ID NO: 274942 - DNA, 25 bp, Artificial
  Probe
gttggacccagagacacagtggtgc

SEQ ID NO: 274943 - DNA, 25 bp, Artificial
  Probe
tctgactagggcttagaccttttgg

SEQ ID NO: 274944 - DNA, 25 bp, Artificial
  Probe
agggacagcctctctgggtggcttt

SEQ ID NO: 274945 - DNA, 25 bp, Artificial
  Probe
agagacacagtggtgctctccacat

SEQ ID NO: 274946 - DNA, 25 bp, Artificial
  Probe
tagggcttagaccttttggagctgt

SEQ ID NO: 274947 - DNA, 25 bp, Artificial
  Probe
ccactttgactctctgactagggct

SEQ ID NO: 274948 - DNA, 25 bp, Artificial
  Probe
tggacccagagacacagtggtgctc

SEQ ID NO: 274949 - DNA, 25 bp, Artificial
  Probe
agggcttagaccttttggagctgtg

SEQ ID NO: 274950 - DNA, 25 bp, Artificial
  Probe
acagtggtgctctccacatccacag

SEQ ID NO: 274951 - DNA, 25 bp, Artificial
  Probe
gacccagagacacagtggtgctctc

SEQ ID NO: 274952 - DNA, 25 bp, Artificial
  Probe
ggtgctctccacatccacagggaca

SEQ ID NO: 274953 - DNA, 25 bp, Artificial
  Probe
ggacagcctctctgggtggcttttt

SEQ ID NO: 274954 - DNA, 25 bp, Artificial
  Probe
acccagagacacagtggtgctctcc

SEQ ID NO: 274955 - DNA, 25 bp, Artificial
  Probe
gtggtgctctccacatccacaggga

SEQ ID NO: 274956 - DNA, 25 bp, Artificial
  Probe
cagtggtgctctccacatccacagg

SEQ ID NO: 274957 - DNA, 25 bp, Artificial
  Probe
cagagacacagtggtgctctccaca

SEQ ID NO: 274958 - DNA, 25 bp, Artificial
  Probe
ttttgctgggcagtgtcacttggga

SEQ ID NO: 274959 - DNA, 25 bp, Artificial
  Probe
ccagagacacagtggtgctctccac

SEQ ID NO: 274960 - DNA, 25 bp, Artificial
  Probe
tgactctctgactagggcttagacc

SEQ ID NO: 274961 - DNA, 25 bp, Artificial
  Probe
tttgactctctgactagggcttaga

SEQ ID NO: 274962 - DNA, 25 bp, Artificial
  Probe
cttagaccttttggagctgtggggt

SEQ ID NO: 274963 - DNA, 25 bp, Artificial
  Probe
tctctgggtggctttttgctgggca

SEQ ID NO: 274964 - DNA, 25 bp, Artificial
  Probe
tgactagggcttagaccttttggag

SEQ ID NO: 274965 - DNA, 25 bp, Artificial
  Probe
gagacacagtggtgctctccacatc

SEQ ID NO: 274966 - DNA, 25 bp, Artificial
  Probe
ctttgactctctgactagggcttag

SEQ ID NO: 274967 - DNA, 25 bp, Artificial
  Probe
ttggacccagagacacagtggtgct

SEQ ID NO: 274968 - DNA, 25 bp, Artificial
  Probe
ggacccagagacacagtggtgctct

SEQ ID NO: 274969 - DNA, 25 bp, Artificial
  Probe
actttgactctctgactagggctta

SEQ ID NO: 274970 - DNA, 25 bp, Artificial
  Probe
tttttgctgggcagtgtcacttggg

SEQ ID NO: 274971 - DNA, 25 bp, Artificial
  Probe
cactttgactctctgactagggctt

SEQ ID NO: 274972 - DNA, 25 bp, Artificial
  Probe
gaccactttgactctctgactaggg

SEQ ID NO: 274973 - DNA, 25 bp, Artificial
  Probe
ttgactctctgactagggcttagac

SEQ ID NO: 274974 - DNA, 25 bp, Artificial
  Probe
tgaccactttgactctctgactagg

SEQ ID NO: 274975 - DNA, 25 bp, Artificial
  Probe
gtggctttttgctgggcagtgtcac

SEQ ID NO: 274976 - DNA, 25 bp, Artificial
  Probe
cagggacagcctctctgggtggctt

SEQ ID NO: 274977 - DNA, 25 bp, Artificial
  Probe
agtggtgctctccacatccacaggg

SEQ ID NO: 274978 - DNA, 25 bp, Artificial
  Probe
ttcaagccagggttgtgccttactg

SEQ ID NO: 274979 - DNA, 25 bp, Artificial
  Probe
aagccagggttgtgccttactgtcc

SEQ ID NO: 274980 - DNA, 25 bp, Artificial
  Probe
tcctaagaatctggagctagctgtt

SEQ ID NO: 274981 - DNA, 25 bp, Artificial
  Probe
tctggagctagctgtttgcctttga

SEQ ID NO: 274982 - DNA, 25 bp, Artificial
  Probe
tgacttcaagccagggttgtgcctt

SEQ ID NO: 274983 - DNA, 25 bp, Artificial
  Probe
tagctgtttgcctttgactccctga

SEQ ID NO: 274984 - DNA, 25 bp, Artificial
  Probe
ctaagaatctggagctagctgtttg

SEQ ID NO: 274985 - DNA, 25 bp, Artificial
  Probe
acatttggggtttcagttgcaaagc

SEQ ID NO: 274986 - DNA, 25 bp, Artificial
  Probe
atttggggtttcagttgcaaagcca

SEQ ID NO: 274987 - DNA, 25 bp, Artificial
  Probe
ttcattcctaagaatctggagctag

SEQ ID NO: 274988 - DNA, 25 bp, Artificial
  Probe
cagctctaagggttggagtcataac

SEQ ID NO: 274989 - DNA, 25 bp, Artificial
  Probe
ttcttcattcctaagaatctggagc

SEQ ID NO: 274990 - DNA, 25 bp, Artificial
  Probe
cccttctcagctctaagggttggag

SEQ ID NO: 274991 - DNA, 25 bp, Artificial
  Probe
gactgtctggtctcatttccctctc

SEQ ID NO: 274992 - DNA, 25 bp, Artificial
  Probe
atctggagctagctgtttgcctttg

SEQ ID NO: 274993 - DNA, 25 bp, Artificial
  Probe
cgggactgtctggtctcatttccct

SEQ ID NO: 274994 - DNA, 25 bp, Artificial
  Probe
cctaagaatctggagctagctgttt

SEQ ID NO: 274995 - DNA, 25 bp, Artificial
  Probe
aatctggagctagctgtttgccttt

SEQ ID NO: 274996 - DNA, 25 bp, Artificial
  Probe
gacgggactgtctggtctcatttcc

SEQ ID NO: 274997 - DNA, 25 bp, Artificial
  Probe
ggactgtctggtctcatttccctct

SEQ ID NO: 274998 - DNA, 25 bp, Artificial
  Probe
cttcattcctaagaatctggagcta

SEQ ID NO: 274999 - DNA, 25 bp, Artificial
  Probe
ccttctcagctctaagggttggagt

SEQ ID NO: 275000 - DNA, 25 bp, Artificial
  Probe
acccttctcagctctaagggttgga

SEQ ID NO: 275001 - DNA, 25 bp, Artificial
  Probe
attcctaagaatctggagctagctg

SEQ ID NO: 275002 - DNA, 25 bp, Artificial
  Probe
gagctagctgtttgcctttgactcc

SEQ ID NO: 275003 - DNA, 25 bp, Artificial
  Probe
gactccctgacttcaagccagggtt

SEQ ID NO: 275004 - DNA, 25 bp, Artificial
  Probe
cattcctaagaatctggagctagct

SEQ ID NO: 275005 - DNA, 25 bp, Artificial
  Probe
ctggagctagctgtttgcctttgac

SEQ ID NO: 275006 - DNA, 25 bp, Artificial
  Probe
cttctcagctctaagggttggagtc

SEQ ID NO: 275007 - DNA, 25 bp, Artificial
  Probe
tcttcattcctaagaatctggagct

SEQ ID NO: 275008 - DNA, 25 bp, Artificial
  Probe
taagaatctggagctagctgtttgc

SEQ ID NO: 275009 - DNA, 25 bp, Artificial
  Probe
gctctaagggttggagtcataactc

SEQ ID NO: 275010 - DNA, 25 bp, Artificial
  Probe
catttggggtttcagttgcaaagcc

SEQ ID NO: 275011 - DNA, 25 bp, Artificial
  Probe
tgactccctgacttcaagccagggt

SEQ ID NO: 275012 - DNA, 25 bp, Artificial
  Probe
attcttcattcctaagaatctggag

SEQ ID NO: 275013 - DNA, 25 bp, Artificial
  Probe
caagccagggttgtgccttactgtc

SEQ ID NO: 275014 - DNA, 25 bp, Artificial
  Probe
gggactgtctggtctcatttccctc

SEQ ID NO: 275015 - DNA, 25 bp, Artificial
  Probe
tcaagccagggttgtgccttactgt

SEQ ID NO: 275016 - DNA, 25 bp, Artificial
  Probe
agacgggactgtctggtctcatttc

SEQ ID NO: 275017 - DNA, 25 bp, Artificial
  Probe
ttctcagctctaagggttggagtca

SEQ ID NO: 275018 - DNA, 25 bp, Artificial
  Probe
agaatctggagctagctgtttgcct

SEQ ID NO: 275019 - DNA, 25 bp, Artificial
  Probe
actccctgacttcaagccagggttg

SEQ ID NO: 275020 - DNA, 25 bp, Artificial
  Probe
tccctgacttcaagccagggttgtg

SEQ ID NO: 275021 - DNA, 25 bp, Artificial
  Probe
ggagctagctgtttgcctttgactc

SEQ ID NO: 275022 - DNA, 25 bp, Artificial
  Probe
ttgactccctgacttcaagccaggg

SEQ ID NO: 275023 - DNA, 25 bp, Artificial
  Probe
gtttgcctttgactccctgacttca

SEQ ID NO: 275024 - DNA, 25 bp, Artificial
  Probe
aagcagttcaacctgtgcggaccag

SEQ ID NO: 275025 - DNA, 25 bp, Artificial
  Probe
agagtaccagcaacagcaagcagtt

SEQ ID NO: 275026 - DNA, 25 bp, Artificial
  Probe
cagttcaacctgtgcggaccagggc

SEQ ID NO: 275027 - DNA, 25 bp, Artificial
  Probe
cagccacagggcatgctgggtctca

SEQ ID NO: 275028 - DNA, 25 bp, Artificial
  Probe
agaagagtaccagcaacagcaagca

SEQ ID NO: 275029 - DNA, 25 bp, Artificial
  Probe
gagtaccagcaacagcaagcagttc

SEQ ID NO: 275030 - DNA, 25 bp, Artificial
  Probe
agttcaacctgtgcggaccagggcc

SEQ ID NO: 275031 - DNA, 25 bp, Artificial
  Probe
gtaccagcaacagcaagcagttcaa

SEQ ID NO: 275032 - DNA, 25 bp, Artificial
  Probe
aacttcaacaagaagagtaccagca

SEQ ID NO: 275033 - DNA, 25 bp, Artificial
  Probe
aagaagagtaccagcaacagcaagc

SEQ ID NO: 275034 - DNA, 25 bp, Artificial
  Probe
ctggaactggcccagcaacttcaac

SEQ ID NO: 275035 - DNA, 25 bp, Artificial
  Probe
acagcaagcagttcaacctgtgcgg

SEQ ID NO: 275036 - DNA, 25 bp, Artificial
  Probe
agcaagcagttcaacctgtgcggac

SEQ ID NO: 275037 - DNA, 25 bp, Artificial
  Probe
gaagagtaccagcaacagcaagcag

SEQ ID NO: 275038 - DNA, 25 bp, Artificial
  Probe
cccagcaacttcaacaagaagagta

SEQ ID NO: 275039 - DNA, 25 bp, Artificial
  Probe
accagcaacagcaagcagttcaacc

SEQ ID NO: 275040 - DNA, 25 bp, Artificial
  Probe
tggcccagcaacttcaacaagaaga

SEQ ID NO: 275041 - DNA, 25 bp, Artificial
  Probe
gcagccacagggcatgctgggtctc

SEQ ID NO: 275042 - DNA, 25 bp, Artificial
  Probe
cagcaacttcaacaagaagagtacc

SEQ ID NO: 275043 - DNA, 25 bp, Artificial
  Probe
agcagttcaacctgtgcggaccagg

SEQ ID NO: 275044 - DNA, 25 bp, Artificial
  Probe
agcaacttcaacaagaagagtacca

SEQ ID NO: 275045 - DNA, 25 bp, Artificial
  Probe
actggcccagcaacttcaacaagaa

SEQ ID NO: 275046 - DNA, 25 bp, Artificial
  Probe
agtaccagcaacagcaagcagttca

SEQ ID NO: 275047 - DNA, 25 bp, Artificial
  Probe
ggcccagcaacttcaacaagaagag

SEQ ID NO: 275048 - DNA, 25 bp, Artificial
  Probe
ggaactggcccagcaacttcaacaa

SEQ ID NO: 275049 - DNA, 25 bp, Artificial
  Probe
gcaagcagttcaacctgtgcggacc

SEQ ID NO: 275050 - DNA, 25 bp, Artificial
  Probe
ctggcccagcaacttcaacaagaag

SEQ ID NO: 275051 - DNA, 25 bp, Artificial
  Probe
cagcaagcagttcaacctgtgcgga

SEQ ID NO: 275052 - DNA, 25 bp, Artificial
  Probe
caagcagttcaacctgtgcggacca

SEQ ID NO: 275053 - DNA, 25 bp, Artificial
  Probe
tgacctggaactggcccagcaactt

SEQ ID NO: 275054 - DNA, 25 bp, Artificial
  Probe
tggaactggcccagcaacttcaaca

SEQ ID NO: 275055 - DNA, 25 bp, Artificial
  Probe
caacagcaagcagttcaacctgtgc

SEQ ID NO: 275056 - DNA, 25 bp, Artificial
  Probe
gcagttcaacctgtgcggaccaggg

SEQ ID NO: 275057 - DNA, 25 bp, Artificial
  Probe
aacagcaagcagttcaacctgtgcg

SEQ ID NO: 275058 - DNA, 25 bp, Artificial
  Probe
gcccagcaacttcaacaagaagagt

SEQ ID NO: 275059 - DNA, 25 bp, Artificial
  Probe
ccagcaacttcaacaagaagagtac

SEQ ID NO: 275060 - DNA, 25 bp, Artificial
  Probe
gaactggcccagcaacttcaacaag

SEQ ID NO: 275061 - DNA, 25 bp, Artificial
  Probe
cagcaacagcaagcagttcaacctg

SEQ ID NO: 275062 - DNA, 25 bp, Artificial
  Probe
caacttcaacaagaagagtaccagc

SEQ ID NO: 275063 - DNA, 25 bp, Artificial
  Probe
aagagtaccagcaacagcaagcagt

SEQ ID NO: 275064 - DNA, 25 bp, Artificial
  Probe
gcaacttcaacaagaagagtaccag

SEQ ID NO: 275065 - DNA, 25 bp, Artificial
  Probe
aactggcccagcaacttcaacaaga

SEQ ID NO: 275066 - DNA, 25 bp, Artificial
  Probe
gcaacagcaagcagttcaacctgtg

SEQ ID NO: 275067 - DNA, 25 bp, Artificial
  Probe
ccagcaacagcaagcagttcaacct

SEQ ID NO: 275068 - DNA, 25 bp, Artificial
  Probe
agcaacagcaagcagttcaacctgt

SEQ ID NO: 275069 - DNA, 25 bp, Artificial
  Probe
taccagcaacagcaagcagttcaac

SEQ ID NO: 275070 - DNA, 25 bp, Artificial
  Probe
ggacccgctgccaaaaattccagct

SEQ ID NO: 275071 - DNA, 25 bp, Artificial
  Probe
ctaccttctagttgagcccgtatgc

SEQ ID NO: 275072 - DNA, 25 bp, Artificial
  Probe
accgacagtcccatactcctggaga

SEQ ID NO: 275073 - DNA, 25 bp, Artificial
  Probe
gctgccaaaaattccagctcccagt

SEQ ID NO: 275074 - DNA, 25 bp, Artificial
  Probe
tccagcggatttcaaggtcccctgc

SEQ ID NO: 275075 - DNA, 25 bp, Artificial
  Probe
gcttgtcttaccagctccttccgaa

SEQ ID NO: 275076 - DNA, 25 bp, Artificial
  Probe
gtcctttcgctaaagattgatacta

SEQ ID NO: 275077 - DNA, 25 bp, Artificial
  Probe
gctaagccgggctctcggtttagta

SEQ ID NO: 275078 - DNA, 25 bp, Artificial
  Probe
cctactgagcacaactttcaagttg

SEQ ID NO: 275079 - DNA, 25 bp, Artificial
  Probe
aagcttgtcttaccagctccttccg

SEQ ID NO: 275080 - DNA, 25 bp, Artificial
  Probe
aactccttagcctccggggtctgag

SEQ ID NO: 275081 - DNA, 25 bp, Artificial
  Probe
gccaccctaagtcttctatcgggct

SEQ ID NO: 275082 - DNA, 25 bp, Artificial
  Probe
aagattgatactaccttctagttga

SEQ ID NO: 275083 - DNA, 25 bp, Artificial
  Probe
atccaggccttggtgctggggcact

SEQ ID NO: 275084 - DNA, 25 bp, Artificial
  Probe
tccacaatagagcatctgcccaaag

SEQ ID NO: 275085 - DNA, 25 bp, Artificial
  Probe
gtctgtgagtcatcacaaacatctc

SEQ ID NO: 275086 - DNA, 25 bp, Artificial
  Probe
ctcacgatcttagtttgtctccccg

SEQ ID NO: 275087 - DNA, 25 bp, Artificial
  Probe
gcactgagtactgcttctccccttt

SEQ ID NO: 275088 - DNA, 25 bp, Artificial
  Probe
gggacagccggtggtccaatttaca

SEQ ID NO: 275089 - DNA, 25 bp, Artificial
  Probe
taaacgcaacctaaggctcatcgcg

SEQ ID NO: 275090 - DNA, 25 bp, Artificial
  Probe
ccagaacttcggacgctcaggcatg

SEQ ID NO: 275091 - DNA, 25 bp, Artificial
  Probe
aatcgccagcccaagcttgtcttac

SEQ ID NO: 275092 - DNA, 25 bp, Artificial
  Probe
gggtgaatcgccagcccaagcttgt

SEQ ID NO: 275093 - DNA, 25 bp, Artificial
  Probe
tctgagcaggggaccggatcccaga

SEQ ID NO: 275094 - DNA, 25 bp, Artificial
  Probe
gtgctggggcactgagtactgcttc

SEQ ID NO: 275095 - DNA, 25 bp, Artificial
  Probe
gggggctctatctgttaagaggctc

SEQ ID NO: 275096 - DNA, 25 bp, Artificial
  Probe
gctctcggtttagtactaatgtaag

SEQ ID NO: 275097 - DNA, 25 bp, Artificial
  Probe
attgtcaagccctgggaacccaagt

SEQ ID NO: 275098 - DNA, 25 bp, Artificial
  Probe
tcttcgctttgaaactggcccaggg

SEQ ID NO: 275099 - DNA, 25 bp, Artificial
  Probe
gcatctgcccaaaggtctatttacc

SEQ ID NO: 275100 - DNA, 25 bp, Artificial
  Probe
gcattccgttgtacggaaaagggct

SEQ ID NO: 275101 - DNA, 25 bp, Artificial
  Probe
tccatctgttctgaccccggcaaag

SEQ ID NO: 275102 - DNA, 25 bp, Artificial
  Probe
gattcctctgccacggtgaactctc

SEQ ID NO: 275103 - DNA, 25 bp, Artificial
  Probe
gaccccagaacttcggacgctcagg

SEQ ID NO: 275104 - DNA, 25 bp, Artificial
  Probe
ccccttcacagcagggcagaggaaa

SEQ ID NO: 275105 - DNA, 25 bp, Artificial
  Probe
tgaaactggcccagggtaattttgg

SEQ ID NO: 275106 - DNA, 25 bp, Artificial
  Probe
gctggggacatgctcctttccttca

SEQ ID NO: 275107 - DNA, 25 bp, Artificial
  Probe
gacctgtccaattataggactcccc

SEQ ID NO: 275108 - DNA, 25 bp, Artificial
  Probe
cggttgccggatgtataatcttggg

SEQ ID NO: 275109 - DNA, 25 bp, Artificial
  Probe
tccacaacgcagagggacagccggt

SEQ ID NO: 275110 - DNA, 25 bp, Artificial
  Probe
tttcccgcggggtctggtgcattcc

SEQ ID NO: 275111 - DNA, 25 bp, Artificial
  Probe
gccggtggtccaatttacattcctt

SEQ ID NO: 275112 - DNA, 25 bp, Artificial
  Probe
ccccaaaaaggagctgactcctcat

SEQ ID NO: 275113 - DNA, 25 bp, Artificial
  Probe
agtcccatactcctggagatgaccc

SEQ ID NO: 275114 - DNA, 25 bp, Artificial
  Probe
ctatctgttaagaggctcagcttct

SEQ ID NO: 275115 - DNA, 25 bp, Artificial
  Probe
tatctctatctcagcaccccggggt

SEQ ID NO: 275116 - DNA, 25 bp, Artificial
  Probe
agcgaccagcaaattagaaacgcta

SEQ ID NO: 275117 - DNA, 25 bp, Artificial
  Probe
tcaccagtagtttttcccaagagac

SEQ ID NO: 275118 - DNA, 25 bp, Artificial
  Probe
catgagaaggcctttcatgcaccaa

SEQ ID NO: 275119 - DNA, 25 bp, Artificial
  Probe
tgttaagcctcaccagtagtttttc

SEQ ID NO: 275120 - DNA, 25 bp, Artificial
  Probe
gctattcatctctgacataggacac

SEQ ID NO: 275121 - DNA, 25 bp, Artificial
  Probe
ttccaactccggagacgtgatgccc

SEQ ID NO: 275122 - DNA, 25 bp, Artificial
  Probe
gctggcttcctccttaaagtaaact

SEQ ID NO: 275123 - DNA, 25 bp, Artificial
  Probe
aaatggattcgcactcagccacagc

SEQ ID NO: 275124 - DNA, 25 bp, Artificial
  Probe
cataggacacaaacaccatgagaag

SEQ ID NO: 275125 - DNA, 25 bp, Artificial
  Probe
tcagccacagccaatagcagcatag

SEQ ID NO: 275126 - DNA, 25 bp, Artificial
  Probe
aggatgtcaaagctacttagttacc

SEQ ID NO: 275127 - DNA, 25 bp, Artificial
  Probe
taggacacaaacaccatgagaaggc

SEQ ID NO: 275128 - DNA, 25 bp, Artificial
  Probe
gcctccaggggtactgcatgcacat

SEQ ID NO: 275129 - DNA, 25 bp, Artificial
  Probe
ctccggagacgtgatgccctcttct

SEQ ID NO: 275130 - DNA, 25 bp, Artificial
  Probe
ctgtgctttaagaacgggtagttca

SEQ ID NO: 275131 - DNA, 25 bp, Artificial
  Probe
agcacccacatcatgatgctcagac

SEQ ID NO: 275132 - DNA, 25 bp, Artificial
  Probe
ttttcccaagagaccgtcaatctcg

SEQ ID NO: 275133 - DNA, 25 bp, Artificial
  Probe
ctgatgacagtgttcatctgtttga

SEQ ID NO: 275134 - DNA, 25 bp, Artificial
  Probe
tcatgaaacctttcctctgtgtctg

SEQ ID NO: 275135 - DNA, 25 bp, Artificial
  Probe
taaactttgcccaagcgaccagcaa

SEQ ID NO: 275136 - DNA, 25 bp, Artificial
  Probe
taaggacagttcagttcccagcacc

SEQ ID NO: 275137 - DNA, 25 bp, Artificial
  Probe
agtaaagagcacacacactgccctc

SEQ ID NO: 275138 - DNA, 25 bp, Artificial
  Probe
tagtttttcccaagagaccgtcaat

SEQ ID NO: 275139 - DNA, 25 bp, Artificial
  Probe
caatatactgtgagacttaggtttc

SEQ ID NO: 275140 - DNA, 25 bp, Artificial
  Probe
ctcgtaaggacagttcagttcccag

SEQ ID NO: 275141 - DNA, 25 bp, Artificial
  Probe
tgcatgcacatatacaagcgtacac

SEQ ID NO: 275142 - DNA, 25 bp, Artificial
  Probe
gatgtcaaagctacttagttaccta

SEQ ID NO: 275143 - DNA, 25 bp, Artificial
  Probe
tcagacccagttccaactccggaga

SEQ ID NO: 275144 - DNA, 25 bp, Artificial
  Probe
aacaccatgagaaggcctttcatgc

SEQ ID NO: 275145 - DNA, 25 bp, Artificial
  Probe
cagcacccacatcatgatgctcaga

SEQ ID NO: 275146 - DNA, 25 bp, Artificial
  Probe
acacactgccctcgtaaggacagtt

SEQ ID NO: 275147 - DNA, 25 bp, Artificial
  Probe
gcaccaattcaatatactgtgagac

SEQ ID NO: 275148 - DNA, 25 bp, Artificial
  Probe
gagcacacacactgccctcgtaagg

SEQ ID NO: 275149 - DNA, 25 bp, Artificial
  Probe
gagacttaggtttctttcacatttt

SEQ ID NO: 275150 - DNA, 25 bp, Artificial
  Probe
ccacatcatgatgctcagacccagt

SEQ ID NO: 275151 - DNA, 25 bp, Artificial
  Probe
gaaggcctttcatgcaccaattcaa

SEQ ID NO: 275152 - DNA, 25 bp, Artificial
  Probe
gaaacgctattcatctctgacatag

SEQ ID NO: 275153 - DNA, 25 bp, Artificial
  Probe
agcctcaccagtagtttttcccaag

SEQ ID NO: 275154 - DNA, 25 bp, Artificial
  Probe
cccagttccaactccggagacgtga

SEQ ID NO: 275155 - DNA, 25 bp, Artificial
  Probe
tgagacttaggtttctttcacattt

SEQ ID NO: 275156 - DNA, 25 bp, Artificial
  Probe
catgatgctcagacccagttccaac

SEQ ID NO: 275157 - DNA, 25 bp, Artificial
  Probe
ggattcgcactcagccacagccaat

SEQ ID NO: 275158 - DNA, 25 bp, Artificial
  Probe
atgcaccaattcaatatactgtgag

SEQ ID NO: 275159 - DNA, 25 bp, Artificial
  Probe
atactgtgagacttaggtttctttc

SEQ ID NO: 275160 - DNA, 25 bp, Artificial
  Probe
caaacaccatgagaaggcctttcat

SEQ ID NO: 275161 - DNA, 25 bp, Artificial
  Probe
aatagcagcataggatgtcaaagct

SEQ ID NO: 275162 - DNA, 25 bp, Artificial
  Probe
cttcaagccccgaaacacagtagag

SEQ ID NO: 275163 - DNA, 25 bp, Artificial
  Probe
caagccccgaaacacagtagagctt

SEQ ID NO: 275164 - DNA, 25 bp, Artificial
  Probe
ccacggagggggctgaagagaatgg

SEQ ID NO: 275165 - DNA, 25 bp, Artificial
  Probe
cactctccacggagggggctgaaga

SEQ ID NO: 275166 - DNA, 25 bp, Artificial
  Probe
gcactctccacggagggggctgaag

SEQ ID NO: 275167 - DNA, 25 bp, Artificial
  Probe
tcctcagcccattccaaagagggct

SEQ ID NO: 275168 - DNA, 25 bp, Artificial
  Probe
agccccgaaacacagtagagcttca

SEQ ID NO: 275169 - DNA, 25 bp, Artificial
  Probe
tctggggatggtacagggtgtgaca

SEQ ID NO: 275170 - DNA, 25 bp, Artificial
  Probe
tcaagccccgaaacacagtagagct

SEQ ID NO: 275171 - DNA, 25 bp, Artificial
  Probe
aagccccgaaacacagtagagcttc

SEQ ID NO: 275172 - DNA, 25 bp, Artificial
  Probe
actctccacggagggggctgaagag

SEQ ID NO: 275173 - DNA, 25 bp, Artificial
  Probe
gcccattccaaagagggctctccct

SEQ ID NO: 275174 - DNA, 25 bp, Artificial
  Probe
cagcccattccaaagagggctctcc

SEQ ID NO: 275175 - DNA, 25 bp, Artificial
  Probe
tccacggagggggctgaagagaatg

SEQ ID NO: 275176 - DNA, 25 bp, Artificial
  Probe
gcggctttcctcagcccattccaaa

SEQ ID NO: 275177 - DNA, 25 bp, Artificial
  Probe
tcagcccattccaaagagggctctc

SEQ ID NO: 275178 - DNA, 25 bp, Artificial
  Probe
ttcctcagcccattccaaagagggc

SEQ ID NO: 275179 - DNA, 25 bp, Artificial
  Probe
tctccacggagggggctgaagagaa

SEQ ID NO: 275180 - DNA, 25 bp, Artificial
  Probe
agcccattccaaagagggctctccc

SEQ ID NO: 275181 - DNA, 25 bp, Artificial
  Probe
ctcagcccattccaaagagggctct

SEQ ID NO: 275182 - DNA, 25 bp, Artificial
  Probe
ctccacggagggggctgaagagaat

SEQ ID NO: 275183 - DNA, 25 bp, Artificial
  Probe
ttcaagccccgaaacacagtagagc

SEQ ID NO: 275184 - DNA, 25 bp, Artificial
  Probe
gtgtgacaacatgacgtgcatcatc

SEQ ID NO: 275185 - DNA, 25 bp, Artificial
  Probe
cctcagcccattccaaagagggctc

SEQ ID NO: 275186 - DNA, 25 bp, Artificial
  Probe
ggcggctttcctcagcccattccaa

SEQ ID NO: 275187 - DNA, 25 bp, Artificial
  Probe
ctctccacggagggggctgaagaga

SEQ ID NO: 275188 - DNA, 25 bp, Artificial
  Probe
gcttcaagccccgaaacacagtaga

SEQ ID NO: 275189 - DNA, 25 bp, Artificial
  Probe
atttcagtctggaagaaaggccagt

SEQ ID NO: 275190 - DNA, 25 bp, Artificial
  Probe
tacaacccattgtgctcatatctgg

SEQ ID NO: 275191 - DNA, 25 bp, Artificial
  Probe
ccaccaagagtgtgggtttccttca

SEQ ID NO: 275192 - DNA, 25 bp, Artificial
  Probe
agcactctggtggaaagaaattccc

SEQ ID NO: 275193 - DNA, 25 bp, Artificial
  Probe
ctgtcagtgctgtgagacacaggcg

SEQ ID NO: 275194 - DNA, 25 bp, Artificial
  Probe
cttgccacaccgagcagcaatgggt

SEQ ID NO: 275195 - DNA, 25 bp, Artificial
  Probe
cgccaccaagagtgtgggtttcctt

SEQ ID NO: 275196 - DNA, 25 bp, Artificial
  Probe
agatttcagtctggaagaaaggcca

SEQ ID NO: 275197 - DNA, 25 bp, Artificial
  Probe
ctctgtgttacaacccattgtgctc

SEQ ID NO: 275198 - DNA, 25 bp, Artificial
  Probe
tgggtttccttcagaacgcaccaga

SEQ ID NO: 275199 - DNA, 25 bp, Artificial
  Probe
cagaaactgtcattgggacccacca

SEQ ID NO: 275200 - DNA, 25 bp, Artificial
  Probe
tgctgtgagacacaggcggctagcc

SEQ ID NO: 275201 - DNA, 25 bp, Artificial
  Probe
gagctgtcagtgctgtgagacacag

SEQ ID NO: 275202 - DNA, 25 bp, Artificial
  Probe
gacacaggcggctagccagaaactg

SEQ ID NO: 275203 - DNA, 25 bp, Artificial
  Probe
cagaacgcaccagatggcacttgcc

SEQ ID NO: 275204 - DNA, 25 bp, Artificial
  Probe
caatgggtagcactctggtggaaag

SEQ ID NO: 275205 - DNA, 25 bp, Artificial
  Probe
gtgtgggtttccttcagaacgcacc

SEQ ID NO: 275206 - DNA, 25 bp, Artificial
  Probe
acagatttcagtctggaagaaaggc

SEQ ID NO: 275207 - DNA, 25 bp, Artificial
  Probe
cagtgctgtgagacacaggcggcta

SEQ ID NO: 275208 - DNA, 25 bp, Artificial
  Probe
agctgtcagtgctgtgagacacagg

SEQ ID NO: 275209 - DNA, 25 bp, Artificial
  Probe
ggcggctagccagaaactgtcattg

SEQ ID NO: 275210 - DNA, 25 bp, Artificial
  Probe
cacggtgcaggactcagtctgaatt

SEQ ID NO: 275211 - DNA, 25 bp, Artificial
  Probe
aggcggctagccagaaactgtcatt

SEQ ID NO: 275212 - DNA, 25 bp, Artificial
  Probe
atggcacttgccacaccgagcagca

SEQ ID NO: 275213 - DNA, 25 bp, Artificial
  Probe
ctccagtcacactggggttcaggct

SEQ ID NO: 275214 - DNA, 25 bp, Artificial
  Probe
atgcggacacggtgcaggactcagt

SEQ ID NO: 275215 - DNA, 25 bp, Artificial
  Probe
agggcacagatttcagtctggaaga

SEQ ID NO: 275216 - DNA, 25 bp, Artificial
  Probe
gctgtgagacacaggcggctagcca

SEQ ID NO: 275217 - DNA, 25 bp, Artificial
  Probe
agcaatgggtagcactctggtggaa

SEQ ID NO: 275218 - DNA, 25 bp, Artificial
  Probe
ggcacttgccacaccgagcagcaat

SEQ ID NO: 275219 - DNA, 25 bp, Artificial
  Probe
accgagcagcaatgggtagcactct

SEQ ID NO: 275220 - DNA, 25 bp, Artificial
  Probe
gctagccagaaactgtcattgggac

SEQ ID NO: 275221 - DNA, 25 bp, Artificial
  Probe
tgcggacacggtgcaggactcagtc

SEQ ID NO: 275222 - DNA, 25 bp, Artificial
  Probe
gccaaaacttccactttgtgggcct

SEQ ID NO: 275223 - DNA, 25 bp, Artificial
  Probe
tacatacggttctccagtcacactg

SEQ ID NO: 275224 - DNA, 25 bp, Artificial
  Probe
tatatgtgcactactctgtcatatg

SEQ ID NO: 275225 - DNA, 25 bp, Artificial
  Probe
tttcagtctggaagaaaggccagta

SEQ ID NO: 275226 - DNA, 25 bp, Artificial
  Probe
cagtctgaattcagggcacagattt

SEQ ID NO: 275227 - DNA, 25 bp, Artificial
  Probe
cattgtgctcatatctggagaatgt

SEQ ID NO: 275228 - DNA, 25 bp, Artificial
  Probe
gtgttacaacccattgtgctcatat

SEQ ID NO: 275229 - DNA, 25 bp, Artificial
  Probe
gtagcactctggtggaaagaaattc

SEQ ID NO: 275230 - DNA, 25 bp, Artificial
  Probe
tgaattcagggcacagatttcagtc

SEQ ID NO: 275231 - DNA, 25 bp, Artificial
  Probe
accagatggcacttgccacaccgag

SEQ ID NO: 275232 - DNA, 25 bp, Artificial
  Probe
caagagtgtgggtttccttcagaac

SEQ ID NO: 275233 - DNA, 25 bp, Artificial
  Probe
tcagtgctgtgagacacaggcggct

SEQ ID NO: 275234 - DNA, 25 bp, Artificial
  Probe
gaacgcaccagatggcacttgccac

SEQ ID NO: 275235 - DNA, 25 bp, Artificial
  Probe
agctttagcaatcatcaagaccaag

SEQ ID NO: 275236 - DNA, 25 bp, Artificial
  Probe
gcagaaatgccctcctgtccaaact

SEQ ID NO: 275237 - DNA, 25 bp, Artificial
  Probe
gcaatcatcaagaccaagagaagac

SEQ ID NO: 275238 - DNA, 25 bp, Artificial
  Probe
ccacccaaaagcaagtgaaagcttt

SEQ ID NO: 275239 - DNA, 25 bp, Artificial
  Probe
aagacaaggtgcatcatgtacttcc

SEQ ID NO: 275240 - DNA, 25 bp, Artificial
  Probe
tccaaagtgcccagagccttgtcct

SEQ ID NO: 275241 - DNA, 25 bp, Artificial
  Probe
tccaaagtgccctgaaccgtgcgct

SEQ ID NO: 275242 - DNA, 25 bp, Artificial
  Probe
tccaaagtgcccagaaccttgtcct

SEQ ID NO: 275243 - DNA, 25 bp, Artificial
  Probe
ctctcatggatgcagaagaaccttc

SEQ ID NO: 275244 - DNA, 25 bp, Artificial
  Probe
ccaaaagtgcccagagccatgtcct

SEQ ID NO: 275245 - DNA, 25 bp, Artificial
  Probe
tcatcaagaccaagagaagacaagg

SEQ ID NO: 275246 - DNA, 25 bp, Artificial
  Probe
ggaaccttctcactgttcctgtcac

SEQ ID NO: 275247 - DNA, 25 bp, Artificial
  Probe
cacccaaaagcaagtgaaagcttta

SEQ ID NO: 275248 - DNA, 25 bp, Artificial
  Probe
gaatagcaggtggtgtcccaatgcc

SEQ ID NO: 275249 - DNA, 25 bp, Artificial
  Probe
agaatagcaggtggtgtcccaatgc

SEQ ID NO: 275250 - DNA, 25 bp, Artificial
  Probe
caagagattgccagaaatggccctt

SEQ ID NO: 275251 - DNA, 25 bp, Artificial
  Probe
gaaagctttagcaatcatcaagacc

SEQ ID NO: 275252 - DNA, 25 bp, Artificial
  Probe
aaagtgccctgaaccgtgcgctcct

SEQ ID NO: 275253 - DNA, 25 bp, Artificial
  Probe
cttctcactgttcctgtcacttagg

SEQ ID NO: 275254 - DNA, 25 bp, Artificial
  Probe
tccagtggaaccttctcactgttcc

SEQ ID NO: 275255 - DNA, 25 bp, Artificial
  Probe
agaagtgtcctgagccctgtcctcc

SEQ ID NO: 275256 - DNA, 25 bp, Artificial
  Probe
agaagacaaggtgcatcatgtactt

SEQ ID NO: 275257 - DNA, 25 bp, Artificial
  Probe
catgccagcagaaatgccctcctgt

SEQ ID NO: 275258 - DNA, 25 bp, Artificial
  Probe
tttggtagtctagtattcctgatgc

SEQ ID NO: 275259 - DNA, 25 bp, Artificial
  Probe
ctgatgctcagaaggaagaatagca

SEQ ID NO: 275260 - DNA, 25 bp, Artificial
  Probe
tcagccatgccagcagaaatgccct

SEQ ID NO: 275261 - DNA, 25 bp, Artificial
  Probe
gtgcatcatgtacttccaaagcaac

SEQ ID NO: 275262 - DNA, 25 bp, Artificial
  Probe
tagcaatcatcaagaccaagagaag

SEQ ID NO: 275263 - DNA, 25 bp, Artificial
  Probe
ccactgataatttctgattggaaag

SEQ ID NO: 275264 - DNA, 25 bp, Artificial
  Probe
tttctgattggaaaggagcttctct

SEQ ID NO: 275265 - DNA, 25 bp, Artificial
  Probe
ccagaagtgtcctgagccctgtcct

SEQ ID NO: 275266 - DNA, 25 bp, Artificial
  Probe
ctctgagtgtattcccctgctgcta

SEQ ID NO: 275267 - DNA, 25 bp, Artificial
  Probe
cagaaatggccctttggtagtctag

SEQ ID NO: 275268 - DNA, 25 bp, Artificial
  Probe
gaaatggccctttggtagtctagta

SEQ ID NO: 275269 - DNA, 25 bp, Artificial
  Probe
atgccagcagaaatgccctcctgtc

SEQ ID NO: 275270 - DNA, 25 bp, Artificial
  Probe
gattgccagaaatggccctttggta

SEQ ID NO: 275271 - DNA, 25 bp, Artificial
  Probe
agattgccagaaatggccctttggt

SEQ ID NO: 275272 - DNA, 25 bp, Artificial
  Probe
aaacctctcatggatgcagaagaac

SEQ ID NO: 275273 - DNA, 25 bp, Artificial
  Probe
atttctgattggaaaggagcttctc

SEQ ID NO: 275274 - DNA, 25 bp, Artificial
  Probe
cataccactgataatttctgattgg

SEQ ID NO: 275275 - DNA, 25 bp, Artificial
  Probe
ccttcaaaacctctcatggatgcag

SEQ ID NO: 275276 - DNA, 25 bp, Artificial
  Probe
agtgtattcccctgctgctatcaag

SEQ ID NO: 275277 - DNA, 25 bp, Artificial
  Probe
tcaaaacctctcatggatgcagaag

SEQ ID NO: 275278 - DNA, 25 bp, Artificial
  Probe
acaaggtgcatcatgtacttccaaa

SEQ ID NO: 275279 - DNA, 25 bp, Artificial
  Probe
ctatcaagagattgccagaaatggc

SEQ ID NO: 275280 - DNA, 25 bp, Artificial
  Probe
gaaaggagcttctctgagtgtattc

SEQ ID NO: 275281 - DNA, 25 bp, Artificial
  Probe
cataagcacgggaagcactcctcct

SEQ ID NO: 275282 - DNA, 25 bp, Artificial
  Probe
ctgcttgatattaccgtagcttatg

SEQ ID NO: 275283 - DNA, 25 bp, Artificial
  Probe
aatcacacaagcatcataagcacgg

SEQ ID NO: 275284 - DNA, 25 bp, Artificial
  Probe
gcactgtcttttaagatatgcacca

SEQ ID NO: 275285 - DNA, 25 bp, Artificial
  Probe
catcttgtactgaggggaaattagc

SEQ ID NO: 275286 - DNA, 25 bp, Artificial
  Probe
ctgccgaggggtagcaaaagctacc

SEQ ID NO: 275287 - DNA, 25 bp, Artificial
  Probe
agcatcataagcacgggaagcactc

SEQ ID NO: 275288 - DNA, 25 bp, Artificial
  Probe
tgttgtctcagatggctctgaggac

SEQ ID NO: 275289 - DNA, 25 bp, Artificial
  Probe
ctgactgaacacagggcctggagcc

SEQ ID NO: 275290 - DNA, 25 bp, Artificial
  Probe
gaccagcgatcttgggaaggattga

SEQ ID NO: 275291 - DNA, 25 bp, Artificial
  Probe
ctcagatggctctgaggaccaaata

SEQ ID NO: 275292 - DNA, 25 bp, Artificial
  Probe
gaatcctagtgctgggccaaatcca

SEQ ID NO: 275293 - DNA, 25 bp, Artificial
  Probe
atcctgtaccgcaaccagggtgtcc

SEQ ID NO: 275294 - DNA, 25 bp, Artificial
  Probe
aagatatgcaccatgtgatttttct

SEQ ID NO: 275295 - DNA, 25 bp, Artificial
  Probe
tgtccaggaggttccaatcctgcct

SEQ ID NO: 275296 - DNA, 25 bp, Artificial
  Probe
tgtcctcccggaattcctcagggaa

SEQ ID NO: 275297 - DNA, 25 bp, Artificial
  Probe
actgccgaggggtagcaaaagctac

SEQ ID NO: 275298 - DNA, 25 bp, Artificial
  Probe
aactaacttgtggacatgtggaatc

SEQ ID NO: 275299 - DNA, 25 bp, Artificial
  Probe
cagcagtgactctgactgaacacag

SEQ ID NO: 275300 - DNA, 25 bp, Artificial
  Probe
gatgagctcttttggaacccaattt

SEQ ID NO: 275301 - DNA, 25 bp, Artificial
  Probe
tgtccaggataccaaccctcaggtc

SEQ ID NO: 275302 - DNA, 25 bp, Artificial
  Probe
ataagcacgggaagcactcctcctc

SEQ ID NO: 275303 - DNA, 25 bp, Artificial
  Probe
acttgtggacatgtggaatcctagt

SEQ ID NO: 275304 - DNA, 25 bp, Artificial
  Probe
aagcttcacctgtcatcttgtactg

SEQ ID NO: 275305 - DNA, 25 bp, Artificial
  Probe
gaaacctgtacttttgtaatggcga

SEQ ID NO: 275306 - DNA, 25 bp, Artificial
  Probe
gggggcactgtcttttaagatatgc

SEQ ID NO: 275307 - DNA, 25 bp, Artificial
  Probe
agtccctttctttacttgatgagct

SEQ ID NO: 275308 - DNA, 25 bp, Artificial
  Probe
gtccctttctttacttgatgagctc

SEQ ID NO: 275309 - DNA, 25 bp, Artificial
  Probe
gcaaaagctaccttctccctgcttg

SEQ ID NO: 275310 - DNA, 25 bp, Artificial
  Probe
gagaaacctgtacttttgtaatggc

SEQ ID NO: 275311 - DNA, 25 bp, Artificial
  Probe
tccttatcctgtaccgcaaccaggg

SEQ ID NO: 275312 - DNA, 25 bp, Artificial
  Probe
aggaggttccaatcctgcctgccca

SEQ ID NO: 275313 - DNA, 25 bp, Artificial
  Probe
tcttttaagatatgcaccatgtgat

SEQ ID NO: 275314 - DNA, 25 bp, Artificial
  Probe
gtgtcgacctccttatcctgtaccg

SEQ ID NO: 275315 - DNA, 25 bp, Artificial
  Probe
tctttacttgatgagctcttttgga

SEQ ID NO: 275316 - DNA, 25 bp, Artificial
  Probe
caccccaagttgtgtgtccaggagg

SEQ ID NO: 275317 - DNA, 25 bp, Artificial
  Probe
gtgctgggccaaatccatatccacc

SEQ ID NO: 275318 - DNA, 25 bp, Artificial
  Probe
acatgtggaatcctagtgctgggcc

SEQ ID NO: 275319 - DNA, 25 bp, Artificial
  Probe
ccgcaaccagggtgtccaggatacc

SEQ ID NO: 275320 - DNA, 25 bp, Artificial
  Probe
agatgactgccgaggggtagcaaaa

SEQ ID NO: 275321 - DNA, 25 bp, Artificial
  Probe
tccgtgtcgacctccttatcctgta

SEQ ID NO: 275322 - DNA, 25 bp, Artificial
  Probe
ttctccctgcttgatattaccgtag

SEQ ID NO: 275323 - DNA, 25 bp, Artificial
  Probe
cagttcagtatgttgtctcagatgg

SEQ ID NO: 275324 - DNA, 25 bp, Artificial
  Probe
tagtgctgggccaaatccatatcca

SEQ ID NO: 275325 - DNA, 25 bp, Artificial
  Probe
tgtaccgcaaccagggtgtccagga

SEQ ID NO: 275326 - DNA, 25 bp, Artificial
  Probe
ctgtcctcccggaattcctcaggga

SEQ ID NO: 275327 - DNA, 25 bp, Artificial
  Probe
gttcagacctaacttcacctagtgt

SEQ ID NO: 275328 - DNA, 25 bp, Artificial
  Probe
agttcagacctaacttcacctagtg

SEQ ID NO: 275329 - DNA, 25 bp, Artificial
  Probe
tattggctagttcagacctaacttc

SEQ ID NO: 275330 - DNA, 25 bp, Artificial
  Probe
tagccagacattttcatgttaactg

SEQ ID NO: 275331 - DNA, 25 bp, Artificial
  Probe
accagccactgcatatacaagtgtc

SEQ ID NO: 275332 - DNA, 25 bp, Artificial
  Probe
aatattggctagttcagacctaact

SEQ ID NO: 275333 - DNA, 25 bp, Artificial
  Probe
tgcaaatagtcacctaagaatgagt

SEQ ID NO: 275334 - DNA, 25 bp, Artificial
  Probe
ccagacattttcatgttaactggaa

SEQ ID NO: 275335 - DNA, 25 bp, Artificial
  Probe
tagtcacctaagaatgagtgagctt

SEQ ID NO: 275336 - DNA, 25 bp, Artificial
  Probe
agccactgcatatacaagtgtccgt

SEQ ID NO: 275337 - DNA, 25 bp, Artificial
  Probe
tgcatatacaagtgtccgtagccag

SEQ ID NO: 275338 - DNA, 25 bp, Artificial
  Probe
catatacaagtgtccgtagccagac

SEQ ID NO: 275339 - DNA, 25 bp, Artificial
  Probe
gtccgtagccagacattttcatgtt

SEQ ID NO: 275340 - DNA, 25 bp, Artificial
  Probe
gcatatacaagtgtccgtagccaga

SEQ ID NO: 275341 - DNA, 25 bp, Artificial
  Probe
atagtcacctaagaatgagtgagct

SEQ ID NO: 275342 - DNA, 25 bp, Artificial
  Probe
ccactgcatatacaagtgtccgtag

SEQ ID NO: 275343 - DNA, 25 bp, Artificial
  Probe
gccagacattttcatgttaactgga

SEQ ID NO: 275344 - DNA, 25 bp, Artificial
  Probe
atatgcaaatagtcacctaagaatg

SEQ ID NO: 275345 - DNA, 25 bp, Artificial
  Probe
agccagacattttcatgttaactgg

SEQ ID NO: 275346 - DNA, 25 bp, Artificial
  Probe
gtgtccgtagccagacattttcatg

SEQ ID NO: 275347 - DNA, 25 bp, Artificial
  Probe
tacaagtgtccgtagccagacattt

SEQ ID NO: 275348 - DNA, 25 bp, Artificial
  Probe
gcttggagaaccagccactgcatat

SEQ ID NO: 275349 - DNA, 25 bp, Artificial
  Probe
agcttggagaaccagccactgcata

SEQ ID NO: 275350 - DNA, 25 bp, Artificial
  Probe
cactgcatatacaagtgtccgtagc

SEQ ID NO: 275351 - DNA, 25 bp, Artificial
  Probe
ggagaaccagccactgcatatacaa

SEQ ID NO: 275352 - DNA, 25 bp, Artificial
  Probe
ccagccactgcatatacaagtgtcc

SEQ ID NO: 275353 - DNA, 25 bp, Artificial
  Probe
tgtccgtagccagacattttcatgt

SEQ ID NO: 275354 - DNA, 25 bp, Artificial
  Probe
attggctagttcagacctaacttca

SEQ ID NO: 275355 - DNA, 25 bp, Artificial
  Probe
gagaaccagccactgcatatacaag

SEQ ID NO: 275356 - DNA, 25 bp, Artificial
  Probe
agtcacctaagaatgagtgagcttg

SEQ ID NO: 275357 - DNA, 25 bp, Artificial
  Probe
atgcaaatagtcacctaagaatgag

SEQ ID NO: 275358 - DNA, 25 bp, Artificial
  Probe
tccgtagccagacattttcatgtta

SEQ ID NO: 275359 - DNA, 25 bp, Artificial
  Probe
gccactgcatatacaagtgtccgta

SEQ ID NO: 275360 - DNA, 25 bp, Artificial
  Probe
agaaccagccactgcatatacaagt

SEQ ID NO: 275361 - DNA, 25 bp, Artificial
  Probe
cagccactgcatatacaagtgtccg

SEQ ID NO: 275362 - DNA, 25 bp, Artificial
  Probe
ggaatattggctagttcagacctaa

SEQ ID NO: 275363 - DNA, 25 bp, Artificial
  Probe
cagacattttcatgttaactggaat

SEQ ID NO: 275364 - DNA, 25 bp, Artificial
  Probe
caaatagtcacctaagaatgagtga

SEQ ID NO: 275365 - DNA, 25 bp, Artificial
  Probe
ttggctagttcagacctaacttcac

SEQ ID NO: 275366 - DNA, 25 bp, Artificial
  Probe
gtagccagacattttcatgttaact

SEQ ID NO: 275367 - DNA, 25 bp, Artificial
  Probe
acaagtgtccgtagccagacatttt

SEQ ID NO: 275368 - DNA, 25 bp, Artificial
  Probe
cgtagccagacattttcatgttaac

SEQ ID NO: 275369 - DNA, 25 bp, Artificial
  Probe
gtcacctaagaatgagtgagcttgg

SEQ ID NO: 275370 - DNA, 25 bp, Artificial
  Probe
tatgcaaatagtcacctaagaatga

SEQ ID NO: 275371 - DNA, 25 bp, Artificial
  Probe
aaccagccactgcatatacaagtgt

SEQ ID NO: 275372 - DNA, 25 bp, Artificial
  Probe
aatagtcacctaagaatgagtgagc

SEQ ID NO: 275373 - DNA, 25 bp, Artificial
  Probe
tttgattaccctgtgagcctgctgc

SEQ ID NO: 275374 - DNA, 25 bp, Artificial
  Probe
ttgattaccctgtgagcctgctgca

SEQ ID NO: 275375 - DNA, 25 bp, Artificial
  Probe
atagtgtgactgcaaactccaagct

SEQ ID NO: 275376 - DNA, 25 bp, Artificial
  Probe
cttcagcatggcagccttttcctta

SEQ ID NO: 275377 - DNA, 25 bp, Artificial
  Probe
tgcatgcaggctttgattaccctgt

SEQ ID NO: 275378 - DNA, 25 bp, Artificial
  Probe
gcaggctttgattaccctgtgagcc

SEQ ID NO: 275379 - DNA, 25 bp, Artificial
  Probe
atgcaggctttgattaccctgtgag

SEQ ID NO: 275380 - DNA, 25 bp, Artificial
  Probe
caggctttgattaccctgtgagcct

SEQ ID NO: 275381 - DNA, 25 bp, Artificial
  Probe
gtgtgactgcaaactccaagctggt

SEQ ID NO: 275382 - DNA, 25 bp, Artificial
  Probe
gactgcaaactccaagctggtcatt

SEQ ID NO: 275383 - DNA, 25 bp, Artificial
  Probe
agtgtgactgcaaactccaagctgg

SEQ ID NO: 275384 - DNA, 25 bp, Artificial
  Probe
ttatagtgtgactgcaaactccaag

SEQ ID NO: 275385 - DNA, 25 bp, Artificial
  Probe
atggcagccttttccttaagacacc

SEQ ID NO: 275386 - DNA, 25 bp, Artificial
  Probe
catggcagccttttccttaagacac

SEQ ID NO: 275387 - DNA, 25 bp, Artificial
  Probe
gattaccctgtgagcctgctgcatt

SEQ ID NO: 275388 - DNA, 25 bp, Artificial
  Probe
gcatgcaggctttgattaccctgtg

SEQ ID NO: 275389 - DNA, 25 bp, Artificial
  Probe
tgattaccctgtgagcctgctgcat

SEQ ID NO: 275390 - DNA, 25 bp, Artificial
  Probe
tggcagccttttccttaagacacca

SEQ ID NO: 275391 - DNA, 25 bp, Artificial
  Probe
ctttgattaccctgtgagcctgctg

SEQ ID NO: 275392 - DNA, 25 bp, Artificial
  Probe
tgtgactgcaaactccaagctggtc

SEQ ID NO: 275393 - DNA, 25 bp, Artificial
  Probe
tagtgtgactgcaaactccaagctg

SEQ ID NO: 275394 - DNA, 25 bp, Artificial
  Probe
ggcagccttttccttaagacaccaa

SEQ ID NO: 275395 - DNA, 25 bp, Artificial
  Probe
actgcaaactccaagctggtcatta

SEQ ID NO: 275396 - DNA, 25 bp, Artificial
  Probe
tgactgcaaactccaagctggtcat

SEQ ID NO: 275397 - DNA, 25 bp, Artificial
  Probe
agcatggcagccttttccttaagac

SEQ ID NO: 275398 - DNA, 25 bp, Artificial
  Probe
gaaatacagtccacagtgcaaactg

SEQ ID NO: 275399 - DNA, 25 bp, Artificial
  Probe
ctgcaaactccaagctggtcattat

SEQ ID NO: 275400 - DNA, 25 bp, Artificial
  Probe
catgcaggctttgattaccctgtga

SEQ ID NO: 275401 - DNA, 25 bp, Artificial
  Probe
tgcaggctttgattaccctgtgagc

SEQ ID NO: 275402 - DNA, 25 bp, Artificial
  Probe
tgcaaactccaagctggtcattatc

SEQ ID NO: 275403 - DNA, 25 bp, Artificial
  Probe
gcatggcagccttttccttaagaca

SEQ ID NO: 275404 - DNA, 25 bp, Artificial
  Probe
gtgactgcaaactccaagctggtca

SEQ ID NO: 275405 - DNA, 25 bp, Artificial
  Probe
gctatgtaactcgtttctaccggga

SEQ ID NO: 275406 - DNA, 25 bp, Artificial
  Probe
cagcaacagccaggtcgagcgtctc

SEQ ID NO: 275407 - DNA, 25 bp, Artificial
  Probe
gccctgggctagagggccgcacaca

SEQ ID NO: 275408 - DNA, 25 bp, Artificial
  Probe
agcgccacctattccgtgtaccgaa

SEQ ID NO: 275409 - DNA, 25 bp, Artificial
  Probe
gaaatgtgacccaaatgttcctgac

SEQ ID NO: 275410 - DNA, 25 bp, Artificial
  Probe
gtcggcagccacaacttcgaaacca

SEQ ID NO: 275411 - DNA, 25 bp, Artificial
  Probe
tgtgcgcatgcgtggagacacactt

SEQ ID NO: 275412 - DNA, 25 bp, Artificial
  Probe
ttctaccgggaaaactcctcaggtg

SEQ ID NO: 275413 - DNA, 25 bp, Artificial
  Probe
tggtgggaccccaggtgaatgaacc

SEQ ID NO: 275414 - DNA, 25 bp, Artificial
  Probe
ccaccaagaagagagtgctgttgtt

SEQ ID NO: 275415 - DNA, 25 bp, Artificial
  Probe
acagcatggatttcatcaacgacgc

SEQ ID NO: 275416 - DNA, 25 bp, Artificial
  Probe
cgtgtactcgtcaccggtaagaccg

SEQ ID NO: 275417 - DNA, 25 bp, Artificial
  Probe
tcagttccagcagaactacacggta

SEQ ID NO: 275418 - DNA, 25 bp, Artificial
  Probe
agcgcctagccgagcggttcctgtc

SEQ ID NO: 275419 - DNA, 25 bp, Artificial
  Probe
ccaggtgaatgaaccccacatccgt

SEQ ID NO: 275420 - DNA, 25 bp, Artificial
  Probe
acagcagaggccattgagaaggctg

SEQ ID NO: 275421 - DNA, 25 bp, Artificial
  Probe
tgaatgaaccccacatccgtgtact

SEQ ID NO: 275422 - DNA, 25 bp, Artificial
  Probe
tggccttcggcgagcgccacctatt

SEQ ID NO: 275423 - DNA, 25 bp, Artificial
  Probe
tctccaggaaggtggccctgggcta

SEQ ID NO: 275424 - DNA, 25 bp, Artificial
  Probe
cgaccgacatcaccattctgctaga

SEQ ID NO: 275425 - DNA, 25 bp, Artificial
  Probe
ctagagggccgcacacatggctgtg

SEQ ID NO: 275426 - DNA, 25 bp, Artificial
  Probe
cctattccgtgtaccgaactaccag

SEQ ID NO: 275427 - DNA, 25 bp, Artificial
  Probe
tgctgttgttctcagatggtaactc

SEQ ID NO: 275428 - DNA, 25 bp, Artificial
  Probe
tctgtggacagcatggatttcatca

SEQ ID NO: 275429 - DNA, 25 bp, Artificial
  Probe
ctgaccaaacaggaataggaaatgt

SEQ ID NO: 275430 - DNA, 25 bp, Artificial
  Probe
ctagccgagcggttcctgtcagcgg

SEQ ID NO: 275431 - DNA, 25 bp, Artificial
  Probe
gtggagacacacttcaacagccctt

SEQ ID NO: 275432 - DNA, 25 bp, Artificial
  Probe
ccgagtacgacgtggccttcggcga

SEQ ID NO: 275433 - DNA, 25 bp, Artificial
  Probe
ttcgaaaccaccaaggtcttcgcca

SEQ ID NO: 275434 - DNA, 25 bp, Artificial
  Probe
cagcagaggccattgagaaggctgt

SEQ ID NO: 275435 - DNA, 25 bp, Artificial
  Probe
cacatccgtgtactcgtcaccggta

SEQ ID NO: 275436 - DNA, 25 bp, Artificial
  Probe
gccagtgtcggcagccacaacttcg

SEQ ID NO: 275437 - DNA, 25 bp, Artificial
  Probe
aaggtcttcgccaagcgcctagccg

SEQ ID NO: 275438 - DNA, 25 bp, Artificial
  Probe
tcgccaagcgcctagccgagcggtt

SEQ ID NO: 275439 - DNA, 25 bp, Artificial
  Probe
ttcccactgaccaaacaggaatagg

SEQ ID NO: 275440 - DNA, 25 bp, Artificial
  Probe
gtaagaccgccgagtacgacgtggc

SEQ ID NO: 275441 - DNA, 25 bp, Artificial
  Probe
cgcacacatggctgtgcgcatgcgt

SEQ ID NO: 275442 - DNA, 25 bp, Artificial
  Probe
gccacaacttcgaaaccaccaaggt

SEQ ID NO: 275443 - DNA, 25 bp, Artificial
  Probe
gtcaccggtaagaccgccgagtacg

SEQ ID NO: 275444 - DNA, 25 bp, Artificial
  Probe
ctgctagacagctcggccagtgtcg

SEQ ID NO: 275445 - DNA, 25 bp, Artificial
  Probe
taccagacagtctccaggaaggtgg

SEQ ID NO: 275446 - DNA, 25 bp, Artificial
  Probe
aaaccaccaaggtcttcgccaagcg

SEQ ID NO: 275447 - DNA, 25 bp, Artificial
  Probe
tggccagctctgtggacagcatgga

SEQ ID NO: 275448 - DNA, 25 bp, Artificial
  Probe
aaactcctcaggtgccaccaagaag

SEQ ID NO: 275449 - DNA, 25 bp, Artificial
  Probe
ggccagattatacctgtccaatcac

SEQ ID NO: 275450 - DNA, 25 bp, Artificial
  Probe
aatgaaccccacatccgtgtactcg

SEQ ID NO: 275451 - DNA, 25 bp, Artificial
  Probe
gcctggaagtacaaccgggagtgca

SEQ ID NO: 275452 - DNA, 25 bp, Artificial
  Probe
agcagctggcaaacatgaggatcca

SEQ ID NO: 275453 - DNA, 25 bp, Artificial
  Probe
acgagccccagtaggaaccgcttca

SEQ ID NO: 275454 - DNA, 25 bp, Artificial
  Probe
agtggaccgattaaagctggcagag

SEQ ID NO: 275455 - DNA, 25 bp, Artificial
  Probe
ccaagccaaaggatggtgtttatat

SEQ ID NO: 275456 - DNA, 25 bp, Artificial
  Probe
gacgcgctgcagagttttagctgga

SEQ ID NO: 275457 - DNA, 25 bp, Artificial
  Probe
gccccagtaggaaccgcttcaaact

SEQ ID NO: 275458 - DNA, 25 bp, Artificial
  Probe
accgggagtgcaaactcctgcggga

SEQ ID NO: 275459 - DNA, 25 bp, Artificial
  Probe
cgctgcagagttttagctggaatgg

SEQ ID NO: 275460 - DNA, 25 bp, Artificial
  Probe
tgcaggaggcctggaagtacaaccg

SEQ ID NO: 275461 - DNA, 25 bp, Artificial
  Probe
acgcgctgcagagttttagctggaa

SEQ ID NO: 275462 - DNA, 25 bp, Artificial
  Probe
acaaccgggagtgcaaactcctgcg

SEQ ID NO: 275463 - DNA, 25 bp, Artificial
  Probe
tggattcacagataaagtggaccga

SEQ ID NO: 275464 - DNA, 25 bp, Artificial
  Probe
tggttgcagggatccagcaggctca

SEQ ID NO: 275465 - DNA, 25 bp, Artificial
  Probe
aactcctgcgggacgcgctgcagag

SEQ ID NO: 275466 - DNA, 25 bp, Artificial
  Probe
aaagcttcgcgatgtcattgcccag

SEQ ID NO: 275467 - DNA, 25 bp, Artificial
  Probe
cacgaccatgagaatggagtcgagg

SEQ ID NO: 275468 - DNA, 25 bp, Artificial
  Probe
gagtgcaaactcctgcgggacgcgc

SEQ ID NO: 275469 - DNA, 25 bp, Artificial
  Probe
agctggaatggtcgtggattcacag

SEQ ID NO: 275470 - DNA, 25 bp, Artificial
  Probe
ttagctggaatggtcgtggattcac

SEQ ID NO: 275471 - DNA, 25 bp, Artificial
  Probe
ggttgcagggatccagcaggctcat

SEQ ID NO: 275472 - DNA, 25 bp, Artificial
  Probe
ataaggcagtggttgcagggatcca

SEQ ID NO: 275473 - DNA, 25 bp, Artificial
  Probe
gcttcaaactgtttttaacaattgg

SEQ ID NO: 275474 - DNA, 25 bp, Artificial
  Probe
gcagctggcaaacatgaggatccag

SEQ ID NO: 275475 - DNA, 25 bp, Artificial
  Probe
gctccaagccaaaggatggtgttta

SEQ ID NO: 275476 - DNA, 25 bp, Artificial
  Probe
tagctggaatggtcgtggattcaca

SEQ ID NO: 275477 - DNA, 25 bp, Artificial
  Probe
agtgcaaactcctgcgggacgcgct

SEQ ID NO: 275478 - DNA, 25 bp, Artificial
  Probe
agcttcgcgatgtcattgcccagtg

SEQ ID NO: 275479 - DNA, 25 bp, Artificial
  Probe
tatatccacgaccatgagaatggag

SEQ ID NO: 275480 - DNA, 25 bp, Artificial
  Probe
ctcagctgatgatggataaggcagt

SEQ ID NO: 275481 - DNA, 25 bp, Artificial
  Probe
aagcttcgcgatgtcattgcccagt

SEQ ID NO: 275482 - DNA, 25 bp, Artificial
  Probe
cgagcagctggcaaacatgaggatc

SEQ ID NO: 275483 - DNA, 25 bp, Artificial
  Probe
atgcaggaggcctggaagtacaacc

SEQ ID NO: 275484 - DNA, 25 bp, Artificial
  Probe
tccacgaccatgagaatggagtcga

SEQ ID NO: 275485 - DNA, 25 bp, Artificial
  Probe
tccaagccaaaggatggtgtttata

SEQ ID NO: 275486 - DNA, 25 bp, Artificial
  Probe
agtacaaccgggagtgcaaactcct

SEQ ID NO: 275487 - DNA, 25 bp, Artificial
  Probe
gtacaaccgggagtgcaaactcctg

SEQ ID NO: 275488 - DNA, 25 bp, Artificial
  Probe
tggaccgattaaagctggcagaggt

SEQ ID NO: 275489 - DNA, 25 bp, Artificial
  Probe
accgattaaagctggcagaggttgt

SEQ ID NO: 275490 - DNA, 25 bp, Artificial
  Probe
tggtgtttatatccacgaccatgag

SEQ ID NO: 275491 - DNA, 25 bp, Artificial
  Probe
gagccccagtaggaaccgcttcaaa

SEQ ID NO: 275492 - DNA, 25 bp, Artificial
  Probe
cctggaagtacaaccgggagtgcaa

SEQ ID NO: 275493 - DNA, 25 bp, Artificial
  Probe
ggtgtttatatccacgaccatgaga

SEQ ID NO: 275494 - DNA, 25 bp, Artificial
  Probe
cgggacgcgctgcagagttttagct

SEQ ID NO: 275495 - DNA, 25 bp, Artificial
  Probe
cagctggcaaacatgaggatccagg

SEQ ID NO: 275496 - DNA, 25 bp, Artificial
  Probe
aagtggaccgattaaagctggcaga

SEQ ID NO: 275497 - DNA, 25 bp, Artificial
  Probe
aaggcctgtccctgggtcattagca

SEQ ID NO: 275498 - DNA, 25 bp, Artificial
  Probe
ctgggaccaggcaggacccttgcct

SEQ ID NO: 275499 - DNA, 25 bp, Artificial
  Probe
acttcaaggagctgccaccacgttc

SEQ ID NO: 275500 - DNA, 25 bp, Artificial
  Probe
gcaaccttgcccaggctctgtgttg

SEQ ID NO: 275501 - DNA, 25 bp, Artificial
  Probe
caagaagcttcttccctgggagctg

SEQ ID NO: 275502 - DNA, 25 bp, Artificial
  Probe
acagaatggtttccagaatgttccg

SEQ ID NO: 275503 - DNA, 25 bp, Artificial
  Probe
ccttgcccaggctctgtgttgactg

SEQ ID NO: 275504 - DNA, 25 bp, Artificial
  Probe
aagcttcttccctgggagctgctat

SEQ ID NO: 275505 - DNA, 25 bp, Artificial
  Probe
ccacgttcaaactcagagctttaag

SEQ ID NO: 275506 - DNA, 25 bp, Artificial
  Probe
ttgattcaagaagcttcttccctgg

SEQ ID NO: 275507 - DNA, 25 bp, Artificial
  Probe
ggcttcactgactgttcctaaaact

SEQ ID NO: 275508 - DNA, 25 bp, Artificial
  Probe
gccaccacgttcaaactcagagctt

SEQ ID NO: 275509 - DNA, 25 bp, Artificial
  Probe
gactcacagaatggtttccagaatg

SEQ ID NO: 275510 - DNA, 25 bp, Artificial
  Probe
gatactctggaaccttgcatctcta

SEQ ID NO: 275511 - DNA, 25 bp, Artificial
  Probe
agaatggtttccagaatgttccgta

SEQ ID NO: 275512 - DNA, 25 bp, Artificial
  Probe
actatccttacactctaaagaggag

SEQ ID NO: 275513 - DNA, 25 bp, Artificial
  Probe
ccttgctgggaccaggcaggaccct

SEQ ID NO: 275514 - DNA, 25 bp, Artificial
  Probe
ccgtagatgagtgtacttggagcct

SEQ ID NO: 275515 - DNA, 25 bp, Artificial
  Probe
ttcctggttttctggttccccacat

SEQ ID NO: 275516 - DNA, 25 bp, Artificial
  Probe
ggctctgtgttgactgccaaccact

SEQ ID NO: 275517 - DNA, 25 bp, Artificial
  Probe
tcacccatatcacttcaaggagctg

SEQ ID NO: 275518 - DNA, 25 bp, Artificial
  Probe
tttccagaatgttccgtagatgagt

SEQ ID NO: 275519 - DNA, 25 bp, Artificial
  Probe
gagcctcctgttcctgtcattaaga

SEQ ID NO: 275520 - DNA, 25 bp, Artificial
  Probe
cagaatgttccgtagatgagtgtac

SEQ ID NO: 275521 - DNA, 25 bp, Artificial
  Probe
cctgttcctgtcattaagaaaggcc

SEQ ID NO: 275522 - DNA, 25 bp, Artificial
  Probe
accttgagcagctactcactgactc

SEQ ID NO: 275523 - DNA, 25 bp, Artificial
  Probe
tgccaccacgttcaaactcagagct

SEQ ID NO: 275524 - DNA, 25 bp, Artificial
  Probe
cttgctgggaccaggcaggaccctt

SEQ ID NO: 275525 - DNA, 25 bp, Artificial
  Probe
acgttcaaactcagagctttaaggc

SEQ ID NO: 275526 - DNA, 25 bp, Artificial
  Probe
caaagcccaccaaggaccttgagca

SEQ ID NO: 275527 - DNA, 25 bp, Artificial
  Probe
gagctttaaggcttcactgactgtt

SEQ ID NO: 275528 - DNA, 25 bp, Artificial
  Probe
ctcagagctttaaggcttcactgac

SEQ ID NO: 275529 - DNA, 25 bp, Artificial
  Probe
ctgtcattaagaaaggcctgtccct

SEQ ID NO: 275530 - DNA, 25 bp, Artificial
  Probe
ttaagaaaggcctgtccctgggtca

SEQ ID NO: 275531 - DNA, 25 bp, Artificial
  Probe
ctggttttctggttccccacatcat

SEQ ID NO: 275532 - DNA, 25 bp, Artificial
  Probe
tgggagctgctatttttccaaaatt

SEQ ID NO: 275533 - DNA, 25 bp, Artificial
  Probe
ctatccttacactctaaagaggagg

SEQ ID NO: 275534 - DNA, 25 bp, Artificial
  Probe
ttccgtagatgagtgtacttggagc

SEQ ID NO: 275535 - DNA, 25 bp, Artificial
  Probe
ccctgggagctgctatttttccaaa

SEQ ID NO: 275536 - DNA, 25 bp, Artificial
  Probe
ggaaccttgcatctctaccccaaag

SEQ ID NO: 275537 - DNA, 25 bp, Artificial
  Probe
gtacttggagcctcctgttcctgtc

SEQ ID NO: 275538 - DNA, 25 bp, Artificial
  Probe
atgagtgtacttggagcctcctgtt

SEQ ID NO: 275539 - DNA, 25 bp, Artificial
  Probe
taagaaaggcctgtccctgggtcat

SEQ ID NO: 275540 - DNA, 25 bp, Artificial
  Probe
caaggagctgccaccacgttcaaac

SEQ ID NO: 275541 - DNA, 25 bp, Artificial
  Probe
ttcctgtcattaagaaaggcctgtc

SEQ ID NO: 275542 - DNA, 25 bp, Artificial
  Probe
gagtgtacttggagcctcctgttcc

SEQ ID NO: 275543 - DNA, 25 bp, Artificial
  Probe
ctgagctggatcctgacagtactgt

SEQ ID NO: 275544 - DNA, 25 bp, Artificial
  Probe
agagacgttcagaactgtagcaggc

SEQ ID NO: 275545 - DNA, 25 bp, Artificial
  Probe
agacatgaggctgagctggatcctg

SEQ ID NO: 275546 - DNA, 25 bp, Artificial
  Probe
gtcttacacatgcattacacgggaa

SEQ ID NO: 275547 - DNA, 25 bp, Artificial
  Probe
gacgttcagaactgtagcaggctgc

SEQ ID NO: 275548 - DNA, 25 bp, Artificial
  Probe
gataccaggtggagcaaccctggtg

SEQ ID NO: 275549 - DNA, 25 bp, Artificial
  Probe
gacatgaggctgagctggatcctga

SEQ ID NO: 275550 - DNA, 25 bp, Artificial
  Probe
cttacacatgcattacacgggaaag

SEQ ID NO: 275551 - DNA, 25 bp, Artificial
  Probe
gagacgttcagaactgtagcaggct

SEQ ID NO: 275552 - DNA, 25 bp, Artificial
  Probe
gagacatgaggctgagctggatcct

SEQ ID NO: 275553 - DNA, 25 bp, Artificial
  Probe
agataccaggtggagcaaccctggt

SEQ ID NO: 275554 - DNA, 25 bp, Artificial
  Probe
gcattacacgggaaagctagaagat

SEQ ID NO: 275555 - DNA, 25 bp, Artificial
  Probe
catttgcctgagtgccctggtcaca

SEQ ID NO: 275556 - DNA, 25 bp, Artificial
  Probe
gaggctgagctggatcctgacagta

SEQ ID NO: 275557 - DNA, 25 bp, Artificial
  Probe
gagatgtcttacacatgcattacac

SEQ ID NO: 275558 - DNA, 25 bp, Artificial
  Probe
actgctcaagattgagagacgttca

SEQ ID NO: 275559 - DNA, 25 bp, Artificial
  Probe
atgtcttacacatgcattacacggg

SEQ ID NO: 275560 - DNA, 25 bp, Artificial
  Probe
agatgtcttacacatgcattacacg

SEQ ID NO: 275561 - DNA, 25 bp, Artificial
  Probe
gctgagctggatcctgacagtactg

SEQ ID NO: 275562 - DNA, 25 bp, Artificial
  Probe
taccaggtggagcaaccctggtgtt

SEQ ID NO: 275563 - DNA, 25 bp, Artificial
  Probe
cccccaaagataccaggtggagcaa

SEQ ID NO: 275564 - DNA, 25 bp, Artificial
  Probe
gaggcccctatcagggaccagactg

SEQ ID NO: 275565 - DNA, 25 bp, Artificial
  Probe
tgtcttacacatgcattacacggga

SEQ ID NO: 275566 - DNA, 25 bp, Artificial
  Probe
cacatgcattacacgggaaagctag

SEQ ID NO: 275567 - DNA, 25 bp, Artificial
  Probe
acacatgcattacacgggaaagcta

SEQ ID NO: 275568 - DNA, 25 bp, Artificial
  Probe
accaggtggagcaaccctggtgttt

SEQ ID NO: 275569 - DNA, 25 bp, Artificial
  Probe
acatgaggctgagctggatcctgac

SEQ ID NO: 275570 - DNA, 25 bp, Artificial
  Probe
gatgtcttacacatgcattacacgg

SEQ ID NO: 275571 - DNA, 25 bp, Artificial
  Probe
tgaggctgagctggatcctgacagt

SEQ ID NO: 275572 - DNA, 25 bp, Artificial
  Probe
caaagataccaggtggagcaaccct

SEQ ID NO: 275573 - DNA, 25 bp, Artificial
  Probe
ctgctcaagattgagagacgttcag

SEQ ID NO: 275574 - DNA, 25 bp, Artificial
  Probe
tcttacacatgcattacacgggaaa

SEQ ID NO: 275575 - DNA, 25 bp, Artificial
  Probe
ccaggtggagcaaccctggtgtttg

SEQ ID NO: 275576 - DNA, 25 bp, Artificial
  Probe
ccaaagataccaggtggagcaaccc

SEQ ID NO: 275577 - DNA, 25 bp, Artificial
  Probe
acgttcagaactgtagcaggctgca

SEQ ID NO: 275578 - DNA, 25 bp, Artificial
  Probe
agacgttcagaactgtagcaggctg

SEQ ID NO: 275579 - DNA, 25 bp, Artificial
  Probe
taggaggcccctatcagggaccaga

SEQ ID NO: 275580 - DNA, 25 bp, Artificial
  Probe
tacacatgcattacacgggaaagct

SEQ ID NO: 275581 - DNA, 25 bp, Artificial
  Probe
ggctgagctggatcctgacagtact

SEQ ID NO: 275582 - DNA, 25 bp, Artificial
  Probe
ggaggcccctatcagggaccagact

SEQ ID NO: 275583 - DNA, 25 bp, Artificial
  Probe
gtaggaggcccctatcagggaccag

SEQ ID NO: 275584 - DNA, 25 bp, Artificial
  Probe
catgaggctgagctggatcctgaca

SEQ ID NO: 275585 - DNA, 25 bp, Artificial
  Probe
cattacacgggaaagctagaagatg

SEQ ID NO: 275586 - DNA, 25 bp, Artificial
  Probe
ccccaaagataccaggtggagcaac

SEQ ID NO: 275587 - DNA, 25 bp, Artificial
  Probe
aagataccaggtggagcaaccctgg

SEQ ID NO: 275588 - DNA, 25 bp, Artificial
  Probe
aggctgagctggatcctgacagtac

SEQ ID NO: 275589 - DNA, 25 bp, Artificial
  Probe
gtttaacatcagcacagataaccga

SEQ ID NO: 275590 - DNA, 25 bp, Artificial
  Probe
tcttctactgtaacatgaatctgtg

SEQ ID NO: 275591 - DNA, 25 bp, Artificial
  Probe
tcagagtccctactaagaatgcatt

SEQ ID NO: 275592 - DNA, 25 bp, Artificial
  Probe
tccctactaagaatgcattagtgag

SEQ ID NO: 275593 - DNA, 25 bp, Artificial
  Probe
tggacacttcataagcttataaatg

SEQ ID NO: 275594 - DNA, 25 bp, Artificial
  Probe
acatcagcacagataaccgaagact

SEQ ID NO: 275595 - DNA, 25 bp, Artificial
  Probe
aaagttgctgcagctactttagcct

SEQ ID NO: 275596 - DNA, 25 bp, Artificial
  Probe
ccttaagtgtggtggctgtgccttg

SEQ ID NO: 275597 - DNA, 25 bp, Artificial
  Probe
actgtaacatgaatctgtgacctgc

SEQ ID NO: 275598 - DNA, 25 bp, Artificial
  Probe
cttctttggcagaatgtcttctcct

SEQ ID NO: 275599 - DNA, 25 bp, Artificial
  Probe
tataacaaagttgctgcagctactt

SEQ ID NO: 275600 - DNA, 25 bp, Artificial
  Probe
tcttctttggcagaatgtcttctcc

SEQ ID NO: 275601 - DNA, 25 bp, Artificial
  Probe
ttaacatcagcacagataaccgaag

SEQ ID NO: 275602 - DNA, 25 bp, Artificial
  Probe
ctgtgacctgcgttaagtgagctgg

SEQ ID NO: 275603 - DNA, 25 bp, Artificial
  Probe
tctcagagtccctactaagaatgca

SEQ ID NO: 275604 - DNA, 25 bp, Artificial
  Probe
cttctccttaagtgtggtggctgtg

SEQ ID NO: 275605 - DNA, 25 bp, Artificial
  Probe
ggtggctgtgccttgtgtccagaaa

SEQ ID NO: 275606 - DNA, 25 bp, Artificial
  Probe
ctttggcagaatgtcttctccttaa

SEQ ID NO: 275607 - DNA, 25 bp, Artificial
  Probe
cctgcgttaagtgagctggagaaaa

SEQ ID NO: 275608 - DNA, 25 bp, Artificial
  Probe
catcctcttctttggcagaatgtct

SEQ ID NO: 275609 - DNA, 25 bp, Artificial
  Probe
catctaattgctttaggagatatct

SEQ ID NO: 275610 - DNA, 25 bp, Artificial
  Probe
taacatcagcacagataaccgaaga

SEQ ID NO: 275611 - DNA, 25 bp, Artificial
  Probe
ttgctttaggagatatctggacact

SEQ ID NO: 275612 - DNA, 25 bp, Artificial
  Probe
cacagataaccgaagacttcaattg

SEQ ID NO: 275613 - DNA, 25 bp, Artificial
  Probe
cagcatcctcttctttggcagaatg

SEQ ID NO: 275614 - DNA, 25 bp, Artificial
  Probe
taacatgaatctgtgacctgcgtta

SEQ ID NO: 275615 - DNA, 25 bp, Artificial
  Probe
aacatgaatctgtgacctgcgttaa

SEQ ID NO: 275616 - DNA, 25 bp, Artificial
  Probe
ccgaagacttcaattgtgatcaccc

SEQ ID NO: 275617 - DNA, 25 bp, Artificial
  Probe
gaatctgtgacctgcgttaagtgag

SEQ ID NO: 275618 - DNA, 25 bp, Artificial
  Probe
tcatctaattgctttaggagatatc

SEQ ID NO: 275619 - DNA, 25 bp, Artificial
  Probe
tcagcacagataaccgaagacttca

SEQ ID NO: 275620 - DNA, 25 bp, Artificial
  Probe
taaccgaagacttcaattgtgatca

SEQ ID NO: 275621 - DNA, 25 bp, Artificial
  Probe
attgctttaggagatatctggacac

SEQ ID NO: 275622 - DNA, 25 bp, Artificial
  Probe
gtcagtttaacatcagcacagataa

SEQ ID NO: 275623 - DNA, 25 bp, Artificial
  Probe
atcagcacagataaccgaagacttc

SEQ ID NO: 275624 - DNA, 25 bp, Artificial
  Probe
gatatctggacacttcataagctta

SEQ ID NO: 275625 - DNA, 25 bp, Artificial
  Probe
agttgctgcagctactttagcctgg

SEQ ID NO: 275626 - DNA, 25 bp, Artificial
  Probe
tgaatctgtgacctgcgttaagtga

SEQ ID NO: 275627 - DNA, 25 bp, Artificial
  Probe
tgtgacctgcgttaagtgagctgga

SEQ ID NO: 275628 - DNA, 25 bp, Artificial
  Probe
ctcttctttggcagaatgtcttctc

SEQ ID NO: 275629 - DNA, 25 bp, Artificial
  Probe
agtttaacatcagcacagataaccg

SEQ ID NO: 275630 - DNA, 25 bp, Artificial
  Probe
atataacaaagttgctgcagctact

SEQ ID NO: 275631 - DNA, 25 bp, Artificial
  Probe
tgacctgcgttaagtgagctggaga

SEQ ID NO: 275632 - DNA, 25 bp, Artificial
  Probe
ggagatatctggacacttcataagc

SEQ ID NO: 275633 - DNA, 25 bp, Artificial
  Probe
gtaacatgaatctgtgacctgcgtt

SEQ ID NO: 275634 - DNA, 25 bp, Artificial
  Probe
ataacaaagttgctgcagctacttt

SEQ ID NO: 275635 - DNA, 25 bp, Artificial
  Probe
tgcgttacccggagacgacaatcaa

SEQ ID NO: 275636 - DNA, 25 bp, Artificial
  Probe
gtgaccaatctctcttgctgcctct

SEQ ID NO: 275637 - DNA, 25 bp, Artificial
  Probe
ttctgttgcggaaatacaagcatag

SEQ ID NO: 275638 - DNA, 25 bp, Artificial
  Probe
cttctgttgcggaaatacaagcata

SEQ ID NO: 275639 - DNA, 25 bp, Artificial
  Probe
ttctcttgcgccagtgaccaatctc

SEQ ID NO: 275640 - DNA, 25 bp, Artificial
  Probe
tctcttgctgcctctcatcattggc

SEQ ID NO: 275641 - DNA, 25 bp, Artificial
  Probe
acaagggacacttcgggccatgctt

SEQ ID NO: 275642 - DNA, 25 bp, Artificial
  Probe
acagtctaccttaactacatggcag

SEQ ID NO: 275643 - DNA, 25 bp, Artificial
  Probe
cagtccactctgtaggccaccaagg

SEQ ID NO: 275644 - DNA, 25 bp, Artificial
  Probe
agcccctctgagcatttgctccagt

SEQ ID NO: 275645 - DNA, 25 bp, Artificial
  Probe
ctctgagcatttgctccagtccact

SEQ ID NO: 275646 - DNA, 25 bp, Artificial
  Probe
tcttgctgcctctcatcattggcct

SEQ ID NO: 275647 - DNA, 25 bp, Artificial
  Probe
tgcctctcatcattggcctggtcct

SEQ ID NO: 275648 - DNA, 25 bp, Artificial
  Probe
gattcaaacaggaccgacatcagag

SEQ ID NO: 275649 - DNA, 25 bp, Artificial
  Probe
gccttctgcgttacccggagacgac

SEQ ID NO: 275650 - DNA, 25 bp, Artificial
  Probe
gttctttctccagcaattcacctgg

SEQ ID NO: 275651 - DNA, 25 bp, Artificial
  Probe
ggaatacaatgtgtccttcccacaa

SEQ ID NO: 275652 - DNA, 25 bp, Artificial
  Probe
tccttcccacaagcagcacagtgga

SEQ ID NO: 275653 - DNA, 25 bp, Artificial
  Probe
caaagcttctgttgcggaaatacaa

SEQ ID NO: 275654 - DNA, 25 bp, Artificial
  Probe
tggctctctcattcccttacggaca

SEQ ID NO: 275655 - DNA, 25 bp, Artificial
  Probe
ccctgaggctgcaggctgctcagtt

SEQ ID NO: 275656 - DNA, 25 bp, Artificial
  Probe
ctcagttgccggacaagggacactt

SEQ ID NO: 275657 - DNA, 25 bp, Artificial
  Probe
tcaccctggtgctcattgccttctg

SEQ ID NO: 275658 - DNA, 25 bp, Artificial
  Probe
attcccttacggacagcttacctgt

SEQ ID NO: 275659 - DNA, 25 bp, Artificial
  Probe
gctgcaggctgctcagttgccggac

SEQ ID NO: 275660 - DNA, 25 bp, Artificial
  Probe
tctccctgaggctgcaggctgctca

SEQ ID NO: 275661 - DNA, 25 bp, Artificial
  Probe
tgggccaaagcttctgttgcggaaa

SEQ ID NO: 275662 - DNA, 25 bp, Artificial
  Probe
acacttcgggccatgcttctcttgc

SEQ ID NO: 275663 - DNA, 25 bp, Artificial
  Probe
tcagcgcagaattcatctcttcaag

SEQ ID NO: 275664 - DNA, 25 bp, Artificial
  Probe
agtccactctgtaggccaccaagga

SEQ ID NO: 275665 - DNA, 25 bp, Artificial
  Probe
gccatgcttctcttgcgccagtgac

SEQ ID NO: 275666 - DNA, 25 bp, Artificial
  Probe
cttcagcatgcaattgactcaacag

SEQ ID NO: 275667 - DNA, 25 bp, Artificial
  Probe
ctgctctccctgaggctgcaggctg

SEQ ID NO: 275668 - DNA, 25 bp, Artificial
  Probe
ggagacgacaatcaacctaccagcc

SEQ ID NO: 275669 - DNA, 25 bp, Artificial
  Probe
gcagaattcatctcttcaagagctc

SEQ ID NO: 275670 - DNA, 25 bp, Artificial
  Probe
tgtgtccttcccacaagcagcacag

SEQ ID NO: 275671 - DNA, 25 bp, Artificial
  Probe
ttctccagcaattcacctggacctg

SEQ ID NO: 275672 - DNA, 25 bp, Artificial
  Probe
agtggacattctcagcgcagaattc

SEQ ID NO: 275673 - DNA, 25 bp, Artificial
  Probe
ctacatggcagtggaatacaatgtg

SEQ ID NO: 275674 - DNA, 25 bp, Artificial
  Probe
actctgtaggccaccaaggagcatc

SEQ ID NO: 275675 - DNA, 25 bp, Artificial
  Probe
acctgtggattcaaacaggaccgac

SEQ ID NO: 275676 - DNA, 25 bp, Artificial
  Probe
caggctgctcagttgccggacaagg

SEQ ID NO: 275677 - DNA, 25 bp, Artificial
  Probe
gagcatcctcatttcttcagcatgc

SEQ ID NO: 275678 - DNA, 25 bp, Artificial
  Probe
gccggacaagggacacttcgggcca

SEQ ID NO: 275679 - DNA, 25 bp, Artificial
  Probe
tggattcaaacaggaccgacatcag

SEQ ID NO: 275680 - DNA, 25 bp, Artificial
  Probe
ttgctccagtccactctgtaggcca

SEQ ID NO: 275681 - DNA, 25 bp, Artificial
  Probe
agctgctgtctccagccggactggc

SEQ ID NO: 275682 - DNA, 25 bp, Artificial
  Probe
agcagctggttggagagttacctga

SEQ ID NO: 275683 - DNA, 25 bp, Artificial
  Probe
gctgtccatgcagagctgaaacgca

SEQ ID NO: 275684 - DNA, 25 bp, Artificial
  Probe
ccagaaggacccagaaatctacaca

SEQ ID NO: 275685 - DNA, 25 bp, Artificial
  Probe
atacaaccggttcttgaacccagat

SEQ ID NO: 275686 - DNA, 25 bp, Artificial
  Probe
agaaggccaggatgaagccgacgct

SEQ ID NO: 275687 - DNA, 25 bp, Artificial
  Probe
acctgagacatcttgaggagatggg

SEQ ID NO: 275688 - DNA, 25 bp, Artificial
  Probe
actccacagaaggaggcagtggctg

SEQ ID NO: 275689 - DNA, 25 bp, Artificial
  Probe
ggataaagaccatgcatgcagtgtc

SEQ ID NO: 275690 - DNA, 25 bp, Artificial
  Probe
cttcatcacccgtgaggtcatggca

SEQ ID NO: 275691 - DNA, 25 bp, Artificial
  Probe
gcctccagggctgaccggagcagct

SEQ ID NO: 275692 - DNA, 25 bp, Artificial
  Probe
tatcagaggacatgcaggcccgggc

SEQ ID NO: 275693 - DNA, 25 bp, Artificial
  Probe
gcccgggcactggtgctgcagctct

SEQ ID NO: 275694 - DNA, 25 bp, Artificial
  Probe
caccttccgccagctggatctgatg

SEQ ID NO: 275695 - DNA, 25 bp, Artificial
  Probe
gaagatgtgcccatccggtaccgta

SEQ ID NO: 275696 - DNA, 25 bp, Artificial
  Probe
actcccgcagaagattctagacagc

SEQ ID NO: 275697 - DNA, 25 bp, Artificial
  Probe
catcaacagcatcaaacagtttgtg

SEQ ID NO: 275698 - DNA, 25 bp, Artificial
  Probe
tacaaccggttcttgaacccagatg

SEQ ID NO: 275699 - DNA, 25 bp, Artificial
  Probe
gaaatctacacagaacctgaagtct

SEQ ID NO: 275700 - DNA, 25 bp, Artificial
  Probe
ccggagtttgaccttagcagatatg

SEQ ID NO: 275701 - DNA, 25 bp, Artificial
  Probe
aatatgggacccacggctttctggc

SEQ ID NO: 275702 - DNA, 25 bp, Artificial
  Probe
ctggtcagtgaggacacagaggtcc

SEQ ID NO: 275703 - DNA, 25 bp, Artificial
  Probe
gaccgtgaccactcagccgacgttt

SEQ ID NO: 275704 - DNA, 25 bp, Artificial
  Probe
accccagcgaggagaaggccaggat

SEQ ID NO: 275705 - DNA, 25 bp, Artificial
  Probe
cagggcacaaccagtgcctggggaa

SEQ ID NO: 275706 - DNA, 25 bp, Artificial
  Probe
gagagttacctgagacatcttgagg

SEQ ID NO: 275707 - DNA, 25 bp, Artificial
  Probe
tgaggacacagaggtcccggagttt

SEQ ID NO: 275708 - DNA, 25 bp, Artificial
  Probe
accgtgaccactcagccgacgtttt

SEQ ID NO: 275709 - DNA, 25 bp, Artificial
  Probe
gaaaggtctgcttgagttctcctac

SEQ ID NO: 275710 - DNA, 25 bp, Artificial
  Probe
acctgcgcaccgtcctgctgggtga

SEQ ID NO: 275711 - DNA, 25 bp, Artificial
  Probe
aagccatgtataccaacctgcgcac

SEQ ID NO: 275712 - DNA, 25 bp, Artificial
  Probe
tgtatggagtggaggcctcaccacg

SEQ ID NO: 275713 - DNA, 25 bp, Artificial
  Probe
tcagcgctggctacctgaccctgta

SEQ ID NO: 275714 - DNA, 25 bp, Artificial
  Probe
gtgctcaatgagaccctccggctca

SEQ ID NO: 275715 - DNA, 25 bp, Artificial
  Probe
agagtcaggccctcgaccgtgacca

SEQ ID NO: 275716 - DNA, 25 bp, Artificial
  Probe
gcttccaaatttcaaccccagcgag

SEQ ID NO: 275717 - DNA, 25 bp, Artificial
  Probe
cagaggacatgcaggcccgggcact

SEQ ID NO: 275718 - DNA, 25 bp, Artificial
  Probe
ctgtccatgcagagctgaaacgcat

SEQ ID NO: 275719 - DNA, 25 bp, Artificial
  Probe
gatttttgatctgcagcttccaaat

SEQ ID NO: 275720 - DNA, 25 bp, Artificial
  Probe
ctggctcgaggctccttgtcagtgg

SEQ ID NO: 275721 - DNA, 25 bp, Artificial
  Probe
cggtaccgtaccaggctgtgacctg

SEQ ID NO: 275722 - DNA, 25 bp, Artificial
  Probe
atttcgacctggagctggtcagtga

SEQ ID NO: 275723 - DNA, 25 bp, Artificial
  Probe
cctccagggctgaccggagcagctg

SEQ ID NO: 275724 - DNA, 25 bp, Artificial
  Probe
ttgagttctcctacagctccctgct

SEQ ID NO: 275725 - DNA, 25 bp, Artificial
  Probe
cagacctggccttgcctatggcaga

SEQ ID NO: 275726 - DNA, 25 bp, Artificial
  Probe
tggggcctcctgacttcctgttgtt

SEQ ID NO: 275727 - DNA, 25 bp, Artificial
  Probe
atgctgccacccttctgttgtaaac

SEQ ID NO: 275728 - DNA, 25 bp, Artificial
  Probe
cacactcacccgtgtgaaaggactg

SEQ ID NO: 275729 - DNA, 25 bp, Artificial
  Probe
cgaaattctgttgtcaagatatggc

SEQ ID NO: 275730 - DNA, 25 bp, Artificial
  Probe
ctggagtttatcacttgtggacttt

SEQ ID NO: 275731 - DNA, 25 bp, Artificial
  Probe
tatggcacaggaacagacagccctc

SEQ ID NO: 275732 - DNA, 25 bp, Artificial
  Probe
gtcaccttgaccttgttttctgtaa

SEQ ID NO: 275733 - DNA, 25 bp, Artificial
  Probe
tccctgtctgcaacgcaactggagt

SEQ ID NO: 275734 - DNA, 25 bp, Artificial
  Probe
acccgtgtgaaaggactgaagccca

SEQ ID NO: 275735 - DNA, 25 bp, Artificial
  Probe
ccttgttttctgtaatccctgtctg

SEQ ID NO: 275736 - DNA, 25 bp, Artificial
  Probe
tgggttagacccagtgcatggcaaa

SEQ ID NO: 275737 - DNA, 25 bp, Artificial
  Probe
tggctgtagaacgtcagccactgct

SEQ ID NO: 275738 - DNA, 25 bp, Artificial
  Probe
ctcgggttgattcgatgcttcccag

SEQ ID NO: 275739 - DNA, 25 bp, Artificial
  Probe
tcctgtggctgtagaacgtcagcca

SEQ ID NO: 275740 - DNA, 25 bp, Artificial
  Probe
ttacagtgagcgagcagcaaacatt

SEQ ID NO: 275741 - DNA, 25 bp, Artificial
  Probe
tttcgtttctgacgtttcctgtggc

SEQ ID NO: 275742 - DNA, 25 bp, Artificial
  Probe
attgagagcttcacacactcacccg

SEQ ID NO: 275743 - DNA, 25 bp, Artificial
  Probe
gtttcctgtggctgtagaacgtcag

SEQ ID NO: 275744 - DNA, 25 bp, Artificial
  Probe
tgttttctgtaatccctgtctgcaa

SEQ ID NO: 275745 - DNA, 25 bp, Artificial
  Probe
gtggtagcttttcgtttctgacgtt

SEQ ID NO: 275746 - DNA, 25 bp, Artificial
  Probe
atttcttatggcacaggaacagaca

SEQ ID NO: 275747 - DNA, 25 bp, Artificial
  Probe
tgctgccacccttctgttgtaaacg

SEQ ID NO: 275748 - DNA, 25 bp, Artificial
  Probe
ctgtagaacgtcagccactgctcag

SEQ ID NO: 275749 - DNA, 25 bp, Artificial
  Probe
gctcactgtcaccttgaccttgttt

SEQ ID NO: 275750 - DNA, 25 bp, Artificial
  Probe
cacttgtggactttggaaagctttg

SEQ ID NO: 275751 - DNA, 25 bp, Artificial
  Probe
tgagcgagcagcaaacattgagagc

SEQ ID NO: 275752 - DNA, 25 bp, Artificial
  Probe
gttgttacagtgagcgagcagcaaa

SEQ ID NO: 275753 - DNA, 25 bp, Artificial
  Probe
gtctgcaacgcaactggagtttatc

SEQ ID NO: 275754 - DNA, 25 bp, Artificial
  Probe
tcaagatatggcaggtggtgacttc

SEQ ID NO: 275755 - DNA, 25 bp, Artificial
  Probe
ctgctcactgtcaccttgaccttgt

SEQ ID NO: 275756 - DNA, 25 bp, Artificial
  Probe
gtgctgtggtagcttttcgtttctg

SEQ ID NO: 275757 - DNA, 25 bp, Artificial
  Probe
cgagcagcaaacattgagagcttca

SEQ ID NO: 275758 - DNA, 25 bp, Artificial
  Probe
agagcttcacacactcacccgtgtg

SEQ ID NO: 275759 - DNA, 25 bp, Artificial
  Probe
tggtgacttcctttgtaattctaaa

SEQ ID NO: 275760 - DNA, 25 bp, Artificial
  Probe
agaacgtcagccactgctcagcggc

SEQ ID NO: 275761 - DNA, 25 bp, Artificial
  Probe
acaggaacagacagccctccgaaat

SEQ ID NO: 275762 - DNA, 25 bp, Artificial
  Probe
ttatcacttgtggactttggaaagc

SEQ ID NO: 275763 - DNA, 25 bp, Artificial
  Probe
tacagtgagcgagcagcaaacattg

SEQ ID NO: 275764 - DNA, 25 bp, Artificial
  Probe
ttagacccagtgcatggcaaaaaca

SEQ ID NO: 275765 - DNA, 25 bp, Artificial
  Probe
tgaaaggactgaagcccaagcccag

SEQ ID NO: 275766 - DNA, 25 bp, Artificial
  Probe
agcttttcgtttctgacgtttcctg

SEQ ID NO: 275767 - DNA, 25 bp, Artificial
  Probe
tagttcctctataacgaacatgaag

SEQ ID NO: 275768 - DNA, 25 bp, Artificial
  Probe
gcacaggaacagacagccctccgaa

SEQ ID NO: 275769 - DNA, 25 bp, Artificial
  Probe
ttctgtaatccctgtctgcaacgca

SEQ ID NO: 275770 - DNA, 25 bp, Artificial
  Probe
gaagttgttacagtgagcgagcagc

SEQ ID NO: 275771 - DNA, 25 bp, Artificial
  Probe
cgttgtactttgcatttcttatggc

SEQ ID NO: 275772 - DNA, 25 bp, Artificial
  Probe
ttgaccttgttttctgtaatccctg

SEQ ID NO: 275773 - DNA, 25 bp, Artificial
  Probe
aatgctaagtaagcttcttagggcc

SEQ ID NO: 275774 - DNA, 25 bp, Artificial
  Probe
gcctttgctaatagatagtaactca

SEQ ID NO: 275775 - DNA, 25 bp, Artificial
  Probe
ggatgtggcgcctcactaggctttg

SEQ ID NO: 275776 - DNA, 25 bp, Artificial
  Probe
tacactgcagccaggttatttgttg

SEQ ID NO: 275777 - DNA, 25 bp, Artificial
  Probe
tgcgcctgtgcgtgtgtactaacag

SEQ ID NO: 275778 - DNA, 25 bp, Artificial
  Probe
taaagtttccgtgatttaacagtct

SEQ ID NO: 275779 - DNA, 25 bp, Artificial
  Probe
agggcctttgctaatagatagtaac

SEQ ID NO: 275780 - DNA, 25 bp, Artificial
  Probe
tgctaagtaagcttcttagggcctt

SEQ ID NO: 275781 - DNA, 25 bp, Artificial
  Probe
gttgatcttttcacaagtaacagaa

SEQ ID NO: 275782 - DNA, 25 bp, Artificial
  Probe
tactaacagtcattgtacagatgtg

SEQ ID NO: 275783 - DNA, 25 bp, Artificial
  Probe
cttagggcctttgctaatagatagt

SEQ ID NO: 275784 - DNA, 25 bp, Artificial
  Probe
ctcactaggctttgtgtgagtgggt

SEQ ID NO: 275785 - DNA, 25 bp, Artificial
  Probe
ctgcagccaggttatttgttggttt

SEQ ID NO: 275786 - DNA, 25 bp, Artificial
  Probe
atgtgtgcgcctgtgcgtgtgtact

SEQ ID NO: 275787 - DNA, 25 bp, Artificial
  Probe
atagtaactcaatccggtgttgatc

SEQ ID NO: 275788 - DNA, 25 bp, Artificial
  Probe
agtgtgtgtgcatacgtgcgcgcat

SEQ ID NO: 275789 - DNA, 25 bp, Artificial
  Probe
aagtaagcttcttagggcctttgct

SEQ ID NO: 275790 - DNA, 25 bp, Artificial
  Probe
tccgtgatttaacagtctgtttcca

SEQ ID NO: 275791 - DNA, 25 bp, Artificial
  Probe
agtaagcttcttagggcctttgcta

SEQ ID NO: 275792 - DNA, 25 bp, Artificial
  Probe
cttcttagggcctttgctaatagat

SEQ ID NO: 275793 - DNA, 25 bp, Artificial
  Probe
cgtgatttaacagtctgtttccaac

SEQ ID NO: 275794 - DNA, 25 bp, Artificial
  Probe
tatttttcccagtgtttagatgatc

SEQ ID NO: 275795 - DNA, 25 bp, Artificial
  Probe
cggtgttgatcttttcacaagtaac

SEQ ID NO: 275796 - DNA, 25 bp, Artificial
  Probe
atgtggcgcctcactaggctttgtg

SEQ ID NO: 275797 - DNA, 25 bp, Artificial
  Probe
tgtgtgcatacgtgcgcgcatgtgt

SEQ ID NO: 275798 - DNA, 25 bp, Artificial
  Probe
cagtgtgtgtgcatacgtgcgcgca

SEQ ID NO: 275799 - DNA, 25 bp, Artificial
  Probe
gcctcactaggctttgtgtgagtgg

SEQ ID NO: 275800 - DNA, 25 bp, Artificial
  Probe
gatttgcataaattaccatgcctgc

SEQ ID NO: 275801 - DNA, 25 bp, Artificial
  Probe
aactcaatccggtgttgatcttttc

SEQ ID NO: 275802 - DNA, 25 bp, Artificial
  Probe
atacgtgcgcgcatgtgtgcgcctg

SEQ ID NO: 275803 - DNA, 25 bp, Artificial
  Probe
gcgcctgtgcgtgtgtactaacagt

SEQ ID NO: 275804 - DNA, 25 bp, Artificial
  Probe
tttccgtgatttaacagtctgtttc

SEQ ID NO: 275805 - DNA, 25 bp, Artificial
  Probe
ttcccagtgtttagatgatctcaaa

SEQ ID NO: 275806 - DNA, 25 bp, Artificial
  Probe
atagatagtaactcaatccggtgtt

SEQ ID NO: 275807 - DNA, 25 bp, Artificial
  Probe
tatgatacactgcagccaggttatt

SEQ ID NO: 275808 - DNA, 25 bp, Artificial
  Probe
tgtgtgtgcatacgtgcgcgcatgt

SEQ ID NO: 275809 - DNA, 25 bp, Artificial
  Probe
tttgtttatgatacactgcagccag

SEQ ID NO: 275810 - DNA, 25 bp, Artificial
  Probe
gggcctttgctaatagatagtaact

SEQ ID NO: 275811 - DNA, 25 bp, Artificial
  Probe
tggcgcctcactaggctttgtgtga

SEQ ID NO: 275812 - DNA, 25 bp, Artificial
  Probe
cgtgtgtactaacagtcattgtaca

SEQ ID NO: 275813 - DNA, 25 bp, Artificial
  Probe
aaccatgtgcaagattaatgctaag

SEQ ID NO: 275814 - DNA, 25 bp, Artificial
  Probe
tttgttggtttatggacatactgcc

SEQ ID NO: 275815 - DNA, 25 bp, Artificial
  Probe
catgtgtgcgcctgtgcgtgtgtac

SEQ ID NO: 275816 - DNA, 25 bp, Artificial
  Probe
gtttatggacatactgccctttttt

SEQ ID NO: 275817 - DNA, 25 bp, Artificial
  Probe
tgtgcgtgtgtactaacagtcattg

SEQ ID NO: 275818 - DNA, 25 bp, Artificial
  Probe
atgatacactgcagccaggttattt

SEQ ID NO: 275819 - DNA, 25 bp, Artificial
  Probe
caccaccaagtctgccgaaatcagg

SEQ ID NO: 275820 - DNA, 25 bp, Artificial
  Probe
gacgctgagaccacactcttggagc

SEQ ID NO: 275821 - DNA, 25 bp, Artificial
  Probe
cttggagattgacctggactcgatg

SEQ ID NO: 275822 - DNA, 25 bp, Artificial
  Probe
cttggagaacaacctcggggaagtg

SEQ ID NO: 275823 - DNA, 25 bp, Artificial
  Probe
acggtagtcaccaccaagtctgccg

SEQ ID NO: 275824 - DNA, 25 bp, Artificial
  Probe
tctcagcagattgaagagagtacca

SEQ ID NO: 275825 - DNA, 25 bp, Artificial
  Probe
ccgaaatcagggacgctgagaccac

SEQ ID NO: 275826 - DNA, 25 bp, Artificial
  Probe
ggtctcagcagattgaagagagtac

SEQ ID NO: 275827 - DNA, 25 bp, Artificial
  Probe
tggagattgacctggactcgatgaa

SEQ ID NO: 275828 - DNA, 25 bp, Artificial
  Probe
gtctgccgaaatcagggacgctgag

SEQ ID NO: 275829 - DNA, 25 bp, Artificial
  Probe
ccagatacagggtgcagatggagca

SEQ ID NO: 275830 - DNA, 25 bp, Artificial
  Probe
gacctggactcgatgaaaaaccaga

SEQ ID NO: 275831 - DNA, 25 bp, Artificial
  Probe
tctgccgaaatcagggacgctgaga

SEQ ID NO: 275832 - DNA, 25 bp, Artificial
  Probe
ccctccagaccttggagattgacct

SEQ ID NO: 275833 - DNA, 25 bp, Artificial
  Probe
ctcaatggggtccttctgcatctgg

SEQ ID NO: 275834 - DNA, 25 bp, Artificial
  Probe
accacggtagtcaccaccaagtctg

SEQ ID NO: 275835 - DNA, 25 bp, Artificial
  Probe
aatcagggacgctgagaccacactc

SEQ ID NO: 275836 - DNA, 25 bp, Artificial
  Probe
ggagcaactcaatggggtccttctg

SEQ ID NO: 275837 - DNA, 25 bp, Artificial
  Probe
tcagggacgctgagaccacactctt

SEQ ID NO: 275838 - DNA, 25 bp, Artificial
  Probe
gctgagaccacactcttggagctga

SEQ ID NO: 275839 - DNA, 25 bp, Artificial
  Probe
aaccagaacatcaacttggagaaca

SEQ ID NO: 275840 - DNA, 25 bp, Artificial
  Probe
acactcttggagctgagacgcaccc

SEQ ID NO: 275841 - DNA, 25 bp, Artificial
  Probe
agagtaccacggtagtcaccaccaa

SEQ ID NO: 275842 - DNA, 25 bp, Artificial
  Probe
cagaacatcaacttggagaacaacc

SEQ ID NO: 275843 - DNA, 25 bp, Artificial
  Probe
aacatcaacttggagaacaacctcg

SEQ ID NO: 275844 - DNA, 25 bp, Artificial
  Probe
ggggtccttctgcatctggaatcag

SEQ ID NO: 275845 - DNA, 25 bp, Artificial
  Probe
actcttggagctgagacgcaccctc

SEQ ID NO: 275846 - DNA, 25 bp, Artificial
  Probe
gagtaccacggtagtcaccaccaag

SEQ ID NO: 275847 - DNA, 25 bp, Artificial
  Probe
aactcaatggggtccttctgcatct

SEQ ID NO: 275848 - DNA, 25 bp, Artificial
  Probe
gattgacctggactcgatgaaaaac

SEQ ID NO: 275849 - DNA, 25 bp, Artificial
  Probe
ccagaacatcaacttggagaacaac

SEQ ID NO: 275850 - DNA, 25 bp, Artificial
  Probe
tggggtccttctgcatctggaatca

SEQ ID NO: 275851 - DNA, 25 bp, Artificial
  Probe
cctccagaccttggagattgacctg

SEQ ID NO: 275852 - DNA, 25 bp, Artificial
  Probe
gatacagggtgcagatggagcaact

SEQ ID NO: 275853 - DNA, 25 bp, Artificial
  Probe
acatcaacttggagaacaacctcgg

SEQ ID NO: 275854 - DNA, 25 bp, Artificial
  Probe
ccaagtctgccgaaatcagggacgc

SEQ ID NO: 275855 - DNA, 25 bp, Artificial
  Probe
atggagcaactcaatggggtccttc

SEQ ID NO: 275856 - DNA, 25 bp, Artificial
  Probe
ctggtctcagcagattgaagagagt

SEQ ID NO: 275857 - DNA, 25 bp, Artificial
  Probe
ctggaatcagagctggcacaaactc

SEQ ID NO: 275858 - DNA, 25 bp, Artificial
  Probe
cagatggagcaactcaatggggtcc

SEQ ID NO: 275859 - DNA, 25 bp, Artificial
  Probe
ggacgctgagaccacactcttggag

SEQ ID NO: 275860 - DNA, 25 bp, Artificial
  Probe
gtcaccaccaagtctgccgaaatca

SEQ ID NO: 275861 - DNA, 25 bp, Artificial
  Probe
aagtctgccgaaatcagggacgctg

SEQ ID NO: 275862 - DNA, 25 bp, Artificial
  Probe
acctggactcgatgaaaaaccagaa

SEQ ID NO: 275863 - DNA, 25 bp, Artificial
  Probe
aaaccagaacatcaacttggagaac

SEQ ID NO: 275864 - DNA, 25 bp, Artificial
  Probe
tacagggtgcagatggagcaactca

SEQ ID NO: 275865 - DNA, 25 bp, Artificial
  Probe
agctaagaatccggtgcaggagaaa

SEQ ID NO: 275866 - DNA, 25 bp, Artificial
  Probe
aaacaacagaccttgtaggtggctg

SEQ ID NO: 275867 - DNA, 25 bp, Artificial
  Probe
gagtgtggtggtgcaggaaacaaca

SEQ ID NO: 275868 - DNA, 25 bp, Artificial
  Probe
cagcggcggtggcagcaatttccac

SEQ ID NO: 275869 - DNA, 25 bp, Artificial
  Probe
tgttcttcctagtgtagcttccttt

SEQ ID NO: 275870 - DNA, 25 bp, Artificial
  Probe
ctaagaatccggtgcaggagaaaag

SEQ ID NO: 275871 - DNA, 25 bp, Artificial
  Probe
gcagcaatttccacatcagcgtgga

SEQ ID NO: 275872 - DNA, 25 bp, Artificial
  Probe
agacccagctgagtgagctccgctg

SEQ ID NO: 275873 - DNA, 25 bp, Artificial
  Probe
tagtgtagcttccttttgagtgtgg

SEQ ID NO: 275874 - DNA, 25 bp, Artificial
  Probe
ttttgagtgtggtggtgcaggaaac

SEQ ID NO: 275875 - DNA, 25 bp, Artificial
  Probe
ctagtgtagcttccttttgagtgtg

SEQ ID NO: 275876 - DNA, 25 bp, Artificial
  Probe
cggtggcagcaatttccacatcagc

SEQ ID NO: 275877 - DNA, 25 bp, Artificial
  Probe
tagcttccttttgagtgtggtggtg

SEQ ID NO: 275878 - DNA, 25 bp, Artificial
  Probe
tcttcctagtgtagcttccttttga

SEQ ID NO: 275879 - DNA, 25 bp, Artificial
  Probe
ttgagtgtggtggtgcaggaaacaa

SEQ ID NO: 275880 - DNA, 25 bp, Artificial
  Probe
cttccttttgagtgtggtggtgcag

SEQ ID NO: 275881 - DNA, 25 bp, Artificial
  Probe
gcaggaaacaacagaccttgtaggt

SEQ ID NO: 275882 - DNA, 25 bp, Artificial
  Probe
tgtagcttccttttgagtgtggtgg

SEQ ID NO: 275883 - DNA, 25 bp, Artificial
  Probe
taagaatccggtgcaggagaaaaga

SEQ ID NO: 275884 - DNA, 25 bp, Artificial
  Probe
agaatccggtgcaggagaaaagaac

SEQ ID NO: 275885 - DNA, 25 bp, Artificial
  Probe
cttttgagtgtggtggtgcaggaaa

SEQ ID NO: 275886 - DNA, 25 bp, Artificial
  Probe
gcttccttttgagtgtggtggtgca

SEQ ID NO: 275887 - DNA, 25 bp, Artificial
  Probe
gtggcagcaatttccacatcagcgt

SEQ ID NO: 275888 - DNA, 25 bp, Artificial
  Probe
aacagaccttgtaggtggctgttcc

SEQ ID NO: 275889 - DNA, 25 bp, Artificial
  Probe
tcctagtgtagcttccttttgagtg

SEQ ID NO: 275890 - DNA, 25 bp, Artificial
  Probe
aaagctaagaatccggtgcaggaga

SEQ ID NO: 275891 - DNA, 25 bp, Artificial
  Probe
gctaagaatccggtgcaggagaaaa

SEQ ID NO: 275892 - DNA, 25 bp, Artificial
  Probe
cctagtgtagcttccttttgagtgt

SEQ ID NO: 275893 - DNA, 25 bp, Artificial
  Probe
ggtggcagcaatttccacatcagcg

SEQ ID NO: 275894 - DNA, 25 bp, Artificial
  Probe
ttcctagtgtagcttccttttgagt

SEQ ID NO: 275895 - DNA, 25 bp, Artificial
  Probe
ggaaacaacagaccttgtaggtggc

SEQ ID NO: 275896 - DNA, 25 bp, Artificial
  Probe
agcttccttttgagtgtggtggtgc

SEQ ID NO: 275897 - DNA, 25 bp, Artificial
  Probe
tcaataaagaatcacattttctttt

SEQ ID NO: 275898 - DNA, 25 bp, Artificial
  Probe
caggaaacaacagaccttgtaggtg

SEQ ID NO: 275899 - DNA, 25 bp, Artificial
  Probe
ttccttttgagtgtggtggtgcagg

SEQ ID NO: 275900 - DNA, 25 bp, Artificial
  Probe
gaaacaacagaccttgtaggtggct

SEQ ID NO: 275901 - DNA, 25 bp, Artificial
  Probe
aagctaagaatccggtgcaggagaa

SEQ ID NO: 275902 - DNA, 25 bp, Artificial
  Probe
cttcctagtgtagcttccttttgag

SEQ ID NO: 275903 - DNA, 25 bp, Artificial
  Probe
aggaaacaacagaccttgtaggtgg

SEQ ID NO: 275904 - DNA, 25 bp, Artificial
  Probe
agcggcggtggcagcaatttccaca

SEQ ID NO: 275905 - DNA, 25 bp, Artificial
  Probe
ggcagcaatttccacatcagcgtgg

SEQ ID NO: 275906 - DNA, 25 bp, Artificial
  Probe
aagaatccggtgcaggagaaaagaa

SEQ ID NO: 275907 - DNA, 25 bp, Artificial
  Probe
tggcagcaatttccacatcagcgtg

SEQ ID NO: 275908 - DNA, 25 bp, Artificial
  Probe
cagcaatttccacatcagcgtggag

SEQ ID NO: 275909 - DNA, 25 bp, Artificial
  Probe
gaatccggtgcaggagaaaagaacc

SEQ ID NO: 275910 - DNA, 25 bp, Artificial
  Probe
ttcttcctagtgtagcttccttttg

SEQ ID NO: 275911 - DNA, 25 bp, Artificial
  Probe
ccgcagcgaggtgtctgagctccgc

SEQ ID NO: 275912 - DNA, 25 bp, Artificial
  Probe
tccagcaacagactcctgtttcagc

SEQ ID NO: 275913 - DNA, 25 bp, Artificial
  Probe
acaagccaaaagaacctgtgaccac

SEQ ID NO: 275914 - DNA, 25 bp, Artificial
  Probe
gaggatgcccacctgactcagtaca

SEQ ID NO: 275915 - DNA, 25 bp, Artificial
  Probe
gtccaggatggcaaggtcatctcat

SEQ ID NO: 275916 - DNA, 25 bp, Artificial
  Probe
gcgaggatgcccacctgactcagta

SEQ ID NO: 275917 - DNA, 25 bp, Artificial
  Probe
tccctgaggctgcagagaggcagct

SEQ ID NO: 275918 - DNA, 25 bp, Artificial
  Probe
ggcaaggtcatctcatcccgggagc

SEQ ID NO: 275919 - DNA, 25 bp, Artificial
  Probe
gcccagttccctgaggctgcagaga

SEQ ID NO: 275920 - DNA, 25 bp, Artificial
  Probe
gatggcaaggtcatctcatcccggg

SEQ ID NO: 275921 - DNA, 25 bp, Artificial
  Probe
tgactcagtacaagccaaaagaacc

SEQ ID NO: 275922 - DNA, 25 bp, Artificial
  Probe
agaggtccaggatggcaaggtcatc

SEQ ID NO: 275923 - DNA, 25 bp, Artificial
  Probe
tcagtacaagccaaaagaacctgtg

SEQ ID NO: 275924 - DNA, 25 bp, Artificial
  Probe
tgaggctgcagagaggcagctcccc

SEQ ID NO: 275925 - DNA, 25 bp, Artificial
  Probe
cgaggatgcccacctgactcagtac

SEQ ID NO: 275926 - DNA, 25 bp, Artificial
  Probe
agtacaagccaaaagaacctgtgac

SEQ ID NO: 275927 - DNA, 25 bp, Artificial
  Probe
aagaggtccaggatggcaaggtcat

SEQ ID NO: 275928 - DNA, 25 bp, Artificial
  Probe
gcagcgaggtgtctgagctccgcag

SEQ ID NO: 275929 - DNA, 25 bp, Artificial
  Probe
cagtacaagccaaaagaacctgtga

SEQ ID NO: 275930 - DNA, 25 bp, Artificial
  Probe
gtacaagccaaaagaacctgtgacc

SEQ ID NO: 275931 - DNA, 25 bp, Artificial
  Probe
ccagttccctgaggctgcagagagg

SEQ ID NO: 275932 - DNA, 25 bp, Artificial
  Probe
caaggtcatctcatcccgggagcag

SEQ ID NO: 275933 - DNA, 25 bp, Artificial
  Probe
ccctgaggctgcagagaggcagctc

SEQ ID NO: 275934 - DNA, 25 bp, Artificial
  Probe
tcatcccgggagcaggtccaccaga

SEQ ID NO: 275935 - DNA, 25 bp, Artificial
  Probe
atggcaaggtcatctcatcccggga

SEQ ID NO: 275936 - DNA, 25 bp, Artificial
  Probe
aacctgtgaccacccgccaggtgcg

SEQ ID NO: 275937 - DNA, 25 bp, Artificial
  Probe
ccattgtggaagaggtccaggatgg

SEQ ID NO: 275938 - DNA, 25 bp, Artificial
  Probe
tgcccagttccctgaggctgcagag

SEQ ID NO: 275939 - DNA, 25 bp, Artificial
  Probe
ttccctgaggctgcagagaggcagc

SEQ ID NO: 275940 - DNA, 25 bp, Artificial
  Probe
cctgactcagtacaagccaaaagaa

SEQ ID NO: 275941 - DNA, 25 bp, Artificial
  Probe
aaggtcatctcatcccgggagcagg

SEQ ID NO: 275942 - DNA, 25 bp, Artificial
  Probe
cgcagcgaggtgtctgagctccgca

SEQ ID NO: 275943 - DNA, 25 bp, Artificial
  Probe
ccagcaacagactcctgtttcagcc

SEQ ID NO: 275944 - DNA, 25 bp, Artificial
  Probe
acctgactcagtacaagccaaaaga

SEQ ID NO: 275945 - DNA, 25 bp, Artificial
  Probe
cccgggagcaggtccaccagaccac

SEQ ID NO: 275946 - DNA, 25 bp, Artificial
  Probe
ctgaggctgcagagaggcagctccc

SEQ ID NO: 275947 - DNA, 25 bp, Artificial
  Probe
cagcaacagactcctgtttcagcct

SEQ ID NO: 275948 - DNA, 25 bp, Artificial
  Probe
ctgactcagtacaagccaaaagaac

SEQ ID NO: 275949 - DNA, 25 bp, Artificial
  Probe
cctgaggctgcagagaggcagctcc

SEQ ID NO: 275950 - DNA, 25 bp, Artificial
  Probe
gcaaggtcatctcatcccgggagca

SEQ ID NO: 275951 - DNA, 25 bp, Artificial
  Probe
tacaagccaaaagaacctgtgacca

SEQ ID NO: 275952 - DNA, 25 bp, Artificial
  Probe
gttccctgaggctgcagagaggcag

SEQ ID NO: 275953 - DNA, 25 bp, Artificial
  Probe
aggatgcccacctgactcagtacaa

SEQ ID NO: 275954 - DNA, 25 bp, Artificial
  Probe
atgcccacctgactcagtacaagcc

SEQ ID NO: 275955 - DNA, 25 bp, Artificial
  Probe
caagccaaaagaacctgtgaccacc

SEQ ID NO: 275956 - DNA, 25 bp, Artificial
  Probe
cacctgactcagtacaagccaaaag

SEQ ID NO: 275957 - DNA, 25 bp, Artificial
  Probe
cagcacacagcatgtcccagaacat

SEQ ID NO: 275958 - DNA, 25 bp, Artificial
  Probe
ttgcatgtactgtatgttcagaggc

SEQ ID NO: 275959 - DNA, 25 bp, Artificial
  Probe
ttttgtgtctaatcgagacatttca

SEQ ID NO: 275960 - DNA, 25 bp, Artificial
  Probe
cactgttaggcgacagcacacagca

SEQ ID NO: 275961 - DNA, 25 bp, Artificial
  Probe
gtgtctaatcgagacatttcaattt

SEQ ID NO: 275962 - DNA, 25 bp, Artificial
  Probe
tcctaaaacttggatgatagaacct

SEQ ID NO: 275963 - DNA, 25 bp, Artificial
  Probe
tgtactgtatgttcagaggcaatca

SEQ ID NO: 275964 - DNA, 25 bp, Artificial
  Probe
cagcatgtcccagaacatttctgtg

SEQ ID NO: 275965 - DNA, 25 bp, Artificial
  Probe
atatggttttactgtgccttacatg

SEQ ID NO: 275966 - DNA, 25 bp, Artificial
  Probe
tgtgccttacatgaagagaaactat

SEQ ID NO: 275967 - DNA, 25 bp, Artificial
  Probe
gtcccagaacatttctgtgtttaat

SEQ ID NO: 275968 - DNA, 25 bp, Artificial
  Probe
agcatgtcccagaacatttctgtgt

SEQ ID NO: 275969 - DNA, 25 bp, Artificial
  Probe
ttttactgtgccttacatgaagaga

SEQ ID NO: 275970 - DNA, 25 bp, Artificial
  Probe
cagcctctactgcactgttaggcga

SEQ ID NO: 275971 - DNA, 25 bp, Artificial
  Probe
gaaacagcctctactgcactgttag

SEQ ID NO: 275972 - DNA, 25 bp, Artificial
  Probe
tatactcaatatggttttactgtgc

SEQ ID NO: 275973 - DNA, 25 bp, Artificial
  Probe
aggcgacagcacacagcatgtccca

SEQ ID NO: 275974 - DNA, 25 bp, Artificial
  Probe
cccaaccaaagagatctaaagtatg

SEQ ID NO: 275975 - DNA, 25 bp, Artificial
  Probe
ctgtgccttacatgaagagaaacta

SEQ ID NO: 275976 - DNA, 25 bp, Artificial
  Probe
attttgtgtctaatcgagacatttc

SEQ ID NO: 275977 - DNA, 25 bp, Artificial
  Probe
tatcgcatgtgactcttttgacttt

SEQ ID NO: 275978 - DNA, 25 bp, Artificial
  Probe
aattatatcgcatgtgactcttttg

SEQ ID NO: 275979 - DNA, 25 bp, Artificial
  Probe
atgttttacaagagccatttcaaag

SEQ ID NO: 275980 - DNA, 25 bp, Artificial
  Probe
tctactgcactgttaggcgacagca

SEQ ID NO: 275981 - DNA, 25 bp, Artificial
  Probe
tgttcagaggcaatcagttgtatac

SEQ ID NO: 275982 - DNA, 25 bp, Artificial
  Probe
gcacacagcatgtcccagaacattt

SEQ ID NO: 275983 - DNA, 25 bp, Artificial
  Probe
caaagtcttcctaaaacttggatga

SEQ ID NO: 275984 - DNA, 25 bp, Artificial
  Probe
gcaatcagttgtatactcaatatgg

SEQ ID NO: 275985 - DNA, 25 bp, Artificial
  Probe
gcatgtactgtatgttcagaggcaa

SEQ ID NO: 275986 - DNA, 25 bp, Artificial
  Probe
tactgcactgttaggcgacagcaca

SEQ ID NO: 275987 - DNA, 25 bp, Artificial
  Probe
catgtgactcttttgactttcaggg

SEQ ID NO: 275988 - DNA, 25 bp, Artificial
  Probe
gactcttttgactttcagggtttct

SEQ ID NO: 275989 - DNA, 25 bp, Artificial
  Probe
tcaaagtcttcctaaaacttggatg

SEQ ID NO: 275990 - DNA, 25 bp, Artificial
  Probe
actgtatgttcagaggcaatcagtt

SEQ ID NO: 275991 - DNA, 25 bp, Artificial
  Probe
tgtgtctaatcgagacatttcaatt

SEQ ID NO: 275992 - DNA, 25 bp, Artificial
  Probe
ggaaacagcctctactgcactgtta

SEQ ID NO: 275993 - DNA, 25 bp, Artificial
  Probe
ttcagaggcaatcagttgtatactc

SEQ ID NO: 275994 - DNA, 25 bp, Artificial
  Probe
aacagcctctactgcactgttaggc

SEQ ID NO: 275995 - DNA, 25 bp, Artificial
  Probe
ctcttttgactttcagggtttctca

SEQ ID NO: 275996 - DNA, 25 bp, Artificial
  Probe
tgggaaacagcctctactgcactgt

SEQ ID NO: 275997 - DNA, 25 bp, Artificial
  Probe
gttcagaggcaatcagttgtatact

SEQ ID NO: 275998 - DNA, 25 bp, Artificial
  Probe
tcttttgactttcagggtttctcaa

SEQ ID NO: 275999 - DNA, 25 bp, Artificial
  Probe
cgagacatttcaatttcattagatg

SEQ ID NO: 276000 - DNA, 25 bp, Artificial
  Probe
atggttttactgtgccttacatgaa

SEQ ID NO: 276001 - DNA, 25 bp, Artificial
  Probe
catgtcccagaacatttctgtgttt

SEQ ID NO: 276002 - DNA, 25 bp, Artificial
  Probe
caatcagttgtatactcaatatggt

SEQ ID NO: 276003 - DNA, 25 bp, Artificial
  Probe
aagatcattcgaaaagtcgtccgac

SEQ ID NO: 276004 - DNA, 25 bp, Artificial
  Probe
ccacacttcgtggaccagaactact

SEQ ID NO: 276005 - DNA, 25 bp, Artificial
  Probe
cttcatactcctcaaggaaagatgg

SEQ ID NO: 276006 - DNA, 25 bp, Artificial
  Probe
tcacagacgaacagggcaacattgt

SEQ ID NO: 276007 - DNA, 25 bp, Artificial
  Probe
tggactcctctggtgccatcgacac

SEQ ID NO: 276008 - DNA, 25 bp, Artificial
  Probe
caaacagtgacctctcctcaagtag

SEQ ID NO: 276009 - DNA, 25 bp, Artificial
  Probe
caggcccacacttcgtggaccagaa

SEQ ID NO: 276010 - DNA, 25 bp, Artificial
  Probe
aacagggcaacattgtcaccaagaa

SEQ ID NO: 276011 - DNA, 25 bp, Artificial
  Probe
gcccacacttcgtggaccagaacta

SEQ ID NO: 276012 - DNA, 25 bp, Artificial
  Probe
acaattcacagacgaacagggcaac

SEQ ID NO: 276013 - DNA, 25 bp, Artificial
  Probe
tcctgagaagcatcttagagtaaaa

SEQ ID NO: 276014 - DNA, 25 bp, Artificial
  Probe
ctactgtgaatcctgagaagcatct

SEQ ID NO: 276015 - DNA, 25 bp, Artificial
  Probe
ggaacaattcacagacgaacagggc

SEQ ID NO: 276016 - DNA, 25 bp, Artificial
  Probe
aacagtgacctctcctcaagtagcc

SEQ ID NO: 276017 - DNA, 25 bp, Artificial
  Probe
cgacacccagcagcacgaggaggtg

SEQ ID NO: 276018 - DNA, 25 bp, Artificial
  Probe
cagcttcatactcctcaaggaaaga

SEQ ID NO: 276019 - DNA, 25 bp, Artificial
  Probe
agatcattcgaaaagtcgtccgaca

SEQ ID NO: 276020 - DNA, 25 bp, Artificial
  Probe
ccccaaattgtatgacgttaagtca

SEQ ID NO: 276021 - DNA, 25 bp, Artificial
  Probe
cacacttcgtggaccagaactactg

SEQ ID NO: 276022 - DNA, 25 bp, Artificial
  Probe
gtgaatcctgagaagcatcttagag

SEQ ID NO: 276023 - DNA, 25 bp, Artificial
  Probe
gggcaaacagtgacctctcctcaag

SEQ ID NO: 276024 - DNA, 25 bp, Artificial
  Probe
atcgacacccagcagcacgaggagg

SEQ ID NO: 276025 - DNA, 25 bp, Artificial
  Probe
gactccagccggacctgatagaagg

SEQ ID NO: 276026 - DNA, 25 bp, Artificial
  Probe
tcattcgaaaagtcgtccgacaggt

SEQ ID NO: 276027 - DNA, 25 bp, Artificial
  Probe
actagccttggaatccagattcaag

SEQ ID NO: 276028 - DNA, 25 bp, Artificial
  Probe
gcaacattgtcaccaagaagatcat

SEQ ID NO: 276029 - DNA, 25 bp, Artificial
  Probe
agccggacctgatagaaggcaggaa

SEQ ID NO: 276030 - DNA, 25 bp, Artificial
  Probe
acattgtcaccaagaagatcattcg

SEQ ID NO: 276031 - DNA, 25 bp, Artificial
  Probe
accagaactactgtgaatcctgaga

SEQ ID NO: 276032 - DNA, 25 bp, Artificial
  Probe
ccttggaatccagattcaagactcc

SEQ ID NO: 276033 - DNA, 25 bp, Artificial
  Probe
ttcgaaaagtcgtccgacaggtgga

SEQ ID NO: 276034 - DNA, 25 bp, Artificial
  Probe
cgtccgacaggtggactcctctggt

SEQ ID NO: 276035 - DNA, 25 bp, Artificial
  Probe
catactcctcaaggaaagatggaaa

SEQ ID NO: 276036 - DNA, 25 bp, Artificial
  Probe
aaagtcgtccgacaggtggactcct

SEQ ID NO: 276037 - DNA, 25 bp, Artificial
  Probe
ccagcttcatactcctcaaggaaag

SEQ ID NO: 276038 - DNA, 25 bp, Artificial
  Probe
caccaagaagatcattcgaaaagtc

SEQ ID NO: 276039 - DNA, 25 bp, Artificial
  Probe
aaactagccttggaatccagattca

SEQ ID NO: 276040 - DNA, 25 bp, Artificial
  Probe
catccccaaattgtatgacgttaag

SEQ ID NO: 276041 - DNA, 25 bp, Artificial
  Probe
actgtgaatcctgagaagcatctta

SEQ ID NO: 276042 - DNA, 25 bp, Artificial
  Probe
ggagcagtgactcagtcttcgctaa

SEQ ID NO: 276043 - DNA, 25 bp, Artificial
  Probe
gaacaattcacagacgaacagggca

SEQ ID NO: 276044 - DNA, 25 bp, Artificial
  Probe
tggaatccagattcaagactcctcc

SEQ ID NO: 276045 - DNA, 25 bp, Artificial
  Probe
gtgactcagtcttcgctaatcccag

SEQ ID NO: 276046 - DNA, 25 bp, Artificial
  Probe
ggctcaaatagtgaagcgggccagc

SEQ ID NO: 276047 - DNA, 25 bp, Artificial
  Probe
atcattcgaaaagtcgtccgacagg

SEQ ID NO: 276048 - DNA, 25 bp, Artificial
  Probe
ggagtggactccagccggacctgat

SEQ ID NO: 276049 - DNA, 25 bp, Artificial
  Probe
attctgtgggttaatgcaccagact

SEQ ID NO: 276050 - DNA, 25 bp, Artificial
  Probe
gattcttactctctaacgttcttgg

SEQ ID NO: 276051 - DNA, 25 bp, Artificial
  Probe
tcctaaccgcgtagcataatgccac

SEQ ID NO: 276052 - DNA, 25 bp, Artificial
  Probe
ggtggacacagcttaaatcacaaac

SEQ ID NO: 276053 - DNA, 25 bp, Artificial
  Probe
aaggacattacctgaggtgtcttgt

SEQ ID NO: 276054 - DNA, 25 bp, Artificial
  Probe
ctcctaaccgcgtagcataatgcca

SEQ ID NO: 276055 - DNA, 25 bp, Artificial
  Probe
acccaagagaaaagccattacgtgt

SEQ ID NO: 276056 - DNA, 25 bp, Artificial
  Probe
tgggttaatgcaccagacttaccag

SEQ ID NO: 276057 - DNA, 25 bp, Artificial
  Probe
ctgtgggttaatgcaccagacttac

SEQ ID NO: 276058 - DNA, 25 bp, Artificial
  Probe
tgcaatgttaatacccaagagaaaa

SEQ ID NO: 276059 - DNA, 25 bp, Artificial
  Probe
caaagacgtgtgcagtctacgctgc

SEQ ID NO: 276060 - DNA, 25 bp, Artificial
  Probe
cgcgtagcataatgccaccaattca

SEQ ID NO: 276061 - DNA, 25 bp, Artificial
  Probe
gttaatacccaagagaaaagccatt

SEQ ID NO: 276062 - DNA, 25 bp, Artificial
  Probe
ggtcacatttatttgcctcttcgtt

SEQ ID NO: 276063 - DNA, 25 bp, Artificial
  Probe
gccagggtggacacagcttaaatca

SEQ ID NO: 276064 - DNA, 25 bp, Artificial
  Probe
aatacccaagagaaaagccattacg

SEQ ID NO: 276065 - DNA, 25 bp, Artificial
  Probe
cctcttcgttttgatggtggtttga

SEQ ID NO: 276066 - DNA, 25 bp, Artificial
  Probe
atgatttggtcacatttatttgcct

SEQ ID NO: 276067 - DNA, 25 bp, Artificial
  Probe
cttgtgcagtagtaacaaggacatt

SEQ ID NO: 276068 - DNA, 25 bp, Artificial
  Probe
gcataatgccaccaattcatggggc

SEQ ID NO: 276069 - DNA, 25 bp, Artificial
  Probe
tctcctaatgaagttagtaaacttg

SEQ ID NO: 276070 - DNA, 25 bp, Artificial
  Probe
tacaaagacgtgtgcagtctacgct

SEQ ID NO: 276071 - DNA, 25 bp, Artificial
  Probe
agtaacaaggacattacctgaggtg

SEQ ID NO: 276072 - DNA, 25 bp, Artificial
  Probe
aaacttgtgcagtagtaacaaggac

SEQ ID NO: 276073 - DNA, 25 bp, Artificial
  Probe
gatttggtcacatttatttgcctct

SEQ ID NO: 276074 - DNA, 25 bp, Artificial
  Probe
aagagaaaagccattacgtgtatgc

SEQ ID NO: 276075 - DNA, 25 bp, Artificial
  Probe
acgtgtgcagtctacgctgcctcct

SEQ ID NO: 276076 - DNA, 25 bp, Artificial
  Probe
atgttaatacccaagagaaaagcca

SEQ ID NO: 276077 - DNA, 25 bp, Artificial
  Probe
aagtacaaagacgtgtgcagtctac

SEQ ID NO: 276078 - DNA, 25 bp, Artificial
  Probe
acaaggacattacctgaggtgtctt

SEQ ID NO: 276079 - DNA, 25 bp, Artificial
  Probe
cgtttcaaatgatttggtcacattt

SEQ ID NO: 276080 - DNA, 25 bp, Artificial
  Probe
ttggtcacatttatttgcctcttcg

SEQ ID NO: 276081 - DNA, 25 bp, Artificial
  Probe
gaattctgtgggttaatgcaccaga

SEQ ID NO: 276082 - DNA, 25 bp, Artificial
  Probe
gtttagccagggtggacacagctta

SEQ ID NO: 276083 - DNA, 25 bp, Artificial
  Probe
aaagccattacgtgtatgctggtca

SEQ ID NO: 276084 - DNA, 25 bp, Artificial
  Probe
ctctctaacgttcttggtcctattg

SEQ ID NO: 276085 - DNA, 25 bp, Artificial
  Probe
tgaattgtcactgaagaagcaagct

SEQ ID NO: 276086 - DNA, 25 bp, Artificial
  Probe
tactgcaatgttaatacccaagaga

SEQ ID NO: 276087 - DNA, 25 bp, Artificial
  Probe
ggtcctattgaaacatttcagtatc

SEQ ID NO: 276088 - DNA, 25 bp, Artificial
  Probe
taacgttcttggtcctattgaaaca

SEQ ID NO: 276089 - DNA, 25 bp, Artificial
  Probe
tagcataatgccaccaattcatggg

SEQ ID NO: 276090 - DNA, 25 bp, Artificial
  Probe
ttcctcgtttcaaatgatttggtca

SEQ ID NO: 276091 - DNA, 25 bp, Artificial
  Probe
gtggacacagcttaaatcacaaact

SEQ ID NO: 276092 - DNA, 25 bp, Artificial
  Probe
cattacctgaggtgtcttgtatgat

SEQ ID NO: 276093 - DNA, 25 bp, Artificial
  Probe
atttgcctcttcgttttgatggtgg

SEQ ID NO: 276094 - DNA, 25 bp, Artificial
  Probe
gcaccagacttaccagtgtccattt

SEQ ID NO: 276095 - DNA, 25 bp, Artificial
  Probe
ccggccgaagtgtccttgtgggtat

SEQ ID NO: 276096 - DNA, 25 bp, Artificial
  Probe
cagggatgatgtccctttgattttc

SEQ ID NO: 276097 - DNA, 25 bp, Artificial
  Probe
gggatgatgtccctttgattttctt

SEQ ID NO: 276098 - DNA, 25 bp, Artificial
  Probe
tcttctgttccacagaattgtggtc

SEQ ID NO: 276099 - DNA, 25 bp, Artificial
  Probe
ggatgatgtccctttgattttcttc

SEQ ID NO: 276100 - DNA, 25 bp, Artificial
  Probe
tgttccacagaattgtggtctgtct

SEQ ID NO: 276101 - DNA, 25 bp, Artificial
  Probe
gtgtccttgtgggtatttccacagc

SEQ ID NO: 276102 - DNA, 25 bp, Artificial
  Probe
agggatgatgtccctttgattttct

SEQ ID NO: 276103 - DNA, 25 bp, Artificial
  Probe
ttcttctgttccacagaattgtggt

SEQ ID NO: 276104 - DNA, 25 bp, Artificial
  Probe
cggccgaagtgtccttgtgggtatt

SEQ ID NO: 276105 - DNA, 25 bp, Artificial
  Probe
tgtgggtatttccacagctcggctg

SEQ ID NO: 276106 - DNA, 25 bp, Artificial
  Probe
gctcagaccagctgttaatcttctc

SEQ ID NO: 276107 - DNA, 25 bp, Artificial
  Probe
ccttgtgggtatttccacagctcgg

SEQ ID NO: 276108 - DNA, 25 bp, Artificial
  Probe
aagtgtccttgtgggtatttccaca

SEQ ID NO: 276109 - DNA, 25 bp, Artificial
  Probe
ccggccggccgaagtgtccttgtgg

SEQ ID NO: 276110 - DNA, 25 bp, Artificial
  Probe
cgaagtgtccttgtgggtatttcca

SEQ ID NO: 276111 - DNA, 25 bp, Artificial
  Probe
tttcttctgttccacagaattgtgg

SEQ ID NO: 276112 - DNA, 25 bp, Artificial
  Probe
cacagaattgtggtctgtcttgagg

SEQ ID NO: 276113 - DNA, 25 bp, Artificial
  Probe
gaagtgtccttgtgggtatttccac

SEQ ID NO: 276114 - DNA, 25 bp, Artificial
  Probe
tcagaccagctgttaatcttctcct

SEQ ID NO: 276115 - DNA, 25 bp, Artificial
  Probe
ttgtgggtatttccacagctcggct

SEQ ID NO: 276116 - DNA, 25 bp, Artificial
  Probe
tccacagaattgtggtctgtcttga

SEQ ID NO: 276117 - DNA, 25 bp, Artificial
  Probe
agaccagctgttaatcttctcctca

SEQ ID NO: 276118 - DNA, 25 bp, Artificial
  Probe
ggccgaagtgtccttgtgggtattt

SEQ ID NO: 276119 - DNA, 25 bp, Artificial
  Probe
ttttcttctgttccacagaattgtg

SEQ ID NO: 276120 - DNA, 25 bp, Artificial
  Probe
gtccttgtgggtatttccacagctc

SEQ ID NO: 276121 - DNA, 25 bp, Artificial
  Probe
ttctgttccacagaattgtggtctg

SEQ ID NO: 276122 - DNA, 25 bp, Artificial
  Probe
cttctgttccacagaattgtggtct

SEQ ID NO: 276123 - DNA, 25 bp, Artificial
  Probe
tgattttcttctgttccacagaatt

SEQ ID NO: 276124 - DNA, 25 bp, Artificial
  Probe
ccacagaattgtggtctgtcttgag

SEQ ID NO: 276125 - DNA, 25 bp, Artificial
  Probe
gccggccgaagtgtccttgtgggta

SEQ ID NO: 276126 - DNA, 25 bp, Artificial
  Probe
gatgatgtccctttgattttcttct

SEQ ID NO: 276127 - DNA, 25 bp, Artificial
  Probe
tccttgtgggtatttccacagctcg

SEQ ID NO: 276128 - DNA, 25 bp, Artificial
  Probe
ggctcagaccagctgttaatcttct

SEQ ID NO: 276129 - DNA, 25 bp, Artificial
  Probe
ctgttccacagaattgtggtctgtc

SEQ ID NO: 276130 - DNA, 25 bp, Artificial
  Probe
gttccacagaattgtggtctgtctt

SEQ ID NO: 276131 - DNA, 25 bp, Artificial
  Probe
tgtccttgtgggtatttccacagct

SEQ ID NO: 276132 - DNA, 25 bp, Artificial
  Probe
agcagggatgatgtccctttgattt

SEQ ID NO: 276133 - DNA, 25 bp, Artificial
  Probe
ttccacagaattgtggtctgtcttg

SEQ ID NO: 276134 - DNA, 25 bp, Artificial
  Probe
gccgaagtgtccttgtgggtatttc

SEQ ID NO: 276135 - DNA, 25 bp, Artificial
  Probe
gttaatcttctcctcacagcctacg

SEQ ID NO: 276136 - DNA, 25 bp, Artificial
  Probe
gattttcttctgttccacagaattg

SEQ ID NO: 276137 - DNA, 25 bp, Artificial
  Probe
cttgtgggtatttccacagctcggc

SEQ ID NO: 276138 - DNA, 25 bp, Artificial
  Probe
tctgttccacagaattgtggtctgt

SEQ ID NO: 276139 - DNA, 25 bp, Artificial
  Probe
acagaattgtggtctgtcttgaggt

SEQ ID NO: 276140 - DNA, 25 bp, Artificial
  Probe
attttcttctgttccacagaattgt

SEQ ID NO: 276141 - DNA, 25 bp, Artificial
  Probe
gctcagcagtaatgaccccatctgt

SEQ ID NO: 276142 - DNA, 25 bp, Artificial
  Probe
acactgtcgtgaaggaccaggctcg

SEQ ID NO: 276143 - DNA, 25 bp, Artificial
  Probe
acacctgtcagtagcgccaatatga

SEQ ID NO: 276144 - DNA, 25 bp, Artificial
  Probe
ttgggcagacactcccgtaagcgat

SEQ ID NO: 276145 - DNA, 25 bp, Artificial
  Probe
tccttaatgcagcttgcgcctggtt

SEQ ID NO: 276146 - DNA, 25 bp, Artificial
  Probe
cgtgattgctgctgccaactcactt

SEQ ID NO: 276147 - DNA, 25 bp, Artificial
  Probe
tgtccacagtgaaaaccagcacctt

SEQ ID NO: 276148 - DNA, 25 bp, Artificial
  Probe
tcccgtaagcgatgggaacgctttg

SEQ ID NO: 276149 - DNA, 25 bp, Artificial
  Probe
ccatctgtcttctgatgcctgggca

SEQ ID NO: 276150 - DNA, 25 bp, Artificial
  Probe
tcagcagtaatgaccccatctgtct

SEQ ID NO: 276151 - DNA, 25 bp, Artificial
  Probe
gcagcacacctgtcagtagcgccaa

SEQ ID NO: 276152 - DNA, 25 bp, Artificial
  Probe
ttacttctacactgtcgtgaaggac

SEQ ID NO: 276153 - DNA, 25 bp, Artificial
  Probe
tcacccgtgattgctgctgccaact

SEQ ID NO: 276154 - DNA, 25 bp, Artificial
  Probe
ccgtgattgctgctgccaactcact

SEQ ID NO: 276155 - DNA, 25 bp, Artificial
  Probe
tcagggatttcttcagtgccaaccc

SEQ ID NO: 276156 - DNA, 25 bp, Artificial
  Probe
tcaacgatatcttgggcagacactc

SEQ ID NO: 276157 - DNA, 25 bp, Artificial
  Probe
cagacactcccgtaagcgatgggaa

SEQ ID NO: 276158 - DNA, 25 bp, Artificial
  Probe
gacactcccgtaagcgatgggaacg

SEQ ID NO: 276159 - DNA, 25 bp, Artificial
  Probe
tcgtgaaggaccaggctcgaatgag

SEQ ID NO: 276160 - DNA, 25 bp, Artificial
  Probe
atgaccccatctgtcttctgatgcc

SEQ ID NO: 276161 - DNA, 25 bp, Artificial
  Probe
gcacacctgtcagtagcgccaatat

SEQ ID NO: 276162 - DNA, 25 bp, Artificial
  Probe
gaccaggctcgaatgagttcggctg

SEQ ID NO: 276163 - DNA, 25 bp, Artificial
  Probe
tgggaacgctttgtccacagtgaaa

SEQ ID NO: 276164 - DNA, 25 bp, Artificial
  Probe
ggggcagcacacctgtcagtagcgc

SEQ ID NO: 276165 - DNA, 25 bp, Artificial
  Probe
cgccaatatgatgtcagggatttct

SEQ ID NO: 276166 - DNA, 25 bp, Artificial
  Probe
agtaatgaccccatctgtcttctga

SEQ ID NO: 276167 - DNA, 25 bp, Artificial
  Probe
aggctcacccgtgattgctgctgcc

SEQ ID NO: 276168 - DNA, 25 bp, Artificial
  Probe
ctgctgccaactcacttgggatacc

SEQ ID NO: 276169 - DNA, 25 bp, Artificial
  Probe
aggctcgaatgagttcggctggcat

SEQ ID NO: 276170 - DNA, 25 bp, Artificial
  Probe
caggctcgaatgagttcggctggca

SEQ ID NO: 276171 - DNA, 25 bp, Artificial
  Probe
taagcgatgggaacgctttgtccac

SEQ ID NO: 276172 - DNA, 25 bp, Artificial
  Probe
ttctacactgtcgtgaaggaccagg

SEQ ID NO: 276173 - DNA, 25 bp, Artificial
  Probe
cctctggcaggctcacccgtgattg

SEQ ID NO: 276174 - DNA, 25 bp, Artificial
  Probe
attgctgctgccaactcacttggga

SEQ ID NO: 276175 - DNA, 25 bp, Artificial
  Probe
atgatgtcagggatttcttcagtgc

SEQ ID NO: 276176 - DNA, 25 bp, Artificial
  Probe
gggacctctggcaggctcacccgtg

SEQ ID NO: 276177 - DNA, 25 bp, Artificial
  Probe
gatatcttgggcagacactcccgta

SEQ ID NO: 276178 - DNA, 25 bp, Artificial
  Probe
tctggcaggctcacccgtgattgct

SEQ ID NO: 276179 - DNA, 25 bp, Artificial
  Probe
gtcagtagcgccaatatgatgtcag

SEQ ID NO: 276180 - DNA, 25 bp, Artificial
  Probe
cgatgggaacgctttgtccacagtg

SEQ ID NO: 276181 - DNA, 25 bp, Artificial
  Probe
ggattttctggacaagctgctgcga

SEQ ID NO: 276182 - DNA, 25 bp, Artificial
  Probe
gctcacccgtgattgctgctgccaa

SEQ ID NO: 276183 - DNA, 25 bp, Artificial
  Probe
gtccacagtgaaaaccagcaccttg

SEQ ID NO: 276184 - DNA, 25 bp, Artificial
  Probe
acccgtgattgctgctgccaactca

SEQ ID NO: 276185 - DNA, 25 bp, Artificial
  Probe
gaaggaccaggctcgaatgagttcg

SEQ ID NO: 276186 - DNA, 25 bp, Artificial
  Probe
ctcccgtaagcgatgggaacgcttt

SEQ ID NO: 276187 - DNA, 25 bp, Artificial
  Probe
gagggtacaggcaccggactaccag

SEQ ID NO: 276188 - DNA, 25 bp, Artificial
  Probe
accacagaggcatgaactctgtctc

SEQ ID NO: 276189 - DNA, 25 bp, Artificial
  Probe
ttcctctcatacctgtcagggagcc

SEQ ID NO: 276190 - DNA, 25 bp, Artificial
  Probe
tctgtctcgagatgctgcagatatg

SEQ ID NO: 276191 - DNA, 25 bp, Artificial
  Probe
tagatcaggagatccctgttttagt

SEQ ID NO: 276192 - DNA, 25 bp, Artificial
  Probe
ctgtagatcaggagatccctgtttt

SEQ ID NO: 276193 - DNA, 25 bp, Artificial
  Probe
ccagtcataggcaggttcattcagg

SEQ ID NO: 276194 - DNA, 25 bp, Artificial
  Probe
gagagataccacctctctatacacg

SEQ ID NO: 276195 - DNA, 25 bp, Artificial
  Probe
taccacagaggcatgaactctgtct

SEQ ID NO: 276196 - DNA, 25 bp, Artificial
  Probe
aggcaccggactaccagtcataggc

SEQ ID NO: 276197 - DNA, 25 bp, Artificial
  Probe
gatatggatgccttcctctcatacc

SEQ ID NO: 276198 - DNA, 25 bp, Artificial
  Probe
acaggcaccggactaccagtcatag

SEQ ID NO: 276199 - DNA, 25 bp, Artificial
  Probe
caaagctgtagatcaggagatccct

SEQ ID NO: 276200 - DNA, 25 bp, Artificial
  Probe
tatggatgccttcctctcatacctg

SEQ ID NO: 276201 - DNA, 25 bp, Artificial
  Probe
ctctcatacctgtcagggagcctct

SEQ ID NO: 276202 - DNA, 25 bp, Artificial
  Probe
cgagatgctgcagatatggatgcct

SEQ ID NO: 276203 - DNA, 25 bp, Artificial
  Probe
gtcataggcaggttcattcaggtat

SEQ ID NO: 276204 - DNA, 25 bp, Artificial
  Probe
accggactaccagtcataggcaggt

SEQ ID NO: 276205 - DNA, 25 bp, Artificial
  Probe
agtgtggttttcacctctgctcggg

SEQ ID NO: 276206 - DNA, 25 bp, Artificial
  Probe
ggcatgaactctgtctcgagatgct

SEQ ID NO: 276207 - DNA, 25 bp, Artificial
  Probe
actctgtctcgagatgctgcagata

SEQ ID NO: 276208 - DNA, 25 bp, Artificial
  Probe
gcatgaactctgtctcgagatgctg

SEQ ID NO: 276209 - DNA, 25 bp, Artificial
  Probe
cggactaccagtcataggcaggttc

SEQ ID NO: 276210 - DNA, 25 bp, Artificial
  Probe
agaggcatgaactctgtctcgagat

SEQ ID NO: 276211 - DNA, 25 bp, Artificial
  Probe
actaccagtcataggcaggttcatt

SEQ ID NO: 276212 - DNA, 25 bp, Artificial
  Probe
tggatgccttcctctcatacctgtc

SEQ ID NO: 276213 - DNA, 25 bp, Artificial
  Probe
tcctctcatacctgtcagggagcct

SEQ ID NO: 276214 - DNA, 25 bp, Artificial
  Probe
aaagtgtggttttcacctctgctcg

SEQ ID NO: 276215 - DNA, 25 bp, Artificial
  Probe
ttccctctaggaaaaaagggctgct

SEQ ID NO: 276216 - DNA, 25 bp, Artificial
  Probe
caccggactaccagtcataggcagg

SEQ ID NO: 276217 - DNA, 25 bp, Artificial
  Probe
tcaaagctgtagatcaggagatccc

SEQ ID NO: 276218 - DNA, 25 bp, Artificial
  Probe
gaggcatgaactctgtctcgagatg

SEQ ID NO: 276219 - DNA, 25 bp, Artificial
  Probe
gactaccagtcataggcaggttcat

SEQ ID NO: 276220 - DNA, 25 bp, Artificial
  Probe
cacagaggcatgaactctgtctcga

SEQ ID NO: 276221 - DNA, 25 bp, Artificial
  Probe
gtagatcaggagatccctgttttag

SEQ ID NO: 276222 - DNA, 25 bp, Artificial
  Probe
gttcattcaggtatagagagatacc

SEQ ID NO: 276223 - DNA, 25 bp, Artificial
  Probe
ggactaccagtcataggcaggttca

SEQ ID NO: 276224 - DNA, 25 bp, Artificial
  Probe
cataggcaggttcattcaggtatag

SEQ ID NO: 276225 - DNA, 25 bp, Artificial
  Probe
ccttcctctcatacctgtcagggag

SEQ ID NO: 276226 - DNA, 25 bp, Artificial
  Probe
tgccttcctctcatacctgtcaggg

SEQ ID NO: 276227 - DNA, 25 bp, Artificial
  Probe
agatgctgcagatatggatgccttc

SEQ ID NO: 276228 - DNA, 25 bp, Artificial
  Probe
ctcgagatgctgcagatatggatgc

SEQ ID NO: 276229 - DNA, 25 bp, Artificial
  Probe
tacaggcaccggactaccagtcata

SEQ ID NO: 276230 - DNA, 25 bp, Artificial
  Probe
ttcattcaggtatagagagatacca

SEQ ID NO: 276231 - DNA, 25 bp, Artificial
  Probe
tgtctcgagatgctgcagatatgga

SEQ ID NO: 276232 - DNA, 25 bp, Artificial
  Probe
atgaactctgtctcgagatgctgca

SEQ ID NO: 276233 - DNA, 25 bp, Artificial
  Probe
tactacgatgccattgcctgcctca

SEQ ID NO: 276234 - DNA, 25 bp, Artificial
  Probe
caagtactacgatgccattgcctgc

SEQ ID NO: 276235 - DNA, 25 bp, Artificial
  Probe
gatgccattgcctgcctcaagaacc

SEQ ID NO: 276236 - DNA, 25 bp, Artificial
  Probe
tgcctcaagaacctgcagatgaagg

SEQ ID NO: 276237 - DNA, 25 bp, Artificial
  Probe
tggacttgcagatcacaccactgct

SEQ ID NO: 276238 - DNA, 25 bp, Artificial
  Probe
gaggctgctcccaagtactacgatg

SEQ ID NO: 276239 - DNA, 25 bp, Artificial
  Probe
tgcctgcctcaagaacctgcagatg

SEQ ID NO: 276240 - DNA, 25 bp, Artificial
  Probe
gactggatccagttggacttgcaga

SEQ ID NO: 276241 - DNA, 25 bp, Artificial
  Probe
actacgatgccattgcctgcctcaa

SEQ ID NO: 276242 - DNA, 25 bp, Artificial
  Probe
tcaagaacctgcagatgaaggagca

SEQ ID NO: 276243 - DNA, 25 bp, Artificial
  Probe
cacccgactggatccagttggactt

SEQ ID NO: 276244 - DNA, 25 bp, Artificial
  Probe
gaacctgcagatgaaggagcagcct

SEQ ID NO: 276245 - DNA, 25 bp, Artificial
  Probe
aaggagcagcctggatcacccgact

SEQ ID NO: 276246 - DNA, 25 bp, Artificial
  Probe
tgaaggaggctgctcccaagtacta

SEQ ID NO: 276247 - DNA, 25 bp, Artificial
  Probe
ggagcagcctggatcacccgactgg

SEQ ID NO: 276248 - DNA, 25 bp, Artificial
  Probe
tcccaagtactacgatgccattgcc

SEQ ID NO: 276249 - DNA, 25 bp, Artificial
  Probe
gttggacttgcagatcacaccactg

SEQ ID NO: 276250 - DNA, 25 bp, Artificial
  Probe
ccgactggatccagttggacttgca

SEQ ID NO: 276251 - DNA, 25 bp, Artificial
  Probe
gcagcctggatcacccgactggatc

SEQ ID NO: 276252 - DNA, 25 bp, Artificial
  Probe
cccgactggatccagttggacttgc

SEQ ID NO: 276253 - DNA, 25 bp, Artificial
  Probe
aggctgctcccaagtactacgatgc

SEQ ID NO: 276254 - DNA, 25 bp, Artificial
  Probe
cagttggacttgcagatcacaccac

SEQ ID NO: 276255 - DNA, 25 bp, Artificial
  Probe
agatgaaggagcagcctggatcacc

SEQ ID NO: 276256 - DNA, 25 bp, Artificial
  Probe
gcctgcctcaagaacctgcagatga

SEQ ID NO: 276257 - DNA, 25 bp, Artificial
  Probe
tcacccgactggatccagttggact

SEQ ID NO: 276258 - DNA, 25 bp, Artificial
  Probe
atcacccgactggatccagttggac

SEQ ID NO: 276259 - DNA, 25 bp, Artificial
  Probe
actgctactcaactattgccagtgc

SEQ ID NO: 276260 - DNA, 25 bp, Artificial
  Probe
ctacgatgccattgcctgcctcaag

SEQ ID NO: 276261 - DNA, 25 bp, Artificial
  Probe
ctgctcccaagtactacgatgccat

SEQ ID NO: 276262 - DNA, 25 bp, Artificial
  Probe
gacttgcagatcacaccactgctac

SEQ ID NO: 276263 - DNA, 25 bp, Artificial
  Probe
atccagttggacttgcagatcacac

SEQ ID NO: 276264 - DNA, 25 bp, Artificial
  Probe
cagatgaaggagcagcctggatcac

SEQ ID NO: 276265 - DNA, 25 bp, Artificial
  Probe
ttgcctgcctcaagaacctgcagat

SEQ ID NO: 276266 - DNA, 25 bp, Artificial
  Probe
tggatcacccgactggatccagttg

SEQ ID NO: 276267 - DNA, 25 bp, Artificial
  Probe
ggacttgcagatcacaccactgcta

SEQ ID NO: 276268 - DNA, 25 bp, Artificial
  Probe
gcctcaagaacctgcagatgaagga

SEQ ID NO: 276269 - DNA, 25 bp, Artificial
  Probe
gtgaaggaggctgctcccaagtact

SEQ ID NO: 276270 - DNA, 25 bp, Artificial
  Probe
ccagttggacttgcagatcacacca

SEQ ID NO: 276271 - DNA, 25 bp, Artificial
  Probe
cctcaagaacctgcagatgaaggag

SEQ ID NO: 276272 - DNA, 25 bp, Artificial
  Probe
cattgcctgcctcaagaacctgcag

SEQ ID NO: 276273 - DNA, 25 bp, Artificial
  Probe
agcagcctggatcacccgactggat

SEQ ID NO: 276274 - DNA, 25 bp, Artificial
  Probe
gatccagttggacttgcagatcaca

SEQ ID NO: 276275 - DNA, 25 bp, Artificial
  Probe
gctactcaactattgccagtgcaag

SEQ ID NO: 276276 - DNA, 25 bp, Artificial
  Probe
ctcccaagtactacgatgccattgc

SEQ ID NO: 276277 - DNA, 25 bp, Artificial
  Probe
ctggatccagttggacttgcagatc

SEQ ID NO: 276278 - DNA, 25 bp, Artificial
  Probe
cccaagtactacgatgccattgcct

SEQ ID NO: 276279 - DNA, 25 bp, Artificial
  Probe
tggcaagctttagggtgctattggg

SEQ ID NO: 276280 - DNA, 25 bp, Artificial
  Probe
tgctattggggctagggcaccttgc

SEQ ID NO: 276281 - DNA, 25 bp, Artificial
  Probe
cttgcttgcctaggtacttgttatt

SEQ ID NO: 276282 - DNA, 25 bp, Artificial
  Probe
aggtacttgttattaacaggagtgg

SEQ ID NO: 276283 - DNA, 25 bp, Artificial
  Probe
caagctttagggtgctattggggct

SEQ ID NO: 276284 - DNA, 25 bp, Artificial
  Probe
gacatagtactagaggccaaagggg

SEQ ID NO: 276285 - DNA, 25 bp, Artificial
  Probe
taggctggcaagctttagggtgcta

SEQ ID NO: 276286 - DNA, 25 bp, Artificial
  Probe
acatagtactagaggccaaaggggt

SEQ ID NO: 276287 - DNA, 25 bp, Artificial
  Probe
tagtgggtgggataggctggcaagc

SEQ ID NO: 276288 - DNA, 25 bp, Artificial
  Probe
ttattaacaggagtggggaaccaag

SEQ ID NO: 276289 - DNA, 25 bp, Artificial
  Probe
caccttgcttgcctaggtacttgtt

SEQ ID NO: 276290 - DNA, 25 bp, Artificial
  Probe
gataggctggcaagctttagggtgc

SEQ ID NO: 276291 - DNA, 25 bp, Artificial
  Probe
ggaaccaagtgcttggggacatagt

SEQ ID NO: 276292 - DNA, 25 bp, Artificial
  Probe
gctagggcaccttgcttgcctaggt

SEQ ID NO: 276293 - DNA, 25 bp, Artificial
  Probe
ggataggctggcaagctttagggtg

SEQ ID NO: 276294 - DNA, 25 bp, Artificial
  Probe
accttgcttgcctaggtacttgtta

SEQ ID NO: 276295 - DNA, 25 bp, Artificial
  Probe
gctggcaagctttagggtgctattg

SEQ ID NO: 276296 - DNA, 25 bp, Artificial
  Probe
catagtactagaggccaaaggggtg

SEQ ID NO: 276297 - DNA, 25 bp, Artificial
  Probe
gcttgcctaggtacttgttattaac

SEQ ID NO: 276298 - DNA, 25 bp, Artificial
  Probe
ataggctggcaagctttagggtgct

SEQ ID NO: 276299 - DNA, 25 bp, Artificial
  Probe
tgcctaggtacttgttattaacagg

SEQ ID NO: 276300 - DNA, 25 bp, Artificial
  Probe
ggggctagggcaccttgcttgccta

SEQ ID NO: 276301 - DNA, 25 bp, Artificial
  Probe
tagggcaccttgcttgcctaggtac

SEQ ID NO: 276302 - DNA, 25 bp, Artificial
  Probe
ggctggcaagctttagggtgctatt

SEQ ID NO: 276303 - DNA, 25 bp, Artificial
  Probe
tggggctagggcaccttgcttgcct

SEQ ID NO: 276304 - DNA, 25 bp, Artificial
  Probe
ttgcttgcctaggtacttgttatta

SEQ ID NO: 276305 - DNA, 25 bp, Artificial
  Probe
ggcaccttgcttgcctaggtacttg

SEQ ID NO: 276306 - DNA, 25 bp, Artificial
  Probe
gggctagggcaccttgcttgcctag

SEQ ID NO: 276307 - DNA, 25 bp, Artificial
  Probe
aagtgcttggggacatagtactaga

SEQ ID NO: 276308 - DNA, 25 bp, Artificial
  Probe
aggctggcaagctttagggtgctat

SEQ ID NO: 276309 - DNA, 25 bp, Artificial
  Probe
gggcaccttgcttgcctaggtactt

SEQ ID NO: 276310 - DNA, 25 bp, Artificial
  Probe
gaaccaagtgcttggggacatagta

SEQ ID NO: 276311 - DNA, 25 bp, Artificial
  Probe
ttggggctagggcaccttgcttgcc

SEQ ID NO: 276312 - DNA, 25 bp, Artificial
  Probe
gtggggaaccaagtgcttggggaca

SEQ ID NO: 276313 - DNA, 25 bp, Artificial
  Probe
gcctaggtacttgttattaacagga

SEQ ID NO: 276314 - DNA, 25 bp, Artificial
  Probe
cttgcctaggtacttgttattaaca

SEQ ID NO: 276315 - DNA, 25 bp, Artificial
  Probe
tgttattaacaggagtggggaacca

SEQ ID NO: 276316 - DNA, 25 bp, Artificial
  Probe
ctagggcaccttgcttgcctaggta

SEQ ID NO: 276317 - DNA, 25 bp, Artificial
  Probe
ctggcaagctttagggtgctattgg

SEQ ID NO: 276318 - DNA, 25 bp, Artificial
  Probe
ttgcctaggtacttgttattaacag

SEQ ID NO: 276319 - DNA, 25 bp, Artificial
  Probe
ccttgcttgcctaggtacttgttat

SEQ ID NO: 276320 - DNA, 25 bp, Artificial
  Probe
tacttgttattaacaggagtgggga

SEQ ID NO: 276321 - DNA, 25 bp, Artificial
  Probe
agggcaccttgcttgcctaggtact

SEQ ID NO: 276322 - DNA, 25 bp, Artificial
  Probe
ggctagggcaccttgcttgcctagg

SEQ ID NO: 276323 - DNA, 25 bp, Artificial
  Probe
tgcttgcctaggtacttgttattaa

SEQ ID NO: 276324 - DNA, 25 bp, Artificial
  Probe
gctattggggctagggcaccttgct

SEQ ID NO: 276325 - DNA, 25 bp, Artificial
  Probe
ggaactttgatcttcctaagaatta

SEQ ID NO: 276326 - DNA, 25 bp, Artificial
  Probe
ctgaagttgccgtttagacacatgt

SEQ ID NO: 276327 - DNA, 25 bp, Artificial
  Probe
tttgcttctaggaatgaaacatcaa

SEQ ID NO: 276328 - DNA, 25 bp, Artificial
  Probe
ggagtgatactgtgccatgctggtc

SEQ ID NO: 276329 - DNA, 25 bp, Artificial
  Probe
cctctggagtgatactgtgccatgc

SEQ ID NO: 276330 - DNA, 25 bp, Artificial
  Probe
agggaactttgatcttcctaagaat

SEQ ID NO: 276331 - DNA, 25 bp, Artificial
  Probe
ttaacctgaagttgccgtttagaca

SEQ ID NO: 276332 - DNA, 25 bp, Artificial
  Probe
aggctcttccttaattcctctggag

SEQ ID NO: 276333 - DNA, 25 bp, Artificial
  Probe
ggaaacttcttcatgggtggctcag

SEQ ID NO: 276334 - DNA, 25 bp, Artificial
  Probe
ctttgcttctaggaatgaaacatca

SEQ ID NO: 276335 - DNA, 25 bp, Artificial
  Probe
cttccttaattcctctggagtgata

SEQ ID NO: 276336 - DNA, 25 bp, Artificial
  Probe
ggtgtccaaactttgaggcactttt

SEQ ID NO: 276337 - DNA, 25 bp, Artificial
  Probe
gtgccatgctggtctttgcttctag

SEQ ID NO: 276338 - DNA, 25 bp, Artificial
  Probe
tggctacactatttggtgaggagct

SEQ ID NO: 276339 - DNA, 25 bp, Artificial
  Probe
gatactgtgccatgctggtctttgc

SEQ ID NO: 276340 - DNA, 25 bp, Artificial
  Probe
gtccaaactttgaggcacttttcaa

SEQ ID NO: 276341 - DNA, 25 bp, Artificial
  Probe
tgctcagcttgcagtcatgcaggga

SEQ ID NO: 276342 - DNA, 25 bp, Artificial
  Probe
tagtcatattaacctgaagttgccg

SEQ ID NO: 276343 - DNA, 25 bp, Artificial
  Probe
tgatactgtgccatgctggtctttg

SEQ ID NO: 276344 - DNA, 25 bp, Artificial
  Probe
cttcttcatgggtggctcagatggt

SEQ ID NO: 276345 - DNA, 25 bp, Artificial
  Probe
tcagatggtggctacactatttggt

SEQ ID NO: 276346 - DNA, 25 bp, Artificial
  Probe
gctggtgccaccactggcagcattc

SEQ ID NO: 276347 - DNA, 25 bp, Artificial
  Probe
ggtggctcagatggtggctacacta

SEQ ID NO: 276348 - DNA, 25 bp, Artificial
  Probe
tggagtgatactgtgccatgctggt

SEQ ID NO: 276349 - DNA, 25 bp, Artificial
  Probe
tgccagatttggagctggtgccacc

SEQ ID NO: 276350 - DNA, 25 bp, Artificial
  Probe
atattaacctgaagttgccgtttag

SEQ ID NO: 276351 - DNA, 25 bp, Artificial
  Probe
cagatggtggctacactatttggtg

SEQ ID NO: 276352 - DNA, 25 bp, Artificial
  Probe
tgatcttcctaagaattaaagttgc

SEQ ID NO: 276353 - DNA, 25 bp, Artificial
  Probe
gtctttgcttctaggaatgaaacat

SEQ ID NO: 276354 - DNA, 25 bp, Artificial
  Probe
atgctggtctttgcttctaggaatg

SEQ ID NO: 276355 - DNA, 25 bp, Artificial
  Probe
gcaagggaaacttcttcatgggtgg

SEQ ID NO: 276356 - DNA, 25 bp, Artificial
  Probe
tattaacctgaagttgccgtttaga

SEQ ID NO: 276357 - DNA, 25 bp, Artificial
  Probe
ggagctggtgccaccactggcagca

SEQ ID NO: 276358 - DNA, 25 bp, Artificial
  Probe
gggaactttgatcttcctaagaatt

SEQ ID NO: 276359 - DNA, 25 bp, Artificial
  Probe
atttggagctggtgccaccactggc

SEQ ID NO: 276360 - DNA, 25 bp, Artificial
  Probe
gtggctacactatttggtgaggagc

SEQ ID NO: 276361 - DNA, 25 bp, Artificial
  Probe
cctaaagcattctgaggtagggagg

SEQ ID NO: 276362 - DNA, 25 bp, Artificial
  Probe
tttagtcatattaacctgaagttgc

SEQ ID NO: 276363 - DNA, 25 bp, Artificial
  Probe
ctacactatttggtgaggagctgtg

SEQ ID NO: 276364 - DNA, 25 bp, Artificial
  Probe
ctccctaaagcattctgaggtaggg

SEQ ID NO: 276365 - DNA, 25 bp, Artificial
  Probe
tgctttagtcatattaacctgaagt

SEQ ID NO: 276366 - DNA, 25 bp, Artificial
  Probe
caaggctcttccttaattcctctgg

SEQ ID NO: 276367 - DNA, 25 bp, Artificial
  Probe
tggctcagatggtggctacactatt

SEQ ID NO: 276368 - DNA, 25 bp, Artificial
  Probe
taattcctctggagtgatactgtgc

SEQ ID NO: 276369 - DNA, 25 bp, Artificial
  Probe
tggtgtccaaactttgaggcacttt

SEQ ID NO: 276370 - DNA, 25 bp, Artificial
  Probe
gccgtttagacacatgtttttgggg

SEQ ID NO: 276371 - DNA, 25 bp, Artificial
  Probe
cgctgaaattcattgctggaggaag

SEQ ID NO: 276372 - DNA, 25 bp, Artificial
  Probe
aatctgacagcacccgctgaaattc

SEQ ID NO: 276373 - DNA, 25 bp, Artificial
  Probe
tctgggtgctcattgcctacattct

SEQ ID NO: 276374 - DNA, 25 bp, Artificial
  Probe
acccgctgaaattcattgctggagg

SEQ ID NO: 276375 - DNA, 25 bp, Artificial
  Probe
cccgctgaaattcattgctggagga

SEQ ID NO: 276376 - DNA, 25 bp, Artificial
  Probe
agcacccgctgaaattcattgctgg

SEQ ID NO: 276377 - DNA, 25 bp, Artificial
  Probe
gaaaatctgacagcacccgctgaaa

SEQ ID NO: 276378 - DNA, 25 bp, Artificial
  Probe
cctacattctctataaaaagaaggt

SEQ ID NO: 276379 - DNA, 25 bp, Artificial
  Probe
accgctctctgggtgctcattgcct

SEQ ID NO: 276380 - DNA, 25 bp, Artificial
  Probe
gctgaaattcattgctggaggaagc

SEQ ID NO: 276381 - DNA, 25 bp, Artificial
  Probe
tctctgggtgctcattgcctacatt

SEQ ID NO: 276382 - DNA, 25 bp, Artificial
  Probe
aaagagcatctcatccagaacatag

SEQ ID NO: 276383 - DNA, 25 bp, Artificial
  Probe
ctgggtgctcattgcctacattctc

SEQ ID NO: 276384 - DNA, 25 bp, Artificial
  Probe
ggaaaatctgacagcacccgctgaa

SEQ ID NO: 276385 - DNA, 25 bp, Artificial
  Probe
tgggtgctcattgcctacattctct

SEQ ID NO: 276386 - DNA, 25 bp, Artificial
  Probe
cgccaccgctctctgggtgctcatt

SEQ ID NO: 276387 - DNA, 25 bp, Artificial
  Probe
agcatctcatccagaacatagtcgc

SEQ ID NO: 276388 - DNA, 25 bp, Artificial
  Probe
aagagcatctcatccagaacatagt

SEQ ID NO: 276389 - DNA, 25 bp, Artificial
  Probe
aaaatctgacagcacccgctgaaat

SEQ ID NO: 276390 - DNA, 25 bp, Artificial
  Probe
agagcatctcatccagaacatagtc

SEQ ID NO: 276391 - DNA, 25 bp, Artificial
  Probe
agggtcagggaggagagcggcagcc

SEQ ID NO: 276392 - DNA, 25 bp, Artificial
  Probe
ctacattctctataaaaagaaggtt

SEQ ID NO: 276393 - DNA, 25 bp, Artificial
  Probe
ctctctgggtgctcattgcctacat

SEQ ID NO: 276394 - DNA, 25 bp, Artificial
  Probe
tgaaattcattgctggaggaagcta

SEQ ID NO: 276395 - DNA, 25 bp, Artificial
  Probe
aaatctgacagcacccgctgaaatt

SEQ ID NO: 276396 - DNA, 25 bp, Artificial
  Probe
ccgctgaaattcattgctggaggaa

SEQ ID NO: 276397 - DNA, 25 bp, Artificial
  Probe
gctcattgcctacattctctataaa

SEQ ID NO: 276398 - DNA, 25 bp, Artificial
  Probe
catctcatccagaacatagtcgcca

SEQ ID NO: 276399 - DNA, 25 bp, Artificial
  Probe
cacccgctgaaattcattgctggag

SEQ ID NO: 276400 - DNA, 25 bp, Artificial
  Probe
ctgaaattcattgctggaggaagct

SEQ ID NO: 276401 - DNA, 25 bp, Artificial
  Probe
cagcacccgctgaaattcattgctg

SEQ ID NO: 276402 - DNA, 25 bp, Artificial
  Probe
tcgccaccgctctctgggtgctcat

SEQ ID NO: 276403 - DNA, 25 bp, Artificial
  Probe
gacagcacccgctgaaattcattgc

SEQ ID NO: 276404 - DNA, 25 bp, Artificial
  Probe
gctctctgggtgctcattgcctaca

SEQ ID NO: 276405 - DNA, 25 bp, Artificial
  Probe
tccagaacatagtcgccaccgctct

SEQ ID NO: 276406 - DNA, 25 bp, Artificial
  Probe
gcacccgctgaaattcattgctgga

SEQ ID NO: 276407 - DNA, 25 bp, Artificial
  Probe
cgctctctgggtgctcattgcctac

SEQ ID NO: 276408 - DNA, 25 bp, Artificial
  Probe
acagcacccgctgaaattcattgct

SEQ ID NO: 276409 - DNA, 25 bp, Artificial
  Probe
gccaccgctctctgggtgctcattg

SEQ ID NO: 276410 - DNA, 25 bp, Artificial
  Probe
ccaccgctctctgggtgctcattgc

SEQ ID NO: 276411 - DNA, 25 bp, Artificial
  Probe
ccgctctctgggtgctcattgccta

SEQ ID NO: 276412 - DNA, 25 bp, Artificial
  Probe
gagcatctcatccagaacatagtcg

SEQ ID NO: 276413 - DNA, 25 bp, Artificial
  Probe
ctctgggtgctcattgcctacattc

SEQ ID NO: 276414 - DNA, 25 bp, Artificial
  Probe
gaacatagtcgccaccgctctctgg

SEQ ID NO: 276415 - DNA, 25 bp, Artificial
  Probe
tgacagcacccgctgaaattcattg

SEQ ID NO: 276416 - DNA, 25 bp, Artificial
  Probe
gcatctcatccagaacatagtcgcc

SEQ ID NO: 276417 - DNA, 25 bp, Artificial
  Probe
aggttttgcaccaaggcacatgcac

SEQ ID NO: 276418 - DNA, 25 bp, Artificial
  Probe
attcgattctttgagtggaggaacc

SEQ ID NO: 276419 - DNA, 25 bp, Artificial
  Probe
agttgcgcccattgcccaggactct

SEQ ID NO: 276420 - DNA, 25 bp, Artificial
  Probe
tccactagatattcgattctttgag

SEQ ID NO: 276421 - DNA, 25 bp, Artificial
  Probe
gtgcaactgctcctgctgcacggcg

SEQ ID NO: 276422 - DNA, 25 bp, Artificial
  Probe
tgccctgtggagaccactcttctgg

SEQ ID NO: 276423 - DNA, 25 bp, Artificial
  Probe
gaacaacagcctgaacatggtgcaa

SEQ ID NO: 276424 - DNA, 25 bp, Artificial
  Probe
ggaatccactagatattcgattctt

SEQ ID NO: 276425 - DNA, 25 bp, Artificial
  Probe
ttctggaaactgtgaggaccttgtt

SEQ ID NO: 276426 - DNA, 25 bp, Artificial
  Probe
tcagatgtactctggcagctcggct

SEQ ID NO: 276427 - DNA, 25 bp, Artificial
  Probe
gcattccgcgtctggccgcgggctt

SEQ ID NO: 276428 - DNA, 25 bp, Artificial
  Probe
ccagtcttcgggaccaggttttgca

SEQ ID NO: 276429 - DNA, 25 bp, Artificial
  Probe
aacagcctgaacatggtgcaactgc

SEQ ID NO: 276430 - DNA, 25 bp, Artificial
  Probe
tggcagctcggctctgcattccgcg

SEQ ID NO: 276431 - DNA, 25 bp, Artificial
  Probe
gctcggctctgcattccgcgtctgg

SEQ ID NO: 276432 - DNA, 25 bp, Artificial
  Probe
ttctgcctctggtgcgcacactggt

SEQ ID NO: 276433 - DNA, 25 bp, Artificial
  Probe
tccccagctccaggaagcagctgag

SEQ ID NO: 276434 - DNA, 25 bp, Artificial
  Probe
agatactcccagttgcgcccattgc

SEQ ID NO: 276435 - DNA, 25 bp, Artificial
  Probe
cgattctttgagtggaggaaccaaa

SEQ ID NO: 276436 - DNA, 25 bp, Artificial
  Probe
tactctggcagctcggctctgcatt

SEQ ID NO: 276437 - DNA, 25 bp, Artificial
  Probe
gcgccaacgtgaacgctcagatgta

SEQ ID NO: 276438 - DNA, 25 bp, Artificial
  Probe
gcccaggactctaagccccatttaa

SEQ ID NO: 276439 - DNA, 25 bp, Artificial
  Probe
tactactgagcacagatactcccag

SEQ ID NO: 276440 - DNA, 25 bp, Artificial
  Probe
attgcccaggactctaagccccatt

SEQ ID NO: 276441 - DNA, 25 bp, Artificial
  Probe
ggatgctccaagcttccccatgact

SEQ ID NO: 276442 - DNA, 25 bp, Artificial
  Probe
gcctcaagaactgtcacaatgacac

SEQ ID NO: 276443 - DNA, 25 bp, Artificial
  Probe
gctcagatgtactctggcagctcgg

SEQ ID NO: 276444 - DNA, 25 bp, Artificial
  Probe
tgaacgctcagatgtactctggcag

SEQ ID NO: 276445 - DNA, 25 bp, Artificial
  Probe
caacgtgaacgctcagatgtactct

SEQ ID NO: 276446 - DNA, 25 bp, Artificial
  Probe
cgggcttctgcctctggtgcgcaca

SEQ ID NO: 276447 - DNA, 25 bp, Artificial
  Probe
tctttgagtggaggaaccaaaggac

SEQ ID NO: 276448 - DNA, 25 bp, Artificial
  Probe
atgtactctggcagctcggctctgc

SEQ ID NO: 276449 - DNA, 25 bp, Artificial
  Probe
cccggactcatgaggaagggcttcc

SEQ ID NO: 276450 - DNA, 25 bp, Artificial
  Probe
tgcacggcgccaacgtgaacgctca

SEQ ID NO: 276451 - DNA, 25 bp, Artificial
  Probe
ctccaggaagcagctgagacggatg

SEQ ID NO: 276452 - DNA, 25 bp, Artificial
  Probe
cgaaggatgctccaagcttccccat

SEQ ID NO: 276453 - DNA, 25 bp, Artificial
  Probe
tgcattccgcgtctggccgcgggct

SEQ ID NO: 276454 - DNA, 25 bp, Artificial
  Probe
ccatgctgtggagaacaacagcctg

SEQ ID NO: 276455 - DNA, 25 bp, Artificial
  Probe
ctgacagcggcctcaagaactgtca

SEQ ID NO: 276456 - DNA, 25 bp, Artificial
  Probe
tggaatccactagatattcgattct

SEQ ID NO: 276457 - DNA, 25 bp, Artificial
  Probe
ctggccgcgggcttctgcctctggt

SEQ ID NO: 276458 - DNA, 25 bp, Artificial
  Probe
acatggtgcaactgctcctgctgca

SEQ ID NO: 276459 - DNA, 25 bp, Artificial
  Probe
cactagatattcgattctttgagtg

SEQ ID NO: 276460 - DNA, 25 bp, Artificial
  Probe
gagcagacccggactcatgaggaag

SEQ ID NO: 276461 - DNA, 25 bp, Artificial
  Probe
gagcacagatactcccagttgcgcc

SEQ ID NO: 276462 - DNA, 25 bp, Artificial
  Probe
acagatactcccagttgcgcccatt

SEQ ID NO: 276463 - DNA, 25 bp, Artificial
  Probe
gagggtcaccatccttcttcctgca

SEQ ID NO: 276464 - DNA, 25 bp, Artificial
  Probe
gctcttaattatggacgctactcct

SEQ ID NO: 276465 - DNA, 25 bp, Artificial
  Probe
ctcatggagcagtgctgggcctatg

SEQ ID NO: 276466 - DNA, 25 bp, Artificial
  Probe
agccggcctcagacaagtccctgtt

SEQ ID NO: 276467 - DNA, 25 bp, Artificial
  Probe
tggactgcccctgaagctcttaatt

SEQ ID NO: 276468 - DNA, 25 bp, Artificial
  Probe
tccgaaagcggcatcggtgagacca

SEQ ID NO: 276469 - DNA, 25 bp, Artificial
  Probe
gctcatggagcagtgctgggcctat

SEQ ID NO: 276470 - DNA, 25 bp, Artificial
  Probe
gggcagaggcctagcttcagcacca

SEQ ID NO: 276471 - DNA, 25 bp, Artificial
  Probe
gttcccactcactgttggacagctc

SEQ ID NO: 276472 - DNA, 25 bp, Artificial
  Probe
atcggtgagaccagtggcctgttcg

SEQ ID NO: 276473 - DNA, 25 bp, Artificial
  Probe
agagtatccgaaagcggcatcggtg

SEQ ID NO: 276474 - DNA, 25 bp, Artificial
  Probe
caacactagcagcagggcttcgggc

SEQ ID NO: 276475 - DNA, 25 bp, Artificial
  Probe
tcagcagttcccactcactgttgga

SEQ ID NO: 276476 - DNA, 25 bp, Artificial
  Probe
agaccagtggcctgttcgggcaaga

SEQ ID NO: 276477 - DNA, 25 bp, Artificial
  Probe
ctttggcattttgctgtgggagacc

SEQ ID NO: 276478 - DNA, 25 bp, Artificial
  Probe
cttcgggatgtctcgagaagaggct

SEQ ID NO: 276479 - DNA, 25 bp, Artificial
  Probe
tgcacaaattcatctcttggacaga

SEQ ID NO: 276480 - DNA, 25 bp, Artificial
  Probe
aggagctacagagtatccgaaagcg

SEQ ID NO: 276481 - DNA, 25 bp, Artificial
  Probe
tcgaaaaggggcatcgtctgccttg

SEQ ID NO: 276482 - DNA, 25 bp, Artificial
  Probe
agtgacttcgggatgtctcgagaag

SEQ ID NO: 276483 - DNA, 25 bp, Artificial
  Probe
agatcagtgacttcgggatgtctcg

SEQ ID NO: 276484 - DNA, 25 bp, Artificial
  Probe
gcatcggtgagaccagtggcctgtt

SEQ ID NO: 276485 - DNA, 25 bp, Artificial
  Probe
ttcgggcaagagtgtacgtcctcag

SEQ ID NO: 276486 - DNA, 25 bp, Artificial
  Probe
ccgaaagcggcatcggtgagaccag

SEQ ID NO: 276487 - DNA, 25 bp, Artificial
  Probe
accagtggcctgttcgggcaagagt

SEQ ID NO: 276488 - DNA, 25 bp, Artificial
  Probe
cgctactcctcagaaagtgacgtgt

SEQ ID NO: 276489 - DNA, 25 bp, Artificial
  Probe
catcgtctgccttgcccagagctgt

SEQ ID NO: 276490 - DNA, 25 bp, Artificial
  Probe
aaaggggcatcgtctgccttgccca

SEQ ID NO: 276491 - DNA, 25 bp, Artificial
  Probe
ccaagacctgggttccaacactagc

SEQ ID NO: 276492 - DNA, 25 bp, Artificial
  Probe
aattatggacgctactcctcagaaa

SEQ ID NO: 276493 - DNA, 25 bp, Artificial
  Probe
ctagcttcagcaccatctgccagga

SEQ ID NO: 276494 - DNA, 25 bp, Artificial
  Probe
gtgtacgtcctcagcagttcccact

SEQ ID NO: 276495 - DNA, 25 bp, Artificial
  Probe
agcagacacgggagtttgtcgaaaa

SEQ ID NO: 276496 - DNA, 25 bp, Artificial
  Probe
agagctgtgccctgatgcagtcttc

SEQ ID NO: 276497 - DNA, 25 bp, Artificial
  Probe
cagacacgggagtttgtcgaaaagg

SEQ ID NO: 276498 - DNA, 25 bp, Artificial
  Probe
tggcattttgctgtgggagaccttc

SEQ ID NO: 276499 - DNA, 25 bp, Artificial
  Probe
gcaagagtgtacgtcctcagcagtt

SEQ ID NO: 276500 - DNA, 25 bp, Artificial
  Probe
cttcaggctcatggagcagtgctgg

SEQ ID NO: 276501 - DNA, 25 bp, Artificial
  Probe
tgccttgcccagagctgtgccctga

SEQ ID NO: 276502 - DNA, 25 bp, Artificial
  Probe
gtccctgttaagtggactgcccctg

SEQ ID NO: 276503 - DNA, 25 bp, Artificial
  Probe
ggagggtcaccatccttcttcctgc

SEQ ID NO: 276504 - DNA, 25 bp, Artificial
  Probe
gaggcctagcttcagcaccatctgc

SEQ ID NO: 276505 - DNA, 25 bp, Artificial
  Probe
gcctgttcgggcaagagtgtacgtc

SEQ ID NO: 276506 - DNA, 25 bp, Artificial
  Probe
caatcagcagacacgggagtttgtc

SEQ ID NO: 276507 - DNA, 25 bp, Artificial
  Probe
cttgcccagagctgtgccctgatgc

SEQ ID NO: 276508 - DNA, 25 bp, Artificial
  Probe
aacctcaccaatcagcagacacggg

SEQ ID NO: 276509 - DNA, 25 bp, Artificial
  Probe
cttcttcgataatagtgacaacgtg

SEQ ID NO: 276510 - DNA, 25 bp, Artificial
  Probe
atgagtgtggctgtcgctgaccacc

SEQ ID NO: 276511 - DNA, 25 bp, Artificial
  Probe
ttcttcgataatagtgacaacgtgg

SEQ ID NO: 276512 - DNA, 25 bp, Artificial
  Probe
acggttgcacgtgagcttccgtgag

SEQ ID NO: 276513 - DNA, 25 bp, Artificial
  Probe
tctccgtgctcttcttcgataatag

SEQ ID NO: 276514 - DNA, 25 bp, Artificial
  Probe
tgccagagcgtctgtcgcctatctc

SEQ ID NO: 276515 - DNA, 25 bp, Artificial
  Probe
tgagtgtggctgtcgctgaccaccc

SEQ ID NO: 276516 - DNA, 25 bp, Artificial
  Probe
ttgctgctggtgacgctggacccac

SEQ ID NO: 276517 - DNA, 25 bp, Artificial
  Probe
cgtgccagagcgtctgtcgcctatc

SEQ ID NO: 276518 - DNA, 25 bp, Artificial
  Probe
tggtgctgcgccactacgaggacat

SEQ ID NO: 276519 - DNA, 25 bp, Artificial
  Probe
acaacgtggtgctgcgccactacga

SEQ ID NO: 276520 - DNA, 25 bp, Artificial
  Probe
tgtggctgtcgctgaccacccagga

SEQ ID NO: 276521 - DNA, 25 bp, Artificial
  Probe
aagcagggaccgtttgttcatgttt

SEQ ID NO: 276522 - DNA, 25 bp, Artificial
  Probe
cctgaaacactgaggggacccggcg

SEQ ID NO: 276523 - DNA, 25 bp, Artificial
  Probe
gtgctgcgccactacgaggacatgg

SEQ ID NO: 276524 - DNA, 25 bp, Artificial
  Probe
cacgcgaaaagcagggaccgtttgt

SEQ ID NO: 276525 - DNA, 25 bp, Artificial
  Probe
aatagtgacaacgtggtgctgcgcc

SEQ ID NO: 276526 - DNA, 25 bp, Artificial
  Probe
gatgagtgtggctgtcgctgaccac

SEQ ID NO: 276527 - DNA, 25 bp, Artificial
  Probe
gttgctgctggtgacgctggaccca

SEQ ID NO: 276528 - DNA, 25 bp, Artificial
  Probe
cgaaaagcagggaccgtttgttcat

SEQ ID NO: 276529 - DNA, 25 bp, Artificial
  Probe
cgtgctcttcttcgataatagtgac

SEQ ID NO: 276530 - DNA, 25 bp, Artificial
  Probe
ctccgtgctcttcttcgataatagt

SEQ ID NO: 276531 - DNA, 25 bp, Artificial
  Probe
gtgccagagcgtctgtcgcctatct

SEQ ID NO: 276532 - DNA, 25 bp, Artificial
  Probe
tggctgtcgctgaccacccaggaca

SEQ ID NO: 276533 - DNA, 25 bp, Artificial
  Probe
gtctgtcgcctatctccgtgctctt

SEQ ID NO: 276534 - DNA, 25 bp, Artificial
  Probe
ctgaggcctcgttgctgctggtgac

SEQ ID NO: 276535 - DNA, 25 bp, Artificial
  Probe
aggcctcgttgctgctggtgacgct

SEQ ID NO: 276536 - DNA, 25 bp, Artificial
  Probe
tgcgccactacgaggacatggtggt

SEQ ID NO: 276537 - DNA, 25 bp, Artificial
  Probe
gacaacgtggtgctgcgccactacg

SEQ ID NO: 276538 - DNA, 25 bp, Artificial
  Probe
taggctcgccctgctgcgtgccaga

SEQ ID NO: 276539 - DNA, 25 bp, Artificial
  Probe
gcctatctccgtgctcttcttcgat

SEQ ID NO: 276540 - DNA, 25 bp, Artificial
  Probe
agcagggaccgtttgttcatgtttt

SEQ ID NO: 276541 - DNA, 25 bp, Artificial
  Probe
cgctgcaacctgtgggcgcctggct

SEQ ID NO: 276542 - DNA, 25 bp, Artificial
  Probe
tacctgaaacactgaggggacccgg

SEQ ID NO: 276543 - DNA, 25 bp, Artificial
  Probe
cagggaccgtttgttcatgttttat

SEQ ID NO: 276544 - DNA, 25 bp, Artificial
  Probe
tgctcttcttcgataatagtgacaa

SEQ ID NO: 276545 - DNA, 25 bp, Artificial
  Probe
gacggttgcacgtgagcttccgtga

SEQ ID NO: 276546 - DNA, 25 bp, Artificial
  Probe
gctgcgccactacgaggacatggtg

SEQ ID NO: 276547 - DNA, 25 bp, Artificial
  Probe
ctgctgcgtgccagagcgtctgtcg

SEQ ID NO: 276548 - DNA, 25 bp, Artificial
  Probe
ctcttcttcgataatagtgacaacg

SEQ ID NO: 276549 - DNA, 25 bp, Artificial
  Probe
gtgacaacgtggtgctgcgccacta

SEQ ID NO: 276550 - DNA, 25 bp, Artificial
  Probe
tgctgcgtgccagagcgtctgtcgc

SEQ ID NO: 276551 - DNA, 25 bp, Artificial
  Probe
gctgcgtgccagagcgtctgtcgcc

SEQ ID NO: 276552 - DNA, 25 bp, Artificial
  Probe
ataatagtgacaacgtggtgctgcg

SEQ ID NO: 276553 - DNA, 25 bp, Artificial
  Probe
tagtgacaacgtggtgctgcgccac

SEQ ID NO: 276554 - DNA, 25 bp, Artificial
  Probe
cctcgttgctgctggtgacgctgga

SEQ ID NO: 276555 - DNA, 25 bp, Artificial
  Probe
cacaggaacagatcacactggagcc

SEQ ID NO: 276556 - DNA, 25 bp, Artificial
  Probe
ctgtcccatgccacagatgctgaaa

SEQ ID NO: 276557 - DNA, 25 bp, Artificial
  Probe
ctttattcagcctaagagagaaatt

SEQ ID NO: 276558 - DNA, 25 bp, Artificial
  Probe
gaggaagcactgtcccatgccacag

SEQ ID NO: 276559 - DNA, 25 bp, Artificial
  Probe
ccagcacaggaacagatcacactgg

SEQ ID NO: 276560 - DNA, 25 bp, Artificial
  Probe
aattccagcacaggaacagatcaca

SEQ ID NO: 276561 - DNA, 25 bp, Artificial
  Probe
caagcaatactatgatgctatctgc

SEQ ID NO: 276562 - DNA, 25 bp, Artificial
  Probe
aaaccctttattcagcctaagagag

SEQ ID NO: 276563 - DNA, 25 bp, Artificial
  Probe
aacagatcacactggagcctgaact

SEQ ID NO: 276564 - DNA, 25 bp, Artificial
  Probe
gtacacactgatgagcaacaagcaa

SEQ ID NO: 276565 - DNA, 25 bp, Artificial
  Probe
ccttcactggcgagaagaagggaaa

SEQ ID NO: 276566 - DNA, 25 bp, Artificial
  Probe
gaggcccttcactggcgagaagaag

SEQ ID NO: 276567 - DNA, 25 bp, Artificial
  Probe
gcctgacaagtataagccagtacca

SEQ ID NO: 276568 - DNA, 25 bp, Artificial
  Probe
agatcacactggagcctgaactgga

SEQ ID NO: 276569 - DNA, 25 bp, Artificial
  Probe
gcaacaagcaatactatgatgctat

SEQ ID NO: 276570 - DNA, 25 bp, Artificial
  Probe
gagatctgcaacaccgaaggcatta

SEQ ID NO: 276571 - DNA, 25 bp, Artificial
  Probe
ttccagcacaggaacagatcacact

SEQ ID NO: 276572 - DNA, 25 bp, Artificial
  Probe
aaattccagcacaggaacagatcac

SEQ ID NO: 276573 - DNA, 25 bp, Artificial
  Probe
gagaaattccagcacaggaacagat

SEQ ID NO: 276574 - DNA, 25 bp, Artificial
  Probe
ataagccagtaccagatgaaccccc

SEQ ID NO: 276575 - DNA, 25 bp, Artificial
  Probe
agcctgaactggaggaagcactgtc

SEQ ID NO: 276576 - DNA, 25 bp, Artificial
  Probe
attcagcctaagagagaaattccag

SEQ ID NO: 276577 - DNA, 25 bp, Artificial
  Probe
ccatgccacagatgctgaaatgtgt

SEQ ID NO: 276578 - DNA, 25 bp, Artificial
  Probe
tcactggcgagaagaagggaaaacc

SEQ ID NO: 276579 - DNA, 25 bp, Artificial
  Probe
gatgctatctgcagcggagagatct

SEQ ID NO: 276580 - DNA, 25 bp, Artificial
  Probe
tgcagcctgacaagtataagccagt

SEQ ID NO: 276581 - DNA, 25 bp, Artificial
  Probe
aaccctttattcagcctaagagaga

SEQ ID NO: 276582 - DNA, 25 bp, Artificial
  Probe
tacacactgatgagcaacaagcaat

SEQ ID NO: 276583 - DNA, 25 bp, Artificial
  Probe
catgccacagatgctgaaatgtgtg

SEQ ID NO: 276584 - DNA, 25 bp, Artificial
  Probe
tatctgcagcggagagatctgcaac

SEQ ID NO: 276585 - DNA, 25 bp, Artificial
  Probe
atactatgatgctatctgcagcgga

SEQ ID NO: 276586 - DNA, 25 bp, Artificial
  Probe
atgagcaacaagcaatactatgatg

SEQ ID NO: 276587 - DNA, 25 bp, Artificial
  Probe
caatactatgatgctatctgcagcg

SEQ ID NO: 276588 - DNA, 25 bp, Artificial
  Probe
gcgatcctgggcatgtacacactga

SEQ ID NO: 276589 - DNA, 25 bp, Artificial
  Probe
ggaggaagcactgtcccatgccaca

SEQ ID NO: 276590 - DNA, 25 bp, Artificial
  Probe
aagcactgtcccatgccacagatgc

SEQ ID NO: 276591 - DNA, 25 bp, Artificial
  Probe
caagtataagccagtaccagatgaa

SEQ ID NO: 276592 - DNA, 25 bp, Artificial
  Probe
ctgcagcggagagatctgcaacacc

SEQ ID NO: 276593 - DNA, 25 bp, Artificial
  Probe
acagatcacactggagcctgaactg

SEQ ID NO: 276594 - DNA, 25 bp, Artificial
  Probe
cgatcctgggcatgtacacactgat

SEQ ID NO: 276595 - DNA, 25 bp, Artificial
  Probe
cagcctgacaagtataagccagtac

SEQ ID NO: 276596 - DNA, 25 bp, Artificial
  Probe
atctgcagcggagagatctgcaaca

SEQ ID NO: 276597 - DNA, 25 bp, Artificial
  Probe
cggagagatctgcaacaccgaaggc

SEQ ID NO: 276598 - DNA, 25 bp, Artificial
  Probe
gagcaacaagcaatactatgatgct

SEQ ID NO: 276599 - DNA, 25 bp, Artificial
  Probe
gagagaaattccagcacaggaacag

SEQ ID NO: 276600 - DNA, 25 bp, Artificial
  Probe
gaaattccagcacaggaacagatca

SEQ ID NO: 276601 - DNA, 25 bp, Artificial
  Probe
ccccaaaggaatccactaaggcctg

SEQ ID NO: 276602 - DNA, 25 bp, Artificial
  Probe
agtgtggatgttcagcaggtcccag

SEQ ID NO: 276603 - DNA, 25 bp, Artificial
  Probe
agactatggacttcctcccttccag

SEQ ID NO: 276604 - DNA, 25 bp, Artificial
  Probe
acatggggcagacacacatactagg

SEQ ID NO: 276605 - DNA, 25 bp, Artificial
  Probe
tggggcagacacacatactagggta

SEQ ID NO: 276606 - DNA, 25 bp, Artificial
  Probe
gacacacatactagggtaccagagg

SEQ ID NO: 276607 - DNA, 25 bp, Artificial
  Probe
cagagcctgtggaacccccaaagga

SEQ ID NO: 276608 - DNA, 25 bp, Artificial
  Probe
cacatactagggtaccagaggtccc

SEQ ID NO: 276609 - DNA, 25 bp, Artificial
  Probe
atactagggtaccagaggtccccag

SEQ ID NO: 276610 - DNA, 25 bp, Artificial
  Probe
tggatgttcagcaggtcccagacca

SEQ ID NO: 276611 - DNA, 25 bp, Artificial
  Probe
ccagaggtccccagtcgattcctgg

SEQ ID NO: 276612 - DNA, 25 bp, Artificial
  Probe
tccccagtcgattcctggcagtgtg

SEQ ID NO: 276613 - DNA, 25 bp, Artificial
  Probe
ccagtcgattcctggcagtgtggat

SEQ ID NO: 276614 - DNA, 25 bp, Artificial
  Probe
gattcctggcagtgtggatgttcag

SEQ ID NO: 276615 - DNA, 25 bp, Artificial
  Probe
tcgattcctggcagtgtggatgttc

SEQ ID NO: 276616 - DNA, 25 bp, Artificial
  Probe
tccactaaggcctgggaagtgtcct

SEQ ID NO: 276617 - DNA, 25 bp, Artificial
  Probe
tcatcctggagtcagcaggaggctt

SEQ ID NO: 276618 - DNA, 25 bp, Artificial
  Probe
ctagggtaccagaggtccccagtcg

SEQ ID NO: 276619 - DNA, 25 bp, Artificial
  Probe
caaaggaatccactaaggcctggga

SEQ ID NO: 276620 - DNA, 25 bp, Artificial
  Probe
caacctttggggacatggggcagac

SEQ ID NO: 276621 - DNA, 25 bp, Artificial
  Probe
tcctggcagtgtggatgttcagcag

SEQ ID NO: 276622 - DNA, 25 bp, Artificial
  Probe
aggtccccagtcgattcctggcagt

SEQ ID NO: 276623 - DNA, 25 bp, Artificial
  Probe
gaccagactatggacttcctccctt

SEQ ID NO: 276624 - DNA, 25 bp, Artificial
  Probe
agaccagactatggacttcctccct

SEQ ID NO: 276625 - DNA, 25 bp, Artificial
  Probe
tcaccctacacagagcctgtggaac

SEQ ID NO: 276626 - DNA, 25 bp, Artificial
  Probe
cttgtcccaacctttggggacatgg

SEQ ID NO: 276627 - DNA, 25 bp, Artificial
  Probe
aggaatccactaaggcctgggaagt

SEQ ID NO: 276628 - DNA, 25 bp, Artificial
  Probe
gggcagacacacatactagggtacc

SEQ ID NO: 276629 - DNA, 25 bp, Artificial
  Probe
tcagcaggtcccagaccagactatg

SEQ ID NO: 276630 - DNA, 25 bp, Artificial
  Probe
tgtggaacccccaaaggaatccact

SEQ ID NO: 276631 - DNA, 25 bp, Artificial
  Probe
aaggaatccactaaggcctgggaag

SEQ ID NO: 276632 - DNA, 25 bp, Artificial
  Probe
gactatggacttcctcccttccaga

SEQ ID NO: 276633 - DNA, 25 bp, Artificial
  Probe
tagggtaccagaggtccccagtcga

SEQ ID NO: 276634 - DNA, 25 bp, Artificial
  Probe
tcttcatcctggagtcagcaggagg

SEQ ID NO: 276635 - DNA, 25 bp, Artificial
  Probe
atgttcagcaggtcccagaccagac

SEQ ID NO: 276636 - DNA, 25 bp, Artificial
  Probe
gctcaccctacacagagcctgtgga

SEQ ID NO: 276637 - DNA, 25 bp, Artificial
  Probe
tacacagagcctgtggaacccccaa

SEQ ID NO: 276638 - DNA, 25 bp, Artificial
  Probe
cctttggggacatggggcagacaca

SEQ ID NO: 276639 - DNA, 25 bp, Artificial
  Probe
tgtggatgttcagcaggtcccagac

SEQ ID NO: 276640 - DNA, 25 bp, Artificial
  Probe
tccttgtcccaacctttggggacat

SEQ ID NO: 276641 - DNA, 25 bp, Artificial
  Probe
tcccagaccagactatggacttcct

SEQ ID NO: 276642 - DNA, 25 bp, Artificial
  Probe
gggtaccagaggtccccagtcgatt

SEQ ID NO: 276643 - DNA, 25 bp, Artificial
  Probe
catactagggtaccagaggtcccca

SEQ ID NO: 276644 - DNA, 25 bp, Artificial
  Probe
tgtcccaacctttggggacatgggg

SEQ ID NO: 276645 - DNA, 25 bp, Artificial
  Probe
cagtgtggatgttcagcaggtccca

SEQ ID NO: 276646 - DNA, 25 bp, Artificial
  Probe
ctctcttcatcctggagtcagcagg

SEQ ID NO: 276647 - DNA, 25 bp, Artificial
  Probe
actgcagacatggtaaaggaggcgt

SEQ ID NO: 276648 - DNA, 25 bp, Artificial
  Probe
cagatgccaggaggaaagctgagct

SEQ ID NO: 276649 - DNA, 25 bp, Artificial
  Probe
tgcccaaaaaactgaagagtcagca

SEQ ID NO: 276650 - DNA, 25 bp, Artificial
  Probe
gagaggtgcgctcactccttaagga

SEQ ID NO: 276651 - DNA, 25 bp, Artificial
  Probe
atgcgcaaactgctgcctcgaccta

SEQ ID NO: 276652 - DNA, 25 bp, Artificial
  Probe
tggcccaagccaacagcaaacttca

SEQ ID NO: 276653 - DNA, 25 bp, Artificial
  Probe
ttacagcacctgcttataacagagg

SEQ ID NO: 276654 - DNA, 25 bp, Artificial
  Probe
cccaggttgcagcagagaaggcgat

SEQ ID NO: 276655 - DNA, 25 bp, Artificial
  Probe
agagtcagcagatgccaggaggaaa

SEQ ID NO: 276656 - DNA, 25 bp, Artificial
  Probe
gcgtctgaggaaaccctgaccaatg

SEQ ID NO: 276657 - DNA, 25 bp, Artificial
  Probe
ctgaggaaaccctgaccaatgcctc

SEQ ID NO: 276658 - DNA, 25 bp, Artificial
  Probe
tttaaccaccttcttttgtatggag

SEQ ID NO: 276659 - DNA, 25 bp, Artificial
  Probe
ccaaagtaaacatgcgcaaactgct

SEQ ID NO: 276660 - DNA, 25 bp, Artificial
  Probe
gctgcctcgacctacagataactca

SEQ ID NO: 276661 - DNA, 25 bp, Artificial
  Probe
cttcagctgttagaagacttagaaa

SEQ ID NO: 276662 - DNA, 25 bp, Artificial
  Probe
gtaaacatgcgcaaactgctgcctc

SEQ ID NO: 276663 - DNA, 25 bp, Artificial
  Probe
taaacatgcgcaaactgctgcctcg

SEQ ID NO: 276664 - DNA, 25 bp, Artificial
  Probe
gtaaagctgcccagaactctgggga

SEQ ID NO: 276665 - DNA, 25 bp, Artificial
  Probe
tgagctgctacaaaatgaagcaaaa

SEQ ID NO: 276666 - DNA, 25 bp, Artificial
  Probe
tttaattgcccaaaaaactgaagag

SEQ ID NO: 276667 - DNA, 25 bp, Artificial
  Probe
aagctgagctgctacaaaatgaagc

SEQ ID NO: 276668 - DNA, 25 bp, Artificial
  Probe
aaaggcccaggttgcagcagagaag

SEQ ID NO: 276669 - DNA, 25 bp, Artificial
  Probe
caggttgcagcagagaaggcgatta

SEQ ID NO: 276670 - DNA, 25 bp, Artificial
  Probe
ctgtagggtggctcagtgaccaaag

SEQ ID NO: 276671 - DNA, 25 bp, Artificial
  Probe
tgccgtttacagcacctgcttataa

SEQ ID NO: 276672 - DNA, 25 bp, Artificial
  Probe
aactgaagagtcagcagatgccagg

SEQ ID NO: 276673 - DNA, 25 bp, Artificial
  Probe
catcagcaagcttgagaggaatgtg

SEQ ID NO: 276674 - DNA, 25 bp, Artificial
  Probe
atcgattgaatctgagacagcagcg

SEQ ID NO: 276675 - DNA, 25 bp, Artificial
  Probe
atctgagacagcagcgtctgaggaa

SEQ ID NO: 276676 - DNA, 25 bp, Artificial
  Probe
aggggacccagaacctgctaacatc

SEQ ID NO: 276677 - DNA, 25 bp, Artificial
  Probe
caaactgctgcctcgacctacagat

SEQ ID NO: 276678 - DNA, 25 bp, Artificial
  Probe
attgaatctgagacagcagcgtctg

SEQ ID NO: 276679 - DNA, 25 bp, Artificial
  Probe
agccaacagcaaacttcagctgtta

SEQ ID NO: 276680 - DNA, 25 bp, Artificial
  Probe
gaaagttgccgtttacagcacctgc

SEQ ID NO: 276681 - DNA, 25 bp, Artificial
  Probe
gacagcagcgtctgaggaaaccctg

SEQ ID NO: 276682 - DNA, 25 bp, Artificial
  Probe
tttacagcacctgcttataacagag

SEQ ID NO: 276683 - DNA, 25 bp, Artificial
  Probe
accaaagtaaacatgcgcaaactgc

SEQ ID NO: 276684 - DNA, 25 bp, Artificial
  Probe
aacagcaaacttcagctgttagaag

SEQ ID NO: 276685 - DNA, 25 bp, Artificial
  Probe
tgaggaaaccctgaccaatgcctcc

SEQ ID NO: 276686 - DNA, 25 bp, Artificial
  Probe
taaagctgcccagaactctggggag

SEQ ID NO: 276687 - DNA, 25 bp, Artificial
  Probe
taaagctcaagaactggtgcgactg

SEQ ID NO: 276688 - DNA, 25 bp, Artificial
  Probe
ctcaagaactggtgcgactggaagg

SEQ ID NO: 276689 - DNA, 25 bp, Artificial
  Probe
ctcagtgaccaaagtaaacatgcgc

SEQ ID NO: 276690 - DNA, 25 bp, Artificial
  Probe
ctccttaaggacataagtgagaaag

SEQ ID NO: 276691 - DNA, 25 bp, Artificial
  Probe
tcccagcgcatcagcaagcttgaga

SEQ ID NO: 276692 - DNA, 25 bp, Artificial
  Probe
aagagtcagcagatgccaggaggaa

SEQ ID NO: 276693 - DNA, 25 bp, Artificial
  Probe
aatggttcttgttttcgtctagtca

SEQ ID NO: 276694 - DNA, 25 bp, Artificial
  Probe
gactatcagaatctatgtatgtttc

SEQ ID NO: 276695 - DNA, 25 bp, Artificial
  Probe
actgtctaattgttcaccctaatgg

SEQ ID NO: 276696 - DNA, 25 bp, Artificial
  Probe
ccttagctcgcgtgtgttactttca

SEQ ID NO: 276697 - DNA, 25 bp, Artificial
  Probe
ggatatttgttgacctgccattaaa

SEQ ID NO: 276698 - DNA, 25 bp, Artificial
  Probe
tgtttcaggatatttgttgacctgc

SEQ ID NO: 276699 - DNA, 25 bp, Artificial
  Probe
ttgccctgaaattttagaaaactgt

SEQ ID NO: 276700 - DNA, 25 bp, Artificial
  Probe
ggttcttgttttcgtctagtcatgg

SEQ ID NO: 276701 - DNA, 25 bp, Artificial
  Probe
ctgcttgtagacctgttaatatagt

SEQ ID NO: 276702 - DNA, 25 bp, Artificial
  Probe
ctggattcgtgtagccagcattgca

SEQ ID NO: 276703 - DNA, 25 bp, Artificial
  Probe
gtgtagccagcattgcaggttatca

SEQ ID NO: 276704 - DNA, 25 bp, Artificial
  Probe
ggaacaacattgacttcccttagct

SEQ ID NO: 276705 - DNA, 25 bp, Artificial
  Probe
agcattgcaggttatcagagatcaa

SEQ ID NO: 276706 - DNA, 25 bp, Artificial
  Probe
ctatcagaatctatgtatgtttcag

SEQ ID NO: 276707 - DNA, 25 bp, Artificial
  Probe
aattgttcaccctaatggttcttgt

SEQ ID NO: 276708 - DNA, 25 bp, Artificial
  Probe
tgccttggaacaacattgacttccc

SEQ ID NO: 276709 - DNA, 25 bp, Artificial
  Probe
cattgacttcccttagctcgcgtgt

SEQ ID NO: 276710 - DNA, 25 bp, Artificial
  Probe
cgcgtgtgttactttcaagtttgaa

SEQ ID NO: 276711 - DNA, 25 bp, Artificial
  Probe
tcaggatatttgttgacctgccatt

SEQ ID NO: 276712 - DNA, 25 bp, Artificial
  Probe
agccagcattgcaggttatcagaga

SEQ ID NO: 276713 - DNA, 25 bp, Artificial
  Probe
cattgcaggttatcagagatcaaag

SEQ ID NO: 276714 - DNA, 25 bp, Artificial
  Probe
cttgttttcgtctagtcatggagat

SEQ ID NO: 276715 - DNA, 25 bp, Artificial
  Probe
taaaggactactcttttgctgtttt

SEQ ID NO: 276716 - DNA, 25 bp, Artificial
  Probe
ctagtcatggagattcagtaagtgc

SEQ ID NO: 276717 - DNA, 25 bp, Artificial
  Probe
cgtctagtcatggagattcagtaag

SEQ ID NO: 276718 - DNA, 25 bp, Artificial
  Probe
tactttcaagtttgaattcaactgg

SEQ ID NO: 276719 - DNA, 25 bp, Artificial
  Probe
agttaaaggactactcttttgctgt

SEQ ID NO: 276720 - DNA, 25 bp, Artificial
  Probe
gtctaattgttcaccctaatggttc

SEQ ID NO: 276721 - DNA, 25 bp, Artificial
  Probe
gagattcagtaagtgccttggaaca

SEQ ID NO: 276722 - DNA, 25 bp, Artificial
  Probe
tcagtaagtgccttggaacaacatt

SEQ ID NO: 276723 - DNA, 25 bp, Artificial
  Probe
tggaacaacattgacttcccttagc

SEQ ID NO: 276724 - DNA, 25 bp, Artificial
  Probe
tcaccctaatggttcttgttttcgt

SEQ ID NO: 276725 - DNA, 25 bp, Artificial
  Probe
agattcagtaagtgccttggaacaa

SEQ ID NO: 276726 - DNA, 25 bp, Artificial
  Probe
ttcaccctaatggttcttgttttcg

SEQ ID NO: 276727 - DNA, 25 bp, Artificial
  Probe
agtaagtgccttggaacaacattga

SEQ ID NO: 276728 - DNA, 25 bp, Artificial
  Probe
ccagcattgcaggttatcagagatc

SEQ ID NO: 276729 - DNA, 25 bp, Artificial
  Probe
acttcccttagctcgcgtgtgttac

SEQ ID NO: 276730 - DNA, 25 bp, Artificial
  Probe
actttcaagtttgaattcaactggg

SEQ ID NO: 276731 - DNA, 25 bp, Artificial
  Probe
tgttttcgtctagtcatggagattc

SEQ ID NO: 276732 - DNA, 25 bp, Artificial
  Probe
taagtgccttggaacaacattgact

SEQ ID NO: 276733 - DNA, 25 bp, Artificial
  Probe
tttgccctgaaattttagaaaactg

SEQ ID NO: 276734 - DNA, 25 bp, Artificial
  Probe
ggactactcttttgctgttttatca

SEQ ID NO: 276735 - DNA, 25 bp, Artificial
  Probe
tttaaacttgctggattcgtgtagc

SEQ ID NO: 276736 - DNA, 25 bp, Artificial
  Probe
aaggactactcttttgctgttttat

SEQ ID NO: 276737 - DNA, 25 bp, Artificial
  Probe
cctaatggttcttgttttcgtctag

SEQ ID NO: 276738 - DNA, 25 bp, Artificial
  Probe
attgttcaccctaatggttcttgtt

SEQ ID NO: 276739 - DNA, 25 bp, Artificial
  Probe
caagtcttaccaaccgaggcactac

SEQ ID NO: 276740 - DNA, 25 bp, Artificial
  Probe
acagatactgaaacccagtagcaag

SEQ ID NO: 276741 - DNA, 25 bp, Artificial
  Probe
agcaagtgacatacccatgccatct

SEQ ID NO: 276742 - DNA, 25 bp, Artificial
  Probe
cctttgaatttcctaatagaggata

SEQ ID NO: 276743 - DNA, 25 bp, Artificial
  Probe
attctctaagtgaatacacatgaag

SEQ ID NO: 276744 - DNA, 25 bp, Artificial
  Probe
tcaattcacaggacagtgctgaaat

SEQ ID NO: 276745 - DNA, 25 bp, Artificial
  Probe
atactgaaacccagtagcaagtgac

SEQ ID NO: 276746 - DNA, 25 bp, Artificial
  Probe
tctctaagtgaatacacatgaagaa

SEQ ID NO: 276747 - DNA, 25 bp, Artificial
  Probe
cataaggccataattagctgtgtgt

SEQ ID NO: 276748 - DNA, 25 bp, Artificial
  Probe
taggactgtcggtaaccatcctaat

SEQ ID NO: 276749 - DNA, 25 bp, Artificial
  Probe
ttgaatttcctaatagaggatagcc

SEQ ID NO: 276750 - DNA, 25 bp, Artificial
  Probe
aagcataaggccataattagctgtg

SEQ ID NO: 276751 - DNA, 25 bp, Artificial
  Probe
atgcatagagattgcggagaccatt

SEQ ID NO: 276752 - DNA, 25 bp, Artificial
  Probe
gctctagagtcaccagtcaattcac

SEQ ID NO: 276753 - DNA, 25 bp, Artificial
  Probe
tcttaccaaccgaggcactacagat

SEQ ID NO: 276754 - DNA, 25 bp, Artificial
  Probe
attcacaggacagtgctgaaattct

SEQ ID NO: 276755 - DNA, 25 bp, Artificial
  Probe
gctgcctgtcacattttaccgcatt

SEQ ID NO: 276756 - DNA, 25 bp, Artificial
  Probe
tgaatcaaaggctctagagtcacca

SEQ ID NO: 276757 - DNA, 25 bp, Artificial
  Probe
tgacttctgtcatctcttttgaaag

SEQ ID NO: 276758 - DNA, 25 bp, Artificial
  Probe
ttttcctgttcctgaatcaaaggct

SEQ ID NO: 276759 - DNA, 25 bp, Artificial
  Probe
ccttgggctgcctgtcacattttac

SEQ ID NO: 276760 - DNA, 25 bp, Artificial
  Probe
atgtgttcaaccatgatgagttttc

SEQ ID NO: 276761 - DNA, 25 bp, Artificial
  Probe
ctacatatgcatagagattgcggag

SEQ ID NO: 276762 - DNA, 25 bp, Artificial
  Probe
ccaaccgaggcactacagatactga

SEQ ID NO: 276763 - DNA, 25 bp, Artificial
  Probe
tagaggatagccagcccttgggctg

SEQ ID NO: 276764 - DNA, 25 bp, Artificial
  Probe
tgaactacatatgcatagagattgc

SEQ ID NO: 276765 - DNA, 25 bp, Artificial
  Probe
acaataggactgtcggtaaccatcc

SEQ ID NO: 276766 - DNA, 25 bp, Artificial
  Probe
gtgactatagcgttgacttctgtca

SEQ ID NO: 276767 - DNA, 25 bp, Artificial
  Probe
tctgtcatctcttttgaaagacttg

SEQ ID NO: 276768 - DNA, 25 bp, Artificial
  Probe
ctgtcatctcttttgaaagacttgt

SEQ ID NO: 276769 - DNA, 25 bp, Artificial
  Probe
gaaatgcctttgaatttcctaatag

SEQ ID NO: 276770 - DNA, 25 bp, Artificial
  Probe
aatgcctttgaatttcctaatagag

SEQ ID NO: 276771 - DNA, 25 bp, Artificial
  Probe
atctgtgactatagcgttgacttct

SEQ ID NO: 276772 - DNA, 25 bp, Artificial
  Probe
gtaatttcaacaataggactgtcgg

SEQ ID NO: 276773 - DNA, 25 bp, Artificial
  Probe
catttttctcatgatttgtgtagca

SEQ ID NO: 276774 - DNA, 25 bp, Artificial
  Probe
agattgcggagaccattacaatctg

SEQ ID NO: 276775 - DNA, 25 bp, Artificial
  Probe
acccagtagcaagtgacatacccat

SEQ ID NO: 276776 - DNA, 25 bp, Artificial
  Probe
tcctaatagaggatagccagccctt

SEQ ID NO: 276777 - DNA, 25 bp, Artificial
  Probe
tcacaggacagtgctgaaattctaa

SEQ ID NO: 276778 - DNA, 25 bp, Artificial
  Probe
gactgtcggtaaccatcctaatcaa

SEQ ID NO: 276779 - DNA, 25 bp, Artificial
  Probe
gctgtgtgtccctgcatatatatgt

SEQ ID NO: 276780 - DNA, 25 bp, Artificial
  Probe
gccattctctaagtgaatacacatg

SEQ ID NO: 276781 - DNA, 25 bp, Artificial
  Probe
gtgtgtccctgcatatatatgtgtg

SEQ ID NO: 276782 - DNA, 25 bp, Artificial
  Probe
agtagcaagtgacatacccatgcca

SEQ ID NO: 276783 - DNA, 25 bp, Artificial
  Probe
ttcctgaatcaaaggctctagagtc

SEQ ID NO: 276784 - DNA, 25 bp, Artificial
  Probe
attagctgtgtgtccctgcatatat

SEQ ID NO: 276785 - DNA, 25 bp, Artificial
  Probe
aagatgagcgtctggcaccaccgtc

SEQ ID NO: 276786 - DNA, 25 bp, Artificial
  Probe
aatatttgaacgactgtatttgcca

SEQ ID NO: 276787 - DNA, 25 bp, Artificial
  Probe
tcttcaagaagtgacggagcaagac

SEQ ID NO: 276788 - DNA, 25 bp, Artificial
  Probe
tcttacctcagctgcgacacagtgg

SEQ ID NO: 276789 - DNA, 25 bp, Artificial
  Probe
gactggacatctggagtatgttgca

SEQ ID NO: 276790 - DNA, 25 bp, Artificial
  Probe
cccagcagctgagagtgaaatgcag

SEQ ID NO: 276791 - DNA, 25 bp, Artificial
  Probe
ggccctgcagggaatccgaatggcc

SEQ ID NO: 276792 - DNA, 25 bp, Artificial
  Probe
acgtgtacaatgactggacatctgg

SEQ ID NO: 276793 - DNA, 25 bp, Artificial
  Probe
gcgcatctaaggtcgatgtaatcca

SEQ ID NO: 276794 - DNA, 25 bp, Artificial
  Probe
tgtgccatgttgtgtgtttgaccaa

SEQ ID NO: 276795 - DNA, 25 bp, Artificial
  Probe
tgactggacatctggagtatgttgc

SEQ ID NO: 276796 - DNA, 25 bp, Artificial
  Probe
tttttaacttgagaaactcctggtg

SEQ ID NO: 276797 - DNA, 25 bp, Artificial
  Probe
acagaatctctgtggccctgcaggg

SEQ ID NO: 276798 - DNA, 25 bp, Artificial
  Probe
gagaaactcctggtggcacaagatg

SEQ ID NO: 276799 - DNA, 25 bp, Artificial
  Probe
aacgactgtatttgccaaagcacat

SEQ ID NO: 276800 - DNA, 25 bp, Artificial
  Probe
tctctgtggccctgcagggaatccg

SEQ ID NO: 276801 - DNA, 25 bp, Artificial
  Probe
acaagatgagcgtctggcaccaccg

SEQ ID NO: 276802 - DNA, 25 bp, Artificial
  Probe
tactttaactcaatgggtgcttttt

SEQ ID NO: 276803 - DNA, 25 bp, Artificial
  Probe
tgttgtgtgtttgaccaattcaatc

SEQ ID NO: 276804 - DNA, 25 bp, Artificial
  Probe
caccgtctcctatgccaggatttaa

SEQ ID NO: 276805 - DNA, 25 bp, Artificial
  Probe
tgctttttaacttgagaaactcctg

SEQ ID NO: 276806 - DNA, 25 bp, Artificial
  Probe
ctgtggccctgcagggaatccgaat

SEQ ID NO: 276807 - DNA, 25 bp, Artificial
  Probe
tgtctgtcttcaagaagtgacggag

SEQ ID NO: 276808 - DNA, 25 bp, Artificial
  Probe
ccctgcagggaatccgaatggccca

SEQ ID NO: 276809 - DNA, 25 bp, Artificial
  Probe
tgtacaatgactggacatctggagt

SEQ ID NO: 276810 - DNA, 25 bp, Artificial
  Probe
agacaaattactttaactcaatggg

SEQ ID NO: 276811 - DNA, 25 bp, Artificial
  Probe
acagtgacagaatctctgtggccct

SEQ ID NO: 276812 - DNA, 25 bp, Artificial
  Probe
acggaagacagtcttacctcagctg

SEQ ID NO: 276813 - DNA, 25 bp, Artificial
  Probe
tgaaatgcagatcaggcccattgtg

SEQ ID NO: 276814 - DNA, 25 bp, Artificial
  Probe
gatcaggcccattgtgatgtcacag

SEQ ID NO: 276815 - DNA, 25 bp, Artificial
  Probe
caatgactggacatctggagtatgt

SEQ ID NO: 276816 - DNA, 25 bp, Artificial
  Probe
agtgacagaatctctgtggccctgc

SEQ ID NO: 276817 - DNA, 25 bp, Artificial
  Probe
actcctggtggcacaagatgagcgt

SEQ ID NO: 276818 - DNA, 25 bp, Artificial
  Probe
tggcacaagatgagcgtctggcacc

SEQ ID NO: 276819 - DNA, 25 bp, Artificial
  Probe
ccaccgtctcctatgccaggattta

SEQ ID NO: 276820 - DNA, 25 bp, Artificial
  Probe
gaaatgcagatcaggcccattgtga

SEQ ID NO: 276821 - DNA, 25 bp, Artificial
  Probe
ctcacatacacgtgtacaatgactg

SEQ ID NO: 276822 - DNA, 25 bp, Artificial
  Probe
ctcaatgggtgctttttaacttgag

SEQ ID NO: 276823 - DNA, 25 bp, Artificial
  Probe
cagatcaggcccattgtgatgtcac

SEQ ID NO: 276824 - DNA, 25 bp, Artificial
  Probe
agcagcgcatctaaggtcgatgtaa

SEQ ID NO: 276825 - DNA, 25 bp, Artificial
  Probe
ctgtctcacatacacgtgtacaatg

SEQ ID NO: 276826 - DNA, 25 bp, Artificial
  Probe
taactcaatgggtgctttttaactt

SEQ ID NO: 276827 - DNA, 25 bp, Artificial
  Probe
cctggtggcacaagatgagcgtctg

SEQ ID NO: 276828 - DNA, 25 bp, Artificial
  Probe
ataacagtgacagaatctctgtggc

SEQ ID NO: 276829 - DNA, 25 bp, Artificial
  Probe
catgttgtgtgtttgaccaattcaa

SEQ ID NO: 276830 - DNA, 25 bp, Artificial
  Probe
ctgtcttcaagaagtgacggagcaa

SEQ ID NO: 276831 - DNA, 25 bp, Artificial
  Probe
tgattgtgctcatggacatggacac

SEQ ID NO: 276832 - DNA, 25 bp, Artificial
  Probe
cagacccttttttgccgtgcaaagg

SEQ ID NO: 276833 - DNA, 25 bp, Artificial
  Probe
gtgggtagccagcatttcatggtac

SEQ ID NO: 276834 - DNA, 25 bp, Artificial
  Probe
caggacccttgtttgtgtcaaaaat

SEQ ID NO: 276835 - DNA, 25 bp, Artificial
  Probe
tttactccggtttcccagggcacag

SEQ ID NO: 276836 - DNA, 25 bp, Artificial
  Probe
cccttgtttgtgtcaaaaatggctt

SEQ ID NO: 276837 - DNA, 25 bp, Artificial
  Probe
agggcatcctgttcccctagcctgt

SEQ ID NO: 276838 - DNA, 25 bp, Artificial
  Probe
gcatgccccaggacccttgtttgtg

SEQ ID NO: 276839 - DNA, 25 bp, Artificial
  Probe
actgcagcctggtgggccagtctcc

SEQ ID NO: 276840 - DNA, 25 bp, Artificial
  Probe
ggtgctatctgttaactgattgtgc

SEQ ID NO: 276841 - DNA, 25 bp, Artificial
  Probe
ggtgctagagcctgagctctcctgc

SEQ ID NO: 276842 - DNA, 25 bp, Artificial
  Probe
tctcaattctgatcattcagtcagg

SEQ ID NO: 276843 - DNA, 25 bp, Artificial
  Probe
gctccttttgtggatcctgtttctc

SEQ ID NO: 276844 - DNA, 25 bp, Artificial
  Probe
gtgagcactctgcttctgtcccgct

SEQ ID NO: 276845 - DNA, 25 bp, Artificial
  Probe
gactccctttcattttggtgcatca

SEQ ID NO: 276846 - DNA, 25 bp, Artificial
  Probe
agccaccaaggaatgagactctgcc

SEQ ID NO: 276847 - DNA, 25 bp, Artificial
  Probe
ctctgaccctgcaggcgccttggga

SEQ ID NO: 276848 - DNA, 25 bp, Artificial
  Probe
caaaggactccctttcattttggtg

SEQ ID NO: 276849 - DNA, 25 bp, Artificial
  Probe
atgctctgaccctgcaggcgccttg

SEQ ID NO: 276850 - DNA, 25 bp, Artificial
  Probe
tttgtggatcctgtttctctcccag

SEQ ID NO: 276851 - DNA, 25 bp, Artificial
  Probe
gccccaggacccttgtttgtgtcaa

SEQ ID NO: 276852 - DNA, 25 bp, Artificial
  Probe
ttcactgcacaactaaggccaggcc

SEQ ID NO: 276853 - DNA, 25 bp, Artificial
  Probe
tggtgggtagccagcatttcatggt

SEQ ID NO: 276854 - DNA, 25 bp, Artificial
  Probe
ctcaccctgatgatttactccggtt

SEQ ID NO: 276855 - DNA, 25 bp, Artificial
  Probe
tagagcctgagctctcctgccctgg

SEQ ID NO: 276856 - DNA, 25 bp, Artificial
  Probe
agtctccatttcagcatcttgcatg

SEQ ID NO: 276857 - DNA, 25 bp, Artificial
  Probe
tttcattttggtgcatcactccacg

SEQ ID NO: 276858 - DNA, 25 bp, Artificial
  Probe
agcactgcagcctggtgggccagtc

SEQ ID NO: 276859 - DNA, 25 bp, Artificial
  Probe
gtgctcatggacatggacacagacc

SEQ ID NO: 276860 - DNA, 25 bp, Artificial
  Probe
agactggctgccagagtagccacca

SEQ ID NO: 276861 - DNA, 25 bp, Artificial
  Probe
ttttttgccgtgcaaagggaattct

SEQ ID NO: 276862 - DNA, 25 bp, Artificial
  Probe
gtggcatgccccaggacccttgttt

SEQ ID NO: 276863 - DNA, 25 bp, Artificial
  Probe
ctgatgatttactccggtttcccag

SEQ ID NO: 276864 - DNA, 25 bp, Artificial
  Probe
gctcccagcactgcagcctggtggg

SEQ ID NO: 276865 - DNA, 25 bp, Artificial
  Probe
ttcctcagacccttttttgccgtgc

SEQ ID NO: 276866 - DNA, 25 bp, Artificial
  Probe
ctccggtttcccagggcacagggtg

SEQ ID NO: 276867 - DNA, 25 bp, Artificial
  Probe
tgggaagcgcccaaaggactccctt

SEQ ID NO: 276868 - DNA, 25 bp, Artificial
  Probe
aaatggctttcctgctccttttgtg

SEQ ID NO: 276869 - DNA, 25 bp, Artificial
  Probe
caagtgggtgctagagcctgagctc

SEQ ID NO: 276870 - DNA, 25 bp, Artificial
  Probe
gtcaaaaatggctttcctgctcctt

SEQ ID NO: 276871 - DNA, 25 bp, Artificial
  Probe
gcctggtgggccagtctccatttca

SEQ ID NO: 276872 - DNA, 25 bp, Artificial
  Probe
cagttggtgctatctgttaactgat

SEQ ID NO: 276873 - DNA, 25 bp, Artificial
  Probe
cctgggcatcccagttggtgctatc

SEQ ID NO: 276874 - DNA, 25 bp, Artificial
  Probe
ttttggtgcatcactccacggctcc

SEQ ID NO: 276875 - DNA, 25 bp, Artificial
  Probe
acaactaaggccaggccctccagag

SEQ ID NO: 276876 - DNA, 25 bp, Artificial
  Probe
gcgcccaaaggactccctttcattt

SEQ ID NO: 276877 - DNA, 25 bp, Artificial
  Probe
gtgtcaggaacactgcagtgtctca

SEQ ID NO: 276878 - DNA, 25 bp, Artificial
  Probe
ccgccattgtctgtcctttggccag

SEQ ID NO: 276879 - DNA, 25 bp, Artificial
  Probe
gggtttccatctgctgtttcatctt

SEQ ID NO: 276880 - DNA, 25 bp, Artificial
  Probe
ctagcttgggtgctgaagcacggtc

SEQ ID NO: 276881 - DNA, 25 bp, Artificial
  Probe
tcatcttcagggagtgccccatgac

SEQ ID NO: 276882 - DNA, 25 bp, Artificial
  Probe
ttgtctgtcctttggccagatgtta

SEQ ID NO: 276883 - DNA, 25 bp, Artificial
  Probe
acacctgtaggttattgcagtccta

SEQ ID NO: 276884 - DNA, 25 bp, Artificial
  Probe
cttgggtgctgaagcacggtccgta

SEQ ID NO: 276885 - DNA, 25 bp, Artificial
  Probe
tacccagcagctagcttgggtgctg

SEQ ID NO: 276886 - DNA, 25 bp, Artificial
  Probe
tagggccacagaggtagaccctgag

SEQ ID NO: 276887 - DNA, 25 bp, Artificial
  Probe
gagacaatatgtctttgccttcatt

SEQ ID NO: 276888 - DNA, 25 bp, Artificial
  Probe
cctgaggccacaggtcagtgtctcc

SEQ ID NO: 276889 - DNA, 25 bp, Artificial
  Probe
atcttcagggagtgccccatgactt

SEQ ID NO: 276890 - DNA, 25 bp, Artificial
  Probe
ctgtttcatcttcagggagtgcccc

SEQ ID NO: 276891 - DNA, 25 bp, Artificial
  Probe
gccttcattgaggttctggtatagt

SEQ ID NO: 276892 - DNA, 25 bp, Artificial
  Probe
tggccagatgttacttgtttcctgt

SEQ ID NO: 276893 - DNA, 25 bp, Artificial
  Probe
acaatatgtctttgccttcattgag

SEQ ID NO: 276894 - DNA, 25 bp, Artificial
  Probe
tctccttgaacgttcaaatgggtaa

SEQ ID NO: 276895 - DNA, 25 bp, Artificial
  Probe
agggccacagaggtagaccctgaga

SEQ ID NO: 276896 - DNA, 25 bp, Artificial
  Probe
tgtcctttggccagatgttacttgt

SEQ ID NO: 276897 - DNA, 25 bp, Artificial
  Probe
ggtcagtgtctccttgaacgttcaa

SEQ ID NO: 276898 - DNA, 25 bp, Artificial
  Probe
catctgctgtttcatcttcagggag

SEQ ID NO: 276899 - DNA, 25 bp, Artificial
  Probe
tgtttcatcttcagggagtgcccca

SEQ ID NO: 276900 - DNA, 25 bp, Artificial
  Probe
tgtcaggaacactgcagtgtctcac

SEQ ID NO: 276901 - DNA, 25 bp, Artificial
  Probe
cttcctgaggccacaggtcagtgtc

SEQ ID NO: 276902 - DNA, 25 bp, Artificial
  Probe
gtctttgccttcattgaggttctgg

SEQ ID NO: 276903 - DNA, 25 bp, Artificial
  Probe
cattgtctgtcctttggccagatgt

SEQ ID NO: 276904 - DNA, 25 bp, Artificial
  Probe
agggagtgccccatgacttgtgtca

SEQ ID NO: 276905 - DNA, 25 bp, Artificial
  Probe
cacaggtcagtgtctccttgaacgt

SEQ ID NO: 276906 - DNA, 25 bp, Artificial
  Probe
cagcagctagcttgggtgctgaagc

SEQ ID NO: 276907 - DNA, 25 bp, Artificial
  Probe
tgaaatgggtttccatctgctgttt

SEQ ID NO: 276908 - DNA, 25 bp, Artificial
  Probe
tgaaattcctgattgaggcggttca

SEQ ID NO: 276909 - DNA, 25 bp, Artificial
  Probe
atgaaattcctgattgaggcggttc

SEQ ID NO: 276910 - DNA, 25 bp, Artificial
  Probe
tagcttgggtgctgaagcacggtcc

SEQ ID NO: 276911 - DNA, 25 bp, Artificial
  Probe
acttgtgtcaggaacactgcagtgt

SEQ ID NO: 276912 - DNA, 25 bp, Artificial
  Probe
gacttgtgtcaggaacactgcagtg

SEQ ID NO: 276913 - DNA, 25 bp, Artificial
  Probe
tggccgccattgtctgtcctttggc

SEQ ID NO: 276914 - DNA, 25 bp, Artificial
  Probe
cttcattgaggttctggtatagtct

SEQ ID NO: 276915 - DNA, 25 bp, Artificial
  Probe
tgtctccttgaacgttcaaatgggt

SEQ ID NO: 276916 - DNA, 25 bp, Artificial
  Probe
tatcacttcctgaggccacaggtca

SEQ ID NO: 276917 - DNA, 25 bp, Artificial
  Probe
tgggtacccagcagctagcttgggt

SEQ ID NO: 276918 - DNA, 25 bp, Artificial
  Probe
ccatgacttgtgtcaggaacactgc

SEQ ID NO: 276919 - DNA, 25 bp, Artificial
  Probe
tatgtctttgccttcattgaggttc

SEQ ID NO: 276920 - DNA, 25 bp, Artificial
  Probe
ttccatctgctgtttcatcttcagg

SEQ ID NO: 276921 - DNA, 25 bp, Artificial
  Probe
agtgccccatgacttgtgtcaggaa

SEQ ID NO: 276922 - DNA, 25 bp, Artificial
  Probe
gggccacagaggtagaccctgagac

SEQ ID NO: 276923 - DNA, 25 bp, Artificial
  Probe
atttctcaaggcagttatgttccta

SEQ ID NO: 276924 - DNA, 25 bp, Artificial
  Probe
atggatggcttctgtcccgtccaga

SEQ ID NO: 276925 - DNA, 25 bp, Artificial
  Probe
agtgcactgcggagagtcactgaaa

SEQ ID NO: 276926 - DNA, 25 bp, Artificial
  Probe
aggacctaaggcagtgtgcactccg

SEQ ID NO: 276927 - DNA, 25 bp, Artificial
  Probe
aatccctcaagtcttaccaagctgg

SEQ ID NO: 276928 - DNA, 25 bp, Artificial
  Probe
ctcctttgtctagtttaaaatggat

SEQ ID NO: 276929 - DNA, 25 bp, Artificial
  Probe
gttcgaaatctcctttgtctagttt

SEQ ID NO: 276930 - DNA, 25 bp, Artificial
  Probe
tggcaggacctaaggcagtgtgcac

SEQ ID NO: 276931 - DNA, 25 bp, Artificial
  Probe
gttcctacgttctgaccaaacagtt

SEQ ID NO: 276932 - DNA, 25 bp, Artificial
  Probe
tggatggcttctgtcccgtccagaa

SEQ ID NO: 276933 - DNA, 25 bp, Artificial
  Probe
ggacctaaggcagtgtgcactccgg

SEQ ID NO: 276934 - DNA, 25 bp, Artificial
  Probe
ctggcaggacctaaggcagtgtgca

SEQ ID NO: 276935 - DNA, 25 bp, Artificial
  Probe
atctcctttgtctagtttaaaatgg

SEQ ID NO: 276936 - DNA, 25 bp, Artificial
  Probe
tcagatttctcaaggcagttatgtt

SEQ ID NO: 276937 - DNA, 25 bp, Artificial
  Probe
cttaccaagctggtgagtgcactgc

SEQ ID NO: 276938 - DNA, 25 bp, Artificial
  Probe
gaggtggtcgcttgaacacttctgt

SEQ ID NO: 276939 - DNA, 25 bp, Artificial
  Probe
ctcaagtcttaccaagctggtgagt

SEQ ID NO: 276940 - DNA, 25 bp, Artificial
  Probe
tgtgcactccggttaggtaattctc

SEQ ID NO: 276941 - DNA, 25 bp, Artificial
  Probe
ggcagtgtgcactccggttaggtaa

SEQ ID NO: 276942 - DNA, 25 bp, Artificial
  Probe
gtgcactgcggagagtcactgaaat

SEQ ID NO: 276943 - DNA, 25 bp, Artificial
  Probe
agttatgttcctacgttctgaccaa

SEQ ID NO: 276944 - DNA, 25 bp, Artificial
  Probe
tgggtcaggaacactcggccctgga

SEQ ID NO: 276945 - DNA, 25 bp, Artificial
  Probe
ctgtgctggcaggacctaaggcagt

SEQ ID NO: 276946 - DNA, 25 bp, Artificial
  Probe
tctcaaggcagttatgttcctacgt

SEQ ID NO: 276947 - DNA, 25 bp, Artificial
  Probe
atgttcctacgttctgaccaaacag

SEQ ID NO: 276948 - DNA, 25 bp, Artificial
  Probe
gcactccggttaggtaattctcaga

SEQ ID NO: 276949 - DNA, 25 bp, Artificial
  Probe
accaagctggtgagtgcactgcgga

SEQ ID NO: 276950 - DNA, 25 bp, Artificial
  Probe
tcctacgttctgaccaaacagtttg

SEQ ID NO: 276951 - DNA, 25 bp, Artificial
  Probe
tacgttctgaccaaacagtttgagg

SEQ ID NO: 276952 - DNA, 25 bp, Artificial
  Probe
gttatgttcctacgttctgaccaaa

SEQ ID NO: 276953 - DNA, 25 bp, Artificial
  Probe
tggtgggtcaggaacactcggccct

SEQ ID NO: 276954 - DNA, 25 bp, Artificial
  Probe
ttgaacacttctgtgctggcaggac

SEQ ID NO: 276955 - DNA, 25 bp, Artificial
  Probe
aaggcagtgtgcactccggttaggt

SEQ ID NO: 276956 - DNA, 25 bp, Artificial
  Probe
ctccggttaggtaattctcagattt

SEQ ID NO: 276957 - DNA, 25 bp, Artificial
  Probe
tcgcttgaacacttctgtgctggca

SEQ ID NO: 276958 - DNA, 25 bp, Artificial
  Probe
ctcagatttctcaaggcagttatgt

SEQ ID NO: 276959 - DNA, 25 bp, Artificial
  Probe
tcaaggcagttatgttcctacgttc

SEQ ID NO: 276960 - DNA, 25 bp, Artificial
  Probe
ttctgtgctggcaggacctaaggca

SEQ ID NO: 276961 - DNA, 25 bp, Artificial
  Probe
aaatggatggcttctgtcccgtcca

SEQ ID NO: 276962 - DNA, 25 bp, Artificial
  Probe
taggtaattctcagatttctcaagg

SEQ ID NO: 276963 - DNA, 25 bp, Artificial
  Probe
gaatccctcaagtcttaccaagctg

SEQ ID NO: 276964 - DNA, 25 bp, Artificial
  Probe
aaggcagttatgttcctacgttctg

SEQ ID NO: 276965 - DNA, 25 bp, Artificial
  Probe
cctacgttctgaccaaacagtttga

SEQ ID NO: 276966 - DNA, 25 bp, Artificial
  Probe
ttagttcgaaatctcctttgtctag

SEQ ID NO: 276967 - DNA, 25 bp, Artificial
  Probe
acacttctgtgctggcaggacctaa

SEQ ID NO: 276968 - DNA, 25 bp, Artificial
  Probe
gtgcactccggttaggtaattctca

SEQ ID NO: 276969 - DNA, 25 bp, Artificial
  Probe
tcacccctttttggtgtgttggaca

SEQ ID NO: 276970 - DNA, 25 bp, Artificial
  Probe
gatcccaatgtgacccgggccacag

SEQ ID NO: 276971 - DNA, 25 bp, Artificial
  Probe
cctaaacggttcagtttcctctgca

SEQ ID NO: 276972 - DNA, 25 bp, Artificial
  Probe
cctcaagtgaggtcatcacctcctg

SEQ ID NO: 276973 - DNA, 25 bp, Artificial
  Probe
aggtcatcacctcctgggctcctgg

SEQ ID NO: 276974 - DNA, 25 bp, Artificial
  Probe
cacctcctgggctcctgggagctgg

SEQ ID NO: 276975 - DNA, 25 bp, Artificial
  Probe
ctggtgaccttggtgctcagagagc

SEQ ID NO: 276976 - DNA, 25 bp, Artificial
  Probe
tgcagtcgcacatgatgatcccaat

SEQ ID NO: 276977 - DNA, 25 bp, Artificial
  Probe
acctcctgggctcctgggagctggt

SEQ ID NO: 276978 - DNA, 25 bp, Artificial
  Probe
tcaagtgaggtcatcacctcctggg

SEQ ID NO: 276979 - DNA, 25 bp, Artificial
  Probe
caaagaaggggctcctacaggcacc

SEQ ID NO: 276980 - DNA, 25 bp, Artificial
  Probe
tggtgaccttggtgctcagagagcc

SEQ ID NO: 276981 - DNA, 25 bp, Artificial
  Probe
ctggggctgcacagaagacctcagg

SEQ ID NO: 276982 - DNA, 25 bp, Artificial
  Probe
ccctgaagtgtgagccatctacttt

SEQ ID NO: 276983 - DNA, 25 bp, Artificial
  Probe
ggggcttaaagctctagcctcaagt

SEQ ID NO: 276984 - DNA, 25 bp, Artificial
  Probe
ctcagagagccctgaagtgtgagcc

SEQ ID NO: 276985 - DNA, 25 bp, Artificial
  Probe
accttggtgctcagagagccctgaa

SEQ ID NO: 276986 - DNA, 25 bp, Artificial
  Probe
ggcaccagccacctaaacggttcag

SEQ ID NO: 276987 - DNA, 25 bp, Artificial
  Probe
ggcttaaagctctagcctcaagtga

SEQ ID NO: 276988 - DNA, 25 bp, Artificial
  Probe
aaggggctcctacaggcaccagcca

SEQ ID NO: 276989 - DNA, 25 bp, Artificial
  Probe
tttcctctgcactggggctgcacag

SEQ ID NO: 276990 - DNA, 25 bp, Artificial
  Probe
acggttcagtttcctctgcactggg

SEQ ID NO: 276991 - DNA, 25 bp, Artificial
  Probe
gaagtgtgagccatctactttggtc

SEQ ID NO: 276992 - DNA, 25 bp, Artificial
  Probe
agctggtgaccttggtgctcagaga

SEQ ID NO: 276993 - DNA, 25 bp, Artificial
  Probe
agaaggggctcctacaggcaccagc

SEQ ID NO: 276994 - DNA, 25 bp, Artificial
  Probe
gacattctgcagtcgcacatgatga

SEQ ID NO: 276995 - DNA, 25 bp, Artificial
  Probe
gcaccagccacctaaacggttcagt

SEQ ID NO: 276996 - DNA, 25 bp, Artificial
  Probe
ccttgctgggttacttgtcaacaaa

SEQ ID NO: 276997 - DNA, 25 bp, Artificial
  Probe
ctgcactggggctgcacagaagacc

SEQ ID NO: 276998 - DNA, 25 bp, Artificial
  Probe
ttctgcagtcgcacatgatgatccc

SEQ ID NO: 276999 - DNA, 25 bp, Artificial
  Probe
gctgcacagaagacctcagggcagg

SEQ ID NO: 277000 - DNA, 25 bp, Artificial
  Probe
tggtgctcagagagccctgaagtgt

SEQ ID NO: 277001 - DNA, 25 bp, Artificial
  Probe
cgcacatgatgatcccaatgtgacc

SEQ ID NO: 277002 - DNA, 25 bp, Artificial
  Probe
tctgcagtcgcacatgatgatccca

SEQ ID NO: 277003 - DNA, 25 bp, Artificial
  Probe
aaagctctagcctcaagtgaggtca

SEQ ID NO: 277004 - DNA, 25 bp, Artificial
  Probe
ctctagcctcaagtgaggtcatcac

SEQ ID NO: 277005 - DNA, 25 bp, Artificial
  Probe
tgtgagccatctactttggtcatgg

SEQ ID NO: 277006 - DNA, 25 bp, Artificial
  Probe
aggggctcagaacctcatggacatt

SEQ ID NO: 277007 - DNA, 25 bp, Artificial
  Probe
cacctaaacggttcagtttcctctg

SEQ ID NO: 277008 - DNA, 25 bp, Artificial
  Probe
gccctgaagtgtgagccatctactt

SEQ ID NO: 277009 - DNA, 25 bp, Artificial
  Probe
catgatgatcccaatgtgacccggg

SEQ ID NO: 277010 - DNA, 25 bp, Artificial
  Probe
caccagccacctaaacggttcagtt

SEQ ID NO: 277011 - DNA, 25 bp, Artificial
  Probe
ttggtgctcagagagccctgaagtg

SEQ ID NO: 277012 - DNA, 25 bp, Artificial
  Probe
gcttaaagctctagcctcaagtgag

SEQ ID NO: 277013 - DNA, 25 bp, Artificial
  Probe
gggctgcacagaagacctcagggca

SEQ ID NO: 277014 - DNA, 25 bp, Artificial
  Probe
caccttgctgggttacttgtcaaca

SEQ ID NO: 277015 - DNA, 25 bp, Artificial
  Probe
cagagcgctatccaggatctcctga

SEQ ID NO: 277016 - DNA, 25 bp, Artificial
  Probe
gaaccgagatgcccagagcgctatc

SEQ ID NO: 277017 - DNA, 25 bp, Artificial
  Probe
gatgcccagagcgctatccaggatc

SEQ ID NO: 277018 - DNA, 25 bp, Artificial
  Probe
ccaggatctcctgagtgaaagagaa

SEQ ID NO: 277019 - DNA, 25 bp, Artificial
  Probe
tcagaaccgagatgcccagagcgct

SEQ ID NO: 277020 - DNA, 25 bp, Artificial
  Probe
ggatctcctgagtgaaagagaacag

SEQ ID NO: 277021 - DNA, 25 bp, Artificial
  Probe
agcgctatccaggatctcctgagtg

SEQ ID NO: 277022 - DNA, 25 bp, Artificial
  Probe
gcgctatccaggatctcctgagtga

SEQ ID NO: 277023 - DNA, 25 bp, Artificial
  Probe
atccaggatctcctgagtgaaagag

SEQ ID NO: 277024 - DNA, 25 bp, Artificial
  Probe
agagcgctatccaggatctcctgag

SEQ ID NO: 277025 - DNA, 25 bp, Artificial
  Probe
aggatctcctgagtgaaagagaaca

SEQ ID NO: 277026 - DNA, 25 bp, Artificial
  Probe
tacagcgtcagaaccgagatgccca

SEQ ID NO: 277027 - DNA, 25 bp, Artificial
  Probe
atctcctgagtgaaagagaacagtt

SEQ ID NO: 277028 - DNA, 25 bp, Artificial
  Probe
ccgagatgcccagagcgctatccag

SEQ ID NO: 277029 - DNA, 25 bp, Artificial
  Probe
agatgcccagagcgctatccaggat

SEQ ID NO: 277030 - DNA, 25 bp, Artificial
  Probe
agcgtcagaaccgagatgcccagag

SEQ ID NO: 277031 - DNA, 25 bp, Artificial
  Probe
cgagatgcccagagcgctatccagg

SEQ ID NO: 277032 - DNA, 25 bp, Artificial
  Probe
caggatctcctgagtgaaagagaac

SEQ ID NO: 277033 - DNA, 25 bp, Artificial
  Probe
gatctcctgagtgaaagagaacagt

SEQ ID NO: 277034 - DNA, 25 bp, Artificial
  Probe
tccaggatctcctgagtgaaagaga

SEQ ID NO: 277035 - DNA, 25 bp, Artificial
  Probe
cagaaccgagatgcccagagcgcta

SEQ ID NO: 277036 - DNA, 25 bp, Artificial
  Probe
tatccaggatctcctgagtgaaaga

SEQ ID NO: 277037 - DNA, 25 bp, Artificial
  Probe
gctatccaggatctcctgagtgaaa

SEQ ID NO: 277038 - DNA, 25 bp, Artificial
  Probe
acagcgtcagaaccgagatgcccag

SEQ ID NO: 277039 - DNA, 25 bp, Artificial
  Probe
cagcgtcagaaccgagatgcccaga

SEQ ID NO: 277040 - DNA, 25 bp, Artificial
  Probe
ctatccaggatctcctgagtgaaag

SEQ ID NO: 277041 - DNA, 25 bp, Artificial
  Probe
gcgtcagaaccgagatgcccagagc

SEQ ID NO: 277042 - DNA, 25 bp, Artificial
  Probe
ccagagcgctatccaggatctcctg

SEQ ID NO: 277043 - DNA, 25 bp, Artificial
  Probe
agagaacagttccgtcaggaaatga

SEQ ID NO: 277044 - DNA, 25 bp, Artificial
  Probe
gtcagaaccgagatgcccagagcgc

SEQ ID NO: 277045 - DNA, 25 bp, Artificial
  Probe
ctacagcgtcagaaccgagatgccc

SEQ ID NO: 277046 - DNA, 25 bp, Artificial
  Probe
cgctatccaggatctcctgagtgaa

SEQ ID NO: 277047 - DNA, 25 bp, Artificial
  Probe
aagagaacagttccgtcaggaaatg

SEQ ID NO: 277048 - DNA, 25 bp, Artificial
  Probe
accgagatgcccagagcgctatcca

SEQ ID NO: 277049 - DNA, 25 bp, Artificial
  Probe
gagatgcccagagcgctatccagga

SEQ ID NO: 277050 - DNA, 25 bp, Artificial
  Probe
aaccgagatgcccagagcgctatcc

SEQ ID NO: 277051 - DNA, 25 bp, Artificial
  Probe
gcccagagcgctatccaggatctcc

SEQ ID NO: 277052 - DNA, 25 bp, Artificial
  Probe
tgcccagagcgctatccaggatctc

SEQ ID NO: 277053 - DNA, 25 bp, Artificial
  Probe
aaagagaacagttccgtcaggaaat

SEQ ID NO: 277054 - DNA, 25 bp, Artificial
  Probe
agaaccgagatgcccagagcgctat

SEQ ID NO: 277055 - DNA, 25 bp, Artificial
  Probe
cgtcagaaccgagatgcccagagcg

SEQ ID NO: 277056 - DNA, 25 bp, Artificial
  Probe
atgcccagagcgctatccaggatct

SEQ ID NO: 277057 - DNA, 25 bp, Artificial
  Probe
cccagagcgctatccaggatctcct

SEQ ID NO: 277058 - DNA, 25 bp, Artificial
  Probe
gagcgctatccaggatctcctgagt

SEQ ID NO: 277059 - DNA, 25 bp, Artificial
  Probe
ctgatttgcatactcgtgtatatat

SEQ ID NO: 277060 - DNA, 25 bp, Artificial
  Probe
gaaaggctttctcacataactcttg

SEQ ID NO: 277061 - DNA, 25 bp, Artificial
  Probe
tgatggctgcttagcatcccactgg

SEQ ID NO: 277062 - DNA, 25 bp, Artificial
  Probe
ccgagtgtccactgactctcttatg

SEQ ID NO: 277063 - DNA, 25 bp, Artificial
  Probe
ccactgactctcttatgatggctgc

SEQ ID NO: 277064 - DNA, 25 bp, Artificial
  Probe
gactctcttatgatggctgcttagc

SEQ ID NO: 277065 - DNA, 25 bp, Artificial
  Probe
ttagcatcccactggctgttcagaa

SEQ ID NO: 277066 - DNA, 25 bp, Artificial
  Probe
taactcttgtacttagacaggcaag

SEQ ID NO: 277067 - DNA, 25 bp, Artificial
  Probe
agccgagtgtccactgactctctta

SEQ ID NO: 277068 - DNA, 25 bp, Artificial
  Probe
tgactctcttatgatggctgcttag

SEQ ID NO: 277069 - DNA, 25 bp, Artificial
  Probe
ataactcttgtacttagacaggcaa

SEQ ID NO: 277070 - DNA, 25 bp, Artificial
  Probe
tggctgttcagaaaggctttctcac

SEQ ID NO: 277071 - DNA, 25 bp, Artificial
  Probe
tggctgcttagcatcccactggctg

SEQ ID NO: 277072 - DNA, 25 bp, Artificial
  Probe
ggctgcttagcatcccactggctgt

SEQ ID NO: 277073 - DNA, 25 bp, Artificial
  Probe
ctggctgttcagaaaggctttctca

SEQ ID NO: 277074 - DNA, 25 bp, Artificial
  Probe
cgagtgtccactgactctcttatga

SEQ ID NO: 277075 - DNA, 25 bp, Artificial
  Probe
cataactcttgtacttagacaggca

SEQ ID NO: 277076 - DNA, 25 bp, Artificial
  Probe
cttagacaggcaagttcccagatac

SEQ ID NO: 277077 - DNA, 25 bp, Artificial
  Probe
ctcttgtacttagacaggcaagttc

SEQ ID NO: 277078 - DNA, 25 bp, Artificial
  Probe
gtccactgactctcttatgatggct

SEQ ID NO: 277079 - DNA, 25 bp, Artificial
  Probe
gtgtccactgactctcttatgatgg

SEQ ID NO: 277080 - DNA, 25 bp, Artificial
  Probe
acttagacaggcaagttcccagata

SEQ ID NO: 277081 - DNA, 25 bp, Artificial
  Probe
gttcagaaaggctttctcacataac

SEQ ID NO: 277082 - DNA, 25 bp, Artificial
  Probe
tatttacaaacagttggcccttgct

SEQ ID NO: 277083 - DNA, 25 bp, Artificial
  Probe
atcccactggctgttcagaaaggct

SEQ ID NO: 277084 - DNA, 25 bp, Artificial
  Probe
tatatttacaaacagttggcccttg

SEQ ID NO: 277085 - DNA, 25 bp, Artificial
  Probe
ttagacaggcaagttcccagatact

SEQ ID NO: 277086 - DNA, 25 bp, Artificial
  Probe
atggctgcttagcatcccactggct

SEQ ID NO: 277087 - DNA, 25 bp, Artificial
  Probe
gccgagtgtccactgactctcttat

SEQ ID NO: 277088 - DNA, 25 bp, Artificial
  Probe
ttaagaacttattgcatctgtgcca

SEQ ID NO: 277089 - DNA, 25 bp, Artificial
  Probe
actctcttatgatggctgcttagca

SEQ ID NO: 277090 - DNA, 25 bp, Artificial
  Probe
actggctgttcagaaaggctttctc

SEQ ID NO: 277091 - DNA, 25 bp, Artificial
  Probe
catcccactggctgttcagaaaggc

SEQ ID NO: 277092 - DNA, 25 bp, Artificial
  Probe
tttacaaacagttggcccttgctaa

SEQ ID NO: 277093 - DNA, 25 bp, Artificial
  Probe
cttatgatggctgcttagcatccca

SEQ ID NO: 277094 - DNA, 25 bp, Artificial
  Probe
gagtgtccactgactctcttatgat

SEQ ID NO: 277095 - DNA, 25 bp, Artificial
  Probe
agtgtccactgactctcttatgatg

SEQ ID NO: 277096 - DNA, 25 bp, Artificial
  Probe
cacataactcttgtacttagacagg

SEQ ID NO: 277097 - DNA, 25 bp, Artificial
  Probe
tcccactggctgttcagaaaggctt

SEQ ID NO: 277098 - DNA, 25 bp, Artificial
  Probe
actcttgtacttagacaggcaagtt

SEQ ID NO: 277099 - DNA, 25 bp, Artificial
  Probe
gcttagcatcccactggctgttcag

SEQ ID NO: 277100 - DNA, 25 bp, Artificial
  Probe
tccactgactctcttatgatggctg

SEQ ID NO: 277101 - DNA, 25 bp, Artificial
  Probe
ttgtacttagacaggcaagttccca

SEQ ID NO: 277102 - DNA, 25 bp, Artificial
  Probe
gatggctgcttagcatcccactggc

SEQ ID NO: 277103 - DNA, 25 bp, Artificial
  Probe
cactggctgttcagaaaggctttct

SEQ ID NO: 277104 - DNA, 25 bp, Artificial
  Probe
atttacaaacagttggcccttgcta

SEQ ID NO: 277105 - DNA, 25 bp, Artificial
  Probe
agaactatttctggatcacaatgac

SEQ ID NO: 277106 - DNA, 25 bp, Artificial
  Probe
tctcgttctatggagcatatcattc

SEQ ID NO: 277107 - DNA, 25 bp, Artificial
  Probe
catttaacagactttctgatgatgg

SEQ ID NO: 277108 - DNA, 25 bp, Artificial
  Probe
gaactatttctggatcacaatgact

SEQ ID NO: 277109 - DNA, 25 bp, Artificial
  Probe
gttctatggagcatatcattctctg

SEQ ID NO: 277110 - DNA, 25 bp, Artificial
  Probe
ccataccccctggaatacaaggaat

SEQ ID NO: 277111 - DNA, 25 bp, Artificial
  Probe
gcatatcattctctgagagaactat

SEQ ID NO: 277112 - DNA, 25 bp, Artificial
  Probe
ttgcaccttgtcctaattgggaacc

SEQ ID NO: 277113 - DNA, 25 bp, Artificial
  Probe
gaacaaatctgcaatgctgaggaag

SEQ ID NO: 277114 - DNA, 25 bp, Artificial
  Probe
ctatgtcgccctatgcgttttcatg

SEQ ID NO: 277115 - DNA, 25 bp, Artificial
  Probe
gtacttgtacctgtcatttaacaga

SEQ ID NO: 277116 - DNA, 25 bp, Artificial
  Probe
gctatgtcgccctatgcgttttcat

SEQ ID NO: 277117 - DNA, 25 bp, Artificial
  Probe
ccacatgaaaccaggcctggagtac

SEQ ID NO: 277118 - DNA, 25 bp, Artificial
  Probe
tctgagagaactatttctggatcac

SEQ ID NO: 277119 - DNA, 25 bp, Artificial
  Probe
atgtgtttggccacatgaaaccagg

SEQ ID NO: 277120 - DNA, 25 bp, Artificial
  Probe
ggagtacttgtacctgtcatttaac

SEQ ID NO: 277121 - DNA, 25 bp, Artificial
  Probe
ggaacatccttcctgaacaaatctg

SEQ ID NO: 277122 - DNA, 25 bp, Artificial
  Probe
tggccacatgaaaccaggcctggag

SEQ ID NO: 277123 - DNA, 25 bp, Artificial
  Probe
agactttctgatgatggtgtggacc

SEQ ID NO: 277124 - DNA, 25 bp, Artificial
  Probe
ttctatggagcatatcattctctga

SEQ ID NO: 277125 - DNA, 25 bp, Artificial
  Probe
gatgaggactcagctcttgaacacc

SEQ ID NO: 277126 - DNA, 25 bp, Artificial
  Probe
tgtgtttggccacatgaaaccaggc

SEQ ID NO: 277127 - DNA, 25 bp, Artificial
  Probe
aagcattgcattttctgaggctgaa

SEQ ID NO: 277128 - DNA, 25 bp, Artificial
  Probe
taccccctggaatacaaggaatgaa

SEQ ID NO: 277129 - DNA, 25 bp, Artificial
  Probe
caaatctgcaatgctgaggaagatg

SEQ ID NO: 277130 - DNA, 25 bp, Artificial
  Probe
agcattgcattttctgaggctgaac

SEQ ID NO: 277131 - DNA, 25 bp, Artificial
  Probe
gagtacttgtacctgtcatttaaca

SEQ ID NO: 277132 - DNA, 25 bp, Artificial
  Probe
cccctggaatacaaggaatgaaagc

SEQ ID NO: 277133 - DNA, 25 bp, Artificial
  Probe
ctgtcatttaacagactttctgatg

SEQ ID NO: 277134 - DNA, 25 bp, Artificial
  Probe
ctatggagcatatcattctctgaga

SEQ ID NO: 277135 - DNA, 25 bp, Artificial
  Probe
cataccccctggaatacaaggaatg

SEQ ID NO: 277136 - DNA, 25 bp, Artificial
  Probe
ttttgcaccttgtcctaattgggaa

SEQ ID NO: 277137 - DNA, 25 bp, Artificial
  Probe
tgaaagcattgcattttctgaggct

SEQ ID NO: 277138 - DNA, 25 bp, Artificial
  Probe
ccccctggaatacaaggaatgaaag

SEQ ID NO: 277139 - DNA, 25 bp, Artificial
  Probe
ggactcagctcttgaacaccttcat

SEQ ID NO: 277140 - DNA, 25 bp, Artificial
  Probe
gaaaccaggcctggagtacttgtac

SEQ ID NO: 277141 - DNA, 25 bp, Artificial
  Probe
aaccaggcctggagtacttgtacct

SEQ ID NO: 277142 - DNA, 25 bp, Artificial
  Probe
tgaaaccaggcctggagtacttgta

SEQ ID NO: 277143 - DNA, 25 bp, Artificial
  Probe
gcaccttgtcctaattgggaaccaa

SEQ ID NO: 277144 - DNA, 25 bp, Artificial
  Probe
cttcctgaacaaatctgcaatgctg

SEQ ID NO: 277145 - DNA, 25 bp, Artificial
  Probe
ttctctgagagaactatttctggat

SEQ ID NO: 277146 - DNA, 25 bp, Artificial
  Probe
actttctgatgatggtgtggaccta

SEQ ID NO: 277147 - DNA, 25 bp, Artificial
  Probe
tcattctctgagagaactatttctg

SEQ ID NO: 277148 - DNA, 25 bp, Artificial
  Probe
aagatgaggactcagctcttgaaca

SEQ ID NO: 277149 - DNA, 25 bp, Artificial
  Probe
gagcatatcattctctgagagaact

SEQ ID NO: 277150 - DNA, 25 bp, Artificial
  Probe
cagactttctgatgatggtgtggac

SEQ ID NO: 277151 - DNA, 25 bp, Artificial
  Probe
acaccatcaagcagcatgcattgaa

SEQ ID NO: 277152 - DNA, 25 bp, Artificial
  Probe
gccttagacaaaactgagcaagagg

SEQ ID NO: 277153 - DNA, 25 bp, Artificial
  Probe
cttagacaaaactgagcaagaggct

SEQ ID NO: 277154 - DNA, 25 bp, Artificial
  Probe
gaaacactgtacacgcaaacagggt

SEQ ID NO: 277155 - DNA, 25 bp, Artificial
  Probe
ctccatgatgcttggctccggaatg

SEQ ID NO: 277156 - DNA, 25 bp, Artificial
  Probe
ccactgcatggcagtgagtggcagc

SEQ ID NO: 277157 - DNA, 25 bp, Artificial
  Probe
accatcaagcagcatgcattgaact

SEQ ID NO: 277158 - DNA, 25 bp, Artificial
  Probe
gcaatttcatgttatgccttaagtc

SEQ ID NO: 277159 - DNA, 25 bp, Artificial
  Probe
gactggatcttccacaccatcaagc

SEQ ID NO: 277160 - DNA, 25 bp, Artificial
  Probe
catgcattgaactgagatggcagct

SEQ ID NO: 277161 - DNA, 25 bp, Artificial
  Probe
agcatgcattgaactgagatggcag

SEQ ID NO: 277162 - DNA, 25 bp, Artificial
  Probe
aaatggactggatcttccacaccat

SEQ ID NO: 277163 - DNA, 25 bp, Artificial
  Probe
agcaatttcatgttatgccttaagt

SEQ ID NO: 277164 - DNA, 25 bp, Artificial
  Probe
tgcctagcttctccactgcatggca

SEQ ID NO: 277165 - DNA, 25 bp, Artificial
  Probe
ttctccactgcatggcagtgagtgg

SEQ ID NO: 277166 - DNA, 25 bp, Artificial
  Probe
gtacacgcaaacagggtttgatagc

SEQ ID NO: 277167 - DNA, 25 bp, Artificial
  Probe
tcgaaagactctagccttagacaaa

SEQ ID NO: 277168 - DNA, 25 bp, Artificial
  Probe
tggtgcctagcttctccactgcatg

SEQ ID NO: 277169 - DNA, 25 bp, Artificial
  Probe
cgagctggtgcctagcttctccact

SEQ ID NO: 277170 - DNA, 25 bp, Artificial
  Probe
gctggtgcctagcttctccactgca

SEQ ID NO: 277171 - DNA, 25 bp, Artificial
  Probe
cagtctttcgatgatattgcatata

SEQ ID NO: 277172 - DNA, 25 bp, Artificial
  Probe
agcttctccactgcatggcagtgag

SEQ ID NO: 277173 - DNA, 25 bp, Artificial
  Probe
tgcattgaactgagatggcagctgg

SEQ ID NO: 277174 - DNA, 25 bp, Artificial
  Probe
tggactggatcttccacaccatcaa

SEQ ID NO: 277175 - DNA, 25 bp, Artificial
  Probe
cactgtacacgcaaacagggtttga

SEQ ID NO: 277176 - DNA, 25 bp, Artificial
  Probe
aagactctagccttagacaaaactg

SEQ ID NO: 277177 - DNA, 25 bp, Artificial
  Probe
ggatggcacagtcaggaacaacatc

SEQ ID NO: 277178 - DNA, 25 bp, Artificial
  Probe
tggatcttccacaccatcaagcagc

SEQ ID NO: 277179 - DNA, 25 bp, Artificial
  Probe
cactgcatggcagtgagtggcagca

SEQ ID NO: 277180 - DNA, 25 bp, Artificial
  Probe
tagccttagacaaaactgagcaaga

SEQ ID NO: 277181 - DNA, 25 bp, Artificial
  Probe
ctccggaatgccagaactgcagtct

SEQ ID NO: 277182 - DNA, 25 bp, Artificial
  Probe
cagtcaggaacaacatcaggactcg

SEQ ID NO: 277183 - DNA, 25 bp, Artificial
  Probe
gcatgggatggcacagtcaggaaca

SEQ ID NO: 277184 - DNA, 25 bp, Artificial
  Probe
actgcgagctggtgcctagcttctc

SEQ ID NO: 277185 - DNA, 25 bp, Artificial
  Probe
tgggatggcacagtcaggaacaaca

SEQ ID NO: 277186 - DNA, 25 bp, Artificial
  Probe
atcaagcagcatgcattgaactgag

SEQ ID NO: 277187 - DNA, 25 bp, Artificial
  Probe
ggactgcgagctggtgcctagcttc

SEQ ID NO: 277188 - DNA, 25 bp, Artificial
  Probe
tatattcgaaagactctagccttag

SEQ ID NO: 277189 - DNA, 25 bp, Artificial
  Probe
ctagcttctccactgcatggcagtg

SEQ ID NO: 277190 - DNA, 25 bp, Artificial
  Probe
ctggatcttccacaccatcaagcag

SEQ ID NO: 277191 - DNA, 25 bp, Artificial
  Probe
atgagcaatttcatgttatgcctta

SEQ ID NO: 277192 - DNA, 25 bp, Artificial
  Probe
gcctagcttctccactgcatggcag

SEQ ID NO: 277193 - DNA, 25 bp, Artificial
  Probe
ttggctccggaatgccagaactgca

SEQ ID NO: 277194 - DNA, 25 bp, Artificial
  Probe
attgaaacactgtacacgcaaacag

SEQ ID NO: 277195 - DNA, 25 bp, Artificial
  Probe
ccacaccatcaagcagcatgcattg

SEQ ID NO: 277196 - DNA, 25 bp, Artificial
  Probe
gcttggctccggaatgccagaactg

SEQ ID NO: 277197 - DNA, 25 bp, Artificial
  Probe
gcatgcgtatccagaggatgcggaa

SEQ ID NO: 277198 - DNA, 25 bp, Artificial
  Probe
tgcgtatccagaggatgcggaaaac

SEQ ID NO: 277199 - DNA, 25 bp, Artificial
  Probe
atgcgtatccagaggatgcggaaaa

SEQ ID NO: 277200 - DNA, 25 bp, Artificial
  Probe
aacttttaatcaccttagagtcgtg

SEQ ID NO: 277201 - DNA, 25 bp, Artificial
  Probe
agtcaggcattacatccttcacatg

SEQ ID NO: 277202 - DNA, 25 bp, Artificial
  Probe
actgacgtggcatgcgtatccagag

SEQ ID NO: 277203 - DNA, 25 bp, Artificial
  Probe
tggttcccttgtaatataactgatg

SEQ ID NO: 277204 - DNA, 25 bp, Artificial
  Probe
tgaagctgacctggtccttgcaaaa

SEQ ID NO: 277205 - DNA, 25 bp, Artificial
  Probe
gtgtagctctgtgaaagtcaggcat

SEQ ID NO: 277206 - DNA, 25 bp, Artificial
  Probe
tgactcctaagtgtagctctgtgaa

SEQ ID NO: 277207 - DNA, 25 bp, Artificial
  Probe
atgctgtgtggttcccatagtgttc

SEQ ID NO: 277208 - DNA, 25 bp, Artificial
  Probe
cccttgtaatataactgatggtctg

SEQ ID NO: 277209 - DNA, 25 bp, Artificial
  Probe
ctctgtgaaagtcaggcattacatc

SEQ ID NO: 277210 - DNA, 25 bp, Artificial
  Probe
tggtctgactcctaagtgtagctct

SEQ ID NO: 277211 - DNA, 25 bp, Artificial
  Probe
ttacatccttcacatgctgtgtggt

SEQ ID NO: 277212 - DNA, 25 bp, Artificial
  Probe
gtaatataactgatggtctgactcc

SEQ ID NO: 277213 - DNA, 25 bp, Artificial
  Probe
ctaagtgtagctctgtgaaagtcag

SEQ ID NO: 277214 - DNA, 25 bp, Artificial
  Probe
agctctgtgaaagtcaggcattaca

SEQ ID NO: 277215 - DNA, 25 bp, Artificial
  Probe
cttttaatcaccttagagtcgtgat

SEQ ID NO: 277216 - DNA, 25 bp, Artificial
  Probe
atataactgatggtctgactcctaa

SEQ ID NO: 277217 - DNA, 25 bp, Artificial
  Probe
tcaccttagagtcgtgatctttggg

SEQ ID NO: 277218 - DNA, 25 bp, Artificial
  Probe
aagtgtagctctgtgaaagtcaggc

SEQ ID NO: 277219 - DNA, 25 bp, Artificial
  Probe
tgtgtggttcccatagtgttctctt

SEQ ID NO: 277220 - DNA, 25 bp, Artificial
  Probe
aggcattacatccttcacatgctgt

SEQ ID NO: 277221 - DNA, 25 bp, Artificial
  Probe
gactcctaagtgtagctctgtgaaa

SEQ ID NO: 277222 - DNA, 25 bp, Artificial
  Probe
acgtggcatgcgtatccagaggatg

SEQ ID NO: 277223 - DNA, 25 bp, Artificial
  Probe
ggcattacatccttcacatgctgtg

SEQ ID NO: 277224 - DNA, 25 bp, Artificial
  Probe
tcctaagtgtagctctgtgaaagtc

SEQ ID NO: 277225 - DNA, 25 bp, Artificial
  Probe
gactgacgtggcatgcgtatccaga

SEQ ID NO: 277226 - DNA, 25 bp, Artificial
  Probe
gttcccttgtaatataactgatggt

SEQ ID NO: 277227 - DNA, 25 bp, Artificial
  Probe
gtagctctgtgaaagtcaggcatta

SEQ ID NO: 277228 - DNA, 25 bp, Artificial
  Probe
ttaatcaccttagagtcgtgatctt

SEQ ID NO: 277229 - DNA, 25 bp, Artificial
  Probe
ttcccttgtaatataactgatggtc

SEQ ID NO: 277230 - DNA, 25 bp, Artificial
  Probe
cagatgaagctgacctggtccttgc

SEQ ID NO: 277231 - DNA, 25 bp, Artificial
  Probe
tataactgatggtctgactcctaag

SEQ ID NO: 277232 - DNA, 25 bp, Artificial
  Probe
cttcacatgctgtgtggttcccata

SEQ ID NO: 277233 - DNA, 25 bp, Artificial
  Probe
cgtggcatgcgtatccagaggatgc

SEQ ID NO: 277234 - DNA, 25 bp, Artificial
  Probe
gagagactgacgtggcatgcgtatc

SEQ ID NO: 277235 - DNA, 25 bp, Artificial
  Probe
gtcaggcattacatccttcacatgc

SEQ ID NO: 277236 - DNA, 25 bp, Artificial
  Probe
gtaacttttaatcaccttagagtcg

SEQ ID NO: 277237 - DNA, 25 bp, Artificial
  Probe
cgtatccagaggatgcggaaaacaa

SEQ ID NO: 277238 - DNA, 25 bp, Artificial
  Probe
tcacatgctgtgtggttcccatagt

SEQ ID NO: 277239 - DNA, 25 bp, Artificial
  Probe
agagagactgacgtggcatgcgtat

SEQ ID NO: 277240 - DNA, 25 bp, Artificial
  Probe
catccttcacatgctgtgtggttcc

SEQ ID NO: 277241 - DNA, 25 bp, Artificial
  Probe
ccttagagtcgtgatctttggggtt

SEQ ID NO: 277242 - DNA, 25 bp, Artificial
  Probe
ggttcccatagtgttctctttcatc

SEQ ID NO: 277243 - DNA, 25 bp, Artificial
  Probe
gacctaggtcagctcctgcaagacg

SEQ ID NO: 277244 - DNA, 25 bp, Artificial
  Probe
atcaccaaggagaggctgagctaca

SEQ ID NO: 277245 - DNA, 25 bp, Artificial
  Probe
tcagcgaagacctaggtcagctcct

SEQ ID NO: 277246 - DNA, 25 bp, Artificial
  Probe
tctaagtggcctgctacttctccca

SEQ ID NO: 277247 - DNA, 25 bp, Artificial
  Probe
aagatcctctaagtggcctgctact

SEQ ID NO: 277248 - DNA, 25 bp, Artificial
  Probe
tgggggcctcatcgatcccaagagg

SEQ ID NO: 277249 - DNA, 25 bp, Artificial
  Probe
gatcccaagaggacaggacgcatcc

SEQ ID NO: 277250 - DNA, 25 bp, Artificial
  Probe
gcgtgcaccgccttgtcctggagca

SEQ ID NO: 277251 - DNA, 25 bp, Artificial
  Probe
cgctgccacaaagatcctctaagtg

SEQ ID NO: 277252 - DNA, 25 bp, Artificial
  Probe
gggcctcatcgatcccaagaggaca

SEQ ID NO: 277253 - DNA, 25 bp, Artificial
  Probe
gatcagcgaagacctaggtcagctc

SEQ ID NO: 277254 - DNA, 25 bp, Artificial
  Probe
tgtgttgggccctgtccccaaacat

SEQ ID NO: 277255 - DNA, 25 bp, Artificial
  Probe
ctcatcgatcccaagaggacaggac

SEQ ID NO: 277256 - DNA, 25 bp, Artificial
  Probe
ccaaacatgggaagctctgttatcc

SEQ ID NO: 277257 - DNA, 25 bp, Artificial
  Probe
cgccttgtcctggagcagcataatc

SEQ ID NO: 277258 - DNA, 25 bp, Artificial
  Probe
gtgcaccgccttgtcctggagcagc

SEQ ID NO: 277259 - DNA, 25 bp, Artificial
  Probe
agcgaagacctaggtcagctcctgc

SEQ ID NO: 277260 - DNA, 25 bp, Artificial
  Probe
gcagcaccttactgggggcctcatc

SEQ ID NO: 277261 - DNA, 25 bp, Artificial
  Probe
tgtccccaaacatgggaagctctgt

SEQ ID NO: 277262 - DNA, 25 bp, Artificial
  Probe
ctcactgtgcagtcacttgtgttgg

SEQ ID NO: 277263 - DNA, 25 bp, Artificial
  Probe
gggggcctcatcgatcccaagagga

SEQ ID NO: 277264 - DNA, 25 bp, Artificial
  Probe
cctgtccccaaacatgggaagctct

SEQ ID NO: 277265 - DNA, 25 bp, Artificial
  Probe
agatcctctaagtggcctgctactt

SEQ ID NO: 277266 - DNA, 25 bp, Artificial
  Probe
agaggctgagctacaaggaggccat

SEQ ID NO: 277267 - DNA, 25 bp, Artificial
  Probe
ttactgggggcctcatcgatcccaa

SEQ ID NO: 277268 - DNA, 25 bp, Artificial
  Probe
agtcacttgtgttgggccctgtccc

SEQ ID NO: 277269 - DNA, 25 bp, Artificial
  Probe
actgggggcctcatcgatcccaaga

SEQ ID NO: 277270 - DNA, 25 bp, Artificial
  Probe
agaccccatcaccaaggagaggctg

SEQ ID NO: 277271 - DNA, 25 bp, Artificial
  Probe
cccaaacatgggaagctctgttatc

SEQ ID NO: 277272 - DNA, 25 bp, Artificial
  Probe
gatgatcagcgaagacctaggtcag

SEQ ID NO: 277273 - DNA, 25 bp, Artificial
  Probe
atgatcagcgaagacctaggtcagc

SEQ ID NO: 277274 - DNA, 25 bp, Artificial
  Probe
tggggcgctgccacaaagatcctct

SEQ ID NO: 277275 - DNA, 25 bp, Artificial
  Probe
tgttgggccctgtccccaaacatgg

SEQ ID NO: 277276 - DNA, 25 bp, Artificial
  Probe
aatgcaggcgtgcaccgccttgtcc

SEQ ID NO: 277277 - DNA, 25 bp, Artificial
  Probe
gccctgtccccaaacatgggaagct

SEQ ID NO: 277278 - DNA, 25 bp, Artificial
  Probe
taagtggcctgctacttctcccagc

SEQ ID NO: 277279 - DNA, 25 bp, Artificial
  Probe
gtcagctcctgcaagacgaatccag

SEQ ID NO: 277280 - DNA, 25 bp, Artificial
  Probe
atcccaagaggacaggacgcatccc

SEQ ID NO: 277281 - DNA, 25 bp, Artificial
  Probe
gccatggggcgctgccacaaagatc

SEQ ID NO: 277282 - DNA, 25 bp, Artificial
  Probe
ccacctcactgtgcagtcacttgtg

SEQ ID NO: 277283 - DNA, 25 bp, Artificial
  Probe
aaggatttgacagaccccatcacca

SEQ ID NO: 277284 - DNA, 25 bp, Artificial
  Probe
aagacctaggtcagctcctgcaaga

SEQ ID NO: 277285 - DNA, 25 bp, Artificial
  Probe
aacatgggaagctctgttatccctc

SEQ ID NO: 277286 - DNA, 25 bp, Artificial
  Probe
cacaaagatcctctaagtggcctgc

SEQ ID NO: 277287 - DNA, 25 bp, Artificial
  Probe
caaagatcctctaagtggcctgcta

SEQ ID NO: 277288 - DNA, 25 bp, Artificial
  Probe
caaacatgggaagctctgttatccc

SEQ ID NO: 277289 - DNA, 25 bp, Artificial
  Probe
aagcaacttacactggtttgacagt

SEQ ID NO: 277290 - DNA, 25 bp, Artificial
  Probe
cttggctgctgttttaaagtttgcc

SEQ ID NO: 277291 - DNA, 25 bp, Artificial
  Probe
atgagaaaccaagcaacttacactg

SEQ ID NO: 277292 - DNA, 25 bp, Artificial
  Probe
gtgactggcagcttattgtggagct

SEQ ID NO: 277293 - DNA, 25 bp, Artificial
  Probe
agtgactggcagcttattgtggagc

SEQ ID NO: 277294 - DNA, 25 bp, Artificial
  Probe
acttacactggtttgacagtggtca

SEQ ID NO: 277295 - DNA, 25 bp, Artificial
  Probe
tacactggtttgacagtggtcagtt

SEQ ID NO: 277296 - DNA, 25 bp, Artificial
  Probe
caagcaacttacactggtttgacag

SEQ ID NO: 277297 - DNA, 25 bp, Artificial
  Probe
agactggttcagagacgaaatgcag

SEQ ID NO: 277298 - DNA, 25 bp, Artificial
  Probe
ctccaaaaatgtttgggagacactt

SEQ ID NO: 277299 - DNA, 25 bp, Artificial
  Probe
ttggctgctgttttaaagtttgccc

SEQ ID NO: 277300 - DNA, 25 bp, Artificial
  Probe
gagaaaccaagcaacttacactggt

SEQ ID NO: 277301 - DNA, 25 bp, Artificial
  Probe
aacttacactggtttgacagtggtc

SEQ ID NO: 277302 - DNA, 25 bp, Artificial
  Probe
actcaaagactggttcagagacgaa

SEQ ID NO: 277303 - DNA, 25 bp, Artificial
  Probe
agtttgcccttcctcaaatttggat

SEQ ID NO: 277304 - DNA, 25 bp, Artificial
  Probe
agcaacttacactggtttgacagtg

SEQ ID NO: 277305 - DNA, 25 bp, Artificial
  Probe
tgttttccatgagaaaccaagcaac

SEQ ID NO: 277306 - DNA, 25 bp, Artificial
  Probe
ctggcagcttattgtggagctgaag

SEQ ID NO: 277307 - DNA, 25 bp, Artificial
  Probe
gaaaccaagcaacttacactggttt

SEQ ID NO: 277308 - DNA, 25 bp, Artificial
  Probe
aagactggttcagagacgaaatgca

SEQ ID NO: 277309 - DNA, 25 bp, Artificial
  Probe
catttggacgctgatggacttaggt

SEQ ID NO: 277310 - DNA, 25 bp, Artificial
  Probe
tctccaaaaatgtttgggagacact

SEQ ID NO: 277311 - DNA, 25 bp, Artificial
  Probe
aaaccaagcaacttacactggtttg

SEQ ID NO: 277312 - DNA, 25 bp, Artificial
  Probe
aaatgcagaagagtgactggcagct

SEQ ID NO: 277313 - DNA, 25 bp, Artificial
  Probe
gcaacttacactggtttgacagtgg

SEQ ID NO: 277314 - DNA, 25 bp, Artificial
  Probe
tactgattaaatcagtcctgcagta

SEQ ID NO: 277315 - DNA, 25 bp, Artificial
  Probe
caaagactggttcagagacgaaatg

SEQ ID NO: 277316 - DNA, 25 bp, Artificial
  Probe
aatctccaaaaatgtttgggagaca

SEQ ID NO: 277317 - DNA, 25 bp, Artificial
  Probe
actggtttgacagtggtcagttccc

SEQ ID NO: 277318 - DNA, 25 bp, Artificial
  Probe
ctgattaaatcagtcctgcagtatt

SEQ ID NO: 277319 - DNA, 25 bp, Artificial
  Probe
tggtttgacagtggtcagttccccg

SEQ ID NO: 277320 - DNA, 25 bp, Artificial
  Probe
tgcactcaaagactggttcagagac

SEQ ID NO: 277321 - DNA, 25 bp, Artificial
  Probe
cactggtttgacagtggtcagttcc

SEQ ID NO: 277322 - DNA, 25 bp, Artificial
  Probe
ctcaaagactggttcagagacgaaa

SEQ ID NO: 277323 - DNA, 25 bp, Artificial
  Probe
accaagcaacttacactggtttgac

SEQ ID NO: 277324 - DNA, 25 bp, Artificial
  Probe
tggctgctgttttaaagtttgccct

SEQ ID NO: 277325 - DNA, 25 bp, Artificial
  Probe
acttggctgctgttttaaagtttgc

SEQ ID NO: 277326 - DNA, 25 bp, Artificial
  Probe
ttacactggtttgacagtggtcagt

SEQ ID NO: 277327 - DNA, 25 bp, Artificial
  Probe
acatttggacgctgatggacttagg

SEQ ID NO: 277328 - DNA, 25 bp, Artificial
  Probe
atctccaaaaatgtttgggagacac

SEQ ID NO: 277329 - DNA, 25 bp, Artificial
  Probe
atgcactcaaagactggttcagaga

SEQ ID NO: 277330 - DNA, 25 bp, Artificial
  Probe
gactggcagcttattgtggagctga

SEQ ID NO: 277331 - DNA, 25 bp, Artificial
  Probe
gatgcactcaaagactggttcagag

SEQ ID NO: 277332 - DNA, 25 bp, Artificial
  Probe
gtttgcccttcctcaaatttggatt

SEQ ID NO: 277333 - DNA, 25 bp, Artificial
  Probe
ggtttgacagtggtcagttccccgc

SEQ ID NO: 277334 - DNA, 25 bp, Artificial
  Probe
acattcttgtcagcaagatcagccg

SEQ ID NO: 277335 - DNA, 25 bp, Artificial
  Probe
ctgtcattgggcacgagatgaaaat

SEQ ID NO: 277336 - DNA, 25 bp, Artificial
  Probe
gggaagaccctaagagtctttgtca

SEQ ID NO: 277337 - DNA, 25 bp, Artificial
  Probe
cgcaggctggagctgtctagatgct

SEQ ID NO: 277338 - DNA, 25 bp, Artificial
  Probe
ggaagaccctaagagtctttgtcac

SEQ ID NO: 277339 - DNA, 25 bp, Artificial
  Probe
ggtttccatcatggaagccactctg

SEQ ID NO: 277340 - DNA, 25 bp, Artificial
  Probe
ccaggccaggtttgagtgttgtcag

SEQ ID NO: 277341 - DNA, 25 bp, Artificial
  Probe
ccagctgtcctgtacggtaacaggg

SEQ ID NO: 277342 - DNA, 25 bp, Artificial
  Probe
gaagaccctaagagtctttgtcacg

SEQ ID NO: 277343 - DNA, 25 bp, Artificial
  Probe
cacgttcctaagatgtcccatgctg

SEQ ID NO: 277344 - DNA, 25 bp, Artificial
  Probe
caaagcacgttcctaagatgtccca

SEQ ID NO: 277345 - DNA, 25 bp, Artificial
  Probe
cgtagcgctgaaagccaggcccgca

SEQ ID NO: 277346 - DNA, 25 bp, Artificial
  Probe
agctgtctagatgctggtgtctcac

SEQ ID NO: 277347 - DNA, 25 bp, Artificial
  Probe
cgttcctaagatgtcccatgctgtc

SEQ ID NO: 277348 - DNA, 25 bp, Artificial
  Probe
cacatcaaagcacgttcctaagatg

SEQ ID NO: 277349 - DNA, 25 bp, Artificial
  Probe
gggtctgaggtttccatcatggaag

SEQ ID NO: 277350 - DNA, 25 bp, Artificial
  Probe
tctttgtcacgtagcgctgaaagcc

SEQ ID NO: 277351 - DNA, 25 bp, Artificial
  Probe
gagtctttgtcacgtagcgctgaaa

SEQ ID NO: 277352 - DNA, 25 bp, Artificial
  Probe
gcgctgaaagccaggcccgcaggct

SEQ ID NO: 277353 - DNA, 25 bp, Artificial
  Probe
gccctgtcccatctcaggtaaaaaa

SEQ ID NO: 277354 - DNA, 25 bp, Artificial
  Probe
ctaagatgtcccatgctgtccacca

SEQ ID NO: 277355 - DNA, 25 bp, Artificial
  Probe
tgcagggtgagcagtttctgtcatt

SEQ ID NO: 277356 - DNA, 25 bp, Artificial
  Probe
gtctagatgctggtgtctcactcat

SEQ ID NO: 277357 - DNA, 25 bp, Artificial
  Probe
gcccgcaggctggagctgtctagat

SEQ ID NO: 277358 - DNA, 25 bp, Artificial
  Probe
atgtcccatgctgtccaccagctgt

SEQ ID NO: 277359 - DNA, 25 bp, Artificial
  Probe
agtttctgtcattgggcacgagatg

SEQ ID NO: 277360 - DNA, 25 bp, Artificial
  Probe
aggcttctacataccccaggccagg

SEQ ID NO: 277361 - DNA, 25 bp, Artificial
  Probe
accagctgtcctgtacggtaacagg

SEQ ID NO: 277362 - DNA, 25 bp, Artificial
  Probe
atgctggtgtctcactcattttaaa

SEQ ID NO: 277363 - DNA, 25 bp, Artificial
  Probe
tgtccaccagctgtcctgtacggta

SEQ ID NO: 277364 - DNA, 25 bp, Artificial
  Probe
agatgctggtgtctcactcatttta

SEQ ID NO: 277365 - DNA, 25 bp, Artificial
  Probe
catcaaagcacgttcctaagatgtc

SEQ ID NO: 277366 - DNA, 25 bp, Artificial
  Probe
ccctaagagtctttgtcacgtagcg

SEQ ID NO: 277367 - DNA, 25 bp, Artificial
  Probe
tttccatcatggaagccactctgcc

SEQ ID NO: 277368 - DNA, 25 bp, Artificial
  Probe
gttcctaagatgtcccatgctgtcc

SEQ ID NO: 277369 - DNA, 25 bp, Artificial
  Probe
acgtagcgctgaaagccaggcccgc

SEQ ID NO: 277370 - DNA, 25 bp, Artificial
  Probe
gctgtccaccagctgtcctgtacgg

SEQ ID NO: 277371 - DNA, 25 bp, Artificial
  Probe
gtcacgtagcgctgaaagccaggcc

SEQ ID NO: 277372 - DNA, 25 bp, Artificial
  Probe
tggccctgtcccatctcaggtaaaa

SEQ ID NO: 277373 - DNA, 25 bp, Artificial
  Probe
ctagatgctggtgtctcactcattt

SEQ ID NO: 277374 - DNA, 25 bp, Artificial
  Probe
ctgtctagatgctggtgtctcactc

SEQ ID NO: 277375 - DNA, 25 bp, Artificial
  Probe
ctggagctgtctagatgctggtgtc

SEQ ID NO: 277376 - DNA, 25 bp, Artificial
  Probe
tgtcctgtacggtaacagggaagac

SEQ ID NO: 277377 - DNA, 25 bp, Artificial
  Probe
aataggcttctacataccccaggcc

SEQ ID NO: 277378 - DNA, 25 bp, Artificial
  Probe
ataccccaggccaggtttgagtgtt

SEQ ID NO: 277379 - DNA, 25 bp, Artificial
  Probe
ggtgagcagtttctgtcattgggca

SEQ ID NO: 277380 - DNA, 25 bp, Artificial
  Probe
tgaggtttccatcatggaagccact

SEQ ID NO: 277381 - DNA, 25 bp, Artificial
  Probe
cgccgtgtatctggtttgtatggtt

SEQ ID NO: 277382 - DNA, 25 bp, Artificial
  Probe
tcacatgcgccgtgtatctggtttg

SEQ ID NO: 277383 - DNA, 25 bp, Artificial
  Probe
atcttgaccttccagggagatgtca

SEQ ID NO: 277384 - DNA, 25 bp, Artificial
  Probe
caggaactgggtctttctgactcca

SEQ ID NO: 277385 - DNA, 25 bp, Artificial
  Probe
gaagactcttcctcactctgaggat

SEQ ID NO: 277386 - DNA, 25 bp, Artificial
  Probe
ggaactgggtctttctgactccacg

SEQ ID NO: 277387 - DNA, 25 bp, Artificial
  Probe
ggaagactcttcctcactctgagga

SEQ ID NO: 277388 - DNA, 25 bp, Artificial
  Probe
atgcgccgtgtatctggtttgtatg

SEQ ID NO: 277389 - DNA, 25 bp, Artificial
  Probe
tgggtctttctgactccacgtctct

SEQ ID NO: 277390 - DNA, 25 bp, Artificial
  Probe
ggcttctctagaggaagactcttcc

SEQ ID NO: 277391 - DNA, 25 bp, Artificial
  Probe
tttctgactccacgtctctgatctg

SEQ ID NO: 277392 - DNA, 25 bp, Artificial
  Probe
gcttctctagaggaagactcttcct

SEQ ID NO: 277393 - DNA, 25 bp, Artificial
  Probe
gggtcctagatcaggacgttgccag

SEQ ID NO: 277394 - DNA, 25 bp, Artificial
  Probe
gggcggcttctctagaggaagactc

SEQ ID NO: 277395 - DNA, 25 bp, Artificial
  Probe
ttccatgaccaggagggaagcctaa

SEQ ID NO: 277396 - DNA, 25 bp, Artificial
  Probe
aaagttccatgaccaggagggaagc

SEQ ID NO: 277397 - DNA, 25 bp, Artificial
  Probe
ggagatgtcatttcccaatggcaac

SEQ ID NO: 277398 - DNA, 25 bp, Artificial
  Probe
caacaaaagttccatgaccaggagg

SEQ ID NO: 277399 - DNA, 25 bp, Artificial
  Probe
agaggaagactcttcctcactctga

SEQ ID NO: 277400 - DNA, 25 bp, Artificial
  Probe
cacatgcgccgtgtatctggtttgt

SEQ ID NO: 277401 - DNA, 25 bp, Artificial
  Probe
ccgtgtatctggtttgtatggtttc

SEQ ID NO: 277402 - DNA, 25 bp, Artificial
  Probe
agttccatgaccaggagggaagcct

SEQ ID NO: 277403 - DNA, 25 bp, Artificial
  Probe
aactgggtctttctgactccacgtc

SEQ ID NO: 277404 - DNA, 25 bp, Artificial
  Probe
aggcaaggaactgctgtgctgctgt

SEQ ID NO: 277405 - DNA, 25 bp, Artificial
  Probe
acagcaacaaaagttccatgaccag

SEQ ID NO: 277406 - DNA, 25 bp, Artificial
  Probe
cttccagggagatgtcatttcccaa

SEQ ID NO: 277407 - DNA, 25 bp, Artificial
  Probe
gcaacaaaagttccatgaccaggag

SEQ ID NO: 277408 - DNA, 25 bp, Artificial
  Probe
agggcggcttctctagaggaagact

SEQ ID NO: 277409 - DNA, 25 bp, Artificial
  Probe
gaactgctgtgctgctgtggagcca

SEQ ID NO: 277410 - DNA, 25 bp, Artificial
  Probe
ggggtcctagatcaggacgttgcca

SEQ ID NO: 277411 - DNA, 25 bp, Artificial
  Probe
cggcttctctagaggaagactcttc

SEQ ID NO: 277412 - DNA, 25 bp, Artificial
  Probe
ggtctttctgactccacgtctctga

SEQ ID NO: 277413 - DNA, 25 bp, Artificial
  Probe
caaggaactgctgtgctgctgtgga

SEQ ID NO: 277414 - DNA, 25 bp, Artificial
  Probe
agcaacaaaagttccatgaccagga

SEQ ID NO: 277415 - DNA, 25 bp, Artificial
  Probe
ccatcttgaccttccagggagatgt

SEQ ID NO: 277416 - DNA, 25 bp, Artificial
  Probe
tcttgaccttccagggagatgtcat

SEQ ID NO: 277417 - DNA, 25 bp, Artificial
  Probe
gtcctagatcaggacgttgccagcg

SEQ ID NO: 277418 - DNA, 25 bp, Artificial
  Probe
acatgcgccgtgtatctggtttgta

SEQ ID NO: 277419 - DNA, 25 bp, Artificial
  Probe
ttctctagaggaagactcttcctca

SEQ ID NO: 277420 - DNA, 25 bp, Artificial
  Probe
gttccatgaccaggagggaagccta

SEQ ID NO: 277421 - DNA, 25 bp, Artificial
  Probe
gtctttctgactccacgtctctgat

SEQ ID NO: 277422 - DNA, 25 bp, Artificial
  Probe
cttctctagaggaagactcttcctc

SEQ ID NO: 277423 - DNA, 25 bp, Artificial
  Probe
tagaggaagactcttcctcactctg

SEQ ID NO: 277424 - DNA, 25 bp, Artificial
  Probe
agccccatcttgaccttccagggag

SEQ ID NO: 277425 - DNA, 25 bp, Artificial
  Probe
ccaggaactgggtctttctgactcc

SEQ ID NO: 277426 - DNA, 25 bp, Artificial
  Probe
gcgccgtgtatctggtttgtatggt

SEQ ID NO: 277427 - DNA, 25 bp, Artificial
  Probe
gtgaccattccaacctgtgcatttt

SEQ ID NO: 277428 - DNA, 25 bp, Artificial
  Probe
cagcacagtggcaagggtgttctca

SEQ ID NO: 277429 - DNA, 25 bp, Artificial
  Probe
attgtgaccattccaacctgtgcat

SEQ ID NO: 277430 - DNA, 25 bp, Artificial
  Probe
caaatgtccacctggggccagcaca

SEQ ID NO: 277431 - DNA, 25 bp, Artificial
  Probe
tgagctgagcgtcaggctgcctgct

SEQ ID NO: 277432 - DNA, 25 bp, Artificial
  Probe
gtggatttctctctttgccttaaac

SEQ ID NO: 277433 - DNA, 25 bp, Artificial
  Probe
aaccatcttctgcttggggatcggt

SEQ ID NO: 277434 - DNA, 25 bp, Artificial
  Probe
tgaatgttccctacttacaactgtg

SEQ ID NO: 277435 - DNA, 25 bp, Artificial
  Probe
tccaaatgtccacctggggccagca

SEQ ID NO: 277436 - DNA, 25 bp, Artificial
  Probe
cacctggggccagcacagtggcaag

SEQ ID NO: 277437 - DNA, 25 bp, Artificial
  Probe
ccacctggggccagcacagtggcaa

SEQ ID NO: 277438 - DNA, 25 bp, Artificial
  Probe
agcacagtggcaagggtgttctcag

SEQ ID NO: 277439 - DNA, 25 bp, Artificial
  Probe
ataaccatcttctgcttggggatcg

SEQ ID NO: 277440 - DNA, 25 bp, Artificial
  Probe
gaaacacatgccttttagcaggaag

SEQ ID NO: 277441 - DNA, 25 bp, Artificial
  Probe
cttacaactgtggttatcaaaattg

SEQ ID NO: 277442 - DNA, 25 bp, Artificial
  Probe
ggaagcaaatctgtccttttttaag

SEQ ID NO: 277443 - DNA, 25 bp, Artificial
  Probe
aaattgtgaccattccaacctgtgc

SEQ ID NO: 277444 - DNA, 25 bp, Artificial
  Probe
atcggtgaaacacatgccttttagc

SEQ ID NO: 277445 - DNA, 25 bp, Artificial
  Probe
caacctgtgcatttttgtgtgttta

SEQ ID NO: 277446 - DNA, 25 bp, Artificial
  Probe
tctgcttggggatcggtgaaacaca

SEQ ID NO: 277447 - DNA, 25 bp, Artificial
  Probe
aatgttccctacttacaactgtggt

SEQ ID NO: 277448 - DNA, 25 bp, Artificial
  Probe
ccttttagcaggaagcaaatctgtc

SEQ ID NO: 277449 - DNA, 25 bp, Artificial
  Probe
gaataaccatcttctgcttggggat

SEQ ID NO: 277450 - DNA, 25 bp, Artificial
  Probe
tgccttttagcaggaagcaaatctg

SEQ ID NO: 277451 - DNA, 25 bp, Artificial
  Probe
atattcgtgccaaccttctgaaaag

SEQ ID NO: 277452 - DNA, 25 bp, Artificial
  Probe
gtgtgaataaccatcttctgcttgg

SEQ ID NO: 277453 - DNA, 25 bp, Artificial
  Probe
aggtgtccaaatgtccacctggggc

SEQ ID NO: 277454 - DNA, 25 bp, Artificial
  Probe
cggtgaaacacatgccttttagcag

SEQ ID NO: 277455 - DNA, 25 bp, Artificial
  Probe
agtgtgaataaccatcttctgcttg

SEQ ID NO: 277456 - DNA, 25 bp, Artificial
  Probe
caaccttctgaaaaggaagctataa

SEQ ID NO: 277457 - DNA, 25 bp, Artificial
  Probe
ccatcttctgcttggggatcggtga

SEQ ID NO: 277458 - DNA, 25 bp, Artificial
  Probe
gttccctacttacaactgtggttat

SEQ ID NO: 277459 - DNA, 25 bp, Artificial
  Probe
aaaggtgtccaaatgtccacctggg

SEQ ID NO: 277460 - DNA, 25 bp, Artificial
  Probe
atgttccctacttacaactgtggtt

SEQ ID NO: 277461 - DNA, 25 bp, Artificial
  Probe
tgccaaccttctgaaaaggaagcta

SEQ ID NO: 277462 - DNA, 25 bp, Artificial
  Probe
catgccttttagcaggaagcaaatc

SEQ ID NO: 277463 - DNA, 25 bp, Artificial
  Probe
ttgtgaccattccaacctgtgcatt

SEQ ID NO: 277464 - DNA, 25 bp, Artificial
  Probe
gaccattccaacctgtgcatttttg

SEQ ID NO: 277465 - DNA, 25 bp, Artificial
  Probe
gaagcaaatctgtccttttttaagt

SEQ ID NO: 277466 - DNA, 25 bp, Artificial
  Probe
tggtggatttctctctttgccttaa

SEQ ID NO: 277467 - DNA, 25 bp, Artificial
  Probe
cacaatgtcttctgtttagtgtatg

SEQ ID NO: 277468 - DNA, 25 bp, Artificial
  Probe
ttctgcttggggatcggtgaaacac

SEQ ID NO: 277469 - DNA, 25 bp, Artificial
  Probe
ccattccaacctgtgcatttttgtg

SEQ ID NO: 277470 - DNA, 25 bp, Artificial
  Probe
tgtacatattcgtgccaaccttctg

SEQ ID NO: 277471 - DNA, 25 bp, Artificial
  Probe
aacacatgccttttagcaggaagca

SEQ ID NO: 277472 - DNA, 25 bp, Artificial
  Probe
gtgtccaaatgtccacctggggcca

SEQ ID NO: 277473 - DNA, 25 bp, Artificial
  Probe
gacagttgttttccatgattttgac

SEQ ID NO: 277474 - DNA, 25 bp, Artificial
  Probe
accaccaagttgtaaagatgtacgt

SEQ ID NO: 277475 - DNA, 25 bp, Artificial
  Probe
ctaactgtgtaagtgcttataacgg

SEQ ID NO: 277476 - DNA, 25 bp, Artificial
  Probe
tctgcacttgtgattttagactctc

SEQ ID NO: 277477 - DNA, 25 bp, Artificial
  Probe
catgactaactgtgtaagtgcttat

SEQ ID NO: 277478 - DNA, 25 bp, Artificial
  Probe
ctggcttctggaagaatttgttcga

SEQ ID NO: 277479 - DNA, 25 bp, Artificial
  Probe
gaccactatagtttgacgccatctc

SEQ ID NO: 277480 - DNA, 25 bp, Artificial
  Probe
gttttcctctgaagcctgagatgga

SEQ ID NO: 277481 - DNA, 25 bp, Artificial
  Probe
tgttttcctctgaagcctgagatgg

SEQ ID NO: 277482 - DNA, 25 bp, Artificial
  Probe
ggcttaattcagcaaagcctccatt

SEQ ID NO: 277483 - DNA, 25 bp, Artificial
  Probe
cgaatgacagttgttttccatgatt

SEQ ID NO: 277484 - DNA, 25 bp, Artificial
  Probe
cagttgttttccatgattttgacta

SEQ ID NO: 277485 - DNA, 25 bp, Artificial
  Probe
cagttgtggctggatagctgaacag

SEQ ID NO: 277486 - DNA, 25 bp, Artificial
  Probe
caaaccatgggtgttttctaaatct

SEQ ID NO: 277487 - DNA, 25 bp, Artificial
  Probe
ctggtgcactgtcatgttgagaaag

SEQ ID NO: 277488 - DNA, 25 bp, Artificial
  Probe
tttaacattggtttgggacacagac

SEQ ID NO: 277489 - DNA, 25 bp, Artificial
  Probe
tgctattagcccaaaccatgggtgt

SEQ ID NO: 277490 - DNA, 25 bp, Artificial
  Probe
tttgttcgaatgacagttgttttcc

SEQ ID NO: 277491 - DNA, 25 bp, Artificial
  Probe
ccattggtggcttcagttgtggctg

SEQ ID NO: 277492 - DNA, 25 bp, Artificial
  Probe
gctgtccaacttcaataggtcccac

SEQ ID NO: 277493 - DNA, 25 bp, Artificial
  Probe
tggctggatagctgaacagagtctg

SEQ ID NO: 277494 - DNA, 25 bp, Artificial
  Probe
ggtcccaccaacaatgctattagcc

SEQ ID NO: 277495 - DNA, 25 bp, Artificial
  Probe
tatgtctgcacttgtgattttagac

SEQ ID NO: 277496 - DNA, 25 bp, Artificial
  Probe
acagtctctggcttctggaagaatt

SEQ ID NO: 277497 - DNA, 25 bp, Artificial
  Probe
aagatgtacgtttttacctggcagt

SEQ ID NO: 277498 - DNA, 25 bp, Artificial
  Probe
tttgaccactatagtttgacgccat

SEQ ID NO: 277499 - DNA, 25 bp, Artificial
  Probe
tagtttgacgccatctccattttgg

SEQ ID NO: 277500 - DNA, 25 bp, Artificial
  Probe
tggctaacctgtctcaccatcaggc

SEQ ID NO: 277501 - DNA, 25 bp, Artificial
  Probe
cttgggaccaccaagttgtaaagat

SEQ ID NO: 277502 - DNA, 25 bp, Artificial
  Probe
cattggtttgggacacagactttgt

SEQ ID NO: 277503 - DNA, 25 bp, Artificial
  Probe
tttggctaacctgtctcaccatcag

SEQ ID NO: 277504 - DNA, 25 bp, Artificial
  Probe
gccatctccattttggctaacctgt

SEQ ID NO: 277505 - DNA, 25 bp, Artificial
  Probe
tttttacctggcagttgtaccactg

SEQ ID NO: 277506 - DNA, 25 bp, Artificial
  Probe
tgtacgtttttacctggcagttgta

SEQ ID NO: 277507 - DNA, 25 bp, Artificial
  Probe
tagcccaaaccatgggtgttttcta

SEQ ID NO: 277508 - DNA, 25 bp, Artificial
  Probe
aactctccatgactaactgtgtaag

SEQ ID NO: 277509 - DNA, 25 bp, Artificial
  Probe
actaactgtgtaagtgcttataacg

SEQ ID NO: 277510 - DNA, 25 bp, Artificial
  Probe
ctagatatgtctgcacttgtgattt

SEQ ID NO: 277511 - DNA, 25 bp, Artificial
  Probe
taggtcccaccaacaatgctattag

SEQ ID NO: 277512 - DNA, 25 bp, Artificial
  Probe
tggcttcagttgtggctggatagct

SEQ ID NO: 277513 - DNA, 25 bp, Artificial
  Probe
tccattggtggcttcagttgtggct

SEQ ID NO: 277514 - DNA, 25 bp, Artificial
  Probe
ttaacattggtttgggacacagact

SEQ ID NO: 277515 - DNA, 25 bp, Artificial
  Probe
ctgaagcctgagatggatttaacat

SEQ ID NO: 277516 - DNA, 25 bp, Artificial
  Probe
agtatccatcagacaacagtctctg

SEQ ID NO: 277517 - DNA, 25 bp, Artificial
  Probe
ttgttcagctgtccaacttcaatag

SEQ ID NO: 277518 - DNA, 25 bp, Artificial
  Probe
cagactttgttcagctgtccaactt

SEQ ID NO: 277519 - DNA, 25 bp, Artificial
  Probe
gcctctaaaggtgatcaacaaatac

SEQ ID NO: 277520 - DNA, 25 bp, Artificial
  Probe
ctgatgtctggtcttttggagtgac

SEQ ID NO: 277521 - DNA, 25 bp, Artificial
  Probe
ggaattccaaccatctaatcggaca

SEQ ID NO: 277522 - DNA, 25 bp, Artificial
  Probe
cagtgttttggtacgctccggagtg

SEQ ID NO: 277523 - DNA, 25 bp, Artificial
  Probe
tgctgggaattccaaccatctaatc

SEQ ID NO: 277524 - DNA, 25 bp, Artificial
  Probe
agatgacagtaacacggcttgtgaa

SEQ ID NO: 277525 - DNA, 25 bp, Artificial
  Probe
catgtatatgtcacatggtcactca

SEQ ID NO: 277526 - DNA, 25 bp, Artificial
  Probe
cagtaacacggcttgtgaatactct

SEQ ID NO: 277527 - DNA, 25 bp, Artificial
  Probe
aggcccaactcatggccagatgaca

SEQ ID NO: 277528 - DNA, 25 bp, Artificial
  Probe
cggacaacctttcagaaccttattg

SEQ ID NO: 277529 - DNA, 25 bp, Artificial
  Probe
caacctttcagaaccttattgaagg

SEQ ID NO: 277530 - DNA, 25 bp, Artificial
  Probe
aatgataggcccaactcatggccag

SEQ ID NO: 277531 - DNA, 25 bp, Artificial
  Probe
acggcttgtgaatactctgaaagaa

SEQ ID NO: 277532 - DNA, 25 bp, Artificial
  Probe
cacgagttgctcacgtactgtgact

SEQ ID NO: 277533 - DNA, 25 bp, Artificial
  Probe
ttttatatcgcctctgatgtctggt

SEQ ID NO: 277534 - DNA, 25 bp, Artificial
  Probe
ctcagattttagtcccatggccttg

SEQ ID NO: 277535 - DNA, 25 bp, Artificial
  Probe
ggtacgctccggagtgtttaatcca

SEQ ID NO: 277536 - DNA, 25 bp, Artificial
  Probe
ttgtattttgcctctaaaggtgatc

SEQ ID NO: 277537 - DNA, 25 bp, Artificial
  Probe
ccaactgtcccgatgaggtttatca

SEQ ID NO: 277538 - DNA, 25 bp, Artificial
  Probe
tcccgatgaggtttatcagcttatg

SEQ ID NO: 277539 - DNA, 25 bp, Artificial
  Probe
cttgttcctgaaaatgataggccca

SEQ ID NO: 277540 - DNA, 25 bp, Artificial
  Probe
tgacactgcacgagttgctcacgta

SEQ ID NO: 277541 - DNA, 25 bp, Artificial
  Probe
agtcccatggccttgttcctgaaaa

SEQ ID NO: 277542 - DNA, 25 bp, Artificial
  Probe
aggtgatcaacaaatactcgagtta

SEQ ID NO: 277543 - DNA, 25 bp, Artificial
  Probe
ctccggagtgtttaatccagtgtaa

SEQ ID NO: 277544 - DNA, 25 bp, Artificial
  Probe
ccagtgttttggtacgctccggagt

SEQ ID NO: 277545 - DNA, 25 bp, Artificial
  Probe
tatacatgtatatgtcacatggtca

SEQ ID NO: 277546 - DNA, 25 bp, Artificial
  Probe
ctttcagaaccttattgaaggattt

SEQ ID NO: 277547 - DNA, 25 bp, Artificial
  Probe
tccacccaactgtcccgatgaggtt

SEQ ID NO: 277548 - DNA, 25 bp, Artificial
  Probe
aaggaaagcgcctgtcctgtccacc

SEQ ID NO: 277549 - DNA, 25 bp, Artificial
  Probe
gtccacccaactgtcccgatgaggt

SEQ ID NO: 277550 - DNA, 25 bp, Artificial
  Probe
atcgcctctgatgtctggtcttttg

SEQ ID NO: 277551 - DNA, 25 bp, Artificial
  Probe
caactcatggccagatgacagtaac

SEQ ID NO: 277552 - DNA, 25 bp, Artificial
  Probe
gatgacagtaacacggcttgtgaat

SEQ ID NO: 277553 - DNA, 25 bp, Artificial
  Probe
tactgtgactcagattttagtccca

SEQ ID NO: 277554 - DNA, 25 bp, Artificial
  Probe
acacggcttgtgaatactctgaaag

SEQ ID NO: 277555 - DNA, 25 bp, Artificial
  Probe
ctgcacgagttgctcacgtactgtg

SEQ ID NO: 277556 - DNA, 25 bp, Artificial
  Probe
attttagtcccatggccttgttcct

SEQ ID NO: 277557 - DNA, 25 bp, Artificial
  Probe
gattttagtcccatggccttgttcc

SEQ ID NO: 277558 - DNA, 25 bp, Artificial
  Probe
tcatggccagatgacagtaacacgg

SEQ ID NO: 277559 - DNA, 25 bp, Artificial
  Probe
aaccttattgaaggatttgaagcac

SEQ ID NO: 277560 - DNA, 25 bp, Artificial
  Probe
ggagtgacactgcacgagttgctca

SEQ ID NO: 277561 - DNA, 25 bp, Artificial
  Probe
gatgtctggtcttttggagtgacac

SEQ ID NO: 277562 - DNA, 25 bp, Artificial
  Probe
gtgatcaacaaatactcgagttaca

SEQ ID NO: 277563 - DNA, 25 bp, Artificial
  Probe
ttgttcctgaaaatgataggcccaa

SEQ ID NO: 277564 - DNA, 25 bp, Artificial
  Probe
tgtgactcagattttagtcccatgg

SEQ ID NO: 277565 - DNA, 25 bp, Artificial
  Probe
gcacaagccccaaatgaataatgtc

SEQ ID NO: 277566 - DNA, 25 bp, Artificial
  Probe
ttcacgtatgtccttagagacttac

SEQ ID NO: 277567 - DNA, 25 bp, Artificial
  Probe
gccacttacaagctattcggggaaa

SEQ ID NO: 277568 - DNA, 25 bp, Artificial
  Probe
catccttcgtcatcgaggaacagac

SEQ ID NO: 277569 - DNA, 25 bp, Artificial
  Probe
tccaaagacaaactactgtgtgtct

SEQ ID NO: 277570 - DNA, 25 bp, Artificial
  Probe
tgccacttacaagctattcggggaa

SEQ ID NO: 277571 - DNA, 25 bp, Artificial
  Probe
actggagtctacatccttcgtcatc

SEQ ID NO: 277572 - DNA, 25 bp, Artificial
  Probe
tggagtttccacctgccacttacaa

SEQ ID NO: 277573 - DNA, 25 bp, Artificial
  Probe
gccccaaatgaataatgtcactggg

SEQ ID NO: 277574 - DNA, 25 bp, Artificial
  Probe
ctgggaacttcacgtatgtccttag

SEQ ID NO: 277575 - DNA, 25 bp, Artificial
  Probe
actgggaacttcacgtatgtcctta

SEQ ID NO: 277576 - DNA, 25 bp, Artificial
  Probe
tgtccttagagacttacttccaaag

SEQ ID NO: 277577 - DNA, 25 bp, Artificial
  Probe
ccacttacaagctattcggggaaag

SEQ ID NO: 277578 - DNA, 25 bp, Artificial
  Probe
gacaaactactgtgtgtctgtttat

SEQ ID NO: 277579 - DNA, 25 bp, Artificial
  Probe
tgtcactgggaacttcacgtatgtc

SEQ ID NO: 277580 - DNA, 25 bp, Artificial
  Probe
tggagtctacatccttcgtcatcga

SEQ ID NO: 277581 - DNA, 25 bp, Artificial
  Probe
acttccaaagacaaactactgtgtg

SEQ ID NO: 277582 - DNA, 25 bp, Artificial
  Probe
ctgaccaggaatcaggtatggttag

SEQ ID NO: 277583 - DNA, 25 bp, Artificial
  Probe
caaactactgtgtgtctgtttattt

SEQ ID NO: 277584 - DNA, 25 bp, Artificial
  Probe
cgtccttcagcctgaccaggaatca

SEQ ID NO: 277585 - DNA, 25 bp, Artificial
  Probe
ggagtctacatccttcgtcatcgag

SEQ ID NO: 277586 - DNA, 25 bp, Artificial
  Probe
caaagacaaactactgtgtgtctgt

SEQ ID NO: 277587 - DNA, 25 bp, Artificial
  Probe
tccttcagcctgaccaggaatcagg

SEQ ID NO: 277588 - DNA, 25 bp, Artificial
  Probe
gtccttagagacttacttccaaaga

SEQ ID NO: 277589 - DNA, 25 bp, Artificial
  Probe
aagactggagtctacatccttcgtc

SEQ ID NO: 277590 - DNA, 25 bp, Artificial
  Probe
aatgtcactgggaacttcacgtatg

SEQ ID NO: 277591 - DNA, 25 bp, Artificial
  Probe
cacttacaagctattcggggaaagc

SEQ ID NO: 277592 - DNA, 25 bp, Artificial
  Probe
agacaaactactgtgtgtctgttta

SEQ ID NO: 277593 - DNA, 25 bp, Artificial
  Probe
atgatggagtttccacctgccactt

SEQ ID NO: 277594 - DNA, 25 bp, Artificial
  Probe
gtccttcagcctgaccaggaatcag

SEQ ID NO: 277595 - DNA, 25 bp, Artificial
  Probe
ggagtttccacctgccacttacaag

SEQ ID NO: 277596 - DNA, 25 bp, Artificial
  Probe
gcctgaccaggaatcaggtatggtt

SEQ ID NO: 277597 - DNA, 25 bp, Artificial
  Probe
atgaataatgtcactgggaacttca

SEQ ID NO: 277598 - DNA, 25 bp, Artificial
  Probe
ccaataaatgcacatcactgagctg

SEQ ID NO: 277599 - DNA, 25 bp, Artificial
  Probe
aacttcacgtatgtccttagagact

SEQ ID NO: 277600 - DNA, 25 bp, Artificial
  Probe
gaccaggaatcaggtatggttaggc

SEQ ID NO: 277601 - DNA, 25 bp, Artificial
  Probe
acttcacgtatgtccttagagactt

SEQ ID NO: 277602 - DNA, 25 bp, Artificial
  Probe
cctgaccaggaatcaggtatggtta

SEQ ID NO: 277603 - DNA, 25 bp, Artificial
  Probe
gtatgtccttagagacttacttcca

SEQ ID NO: 277604 - DNA, 25 bp, Artificial
  Probe
gggaacttcacgtatgtccttagag

SEQ ID NO: 277605 - DNA, 25 bp, Artificial
  Probe
cacctgccacttacaagctattcgg

SEQ ID NO: 277606 - DNA, 25 bp, Artificial
  Probe
cttacaagctattcggggaaagctt

SEQ ID NO: 277607 - DNA, 25 bp, Artificial
  Probe
cagcctgaccaggaatcaggtatgg

SEQ ID NO: 277608 - DNA, 25 bp, Artificial
  Probe
gactggagtctacatccttcgtcat

SEQ ID NO: 277609 - DNA, 25 bp, Artificial
  Probe
gtctacatccttcgtcatcgaggaa

SEQ ID NO: 277610 - DNA, 25 bp, Artificial
  Probe
aagccccaaatgaataatgtcactg

SEQ ID NO: 277611 - DNA, 25 bp, Artificial
  Probe
cagcatactgtcttttaagtttaca

SEQ ID NO: 277612 - DNA, 25 bp, Artificial
  Probe
agcatactgtcttttaagtttacat

SEQ ID NO: 277613 - DNA, 25 bp, Artificial
  Probe
tgacctctgactccttaagtttgct

SEQ ID NO: 277614 - DNA, 25 bp, Artificial
  Probe
tctcttctctgctccctttgacctc

SEQ ID NO: 277615 - DNA, 25 bp, Artificial
  Probe
tctgctccctttgacctctgactcc

SEQ ID NO: 277616 - DNA, 25 bp, Artificial
  Probe
ttaacacgttctcttctctgctccc

SEQ ID NO: 277617 - DNA, 25 bp, Artificial
  Probe
ctccctttgacctctgactccttaa

SEQ ID NO: 277618 - DNA, 25 bp, Artificial
  Probe
ccctttgacctctgactccttaagt

SEQ ID NO: 277619 - DNA, 25 bp, Artificial
  Probe
tccctttgacctctgactccttaag

SEQ ID NO: 277620 - DNA, 25 bp, Artificial
  Probe
tctctgctccctttgacctctgact

SEQ ID NO: 277621 - DNA, 25 bp, Artificial
  Probe
acctctgactccttaagtttgctgc

SEQ ID NO: 277622 - DNA, 25 bp, Artificial
  Probe
acatttaacacgttctcttctctgc

SEQ ID NO: 277623 - DNA, 25 bp, Artificial
  Probe
taagtttacatttaacacgttctct

SEQ ID NO: 277624 - DNA, 25 bp, Artificial
  Probe
tccttaagtttgctgctgagggttg

SEQ ID NO: 277625 - DNA, 25 bp, Artificial
  Probe
cctctgactccttaagtttgctgct

SEQ ID NO: 277626 - DNA, 25 bp, Artificial
  Probe
ctccttaagtttgctgctgagggtt

SEQ ID NO: 277627 - DNA, 25 bp, Artificial
  Probe
tcttctctgctccctttgacctctg

SEQ ID NO: 277628 - DNA, 25 bp, Artificial
  Probe
catttaacacgttctcttctctgct

SEQ ID NO: 277629 - DNA, 25 bp, Artificial
  Probe
ttacatttaacacgttctcttctct

SEQ ID NO: 277630 - DNA, 25 bp, Artificial
  Probe
ccagcatactgtcttttaagtttac

SEQ ID NO: 277631 - DNA, 25 bp, Artificial
  Probe
aacacgttctcttctctgctccctt

SEQ ID NO: 277632 - DNA, 25 bp, Artificial
  Probe
ttgacctctgactccttaagtttgc

SEQ ID NO: 277633 - DNA, 25 bp, Artificial
  Probe
ttctcttctctgctccctttgacct

SEQ ID NO: 277634 - DNA, 25 bp, Artificial
  Probe
tctgactccttaagtttgctgctga

SEQ ID NO: 277635 - DNA, 25 bp, Artificial
  Probe
ctctgactccttaagtttgctgctg

SEQ ID NO: 277636 - DNA, 25 bp, Artificial
  Probe
ctgctccctttgacctctgactcct

SEQ ID NO: 277637 - DNA, 25 bp, Artificial
  Probe
ctcttctctgctccctttgacctct

SEQ ID NO: 277638 - DNA, 25 bp, Artificial
  Probe
atttaacacgttctcttctctgctc

SEQ ID NO: 277639 - DNA, 25 bp, Artificial
  Probe
tacatttaacacgttctcttctctg

SEQ ID NO: 277640 - DNA, 25 bp, Artificial
  Probe
tttacatttaacacgttctcttctc

SEQ ID NO: 277641 - DNA, 25 bp, Artificial
  Probe
gactccttaagtttgctgctgaggg

SEQ ID NO: 277642 - DNA, 25 bp, Artificial
  Probe
tgctccctttgacctctgactcctt

SEQ ID NO: 277643 - DNA, 25 bp, Artificial
  Probe
cccagcatactgtcttttaagttta

SEQ ID NO: 277644 - DNA, 25 bp, Artificial
  Probe
ttctctgctccctttgacctctgac

SEQ ID NO: 277645 - DNA, 25 bp, Artificial
  Probe
catactgtcttttaagtttacattt

SEQ ID NO: 277646 - DNA, 25 bp, Artificial
  Probe
gtttacatttaacacgttctcttct

SEQ ID NO: 277647 - DNA, 25 bp, Artificial
  Probe
cctttgacctctgactccttaagtt

SEQ ID NO: 277648 - DNA, 25 bp, Artificial
  Probe
actccttaagtttgctgctgagggt

SEQ ID NO: 277649 - DNA, 25 bp, Artificial
  Probe
ctgactccttaagtttgctgctgag

SEQ ID NO: 277650 - DNA, 25 bp, Artificial
  Probe
acacgttctcttctctgctcccttt

SEQ ID NO: 277651 - DNA, 25 bp, Artificial
  Probe
cacgttctcttctctgctccctttg

SEQ ID NO: 277652 - DNA, 25 bp, Artificial
  Probe
tgactccttaagtttgctgctgagg

SEQ ID NO: 277653 - DNA, 25 bp, Artificial
  Probe
gacctctgactccttaagtttgctg

SEQ ID NO: 277654 - DNA, 25 bp, Artificial
  Probe
gttctcttctctgctccctttgacc

SEQ ID NO: 277655 - DNA, 25 bp, Artificial
  Probe
tttgacctctgactccttaagtttg

SEQ ID NO: 277656 - DNA, 25 bp, Artificial
  Probe
tttaacacgttctcttctctgctcc

SEQ ID NO: 277657 - DNA, 25 bp, Artificial
  Probe
tataagaggggttcccaactcagat

SEQ ID NO: 277658 - DNA, 25 bp, Artificial
  Probe
ctgggccctgcagttccagctctgt

SEQ ID NO: 277659 - DNA, 25 bp, Artificial
  Probe
cttgtggccgccttctgcgattcag

SEQ ID NO: 277660 - DNA, 25 bp, Artificial
  Probe
tcatcggaactttgtgatggattac

SEQ ID NO: 277661 - DNA, 25 bp, Artificial
  Probe
tcattgagaagtaccttgctcctta

SEQ ID NO: 277662 - DNA, 25 bp, Artificial
  Probe
agccagcttctgaagcctctgggcc

SEQ ID NO: 277663 - DNA, 25 bp, Artificial
  Probe
gtttctttcttgatgccatgacatc

SEQ ID NO: 277664 - DNA, 25 bp, Artificial
  Probe
tggaaaggcctcctcagccctgaca

SEQ ID NO: 277665 - DNA, 25 bp, Artificial
  Probe
aacactcagccagcttctgaagcct

SEQ ID NO: 277666 - DNA, 25 bp, Artificial
  Probe
ctcagccctgacacttctcattgag

SEQ ID NO: 277667 - DNA, 25 bp, Artificial
  Probe
ctataagaggggttcccaactcaga

SEQ ID NO: 277668 - DNA, 25 bp, Artificial
  Probe
acctcccggaagattcatcggaact

SEQ ID NO: 277669 - DNA, 25 bp, Artificial
  Probe
gatcagcacaacactcagccagctt

SEQ ID NO: 277670 - DNA, 25 bp, Artificial
  Probe
gccaacttcagtttctttcttgatg

SEQ ID NO: 277671 - DNA, 25 bp, Artificial
  Probe
tatgggatatgtgtctcccatggag

SEQ ID NO: 277672 - DNA, 25 bp, Artificial
  Probe
ggttcccaactcagatcagcacaac

SEQ ID NO: 277673 - DNA, 25 bp, Artificial
  Probe
tgacttggagttgaactgagcagct

SEQ ID NO: 277674 - DNA, 25 bp, Artificial
  Probe
atgacttggagttgaactgagcagc

SEQ ID NO: 277675 - DNA, 25 bp, Artificial
  Probe
gttgaactgagcagctccagactca

SEQ ID NO: 277676 - DNA, 25 bp, Artificial
  Probe
tcccggaagattcatcggaactttg

SEQ ID NO: 277677 - DNA, 25 bp, Artificial
  Probe
aacccatgtcttaggccccagagtc

SEQ ID NO: 277678 - DNA, 25 bp, Artificial
  Probe
agaggggttcccaactcagatcagc

SEQ ID NO: 277679 - DNA, 25 bp, Artificial
  Probe
ttctgaccaaaaaaggcaggcaaat

SEQ ID NO: 277680 - DNA, 25 bp, Artificial
  Probe
agttccagctctgtgcaaacctctc

SEQ ID NO: 277681 - DNA, 25 bp, Artificial
  Probe
ccaccattgtgcttctctgctattg

SEQ ID NO: 277682 - DNA, 25 bp, Artificial
  Probe
gagattccgttttccttcctgcaac

SEQ ID NO: 277683 - DNA, 25 bp, Artificial
  Probe
ccgccttctgcgattcagtgctgtc

SEQ ID NO: 277684 - DNA, 25 bp, Artificial
  Probe
gctttcggccaacttcagtttcttt

SEQ ID NO: 277685 - DNA, 25 bp, Artificial
  Probe
caaacccatgtcttaggccccagag

SEQ ID NO: 277686 - DNA, 25 bp, Artificial
  Probe
gtggccgccttctgcgattcagtgc

SEQ ID NO: 277687 - DNA, 25 bp, Artificial
  Probe
tcagatcagcacaacactcagccag

SEQ ID NO: 277688 - DNA, 25 bp, Artificial
  Probe
catcggaactttgtgatggattact

SEQ ID NO: 277689 - DNA, 25 bp, Artificial
  Probe
gtcttaggccccagagtccctataa

SEQ ID NO: 277690 - DNA, 25 bp, Artificial
  Probe
actcagccagcttctgaagcctctg

SEQ ID NO: 277691 - DNA, 25 bp, Artificial
  Probe
taggccccagagtccctataagagg

SEQ ID NO: 277692 - DNA, 25 bp, Artificial
  Probe
agcacaacactcagccagcttctga

SEQ ID NO: 277693 - DNA, 25 bp, Artificial
  Probe
agactcaagacaggaagagccactt

SEQ ID NO: 277694 - DNA, 25 bp, Artificial
  Probe
ccctgggtcaatgagtatgtgaatg

SEQ ID NO: 277695 - DNA, 25 bp, Artificial
  Probe
catgagattccgttttccttcctgc

SEQ ID NO: 277696 - DNA, 25 bp, Artificial
  Probe
cacttctcattgagaagtaccttgc

SEQ ID NO: 277697 - DNA, 25 bp, Artificial
  Probe
ttgctcccagccagctgtggtattt

SEQ ID NO: 277698 - DNA, 25 bp, Artificial
  Probe
gggatatgtgtctcccatggagatg

SEQ ID NO: 277699 - DNA, 25 bp, Artificial
  Probe
cccagcgagccctgggtcaatgagt

SEQ ID NO: 277700 - DNA, 25 bp, Artificial
  Probe
cttcagtttctttcttgatgccatg

SEQ ID NO: 277701 - DNA, 25 bp, Artificial
  Probe
gtcagcaccaataggctctgaccct

SEQ ID NO: 277702 - DNA, 25 bp, Artificial
  Probe
gaagtaccttgctccttacattcag

SEQ ID NO: 277703 - DNA, 25 bp, Artificial
  Probe
gctgttgtcacagcacatgcagtgc

SEQ ID NO: 277704 - DNA, 25 bp, Artificial
  Probe
gcagtaccaagtttcagtggaacca

SEQ ID NO: 277705 - DNA, 25 bp, Artificial
  Probe
tgctggaaagctgttctttctcttc

SEQ ID NO: 277706 - DNA, 25 bp, Artificial
  Probe
tcgctctcggtagcagtaccaagtt

SEQ ID NO: 277707 - DNA, 25 bp, Artificial
  Probe
aatgtccgtgccatgttgagtatat

SEQ ID NO: 277708 - DNA, 25 bp, Artificial
  Probe
agcagtaccaagtttcagtggaacc

SEQ ID NO: 277709 - DNA, 25 bp, Artificial
  Probe
tgctgttgtcacagcacatgcagtg

SEQ ID NO: 277710 - DNA, 25 bp, Artificial
  Probe
atgtccgtgccatgttgagtatatt

SEQ ID NO: 277711 - DNA, 25 bp, Artificial
  Probe
gtaccaagtttcagtggaaccaaat

SEQ ID NO: 277712 - DNA, 25 bp, Artificial
  Probe
gtcgctctcggtagcagtaccaagt

SEQ ID NO: 277713 - DNA, 25 bp, Artificial
  Probe
ggtagcagtaccaagtttcagtgga

SEQ ID NO: 277714 - DNA, 25 bp, Artificial
  Probe
ttcttcctgggaaaagtagtcgctc

SEQ ID NO: 277715 - DNA, 25 bp, Artificial
  Probe
tctcggtagcagtaccaagtttcag

SEQ ID NO: 277716 - DNA, 25 bp, Artificial
  Probe
ctcggtagcagtaccaagtttcagt

SEQ ID NO: 277717 - DNA, 25 bp, Artificial
  Probe
atgctgctggaaagctgttctttct

SEQ ID NO: 277718 - DNA, 25 bp, Artificial
  Probe
agttccttcactgtaatgtttatgc

SEQ ID NO: 277719 - DNA, 25 bp, Artificial
  Probe
gtagcagtaccaagtttcagtggaa

SEQ ID NO: 277720 - DNA, 25 bp, Artificial
  Probe
gttccttcactgtaatgtttatgct

SEQ ID NO: 277721 - DNA, 25 bp, Artificial
  Probe
taccaagtttcagtggaaccaaatt

SEQ ID NO: 277722 - DNA, 25 bp, Artificial
  Probe
catgctgctggaaagctgttctttc

SEQ ID NO: 277723 - DNA, 25 bp, Artificial
  Probe
tgctgctggaaagctgttctttctc

SEQ ID NO: 277724 - DNA, 25 bp, Artificial
  Probe
tccttcactgtaatgtttatgctgt

SEQ ID NO: 277725 - DNA, 25 bp, Artificial
  Probe
tagcagtaccaagtttcagtggaac

SEQ ID NO: 277726 - DNA, 25 bp, Artificial
  Probe
tgttgtcacagcacatgcagtgctc

SEQ ID NO: 277727 - DNA, 25 bp, Artificial
  Probe
tcttcctgggaaaagtagtcgctct

SEQ ID NO: 277728 - DNA, 25 bp, Artificial
  Probe
gttgtcacagcacatgcagtgctcc

SEQ ID NO: 277729 - DNA, 25 bp, Artificial
  Probe
ccttcactgtaatgtttatgctgtt

SEQ ID NO: 277730 - DNA, 25 bp, Artificial
  Probe
agtcgctctcggtagcagtaccaag

SEQ ID NO: 277731 - DNA, 25 bp, Artificial
  Probe
gtccgtgccatgttgagtatattcg

SEQ ID NO: 277732 - DNA, 25 bp, Artificial
  Probe
cttcttcctgggaaaagtagtcgct

SEQ ID NO: 277733 - DNA, 25 bp, Artificial
  Probe
cgctctcggtagcagtaccaagttt

SEQ ID NO: 277734 - DNA, 25 bp, Artificial
  Probe
ctgttgtcacagcacatgcagtgct

SEQ ID NO: 277735 - DNA, 25 bp, Artificial
  Probe
ccatgctgctggaaagctgttcttt

SEQ ID NO: 277736 - DNA, 25 bp, Artificial
  Probe
aaagtagtcgctctcggtagcagta

SEQ ID NO: 277737 - DNA, 25 bp, Artificial
  Probe
cagttccttcactgtaatgtttatg

SEQ ID NO: 277738 - DNA, 25 bp, Artificial
  Probe
ttccttcactgtaatgtttatgctg

SEQ ID NO: 277739 - DNA, 25 bp, Artificial
  Probe
ctctcggtagcagtaccaagtttca

SEQ ID NO: 277740 - DNA, 25 bp, Artificial
  Probe
aagtagtcgctctcggtagcagtac

SEQ ID NO: 277741 - DNA, 25 bp, Artificial
  Probe
cttcctgggaaaagtagtcgctctc

SEQ ID NO: 277742 - DNA, 25 bp, Artificial
  Probe
gctctcggtagcagtaccaagtttc

SEQ ID NO: 277743 - DNA, 25 bp, Artificial
  Probe
tcggtagcagtaccaagtttcagtg

SEQ ID NO: 277744 - DNA, 25 bp, Artificial
  Probe
ctgctggaaagctgttctttctctt

SEQ ID NO: 277745 - DNA, 25 bp, Artificial
  Probe
tgtccgtgccatgttgagtatattc

SEQ ID NO: 277746 - DNA, 25 bp, Artificial
  Probe
cagtaccaagtttcagtggaaccaa

SEQ ID NO: 277747 - DNA, 25 bp, Artificial
  Probe
tttcatgaaacttacatgtgcacca

SEQ ID NO: 277748 - DNA, 25 bp, Artificial
  Probe
catgaaacaattccagtttacatac

SEQ ID NO: 277749 - DNA, 25 bp, Artificial
  Probe
tttgttgcatttcaaaatcatgaaa

SEQ ID NO: 277750 - DNA, 25 bp, Artificial
  Probe
aattccagtttacatactaaaagag

SEQ ID NO: 277751 - DNA, 25 bp, Artificial
  Probe
cagttctccgggcgtaacctaggtg

SEQ ID NO: 277752 - DNA, 25 bp, Artificial
  Probe
gaaacaattccagtttacatactaa

SEQ ID NO: 277753 - DNA, 25 bp, Artificial
  Probe
ttagtggtggatttttcctcatccc

SEQ ID NO: 277754 - DNA, 25 bp, Artificial
  Probe
gcattttcatgaaacttacatgtgc

SEQ ID NO: 277755 - DNA, 25 bp, Artificial
  Probe
ttcaaaatcatgaaacaattccagt

SEQ ID NO: 277756 - DNA, 25 bp, Artificial
  Probe
catttcaaaatcatgaaacaattcc

SEQ ID NO: 277757 - DNA, 25 bp, Artificial
  Probe
ggtggatttttcctcatccctgaaa

SEQ ID NO: 277758 - DNA, 25 bp, Artificial
  Probe
tccagtttacatactaaaagagatg

SEQ ID NO: 277759 - DNA, 25 bp, Artificial
  Probe
gccagttctccgggcgtaacctagg

SEQ ID NO: 277760 - DNA, 25 bp, Artificial
  Probe
tatttgttgcatttcaaaatcatga

SEQ ID NO: 277761 - DNA, 25 bp, Artificial
  Probe
cagtttacatactaaaagagatgtg

SEQ ID NO: 277762 - DNA, 25 bp, Artificial
  Probe
aaaatcatgaaacaattccagttta

SEQ ID NO: 277763 - DNA, 25 bp, Artificial
  Probe
aaacttacatgtgcaccattccagg

SEQ ID NO: 277764 - DNA, 25 bp, Artificial
  Probe
aatgttttcatttatatttgttgca

SEQ ID NO: 277765 - DNA, 25 bp, Artificial
  Probe
gatttttcctcatccctgaaatgtt

SEQ ID NO: 277766 - DNA, 25 bp, Artificial
  Probe
tgcatttcaaaatcatgaaacaatt

SEQ ID NO: 277767 - DNA, 25 bp, Artificial
  Probe
aatcatgaaacaattccagtttaca

SEQ ID NO: 277768 - DNA, 25 bp, Artificial
  Probe
gaagccagttctccgggcgtaacct

SEQ ID NO: 277769 - DNA, 25 bp, Artificial
  Probe
tttatatttgttgcatttcaaaatc

SEQ ID NO: 277770 - DNA, 25 bp, Artificial
  Probe
acaattccagtttacatactaaaag

SEQ ID NO: 277771 - DNA, 25 bp, Artificial
  Probe
atgttttcatttatatttgttgcat

SEQ ID NO: 277772 - DNA, 25 bp, Artificial
  Probe
ggatttttcctcatccctgaaatgt

SEQ ID NO: 277773 - DNA, 25 bp, Artificial
  Probe
tggtggatttttcctcatccctgaa

SEQ ID NO: 277774 - DNA, 25 bp, Artificial
  Probe
tttacatactaaaagagatgtgaga

SEQ ID NO: 277775 - DNA, 25 bp, Artificial
  Probe
agtttacatactaaaagagatgtga

SEQ ID NO: 277776 - DNA, 25 bp, Artificial
  Probe
tgttgcatttcaaaatcatgaaaca

SEQ ID NO: 277777 - DNA, 25 bp, Artificial
  Probe
gaaacttacatgtgcaccattccag

SEQ ID NO: 277778 - DNA, 25 bp, Artificial
  Probe
tttttcctcatccctgaaatgtttt

SEQ ID NO: 277779 - DNA, 25 bp, Artificial
  Probe
ccctgaaatgttttcatttatattt

SEQ ID NO: 277780 - DNA, 25 bp, Artificial
  Probe
tatatttgttgcatttcaaaatcat

SEQ ID NO: 277781 - DNA, 25 bp, Artificial
  Probe
ttccagtttacatactaaaagagat

SEQ ID NO: 277782 - DNA, 25 bp, Artificial
  Probe
aacttacatgtgcaccattccagga

SEQ ID NO: 277783 - DNA, 25 bp, Artificial
  Probe
catgaaacttacatgtgcaccattc

SEQ ID NO: 277784 - DNA, 25 bp, Artificial
  Probe
catttatatttgttgcatttcaaaa

SEQ ID NO: 277785 - DNA, 25 bp, Artificial
  Probe
tggatttttcctcatccctgaaatg

SEQ ID NO: 277786 - DNA, 25 bp, Artificial
  Probe
tagtggtggatttttcctcatccct

SEQ ID NO: 277787 - DNA, 25 bp, Artificial
  Probe
gtggatttttcctcatccctgaaat

SEQ ID NO: 277788 - DNA, 25 bp, Artificial
  Probe
tttcctcatccctgaaatgttttca

SEQ ID NO: 277789 - DNA, 25 bp, Artificial
  Probe
ttcatttatatttgttgcatttcaa

SEQ ID NO: 277790 - DNA, 25 bp, Artificial
  Probe
ttttcatttatatttgttgcatttc

SEQ ID NO: 277791 - DNA, 25 bp, Artificial
  Probe
ccagtttacatactaaaagagatgt

SEQ ID NO: 277792 - DNA, 25 bp, Artificial
  Probe
tgaaacttacatgtgcaccattcca

SEQ ID NO: 277793 - DNA, 25 bp, Artificial
  Probe
agtactggcgccttaaccagcaact

SEQ ID NO: 277794 - DNA, 25 bp, Artificial
  Probe
ctcctgcaaccgtggaatcagtctt

SEQ ID NO: 277795 - DNA, 25 bp, Artificial
  Probe
gatgcactgtagtcctcggactcca

SEQ ID NO: 277796 - DNA, 25 bp, Artificial
  Probe
cttagggttgtgcagatgggcactt

SEQ ID NO: 277797 - DNA, 25 bp, Artificial
  Probe
gtgcagatgggcacttgacctagtg

SEQ ID NO: 277798 - DNA, 25 bp, Artificial
  Probe
atggttatcggctatcctgaaactg

SEQ ID NO: 277799 - DNA, 25 bp, Artificial
  Probe
gggcacttgacctagtgcccctaga

SEQ ID NO: 277800 - DNA, 25 bp, Artificial
  Probe
cagatgggcacttgacctagtgccc

SEQ ID NO: 277801 - DNA, 25 bp, Artificial
  Probe
ctccttagggttgtgcagatgggca

SEQ ID NO: 277802 - DNA, 25 bp, Artificial
  Probe
cacttgacctagtgcccctagatac

SEQ ID NO: 277803 - DNA, 25 bp, Artificial
  Probe
gtcatatggctgtttcaagtgtgac

SEQ ID NO: 277804 - DNA, 25 bp, Artificial
  Probe
cattaactggggatgtgaccactcc

SEQ ID NO: 277805 - DNA, 25 bp, Artificial
  Probe
atgcactgtagtcctcggactccag

SEQ ID NO: 277806 - DNA, 25 bp, Artificial
  Probe
agtcctcggactccagacactaact

SEQ ID NO: 277807 - DNA, 25 bp, Artificial
  Probe
aagggctatcccagaaatacgacac

SEQ ID NO: 277808 - DNA, 25 bp, Artificial
  Probe
gcagatgggcacttgacctagtgcc

SEQ ID NO: 277809 - DNA, 25 bp, Artificial
  Probe
cttcttgtcatatggctgtttcaag

SEQ ID NO: 277810 - DNA, 25 bp, Artificial
  Probe
gtccccatttcttcttgtcatatgg

SEQ ID NO: 277811 - DNA, 25 bp, Artificial
  Probe
tcttcttgtcatatggctgtttcaa

SEQ ID NO: 277812 - DNA, 25 bp, Artificial
  Probe
taactcattaactggggatgtgacc

SEQ ID NO: 277813 - DNA, 25 bp, Artificial
  Probe
gtagtcctcggactccagacactaa

SEQ ID NO: 277814 - DNA, 25 bp, Artificial
  Probe
tgtgaccactcctgcaaccgtggaa

SEQ ID NO: 277815 - DNA, 25 bp, Artificial
  Probe
accactcctgcaaccgtggaatcag

SEQ ID NO: 277816 - DNA, 25 bp, Artificial
  Probe
ttcaagtgtgacatctattttctgg

SEQ ID NO: 277817 - DNA, 25 bp, Artificial
  Probe
tctacatagcactggctatggttat

SEQ ID NO: 277818 - DNA, 25 bp, Artificial
  Probe
catagcactggctatggttatcggc

SEQ ID NO: 277819 - DNA, 25 bp, Artificial
  Probe
ctctctacatagcactggctatggt

SEQ ID NO: 277820 - DNA, 25 bp, Artificial
  Probe
tccagacactaactcattaactggg

SEQ ID NO: 277821 - DNA, 25 bp, Artificial
  Probe
gtggcaaagggctatcccagaaata

SEQ ID NO: 277822 - DNA, 25 bp, Artificial
  Probe
gggatgtgaccactcctgcaaccgt

SEQ ID NO: 277823 - DNA, 25 bp, Artificial
  Probe
cccatttcttcttgtcatatggctg

SEQ ID NO: 277824 - DNA, 25 bp, Artificial
  Probe
cagaaatacgacacactggatgcac

SEQ ID NO: 277825 - DNA, 25 bp, Artificial
  Probe
gtactggcgccttaaccagcaactt

SEQ ID NO: 277826 - DNA, 25 bp, Artificial
  Probe
ggcaaagggctatcccagaaatacg

SEQ ID NO: 277827 - DNA, 25 bp, Artificial
  Probe
taactggggatgtgaccactcctgc

SEQ ID NO: 277828 - DNA, 25 bp, Artificial
  Probe
gaccactcctgcaaccgtggaatca

SEQ ID NO: 277829 - DNA, 25 bp, Artificial
  Probe
tggggatgtgaccactcctgcaacc

SEQ ID NO: 277830 - DNA, 25 bp, Artificial
  Probe
gtgaccactcctgcaaccgtggaat

SEQ ID NO: 277831 - DNA, 25 bp, Artificial
  Probe
tggatgcactgtagtcctcggactc

SEQ ID NO: 277832 - DNA, 25 bp, Artificial
  Probe
gaaatacgacacactggatgcactg

SEQ ID NO: 277833 - DNA, 25 bp, Artificial
  Probe
cccagggtctctctacatagcactg

SEQ ID NO: 277834 - DNA, 25 bp, Artificial
  Probe
tggctatggttatcggctatcctga

SEQ ID NO: 277835 - DNA, 25 bp, Artificial
  Probe
caagtctacttcttcaagggcaaag

SEQ ID NO: 277836 - DNA, 25 bp, Artificial
  Probe
ccatttcttcttgtcatatggctgt

SEQ ID NO: 277837 - DNA, 25 bp, Artificial
  Probe
aatacgacacactggatgcactgta

SEQ ID NO: 277838 - DNA, 25 bp, Artificial
  Probe
ccgtggaatcagtcttggatgttcc

SEQ ID NO: 277839 - DNA, 25 bp, Artificial
  Probe
ctgttgcagaaggagctgcccacct

SEQ ID NO: 277840 - DNA, 25 bp, Artificial
  Probe
tatgcagggcgctgtggtgacaaat

SEQ ID NO: 277841 - DNA, 25 bp, Artificial
  Probe
caaatacaagatctgccagtcggag

SEQ ID NO: 277842 - DNA, 25 bp, Artificial
  Probe
gcagtagctgccatcgtgtgtacct

SEQ ID NO: 277843 - DNA, 25 bp, Artificial
  Probe
aggcgtatgctatcccagaagggcc

SEQ ID NO: 277844 - DNA, 25 bp, Artificial
  Probe
tgcagaaggagctgcccacctggac

SEQ ID NO: 277845 - DNA, 25 bp, Artificial
  Probe
catttttatccctgagttggtccta

SEQ ID NO: 277846 - DNA, 25 bp, Artificial
  Probe
acctggaagctcaggcatgtgcaca

SEQ ID NO: 277847 - DNA, 25 bp, Artificial
  Probe
gtccaaaggcgtatgctatcccaga

SEQ ID NO: 277848 - DNA, 25 bp, Artificial
  Probe
gtgtaccttccaggagtatgcaggg

SEQ ID NO: 277849 - DNA, 25 bp, Artificial
  Probe
gaagaacatctctgctcttacctgg

SEQ ID NO: 277850 - DNA, 25 bp, Artificial
  Probe
tctgctcttacctggaagctcaggc

SEQ ID NO: 277851 - DNA, 25 bp, Artificial
  Probe
ctttggggagtacgtgcgctcactt

SEQ ID NO: 277852 - DNA, 25 bp, Artificial
  Probe
agaacatctctgctcttacctggaa

SEQ ID NO: 277853 - DNA, 25 bp, Artificial
  Probe
gacaaatacaagatctgccagtcgg

SEQ ID NO: 277854 - DNA, 25 bp, Artificial
  Probe
aagatctgccagtcggagctcaagg

SEQ ID NO: 277855 - DNA, 25 bp, Artificial
  Probe
ctggagcaggcagtagctgccatcg

SEQ ID NO: 277856 - DNA, 25 bp, Artificial
  Probe
tgccatcgtgtgtaccttccaggag

SEQ ID NO: 277857 - DNA, 25 bp, Artificial
  Probe
gctccatttttatccctgagttggt

SEQ ID NO: 277858 - DNA, 25 bp, Artificial
  Probe
caggcatgtgcacacagttgggact

SEQ ID NO: 277859 - DNA, 25 bp, Artificial
  Probe
tttttatccctgagttggtcctact

SEQ ID NO: 277860 - DNA, 25 bp, Artificial
  Probe
acaagatctgccagtcggagctcaa

SEQ ID NO: 277861 - DNA, 25 bp, Artificial
  Probe
cacacagttgggactgctgtggcag

SEQ ID NO: 277862 - DNA, 25 bp, Artificial
  Probe
cctggagcaggcagtagctgccatc

SEQ ID NO: 277863 - DNA, 25 bp, Artificial
  Probe
tcagtgctccatttttatccctgag

SEQ ID NO: 277864 - DNA, 25 bp, Artificial
  Probe
cttccaggagtatgcagggcgctgt

SEQ ID NO: 277865 - DNA, 25 bp, Artificial
  Probe
agctgttgcagaaggagctgcccac

SEQ ID NO: 277866 - DNA, 25 bp, Artificial
  Probe
ggaagctcaggcatgtgcacacagt

SEQ ID NO: 277867 - DNA, 25 bp, Artificial
  Probe
gtatgctatcccagaagggccaggt

SEQ ID NO: 277868 - DNA, 25 bp, Artificial
  Probe
gcaggcagtagctgccatcgtgtgt

SEQ ID NO: 277869 - DNA, 25 bp, Artificial
  Probe
gactttggggagtacgtgcgctcac

SEQ ID NO: 277870 - DNA, 25 bp, Artificial
  Probe
tgccagtcggagctcaaggagctgt

SEQ ID NO: 277871 - DNA, 25 bp, Artificial
  Probe
gttgcagaaggagctgcccacctgg

SEQ ID NO: 277872 - DNA, 25 bp, Artificial
  Probe
gttccgggagtgtgactacaataaa

SEQ ID NO: 277873 - DNA, 25 bp, Artificial
  Probe
tggtcctactctctcagtgttaccc

SEQ ID NO: 277874 - DNA, 25 bp, Artificial
  Probe
cagtcggagctcaaggagctgttgc

SEQ ID NO: 277875 - DNA, 25 bp, Artificial
  Probe
gtgagttccgggagtgtgactacaa

SEQ ID NO: 277876 - DNA, 25 bp, Artificial
  Probe
agcaggcagtagctgccatcgtgtg

SEQ ID NO: 277877 - DNA, 25 bp, Artificial
  Probe
tctcttcttggaagggaagaacatc

SEQ ID NO: 277878 - DNA, 25 bp, Artificial
  Probe
tgtgcacacagttgggactgctgtg

SEQ ID NO: 277879 - DNA, 25 bp, Artificial
  Probe
aaggcgtatgctatcccagaagggc

SEQ ID NO: 277880 - DNA, 25 bp, Artificial
  Probe
atccctgagttggtcctactctctc

SEQ ID NO: 277881 - DNA, 25 bp, Artificial
  Probe
agggcgctgtggtgacaaatacaag

SEQ ID NO: 277882 - DNA, 25 bp, Artificial
  Probe
gggaagaacatctctgctcttacct

SEQ ID NO: 277883 - DNA, 25 bp, Artificial
  Probe
ggtccaaaggcgtatgctatcccag

SEQ ID NO: 277884 - DNA, 25 bp, Artificial
  Probe
acaggctcctggaccccagtgtggc

SEQ ID NO: 277885 - DNA, 25 bp, Artificial
  Probe
aggcggcacgaggattgaaggcgag

SEQ ID NO: 277886 - DNA, 25 bp, Artificial
  Probe
caagcctgtcgtgagtgacgatgac

SEQ ID NO: 277887 - DNA, 25 bp, Artificial
  Probe
ccaggaccgactcaaggggggcagg

SEQ ID NO: 277888 - DNA, 25 bp, Artificial
  Probe
ctcaggaagtggcagcgaggaagac

SEQ ID NO: 277889 - DNA, 25 bp, Artificial
  Probe
gaggcggcacgaggattgaaggcga

SEQ ID NO: 277890 - DNA, 25 bp, Artificial
  Probe
cacgaggcggcacgaggattgaagg

SEQ ID NO: 277891 - DNA, 25 bp, Artificial
  Probe
aggaagtggcagcgaggaagactga

SEQ ID NO: 277892 - DNA, 25 bp, Artificial
  Probe
agcctgtcgtgagtgacgatgacag

SEQ ID NO: 277893 - DNA, 25 bp, Artificial
  Probe
acgaggcggcacgaggattgaaggc

SEQ ID NO: 277894 - DNA, 25 bp, Artificial
  Probe
gcctgtcgtgagtgacgatgacagt

SEQ ID NO: 277895 - DNA, 25 bp, Artificial
  Probe
tcaggaagtggcagcgaggaagact

SEQ ID NO: 277896 - DNA, 25 bp, Artificial
  Probe
ccaagcctgtcgtgagtgacgatga

SEQ ID NO: 277897 - DNA, 25 bp, Artificial
  Probe
ggcggcacgaggattgaaggcgagg

SEQ ID NO: 277898 - DNA, 25 bp, Artificial
  Probe
cctgtcgtgagtgacgatgacagtg

SEQ ID NO: 277899 - DNA, 25 bp, Artificial
  Probe
cgaggcggcacgaggattgaaggcg

SEQ ID NO: 277900 - DNA, 25 bp, Artificial
  Probe
gaccgactcaaggggggcaggcggc

SEQ ID NO: 277901 - DNA, 25 bp, Artificial
  Probe
gtcgtgagtgacgatgacagtgatg

SEQ ID NO: 277902 - DNA, 25 bp, Artificial
  Probe
gaggaaggctctgagtctgagtccc

SEQ ID NO: 277903 - DNA, 25 bp, Artificial
  Probe
aagcctgtcgtgagtgacgatgaca

SEQ ID NO: 277904 - DNA, 25 bp, Artificial
  Probe
aggaccgactcaaggggggcaggcg

SEQ ID NO: 277905 - DNA, 25 bp, Artificial
  Probe
ggcacgaggcggcacgaggattgaa

SEQ ID NO: 277906 - DNA, 25 bp, Artificial
  Probe
caggaccgactcaaggggggcaggc

SEQ ID NO: 277907 - DNA, 25 bp, Artificial
  Probe
gcacgaggcggcacgaggattgaag

SEQ ID NO: 277908 - DNA, 25 bp, Artificial
  Probe
cccaggaccgactcaaggggggcag

SEQ ID NO: 277909 - DNA, 25 bp, Artificial
  Probe
cggcacgaggattgaaggcgaggaa

SEQ ID NO: 277910 - DNA, 25 bp, Artificial
  Probe
ggaagtggcagcgaggaagactgaa

SEQ ID NO: 277911 - DNA, 25 bp, Artificial
  Probe
tgtcgtgagtgacgatgacagtgat

SEQ ID NO: 277912 - DNA, 25 bp, Artificial
  Probe
ggaccgactcaaggggggcaggcgg

SEQ ID NO: 277913 - DNA, 25 bp, Artificial
  Probe
accgactcaaggggggcaggcggcg

SEQ ID NO: 277914 - DNA, 25 bp, Artificial
  Probe
ctgtcgtgagtgacgatgacagtga

SEQ ID NO: 277915 - DNA, 25 bp, Artificial
  Probe
cttaaagatgaactacctgaacggc

SEQ ID NO: 277916 - DNA, 25 bp, Artificial
  Probe
ctcgcttcattgtgtatagttataa

SEQ ID NO: 277917 - DNA, 25 bp, Artificial
  Probe
aataccagcacgacgatggccgggt

SEQ ID NO: 277918 - DNA, 25 bp, Artificial
  Probe
ctgcagagccattcttaaaggggcc

SEQ ID NO: 277919 - DNA, 25 bp, Artificial
  Probe
agctcgagggtgtctctccagatga

SEQ ID NO: 277920 - DNA, 25 bp, Artificial
  Probe
taaataccagcacgacgatggccgg

SEQ ID NO: 277921 - DNA, 25 bp, Artificial
  Probe
ggagctcgagggtgtctctccagat

SEQ ID NO: 277922 - DNA, 25 bp, Artificial
  Probe
ctggaaccagacataaatagttatt

SEQ ID NO: 277923 - DNA, 25 bp, Artificial
  Probe
taccagcacgacgatggccgggtct

SEQ ID NO: 277924 - DNA, 25 bp, Artificial
  Probe
atgaggagctcgagggtgtctctcc

SEQ ID NO: 277925 - DNA, 25 bp, Artificial
  Probe
aacttggatttttccactaatgtga

SEQ ID NO: 277926 - DNA, 25 bp, Artificial
  Probe
cctcgcttcattgtgtatagttata

SEQ ID NO: 277927 - DNA, 25 bp, Artificial
  Probe
ggctgcagagccattcttaaagggg

SEQ ID NO: 277928 - DNA, 25 bp, Artificial
  Probe
tgaactacctgaacggcaacctcgc

SEQ ID NO: 277929 - DNA, 25 bp, Artificial
  Probe
tataaataccagcacgacgatggcc

SEQ ID NO: 277930 - DNA, 25 bp, Artificial
  Probe
caacctcgcttcattgtgtatagtt

SEQ ID NO: 277931 - DNA, 25 bp, Artificial
  Probe
cttctccagtcctctggggtgcaaa

SEQ ID NO: 277932 - DNA, 25 bp, Artificial
  Probe
tctccagatgaacttaaagatgaac

SEQ ID NO: 277933 - DNA, 25 bp, Artificial
  Probe
ttttccactaatgtgaacttctgtg

SEQ ID NO: 277934 - DNA, 25 bp, Artificial
  Probe
gatcatacggcaacggacggctgac

SEQ ID NO: 277935 - DNA, 25 bp, Artificial
  Probe
ctgaacggcaacctcgcttcattgt

SEQ ID NO: 277936 - DNA, 25 bp, Artificial
  Probe
ctttatcttctccagtcctctgggg

SEQ ID NO: 277937 - DNA, 25 bp, Artificial
  Probe
acttaaagatgaactacctgaacgg

SEQ ID NO: 277938 - DNA, 25 bp, Artificial
  Probe
tgaacggcaacctcgcttcattgtg

SEQ ID NO: 277939 - DNA, 25 bp, Artificial
  Probe
gaaacttggatttttccactaatgt

SEQ ID NO: 277940 - DNA, 25 bp, Artificial
  Probe
ggatttttccactaatgtgaacttc

SEQ ID NO: 277941 - DNA, 25 bp, Artificial
  Probe
atacggcaacggacggctgacgacc

SEQ ID NO: 277942 - DNA, 25 bp, Artificial
  Probe
agatcatacggcaacggacggctga

SEQ ID NO: 277943 - DNA, 25 bp, Artificial
  Probe
tcgagggtgtctctccagatgaact

SEQ ID NO: 277944 - DNA, 25 bp, Artificial
  Probe
aacctcgcttcattgtgtatagtta

SEQ ID NO: 277945 - DNA, 25 bp, Artificial
  Probe
ctgacgaccggaaggaaaatgagtg

SEQ ID NO: 277946 - DNA, 25 bp, Artificial
  Probe
cactaatgtgaacttctgtgtttct

SEQ ID NO: 277947 - DNA, 25 bp, Artificial
  Probe
aggtggctgcagagccattcttaaa

SEQ ID NO: 277948 - DNA, 25 bp, Artificial
  Probe
cttggatttttccactaatgtgaac

SEQ ID NO: 277949 - DNA, 25 bp, Artificial
  Probe
accagcacgacgatggccgggtctc

SEQ ID NO: 277950 - DNA, 25 bp, Artificial
  Probe
gctgacgaccggaaggaaaatgagt

SEQ ID NO: 277951 - DNA, 25 bp, Artificial
  Probe
ttctccagtcctctggggtgcaaac

SEQ ID NO: 277952 - DNA, 25 bp, Artificial
  Probe
ttatcttctccagtcctctggggtg

SEQ ID NO: 277953 - DNA, 25 bp, Artificial
  Probe
tgcagagccattcttaaaggggccc

SEQ ID NO: 277954 - DNA, 25 bp, Artificial
  Probe
cggcaacctcgcttcattgtgtata

SEQ ID NO: 277955 - DNA, 25 bp, Artificial
  Probe
gtgctttatcttctccagtcctctg

SEQ ID NO: 277956 - DNA, 25 bp, Artificial
  Probe
tacctgaacggcaacctcgcttcat

SEQ ID NO: 277957 - DNA, 25 bp, Artificial
  Probe
tatcttctccagtcctctggggtgc

SEQ ID NO: 277958 - DNA, 25 bp, Artificial
  Probe
gagggtgtctctccagatgaactta

SEQ ID NO: 277959 - DNA, 25 bp, Artificial
  Probe
ttccactaatgtgaacttctgtgtt

SEQ ID NO: 277960 - DNA, 25 bp, Artificial
  Probe
tctctccagatgaacttaaagatga

SEQ ID NO: 277961 - DNA, 25 bp, Artificial
  Probe
gacttcctggttctgatcaaaacca

SEQ ID NO: 277962 - DNA, 25 bp, Artificial
  Probe
gccttgcaagatactcccttgctca

SEQ ID NO: 277963 - DNA, 25 bp, Artificial
  Probe
aaaggggtgacttcctggttctgat

SEQ ID NO: 277964 - DNA, 25 bp, Artificial
  Probe
agctatctagatagacaccaagctt

SEQ ID NO: 277965 - DNA, 25 bp, Artificial
  Probe
gaacgatacactcaatgccctgtat

SEQ ID NO: 277966 - DNA, 25 bp, Artificial
  Probe
aaccgtagatagctatctagataga

SEQ ID NO: 277967 - DNA, 25 bp, Artificial
  Probe
tgcagcaaagccttgcaagatactc

SEQ ID NO: 277968 - DNA, 25 bp, Artificial
  Probe
ttatcgggtctctgccttaaaacac

SEQ ID NO: 277969 - DNA, 25 bp, Artificial
  Probe
tatgcatcattatcgggtctctgcc

SEQ ID NO: 277970 - DNA, 25 bp, Artificial
  Probe
gattacttgaacgatacactcaatg

SEQ ID NO: 277971 - DNA, 25 bp, Artificial
  Probe
tcctggccctagagggctacttcaa

SEQ ID NO: 277972 - DNA, 25 bp, Artificial
  Probe
ctcttgtgtgttaaatgaagctcga

SEQ ID NO: 277973 - DNA, 25 bp, Artificial
  Probe
gctatctagatagacaccaagcttc

SEQ ID NO: 277974 - DNA, 25 bp, Artificial
  Probe
tccgggctagtatgcatcattatcg

SEQ ID NO: 277975 - DNA, 25 bp, Artificial
  Probe
agttctctaggaaggagtcctcaga

SEQ ID NO: 277976 - DNA, 25 bp, Artificial
  Probe
aaaccctcattgcagcaaagccttg

SEQ ID NO: 277977 - DNA, 25 bp, Artificial
  Probe
tctaggaaggagtcctcagaatggc

SEQ ID NO: 277978 - DNA, 25 bp, Artificial
  Probe
tatctacctgtaaccgtagatagct

SEQ ID NO: 277979 - DNA, 25 bp, Artificial
  Probe
cctgtatctgggagcacttgcggag

SEQ ID NO: 277980 - DNA, 25 bp, Artificial
  Probe
aggaaggagtcctcagaatggcatg

SEQ ID NO: 277981 - DNA, 25 bp, Artificial
  Probe
cttgaacgatacactcaatgccctg

SEQ ID NO: 277982 - DNA, 25 bp, Artificial
  Probe
atcattatcgggtctctgccttaaa

SEQ ID NO: 277983 - DNA, 25 bp, Artificial
  Probe
gctagtatgcatcattatcgggtct

SEQ ID NO: 277984 - DNA, 25 bp, Artificial
  Probe
cgggtctctgccttaaaacacatcc

SEQ ID NO: 277985 - DNA, 25 bp, Artificial
  Probe
tacctgtaaccgtagatagctatct

SEQ ID NO: 277986 - DNA, 25 bp, Artificial
  Probe
agcacttgcggaggtgtcctggccc

SEQ ID NO: 277987 - DNA, 25 bp, Artificial
  Probe
aaatgaagctcgaagttctctagga

SEQ ID NO: 277988 - DNA, 25 bp, Artificial
  Probe
cttttgtcaggataacatcatatag

SEQ ID NO: 277989 - DNA, 25 bp, Artificial
  Probe
ctgacagaaactcttgtgtgttaaa

SEQ ID NO: 277990 - DNA, 25 bp, Artificial
  Probe
ccactagcagggattgaaaacattt

SEQ ID NO: 277991 - DNA, 25 bp, Artificial
  Probe
gagtcctcagaatggcatgtattgg

SEQ ID NO: 277992 - DNA, 25 bp, Artificial
  Probe
agcttcttatactccgggctagtat

SEQ ID NO: 277993 - DNA, 25 bp, Artificial
  Probe
agacaccaagcttcttatactccgg

SEQ ID NO: 277994 - DNA, 25 bp, Artificial
  Probe
aactcttgtgtgttaaatgaagctc

SEQ ID NO: 277995 - DNA, 25 bp, Artificial
  Probe
tgtaaccgtagatagctatctagat

SEQ ID NO: 277996 - DNA, 25 bp, Artificial
  Probe
atgccctgtatctgggagcacttgc

SEQ ID NO: 277997 - DNA, 25 bp, Artificial
  Probe
cttgcggaggtgtcctggccctaga

SEQ ID NO: 277998 - DNA, 25 bp, Artificial
  Probe
atagctatctagatagacaccaagc

SEQ ID NO: 277999 - DNA, 25 bp, Artificial
  Probe
tatactccgggctagtatgcatcat

SEQ ID NO: 278000 - DNA, 25 bp, Artificial
  Probe
cactcaatgccctgtatctgggagc

SEQ ID NO: 278001 - DNA, 25 bp, Artificial
  Probe
acctgtaaccgtagatagctatcta

SEQ ID NO: 278002 - DNA, 25 bp, Artificial
  Probe
attatcgggtctctgccttaaaaca

SEQ ID NO: 278003 - DNA, 25 bp, Artificial
  Probe
accgtagatagctatctagatagac

SEQ ID NO: 278004 - DNA, 25 bp, Artificial
  Probe
gtgtcctggccctagagggctactt

SEQ ID NO: 278005 - DNA, 25 bp, Artificial
  Probe
gccctagagggctacttcaatgtct

SEQ ID NO: 278006 - DNA, 25 bp, Artificial
  Probe
cctcattgcagcaaagccttgcaag

SEQ ID NO: 278007 - DNA, 25 bp, Artificial
  Probe
gcctggctacctgctgtaacaccca

SEQ ID NO: 278008 - DNA, 25 bp, Artificial
  Probe
tgtaacacccaccatgaatgcagga

SEQ ID NO: 278009 - DNA, 25 bp, Artificial
  Probe
tgctgtaacacccaccatgaatgca

SEQ ID NO: 278010 - DNA, 25 bp, Artificial
  Probe
ccctctggcctggctacctgctgta

SEQ ID NO: 278011 - DNA, 25 bp, Artificial
  Probe
atgaatgcaggagatggaggctctc

SEQ ID NO: 278012 - DNA, 25 bp, Artificial
  Probe
tgggccctctggcctggctacctgc

SEQ ID NO: 278013 - DNA, 25 bp, Artificial
  Probe
accatgaatgcaggagatggaggct

SEQ ID NO: 278014 - DNA, 25 bp, Artificial
  Probe
acacccaccatgaatgcaggagatg

SEQ ID NO: 278015 - DNA, 25 bp, Artificial
  Probe
cctgctgtaacacccaccatgaatg

SEQ ID NO: 278016 - DNA, 25 bp, Artificial
  Probe
gctgtaacacccaccatgaatgcag

SEQ ID NO: 278017 - DNA, 25 bp, Artificial
  Probe
ctgtaacacccaccatgaatgcagg

SEQ ID NO: 278018 - DNA, 25 bp, Artificial
  Probe
aacacccaccatgaatgcaggagat

SEQ ID NO: 278019 - DNA, 25 bp, Artificial
  Probe
acccaccatgaatgcaggagatgga

SEQ ID NO: 278020 - DNA, 25 bp, Artificial
  Probe
tctggcctggctacctgctgtaaca

SEQ ID NO: 278021 - DNA, 25 bp, Artificial
  Probe
ctggcctggctacctgctgtaacac

SEQ ID NO: 278022 - DNA, 25 bp, Artificial
  Probe
cctggctacctgctgtaacacccac

SEQ ID NO: 278023 - DNA, 25 bp, Artificial
  Probe
cacccaccatgaatgcaggagatgg

SEQ ID NO: 278024 - DNA, 25 bp, Artificial
  Probe
caccatgaatgcaggagatggaggc

SEQ ID NO: 278025 - DNA, 25 bp, Artificial
  Probe
tggctacctgctgtaacacccacca

SEQ ID NO: 278026 - DNA, 25 bp, Artificial
  Probe
acctgctgtaacacccaccatgaat

SEQ ID NO: 278027 - DNA, 25 bp, Artificial
  Probe
ctgctgtaacacccaccatgaatgc

SEQ ID NO: 278028 - DNA, 25 bp, Artificial
  Probe
gctacctgctgtaacacccaccatg

SEQ ID NO: 278029 - DNA, 25 bp, Artificial
  Probe
ccaccatgaatgcaggagatggagg

SEQ ID NO: 278030 - DNA, 25 bp, Artificial
  Probe
ctggctacctgctgtaacacccacc

SEQ ID NO: 278031 - DNA, 25 bp, Artificial
  Probe
taacacccaccatgaatgcaggaga

SEQ ID NO: 278032 - DNA, 25 bp, Artificial
  Probe
ggcctggctacctgctgtaacaccc

SEQ ID NO: 278033 - DNA, 25 bp, Artificial
  Probe
ggctacctgctgtaacacccaccat

SEQ ID NO: 278034 - DNA, 25 bp, Artificial
  Probe
ctctggcctggctacctgctgtaac

SEQ ID NO: 278035 - DNA, 25 bp, Artificial
  Probe
gccctctggcctggctacctgctgt

SEQ ID NO: 278036 - DNA, 25 bp, Artificial
  Probe
tacctgctgtaacacccaccatgaa

SEQ ID NO: 278037 - DNA, 25 bp, Artificial
  Probe
ctacctgctgtaacacccaccatga

SEQ ID NO: 278038 - DNA, 25 bp, Artificial
  Probe
cctctggcctggctacctgctgtaa

SEQ ID NO: 278039 - DNA, 25 bp, Artificial
  Probe
cccaccatgaatgcaggagatggag

SEQ ID NO: 278040 - DNA, 25 bp, Artificial
  Probe
ggccctctggcctggctacctgctg

SEQ ID NO: 278041 - DNA, 25 bp, Artificial
  Probe
tggcctggctacctgctgtaacacc

SEQ ID NO: 278042 - DNA, 25 bp, Artificial
  Probe
cacattcaaaacttaatggcttggc

SEQ ID NO: 278043 - DNA, 25 bp, Artificial
  Probe
catctctgtgggtaattcccccaaa

SEQ ID NO: 278044 - DNA, 25 bp, Artificial
  Probe
aaacttaatggcttggctatcatca

SEQ ID NO: 278045 - DNA, 25 bp, Artificial
  Probe
tctctgtgggtaattcccccaaatc

SEQ ID NO: 278046 - DNA, 25 bp, Artificial
  Probe
tctgcctgccaacacccttggaaag

SEQ ID NO: 278047 - DNA, 25 bp, Artificial
  Probe
gagttcccagggttccagcactacc

SEQ ID NO: 278048 - DNA, 25 bp, Artificial
  Probe
ccttgcatctctgtgggtaattccc

SEQ ID NO: 278049 - DNA, 25 bp, Artificial
  Probe
atcaacttaccttgcatctctgtgg

SEQ ID NO: 278050 - DNA, 25 bp, Artificial
  Probe
agatagacaagcagggcagagaagc

SEQ ID NO: 278051 - DNA, 25 bp, Artificial
  Probe
acgggaccacatcaaccccagagtt

SEQ ID NO: 278052 - DNA, 25 bp, Artificial
  Probe
aacttaatggcttggctatcatcaa

SEQ ID NO: 278053 - DNA, 25 bp, Artificial
  Probe
agcacattcaaaacttaatggcttg

SEQ ID NO: 278054 - DNA, 25 bp, Artificial
  Probe
gagaagcacattcaaaacttaatgg

SEQ ID NO: 278055 - DNA, 25 bp, Artificial
  Probe
acatcaaccccagagttcccagggt

SEQ ID NO: 278056 - DNA, 25 bp, Artificial
  Probe
ttgtcgccaggcttccattaacaga

SEQ ID NO: 278057 - DNA, 25 bp, Artificial
  Probe
gcactaccaagttggaattccagat

SEQ ID NO: 278058 - DNA, 25 bp, Artificial
  Probe
ggggttgtcgccaggcttccattaa

SEQ ID NO: 278059 - DNA, 25 bp, Artificial
  Probe
agaagcacattcaaaacttaatggc

SEQ ID NO: 278060 - DNA, 25 bp, Artificial
  Probe
tcgccaggcttccattaacagaaga

SEQ ID NO: 278061 - DNA, 25 bp, Artificial
  Probe
acttaccttgcatctctgtgggtaa

SEQ ID NO: 278062 - DNA, 25 bp, Artificial
  Probe
cttgcatctctgtgggtaattcccc

SEQ ID NO: 278063 - DNA, 25 bp, Artificial
  Probe
tggcttggctatcatcaaacaatca

SEQ ID NO: 278064 - DNA, 25 bp, Artificial
  Probe
gcttccattaacagaagaggccttg

SEQ ID NO: 278065 - DNA, 25 bp, Artificial
  Probe
ttccagcactaccaagttggaattc

SEQ ID NO: 278066 - DNA, 25 bp, Artificial
  Probe
aggcttccattaacagaagaggcct

SEQ ID NO: 278067 - DNA, 25 bp, Artificial
  Probe
tcttttaagtcctccaggcctggtt

SEQ ID NO: 278068 - DNA, 25 bp, Artificial
  Probe
gaagcacattcaaaacttaatggct

SEQ ID NO: 278069 - DNA, 25 bp, Artificial
  Probe
cattcaaaacttaatggcttggcta

SEQ ID NO: 278070 - DNA, 25 bp, Artificial
  Probe
tcccagggttccagcactaccaagt

SEQ ID NO: 278071 - DNA, 25 bp, Artificial
  Probe
gacgggaccacatcaaccccagagt

SEQ ID NO: 278072 - DNA, 25 bp, Artificial
  Probe
catcaaccccagagttcccagggtt

SEQ ID NO: 278073 - DNA, 25 bp, Artificial
  Probe
ctgtcttttaagtcctccaggcctg

SEQ ID NO: 278074 - DNA, 25 bp, Artificial
  Probe
gccaacacccttggaaaggaatcca

SEQ ID NO: 278075 - DNA, 25 bp, Artificial
  Probe
cacccttggaaaggaatccacagca

SEQ ID NO: 278076 - DNA, 25 bp, Artificial
  Probe
cattaacagaagaggccttgggggt

SEQ ID NO: 278077 - DNA, 25 bp, Artificial
  Probe
taatggcttggctatcatcaaacaa

SEQ ID NO: 278078 - DNA, 25 bp, Artificial
  Probe
ggggctgtcttttaagtcctccagg

SEQ ID NO: 278079 - DNA, 25 bp, Artificial
  Probe
caacacccttggaaaggaatccaca

SEQ ID NO: 278080 - DNA, 25 bp, Artificial
  Probe
tctcaggccccgaggggctgtcttt

SEQ ID NO: 278081 - DNA, 25 bp, Artificial
  Probe
tttaagtcctccaggcctggttcca

SEQ ID NO: 278082 - DNA, 25 bp, Artificial
  Probe
actaccaagttggaattccagattg

SEQ ID NO: 278083 - DNA, 25 bp, Artificial
  Probe
ctgccaacacccttggaaaggaatc

SEQ ID NO: 278084 - DNA, 25 bp, Artificial
  Probe
ttcaaaacttaatggcttggctatc

SEQ ID NO: 278085 - DNA, 25 bp, Artificial
  Probe
cccagggttccagcactaccaagtt

SEQ ID NO: 278086 - DNA, 25 bp, Artificial
  Probe
ggcttggctatcatcaaacaatcaa

SEQ ID NO: 278087 - DNA, 25 bp, Artificial
  Probe
aggcctggttccatctgcctgccaa

SEQ ID NO: 278088 - DNA, 25 bp, Artificial
  Probe
gtacgatcgcccaactttaagtgaa

SEQ ID NO: 278089 - DNA, 25 bp, Artificial
  Probe
ccataccctggctgttgataaataa

SEQ ID NO: 278090 - DNA, 25 bp, Artificial
  Probe
gtttgctgcctctgggacccactgc

SEQ ID NO: 278091 - DNA, 25 bp, Artificial
  Probe
ctagaaaggggctcctgtactcctc

SEQ ID NO: 278092 - DNA, 25 bp, Artificial
  Probe
ccactgctagaaaggggctcctgta

SEQ ID NO: 278093 - DNA, 25 bp, Artificial
  Probe
cttggccaagagcagagtatggaag

SEQ ID NO: 278094 - DNA, 25 bp, Artificial
  Probe
cctttgaatttccataccctggctg

SEQ ID NO: 278095 - DNA, 25 bp, Artificial
  Probe
cagacaacgcgttttcgcttcccga

SEQ ID NO: 278096 - DNA, 25 bp, Artificial
  Probe
gggtttgctgcctctgggacccact

SEQ ID NO: 278097 - DNA, 25 bp, Artificial
  Probe
cctgatgaaacttcccagacaacgc

SEQ ID NO: 278098 - DNA, 25 bp, Artificial
  Probe
ggggctcctgtactcctccacggat

SEQ ID NO: 278099 - DNA, 25 bp, Artificial
  Probe
tcttttcttccttggccaagagcag

SEQ ID NO: 278100 - DNA, 25 bp, Artificial
  Probe
tggaagcgtggacattcaggttagc

SEQ ID NO: 278101 - DNA, 25 bp, Artificial
  Probe
gatcgcccaactttaagtgaaaatt

SEQ ID NO: 278102 - DNA, 25 bp, Artificial
  Probe
gatctagtttcctgcctagtcctgg

SEQ ID NO: 278103 - DNA, 25 bp, Artificial
  Probe
tcccgtttgcccaaggtcttgcttg

SEQ ID NO: 278104 - DNA, 25 bp, Artificial
  Probe
tttcctgcctagtcctgggtaaact

SEQ ID NO: 278105 - DNA, 25 bp, Artificial
  Probe
acttcccagacaacgcgttttcgct

SEQ ID NO: 278106 - DNA, 25 bp, Artificial
  Probe
cctctgggacccactgctagaaagg

SEQ ID NO: 278107 - DNA, 25 bp, Artificial
  Probe
atttccataccctggctgttgataa

SEQ ID NO: 278108 - DNA, 25 bp, Artificial
  Probe
tacgatcgcccaactttaagtgaaa

SEQ ID NO: 278109 - DNA, 25 bp, Artificial
  Probe
cttccttggccaagagcagagtatg

SEQ ID NO: 278110 - DNA, 25 bp, Artificial
  Probe
tcctgtactcctccacggatctagt

SEQ ID NO: 278111 - DNA, 25 bp, Artificial
  Probe
atgaaacttcccagacaacgcgttt

SEQ ID NO: 278112 - DNA, 25 bp, Artificial
  Probe
agcgtggacattcaggttagctaaa

SEQ ID NO: 278113 - DNA, 25 bp, Artificial
  Probe
ccttcttttcttccttggccaagag

SEQ ID NO: 278114 - DNA, 25 bp, Artificial
  Probe
ctccacggatctagtttcctgccta

SEQ ID NO: 278115 - DNA, 25 bp, Artificial
  Probe
gacattcaggttagctaaagggctt

SEQ ID NO: 278116 - DNA, 25 bp, Artificial
  Probe
tgggctgtgtttaatcagggagtcc

SEQ ID NO: 278117 - DNA, 25 bp, Artificial
  Probe
ttgaatttccataccctggctgttg

SEQ ID NO: 278118 - DNA, 25 bp, Artificial
  Probe
gacaacgcgttttcgcttcccgagc

SEQ ID NO: 278119 - DNA, 25 bp, Artificial
  Probe
tcctgatgaaacttcccagacaacg

SEQ ID NO: 278120 - DNA, 25 bp, Artificial
  Probe
tagtttcctgcctagtcctgggtaa

SEQ ID NO: 278121 - DNA, 25 bp, Artificial
  Probe
tgaaacttcccagacaacgcgtttt

SEQ ID NO: 278122 - DNA, 25 bp, Artificial
  Probe
gtttaatcagggagtccaggcctgg

SEQ ID NO: 278123 - DNA, 25 bp, Artificial
  Probe
gaaaggggctcctgtactcctccac

SEQ ID NO: 278124 - DNA, 25 bp, Artificial
  Probe
tggacattcaggttagctaaagggc

SEQ ID NO: 278125 - DNA, 25 bp, Artificial
  Probe
gctgcctctgggacccactgctaga

SEQ ID NO: 278126 - DNA, 25 bp, Artificial
  Probe
gtttgcccaaggtcttgcttgcctg

SEQ ID NO: 278127 - DNA, 25 bp, Artificial
  Probe
gggacccactgctagaaaggggctc

SEQ ID NO: 278128 - DNA, 25 bp, Artificial
  Probe
actcctccacggatctagtttcctg

SEQ ID NO: 278129 - DNA, 25 bp, Artificial
  Probe
ttcaggttagctaaagggcttgacc

SEQ ID NO: 278130 - DNA, 25 bp, Artificial
  Probe
cctgcctagtcctgggtaaacttag

SEQ ID NO: 278131 - DNA, 25 bp, Artificial
  Probe
cgtggacattcaggttagctaaagg

SEQ ID NO: 278132 - DNA, 25 bp, Artificial
  Probe
ccgagagctcacagccaactttaat

SEQ ID NO: 278133 - DNA, 25 bp, Artificial
  Probe
ctgggctgtgtttaatcagggagtc

SEQ ID NO: 278134 - DNA, 25 bp, Artificial
  Probe
tgtcgttggtgatgccagccatgcc

SEQ ID NO: 278135 - DNA, 25 bp, Artificial
  Probe
attcacatcaagacctccacggtcc

SEQ ID NO: 278136 - DNA, 25 bp, Artificial
  Probe
tgaagtcatggacaccaggggattc

SEQ ID NO: 278137 - DNA, 25 bp, Artificial
  Probe
ggattcacatcaagacctccacggt

SEQ ID NO: 278138 - DNA, 25 bp, Artificial
  Probe
tcagccacaacaggacatccaggcc

SEQ ID NO: 278139 - DNA, 25 bp, Artificial
  Probe
gattcacatcaagacctccacggtc

SEQ ID NO: 278140 - DNA, 25 bp, Artificial
  Probe
gtcatggacaccaggggattcacat

SEQ ID NO: 278141 - DNA, 25 bp, Artificial
  Probe
cgggggcccgctggggactatgagg

SEQ ID NO: 278142 - DNA, 25 bp, Artificial
  Probe
gtgatgccagccatgccccccaatg

SEQ ID NO: 278143 - DNA, 25 bp, Artificial
  Probe
catcagccacaacaggacatccagg

SEQ ID NO: 278144 - DNA, 25 bp, Artificial
  Probe
tgtgaagtcatggacaccaggggat

SEQ ID NO: 278145 - DNA, 25 bp, Artificial
  Probe
tcatggacaccaggggattcacatc

SEQ ID NO: 278146 - DNA, 25 bp, Artificial
  Probe
gggattcacatcaagacctccacgg

SEQ ID NO: 278147 - DNA, 25 bp, Artificial
  Probe
agatgtcgttggtgatgccagccat

SEQ ID NO: 278148 - DNA, 25 bp, Artificial
  Probe
accaggggattcacatcaagacctc

SEQ ID NO: 278149 - DNA, 25 bp, Artificial
  Probe
aagtcatggacaccaggggattcac

SEQ ID NO: 278150 - DNA, 25 bp, Artificial
  Probe
atgatgcagattgagtgtgaagtca

SEQ ID NO: 278151 - DNA, 25 bp, Artificial
  Probe
caggcccaagatgtcgttggtgatg

SEQ ID NO: 278152 - DNA, 25 bp, Artificial
  Probe
gacatccaggcccaagatgtcgttg

SEQ ID NO: 278153 - DNA, 25 bp, Artificial
  Probe
gacaccaggggattcacatcaagac

SEQ ID NO: 278154 - DNA, 25 bp, Artificial
  Probe
tggacaccaggggattcacatcaag

SEQ ID NO: 278155 - DNA, 25 bp, Artificial
  Probe
ccaggcccaagatgtcgttggtgat

SEQ ID NO: 278156 - DNA, 25 bp, Artificial
  Probe
ggacaccaggggattcacatcaaga

SEQ ID NO: 278157 - DNA, 25 bp, Artificial
  Probe
acaccaggggattcacatcaagacc

SEQ ID NO: 278158 - DNA, 25 bp, Artificial
  Probe
ggcccaagatgtcgttggtgatgcc

SEQ ID NO: 278159 - DNA, 25 bp, Artificial
  Probe
gcccaagatgtcgttggtgatgcca

SEQ ID NO: 278160 - DNA, 25 bp, Artificial
  Probe
aggacatccaggcccaagatgtcgt

SEQ ID NO: 278161 - DNA, 25 bp, Artificial
  Probe
gtgaagtcatggacaccaggggatt

SEQ ID NO: 278162 - DNA, 25 bp, Artificial
  Probe
ccaagatgtcgttggtgatgccagc

SEQ ID NO: 278163 - DNA, 25 bp, Artificial
  Probe
atgtcgttggtgatgccagccatgc

SEQ ID NO: 278164 - DNA, 25 bp, Artificial
  Probe
gtcgttggtgatgccagccatgccc

SEQ ID NO: 278165 - DNA, 25 bp, Artificial
  Probe
cccaagatgtcgttggtgatgccag

SEQ ID NO: 278166 - DNA, 25 bp, Artificial
  Probe
ggggattcacatcaagacctccacg

SEQ ID NO: 278167 - DNA, 25 bp, Artificial
  Probe
cgctggggactatgaggagatgatg

SEQ ID NO: 278168 - DNA, 25 bp, Artificial
  Probe
agtcatggacaccaggggattcaca

SEQ ID NO: 278169 - DNA, 25 bp, Artificial
  Probe
cacatcaagacctccacggtccccc

SEQ ID NO: 278170 - DNA, 25 bp, Artificial
  Probe
aagatgtcgttggtgatgccagcca

SEQ ID NO: 278171 - DNA, 25 bp, Artificial
  Probe
caagatgtcgttggtgatgccagcc

SEQ ID NO: 278172 - DNA, 25 bp, Artificial
  Probe
tgtcaggccgggggcccgctgggga

SEQ ID NO: 278173 - DNA, 25 bp, Artificial
  Probe
cccccctcacttcggaagcagccgt

SEQ ID NO: 278174 - DNA, 25 bp, Artificial
  Probe
atcagccacaacaggacatccaggc

SEQ ID NO: 278175 - DNA, 25 bp, Artificial
  Probe
catgccccccaatgagaccgtgtca

SEQ ID NO: 278176 - DNA, 25 bp, Artificial
  Probe
gatgtcgttggtgatgccagccatg

SEQ ID NO: 278177 - DNA, 25 bp, Artificial
  Probe
gaagtcatggacaccaggggattca

SEQ ID NO: 278178 - DNA, 25 bp, Artificial
  Probe
aggcccaagatgtcgttggtgatgc

SEQ ID NO: 278179 - DNA, 25 bp, Artificial
  Probe
caccaggggattcacatcaagacct

SEQ ID NO: 278180 - DNA, 25 bp, Artificial
  Probe
ttgctttcagctaattggaatcttt

SEQ ID NO: 278181 - DNA, 25 bp, Artificial
  Probe
ttatccacagagagatgcagataaa

SEQ ID NO: 278182 - DNA, 25 bp, Artificial
  Probe
ggagactgacacattagcctgaaaa

SEQ ID NO: 278183 - DNA, 25 bp, Artificial
  Probe
gactgacacattagcctgaaaagct

SEQ ID NO: 278184 - DNA, 25 bp, Artificial
  Probe
gtcaccaattacagggattggaaag

SEQ ID NO: 278185 - DNA, 25 bp, Artificial
  Probe
aaggctgttatccacagagagatgc

SEQ ID NO: 278186 - DNA, 25 bp, Artificial
  Probe
ccctgtatctctaaaacactggaag

SEQ ID NO: 278187 - DNA, 25 bp, Artificial
  Probe
acaactccacaagagactatagaag

SEQ ID NO: 278188 - DNA, 25 bp, Artificial
  Probe
tgtgttctatgtccactttctgtcc

SEQ ID NO: 278189 - DNA, 25 bp, Artificial
  Probe
aaatgctctgaaggagtacaactcc

SEQ ID NO: 278190 - DNA, 25 bp, Artificial
  Probe
ggttacctttgtgagttataacagc

SEQ ID NO: 278191 - DNA, 25 bp, Artificial
  Probe
tactcagaaacaggatttcccaaga

SEQ ID NO: 278192 - DNA, 25 bp, Artificial
  Probe
tccacaagagactatagaagtgaag

SEQ ID NO: 278193 - DNA, 25 bp, Artificial
  Probe
gttgcattgctgtggggtcaccaat

SEQ ID NO: 278194 - DNA, 25 bp, Artificial
  Probe
gtacaactccacaagagactataga

SEQ ID NO: 278195 - DNA, 25 bp, Artificial
  Probe
acattagcctgaaaagctacaccag

SEQ ID NO: 278196 - DNA, 25 bp, Artificial
  Probe
gacacattagcctgaaaagctacac

SEQ ID NO: 278197 - DNA, 25 bp, Artificial
  Probe
agcgcctggatggagactgacacat

SEQ ID NO: 278198 - DNA, 25 bp, Artificial
  Probe
gctacaccagtagactgattcaatc

SEQ ID NO: 278199 - DNA, 25 bp, Artificial
  Probe
gtgagttataacagcgcctggatgg

SEQ ID NO: 278200 - DNA, 25 bp, Artificial
  Probe
atgctctgaaggagtacaactccac

SEQ ID NO: 278201 - DNA, 25 bp, Artificial
  Probe
ttactcagaaacaggatttcccaag

SEQ ID NO: 278202 - DNA, 25 bp, Artificial
  Probe
aaagctacaccagtagactgattca

SEQ ID NO: 278203 - DNA, 25 bp, Artificial
  Probe
ggtacaaactattactcagaaacag

SEQ ID NO: 278204 - DNA, 25 bp, Artificial
  Probe
gaaggagtacaactccacaagagac

SEQ ID NO: 278205 - DNA, 25 bp, Artificial
  Probe
gtacaaactattactcagaaacagg

SEQ ID NO: 278206 - DNA, 25 bp, Artificial
  Probe
ctctcgtgccataacgaataatcag

SEQ ID NO: 278207 - DNA, 25 bp, Artificial
  Probe
cgtgccataacgaataatcagtatg

SEQ ID NO: 278208 - DNA, 25 bp, Artificial
  Probe
caaagtacgttgcattgctgtgggg

SEQ ID NO: 278209 - DNA, 25 bp, Artificial
  Probe
cgcctggatggagactgacacatta

SEQ ID NO: 278210 - DNA, 25 bp, Artificial
  Probe
tcttttggagttgcttgctttcagc

SEQ ID NO: 278211 - DNA, 25 bp, Artificial
  Probe
aagtacgttgcattgctgtggggtc

SEQ ID NO: 278212 - DNA, 25 bp, Artificial
  Probe
tataacagcgcctggatggagactg

SEQ ID NO: 278213 - DNA, 25 bp, Artificial
  Probe
ctgtggggtcaccaattacagggat

SEQ ID NO: 278214 - DNA, 25 bp, Artificial
  Probe
caccagtagactgattcaatcaaga

SEQ ID NO: 278215 - DNA, 25 bp, Artificial
  Probe
tactgcctctctcgtgccataacga

SEQ ID NO: 278216 - DNA, 25 bp, Artificial
  Probe
tgctgtggggtcaccaattacaggg

SEQ ID NO: 278217 - DNA, 25 bp, Artificial
  Probe
acctttgtgagttataacagcgcct

SEQ ID NO: 278218 - DNA, 25 bp, Artificial
  Probe
tgaaaagctacaccagtagactgat

SEQ ID NO: 278219 - DNA, 25 bp, Artificial
  Probe
attgctgtggggtcaccaattacag

SEQ ID NO: 278220 - DNA, 25 bp, Artificial
  Probe
cgaaaatgctctgaaggagtacaac

SEQ ID NO: 278221 - DNA, 25 bp, Artificial
  Probe
tagacaagatccaaagtacgttgca

SEQ ID NO: 278222 - DNA, 25 bp, Artificial
  Probe
acaccagtagactgattcaatcaag

SEQ ID NO: 278223 - DNA, 25 bp, Artificial
  Probe
ctgcctctctcgtgccataacgaat

SEQ ID NO: 278224 - DNA, 25 bp, Artificial
  Probe
gtgttctatgtccactttctgtcct

SEQ ID NO: 278225 - DNA, 25 bp, Artificial
  Probe
aacagcgcctggatggagactgaca

SEQ ID NO: 278226 - DNA, 25 bp, Artificial
  Probe
ctccaggttcctcagagaaagggct

SEQ ID NO: 278227 - DNA, 25 bp, Artificial
  Probe
ccaggttcctcagagaaagggctgg

SEQ ID NO: 278228 - DNA, 25 bp, Artificial
  Probe
ttctccaggttcctcagagaaaggg

SEQ ID NO: 278229 - DNA, 25 bp, Artificial
  Probe
aggttcctcagagaaagggctggac

SEQ ID NO: 278230 - DNA, 25 bp, Artificial
  Probe
tccaggtgtgtccaacttgggaagg

SEQ ID NO: 278231 - DNA, 25 bp, Artificial
  Probe
ttcctcagagaaagggctggactgg

SEQ ID NO: 278232 - DNA, 25 bp, Artificial
  Probe
atccaggtgtgtccaacttgggaag

SEQ ID NO: 278233 - DNA, 25 bp, Artificial
  Probe
ggttcctcagagaaagggctggact

SEQ ID NO: 278234 - DNA, 25 bp, Artificial
  Probe
caggttcctcagagaaagggctgga

SEQ ID NO: 278235 - DNA, 25 bp, Artificial
  Probe
tatccaggtgtgtccaacttgggaa

SEQ ID NO: 278236 - DNA, 25 bp, Artificial
  Probe
tctccaggttcctcagagaaagggc

SEQ ID NO: 278237 - DNA, 25 bp, Artificial
  Probe
tgtatccaggtgtgtccaacttggg

SEQ ID NO: 278238 - DNA, 25 bp, Artificial
  Probe
ctgcctacgaagaatgtgaggaagg

SEQ ID NO: 278239 - DNA, 25 bp, Artificial
  Probe
tctgcctacgaagaatgtgaggaag

SEQ ID NO: 278240 - DNA, 25 bp, Artificial
  Probe
gtatccaggtgtgtccaacttggga

SEQ ID NO: 278241 - DNA, 25 bp, Artificial
  Probe
catctgcctacgaagaatgtgagga

SEQ ID NO: 278242 - DNA, 25 bp, Artificial
  Probe
gttcctcagagaaagggctggactg

SEQ ID NO: 278243 - DNA, 25 bp, Artificial
  Probe
tccaggttcctcagagaaagggctg

SEQ ID NO: 278244 - DNA, 25 bp, Artificial
  Probe
atgtatccaggtgtgtccaacttgg

SEQ ID NO: 278245 - DNA, 25 bp, Artificial
  Probe
taatttttctccaggttcctcagag

SEQ ID NO: 278246 - DNA, 25 bp, Artificial
  Probe
atttttctccaggttcctcagagaa

SEQ ID NO: 278247 - DNA, 25 bp, Artificial
  Probe
atctgcctacgaagaatgtgaggaa

SEQ ID NO: 278248 - DNA, 25 bp, Artificial
  Probe
aatttttctccaggttcctcagaga

SEQ ID NO: 278249 - DNA, 25 bp, Artificial
  Probe
gctaatttttctccaggttcctcag

SEQ ID NO: 278250 - DNA, 25 bp, Artificial
  Probe
aatgtatccaggtgtgtccaacttg

SEQ ID NO: 278251 - DNA, 25 bp, Artificial
  Probe
cacaaagctttagacttcaggcttg

SEQ ID NO: 278252 - DNA, 25 bp, Artificial
  Probe
ccctccatggaggtttgtggattgg

SEQ ID NO: 278253 - DNA, 25 bp, Artificial
  Probe
aggatcccgctgcataccctaggct

SEQ ID NO: 278254 - DNA, 25 bp, Artificial
  Probe
atccagccctccatggaggtttgtg

SEQ ID NO: 278255 - DNA, 25 bp, Artificial
  Probe
ttgtttctctacctttagacaggat

SEQ ID NO: 278256 - DNA, 25 bp, Artificial
  Probe
tagacttcaggcttgcacgtgtttc

SEQ ID NO: 278257 - DNA, 25 bp, Artificial
  Probe
ttgtgtttatgtttccactgtggcc

SEQ ID NO: 278258 - DNA, 25 bp, Artificial
  Probe
aagacacctgagctgatgttcatgc

SEQ ID NO: 278259 - DNA, 25 bp, Artificial
  Probe
gaaagacacctgagctgatgttcat

SEQ ID NO: 278260 - DNA, 25 bp, Artificial
  Probe
ggcttgcacgtgtttccttttgtgt

SEQ ID NO: 278261 - DNA, 25 bp, Artificial
  Probe
gcctgcttggaagactccatccagc

SEQ ID NO: 278262 - DNA, 25 bp, Artificial
  Probe
actgcagaagtcaatcagagcagat

SEQ ID NO: 278263 - DNA, 25 bp, Artificial
  Probe
gctgcctgcttggaagactccatcc

SEQ ID NO: 278264 - DNA, 25 bp, Artificial
  Probe
actgtggcctttatagatactccag

SEQ ID NO: 278265 - DNA, 25 bp, Artificial
  Probe
gtttctctacctttagacaggatcc

SEQ ID NO: 278266 - DNA, 25 bp, Artificial
  Probe
tgcttggaagactccatccagccct

SEQ ID NO: 278267 - DNA, 25 bp, Artificial
  Probe
atgttgtttctctacctttagacag

SEQ ID NO: 278268 - DNA, 25 bp, Artificial
  Probe
gatactccagagaaagcaccaataa

SEQ ID NO: 278269 - DNA, 25 bp, Artificial
  Probe
acacctgagctgatgttcatgcttt

SEQ ID NO: 278270 - DNA, 25 bp, Artificial
  Probe
tggcctttatagatactccagagaa

SEQ ID NO: 278271 - DNA, 25 bp, Artificial
  Probe
ttgcttggtcacagctttgtttaca

SEQ ID NO: 278272 - DNA, 25 bp, Artificial
  Probe
ctttagacaggatcccgctgcatac

SEQ ID NO: 278273 - DNA, 25 bp, Artificial
  Probe
atgtttccactgtggcctttataga

SEQ ID NO: 278274 - DNA, 25 bp, Artificial
  Probe
ctgtggcctttatagatactccaga

SEQ ID NO: 278275 - DNA, 25 bp, Artificial
  Probe
ggtcacagctttgtttacatgagct

SEQ ID NO: 278276 - DNA, 25 bp, Artificial
  Probe
actatggctgcctgcttggaagact

SEQ ID NO: 278277 - DNA, 25 bp, Artificial
  Probe
ttcatgctttgcttggtcacagctt

SEQ ID NO: 278278 - DNA, 25 bp, Artificial
  Probe
gtgtttatgtttccactgtggcctt

SEQ ID NO: 278279 - DNA, 25 bp, Artificial
  Probe
gcttggtcacagctttgtttacatg

SEQ ID NO: 278280 - DNA, 25 bp, Artificial
  Probe
cagccctccatggaggtttgtggat

SEQ ID NO: 278281 - DNA, 25 bp, Artificial
  Probe
aagtcaatcagagcagatgggtaac

SEQ ID NO: 278282 - DNA, 25 bp, Artificial
  Probe
caaagctttagacttcaggcttgca

SEQ ID NO: 278283 - DNA, 25 bp, Artificial
  Probe
agatgggtaactatggctgcctgct

SEQ ID NO: 278284 - DNA, 25 bp, Artificial
  Probe
acaggatcccgctgcataccctagg

SEQ ID NO: 278285 - DNA, 25 bp, Artificial
  Probe
ttatgtttccactgtggcctttata

SEQ ID NO: 278286 - DNA, 25 bp, Artificial
  Probe
gatgaaagacacctgagctgatgtt

SEQ ID NO: 278287 - DNA, 25 bp, Artificial
  Probe
ggtaactatggctgcctgcttggaa

SEQ ID NO: 278288 - DNA, 25 bp, Artificial
  Probe
ctttgtttacatgagcttcacacgg

SEQ ID NO: 278289 - DNA, 25 bp, Artificial
  Probe
tccactgtggcctttatagatactc

SEQ ID NO: 278290 - DNA, 25 bp, Artificial
  Probe
ttctctacctttagacaggatcccg

SEQ ID NO: 278291 - DNA, 25 bp, Artificial
  Probe
gtttatgtttccactgtggccttta

SEQ ID NO: 278292 - DNA, 25 bp, Artificial
  Probe
tgctttgcttggtcacagctttgtt

SEQ ID NO: 278293 - DNA, 25 bp, Artificial
  Probe
agctttagacttcaggcttgcacgt

SEQ ID NO: 278294 - DNA, 25 bp, Artificial
  Probe
gctttagacttcaggcttgcacgtg

SEQ ID NO: 278295 - DNA, 25 bp, Artificial
  Probe
acttcacaaagctttagacttcagg

SEQ ID NO: 278296 - DNA, 25 bp, Artificial
  Probe
caatcagagcagatgggtaactatg

SEQ ID NO: 278297 - DNA, 25 bp, Artificial
  Probe
aggtggccataggattcagatcctg

SEQ ID NO: 278298 - DNA, 25 bp, Artificial
  Probe
cataggattcagatcctgattggag

SEQ ID NO: 278299 - DNA, 25 bp, Artificial
  Probe
taggattcagatcctgattggagac

SEQ ID NO: 278300 - DNA, 25 bp, Artificial
  Probe
gtagtgaccccattgtgcaggggtt

SEQ ID NO: 278301 - DNA, 25 bp, Artificial
  Probe
gagaccctggggtctaacctacagc

SEQ ID NO: 278302 - DNA, 25 bp, Artificial
  Probe
tcaggaggcaactgctccagggaag

SEQ ID NO: 278303 - DNA, 25 bp, Artificial
  Probe
catcagggagctcagccctagaggg

SEQ ID NO: 278304 - DNA, 25 bp, Artificial
  Probe
ggggcgtcttggtgtattctgcttc

SEQ ID NO: 278305 - DNA, 25 bp, Artificial
  Probe
gattggagaccctttgccgttggac

SEQ ID NO: 278306 - DNA, 25 bp, Artificial
  Probe
tggcgagacaagacatcctatagat

SEQ ID NO: 278307 - DNA, 25 bp, Artificial
  Probe
tctgttctggagaccctggggtcta

SEQ ID NO: 278308 - DNA, 25 bp, Artificial
  Probe
tgggagcctttcaaggggtattact

SEQ ID NO: 278309 - DNA, 25 bp, Artificial
  Probe
ctggtacccatcagggagctcagcc

SEQ ID NO: 278310 - DNA, 25 bp, Artificial
  Probe
agctcagccctagaggggtagtgac

SEQ ID NO: 278311 - DNA, 25 bp, Artificial
  Probe
acatcctatagatggcggctgctcc

SEQ ID NO: 278312 - DNA, 25 bp, Artificial
  Probe
ctaatctccagtaccgatgcaatga

SEQ ID NO: 278313 - DNA, 25 bp, Artificial
  Probe
actgatccacggaatgtgggttggc

SEQ ID NO: 278314 - DNA, 25 bp, Artificial
  Probe
agcccctcagcctaacagatggttc

SEQ ID NO: 278315 - DNA, 25 bp, Artificial
  Probe
tcatttggtctaatctccagtaccg

SEQ ID NO: 278316 - DNA, 25 bp, Artificial
  Probe
actgctgtggactgatccacggaat

SEQ ID NO: 278317 - DNA, 25 bp, Artificial
  Probe
tggttctctggtacccatcagggag

SEQ ID NO: 278318 - DNA, 25 bp, Artificial
  Probe
cattcaggaggcaactgctccaggg

SEQ ID NO: 278319 - DNA, 25 bp, Artificial
  Probe
tgtgggttggcgagacaagacatcc

SEQ ID NO: 278320 - DNA, 25 bp, Artificial
  Probe
gtccccagctagtggcggactctgg

SEQ ID NO: 278321 - DNA, 25 bp, Artificial
  Probe
atagatggcggctgctccaccggcc

SEQ ID NO: 278322 - DNA, 25 bp, Artificial
  Probe
cccaagtcggctacattcgggtgaa

SEQ ID NO: 278323 - DNA, 25 bp, Artificial
  Probe
ggactttgagccattcaggaggcaa

SEQ ID NO: 278324 - DNA, 25 bp, Artificial
  Probe
gaggtggccataggattcagatcct

SEQ ID NO: 278325 - DNA, 25 bp, Artificial
  Probe
cctttcaaggggtattactactcag

SEQ ID NO: 278326 - DNA, 25 bp, Artificial
  Probe
gctacattcgggtgaagctctatga

SEQ ID NO: 278327 - DNA, 25 bp, Artificial
  Probe
gctcagccctagaggggtagtgacc

SEQ ID NO: 278328 - DNA, 25 bp, Artificial
  Probe
tctctggtacccatcagggagctca

SEQ ID NO: 278329 - DNA, 25 bp, Artificial
  Probe
tctccagtaccgatgcaatgacaca

SEQ ID NO: 278330 - DNA, 25 bp, Artificial
  Probe
tacccatcagggagctcagccctag

SEQ ID NO: 278331 - DNA, 25 bp, Artificial
  Probe
aggaaagacaacaacacattgccat

SEQ ID NO: 278332 - DNA, 25 bp, Artificial
  Probe
gtaccgatgcaatgacacagtgcct

SEQ ID NO: 278333 - DNA, 25 bp, Artificial
  Probe
tcctgattggagaccctttgccgtt

SEQ ID NO: 278334 - DNA, 25 bp, Artificial
  Probe
acacagtgcctgaggactttgagcc

SEQ ID NO: 278335 - DNA, 25 bp, Artificial
  Probe
tggggtctaacctacagcccctcag

SEQ ID NO: 278336 - DNA, 25 bp, Artificial
  Probe
ttggagaccctttgccgttggactc

SEQ ID NO: 278337 - DNA, 25 bp, Artificial
  Probe
gagccattcaggaggcaactgctcc

SEQ ID NO: 278338 - DNA, 25 bp, Artificial
  Probe
tgcctgaggactttgagccattcag

SEQ ID NO: 278339 - DNA, 25 bp, Artificial
  Probe
agtcggctacattcgggtgaagctc

SEQ ID NO: 278340 - DNA, 25 bp, Artificial
  Probe
tgaagctctatgagggtccccagct

SEQ ID NO: 278341 - DNA, 25 bp, Artificial
  Probe
tagtgaccccattgtgcaggggttg

SEQ ID NO: 278342 - DNA, 25 bp, Artificial
  Probe
gaccctttgccgttggactctgttc

SEQ ID NO: 278343 - DNA, 25 bp, Artificial
  Probe
gttttggacactaggcatgagtcct

SEQ ID NO: 278344 - DNA, 25 bp, Artificial
  Probe
tgtggcaggtgtcattcatctcggt

SEQ ID NO: 278345 - DNA, 25 bp, Artificial
  Probe
tcagatggactcagatccctcagct

SEQ ID NO: 278346 - DNA, 25 bp, Artificial
  Probe
ctgacgtcactgaggagaagggatt

SEQ ID NO: 278347 - DNA, 25 bp, Artificial
  Probe
gcgtacacaatcaatgtactatgca

SEQ ID NO: 278348 - DNA, 25 bp, Artificial
  Probe
atgctgtttctctgtgtcctgacgt

SEQ ID NO: 278349 - DNA, 25 bp, Artificial
  Probe
tggcaggtgtcattcatctcggttt

SEQ ID NO: 278350 - DNA, 25 bp, Artificial
  Probe
tcctgacgtcactgaggagaaggga

SEQ ID NO: 278351 - DNA, 25 bp, Artificial
  Probe
atgggagcagactttccactactgt

SEQ ID NO: 278352 - DNA, 25 bp, Artificial
  Probe
atgcttcctttgaacccagttaaag

SEQ ID NO: 278353 - DNA, 25 bp, Artificial
  Probe
cattcatctcggttttggacactag

SEQ ID NO: 278354 - DNA, 25 bp, Artificial
  Probe
tgtcctgacgtcactgaggagaagg

SEQ ID NO: 278355 - DNA, 25 bp, Artificial
  Probe
agatggactcagatccctcagctcc

SEQ ID NO: 278356 - DNA, 25 bp, Artificial
  Probe
agataccgctctcttcagagtaact

SEQ ID NO: 278357 - DNA, 25 bp, Artificial
  Probe
cggctccctactcatagtaaaccag

SEQ ID NO: 278358 - DNA, 25 bp, Artificial
  Probe
ggctccctactcatagtaaaccagc

SEQ ID NO: 278359 - DNA, 25 bp, Artificial
  Probe
tggacactaggcatgagtcctgtct

SEQ ID NO: 278360 - DNA, 25 bp, Artificial
  Probe
cctgtcagtattctcagatggactc

SEQ ID NO: 278361 - DNA, 25 bp, Artificial
  Probe
gacactaggcatgagtcctgtctcc

SEQ ID NO: 278362 - DNA, 25 bp, Artificial
  Probe
aagcgtacacaatcaatgtactatg

SEQ ID NO: 278363 - DNA, 25 bp, Artificial
  Probe
tttggtcccggctccctactcatag

SEQ ID NO: 278364 - DNA, 25 bp, Artificial
  Probe
cacaattgtggcaggtgtcattcat

SEQ ID NO: 278365 - DNA, 25 bp, Artificial
  Probe
gcatgagtcctgtctcctttctcct

SEQ ID NO: 278366 - DNA, 25 bp, Artificial
  Probe
tgattcctgtttcctgacaccgagt

SEQ ID NO: 278367 - DNA, 25 bp, Artificial
  Probe
gtgtcattcatctcggttttggaca

SEQ ID NO: 278368 - DNA, 25 bp, Artificial
  Probe
ttcatctcggttttggacactaggc

SEQ ID NO: 278369 - DNA, 25 bp, Artificial
  Probe
ttgaacccagttaaagtctctcctg

SEQ ID NO: 278370 - DNA, 25 bp, Artificial
  Probe
aagtctctcctgtcagtattctcag

SEQ ID NO: 278371 - DNA, 25 bp, Artificial
  Probe
cagcaaatgctgtttctctgtgtcc

SEQ ID NO: 278372 - DNA, 25 bp, Artificial
  Probe
acccagttaaagtctctcctgtcag

SEQ ID NO: 278373 - DNA, 25 bp, Artificial
  Probe
taattcccaggcagcactttggtcc

SEQ ID NO: 278374 - DNA, 25 bp, Artificial
  Probe
gcagactttccactactgtgcaata

SEQ ID NO: 278375 - DNA, 25 bp, Artificial
  Probe
ggagcagactttccactactgtgca

SEQ ID NO: 278376 - DNA, 25 bp, Artificial
  Probe
gtgcgttgcttacagcaaatgctgt

SEQ ID NO: 278377 - DNA, 25 bp, Artificial
  Probe
attcctgtttcctgacaccgagtcc

SEQ ID NO: 278378 - DNA, 25 bp, Artificial
  Probe
tgcttcctttgaacccagttaaagt

SEQ ID NO: 278379 - DNA, 25 bp, Artificial
  Probe
cggttttggacactaggcatgagtc

SEQ ID NO: 278380 - DNA, 25 bp, Artificial
  Probe
ctcttcagagtaactgtgaaccttt

SEQ ID NO: 278381 - DNA, 25 bp, Artificial
  Probe
tgggcacaattgtggcaggtgtcat

SEQ ID NO: 278382 - DNA, 25 bp, Artificial
  Probe
gaacccagttaaagtctctcctgtc

SEQ ID NO: 278383 - DNA, 25 bp, Artificial
  Probe
aaatgctgtttctctgtgtcctgac

SEQ ID NO: 278384 - DNA, 25 bp, Artificial
  Probe
ttcccaggcagcactttggtcccgg

SEQ ID NO: 278385 - DNA, 25 bp, Artificial
  Probe
ccagttaaagtctctcctgtcagta

SEQ ID NO: 278386 - DNA, 25 bp, Artificial
  Probe
gtattctcagatggactcagatccc

SEQ ID NO: 278387 - DNA, 25 bp, Artificial
  Probe
gtacacaatcaatgtactatgcaag

SEQ ID NO: 278388 - DNA, 25 bp, Artificial
  Probe
tgcttacagcaaatgctgtttctct

SEQ ID NO: 278389 - DNA, 25 bp, Artificial
  Probe
agcacctctgggatggcctcgcaga

SEQ ID NO: 278390 - DNA, 25 bp, Artificial
  Probe
atggcctcgcagaaccgcgacccag

SEQ ID NO: 278391 - DNA, 25 bp, Artificial
  Probe
gcagaaccgcgacccagctgcagcc

SEQ ID NO: 278392 - DNA, 25 bp, Artificial
  Probe
ctctgggatggcctcgcagaaccgc

SEQ ID NO: 278393 - DNA, 25 bp, Artificial
  Probe
ccagcacctctgggatggcctcgca

SEQ ID NO: 278394 - DNA, 25 bp, Artificial
  Probe
cacctctgggatggcctcgcagaac

SEQ ID NO: 278395 - DNA, 25 bp, Artificial
  Probe
accgcgacccagctgcagccagcgt

SEQ ID NO: 278396 - DNA, 25 bp, Artificial
  Probe
acccagctgcagccagcgttgccgc

SEQ ID NO: 278397 - DNA, 25 bp, Artificial
  Probe
agcgttgccgccgttcgaaaaggag

SEQ ID NO: 278398 - DNA, 25 bp, Artificial
  Probe
ccagcgttgccgccgttcgaaaagg

SEQ ID NO: 278399 - DNA, 25 bp, Artificial
  Probe
cgaggcgtgccagcacctctgggat

SEQ ID NO: 278400 - DNA, 25 bp, Artificial
  Probe
ctgggatggcctcgcagaaccgcga

SEQ ID NO: 278401 - DNA, 25 bp, Artificial
  Probe
ggcgtgccagcacctctgggatggc

SEQ ID NO: 278402 - DNA, 25 bp, Artificial
  Probe
agccagcgttgccgccgttcgaaaa

SEQ ID NO: 278403 - DNA, 25 bp, Artificial
  Probe
gctgcagccagcgttgccgccgttc

SEQ ID NO: 278404 - DNA, 25 bp, Artificial
  Probe
cagaaccgcgacccagctgcagcca

SEQ ID NO: 278405 - DNA, 25 bp, Artificial
  Probe
gccagcacctctgggatggcctcgc

SEQ ID NO: 278406 - DNA, 25 bp, Artificial
  Probe
tgccagcacctctgggatggcctcg

SEQ ID NO: 278407 - DNA, 25 bp, Artificial
  Probe
tcgcagaaccgcgacccagctgcag

SEQ ID NO: 278408 - DNA, 25 bp, Artificial
  Probe
gaaccgcgacccagctgcagccagc

SEQ ID NO: 278409 - DNA, 25 bp, Artificial
  Probe
cctctgggatggcctcgcagaaccg

SEQ ID NO: 278410 - DNA, 25 bp, Artificial
  Probe
tctgggatggcctcgcagaaccgcg

SEQ ID NO: 278411 - DNA, 25 bp, Artificial
  Probe
ggatggcctcgcagaaccgcgaccc

SEQ ID NO: 278412 - DNA, 25 bp, Artificial
  Probe
aaccgcgacccagctgcagccagcg

SEQ ID NO: 278413 - DNA, 25 bp, Artificial
  Probe
gcgacccagctgcagccagcgttgc

SEQ ID NO: 278414 - DNA, 25 bp, Artificial
  Probe
cagctgcagccagcgttgccgccgt

SEQ ID NO: 278415 - DNA, 25 bp, Artificial
  Probe
cacgaggcgtgccagcacctctggg

SEQ ID NO: 278416 - DNA, 25 bp, Artificial
  Probe
tgggatggcctcgcagaaccgcgac

SEQ ID NO: 278417 - DNA, 25 bp, Artificial
  Probe
tgcagccagcgttgccgccgttcga

SEQ ID NO: 278418 - DNA, 25 bp, Artificial
  Probe
gatggcctcgcagaaccgcgaccca

SEQ ID NO: 278419 - DNA, 25 bp, Artificial
  Probe
ctcgcagaaccgcgacccagctgca

SEQ ID NO: 278420 - DNA, 25 bp, Artificial
  Probe
cagccagcgttgccgccgttcgaaa

SEQ ID NO: 278421 - DNA, 25 bp, Artificial
  Probe
acgaggcgtgccagcacctctggga

SEQ ID NO: 278422 - DNA, 25 bp, Artificial
  Probe
cgtgccagcacctctgggatggcct

SEQ ID NO: 278423 - DNA, 25 bp, Artificial
  Probe
cgcagaaccgcgacccagctgcagc

SEQ ID NO: 278424 - DNA, 25 bp, Artificial
  Probe
gcgtgccagcacctctgggatggcc

SEQ ID NO: 278425 - DNA, 25 bp, Artificial
  Probe
ctgcagccagcgttgccgccgttcg

SEQ ID NO: 278426 - DNA, 25 bp, Artificial
  Probe
ccagctgcagccagcgttgccgccg

SEQ ID NO: 278427 - DNA, 25 bp, Artificial
  Probe
cgacccagctgcagccagcgttgcc

SEQ ID NO: 278428 - DNA, 25 bp, Artificial
  Probe
gtgccagcacctctgggatggcctc

SEQ ID NO: 278429 - DNA, 25 bp, Artificial
  Probe
gcacctctgggatggcctcgcagaa

SEQ ID NO: 278430 - DNA, 25 bp, Artificial
  Probe
cagcacctctgggatggcctcgcag

SEQ ID NO: 278431 - DNA, 25 bp, Artificial
  Probe
gcctcgcagaaccgcgacccagctg

SEQ ID NO: 278432 - DNA, 25 bp, Artificial
  Probe
gcagccagcgttgccgccgttcgaa

SEQ ID NO: 278433 - DNA, 25 bp, Artificial
  Probe
cccagctgcagccagcgttgccgcc

SEQ ID NO: 278434 - DNA, 25 bp, Artificial
  Probe
tggcctcgcagaaccgcgacccagc

SEQ ID NO: 278435 - DNA, 25 bp, Artificial
  Probe
aggctgctcggctcaagacagacgt

SEQ ID NO: 278436 - DNA, 25 bp, Artificial
  Probe
gtatcttggactcgtgtccttagca

SEQ ID NO: 278437 - DNA, 25 bp, Artificial
  Probe
cccagctgccatcagactgtagtga

SEQ ID NO: 278438 - DNA, 25 bp, Artificial
  Probe
cccacgtatcttggactcgtgtcct

SEQ ID NO: 278439 - DNA, 25 bp, Artificial
  Probe
ctcccagctgccatcagactgtagt

SEQ ID NO: 278440 - DNA, 25 bp, Artificial
  Probe
gcattcttgtgctgtgggcctttgg

SEQ ID NO: 278441 - DNA, 25 bp, Artificial
  Probe
tgtgggcctttggaaggacaacctt

SEQ ID NO: 278442 - DNA, 25 bp, Artificial
  Probe
agataattacccacgtatcttggac

SEQ ID NO: 278443 - DNA, 25 bp, Artificial
  Probe
ccagctgccatcagactgtagtgac

SEQ ID NO: 278444 - DNA, 25 bp, Artificial
  Probe
cttggactcgtgtccttagcacaag

SEQ ID NO: 278445 - DNA, 25 bp, Artificial
  Probe
agggaaacgtgtgtcactggtactt

SEQ ID NO: 278446 - DNA, 25 bp, Artificial
  Probe
atcttggactcgtgtccttagcaca

SEQ ID NO: 278447 - DNA, 25 bp, Artificial
  Probe
aaacgtgtgtcactggtacttttca

SEQ ID NO: 278448 - DNA, 25 bp, Artificial
  Probe
ctggtacttttcaaactgtgaatta

SEQ ID NO: 278449 - DNA, 25 bp, Artificial
  Probe
gataattacccacgtatcttggact

SEQ ID NO: 278450 - DNA, 25 bp, Artificial
  Probe
tgtccttagcacaagaaaattggca

SEQ ID NO: 278451 - DNA, 25 bp, Artificial
  Probe
gtgtccttagcacaagaaaattggc

SEQ ID NO: 278452 - DNA, 25 bp, Artificial
  Probe
cgtatcttggactcgtgtccttagc

SEQ ID NO: 278453 - DNA, 25 bp, Artificial
  Probe
gatttatgtacagcattcttgtgct

SEQ ID NO: 278454 - DNA, 25 bp, Artificial
  Probe
tttgtgacatttaagtcccaatggt

SEQ ID NO: 278455 - DNA, 25 bp, Artificial
  Probe
acagcattcttgtgctgtgggcctt

SEQ ID NO: 278456 - DNA, 25 bp, Artificial
  Probe
tcagactgtagtgacttttattccc

SEQ ID NO: 278457 - DNA, 25 bp, Artificial
  Probe
tgggcctttggaaggacaaccttat

SEQ ID NO: 278458 - DNA, 25 bp, Artificial
  Probe
ctcggctcaagacagacgtcactgg

SEQ ID NO: 278459 - DNA, 25 bp, Artificial
  Probe
ggctcaagacagacgtcactgggtg

SEQ ID NO: 278460 - DNA, 25 bp, Artificial
  Probe
ccatcagactgtagtgacttttatt

SEQ ID NO: 278461 - DNA, 25 bp, Artificial
  Probe
attcttgtgctgtgggcctttggaa

SEQ ID NO: 278462 - DNA, 25 bp, Artificial
  Probe
tcactggtacttttcaaactgtgaa

SEQ ID NO: 278463 - DNA, 25 bp, Artificial
  Probe
acccacgtatcttggactcgtgtcc

SEQ ID NO: 278464 - DNA, 25 bp, Artificial
  Probe
ggactcgtgtccttagcacaagaaa

SEQ ID NO: 278465 - DNA, 25 bp, Artificial
  Probe
tatgtacagcattcttgtgctgtgg

SEQ ID NO: 278466 - DNA, 25 bp, Artificial
  Probe
ccttagcacaagaaaattggcatct

SEQ ID NO: 278467 - DNA, 25 bp, Artificial
  Probe
gcctttggaaggacaaccttatgaa

SEQ ID NO: 278468 - DNA, 25 bp, Artificial
  Probe
tgctgtgggcctttggaaggacaac

SEQ ID NO: 278469 - DNA, 25 bp, Artificial
  Probe
ctgctcggctcaagacagacgtcac

SEQ ID NO: 278470 - DNA, 25 bp, Artificial
  Probe
ctcgtgtccttagcacaagaaaatt

SEQ ID NO: 278471 - DNA, 25 bp, Artificial
  Probe
ctgccatcagactgtagtgactttt

SEQ ID NO: 278472 - DNA, 25 bp, Artificial
  Probe
cgtgtgtcactggtacttttcaaac

SEQ ID NO: 278473 - DNA, 25 bp, Artificial
  Probe
gtacagcattcttgtgctgtgggcc

SEQ ID NO: 278474 - DNA, 25 bp, Artificial
  Probe
catcttttaaggatttatgtacagc

SEQ ID NO: 278475 - DNA, 25 bp, Artificial
  Probe
taattacccacgtatcttggactcg

SEQ ID NO: 278476 - DNA, 25 bp, Artificial
  Probe
gggaaacgtgtgtcactggtacttt

SEQ ID NO: 278477 - DNA, 25 bp, Artificial
  Probe
atttatgtacagcattcttgtgctg

SEQ ID NO: 278478 - DNA, 25 bp, Artificial
  Probe
caagacagacgtcactgggtgaagg

SEQ ID NO: 278479 - DNA, 25 bp, Artificial
  Probe
ttgtgacatttaagtcccaatggtt

SEQ ID NO: 278480 - DNA, 25 bp, Artificial
  Probe
aattacccacgtatcttggactcgt

SEQ ID NO: 278481 - DNA, 25 bp, Artificial
  Probe
gagctgaaggctcttctccagagct

SEQ ID NO: 278482 - DNA, 25 bp, Artificial
  Probe
atgagttactacagccattcaacgt

SEQ ID NO: 278483 - DNA, 25 bp, Artificial
  Probe
cctgtacaagtctgagatggaggtt

SEQ ID NO: 278484 - DNA, 25 bp, Artificial
  Probe
agctgaaggctcttctccagagctc

SEQ ID NO: 278485 - DNA, 25 bp, Artificial
  Probe
gcatgagttactacagccattcaac

SEQ ID NO: 278486 - DNA, 25 bp, Artificial
  Probe
cccgacctgtacaagtctgagatgg

SEQ ID NO: 278487 - DNA, 25 bp, Artificial
  Probe
catgagttactacagccattcaacg

SEQ ID NO: 278488 - DNA, 25 bp, Artificial
  Probe
acctgtacaagtctgagatggaggt

SEQ ID NO: 278489 - DNA, 25 bp, Artificial
  Probe
cctttgagcccgacctgtacaagtc

SEQ ID NO: 278490 - DNA, 25 bp, Artificial
  Probe
tgttgcccagtttaaatttacagtt

SEQ ID NO: 278491 - DNA, 25 bp, Artificial
  Probe
ccgacctgtacaagtctgagatgga

SEQ ID NO: 278492 - DNA, 25 bp, Artificial
  Probe
gctgaaggctcttctccagagctct

SEQ ID NO: 278493 - DNA, 25 bp, Artificial
  Probe
tcatgcccaatggccccatgcggat

SEQ ID NO: 278494 - DNA, 25 bp, Artificial
  Probe
agcatgagttactacagccattcaa

SEQ ID NO: 278495 - DNA, 25 bp, Artificial
  Probe
tttgttgcccagtttaaatttacag

SEQ ID NO: 278496 - DNA, 25 bp, Artificial
  Probe
gcccgacctgtacaagtctgagatg

SEQ ID NO: 278497 - DNA, 25 bp, Artificial
  Probe
gaaggctcttctccagagctctgca

SEQ ID NO: 278498 - DNA, 25 bp, Artificial
  Probe
tccctttgagcccgacctgtacaag

SEQ ID NO: 278499 - DNA, 25 bp, Artificial
  Probe
gagcccgacctgtacaagtctgaga

SEQ ID NO: 278500 - DNA, 25 bp, Artificial
  Probe
gtgagtttgttgcccagtttaaatt

SEQ ID NO: 278501 - DNA, 25 bp, Artificial
  Probe
tgagcccgacctgtacaagtctgag

SEQ ID NO: 278502 - DNA, 25 bp, Artificial
  Probe
cgacctgtacaagtctgagatggag

SEQ ID NO: 278503 - DNA, 25 bp, Artificial
  Probe
ctgtacaagtctgagatggaggttc

SEQ ID NO: 278504 - DNA, 25 bp, Artificial
  Probe
ctgaaggctcttctccagagctctg

SEQ ID NO: 278505 - DNA, 25 bp, Artificial
  Probe
tactcatgcccaatggccccatgcg

SEQ ID NO: 278506 - DNA, 25 bp, Artificial
  Probe
ctttgagcccgacctgtacaagtct

SEQ ID NO: 278507 - DNA, 25 bp, Artificial
  Probe
actcatgcccaatggccccatgcgg

SEQ ID NO: 278508 - DNA, 25 bp, Artificial
  Probe
tgagtttgttgcccagtttaaattt

SEQ ID NO: 278509 - DNA, 25 bp, Artificial
  Probe
tgaaggctcttctccagagctctgc

SEQ ID NO: 278510 - DNA, 25 bp, Artificial
  Probe
ggtccctttgagcccgacctgtaca

SEQ ID NO: 278511 - DNA, 25 bp, Artificial
  Probe
gacctgtacaagtctgagatggagg

SEQ ID NO: 278512 - DNA, 25 bp, Artificial
  Probe
agcccgacctgtacaagtctgagat

SEQ ID NO: 278513 - DNA, 25 bp, Artificial
  Probe
ccaagcatgagttactacagccatt

SEQ ID NO: 278514 - DNA, 25 bp, Artificial
  Probe
ttgagcccgacctgtacaagtctga

SEQ ID NO: 278515 - DNA, 25 bp, Artificial
  Probe
ttgttgcccagtttaaatttacagt

SEQ ID NO: 278516 - DNA, 25 bp, Artificial
  Probe
ggtgagtttgttgcccagtttaaat

SEQ ID NO: 278517 - DNA, 25 bp, Artificial
  Probe
ccctttgagcccgacctgtacaagt

SEQ ID NO: 278518 - DNA, 25 bp, Artificial
  Probe
catgcccaatggccccatgcggata

SEQ ID NO: 278519 - DNA, 25 bp, Artificial
  Probe
ctcatgcccaatggccccatgcgga

SEQ ID NO: 278520 - DNA, 25 bp, Artificial
  Probe
tttgagcccgacctgtacaagtctg

SEQ ID NO: 278521 - DNA, 25 bp, Artificial
  Probe
gtccctttgagcccgacctgtacaa

SEQ ID NO: 278522 - DNA, 25 bp, Artificial
  Probe
tggggagcacgcatcccattcaagt

SEQ ID NO: 278523 - DNA, 25 bp, Artificial
  Probe
gaggttctgccctggacccacagct

SEQ ID NO: 278524 - DNA, 25 bp, Artificial
  Probe
caatgaccacgcatggctggagatc

SEQ ID NO: 278525 - DNA, 25 bp, Artificial
  Probe
ggagtgaggttctgccctggaccca

SEQ ID NO: 278526 - DNA, 25 bp, Artificial
  Probe
agcacgcatcccattcaagtctgtg

SEQ ID NO: 278527 - DNA, 25 bp, Artificial
  Probe
cgcatggctggagatcctgcagccc

SEQ ID NO: 278528 - DNA, 25 bp, Artificial
  Probe
agagcccagtcaccagggctgctgc

SEQ ID NO: 278529 - DNA, 25 bp, Artificial
  Probe
ggggagcacgcatcccattcaagtc

SEQ ID NO: 278530 - DNA, 25 bp, Artificial
  Probe
tttgagccccaatccggagctgcag

SEQ ID NO: 278531 - DNA, 25 bp, Artificial
  Probe
accacgcatggctggagatcctgca

SEQ ID NO: 278532 - DNA, 25 bp, Artificial
  Probe
aaggagatcgccagcaccctgatgg

SEQ ID NO: 278533 - DNA, 25 bp, Artificial
  Probe
agtccctctaataaatcatgtggaa

SEQ ID NO: 278534 - DNA, 25 bp, Artificial
  Probe
cacaagccgggagcatcaccagagc

SEQ ID NO: 278535 - DNA, 25 bp, Artificial
  Probe
agcatcctcacaagccgggagcatc

SEQ ID NO: 278536 - DNA, 25 bp, Artificial
  Probe
tggtgctgaacatgatggagtcctc

SEQ ID NO: 278537 - DNA, 25 bp, Artificial
  Probe
tgccctggacccacagctcatgtgt

SEQ ID NO: 278538 - DNA, 25 bp, Artificial
  Probe
tccggagctgcagcaccggggcact

SEQ ID NO: 278539 - DNA, 25 bp, Artificial
  Probe
gagatcgccagcaccctgatggaga

SEQ ID NO: 278540 - DNA, 25 bp, Artificial
  Probe
tcacaagccgggagcatcaccagag

SEQ ID NO: 278541 - DNA, 25 bp, Artificial
  Probe
atagaagcagcgtggccaacaggac

SEQ ID NO: 278542 - DNA, 25 bp, Artificial
  Probe
ggtcctggagatcctgtcagtgttg

SEQ ID NO: 278543 - DNA, 25 bp, Artificial
  Probe
tcccattcaagtctgtggattatgg

SEQ ID NO: 278544 - DNA, 25 bp, Artificial
  Probe
caagtctgtggattatgggcatcaa

SEQ ID NO: 278545 - DNA, 25 bp, Artificial
  Probe
tcgtggtgctgaacatgatggagtc

SEQ ID NO: 278546 - DNA, 25 bp, Artificial
  Probe
cgtggtgctgaacatgatggagtcc

SEQ ID NO: 278547 - DNA, 25 bp, Artificial
  Probe
gctggagatcctgcagccctgcttt

SEQ ID NO: 278548 - DNA, 25 bp, Artificial
  Probe
tcagaagggccctgtctgtactgta

SEQ ID NO: 278549 - DNA, 25 bp, Artificial
  Probe
tggagatcctgcagccctgcttttg

SEQ ID NO: 278550 - DNA, 25 bp, Artificial
  Probe
agggccctgtctgtactgtagagag

SEQ ID NO: 278551 - DNA, 25 bp, Artificial
  Probe
tgcagccctgcttttgagccccaat

SEQ ID NO: 278552 - DNA, 25 bp, Artificial
  Probe
ttcaagtctgtggattatgggcatc

SEQ ID NO: 278553 - DNA, 25 bp, Artificial
  Probe
gaagggccctgtctgtactgtagag

SEQ ID NO: 278554 - DNA, 25 bp, Artificial
  Probe
caatccggagctgcagcaccggggc

SEQ ID NO: 278555 - DNA, 25 bp, Artificial
  Probe
gcactgtcgtggtgctgaacatgat

SEQ ID NO: 278556 - DNA, 25 bp, Artificial
  Probe
aatgaccacgcatggctggagatcc

SEQ ID NO: 278557 - DNA, 25 bp, Artificial
  Probe
ccattcaagtctgtggattatgggc

SEQ ID NO: 278558 - DNA, 25 bp, Artificial
  Probe
aagggcacagtagcatcctcacaag

SEQ ID NO: 278559 - DNA, 25 bp, Artificial
  Probe
cccacaatgaccacgcatggctgga

SEQ ID NO: 278560 - DNA, 25 bp, Artificial
  Probe
cattcaagtctgtggattatgggca

SEQ ID NO: 278561 - DNA, 25 bp, Artificial
  Probe
tgaacatgatggagtcctcgaagga

SEQ ID NO: 278562 - DNA, 25 bp, Artificial
  Probe
gactgggatgctggacactggcctt

SEQ ID NO: 278563 - DNA, 25 bp, Artificial
  Probe
gaggtcctggagatcctgtcagtgt

SEQ ID NO: 278564 - DNA, 25 bp, Artificial
  Probe
gtcctcgaaggagatcgccagcacc

SEQ ID NO: 278565 - DNA, 25 bp, Artificial
  Probe
tagtccctctaataaatcatgtgga

SEQ ID NO: 278566 - DNA, 25 bp, Artificial
  Probe
ctgtcgtggtgctgaacatgatgga

SEQ ID NO: 278567 - DNA, 25 bp, Artificial
  Probe
cttttgagccccaatccggagctgc

SEQ ID NO: 278568 - DNA, 25 bp, Artificial
  Probe
aatttaagaactgaggcaaggagcc

SEQ ID NO: 278569 - DNA, 25 bp, Artificial
  Probe
tggctgtccgaggatcgcaccagca

SEQ ID NO: 278570 - DNA, 25 bp, Artificial
  Probe
cttccagtgggagatcatcaccctg

SEQ ID NO: 278571 - DNA, 25 bp, Artificial
  Probe
taggctttgctgtagggctcaaagg

SEQ ID NO: 278572 - DNA, 25 bp, Artificial
  Probe
gagcccctaggctttgctgtagggc

SEQ ID NO: 278573 - DNA, 25 bp, Artificial
  Probe
ccttccagtgggagatcatcaccct

SEQ ID NO: 278574 - DNA, 25 bp, Artificial
  Probe
tgtggctgtccgaggatcgcaccag

SEQ ID NO: 278575 - DNA, 25 bp, Artificial
  Probe
caaaggggagccagggtcccatctc

SEQ ID NO: 278576 - DNA, 25 bp, Artificial
  Probe
tccgaggatcgcaccagcatgtccg

SEQ ID NO: 278577 - DNA, 25 bp, Artificial
  Probe
ctgagagtgcactcggggttccttg

SEQ ID NO: 278578 - DNA, 25 bp, Artificial
  Probe
aactgttacagtaatcagccttgtg

SEQ ID NO: 278579 - DNA, 25 bp, Artificial
  Probe
gatcgcaccagcatgtccgatagag

SEQ ID NO: 278580 - DNA, 25 bp, Artificial
  Probe
agtgggagatcatcaccctgagagt

SEQ ID NO: 278581 - DNA, 25 bp, Artificial
  Probe
gcaaggagcccctaggctttgctgt

SEQ ID NO: 278582 - DNA, 25 bp, Artificial
  Probe
aactcaccttccagtgggagatcat

SEQ ID NO: 278583 - DNA, 25 bp, Artificial
  Probe
caaggagcccctaggctttgctgta

SEQ ID NO: 278584 - DNA, 25 bp, Artificial
  Probe
atttaagaactgaggcaaggagccc

SEQ ID NO: 278585 - DNA, 25 bp, Artificial
  Probe
tcaccctgagagtgcactcggggtt

SEQ ID NO: 278586 - DNA, 25 bp, Artificial
  Probe
cgcaccagcatgtccgatagaggaa

SEQ ID NO: 278587 - DNA, 25 bp, Artificial
  Probe
catcaccctgagagtgcactcgggg

SEQ ID NO: 278588 - DNA, 25 bp, Artificial
  Probe
agatcatcaccctgagagtgcactc

SEQ ID NO: 278589 - DNA, 25 bp, Artificial
  Probe
agccagggtcccatctcgaagttct

SEQ ID NO: 278590 - DNA, 25 bp, Artificial
  Probe
caagtacttctataatagtctgtgt

SEQ ID NO: 278591 - DNA, 25 bp, Artificial
  Probe
cagtaatcagccttgtgtatatgaa

SEQ ID NO: 278592 - DNA, 25 bp, Artificial
  Probe
atgacatgacacaggtgcacacacg

SEQ ID NO: 278593 - DNA, 25 bp, Artificial
  Probe
gacctgtggctgtccgaggatcgca

SEQ ID NO: 278594 - DNA, 25 bp, Artificial
  Probe
cttctataatagtctgtgttcaaag

SEQ ID NO: 278595 - DNA, 25 bp, Artificial
  Probe
ctcaccttccagtgggagatcatca

SEQ ID NO: 278596 - DNA, 25 bp, Artificial
  Probe
acacaggtgcacacacgcaggtctt

SEQ ID NO: 278597 - DNA, 25 bp, Artificial
  Probe
taatcagccttgtgtatatgaaaac

SEQ ID NO: 278598 - DNA, 25 bp, Artificial
  Probe
tgggagatcatcaccctgagagtgc

SEQ ID NO: 278599 - DNA, 25 bp, Artificial
  Probe
atctcgaagttctctgctggggaag

SEQ ID NO: 278600 - DNA, 25 bp, Artificial
  Probe
taaactgttacagtaatcagccttg

SEQ ID NO: 278601 - DNA, 25 bp, Artificial
  Probe
gtacttctataatagtctgtgttca

SEQ ID NO: 278602 - DNA, 25 bp, Artificial
  Probe
ccctaggctttgctgtagggctcaa

SEQ ID NO: 278603 - DNA, 25 bp, Artificial
  Probe
actgaggcaaggagcccctaggctt

SEQ ID NO: 278604 - DNA, 25 bp, Artificial
  Probe
cgtcaagtacttctataatagtctg

SEQ ID NO: 278605 - DNA, 25 bp, Artificial
  Probe
gttacagtaatcagccttgtgtata

SEQ ID NO: 278606 - DNA, 25 bp, Artificial
  Probe
agtacttctataatagtctgtgttc

SEQ ID NO: 278607 - DNA, 25 bp, Artificial
  Probe
gaatgacatgacacaggtgcacaca

SEQ ID NO: 278608 - DNA, 25 bp, Artificial
  Probe
gcccctaggctttgctgtagggctc

SEQ ID NO: 278609 - DNA, 25 bp, Artificial
  Probe
gctgtccgaggatcgcaccagcatg

SEQ ID NO: 278610 - DNA, 25 bp, Artificial
  Probe
gtgcactcggggttccttgtgttag

SEQ ID NO: 278611 - DNA, 25 bp, Artificial
  Probe
acaggtgcacacacgcaggtcttcc

SEQ ID NO: 278612 - DNA, 25 bp, Artificial
  Probe
gaactgaggcaaggagcccctaggc

SEQ ID NO: 278613 - DNA, 25 bp, Artificial
  Probe
gcactcggggttccttgtgttagaa

SEQ ID NO: 278614 - DNA, 25 bp, Artificial
  Probe
cacttcattaaatgggccagataca

SEQ ID NO: 278615 - DNA, 25 bp, Artificial
  Probe
gtccaagtgagttcacgaatcttca

SEQ ID NO: 278616 - DNA, 25 bp, Artificial
  Probe
gaggtagtccactgtctgattggaa

SEQ ID NO: 278617 - DNA, 25 bp, Artificial
  Probe
gccttgccttacgtaaagaaatcag

SEQ ID NO: 278618 - DNA, 25 bp, Artificial
  Probe
tggagagcttctcacgatatacgct

SEQ ID NO: 278619 - DNA, 25 bp, Artificial
  Probe
tcttatatcccgttggagttgctgg

SEQ ID NO: 278620 - DNA, 25 bp, Artificial
  Probe
acccacttctgtgcttgtgactggg

SEQ ID NO: 278621 - DNA, 25 bp, Artificial
  Probe
ttgctggagagcttctcacgatata

SEQ ID NO: 278622 - DNA, 25 bp, Artificial
  Probe
ggaatcgtacccacttctgtgcttg

SEQ ID NO: 278623 - DNA, 25 bp, Artificial
  Probe
atatacgctgccttgccttacgtaa

SEQ ID NO: 278624 - DNA, 25 bp, Artificial
  Probe
ctggggtccaagtgagttcacgaat

SEQ ID NO: 278625 - DNA, 25 bp, Artificial
  Probe
actggggtccaagtgagttcacgaa

SEQ ID NO: 278626 - DNA, 25 bp, Artificial
  Probe
agttgctggagagcttctcacgata

SEQ ID NO: 278627 - DNA, 25 bp, Artificial
  Probe
gccgcacttcattaaatgggccaga

SEQ ID NO: 278628 - DNA, 25 bp, Artificial
  Probe
agagcttctcacgatatacgctgcc

SEQ ID NO: 278629 - DNA, 25 bp, Artificial
  Probe
gctggagagcttctcacgatatacg

SEQ ID NO: 278630 - DNA, 25 bp, Artificial
  Probe
tggagttgctggagagcttctcacg

SEQ ID NO: 278631 - DNA, 25 bp, Artificial
  Probe
ctgtctgattggaatcgtacccact

SEQ ID NO: 278632 - DNA, 25 bp, Artificial
  Probe
cttctgtgcttgtgactggggtcca

SEQ ID NO: 278633 - DNA, 25 bp, Artificial
  Probe
ttctcacgatatacgctgccttgcc

SEQ ID NO: 278634 - DNA, 25 bp, Artificial
  Probe
ctgtgcttgtgactggggtccaagt

SEQ ID NO: 278635 - DNA, 25 bp, Artificial
  Probe
cgctgccttgccttacgtaaagaaa

SEQ ID NO: 278636 - DNA, 25 bp, Artificial
  Probe
ccacttgccgcacttcattaaatgg

SEQ ID NO: 278637 - DNA, 25 bp, Artificial
  Probe
atatcccgttggagttgctggagag

SEQ ID NO: 278638 - DNA, 25 bp, Artificial
  Probe
gaccgagatcactcgctattccttc

SEQ ID NO: 278639 - DNA, 25 bp, Artificial
  Probe
ggtagtccactgtctgattggaatc

SEQ ID NO: 278640 - DNA, 25 bp, Artificial
  Probe
tttatcatcttatatcccgttggag

SEQ ID NO: 278641 - DNA, 25 bp, Artificial
  Probe
cacgatatacgctgccttgccttac

SEQ ID NO: 278642 - DNA, 25 bp, Artificial
  Probe
tatcatcttatatcccgttggagtt

SEQ ID NO: 278643 - DNA, 25 bp, Artificial
  Probe
tctgattggaatcgtacccacttct

SEQ ID NO: 278644 - DNA, 25 bp, Artificial
  Probe
ttatcatcttatatcccgttggagt

SEQ ID NO: 278645 - DNA, 25 bp, Artificial
  Probe
cttctcacgatatacgctgccttgc

SEQ ID NO: 278646 - DNA, 25 bp, Artificial
  Probe
gattggaatcgtacccacttctgtg

SEQ ID NO: 278647 - DNA, 25 bp, Artificial
  Probe
actgtctgattggaatcgtacccac

SEQ ID NO: 278648 - DNA, 25 bp, Artificial
  Probe
ggggtccaagtgagttcacgaatct

SEQ ID NO: 278649 - DNA, 25 bp, Artificial
  Probe
ttgtgactggggtccaagtgagttc

SEQ ID NO: 278650 - DNA, 25 bp, Artificial
  Probe
tctgtgcttgtgactggggtccaag

SEQ ID NO: 278651 - DNA, 25 bp, Artificial
  Probe
gttggagttgctggagagcttctca

SEQ ID NO: 278652 - DNA, 25 bp, Artificial
  Probe
ttgccttacgtaaagaaatcaggga

SEQ ID NO: 278653 - DNA, 25 bp, Artificial
  Probe
ttatatcccgttggagttgctggag

SEQ ID NO: 278654 - DNA, 25 bp, Artificial
  Probe
tgctggagagcttctcacgatatac

SEQ ID NO: 278655 - DNA, 25 bp, Artificial
  Probe
tcccgttggagttgctggagagctt

SEQ ID NO: 278656 - DNA, 25 bp, Artificial
  Probe
tatacgctgccttgccttacgtaaa

SEQ ID NO: 278657 - DNA, 25 bp, Artificial
  Probe
cactgtctgattggaatcgtaccca

SEQ ID NO: 278658 - DNA, 25 bp, Artificial
  Probe
gatgttttcagtaaggcttcctaac

SEQ ID NO: 278659 - DNA, 25 bp, Artificial
  Probe
cccacttctgtgcttgtgactgggg

SEQ ID NO: 278660 - DNA, 25 bp, Artificial
  Probe
tctccacagttgtgcggaaggcaga

SEQ ID NO: 278661 - DNA, 25 bp, Artificial
  Probe
tgaagcctggcgaaccacggacatg

SEQ ID NO: 278662 - DNA, 25 bp, Artificial
  Probe
gacgtgatgactgatccttcctggc

SEQ ID NO: 278663 - DNA, 25 bp, Artificial
  Probe
gtccaccttccgagcgtttctgtca

SEQ ID NO: 278664 - DNA, 25 bp, Artificial
  Probe
tcacacttgcaggatctctccacag

SEQ ID NO: 278665 - DNA, 25 bp, Artificial
  Probe
tgatgactgatccttcctggccgca

SEQ ID NO: 278666 - DNA, 25 bp, Artificial
  Probe
accttccgagcgtttctgtcatcac

SEQ ID NO: 278667 - DNA, 25 bp, Artificial
  Probe
catcgaaaacagtttcatgacagac

SEQ ID NO: 278668 - DNA, 25 bp, Artificial
  Probe
ctcctttgatggtcgggacgtgatg

SEQ ID NO: 278669 - DNA, 25 bp, Artificial
  Probe
gtcatcacacttgcaggatctctcc

SEQ ID NO: 278670 - DNA, 25 bp, Artificial
  Probe
atctctccacagttgtgcggaaggc

SEQ ID NO: 278671 - DNA, 25 bp, Artificial
  Probe
tgacagacgcaaggaagtgataacc

SEQ ID NO: 278672 - DNA, 25 bp, Artificial
  Probe
gactactgtccaccttccgagcgtt

SEQ ID NO: 278673 - DNA, 25 bp, Artificial
  Probe
acaactgggactcaatattttctgg

SEQ ID NO: 278674 - DNA, 25 bp, Artificial
  Probe
ggtcgggacgtgatgactgatcctt

SEQ ID NO: 278675 - DNA, 25 bp, Artificial
  Probe
acggacatggcagtaacaggatttg

SEQ ID NO: 278676 - DNA, 25 bp, Artificial
  Probe
ctccccatggttcttaaaagagtat

SEQ ID NO: 278677 - DNA, 25 bp, Artificial
  Probe
gtttcatgacagacgcaaggaagtg

SEQ ID NO: 278678 - DNA, 25 bp, Artificial
  Probe
caggccagggctgcaggactactgt

SEQ ID NO: 278679 - DNA, 25 bp, Artificial
  Probe
ctcgtggacaagtactgtgaagcct

SEQ ID NO: 278680 - DNA, 25 bp, Artificial
  Probe
gacaagtactgtgaagcctggcgaa

SEQ ID NO: 278681 - DNA, 25 bp, Artificial
  Probe
aaagcatatagctgtgctaataggc

SEQ ID NO: 278682 - DNA, 25 bp, Artificial
  Probe
acattccgatatactcctttgatgg

SEQ ID NO: 278683 - DNA, 25 bp, Artificial
  Probe
cagtcttccaattgtgaacctcaag

SEQ ID NO: 278684 - DNA, 25 bp, Artificial
  Probe
ggctgcaggactactgtccaccttc

SEQ ID NO: 278685 - DNA, 25 bp, Artificial
  Probe
catgacagacgcaaggaagtgataa

SEQ ID NO: 278686 - DNA, 25 bp, Artificial
  Probe
gcatcgaaaacagtttcatgacaga

SEQ ID NO: 278687 - DNA, 25 bp, Artificial
  Probe
agtgtttccagcaggccagggctgc

SEQ ID NO: 278688 - DNA, 25 bp, Artificial
  Probe
gaaccacggacatggcagtaacagg

SEQ ID NO: 278689 - DNA, 25 bp, Artificial
  Probe
tgcaggactactgtccaccttccga

SEQ ID NO: 278690 - DNA, 25 bp, Artificial
  Probe
cacggacatggcagtaacaggattt

SEQ ID NO: 278691 - DNA, 25 bp, Artificial
  Probe
tccagtgtttccagcaggccagggc

SEQ ID NO: 278692 - DNA, 25 bp, Artificial
  Probe
acggtgtccgcctcgtggacaagta

SEQ ID NO: 278693 - DNA, 25 bp, Artificial
  Probe
caagtactgtgaagcctggcgaacc

SEQ ID NO: 278694 - DNA, 25 bp, Artificial
  Probe
agagagattcagtcttccaattgtg

SEQ ID NO: 278695 - DNA, 25 bp, Artificial
  Probe
gcctggcgaaccacggacatggcag

SEQ ID NO: 278696 - DNA, 25 bp, Artificial
  Probe
aacagtttcatgacagacgcaagga

SEQ ID NO: 278697 - DNA, 25 bp, Artificial
  Probe
gctttttaacaactgggactcaata

SEQ ID NO: 278698 - DNA, 25 bp, Artificial
  Probe
ggcgaaccacggacatggcagtaac

SEQ ID NO: 278699 - DNA, 25 bp, Artificial
  Probe
atggtcgggacgtgatgactgatcc

SEQ ID NO: 278700 - DNA, 25 bp, Artificial
  Probe
gattcagtcttccaattgtgaacct

SEQ ID NO: 278701 - DNA, 25 bp, Artificial
  Probe
tactgtgaagcctggcgaaccacgg

SEQ ID NO: 278702 - DNA, 25 bp, Artificial
  Probe
tagctgtgctaataggctaatcgtt

SEQ ID NO: 278703 - DNA, 25 bp, Artificial
  Probe
ctgggactcaatattttctggtgat

SEQ ID NO: 278704 - DNA, 25 bp, Artificial
  Probe
ctcaagggccaagtgctttttaaca

SEQ ID NO: 278705 - DNA, 25 bp, Artificial
  Probe
ttgtgaacctcaagggccaagtgct

SEQ ID NO: 278706 - DNA, 25 bp, Artificial
  Probe
ccagccgtcgacttccagtagcatt

SEQ ID NO: 278707 - DNA, 25 bp, Artificial
  Probe
attcccagccgtcgacttccagtag

SEQ ID NO: 278708 - DNA, 25 bp, Artificial
  Probe
ttattttcatacattaaagccggag

SEQ ID NO: 278709 - DNA, 25 bp, Artificial
  Probe
ccaaattagacaacatgggtattat

SEQ ID NO: 278710 - DNA, 25 bp, Artificial
  Probe
tgcagacagccgatccaaatgattg

SEQ ID NO: 278711 - DNA, 25 bp, Artificial
  Probe
ttcatacattaaagccggagcattg

SEQ ID NO: 278712 - DNA, 25 bp, Artificial
  Probe
aaagtggcccagatgctcctgtcac

SEQ ID NO: 278713 - DNA, 25 bp, Artificial
  Probe
agtcatctgctgaggatagcgagga

SEQ ID NO: 278714 - DNA, 25 bp, Artificial
  Probe
tgatgctaaggagtcatctgctgag

SEQ ID NO: 278715 - DNA, 25 bp, Artificial
  Probe
attgtttacagcagccaagaaagtg

SEQ ID NO: 278716 - DNA, 25 bp, Artificial
  Probe
tattcccagccgtcgacttccagta

SEQ ID NO: 278717 - DNA, 25 bp, Artificial
  Probe
tctctgaacgccatcgagccatgtg

SEQ ID NO: 278718 - DNA, 25 bp, Artificial
  Probe
ctgaaaaagccaaactggaaagctc

SEQ ID NO: 278719 - DNA, 25 bp, Artificial
  Probe
agaaggcttagatgtgcctgatggc

SEQ ID NO: 278720 - DNA, 25 bp, Artificial
  Probe
gacgcagacctttacacttctaatg

SEQ ID NO: 278721 - DNA, 25 bp, Artificial
  Probe
gagagtgacgactattcccagccgt

SEQ ID NO: 278722 - DNA, 25 bp, Artificial
  Probe
acagcagccaagaaagtggcaaaga

SEQ ID NO: 278723 - DNA, 25 bp, Artificial
  Probe
atgacccccaaattagacaacatgg

SEQ ID NO: 278724 - DNA, 25 bp, Artificial
  Probe
ctcagatcaggcagaagaaggctta

SEQ ID NO: 278725 - DNA, 25 bp, Artificial
  Probe
tagacggcgggcagacgcagacctt

SEQ ID NO: 278726 - DNA, 25 bp, Artificial
  Probe
ttgttcacggcaaaaccggacacct

SEQ ID NO: 278727 - DNA, 25 bp, Artificial
  Probe
aaccggacacctgatgtcatgtttc

SEQ ID NO: 278728 - DNA, 25 bp, Artificial
  Probe
cattaaagccggagcattgtcttag

SEQ ID NO: 278729 - DNA, 25 bp, Artificial
  Probe
tacttcaactagacggcgggcagac

SEQ ID NO: 278730 - DNA, 25 bp, Artificial
  Probe
tgtcacaggagagtgacgactattc

SEQ ID NO: 278731 - DNA, 25 bp, Artificial
  Probe
ttcacgtgtgcaaagaagctaaaga

SEQ ID NO: 278732 - DNA, 25 bp, Artificial
  Probe
cttagatgtgcctgatggcaaaaaa

SEQ ID NO: 278733 - DNA, 25 bp, Artificial
  Probe
gttgcattgttcacggcaaaaccgg

SEQ ID NO: 278734 - DNA, 25 bp, Artificial
  Probe
agtatggaatccagcttctctctga

SEQ ID NO: 278735 - DNA, 25 bp, Artificial
  Probe
cccgtgtgcagacagccgatccaaa

SEQ ID NO: 278736 - DNA, 25 bp, Artificial
  Probe
tcgagccatgtgtgatttgccaggg

SEQ ID NO: 278737 - DNA, 25 bp, Artificial
  Probe
cgccatcgagccatgtgtgatttgc

SEQ ID NO: 278738 - DNA, 25 bp, Artificial
  Probe
agtgacgactattcccagccgtcga

SEQ ID NO: 278739 - DNA, 25 bp, Artificial
  Probe
cggcaaaaccggacacctgatgtca

SEQ ID NO: 278740 - DNA, 25 bp, Artificial
  Probe
gcaaaaccggacacctgatgtcatg

SEQ ID NO: 278741 - DNA, 25 bp, Artificial
  Probe
aaagccaaactggaaagctcagatc

SEQ ID NO: 278742 - DNA, 25 bp, Artificial
  Probe
aaggcttagatgtgcctgatggcaa

SEQ ID NO: 278743 - DNA, 25 bp, Artificial
  Probe
gcgggcagacgcagacctttacact

SEQ ID NO: 278744 - DNA, 25 bp, Artificial
  Probe
gacggcgggcagacgcagaccttta

SEQ ID NO: 278745 - DNA, 25 bp, Artificial
  Probe
tcagatcaggcagaagaaggcttag

SEQ ID NO: 278746 - DNA, 25 bp, Artificial
  Probe
gaatccagcttctctctgaacgcca

SEQ ID NO: 278747 - DNA, 25 bp, Artificial
  Probe
tgaacgccatcgagccatgtgtgat

SEQ ID NO: 278748 - DNA, 25 bp, Artificial
  Probe
ccgtgtgcagacagccgatccaaat

SEQ ID NO: 278749 - DNA, 25 bp, Artificial
  Probe
catctgctgaggatagcgaggaaaa

SEQ ID NO: 278750 - DNA, 25 bp, Artificial
  Probe
aaatggttgcattgttcacggcaaa

SEQ ID NO: 278751 - DNA, 25 bp, Artificial
  Probe
gttcacggcaaaaccggacacctga

SEQ ID NO: 278752 - DNA, 25 bp, Artificial
  Probe
agctgttgcacctgttccacctgca

SEQ ID NO: 278753 - DNA, 25 bp, Artificial
  Probe
aggcttttacattggagaggcaaac

SEQ ID NO: 278754 - DNA, 25 bp, Artificial
  Probe
tggaagctccggagcagtatcgttt

SEQ ID NO: 278755 - DNA, 25 bp, Artificial
  Probe
ggatgttttccatgcagtaaagacc

SEQ ID NO: 278756 - DNA, 25 bp, Artificial
  Probe
tgcaacctaactagaccacaagaag

SEQ ID NO: 278757 - DNA, 25 bp, Artificial
  Probe
gagaaggccggacgatcatccactg

SEQ ID NO: 278758 - DNA, 25 bp, Artificial
  Probe
tagaccacaagaaggctatctgatg

SEQ ID NO: 278759 - DNA, 25 bp, Artificial
  Probe
agccaaacatggtggaagctccgga

SEQ ID NO: 278760 - DNA, 25 bp, Artificial
  Probe
ctcatcgagaagtgcctggctccaa

SEQ ID NO: 278761 - DNA, 25 bp, Artificial
  Probe
tcgagaagtgcctggctccaaacgc

SEQ ID NO: 278762 - DNA, 25 bp, Artificial
  Probe
gcctggctccaaacgctcgtttttg

SEQ ID NO: 278763 - DNA, 25 bp, Artificial
  Probe
catgcagtaaagaccctgaggaaca

SEQ ID NO: 278764 - DNA, 25 bp, Artificial
  Probe
gaagtgcctggctccaaacgctcgt

SEQ ID NO: 278765 - DNA, 25 bp, Artificial
  Probe
tttttaggatatgcaacctaactag

SEQ ID NO: 278766 - DNA, 25 bp, Artificial
  Probe
tgttccacctgcaccgagagatttt

SEQ ID NO: 278767 - DNA, 25 bp, Artificial
  Probe
cgctcgtttttgaaactgatactgc

SEQ ID NO: 278768 - DNA, 25 bp, Artificial
  Probe
caaacatggtggaagctccggagca

SEQ ID NO: 278769 - DNA, 25 bp, Artificial
  Probe
gaacagcaagccaaacatggtggaa

SEQ ID NO: 278770 - DNA, 25 bp, Artificial
  Probe
gtctgttgagccagcagctgttgca

SEQ ID NO: 278771 - DNA, 25 bp, Artificial
  Probe
atcacgtggagatccgtctgttgag

SEQ ID NO: 278772 - DNA, 25 bp, Artificial
  Probe
cgtggagatccgtctgttgagccag

SEQ ID NO: 278773 - DNA, 25 bp, Artificial
  Probe
cctgttccacctgcaccgagagatt

SEQ ID NO: 278774 - DNA, 25 bp, Artificial
  Probe
ttcggtgatactttgcagaacatca

SEQ ID NO: 278775 - DNA, 25 bp, Artificial
  Probe
tgatactttgcagaacatcacgtgg

SEQ ID NO: 278776 - DNA, 25 bp, Artificial
  Probe
cagtaaagaccctgaggaacagcaa

SEQ ID NO: 278777 - DNA, 25 bp, Artificial
  Probe
cagtacctaggctgggcttctcatc

SEQ ID NO: 278778 - DNA, 25 bp, Artificial
  Probe
acatggtggaagctccggagcagta

SEQ ID NO: 278779 - DNA, 25 bp, Artificial
  Probe
gatcatccactgcttgaatggcggt

SEQ ID NO: 278780 - DNA, 25 bp, Artificial
  Probe
ctatgacgtggctttggagtacctg

SEQ ID NO: 278781 - DNA, 25 bp, Artificial
  Probe
tggctttggagtacctggagtcctc

SEQ ID NO: 278782 - DNA, 25 bp, Artificial
  Probe
ccacaagaaggctatctgatggtac

SEQ ID NO: 278783 - DNA, 25 bp, Artificial
  Probe
ccacctgcaccgagagattttaatg

SEQ ID NO: 278784 - DNA, 25 bp, Artificial
  Probe
ggcgcagtggcatgttctgtgcaat

SEQ ID NO: 278785 - DNA, 25 bp, Artificial
  Probe
ggcttctcatcgagaagtgcctggc

SEQ ID NO: 278786 - DNA, 25 bp, Artificial
  Probe
cctaggctgggcttctcatcgagaa

SEQ ID NO: 278787 - DNA, 25 bp, Artificial
  Probe
tcgtttctgctatgacgtggctttg

SEQ ID NO: 278788 - DNA, 25 bp, Artificial
  Probe
ctgcaccgagagattttaatgtggg

SEQ ID NO: 278789 - DNA, 25 bp, Artificial
  Probe
ggatatgcaacctaactagaccaca

SEQ ID NO: 278790 - DNA, 25 bp, Artificial
  Probe
agcagctgttgcacctgttccacct

SEQ ID NO: 278791 - DNA, 25 bp, Artificial
  Probe
ccctgaggaacagcaagccaaacat

SEQ ID NO: 278792 - DNA, 25 bp, Artificial
  Probe
tagttcggtgatactttgcagaaca

SEQ ID NO: 278793 - DNA, 25 bp, Artificial
  Probe
cgtttttgaaactgatactgcaggt

SEQ ID NO: 278794 - DNA, 25 bp, Artificial
  Probe
gttctgtgcaataggcattgtcgtg

SEQ ID NO: 278795 - DNA, 25 bp, Artificial
  Probe
gctccaaacgctcgtttttgaaact

SEQ ID NO: 278796 - DNA, 25 bp, Artificial
  Probe
cagcagttccagtacctaggctggg

SEQ ID NO: 278797 - DNA, 25 bp, Artificial
  Probe
atccgtctgttgagccagcagctgt

SEQ ID NO: 278798 - DNA, 25 bp, Artificial
  Probe
agtggtccagtttggcctagtaagg

SEQ ID NO: 278799 - DNA, 25 bp, Artificial
  Probe
tagttagctatccagggaagccggg

SEQ ID NO: 278800 - DNA, 25 bp, Artificial
  Probe
ggctcgatgggctaagacctggtaa

SEQ ID NO: 278801 - DNA, 25 bp, Artificial
  Probe
ctaagacctggtaagacagagtggg

SEQ ID NO: 278802 - DNA, 25 bp, Artificial
  Probe
cactgaggtcagacccaagcttgga

SEQ ID NO: 278803 - DNA, 25 bp, Artificial
  Probe
acagctgcgactcaggttagtcagt

SEQ ID NO: 278804 - DNA, 25 bp, Artificial
  Probe
gcggtgttctctacggctctctcta

SEQ ID NO: 278805 - DNA, 25 bp, Artificial
  Probe
ctgaagttggcacctcaccgccttt

SEQ ID NO: 278806 - DNA, 25 bp, Artificial
  Probe
catactgctcacacggggttaagtg

SEQ ID NO: 278807 - DNA, 25 bp, Artificial
  Probe
cagtttggcctagtaaggttgccta

SEQ ID NO: 278808 - DNA, 25 bp, Artificial
  Probe
gaggtcagacccaagcttggagtcc

SEQ ID NO: 278809 - DNA, 25 bp, Artificial
  Probe
caaagcacgtttagtatgtgtcagt

SEQ ID NO: 278810 - DNA, 25 bp, Artificial
  Probe
gttctctacggctctctctacagct

SEQ ID NO: 278811 - DNA, 25 bp, Artificial
  Probe
tacggctctctctacagctgcgact

SEQ ID NO: 278812 - DNA, 25 bp, Artificial
  Probe
tttggcctagtaaggttgcctacca

SEQ ID NO: 278813 - DNA, 25 bp, Artificial
  Probe
ggctctctctacagctgcgactcag

SEQ ID NO: 278814 - DNA, 25 bp, Artificial
  Probe
tatatagttagctatccagggaagc

SEQ ID NO: 278815 - DNA, 25 bp, Artificial
  Probe
cccagacccggctcgatgggctaag

SEQ ID NO: 278816 - DNA, 25 bp, Artificial
  Probe
tcaccgccttttacttcatcgtgtg

SEQ ID NO: 278817 - DNA, 25 bp, Artificial
  Probe
ggcctagtaaggttgcctaccaatg

SEQ ID NO: 278818 - DNA, 25 bp, Artificial
  Probe
tcatcgtgtgtttccccttctcaag

SEQ ID NO: 278819 - DNA, 25 bp, Artificial
  Probe
tccagtttggcctagtaaggttgcc

SEQ ID NO: 278820 - DNA, 25 bp, Artificial
  Probe
gacaagacacttttgcattaccttg

SEQ ID NO: 278821 - DNA, 25 bp, Artificial
  Probe
agacccaagcttggagtcctgacct

SEQ ID NO: 278822 - DNA, 25 bp, Artificial
  Probe
tcacacggggttaagtggtccagtt

SEQ ID NO: 278823 - DNA, 25 bp, Artificial
  Probe
gccaaaccacacacctgaagttggc

SEQ ID NO: 278824 - DNA, 25 bp, Artificial
  Probe
gctcacacggggttaagtggtccag

SEQ ID NO: 278825 - DNA, 25 bp, Artificial
  Probe
gtttctctagcgagatgcactgagg

SEQ ID NO: 278826 - DNA, 25 bp, Artificial
  Probe
aaccacacacctgaagttggcacct

SEQ ID NO: 278827 - DNA, 25 bp, Artificial
  Probe
tagcatcagcccatgtttggtaagc

SEQ ID NO: 278828 - DNA, 25 bp, Artificial
  Probe
gcatactgctcacacggggttaagt

SEQ ID NO: 278829 - DNA, 25 bp, Artificial
  Probe
cagaacaggcggtgttctctacggc

SEQ ID NO: 278830 - DNA, 25 bp, Artificial
  Probe
cctcgacagaacaggcggtgttctc

SEQ ID NO: 278831 - DNA, 25 bp, Artificial
  Probe
gccttttacttcatcgtgtgtttcc

SEQ ID NO: 278832 - DNA, 25 bp, Artificial
  Probe
cccatgtttggtaagcactttatgc

SEQ ID NO: 278833 - DNA, 25 bp, Artificial
  Probe
ggttaagtggtccagtttggcctag

SEQ ID NO: 278834 - DNA, 25 bp, Artificial
  Probe
gacccaagcttggagtcctgacctt

SEQ ID NO: 278835 - DNA, 25 bp, Artificial
  Probe
gacccggctcgatgggctaagacct

SEQ ID NO: 278836 - DNA, 25 bp, Artificial
  Probe
tctacagctgcgactcaggttagtc

SEQ ID NO: 278837 - DNA, 25 bp, Artificial
  Probe
agttggcacctcaccgccttttact

SEQ ID NO: 278838 - DNA, 25 bp, Artificial
  Probe
tctctctacagctgcgactcaggtt

SEQ ID NO: 278839 - DNA, 25 bp, Artificial
  Probe
agctgcgactcaggttagtcagtga

SEQ ID NO: 278840 - DNA, 25 bp, Artificial
  Probe
acctggtaagacagagtgggtgctc

SEQ ID NO: 278841 - DNA, 25 bp, Artificial
  Probe
tctacggctctctctacagctgcga

SEQ ID NO: 278842 - DNA, 25 bp, Artificial
  Probe
ttctctacggctctctctacagctg

SEQ ID NO: 278843 - DNA, 25 bp, Artificial
  Probe
gcattaccttgctttatatagttag

SEQ ID NO: 278844 - DNA, 25 bp, Artificial
  Probe
aacttccaagggtctcggtctcaga

SEQ ID NO: 278845 - DNA, 25 bp, Artificial
  Probe
aaagcctgaggaagcttaggtgcca

SEQ ID NO: 278846 - DNA, 25 bp, Artificial
  Probe
tcagaccgggatgtgaagcacaacg

SEQ ID NO: 278847 - DNA, 25 bp, Artificial
  Probe
ccatgccaggcacctgacggtgcta

SEQ ID NO: 278848 - DNA, 25 bp, Artificial
  Probe
tctcggtctcagaccgggatgtgaa

SEQ ID NO: 278849 - DNA, 25 bp, Artificial
  Probe
aagggtctcggtctcagaccgggat

SEQ ID NO: 278850 - DNA, 25 bp, Artificial
  Probe
tctcaggattatggtccaaataaac

SEQ ID NO: 278851 - DNA, 25 bp, Artificial
  Probe
gcccacatggtaacaagacaacttc

SEQ ID NO: 278852 - DNA, 25 bp, Artificial
  Probe
tgctgttctcaggattatggtccaa

SEQ ID NO: 278853 - DNA, 25 bp, Artificial
  Probe
cttggcctagaaccaacatcctttg

SEQ ID NO: 278854 - DNA, 25 bp, Artificial
  Probe
agctaatgcttgttgagtacttgcc

SEQ ID NO: 278855 - DNA, 25 bp, Artificial
  Probe
acaagacaacttccaagggtctcgg

SEQ ID NO: 278856 - DNA, 25 bp, Artificial
  Probe
gagttggcttttgaccctagaggcg

SEQ ID NO: 278857 - DNA, 25 bp, Artificial
  Probe
gtctcggtctcagaccgggatgtga

SEQ ID NO: 278858 - DNA, 25 bp, Artificial
  Probe
cgagttgtcagaactagtgtgtcct

SEQ ID NO: 278859 - DNA, 25 bp, Artificial
  Probe
taacaagacaacttccaagggtctc

SEQ ID NO: 278860 - DNA, 25 bp, Artificial
  Probe
caagacaacttccaagggtctcggt

SEQ ID NO: 278861 - DNA, 25 bp, Artificial
  Probe
agtgtgtcctccagtcggtgccacc

SEQ ID NO: 278862 - DNA, 25 bp, Artificial
  Probe
gtaacaagacaacttccaagggtct

SEQ ID NO: 278863 - DNA, 25 bp, Artificial
  Probe
tcggtgccacccaaagctgcagaaa

SEQ ID NO: 278864 - DNA, 25 bp, Artificial
  Probe
cttccaagggtctcggtctcagacc

SEQ ID NO: 278865 - DNA, 25 bp, Artificial
  Probe
agctgcagaaagaccgaatgaaaag

SEQ ID NO: 278866 - DNA, 25 bp, Artificial
  Probe
caaagctgcagaaagaccgaatgaa

SEQ ID NO: 278867 - DNA, 25 bp, Artificial
  Probe
acagtatggtccacgggccccaggt

SEQ ID NO: 278868 - DNA, 25 bp, Artificial
  Probe
agctggcgagttgtcagaactagtg

SEQ ID NO: 278869 - DNA, 25 bp, Artificial
  Probe
agaaccaacatcctttgggcttagg

SEQ ID NO: 278870 - DNA, 25 bp, Artificial
  Probe
gccaggcacctgacggtgctaagaa

SEQ ID NO: 278871 - DNA, 25 bp, Artificial
  Probe
ggcttttgaccctagaggcgaggtt

SEQ ID NO: 278872 - DNA, 25 bp, Artificial
  Probe
aggcagctggcgagttgtcagaact

SEQ ID NO: 278873 - DNA, 25 bp, Artificial
  Probe
acctgacggtgctaagaatacggtt

SEQ ID NO: 278874 - DNA, 25 bp, Artificial
  Probe
agttggcttttgaccctagaggcga

SEQ ID NO: 278875 - DNA, 25 bp, Artificial
  Probe
gttctcaggattatggtccaaataa

SEQ ID NO: 278876 - DNA, 25 bp, Artificial
  Probe
tggtccaaataaacagtatggtcca

SEQ ID NO: 278877 - DNA, 25 bp, Artificial
  Probe
ggcacctgacggtgctaagaatacg

SEQ ID NO: 278878 - DNA, 25 bp, Artificial
  Probe
tggtaacaagacaacttccaagggt

SEQ ID NO: 278879 - DNA, 25 bp, Artificial
  Probe
caagggtctcggtctcagaccggga

SEQ ID NO: 278880 - DNA, 25 bp, Artificial
  Probe
ccctggaagcccacatggtaacaag

SEQ ID NO: 278881 - DNA, 25 bp, Artificial
  Probe
gccttggcctagaaccaacatcctt

SEQ ID NO: 278882 - DNA, 25 bp, Artificial
  Probe
ttttgaccctagaggcgaggttaag

SEQ ID NO: 278883 - DNA, 25 bp, Artificial
  Probe
gcttttgaccctagaggcgaggtta

SEQ ID NO: 278884 - DNA, 25 bp, Artificial
  Probe
taaacagtatggtccacgggcccca

SEQ ID NO: 278885 - DNA, 25 bp, Artificial
  Probe
tctcagaccgggatgtgaagcacaa

SEQ ID NO: 278886 - DNA, 25 bp, Artificial
  Probe
ttgttgagtacttgccccatgccag

SEQ ID NO: 278887 - DNA, 25 bp, Artificial
  Probe
aacagtatggtccacgggccccagg

SEQ ID NO: 278888 - DNA, 25 bp, Artificial
  Probe
atgccccctggaagcccacatggta

SEQ ID NO: 278889 - DNA, 25 bp, Artificial
  Probe
ctgttctcaggattatggtccaaat

SEQ ID NO: 278890 - DNA, 25 bp, Artificial
  Probe
aacaggaacttttcctgaagttgca

SEQ ID NO: 278891 - DNA, 25 bp, Artificial
  Probe
tcttcctggcgctatgccaccatat

SEQ ID NO: 278892 - DNA, 25 bp, Artificial
  Probe
aatgtcgcaaggtggccgttactga

SEQ ID NO: 278893 - DNA, 25 bp, Artificial
  Probe
ctccaatgccacctcatggtcagta

SEQ ID NO: 278894 - DNA, 25 bp, Artificial
  Probe
tggttatcttcctggcgctatgcca

SEQ ID NO: 278895 - DNA, 25 bp, Artificial
  Probe
aggaatgaggcctccaatgccacct

SEQ ID NO: 278896 - DNA, 25 bp, Artificial
  Probe
tgaggcctccaatgccacctcatgg

SEQ ID NO: 278897 - DNA, 25 bp, Artificial
  Probe
cagttggaccaatagggggcatgat

SEQ ID NO: 278898 - DNA, 25 bp, Artificial
  Probe
tggcgctatgccaccatatggacag

SEQ ID NO: 278899 - DNA, 25 bp, Artificial
  Probe
atgatgccaccacagccaggcatac

SEQ ID NO: 278900 - DNA, 25 bp, Artificial
  Probe
accatcaaggaatgcctggttatct

SEQ ID NO: 278901 - DNA, 25 bp, Artificial
  Probe
taccaggaactattggacatttatt

SEQ ID NO: 278902 - DNA, 25 bp, Artificial
  Probe
caccatatggacagggaccaccaat

SEQ ID NO: 278903 - DNA, 25 bp, Artificial
  Probe
acagccaggcataccacagcagcaa

SEQ ID NO: 278904 - DNA, 25 bp, Artificial
  Probe
aatgggaatgagacctcctgtaatg

SEQ ID NO: 278905 - DNA, 25 bp, Artificial
  Probe
ttcctcgaccaggacaaactccgat

SEQ ID NO: 278906 - DNA, 25 bp, Artificial
  Probe
aggcttcattgtgactttaacaaac

SEQ ID NO: 278907 - DNA, 25 bp, Artificial
  Probe
atgccacctcatggtcagtatggtg

SEQ ID NO: 278908 - DNA, 25 bp, Artificial
  Probe
caaggaatgcctggttatcttcctg

SEQ ID NO: 278909 - DNA, 25 bp, Artificial
  Probe
cctcctgtaatgtcgcaaggtggcc

SEQ ID NO: 278910 - DNA, 25 bp, Artificial
  Probe
cttgtgctgtttatgtagacaagct

SEQ ID NO: 278911 - DNA, 25 bp, Artificial
  Probe
gcacagttacctaaatatcagcgaa

SEQ ID NO: 278912 - DNA, 25 bp, Artificial
  Probe
gcaaggtggccgttactgatcttac

SEQ ID NO: 278913 - DNA, 25 bp, Artificial
  Probe
cacagcagcaaggaatgaggcctcc

SEQ ID NO: 278914 - DNA, 25 bp, Artificial
  Probe
ggagattaaaccttttctcaacttg

SEQ ID NO: 278915 - DNA, 25 bp, Artificial
  Probe
gggcatgatgccaccacagccaggc

SEQ ID NO: 278916 - DNA, 25 bp, Artificial
  Probe
aatgcctggttatcttcctggcgct

SEQ ID NO: 278917 - DNA, 25 bp, Artificial
  Probe
ctgatcttacttcaagtctaatagg

SEQ ID NO: 278918 - DNA, 25 bp, Artificial
  Probe
cgtctataaggcttcattgtgactt

SEQ ID NO: 278919 - DNA, 25 bp, Artificial
  Probe
cttccgtctataaggcttcattgtg

SEQ ID NO: 278920 - DNA, 25 bp, Artificial
  Probe
atatggacagggaccaccaatggtg

SEQ ID NO: 278921 - DNA, 25 bp, Artificial
  Probe
ggacagggaccaccaatggtgcccc

SEQ ID NO: 278922 - DNA, 25 bp, Artificial
  Probe
tttatgtagacaagcttccgtctat

SEQ ID NO: 278923 - DNA, 25 bp, Artificial
  Probe
gaaatcttcctcgaccaggacaaac

SEQ ID NO: 278924 - DNA, 25 bp, Artificial
  Probe
ctcctcgacctccaatgggaatgag

SEQ ID NO: 278925 - DNA, 25 bp, Artificial
  Probe
tgtagacaagcttccgtctataagg

SEQ ID NO: 278926 - DNA, 25 bp, Artificial
  Probe
cctcgacctccaatgggaatgagac

SEQ ID NO: 278927 - DNA, 25 bp, Artificial
  Probe
tcaaggaatgcctggttatcttcct

SEQ ID NO: 278928 - DNA, 25 bp, Artificial
  Probe
ttctcaacttgtgctgtttatgtag

SEQ ID NO: 278929 - DNA, 25 bp, Artificial
  Probe
ttcctggcgctatgccaccatatgg

SEQ ID NO: 278930 - DNA, 25 bp, Artificial
  Probe
accaggacaaactccgattggtaat

SEQ ID NO: 278931 - DNA, 25 bp, Artificial
  Probe
cttcccacataccaggaactattgg

SEQ ID NO: 278932 - DNA, 25 bp, Artificial
  Probe
gccgttactgatcttacttcaagtc

SEQ ID NO: 278933 - DNA, 25 bp, Artificial
  Probe
cttacttcaagtctaataggtttgg

SEQ ID NO: 278934 - DNA, 25 bp, Artificial
  Probe
gacaagcttccgtctataaggcttc

SEQ ID NO: 278935 - DNA, 25 bp, Artificial
  Probe
tatcagcgaaatcttcctcgaccag

SEQ ID NO: 278936 - DNA, 25 bp, Artificial
  Probe
caggtgcagcagcttcaggtgtttg

SEQ ID NO: 278937 - DNA, 25 bp, Artificial
  Probe
agcaggtgcagcagcttcaggtgtt

SEQ ID NO: 278938 - DNA, 25 bp, Artificial
  Probe
tcctctgggaactcaaaaacccacg

SEQ ID NO: 278939 - DNA, 25 bp, Artificial
  Probe
tcaaaaacccacgtcaggaccacag

SEQ ID NO: 278940 - DNA, 25 bp, Artificial
  Probe
aggcccagcagaagagcctccttca

SEQ ID NO: 278941 - DNA, 25 bp, Artificial
  Probe
cagtgtacagtgaacctggtaggcg

SEQ ID NO: 278942 - DNA, 25 bp, Artificial
  Probe
cctgaaccagcctggtcctctggga

SEQ ID NO: 278943 - DNA, 25 bp, Artificial
  Probe
agcagcttcaggtgtttgctgacgt

SEQ ID NO: 278944 - DNA, 25 bp, Artificial
  Probe
gcagctactgactgaataaccactt

SEQ ID NO: 278945 - DNA, 25 bp, Artificial
  Probe
ccattcttcaggtcgtagcatttgg

SEQ ID NO: 278946 - DNA, 25 bp, Artificial
  Probe
ggggacccttacctgaaccagcctg

SEQ ID NO: 278947 - DNA, 25 bp, Artificial
  Probe
atgatccagcactgagacacacagg

SEQ ID NO: 278948 - DNA, 25 bp, Artificial
  Probe
tcagcagctactgactgaataacca

SEQ ID NO: 278949 - DNA, 25 bp, Artificial
  Probe
actgaccttctcaaaaccgaagcag

SEQ ID NO: 278950 - DNA, 25 bp, Artificial
  Probe
atccagcactgagacacacaggcct

SEQ ID NO: 278951 - DNA, 25 bp, Artificial
  Probe
cagcactgagacacacaggcctcta

SEQ ID NO: 278952 - DNA, 25 bp, Artificial
  Probe
ggaaaccagcaggtgcagcagcttc

SEQ ID NO: 278953 - DNA, 25 bp, Artificial
  Probe
agcctggtcctctgggaactcaaaa

SEQ ID NO: 278954 - DNA, 25 bp, Artificial
  Probe
gagcctccttcagcagctactgact

SEQ ID NO: 278955 - DNA, 25 bp, Artificial
  Probe
caatctgcagccattcttcaggtcg

SEQ ID NO: 278956 - DNA, 25 bp, Artificial
  Probe
ttctcaaaaccgaagcagatggaaa

SEQ ID NO: 278957 - DNA, 25 bp, Artificial
  Probe
ctgggaactcaaaaacccacgtcag

SEQ ID NO: 278958 - DNA, 25 bp, Artificial
  Probe
actgagacacacaggcctctactgc

SEQ ID NO: 278959 - DNA, 25 bp, Artificial
  Probe
tcaaaaccgaagcagatggaaacca

SEQ ID NO: 278960 - DNA, 25 bp, Artificial
  Probe
gtccagtgtacagtgaacctggtag

SEQ ID NO: 278961 - DNA, 25 bp, Artificial
  Probe
ctgactgaataaccacttttaaagg

SEQ ID NO: 278962 - DNA, 25 bp, Artificial
  Probe
tctgggaactcaaaaacccacgtca

SEQ ID NO: 278963 - DNA, 25 bp, Artificial
  Probe
atctgcagccattcttcaggtcgta

SEQ ID NO: 278964 - DNA, 25 bp, Artificial
  Probe
ctgaccttctcaaaaccgaagcaga

SEQ ID NO: 278965 - DNA, 25 bp, Artificial
  Probe
agcagaagagcctccttcagcagct

SEQ ID NO: 278966 - DNA, 25 bp, Artificial
  Probe
tgactgaataaccacttttaaagga

SEQ ID NO: 278967 - DNA, 25 bp, Artificial
  Probe
ggacccttacctgaaccagcctggt

SEQ ID NO: 278968 - DNA, 25 bp, Artificial
  Probe
gatgaatgatccagcactgagacac

SEQ ID NO: 278969 - DNA, 25 bp, Artificial
  Probe
tgtttgctgacgtccagtgtacagt

SEQ ID NO: 278970 - DNA, 25 bp, Artificial
  Probe
ttcaggtcgtagcatttggagcaaa

SEQ ID NO: 278971 - DNA, 25 bp, Artificial
  Probe
tgggaactcaaaaacccacgtcagg

SEQ ID NO: 278972 - DNA, 25 bp, Artificial
  Probe
gatttttgatatctcaatctgcagc

SEQ ID NO: 278973 - DNA, 25 bp, Artificial
  Probe
ctgaataaccacttttaaaggaatg

SEQ ID NO: 278974 - DNA, 25 bp, Artificial
  Probe
gaccttctcaaaaccgaagcagatg

SEQ ID NO: 278975 - DNA, 25 bp, Artificial
  Probe
gctgacgtccagtgtacagtgaacc

SEQ ID NO: 278976 - DNA, 25 bp, Artificial
  Probe
tgaaccagcctggtcctctgggaac

SEQ ID NO: 278977 - DNA, 25 bp, Artificial
  Probe
cctccttcagcagctactgactgaa

SEQ ID NO: 278978 - DNA, 25 bp, Artificial
  Probe
gaatgatccagcactgagacacaca

SEQ ID NO: 278979 - DNA, 25 bp, Artificial
  Probe
aaaccagcaggtgcagcagcttcag

SEQ ID NO: 278980 - DNA, 25 bp, Artificial
  Probe
ctccttcagcagctactgactgaat

SEQ ID NO: 278981 - DNA, 25 bp, Artificial
  Probe
ggcccagcagaagagcctccttcag

SEQ ID NO: 278982 - DNA, 25 bp, Artificial
  Probe
cgttaccctcagagagtccatgtcc

SEQ ID NO: 278983 - DNA, 25 bp, Artificial
  Probe
acttcaatcgccttggctaggtttc

SEQ ID NO: 278984 - DNA, 25 bp, Artificial
  Probe
aagtgaaacactgtgtacttgcttt

SEQ ID NO: 278985 - DNA, 25 bp, Artificial
  Probe
acttcaatgggctgagcatgaatgc

SEQ ID NO: 278986 - DNA, 25 bp, Artificial
  Probe
gaaacactgtgtacttgcttttctc

SEQ ID NO: 278987 - DNA, 25 bp, Artificial
  Probe
cttcaatcgccttggctaggtttcc

SEQ ID NO: 278988 - DNA, 25 bp, Artificial
  Probe
tgatgacttcaatgggctgagcatg

SEQ ID NO: 278989 - DNA, 25 bp, Artificial
  Probe
agcatgaatgccagagtggagcatc

SEQ ID NO: 278990 - DNA, 25 bp, Artificial
  Probe
actaaacactttaggcaaagtcaga

SEQ ID NO: 278991 - DNA, 25 bp, Artificial
  Probe
aatcgccttggctaggtttccaagt

SEQ ID NO: 278992 - DNA, 25 bp, Artificial
  Probe
ttataacttcaatcgccttggctag

SEQ ID NO: 278993 - DNA, 25 bp, Artificial
  Probe
aaaggcctgttctgctcttatttaa

SEQ ID NO: 278994 - DNA, 25 bp, Artificial
  Probe
ttcatgtgtgatgacttcaatgggc

SEQ ID NO: 278995 - DNA, 25 bp, Artificial
  Probe
gagtgacaacccaagaatggtactg

SEQ ID NO: 278996 - DNA, 25 bp, Artificial
  Probe
ttaccctcagagagtccatgtccct

SEQ ID NO: 278997 - DNA, 25 bp, Artificial
  Probe
tgccagagtggagcatcgttaccct

SEQ ID NO: 278998 - DNA, 25 bp, Artificial
  Probe
taaaggcctgttctgctcttattta

SEQ ID NO: 278999 - DNA, 25 bp, Artificial
  Probe
gtcttggtgtcaatctttttcactg

SEQ ID NO: 279000 - DNA, 25 bp, Artificial
  Probe
gagtggagcatcgttaccctcagag

SEQ ID NO: 279001 - DNA, 25 bp, Artificial
  Probe
ggctaggtttccaagtcactgattt

SEQ ID NO: 279002 - DNA, 25 bp, Artificial
  Probe
aacactttaggcaaagtcagaagga

SEQ ID NO: 279003 - DNA, 25 bp, Artificial
  Probe
gatttctgctgaagattttactaca

SEQ ID NO: 279004 - DNA, 25 bp, Artificial
  Probe
actgtgtacttgcttttctccaaag

SEQ ID NO: 279005 - DNA, 25 bp, Artificial
  Probe
tgtgatgacttcaatgggctgagca

SEQ ID NO: 279006 - DNA, 25 bp, Artificial
  Probe
agctgagtgacaacccaagaatggt

SEQ ID NO: 279007 - DNA, 25 bp, Artificial
  Probe
gacttactaaacactttaggcaaag

SEQ ID NO: 279008 - DNA, 25 bp, Artificial
  Probe
agagctgagtgacaacccaagaatg

SEQ ID NO: 279009 - DNA, 25 bp, Artificial
  Probe
catcagagctgagtgacaacccaag

SEQ ID NO: 279010 - DNA, 25 bp, Artificial
  Probe
tactaaacactttaggcaaagtcag

SEQ ID NO: 279011 - DNA, 25 bp, Artificial
  Probe
tggagcatcgttaccctcagagagt

SEQ ID NO: 279012 - DNA, 25 bp, Artificial
  Probe
catgtgtgatgacttcaatgggctg

SEQ ID NO: 279013 - DNA, 25 bp, Artificial
  Probe
acccaagaatggtactggtttcatg

SEQ ID NO: 279014 - DNA, 25 bp, Artificial
  Probe
ttctgctgaagattttactacattg

SEQ ID NO: 279015 - DNA, 25 bp, Artificial
  Probe
aagtcagaaggatctgcagcaaaat

SEQ ID NO: 279016 - DNA, 25 bp, Artificial
  Probe
ctggtttcatgtgtgatgacttcaa

SEQ ID NO: 279017 - DNA, 25 bp, Artificial
  Probe
caacccaagaatggtactggtttca

SEQ ID NO: 279018 - DNA, 25 bp, Artificial
  Probe
cttggctaggtttccaagtcactga

SEQ ID NO: 279019 - DNA, 25 bp, Artificial
  Probe
tactggtttcatgtgtgatgacttc

SEQ ID NO: 279020 - DNA, 25 bp, Artificial
  Probe
taatcatcagagctgagtgacaacc

SEQ ID NO: 279021 - DNA, 25 bp, Artificial
  Probe
gtgtacttgcttttctccaaagtaa

SEQ ID NO: 279022 - DNA, 25 bp, Artificial
  Probe
tgcttttctccaaagtaaaattagg

SEQ ID NO: 279023 - DNA, 25 bp, Artificial
  Probe
aaagtcagaaggatctgcagcaaaa

SEQ ID NO: 279024 - DNA, 25 bp, Artificial
  Probe
atttaatcatcagagctgagtgaca

SEQ ID NO: 279025 - DNA, 25 bp, Artificial
  Probe
caatgggctgagcatgaatgccaga

SEQ ID NO: 279026 - DNA, 25 bp, Artificial
  Probe
ctttaggcaaagtcagaaggatctg

SEQ ID NO: 279027 - DNA, 25 bp, Artificial
  Probe
tttgagacttactaaacactttagg

SEQ ID NO: 279028 - DNA, 25 bp, Artificial
  Probe
taattgtggcaagtgaggcctgtgc

SEQ ID NO: 279029 - DNA, 25 bp, Artificial
  Probe
ctgtgacacgtgtgaggagcccgat

SEQ ID NO: 279030 - DNA, 25 bp, Artificial
  Probe
cccccattcgatgaacgcaagtgtc

SEQ ID NO: 279031 - DNA, 25 bp, Artificial
  Probe
gtacagagcgcatgcgtgtgccctt

SEQ ID NO: 279032 - DNA, 25 bp, Artificial
  Probe
aattgtggcaagtgaggcctgtgca

SEQ ID NO: 279033 - DNA, 25 bp, Artificial
  Probe
agagcgcatgcgtgtgcccttgctc

SEQ ID NO: 279034 - DNA, 25 bp, Artificial
  Probe
agtcatctgtgcagggtcaccgaga

SEQ ID NO: 279035 - DNA, 25 bp, Artificial
  Probe
gatgaacgcaagtgtctggctgaag

SEQ ID NO: 279036 - DNA, 25 bp, Artificial
  Probe
aaattccaggcacctgctgtgacac

SEQ ID NO: 279037 - DNA, 25 bp, Artificial
  Probe
ttccaggcacctgctgtgacacgtg

SEQ ID NO: 279038 - DNA, 25 bp, Artificial
  Probe
tgacacgtgtgaggagcccgattgc

SEQ ID NO: 279039 - DNA, 25 bp, Artificial
  Probe
tgcaaagacatcacagccaaggtgc

SEQ ID NO: 279040 - DNA, 25 bp, Artificial
  Probe
gacatcacagccaaggtgcagtata

SEQ ID NO: 279041 - DNA, 25 bp, Artificial
  Probe
tgctcctgctgctggccctcaagta

SEQ ID NO: 279042 - DNA, 25 bp, Artificial
  Probe
agcgcatgcgtgtgcccttgctctg

SEQ ID NO: 279043 - DNA, 25 bp, Artificial
  Probe
gtgtctggctgaaggaggcaaaatc

SEQ ID NO: 279044 - DNA, 25 bp, Artificial
  Probe
cccattcgatgaacgcaagtgtctg

SEQ ID NO: 279045 - DNA, 25 bp, Artificial
  Probe
ctgctgtgacacgtgtgaggagccc

SEQ ID NO: 279046 - DNA, 25 bp, Artificial
  Probe
caagtgtctggctgaaggaggcaaa

SEQ ID NO: 279047 - DNA, 25 bp, Artificial
  Probe
cgtgaaaattccaggcacctgctgt

SEQ ID NO: 279048 - DNA, 25 bp, Artificial
  Probe
atcgtgaaaattccaggcacctgct

SEQ ID NO: 279049 - DNA, 25 bp, Artificial
  Probe
aggatggctgtgacagtcatctgtg

SEQ ID NO: 279050 - DNA, 25 bp, Artificial
  Probe
gaagtggacattcactattgccagg

SEQ ID NO: 279051 - DNA, 25 bp, Artificial
  Probe
gtctggctgaaggaggcaaaatcgt

SEQ ID NO: 279052 - DNA, 25 bp, Artificial
  Probe
ttcgatgaacgcaagtgtctggctg

SEQ ID NO: 279053 - DNA, 25 bp, Artificial
  Probe
gacattcactattgccagggaaagt

SEQ ID NO: 279054 - DNA, 25 bp, Artificial
  Probe
gaacagtgctcctgctgctggccct

SEQ ID NO: 279055 - DNA, 25 bp, Artificial
  Probe
tggctgtgacagtcatctgtgcagg

SEQ ID NO: 279056 - DNA, 25 bp, Artificial
  Probe
caagtgaggcctgtgcagccacggc

SEQ ID NO: 279057 - DNA, 25 bp, Artificial
  Probe
cctcaagtacagagcgcatgcgtgt

SEQ ID NO: 279058 - DNA, 25 bp, Artificial
  Probe
acacgtgtgaggagcccgattgcaa

SEQ ID NO: 279059 - DNA, 25 bp, Artificial
  Probe
agtgctcctgctgctggccctcaag

SEQ ID NO: 279060 - DNA, 25 bp, Artificial
  Probe
gtgcccttgctctgcaccaatggct

SEQ ID NO: 279061 - DNA, 25 bp, Artificial
  Probe
tgtgacacgtgtgaggagcccgatt

SEQ ID NO: 279062 - DNA, 25 bp, Artificial
  Probe
aggcacctgctgtgacacgtgtgag

SEQ ID NO: 279063 - DNA, 25 bp, Artificial
  Probe
tgctgctggccctcaagtacagagc

SEQ ID NO: 279064 - DNA, 25 bp, Artificial
  Probe
gctgtgacagtcatctgtgcagggt

SEQ ID NO: 279065 - DNA, 25 bp, Artificial
  Probe
gctgtgtactccattgacatcgagg

SEQ ID NO: 279066 - DNA, 25 bp, Artificial
  Probe
gtgaggagcccgattgcaaagacat

SEQ ID NO: 279067 - DNA, 25 bp, Artificial
  Probe
atgcgtgtgcccttgctctgcacca

SEQ ID NO: 279068 - DNA, 25 bp, Artificial
  Probe
aattccaggcacctgctgtgacacg

SEQ ID NO: 279069 - DNA, 25 bp, Artificial
  Probe
acagccaaggtgcagtatatcaaag

SEQ ID NO: 279070 - DNA, 25 bp, Artificial
  Probe
aagtgaggcctgtgcagccacggca

SEQ ID NO: 279071 - DNA, 25 bp, Artificial
  Probe
tgaacgcaagtgtctggctgaagga

SEQ ID NO: 279072 - DNA, 25 bp, Artificial
  Probe
tgaggcctgtgcagccacggcagac

SEQ ID NO: 279073 - DNA, 25 bp, Artificial
  Probe
agtacagagcgcatgcgtgtgccct

SEQ ID NO: 279074 - DNA, 25 bp, Artificial
  Probe
cagttgtaatcgtggcactgttcat

SEQ ID NO: 279075 - DNA, 25 bp, Artificial
  Probe
actgatacgcttgctagagagttca

SEQ ID NO: 279076 - DNA, 25 bp, Artificial
  Probe
cctactaaacagttgtaatcgtggc

SEQ ID NO: 279077 - DNA, 25 bp, Artificial
  Probe
gagagttcagctagtcggaacgcca

SEQ ID NO: 279078 - DNA, 25 bp, Artificial
  Probe
aatcgtggcactgttcatagagggt

SEQ ID NO: 279079 - DNA, 25 bp, Artificial
  Probe
cagctagtcggaacgccagggaaag

SEQ ID NO: 279080 - DNA, 25 bp, Artificial
  Probe
acatagcgttattaatcaggaatac

SEQ ID NO: 279081 - DNA, 25 bp, Artificial
  Probe
agtttgctgcaaagttcccactgtc

SEQ ID NO: 279082 - DNA, 25 bp, Artificial
  Probe
ttgaaaagccgacatagcgttatta

SEQ ID NO: 279083 - DNA, 25 bp, Artificial
  Probe
tgtaatcgtggcactgttcatagag

SEQ ID NO: 279084 - DNA, 25 bp, Artificial
  Probe
tgaaaagccgacatagcgttattaa

SEQ ID NO: 279085 - DNA, 25 bp, Artificial
  Probe
taaacagttgtaatcgtggcactgt

SEQ ID NO: 279086 - DNA, 25 bp, Artificial
  Probe
atacgcttgctagagagttcagcta

SEQ ID NO: 279087 - DNA, 25 bp, Artificial
  Probe
tcaaatacagtttgctgcaaagttc

SEQ ID NO: 279088 - DNA, 25 bp, Artificial
  Probe
actaaacagttgtaatcgtggcact

SEQ ID NO: 279089 - DNA, 25 bp, Artificial
  Probe
tcgtggcactgttcatagagggtta

SEQ ID NO: 279090 - DNA, 25 bp, Artificial
  Probe
ttgctagagagttcagctagtcgga

SEQ ID NO: 279091 - DNA, 25 bp, Artificial
  Probe
cgcttgctagagagttcagctagtc

SEQ ID NO: 279092 - DNA, 25 bp, Artificial
  Probe
agagagttcagctagtcggaacgcc

SEQ ID NO: 279093 - DNA, 25 bp, Artificial
  Probe
ttttttaactgatacgcttgctaga

SEQ ID NO: 279094 - DNA, 25 bp, Artificial
  Probe
gcttgctagagagttcagctagtcg

SEQ ID NO: 279095 - DNA, 25 bp, Artificial
  Probe
tttgaaaagccgacatagcgttatt

SEQ ID NO: 279096 - DNA, 25 bp, Artificial
  Probe
ctactaaacagttgtaatcgtggca

SEQ ID NO: 279097 - DNA, 25 bp, Artificial
  Probe
aactcaaatacagtttgctgcaaag

SEQ ID NO: 279098 - DNA, 25 bp, Artificial
  Probe
cgtggcactgttcatagagggttag

SEQ ID NO: 279099 - DNA, 25 bp, Artificial
  Probe
taatcgtggcactgttcatagaggg

SEQ ID NO: 279100 - DNA, 25 bp, Artificial
  Probe
taactgatacgcttgctagagagtt

SEQ ID NO: 279101 - DNA, 25 bp, Artificial
  Probe
tgatacgcttgctagagagttcagc

SEQ ID NO: 279102 - DNA, 25 bp, Artificial
  Probe
gtttgctgcaaagttcccactgtcc

SEQ ID NO: 279103 - DNA, 25 bp, Artificial
  Probe
acgcttgctagagagttcagctagt

SEQ ID NO: 279104 - DNA, 25 bp, Artificial
  Probe
tcagctagtcggaacgccagggaaa

SEQ ID NO: 279105 - DNA, 25 bp, Artificial
  Probe
acctactaaacagttgtaatcgtgg

SEQ ID NO: 279106 - DNA, 25 bp, Artificial
  Probe
acagtttgctgcaaagttcccactg

SEQ ID NO: 279107 - DNA, 25 bp, Artificial
  Probe
aacctactaaacagttgtaatcgtg

SEQ ID NO: 279108 - DNA, 25 bp, Artificial
  Probe
gatacgcttgctagagagttcagct

SEQ ID NO: 279109 - DNA, 25 bp, Artificial
  Probe
tttttaactgatacgcttgctagag

SEQ ID NO: 279110 - DNA, 25 bp, Artificial
  Probe
tagagagttcagctagtcggaacgc

SEQ ID NO: 279111 - DNA, 25 bp, Artificial
  Probe
cttgctagagagttcagctagtcgg

SEQ ID NO: 279112 - DNA, 25 bp, Artificial
  Probe
gagttcagctagtcggaacgccagg

SEQ ID NO: 279113 - DNA, 25 bp, Artificial
  Probe
atcgtggcactgttcatagagggtt

SEQ ID NO: 279114 - DNA, 25 bp, Artificial
  Probe
acagttgtaatcgtggcactgttca

SEQ ID NO: 279115 - DNA, 25 bp, Artificial
  Probe
ctagagagttcagctagtcggaacg

SEQ ID NO: 279116 - DNA, 25 bp, Artificial
  Probe
tactaaacagttgtaatcgtggcac

SEQ ID NO: 279117 - DNA, 25 bp, Artificial
  Probe
tacagtttgctgcaaagttcccact

SEQ ID NO: 279118 - DNA, 25 bp, Artificial
  Probe
tacgcttgctagagagttcagctag

SEQ ID NO: 279119 - DNA, 25 bp, Artificial
  Probe
tttgctgcaaagttcccactgtccc

SEQ ID NO: 279120 - DNA, 25 bp, Artificial
  Probe
ttgaacctgaagtggggcagaaggg

SEQ ID NO: 279121 - DNA, 25 bp, Artificial
  Probe
ggattgaacctgaagtggggcagaa

SEQ ID NO: 279122 - DNA, 25 bp, Artificial
  Probe
actggtcacgaagtattcagcaaga

SEQ ID NO: 279123 - DNA, 25 bp, Artificial
  Probe
tattcagcaagattccaggattgaa

SEQ ID NO: 279124 - DNA, 25 bp, Artificial
  Probe
aactggtcacgaagtattcagcaag

SEQ ID NO: 279125 - DNA, 25 bp, Artificial
  Probe
tgaagtggggcagaaggggaggagg

SEQ ID NO: 279126 - DNA, 25 bp, Artificial
  Probe
attccaggattgaacctgaagtggg

SEQ ID NO: 279127 - DNA, 25 bp, Artificial
  Probe
gattccaggattgaacctgaagtgg

SEQ ID NO: 279128 - DNA, 25 bp, Artificial
  Probe
tccaggattgaacctgaagtggggc

SEQ ID NO: 279129 - DNA, 25 bp, Artificial
  Probe
cctgtgttgtttctaggaaatgatt

SEQ ID NO: 279130 - DNA, 25 bp, Artificial
  Probe
tcagcaagattccaggattgaacct

SEQ ID NO: 279131 - DNA, 25 bp, Artificial
  Probe
caagattccaggattgaacctgaag

SEQ ID NO: 279132 - DNA, 25 bp, Artificial
  Probe
gaaaaactggtcacgaagtattcag

SEQ ID NO: 279133 - DNA, 25 bp, Artificial
  Probe
ccctgtgttgtttctaggaaatgat

SEQ ID NO: 279134 - DNA, 25 bp, Artificial
  Probe
agcaagattccaggattgaacctga

SEQ ID NO: 279135 - DNA, 25 bp, Artificial
  Probe
tccctgtgttgtttctaggaaatga

SEQ ID NO: 279136 - DNA, 25 bp, Artificial
  Probe
agattccaggattgaacctgaagtg

SEQ ID NO: 279137 - DNA, 25 bp, Artificial
  Probe
cctgaagtggggcagaaggggagga

SEQ ID NO: 279138 - DNA, 25 bp, Artificial
  Probe
tgccaaggtctcccatccctgtgtt

SEQ ID NO: 279139 - DNA, 25 bp, Artificial
  Probe
attcagcaagattccaggattgaac

SEQ ID NO: 279140 - DNA, 25 bp, Artificial
  Probe
agtattcagcaagattccaggattg

SEQ ID NO: 279141 - DNA, 25 bp, Artificial
  Probe
aaggtctcccatccctgtgttgttt

SEQ ID NO: 279142 - DNA, 25 bp, Artificial
  Probe
ctcccatccctgtgttgtttctagg

SEQ ID NO: 279143 - DNA, 25 bp, Artificial
  Probe
aagattccaggattgaacctgaagt

SEQ ID NO: 279144 - DNA, 25 bp, Artificial
  Probe
ctggtcacgaagtattcagcaagat

SEQ ID NO: 279145 - DNA, 25 bp, Artificial
  Probe
ttccaggattgaacctgaagtgggg

SEQ ID NO: 279146 - DNA, 25 bp, Artificial
  Probe
gtcacgaagtattcagcaagattcc

SEQ ID NO: 279147 - DNA, 25 bp, Artificial
  Probe
aaaactggtcacgaagtattcagca

SEQ ID NO: 279148 - DNA, 25 bp, Artificial
  Probe
caggattgaacctgaagtggggcag

SEQ ID NO: 279149 - DNA, 25 bp, Artificial
  Probe
tggggcagaaggggaggaggtaggg

SEQ ID NO: 279150 - DNA, 25 bp, Artificial
  Probe
aggttgccaaggtctcccatccctg

SEQ ID NO: 279151 - DNA, 25 bp, Artificial
  Probe
catccctgtgttgtttctaggaaat

SEQ ID NO: 279152 - DNA, 25 bp, Artificial
  Probe
cccatccctgtgttgtttctaggaa

SEQ ID NO: 279153 - DNA, 25 bp, Artificial
  Probe
ttcagcaagattccaggattgaacc

SEQ ID NO: 279154 - DNA, 25 bp, Artificial
  Probe
aagtattcagcaagattccaggatt

SEQ ID NO: 279155 - DNA, 25 bp, Artificial
  Probe
ccatccctgtgttgtttctaggaaa

SEQ ID NO: 279156 - DNA, 25 bp, Artificial
  Probe
ggtctcccatccctgtgttgtttct

SEQ ID NO: 279157 - DNA, 25 bp, Artificial
  Probe
atccctgtgttgtttctaggaaatg

SEQ ID NO: 279158 - DNA, 25 bp, Artificial
  Probe
gaacctgaagtggggcagaagggga

SEQ ID NO: 279159 - DNA, 25 bp, Artificial
  Probe
aaactggtcacgaagtattcagcaa

SEQ ID NO: 279160 - DNA, 25 bp, Artificial
  Probe
gtattcagcaagattccaggattga

SEQ ID NO: 279161 - DNA, 25 bp, Artificial
  Probe
cagcaagattccaggattgaacctg

SEQ ID NO: 279162 - DNA, 25 bp, Artificial
  Probe
agaaaaactggtcacgaagtattca

SEQ ID NO: 279163 - DNA, 25 bp, Artificial
  Probe
tggtcacgaagtattcagcaagatt

SEQ ID NO: 279164 - DNA, 25 bp, Artificial
  Probe
ttgccaaggtctcccatccctgtgt

SEQ ID NO: 279165 - DNA, 25 bp, Artificial
  Probe
gccaaggtctcccatccctgtgttg

SEQ ID NO: 279166 - DNA, 25 bp, Artificial
  Probe
ccatgaatcgctccatggtggaaga

SEQ ID NO: 279167 - DNA, 25 bp, Artificial
  Probe
gccatgaatcgctccatggtggaag

SEQ ID NO: 279168 - DNA, 25 bp, Artificial
  Probe
agcttcgatgcgaccgggaattcct

SEQ ID NO: 279169 - DNA, 25 bp, Artificial
  Probe
gctcccgctctggttcccgtagtgg

SEQ ID NO: 279170 - DNA, 25 bp, Artificial
  Probe
gcttcctggagttccagttcctcac

SEQ ID NO: 279171 - DNA, 25 bp, Artificial
  Probe
tggaagacatcactgggctgcgcct

SEQ ID NO: 279172 - DNA, 25 bp, Artificial
  Probe
ggtatagccgtagaaccctctgtgc

SEQ ID NO: 279173 - DNA, 25 bp, Artificial
  Probe
ctccatggtggaagacatcactggg

SEQ ID NO: 279174 - DNA, 25 bp, Artificial
  Probe
cgctccatggtggaagacatcactg

SEQ ID NO: 279175 - DNA, 25 bp, Artificial
  Probe
agttgccatgccttagaatcatttg

SEQ ID NO: 279176 - DNA, 25 bp, Artificial
  Probe
aggtatagccgtagaaccctctgtg

SEQ ID NO: 279177 - DNA, 25 bp, Artificial
  Probe
acatcactgggctgcgccttctgga

SEQ ID NO: 279178 - DNA, 25 bp, Artificial
  Probe
aggaagcttcgatgcgaccgggaat

SEQ ID NO: 279179 - DNA, 25 bp, Artificial
  Probe
ggccagcgcttcctggagttccagt

SEQ ID NO: 279180 - DNA, 25 bp, Artificial
  Probe
tggagttccagttcctcaccggagg

SEQ ID NO: 279181 - DNA, 25 bp, Artificial
  Probe
aatcgctccatggtggaagacatca

SEQ ID NO: 279182 - DNA, 25 bp, Artificial
  Probe
tcctcgaagggtttgcctagccctt

SEQ ID NO: 279183 - DNA, 25 bp, Artificial
  Probe
tcatttagcagtagctccattgggt

SEQ ID NO: 279184 - DNA, 25 bp, Artificial
  Probe
tgcctgaggtatagccgtagaaccc

SEQ ID NO: 279185 - DNA, 25 bp, Artificial
  Probe
gatgcgaccgggaattcctcctact

SEQ ID NO: 279186 - DNA, 25 bp, Artificial
  Probe
tcccgctctggttcccgtagtgggt

SEQ ID NO: 279187 - DNA, 25 bp, Artificial
  Probe
gttccagttcctcaccggaggcctt

SEQ ID NO: 279188 - DNA, 25 bp, Artificial
  Probe
ttcatttagcagtagctccattggg

SEQ ID NO: 279189 - DNA, 25 bp, Artificial
  Probe
tattcatttagcagtagctccattg

SEQ ID NO: 279190 - DNA, 25 bp, Artificial
  Probe
tgaatcgctccatggtggaagacat

SEQ ID NO: 279191 - DNA, 25 bp, Artificial
  Probe
ggaagacatcactgggctgcgcctt

SEQ ID NO: 279192 - DNA, 25 bp, Artificial
  Probe
gggctgcgccttctggaagccgcct

SEQ ID NO: 279193 - DNA, 25 bp, Artificial
  Probe
acgaggcaggccagcgcttcctgga

SEQ ID NO: 279194 - DNA, 25 bp, Artificial
  Probe
atcgctccatggtggaagacatcac

SEQ ID NO: 279195 - DNA, 25 bp, Artificial
  Probe
gccgtagaaccctctgtgcttaaaa

SEQ ID NO: 279196 - DNA, 25 bp, Artificial
  Probe
tcccgtagtgggtctcgaagaggaa

SEQ ID NO: 279197 - DNA, 25 bp, Artificial
  Probe
aaagtaaatggctgccctacgaggc

SEQ ID NO: 279198 - DNA, 25 bp, Artificial
  Probe
tggttcccgtagtgggtctcgaaga

SEQ ID NO: 279199 - DNA, 25 bp, Artificial
  Probe
cgcttcctggagttccagttcctca

SEQ ID NO: 279200 - DNA, 25 bp, Artificial
  Probe
tagtgggtctcgaagaggaagcttc

SEQ ID NO: 279201 - DNA, 25 bp, Artificial
  Probe
tatagccgtagaaccctctgtgctt

SEQ ID NO: 279202 - DNA, 25 bp, Artificial
  Probe
gttcctcaccggaggccttgttgac

SEQ ID NO: 279203 - DNA, 25 bp, Artificial
  Probe
aagtagttgccatgccttagaatca

SEQ ID NO: 279204 - DNA, 25 bp, Artificial
  Probe
gaagtagttgccatgccttagaatc

SEQ ID NO: 279205 - DNA, 25 bp, Artificial
  Probe
gcaggccagcgcttcctggagttcc

SEQ ID NO: 279206 - DNA, 25 bp, Artificial
  Probe
gtcctcgaagggtttgcctagccct

SEQ ID NO: 279207 - DNA, 25 bp, Artificial
  Probe
atttagcagtagctccattgggtac

SEQ ID NO: 279208 - DNA, 25 bp, Artificial
  Probe
catgccttagaatcatttgtatgaa

SEQ ID NO: 279209 - DNA, 25 bp, Artificial
  Probe
ctgggctgcgccttctggaagccgc

SEQ ID NO: 279210 - DNA, 25 bp, Artificial
  Probe
ttcctggagttccagttcctcaccg

SEQ ID NO: 279211 - DNA, 25 bp, Artificial
  Probe
ctctggttcccgtagtgggtctcga

SEQ ID NO: 279212 - DNA, 25 bp, Artificial
  Probe
tataaaagctttctgagccacagcc

SEQ ID NO: 279213 - DNA, 25 bp, Artificial
  Probe
ctgggcttgccttctgtggtaatac

SEQ ID NO: 279214 - DNA, 25 bp, Artificial
  Probe
ctttctgagccacagccttttaaag

SEQ ID NO: 279215 - DNA, 25 bp, Artificial
  Probe
cagctgctgctttagtcgtctttct

SEQ ID NO: 279216 - DNA, 25 bp, Artificial
  Probe
gatacagctgctgctttagtcgtct

SEQ ID NO: 279217 - DNA, 25 bp, Artificial
  Probe
tttgagctgggcttgccttctgtgg

SEQ ID NO: 279218 - DNA, 25 bp, Artificial
  Probe
atttgactttctgactgcatgcaac

SEQ ID NO: 279219 - DNA, 25 bp, Artificial
  Probe
gccttctgtggtaatacatgacaga

SEQ ID NO: 279220 - DNA, 25 bp, Artificial
  Probe
gcaactttgagctgggcttgccttc

SEQ ID NO: 279221 - DNA, 25 bp, Artificial
  Probe
tttgactttctgactgcatgcaact

SEQ ID NO: 279222 - DNA, 25 bp, Artificial
  Probe
ttgccttctgtggtaatacatgaca

SEQ ID NO: 279223 - DNA, 25 bp, Artificial
  Probe
ggcttgccttctgtggtaatacatg

SEQ ID NO: 279224 - DNA, 25 bp, Artificial
  Probe
tgcatgcaactttgagctgggcttg

SEQ ID NO: 279225 - DNA, 25 bp, Artificial
  Probe
tgggcttgccttctgtggtaataca

SEQ ID NO: 279226 - DNA, 25 bp, Artificial
  Probe
gggcttgccttctgtggtaatacat

SEQ ID NO: 279227 - DNA, 25 bp, Artificial
  Probe
gcatgcaactttgagctgggcttgc

SEQ ID NO: 279228 - DNA, 25 bp, Artificial
  Probe
atgcaactttgagctgggcttgcct

SEQ ID NO: 279229 - DNA, 25 bp, Artificial
  Probe
actgcatgcaactttgagctgggct

SEQ ID NO: 279230 - DNA, 25 bp, Artificial
  Probe
agtaaaatttgactttctgactgca

SEQ ID NO: 279231 - DNA, 25 bp, Artificial
  Probe
catgcaactttgagctgggcttgcc

SEQ ID NO: 279232 - DNA, 25 bp, Artificial
  Probe
gctttctgagccacagccttttaaa

SEQ ID NO: 279233 - DNA, 25 bp, Artificial
  Probe
agatacagctgctgctttagtcgtc

SEQ ID NO: 279234 - DNA, 25 bp, Artificial
  Probe
acagctgctgctttagtcgtctttc

SEQ ID NO: 279235 - DNA, 25 bp, Artificial
  Probe
gctttagtcgtctttctttgaatgc

SEQ ID NO: 279236 - DNA, 25 bp, Artificial
  Probe
ctgactgcatgcaactttgagctgg

SEQ ID NO: 279237 - DNA, 25 bp, Artificial
  Probe
ttgagctgggcttgccttctgtggt

SEQ ID NO: 279238 - DNA, 25 bp, Artificial
  Probe
cttgccttctgtggtaatacatgac

SEQ ID NO: 279239 - DNA, 25 bp, Artificial
  Probe
ctttctgactgcatgcaactttgag

SEQ ID NO: 279240 - DNA, 25 bp, Artificial
  Probe
aatttgactttctgactgcatgcaa

SEQ ID NO: 279241 - DNA, 25 bp, Artificial
  Probe
tgactttctgactgcatgcaacttt

SEQ ID NO: 279242 - DNA, 25 bp, Artificial
  Probe
gctgggcttgccttctgtggtaata

SEQ ID NO: 279243 - DNA, 25 bp, Artificial
  Probe
gctgctttagtcgtctttctttgaa

SEQ ID NO: 279244 - DNA, 25 bp, Artificial
  Probe
tttctgactgcatgcaactttgagc

SEQ ID NO: 279245 - DNA, 25 bp, Artificial
  Probe
atacagctgctgctttagtcgtctt

SEQ ID NO: 279246 - DNA, 25 bp, Artificial
  Probe
actttctgactgcatgcaactttga

SEQ ID NO: 279247 - DNA, 25 bp, Artificial
  Probe
ttctgactgcatgcaactttgagct

SEQ ID NO: 279248 - DNA, 25 bp, Artificial
  Probe
ccttctgtggtaatacatgacagag

SEQ ID NO: 279249 - DNA, 25 bp, Artificial
  Probe
tgactgcatgcaactttgagctggg

SEQ ID NO: 279250 - DNA, 25 bp, Artificial
  Probe
aaatttgactttctgactgcatgca

SEQ ID NO: 279251 - DNA, 25 bp, Artificial
  Probe
ttgactttctgactgcatgcaactt

SEQ ID NO: 279252 - DNA, 25 bp, Artificial
  Probe
tgccttctgtggtaatacatgacag

SEQ ID NO: 279253 - DNA, 25 bp, Artificial
  Probe
atataaaagctttctgagccacagc

SEQ ID NO: 279254 - DNA, 25 bp, Artificial
  Probe
tttctgagccacagccttttaaagg

SEQ ID NO: 279255 - DNA, 25 bp, Artificial
  Probe
ggatttgaccaaagttctctttgtt

SEQ ID NO: 279256 - DNA, 25 bp, Artificial
  Probe
tgagccacagccttttaaaggggga

SEQ ID NO: 279257 - DNA, 25 bp, Artificial
  Probe
cagatacagctgctgctttagtcgt

SEQ ID NO: 279258 - DNA, 25 bp, Artificial
  Probe
tgggcccagggtcactttcaaggac

SEQ ID NO: 279259 - DNA, 25 bp, Artificial
  Probe
caagatagaccctgggtgaacatga

SEQ ID NO: 279260 - DNA, 25 bp, Artificial
  Probe
catccggggaccttgcaaggctttg

SEQ ID NO: 279261 - DNA, 25 bp, Artificial
  Probe
ggaccaagatagaccctgggtgaac

SEQ ID NO: 279262 - DNA, 25 bp, Artificial
  Probe
ggcctcagacacaggcaaggcttgt

SEQ ID NO: 279263 - DNA, 25 bp, Artificial
  Probe
cacatgtggaggacagtttgggaac

SEQ ID NO: 279264 - DNA, 25 bp, Artificial
  Probe
agatacagagccttaagggacttgg

SEQ ID NO: 279265 - DNA, 25 bp, Artificial
  Probe
tcagacacaggcaaggcttgtgacc

SEQ ID NO: 279266 - DNA, 25 bp, Artificial
  Probe
gggcttcagtagcattaccacatgt

SEQ ID NO: 279267 - DNA, 25 bp, Artificial
  Probe
gacatccggggaccttgcaaggctt

SEQ ID NO: 279268 - DNA, 25 bp, Artificial
  Probe
acgaccgcctgagcaagcctgagac

SEQ ID NO: 279269 - DNA, 25 bp, Artificial
  Probe
tgatgtcgcatggaggagcacccct

SEQ ID NO: 279270 - DNA, 25 bp, Artificial
  Probe
gcttgtactgcgtggaccaagatag

SEQ ID NO: 279271 - DNA, 25 bp, Artificial
  Probe
aagcctgagaccttgttgcagaccc

SEQ ID NO: 279272 - DNA, 25 bp, Artificial
  Probe
ctgcgtggaccaagatagaccctgg

SEQ ID NO: 279273 - DNA, 25 bp, Artificial
  Probe
accctgggtgaacatgatgtcgcat

SEQ ID NO: 279274 - DNA, 25 bp, Artificial
  Probe
agggacttggcctcagacacctctt

SEQ ID NO: 279275 - DNA, 25 bp, Artificial
  Probe
ccttaagggacttggcctcagacac

SEQ ID NO: 279276 - DNA, 25 bp, Artificial
  Probe
tgagccctaaacatggcagaggagg

SEQ ID NO: 279277 - DNA, 25 bp, Artificial
  Probe
ctgagaccttgttgcagacccacca

SEQ ID NO: 279278 - DNA, 25 bp, Artificial
  Probe
ccttgagggcttgtactgcgtggac

SEQ ID NO: 279279 - DNA, 25 bp, Artificial
  Probe
ccttcagaggccttgagggcttgta

SEQ ID NO: 279280 - DNA, 25 bp, Artificial
  Probe
tcccagaggcctcagacacaggcaa

SEQ ID NO: 279281 - DNA, 25 bp, Artificial
  Probe
cccaaccttcagaggccttgagggc

SEQ ID NO: 279282 - DNA, 25 bp, Artificial
  Probe
ctttcaaggacatccggggaccttg

SEQ ID NO: 279283 - DNA, 25 bp, Artificial
  Probe
gagccttaagggacttggcctcaga

SEQ ID NO: 279284 - DNA, 25 bp, Artificial
  Probe
acatgatgtcgcatggaggagcacc

SEQ ID NO: 279285 - DNA, 25 bp, Artificial
  Probe
acctcttcagagagacactagcggg

SEQ ID NO: 279286 - DNA, 25 bp, Artificial
  Probe
cagtagcattaccacatgtggagga

SEQ ID NO: 279287 - DNA, 25 bp, Artificial
  Probe
gcaagcctgagaccttgttgcagac

SEQ ID NO: 279288 - DNA, 25 bp, Artificial
  Probe
cagagagacactagcggggcaccgt

SEQ ID NO: 279289 - DNA, 25 bp, Artificial
  Probe
ggacatccggggaccttgcaaggct

SEQ ID NO: 279290 - DNA, 25 bp, Artificial
  Probe
atagaccctgggtgaacatgatgtc

SEQ ID NO: 279291 - DNA, 25 bp, Artificial
  Probe
tgagggcttgtactgcgtggaccaa

SEQ ID NO: 279292 - DNA, 25 bp, Artificial
  Probe
tgagaccttgttgcagacccaccag

SEQ ID NO: 279293 - DNA, 25 bp, Artificial
  Probe
ctgacgaccgcctgagcaagcctga

SEQ ID NO: 279294 - DNA, 25 bp, Artificial
  Probe
cactttcaaggacatccggggacct

SEQ ID NO: 279295 - DNA, 25 bp, Artificial
  Probe
tcagaggccttgagggcttgtactg

SEQ ID NO: 279296 - DNA, 25 bp, Artificial
  Probe
accgcctgagcaagcctgagacctt

SEQ ID NO: 279297 - DNA, 25 bp, Artificial
  Probe
gcctgagaccttgttgcagacccac

SEQ ID NO: 279298 - DNA, 25 bp, Artificial
  Probe
cagacacaggcaaggcttgtgaccc

SEQ ID NO: 279299 - DNA, 25 bp, Artificial
  Probe
gtggaccaagatagaccctgggtga

SEQ ID NO: 279300 - DNA, 25 bp, Artificial
  Probe
tacagagccttaagggacttggcct

SEQ ID NO: 279301 - DNA, 25 bp, Artificial
  Probe
gaccgcctgagcaagcctgagacct

SEQ ID NO: 279302 - DNA, 25 bp, Artificial
  Probe
cctgagcaagcctgagaccttgttg

SEQ ID NO: 279303 - DNA, 25 bp, Artificial
  Probe
gaattgtaaccacatgcaaataaag

SEQ ID NO: 279304 - DNA, 25 bp, Artificial
  Probe
gtacaattatgtctcttgagcatca

SEQ ID NO: 279305 - DNA, 25 bp, Artificial
  Probe
tgtacaattatgtctcttgagcatc

SEQ ID NO: 279306 - DNA, 25 bp, Artificial
  Probe
cagatataactgtcttgtttcagtg

SEQ ID NO: 279307 - DNA, 25 bp, Artificial
  Probe
ttgttactgctgattcttgtaaatc

SEQ ID NO: 279308 - DNA, 25 bp, Artificial
  Probe
ctgagctgtaatttcgccttaaact

SEQ ID NO: 279309 - DNA, 25 bp, Artificial
  Probe
agcatcaatcttgttactgctgatt

SEQ ID NO: 279310 - DNA, 25 bp, Artificial
  Probe
tcaatcttgttactgctgattcttg

SEQ ID NO: 279311 - DNA, 25 bp, Artificial
  Probe
gttactgctgattcttgtaaatctt

SEQ ID NO: 279312 - DNA, 25 bp, Artificial
  Probe
tcgtctatgtgttatgaacatctga

SEQ ID NO: 279313 - DNA, 25 bp, Artificial
  Probe
atgtctcttgagcatcaatcttgtt

SEQ ID NO: 279314 - DNA, 25 bp, Artificial
  Probe
taaactatggacactctatctgtag

SEQ ID NO: 279315 - DNA, 25 bp, Artificial
  Probe
gacactctatctgtagtgcattttt

SEQ ID NO: 279316 - DNA, 25 bp, Artificial
  Probe
aatgtacaattatgtctcttgagca

SEQ ID NO: 279317 - DNA, 25 bp, Artificial
  Probe
ggacactctatctgtagtgcatttt

SEQ ID NO: 279318 - DNA, 25 bp, Artificial
  Probe
caacagttctgagctgtaatttcgc

SEQ ID NO: 279319 - DNA, 25 bp, Artificial
  Probe
aactatggacactctatctgtagtg

SEQ ID NO: 279320 - DNA, 25 bp, Artificial
  Probe
aaggacaacagttctgagctgtaat

SEQ ID NO: 279321 - DNA, 25 bp, Artificial
  Probe
acagttctgagctgtaatttcgcct

SEQ ID NO: 279322 - DNA, 25 bp, Artificial
  Probe
gccagatataactgtcttgtttcag

SEQ ID NO: 279323 - DNA, 25 bp, Artificial
  Probe
tcttgagcatcaatcttgttactgc

SEQ ID NO: 279324 - DNA, 25 bp, Artificial
  Probe
ctatggacactctatctgtagtgca

SEQ ID NO: 279325 - DNA, 25 bp, Artificial
  Probe
ggaaaagtccacagtgaacttacaa

SEQ ID NO: 279326 - DNA, 25 bp, Artificial
  Probe
aatcttgttactgctgattcttgta

SEQ ID NO: 279327 - DNA, 25 bp, Artificial
  Probe
tcttgttactgctgattcttgtaaa

SEQ ID NO: 279328 - DNA, 25 bp, Artificial
  Probe
ttatgtctcttgagcatcaatcttg

SEQ ID NO: 279329 - DNA, 25 bp, Artificial
  Probe
ttctgagctgtaatttcgccttaaa

SEQ ID NO: 279330 - DNA, 25 bp, Artificial
  Probe
gtctcttgagcatcaatcttgttac

SEQ ID NO: 279331 - DNA, 25 bp, Artificial
  Probe
aaatcgtctatgtgttatgaacatc

SEQ ID NO: 279332 - DNA, 25 bp, Artificial
  Probe
agttctgagctgtaatttcgcctta

SEQ ID NO: 279333 - DNA, 25 bp, Artificial
  Probe
atcgtctatgtgttatgaacatctg

SEQ ID NO: 279334 - DNA, 25 bp, Artificial
  Probe
gtaatttcgccttaaactatggaca

SEQ ID NO: 279335 - DNA, 25 bp, Artificial
  Probe
ccacagtgaacttacaatgaaggga

SEQ ID NO: 279336 - DNA, 25 bp, Artificial
  Probe
acaacagttctgagctgtaatttcg

SEQ ID NO: 279337 - DNA, 25 bp, Artificial
  Probe
tgagctgtaatttcgccttaaacta

SEQ ID NO: 279338 - DNA, 25 bp, Artificial
  Probe
aaagtccacagtgaacttacaatga

SEQ ID NO: 279339 - DNA, 25 bp, Artificial
  Probe
aagtccacagtgaacttacaatgaa

SEQ ID NO: 279340 - DNA, 25 bp, Artificial
  Probe
aaaggacaacagttctgagctgtaa

SEQ ID NO: 279341 - DNA, 25 bp, Artificial
  Probe
atggacactctatctgtagtgcatt

SEQ ID NO: 279342 - DNA, 25 bp, Artificial
  Probe
aatcgtctatgtgttatgaacatct

SEQ ID NO: 279343 - DNA, 25 bp, Artificial
  Probe
tgtaatttcgccttaaactatggac

SEQ ID NO: 279344 - DNA, 25 bp, Artificial
  Probe
gcatcaatcttgttactgctgattc

SEQ ID NO: 279345 - DNA, 25 bp, Artificial
  Probe
taactgtcttgtttcagtgaggagc

SEQ ID NO: 279346 - DNA, 25 bp, Artificial
  Probe
gagcatcaatcttgttactgctgat

SEQ ID NO: 279347 - DNA, 25 bp, Artificial
  Probe
ccagatataactgtcttgtttcagt

SEQ ID NO: 279348 - DNA, 25 bp, Artificial
  Probe
ttgagcatcaatcttgttactgctg

SEQ ID NO: 279349 - DNA, 25 bp, Artificial
  Probe
ctcttgagcatcaatcttgttactg

SEQ ID NO: 279350 - DNA, 25 bp, Artificial
  Probe
cggacacatgaggccagctgctgga

SEQ ID NO: 279351 - DNA, 25 bp, Artificial
  Probe
accatcctccggacacatgaggcca

SEQ ID NO: 279352 - DNA, 25 bp, Artificial
  Probe
cccagggaggctccaggagctctca

SEQ ID NO: 279353 - DNA, 25 bp, Artificial
  Probe
acgccgtccatgctgccctcttccc

SEQ ID NO: 279354 - DNA, 25 bp, Artificial
  Probe
gtactgggccgggacgccgtccatg

SEQ ID NO: 279355 - DNA, 25 bp, Artificial
  Probe
tgccagggttactggcgccatgtgc

SEQ ID NO: 279356 - DNA, 25 bp, Artificial
  Probe
gacacatgaggccagctgctggagg

SEQ ID NO: 279357 - DNA, 25 bp, Artificial
  Probe
gcatgtactgggccgggacgccgtc

SEQ ID NO: 279358 - DNA, 25 bp, Artificial
  Probe
acataggaccagcctagcccctcat

SEQ ID NO: 279359 - DNA, 25 bp, Artificial
  Probe
catgtactgggccgggacgccgtcc

SEQ ID NO: 279360 - DNA, 25 bp, Artificial
  Probe
ctgcatgtactgggccgggacgccg

SEQ ID NO: 279361 - DNA, 25 bp, Artificial
  Probe
gctgcatgtactgggccgggacgcc

SEQ ID NO: 279362 - DNA, 25 bp, Artificial
  Probe
ccatcctccggacacatgaggccag

SEQ ID NO: 279363 - DNA, 25 bp, Artificial
  Probe
tactgggccgggacgccgtccatgc

SEQ ID NO: 279364 - DNA, 25 bp, Artificial
  Probe
cagggttactggcgccatgtgcccc

SEQ ID NO: 279365 - DNA, 25 bp, Artificial
  Probe
cataggaccagcctagcccctcatc

SEQ ID NO: 279366 - DNA, 25 bp, Artificial
  Probe
tcatcccttttaatataaaagatat

SEQ ID NO: 279367 - DNA, 25 bp, Artificial
  Probe
ccggacacatgaggccagctgctgg

SEQ ID NO: 279368 - DNA, 25 bp, Artificial
  Probe
agggttactggcgccatgtgccccc

SEQ ID NO: 279369 - DNA, 25 bp, Artificial
  Probe
gcgggtacagctgcatgtactgggc

SEQ ID NO: 279370 - DNA, 25 bp, Artificial
  Probe
cctcatcccttttaatataaaagat

SEQ ID NO: 279371 - DNA, 25 bp, Artificial
  Probe
acagctgcatgtactgggccgggac

SEQ ID NO: 279372 - DNA, 25 bp, Artificial
  Probe
tcctccggacacatgaggccagctg

SEQ ID NO: 279373 - DNA, 25 bp, Artificial
  Probe
ggacacatgaggccagctgctggag

SEQ ID NO: 279374 - DNA, 25 bp, Artificial
  Probe
gggtacagctgcatgtactgggccg

SEQ ID NO: 279375 - DNA, 25 bp, Artificial
  Probe
atgtactgggccgggacgccgtcca

SEQ ID NO: 279376 - DNA, 25 bp, Artificial
  Probe
tgtactgggccgggacgccgtccat

SEQ ID NO: 279377 - DNA, 25 bp, Artificial
  Probe
ccagggaggctccaggagctctcag

SEQ ID NO: 279378 - DNA, 25 bp, Artificial
  Probe
ggttactggcgccatgtgcccccca

SEQ ID NO: 279379 - DNA, 25 bp, Artificial
  Probe
gccagggttactggcgccatgtgcc

SEQ ID NO: 279380 - DNA, 25 bp, Artificial
  Probe
atcctccggacacatgaggccagct

SEQ ID NO: 279381 - DNA, 25 bp, Artificial
  Probe
ggtacagctgcatgtactgggccgg

SEQ ID NO: 279382 - DNA, 25 bp, Artificial
  Probe
atcccttttaatataaaagatatat

SEQ ID NO: 279383 - DNA, 25 bp, Artificial
  Probe
agctgcatgtactgggccgggacgc

SEQ ID NO: 279384 - DNA, 25 bp, Artificial
  Probe
taggaccagcctagcccctcatccc

SEQ ID NO: 279385 - DNA, 25 bp, Artificial
  Probe
ctccggacacatgaggccagctgct

SEQ ID NO: 279386 - DNA, 25 bp, Artificial
  Probe
gggacgccgtccatgctgccctctt

SEQ ID NO: 279387 - DNA, 25 bp, Artificial
  Probe
ccccagggaggctccaggagctctc

SEQ ID NO: 279388 - DNA, 25 bp, Artificial
  Probe
ccgggacgccgtccatgctgccctc

SEQ ID NO: 279389 - DNA, 25 bp, Artificial
  Probe
cgccgtccatgctgccctcttcccc

SEQ ID NO: 279390 - DNA, 25 bp, Artificial
  Probe
catcctccggacacatgaggccagc

SEQ ID NO: 279391 - DNA, 25 bp, Artificial
  Probe
acacatgaggccagctgctggaggc

SEQ ID NO: 279392 - DNA, 25 bp, Artificial
  Probe
gccgggacgccgtccatgctgccct

SEQ ID NO: 279393 - DNA, 25 bp, Artificial
  Probe
cctccggacacatgaggccagctgc

SEQ ID NO: 279394 - DNA, 25 bp, Artificial
  Probe
tccggacacatgaggccagctgctg

SEQ ID NO: 279395 - DNA, 25 bp, Artificial
  Probe
cgggtacagctgcatgtactgggcc

SEQ ID NO: 279396 - DNA, 25 bp, Artificial
  Probe
ctgtttcctggctaccacaccaaga

SEQ ID NO: 279397 - DNA, 25 bp, Artificial
  Probe
aggaccagtggcttcagctgctgag

SEQ ID NO: 279398 - DNA, 25 bp, Artificial
  Probe
ccggcatgaggattccaggttggct

SEQ ID NO: 279399 - DNA, 25 bp, Artificial
  Probe
gtatgagaatgttcccaccgtggac

SEQ ID NO: 279400 - DNA, 25 bp, Artificial
  Probe
tgaccgagcagatgtgtgatgagct

SEQ ID NO: 279401 - DNA, 25 bp, Artificial
  Probe
ggctaccacaccaagacacgggcag

SEQ ID NO: 279402 - DNA, 25 bp, Artificial
  Probe
gatgagaactacagccgggccctgg

SEQ ID NO: 279403 - DNA, 25 bp, Artificial
  Probe
cactgctgaccgagcagatgtgtga

SEQ ID NO: 279404 - DNA, 25 bp, Artificial
  Probe
gtggaacagccatgcccagatgtgt

SEQ ID NO: 279405 - DNA, 25 bp, Artificial
  Probe
ggcccatgacggagcacctgtttcc

SEQ ID NO: 279406 - DNA, 25 bp, Artificial
  Probe
tgctgaccgagcagatgtgtgatga

SEQ ID NO: 279407 - DNA, 25 bp, Artificial
  Probe
tgctgaggacatatgtggggcccat

SEQ ID NO: 279408 - DNA, 25 bp, Artificial
  Probe
ttcccactgctgaccgagcagatgt

SEQ ID NO: 279409 - DNA, 25 bp, Artificial
  Probe
tggctaccacaccaagacacgggca

SEQ ID NO: 279410 - DNA, 25 bp, Artificial
  Probe
atgtgtactggttcccactgctgac

SEQ ID NO: 279411 - DNA, 25 bp, Artificial
  Probe
aacactatggccagtggtctggagg

SEQ ID NO: 279412 - DNA, 25 bp, Artificial
  Probe
gtttcctggctaccacaccaagaca

SEQ ID NO: 279413 - DNA, 25 bp, Artificial
  Probe
accgtggacatccacatgaagcagg

SEQ ID NO: 279414 - DNA, 25 bp, Artificial
  Probe
cagatgtgtactggttcccactgct

SEQ ID NO: 279415 - DNA, 25 bp, Artificial
  Probe
ttcagctgctgaggacatatgtggg

SEQ ID NO: 279416 - DNA, 25 bp, Artificial
  Probe
ccgtggacatccacatgaagcaggt

SEQ ID NO: 279417 - DNA, 25 bp, Artificial
  Probe
cagtggcttcagctgctgaggacat

SEQ ID NO: 279418 - DNA, 25 bp, Artificial
  Probe
gaccagtggcttcagctgctgagga

SEQ ID NO: 279419 - DNA, 25 bp, Artificial
  Probe
gtactggttcccactgctgaccgag

SEQ ID NO: 279420 - DNA, 25 bp, Artificial
  Probe
tgtttcctggctaccacaccaagac

SEQ ID NO: 279421 - DNA, 25 bp, Artificial
  Probe
ggtggaacagccatgcccagatgtg

SEQ ID NO: 279422 - DNA, 25 bp, Artificial
  Probe
atgtggggcccatgacggagcacct

SEQ ID NO: 279423 - DNA, 25 bp, Artificial
  Probe
agccatgcccagatgtgtactggtt

SEQ ID NO: 279424 - DNA, 25 bp, Artificial
  Probe
cccagatgtgtactggttcccactg

SEQ ID NO: 279425 - DNA, 25 bp, Artificial
  Probe
cactatggccagtggtctggaggcc

SEQ ID NO: 279426 - DNA, 25 bp, Artificial
  Probe
ctggttcccactgctgaccgagcag

SEQ ID NO: 279427 - DNA, 25 bp, Artificial
  Probe
ggtacgaggaccagtggcttcagct

SEQ ID NO: 279428 - DNA, 25 bp, Artificial
  Probe
tggacatccacatgaagcaggtggg

SEQ ID NO: 279429 - DNA, 25 bp, Artificial
  Probe
gagcacctgtttcctggctaccaca

SEQ ID NO: 279430 - DNA, 25 bp, Artificial
  Probe
tcccaccgtggacatccacatgaag

SEQ ID NO: 279431 - DNA, 25 bp, Artificial
  Probe
tatgtggggcccatgacggagcacc

SEQ ID NO: 279432 - DNA, 25 bp, Artificial
  Probe
ctgctgaggacatatgtggggccca

SEQ ID NO: 279433 - DNA, 25 bp, Artificial
  Probe
ggttcccactgctgaccgagcagat

SEQ ID NO: 279434 - DNA, 25 bp, Artificial
  Probe
atgttcccaccgtggacatccacat

SEQ ID NO: 279435 - DNA, 25 bp, Artificial
  Probe
atgcccagatgtgtactggttccca

SEQ ID NO: 279436 - DNA, 25 bp, Artificial
  Probe
cttcagctgctgaggacatatgtgg

SEQ ID NO: 279437 - DNA, 25 bp, Artificial
  Probe
acagccatgcccagatgtgtactgg

SEQ ID NO: 279438 - DNA, 25 bp, Artificial
  Probe
ctgaccgagcagatgtgtgatgagc

SEQ ID NO: 279439 - DNA, 25 bp, Artificial
  Probe
tacgaggaccagtggcttcagctgc

SEQ ID NO: 279440 - DNA, 25 bp, Artificial
  Probe
gcccagatgtgtactggttcccact

SEQ ID NO: 279441 - DNA, 25 bp, Artificial
  Probe
tgttcccaccgtggacatccacatg

SEQ ID NO: 279442 - DNA, 25 bp, Artificial
  Probe
acctggagggaccacctctagacgc

SEQ ID NO: 279443 - DNA, 25 bp, Artificial
  Probe
gttaagcagatctgcctggtcatgc

SEQ ID NO: 279444 - DNA, 25 bp, Artificial
  Probe
tctcactttgccatgatgcacggcg

SEQ ID NO: 279445 - DNA, 25 bp, Artificial
  Probe
tccgcaagggagagtcatgaccatc

SEQ ID NO: 279446 - DNA, 25 bp, Artificial
  Probe
cgacctggagggaccacctctagac

SEQ ID NO: 279447 - DNA, 25 bp, Artificial
  Probe
ccgcagtcggtcaccgagtgtgtta

SEQ ID NO: 279448 - DNA, 25 bp, Artificial
  Probe
tggcaagacaacagtctcactttgc

SEQ ID NO: 279449 - DNA, 25 bp, Artificial
  Probe
gaaccaggtggcaagacaacagtct

SEQ ID NO: 279450 - DNA, 25 bp, Artificial
  Probe
tggatcttggccaagctgaaccagg

SEQ ID NO: 279451 - DNA, 25 bp, Artificial
  Probe
cccagtctccgcaagggagagtcat

SEQ ID NO: 279452 - DNA, 25 bp, Artificial
  Probe
tccgctggatcttggccaagctgaa

SEQ ID NO: 279453 - DNA, 25 bp, Artificial
  Probe
agctgaaccaggtggcaagacaaca

SEQ ID NO: 279454 - DNA, 25 bp, Artificial
  Probe
caccgagtgtgttaagcagatctgc

SEQ ID NO: 279455 - DNA, 25 bp, Artificial
  Probe
tgccgcagtcggtcaccgagtgtgt

SEQ ID NO: 279456 - DNA, 25 bp, Artificial
  Probe
cctctagacgcctactcgattcaag

SEQ ID NO: 279457 - DNA, 25 bp, Artificial
  Probe
gcctactcgattcaaggacaacaca

SEQ ID NO: 279458 - DNA, 25 bp, Artificial
  Probe
acagtctcactttgccatgatgcac

SEQ ID NO: 279459 - DNA, 25 bp, Artificial
  Probe
ctatcgccggcgtgccgcagtcggt

SEQ ID NO: 279460 - DNA, 25 bp, Artificial
  Probe
ggccagttcgccagtcatctgcgcg

SEQ ID NO: 279461 - DNA, 25 bp, Artificial
  Probe
agcagatctgcctggtcatgctgga

SEQ ID NO: 279462 - DNA, 25 bp, Artificial
  Probe
gagggaccacctctagacgcctact

SEQ ID NO: 279463 - DNA, 25 bp, Artificial
  Probe
ggagagtcatgaccatcccgtacca

SEQ ID NO: 279464 - DNA, 25 bp, Artificial
  Probe
gcaagacaacagtctcactttgcca

SEQ ID NO: 279465 - DNA, 25 bp, Artificial
  Probe
ctggagggaccacctctagacgcct

SEQ ID NO: 279466 - DNA, 25 bp, Artificial
  Probe
gggattcgccggaattgactccagc

SEQ ID NO: 279467 - DNA, 25 bp, Artificial
  Probe
cttggccaagctgaaccaggtggca

SEQ ID NO: 279468 - DNA, 25 bp, Artificial
  Probe
ctttgccatgatgcacggcgggacg

SEQ ID NO: 279469 - DNA, 25 bp, Artificial
  Probe
agttcgccagtcatctgcgcgggcg

SEQ ID NO: 279470 - DNA, 25 bp, Artificial
  Probe
tgtgttaagcagatctgcctggtca

SEQ ID NO: 279471 - DNA, 25 bp, Artificial
  Probe
ggacaacacaaccatttctccgctg

SEQ ID NO: 279472 - DNA, 25 bp, Artificial
  Probe
tgcctggtcatgctggagacgctct

SEQ ID NO: 279473 - DNA, 25 bp, Artificial
  Probe
ggccaagctgaaccaggtggcaaga

SEQ ID NO: 279474 - DNA, 25 bp, Artificial
  Probe
aagacaacagtctcactttgccatg

SEQ ID NO: 279475 - DNA, 25 bp, Artificial
  Probe
atgccggccagttcgccagtcatct

SEQ ID NO: 279476 - DNA, 25 bp, Artificial
  Probe
gggctatcactatcgccggcgtgcc

SEQ ID NO: 279477 - DNA, 25 bp, Artificial
  Probe
cagttcgccagtcatctgcgcgggc

SEQ ID NO: 279478 - DNA, 25 bp, Artificial
  Probe
caagctgaaccaggtggcaagacaa

SEQ ID NO: 279479 - DNA, 25 bp, Artificial
  Probe
gacaacacaaccatttctccgctgg

SEQ ID NO: 279480 - DNA, 25 bp, Artificial
  Probe
agagtcatgaccatcccgtaccagc

SEQ ID NO: 279481 - DNA, 25 bp, Artificial
  Probe
aaccaggtggcaagacaacagtctc

SEQ ID NO: 279482 - DNA, 25 bp, Artificial
  Probe
tctccgcaagggagagtcatgacca

SEQ ID NO: 279483 - DNA, 25 bp, Artificial
  Probe
ccatttctccgctggatcttggcca

SEQ ID NO: 279484 - DNA, 25 bp, Artificial
  Probe
agtcggtcaccgagtgtgttaagca

SEQ ID NO: 279485 - DNA, 25 bp, Artificial
  Probe
catttctccgctggatcttggccaa

SEQ ID NO: 279486 - DNA, 25 bp, Artificial
  Probe
ggattcgccggaattgactccagct

SEQ ID NO: 279487 - DNA, 25 bp, Artificial
  Probe
tcggtcaccgagtgtgttaagcaga

SEQ ID NO: 279488 - DNA, 25 bp, Artificial
  Probe
tcaggacacgaggggtggggacacc

SEQ ID NO: 279489 - DNA, 25 bp, Artificial
  Probe
ccggggtgacaccagcattgagccc

SEQ ID NO: 279490 - DNA, 25 bp, Artificial
  Probe
agaacgccccatcttaggggaggca

SEQ ID NO: 279491 - DNA, 25 bp, Artificial
  Probe
tgcccttccttcctatggaagtggg

SEQ ID NO: 279492 - DNA, 25 bp, Artificial
  Probe
agccagcacagcacccggggtgaca

SEQ ID NO: 279493 - DNA, 25 bp, Artificial
  Probe
cacccggggtgacaccagcattgag

SEQ ID NO: 279494 - DNA, 25 bp, Artificial
  Probe
ggatcctcaggcgaggcccctgggg

SEQ ID NO: 279495 - DNA, 25 bp, Artificial
  Probe
tggttcccatcctgagtttggaatt

SEQ ID NO: 279496 - DNA, 25 bp, Artificial
  Probe
gcagggcccaaagagccccggccca

SEQ ID NO: 279497 - DNA, 25 bp, Artificial
  Probe
ctcaggcgaggcccctggggtgggt

SEQ ID NO: 279498 - DNA, 25 bp, Artificial
  Probe
ttgtggttcccatcctgagtttgga

SEQ ID NO: 279499 - DNA, 25 bp, Artificial
  Probe
tgtggttcccatcctgagtttggaa

SEQ ID NO: 279500 - DNA, 25 bp, Artificial
  Probe
cctttttgtggttcccatcctgagt

SEQ ID NO: 279501 - DNA, 25 bp, Artificial
  Probe
gcctttttgtggttcccatcctgag

SEQ ID NO: 279502 - DNA, 25 bp, Artificial
  Probe
tccttcctatggaagtgggaaacat

SEQ ID NO: 279503 - DNA, 25 bp, Artificial
  Probe
tcttaggggaggcagggcccaaaga

SEQ ID NO: 279504 - DNA, 25 bp, Artificial
  Probe
acccggggtgacaccagcattgagc

SEQ ID NO: 279505 - DNA, 25 bp, Artificial
  Probe
cggggtgacaccagcattgagcccc

SEQ ID NO: 279506 - DNA, 25 bp, Artificial
  Probe
gcccttccttcctatggaagtggga

SEQ ID NO: 279507 - DNA, 25 bp, Artificial
  Probe
tttgtggttcccatcctgagtttgg

SEQ ID NO: 279508 - DNA, 25 bp, Artificial
  Probe
gacacgaggggtggggacaccttgt

SEQ ID NO: 279509 - DNA, 25 bp, Artificial
  Probe
ctttttgtggttcccatcctgagtt

SEQ ID NO: 279510 - DNA, 25 bp, Artificial
  Probe
ccttcctatggaagtgggaaacatg

SEQ ID NO: 279511 - DNA, 25 bp, Artificial
  Probe
gtggttcccatcctgagtttggaat

SEQ ID NO: 279512 - DNA, 25 bp, Artificial
  Probe
tatgtagccgagctgcccttccttc

SEQ ID NO: 279513 - DNA, 25 bp, Artificial
  Probe
tcaggcgaggcccctggggtgggtc

SEQ ID NO: 279514 - DNA, 25 bp, Artificial
  Probe
agccgagctgcccttccttcctatg

SEQ ID NO: 279515 - DNA, 25 bp, Artificial
  Probe
cccggggtgacaccagcattgagcc

SEQ ID NO: 279516 - DNA, 25 bp, Artificial
  Probe
gctgcccttccttcctatggaagtg

SEQ ID NO: 279517 - DNA, 25 bp, Artificial
  Probe
gcacccggggtgacaccagcattga

SEQ ID NO: 279518 - DNA, 25 bp, Artificial
  Probe
acagccagcacagcacccggggtga

SEQ ID NO: 279519 - DNA, 25 bp, Artificial
  Probe
gcccacagccagcacagcacccggg

SEQ ID NO: 279520 - DNA, 25 bp, Artificial
  Probe
gcccaaagagccccggcccagagga

SEQ ID NO: 279521 - DNA, 25 bp, Artificial
  Probe
ttaggatcctcaggcgaggcccctg

SEQ ID NO: 279522 - DNA, 25 bp, Artificial
  Probe
gccccacccaggtgccgcggccagc

SEQ ID NO: 279523 - DNA, 25 bp, Artificial
  Probe
ggttcccatcctgagtttggaatta

SEQ ID NO: 279524 - DNA, 25 bp, Artificial
  Probe
cagcacccggggtgacaccagcatt

SEQ ID NO: 279525 - DNA, 25 bp, Artificial
  Probe
ttccttcctatggaagtgggaaaca

SEQ ID NO: 279526 - DNA, 25 bp, Artificial
  Probe
acagcacccggggtgacaccagcat

SEQ ID NO: 279527 - DNA, 25 bp, Artificial
  Probe
catggtcaggacacgaggggtgggg

SEQ ID NO: 279528 - DNA, 25 bp, Artificial
  Probe
gggaggcagggcccaaagagccccg

SEQ ID NO: 279529 - DNA, 25 bp, Artificial
  Probe
cttcctatggaagtgggaaacatgg

SEQ ID NO: 279530 - DNA, 25 bp, Artificial
  Probe
ccaggtgccgcggccagctcctgcg

SEQ ID NO: 279531 - DNA, 25 bp, Artificial
  Probe
ggaaacatggtcaggacacgagggg

SEQ ID NO: 279532 - DNA, 25 bp, Artificial
  Probe
atgtagccgagctgcccttccttcc

SEQ ID NO: 279533 - DNA, 25 bp, Artificial
  Probe
agcacccggggtgacaccagcattg

SEQ ID NO: 279534 - DNA, 25 bp, Artificial
  Probe
caccagatgatgtcccagctctggc

SEQ ID NO: 279535 - DNA, 25 bp, Artificial
  Probe
gaatcctcaacttctgaagtgaatg

SEQ ID NO: 279536 - DNA, 25 bp, Artificial
  Probe
tgccatcttgtcttgtgggactatt

SEQ ID NO: 279537 - DNA, 25 bp, Artificial
  Probe
accctcatctcaagtggctcatgat

SEQ ID NO: 279538 - DNA, 25 bp, Artificial
  Probe
aatgtcactccgtgttctgtccctg

SEQ ID NO: 279539 - DNA, 25 bp, Artificial
  Probe
gcccacctgccatcttgtcttgtgg

SEQ ID NO: 279540 - DNA, 25 bp, Artificial
  Probe
ccatggactctcctgcgtgggtgca

SEQ ID NO: 279541 - DNA, 25 bp, Artificial
  Probe
gctcacaccagatgatgtcccagct

SEQ ID NO: 279542 - DNA, 25 bp, Artificial
  Probe
tccgggagatctccactgatggcct

SEQ ID NO: 279543 - DNA, 25 bp, Artificial
  Probe
ccatcttccgggagatctccactga

SEQ ID NO: 279544 - DNA, 25 bp, Artificial
  Probe
tttggaatcctcaacttctgaagtg

SEQ ID NO: 279545 - DNA, 25 bp, Artificial
  Probe
ggagatctccactgatggcctgggt

SEQ ID NO: 279546 - DNA, 25 bp, Artificial
  Probe
ccatcttgtcttgtgggactattgc

SEQ ID NO: 279547 - DNA, 25 bp, Artificial
  Probe
tcacaccagatgatgtcccagctct

SEQ ID NO: 279548 - DNA, 25 bp, Artificial
  Probe
tgctcaccatcttccgggagatctc

SEQ ID NO: 279549 - DNA, 25 bp, Artificial
  Probe
catgctcaccatcttccgggagatc

SEQ ID NO: 279550 - DNA, 25 bp, Artificial
  Probe
agtgaatgtcactccgtgttctgtc

SEQ ID NO: 279551 - DNA, 25 bp, Artificial
  Probe
atcctcaacttctgaagtgaatgtc

SEQ ID NO: 279552 - DNA, 25 bp, Artificial
  Probe
ttgtcttgtgggactattgcctacc

SEQ ID NO: 279553 - DNA, 25 bp, Artificial
  Probe
cttttggaatcctcaacttctgaag

SEQ ID NO: 279554 - DNA, 25 bp, Artificial
  Probe
tgaagtgaatgtcactccgtgttct

SEQ ID NO: 279555 - DNA, 25 bp, Artificial
  Probe
acccatggactctcctgcgtgggtg

SEQ ID NO: 279556 - DNA, 25 bp, Artificial
  Probe
tccatgctcaccatcttccgggaga

SEQ ID NO: 279557 - DNA, 25 bp, Artificial
  Probe
ccacagaagggctcacaccagatga

SEQ ID NO: 279558 - DNA, 25 bp, Artificial
  Probe
ctcctgcgtgggtgcagtctccact

SEQ ID NO: 279559 - DNA, 25 bp, Artificial
  Probe
ctgcgtgggtgcagtctccactcca

SEQ ID NO: 279560 - DNA, 25 bp, Artificial
  Probe
tcctgcgtgggtgcagtctccactc

SEQ ID NO: 279561 - DNA, 25 bp, Artificial
  Probe
tcttccgggagatctccactgatgg

SEQ ID NO: 279562 - DNA, 25 bp, Artificial
  Probe
cacccatggactctcctgcgtgggt

SEQ ID NO: 279563 - DNA, 25 bp, Artificial
  Probe
atgtcactccgtgttctgtccctgc

SEQ ID NO: 279564 - DNA, 25 bp, Artificial
  Probe
atctcaagtggctcatgatacaagg

SEQ ID NO: 279565 - DNA, 25 bp, Artificial
  Probe
gatctccactgatggcctgggtggt

SEQ ID NO: 279566 - DNA, 25 bp, Artificial
  Probe
cctcatctcaagtggctcatgatac

SEQ ID NO: 279567 - DNA, 25 bp, Artificial
  Probe
caagtggctcatgatacaagggtgg

SEQ ID NO: 279568 - DNA, 25 bp, Artificial
  Probe
cacagaagggctcacaccagatgat

SEQ ID NO: 279569 - DNA, 25 bp, Artificial
  Probe
cgggagatctccactgatggcctgg

SEQ ID NO: 279570 - DNA, 25 bp, Artificial
  Probe
gggactattgcctaccctcatctca

SEQ ID NO: 279571 - DNA, 25 bp, Artificial
  Probe
gagatctccactgatggcctgggtg

SEQ ID NO: 279572 - DNA, 25 bp, Artificial
  Probe
aacttctgaagtgaatgtcactccg

SEQ ID NO: 279573 - DNA, 25 bp, Artificial
  Probe
ctaccctcatctcaagtggctcatg

SEQ ID NO: 279574 - DNA, 25 bp, Artificial
  Probe
catggactctcctgcgtgggtgcag

SEQ ID NO: 279575 - DNA, 25 bp, Artificial
  Probe
tgcgtgggtgcagtctccactccaa

SEQ ID NO: 279576 - DNA, 25 bp, Artificial
  Probe
catcttgtcttgtgggactattgcc

SEQ ID NO: 279577 - DNA, 25 bp, Artificial
  Probe
ttgtgggactattgcctaccctcat

SEQ ID NO: 279578 - DNA, 25 bp, Artificial
  Probe
agtgcccacagaagggctcacacca

SEQ ID NO: 279579 - DNA, 25 bp, Artificial
  Probe
gactctcctgcgtgggtgcagtctc

SEQ ID NO: 279580 - DNA, 25 bp, Artificial
  Probe
gtggagcaggccatagtcctctgcc

SEQ ID NO: 279581 - DNA, 25 bp, Artificial
  Probe
ctggggccgtgtctgtgtgcccctt

SEQ ID NO: 279582 - DNA, 25 bp, Artificial
  Probe
tcaccaaaggtctcggtacaaccag

SEQ ID NO: 279583 - DNA, 25 bp, Artificial
  Probe
tggtgtgctaggagcacccagtacc

SEQ ID NO: 279584 - DNA, 25 bp, Artificial
  Probe
gggactcaggctcctttctggaccc

SEQ ID NO: 279585 - DNA, 25 bp, Artificial
  Probe
gaccagctggtcacatggtgctgct

SEQ ID NO: 279586 - DNA, 25 bp, Artificial
  Probe
ctgacaccaagaaggccgtcaagta

SEQ ID NO: 279587 - DNA, 25 bp, Artificial
  Probe
cacagccctgggagtcctgttcctg

SEQ ID NO: 279588 - DNA, 25 bp, Artificial
  Probe
ccctgggagtcctgttcctgggctg

SEQ ID NO: 279589 - DNA, 25 bp, Artificial
  Probe
gtacaggccagtgtgggcaagactc

SEQ ID NO: 279590 - DNA, 25 bp, Artificial
  Probe
gagtcaaaaatgtacccccatgccc

SEQ ID NO: 279591 - DNA, 25 bp, Artificial
  Probe
ccaacttggggcttctcagagtcaa

SEQ ID NO: 279592 - DNA, 25 bp, Artificial
  Probe
caaggcacgcaggaagaagatcatg

SEQ ID NO: 279593 - DNA, 25 bp, Artificial
  Probe
cctgctccctttctgctctgaaaag

SEQ ID NO: 279594 - DNA, 25 bp, Artificial
  Probe
gactgaccactgtccgtgctgcctt

SEQ ID NO: 279595 - DNA, 25 bp, Artificial
  Probe
agaagatcatgatcatcatttgctg

SEQ ID NO: 279596 - DNA, 25 bp, Artificial
  Probe
aaggagtatgcatgcgactgcatgc

SEQ ID NO: 279597 - DNA, 25 bp, Artificial
  Probe
accatcgggggcatctttggataga

SEQ ID NO: 279598 - DNA, 25 bp, Artificial
  Probe
tgctgcacctagctgggttgccctc

SEQ ID NO: 279599 - DNA, 25 bp, Artificial
  Probe
tctgcccacagtctctaacgggcat

SEQ ID NO: 279600 - DNA, 25 bp, Artificial
  Probe
ccacgtggtgtcaggtgtactggat

SEQ ID NO: 279601 - DNA, 25 bp, Artificial
  Probe
gtggggacagctcagcactgagtct

SEQ ID NO: 279602 - DNA, 25 bp, Artificial
  Probe
ccactcctgccttctggctgggagt

SEQ ID NO: 279603 - DNA, 25 bp, Artificial
  Probe
ccagtgtgggcaagactcgggccct

SEQ ID NO: 279604 - DNA, 25 bp, Artificial
  Probe
cccacggctccattctggatgggtc

SEQ ID NO: 279605 - DNA, 25 bp, Artificial
  Probe
catgttaagtcgtggccggagttgc

SEQ ID NO: 279606 - DNA, 25 bp, Artificial
  Probe
gtgattctgggcatcatcatcgcct

SEQ ID NO: 279607 - DNA, 25 bp, Artificial
  Probe
gtgctgccttctctcatggccactt

SEQ ID NO: 279608 - DNA, 25 bp, Artificial
  Probe
ttccttcaggcctggggcctacgct

SEQ ID NO: 279609 - DNA, 25 bp, Artificial
  Probe
aggcctggggcctacgcttccctgg

SEQ ID NO: 279610 - DNA, 25 bp, Artificial
  Probe
catggtgctgcttttcaggttaggg

SEQ ID NO: 279611 - DNA, 25 bp, Artificial
  Probe
tgcccagtgactgaccactgtccgt

SEQ ID NO: 279612 - DNA, 25 bp, Artificial
  Probe
cctttctcatccacaggcaaggagt

SEQ ID NO: 279613 - DNA, 25 bp, Artificial
  Probe
ccctggctgctgcacctagctgggt

SEQ ID NO: 279614 - DNA, 25 bp, Artificial
  Probe
tgggcctgagcctagtgatcctttg

SEQ ID NO: 279615 - DNA, 25 bp, Artificial
  Probe
ctgccttctggctgggagtcctttt

SEQ ID NO: 279616 - DNA, 25 bp, Artificial
  Probe
ggagcaggccatagtcctctgccca

SEQ ID NO: 279617 - DNA, 25 bp, Artificial
  Probe
caggtgtactggatgcagtattcag

SEQ ID NO: 279618 - DNA, 25 bp, Artificial
  Probe
ctgccaggatgctcagggtgccacg

SEQ ID NO: 279619 - DNA, 25 bp, Artificial
  Probe
catgcgactgcatgcagcgggagct

SEQ ID NO: 279620 - DNA, 25 bp, Artificial
  Probe
gtctccctgaggaggcccctggctg

SEQ ID NO: 279621 - DNA, 25 bp, Artificial
  Probe
tggggccgtgtctgtgtgccccttc

SEQ ID NO: 279622 - DNA, 25 bp, Artificial
  Probe
actttgggcctgcagtctcaccctg

SEQ ID NO: 279623 - DNA, 25 bp, Artificial
  Probe
cgtcaagtaccagagcaaggcacgc

SEQ ID NO: 279624 - DNA, 25 bp, Artificial
  Probe
gtgtctctggcctcagctgccctta

SEQ ID NO: 279625 - DNA, 25 bp, Artificial
  Probe
cagccttgctctgagctggagaggt

SEQ ID NO: 279626 - DNA, 25 bp, Artificial
  Probe
taacccctgttgtagatacagtgtc

SEQ ID NO: 279627 - DNA, 25 bp, Artificial
  Probe
ttgtaacccctgttgtagatacagt

SEQ ID NO: 279628 - DNA, 25 bp, Artificial
  Probe
atacagtgtctgagtcacttgttaa

SEQ ID NO: 279629 - DNA, 25 bp, Artificial
  Probe
ctgagtcacttgttaatgttaactt

SEQ ID NO: 279630 - DNA, 25 bp, Artificial
  Probe
tcactctccaaactttgtgtttaaa

SEQ ID NO: 279631 - DNA, 25 bp, Artificial
  Probe
cccctgttgtagatacagtgtctga

SEQ ID NO: 279632 - DNA, 25 bp, Artificial
  Probe
cctgacccgattcagtatgcctcac

SEQ ID NO: 279633 - DNA, 25 bp, Artificial
  Probe
agatacagtgtctgagtcacttgtt

SEQ ID NO: 279634 - DNA, 25 bp, Artificial
  Probe
taatgttaacttggcctgacccgat

SEQ ID NO: 279635 - DNA, 25 bp, Artificial
  Probe
ctgacccgattcagtatgcctcact

SEQ ID NO: 279636 - DNA, 25 bp, Artificial
  Probe
cagtgtctgagtcacttgttaatgt

SEQ ID NO: 279637 - DNA, 25 bp, Artificial
  Probe
ttaatgttaacttggcctgacccga

SEQ ID NO: 279638 - DNA, 25 bp, Artificial
  Probe
tctccaaactttgtgtttaaaatat

SEQ ID NO: 279639 - DNA, 25 bp, Artificial
  Probe
gttaacttggcctgacccgattcag

SEQ ID NO: 279640 - DNA, 25 bp, Artificial
  Probe
tttgtaacccctgttgtagatacag

SEQ ID NO: 279641 - DNA, 25 bp, Artificial
  Probe
ttggcctgacccgattcagtatgcc

SEQ ID NO: 279642 - DNA, 25 bp, Artificial
  Probe
acccctgttgtagatacagtgtctg

SEQ ID NO: 279643 - DNA, 25 bp, Artificial
  Probe
gtaacccctgttgtagatacagtgt

SEQ ID NO: 279644 - DNA, 25 bp, Artificial
  Probe
tacagtgtctgagtcacttgttaat

SEQ ID NO: 279645 - DNA, 25 bp, Artificial
  Probe
acagtgtctgagtcacttgttaatg

SEQ ID NO: 279646 - DNA, 25 bp, Artificial
  Probe
aacttggcctgacccgattcagtat

SEQ ID NO: 279647 - DNA, 25 bp, Artificial
  Probe
tagatacagtgtctgagtcacttgt

SEQ ID NO: 279648 - DNA, 25 bp, Artificial
  Probe
ttttgtaacccctgttgtagataca

SEQ ID NO: 279649 - DNA, 25 bp, Artificial
  Probe
tatgcctcactctccaaactttgtg

SEQ ID NO: 279650 - DNA, 25 bp, Artificial
  Probe
taacttggcctgacccgattcagta

SEQ ID NO: 279651 - DNA, 25 bp, Artificial
  Probe
gcctgacccgattcagtatgcctca

SEQ ID NO: 279652 - DNA, 25 bp, Artificial
  Probe
ttgtagatacagtgtctgagtcact

SEQ ID NO: 279653 - DNA, 25 bp, Artificial
  Probe
tgacccgattcagtatgcctcactc

SEQ ID NO: 279654 - DNA, 25 bp, Artificial
  Probe
gatacagtgtctgagtcacttgtta

SEQ ID NO: 279655 - DNA, 25 bp, Artificial
  Probe
tctgagtcacttgttaatgttaact

SEQ ID NO: 279656 - DNA, 25 bp, Artificial
  Probe
cacttgttaatgttaacttggcctg

SEQ ID NO: 279657 - DNA, 25 bp, Artificial
  Probe
tgagtcacttgttaatgttaacttg

SEQ ID NO: 279658 - DNA, 25 bp, Artificial
  Probe
tggcctgacccgattcagtatgcct

SEQ ID NO: 279659 - DNA, 25 bp, Artificial
  Probe
acttgttaatgttaacttggcctga

SEQ ID NO: 279660 - DNA, 25 bp, Artificial
  Probe
ccctgttgtagatacagtgtctgag

SEQ ID NO: 279661 - DNA, 25 bp, Artificial
  Probe
cctcactctccaaactttgtgttta

SEQ ID NO: 279662 - DNA, 25 bp, Artificial
  Probe
ggcctgacccgattcagtatgcctc

SEQ ID NO: 279663 - DNA, 25 bp, Artificial
  Probe
acccgattcagtatgcctcactctc

SEQ ID NO: 279664 - DNA, 25 bp, Artificial
  Probe
gacccgattcagtatgcctcactct

SEQ ID NO: 279665 - DNA, 25 bp, Artificial
  Probe
tgtagatacagtgtctgagtcactt

SEQ ID NO: 279666 - DNA, 25 bp, Artificial
  Probe
gttgtagatacagtgtctgagtcac

SEQ ID NO: 279667 - DNA, 25 bp, Artificial
  Probe
aacccctgttgtagatacagtgtct

SEQ ID NO: 279668 - DNA, 25 bp, Artificial
  Probe
tgtaacccctgttgtagatacagtg

SEQ ID NO: 279669 - DNA, 25 bp, Artificial
  Probe
gttaatgttaacttggcctgacccg

SEQ ID NO: 279670 - DNA, 25 bp, Artificial
  Probe
gtctgagtcacttgttaatgttaac

SEQ ID NO: 279671 - DNA, 25 bp, Artificial
  Probe
ttaacttggcctgacccgattcagt

SEQ ID NO: 279672 - DNA, 25 bp, Artificial
  Probe
ccccagtcactgctgttgtggaaaa

SEQ ID NO: 279673 - DNA, 25 bp, Artificial
  Probe
gttactggatctgtgcggcgctcct

SEQ ID NO: 279674 - DNA, 25 bp, Artificial
  Probe
cgtgccccagtcactgctgttgtgg

SEQ ID NO: 279675 - DNA, 25 bp, Artificial
  Probe
tcggcacgagctttcacttccttgt

SEQ ID NO: 279676 - DNA, 25 bp, Artificial
  Probe
ccagtcactgctgttgtggaaaatt

SEQ ID NO: 279677 - DNA, 25 bp, Artificial
  Probe
cgagctttcacttccttgtcggaga

SEQ ID NO: 279678 - DNA, 25 bp, Artificial
  Probe
agtcactgctgttgtggaaaattgg

SEQ ID NO: 279679 - DNA, 25 bp, Artificial
  Probe
cccagtcactgctgttgtggaaaat

SEQ ID NO: 279680 - DNA, 25 bp, Artificial
  Probe
cacgagctttcacttccttgtcgga

SEQ ID NO: 279681 - DNA, 25 bp, Artificial
  Probe
tgccccagtcactgctgttgtggaa

SEQ ID NO: 279682 - DNA, 25 bp, Artificial
  Probe
ttcggcacgagctttcacttccttg

SEQ ID NO: 279683 - DNA, 25 bp, Artificial
  Probe
agtcatggcgttactggatctgtgc

SEQ ID NO: 279684 - DNA, 25 bp, Artificial
  Probe
tggatctgtgcggcgctcctcgggg

SEQ ID NO: 279685 - DNA, 25 bp, Artificial
  Probe
ctgctgttgtggaaaattggcttca

SEQ ID NO: 279686 - DNA, 25 bp, Artificial
  Probe
ctggatctgtgcggcgctcctcggg

SEQ ID NO: 279687 - DNA, 25 bp, Artificial
  Probe
actgctgttgtggaaaattggcttc

SEQ ID NO: 279688 - DNA, 25 bp, Artificial
  Probe
gtcatggcgttactggatctgtgcg

SEQ ID NO: 279689 - DNA, 25 bp, Artificial
  Probe
atggcgttactggatctgtgcggcg

SEQ ID NO: 279690 - DNA, 25 bp, Artificial
  Probe
gtgccccagtcactgctgttgtgga

SEQ ID NO: 279691 - DNA, 25 bp, Artificial
  Probe
cactgctgttgtggaaaattggctt

SEQ ID NO: 279692 - DNA, 25 bp, Artificial
  Probe
ttactggatctgtgcggcgctcctc

SEQ ID NO: 279693 - DNA, 25 bp, Artificial
  Probe
gtcactgctgttgtggaaaattggc

SEQ ID NO: 279694 - DNA, 25 bp, Artificial
  Probe
tccggggctaagtagtcatggcgtt

SEQ ID NO: 279695 - DNA, 25 bp, Artificial
  Probe
gccccagtcactgctgttgtggaaa

SEQ ID NO: 279696 - DNA, 25 bp, Artificial
  Probe
gcgttactggatctgtgcggcgctc

SEQ ID NO: 279697 - DNA, 25 bp, Artificial
  Probe
ggctaagtagtcatggcgttactgg

SEQ ID NO: 279698 - DNA, 25 bp, Artificial
  Probe
gagctttcacttccttgtcggagag

SEQ ID NO: 279699 - DNA, 25 bp, Artificial
  Probe
gctttcacttccttgtcggagagtc

SEQ ID NO: 279700 - DNA, 25 bp, Artificial
  Probe
ggcgttactggatctgtgcggcgct

SEQ ID NO: 279701 - DNA, 25 bp, Artificial
  Probe
tactggatctgtgcggcgctcctcg

SEQ ID NO: 279702 - DNA, 25 bp, Artificial
  Probe
ccggggctaagtagtcatggcgtta

SEQ ID NO: 279703 - DNA, 25 bp, Artificial
  Probe
ggcacgagctttcacttccttgtcg

SEQ ID NO: 279704 - DNA, 25 bp, Artificial
  Probe
acgagctttcacttccttgtcggag

SEQ ID NO: 279705 - DNA, 25 bp, Artificial
  Probe
ccgtgccccagtcactgctgttgtg

SEQ ID NO: 279706 - DNA, 25 bp, Artificial
  Probe
cccgtgccccagtcactgctgttgt

SEQ ID NO: 279707 - DNA, 25 bp, Artificial
  Probe
cagtcactgctgttgtggaaaattg

SEQ ID NO: 279708 - DNA, 25 bp, Artificial
  Probe
tagtcatggcgttactggatctgtg

SEQ ID NO: 279709 - DNA, 25 bp, Artificial
  Probe
agtagtcatggcgttactggatctg

SEQ ID NO: 279710 - DNA, 25 bp, Artificial
  Probe
catggcgttactggatctgtgcggc

SEQ ID NO: 279711 - DNA, 25 bp, Artificial
  Probe
cgttactggatctgtgcggcgctcc

SEQ ID NO: 279712 - DNA, 25 bp, Artificial
  Probe
tcactgctgttgtggaaaattggct

SEQ ID NO: 279713 - DNA, 25 bp, Artificial
  Probe
gcacgagctttcacttccttgtcgg

SEQ ID NO: 279714 - DNA, 25 bp, Artificial
  Probe
agctttcacttccttgtcggagagt

SEQ ID NO: 279715 - DNA, 25 bp, Artificial
  Probe
tcatggcgttactggatctgtgcgg

SEQ ID NO: 279716 - DNA, 25 bp, Artificial
  Probe
gtagtcatggcgttactggatctgt

SEQ ID NO: 279717 - DNA, 25 bp, Artificial
  Probe
cggcacgagctttcacttccttgtc

SEQ ID NO: 279718 - DNA, 25 bp, Artificial
  Probe
gaccttctgcggaatctgctgcagg

SEQ ID NO: 279719 - DNA, 25 bp, Artificial
  Probe
tcttaattgaccaccagggttacat

SEQ ID NO: 279720 - DNA, 25 bp, Artificial
  Probe
ggaaaacctcttaattgaccaccag

SEQ ID NO: 279721 - DNA, 25 bp, Artificial
  Probe
tggccccagagatcatcctcagcaa

SEQ ID NO: 279722 - DNA, 25 bp, Artificial
  Probe
cagttccgatctcaaggaccttctg

SEQ ID NO: 279723 - DNA, 25 bp, Artificial
  Probe
tttgggttcgccaagagagtcaagg

SEQ ID NO: 279724 - DNA, 25 bp, Artificial
  Probe
ccttctgcggaatctgctgcaggtg

SEQ ID NO: 279725 - DNA, 25 bp, Artificial
  Probe
agagtcaagggcaggacttggacat

SEQ ID NO: 279726 - DNA, 25 bp, Artificial
  Probe
ggaaaggtccgcttcccgtcgcact

SEQ ID NO: 279727 - DNA, 25 bp, Artificial
  Probe
gtactgatctacgagatggctgctg

SEQ ID NO: 279728 - DNA, 25 bp, Artificial
  Probe
ccaagagagtcaagggcaggacttg

SEQ ID NO: 279729 - DNA, 25 bp, Artificial
  Probe
agggttacatccaggtcacagattt

SEQ ID NO: 279730 - DNA, 25 bp, Artificial
  Probe
tcgccaagagagtcaagggcaggac

SEQ ID NO: 279731 - DNA, 25 bp, Artificial
  Probe
tgcggaatctgctgcaggtggatct

SEQ ID NO: 279732 - DNA, 25 bp, Artificial
  Probe
tgatctacgagatggctgctggcta

SEQ ID NO: 279733 - DNA, 25 bp, Artificial
  Probe
ttcgccaagagagtcaagggcagga

SEQ ID NO: 279734 - DNA, 25 bp, Artificial
  Probe
acagagatctcaagccggaaaacct

SEQ ID NO: 279735 - DNA, 25 bp, Artificial
  Probe
cccgttctttgctgaccagccaatt

SEQ ID NO: 279736 - DNA, 25 bp, Artificial
  Probe
cagccaattcagatttatgagaaga

SEQ ID NO: 279737 - DNA, 25 bp, Artificial
  Probe
cccagagatcatcctcagcaagggt

SEQ ID NO: 279738 - DNA, 25 bp, Artificial
  Probe
tgggcattgggtgtactgatctacg

SEQ ID NO: 279739 - DNA, 25 bp, Artificial
  Probe
ggtcacagattttgggttcgccaag

SEQ ID NO: 279740 - DNA, 25 bp, Artificial
  Probe
tcaaggaccttctgcggaatctgct

SEQ ID NO: 279741 - DNA, 25 bp, Artificial
  Probe
tgctgaccagccaattcagatttat

SEQ ID NO: 279742 - DNA, 25 bp, Artificial
  Probe
tgggtgtactgatctacgagatggc

SEQ ID NO: 279743 - DNA, 25 bp, Artificial
  Probe
agatcatcctcagcaagggttacaa

SEQ ID NO: 279744 - DNA, 25 bp, Artificial
  Probe
taattgaccaccagggttacatcca

SEQ ID NO: 279745 - DNA, 25 bp, Artificial
  Probe
acagattttgggttcgccaagagag

SEQ ID NO: 279746 - DNA, 25 bp, Artificial
  Probe
tcaagccggaaaacctcttaattga

SEQ ID NO: 279747 - DNA, 25 bp, Artificial
  Probe
cctcatctacagagatctcaagccg

SEQ ID NO: 279748 - DNA, 25 bp, Artificial
  Probe
gaaaggtccgcttcccgtcgcactt

SEQ ID NO: 279749 - DNA, 25 bp, Artificial
  Probe
cctcagcaagggttacaataaggca

SEQ ID NO: 279750 - DNA, 25 bp, Artificial
  Probe
ctcttaattgaccaccagggttaca

SEQ ID NO: 279751 - DNA, 25 bp, Artificial
  Probe
cgtcgcacttcagttccgatctcaa

SEQ ID NO: 279752 - DNA, 25 bp, Artificial
  Probe
gacctcatctacagagatctcaagc

SEQ ID NO: 279753 - DNA, 25 bp, Artificial
  Probe
caacttcgatgactatgaagaagaa

SEQ ID NO: 279754 - DNA, 25 bp, Artificial
  Probe
tcgcacttcagttccgatctcaagg

SEQ ID NO: 279755 - DNA, 25 bp, Artificial
  Probe
gagtcaagggcaggacttggacatt

SEQ ID NO: 279756 - DNA, 25 bp, Artificial
  Probe
gttctttgctgaccagccaattcag

SEQ ID NO: 279757 - DNA, 25 bp, Artificial
  Probe
ctcaagccggaaaacctcttaattg

SEQ ID NO: 279758 - DNA, 25 bp, Artificial
  Probe
cagattttgggttcgccaagagagt

SEQ ID NO: 279759 - DNA, 25 bp, Artificial
  Probe
gtgggcattgggtgtactgatctac

SEQ ID NO: 279760 - DNA, 25 bp, Artificial
  Probe
acttcagttccgatctcaaggacct

SEQ ID NO: 279761 - DNA, 25 bp, Artificial
  Probe
tcatcctcagcaagggttacaataa

SEQ ID NO: 279762 - DNA, 25 bp, Artificial
  Probe
tgaccaccagggttacatccaggtc

SEQ ID NO: 279763 - DNA, 25 bp, Artificial
  Probe
ctacgagatggctgctggctacccc

SEQ ID NO: 279764 - DNA, 25 bp, Artificial
  Probe
tagccctggccatggctaaccctga

SEQ ID NO: 279765 - DNA, 25 bp, Artificial
  Probe
ctgatgtagccctggccatggctaa

SEQ ID NO: 279766 - DNA, 25 bp, Artificial
  Probe
acctacacgcaggtgcagacccgta

SEQ ID NO: 279767 - DNA, 25 bp, Artificial
  Probe
ataccctgcaggtggcatgccccgt

SEQ ID NO: 279768 - DNA, 25 bp, Artificial
  Probe
gaccacctatgttgtctgcaatgag

SEQ ID NO: 279769 - DNA, 25 bp, Artificial
  Probe
acgcaggtgcagacccgtagctctg

SEQ ID NO: 279770 - DNA, 25 bp, Artificial
  Probe
ctgttcacctgcaacaagtgcagga

SEQ ID NO: 279771 - DNA, 25 bp, Artificial
  Probe
cctacgccggaatgtgttgtgtggt

SEQ ID NO: 279772 - DNA, 25 bp, Artificial
  Probe
aagatgccaagaaccctggcctacg

SEQ ID NO: 279773 - DNA, 25 bp, Artificial
  Probe
gaaagatgccaagaaccctggccta

SEQ ID NO: 279774 - DNA, 25 bp, Artificial
  Probe
ctgaacctcctgcaacgctcttggt

SEQ ID NO: 279775 - DNA, 25 bp, Artificial
  Probe
cattacaccccagcagatagctgtg

SEQ ID NO: 279776 - DNA, 25 bp, Artificial
  Probe
taacctgaaagatgccaagaaccct

SEQ ID NO: 279777 - DNA, 25 bp, Artificial
  Probe
ggtggcacacagaccgacctgttca

SEQ ID NO: 279778 - DNA, 25 bp, Artificial
  Probe
aaggagatccgcaaggctatgacca

SEQ ID NO: 279779 - DNA, 25 bp, Artificial
  Probe
agcctgcctggtgtgcacctgcctg

SEQ ID NO: 279780 - DNA, 25 bp, Artificial
  Probe
gtacaagaaccgtgttcggagccga

SEQ ID NO: 279781 - DNA, 25 bp, Artificial
  Probe
tggtgccattacaccccagcagata

SEQ ID NO: 279782 - DNA, 25 bp, Artificial
  Probe
ctggtgtgcacctgcctgccctttg

SEQ ID NO: 279783 - DNA, 25 bp, Artificial
  Probe
tcttcctggatgtgggaaacactga

SEQ ID NO: 279784 - DNA, 25 bp, Artificial
  Probe
cagtgacgagctgaaggagatccgc

SEQ ID NO: 279785 - DNA, 25 bp, Artificial
  Probe
agaactgcacctacacgcaggtgca

SEQ ID NO: 279786 - DNA, 25 bp, Artificial
  Probe
ctcctgcaacgctcttggtggacac

SEQ ID NO: 279787 - DNA, 25 bp, Artificial
  Probe
cctgcaacaagtgcaggaagaagaa

SEQ ID NO: 279788 - DNA, 25 bp, Artificial
  Probe
tcgatggaagttctgctgagtcctt

SEQ ID NO: 279789 - DNA, 25 bp, Artificial
  Probe
acctgttcacctgcaacaagtgcag

SEQ ID NO: 279790 - DNA, 25 bp, Artificial
  Probe
gtagccctggccatggctaaccctg

SEQ ID NO: 279791 - DNA, 25 bp, Artificial
  Probe
tgatgacatcagaggagatggccag

SEQ ID NO: 279792 - DNA, 25 bp, Artificial
  Probe
ggaaacactgacatgaagtacaaga

SEQ ID NO: 279793 - DNA, 25 bp, Artificial
  Probe
ccggaatgtgttgtgtggtgccatt

SEQ ID NO: 279794 - DNA, 25 bp, Artificial
  Probe
ttgtactgatgtagccctggccatg

SEQ ID NO: 279795 - DNA, 25 bp, Artificial
  Probe
ccagatggcccgtacaggtggcaca

SEQ ID NO: 279796 - DNA, 25 bp, Artificial
  Probe
atggctaaccctgaacctcctgcaa

SEQ ID NO: 279797 - DNA, 25 bp, Artificial
  Probe
cctatgttgtctgcaatgagtgtgg

SEQ ID NO: 279798 - DNA, 25 bp, Artificial
  Probe
cacctgcaacaagtgcaggaagaag

SEQ ID NO: 279799 - DNA, 25 bp, Artificial
  Probe
gagtgcatcttcctggatgtgggaa

SEQ ID NO: 279800 - DNA, 25 bp, Artificial
  Probe
gaagaagaactgcacctacacgcag

SEQ ID NO: 279801 - DNA, 25 bp, Artificial
  Probe
gaaccctggcctacgccggaatgtg

SEQ ID NO: 279802 - DNA, 25 bp, Artificial
  Probe
tgttcggagccgaatctctaacctg

SEQ ID NO: 279803 - DNA, 25 bp, Artificial
  Probe
aaccgtgttcggagccgaatctcta

SEQ ID NO: 279804 - DNA, 25 bp, Artificial
  Probe
agaccgacctgttcacctgcaacaa

SEQ ID NO: 279805 - DNA, 25 bp, Artificial
  Probe
ccagcagatagctgtgatgacatca

SEQ ID NO: 279806 - DNA, 25 bp, Artificial
  Probe
ctgtgatgacatcagaggagatggc

SEQ ID NO: 279807 - DNA, 25 bp, Artificial
  Probe
ggctatgaccaaggaggccatccga

SEQ ID NO: 279808 - DNA, 25 bp, Artificial
  Probe
ttccagcctgcctggtgtgcacctg

SEQ ID NO: 279809 - DNA, 25 bp, Artificial
  Probe
agaaccctggcctacgccggaatgt

SEQ ID NO: 279810 - DNA, 25 bp, Artificial
  Probe
tgtaaggccccctgtccaggtctac

SEQ ID NO: 279811 - DNA, 25 bp, Artificial
  Probe
tgctgcgtctaagcagaaaaggctg

SEQ ID NO: 279812 - DNA, 25 bp, Artificial
  Probe
ttcgaagcttgtaaggccccctgtc

SEQ ID NO: 279813 - DNA, 25 bp, Artificial
  Probe
acatccgtgctgtcccgacaggtgc

SEQ ID NO: 279814 - DNA, 25 bp, Artificial
  Probe
ttttcgaagcttgtaaggccccctg

SEQ ID NO: 279815 - DNA, 25 bp, Artificial
  Probe
actgaacctggaggtcaagactgac

SEQ ID NO: 279816 - DNA, 25 bp, Artificial
  Probe
aacatccgtgctgtcccgacaggtg

SEQ ID NO: 279817 - DNA, 25 bp, Artificial
  Probe
agcaacatccgtgctgtcccgacag

SEQ ID NO: 279818 - DNA, 25 bp, Artificial
  Probe
tgagagactgtcacctgtgtgagcg

SEQ ID NO: 279819 - DNA, 25 bp, Artificial
  Probe
gctgtcccgacaggtgcggagtttc

SEQ ID NO: 279820 - DNA, 25 bp, Artificial
  Probe
tcgaagcttgtaaggccccctgtcc

SEQ ID NO: 279821 - DNA, 25 bp, Artificial
  Probe
tatgtctgcaaagagcaagattcag

SEQ ID NO: 279822 - DNA, 25 bp, Artificial
  Probe
ttgtctttggagcacaataaaatgc

SEQ ID NO: 279823 - DNA, 25 bp, Artificial
  Probe
caacatccgtgctgtcccgacaggt

SEQ ID NO: 279824 - DNA, 25 bp, Artificial
  Probe
tgctgtcccgacaggtgcggagttt

SEQ ID NO: 279825 - DNA, 25 bp, Artificial
  Probe
tgaacctggaggtcaagactgaccc

SEQ ID NO: 279826 - DNA, 25 bp, Artificial
  Probe
cgacaggtgcggagtttcagcacat

SEQ ID NO: 279827 - DNA, 25 bp, Artificial
  Probe
gacaggtgcggagtttcagcacatc

SEQ ID NO: 279828 - DNA, 25 bp, Artificial
  Probe
ctgcgtctaagcagaaaaggctgga

SEQ ID NO: 279829 - DNA, 25 bp, Artificial
  Probe
gatggccgcaccagcaacatccgtg

SEQ ID NO: 279830 - DNA, 25 bp, Artificial
  Probe
gctgcgtctaagcagaaaaggctgg

SEQ ID NO: 279831 - DNA, 25 bp, Artificial
  Probe
cagatactgaacctggaggtcaaga

SEQ ID NO: 279832 - DNA, 25 bp, Artificial
  Probe
ccagatactgaacctggaggtcaag

SEQ ID NO: 279833 - DNA, 25 bp, Artificial
  Probe
atgtctgcaaagagcaagattcaga

SEQ ID NO: 279834 - DNA, 25 bp, Artificial
  Probe
tgtctttggagcacaataaaatgct

SEQ ID NO: 279835 - DNA, 25 bp, Artificial
  Probe
cgtctaagcagaaaaggctggacca

SEQ ID NO: 279836 - DNA, 25 bp, Artificial
  Probe
ctgaacctggaggtcaagactgacc

SEQ ID NO: 279837 - DNA, 25 bp, Artificial
  Probe
acaggtgcggagtttcagcacatct

SEQ ID NO: 279838 - DNA, 25 bp, Artificial
  Probe
gcaacatccgtgctgtcccgacagg

SEQ ID NO: 279839 - DNA, 25 bp, Artificial
  Probe
tgtcccgacaggtgcggagtttcag

SEQ ID NO: 279840 - DNA, 25 bp, Artificial
  Probe
ctgtcccgacaggtgcggagtttca

SEQ ID NO: 279841 - DNA, 25 bp, Artificial
  Probe
tttcgaagcttgtaaggccccctgt

SEQ ID NO: 279842 - DNA, 25 bp, Artificial
  Probe
caccgagagcacaacatctctctgg

SEQ ID NO: 279843 - DNA, 25 bp, Artificial
  Probe
agctctacccagctgaacgggactc

SEQ ID NO: 279844 - DNA, 25 bp, Artificial
  Probe
accctggtgcatgtcccttctggga

SEQ ID NO: 279845 - DNA, 25 bp, Artificial
  Probe
gaagggacaaatctcaccctggtgc

SEQ ID NO: 279846 - DNA, 25 bp, Artificial
  Probe
ggtgcatgtcccttctgggattatc

SEQ ID NO: 279847 - DNA, 25 bp, Artificial
  Probe
agcccccaagtgagccagcgttggg

SEQ ID NO: 279848 - DNA, 25 bp, Artificial
  Probe
ctacccagctgaacgggactccgta

SEQ ID NO: 279849 - DNA, 25 bp, Artificial
  Probe
gggacaaatctcaccctggtgcatg

SEQ ID NO: 279850 - DNA, 25 bp, Artificial
  Probe
gctgcagaggctgcacagagcccca

SEQ ID NO: 279851 - DNA, 25 bp, Artificial
  Probe
cccaagtgagccagcgttggggtca

SEQ ID NO: 279852 - DNA, 25 bp, Artificial
  Probe
ctctggtctggaagggacaaatctc

SEQ ID NO: 279853 - DNA, 25 bp, Artificial
  Probe
gtcccttctgggattatctattcac

SEQ ID NO: 279854 - DNA, 25 bp, Artificial
  Probe
ccagcgttggggtcagaacaggacc

SEQ ID NO: 279855 - DNA, 25 bp, Artificial
  Probe
cagcgttggggtcagaacaggaccc

SEQ ID NO: 279856 - DNA, 25 bp, Artificial
  Probe
cagctaagagctgcagaggctgcac

SEQ ID NO: 279857 - DNA, 25 bp, Artificial
  Probe
atcatggcctacaccgagagcacaa

SEQ ID NO: 279858 - DNA, 25 bp, Artificial
  Probe
gactccgtattcatcatggcctaca

SEQ ID NO: 279859 - DNA, 25 bp, Artificial
  Probe
ccgagagcacaacatctctctggtc

SEQ ID NO: 279860 - DNA, 25 bp, Artificial
  Probe
gggattatctattcacaaccagtag

SEQ ID NO: 279861 - DNA, 25 bp, Artificial
  Probe
gcagctctacccagctgaacgggac

SEQ ID NO: 279862 - DNA, 25 bp, Artificial
  Probe
aatctcaccctggtgcatgtccctt

SEQ ID NO: 279863 - DNA, 25 bp, Artificial
  Probe
gagagcacaacatctctctggtctg

SEQ ID NO: 279864 - DNA, 25 bp, Artificial
  Probe
tcaccctggtgcatgtcccttctgg

SEQ ID NO: 279865 - DNA, 25 bp, Artificial
  Probe
cagctgaacgggactccgtattcat

SEQ ID NO: 279866 - DNA, 25 bp, Artificial
  Probe
tctacccagctgaacgggactccgt

SEQ ID NO: 279867 - DNA, 25 bp, Artificial
  Probe
gcgttggggtcagaacaggacccca

SEQ ID NO: 279868 - DNA, 25 bp, Artificial
  Probe
ccccagctaagagctgcagaggctg

SEQ ID NO: 279869 - DNA, 25 bp, Artificial
  Probe
gggtcagaacaggaccccagctaag

SEQ ID NO: 279870 - DNA, 25 bp, Artificial
  Probe
ggaccccagctaagagctgcagagg

SEQ ID NO: 279871 - DNA, 25 bp, Artificial
  Probe
tccgtattcatcatggcctacaccg

SEQ ID NO: 279872 - DNA, 25 bp, Artificial
  Probe
ctattcacaaccagtagctcctgag

SEQ ID NO: 279873 - DNA, 25 bp, Artificial
  Probe
ggattatctattcacaaccagtagc

SEQ ID NO: 279874 - DNA, 25 bp, Artificial
  Probe
aacgggactccgtattcatcatggc

SEQ ID NO: 279875 - DNA, 25 bp, Artificial
  Probe
tggcctacaccgagagcacaacatc

SEQ ID NO: 279876 - DNA, 25 bp, Artificial
  Probe
aaatctcaccctggtgcatgtccct

SEQ ID NO: 279877 - DNA, 25 bp, Artificial
  Probe
tcaggcagctctacccagctgaacg

SEQ ID NO: 279878 - DNA, 25 bp, Artificial
  Probe
ccgtattcatcatggcctacaccga

SEQ ID NO: 279879 - DNA, 25 bp, Artificial
  Probe
ccctggtgcatgtcccttctgggat

SEQ ID NO: 279880 - DNA, 25 bp, Artificial
  Probe
gcatgtcccttctgggattatctat

SEQ ID NO: 279881 - DNA, 25 bp, Artificial
  Probe
ggtcagaacaggaccccagctaaga

SEQ ID NO: 279882 - DNA, 25 bp, Artificial
  Probe
ggcctacaccgagagcacaacatct

SEQ ID NO: 279883 - DNA, 25 bp, Artificial
  Probe
ttcatcatggcctacaccgagagca

SEQ ID NO: 279884 - DNA, 25 bp, Artificial
  Probe
gaacaggaccccagctaagagctgc

SEQ ID NO: 279885 - DNA, 25 bp, Artificial
  Probe
agctgcagaggctgcacagagcccc

SEQ ID NO: 279886 - DNA, 25 bp, Artificial
  Probe
acaccgagagcacaacatctctctg

SEQ ID NO: 279887 - DNA, 25 bp, Artificial
  Probe
gctgaacgggactccgtattcatca

SEQ ID NO: 279888 - DNA, 25 bp, Artificial
  Probe
tgagcagagcctgtatgagggttct

SEQ ID NO: 279889 - DNA, 25 bp, Artificial
  Probe
tgctccaaggtgtaatgagctttga

SEQ ID NO: 279890 - DNA, 25 bp, Artificial
  Probe
gtgaattctccagtatttaaggtac

SEQ ID NO: 279891 - DNA, 25 bp, Artificial
  Probe
caccacaataggaaacttagaggtc

SEQ ID NO: 279892 - DNA, 25 bp, Artificial
  Probe
gaaatatttccctgagcagagcctg

SEQ ID NO: 279893 - DNA, 25 bp, Artificial
  Probe
atccaacactacaacctaggggctg

SEQ ID NO: 279894 - DNA, 25 bp, Artificial
  Probe
cctgtatgagggttctgggaactga

SEQ ID NO: 279895 - DNA, 25 bp, Artificial
  Probe
ttatctagagtgagggtctcactat

SEQ ID NO: 279896 - DNA, 25 bp, Artificial
  Probe
cctgcagcagagagaggagcagtac

SEQ ID NO: 279897 - DNA, 25 bp, Artificial
  Probe
tgtgttcccggtttcccacggtgca

SEQ ID NO: 279898 - DNA, 25 bp, Artificial
  Probe
tgttccgctcttcctcacttgctgt

SEQ ID NO: 279899 - DNA, 25 bp, Artificial
  Probe
cttgtggtcttttccccagggtcat

SEQ ID NO: 279900 - DNA, 25 bp, Artificial
  Probe
tagattactccaacttgaagaaatg

SEQ ID NO: 279901 - DNA, 25 bp, Artificial
  Probe
tcagaatgtgtaaaccccaacaaga

SEQ ID NO: 279902 - DNA, 25 bp, Artificial
  Probe
aaaccatagtgaagccagggcttgg

SEQ ID NO: 279903 - DNA, 25 bp, Artificial
  Probe
atagctagactttggtcagagtgtc

SEQ ID NO: 279904 - DNA, 25 bp, Artificial
  Probe
gatgagcacaaaagctcccttgcat

SEQ ID NO: 279905 - DNA, 25 bp, Artificial
  Probe
taattactaggatgagcacaaaagc

SEQ ID NO: 279906 - DNA, 25 bp, Artificial
  Probe
ctccagtatttaaggtacagaacta

SEQ ID NO: 279907 - DNA, 25 bp, Artificial
  Probe
gaactgagtgtgagcctgcagcaga

SEQ ID NO: 279908 - DNA, 25 bp, Artificial
  Probe
tgaagaaatgccaacacattacagt

SEQ ID NO: 279909 - DNA, 25 bp, Artificial
  Probe
ccaacaagaaatccaggattagagc

SEQ ID NO: 279910 - DNA, 25 bp, Artificial
  Probe
cttgatccaacactacaacctaggg

SEQ ID NO: 279911 - DNA, 25 bp, Artificial
  Probe
cttgtttctgcacttaagagttgtt

SEQ ID NO: 279912 - DNA, 25 bp, Artificial
  Probe
tgtgaggtcgcttcccttgtggtct

SEQ ID NO: 279913 - DNA, 25 bp, Artificial
  Probe
gggactcatgggaacaccatgcacg

SEQ ID NO: 279914 - DNA, 25 bp, Artificial
  Probe
ttacttagtatcttaaaggcaacag

SEQ ID NO: 279915 - DNA, 25 bp, Artificial
  Probe
agattggacagtttttctctgctgt

SEQ ID NO: 279916 - DNA, 25 bp, Artificial
  Probe
ttctctgctgtgtatgtttccatag

SEQ ID NO: 279917 - DNA, 25 bp, Artificial
  Probe
tatcattatctagagtgagggtctc

SEQ ID NO: 279918 - DNA, 25 bp, Artificial
  Probe
aaagtatgctagctacacttcaatg

SEQ ID NO: 279919 - DNA, 25 bp, Artificial
  Probe
gtcaaccctcaaagtgtgaaatgtg

SEQ ID NO: 279920 - DNA, 25 bp, Artificial
  Probe
ttgcatagagtcttggagcgcccac

SEQ ID NO: 279921 - DNA, 25 bp, Artificial
  Probe
tgctccgttctgaggcttctgtgct

SEQ ID NO: 279922 - DNA, 25 bp, Artificial
  Probe
tcatccaaaagattggacagttttt

SEQ ID NO: 279923 - DNA, 25 bp, Artificial
  Probe
ttctgggaactgagtgtgagcctgc

SEQ ID NO: 279924 - DNA, 25 bp, Artificial
  Probe
gcttcccttgtggtcttttccccag

SEQ ID NO: 279925 - DNA, 25 bp, Artificial
  Probe
ctggccagggtgtctgtcagaatgt

SEQ ID NO: 279926 - DNA, 25 bp, Artificial
  Probe
gtgtatgtttccatagattactcca

SEQ ID NO: 279927 - DNA, 25 bp, Artificial
  Probe
ggcaggcttctgtgaggtcgcttcc

SEQ ID NO: 279928 - DNA, 25 bp, Artificial
  Probe
cacgggctttagttttgactattag

SEQ ID NO: 279929 - DNA, 25 bp, Artificial
  Probe
ttttccccagggtcatccaaaagat

SEQ ID NO: 279930 - DNA, 25 bp, Artificial
  Probe
ggggtgcaatcaccacaataggaaa

SEQ ID NO: 279931 - DNA, 25 bp, Artificial
  Probe
gaacatctctgctgttccgctcttc

SEQ ID NO: 279932 - DNA, 25 bp, Artificial
  Probe
caacacattacagtgggtaagagat

SEQ ID NO: 279933 - DNA, 25 bp, Artificial
  Probe
gattactccaacttgaagaaatgcc

SEQ ID NO: 279934 - DNA, 25 bp, Artificial
  Probe
tggcccagcctatcaaaaaagtgca

SEQ ID NO: 279935 - DNA, 25 bp, Artificial
  Probe
ggcccagcctatcaaaaaagtgcaa

SEQ ID NO: 279936 - DNA, 25 bp, Artificial
  Probe
catcacagaagatactggcccagcc

SEQ ID NO: 279937 - DNA, 25 bp, Artificial
  Probe
attctcatgggtatagacttcagga

SEQ ID NO: 279938 - DNA, 25 bp, Artificial
  Probe
gtatcatcacagaagatactggccc

SEQ ID NO: 279939 - DNA, 25 bp, Artificial
  Probe
tcattttcttcagactcaaaggaag

SEQ ID NO: 279940 - DNA, 25 bp, Artificial
  Probe
cctggtcaggttttaggccagtaag

SEQ ID NO: 279941 - DNA, 25 bp, Artificial
  Probe
tatcatcacagaagatactggccca

SEQ ID NO: 279942 - DNA, 25 bp, Artificial
  Probe
ggaacctggtcaggttttaggccag

SEQ ID NO: 279943 - DNA, 25 bp, Artificial
  Probe
ttgtatcatcacagaagatactggc

SEQ ID NO: 279944 - DNA, 25 bp, Artificial
  Probe
atagcataccttgacaatgtaaagg

SEQ ID NO: 279945 - DNA, 25 bp, Artificial
  Probe
cattttcttcagactcaaaggaaga

SEQ ID NO: 279946 - DNA, 25 bp, Artificial
  Probe
gaacctggtcaggttttaggccagt

SEQ ID NO: 279947 - DNA, 25 bp, Artificial
  Probe
aattctcatgggtatagacttcagg

SEQ ID NO: 279948 - DNA, 25 bp, Artificial
  Probe
tcacagaagatactggcccagccta

SEQ ID NO: 279949 - DNA, 25 bp, Artificial
  Probe
agctgtattgaaatgctgggaaacc

SEQ ID NO: 279950 - DNA, 25 bp, Artificial
  Probe
taagctaacagatgtacagaaggca

SEQ ID NO: 279951 - DNA, 25 bp, Artificial
  Probe
ctggtcaggttttaggccagtaaga

SEQ ID NO: 279952 - DNA, 25 bp, Artificial
  Probe
agcataccttgacaatgtaaaggtt

SEQ ID NO: 279953 - DNA, 25 bp, Artificial
  Probe
ggcattctgagttgggaaggaacct

SEQ ID NO: 279954 - DNA, 25 bp, Artificial
  Probe
actggcccagcctatcaaaaaagtg

SEQ ID NO: 279955 - DNA, 25 bp, Artificial
  Probe
tgacttactagctgtattgaaatgc

SEQ ID NO: 279956 - DNA, 25 bp, Artificial
  Probe
ctggcccagcctatcaaaaaagtgc

SEQ ID NO: 279957 - DNA, 25 bp, Artificial
  Probe
attttcttcagactcaaaggaagaa

SEQ ID NO: 279958 - DNA, 25 bp, Artificial
  Probe
cttactagctgtattgaaatgctgg

SEQ ID NO: 279959 - DNA, 25 bp, Artificial
  Probe
aggcattctgagttgggaaggaacc

SEQ ID NO: 279960 - DNA, 25 bp, Artificial
  Probe
tagcataccttgacaatgtaaaggt

SEQ ID NO: 279961 - DNA, 25 bp, Artificial
  Probe
ttctcatgggtatagacttcaggat

SEQ ID NO: 279962 - DNA, 25 bp, Artificial
  Probe
tatagcataccttgacaatgtaaag

SEQ ID NO: 279963 - DNA, 25 bp, Artificial
  Probe
tttgtatcatcacagaagatactgg

SEQ ID NO: 279964 - DNA, 25 bp, Artificial
  Probe
gacttactagctgtattgaaatgct

SEQ ID NO: 279965 - DNA, 25 bp, Artificial
  Probe
attcttaattctcatgggtatagac

SEQ ID NO: 279966 - DNA, 25 bp, Artificial
  Probe
tcttcagactcaaaggaagaagtat

SEQ ID NO: 279967 - DNA, 25 bp, Artificial
  Probe
cacagaagatactggcccagcctat

SEQ ID NO: 279968 - DNA, 25 bp, Artificial
  Probe
tttaggccagtaagattcttaattc

SEQ ID NO: 279969 - DNA, 25 bp, Artificial
  Probe
atcacagaagatactggcccagcct

SEQ ID NO: 279970 - DNA, 25 bp, Artificial
  Probe
tcttaattctcatgggtatagactt

SEQ ID NO: 279971 - DNA, 25 bp, Artificial
  Probe
gcccagcctatcaaaaaagtgcaat

SEQ ID NO: 279972 - DNA, 25 bp, Artificial
  Probe
ttcttcagactcaaaggaagaagta

SEQ ID NO: 279973 - DNA, 25 bp, Artificial
  Probe
atcatcacagaagatactggcccag

SEQ ID NO: 279974 - DNA, 25 bp, Artificial
  Probe
tgtatcatcacagaagatactggcc

SEQ ID NO: 279975 - DNA, 25 bp, Artificial
  Probe
ttttcttcagactcaaaggaagaag

SEQ ID NO: 279976 - DNA, 25 bp, Artificial
  Probe
agatactggcccagcctatcaaaaa

SEQ ID NO: 279977 - DNA, 25 bp, Artificial
  Probe
ttcttaattctcatgggtatagact

SEQ ID NO: 279978 - DNA, 25 bp, Artificial
  Probe
tttcttcagactcaaaggaagaagt

SEQ ID NO: 279979 - DNA, 25 bp, Artificial
  Probe
ttttgtatcatcacagaagatactg

SEQ ID NO: 279980 - DNA, 25 bp, Artificial
  Probe
cagaaggtctcaggttatcagtggt

SEQ ID NO: 279981 - DNA, 25 bp, Artificial
  Probe
taccctccaaagttgcaccagtttg

SEQ ID NO: 279982 - DNA, 25 bp, Artificial
  Probe
agaatgaccagacctgccatcgcct

SEQ ID NO: 279983 - DNA, 25 bp, Artificial
  Probe
taagccccctgaccattgtgtcctg

SEQ ID NO: 279984 - DNA, 25 bp, Artificial
  Probe
gcacttccggggagttcccatggaa

SEQ ID NO: 279985 - DNA, 25 bp, Artificial
  Probe
gttacatggcatcacaacagaatat

SEQ ID NO: 279986 - DNA, 25 bp, Artificial
  Probe
cttattgggatttcagccttattta

SEQ ID NO: 279987 - DNA, 25 bp, Artificial
  Probe
gatgagcactttctgcagcgccacc

SEQ ID NO: 279988 - DNA, 25 bp, Artificial
  Probe
agttcttctggactggctgatggag

SEQ ID NO: 279989 - DNA, 25 bp, Artificial
  Probe
tattgcttctaaacttgaggaaatc

SEQ ID NO: 279990 - DNA, 25 bp, Artificial
  Probe
gccatcgcctccaaagacagtggtg

SEQ ID NO: 279991 - DNA, 25 bp, Artificial
  Probe
gcttggacttgctggacaaagccca

SEQ ID NO: 279992 - DNA, 25 bp, Artificial
  Probe
tgaaggcccttaagtggcgtttaag

SEQ ID NO: 279993 - DNA, 25 bp, Artificial
  Probe
ccagtttgcttatgttactgatggt

SEQ ID NO: 279994 - DNA, 25 bp, Artificial
  Probe
ggagttcccatggaagactcccaca

SEQ ID NO: 279995 - DNA, 25 bp, Artificial
  Probe
ggatgaaattcttaccatggaactg

SEQ ID NO: 279996 - DNA, 25 bp, Artificial
  Probe
cttgctccggggatgaaattcttac

SEQ ID NO: 279997 - DNA, 25 bp, Artificial
  Probe
cccacacagcagtaagaagcagagc

SEQ ID NO: 279998 - DNA, 25 bp, Artificial
  Probe
tgagagcagttcttctggactggct

SEQ ID NO: 279999 - DNA, 25 bp, Artificial
  Probe
tgggaagttccaagctcaagcactt

SEQ ID NO: 280000 - DNA, 25 bp, Artificial
  Probe
ttgatgcagaaggtctcaggttatc

SEQ ID NO: 280001 - DNA, 25 bp, Artificial
  Probe
cttaccatggaactgatgatgatga

SEQ ID NO: 280002 - DNA, 25 bp, Artificial
  Probe
ccacaccaacagcttggacttgctg

SEQ ID NO: 280003 - DNA, 25 bp, Artificial
  Probe
ctcgctgcttctgctttgtatcatt

SEQ ID NO: 280004 - DNA, 25 bp, Artificial
  Probe
tcctggctgaatgtttatgtccaag

SEQ ID NO: 280005 - DNA, 25 bp, Artificial
  Probe
ggaaatctaccctccaaagttgcac

SEQ ID NO: 280006 - DNA, 25 bp, Artificial
  Probe
gcttctaaacttgaggaaatctacc

SEQ ID NO: 280007 - DNA, 25 bp, Artificial
  Probe
ttatccgggagatgggaagttccaa

SEQ ID NO: 280008 - DNA, 25 bp, Artificial
  Probe
agagatgagcactttctgcagcgcc

SEQ ID NO: 280009 - DNA, 25 bp, Artificial
  Probe
ttacctgagagatgagcactttctg

SEQ ID NO: 280010 - DNA, 25 bp, Artificial
  Probe
gtatcatttttcctcgttggagttg

SEQ ID NO: 280011 - DNA, 25 bp, Artificial
  Probe
agacagaatgaccagacctgccatc

SEQ ID NO: 280012 - DNA, 25 bp, Artificial
  Probe
gaagtctataagctccacagagaga

SEQ ID NO: 280013 - DNA, 25 bp, Artificial
  Probe
tgaatgtttatgtccaagtggccta

SEQ ID NO: 280014 - DNA, 25 bp, Artificial
  Probe
cgacacgggagaagtgctgatgcct

SEQ ID NO: 280015 - DNA, 25 bp, Artificial
  Probe
ctcgttggagttgatgcagaaggtc

SEQ ID NO: 280016 - DNA, 25 bp, Artificial
  Probe
attcgccatggttatccgggagatg

SEQ ID NO: 280017 - DNA, 25 bp, Artificial
  Probe
gagaagtgctgatgcctcagtaccc

SEQ ID NO: 280018 - DNA, 25 bp, Artificial
  Probe
tggaagactcccacaacatccagac

SEQ ID NO: 280019 - DNA, 25 bp, Artificial
  Probe
acttgaggaaatctaccctccaaag

SEQ ID NO: 280020 - DNA, 25 bp, Artificial
  Probe
tgtcaagtggatggttccattcgcc

SEQ ID NO: 280021 - DNA, 25 bp, Artificial
  Probe
tgatgaaggcccttaagtggcgttt

SEQ ID NO: 280022 - DNA, 25 bp, Artificial
  Probe
tgctccggggatgaaattcttacca

SEQ ID NO: 280023 - DNA, 25 bp, Artificial
  Probe
cacacagcagtaagaagcagagcag

SEQ ID NO: 280024 - DNA, 25 bp, Artificial
  Probe
aacacttttacagcttattgggatt

SEQ ID NO: 280025 - DNA, 25 bp, Artificial
  Probe
gttatccgggagatgggaagttcca

SEQ ID NO: 280026 - DNA, 25 bp, Artificial
  Probe
ctttgtcgcatcgatatgtatgatg

SEQ ID NO: 280027 - DNA, 25 bp, Artificial
  Probe
atcagaaaaactaacacaggagtgc

SEQ ID NO: 280028 - DNA, 25 bp, Artificial
  Probe
cagctccactgttgccaaactttgt

SEQ ID NO: 280029 - DNA, 25 bp, Artificial
  Probe
attgattagcagtgccgtcacctca

SEQ ID NO: 280030 - DNA, 25 bp, Artificial
  Probe
tcgtggtgtggacagtggactctac

SEQ ID NO: 280031 - DNA, 25 bp, Artificial
  Probe
gtggactctacctcggcatgaacga

SEQ ID NO: 280032 - DNA, 25 bp, Artificial
  Probe
ctaacacaggagtgcgtgttcagag

SEQ ID NO: 280033 - DNA, 25 bp, Artificial
  Probe
ctaagccaaagttgacaaagacagt

SEQ ID NO: 280034 - DNA, 25 bp, Artificial
  Probe
gtgtcttcacttgagcccttaaaac

SEQ ID NO: 280035 - DNA, 25 bp, Artificial
  Probe
gaccctgacaaagtacctgaactat

SEQ ID NO: 280036 - DNA, 25 bp, Artificial
  Probe
cttactggctggtcctcctggaggg

SEQ ID NO: 280037 - DNA, 25 bp, Artificial
  Probe
cacaggagtgcgtgttcagagaaca

SEQ ID NO: 280038 - DNA, 25 bp, Artificial
  Probe
tgacaaagtacctgaactatataag

SEQ ID NO: 280039 - DNA, 25 bp, Artificial
  Probe
cacttactggctggtcctcctggag

SEQ ID NO: 280040 - DNA, 25 bp, Artificial
  Probe
gctggtcctcctggagggctgccta

SEQ ID NO: 280041 - DNA, 25 bp, Artificial
  Probe
gcttggatgaggacttgccgatttg

SEQ ID NO: 280042 - DNA, 25 bp, Artificial
  Probe
aagcacgtggacaccggaaggagat

SEQ ID NO: 280043 - DNA, 25 bp, Artificial
  Probe
cagaaaaactaacacaggagtgcgt

SEQ ID NO: 280044 - DNA, 25 bp, Artificial
  Probe
ctcctggagggctgcctagggccac

SEQ ID NO: 280045 - DNA, 25 bp, Artificial
  Probe
aaactttgtcgcatcgatatgtatg

SEQ ID NO: 280046 - DNA, 25 bp, Artificial
  Probe
tccactgttgccaaactttgtcgca

SEQ ID NO: 280047 - DNA, 25 bp, Artificial
  Probe
gaggacttgccgatttgctctgcac

SEQ ID NO: 280048 - DNA, 25 bp, Artificial
  Probe
cgcatcgatatgtatgatgggagct

SEQ ID NO: 280049 - DNA, 25 bp, Artificial
  Probe
tgccaaactttgtcgcatcgatatg

SEQ ID NO: 280050 - DNA, 25 bp, Artificial
  Probe
ggttcttattgattagcagtgccgt

SEQ ID NO: 280051 - DNA, 25 bp, Artificial
  Probe
gtacctgaactatataaggatattc

SEQ ID NO: 280052 - DNA, 25 bp, Artificial
  Probe
ctctacctcggcatgaacgagaagg

SEQ ID NO: 280053 - DNA, 25 bp, Artificial
  Probe
cattcgtggtgtggacagtggactc

SEQ ID NO: 280054 - DNA, 25 bp, Artificial
  Probe
tggatgaggacttgccgatttgctc

SEQ ID NO: 280055 - DNA, 25 bp, Artificial
  Probe
cgtggacaccggaaggagatactat

SEQ ID NO: 280056 - DNA, 25 bp, Artificial
  Probe
ctgcctagggccacttgcttgattt

SEQ ID NO: 280057 - DNA, 25 bp, Artificial
  Probe
caggagtgcgtgttcagagaacagt

SEQ ID NO: 280058 - DNA, 25 bp, Artificial
  Probe
cctggtcagcattcgtggtgtggac

SEQ ID NO: 280059 - DNA, 25 bp, Artificial
  Probe
aaactaacacaggagtgcgtgttca

SEQ ID NO: 280060 - DNA, 25 bp, Artificial
  Probe
cagtggactctacctcggcatgaac

SEQ ID NO: 280061 - DNA, 25 bp, Artificial
  Probe
ctcttccaacctgtacaagcacgtg

SEQ ID NO: 280062 - DNA, 25 bp, Artificial
  Probe
caaagtacctgaactatataaggat

SEQ ID NO: 280063 - DNA, 25 bp, Artificial
  Probe
tcagctccactgttgccaaactttg

SEQ ID NO: 280064 - DNA, 25 bp, Artificial
  Probe
caaagacagtgtcttcacttgagcc

SEQ ID NO: 280065 - DNA, 25 bp, Artificial
  Probe
accagtggaccctgacaaagtacct

SEQ ID NO: 280066 - DNA, 25 bp, Artificial
  Probe
ctacctcggcatgaacgagaagggg

SEQ ID NO: 280067 - DNA, 25 bp, Artificial
  Probe
gctctgcacttactggctggtcctc

SEQ ID NO: 280068 - DNA, 25 bp, Artificial
  Probe
tattctaagccaaagttgacaaaga

SEQ ID NO: 280069 - DNA, 25 bp, Artificial
  Probe
gtggacaccggaaggagatactatg

SEQ ID NO: 280070 - DNA, 25 bp, Artificial
  Probe
ccactataaatgcttcatgcggtgg

SEQ ID NO: 280071 - DNA, 25 bp, Artificial
  Probe
taaccactataaatgcttcatgcgg

SEQ ID NO: 280072 - DNA, 25 bp, Artificial
  Probe
atctttgccggcaagcagctggaag

SEQ ID NO: 280073 - DNA, 25 bp, Artificial
  Probe
gaggtggagcccagtgacaccatcg

SEQ ID NO: 280074 - DNA, 25 bp, Artificial
  Probe
gactacaacatccagaaagagtcaa

SEQ ID NO: 280075 - DNA, 25 bp, Artificial
  Probe
ggtggagcccagtgacaccatcgag

SEQ ID NO: 280076 - DNA, 25 bp, Artificial
  Probe
ggagcccagtgacaccatcgagaac

SEQ ID NO: 280077 - DNA, 25 bp, Artificial
  Probe
ttcgttaacaggtcaaaatgcaaat

SEQ ID NO: 280078 - DNA, 25 bp, Artificial
  Probe
ccatcgagaacgtgaaggccaagat

SEQ ID NO: 280079 - DNA, 25 bp, Artificial
  Probe
tcgtgaagaccctgaccggcaagac

SEQ ID NO: 280080 - DNA, 25 bp, Artificial
  Probe
catcgagaacgtgaaggccaagatc

SEQ ID NO: 280081 - DNA, 25 bp, Artificial
  Probe
acgtgaaggccaagatccaggataa

SEQ ID NO: 280082 - DNA, 25 bp, Artificial
  Probe
tttgccggcaagcagctggaagatg

SEQ ID NO: 280083 - DNA, 25 bp, Artificial
  Probe
gaaggccaagatccaggataaagag

SEQ ID NO: 280084 - DNA, 25 bp, Artificial
  Probe
atccagaaagagtcaaccctgcacc

SEQ ID NO: 280085 - DNA, 25 bp, Artificial
  Probe
ggcatgcagatcttcgtgaagaccc

SEQ ID NO: 280086 - DNA, 25 bp, Artificial
  Probe
ccctgaccagcagaggctcatcttt

SEQ ID NO: 280087 - DNA, 25 bp, Artificial
  Probe
cagtgacaccatcgagaacgtgaag

SEQ ID NO: 280088 - DNA, 25 bp, Artificial
  Probe
accatcgagaacgtgaaggccaaga

SEQ ID NO: 280089 - DNA, 25 bp, Artificial
  Probe
aaggccaagatccaggataaagagg

SEQ ID NO: 280090 - DNA, 25 bp, Artificial
  Probe
gtgaagaccctgaccggcaagacca

SEQ ID NO: 280091 - DNA, 25 bp, Artificial
  Probe
ccaagatccaggataaagagggcat

SEQ ID NO: 280092 - DNA, 25 bp, Artificial
  Probe
gtttgttccttcatcgcattcgtta

SEQ ID NO: 280093 - DNA, 25 bp, Artificial
  Probe
cagaaagagtcaaccctgcaccttg

SEQ ID NO: 280094 - DNA, 25 bp, Artificial
  Probe
cggcaagaccatcaccctggaggtg

SEQ ID NO: 280095 - DNA, 25 bp, Artificial
  Probe
tgaccggcaagaccatcaccctgga

SEQ ID NO: 280096 - DNA, 25 bp, Artificial
  Probe
tgaccggcaagaccatcaccctaga

SEQ ID NO: 280097 - DNA, 25 bp, Artificial
  Probe
gacaccatcgagaacgtgaaggcca

SEQ ID NO: 280098 - DNA, 25 bp, Artificial
  Probe
agaccatcaccctagaggtggagcc

SEQ ID NO: 280099 - DNA, 25 bp, Artificial
  Probe
aagagtcaaccctgcaccttgtcct

SEQ ID NO: 280100 - DNA, 25 bp, Artificial
  Probe
tgactacaacatccagaaagagtca

SEQ ID NO: 280101 - DNA, 25 bp, Artificial
  Probe
aggccaagatccaggataaagaggg

SEQ ID NO: 280102 - DNA, 25 bp, Artificial
  Probe
aacgtgaaggccaagatccaggata

SEQ ID NO: 280103 - DNA, 25 bp, Artificial
  Probe
atcttcgtgaagaccctgaccggca

SEQ ID NO: 280104 - DNA, 25 bp, Artificial
  Probe
caacatccagaaagagtcaaccctg

SEQ ID NO: 280105 - DNA, 25 bp, Artificial
  Probe
tggagcccagtgacaccatcgagaa

SEQ ID NO: 280106 - DNA, 25 bp, Artificial
  Probe
atgcagatcttcgtgaagaccctga

SEQ ID NO: 280107 - DNA, 25 bp, Artificial
  Probe
agtgacaccatcgagaacgtgaagg

SEQ ID NO: 280108 - DNA, 25 bp, Artificial
  Probe
ggcaagaccatcaccctagaggtgg

SEQ ID NO: 280109 - DNA, 25 bp, Artificial
  Probe
cctgaccagcagaggctcatctttg

SEQ ID NO: 280110 - DNA, 25 bp, Artificial
  Probe
gagcccagtgacaccatcgagaacg

SEQ ID NO: 280111 - DNA, 25 bp, Artificial
  Probe
ccctagaggtggagcccagtgacac

SEQ ID NO: 280112 - DNA, 25 bp, Artificial
  Probe
acatccagaaagagtcaaccctgca

SEQ ID NO: 280113 - DNA, 25 bp, Artificial
  Probe
gaggctcatctttgccggcaagcag

SEQ ID NO: 280114 - DNA, 25 bp, Artificial
  Probe
accagcagaggctcatctttgccgg

SEQ ID NO: 280115 - DNA, 25 bp, Artificial
  Probe
ttccttcatcgcattcgttaacagg

SEQ ID NO: 280116 - DNA, 25 bp, Artificial
  Probe
cgtgaaggccaagatccaggataaa

SEQ ID NO: 280117 - DNA, 25 bp, Artificial
  Probe
aggtggagcccagtgacaccatcga

SEQ ID NO: 280118 - DNA, 25 bp, Artificial
  Probe
ggtctgaggcagtgccttgtcactc

SEQ ID NO: 280119 - DNA, 25 bp, Artificial
  Probe
gcttcaataatgttcaactgagtcc

SEQ ID NO: 280120 - DNA, 25 bp, Artificial
  Probe
cccgcttcaataatgttcaactgag

SEQ ID NO: 280121 - DNA, 25 bp, Artificial
  Probe
caataatgttcaactgagtcctgta

SEQ ID NO: 280122 - DNA, 25 bp, Artificial
  Probe
tcttccagcagaaagtcctcggcca

SEQ ID NO: 280123 - DNA, 25 bp, Artificial
  Probe
tcttccgaaagcttggtctgaggca

SEQ ID NO: 280124 - DNA, 25 bp, Artificial
  Probe
tcggccattaaaactgagaagcatc

SEQ ID NO: 280125 - DNA, 25 bp, Artificial
  Probe
atcctccgtcatatggcccagacgg

SEQ ID NO: 280126 - DNA, 25 bp, Artificial
  Probe
agattagtgggatttgccctcagaa

SEQ ID NO: 280127 - DNA, 25 bp, Artificial
  Probe
ataatgttcaactgagtcctgtaga

SEQ ID NO: 280128 - DNA, 25 bp, Artificial
  Probe
tgggcgcctccttggcattataaca

SEQ ID NO: 280129 - DNA, 25 bp, Artificial
  Probe
cctcagaagagacctgacaattgca

SEQ ID NO: 280130 - DNA, 25 bp, Artificial
  Probe
gacatgagtccttttacagtgacag

SEQ ID NO: 280131 - DNA, 25 bp, Artificial
  Probe
gaccagctataatggctttcctgtt

SEQ ID NO: 280132 - DNA, 25 bp, Artificial
  Probe
tgttcaactgagtcctgtagatgag

SEQ ID NO: 280133 - DNA, 25 bp, Artificial
  Probe
tcatatggcccagacggcaaaccaa

SEQ ID NO: 280134 - DNA, 25 bp, Artificial
  Probe
attaatgagaccagctataatggct

SEQ ID NO: 280135 - DNA, 25 bp, Artificial
  Probe
aatgttcaactgagtcctgtagatg

SEQ ID NO: 280136 - DNA, 25 bp, Artificial
  Probe
tgaggcagtgccttgtcactcacaa

SEQ ID NO: 280137 - DNA, 25 bp, Artificial
  Probe
ctataatggctttcctgttataatg

SEQ ID NO: 280138 - DNA, 25 bp, Artificial
  Probe
agaagagacctgacaattgcaatag

SEQ ID NO: 280139 - DNA, 25 bp, Artificial
  Probe
aagtcctcggccattaaaactgaga

SEQ ID NO: 280140 - DNA, 25 bp, Artificial
  Probe
agacctgacaattgcaatagaaagt

SEQ ID NO: 280141 - DNA, 25 bp, Artificial
  Probe
gcatccttgacatgagtccttttac

SEQ ID NO: 280142 - DNA, 25 bp, Artificial
  Probe
ataatggctttcctgttataatgtc

SEQ ID NO: 280143 - DNA, 25 bp, Artificial
  Probe
caactgagtcctgtagatgaggaga

SEQ ID NO: 280144 - DNA, 25 bp, Artificial
  Probe
cctcggccattaaaactgagaagca

SEQ ID NO: 280145 - DNA, 25 bp, Artificial
  Probe
aagcttggtctgaggcagtgccttg

SEQ ID NO: 280146 - DNA, 25 bp, Artificial
  Probe
tctcttccagcagaaagtcctcggc

SEQ ID NO: 280147 - DNA, 25 bp, Artificial
  Probe
tgggatttgccctcagaagagacct

SEQ ID NO: 280148 - DNA, 25 bp, Artificial
  Probe
atccttgacatgagtccttttacag

SEQ ID NO: 280149 - DNA, 25 bp, Artificial
  Probe
agcagaaagtcctcggccattaaaa

SEQ ID NO: 280150 - DNA, 25 bp, Artificial
  Probe
attagtgggatttgccctcagaaga

SEQ ID NO: 280151 - DNA, 25 bp, Artificial
  Probe
ttcaataatgttcaactgagtcctg

SEQ ID NO: 280152 - DNA, 25 bp, Artificial
  Probe
agatatcctccgtcatatggcccag

SEQ ID NO: 280153 - DNA, 25 bp, Artificial
  Probe
tgagaccagctataatggctttcct

SEQ ID NO: 280154 - DNA, 25 bp, Artificial
  Probe
aaactgagaagcatccttgacatga

SEQ ID NO: 280155 - DNA, 25 bp, Artificial
  Probe
ttggtctgaggcagtgccttgtcac

SEQ ID NO: 280156 - DNA, 25 bp, Artificial
  Probe
aggcagtgccttgtcactcacaatg

SEQ ID NO: 280157 - DNA, 25 bp, Artificial
  Probe
ttcgtttgttgaatagcacaattct

SEQ ID NO: 280158 - DNA, 25 bp, Artificial
  Probe
agctataatggctttcctgttataa

SEQ ID NO: 280159 - DNA, 25 bp, Artificial
  Probe
tttgacacaggacaatatgacagta

SEQ ID NO: 280160 - DNA, 25 bp, Artificial
  Probe
ttgacatgagtccttttacagtgac

SEQ ID NO: 280161 - DNA, 25 bp, Artificial
  Probe
catctcttccagcagaaagtcctcg

SEQ ID NO: 280162 - DNA, 25 bp, Artificial
  Probe
atctcagagattagtgggatttgcc

SEQ ID NO: 280163 - DNA, 25 bp, Artificial
  Probe
gctttcctgttataatgtcaaaaga

SEQ ID NO: 280164 - DNA, 25 bp, Artificial
  Probe
gaatggtacatgtcttccagggtct

SEQ ID NO: 280165 - DNA, 25 bp, Artificial
  Probe
tcaagtctggccacaactgtacttc

SEQ ID NO: 280166 - DNA, 25 bp, Artificial
  Probe
ccaagtgcactttctaatgtctctg

SEQ ID NO: 280167 - DNA, 25 bp, Artificial
  Probe
ctattgataatactccaggtttgtt

SEQ ID NO: 280168 - DNA, 25 bp, Artificial
  Probe
cctctggaatggtacatgtcttcca

SEQ ID NO: 280169 - DNA, 25 bp, Artificial
  Probe
ccgaagcttcagactaaaacagctg

SEQ ID NO: 280170 - DNA, 25 bp, Artificial
  Probe
tggcttcttcaaagccacagcattt

SEQ ID NO: 280171 - DNA, 25 bp, Artificial
  Probe
aacactggcttcttcaaagccacag

SEQ ID NO: 280172 - DNA, 25 bp, Artificial
  Probe
ggtcttttgaactggcaggtatcta

SEQ ID NO: 280173 - DNA, 25 bp, Artificial
  Probe
cacattggacttgttttaatactag

SEQ ID NO: 280174 - DNA, 25 bp, Artificial
  Probe
ggagccttcggttttccctcataca

SEQ ID NO: 280175 - DNA, 25 bp, Artificial
  Probe
tagtacagtacaacccaagtgcact

SEQ ID NO: 280176 - DNA, 25 bp, Artificial
  Probe
caaattaactatgttctgtaagcag

SEQ ID NO: 280177 - DNA, 25 bp, Artificial
  Probe
ctaatttgtacacattggacttgtt

SEQ ID NO: 280178 - DNA, 25 bp, Artificial
  Probe
atctaatgtgccatatgtttgtttc

SEQ ID NO: 280179 - DNA, 25 bp, Artificial
  Probe
tactagaatctaatgtgccatatgt

SEQ ID NO: 280180 - DNA, 25 bp, Artificial
  Probe
gtaagcagaccgttaactataggag

SEQ ID NO: 280181 - DNA, 25 bp, Artificial
  Probe
gttcactctgctcttctgcatccag

SEQ ID NO: 280182 - DNA, 25 bp, Artificial
  Probe
tgggtcctgaggaatcaagatacaa

SEQ ID NO: 280183 - DNA, 25 bp, Artificial
  Probe
aagccaatctggtctaataacactg

SEQ ID NO: 280184 - DNA, 25 bp, Artificial
  Probe
ctatgttctgtaagcagaccgttaa

SEQ ID NO: 280185 - DNA, 25 bp, Artificial
  Probe
ggagccttcggtttaactatgttct

SEQ ID NO: 280186 - DNA, 25 bp, Artificial
  Probe
acccatgtagtacttgaaaatcaag

SEQ ID NO: 280187 - DNA, 25 bp, Artificial
  Probe
agaccgttaactataggagccttcg

SEQ ID NO: 280188 - DNA, 25 bp, Artificial
  Probe
tgttctgtaagcagaccgttaacta

SEQ ID NO: 280189 - DNA, 25 bp, Artificial
  Probe
ggttttccctcatacaagtgtctaa

SEQ ID NO: 280190 - DNA, 25 bp, Artificial
  Probe
tacttgaaaatcaagtctggccaca

SEQ ID NO: 280191 - DNA, 25 bp, Artificial
  Probe
cagaccgttaactataggagccttc

SEQ ID NO: 280192 - DNA, 25 bp, Artificial
  Probe
tgatactgtcttactactgacacag

SEQ ID NO: 280193 - DNA, 25 bp, Artificial
  Probe
ggtctaataacactggcttcttcaa

SEQ ID NO: 280194 - DNA, 25 bp, Artificial
  Probe
actgaatctttaagtacccatgtag

SEQ ID NO: 280195 - DNA, 25 bp, Artificial
  Probe
gaaagaagaggcactcccttcaccc

SEQ ID NO: 280196 - DNA, 25 bp, Artificial
  Probe
tcttctgcatccagggctgatgtgt

SEQ ID NO: 280197 - DNA, 25 bp, Artificial
  Probe
agccacagcatttctaatccagctg

SEQ ID NO: 280198 - DNA, 25 bp, Artificial
  Probe
ctataggagccttcggtttaactat

SEQ ID NO: 280199 - DNA, 25 bp, Artificial
  Probe
ctagaatctaatgtgccatatgttt

SEQ ID NO: 280200 - DNA, 25 bp, Artificial
  Probe
gatactgtcttactactgacacaga

SEQ ID NO: 280201 - DNA, 25 bp, Artificial
  Probe
ctaatccagctgtgccgaagcttca

SEQ ID NO: 280202 - DNA, 25 bp, Artificial
  Probe
gtacttcagaggaccctagtacagt

SEQ ID NO: 280203 - DNA, 25 bp, Artificial
  Probe
gtacacattggacttgttttaatac

SEQ ID NO: 280204 - DNA, 25 bp, Artificial
  Probe
taagcagaccgttaactataggagc

SEQ ID NO: 280205 - DNA, 25 bp, Artificial
  Probe
ctttaagtacccatgtagtacttga

SEQ ID NO: 280206 - DNA, 25 bp, Artificial
  Probe
gactattgataatactccaggtttg

SEQ ID NO: 280207 - DNA, 25 bp, Artificial
  Probe
ccagctgtgccgaagcttcagacta

SEQ ID NO: 280208 - DNA, 25 bp, Artificial
  Probe
gtgccatatgtttgtttcacacatt

SEQ ID NO: 280209 - DNA, 25 bp, Artificial
  Probe
tgaaaatcaagtctggccacaactg

SEQ ID NO: 280210 - DNA, 25 bp, Artificial
  Probe
tccttgagagaatttcctgaggcaa

SEQ ID NO: 280211 - DNA, 25 bp, Artificial
  Probe
atgctgaatccttccatgttctaag

SEQ ID NO: 280212 - DNA, 25 bp, Artificial
  Probe
cttgagagaatttcctgaggcaaat

SEQ ID NO: 280213 - DNA, 25 bp, Artificial
  Probe
gataaacagatgcttcaccatcatg

SEQ ID NO: 280214 - DNA, 25 bp, Artificial
  Probe
cgtccttgagagaatttcctgaggc

SEQ ID NO: 280215 - DNA, 25 bp, Artificial
  Probe
ggctgtgttccctgacgagattttg

SEQ ID NO: 280216 - DNA, 25 bp, Artificial
  Probe
caaatgttaactctttgtctgtagt

SEQ ID NO: 280217 - DNA, 25 bp, Artificial
  Probe
taagcgtccttgagagaatttcctg

SEQ ID NO: 280218 - DNA, 25 bp, Artificial
  Probe
atgttcaaagacagtaacgaaagac

SEQ ID NO: 280219 - DNA, 25 bp, Artificial
  Probe
gttccctgacgagattttgttgcat

SEQ ID NO: 280220 - DNA, 25 bp, Artificial
  Probe
gcttggacttaaccaggctggaact

SEQ ID NO: 280221 - DNA, 25 bp, Artificial
  Probe
atcatgttcaaagacagtaacgaaa

SEQ ID NO: 280222 - DNA, 25 bp, Artificial
  Probe
aagacagggctgtgttccctgacga

SEQ ID NO: 280223 - DNA, 25 bp, Artificial
  Probe
cagtatcccgggtcccttcattctt

SEQ ID NO: 280224 - DNA, 25 bp, Artificial
  Probe
tctaatcatataagcgtccttgaga

SEQ ID NO: 280225 - DNA, 25 bp, Artificial
  Probe
tttcctgaggcaaatgttaactctt

SEQ ID NO: 280226 - DNA, 25 bp, Artificial
  Probe
acctgagtgtagcagtgtgaagtac

SEQ ID NO: 280227 - DNA, 25 bp, Artificial
  Probe
ttcagcttggacttaaccaggctgg

SEQ ID NO: 280228 - DNA, 25 bp, Artificial
  Probe
tcaaggttttgtactaccaacagta

SEQ ID NO: 280229 - DNA, 25 bp, Artificial
  Probe
acagggctgtgttccctgacgagat

SEQ ID NO: 280230 - DNA, 25 bp, Artificial
  Probe
cctgagtgtagcagtgtgaagtaca

SEQ ID NO: 280231 - DNA, 25 bp, Artificial
  Probe
gcaaatgttaactctttgtctgtag

SEQ ID NO: 280232 - DNA, 25 bp, Artificial
  Probe
ttctaagatggcttagaagcaaatc

SEQ ID NO: 280233 - DNA, 25 bp, Artificial
  Probe
cttccatgttctaagatggcttaga

SEQ ID NO: 280234 - DNA, 25 bp, Artificial
  Probe
tgtactaccaacagtatcccgggtc

SEQ ID NO: 280235 - DNA, 25 bp, Artificial
  Probe
gtctaatcatataagcgtccttgag

SEQ ID NO: 280236 - DNA, 25 bp, Artificial
  Probe
atcatataagcgtccttgagagaat

SEQ ID NO: 280237 - DNA, 25 bp, Artificial
  Probe
ctatacctgagtgtagcagtgtgaa

SEQ ID NO: 280238 - DNA, 25 bp, Artificial
  Probe
atttcctgaggcaaatgttaactct

SEQ ID NO: 280239 - DNA, 25 bp, Artificial
  Probe
ctggcatcaacaaatactcgtaatg

SEQ ID NO: 280240 - DNA, 25 bp, Artificial
  Probe
gcatcaacaaatactcgtaatgctg

SEQ ID NO: 280241 - DNA, 25 bp, Artificial
  Probe
tttcaaggttttgtactaccaacag

SEQ ID NO: 280242 - DNA, 25 bp, Artificial
  Probe
gtttctggcatcaacaaatactcgt

SEQ ID NO: 280243 - DNA, 25 bp, Artificial
  Probe
gttttgtactaccaacagtatcccg

SEQ ID NO: 280244 - DNA, 25 bp, Artificial
  Probe
caactatcagtaaactaatgagaag

SEQ ID NO: 280245 - DNA, 25 bp, Artificial
  Probe
ccgcggccgccgaattcagcttgga

SEQ ID NO: 280246 - DNA, 25 bp, Artificial
  Probe
gtaatgctgaatccttccatgttct

SEQ ID NO: 280247 - DNA, 25 bp, Artificial
  Probe
attatcctactatacctgagtgtag

SEQ ID NO: 280248 - DNA, 25 bp, Artificial
  Probe
actcgtaatgctgaatccttccatg

SEQ ID NO: 280249 - DNA, 25 bp, Artificial
  Probe
ccctgacgagattttgttgcatgtg

SEQ ID NO: 280250 - DNA, 25 bp, Artificial
  Probe
cagcttggacttaaccaggctggaa

SEQ ID NO: 280251 - DNA, 25 bp, Artificial
  Probe
ccatgttctaagatggcttagaagc

SEQ ID NO: 280252 - DNA, 25 bp, Artificial
  Probe
agcgtccttgagagaatttcctgag

SEQ ID NO: 280253 - DNA, 25 bp, Artificial
  Probe
gtatcatgttcaaagacagtaacga

SEQ ID NO: 280254 - DNA, 25 bp, Artificial
  Probe
gcttcaccatcatgccaaacaaagg

SEQ ID NO: 280255 - DNA, 25 bp, Artificial
  Probe
ggtgtttctggcatcaacaaatact

SEQ ID NO: 280256 - DNA, 25 bp, Artificial
  Probe
ccaaggagcagatcagacggttgga

SEQ ID NO: 280257 - DNA, 25 bp, Artificial
  Probe
tccctggccaaggagcagatcagac

SEQ ID NO: 280258 - DNA, 25 bp, Artificial
  Probe
accgccgaaaatgcactctccctgg

SEQ ID NO: 280259 - DNA, 25 bp, Artificial
  Probe
cgaaaatgcactctccctggccaag

SEQ ID NO: 280260 - DNA, 25 bp, Artificial
  Probe
tctccctggccaaggagcagatcag

SEQ ID NO: 280261 - DNA, 25 bp, Artificial
  Probe
aggagcagatcagacggttggagca

SEQ ID NO: 280262 - DNA, 25 bp, Artificial
  Probe
gaaaatgcactctccctggccaagg

SEQ ID NO: 280263 - DNA, 25 bp, Artificial
  Probe
ccgaaaatgcactctccctggccaa

SEQ ID NO: 280264 - DNA, 25 bp, Artificial
  Probe
ctggccaaggagcagatcagacggt

SEQ ID NO: 280265 - DNA, 25 bp, Artificial
  Probe
ctccctggccaaggagcagatcaga

SEQ ID NO: 280266 - DNA, 25 bp, Artificial
  Probe
agcagatcagacggttggagcatag

SEQ ID NO: 280267 - DNA, 25 bp, Artificial
  Probe
agatcagacggttggagcatagcga

SEQ ID NO: 280268 - DNA, 25 bp, Artificial
  Probe
cctggccaaggagcagatcagacgg

SEQ ID NO: 280269 - DNA, 25 bp, Artificial
  Probe
ggagcagatcagacggttggagcat

SEQ ID NO: 280270 - DNA, 25 bp, Artificial
  Probe
ccctggccaaggagcagatcagacg

SEQ ID NO: 280271 - DNA, 25 bp, Artificial
  Probe
ccgccgaaaatgcactctccctggc

SEQ ID NO: 280272 - DNA, 25 bp, Artificial
  Probe
gcagatcagacggttggagcatagc

SEQ ID NO: 280273 - DNA, 25 bp, Artificial
  Probe
tggccaaggagcagatcagacggtt

SEQ ID NO: 280274 - DNA, 25 bp, Artificial
  Probe
cgccgaaaatgcactctccctggcc

SEQ ID NO: 280275 - DNA, 25 bp, Artificial
  Probe
ctctccctggccaaggagcagatca

SEQ ID NO: 280276 - DNA, 25 bp, Artificial
  Probe
cagatcagacggttggagcatagcg

SEQ ID NO: 280277 - DNA, 25 bp, Artificial
  Probe
gatcagacggttggagcatagcgag

SEQ ID NO: 280278 - DNA, 25 bp, Artificial
  Probe
gccgaaaatgcactctccctggcca

SEQ ID NO: 280279 - DNA, 25 bp, Artificial
  Probe
cactctccctggccaaggagcagat

SEQ ID NO: 280280 - DNA, 25 bp, Artificial
  Probe
gagcagatcagacggttggagcata

SEQ ID NO: 280281 - DNA, 25 bp, Artificial
  Probe
actctccctggccaaggagcagatc

SEQ ID NO: 280282 - DNA, 25 bp, Artificial
  Probe
tgctggaagcggaacggtaaattcg

SEQ ID NO: 280283 - DNA, 25 bp, Artificial
  Probe
tagacattctttgttagcacctaag

SEQ ID NO: 280284 - DNA, 25 bp, Artificial
  Probe
gtgacttctagttccaaagttacct

SEQ ID NO: 280285 - DNA, 25 bp, Artificial
  Probe
ggccttgcatacttaaacatctaga

SEQ ID NO: 280286 - DNA, 25 bp, Artificial
  Probe
ctgtgcagtgccacattgttaattt

SEQ ID NO: 280287 - DNA, 25 bp, Artificial
  Probe
accctgcgggccttgcatacttaaa

SEQ ID NO: 280288 - DNA, 25 bp, Artificial
  Probe
atctacaaaaggaggacagagaccc

SEQ ID NO: 280289 - DNA, 25 bp, Artificial
  Probe
gacttctagttccaaagttaccttg

SEQ ID NO: 280290 - DNA, 25 bp, Artificial
  Probe
agttaccttggcttagtgattgcat

SEQ ID NO: 280291 - DNA, 25 bp, Artificial
  Probe
ttatagcgccccagcgagttccgtg

SEQ ID NO: 280292 - DNA, 25 bp, Artificial
  Probe
cttaaagtgacttctagttccaaag

SEQ ID NO: 280293 - DNA, 25 bp, Artificial
  Probe
ctcttctgaatggaaatttatctgc

SEQ ID NO: 280294 - DNA, 25 bp, Artificial
  Probe
ttctagttccaaagttaccttggct

SEQ ID NO: 280295 - DNA, 25 bp, Artificial
  Probe
tttgagtcccttttacaaagcttcg

SEQ ID NO: 280296 - DNA, 25 bp, Artificial
  Probe
gactgactgctctgacatcaataat

SEQ ID NO: 280297 - DNA, 25 bp, Artificial
  Probe
aagactatctacaaaaggaggacag

SEQ ID NO: 280298 - DNA, 25 bp, Artificial
  Probe
ccttttacaaagcttcgtacttgag

SEQ ID NO: 280299 - DNA, 25 bp, Artificial
  Probe
cttcgtacttgaggatgtgagtctt

SEQ ID NO: 280300 - DNA, 25 bp, Artificial
  Probe
taaagtgacttctagttccaaagtt

SEQ ID NO: 280301 - DNA, 25 bp, Artificial
  Probe
ctcaaatatcacttacaggctgcag

SEQ ID NO: 280302 - DNA, 25 bp, Artificial
  Probe
ggtcctgtgcagtgccacattgtta

SEQ ID NO: 280303 - DNA, 25 bp, Artificial
  Probe
gacatcatgagcagggatacactca

SEQ ID NO: 280304 - DNA, 25 bp, Artificial
  Probe
tataccaggagctgggaggtaactc

SEQ ID NO: 280305 - DNA, 25 bp, Artificial
  Probe
ccaaagttaccttggcttagtgatt

SEQ ID NO: 280306 - DNA, 25 bp, Artificial
  Probe
ggctgtgttctggacttaaagtgac

SEQ ID NO: 280307 - DNA, 25 bp, Artificial
  Probe
agcttcgtacttgaggatgtgagtc

SEQ ID NO: 280308 - DNA, 25 bp, Artificial
  Probe
cattgttaatttctgcgtagtgatc

SEQ ID NO: 280309 - DNA, 25 bp, Artificial
  Probe
catcaataatcatggctgtgttctg

SEQ ID NO: 280310 - DNA, 25 bp, Artificial
  Probe
tggtagacatcatgagcagggatac

SEQ ID NO: 280311 - DNA, 25 bp, Artificial
  Probe
catggctgtgttctggacttaaagt

SEQ ID NO: 280312 - DNA, 25 bp, Artificial
  Probe
gactgctctgacatcaataatcatg

SEQ ID NO: 280313 - DNA, 25 bp, Artificial
  Probe
tagttccaaagttaccttggcttag

SEQ ID NO: 280314 - DNA, 25 bp, Artificial
  Probe
caaagcttcgtacttgaggatgtga

SEQ ID NO: 280315 - DNA, 25 bp, Artificial
  Probe
cttagtgattgcatctcgtttgtgg

SEQ ID NO: 280316 - DNA, 25 bp, Artificial
  Probe
cttggcttagtgattgcatctcgtt

SEQ ID NO: 280317 - DNA, 25 bp, Artificial
  Probe
tgaaccaagaactttgagtcccttt

SEQ ID NO: 280318 - DNA, 25 bp, Artificial
  Probe
ggacagagaccctgcgggccttgca

SEQ ID NO: 280319 - DNA, 25 bp, Artificial
  Probe
tgattgcatctcgtttgtggtagac

SEQ ID NO: 280320 - DNA, 25 bp, Artificial
  Probe
aatatcacttacaggctgcagaaaa

SEQ ID NO: 280321 - DNA, 25 bp, Artificial
  Probe
tttataccaggagctgggaggtaac

SEQ ID NO: 280322 - DNA, 25 bp, Artificial
  Probe
tgttctggacttaaagtgacttcta

SEQ ID NO: 280323 - DNA, 25 bp, Artificial
  Probe
cgtttgtggtagacatcatgagcag

SEQ ID NO: 280324 - DNA, 25 bp, Artificial
  Probe
atttcccatgctctcttctgaatgg

SEQ ID NO: 280325 - DNA, 25 bp, Artificial
  Probe
aggaatgactgactgctctgacatc

SEQ ID NO: 280326 - DNA, 25 bp, Artificial
  Probe
tgagtcccttttacaaagcttcgta

SEQ ID NO: 280327 - DNA, 25 bp, Artificial
  Probe
ataatcatggctgtgttctggactt

SEQ ID NO: 280328 - DNA, 25 bp, Artificial
  Probe
ggcgccccggactctttcgagactc

SEQ ID NO: 280329 - DNA, 25 bp, Artificial
  Probe
cgcgggacgcatgcgcggactagat

SEQ ID NO: 280330 - DNA, 25 bp, Artificial
  Probe
caccaggtccccgcgtattgagccc

SEQ ID NO: 280331 - DNA, 25 bp, Artificial
  Probe
cgccccggactctttcgagactcgg

SEQ ID NO: 280332 - DNA, 25 bp, Artificial
  Probe
cggactctttcgagactcggtgccc

SEQ ID NO: 280333 - DNA, 25 bp, Artificial
  Probe
caggtccccgcgtattgagcccgag

SEQ ID NO: 280334 - DNA, 25 bp, Artificial
  Probe
cccggactctttcgagactcggtgc

SEQ ID NO: 280335 - DNA, 25 bp, Artificial
  Probe
gacgcatgcgcggactagatgcggt

SEQ ID NO: 280336 - DNA, 25 bp, Artificial
  Probe
gcccccggactcgacaagctggacc

SEQ ID NO: 280337 - DNA, 25 bp, Artificial
  Probe
gtccccgcgtattgagcccgagcgc

SEQ ID NO: 280338 - DNA, 25 bp, Artificial
  Probe
gggacgcatgcgcggactagatgcg

SEQ ID NO: 280339 - DNA, 25 bp, Artificial
  Probe
cggactagatgcggtggggggggcg

SEQ ID NO: 280340 - DNA, 25 bp, Artificial
  Probe
tactctggatggggaccccgagcgc

SEQ ID NO: 280341 - DNA, 25 bp, Artificial
  Probe
tctttcgagactcggtgcccccgga

SEQ ID NO: 280342 - DNA, 25 bp, Artificial
  Probe
gggcgccccggactctttcgagact

SEQ ID NO: 280343 - DNA, 25 bp, Artificial
  Probe
agactcggtgcccccggactcgaca

SEQ ID NO: 280344 - DNA, 25 bp, Artificial
  Probe
tagatgcggtggggggggcgccccg

SEQ ID NO: 280345 - DNA, 25 bp, Artificial
  Probe
agcaccaggtccccgcgtattgagc

SEQ ID NO: 280346 - DNA, 25 bp, Artificial
  Probe
gactcgacaagctggaccccccttt

SEQ ID NO: 280347 - DNA, 25 bp, Artificial
  Probe
cgcgtattgagcccgagcgcgggac

SEQ ID NO: 280348 - DNA, 25 bp, Artificial
  Probe
cgcatgcgcggactagatgcggtgg

SEQ ID NO: 280349 - DNA, 25 bp, Artificial
  Probe
ggtccccgcgtattgagcccgagcg

SEQ ID NO: 280350 - DNA, 25 bp, Artificial
  Probe
tccccgcgtattgagcccgagcgcg

SEQ ID NO: 280351 - DNA, 25 bp, Artificial
  Probe
gagcgcgggacgcatgcgcggacta

SEQ ID NO: 280352 - DNA, 25 bp, Artificial
  Probe
ggtgcccccggactcgacaagctgg

SEQ ID NO: 280353 - DNA, 25 bp, Artificial
  Probe
gccccggactctttcgagactcggt

SEQ ID NO: 280354 - DNA, 25 bp, Artificial
  Probe
cgtattgagcccgagcgcgggacgc

SEQ ID NO: 280355 - DNA, 25 bp, Artificial
  Probe
tgcccccggactcgacaagctggac

SEQ ID NO: 280356 - DNA, 25 bp, Artificial
  Probe
ctctggatggggaccccgagcgcac

SEQ ID NO: 280357 - DNA, 25 bp, Artificial
  Probe
gacaagctggacccccctttactct

SEQ ID NO: 280358 - DNA, 25 bp, Artificial
  Probe
tcgacaagctggacccccctttact

SEQ ID NO: 280359 - DNA, 25 bp, Artificial
  Probe
ccaggtccccgcgtattgagcccga

SEQ ID NO: 280360 - DNA, 25 bp, Artificial
  Probe
gactctttcgagactcggtgccccc

SEQ ID NO: 280361 - DNA, 25 bp, Artificial
  Probe
ctttactctggatggggaccccgag

SEQ ID NO: 280362 - DNA, 25 bp, Artificial
  Probe
gtgcccccggactcgacaagctgga

SEQ ID NO: 280363 - DNA, 25 bp, Artificial
  Probe
ggactctttcgagactcggtgcccc

SEQ ID NO: 280364 - DNA, 25 bp, Artificial
  Probe
cggactcgacaagctggacccccct

SEQ ID NO: 280365 - DNA, 25 bp, Artificial
  Probe
aggtccccgcgtattgagcccgagc

SEQ ID NO: 280366 - DNA, 25 bp, Artificial
  Probe
ccggactctttcgagactcggtgcc

SEQ ID NO: 280367 - DNA, 25 bp, Artificial
  Probe
gagcccgagcgcgggacgcatgcgc

SEQ ID NO: 280368 - DNA, 25 bp, Artificial
  Probe
tgcgcggactagatgcggtgggggg

SEQ ID NO: 280369 - DNA, 25 bp, Artificial
  Probe
cgcggactagatgcggtgggggggg

SEQ ID NO: 280370 - DNA, 25 bp, Artificial
  Probe
gactagatgcggtggggggggcgcc

SEQ ID NO: 280371 - DNA, 25 bp, Artificial
  Probe
ccccggactctttcgagactcggtg

SEQ ID NO: 280372 - DNA, 25 bp, Artificial
  Probe
catgcgcggactagatgcggtgggg

SEQ ID NO: 280373 - DNA, 25 bp, Artificial
  Probe
attgagcccgagcgcgggacgcatg

SEQ ID NO: 280374 - DNA, 25 bp, Artificial
  Probe
tcacaatccaagtagaagctacgtg

SEQ ID NO: 280375 - DNA, 25 bp, Artificial
  Probe
atctacaaggtgctgcaggttgaaa

SEQ ID NO: 280376 - DNA, 25 bp, Artificial
  Probe
ggctcacaatccaagtagaagctac

SEQ ID NO: 280377 - DNA, 25 bp, Artificial
  Probe
gaacactgaggctcacaatccaagt

SEQ ID NO: 280378 - DNA, 25 bp, Artificial
  Probe
tacgtggatctacaaggtgctgcag

SEQ ID NO: 280379 - DNA, 25 bp, Artificial
  Probe
tccaagtagaagctacgtggatcta

SEQ ID NO: 280380 - DNA, 25 bp, Artificial
  Probe
gacagacatatttatgccttataga

SEQ ID NO: 280381 - DNA, 25 bp, Artificial
  Probe
gatctacaaggtgctgcaggttgaa

SEQ ID NO: 280382 - DNA, 25 bp, Artificial
  Probe
ctgaggctcacaatccaagtagaag

SEQ ID NO: 280383 - DNA, 25 bp, Artificial
  Probe
cacaatccaagtagaagctacgtgg

SEQ ID NO: 280384 - DNA, 25 bp, Artificial
  Probe
ctacaaggtgctgcaggttgaaaat

SEQ ID NO: 280385 - DNA, 25 bp, Artificial
  Probe
gtagaagctacgtggatctacaagg

SEQ ID NO: 280386 - DNA, 25 bp, Artificial
  Probe
gtaccaaatctgacatattaagctg

SEQ ID NO: 280387 - DNA, 25 bp, Artificial
  Probe
gtggatctacaaggtgctgcaggtt

SEQ ID NO: 280388 - DNA, 25 bp, Artificial
  Probe
tgaggctcacaatccaagtagaagc

SEQ ID NO: 280389 - DNA, 25 bp, Artificial
  Probe
aatctgacatattaagctgaatgac

SEQ ID NO: 280390 - DNA, 25 bp, Artificial
  Probe
gttttccagggcacagtcaccacgt

SEQ ID NO: 280391 - DNA, 25 bp, Artificial
  Probe
agaagctacgtggatctacaaggtg

SEQ ID NO: 280392 - DNA, 25 bp, Artificial
  Probe
ctcacaatccaagtagaagctacgt

SEQ ID NO: 280393 - DNA, 25 bp, Artificial
  Probe
gaggctcacaatccaagtagaagct

SEQ ID NO: 280394 - DNA, 25 bp, Artificial
  Probe
actgaggctcacaatccaagtagaa

SEQ ID NO: 280395 - DNA, 25 bp, Artificial
  Probe
tggatctacaaggtgctgcaggttg

SEQ ID NO: 280396 - DNA, 25 bp, Artificial
  Probe
ttatagtgaacactgaggctcacaa

SEQ ID NO: 280397 - DNA, 25 bp, Artificial
  Probe
tctacaaggtgctgcaggttgaaaa

SEQ ID NO: 280398 - DNA, 25 bp, Artificial
  Probe
tattagttttccagggcacagtcac

SEQ ID NO: 280399 - DNA, 25 bp, Artificial
  Probe
acactgaggctcacaatccaagtag

SEQ ID NO: 280400 - DNA, 25 bp, Artificial
  Probe
ctacgtggatctacaaggtgctgca

SEQ ID NO: 280401 - DNA, 25 bp, Artificial
  Probe
acgtggatctacaaggtgctgcagg

SEQ ID NO: 280402 - DNA, 25 bp, Artificial
  Probe
aagctacgtggatctacaaggtgct

SEQ ID NO: 280403 - DNA, 25 bp, Artificial
  Probe
tatagtgaacactgaggctcacaat

SEQ ID NO: 280404 - DNA, 25 bp, Artificial
  Probe
aatattagttttccagggcacagtc

SEQ ID NO: 280405 - DNA, 25 bp, Artificial
  Probe
aacactgaggctcacaatccaagta

SEQ ID NO: 280406 - DNA, 25 bp, Artificial
  Probe
tgctgttaactttgacagacatatt

SEQ ID NO: 280407 - DNA, 25 bp, Artificial
  Probe
agctacgtggatctacaaggtgctg

SEQ ID NO: 280408 - DNA, 25 bp, Artificial
  Probe
gctgttaactttgacagacatattt

SEQ ID NO: 280409 - DNA, 25 bp, Artificial
  Probe
atattagttttccagggcacagtca

SEQ ID NO: 280410 - DNA, 25 bp, Artificial
  Probe
tttatagtgaacactgaggctcaca

SEQ ID NO: 280411 - DNA, 25 bp, Artificial
  Probe
gaaatattagttttccagggcacag

SEQ ID NO: 280412 - DNA, 25 bp, Artificial
  Probe
aggctcacaatccaagtagaagcta

SEQ ID NO: 280413 - DNA, 25 bp, Artificial
  Probe
acaatccaagtagaagctacgtgga

SEQ ID NO: 280414 - DNA, 25 bp, Artificial
  Probe
tagaagctacgtggatctacaaggt

SEQ ID NO: 280415 - DNA, 25 bp, Artificial
  Probe
gctcacaatccaagtagaagctacg

SEQ ID NO: 280416 - DNA, 25 bp, Artificial
  Probe
gaagctacgtggatctacaaggtgc

SEQ ID NO: 280417 - DNA, 25 bp, Artificial
  Probe
gtttatagtgaacactgaggctcac

SEQ ID NO: 280418 - DNA, 25 bp, Artificial
  Probe
caaatctgacatattaagctgaatg

SEQ ID NO: 280419 - DNA, 25 bp, Artificial
  Probe
tagtgaacactgaggctcacaatcc

SEQ ID NO: 280420 - DNA, 25 bp, Artificial
  Probe
tagccttttctctccggttctgggg

SEQ ID NO: 280421 - DNA, 25 bp, Artificial
  Probe
tctctccggttctggggattcagag

SEQ ID NO: 280422 - DNA, 25 bp, Artificial
  Probe
gattataagccaagtttccccaagt

SEQ ID NO: 280423 - DNA, 25 bp, Artificial
  Probe
tctggctgtcttagccttttctctc

SEQ ID NO: 280424 - DNA, 25 bp, Artificial
  Probe
accccagatgaggtggtttggccag

SEQ ID NO: 280425 - DNA, 25 bp, Artificial
  Probe
tctgctgttttctggctgtcttagc

SEQ ID NO: 280426 - DNA, 25 bp, Artificial
  Probe
cttccaggatgtgactaaaccagtg

SEQ ID NO: 280427 - DNA, 25 bp, Artificial
  Probe
cggtaggatgcagtctgtgcatgtt

SEQ ID NO: 280428 - DNA, 25 bp, Artificial
  Probe
gagttacttctatgcctgattataa

SEQ ID NO: 280429 - DNA, 25 bp, Artificial
  Probe
ttgaagcaaactgcaagtctccagt

SEQ ID NO: 280430 - DNA, 25 bp, Artificial
  Probe
tcgactctgatgtccttcccaaagc

SEQ ID NO: 280431 - DNA, 25 bp, Artificial
  Probe
cagtcatcactgagaaggattagta

SEQ ID NO: 280432 - DNA, 25 bp, Artificial
  Probe
cttccggatctttcggactctgggg

SEQ ID NO: 280433 - DNA, 25 bp, Artificial
  Probe
tctttcggactctggggaccccaga

SEQ ID NO: 280434 - DNA, 25 bp, Artificial
  Probe
ctgacctgatcctgggccttttgga

SEQ ID NO: 280435 - DNA, 25 bp, Artificial
  Probe
gttatctcaaatgctgcactatgac

SEQ ID NO: 280436 - DNA, 25 bp, Artificial
  Probe
tggctcaccctttcttccaggatgt

SEQ ID NO: 280437 - DNA, 25 bp, Artificial
  Probe
agtttccccaagtgggctcggcagg

SEQ ID NO: 280438 - DNA, 25 bp, Artificial
  Probe
ttttctctccggttctggggattca

SEQ ID NO: 280439 - DNA, 25 bp, Artificial
  Probe
aatgctgcactatgaccccaacaag

SEQ ID NO: 280440 - DNA, 25 bp, Artificial
  Probe
gatctttcggactctggggacccca

SEQ ID NO: 280441 - DNA, 25 bp, Artificial
  Probe
agttttggcattagatgcacttaac

SEQ ID NO: 280442 - DNA, 25 bp, Artificial
  Probe
ggtggtttggccaggagttacttct

SEQ ID NO: 280443 - DNA, 25 bp, Artificial
  Probe
gaccccagatgaggtggtttggcca

SEQ ID NO: 280444 - DNA, 25 bp, Artificial
  Probe
tagatgcacttaacccgacttccag

SEQ ID NO: 280445 - DNA, 25 bp, Artificial
  Probe
cactatgaccccaacaagcggattt

SEQ ID NO: 280446 - DNA, 25 bp, Artificial
  Probe
ctatagtacggtaggatgcagtctg

SEQ ID NO: 280447 - DNA, 25 bp, Artificial
  Probe
tgatcctgggccttttggacacagg

SEQ ID NO: 280448 - DNA, 25 bp, Artificial
  Probe
cctcttcccagtcatcactgagaag

SEQ ID NO: 280449 - DNA, 25 bp, Artificial
  Probe
ctcccctggatgaagacggacggag

SEQ ID NO: 280450 - DNA, 25 bp, Artificial
  Probe
cctcttcacctgtggtctgacctga

SEQ ID NO: 280451 - DNA, 25 bp, Artificial
  Probe
agtgggctcggcaggattttagcaa

SEQ ID NO: 280452 - DNA, 25 bp, Artificial
  Probe
cttctatgcctgattataagccaag

SEQ ID NO: 280453 - DNA, 25 bp, Artificial
  Probe
ttcgactctgatgtccttcccaaag

SEQ ID NO: 280454 - DNA, 25 bp, Artificial
  Probe
caagtttccccaagtgggctcggca

SEQ ID NO: 280455 - DNA, 25 bp, Artificial
  Probe
tataagccaagtttccccaagtggg

SEQ ID NO: 280456 - DNA, 25 bp, Artificial
  Probe
ctcggcaggattttagcaaggttgt

SEQ ID NO: 280457 - DNA, 25 bp, Artificial
  Probe
gcattagatgcacttaacccgactt

SEQ ID NO: 280458 - DNA, 25 bp, Artificial
  Probe
ccccaagtgggctcggcaggatttt

SEQ ID NO: 280459 - DNA, 25 bp, Artificial
  Probe
atgaccccaacaagcggatttcagc

SEQ ID NO: 280460 - DNA, 25 bp, Artificial
  Probe
tgctgcactatgaccccaacaagcg

SEQ ID NO: 280461 - DNA, 25 bp, Artificial
  Probe
ggatgcagtctgtgcatgttttaac

SEQ ID NO: 280462 - DNA, 25 bp, Artificial
  Probe
tttcagccaaagcagccctggctca

SEQ ID NO: 280463 - DNA, 25 bp, Artificial
  Probe
ccctggatgaagacggacggagctt

SEQ ID NO: 280464 - DNA, 25 bp, Artificial
  Probe
acggacggagcttgttatctcaaat

SEQ ID NO: 280465 - DNA, 25 bp, Artificial
  Probe
aggattttagcaaggttgtgcctcc

SEQ ID NO: 280466 - DNA, 25 bp, Artificial
  Probe
ctgtccatggggatctgcagacgcc

SEQ ID NO: 280467 - DNA, 25 bp, Artificial
  Probe
tcgtttgtgccgacctctcgggcac

SEQ ID NO: 280468 - DNA, 25 bp, Artificial
  Probe
tttaccacctgattctgctggccct

SEQ ID NO: 280469 - DNA, 25 bp, Artificial
  Probe
ctcaagttctggttgtgttgtctgt

SEQ ID NO: 280470 - DNA, 25 bp, Artificial
  Probe
tccatggggatctgcagacgcccct

SEQ ID NO: 280471 - DNA, 25 bp, Artificial
  Probe
ccatcgccccagacagcagagagat

SEQ ID NO: 280472 - DNA, 25 bp, Artificial
  Probe
aacagaggctgtggttgcctgctcc

SEQ ID NO: 280473 - DNA, 25 bp, Artificial
  Probe
ctctgtcacatgtaccgccaacaga

SEQ ID NO: 280474 - DNA, 25 bp, Artificial
  Probe
tgctccctctgctgatacctaagct

SEQ ID NO: 280475 - DNA, 25 bp, Artificial
  Probe
ctcatgacaggcatcatggccgtat

SEQ ID NO: 280476 - DNA, 25 bp, Artificial
  Probe
accgccaacagagacggcaccatgg

SEQ ID NO: 280477 - DNA, 25 bp, Artificial
  Probe
tctgtcacatgtaccgccaacagag

SEQ ID NO: 280478 - DNA, 25 bp, Artificial
  Probe
ggctgtcttccaacgcctcaagttc

SEQ ID NO: 280479 - DNA, 25 bp, Artificial
  Probe
tggccctcatgacaggcatcatggc

SEQ ID NO: 280480 - DNA, 25 bp, Artificial
  Probe
tgcccctgtcaacctggggtacggg

SEQ ID NO: 280481 - DNA, 25 bp, Artificial
  Probe
ggtcttcatccttttccgaaaggct

SEQ ID NO: 280482 - DNA, 25 bp, Artificial
  Probe
tccctgcctctcacgatcagaggat

SEQ ID NO: 280483 - DNA, 25 bp, Artificial
  Probe
actgggtgcccctgtcaacctgggg

SEQ ID NO: 280484 - DNA, 25 bp, Artificial
  Probe
gtggttgcctgctccctctgctgat

SEQ ID NO: 280485 - DNA, 25 bp, Artificial
  Probe
tctgtctggtggtgatggctgttct

SEQ ID NO: 280486 - DNA, 25 bp, Artificial
  Probe
agaagagacacactggctcccgatt

SEQ ID NO: 280487 - DNA, 25 bp, Artificial
  Probe
tgatggctgttctgtgggaatgcca

SEQ ID NO: 280488 - DNA, 25 bp, Artificial
  Probe
tccttttccgaaaggctgtcttcca

SEQ ID NO: 280489 - DNA, 25 bp, Artificial
  Probe
catccttttccgaaaggctgtcttc

SEQ ID NO: 280490 - DNA, 25 bp, Artificial
  Probe
tgtgccgacctctcgggcacgagag

SEQ ID NO: 280491 - DNA, 25 bp, Artificial
  Probe
catccaaaacagaggctgtggttgc

SEQ ID NO: 280492 - DNA, 25 bp, Artificial
  Probe
tggctcccgattctctccaggctaa

SEQ ID NO: 280493 - DNA, 25 bp, Artificial
  Probe
atcagaggattcacgcaggccatcg

SEQ ID NO: 280494 - DNA, 25 bp, Artificial
  Probe
cccgtgtcggggagaagagacacac

SEQ ID NO: 280495 - DNA, 25 bp, Artificial
  Probe
gaagagacacactggctcccgattc

SEQ ID NO: 280496 - DNA, 25 bp, Artificial
  Probe
cattgactgctgtgcctctgtctgg

SEQ ID NO: 280497 - DNA, 25 bp, Artificial
  Probe
ccgattctctccaggctaaggaagg

SEQ ID NO: 280498 - DNA, 25 bp, Artificial
  Probe
tcgggcacgagaggatgaagtttac

SEQ ID NO: 280499 - DNA, 25 bp, Artificial
  Probe
tcgccccagacagcagagagatggg

SEQ ID NO: 280500 - DNA, 25 bp, Artificial
  Probe
ccgttctgtccatggggatctgcag

SEQ ID NO: 280501 - DNA, 25 bp, Artificial
  Probe
aacagagacggcaccatggctcgtt

SEQ ID NO: 280502 - DNA, 25 bp, Artificial
  Probe
gtgttgtctgtgtgcccgttctgtc

SEQ ID NO: 280503 - DNA, 25 bp, Artificial
  Probe
ctgctggccctcatgacaggcatca

SEQ ID NO: 280504 - DNA, 25 bp, Artificial
  Probe
gacctctcgggcacgagaggatgaa

SEQ ID NO: 280505 - DNA, 25 bp, Artificial
  Probe
atcttcttctgcaacggctccgtca

SEQ ID NO: 280506 - DNA, 25 bp, Artificial
  Probe
tctgtgtgcccgttctgtccatggg

SEQ ID NO: 280507 - DNA, 25 bp, Artificial
  Probe
tcttccaacgcctcaagttctggtt

SEQ ID NO: 280508 - DNA, 25 bp, Artificial
  Probe
acatgtaccgccaacagagacggca

SEQ ID NO: 280509 - DNA, 25 bp, Artificial
  Probe
aggatgaagtttaccacctgattct

SEQ ID NO: 280510 - DNA, 25 bp, Artificial
  Probe
ggcaggtggcaccattgactgctgt

SEQ ID NO: 280511 - DNA, 25 bp, Artificial
  Probe
tgacaggcatcatggccgtatgctc

SEQ ID NO: 280512 - DNA, 25 bp, Artificial
  Probe
cgacaccaggtattttgatgaggag

SEQ ID NO: 280513 - DNA, 25 bp, Artificial
  Probe
tcagccagtggcacagcctgaggcc

SEQ ID NO: 280514 - DNA, 25 bp, Artificial
  Probe
gcttctttgccaacatcgtgtggca

SEQ ID NO: 280515 - DNA, 25 bp, Artificial
  Probe
agatcatgcagcaccgcttctttgc

SEQ ID NO: 280516 - DNA, 25 bp, Artificial
  Probe
catgagaagctgttcgagctcatcc

SEQ ID NO: 280517 - DNA, 25 bp, Artificial
  Probe
gcaccgcttctttgccaacatcgtg

SEQ ID NO: 280518 - DNA, 25 bp, Artificial
  Probe
tgacagcatggagtgtgtggacagt

SEQ ID NO: 280519 - DNA, 25 bp, Artificial
  Probe
agcaccgcttctttgccaacatcgt

SEQ ID NO: 280520 - DNA, 25 bp, Artificial
  Probe
aagctgttcgagctcatcctaatgg

SEQ ID NO: 280521 - DNA, 25 bp, Artificial
  Probe
aagatgacagcatggagtgtgtgga

SEQ ID NO: 280522 - DNA, 25 bp, Artificial
  Probe
cttctttgccaacatcgtgtggcaa

SEQ ID NO: 280523 - DNA, 25 bp, Artificial
  Probe
accatgagaagctgttcgagctcat

SEQ ID NO: 280524 - DNA, 25 bp, Artificial
  Probe
ggtcacctctgagaccgacaccagg

SEQ ID NO: 280525 - DNA, 25 bp, Artificial
  Probe
tgagcccacctttcaagccccaggt

SEQ ID NO: 280526 - DNA, 25 bp, Artificial
  Probe
tgccaacatcgtgtggcaagatgtg

SEQ ID NO: 280527 - DNA, 25 bp, Artificial
  Probe
atgcagcaccgcttctttgccaaca

SEQ ID NO: 280528 - DNA, 25 bp, Artificial
  Probe
gaggaacctcgccagcctcggaatt

SEQ ID NO: 280529 - DNA, 25 bp, Artificial
  Probe
gccccaggtcacctctgagaccgac

SEQ ID NO: 280530 - DNA, 25 bp, Artificial
  Probe
ccaggtcacctctgagaccgacacc

SEQ ID NO: 280531 - DNA, 25 bp, Artificial
  Probe
agaagctgttcgagctcatcctaat

SEQ ID NO: 280532 - DNA, 25 bp, Artificial
  Probe
agccagtggcacagcctgaggcctg

SEQ ID NO: 280533 - DNA, 25 bp, Artificial
  Probe
gcctgaggcctggggtggtggctgg

SEQ ID NO: 280534 - DNA, 25 bp, Artificial
  Probe
ccaggaccatgagaagctgttcgag

SEQ ID NO: 280535 - DNA, 25 bp, Artificial
  Probe
gatcatgcagcaccgcttctttgcc

SEQ ID NO: 280536 - DNA, 25 bp, Artificial
  Probe
tgagaagctgttcgagctcatccta

SEQ ID NO: 280537 - DNA, 25 bp, Artificial
  Probe
tgcagcaccgcttctttgccaacat

SEQ ID NO: 280538 - DNA, 25 bp, Artificial
  Probe
gtacctgatggttttgtttctcgga

SEQ ID NO: 280539 - DNA, 25 bp, Artificial
  Probe
tttgccaacatcgtgtggcaagatg

SEQ ID NO: 280540 - DNA, 25 bp, Artificial
  Probe
ttgccaacatcgtgtggcaagatgt

SEQ ID NO: 280541 - DNA, 25 bp, Artificial
  Probe
gagatcatgcagcaccgcttctttg

SEQ ID NO: 280542 - DNA, 25 bp, Artificial
  Probe
ggaccatgagaagctgttcgagctc

SEQ ID NO: 280543 - DNA, 25 bp, Artificial
  Probe
agaagaagctgagcccacctttcaa

SEQ ID NO: 280544 - DNA, 25 bp, Artificial
  Probe
ctactcagccagtggcacagcctga

SEQ ID NO: 280545 - DNA, 25 bp, Artificial
  Probe
cctgatggttttgtttctcggatgt

SEQ ID NO: 280546 - DNA, 25 bp, Artificial
  Probe
gttctcctactcagccagtggcaca

SEQ ID NO: 280547 - DNA, 25 bp, Artificial
  Probe
cgcttctttgccaacatcgtgtggc

SEQ ID NO: 280548 - DNA, 25 bp, Artificial
  Probe
acctttcaagccccaggtcacctct

SEQ ID NO: 280549 - DNA, 25 bp, Artificial
  Probe
ccatgagaagctgttcgagctcatc

SEQ ID NO: 280550 - DNA, 25 bp, Artificial
  Probe
cctttcaagccccaggtcacctctg

SEQ ID NO: 280551 - DNA, 25 bp, Artificial
  Probe
atcgtgtggcaagatgtgtatgaga

SEQ ID NO: 280552 - DNA, 25 bp, Artificial
  Probe
gccaacatcgtgtggcaagatgtgt

SEQ ID NO: 280553 - DNA, 25 bp, Artificial
  Probe
gaagctgttcgagctcatcctaatg

SEQ ID NO: 280554 - DNA, 25 bp, Artificial
  Probe
ttctcctactcagccagtggcacag

SEQ ID NO: 280555 - DNA, 25 bp, Artificial
  Probe
ggaggccaagtccctgctctcgggg

SEQ ID NO: 280556 - DNA, 25 bp, Artificial
  Probe
atgagaagctgttcgagctcatcct

SEQ ID NO: 280557 - DNA, 25 bp, Artificial
  Probe
gagaagctgttcgagctcatcctaa

SEQ ID NO: 280558 - DNA, 25 bp, Artificial
  Probe
tgtcagttcggaacttttcattaag

SEQ ID NO: 280559 - DNA, 25 bp, Artificial
  Probe
ggaacttttcattaagttcatctgg

SEQ ID NO: 280560 - DNA, 25 bp, Artificial
  Probe
ctggaccttcacctcgtgccgaatt

SEQ ID NO: 280561 - DNA, 25 bp, Artificial
  Probe
gttcatctggaccttcacctcgtgc

SEQ ID NO: 280562 - DNA, 25 bp, Artificial
  Probe
aacattgagcttccagagaattcca

SEQ ID NO: 280563 - DNA, 25 bp, Artificial
  Probe
ccaacattgagcttccagagaattc

SEQ ID NO: 280564 - DNA, 25 bp, Artificial
  Probe
tccagagaattccagctccttgtca

SEQ ID NO: 280565 - DNA, 25 bp, Artificial
  Probe
tgagcttccagagaattccagctcc

SEQ ID NO: 280566 - DNA, 25 bp, Artificial
  Probe
gagaattccagctccttgtcagttc

SEQ ID NO: 280567 - DNA, 25 bp, Artificial
  Probe
agcttccagagaattccagctcctt

SEQ ID NO: 280568 - DNA, 25 bp, Artificial
  Probe
cattgagcttccagagaattccagc

SEQ ID NO: 280569 - DNA, 25 bp, Artificial
  Probe
tgccaacattgagcttccagagaat

SEQ ID NO: 280570 - DNA, 25 bp, Artificial
  Probe
attgagcttccagagaattccagct

SEQ ID NO: 280571 - DNA, 25 bp, Artificial
  Probe
ttgagcttccagagaattccagctc

SEQ ID NO: 280572 - DNA, 25 bp, Artificial
  Probe
ccagctccttgtcagttcggaactt

SEQ ID NO: 280573 - DNA, 25 bp, Artificial
  Probe
agaattccagctccttgtcagttcg

SEQ ID NO: 280574 - DNA, 25 bp, Artificial
  Probe
tctggaccttcacctcgtgccgaat

SEQ ID NO: 280575 - DNA, 25 bp, Artificial
  Probe
caacattgagcttccagagaattcc

SEQ ID NO: 280576 - DNA, 25 bp, Artificial
  Probe
attccagctccttgtcagttcggaa

SEQ ID NO: 280577 - DNA, 25 bp, Artificial
  Probe
gcttccagagaattccagctccttg

SEQ ID NO: 280578 - DNA, 25 bp, Artificial
  Probe
gctccttgtcagttcggaacttttc

SEQ ID NO: 280579 - DNA, 25 bp, Artificial
  Probe
cagctccttgtcagttcggaacttt

SEQ ID NO: 280580 - DNA, 25 bp, Artificial
  Probe
agttcatctggaccttcacctcgtg

SEQ ID NO: 280581 - DNA, 25 bp, Artificial
  Probe
tcagttcggaacttttcattaagtt

SEQ ID NO: 280582 - DNA, 25 bp, Artificial
  Probe
gccaacattgagcttccagagaatt

SEQ ID NO: 280583 - DNA, 25 bp, Artificial
  Probe
ccagagaattccagctccttgtcag

SEQ ID NO: 280584 - DNA, 25 bp, Artificial
  Probe
agagaattccagctccttgtcagtt

SEQ ID NO: 280585 - DNA, 25 bp, Artificial
  Probe
ttgtcagttcggaacttttcattaa

SEQ ID NO: 280586 - DNA, 25 bp, Artificial
  Probe
ttccagagaattccagctccttgtc

SEQ ID NO: 280587 - DNA, 25 bp, Artificial
  Probe
gttcggaacttttcattaagttcat

SEQ ID NO: 280588 - DNA, 25 bp, Artificial
  Probe
tccagctccttgtcagttcggaact

SEQ ID NO: 280589 - DNA, 25 bp, Artificial
  Probe
ttcggaacttttcattaagttcatc

SEQ ID NO: 280590 - DNA, 25 bp, Artificial
  Probe
gaacttttcattaagttcatctgga

SEQ ID NO: 280591 - DNA, 25 bp, Artificial
  Probe
gagcttccagagaattccagctcct

SEQ ID NO: 280592 - DNA, 25 bp, Artificial
  Probe
ttccagctccttgtcagttcggaac

SEQ ID NO: 280593 - DNA, 25 bp, Artificial
  Probe
cttccagagaattccagctccttgt

SEQ ID NO: 280594 - DNA, 25 bp, Artificial
  Probe
taagttcatctggaccttcacctcg

SEQ ID NO: 280595 - DNA, 25 bp, Artificial
  Probe
aagttcatctggaccttcacctcgt

SEQ ID NO: 280596 - DNA, 25 bp, Artificial
  Probe
atctggaccttcacctcgtgccgaa

SEQ ID NO: 280597 - DNA, 25 bp, Artificial
  Probe
aattccagctccttgtcagttcgga

SEQ ID NO: 280598 - DNA, 25 bp, Artificial
  Probe
gaattccagctccttgtcagttcgg

SEQ ID NO: 280599 - DNA, 25 bp, Artificial
  Probe
agctccttgtcagttcggaactttt

SEQ ID NO: 280600 - DNA, 25 bp, Artificial
  Probe
cagagaattccagctccttgtcagt

SEQ ID NO: 280601 - DNA, 25 bp, Artificial
  Probe
gtcagttcggaacttttcattaagt

SEQ ID NO: 280602 - DNA, 25 bp, Artificial
  Probe
ctccttgtcagttcggaacttttca

SEQ ID NO: 280603 - DNA, 25 bp, Artificial
  Probe
acattgagcttccagagaattccag

SEQ ID NO: 280604 - DNA, 25 bp, Artificial
  Probe
atgaaaagcagctttgcctcctttt

SEQ ID NO: 280605 - DNA, 25 bp, Artificial
  Probe
catgaaaagcagctttgcctccttt

SEQ ID NO: 280606 - DNA, 25 bp, Artificial
  Probe
agtgtttggctagtagatgttgccc

SEQ ID NO: 280607 - DNA, 25 bp, Artificial
  Probe
gctagtagatgttgccctccaaaat

SEQ ID NO: 280608 - DNA, 25 bp, Artificial
  Probe
tatgtagctgctcttcatgaaaagc

SEQ ID NO: 280609 - DNA, 25 bp, Artificial
  Probe
ctttggactttgaagctagtgcatt

SEQ ID NO: 280610 - DNA, 25 bp, Artificial
  Probe
ttccctgttcgaatgctgtattaat

SEQ ID NO: 280611 - DNA, 25 bp, Artificial
  Probe
cagaatgacttctgactattcaagt

SEQ ID NO: 280612 - DNA, 25 bp, Artificial
  Probe
gaaacacccattgcactgtctgttt

SEQ ID NO: 280613 - DNA, 25 bp, Artificial
  Probe
tacctgtgatttagccatttgacta

SEQ ID NO: 280614 - DNA, 25 bp, Artificial
  Probe
cagtgtttggctagtagatgttgcc

SEQ ID NO: 280615 - DNA, 25 bp, Artificial
  Probe
agatgttgccctccaaaatgagggg

SEQ ID NO: 280616 - DNA, 25 bp, Artificial
  Probe
cttggtaatactgtacatagctgtt

SEQ ID NO: 280617 - DNA, 25 bp, Artificial
  Probe
tgatttagccatttgactaacagtg

SEQ ID NO: 280618 - DNA, 25 bp, Artificial
  Probe
actttgcggaaacacccattgcact

SEQ ID NO: 280619 - DNA, 25 bp, Artificial
  Probe
tgtagctgctcttcatgaaaagcag

SEQ ID NO: 280620 - DNA, 25 bp, Artificial
  Probe
ccccctgtgcttattaacattacgg

SEQ ID NO: 280621 - DNA, 25 bp, Artificial
  Probe
tggctagtagatgttgccctccaaa

SEQ ID NO: 280622 - DNA, 25 bp, Artificial
  Probe
tagatgttgccctccaaaatgaggg

SEQ ID NO: 280623 - DNA, 25 bp, Artificial
  Probe
actgatcttggtaatactgtacata

SEQ ID NO: 280624 - DNA, 25 bp, Artificial
  Probe
gcggaaacacccattgcactgtctg

SEQ ID NO: 280625 - DNA, 25 bp, Artificial
  Probe
ctttgcggaaacacccattgcactg

SEQ ID NO: 280626 - DNA, 25 bp, Artificial
  Probe
attgcactgtctgtttgaaaccccc

SEQ ID NO: 280627 - DNA, 25 bp, Artificial
  Probe
ttaactttgcggaaacacccattgc

SEQ ID NO: 280628 - DNA, 25 bp, Artificial
  Probe
cattgcactgtctgtttgaaacccc

SEQ ID NO: 280629 - DNA, 25 bp, Artificial
  Probe
tgtttggctagtagatgttgccctc

SEQ ID NO: 280630 - DNA, 25 bp, Artificial
  Probe
aacattacggcgattaaaagcacgg

SEQ ID NO: 280631 - DNA, 25 bp, Artificial
  Probe
cctgttcgaatgctgtattaatgta

SEQ ID NO: 280632 - DNA, 25 bp, Artificial
  Probe
taaactgatcttggtaatactgtac

SEQ ID NO: 280633 - DNA, 25 bp, Artificial
  Probe
ttagccatttgactaacagtgtttg

SEQ ID NO: 280634 - DNA, 25 bp, Artificial
  Probe
aacacccattgcactgtctgtttga

SEQ ID NO: 280635 - DNA, 25 bp, Artificial
  Probe
ttcatgaaaagcagctttgcctcct

SEQ ID NO: 280636 - DNA, 25 bp, Artificial
  Probe
tgtgatttagccatttgactaacag

SEQ ID NO: 280637 - DNA, 25 bp, Artificial
  Probe
gcttattaacattacggcgattaaa

SEQ ID NO: 280638 - DNA, 25 bp, Artificial
  Probe
attttacctgtgatttagccatttg

SEQ ID NO: 280639 - DNA, 25 bp, Artificial
  Probe
ctgatcttggtaatactgtacatag

SEQ ID NO: 280640 - DNA, 25 bp, Artificial
  Probe
gaatgacttctgactattcaagttt

SEQ ID NO: 280641 - DNA, 25 bp, Artificial
  Probe
catttgactaacagtgtttggctag

SEQ ID NO: 280642 - DNA, 25 bp, Artificial
  Probe
ccttccctgttcgaatgctgtatta

SEQ ID NO: 280643 - DNA, 25 bp, Artificial
  Probe
ctgctcttcatgaaaagcagctttg

SEQ ID NO: 280644 - DNA, 25 bp, Artificial
  Probe
tttctttggactttgaagctagtgc

SEQ ID NO: 280645 - DNA, 25 bp, Artificial
  Probe
agccatttgactaacagtgtttggc

SEQ ID NO: 280646 - DNA, 25 bp, Artificial
  Probe
ccctgtgcttattaacattacggcg

SEQ ID NO: 280647 - DNA, 25 bp, Artificial
  Probe
ccagaatgacttctgactattcaag

SEQ ID NO: 280648 - DNA, 25 bp, Artificial
  Probe
ctgtgcttattaacattacggcgat

SEQ ID NO: 280649 - DNA, 25 bp, Artificial
  Probe
ggaaacacccattgcactgtctgtt

SEQ ID NO: 280650 - DNA, 25 bp, Artificial
  Probe
atacccagcggaacccagaactatg

SEQ ID NO: 280651 - DNA, 25 bp, Artificial
  Probe
aagcaagcgctttacagtgaagtca

SEQ ID NO: 280652 - DNA, 25 bp, Artificial
  Probe
acgctttctcatttccaatactggg

SEQ ID NO: 280653 - DNA, 25 bp, Artificial
  Probe
cgctttacagtgaagtcatccccac

SEQ ID NO: 280654 - DNA, 25 bp, Artificial
  Probe
ggtcttgaacaactgactcgctgta

SEQ ID NO: 280655 - DNA, 25 bp, Artificial
  Probe
gatacccagcggaacccagaactat

SEQ ID NO: 280656 - DNA, 25 bp, Artificial
  Probe
gtcttgaacaactgactcgctgtat

SEQ ID NO: 280657 - DNA, 25 bp, Artificial
  Probe
ctgtatagctcaagttatctaggtc

SEQ ID NO: 280658 - DNA, 25 bp, Artificial
  Probe
aacccagaactatgtccccagtacg

SEQ ID NO: 280659 - DNA, 25 bp, Artificial
  Probe
ctcatttccaatactgggtgttgaa

SEQ ID NO: 280660 - DNA, 25 bp, Artificial
  Probe
ggtgttgaacccagagccttttata

SEQ ID NO: 280661 - DNA, 25 bp, Artificial
  Probe
tcaaagatacccagcggaacccaga

SEQ ID NO: 280662 - DNA, 25 bp, Artificial
  Probe
atagtgttgcttgtaacataaactc

SEQ ID NO: 280663 - DNA, 25 bp, Artificial
  Probe
tccaatactgggtgttgaacccaga

SEQ ID NO: 280664 - DNA, 25 bp, Artificial
  Probe
agcggaacccagaactatgtcccca

SEQ ID NO: 280665 - DNA, 25 bp, Artificial
  Probe
gcaagcgctttacagtgaagtcatc

SEQ ID NO: 280666 - DNA, 25 bp, Artificial
  Probe
acagccataagcaaagtaagaacgc

SEQ ID NO: 280667 - DNA, 25 bp, Artificial
  Probe
tcgctgtatagctcaagttatctag

SEQ ID NO: 280668 - DNA, 25 bp, Artificial
  Probe
cagacacagccataagcaaagtaag

SEQ ID NO: 280669 - DNA, 25 bp, Artificial
  Probe
cacagccataagcaaagtaagaacg

SEQ ID NO: 280670 - DNA, 25 bp, Artificial
  Probe
catttccaatactgggtgttgaacc

SEQ ID NO: 280671 - DNA, 25 bp, Artificial
  Probe
cccagaactatgtccccagtacgtt

SEQ ID NO: 280672 - DNA, 25 bp, Artificial
  Probe
cataaactcaaagatacccagcgga

SEQ ID NO: 280673 - DNA, 25 bp, Artificial
  Probe
tgaacaactgactcgctgtatagct

SEQ ID NO: 280674 - DNA, 25 bp, Artificial
  Probe
tatagctcaagttatctaggtctaa

SEQ ID NO: 280675 - DNA, 25 bp, Artificial
  Probe
gggactcagcaaaactttttacctg

SEQ ID NO: 280676 - DNA, 25 bp, Artificial
  Probe
ctcaagttatctaggtctaatagtt

SEQ ID NO: 280677 - DNA, 25 bp, Artificial
  Probe
tgtatagctcaagttatctaggtct

SEQ ID NO: 280678 - DNA, 25 bp, Artificial
  Probe
tatataccaagcaagcgctttacag

SEQ ID NO: 280679 - DNA, 25 bp, Artificial
  Probe
caactgactcgctgtatagctcaag

SEQ ID NO: 280680 - DNA, 25 bp, Artificial
  Probe
gccaagcacaagaggcttctgattg

SEQ ID NO: 280681 - DNA, 25 bp, Artificial
  Probe
gctcaagttatctaggtctaatagt

SEQ ID NO: 280682 - DNA, 25 bp, Artificial
  Probe
tacgtttaacccagccaagcacaag

SEQ ID NO: 280683 - DNA, 25 bp, Artificial
  Probe
ccagtacgtttaacccagccaagca

SEQ ID NO: 280684 - DNA, 25 bp, Artificial
  Probe
gtgttgaacccagagccttttatat

SEQ ID NO: 280685 - DNA, 25 bp, Artificial
  Probe
agcacaagaggcttctgattgtggg

SEQ ID NO: 280686 - DNA, 25 bp, Artificial
  Probe
acataaactcaaagatacccagcgg

SEQ ID NO: 280687 - DNA, 25 bp, Artificial
  Probe
tatgtccccagtacgtttaacccag

SEQ ID NO: 280688 - DNA, 25 bp, Artificial
  Probe
tttaacccagccaagcacaagaggc

SEQ ID NO: 280689 - DNA, 25 bp, Artificial
  Probe
ggactcagcaaaactttttacctgt

SEQ ID NO: 280690 - DNA, 25 bp, Artificial
  Probe
cacaagaggcttctgattgtgggtg

SEQ ID NO: 280691 - DNA, 25 bp, Artificial
  Probe
atataccaagcaagcgctttacagt

SEQ ID NO: 280692 - DNA, 25 bp, Artificial
  Probe
taaactcaaagatacccagcggaac

SEQ ID NO: 280693 - DNA, 25 bp, Artificial
  Probe
ccaagcaagcgctttacagtgaagt

SEQ ID NO: 280694 - DNA, 25 bp, Artificial
  Probe
cccagccaagcacaagaggcttctg

SEQ ID NO: 280695 - DNA, 25 bp, Artificial
  Probe
tgaacacagacacagccataagcaa

SEQ ID NO: 280696 - DNA, 25 bp, Artificial
  Probe
gcccccctccaaggcagtgccccca

SEQ ID NO: 280697 - DNA, 25 bp, Artificial
  Probe
gacacacgaacagacacaccgcgac

SEQ ID NO: 280698 - DNA, 25 bp, Artificial
  Probe
ggcgggaactctccacacagagtcc

SEQ ID NO: 280699 - DNA, 25 bp, Artificial
  Probe
gggcgcaccaccgcagtcggcccag

SEQ ID NO: 280700 - DNA, 25 bp, Artificial
  Probe
ccccctccaaggcagtgcccccacg

SEQ ID NO: 280701 - DNA, 25 bp, Artificial
  Probe
gaccaagcagacacacgaacagaca

SEQ ID NO: 280702 - DNA, 25 bp, Artificial
  Probe
ccccctctgcaccggggcgcaccac

SEQ ID NO: 280703 - DNA, 25 bp, Artificial
  Probe
gcccccacggcggcgcacacggccg

SEQ ID NO: 280704 - DNA, 25 bp, Artificial
  Probe
aacgaaggaccaagcagacacacga

SEQ ID NO: 280705 - DNA, 25 bp, Artificial
  Probe
aggaccaagcagacacacgaacaga

SEQ ID NO: 280706 - DNA, 25 bp, Artificial
  Probe
ggccgcgtgccaaaaaccccctctg

SEQ ID NO: 280707 - DNA, 25 bp, Artificial
  Probe
acacaacgaaggaccaagcagacac

SEQ ID NO: 280708 - DNA, 25 bp, Artificial
  Probe
agaagcaacacgaacaacacaacga

SEQ ID NO: 280709 - DNA, 25 bp, Artificial
  Probe
cacaacgaaggaccaagcagacaca

SEQ ID NO: 280710 - DNA, 25 bp, Artificial
  Probe
cggcgggaactctccacacagagtc

SEQ ID NO: 280711 - DNA, 25 bp, Artificial
  Probe
acaacgaaggaccaagcagacacac

SEQ ID NO: 280712 - DNA, 25 bp, Artificial
  Probe
cgtgccaaaaaccccctctgcaccg

SEQ ID NO: 280713 - DNA, 25 bp, Artificial
  Probe
gaaggaccaagcagacacacgaaca

SEQ ID NO: 280714 - DNA, 25 bp, Artificial
  Probe
ggaccaagcagacacacgaacagac

SEQ ID NO: 280715 - DNA, 25 bp, Artificial
  Probe
gcacacggccgcgtgccaaaaaccc

SEQ ID NO: 280716 - DNA, 25 bp, Artificial
  Probe
caagccccggcgggaactctccaca

SEQ ID NO: 280717 - DNA, 25 bp, Artificial
  Probe
acggtggagcccccctccaaggcag

SEQ ID NO: 280718 - DNA, 25 bp, Artificial
  Probe
gcggcgcacacggccgcgtgccaaa

SEQ ID NO: 280719 - DNA, 25 bp, Artificial
  Probe
cccagaacggggcagccccacggtg

SEQ ID NO: 280720 - DNA, 25 bp, Artificial
  Probe
agcagacacacgaacagacacaccg

SEQ ID NO: 280721 - DNA, 25 bp, Artificial
  Probe
ccacaccgaagaagaaaggagaagc

SEQ ID NO: 280722 - DNA, 25 bp, Artificial
  Probe
agaacggggcagccccacggtggag

SEQ ID NO: 280723 - DNA, 25 bp, Artificial
  Probe
agacacacgaacagacacaccgcga

SEQ ID NO: 280724 - DNA, 25 bp, Artificial
  Probe
ccaagcagacacacgaacagacaca

SEQ ID NO: 280725 - DNA, 25 bp, Artificial
  Probe
caagcagacacacgaacagacacac

SEQ ID NO: 280726 - DNA, 25 bp, Artificial
  Probe
acagacacaccgcgacgctccccaa

SEQ ID NO: 280727 - DNA, 25 bp, Artificial
  Probe
aaggaccaagcagacacacgaacag

SEQ ID NO: 280728 - DNA, 25 bp, Artificial
  Probe
ctccacacagagtccccccccagaa

SEQ ID NO: 280729 - DNA, 25 bp, Artificial
  Probe
caaggcagtgcccccacggcggcgc

SEQ ID NO: 280730 - DNA, 25 bp, Artificial
  Probe
gcagacacacgaacagacacaccgc

SEQ ID NO: 280731 - DNA, 25 bp, Artificial
  Probe
cgaacaacacaacgaaggaccaagc

SEQ ID NO: 280732 - DNA, 25 bp, Artificial
  Probe
cccacaccgaagaagaaaggagaag

SEQ ID NO: 280733 - DNA, 25 bp, Artificial
  Probe
aagcagacacacgaacagacacacc

SEQ ID NO: 280734 - DNA, 25 bp, Artificial
  Probe
caacacaacgaaggaccaagcagac

SEQ ID NO: 280735 - DNA, 25 bp, Artificial
  Probe
ccggcgggaactctccacacagagt

SEQ ID NO: 280736 - DNA, 25 bp, Artificial
  Probe
accaagcagacacacgaacagacac

SEQ ID NO: 280737 - DNA, 25 bp, Artificial
  Probe
cgaaggaccaagcagacacacgaac

SEQ ID NO: 280738 - DNA, 25 bp, Artificial
  Probe
gcagccccacggtggagcccccctc

SEQ ID NO: 280739 - DNA, 25 bp, Artificial
  Probe
gaacagacacaccgcgacgctcccc

SEQ ID NO: 280740 - DNA, 25 bp, Artificial
  Probe
ggcagccccacggtggagcccccct

SEQ ID NO: 280741 - DNA, 25 bp, Artificial
  Probe
aacacaacgaaggaccaagcagaca

SEQ ID NO: 280742 - DNA, 25 bp, Artificial
  Probe
gcttaaagccacaagcacagtgaca

SEQ ID NO: 280743 - DNA, 25 bp, Artificial
  Probe
gcctctaattcaaaccttcgcgtga

SEQ ID NO: 280744 - DNA, 25 bp, Artificial
  Probe
tctaatagtgcactccctggactga

SEQ ID NO: 280745 - DNA, 25 bp, Artificial
  Probe
tgttagctatgcattttctccaccg

SEQ ID NO: 280746 - DNA, 25 bp, Artificial
  Probe
cacagtcccaataactagtgccaag

SEQ ID NO: 280747 - DNA, 25 bp, Artificial
  Probe
agctttcattggagtagcccaagaa

SEQ ID NO: 280748 - DNA, 25 bp, Artificial
  Probe
gctcttgcttaatatctagacatgc

SEQ ID NO: 280749 - DNA, 25 bp, Artificial
  Probe
cagaatattggcttctaggcaacta

SEQ ID NO: 280750 - DNA, 25 bp, Artificial
  Probe
ccctggactgagcatatacaaaaca

SEQ ID NO: 280751 - DNA, 25 bp, Artificial
  Probe
tttgaaatttcttgggctactccaa

SEQ ID NO: 280752 - DNA, 25 bp, Artificial
  Probe
ctggtgatagcatccccaaagttta

SEQ ID NO: 280753 - DNA, 25 bp, Artificial
  Probe
gtttaccaaagaatagctcttgctt

SEQ ID NO: 280754 - DNA, 25 bp, Artificial
  Probe
agaatagctcttgcttaatatctag

SEQ ID NO: 280755 - DNA, 25 bp, Artificial
  Probe
tgccaaatgggaaggcccaggccct

SEQ ID NO: 280756 - DNA, 25 bp, Artificial
  Probe
cccttctaatagtgcactccctgga

SEQ ID NO: 280757 - DNA, 25 bp, Artificial
  Probe
cagtccattattatcaatgcaggaa

SEQ ID NO: 280758 - DNA, 25 bp, Artificial
  Probe
attattatcaatgcaggaacatggc

SEQ ID NO: 280759 - DNA, 25 bp, Artificial
  Probe
tgtggacgatggagccattgccccc

SEQ ID NO: 280760 - DNA, 25 bp, Artificial
  Probe
catttgatgtctgctagcagaatat

SEQ ID NO: 280761 - DNA, 25 bp, Artificial
  Probe
tctgctagcagaatattggcttcta

SEQ ID NO: 280762 - DNA, 25 bp, Artificial
  Probe
tggcttcaggaacctgggcccccat

SEQ ID NO: 280763 - DNA, 25 bp, Artificial
  Probe
gctctcaatttgttagctatgcatt

SEQ ID NO: 280764 - DNA, 25 bp, Artificial
  Probe
agtttaccaaagaatagctcttgct

SEQ ID NO: 280765 - DNA, 25 bp, Artificial
  Probe
tctgccagtggttaaaagtatcttc

SEQ ID NO: 280766 - DNA, 25 bp, Artificial
  Probe
aagtcccccagatgagtcccctgat

SEQ ID NO: 280767 - DNA, 25 bp, Artificial
  Probe
gacataaaatgttctgccagtggtt

SEQ ID NO: 280768 - DNA, 25 bp, Artificial
  Probe
tggagtagcccaagaaagctgtgca

SEQ ID NO: 280769 - DNA, 25 bp, Artificial
  Probe
tctaggcaactaggttaagggctta

SEQ ID NO: 280770 - DNA, 25 bp, Artificial
  Probe
ccaccatgtgccaaatgggaaggcc

SEQ ID NO: 280771 - DNA, 25 bp, Artificial
  Probe
ccaatgaaagctgtgtatgtatctc

SEQ ID NO: 280772 - DNA, 25 bp, Artificial
  Probe
ccaagaaagctgtgcagggagagat

SEQ ID NO: 280773 - DNA, 25 bp, Artificial
  Probe
agctatgcattttctccaccgcagc

SEQ ID NO: 280774 - DNA, 25 bp, Artificial
  Probe
acagccacacttcttggaactgaac

SEQ ID NO: 280775 - DNA, 25 bp, Artificial
  Probe
tgtatgtatctctccctgcacagct

SEQ ID NO: 280776 - DNA, 25 bp, Artificial
  Probe
tgcactccctggactgagcatatac

SEQ ID NO: 280777 - DNA, 25 bp, Artificial
  Probe
tctagacatgctctcaatttgttag

SEQ ID NO: 280778 - DNA, 25 bp, Artificial
  Probe
ggggcctctaattcaaaccttcgcg

SEQ ID NO: 280779 - DNA, 25 bp, Artificial
  Probe
agatgagtcccctgatccccctgat

SEQ ID NO: 280780 - DNA, 25 bp, Artificial
  Probe
tagtgccaagggacataaaatgttc

SEQ ID NO: 280781 - DNA, 25 bp, Artificial
  Probe
cgacactgacacagcctctggggag

SEQ ID NO: 280782 - DNA, 25 bp, Artificial
  Probe
caccgcagccacctgaggttagcaa

SEQ ID NO: 280783 - DNA, 25 bp, Artificial
  Probe
tgaactgaactctgtgggcccagag

SEQ ID NO: 280784 - DNA, 25 bp, Artificial
  Probe
ccgacactgacacagcctctgggga

SEQ ID NO: 280785 - DNA, 25 bp, Artificial
  Probe
tctctccctgcacagctttcattgg

SEQ ID NO: 280786 - DNA, 25 bp, Artificial
  Probe
gagagatacatacaccgttctttac

SEQ ID NO: 280787 - DNA, 25 bp, Artificial
  Probe
cctcctggcctcatgagggtcactg

SEQ ID NO: 280788 - DNA, 25 bp, Artificial
  Probe
tggtggaacaccaggagtatgtgac

SEQ ID NO: 280789 - DNA, 25 bp, Artificial
  Probe
gcttcacgcctttcaccttgggcaa

SEQ ID NO: 280790 - DNA, 25 bp, Artificial
  Probe
gtgcctgaagttgaaggtgactgtc

SEQ ID NO: 280791 - DNA, 25 bp, Artificial
  Probe
aaacccagtgcctgaagttgaaggt

SEQ ID NO: 280792 - DNA, 25 bp, Artificial
  Probe
gcccggagaagctgtctgagaaatt

SEQ ID NO: 280793 - DNA, 25 bp, Artificial
  Probe
atcaggaaacccagtgcctgaagtt

SEQ ID NO: 280794 - DNA, 25 bp, Artificial
  Probe
caacccacaggagaagagactccaa

SEQ ID NO: 280795 - DNA, 25 bp, Artificial
  Probe
ttcccattggtctgggcagtattgc

SEQ ID NO: 280796 - DNA, 25 bp, Artificial
  Probe
cgactctgtggcagatgctgccatg

SEQ ID NO: 280797 - DNA, 25 bp, Artificial
  Probe
taccatcaggaaacccagtgcctga

SEQ ID NO: 280798 - DNA, 25 bp, Artificial
  Probe
taccactgctgctgctgcaaactca

SEQ ID NO: 280799 - DNA, 25 bp, Artificial
  Probe
acatggtggaacaccaggagtatgt

SEQ ID NO: 280800 - DNA, 25 bp, Artificial
  Probe
cactgctgctgctgcaaactcagtg

SEQ ID NO: 280801 - DNA, 25 bp, Artificial
  Probe
attggtctgggcagtattgctccta

SEQ ID NO: 280802 - DNA, 25 bp, Artificial
  Probe
ttacgaggacgactctgtggcagat

SEQ ID NO: 280803 - DNA, 25 bp, Artificial
  Probe
ctgtcaatggcaaaatcactcacag

SEQ ID NO: 280804 - DNA, 25 bp, Artificial
  Probe
ggaaggacacagctactactacatc

SEQ ID NO: 280805 - DNA, 25 bp, Artificial
  Probe
cagtgcctgaagttgaaggtgactg

SEQ ID NO: 280806 - DNA, 25 bp, Artificial
  Probe
cacggcccggagaagctgtctgaga

SEQ ID NO: 280807 - DNA, 25 bp, Artificial
  Probe
gaaggacacagctactactacatct

SEQ ID NO: 280808 - DNA, 25 bp, Artificial
  Probe
aacccagtgcctgaagttgaaggtg

SEQ ID NO: 280809 - DNA, 25 bp, Artificial
  Probe
acgaggacgactctgtggcagatgc

SEQ ID NO: 280810 - DNA, 25 bp, Artificial
  Probe
agcacggcccggagaagctgtctga

SEQ ID NO: 280811 - DNA, 25 bp, Artificial
  Probe
ctgtacatggtggaacaccaggagt

SEQ ID NO: 280812 - DNA, 25 bp, Artificial
  Probe
gaagtgcaggttttgcacagcattg

SEQ ID NO: 280813 - DNA, 25 bp, Artificial
  Probe
catggtggaacaccaggagtatgtg

SEQ ID NO: 280814 - DNA, 25 bp, Artificial
  Probe
aggacgactctgtggcagatgctgc

SEQ ID NO: 280815 - DNA, 25 bp, Artificial
  Probe
actctgtggcagatgctgccatgga

SEQ ID NO: 280816 - DNA, 25 bp, Artificial
  Probe
caccaggagtatgtgacatgcgagc

SEQ ID NO: 280817 - DNA, 25 bp, Artificial
  Probe
ggttttgcacagcattggtcacagc

SEQ ID NO: 280818 - DNA, 25 bp, Artificial
  Probe
gtattgctcctaccactgctgctgc

SEQ ID NO: 280819 - DNA, 25 bp, Artificial
  Probe
caggaaacccagtgcctgaagttga

SEQ ID NO: 280820 - DNA, 25 bp, Artificial
  Probe
cacgcctttcaccttgggcaaggag

SEQ ID NO: 280821 - DNA, 25 bp, Artificial
  Probe
gtcaatggcaaaatcactcacagcc

SEQ ID NO: 280822 - DNA, 25 bp, Artificial
  Probe
ctatctaccatcaggaaacccagtg

SEQ ID NO: 280823 - DNA, 25 bp, Artificial
  Probe
ccagtgccaagcacggcccggagaa

SEQ ID NO: 280824 - DNA, 25 bp, Artificial
  Probe
gtctgggcagtattgctcctaccac

SEQ ID NO: 280825 - DNA, 25 bp, Artificial
  Probe
aacccacaggagaagagactccaag

SEQ ID NO: 280826 - DNA, 25 bp, Artificial
  Probe
accttgggcaaggagttcaaggaag

SEQ ID NO: 280827 - DNA, 25 bp, Artificial
  Probe
tgcacagcattggtcacagcgccgc

SEQ ID NO: 280828 - DNA, 25 bp, Artificial
  Probe
aggtgactgtcaatggcaaaatcac

SEQ ID NO: 280829 - DNA, 25 bp, Artificial
  Probe
cgaggacgactctgtggcagatgct

SEQ ID NO: 280830 - DNA, 25 bp, Artificial
  Probe
cgcctcttcccattggtctgggcag

SEQ ID NO: 280831 - DNA, 25 bp, Artificial
  Probe
cgcctttcaccttgggcaaggagtt

SEQ ID NO: 280832 - DNA, 25 bp, Artificial
  Probe
ttcaccttgggcaaggagttcaagg

SEQ ID NO: 280833 - DNA, 25 bp, Artificial
  Probe
cccggagaagctgtctgagaaattc

SEQ ID NO: 280834 - DNA, 25 bp, Artificial
  Probe
tccacggagcccagaaaatcactga

SEQ ID NO: 280835 - DNA, 25 bp, Artificial
  Probe
ctcaacagaaactatgataagtcag

SEQ ID NO: 280836 - DNA, 25 bp, Artificial
  Probe
cggactcgaagttgtcttgtagagg

SEQ ID NO: 280837 - DNA, 25 bp, Artificial
  Probe
gagaagcgaatctgctgttgagcac

SEQ ID NO: 280838 - DNA, 25 bp, Artificial
  Probe
agacagtgacaggtaccacccaaag

SEQ ID NO: 280839 - DNA, 25 bp, Artificial
  Probe
cgttacactgtgtggcaagacagtg

SEQ ID NO: 280840 - DNA, 25 bp, Artificial
  Probe
attcccaacgttacactgtgtggca

SEQ ID NO: 280841 - DNA, 25 bp, Artificial
  Probe
tgaaaaacagctacaactgtatgaa

SEQ ID NO: 280842 - DNA, 25 bp, Artificial
  Probe
ccaacggacctcaacagaaactatg

SEQ ID NO: 280843 - DNA, 25 bp, Artificial
  Probe
ggaaacatggtcagttccattgata

SEQ ID NO: 280844 - DNA, 25 bp, Artificial
  Probe
aaattagcactggaaacatggtcag

SEQ ID NO: 280845 - DNA, 25 bp, Artificial
  Probe
gcgaatctgctgttgagcacacaga

SEQ ID NO: 280846 - DNA, 25 bp, Artificial
  Probe
gacaaaagctctaagccacaggagt

SEQ ID NO: 280847 - DNA, 25 bp, Artificial
  Probe
gctgcacatggcttccccagagcag

SEQ ID NO: 280848 - DNA, 25 bp, Artificial
  Probe
acactcttgaataggggacatgcga

SEQ ID NO: 280849 - DNA, 25 bp, Artificial
  Probe
gttgacaaaagctctaagccacagg

SEQ ID NO: 280850 - DNA, 25 bp, Artificial
  Probe
ttgatgggaacacactcttgaatag

SEQ ID NO: 280851 - DNA, 25 bp, Artificial
  Probe
caggtaccacccaaagccagtgctg

SEQ ID NO: 280852 - DNA, 25 bp, Artificial
  Probe
gtgacaggtaccacccaaagccagt

SEQ ID NO: 280853 - DNA, 25 bp, Artificial
  Probe
cagtgctgcacatggcttccccaga

SEQ ID NO: 280854 - DNA, 25 bp, Artificial
  Probe
aactatgataagtcagcggacctaa

SEQ ID NO: 280855 - DNA, 25 bp, Artificial
  Probe
tcttctgtagttgacaaaagctcta

SEQ ID NO: 280856 - DNA, 25 bp, Artificial
  Probe
aagttcaggtgatctaaaggttcac

SEQ ID NO: 280857 - DNA, 25 bp, Artificial
  Probe
tgtggcaagacagtgacaggtacca

SEQ ID NO: 280858 - DNA, 25 bp, Artificial
  Probe
gaagaaatcctccagccaccagagc

SEQ ID NO: 280859 - DNA, 25 bp, Artificial
  Probe
aaggaagaaatcctccagccaccag

SEQ ID NO: 280860 - DNA, 25 bp, Artificial
  Probe
agttcaggtgatctaaaggttcacg

SEQ ID NO: 280861 - DNA, 25 bp, Artificial
  Probe
tctgctgttgagcacacagataaaa

SEQ ID NO: 280862 - DNA, 25 bp, Artificial
  Probe
aagctctaagccacaggagttaagt

SEQ ID NO: 280863 - DNA, 25 bp, Artificial
  Probe
aagtcagcggacctaatggggagaa

SEQ ID NO: 280864 - DNA, 25 bp, Artificial
  Probe
aaactatgataagtcagcggaccta

SEQ ID NO: 280865 - DNA, 25 bp, Artificial
  Probe
gtcagttccattgatagtgaaaaac

SEQ ID NO: 280866 - DNA, 25 bp, Artificial
  Probe
gacctaatggggagaagcgaatctg

SEQ ID NO: 280867 - DNA, 25 bp, Artificial
  Probe
ccagaaaatcactgatggtaatgaa

SEQ ID NO: 280868 - DNA, 25 bp, Artificial
  Probe
ataagtcagcggacctaatggggag

SEQ ID NO: 280869 - DNA, 25 bp, Artificial
  Probe
ctgttgagcacacagataaaaagtt

SEQ ID NO: 280870 - DNA, 25 bp, Artificial
  Probe
tcagttccattgatagtgaaaaaca

SEQ ID NO: 280871 - DNA, 25 bp, Artificial
  Probe
ggtaccacccaaagccagtgctgca

SEQ ID NO: 280872 - DNA, 25 bp, Artificial
  Probe
taagccacaggagttaagttcaggt

SEQ ID NO: 280873 - DNA, 25 bp, Artificial
  Probe
agcactggaaacatggtcagttcca

SEQ ID NO: 280874 - DNA, 25 bp, Artificial
  Probe
tcagcattcccaacgttacactgtg

SEQ ID NO: 280875 - DNA, 25 bp, Artificial
  Probe
cagctacaactgtatgaaatccacg

SEQ ID NO: 280876 - DNA, 25 bp, Artificial
  Probe
attaagtctgcttcatcttctgtag

SEQ ID NO: 280877 - DNA, 25 bp, Artificial
  Probe
tgatctaaaggttcacgatgtgtct

SEQ ID NO: 280878 - DNA, 25 bp, Artificial
  Probe
aagccaccacggactcgaagttgtc

SEQ ID NO: 280879 - DNA, 25 bp, Artificial
  Probe
tgaaatccacggagcccagaaaatc

SEQ ID NO: 280880 - DNA, 25 bp, Artificial
  Probe
acctatctcagttaccagagtcttg

SEQ ID NO: 280881 - DNA, 25 bp, Artificial
  Probe
cacgggtgattcgtcaagttaccta

SEQ ID NO: 280882 - DNA, 25 bp, Artificial
  Probe
ggggatgctccaacctgtttcatcc

SEQ ID NO: 280883 - DNA, 25 bp, Artificial
  Probe
actccgaaggacctgtgctgatgga

SEQ ID NO: 280884 - DNA, 25 bp, Artificial
  Probe
cagcaaagttgactttcgtactccc

SEQ ID NO: 280885 - DNA, 25 bp, Artificial
  Probe
agtcgtagatgcactaagtatcgtc

SEQ ID NO: 280886 - DNA, 25 bp, Artificial
  Probe
gatgctttaatgttcacaaagcctg

SEQ ID NO: 280887 - DNA, 25 bp, Artificial
  Probe
cacaatgattgtcactggatatata

SEQ ID NO: 280888 - DNA, 25 bp, Artificial
  Probe
tatgaatttgtgcaccacgctctgt

SEQ ID NO: 280889 - DNA, 25 bp, Artificial
  Probe
agcctgaggaggattctgttttgtc

SEQ ID NO: 280890 - DNA, 25 bp, Artificial
  Probe
gagggctccgagaaggagctcccca

SEQ ID NO: 280891 - DNA, 25 bp, Artificial
  Probe
tacttggtttctctctcccagtaag

SEQ ID NO: 280892 - DNA, 25 bp, Artificial
  Probe
tcccagtaagaagcaggtgcctttg

SEQ ID NO: 280893 - DNA, 25 bp, Artificial
  Probe
aggattctgttttgtctgtgtcgac

SEQ ID NO: 280894 - DNA, 25 bp, Artificial
  Probe
tcctgtgttagatgctttaatgttc

SEQ ID NO: 280895 - DNA, 25 bp, Artificial
  Probe
ctgccagcttcgtgtagacaggggt

SEQ ID NO: 280896 - DNA, 25 bp, Artificial
  Probe
aacttgaaagattgccacctttgtg

SEQ ID NO: 280897 - DNA, 25 bp, Artificial
  Probe
cactcagcaaacatgagatgttctg

SEQ ID NO: 280898 - DNA, 25 bp, Artificial
  Probe
caaaccagtgagcagtatgaatttg

SEQ ID NO: 280899 - DNA, 25 bp, Artificial
  Probe
tccccacgatggatgaggaggctct

SEQ ID NO: 280900 - DNA, 25 bp, Artificial
  Probe
tgctgatggaggtgtgacagtcctc

SEQ ID NO: 280901 - DNA, 25 bp, Artificial
  Probe
tcttgtgactggactgtcagctgtt

SEQ ID NO: 280902 - DNA, 25 bp, Artificial
  Probe
tgaggaggctctaaagccagcctga

SEQ ID NO: 280903 - DNA, 25 bp, Artificial
  Probe
tactccgaaggacctgtgctgatgg

SEQ ID NO: 280904 - DNA, 25 bp, Artificial
  Probe
actggcctctgaaggccgagggcct

SEQ ID NO: 280905 - DNA, 25 bp, Artificial
  Probe
gatatcgttatcctgtgttagatgc

SEQ ID NO: 280906 - DNA, 25 bp, Artificial
  Probe
gttcctgtattaagtgctattacct

SEQ ID NO: 280907 - DNA, 25 bp, Artificial
  Probe
acagaacctgtatgtgtaatattca

SEQ ID NO: 280908 - DNA, 25 bp, Artificial
  Probe
cattggctgtcaacagttgaaagaa

SEQ ID NO: 280909 - DNA, 25 bp, Artificial
  Probe
taaagccagcctgaggcgtggattg

SEQ ID NO: 280910 - DNA, 25 bp, Artificial
  Probe
cagagtctgtgcttatggtgactgg

SEQ ID NO: 280911 - DNA, 25 bp, Artificial
  Probe
ataggactgtgttctaggcatcccc

SEQ ID NO: 280912 - DNA, 25 bp, Artificial
  Probe
tggaatggtccaaaccagtgagcag

SEQ ID NO: 280913 - DNA, 25 bp, Artificial
  Probe
attcagagtctgtgcttatggtgac

SEQ ID NO: 280914 - DNA, 25 bp, Artificial
  Probe
cctcaagagaccaatgaaggcaaga

SEQ ID NO: 280915 - DNA, 25 bp, Artificial
  Probe
gaggtgtgacagtcctcatgcagcc

SEQ ID NO: 280916 - DNA, 25 bp, Artificial
  Probe
aagcaggtgcctttggggatgctcc

SEQ ID NO: 280917 - DNA, 25 bp, Artificial
  Probe
cgagggcctgtggttgtccactgca

SEQ ID NO: 280918 - DNA, 25 bp, Artificial
  Probe
agaaccggatgtttcatcgctacat

SEQ ID NO: 280919 - DNA, 25 bp, Artificial
  Probe
aagataaccgcactcagcaaacatg

SEQ ID NO: 280920 - DNA, 25 bp, Artificial
  Probe
tgaccgacaatggatttttaaccat

SEQ ID NO: 280921 - DNA, 25 bp, Artificial
  Probe
gaattttcaatgcagcaaagttgac

SEQ ID NO: 280922 - DNA, 25 bp, Artificial
  Probe
ttcctcaagagaccaatgaaggcaa

SEQ ID NO: 280923 - DNA, 25 bp, Artificial
  Probe
cccacgatggatgaggaggctctaa

SEQ ID NO: 280924 - DNA, 25 bp, Artificial
  Probe
ccgagggcctgtggttgtccactgc

SEQ ID NO: 280925 - DNA, 25 bp, Artificial
  Probe
gtatttatagtatctcctatggatc

SEQ ID NO: 280926 - DNA, 25 bp, Artificial
  Probe
gcactgcctcacagacttgttttct

SEQ ID NO: 280927 - DNA, 25 bp, Artificial
  Probe
tttttctctctcacgtgattaagag

SEQ ID NO: 280928 - DNA, 25 bp, Artificial
  Probe
agacagggtactgtgcccctcttgt

SEQ ID NO: 280929 - DNA, 25 bp, Artificial
  Probe
gcacaaagtaaaacgtcctaactgg

SEQ ID NO: 280930 - DNA, 25 bp, Artificial
  Probe
ccatcgcccctaagaggaagctcag

SEQ ID NO: 280931 - DNA, 25 bp, Artificial
  Probe
agctcagtgccctggctctcatgtg

SEQ ID NO: 280932 - DNA, 25 bp, Artificial
  Probe
acgtttagccatgctggcccatcgc

SEQ ID NO: 280933 - DNA, 25 bp, Artificial
  Probe
gagcctttttgtccttgattatctc

SEQ ID NO: 280934 - DNA, 25 bp, Artificial
  Probe
tgcctggaaaccactgccaaccatt

SEQ ID NO: 280935 - DNA, 25 bp, Artificial
  Probe
gagaaatgcccaccatgaataacct

SEQ ID NO: 280936 - DNA, 25 bp, Artificial
  Probe
acccgccagtctcattttcagtgtg

SEQ ID NO: 280937 - DNA, 25 bp, Artificial
  Probe
tgagaaatgcccaccatgaataacc

SEQ ID NO: 280938 - DNA, 25 bp, Artificial
  Probe
agtttgacatacaggacacgcccac

SEQ ID NO: 280939 - DNA, 25 bp, Artificial
  Probe
tcagcccgtgtatagggagactcct

SEQ ID NO: 280940 - DNA, 25 bp, Artificial
  Probe
tgtgctctctcagcagctcagtgcc

SEQ ID NO: 280941 - DNA, 25 bp, Artificial
  Probe
tttgtggtccttggtggagccagtc

SEQ ID NO: 280942 - DNA, 25 bp, Artificial
  Probe
agaatgtgctctctcagcagctcag

SEQ ID NO: 280943 - DNA, 25 bp, Artificial
  Probe
gactgatgtaccagacctaattcaa

SEQ ID NO: 280944 - DNA, 25 bp, Artificial
  Probe
ggtattcctacgagcaaacttctac

SEQ ID NO: 280945 - DNA, 25 bp, Artificial
  Probe
ttggcaccattaaggtaaaaatcct

SEQ ID NO: 280946 - DNA, 25 bp, Artificial
  Probe
taaattctcaacagcggagtttggt

SEQ ID NO: 280947 - DNA, 25 bp, Artificial
  Probe
gttatgtcttgtgaaccccaacatc

SEQ ID NO: 280948 - DNA, 25 bp, Artificial
  Probe
gtaccagagaagaacctgtgaaatg

SEQ ID NO: 280949 - DNA, 25 bp, Artificial
  Probe
gcatgcactgggtcgtttggcacca

SEQ ID NO: 280950 - DNA, 25 bp, Artificial
  Probe
cctaactggcaaatgtttggaatta

SEQ ID NO: 280951 - DNA, 25 bp, Artificial
  Probe
tccaccctgttggtatcaccaaggc

SEQ ID NO: 280952 - DNA, 25 bp, Artificial
  Probe
tctgtggccctctgggccctgtgta

SEQ ID NO: 280953 - DNA, 25 bp, Artificial
  Probe
tcttgtttgtggtccttggtggagc

SEQ ID NO: 280954 - DNA, 25 bp, Artificial
  Probe
cttggtggagccagtcgggcacctt

SEQ ID NO: 280955 - DNA, 25 bp, Artificial
  Probe
cattttatcagcaacaagaagggaa

SEQ ID NO: 280956 - DNA, 25 bp, Artificial
  Probe
tcccctcatacatcaagttgggagc

SEQ ID NO: 280957 - DNA, 25 bp, Artificial
  Probe
gctctgctcttcttagggtgttttg

SEQ ID NO: 280958 - DNA, 25 bp, Artificial
  Probe
tccctcagagaatcctatgtaccag

SEQ ID NO: 280959 - DNA, 25 bp, Artificial
  Probe
tctcacgtgattaagagcaaaagac

SEQ ID NO: 280960 - DNA, 25 bp, Artificial
  Probe
caccagtcagccatgctgcctggaa

SEQ ID NO: 280961 - DNA, 25 bp, Artificial
  Probe
cactgggtcgtttggcaccattaag

SEQ ID NO: 280962 - DNA, 25 bp, Artificial
  Probe
aacctgtgaaatgtacgtgtgttgc

SEQ ID NO: 280963 - DNA, 25 bp, Artificial
  Probe
ggccctccaagctcatctttcaaag

SEQ ID NO: 280964 - DNA, 25 bp, Artificial
  Probe
ggggcgccttcctttctgtgcactg

SEQ ID NO: 280965 - DNA, 25 bp, Artificial
  Probe
ctgacctgtatgtgtgacttaataa

SEQ ID NO: 280966 - DNA, 25 bp, Artificial
  Probe
aatgtacctgcttccaccagtcagc

SEQ ID NO: 280967 - DNA, 25 bp, Artificial
  Probe
tcctctacttccaatgaagttcagg

SEQ ID NO: 280968 - DNA, 25 bp, Artificial
  Probe
cccacagaaggtgagcagagcagga

SEQ ID NO: 280969 - DNA, 25 bp, Artificial
  Probe
gtaaaaatccttgattagcacaagc

SEQ ID NO: 280970 - DNA, 25 bp, Artificial
  Probe
tccaatgaagttcaggtatgagcca

SEQ ID NO: 280971 - DNA, 25 bp, Artificial
  Probe
gcaaaagactagactcagctatagg

SEQ ID NO: 280972 - DNA, 25 bp, Artificial
  Probe
tctcatcctcgctcagaggatgctc

SEQ ID NO: 280973 - DNA, 25 bp, Artificial
  Probe
gttcaatgccataggctgtagagtg

SEQ ID NO: 280974 - DNA, 25 bp, Artificial
  Probe
atttgctgttctcatcctcgctcag

SEQ ID NO: 280975 - DNA, 25 bp, Artificial
  Probe
tcatcctcgctcagaggatgctctt

SEQ ID NO: 280976 - DNA, 25 bp, Artificial
  Probe
tcaatgggcaagttacagtgttcag

SEQ ID NO: 280977 - DNA, 25 bp, Artificial
  Probe
acagtgttcagttcaatgccatagg

SEQ ID NO: 280978 - DNA, 25 bp, Artificial
  Probe
gtgaagtaagctcaccatacacagg

SEQ ID NO: 280979 - DNA, 25 bp, Artificial
  Probe
ttctgaacgttgtgacatttgctgt

SEQ ID NO: 280980 - DNA, 25 bp, Artificial
  Probe
ctgtaattccttctaatccctgcgg

SEQ ID NO: 280981 - DNA, 25 bp, Artificial
  Probe
ttcatcgtgggatgactgtaattcc

SEQ ID NO: 280982 - DNA, 25 bp, Artificial
  Probe
ttacagtgttcagttcaatgccata

SEQ ID NO: 280983 - DNA, 25 bp, Artificial
  Probe
atatgtttggggtcctgcctatctt

SEQ ID NO: 280984 - DNA, 25 bp, Artificial
  Probe
tacacaggtgctttacatttaatga

SEQ ID NO: 280985 - DNA, 25 bp, Artificial
  Probe
tgttcagttcaatgccataggctgt

SEQ ID NO: 280986 - DNA, 25 bp, Artificial
  Probe
cttcatcgtgggatgactgtaattc

SEQ ID NO: 280987 - DNA, 25 bp, Artificial
  Probe
gacatttgctgttctcatcctcgct

SEQ ID NO: 280988 - DNA, 25 bp, Artificial
  Probe
gtattagcctatatgtttggggtcc

SEQ ID NO: 280989 - DNA, 25 bp, Artificial
  Probe
atacacaggtgctttacatttaatg

SEQ ID NO: 280990 - DNA, 25 bp, Artificial
  Probe
agtgttcagttcaatgccataggct

SEQ ID NO: 280991 - DNA, 25 bp, Artificial
  Probe
cagttcaatgccataggctgtagag

SEQ ID NO: 280992 - DNA, 25 bp, Artificial
  Probe
cagaggatgctcttcatcgtgggat

SEQ ID NO: 280993 - DNA, 25 bp, Artificial
  Probe
agtgaagtaagctcaccatacacag

SEQ ID NO: 280994 - DNA, 25 bp, Artificial
  Probe
caggtgctttacatttaatgacaag

SEQ ID NO: 280995 - DNA, 25 bp, Artificial
  Probe
aattctgaacgttgtgacatttgct

SEQ ID NO: 280996 - DNA, 25 bp, Artificial
  Probe
gtaattccttctaatccctgcggct

SEQ ID NO: 280997 - DNA, 25 bp, Artificial
  Probe
ctgcggctccatcctaagccaaata

SEQ ID NO: 280998 - DNA, 25 bp, Artificial
  Probe
gctcaccatacacaggtgctttaca

SEQ ID NO: 280999 - DNA, 25 bp, Artificial
  Probe
ctgaacgttgtgacatttgctgttc

SEQ ID NO: 281000 - DNA, 25 bp, Artificial
  Probe
aggcattcaggaaccccttcatcca

SEQ ID NO: 281001 - DNA, 25 bp, Artificial
  Probe
gaacgttgtgacatttgctgttctc

SEQ ID NO: 281002 - DNA, 25 bp, Artificial
  Probe
ctcgctcagaggatgctcttcatcg

SEQ ID NO: 281003 - DNA, 25 bp, Artificial
  Probe
tgcggctccatcctaagccaaataa

SEQ ID NO: 281004 - DNA, 25 bp, Artificial
  Probe
agcctatatgtttggggtcctgcct

SEQ ID NO: 281005 - DNA, 25 bp, Artificial
  Probe
tgctcttcatcgtgggatgactgta

SEQ ID NO: 281006 - DNA, 25 bp, Artificial
  Probe
tttgctgttctcatcctcgctcaga

SEQ ID NO: 281007 - DNA, 25 bp, Artificial
  Probe
tgaggcattcaggaaccccttcatc

SEQ ID NO: 281008 - DNA, 25 bp, Artificial
  Probe
gtaagctcaccatacacaggtgctt

SEQ ID NO: 281009 - DNA, 25 bp, Artificial
  Probe
attcaatgggcaagttacagtgttc

SEQ ID NO: 281010 - DNA, 25 bp, Artificial
  Probe
cacaggtgctttacatttaatgaca

SEQ ID NO: 281011 - DNA, 25 bp, Artificial
  Probe
gcaagttacagtgttcagttcaatg

SEQ ID NO: 281012 - DNA, 25 bp, Artificial
  Probe
ttcaatgggcaagttacagtgttca

SEQ ID NO: 281013 - DNA, 25 bp, Artificial
  Probe
ccataggctgtagagtgaagtaagc

SEQ ID NO: 281014 - DNA, 25 bp, Artificial
  Probe
tcatcgtgggatgactgtaattcct

SEQ ID NO: 281015 - DNA, 25 bp, Artificial
  Probe
tcgctcagaggatgctcttcatcgt

SEQ ID NO: 281016 - DNA, 25 bp, Artificial
  Probe
ctgttctcatcctcgctcagaggat

SEQ ID NO: 281017 - DNA, 25 bp, Artificial
  Probe
gatgctcttcatcgtgggatgactg

SEQ ID NO: 281018 - DNA, 25 bp, Artificial
  Probe
cgccctaccttctggtgagtgacca

SEQ ID NO: 281019 - DNA, 25 bp, Artificial
  Probe
agagctccagtgaccatctctctct

SEQ ID NO: 281020 - DNA, 25 bp, Artificial
  Probe
ttgaggacctagtcactcagcgaaa

SEQ ID NO: 281021 - DNA, 25 bp, Artificial
  Probe
agcacagcggagattgacgtggaac

SEQ ID NO: 281022 - DNA, 25 bp, Artificial
  Probe
gtcactcagcgaaagtttggtagct

SEQ ID NO: 281023 - DNA, 25 bp, Artificial
  Probe
agcatcatggtaagccgtgcgcccg

SEQ ID NO: 281024 - DNA, 25 bp, Artificial
  Probe
gtttgaggacctagtcactcagcga

SEQ ID NO: 281025 - DNA, 25 bp, Artificial
  Probe
tgcgccctaccttctggtgagtgac

SEQ ID NO: 281026 - DNA, 25 bp, Artificial
  Probe
ggacctagtcactcagcgaaagttt

SEQ ID NO: 281027 - DNA, 25 bp, Artificial
  Probe
catagtaccgggagcgactcctcca

SEQ ID NO: 281028 - DNA, 25 bp, Artificial
  Probe
ctgcgccctaccttctggtgagtga

SEQ ID NO: 281029 - DNA, 25 bp, Artificial
  Probe
ccctgatgggtgtgtgatcttggca

SEQ ID NO: 281030 - DNA, 25 bp, Artificial
  Probe
gagtgaccatagtaccgggagcgac

SEQ ID NO: 281031 - DNA, 25 bp, Artificial
  Probe
ggctttcctttctccagcacagcgg

SEQ ID NO: 281032 - DNA, 25 bp, Artificial
  Probe
gaccagagctccagtgaccatctct

SEQ ID NO: 281033 - DNA, 25 bp, Artificial
  Probe
ctggccagggcgtttccgttgcacg

SEQ ID NO: 281034 - DNA, 25 bp, Artificial
  Probe
acctagtcactcagcgaaagtttgg

SEQ ID NO: 281035 - DNA, 25 bp, Artificial
  Probe
cctaccttctggtgagtgaccatag

SEQ ID NO: 281036 - DNA, 25 bp, Artificial
  Probe
ggagaccagagctccagtgaccatc

SEQ ID NO: 281037 - DNA, 25 bp, Artificial
  Probe
acagcggagattgacgtggaacagc

SEQ ID NO: 281038 - DNA, 25 bp, Artificial
  Probe
cgggagaccagagctccagtgacca

SEQ ID NO: 281039 - DNA, 25 bp, Artificial
  Probe
agtgaccatagtaccgggagcgact

SEQ ID NO: 281040 - DNA, 25 bp, Artificial
  Probe
gcgggagaccagagctccagtgacc

SEQ ID NO: 281041 - DNA, 25 bp, Artificial
  Probe
cctgcgccctaccttctggtgagtg

SEQ ID NO: 281042 - DNA, 25 bp, Artificial
  Probe
tttctccagcacagcggagattgac

SEQ ID NO: 281043 - DNA, 25 bp, Artificial
  Probe
cacagcggagattgacgtggaacag

SEQ ID NO: 281044 - DNA, 25 bp, Artificial
  Probe
cacgcaggcgcaagagcctggagac

SEQ ID NO: 281045 - DNA, 25 bp, Artificial
  Probe
ttctggtgagtgaccatagtaccgg

SEQ ID NO: 281046 - DNA, 25 bp, Artificial
  Probe
tttcctttctccagcacagcggaga

SEQ ID NO: 281047 - DNA, 25 bp, Artificial
  Probe
gagctccagtgaccatctctctctt

SEQ ID NO: 281048 - DNA, 25 bp, Artificial
  Probe
accttctggtgagtgaccatagtac

SEQ ID NO: 281049 - DNA, 25 bp, Artificial
  Probe
agtcactcagcgaaagtttggtagc

SEQ ID NO: 281050 - DNA, 25 bp, Artificial
  Probe
ctttcctttctccagcacagcggag

SEQ ID NO: 281051 - DNA, 25 bp, Artificial
  Probe
tgtttgaggacctagtcactcagcg

SEQ ID NO: 281052 - DNA, 25 bp, Artificial
  Probe
cgtggcctgtttgaggacctagtca

SEQ ID NO: 281053 - DNA, 25 bp, Artificial
  Probe
ccacgcaggcgcaagagcctggaga

SEQ ID NO: 281054 - DNA, 25 bp, Artificial
  Probe
ctcagcgaaagtttggtagctaagg

SEQ ID NO: 281055 - DNA, 25 bp, Artificial
  Probe
ccagcacagcggagattgacgtgga

SEQ ID NO: 281056 - DNA, 25 bp, Artificial
  Probe
caccaagggcgcaggacccttttgg

SEQ ID NO: 281057 - DNA, 25 bp, Artificial
  Probe
cgcaggcgcaagagcctggagacta

SEQ ID NO: 281058 - DNA, 25 bp, Artificial
  Probe
gcgtggcctgtttgaggacctagtc

SEQ ID NO: 281059 - DNA, 25 bp, Artificial
  Probe
ctgaccgacagcatcatggtaagcc

SEQ ID NO: 281060 - DNA, 25 bp, Artificial
  Probe
tgagtgaccatagtaccgggagcga

SEQ ID NO: 281061 - DNA, 25 bp, Artificial
  Probe
cgcaagagcctggagactaggacgt

SEQ ID NO: 281062 - DNA, 25 bp, Artificial
  Probe
gaccgacagcatcatggtaagccgt

SEQ ID NO: 281063 - DNA, 25 bp, Artificial
  Probe
tcactcagcgaaagtttggtagcta

SEQ ID NO: 281064 - DNA, 25 bp, Artificial
  Probe
gctctagctactaatcttggctgcc

SEQ ID NO: 281065 - DNA, 25 bp, Artificial
  Probe
tcttggctgcctggcatcacccttt

SEQ ID NO: 281066 - DNA, 25 bp, Artificial
  Probe
caacccctggctctagctactaatc

SEQ ID NO: 281067 - DNA, 25 bp, Artificial
  Probe
tggcatcaccctttgatggacagcc

SEQ ID NO: 281068 - DNA, 25 bp, Artificial
  Probe
aatcttggctgcctggcatcaccct

SEQ ID NO: 281069 - DNA, 25 bp, Artificial
  Probe
tgcctggcatcaccctttgatggac

SEQ ID NO: 281070 - DNA, 25 bp, Artificial
  Probe
cctggcatcaccctttgatggacag

SEQ ID NO: 281071 - DNA, 25 bp, Artificial
  Probe
tagctactaatcttggctgcctggc

SEQ ID NO: 281072 - DNA, 25 bp, Artificial
  Probe
tggctgcctggcatcaccctttgat

SEQ ID NO: 281073 - DNA, 25 bp, Artificial
  Probe
ccaacccctggctctagctactaat

SEQ ID NO: 281074 - DNA, 25 bp, Artificial
  Probe
gctgcctggcatcaccctttgatgg

SEQ ID NO: 281075 - DNA, 25 bp, Artificial
  Probe
ggctgcctggcatcaccctttgatg

SEQ ID NO: 281076 - DNA, 25 bp, Artificial
  Probe
ctgcctggcatcaccctttgatgga

SEQ ID NO: 281077 - DNA, 25 bp, Artificial
  Probe
agctggaggtgggtacctccttaca

SEQ ID NO: 281078 - DNA, 25 bp, Artificial
  Probe
ggcatcaccctttgatggacagccc

SEQ ID NO: 281079 - DNA, 25 bp, Artificial
  Probe
tggaggtgggtacctccttacagac

SEQ ID NO: 281080 - DNA, 25 bp, Artificial
  Probe
ctggcatcaccctttgatggacagc

SEQ ID NO: 281081 - DNA, 25 bp, Artificial
  Probe
taaggagctggaggtgggtacctcc

SEQ ID NO: 281082 - DNA, 25 bp, Artificial
  Probe
ctactaatcttggctgcctggcatc

SEQ ID NO: 281083 - DNA, 25 bp, Artificial
  Probe
acccctggctctagctactaatctt

SEQ ID NO: 281084 - DNA, 25 bp, Artificial
  Probe
ccctggctctagctactaatcttgg

SEQ ID NO: 281085 - DNA, 25 bp, Artificial
  Probe
ctctagctactaatcttggctgcct

SEQ ID NO: 281086 - DNA, 25 bp, Artificial
  Probe
gcctggcatcaccctttgatggaca

SEQ ID NO: 281087 - DNA, 25 bp, Artificial
  Probe
ctagctactaatcttggctgcctgg

SEQ ID NO: 281088 - DNA, 25 bp, Artificial
  Probe
cttggctgcctggcatcaccctttg

SEQ ID NO: 281089 - DNA, 25 bp, Artificial
  Probe
cccctggctctagctactaatcttg

SEQ ID NO: 281090 - DNA, 25 bp, Artificial
  Probe
gctactaatcttggctgcctggcat

SEQ ID NO: 281091 - DNA, 25 bp, Artificial
  Probe
tactaatcttggctgcctggcatca

SEQ ID NO: 281092 - DNA, 25 bp, Artificial
  Probe
atcttggctgcctggcatcaccctt

SEQ ID NO: 281093 - DNA, 25 bp, Artificial
  Probe
ttggctgcctggcatcaccctttga

SEQ ID NO: 281094 - DNA, 25 bp, Artificial
  Probe
gagctggaggtgggtacctccttac

SEQ ID NO: 281095 - DNA, 25 bp, Artificial
  Probe
ctaatcttggctgcctggcatcacc

SEQ ID NO: 281096 - DNA, 25 bp, Artificial
  Probe
agctactaatcttggctgcctggca

SEQ ID NO: 281097 - DNA, 25 bp, Artificial
  Probe
tctagctactaatcttggctgcctg

SEQ ID NO: 281098 - DNA, 25 bp, Artificial
  Probe
cctggctctagctactaatcttggc

SEQ ID NO: 281099 - DNA, 25 bp, Artificial
  Probe
ctggctctagctactaatcttggct

SEQ ID NO: 281100 - DNA, 25 bp, Artificial
  Probe
tggctctagctactaatcttggctg

SEQ ID NO: 281101 - DNA, 25 bp, Artificial
  Probe
actaatcttggctgcctggcatcac

SEQ ID NO: 281102 - DNA, 25 bp, Artificial
  Probe
ggctctagctactaatcttggctgc

SEQ ID NO: 281103 - DNA, 25 bp, Artificial
  Probe
aacccctggctctagctactaatct

SEQ ID NO: 281104 - DNA, 25 bp, Artificial
  Probe
taatcttggctgcctggcatcaccc

SEQ ID NO: 281105 - DNA, 25 bp, Artificial
  Probe
ggattagcaccaaagctctttctcc

SEQ ID NO: 281106 - DNA, 25 bp, Artificial
  Probe
cactccctggaaagggactttgttg

SEQ ID NO: 281107 - DNA, 25 bp, Artificial
  Probe
tcctggtatctgaggtcccaggagg

SEQ ID NO: 281108 - DNA, 25 bp, Artificial
  Probe
gcctccaaaagactccttgcattag

SEQ ID NO: 281109 - DNA, 25 bp, Artificial
  Probe
agagctgttgcttgccctctgtccc

SEQ ID NO: 281110 - DNA, 25 bp, Artificial
  Probe
tatccttttgggtcccttgtcacaa

SEQ ID NO: 281111 - DNA, 25 bp, Artificial
  Probe
cctgaatgtctgttgggtcagaggt

SEQ ID NO: 281112 - DNA, 25 bp, Artificial
  Probe
ttccttttacctagacagtccttgg

SEQ ID NO: 281113 - DNA, 25 bp, Artificial
  Probe
gggattagcaccaaagctctttctc

SEQ ID NO: 281114 - DNA, 25 bp, Artificial
  Probe
aggtctgtaggcatcaatgaaggca

SEQ ID NO: 281115 - DNA, 25 bp, Artificial
  Probe
gaaggaagtccacattgcaaactga

SEQ ID NO: 281116 - DNA, 25 bp, Artificial
  Probe
acctctgcccctgaaatgcgtgatc

SEQ ID NO: 281117 - DNA, 25 bp, Artificial
  Probe
tccctctctcctgtgatcagaggca

SEQ ID NO: 281118 - DNA, 25 bp, Artificial
  Probe
acagactgaggactgaactgggatg

SEQ ID NO: 281119 - DNA, 25 bp, Artificial
  Probe
ctccagagctgtgtgtttgggatga

SEQ ID NO: 281120 - DNA, 25 bp, Artificial
  Probe
cagactgaggactgaactgggatgt

SEQ ID NO: 281121 - DNA, 25 bp, Artificial
  Probe
gggggtctccagactcccctgaagc

SEQ ID NO: 281122 - DNA, 25 bp, Artificial
  Probe
cagccccactataggagcaacgaga

SEQ ID NO: 281123 - DNA, 25 bp, Artificial
  Probe
gtgatcatccttttctgcatcccag

SEQ ID NO: 281124 - DNA, 25 bp, Artificial
  Probe
ccttggtgggcctgaatgtctgttg

SEQ ID NO: 281125 - DNA, 25 bp, Artificial
  Probe
ctgcccctgagctccagagctgtgt

SEQ ID NO: 281126 - DNA, 25 bp, Artificial
  Probe
ttaggtgatccaggagccctgtccc

SEQ ID NO: 281127 - DNA, 25 bp, Artificial
  Probe
ggactgcccgggacaggttgccttc

SEQ ID NO: 281128 - DNA, 25 bp, Artificial
  Probe
ttttttcctggtatctgaggtccca

SEQ ID NO: 281129 - DNA, 25 bp, Artificial
  Probe
ccatgagatcggatagggcaaaaag

SEQ ID NO: 281130 - DNA, 25 bp, Artificial
  Probe
aaggctgtctcctgtcttcaaccac

SEQ ID NO: 281131 - DNA, 25 bp, Artificial
  Probe
gcagtcaccaggattctcttccttt

SEQ ID NO: 281132 - DNA, 25 bp, Artificial
  Probe
ggactttgttgtgatcatccttttc

SEQ ID NO: 281133 - DNA, 25 bp, Artificial
  Probe
atatgggtaaacctaggagaactca

SEQ ID NO: 281134 - DNA, 25 bp, Artificial
  Probe
tcctgatcatctggtcatcttcatg

SEQ ID NO: 281135 - DNA, 25 bp, Artificial
  Probe
tgcatcccagctacccaaggaggag

SEQ ID NO: 281136 - DNA, 25 bp, Artificial
  Probe
ctcccctgaagcagggaaggaagtc

SEQ ID NO: 281137 - DNA, 25 bp, Artificial
  Probe
tttctgcatcccagctacccaagga

SEQ ID NO: 281138 - DNA, 25 bp, Artificial
  Probe
ctctgtttcagactgggcatccact

SEQ ID NO: 281139 - DNA, 25 bp, Artificial
  Probe
tctgtaggcatcaatgaaggcaggg

SEQ ID NO: 281140 - DNA, 25 bp, Artificial
  Probe
aagggcttagagtcctttcaggtgg

SEQ ID NO: 281141 - DNA, 25 bp, Artificial
  Probe
agctggctgggctggtacttatctg

SEQ ID NO: 281142 - DNA, 25 bp, Artificial
  Probe
ctagacagtccttggaaagtgtgtg

SEQ ID NO: 281143 - DNA, 25 bp, Artificial
  Probe
cttgggattccttggtgggcctgaa

SEQ ID NO: 281144 - DNA, 25 bp, Artificial
  Probe
ctcctgtgatcagaggcagaggaag

SEQ ID NO: 281145 - DNA, 25 bp, Artificial
  Probe
cagggatgccactgcctccaaaaga

SEQ ID NO: 281146 - DNA, 25 bp, Artificial
  Probe
aagtcactcttcagggccaagcact

SEQ ID NO: 281147 - DNA, 25 bp, Artificial
  Probe
gggtgacttctaaccactccttcct

SEQ ID NO: 281148 - DNA, 25 bp, Artificial
  Probe
gtcagaggtcatcctttccctctct

SEQ ID NO: 281149 - DNA, 25 bp, Artificial
  Probe
tgctgctttgcctccaaaagtcact

SEQ ID NO: 281150 - DNA, 25 bp, Artificial
  Probe
atgtatcttgcctcactcctgagaa

SEQ ID NO: 281151 - DNA, 25 bp, Artificial
  Probe
tctggctccgtgtatgcgtttggag

SEQ ID NO: 281152 - DNA, 25 bp, Artificial
  Probe
accgccttctcagtgggatctggct

SEQ ID NO: 281153 - DNA, 25 bp, Artificial
  Probe
atctggctccgtgtatgcgtttgga

SEQ ID NO: 281154 - DNA, 25 bp, Artificial
  Probe
gttggctcgacagtgtcgaatctat

SEQ ID NO: 281155 - DNA, 25 bp, Artificial
  Probe
tggaaccgccttctcagtgggatct

SEQ ID NO: 281156 - DNA, 25 bp, Artificial
  Probe
cttctcagtgggatctggctccgtg

SEQ ID NO: 281157 - DNA, 25 bp, Artificial
  Probe
ccgccttctcagtgggatctggctc

SEQ ID NO: 281158 - DNA, 25 bp, Artificial
  Probe
tcgaatctatgagcttcgcaacaag

SEQ ID NO: 281159 - DNA, 25 bp, Artificial
  Probe
ctcgacagtgtcgaatctatgagct

SEQ ID NO: 281160 - DNA, 25 bp, Artificial
  Probe
aacaggatctctggaaccgccttct

SEQ ID NO: 281161 - DNA, 25 bp, Artificial
  Probe
agtgtcgaatctatgagcttcgcaa

SEQ ID NO: 281162 - DNA, 25 bp, Artificial
  Probe
tctcagtgggatctggctccgtgta

SEQ ID NO: 281163 - DNA, 25 bp, Artificial
  Probe
ctggaaccgccttctcagtgggatc

SEQ ID NO: 281164 - DNA, 25 bp, Artificial
  Probe
caggatctctggaaccgccttctca

SEQ ID NO: 281165 - DNA, 25 bp, Artificial
  Probe
gttgttggctcgacagtgtcgaatc

SEQ ID NO: 281166 - DNA, 25 bp, Artificial
  Probe
gctcgacagtgtcgaatctatgagc

SEQ ID NO: 281167 - DNA, 25 bp, Artificial
  Probe
ctcagtgggatctggctccgtgtat

SEQ ID NO: 281168 - DNA, 25 bp, Artificial
  Probe
ggctcgacagtgtcgaatctatgag

SEQ ID NO: 281169 - DNA, 25 bp, Artificial
  Probe
tggctcgacagtgtcgaatctatga

SEQ ID NO: 281170 - DNA, 25 bp, Artificial
  Probe
acagtgtcgaatctatgagcttcgc

SEQ ID NO: 281171 - DNA, 25 bp, Artificial
  Probe
ttggctcgacagtgtcgaatctatg

SEQ ID NO: 281172 - DNA, 25 bp, Artificial
  Probe
tctggaaccgccttctcagtgggat

SEQ ID NO: 281173 - DNA, 25 bp, Artificial
  Probe
cagtgtcgaatctatgagcttcgca

SEQ ID NO: 281174 - DNA, 25 bp, Artificial
  Probe
ggaaccgccttctcagtgggatctg

SEQ ID NO: 281175 - DNA, 25 bp, Artificial
  Probe
gtcgaatctatgagcttcgcaacaa

SEQ ID NO: 281176 - DNA, 25 bp, Artificial
  Probe
gaatctatgagcttcgcaacaagga

SEQ ID NO: 281177 - DNA, 25 bp, Artificial
  Probe
ggttgttggctcgacagtgtcgaat

SEQ ID NO: 281178 - DNA, 25 bp, Artificial
  Probe
cgacagtgtcgaatctatgagcttc

SEQ ID NO: 281179 - DNA, 25 bp, Artificial
  Probe
tgttggctcgacagtgtcgaatcta

SEQ ID NO: 281180 - DNA, 25 bp, Artificial
  Probe
ttctcagtgggatctggctccgtgt

SEQ ID NO: 281181 - DNA, 25 bp, Artificial
  Probe
tatgagcttcgcaacaaggaacgca

SEQ ID NO: 281182 - DNA, 25 bp, Artificial
  Probe
ggaacaggatctctggaaccgcctt

SEQ ID NO: 281183 - DNA, 25 bp, Artificial
  Probe
cgaatctatgagcttcgcaacaagg

SEQ ID NO: 281184 - DNA, 25 bp, Artificial
  Probe
atgagcttcgcaacaaggaacgcat

SEQ ID NO: 281185 - DNA, 25 bp, Artificial
  Probe
aggatctctggaaccgccttctcag

SEQ ID NO: 281186 - DNA, 25 bp, Artificial
  Probe
ttgttggctcgacagtgtcgaatct

SEQ ID NO: 281187 - DNA, 25 bp, Artificial
  Probe
tcgacagtgtcgaatctatgagctt

SEQ ID NO: 281188 - DNA, 25 bp, Artificial
  Probe
aatctatgagcttcgcaacaaggaa

SEQ ID NO: 281189 - DNA, 25 bp, Artificial
  Probe
gatctggctccgtgtatgcgtttgg

SEQ ID NO: 281190 - DNA, 25 bp, Artificial
  Probe
tggctccgtgtatgcgtttggagtc

SEQ ID NO: 281191 - DNA, 25 bp, Artificial
  Probe
gacagtgtcgaatctatgagcttcg

SEQ ID NO: 281192 - DNA, 25 bp, Artificial
  Probe
acaggatctctggaaccgccttctc

SEQ ID NO: 281193 - DNA, 25 bp, Artificial
  Probe
aaccgccttctcagtgggatctggc

SEQ ID NO: 281194 - DNA, 25 bp, Artificial
  Probe
cggttgttggctcgacagtgtcgaa

SEQ ID NO: 281195 - DNA, 25 bp, Artificial
  Probe
gaaccgccttctcagtgggatctgg

SEQ ID NO: 281196 - DNA, 25 bp, Artificial
  Probe
gaacaggatctctggaaccgccttc

SEQ ID NO: 281197 - DNA, 25 bp, Artificial
  Probe
tcttgaattctactacctgaagagc

SEQ ID NO: 281198 - DNA, 25 bp, Artificial
  Probe
tactacctgaagagcaaaggcaggc

SEQ ID NO: 281199 - DNA, 25 bp, Artificial
  Probe
ctttgcttgtggtctccttgtgccc

SEQ ID NO: 281200 - DNA, 25 bp, Artificial
  Probe
atcagtctcctttaatccaaggctg

SEQ ID NO: 281201 - DNA, 25 bp, Artificial
  Probe
ttgcttgtggtctccttgtgcccca

SEQ ID NO: 281202 - DNA, 25 bp, Artificial
  Probe
cctttgcttgtggtctccttgtgcc

SEQ ID NO: 281203 - DNA, 25 bp, Artificial
  Probe
ggctgaagggagtccctttgcttgt

SEQ ID NO: 281204 - DNA, 25 bp, Artificial
  Probe
gtcttgaattctactacctgaagag

SEQ ID NO: 281205 - DNA, 25 bp, Artificial
  Probe
ttgtggtctccttgtgccccatgtc

SEQ ID NO: 281206 - DNA, 25 bp, Artificial
  Probe
cttgtggtctccttgtgccccatgt

SEQ ID NO: 281207 - DNA, 25 bp, Artificial
  Probe
tgtgccccatgtctgtacatttttt

SEQ ID NO: 281208 - DNA, 25 bp, Artificial
  Probe
cttgaattctactacctgaagagca

SEQ ID NO: 281209 - DNA, 25 bp, Artificial
  Probe
ctacctgaagagcaaaggcaggcgg

SEQ ID NO: 281210 - DNA, 25 bp, Artificial
  Probe
atccaaggctgaagggagtcccttt

SEQ ID NO: 281211 - DNA, 25 bp, Artificial
  Probe
gtggtctccttgtgccccatgtctg

SEQ ID NO: 281212 - DNA, 25 bp, Artificial
  Probe
ttaatccaaggctgaagggagtccc

SEQ ID NO: 281213 - DNA, 25 bp, Artificial
  Probe
gtctcctttaatccaaggctgaagg

SEQ ID NO: 281214 - DNA, 25 bp, Artificial
  Probe
ctactacctgaagagcaaaggcagg

SEQ ID NO: 281215 - DNA, 25 bp, Artificial
  Probe
tcagtctcctttaatccaaggctga

SEQ ID NO: 281216 - DNA, 25 bp, Artificial
  Probe
gtgccccatgtctgtacattttttc

SEQ ID NO: 281217 - DNA, 25 bp, Artificial
  Probe
atcagggtcttgaattctactacct

SEQ ID NO: 281218 - DNA, 25 bp, Artificial
  Probe
tttgcttgtggtctccttgtgcccc

SEQ ID NO: 281219 - DNA, 25 bp, Artificial
  Probe
agggagtccctttgcttgtggtctc

SEQ ID NO: 281220 - DNA, 25 bp, Artificial
  Probe
ccctttgcttgtggtctccttgtgc

SEQ ID NO: 281221 - DNA, 25 bp, Artificial
  Probe
ctcctttaatccaaggctgaaggga

SEQ ID NO: 281222 - DNA, 25 bp, Artificial
  Probe
tgcttgtggtctccttgtgccccat

SEQ ID NO: 281223 - DNA, 25 bp, Artificial
  Probe
tccctttgcttgtggtctccttgtg

SEQ ID NO: 281224 - DNA, 25 bp, Artificial
  Probe
tctcctttaatccaaggctgaaggg

SEQ ID NO: 281225 - DNA, 25 bp, Artificial
  Probe
gaagggagtccctttgcttgtggtc

SEQ ID NO: 281226 - DNA, 25 bp, Artificial
  Probe
tgtggtctccttgtgccccatgtct

SEQ ID NO: 281227 - DNA, 25 bp, Artificial
  Probe
tcctttaatccaaggctgaagggag

SEQ ID NO: 281228 - DNA, 25 bp, Artificial
  Probe
agtccctttgcttgtggtctccttg

SEQ ID NO: 281229 - DNA, 25 bp, Artificial
  Probe
aagggagtccctttgcttgtggtct

SEQ ID NO: 281230 - DNA, 25 bp, Artificial
  Probe
gggtcttgaattctactacctgaag

SEQ ID NO: 281231 - DNA, 25 bp, Artificial
  Probe
aggctgaagggagtccctttgcttg

SEQ ID NO: 281232 - DNA, 25 bp, Artificial
  Probe
gcttgtggtctccttgtgccccatg

SEQ ID NO: 281233 - DNA, 25 bp, Artificial
  Probe
agtctcctttaatccaaggctgaag

SEQ ID NO: 281234 - DNA, 25 bp, Artificial
  Probe
actacctgaagagcaaaggcaggcg

SEQ ID NO: 281235 - DNA, 25 bp, Artificial
  Probe
ttgaattctactacctgaagagcaa

SEQ ID NO: 281236 - DNA, 25 bp, Artificial
  Probe
ttgtgccccatgtctgtacattttt

SEQ ID NO: 281237 - DNA, 25 bp, Artificial
  Probe
ggagtccctttgcttgtggtctcct

SEQ ID NO: 281238 - DNA, 25 bp, Artificial
  Probe
cagtctcctttaatccaaggctgaa

SEQ ID NO: 281239 - DNA, 25 bp, Artificial
  Probe
aatcagggtcttgaattctactacc

SEQ ID NO: 281240 - DNA, 25 bp, Artificial
  Probe
gggagtccctttgcttgtggtctcc

SEQ ID NO: 281241 - DNA, 25 bp, Artificial
  Probe
taatccaaggctgaagggagtccct

SEQ ID NO: 281242 - DNA, 25 bp, Artificial
  Probe
gagtccctttgcttgtggtctcctt

SEQ ID NO: 281243 - DNA, 25 bp, Artificial
  Probe
atggtgttcctgaagacacaaagca

SEQ ID NO: 281244 - DNA, 25 bp, Artificial
  Probe
atggatgagccctgagaaacacagg

SEQ ID NO: 281245 - DNA, 25 bp, Artificial
  Probe
agaagacctggatatggatgagccc

SEQ ID NO: 281246 - DNA, 25 bp, Artificial
  Probe
aacttgctatgctgcgttttgtggt

SEQ ID NO: 281247 - DNA, 25 bp, Artificial
  Probe
atccttgctctccaaagacggcact

SEQ ID NO: 281248 - DNA, 25 bp, Artificial
  Probe
gctaccgacatgtatccttgctctc

SEQ ID NO: 281249 - DNA, 25 bp, Artificial
  Probe
tgctctccaaagacggcactagcct

SEQ ID NO: 281250 - DNA, 25 bp, Artificial
  Probe
tatagcaggacatcccgaaataact

SEQ ID NO: 281251 - DNA, 25 bp, Artificial
  Probe
cctgcatgaaacatggctaccgaca

SEQ ID NO: 281252 - DNA, 25 bp, Artificial
  Probe
tagagaacagtgcacagccgagtcc

SEQ ID NO: 281253 - DNA, 25 bp, Artificial
  Probe
catgtatccttgctctccaaagacg

SEQ ID NO: 281254 - DNA, 25 bp, Artificial
  Probe
gtacacctgcatgcaagaagacctg

SEQ ID NO: 281255 - DNA, 25 bp, Artificial
  Probe
ggaagaatcctgacccagaactatg

SEQ ID NO: 281256 - DNA, 25 bp, Artificial
  Probe
agaacagtgcacagccgagtcccca

SEQ ID NO: 281257 - DNA, 25 bp, Artificial
  Probe
ttccagatccaggtgcctgaacttg

SEQ ID NO: 281258 - DNA, 25 bp, Artificial
  Probe
tccagatccaggtgcctgaacttgc

SEQ ID NO: 281259 - DNA, 25 bp, Artificial
  Probe
agtgcacagccgagtccccactgga

SEQ ID NO: 281260 - DNA, 25 bp, Artificial
  Probe
gaggaagaatcctgacccagaacta

SEQ ID NO: 281261 - DNA, 25 bp, Artificial
  Probe
ataggccaatacaccctgccttgga

SEQ ID NO: 281262 - DNA, 25 bp, Artificial
  Probe
ttataggccaatacaccctgccttg

SEQ ID NO: 281263 - DNA, 25 bp, Artificial
  Probe
gatccaggtgcctgaacttgctatg

SEQ ID NO: 281264 - DNA, 25 bp, Artificial
  Probe
gaccagctatgtggagaacaatggt

SEQ ID NO: 281265 - DNA, 25 bp, Artificial
  Probe
caagaagacctggatatggatgagc

SEQ ID NO: 281266 - DNA, 25 bp, Artificial
  Probe
ttgctctccaaagacggcactagcc

SEQ ID NO: 281267 - DNA, 25 bp, Artificial
  Probe
cacaaagcagcaagagaccagctat

SEQ ID NO: 281268 - DNA, 25 bp, Artificial
  Probe
tatggtgttcctgaagacacaaagc

SEQ ID NO: 281269 - DNA, 25 bp, Artificial
  Probe
aagcagcaagagaccagctatgtgg

SEQ ID NO: 281270 - DNA, 25 bp, Artificial
  Probe
acatggctaccgacatgtatccttg

SEQ ID NO: 281271 - DNA, 25 bp, Artificial
  Probe
atgagccctgagaaacacagggagg

SEQ ID NO: 281272 - DNA, 25 bp, Artificial
  Probe
cgacatgtatccttgctctccaaag

SEQ ID NO: 281273 - DNA, 25 bp, Artificial
  Probe
tgaaacatggctaccgacatgtatc

SEQ ID NO: 281274 - DNA, 25 bp, Artificial
  Probe
tgttcctgaagacacaaagcagcaa

SEQ ID NO: 281275 - DNA, 25 bp, Artificial
  Probe
ctatttccagatccaggtgcctgaa

SEQ ID NO: 281276 - DNA, 25 bp, Artificial
  Probe
gagagtagagctctatggtgttcct

SEQ ID NO: 281277 - DNA, 25 bp, Artificial
  Probe
catgcaagaagacctggatatggat

SEQ ID NO: 281278 - DNA, 25 bp, Artificial
  Probe
gcatccagagccagccaaaggatca

SEQ ID NO: 281279 - DNA, 25 bp, Artificial
  Probe
gattatagcaggacatcccgaaata

SEQ ID NO: 281280 - DNA, 25 bp, Artificial
  Probe
gagctctatggtgttcctgaagaca

SEQ ID NO: 281281 - DNA, 25 bp, Artificial
  Probe
ttgtgtacacctgcatgcaagaaga

SEQ ID NO: 281282 - DNA, 25 bp, Artificial
  Probe
atgaaacatggctaccgacatgtat

SEQ ID NO: 281283 - DNA, 25 bp, Artificial
  Probe
gggagacattctatttccagatcca

SEQ ID NO: 281284 - DNA, 25 bp, Artificial
  Probe
agacctggatatggatgagccctga

SEQ ID NO: 281285 - DNA, 25 bp, Artificial
  Probe
tttgtgtacacctgcatgcaagaag

SEQ ID NO: 281286 - DNA, 25 bp, Artificial
  Probe
acaccctgccttggacctgcatgaa

SEQ ID NO: 281287 - DNA, 25 bp, Artificial
  Probe
ccactggtgagagtagagctctatg

SEQ ID NO: 281288 - DNA, 25 bp, Artificial
  Probe
ctggactgctgctccttagctggtc

SEQ ID NO: 281289 - DNA, 25 bp, Artificial
  Probe
cccaccatatgataattaggtactg

SEQ ID NO: 281290 - DNA, 25 bp, Artificial
  Probe
tccaccctgatagcaccatgaagga

SEQ ID NO: 281291 - DNA, 25 bp, Artificial
  Probe
ctgcctcctgagtgtagtgatttgt

SEQ ID NO: 281292 - DNA, 25 bp, Artificial
  Probe
tcttacccaggcaccccttggagtt

SEQ ID NO: 281293 - DNA, 25 bp, Artificial
  Probe
catgtctagataagctctctgaacc

SEQ ID NO: 281294 - DNA, 25 bp, Artificial
  Probe
tatggccagattacagattcaactt

SEQ ID NO: 281295 - DNA, 25 bp, Artificial
  Probe
tcctgtgtcaagaaaactgtgtaga

SEQ ID NO: 281296 - DNA, 25 bp, Artificial
  Probe
cttccttatgtgattggatacttat

SEQ ID NO: 281297 - DNA, 25 bp, Artificial
  Probe
acttcctgaaggatatcaggccacc

SEQ ID NO: 281298 - DNA, 25 bp, Artificial
  Probe
taaggttgaagtcgaccatgtctag

SEQ ID NO: 281299 - DNA, 25 bp, Artificial
  Probe
tcctctgaggaaagtcacataactt

SEQ ID NO: 281300 - DNA, 25 bp, Artificial
  Probe
gaaatgctggctattaacaatatcg

SEQ ID NO: 281301 - DNA, 25 bp, Artificial
  Probe
gtctacacttgaatggatatatcac

SEQ ID NO: 281302 - DNA, 25 bp, Artificial
  Probe
ggatatatcacatctgttggatgac

SEQ ID NO: 281303 - DNA, 25 bp, Artificial
  Probe
ctgcctacgagagaagagtgaagag

SEQ ID NO: 281304 - DNA, 25 bp, Artificial
  Probe
tgagcttccttatgtgattggatac

SEQ ID NO: 281305 - DNA, 25 bp, Artificial
  Probe
ccctgcaattaaggttgaagtcgac

SEQ ID NO: 281306 - DNA, 25 bp, Artificial
  Probe
agagctaaagggttctcaggacaat

SEQ ID NO: 281307 - DNA, 25 bp, Artificial
  Probe
gactctccaaatacagttcaatgag

SEQ ID NO: 281308 - DNA, 25 bp, Artificial
  Probe
tttacccaatcttatctggaaagtg

SEQ ID NO: 281309 - DNA, 25 bp, Artificial
  Probe
cttatggccagattacagattcaac

SEQ ID NO: 281310 - DNA, 25 bp, Artificial
  Probe
cttcctctttcaggatatgaacttg

SEQ ID NO: 281311 - DNA, 25 bp, Artificial
  Probe
ccaccatatgataattaggtactgt

SEQ ID NO: 281312 - DNA, 25 bp, Artificial
  Probe
ccttggagttgttggcctctgtgga

SEQ ID NO: 281313 - DNA, 25 bp, Artificial
  Probe
taattaggtactgttatgaccaatc

SEQ ID NO: 281314 - DNA, 25 bp, Artificial
  Probe
catggtgatgagcttccttatgtga

SEQ ID NO: 281315 - DNA, 25 bp, Artificial
  Probe
tctccaaatacagttcaatgagatg

SEQ ID NO: 281316 - DNA, 25 bp, Artificial
  Probe
aacagagagaccatgcgggctgttc

SEQ ID NO: 281317 - DNA, 25 bp, Artificial
  Probe
gttatgaccaatcagccactcctgc

SEQ ID NO: 281318 - DNA, 25 bp, Artificial
  Probe
tgatagcaccatgaaggaaataaac

SEQ ID NO: 281319 - DNA, 25 bp, Artificial
  Probe
ccatctctggtgtggtagatgggaa

SEQ ID NO: 281320 - DNA, 25 bp, Artificial
  Probe
atatttgtgattcctgctcttcaag

SEQ ID NO: 281321 - DNA, 25 bp, Artificial
  Probe
ggacttcatatttgtgattcctgct

SEQ ID NO: 281322 - DNA, 25 bp, Artificial
  Probe
aacacagcagtacagatgatgctgc

SEQ ID NO: 281323 - DNA, 25 bp, Artificial
  Probe
atttttatgagttccagcatcagtc

SEQ ID NO: 281324 - DNA, 25 bp, Artificial
  Probe
ggttcagcacatacatcccactcag

SEQ ID NO: 281325 - DNA, 25 bp, Artificial
  Probe
aacctggtgcaaaatggaagactcc

SEQ ID NO: 281326 - DNA, 25 bp, Artificial
  Probe
gaaagtcacataacttatggccaga

SEQ ID NO: 281327 - DNA, 25 bp, Artificial
  Probe
taaacagagagaccatgcgggctgt

SEQ ID NO: 281328 - DNA, 25 bp, Artificial
  Probe
caggcaccccttggagttgttggcc

SEQ ID NO: 281329 - DNA, 25 bp, Artificial
  Probe
ctcctgagtgtagtgatttgttgac

SEQ ID NO: 281330 - DNA, 25 bp, Artificial
  Probe
cttattctgggacatgaaatttgtc

SEQ ID NO: 281331 - DNA, 25 bp, Artificial
  Probe
gcctgtaaccccagaaatcctctga

SEQ ID NO: 281332 - DNA, 25 bp, Artificial
  Probe
ttgagtacagggtttctgaagcctc

SEQ ID NO: 281333 - DNA, 25 bp, Artificial
  Probe
gtcacataacttatggccagattac

SEQ ID NO: 281334 - DNA, 25 bp, Artificial
  Probe
attctgggacatgaaatttgtcttc

SEQ ID NO: 281335 - DNA, 25 bp, Artificial
  Probe
tgattcgagctaataactttacctt

SEQ ID NO: 281336 - DNA, 25 bp, Artificial
  Probe
cttttttagtagtgtgtagtgagta

SEQ ID NO: 281337 - DNA, 25 bp, Artificial
  Probe
ttgtttgttttcctggtctcctttg

SEQ ID NO: 281338 - DNA, 25 bp, Artificial
  Probe
cagccgacagagggcttttttagta

SEQ ID NO: 281339 - DNA, 25 bp, Artificial
  Probe
aaatccccagccgacagagggcttt

SEQ ID NO: 281340 - DNA, 25 bp, Artificial
  Probe
agagggcttttttagtagtgtgtag

SEQ ID NO: 281341 - DNA, 25 bp, Artificial
  Probe
tttgttttcctggtctcctttgcct

SEQ ID NO: 281342 - DNA, 25 bp, Artificial
  Probe
ctgattcgagctaataactttacct

SEQ ID NO: 281343 - DNA, 25 bp, Artificial
  Probe
cagctgattcgagctaataacttta

SEQ ID NO: 281344 - DNA, 25 bp, Artificial
  Probe
acagagggcttttttagtagtgtgt

SEQ ID NO: 281345 - DNA, 25 bp, Artificial
  Probe
ttttttagtagtgtgtagtgagtat

SEQ ID NO: 281346 - DNA, 25 bp, Artificial
  Probe
gcttttttagtagtgtgtagtgagt

SEQ ID NO: 281347 - DNA, 25 bp, Artificial
  Probe
ccgacagagggcttttttagtagtg

SEQ ID NO: 281348 - DNA, 25 bp, Artificial
  Probe
agggcttttttagtagtgtgtagtg

SEQ ID NO: 281349 - DNA, 25 bp, Artificial
  Probe
tcgagctaataactttaccttgggg

SEQ ID NO: 281350 - DNA, 25 bp, Artificial
  Probe
gccgacagagggcttttttagtagt

SEQ ID NO: 281351 - DNA, 25 bp, Artificial
  Probe
tttttagtagtgtgtagtgagtatc

SEQ ID NO: 281352 - DNA, 25 bp, Artificial
  Probe
atccccagccgacagagggcttttt

SEQ ID NO: 281353 - DNA, 25 bp, Artificial
  Probe
ttttagtagtgtgtagtgagtatca

SEQ ID NO: 281354 - DNA, 25 bp, Artificial
  Probe
ggcttttttagtagtgtgtagtgag

SEQ ID NO: 281355 - DNA, 25 bp, Artificial
  Probe
agccgacagagggcttttttagtag

SEQ ID NO: 281356 - DNA, 25 bp, Artificial
  Probe
agctgattcgagctaataactttac

SEQ ID NO: 281357 - DNA, 25 bp, Artificial
  Probe
cccagccgacagagggcttttttag

SEQ ID NO: 281358 - DNA, 25 bp, Artificial
  Probe
tccccagccgacagagggctttttt

SEQ ID NO: 281359 - DNA, 25 bp, Artificial
  Probe
gattcgagctaataactttaccttg

SEQ ID NO: 281360 - DNA, 25 bp, Artificial
  Probe
tgtttgttttcctggtctcctttgc

SEQ ID NO: 281361 - DNA, 25 bp, Artificial
  Probe
tgtttgtttgttttcctggtctcct

SEQ ID NO: 281362 - DNA, 25 bp, Artificial
  Probe
aatccccagccgacagagggctttt

SEQ ID NO: 281363 - DNA, 25 bp, Artificial
  Probe
cgacagagggcttttttagtagtgt

SEQ ID NO: 281364 - DNA, 25 bp, Artificial
  Probe
ccagccgacagagggcttttttagt

SEQ ID NO: 281365 - DNA, 25 bp, Artificial
  Probe
tataaacttccgttggagtcagatg

SEQ ID NO: 281366 - DNA, 25 bp, Artificial
  Probe
agtcatgtctcttggcctcaagaag

SEQ ID NO: 281367 - DNA, 25 bp, Artificial
  Probe
cagattcatctcagataaagagaaa

SEQ ID NO: 281368 - DNA, 25 bp, Artificial
  Probe
gtcattgatacctactctagaattg

SEQ ID NO: 281369 - DNA, 25 bp, Artificial
  Probe
attttaccatccacagcctgaagag

SEQ ID NO: 281370 - DNA, 25 bp, Artificial
  Probe
atcctggaaaataaccacgtcattg

SEQ ID NO: 281371 - DNA, 25 bp, Artificial
  Probe
ctcctggatataagttgggcagtta

SEQ ID NO: 281372 - DNA, 25 bp, Artificial
  Probe
gaggactttttgcttgctgactttt

SEQ ID NO: 281373 - DNA, 25 bp, Artificial
  Probe
gtgagactgacgtggaccagacttc

SEQ ID NO: 281374 - DNA, 25 bp, Artificial
  Probe
ggaaaataaccacgtcattgatacc

SEQ ID NO: 281375 - DNA, 25 bp, Artificial
  Probe
tactctagaattgtcttccccgttg

SEQ ID NO: 281376 - DNA, 25 bp, Artificial
  Probe
tccttctttctacactctgaagagg

SEQ ID NO: 281377 - DNA, 25 bp, Artificial
  Probe
ttaaactgggatagagccagtcatg

SEQ ID NO: 281378 - DNA, 25 bp, Artificial
  Probe
acaggaagtccctgtgcagattcat

SEQ ID NO: 281379 - DNA, 25 bp, Artificial
  Probe
actccatgagaacaaagttcacagg

SEQ ID NO: 281380 - DNA, 25 bp, Artificial
  Probe
tttctataaacttccgttggagtca

SEQ ID NO: 281381 - DNA, 25 bp, Artificial
  Probe
ccatccacagcctgaagaggagtgt

SEQ ID NO: 281382 - DNA, 25 bp, Artificial
  Probe
catggccttcgatggctgctatcat

SEQ ID NO: 281383 - DNA, 25 bp, Artificial
  Probe
gcagttcaagccatggccttcgatg

SEQ ID NO: 281384 - DNA, 25 bp, Artificial
  Probe
gccttcgatggctgctatcatgacg

SEQ ID NO: 281385 - DNA, 25 bp, Artificial
  Probe
atgacggtgagactgacgtggacca

SEQ ID NO: 281386 - DNA, 25 bp, Artificial
  Probe
acggtgagactgacgtggaccagac

SEQ ID NO: 281387 - DNA, 25 bp, Artificial
  Probe
tctagaattgtcttccccgttgttt

SEQ ID NO: 281388 - DNA, 25 bp, Artificial
  Probe
ttttcctttctttgcagtactcagg

SEQ ID NO: 281389 - DNA, 25 bp, Artificial
  Probe
tgtctcttggcctcaagaagatgta

SEQ ID NO: 281390 - DNA, 25 bp, Artificial
  Probe
tgttttctataaacttccgttggag

SEQ ID NO: 281391 - DNA, 25 bp, Artificial
  Probe
cagttcaagccatggccttcgatgg

SEQ ID NO: 281392 - DNA, 25 bp, Artificial
  Probe
acagcctgaagaggagtgttttcta

SEQ ID NO: 281393 - DNA, 25 bp, Artificial
  Probe
tgatgcagttcaagccatggccttc

SEQ ID NO: 281394 - DNA, 25 bp, Artificial
  Probe
gctgctatcatgacggtgagactga

SEQ ID NO: 281395 - DNA, 25 bp, Artificial
  Probe
tggtagaatcatcctggaaaataac

SEQ ID NO: 281396 - DNA, 25 bp, Artificial
  Probe
caaagttcacaggaagtccctgtgc

SEQ ID NO: 281397 - DNA, 25 bp, Artificial
  Probe
tttaccatccacagcctgaagagga

SEQ ID NO: 281398 - DNA, 25 bp, Artificial
  Probe
gtggaccagacttccttctttctac

SEQ ID NO: 281399 - DNA, 25 bp, Artificial
  Probe
aagttcacaggaagtccctgtgcag

SEQ ID NO: 281400 - DNA, 25 bp, Artificial
  Probe
caagccatggccttcgatggctgct

SEQ ID NO: 281401 - DNA, 25 bp, Artificial
  Probe
cttccgttggagtcagatggtgtta

SEQ ID NO: 281402 - DNA, 25 bp, Artificial
  Probe
ggatagagccagtcatgtctcttgg

SEQ ID NO: 281403 - DNA, 25 bp, Artificial
  Probe
aagtccctgtgcagattcatctcag

SEQ ID NO: 281404 - DNA, 25 bp, Artificial
  Probe
tgaagaggactttttgcttgctgac

SEQ ID NO: 281405 - DNA, 25 bp, Artificial
  Probe
gaatcatcctggaaaataaccacgt

SEQ ID NO: 281406 - DNA, 25 bp, Artificial
  Probe
ctcaggatgttgcatgtgctagata

SEQ ID NO: 281407 - DNA, 25 bp, Artificial
  Probe
atggtgttatttacctcctggatat

SEQ ID NO: 281408 - DNA, 25 bp, Artificial
  Probe
caggaagtccctgtgcagattcatc

SEQ ID NO: 281409 - DNA, 25 bp, Artificial
  Probe
ctatcatgacggtgagactgacgtg

SEQ ID NO: 281410 - DNA, 25 bp, Artificial
  Probe
agaacaaagttcacaggaagtccct

SEQ ID NO: 281411 - DNA, 25 bp, Artificial
  Probe
aatagaaactttggatccagcactt

SEQ ID NO: 281412 - DNA, 25 bp, Artificial
  Probe
accaagaagcgcatcttccagatcc

SEQ ID NO: 281413 - DNA, 25 bp, Artificial
  Probe
aaggcacccctgaggggctgtatct

SEQ ID NO: 281414 - DNA, 25 bp, Artificial
  Probe
gataatcacgccattgtgtccacat

SEQ ID NO: 281415 - DNA, 25 bp, Artificial
  Probe
cgccattgggaccaaaagatatgat

SEQ ID NO: 281416 - DNA, 25 bp, Artificial
  Probe
caagaagcgcatcttccagatccac

SEQ ID NO: 281417 - DNA, 25 bp, Artificial
  Probe
agctcttccgggtcgctgaggaaca

SEQ ID NO: 281418 - DNA, 25 bp, Artificial
  Probe
ggaagctgccccaaggaatccatct

SEQ ID NO: 281419 - DNA, 25 bp, Artificial
  Probe
aaccttggaagagatcatcgatgat

SEQ ID NO: 281420 - DNA, 25 bp, Artificial
  Probe
tccgggagctcttccgggtcgctga

SEQ ID NO: 281421 - DNA, 25 bp, Artificial
  Probe
ccagcggacaatgttggaactgttg

SEQ ID NO: 281422 - DNA, 25 bp, Artificial
  Probe
aagactatcttctcatggaggaaga

SEQ ID NO: 281423 - DNA, 25 bp, Artificial
  Probe
ctgctcaaccacaaggtgcatgctg

SEQ ID NO: 281424 - DNA, 25 bp, Artificial
  Probe
aatctgtggagctccctcttaccca

SEQ ID NO: 281425 - DNA, 25 bp, Artificial
  Probe
agatattgggggactggacaaccag

SEQ ID NO: 281426 - DNA, 25 bp, Artificial
  Probe
cttctcatggaggaagaattcatta

SEQ ID NO: 281427 - DNA, 25 bp, Artificial
  Probe
attaaggaatctgtggagctccctc

SEQ ID NO: 281428 - DNA, 25 bp, Artificial
  Probe
ccttggatgacttgatcatggcaaa

SEQ ID NO: 281429 - DNA, 25 bp, Artificial
  Probe
agcgggaaatccagcggacaatgtt

SEQ ID NO: 281430 - DNA, 25 bp, Artificial
  Probe
actctggaggtgagcgggaaatcca

SEQ ID NO: 281431 - DNA, 25 bp, Artificial
  Probe
ccacaaggtgcatgctgtgataggg

SEQ ID NO: 281432 - DNA, 25 bp, Artificial
  Probe
atccagcacttatcagaccaggccg

SEQ ID NO: 281433 - DNA, 25 bp, Artificial
  Probe
tatgattcaaactctggaggtgagc

SEQ ID NO: 281434 - DNA, 25 bp, Artificial
  Probe
gatcatcgatgataatcacgccatt

SEQ ID NO: 281435 - DNA, 25 bp, Artificial
  Probe
cccctgaggggctgtatctctagtg

SEQ ID NO: 281436 - DNA, 25 bp, Artificial
  Probe
cctgtcatttgtagacaaggatctg

SEQ ID NO: 281437 - DNA, 25 bp, Artificial
  Probe
tgcatgctgtgataggggtgctcat

SEQ ID NO: 281438 - DNA, 25 bp, Artificial
  Probe
tgagcgggaaatccagcggacaatg

SEQ ID NO: 281439 - DNA, 25 bp, Artificial
  Probe
ctatgcagatattgggggactggac

SEQ ID NO: 281440 - DNA, 25 bp, Artificial
  Probe
tatcatggccacaaaccgaatagaa

SEQ ID NO: 281441 - DNA, 25 bp, Artificial
  Probe
cacaaaccgaatagaaactttggat

SEQ ID NO: 281442 - DNA, 25 bp, Artificial
  Probe
gaataaaagactatcttctcatgga

SEQ ID NO: 281443 - DNA, 25 bp, Artificial
  Probe
ggccacaaaccgaatagaaactttg

SEQ ID NO: 281444 - DNA, 25 bp, Artificial
  Probe
gatcccctggtcacagtgatgaagg

SEQ ID NO: 281445 - DNA, 25 bp, Artificial
  Probe
cattgtgttcattgatgaaatcgac

SEQ ID NO: 281446 - DNA, 25 bp, Artificial
  Probe
cctggtcacagtgatgaaggtggaa

SEQ ID NO: 281447 - DNA, 25 bp, Artificial
  Probe
tcttcagggaacttaatgagtttcc

SEQ ID NO: 281448 - DNA, 25 bp, Artificial
  Probe
tgaggaacacgcaccgtccattgtg

SEQ ID NO: 281449 - DNA, 25 bp, Artificial
  Probe
tgataggggtgctcatggatgacac

SEQ ID NO: 281450 - DNA, 25 bp, Artificial
  Probe
cacctaagggggtcattctctacgg

SEQ ID NO: 281451 - DNA, 25 bp, Artificial
  Probe
gggctgtatctctagtgacacagtt

SEQ ID NO: 281452 - DNA, 25 bp, Artificial
  Probe
gaaacctatgcagatattgggggac

SEQ ID NO: 281453 - DNA, 25 bp, Artificial
  Probe
cctgaaattactaaagctggagaga

SEQ ID NO: 281454 - DNA, 25 bp, Artificial
  Probe
tgtccacatcggtgggctcagaaca

SEQ ID NO: 281455 - DNA, 25 bp, Artificial
  Probe
agtacctaggtgacgggcccaagct

SEQ ID NO: 281456 - DNA, 25 bp, Artificial
  Probe
gaaatcgacgccattgggaccaaaa

SEQ ID NO: 281457 - DNA, 25 bp, Artificial
  Probe
gagctgctgagccactcagctgatg

SEQ ID NO: 281458 - DNA, 25 bp, Artificial
  Probe
catctatgacatcaccaatgtcctg

SEQ ID NO: 281459 - DNA, 25 bp, Artificial
  Probe
aaacgacgcatctatgacatcacca

SEQ ID NO: 281460 - DNA, 25 bp, Artificial
  Probe
cttggagctgctgagccactcagct

SEQ ID NO: 281461 - DNA, 25 bp, Artificial
  Probe
gacgcatctatgacatcaccaatgt

SEQ ID NO: 281462 - DNA, 25 bp, Artificial
  Probe
atctatgacatcaccaatgtcctgg

SEQ ID NO: 281463 - DNA, 25 bp, Artificial
  Probe
agctgctgagccactcagctgatgg

SEQ ID NO: 281464 - DNA, 25 bp, Artificial
  Probe
gaaacgacgcatctatgacatcacc

SEQ ID NO: 281465 - DNA, 25 bp, Artificial
  Probe
gcagaaacgacgcatctatgacatc

SEQ ID NO: 281466 - DNA, 25 bp, Artificial
  Probe
cgacgcatctatgacatcaccaatg

SEQ ID NO: 281467 - DNA, 25 bp, Artificial
  Probe
acgcatctatgacatcaccaatgtc

SEQ ID NO: 281468 - DNA, 25 bp, Artificial
  Probe
ctatgacatcaccaatgtcctggag

SEQ ID NO: 281469 - DNA, 25 bp, Artificial
  Probe
acgacgcatctatgacatcaccaat

SEQ ID NO: 281470 - DNA, 25 bp, Artificial
  Probe
gctgctgagccactcagctgatggt

SEQ ID NO: 281471 - DNA, 25 bp, Artificial
  Probe
actcagctgatggtgttgttgatct

SEQ ID NO: 281472 - DNA, 25 bp, Artificial
  Probe
ttggagctgctgagccactcagctg

SEQ ID NO: 281473 - DNA, 25 bp, Artificial
  Probe
tatgacatcaccaatgtcctggagg

SEQ ID NO: 281474 - DNA, 25 bp, Artificial
  Probe
cactcagctgatggtgttgttgatc

SEQ ID NO: 281475 - DNA, 25 bp, Artificial
  Probe
ctcagctgatggtgttgttgatctg

SEQ ID NO: 281476 - DNA, 25 bp, Artificial
  Probe
agccgaggtgctgaaggtgcagaaa

SEQ ID NO: 281477 - DNA, 25 bp, Artificial
  Probe
tgctgagccactcagctgatggtgt

SEQ ID NO: 281478 - DNA, 25 bp, Artificial
  Probe
tcttggagctgctgagccactcagc

SEQ ID NO: 281479 - DNA, 25 bp, Artificial
  Probe
cgaggtgctgaaggtgcagaaacga

SEQ ID NO: 281480 - DNA, 25 bp, Artificial
  Probe
ctgggcagccgaggtgctgaaggtg

SEQ ID NO: 281481 - DNA, 25 bp, Artificial
  Probe
tctatgacatcaccaatgtcctgga

SEQ ID NO: 281482 - DNA, 25 bp, Artificial
  Probe
ttcttggagctgctgagccactcag

SEQ ID NO: 281483 - DNA, 25 bp, Artificial
  Probe
ctgatggtgttgttgatctgaactg

SEQ ID NO: 281484 - DNA, 25 bp, Artificial
  Probe
gtgcagaaacgacgcatctatgaca

SEQ ID NO: 281485 - DNA, 25 bp, Artificial
  Probe
tgacatcaccaatgtcctggagggg

SEQ ID NO: 281486 - DNA, 25 bp, Artificial
  Probe
gttgttgatctgaactgggcagccg

SEQ ID NO: 281487 - DNA, 25 bp, Artificial
  Probe
gttgatctgaactgggcagccgagg

SEQ ID NO: 281488 - DNA, 25 bp, Artificial
  Probe
tgttgatctgaactgggcagccgag

SEQ ID NO: 281489 - DNA, 25 bp, Artificial
  Probe
tcagctgatggtgttgttgatctga

SEQ ID NO: 281490 - DNA, 25 bp, Artificial
  Probe
agaaacgacgcatctatgacatcac

SEQ ID NO: 281491 - DNA, 25 bp, Artificial
  Probe
cagaaacgacgcatctatgacatca

SEQ ID NO: 281492 - DNA, 25 bp, Artificial
  Probe
ctgctgagccactcagctgatggtg

SEQ ID NO: 281493 - DNA, 25 bp, Artificial
  Probe
atgacatcaccaatgtcctggaggg

SEQ ID NO: 281494 - DNA, 25 bp, Artificial
  Probe
tgttgttgatctgaactgggcagcc

SEQ ID NO: 281495 - DNA, 25 bp, Artificial
  Probe
tgatggtgttgttgatctgaactgg

SEQ ID NO: 281496 - DNA, 25 bp, Artificial
  Probe
gtgttgttgatctgaactgggcagc

SEQ ID NO: 281497 - DNA, 25 bp, Artificial
  Probe
aactgggcagccgaggtgctgaagg

SEQ ID NO: 281498 - DNA, 25 bp, Artificial
  Probe
ttgttgatctgaactgggcagccga

SEQ ID NO: 281499 - DNA, 25 bp, Artificial
  Probe
ggagctgctgagccactcagctgat

SEQ ID NO: 281500 - DNA, 25 bp, Artificial
  Probe
ggcagccgaggtgctgaaggtgcag

SEQ ID NO: 281501 - DNA, 25 bp, Artificial
  Probe
cagctgatggtgttgttgatctgaa

SEQ ID NO: 281502 - DNA, 25 bp, Artificial
  Probe
ccgaggtgctgaaggtgcagaaacg

SEQ ID NO: 281503 - DNA, 25 bp, Artificial
  Probe
cccgtatggctgtcgtggtagcagc

SEQ ID NO: 281504 - DNA, 25 bp, Artificial
  Probe
catcaccaagacagcctacttggct

SEQ ID NO: 281505 - DNA, 25 bp, Artificial
  Probe
ggagaccttgcctgccgcctggtac

SEQ ID NO: 281506 - DNA, 25 bp, Artificial
  Probe
agcgcaaccgcactgtctgctacga

SEQ ID NO: 281507 - DNA, 25 bp, Artificial
  Probe
ccagcgatacctaggcatctgccat

SEQ ID NO: 281508 - DNA, 25 bp, Artificial
  Probe
agaagcaaaacttggcccaacatgc

SEQ ID NO: 281509 - DNA, 25 bp, Artificial
  Probe
ggaggccctgaagcactggctgcaa

SEQ ID NO: 281510 - DNA, 25 bp, Artificial
  Probe
ccctcctgtagaggaagaagctggg

SEQ ID NO: 281511 - DNA, 25 bp, Artificial
  Probe
ctcacagccaagtggcagaggcaga

SEQ ID NO: 281512 - DNA, 25 bp, Artificial
  Probe
ctacttcacacaacagaagttccgg

SEQ ID NO: 281513 - DNA, 25 bp, Artificial
  Probe
ctaagacacctgtgtttcggggact

SEQ ID NO: 281514 - DNA, 25 bp, Artificial
  Probe
gcctgtgtcgccaggatggcccagc

SEQ ID NO: 281515 - DNA, 25 bp, Artificial
  Probe
cgttccgctgtgtacaccctgaact

SEQ ID NO: 281516 - DNA, 25 bp, Artificial
  Probe
gtgtcatcgcccagatatgcgcatc

SEQ ID NO: 281517 - DNA, 25 bp, Artificial
  Probe
agtcgtttggctggttgtgacagcc

SEQ ID NO: 281518 - DNA, 25 bp, Artificial
  Probe
atcacgaacgtgaggcaaggcccct

SEQ ID NO: 281519 - DNA, 25 bp, Artificial
  Probe
tccatttgccaagacttttgcacag

SEQ ID NO: 281520 - DNA, 25 bp, Artificial
  Probe
tctacatggtgaaaccccatctcag

SEQ ID NO: 281521 - DNA, 25 bp, Artificial
  Probe
gctacctgccgtatggcatggccct

SEQ ID NO: 281522 - DNA, 25 bp, Artificial
  Probe
gcctggccctccaaaatttctatgt

SEQ ID NO: 281523 - DNA, 25 bp, Artificial
  Probe
atcggcttcttgcttcccttcacag

SEQ ID NO: 281524 - DNA, 25 bp, Artificial
  Probe
agtgcctgcccacagcagtctttgc

SEQ ID NO: 281525 - DNA, 25 bp, Artificial
  Probe
accgcactgtctgctacgacctgag

SEQ ID NO: 281526 - DNA, 25 bp, Artificial
  Probe
gccccctggcacaagcgtggaggtc

SEQ ID NO: 281527 - DNA, 25 bp, Artificial
  Probe
tgtcatgacaggataacaagctcta

SEQ ID NO: 281528 - DNA, 25 bp, Artificial
  Probe
tggcctgctactgtcgcatggcccg

SEQ ID NO: 281529 - DNA, 25 bp, Artificial
  Probe
tgcctggccctccaaaatttctatg

SEQ ID NO: 281530 - DNA, 25 bp, Artificial
  Probe
cctcctgtagaggaagaagctggga

SEQ ID NO: 281531 - DNA, 25 bp, Artificial
  Probe
agcctacttggctgtgcgctccacg

SEQ ID NO: 281532 - DNA, 25 bp, Artificial
  Probe
ccccctggcacaagcgtggaggtcg

SEQ ID NO: 281533 - DNA, 25 bp, Artificial
  Probe
tgtttacaaggtagaggggaccact

SEQ ID NO: 281534 - DNA, 25 bp, Artificial
  Probe
gaccttcgctgcagcctacaaaggc

SEQ ID NO: 281535 - DNA, 25 bp, Artificial
  Probe
ctgggaaagctcacattcccatcca

SEQ ID NO: 281536 - DNA, 25 bp, Artificial
  Probe
gggaaagctcacattcccatccatt

SEQ ID NO: 281537 - DNA, 25 bp, Artificial
  Probe
tacttatctataactacgccagagg

SEQ ID NO: 281538 - DNA, 25 bp, Artificial
  Probe
gttcctcacctgcattagcttccag

SEQ ID NO: 281539 - DNA, 25 bp, Artificial
  Probe
tctatgccaacctacacggcagcat

SEQ ID NO: 281540 - DNA, 25 bp, Artificial
  Probe
cagctgtctttgttatcagcttcct

SEQ ID NO: 281541 - DNA, 25 bp, Artificial
  Probe
acagcgttctggaccctatcctctt

SEQ ID NO: 281542 - DNA, 25 bp, Artificial
  Probe
agcgtcgcagcaaggcggcccgtat

SEQ ID NO: 281543 - DNA, 25 bp, Artificial
  Probe
tctcttgcccggtactggagacctt

SEQ ID NO: 281544 - DNA, 25 bp, Artificial
  Probe
agttccggcggcaaccacacgatct

SEQ ID NO: 281545 - DNA, 25 bp, Artificial
  Probe
gccagtgctaacagcgttctggacc

SEQ ID NO: 281546 - DNA, 25 bp, Artificial
  Probe
cagaggggaccactggcccttcgga

SEQ ID NO: 281547 - DNA, 25 bp, Artificial
  Probe
ttcacagccttactggcctgctact

SEQ ID NO: 281548 - DNA, 25 bp, Artificial
  Probe
gtatgcctgttcactgcccctactt

SEQ ID NO: 281549 - DNA, 25 bp, Artificial
  Probe
atcctgaacgagatgagggaccagt

SEQ ID NO: 281550 - DNA, 25 bp, Artificial
  Probe
caagatcctggcagccactgtggac

SEQ ID NO: 281551 - DNA, 25 bp, Artificial
  Probe
aatgtcctcctgcagattgacaatg

SEQ ID NO: 281552 - DNA, 25 bp, Artificial
  Probe
cttgcgtcagttagtggaaagtgac

SEQ ID NO: 281553 - DNA, 25 bp, Artificial
  Probe
aacgtggagatggacgcagctcctg

SEQ ID NO: 281554 - DNA, 25 bp, Artificial
  Probe
tgcgtgccctggaagaggccaacag

SEQ ID NO: 281555 - DNA, 25 bp, Artificial
  Probe
acctggataaggtgcgtgccctgga

SEQ ID NO: 281556 - DNA, 25 bp, Artificial
  Probe
gagatgcttgccttgagggtcagac

SEQ ID NO: 281557 - DNA, 25 bp, Artificial
  Probe
ctaatgacttaaggaccaagtatga

SEQ ID NO: 281558 - DNA, 25 bp, Artificial
  Probe
cccactgagatcaaagactacagcc

SEQ ID NO: 281559 - DNA, 25 bp, Artificial
  Probe
atgcttgccttgagggtcagacttg

SEQ ID NO: 281560 - DNA, 25 bp, Artificial
  Probe
atggacgcagctcctggcgtggacc

SEQ ID NO: 281561 - DNA, 25 bp, Artificial
  Probe
tcacgaggaggagatgcttgccttg

SEQ ID NO: 281562 - DNA, 25 bp, Artificial
  Probe
aagaggccaacagtgacctggaggt

SEQ ID NO: 281563 - DNA, 25 bp, Artificial
  Probe
gaaagtgacatcaacaaccttcgct

SEQ ID NO: 281564 - DNA, 25 bp, Artificial
  Probe
tatgtccagggcagacctggagatg

SEQ ID NO: 281565 - DNA, 25 bp, Artificial
  Probe
gccccactgagatcaaagactacag

SEQ ID NO: 281566 - DNA, 25 bp, Artificial
  Probe
acaatgcacggctggcagctaatga

SEQ ID NO: 281567 - DNA, 25 bp, Artificial
  Probe
agatcgagagtctcacggaggagct

SEQ ID NO: 281568 - DNA, 25 bp, Artificial
  Probe
acgtcaacgtggagatggacgcagc

SEQ ID NO: 281569 - DNA, 25 bp, Artificial
  Probe
cagctcctggcgtggacctgagccg

SEQ ID NO: 281570 - DNA, 25 bp, Artificial
  Probe
accagtatgagcagatggcagagaa

SEQ ID NO: 281571 - DNA, 25 bp, Artificial
  Probe
cactgtggacaatgccaatgtcctc

SEQ ID NO: 281572 - DNA, 25 bp, Artificial
  Probe
ggcagccactgtggacaatgccaat

SEQ ID NO: 281573 - DNA, 25 bp, Artificial
  Probe
tgaagatccgtgactggtaccagag

SEQ ID NO: 281574 - DNA, 25 bp, Artificial
  Probe
acctgagccgcatcctgaacgagat

SEQ ID NO: 281575 - DNA, 25 bp, Artificial
  Probe
agaagaaccgcaaagatgtggaggc

SEQ ID NO: 281576 - DNA, 25 bp, Artificial
  Probe
acctgaagagcaagatcctggcagc

SEQ ID NO: 281577 - DNA, 25 bp, Artificial
  Probe
ggtgaagatccgtgactggtaccag

SEQ ID NO: 281578 - DNA, 25 bp, Artificial
  Probe
tggcagctaatgacttaaggaccaa

SEQ ID NO: 281579 - DNA, 25 bp, Artificial
  Probe
tggacgcagctcctggcgtggacct

SEQ ID NO: 281580 - DNA, 25 bp, Artificial
  Probe
acaaccttcgctgtgtgctggatga

SEQ ID NO: 281581 - DNA, 25 bp, Artificial
  Probe
agaatcacgaggaggagatgcttgc

SEQ ID NO: 281582 - DNA, 25 bp, Artificial
  Probe
ctgactatgtccagggcagacctgg

SEQ ID NO: 281583 - DNA, 25 bp, Artificial
  Probe
aagaccatcgaggacctgaagagca

SEQ ID NO: 281584 - DNA, 25 bp, Artificial
  Probe
atgataatgagacgtccttgcgtca

SEQ ID NO: 281585 - DNA, 25 bp, Artificial
  Probe
tcgaggacctgaagagcaagatcct

SEQ ID NO: 281586 - DNA, 25 bp, Artificial
  Probe
tgacctggaggtgaagatccgtgac

SEQ ID NO: 281587 - DNA, 25 bp, Artificial
  Probe
ctcctgcagattgacaatgcacggc

SEQ ID NO: 281588 - DNA, 25 bp, Artificial
  Probe
gatgcagatcgagagtctcacggag

SEQ ID NO: 281589 - DNA, 25 bp, Artificial
  Probe
ggcgtggacctgagccgcatcctga

SEQ ID NO: 281590 - DNA, 25 bp, Artificial
  Probe
gacatcaacaaccttcgctgtgtgc

SEQ ID NO: 281591 - DNA, 25 bp, Artificial
  Probe
tgaactgactatgtccagggcagac

SEQ ID NO: 281592 - DNA, 25 bp, Artificial
  Probe
gtgccctggaagaggccaacagtga

SEQ ID NO: 281593 - DNA, 25 bp, Artificial
  Probe
gattgacaatgcacggctggcagct

SEQ ID NO: 281594 - DNA, 25 bp, Artificial
  Probe
ctgtgtgctggatgaactgactatg

SEQ ID NO: 281595 - DNA, 25 bp, Artificial
  Probe
aaatccactgttaaagctatccagg

SEQ ID NO: 281596 - DNA, 25 bp, Artificial
  Probe
cactgttaaagctatccaggaagct

SEQ ID NO: 281597 - DNA, 25 bp, Artificial
  Probe
agctttggctaagctcagagaggag

SEQ ID NO: 281598 - DNA, 25 bp, Artificial
  Probe
ccactgttaaagctatccaggaagc

SEQ ID NO: 281599 - DNA, 25 bp, Artificial
  Probe
tgttaaagctatccaggaagctttg

SEQ ID NO: 281600 - DNA, 25 bp, Artificial
  Probe
actgttaaagctatccaggaagctt

SEQ ID NO: 281601 - DNA, 25 bp, Artificial
  Probe
gaagctttggctaagctcagagagg

SEQ ID NO: 281602 - DNA, 25 bp, Artificial
  Probe
aaagctatccaggaagctttggcta

SEQ ID NO: 281603 - DNA, 25 bp, Artificial
  Probe
ccaagcaaatccactgttaaagcta

SEQ ID NO: 281604 - DNA, 25 bp, Artificial
  Probe
gctaagctcagagaggaggaggaga

SEQ ID NO: 281605 - DNA, 25 bp, Artificial
  Probe
aagctatccaggaagctttggctaa

SEQ ID NO: 281606 - DNA, 25 bp, Artificial
  Probe
ttaaagctatccaggaagctttggc

SEQ ID NO: 281607 - DNA, 25 bp, Artificial
  Probe
ctgttaaagctatccaggaagcttt

SEQ ID NO: 281608 - DNA, 25 bp, Artificial
  Probe
atccaggaagctttggctaagctca

SEQ ID NO: 281609 - DNA, 25 bp, Artificial
  Probe
aagcaaatccactgttaaagctatc

SEQ ID NO: 281610 - DNA, 25 bp, Artificial
  Probe
gcaaatccactgttaaagctatcca

SEQ ID NO: 281611 - DNA, 25 bp, Artificial
  Probe
gctttggctaagctcagagaggagg

SEQ ID NO: 281612 - DNA, 25 bp, Artificial
  Probe
aggaagctttggctaagctcagaga

SEQ ID NO: 281613 - DNA, 25 bp, Artificial
  Probe
ggaagctttggctaagctcagagag

SEQ ID NO: 281614 - DNA, 25 bp, Artificial
  Probe
atccactgttaaagctatccaggaa

SEQ ID NO: 281615 - DNA, 25 bp, Artificial
  Probe
caaatccactgttaaagctatccag

SEQ ID NO: 281616 - DNA, 25 bp, Artificial
  Probe
ctatccaggaagctttggctaagct

SEQ ID NO: 281617 - DNA, 25 bp, Artificial
  Probe
tggctaagctcagagaggaggagga

SEQ ID NO: 281618 - DNA, 25 bp, Artificial
  Probe
tccactgttaaagctatccaggaag

SEQ ID NO: 281619 - DNA, 25 bp, Artificial
  Probe
gctatccaggaagctttggctaagc

SEQ ID NO: 281620 - DNA, 25 bp, Artificial
  Probe
ctaagctcagagaggaggaggagag

SEQ ID NO: 281621 - DNA, 25 bp, Artificial
  Probe
taaagctatccaggaagctttggct

SEQ ID NO: 281622 - DNA, 25 bp, Artificial
  Probe
ggctaagctcagagaggaggaggag

SEQ ID NO: 281623 - DNA, 25 bp, Artificial
  Probe
tatccaggaagctttggctaagctc

SEQ ID NO: 281624 - DNA, 25 bp, Artificial
  Probe
aagctttggctaagctcagagagga

SEQ ID NO: 281625 - DNA, 25 bp, Artificial
  Probe
tccaggaagctttggctaagctcag

SEQ ID NO: 281626 - DNA, 25 bp, Artificial
  Probe
tttggctaagctcagagaggaggag

SEQ ID NO: 281627 - DNA, 25 bp, Artificial
  Probe
caagcaaatccactgttaaagctat

SEQ ID NO: 281628 - DNA, 25 bp, Artificial
  Probe
agcaaatccactgttaaagctatcc

SEQ ID NO: 281629 - DNA, 25 bp, Artificial
  Probe
ccaggaagctttggctaagctcaga

SEQ ID NO: 281630 - DNA, 25 bp, Artificial
  Probe
aatccactgttaaagctatccagga

SEQ ID NO: 281631 - DNA, 25 bp, Artificial
  Probe
taagctcagagaggaggaggagaga

SEQ ID NO: 281632 - DNA, 25 bp, Artificial
  Probe
gttaaagctatccaggaagctttgg

SEQ ID NO: 281633 - DNA, 25 bp, Artificial
  Probe
ttggctaagctcagagaggaggagg

SEQ ID NO: 281634 - DNA, 25 bp, Artificial
  Probe
agctatccaggaagctttggctaag

SEQ ID NO: 281635 - DNA, 25 bp, Artificial
  Probe
ctttggctaagctcagagaggagga

SEQ ID NO: 281636 - DNA, 25 bp, Artificial
  Probe
aacttgtcaggcactgccagtactt

SEQ ID NO: 281637 - DNA, 25 bp, Artificial
  Probe
tttctaaaaccgaggacatcagtag

SEQ ID NO: 281638 - DNA, 25 bp, Artificial
  Probe
gacactgactttgaaaatgttacaa

SEQ ID NO: 281639 - DNA, 25 bp, Artificial
  Probe
tcagatggtcacagaagcagaagcc

SEQ ID NO: 281640 - DNA, 25 bp, Artificial
  Probe
aagaggaagcacgtcacaggaaatg

SEQ ID NO: 281641 - DNA, 25 bp, Artificial
  Probe
aggcactgccagtacttcctctctg

SEQ ID NO: 281642 - DNA, 25 bp, Artificial
  Probe
gaactttctaaaaccgaggacatca

SEQ ID NO: 281643 - DNA, 25 bp, Artificial
  Probe
gaggttgacagcagccatgaaaagg

SEQ ID NO: 281644 - DNA, 25 bp, Artificial
  Probe
cacagagaccgcattgatccctgaa

SEQ ID NO: 281645 - DNA, 25 bp, Artificial
  Probe
cttgtcaggcactgccagtacttcc

SEQ ID NO: 281646 - DNA, 25 bp, Artificial
  Probe
agggaatggcccagtcacagaaaaa

SEQ ID NO: 281647 - DNA, 25 bp, Artificial
  Probe
aagcagaagcctaaagcacagtaat

SEQ ID NO: 281648 - DNA, 25 bp, Artificial
  Probe
tagtaatagttctcagcaagacact

SEQ ID NO: 281649 - DNA, 25 bp, Artificial
  Probe
aatgtgtctgaactttctaaaaccg

SEQ ID NO: 281650 - DNA, 25 bp, Artificial
  Probe
aaaccagcagcagctgtgacctgta

SEQ ID NO: 281651 - DNA, 25 bp, Artificial
  Probe
acagcagccatgaaaagggcagagg

SEQ ID NO: 281652 - DNA, 25 bp, Artificial
  Probe
tgttacaaaacataaagccgctgct

SEQ ID NO: 281653 - DNA, 25 bp, Artificial
  Probe
accgaggacatcagtagtaatagtt

SEQ ID NO: 281654 - DNA, 25 bp, Artificial
  Probe
ctaaaaccgaggacatcagtagtaa

SEQ ID NO: 281655 - DNA, 25 bp, Artificial
  Probe
actgccagtacttcctctctgcaga

SEQ ID NO: 281656 - DNA, 25 bp, Artificial
  Probe
gctgtgacctgtaaatcagggcgtg

SEQ ID NO: 281657 - DNA, 25 bp, Artificial
  Probe
tccctgaacaagagccaatggaaat

SEQ ID NO: 281658 - DNA, 25 bp, Artificial
  Probe
gtacttcctctctgcagagacccaa

SEQ ID NO: 281659 - DNA, 25 bp, Artificial
  Probe
ttgacagcagccatgaaaagggcag

SEQ ID NO: 281660 - DNA, 25 bp, Artificial
  Probe
acaataacgagcaattctgaaaagc

SEQ ID NO: 281661 - DNA, 25 bp, Artificial
  Probe
gccagtacttcctctctgcagagac

SEQ ID NO: 281662 - DNA, 25 bp, Artificial
  Probe
tcaaaaccagcagcagctgtgacct

SEQ ID NO: 281663 - DNA, 25 bp, Artificial
  Probe
agttaagaacttctatggtcgattc

SEQ ID NO: 281664 - DNA, 25 bp, Artificial
  Probe
ccgctgctggagttttaaaggatga

SEQ ID NO: 281665 - DNA, 25 bp, Artificial
  Probe
tacaaaacataaagccgctgctgga

SEQ ID NO: 281666 - DNA, 25 bp, Artificial
  Probe
aagttagcagcgaacttgtcaggca

SEQ ID NO: 281667 - DNA, 25 bp, Artificial
  Probe
acataaagccgctgctggagtttta

SEQ ID NO: 281668 - DNA, 25 bp, Artificial
  Probe
aaaccgaggacatcagtagtaatag

SEQ ID NO: 281669 - DNA, 25 bp, Artificial
  Probe
caattctgaaaagcatgctgaccat

SEQ ID NO: 281670 - DNA, 25 bp, Artificial
  Probe
cgcattgatccctgaacaagagcca

SEQ ID NO: 281671 - DNA, 25 bp, Artificial
  Probe
cgtcacaggaaatggccaaggagga

SEQ ID NO: 281672 - DNA, 25 bp, Artificial
  Probe
gcagaagcctaaagcacagtaataa

SEQ ID NO: 281673 - DNA, 25 bp, Artificial
  Probe
agcgaacttgtcaggcactgccagt

SEQ ID NO: 281674 - DNA, 25 bp, Artificial
  Probe
agccagacgacaagaatggtaaaga

SEQ ID NO: 281675 - DNA, 25 bp, Artificial
  Probe
taacgagcaattctgaaaagcatgc

SEQ ID NO: 281676 - DNA, 25 bp, Artificial
  Probe
agaggttgacagcagccatgaaaag

SEQ ID NO: 281677 - DNA, 25 bp, Artificial
  Probe
agcctaaagcacagtaataaagacg

SEQ ID NO: 281678 - DNA, 25 bp, Artificial
  Probe
agaccgcattgatccctgaacaaga

SEQ ID NO: 281679 - DNA, 25 bp, Artificial
  Probe
cggagggtctcagatggtcacagaa

SEQ ID NO: 281680 - DNA, 25 bp, Artificial
  Probe
agtacttcctctctgcagagaccca

SEQ ID NO: 281681 - DNA, 25 bp, Artificial
  Probe
aagccagacgacaagaatggtaaag

SEQ ID NO: 281682 - DNA, 25 bp, Artificial
  Probe
tggtgcaaaccctggagcaatatga

SEQ ID NO: 281683 - DNA, 25 bp, Artificial
  Probe
ttcaagctgtgaagagcttaagact

SEQ ID NO: 281684 - DNA, 25 bp, Artificial
  Probe
agccgagggactcctagatgtgttt

SEQ ID NO: 281685 - DNA, 25 bp, Artificial
  Probe
tgtctgaagcaatcagcatacgaga

SEQ ID NO: 281686 - DNA, 25 bp, Artificial
  Probe
ctaaaggctacctgctgtaagatta

SEQ ID NO: 281687 - DNA, 25 bp, Artificial
  Probe
cattttggaacgagtgaaagccgag

SEQ ID NO: 281688 - DNA, 25 bp, Artificial
  Probe
cgtcctgattcctttggtatatatt

SEQ ID NO: 281689 - DNA, 25 bp, Artificial
  Probe
agacttcagagaccacacatggtgc

SEQ ID NO: 281690 - DNA, 25 bp, Artificial
  Probe
ttcatagcactcagtaacattttgg

SEQ ID NO: 281691 - DNA, 25 bp, Artificial
  Probe
ttgttatgttctaaaggctacctgc

SEQ ID NO: 281692 - DNA, 25 bp, Artificial
  Probe
agcaggtccggatggtgagacaatt

SEQ ID NO: 281693 - DNA, 25 bp, Artificial
  Probe
gttctaaaggctacctgctgtaaga

SEQ ID NO: 281694 - DNA, 25 bp, Artificial
  Probe
acttcagagaccacacatggtgcaa

SEQ ID NO: 281695 - DNA, 25 bp, Artificial
  Probe
caggtccggatggtgagacaattcc

SEQ ID NO: 281696 - DNA, 25 bp, Artificial
  Probe
ttttgttatgttctaaaggctacct

SEQ ID NO: 281697 - DNA, 25 bp, Artificial
  Probe
ttaatatccgtcctgattcctttgg

SEQ ID NO: 281698 - DNA, 25 bp, Artificial
  Probe
tgaagcaatcagcatacgagacttt

SEQ ID NO: 281699 - DNA, 25 bp, Artificial
  Probe
taacattttggaacgagtgaaagcc

SEQ ID NO: 281700 - DNA, 25 bp, Artificial
  Probe
ggtccggatggtgagacaattccat

SEQ ID NO: 281701 - DNA, 25 bp, Artificial
  Probe
ggtacattcatagcactcagtaaca

SEQ ID NO: 281702 - DNA, 25 bp, Artificial
  Probe
aagagcttaagacttcagagaccac

SEQ ID NO: 281703 - DNA, 25 bp, Artificial
  Probe
agagcttaagacttcagagaccaca

SEQ ID NO: 281704 - DNA, 25 bp, Artificial
  Probe
cccgccaggaagagcaggtccggat

SEQ ID NO: 281705 - DNA, 25 bp, Artificial
  Probe
ccctggcccgccaggaagagcaggt

SEQ ID NO: 281706 - DNA, 25 bp, Artificial
  Probe
aatcagcatacgagactttctggtt

SEQ ID NO: 281707 - DNA, 25 bp, Artificial
  Probe
tgttctaaaggctacctgctgtaag

SEQ ID NO: 281708 - DNA, 25 bp, Artificial
  Probe
ctcagtaacattttggaacgagtga

SEQ ID NO: 281709 - DNA, 25 bp, Artificial
  Probe
agcttaagacttcagagaccacaca

SEQ ID NO: 281710 - DNA, 25 bp, Artificial
  Probe
atacgagactttctggttactttca

SEQ ID NO: 281711 - DNA, 25 bp, Artificial
  Probe
ttaagacttcagagaccacacatgg

SEQ ID NO: 281712 - DNA, 25 bp, Artificial
  Probe
tctgaagcaatcagcatacgagact

SEQ ID NO: 281713 - DNA, 25 bp, Artificial
  Probe
gttggaatccccactgagggtaaag

SEQ ID NO: 281714 - DNA, 25 bp, Artificial
  Probe
gaaagccgagggactcctagatgtg

SEQ ID NO: 281715 - DNA, 25 bp, Artificial
  Probe
gaatccccactgagggtaaaggcat

SEQ ID NO: 281716 - DNA, 25 bp, Artificial
  Probe
taatatccgtcctgattcctttggt

SEQ ID NO: 281717 - DNA, 25 bp, Artificial
  Probe
cctagatgtgtttcaagctgtgaag

SEQ ID NO: 281718 - DNA, 25 bp, Artificial
  Probe
ctggcccgccaggaagagcaggtcc

SEQ ID NO: 281719 - DNA, 25 bp, Artificial
  Probe
ttcagagaccacacatggtgcaaac

SEQ ID NO: 281720 - DNA, 25 bp, Artificial
  Probe
aaccctggagcaatatgaattctgc

SEQ ID NO: 281721 - DNA, 25 bp, Artificial
  Probe
tcagagaccacacatggtgcaaacc

SEQ ID NO: 281722 - DNA, 25 bp, Artificial
  Probe
actcagtaacattttggaacgagtg

SEQ ID NO: 281723 - DNA, 25 bp, Artificial
  Probe
cccactgagggtaaaggcatgattg

SEQ ID NO: 281724 - DNA, 25 bp, Artificial
  Probe
aacattttggaacgagtgaaagccg

SEQ ID NO: 281725 - DNA, 25 bp, Artificial
  Probe
ccccactgagggtaaaggcatgatt

SEQ ID NO: 281726 - DNA, 25 bp, Artificial
  Probe
cacatggtgcaaaccctggagcaat

SEQ ID NO: 281727 - DNA, 25 bp, Artificial
  Probe
acaggtacattcatagcactcagta

SEQ ID NO: 281728 - DNA, 25 bp, Artificial
  Probe
ggttgcgtggaggtcttacagtcaa

SEQ ID NO: 281729 - DNA, 25 bp, Artificial
  Probe
gcctatgttgccaaagaccctgtga

SEQ ID NO: 281730 - DNA, 25 bp, Artificial
  Probe
gagtacgttgcctatgttgccaaag

SEQ ID NO: 281731 - DNA, 25 bp, Artificial
  Probe
tctcactgtgtctaccagcagcctt

SEQ ID NO: 281732 - DNA, 25 bp, Artificial
  Probe
aggtcaccagggaggctatcagttt

SEQ ID NO: 281733 - DNA, 25 bp, Artificial
  Probe
ggtttcctacttggttcggtacatg

SEQ ID NO: 281734 - DNA, 25 bp, Artificial
  Probe
gccttaacctcatggcagcagactg

SEQ ID NO: 281735 - DNA, 25 bp, Artificial
  Probe
ctatcctgggaaggagtaacctgaa

SEQ ID NO: 281736 - DNA, 25 bp, Artificial
  Probe
tcttacagtcaatgcgagcccttga

SEQ ID NO: 281737 - DNA, 25 bp, Artificial
  Probe
ttcctacttggttcggtacatgggt

SEQ ID NO: 281738 - DNA, 25 bp, Artificial
  Probe
cttgacttcaatacccggactcagg

SEQ ID NO: 281739 - DNA, 25 bp, Artificial
  Probe
gcccactcagctctatcctgggaag

SEQ ID NO: 281740 - DNA, 25 bp, Artificial
  Probe
atgttgccaaagaccctgtgaatca

SEQ ID NO: 281741 - DNA, 25 bp, Artificial
  Probe
tggggatccggacacagctgagtac

SEQ ID NO: 281742 - DNA, 25 bp, Artificial
  Probe
ttcaatacccggactcaggtcacca

SEQ ID NO: 281743 - DNA, 25 bp, Artificial
  Probe
agtttgctggaatgccgatcactct

SEQ ID NO: 281744 - DNA, 25 bp, Artificial
  Probe
cagtttggtgtgtgaagctgtgcct

SEQ ID NO: 281745 - DNA, 25 bp, Artificial
  Probe
tgcgtggaggtcttacagtcaatgc

SEQ ID NO: 281746 - DNA, 25 bp, Artificial
  Probe
ccttgacttcaatacccggactcag

SEQ ID NO: 281747 - DNA, 25 bp, Artificial
  Probe
agctgagtacgttgcctatgttgcc

SEQ ID NO: 281748 - DNA, 25 bp, Artificial
  Probe
tcagtttggtgtgtgaagctgtgcc

SEQ ID NO: 281749 - DNA, 25 bp, Artificial
  Probe
tacttggttcggtacatgggttgcg

SEQ ID NO: 281750 - DNA, 25 bp, Artificial
  Probe
caatgcgagcccttgacttcaatac

SEQ ID NO: 281751 - DNA, 25 bp, Artificial
  Probe
gctggaatgccgatcactctcactg

SEQ ID NO: 281752 - DNA, 25 bp, Artificial
  Probe
gactgcaaacagatcattgccaacc

SEQ ID NO: 281753 - DNA, 25 bp, Artificial
  Probe
tgtgtgaagctgtgcctggtgccaa

SEQ ID NO: 281754 - DNA, 25 bp, Artificial
  Probe
tgccaaagaccctgtgaatcagaga

SEQ ID NO: 281755 - DNA, 25 bp, Artificial
  Probe
aatctatctcattcgcgtctggtgg

SEQ ID NO: 281756 - DNA, 25 bp, Artificial
  Probe
tcagctctatcctgggaaggagtaa

SEQ ID NO: 281757 - DNA, 25 bp, Artificial
  Probe
accagggaggctatcagtttggtgt

SEQ ID NO: 281758 - DNA, 25 bp, Artificial
  Probe
taacctcatggcagcagactgcaaa

SEQ ID NO: 281759 - DNA, 25 bp, Artificial
  Probe
actcaggtcaccagggaggctatca

SEQ ID NO: 281760 - DNA, 25 bp, Artificial
  Probe
acttggttcggtacatgggttgcgt

SEQ ID NO: 281761 - DNA, 25 bp, Artificial
  Probe
taccagcagccttaacctcatggca

SEQ ID NO: 281762 - DNA, 25 bp, Artificial
  Probe
acatgggttgcgtggaggtcttaca

SEQ ID NO: 281763 - DNA, 25 bp, Artificial
  Probe
cgatcactctcactgtgtctaccag

SEQ ID NO: 281764 - DNA, 25 bp, Artificial
  Probe
atgcaatctatctcattcgcgtctg

SEQ ID NO: 281765 - DNA, 25 bp, Artificial
  Probe
tggaggtcttacagtcaatgcgagc

SEQ ID NO: 281766 - DNA, 25 bp, Artificial
  Probe
caacgacaaagtcatgggacctggg

SEQ ID NO: 281767 - DNA, 25 bp, Artificial
  Probe
gtgtctaccagcagccttaacctca

SEQ ID NO: 281768 - DNA, 25 bp, Artificial
  Probe
ctctatcctgggaaggagtaacctg

SEQ ID NO: 281769 - DNA, 25 bp, Artificial
  Probe
cgttgcctatgttgccaaagaccct

SEQ ID NO: 281770 - DNA, 25 bp, Artificial
  Probe
agtaacctgaagtttgctggaatgc

SEQ ID NO: 281771 - DNA, 25 bp, Artificial
  Probe
tcactctcactgtgtctaccagcag

SEQ ID NO: 281772 - DNA, 25 bp, Artificial
  Probe
aagaccctgtgaatcagagagcctg

SEQ ID NO: 281773 - DNA, 25 bp, Artificial
  Probe
caccagggaggctatcagtttggtg

SEQ ID NO: 281774 - DNA, 25 bp, Artificial
  Probe
cgcccctatatggatgcagtcgtct

SEQ ID NO: 281775 - DNA, 25 bp, Artificial
  Probe
cccctatatggatgcagtcgtctcc

SEQ ID NO: 281776 - DNA, 25 bp, Artificial
  Probe
gctgtgcgcccctatatggatgcag

SEQ ID NO: 281777 - DNA, 25 bp, Artificial
  Probe
tcctcagcaacaggagccggaccta

SEQ ID NO: 281778 - DNA, 25 bp, Artificial
  Probe
tttccgtggccagacaatcaaactt

SEQ ID NO: 281779 - DNA, 25 bp, Artificial
  Probe
cagtcgtctccctggttacactcat

SEQ ID NO: 281780 - DNA, 25 bp, Artificial
  Probe
aaactgtttcctcagcaacaggagc

SEQ ID NO: 281781 - DNA, 25 bp, Artificial
  Probe
ccctatatggatgcagtcgtctccc

SEQ ID NO: 281782 - DNA, 25 bp, Artificial
  Probe
tgtgcgtccgaggttatctggctgt

SEQ ID NO: 281783 - DNA, 25 bp, Artificial
  Probe
ccaaaactgtttcctcagcaacagg

SEQ ID NO: 281784 - DNA, 25 bp, Artificial
  Probe
acgacatgatccagtactaccagaa

SEQ ID NO: 281785 - DNA, 25 bp, Artificial
  Probe
aggttatctggctgtgcgcccctat

SEQ ID NO: 281786 - DNA, 25 bp, Artificial
  Probe
tccgaggttatctggctgtgcgccc

SEQ ID NO: 281787 - DNA, 25 bp, Artificial
  Probe
tgcgcccctatatggatgcagtcgt

SEQ ID NO: 281788 - DNA, 25 bp, Artificial
  Probe
atgtgcgtccgaggttatctggctg

SEQ ID NO: 281789 - DNA, 25 bp, Artificial
  Probe
tgcgtccgaggttatctggctgtgc

SEQ ID NO: 281790 - DNA, 25 bp, Artificial
  Probe
ggttacactcatgttggacacaggc

SEQ ID NO: 281791 - DNA, 25 bp, Artificial
  Probe
tggccagacaatcaaacttttgaaa

SEQ ID NO: 281792 - DNA, 25 bp, Artificial
  Probe
ggccagacaatcaaacttttgaaac

SEQ ID NO: 281793 - DNA, 25 bp, Artificial
  Probe
tttcctcagcaacaggagccggacc

SEQ ID NO: 281794 - DNA, 25 bp, Artificial
  Probe
gtccgaggttatctggctgtgcgcc

SEQ ID NO: 281795 - DNA, 25 bp, Artificial
  Probe
ggatgcagtcgtctccctggttaca

SEQ ID NO: 281796 - DNA, 25 bp, Artificial
  Probe
tccctggttacactcatgttggaca

SEQ ID NO: 281797 - DNA, 25 bp, Artificial
  Probe
gacctacgacatgatccagtactac

SEQ ID NO: 281798 - DNA, 25 bp, Artificial
  Probe
aacaggagccggacctacgacatga

SEQ ID NO: 281799 - DNA, 25 bp, Artificial
  Probe
gatgcagtcgtctccctggttacac

SEQ ID NO: 281800 - DNA, 25 bp, Artificial
  Probe
atggatgcagtcgtctccctggtta

SEQ ID NO: 281801 - DNA, 25 bp, Artificial
  Probe
aggagccggacctacgacatgatcc

SEQ ID NO: 281802 - DNA, 25 bp, Artificial
  Probe
gccggacctacgacatgatccagta

SEQ ID NO: 281803 - DNA, 25 bp, Artificial
  Probe
gccctgtttccgtggccagacaatc

SEQ ID NO: 281804 - DNA, 25 bp, Artificial
  Probe
gtttccgtggccagacaatcaaact

SEQ ID NO: 281805 - DNA, 25 bp, Artificial
  Probe
tcgtctccctggttacactcatgtt

SEQ ID NO: 281806 - DNA, 25 bp, Artificial
  Probe
tccgtggccagacaatcaaactttt

SEQ ID NO: 281807 - DNA, 25 bp, Artificial
  Probe
cgtggccagacaatcaaacttttga

SEQ ID NO: 281808 - DNA, 25 bp, Artificial
  Probe
gttatctggctgtgcgcccctatat

SEQ ID NO: 281809 - DNA, 25 bp, Artificial
  Probe
gtttcctcagcaacaggagccggac

SEQ ID NO: 281810 - DNA, 25 bp, Artificial
  Probe
ctcagcaacaggagccggacctacg

SEQ ID NO: 281811 - DNA, 25 bp, Artificial
  Probe
ctggttacactcatgttggacacag

SEQ ID NO: 281812 - DNA, 25 bp, Artificial
  Probe
atatggatgcagtcgtctccctggt

SEQ ID NO: 281813 - DNA, 25 bp, Artificial
  Probe
gtggccagacaatcaaacttttgaa

SEQ ID NO: 281814 - DNA, 25 bp, Artificial
  Probe
tacgacatgatccagtactaccaga

SEQ ID NO: 281815 - DNA, 25 bp, Artificial
  Probe
cggacctacgacatgatccagtact

SEQ ID NO: 281816 - DNA, 25 bp, Artificial
  Probe
cgtccgaggttatctggctgtgcgc

SEQ ID NO: 281817 - DNA, 25 bp, Artificial
  Probe
gagccggacctacgacatgatccag

SEQ ID NO: 281818 - DNA, 25 bp, Artificial
  Probe
ccctggttacactcatgttggacac

SEQ ID NO: 281819 - DNA, 25 bp, Artificial
  Probe
ctacgacatgatccagtactaccag

SEQ ID NO: 281820 - DNA, 25 bp, Artificial
  Probe
aacctgctgttgcagtacaacagcg

SEQ ID NO: 281821 - DNA, 25 bp, Artificial
  Probe
ttatcggggttcctcacagctccct

SEQ ID NO: 281822 - DNA, 25 bp, Artificial
  Probe
aggccatctgcttcaccatcctggg

SEQ ID NO: 281823 - DNA, 25 bp, Artificial
  Probe
tgggtgtccaacctgcgctacaacc

SEQ ID NO: 281824 - DNA, 25 bp, Artificial
  Probe
gaagatcgacatgaccaccttcaac

SEQ ID NO: 281825 - DNA, 25 bp, Artificial
  Probe
gggacaggccatctgcttcaccatc

SEQ ID NO: 281826 - DNA, 25 bp, Artificial
  Probe
tcccggagaagatcgacatgaccac

SEQ ID NO: 281827 - DNA, 25 bp, Artificial
  Probe
acattatcggggttcctcacagctc

SEQ ID NO: 281828 - DNA, 25 bp, Artificial
  Probe
aagagctcaacaagagtgcccctct

SEQ ID NO: 281829 - DNA, 25 bp, Artificial
  Probe
ggaatctagtgaacgctacgcttac

SEQ ID NO: 281830 - DNA, 25 bp, Artificial
  Probe
cctctatgcgctctatgcttctttg

SEQ ID NO: 281831 - DNA, 25 bp, Artificial
  Probe
gatcgacatgaccaccttcaacaag

SEQ ID NO: 281832 - DNA, 25 bp, Artificial
  Probe
agaagatcgacatgaccaccttcaa

SEQ ID NO: 281833 - DNA, 25 bp, Artificial
  Probe
ccttctacattatcggggttcctca

SEQ ID NO: 281834 - DNA, 25 bp, Artificial
  Probe
ggagctggcggtcaatatcatcttc

SEQ ID NO: 281835 - DNA, 25 bp, Artificial
  Probe
tcaccgagggacaggccatctgctt

SEQ ID NO: 281836 - DNA, 25 bp, Artificial
  Probe
tgcgctacaaccacatgcttcgcaa

SEQ ID NO: 281837 - DNA, 25 bp, Artificial
  Probe
ggggttcctcacagctccctctatg

SEQ ID NO: 281838 - DNA, 25 bp, Artificial
  Probe
ctagtgaacgctacgcttacattta

SEQ ID NO: 281839 - DNA, 25 bp, Artificial
  Probe
gtggagttcgctcttgtgtggaatc

SEQ ID NO: 281840 - DNA, 25 bp, Artificial
  Probe
aggatatctaagcagcgtgtcccct

SEQ ID NO: 281841 - DNA, 25 bp, Artificial
  Probe
agaagaagaacctgctgttgcagta

SEQ ID NO: 281842 - DNA, 25 bp, Artificial
  Probe
gagggacaggccatctgcttcacca

SEQ ID NO: 281843 - DNA, 25 bp, Artificial
  Probe
caggcccttctacattatcggggtt

SEQ ID NO: 281844 - DNA, 25 bp, Artificial
  Probe
catcttcccggagaagatcgacatg

SEQ ID NO: 281845 - DNA, 25 bp, Artificial
  Probe
ctcaccgagggacaggccatctgct

SEQ ID NO: 281846 - DNA, 25 bp, Artificial
  Probe
ccttcaacaaggaggctggtgatga

SEQ ID NO: 281847 - DNA, 25 bp, Artificial
  Probe
tcttgtgtggaatctagtgaacgct

SEQ ID NO: 281848 - DNA, 25 bp, Artificial
  Probe
cccaggcccttctacattatcgggg

SEQ ID NO: 281849 - DNA, 25 bp, Artificial
  Probe
ctgctgttgcagtacaacagcggcg

SEQ ID NO: 281850 - DNA, 25 bp, Artificial
  Probe
ccatgaaagagctcaacaagagtgc

SEQ ID NO: 281851 - DNA, 25 bp, Artificial
  Probe
tcaatatcatcttcccggagaagat

SEQ ID NO: 281852 - DNA, 25 bp, Artificial
  Probe
caaccacatgcttcgcaagaagaag

SEQ ID NO: 281853 - DNA, 25 bp, Artificial
  Probe
tctagtgaacgctacgcttacattt

SEQ ID NO: 281854 - DNA, 25 bp, Artificial
  Probe
tgcttcaccatcctgggcgtgctca

SEQ ID NO: 281855 - DNA, 25 bp, Artificial
  Probe
ttgcagtacaacagcggcgaggagc

SEQ ID NO: 281856 - DNA, 25 bp, Artificial
  Probe
atgcttcgcaagaagaagaacctgc

SEQ ID NO: 281857 - DNA, 25 bp, Artificial
  Probe
ccaccttcaacaaggaggctggtga

SEQ ID NO: 281858 - DNA, 25 bp, Artificial
  Probe
cacatgcttcgcaagaagaagaacc

SEQ ID NO: 281859 - DNA, 25 bp, Artificial
  Probe
tgaaggtgtccatgaaagagctcaa

SEQ ID NO: 281860 - DNA, 25 bp, Artificial
  Probe
ctttgtggtggagttcgctcttgtg

SEQ ID NO: 281861 - DNA, 25 bp, Artificial
  Probe
gcctgggtgtccaacctgcgctaca

SEQ ID NO: 281862 - DNA, 25 bp, Artificial
  Probe
tattttctcgtgttgctgtgtgaca

SEQ ID NO: 281863 - DNA, 25 bp, Artificial
  Probe
ggatatctaagcagcgtgtcccctc

SEQ ID NO: 281864 - DNA, 25 bp, Artificial
  Probe
catctgcttcaccatcctgggcgtg

SEQ ID NO: 281865 - DNA, 25 bp, Artificial
  Probe
gcccttctacattatcggggttcct

SEQ ID NO: 281866 - DNA, 25 bp, Artificial
  Probe
agtggtgtgacttgccaaaactttt

SEQ ID NO: 281867 - DNA, 25 bp, Artificial
  Probe
ttgtgttaggcctttgtcccaggcc

SEQ ID NO: 281868 - DNA, 25 bp, Artificial
  Probe
tcagcaatactcagcgcaaagcaga

SEQ ID NO: 281869 - DNA, 25 bp, Artificial
  Probe
gcatcattgtgacattcttcccagt

SEQ ID NO: 281870 - DNA, 25 bp, Artificial
  Probe
gatgatcagtcttgcaatctggtca

SEQ ID NO: 281871 - DNA, 25 bp, Artificial
  Probe
caatctggtcatttgtagaagtggc

SEQ ID NO: 281872 - DNA, 25 bp, Artificial
  Probe
tcaggatgatcagtcttgcaatctg

SEQ ID NO: 281873 - DNA, 25 bp, Artificial
  Probe
agtcaggatgatcagtcttgcaatc

SEQ ID NO: 281874 - DNA, 25 bp, Artificial
  Probe
gacacagcatcattgtgacattctt

SEQ ID NO: 281875 - DNA, 25 bp, Artificial
  Probe
gaccagcttacagagtcaggatgat

SEQ ID NO: 281876 - DNA, 25 bp, Artificial
  Probe
caaacaacagtggtgtgacttgcca

SEQ ID NO: 281877 - DNA, 25 bp, Artificial
  Probe
agcatcattgtgacattcttcccag

SEQ ID NO: 281878 - DNA, 25 bp, Artificial
  Probe
cgagaagcattgtgtctctgaagta

SEQ ID NO: 281879 - DNA, 25 bp, Artificial
  Probe
tcacatgttcgagaagttcagactt

SEQ ID NO: 281880 - DNA, 25 bp, Artificial
  Probe
acaacagtggtgtgacttgccaaaa

SEQ ID NO: 281881 - DNA, 25 bp, Artificial
  Probe
caggccgtccattggtctgtcagca

SEQ ID NO: 281882 - DNA, 25 bp, Artificial
  Probe
gctgtattcaaacaggaccttttgg

SEQ ID NO: 281883 - DNA, 25 bp, Artificial
  Probe
ctggtcatttgtagaagtggccaaa

SEQ ID NO: 281884 - DNA, 25 bp, Artificial
  Probe
gtgtgacttgccaaaacttttctgg

SEQ ID NO: 281885 - DNA, 25 bp, Artificial
  Probe
tcggtgtaaccctttgagaactatc

SEQ ID NO: 281886 - DNA, 25 bp, Artificial
  Probe
cttgcaatctggtcatttgtagaag

SEQ ID NO: 281887 - DNA, 25 bp, Artificial
  Probe
ggcctttgtcccaggccgtccattg

SEQ ID NO: 281888 - DNA, 25 bp, Artificial
  Probe
tcccagttgtgttaggcctttgtcc

SEQ ID NO: 281889 - DNA, 25 bp, Artificial
  Probe
ttacagagtcaggatgatcagtctt

SEQ ID NO: 281890 - DNA, 25 bp, Artificial
  Probe
ttataacaaacaacagtggtgtgac

SEQ ID NO: 281891 - DNA, 25 bp, Artificial
  Probe
aggatgatcagtcttgcaatctggt

SEQ ID NO: 281892 - DNA, 25 bp, Artificial
  Probe
gttcagacttgtaaagcatacctta

SEQ ID NO: 281893 - DNA, 25 bp, Artificial
  Probe
atactcatagctgtattcaaacagg

SEQ ID NO: 281894 - DNA, 25 bp, Artificial
  Probe
agcgcaaagcagagcgagaagcatt

SEQ ID NO: 281895 - DNA, 25 bp, Artificial
  Probe
gacattcttcccagttgtgttaggc

SEQ ID NO: 281896 - DNA, 25 bp, Artificial
  Probe
ctttgagaactatcagaccagctta

SEQ ID NO: 281897 - DNA, 25 bp, Artificial
  Probe
tattcaaacaggaccttttggttgt

SEQ ID NO: 281898 - DNA, 25 bp, Artificial
  Probe
ttgtgacattcttcccagttgtgtt

SEQ ID NO: 281899 - DNA, 25 bp, Artificial
  Probe
taacaaacaacagtggtgtgacttg

SEQ ID NO: 281900 - DNA, 25 bp, Artificial
  Probe
aagttcagacttgtaaagcatacct

SEQ ID NO: 281901 - DNA, 25 bp, Artificial
  Probe
attcttcccagttgtgttaggcctt

SEQ ID NO: 281902 - DNA, 25 bp, Artificial
  Probe
gctgttctcaactatgtccacaatg

SEQ ID NO: 281903 - DNA, 25 bp, Artificial
  Probe
cttttataacaaacaacagtggtgt

SEQ ID NO: 281904 - DNA, 25 bp, Artificial
  Probe
aaagggaaagccatcacatgttcga

SEQ ID NO: 281905 - DNA, 25 bp, Artificial
  Probe
ttcccagttgtgttaggcctttgtc

SEQ ID NO: 281906 - DNA, 25 bp, Artificial
  Probe
tgttaggcctttgtcccaggccgtc

SEQ ID NO: 281907 - DNA, 25 bp, Artificial
  Probe
cttgcctcctgacacagcatcattg

SEQ ID NO: 281908 - DNA, 25 bp, Artificial
  Probe
tgtcccaggccgtccattggtctgt

SEQ ID NO: 281909 - DNA, 25 bp, Artificial
  Probe
tgcttttataacaaacaacagtggt

SEQ ID NO: 281910 - DNA, 25 bp, Artificial
  Probe
aatactcagcgcaaagcagagcgag

SEQ ID NO: 281911 - DNA, 25 bp, Artificial
  Probe
atagctgtattcaaacaggaccttt

SEQ ID NO: 281912 - DNA, 25 bp, Artificial
  Probe
gaacgatacacctgcgagaaagccc

SEQ ID NO: 281913 - DNA, 25 bp, Artificial
  Probe
tcatgtccacagcttgtgggacccc

SEQ ID NO: 281914 - DNA, 25 bp, Artificial
  Probe
gaatggcatcgttcacagagatcta

SEQ ID NO: 281915 - DNA, 25 bp, Artificial
  Probe
aaagcctgaaaacctgctgtacctc

SEQ ID NO: 281916 - DNA, 25 bp, Artificial
  Probe
ctggtccattggtgtcatcacatac

SEQ ID NO: 281917 - DNA, 25 bp, Artificial
  Probe
gcgagaaagccctcagacacccttg

SEQ ID NO: 281918 - DNA, 25 bp, Artificial
  Probe
acacctgcgagaaagccctcagaca

SEQ ID NO: 281919 - DNA, 25 bp, Artificial
  Probe
aaggactttatttgccatctgcttg

SEQ ID NO: 281920 - DNA, 25 bp, Artificial
  Probe
tactacgagtttgagtctccattct

SEQ ID NO: 281921 - DNA, 25 bp, Artificial
  Probe
catctgtcagcctccagattcagaa

SEQ ID NO: 281922 - DNA, 25 bp, Artificial
  Probe
tgtctacacagaaaaggatgccagt

SEQ ID NO: 281923 - DNA, 25 bp, Artificial
  Probe
tgcaccgggacatctacccatctgt

SEQ ID NO: 281924 - DNA, 25 bp, Artificial
  Probe
acacccttggattgacgggaacaca

SEQ ID NO: 281925 - DNA, 25 bp, Artificial
  Probe
agcctccagattcagaagaactttg

SEQ ID NO: 281926 - DNA, 25 bp, Artificial
  Probe
catttctgagtcagccaaggacttt

SEQ ID NO: 281927 - DNA, 25 bp, Artificial
  Probe
gggttactacgagtttgagtctcca

SEQ ID NO: 281928 - DNA, 25 bp, Artificial
  Probe
attctgggatgacatttctgagtca

SEQ ID NO: 281929 - DNA, 25 bp, Artificial
  Probe
actttatttgccatctgcttgagaa

SEQ ID NO: 281930 - DNA, 25 bp, Artificial
  Probe
agaatggagtcatgtccacagcttg

SEQ ID NO: 281931 - DNA, 25 bp, Artificial
  Probe
gatacacctgcgagaaagccctcag

SEQ ID NO: 281932 - DNA, 25 bp, Artificial
  Probe
tgccatctgcttgagaaggacccaa

SEQ ID NO: 281933 - DNA, 25 bp, Artificial
  Probe
tggcatcgttcacagagatctaaag

SEQ ID NO: 281934 - DNA, 25 bp, Artificial
  Probe
aggagaactccaagataatgatcac

SEQ ID NO: 281935 - DNA, 25 bp, Artificial
  Probe
tgagaatggcatcgttcacagagat

SEQ ID NO: 281936 - DNA, 25 bp, Artificial
  Probe
tgagtcagccaaggactttatttgc

SEQ ID NO: 281937 - DNA, 25 bp, Artificial
  Probe
gtccattggtgtcatcacatacata

SEQ ID NO: 281938 - DNA, 25 bp, Artificial
  Probe
tggcctatccaagatggagcagaat

SEQ ID NO: 281939 - DNA, 25 bp, Artificial
  Probe
gataatgatcactgattttggccta

SEQ ID NO: 281940 - DNA, 25 bp, Artificial
  Probe
tccattctgggatgacatttctgag

SEQ ID NO: 281941 - DNA, 25 bp, Artificial
  Probe
cacccctgaggagaactccaagata

SEQ ID NO: 281942 - DNA, 25 bp, Artificial
  Probe
agaaggacccaaatgaacgatacac

SEQ ID NO: 281943 - DNA, 25 bp, Artificial
  Probe
aaaggatgccagtctggtcatccag

SEQ ID NO: 281944 - DNA, 25 bp, Artificial
  Probe
tgacgggaacacagccctgcaccgg

SEQ ID NO: 281945 - DNA, 25 bp, Artificial
  Probe
agcctgaaaacctgctgtacctcac

SEQ ID NO: 281946 - DNA, 25 bp, Artificial
  Probe
tctgagtcagccaaggactttattt

SEQ ID NO: 281947 - DNA, 25 bp, Artificial
  Probe
cagccaaggactttatttgccatct

SEQ ID NO: 281948 - DNA, 25 bp, Artificial
  Probe
aagccctcagacacccttggattga

SEQ ID NO: 281949 - DNA, 25 bp, Artificial
  Probe
attgacgggaacacagccctgcacc

SEQ ID NO: 281950 - DNA, 25 bp, Artificial
  Probe
ctgctggtccattggtgtcatcaca

SEQ ID NO: 281951 - DNA, 25 bp, Artificial
  Probe
cctcagacacccttggattgacggg

SEQ ID NO: 281952 - DNA, 25 bp, Artificial
  Probe
aggatgccagtctggtcatccagca

SEQ ID NO: 281953 - DNA, 25 bp, Artificial
  Probe
accgggacatctacccatctgtcag

SEQ ID NO: 281954 - DNA, 25 bp, Artificial
  Probe
ctgcttgagaaggacccaaatgaac

SEQ ID NO: 281955 - DNA, 25 bp, Artificial
  Probe
tggaggcaagccttcaatgcggccg

SEQ ID NO: 281956 - DNA, 25 bp, Artificial
  Probe
acccctgaggagaactccaagataa

SEQ ID NO: 281957 - DNA, 25 bp, Artificial
  Probe
gttactacgagtttgagtctccatt

SEQ ID NO: 281958 - DNA, 25 bp, Artificial
  Probe
ttcgaggggcagcagcgtccccacg

SEQ ID NO: 281959 - DNA, 25 bp, Artificial
  Probe
gccaaacacggcagctctgggagac

SEQ ID NO: 281960 - DNA, 25 bp, Artificial
  Probe
tctgcacctgccagagacggacagt

SEQ ID NO: 281961 - DNA, 25 bp, Artificial
  Probe
tacatcacccatgctgcctgctggg

SEQ ID NO: 281962 - DNA, 25 bp, Artificial
  Probe
tcttcgaggggcagcagcgtcccca

SEQ ID NO: 281963 - DNA, 25 bp, Artificial
  Probe
cctcagaaggagtgcggatgtcctt

SEQ ID NO: 281964 - DNA, 25 bp, Artificial
  Probe
gtcccgtgtgttcagagaaacaacg

SEQ ID NO: 281965 - DNA, 25 bp, Artificial
  Probe
ctccaaatggagaggcagctacatc

SEQ ID NO: 281966 - DNA, 25 bp, Artificial
  Probe
gtaccagccaaacacggcagctctg

SEQ ID NO: 281967 - DNA, 25 bp, Artificial
  Probe
tgggagaccccgagatcctaacaca

SEQ ID NO: 281968 - DNA, 25 bp, Artificial
  Probe
gatgtccttggctccaaatggagag

SEQ ID NO: 281969 - DNA, 25 bp, Artificial
  Probe
taccagccaaacacggcagctctgg

SEQ ID NO: 281970 - DNA, 25 bp, Artificial
  Probe
ttcccaaccggtgcaggcactggac

SEQ ID NO: 281971 - DNA, 25 bp, Artificial
  Probe
ggctcgctgggcacccaactatgac

SEQ ID NO: 281972 - DNA, 25 bp, Artificial
  Probe
gaccccgagatcctaacacatgttt

SEQ ID NO: 281973 - DNA, 25 bp, Artificial
  Probe
tgccagagacggacagtgatctgtg

SEQ ID NO: 281974 - DNA, 25 bp, Artificial
  Probe
cacctgccagagacggacagtgatc

SEQ ID NO: 281975 - DNA, 25 bp, Artificial
  Probe
aaggtgttcccaaccggtgcaggca

SEQ ID NO: 281976 - DNA, 25 bp, Artificial
  Probe
ggaccagtggtgtcccgtgtgttca

SEQ ID NO: 281977 - DNA, 25 bp, Artificial
  Probe
gcgggtacccgatggcaccccgttg

SEQ ID NO: 281978 - DNA, 25 bp, Artificial
  Probe
ctgtgatcctgtagtatgcccacca

SEQ ID NO: 281979 - DNA, 25 bp, Artificial
  Probe
ctattttgatggtgaccggagctgg

SEQ ID NO: 281980 - DNA, 25 bp, Artificial
  Probe
ctaccaaatctggagccaggagagg

SEQ ID NO: 281981 - DNA, 25 bp, Artificial
  Probe
gcctcagaaggagtgcggatgtcct

SEQ ID NO: 281982 - DNA, 25 bp, Artificial
  Probe
cggagtagagacctttccagcctac

SEQ ID NO: 281983 - DNA, 25 bp, Artificial
  Probe
ggcagctctgggagaccccgagatc

SEQ ID NO: 281984 - DNA, 25 bp, Artificial
  Probe
ccctttgggctaattaagtgtggtg

SEQ ID NO: 281985 - DNA, 25 bp, Artificial
  Probe
gttcccaaccggtgcaggcactgga

SEQ ID NO: 281986 - DNA, 25 bp, Artificial
  Probe
cctttccagcctaccaaatctggag

SEQ ID NO: 281987 - DNA, 25 bp, Artificial
  Probe
caaggtgttcccaaccggtgcaggc

SEQ ID NO: 281988 - DNA, 25 bp, Artificial
  Probe
gtagagacctttccagcctaccaaa

SEQ ID NO: 281989 - DNA, 25 bp, Artificial
  Probe
aaggagtgcggatgtccttggctcc

SEQ ID NO: 281990 - DNA, 25 bp, Artificial
  Probe
tgcaggcactggaccagtggtgtcc

SEQ ID NO: 281991 - DNA, 25 bp, Artificial
  Probe
ctgcgcctggcctcagaaggagtgc

SEQ ID NO: 281992 - DNA, 25 bp, Artificial
  Probe
tgcggatgtccttggctccaaatgg

SEQ ID NO: 281993 - DNA, 25 bp, Artificial
  Probe
agacggacagtgatctgtgatcctg

SEQ ID NO: 281994 - DNA, 25 bp, Artificial
  Probe
gacagtgatctgtgatcctgtagta

SEQ ID NO: 281995 - DNA, 25 bp, Artificial
  Probe
gagatcctaacacatgtttcttcga

SEQ ID NO: 281996 - DNA, 25 bp, Artificial
  Probe
gaggcagctacatcacccatgctgc

SEQ ID NO: 281997 - DNA, 25 bp, Artificial
  Probe
gagaggcagctacatcacccatgct

SEQ ID NO: 281998 - DNA, 25 bp, Artificial
  Probe
ttaacggagaggtgcactctgagaa

SEQ ID NO: 281999 - DNA, 25 bp, Artificial
  Probe
catgtttcttcgaggggcagcagcg

SEQ ID NO: 282000 - DNA, 25 bp, Artificial
  Probe
cagctctgggagaccccgagatcct

SEQ ID NO: 282001 - DNA, 25 bp, Artificial
  Probe
agtggtgtcccgtgtgttcagagaa

SEQ ID NO: 282002 - DNA, 25 bp, Artificial
  Probe
gagggctgctattttgatggtgacc

SEQ ID NO: 282003 - DNA, 25 bp, Artificial
  Probe
acacggcagctctgggagaccccga

SEQ ID NO: 282004 - DNA, 25 bp, Artificial
  Probe
ccaatgagggcatggtcaccgtggt

SEQ ID NO: 282005 - DNA, 25 bp, Artificial
  Probe
cagaccctgtgaccaatgagggcat

SEQ ID NO: 282006 - DNA, 25 bp, Artificial
  Probe
gctctgtggatgagggctccaagcc

SEQ ID NO: 282007 - DNA, 25 bp, Artificial
  Probe
catgttcaccatcaacagtgagaca

SEQ ID NO: 282008 - DNA, 25 bp, Artificial
  Probe
cggtcatcgtccaggccactgacat

SEQ ID NO: 282009 - DNA, 25 bp, Artificial
  Probe
aggcagtggactatgagctgaaccg

SEQ ID NO: 282010 - DNA, 25 bp, Artificial
  Probe
tggactatgagctgaaccgtgcctt

SEQ ID NO: 282011 - DNA, 25 bp, Artificial
  Probe
gggcacttcagtgtccgcacagacc

SEQ ID NO: 282012 - DNA, 25 bp, Artificial
  Probe
attcaccaccagcacatttgcagga

SEQ ID NO: 282013 - DNA, 25 bp, Artificial
  Probe
aggtacatacgtaatgacggtcacc

SEQ ID NO: 282014 - DNA, 25 bp, Artificial
  Probe
cggcatggtgagataccggattgtc

SEQ ID NO: 282015 - DNA, 25 bp, Artificial
  Probe
gtgtccgcacagaccctgtgaccaa

SEQ ID NO: 282016 - DNA, 25 bp, Artificial
  Probe
aaaccgtatagagacagtagtggcc

SEQ ID NO: 282017 - DNA, 25 bp, Artificial
  Probe
aagccaggtacatacgtaatgacgg

SEQ ID NO: 282018 - DNA, 25 bp, Artificial
  Probe
tcaccgccaacgatgcagatgacag

SEQ ID NO: 282019 - DNA, 25 bp, Artificial
  Probe
cctgtgaccaatgagggcatggtca

SEQ ID NO: 282020 - DNA, 25 bp, Artificial
  Probe
gataccggattgtcacccagacgcc

SEQ ID NO: 282021 - DNA, 25 bp, Artificial
  Probe
gtctacaacggctctgtggatgagg

SEQ ID NO: 282022 - DNA, 25 bp, Artificial
  Probe
ccttaattatggtctctcgaacacg

SEQ ID NO: 282023 - DNA, 25 bp, Artificial
  Probe
gcagatgacagcaccacagccaacg

SEQ ID NO: 282024 - DNA, 25 bp, Artificial
  Probe
atggtctctcgaacacggccacggc

SEQ ID NO: 282025 - DNA, 25 bp, Artificial
  Probe
cagaacatgttcaccatcaacagtg

SEQ ID NO: 282026 - DNA, 25 bp, Artificial
  Probe
caccatcaacagtgagacaggggac

SEQ ID NO: 282027 - DNA, 25 bp, Artificial
  Probe
cgtccaggccactgacatggaagga

SEQ ID NO: 282028 - DNA, 25 bp, Artificial
  Probe
taccgaatcataagtggagacccct

SEQ ID NO: 282029 - DNA, 25 bp, Artificial
  Probe
ggattgtcacccagacgccccagag

SEQ ID NO: 282030 - DNA, 25 bp, Artificial
  Probe
tccgggcacttcagtgtccgcacag

SEQ ID NO: 282031 - DNA, 25 bp, Artificial
  Probe
agtggccaacctcacagtgatggac

SEQ ID NO: 282032 - DNA, 25 bp, Artificial
  Probe
tcacagtgatggaccgagaccagcc

SEQ ID NO: 282033 - DNA, 25 bp, Artificial
  Probe
gtaatgacggtcaccgccaacgatg

SEQ ID NO: 282034 - DNA, 25 bp, Artificial
  Probe
accaatgagggcatggtcaccgtgg

SEQ ID NO: 282035 - DNA, 25 bp, Artificial
  Probe
ttcagtgtccgcacagaccctgtga

SEQ ID NO: 282036 - DNA, 25 bp, Artificial
  Probe
agagaaagtccagcagtacacggtc

SEQ ID NO: 282037 - DNA, 25 bp, Artificial
  Probe
actatgagctgaaccgtgccttcat

SEQ ID NO: 282038 - DNA, 25 bp, Artificial
  Probe
acagtagtggccaacctcacagtga

SEQ ID NO: 282039 - DNA, 25 bp, Artificial
  Probe
caacgatgcagatgacagcaccaca

SEQ ID NO: 282040 - DNA, 25 bp, Artificial
  Probe
ttgcaggagaggtccccgaaaaccg

SEQ ID NO: 282041 - DNA, 25 bp, Artificial
  Probe
tgagctgaaccgtgccttcatgctg

SEQ ID NO: 282042 - DNA, 25 bp, Artificial
  Probe
ggccactgacatggaaggaaacctt

SEQ ID NO: 282043 - DNA, 25 bp, Artificial
  Probe
accaggtctacaacggctctgtgga

SEQ ID NO: 282044 - DNA, 25 bp, Artificial
  Probe
tcaccgtggtgaaggcagtggacta

SEQ ID NO: 282045 - DNA, 25 bp, Artificial
  Probe
cactcacccaactggaatgctgtct

SEQ ID NO: 282046 - DNA, 25 bp, Artificial
  Probe
acagccaacggcatggtgagatacc

SEQ ID NO: 282047 - DNA, 25 bp, Artificial
  Probe
tgagataccggattgtcacccagac

SEQ ID NO: 282048 - DNA, 25 bp, Artificial
  Probe
tggatgagggctccaagccaggtac

SEQ ID NO: 282049 - DNA, 25 bp, Artificial
  Probe
cccgaaaaccgtatagagacagtag

SEQ ID NO: 282050 - DNA, 25 bp, Artificial
  Probe
agacgtgtgttccacatgaggacca

SEQ ID NO: 282051 - DNA, 25 bp, Artificial
  Probe
agagattggcatcgtcacaaagata

SEQ ID NO: 282052 - DNA, 25 bp, Artificial
  Probe
atttcggagagattggcatcgtcac

SEQ ID NO: 282053 - DNA, 25 bp, Artificial
  Probe
atgaggaccattacatttgaccgca

SEQ ID NO: 282054 - DNA, 25 bp, Artificial
  Probe
atcaatggacactagttagacgtgt

SEQ ID NO: 282055 - DNA, 25 bp, Artificial
  Probe
agttagacgtgtgttccacatgagg

SEQ ID NO: 282056 - DNA, 25 bp, Artificial
  Probe
ctgtatttccataatccagaggttg

SEQ ID NO: 282057 - DNA, 25 bp, Artificial
  Probe
caatggacactagttagacgtgtgt

SEQ ID NO: 282058 - DNA, 25 bp, Artificial
  Probe
accattacatttgaccgcacagtgc

SEQ ID NO: 282059 - DNA, 25 bp, Artificial
  Probe
atctgtatttccataatccagaggt

SEQ ID NO: 282060 - DNA, 25 bp, Artificial
  Probe
tcaatggacactagttagacgtgtg

SEQ ID NO: 282061 - DNA, 25 bp, Artificial
  Probe
gacgtgtgttccacatgaggaccat

SEQ ID NO: 282062 - DNA, 25 bp, Artificial
  Probe
gttccacatgaggaccattacattt

SEQ ID NO: 282063 - DNA, 25 bp, Artificial
  Probe
aatctgtatttccataatccagagg

SEQ ID NO: 282064 - DNA, 25 bp, Artificial
  Probe
catttgaccgcacagtgcactgaac

SEQ ID NO: 282065 - DNA, 25 bp, Artificial
  Probe
ggaccattacatttgaccgcacagt

SEQ ID NO: 282066 - DNA, 25 bp, Artificial
  Probe
ccacatgaggaccattacatttgac

SEQ ID NO: 282067 - DNA, 25 bp, Artificial
  Probe
gacactagttagacgtgtgttccac

SEQ ID NO: 282068 - DNA, 25 bp, Artificial
  Probe
ttccacatgaggaccattacatttg

SEQ ID NO: 282069 - DNA, 25 bp, Artificial
  Probe
gtagcttttacttcagaaatctgta

SEQ ID NO: 282070 - DNA, 25 bp, Artificial
  Probe
gaggaccattacatttgaccgcaca

SEQ ID NO: 282071 - DNA, 25 bp, Artificial
  Probe
acactagttagacgtgtgttccaca

SEQ ID NO: 282072 - DNA, 25 bp, Artificial
  Probe
tcattcatgggaagtttgttcagct

SEQ ID NO: 282073 - DNA, 25 bp, Artificial
  Probe
ttgtagcttttacttcagaaatctg

SEQ ID NO: 282074 - DNA, 25 bp, Artificial
  Probe
actaacttggaatcaatggacacta

SEQ ID NO: 282075 - DNA, 25 bp, Artificial
  Probe
gtgtgttccacatgaggaccattac

SEQ ID NO: 282076 - DNA, 25 bp, Artificial
  Probe
tatttccataatccagaggttgtaa

SEQ ID NO: 282077 - DNA, 25 bp, Artificial
  Probe
gaatcaatggacactagttagacgt

SEQ ID NO: 282078 - DNA, 25 bp, Artificial
  Probe
tagacgtgtgttccacatgaggacc

SEQ ID NO: 282079 - DNA, 25 bp, Artificial
  Probe
ctatatttcggagagattggcatcg

SEQ ID NO: 282080 - DNA, 25 bp, Artificial
  Probe
gtgttccacatgaggaccattacat

SEQ ID NO: 282081 - DNA, 25 bp, Artificial
  Probe
acatttgaccgcacagtgcactgaa

SEQ ID NO: 282082 - DNA, 25 bp, Artificial
  Probe
ttcatgggaagtttgttcagctttc

SEQ ID NO: 282083 - DNA, 25 bp, Artificial
  Probe
cacatgaggaccattacatttgacc

SEQ ID NO: 282084 - DNA, 25 bp, Artificial
  Probe
ctagttagacgtgtgttccacatga

SEQ ID NO: 282085 - DNA, 25 bp, Artificial
  Probe
atggacactagttagacgtgtgttc

SEQ ID NO: 282086 - DNA, 25 bp, Artificial
  Probe
atatttcggagagattggcatcgtc

SEQ ID NO: 282087 - DNA, 25 bp, Artificial
  Probe
ccattacatttgaccgcacagtgca

SEQ ID NO: 282088 - DNA, 25 bp, Artificial
  Probe
ttcattcatgggaagtttgttcagc

SEQ ID NO: 282089 - DNA, 25 bp, Artificial
  Probe
agattggcatcgtcacaaagataat

SEQ ID NO: 282090 - DNA, 25 bp, Artificial
  Probe
actagttagacgtgtgttccacatg

SEQ ID NO: 282091 - DNA, 25 bp, Artificial
  Probe
gttagacgtgtgttccacatgagga

SEQ ID NO: 282092 - DNA, 25 bp, Artificial
  Probe
catgaggaccattacatttgaccgc

SEQ ID NO: 282093 - DNA, 25 bp, Artificial
  Probe
atttccataatccagaggttgtaag

SEQ ID NO: 282094 - DNA, 25 bp, Artificial
  Probe
tttcggagagattggcatcgtcaca

SEQ ID NO: 282095 - DNA, 25 bp, Artificial
  Probe
gctatatttcggagagattggcatc

SEQ ID NO: 282096 - DNA, 25 bp, Artificial
  Probe
tccagaactgaagacctgtcagcca

SEQ ID NO: 282097 - DNA, 25 bp, Artificial
  Probe
tgactctgtgactggtagtgaatct

SEQ ID NO: 282098 - DNA, 25 bp, Artificial
  Probe
tcagccaatgcctccaagagcaggt

SEQ ID NO: 282099 - DNA, 25 bp, Artificial
  Probe
aatagaaacttccagaactgaagac

SEQ ID NO: 282100 - DNA, 25 bp, Artificial
  Probe
gcctccaagagcaggtgatggttgc

SEQ ID NO: 282101 - DNA, 25 bp, Artificial
  Probe
caatgcctccaagagcaggtgatgg

SEQ ID NO: 282102 - DNA, 25 bp, Artificial
  Probe
gagtctgactctgtgactggtagtg

SEQ ID NO: 282103 - DNA, 25 bp, Artificial
  Probe
actgaagacctgtcagccaatgcct

SEQ ID NO: 282104 - DNA, 25 bp, Artificial
  Probe
ccaatgcctccaagagcaggtgatg

SEQ ID NO: 282105 - DNA, 25 bp, Artificial
  Probe
attagagtctgactctgtgactggt

SEQ ID NO: 282106 - DNA, 25 bp, Artificial
  Probe
agagtctgactctgtgactggtagt

SEQ ID NO: 282107 - DNA, 25 bp, Artificial
  Probe
gactctgtgactggtagtgaatcta

SEQ ID NO: 282108 - DNA, 25 bp, Artificial
  Probe
cttccagaactgaagacctgtcagc

SEQ ID NO: 282109 - DNA, 25 bp, Artificial
  Probe
aactgaagacctgtcagccaatgcc

SEQ ID NO: 282110 - DNA, 25 bp, Artificial
  Probe
caggtgatggttgcaggcaatctta

SEQ ID NO: 282111 - DNA, 25 bp, Artificial
  Probe
agccaatgcctccaagagcaggtga

SEQ ID NO: 282112 - DNA, 25 bp, Artificial
  Probe
gaactgaagacctgtcagccaatgc

SEQ ID NO: 282113 - DNA, 25 bp, Artificial
  Probe
caggcaatcttaaaacattagagtc

SEQ ID NO: 282114 - DNA, 25 bp, Artificial
  Probe
aacattagagtctgactctgtgact

SEQ ID NO: 282115 - DNA, 25 bp, Artificial
  Probe
ctgaagacctgtcagccaatgcctc

SEQ ID NO: 282116 - DNA, 25 bp, Artificial
  Probe
cagaactgaagacctgtcagccaat

SEQ ID NO: 282117 - DNA, 25 bp, Artificial
  Probe
aatgcctccaagagcaggtgatggt

SEQ ID NO: 282118 - DNA, 25 bp, Artificial
  Probe
cctccaagagcaggtgatggttgca

SEQ ID NO: 282119 - DNA, 25 bp, Artificial
  Probe
aaacttccagaactgaagacctgtc

SEQ ID NO: 282120 - DNA, 25 bp, Artificial
  Probe
tagaaacttccagaactgaagacct

SEQ ID NO: 282121 - DNA, 25 bp, Artificial
  Probe
acttccagaactgaagacctgtcag

SEQ ID NO: 282122 - DNA, 25 bp, Artificial
  Probe
gaaacttccagaactgaagacctgt

SEQ ID NO: 282123 - DNA, 25 bp, Artificial
  Probe
acctgtcagccaatgcctccaagag

SEQ ID NO: 282124 - DNA, 25 bp, Artificial
  Probe
tgaagacctgtcagccaatgcctcc

SEQ ID NO: 282125 - DNA, 25 bp, Artificial
  Probe
tctgactctgtgactggtagtgaat

SEQ ID NO: 282126 - DNA, 25 bp, Artificial
  Probe
gacctgtcagccaatgcctccaaga

SEQ ID NO: 282127 - DNA, 25 bp, Artificial
  Probe
gtctgactctgtgactggtagtgaa

SEQ ID NO: 282128 - DNA, 25 bp, Artificial
  Probe
tggttgcaggcaatcttaaaacatt

SEQ ID NO: 282129 - DNA, 25 bp, Artificial
  Probe
ccagaactgaagacctgtcagccaa

SEQ ID NO: 282130 - DNA, 25 bp, Artificial
  Probe
actctgtgactggtagtgaatctac

SEQ ID NO: 282131 - DNA, 25 bp, Artificial
  Probe
atgcctccaagagcaggtgatggtt

SEQ ID NO: 282132 - DNA, 25 bp, Artificial
  Probe
agaactgaagacctgtcagccaatg

SEQ ID NO: 282133 - DNA, 25 bp, Artificial
  Probe
taatagaaacttccagaactgaaga

SEQ ID NO: 282134 - DNA, 25 bp, Artificial
  Probe
aggcaatcttaaaacattagagtct

SEQ ID NO: 282135 - DNA, 25 bp, Artificial
  Probe
ctccaagagcaggtgatggttgcag

SEQ ID NO: 282136 - DNA, 25 bp, Artificial
  Probe
acattagagtctgactctgtgactg

SEQ ID NO: 282137 - DNA, 25 bp, Artificial
  Probe
atggttgcaggcaatcttaaaacat

SEQ ID NO: 282138 - DNA, 25 bp, Artificial
  Probe
ctctgtgactggtagtgaatctact

SEQ ID NO: 282139 - DNA, 25 bp, Artificial
  Probe
atagaaacttccagaactgaagacc

SEQ ID NO: 282140 - DNA, 25 bp, Artificial
  Probe
agtctgactctgtgactggtagtga

SEQ ID NO: 282141 - DNA, 25 bp, Artificial
  Probe
agcaggtgatggttgcaggcaatct

SEQ ID NO: 282142 - DNA, 25 bp, Artificial
  Probe
cagcgatccatccaatgctgcctgg

SEQ ID NO: 282143 - DNA, 25 bp, Artificial
  Probe
tccatccaatgctgcctggatgagc

SEQ ID NO: 282144 - DNA, 25 bp, Artificial
  Probe
cctctgaagcagagcagcgatccat

SEQ ID NO: 282145 - DNA, 25 bp, Artificial
  Probe
agcgatccatccaatgctgcctgga

SEQ ID NO: 282146 - DNA, 25 bp, Artificial
  Probe
gtatcttgtacggtgatggaggacc

SEQ ID NO: 282147 - DNA, 25 bp, Artificial
  Probe
gatccatccaatgctgcctggatga

SEQ ID NO: 282148 - DNA, 25 bp, Artificial
  Probe
aagagtgacaagtccagctgagctg

SEQ ID NO: 282149 - DNA, 25 bp, Artificial
  Probe
tgaagcagagcagcgatccatccaa

SEQ ID NO: 282150 - DNA, 25 bp, Artificial
  Probe
cttgtacggtgatggaggacctgcc

SEQ ID NO: 282151 - DNA, 25 bp, Artificial
  Probe
gaggacctgcctctgaagcagagca

SEQ ID NO: 282152 - DNA, 25 bp, Artificial
  Probe
gcgatccatccaatgctgcctggat

SEQ ID NO: 282153 - DNA, 25 bp, Artificial
  Probe
ccatccaatgctgcctggatgagcc

SEQ ID NO: 282154 - DNA, 25 bp, Artificial
  Probe
cctgcctctgaagcagagcagcgat

SEQ ID NO: 282155 - DNA, 25 bp, Artificial
  Probe
gagtgacaagtccagctgagctggg

SEQ ID NO: 282156 - DNA, 25 bp, Artificial
  Probe
atcttgtacggtgatggaggacctg

SEQ ID NO: 282157 - DNA, 25 bp, Artificial
  Probe
agagtgacaagtccagctgagctgg

SEQ ID NO: 282158 - DNA, 25 bp, Artificial
  Probe
tgacaagtccagctgagctgggaaa

SEQ ID NO: 282159 - DNA, 25 bp, Artificial
  Probe
tgcctctgaagcagagcagcgatcc

SEQ ID NO: 282160 - DNA, 25 bp, Artificial
  Probe
agcagcgatccatccaatgctgcct

SEQ ID NO: 282161 - DNA, 25 bp, Artificial
  Probe
agtgacaagtccagctgagctggga

SEQ ID NO: 282162 - DNA, 25 bp, Artificial
  Probe
gacaagtccagctgagctgggaaag

SEQ ID NO: 282163 - DNA, 25 bp, Artificial
  Probe
gtgacaagtccagctgagctgggaa

SEQ ID NO: 282164 - DNA, 25 bp, Artificial
  Probe
gcagagcagcgatccatccaatgct

SEQ ID NO: 282165 - DNA, 25 bp, Artificial
  Probe
agcagagcagcgatccatccaatgc

SEQ ID NO: 282166 - DNA, 25 bp, Artificial
  Probe
ggacctgcctctgaagcagagcagc

SEQ ID NO: 282167 - DNA, 25 bp, Artificial
  Probe
cgatccatccaatgctgcctggatg

SEQ ID NO: 282168 - DNA, 25 bp, Artificial
  Probe
gcagcgatccatccaatgctgcctg

SEQ ID NO: 282169 - DNA, 25 bp, Artificial
  Probe
tacggtgatggaggacctgcctctg

SEQ ID NO: 282170 - DNA, 25 bp, Artificial
  Probe
tcttgtacggtgatggaggacctgc

SEQ ID NO: 282171 - DNA, 25 bp, Artificial
  Probe
gtacggtgatggaggacctgcctct

SEQ ID NO: 282172 - DNA, 25 bp, Artificial
  Probe
gtgatggaggacctgcctctgaagc

SEQ ID NO: 282173 - DNA, 25 bp, Artificial
  Probe
gcctctgaagcagagcagcgatcca

SEQ ID NO: 282174 - DNA, 25 bp, Artificial
  Probe
gctgagctgggaaagggggaagtat

SEQ ID NO: 282175 - DNA, 25 bp, Artificial
  Probe
ttgtacggtgatggaggacctgcct

SEQ ID NO: 282176 - DNA, 25 bp, Artificial
  Probe
acaagtccagctgagctgggaaagg

SEQ ID NO: 282177 - DNA, 25 bp, Artificial
  Probe
ctctgaagcagagcagcgatccatc

SEQ ID NO: 282178 - DNA, 25 bp, Artificial
  Probe
gggaagtatcttgtacggtgatgga

SEQ ID NO: 282179 - DNA, 25 bp, Artificial
  Probe
gatggaggacctgcctctgaagcag

SEQ ID NO: 282180 - DNA, 25 bp, Artificial
  Probe
tgatggaggacctgcctctgaagca

SEQ ID NO: 282181 - DNA, 25 bp, Artificial
  Probe
aggacctgcctctgaagcagagcag

SEQ ID NO: 282182 - DNA, 25 bp, Artificial
  Probe
tatcttgtacggtgatggaggacct

SEQ ID NO: 282183 - DNA, 25 bp, Artificial
  Probe
cagagcagcgatccatccaatgctg

SEQ ID NO: 282184 - DNA, 25 bp, Artificial
  Probe
caagtccagctgagctgggaaaggg

SEQ ID NO: 282185 - DNA, 25 bp, Artificial
  Probe
tggaggacctgcctctgaagcagag

SEQ ID NO: 282186 - DNA, 25 bp, Artificial
  Probe
ctgcctctgaagcagagcagcgatc

SEQ ID NO: 282187 - DNA, 25 bp, Artificial
  Probe
atccatccaatgctgcctggatgag

SEQ ID NO: 282188 - DNA, 25 bp, Artificial
  Probe
caaggtcatttttctcagatcctgg

SEQ ID NO: 282189 - DNA, 25 bp, Artificial
  Probe
agccgtgttggttattcagttgcta

SEQ ID NO: 282190 - DNA, 25 bp, Artificial
  Probe
tcagatcctgggacggtcccattat

SEQ ID NO: 282191 - DNA, 25 bp, Artificial
  Probe
ggttattcagttgctattgctaaca

SEQ ID NO: 282192 - DNA, 25 bp, Artificial
  Probe
gctattgctaacaacatgcggaagc

SEQ ID NO: 282193 - DNA, 25 bp, Artificial
  Probe
gaaacactatgcagtcagggaacac

SEQ ID NO: 282194 - DNA, 25 bp, Artificial
  Probe
catttttctcagatcctgggacggt

SEQ ID NO: 282195 - DNA, 25 bp, Artificial
  Probe
cagttgctattgctaacaacatgcg

SEQ ID NO: 282196 - DNA, 25 bp, Artificial
  Probe
ttcagttgctattgctaacaacatg

SEQ ID NO: 282197 - DNA, 25 bp, Artificial
  Probe
tcactgagccgtgttggttattcag

SEQ ID NO: 282198 - DNA, 25 bp, Artificial
  Probe
atgcagtcagggaacacagcctttt

SEQ ID NO: 282199 - DNA, 25 bp, Artificial
  Probe
ccttattgcttacagtaaagcatgt

SEQ ID NO: 282200 - DNA, 25 bp, Artificial
  Probe
tgagccgtgttggttattcagttgc

SEQ ID NO: 282201 - DNA, 25 bp, Artificial
  Probe
ctgagccgtgttggttattcagttg

SEQ ID NO: 282202 - DNA, 25 bp, Artificial
  Probe
tttctcagatcctgggacggtccca

SEQ ID NO: 282203 - DNA, 25 bp, Artificial
  Probe
tccttattgcttacagtaaagcatg

SEQ ID NO: 282204 - DNA, 25 bp, Artificial
  Probe
tggttattcagttgctattgctaac

SEQ ID NO: 282205 - DNA, 25 bp, Artificial
  Probe
cagtcagggaacacagccttttttc

SEQ ID NO: 282206 - DNA, 25 bp, Artificial
  Probe
gttgctattgctaacaacatgcgga

SEQ ID NO: 282207 - DNA, 25 bp, Artificial
  Probe
cactgagccgtgttggttattcagt

SEQ ID NO: 282208 - DNA, 25 bp, Artificial
  Probe
ccgtgttggttattcagttgctatt

SEQ ID NO: 282209 - DNA, 25 bp, Artificial
  Probe
atttttctcagatcctgggacggtc

SEQ ID NO: 282210 - DNA, 25 bp, Artificial
  Probe
attgctaacaacatgcggaagcctt

SEQ ID NO: 282211 - DNA, 25 bp, Artificial
  Probe
gttattcagttgctattgctaacaa

SEQ ID NO: 282212 - DNA, 25 bp, Artificial
  Probe
gagccgtgttggttattcagttgct

SEQ ID NO: 282213 - DNA, 25 bp, Artificial
  Probe
cactatgcagtcagggaacacagcc

SEQ ID NO: 282214 - DNA, 25 bp, Artificial
  Probe
gtcatttttctcagatcctgggacg

SEQ ID NO: 282215 - DNA, 25 bp, Artificial
  Probe
taccttagctttcctttgtgagttg

SEQ ID NO: 282216 - DNA, 25 bp, Artificial
  Probe
accttagctttcctttgtgagttgt

SEQ ID NO: 282217 - DNA, 25 bp, Artificial
  Probe
agctttcctttgtgagttgtttcaa

SEQ ID NO: 282218 - DNA, 25 bp, Artificial
  Probe
agttgatcactgagccgtgttggtt

SEQ ID NO: 282219 - DNA, 25 bp, Artificial
  Probe
aaggtcatttttctcagatcctggg

SEQ ID NO: 282220 - DNA, 25 bp, Artificial
  Probe
ttgctaacaacatgcggaagccttt

SEQ ID NO: 282221 - DNA, 25 bp, Artificial
  Probe
gaaatccttattgcttacagtaaag

SEQ ID NO: 282222 - DNA, 25 bp, Artificial
  Probe
atcactgagccgtgttggttattca

SEQ ID NO: 282223 - DNA, 25 bp, Artificial
  Probe
tttttctcagatcctgggacggtcc

SEQ ID NO: 282224 - DNA, 25 bp, Artificial
  Probe
cttattgcttacagtaaagcatgtt

SEQ ID NO: 282225 - DNA, 25 bp, Artificial
  Probe
tgaaacactatgcagtcagggaaca

SEQ ID NO: 282226 - DNA, 25 bp, Artificial
  Probe
ggtcatttttctcagatcctgggac

SEQ ID NO: 282227 - DNA, 25 bp, Artificial
  Probe
tgcagtcagggaacacagccttttt

SEQ ID NO: 282228 - DNA, 25 bp, Artificial
  Probe
aacactatgcagtcagggaacacag

SEQ ID NO: 282229 - DNA, 25 bp, Artificial
  Probe
ctattgctaacaacatgcggaagcc

SEQ ID NO: 282230 - DNA, 25 bp, Artificial
  Probe
agcaaggtcatttttctcagatcct

SEQ ID NO: 282231 - DNA, 25 bp, Artificial
  Probe
tagcaaggtcatttttctcagatcc

SEQ ID NO: 282232 - DNA, 25 bp, Artificial
  Probe
acaacatgcggaagcctttctgtct

SEQ ID NO: 282233 - DNA, 25 bp, Artificial
  Probe
tattgctaacaacatgcggaagcct

SEQ ID NO: 282234 - DNA, 25 bp, Artificial
  Probe
ctcagggcacttactaaaagagggg

SEQ ID NO: 282235 - DNA, 25 bp, Artificial
  Probe
ccctgtgttcagagattgaaaattc

SEQ ID NO: 282236 - DNA, 25 bp, Artificial
  Probe
gaaaggccacagcttaatgtcacaa

SEQ ID NO: 282237 - DNA, 25 bp, Artificial
  Probe
gacgtagccaagatcagaggtaacc

SEQ ID NO: 282238 - DNA, 25 bp, Artificial
  Probe
cttggggccactgctcagggcgacc

SEQ ID NO: 282239 - DNA, 25 bp, Artificial
  Probe
tcccaagcctggatggccagagcgg

SEQ ID NO: 282240 - DNA, 25 bp, Artificial
  Probe
tcttttcctcagaggagccggcagc

SEQ ID NO: 282241 - DNA, 25 bp, Artificial
  Probe
attcccaagcctggatggccagagc

SEQ ID NO: 282242 - DNA, 25 bp, Artificial
  Probe
tattcccaagcctggatggccagag

SEQ ID NO: 282243 - DNA, 25 bp, Artificial
  Probe
ttcccaagcctggatggccagagcg

SEQ ID NO: 282244 - DNA, 25 bp, Artificial
  Probe
aggccacagcttaatgtcacaaaac

SEQ ID NO: 282245 - DNA, 25 bp, Artificial
  Probe
aaaggccacagcttaatgtcacaaa

SEQ ID NO: 282246 - DNA, 25 bp, Artificial
  Probe
agagaaaggccacagcttaatgtca

SEQ ID NO: 282247 - DNA, 25 bp, Artificial
  Probe
aaccccaggaactcaggcagagaca

SEQ ID NO: 282248 - DNA, 25 bp, Artificial
  Probe
gaggtaaccccaggaactcaggcag

SEQ ID NO: 282249 - DNA, 25 bp, Artificial
  Probe
ggtaaccccaggaactcaggcagag

SEQ ID NO: 282250 - DNA, 25 bp, Artificial
  Probe
ccttggggccactgctcagggcgac

SEQ ID NO: 282251 - DNA, 25 bp, Artificial
  Probe
taaccccaggaactcaggcagagac

SEQ ID NO: 282252 - DNA, 25 bp, Artificial
  Probe
tcctcagggcacttactaaaagagg

SEQ ID NO: 282253 - DNA, 25 bp, Artificial
  Probe
tatttattcccaagcctggatggcc

SEQ ID NO: 282254 - DNA, 25 bp, Artificial
  Probe
cttcctcagggcacttactaaaaga

SEQ ID NO: 282255 - DNA, 25 bp, Artificial
  Probe
tttcctcagaggagccggcagcagt

SEQ ID NO: 282256 - DNA, 25 bp, Artificial
  Probe
tggacgtagccaagatcagaggtaa

SEQ ID NO: 282257 - DNA, 25 bp, Artificial
  Probe
accctgtgttcagagattgaaaatt

SEQ ID NO: 282258 - DNA, 25 bp, Artificial
  Probe
ggccacagcttaatgtcacaaaaca

SEQ ID NO: 282259 - DNA, 25 bp, Artificial
  Probe
gccacagcttaatgtcacaaaacag

SEQ ID NO: 282260 - DNA, 25 bp, Artificial
  Probe
attcttttcctcagaggagccggca

SEQ ID NO: 282261 - DNA, 25 bp, Artificial
  Probe
ctatttattcccaagcctggatggc

SEQ ID NO: 282262 - DNA, 25 bp, Artificial
  Probe
tattcttttcctcagaggagccggc

SEQ ID NO: 282263 - DNA, 25 bp, Artificial
  Probe
tccttggggccactgctcagggcga

SEQ ID NO: 282264 - DNA, 25 bp, Artificial
  Probe
agaggtaaccccaggaactcaggca

SEQ ID NO: 282265 - DNA, 25 bp, Artificial
  Probe
ggacgtagccaagatcagaggtaac

SEQ ID NO: 282266 - DNA, 25 bp, Artificial
  Probe
agatcagaggtaaccccaggaactc

SEQ ID NO: 282267 - DNA, 25 bp, Artificial
  Probe
aagatcagaggtaaccccaggaact

SEQ ID NO: 282268 - DNA, 25 bp, Artificial
  Probe
caagatcagaggtaaccccaggaac

SEQ ID NO: 282269 - DNA, 25 bp, Artificial
  Probe
gtggacgtagccaagatcagaggta

SEQ ID NO: 282270 - DNA, 25 bp, Artificial
  Probe
ttcctcagggcacttactaaaagag

SEQ ID NO: 282271 - DNA, 25 bp, Artificial
  Probe
gtagccaagatcagaggtaacccca

SEQ ID NO: 282272 - DNA, 25 bp, Artificial
  Probe
gagaaaggccacagcttaatgtcac

SEQ ID NO: 282273 - DNA, 25 bp, Artificial
  Probe
ttcttttcctcagaggagccggcag

SEQ ID NO: 282274 - DNA, 25 bp, Artificial
  Probe
ccccaggaactcaggcagagacagg

SEQ ID NO: 282275 - DNA, 25 bp, Artificial
  Probe
aggtaaccccaggaactcaggcaga

SEQ ID NO: 282276 - DNA, 25 bp, Artificial
  Probe
cttttcctcagaggagccggcagca

SEQ ID NO: 282277 - DNA, 25 bp, Artificial
  Probe
ccaccctgtgttcagagattgaaaa

SEQ ID NO: 282278 - DNA, 25 bp, Artificial
  Probe
aaggccacagcttaatgtcacaaaa

SEQ ID NO: 282279 - DNA, 25 bp, Artificial
  Probe
cgtagccaagatcagaggtaacccc

SEQ ID NO: 282280 - DNA, 25 bp, Artificial
  Probe
agttctagagaggtttgccttcttg

SEQ ID NO: 282281 - DNA, 25 bp, Artificial
  Probe
gtgaggacaccttaactgcctccac

SEQ ID NO: 282282 - DNA, 25 bp, Artificial
  Probe
gagttcattcacctaactcctgaag

SEQ ID NO: 282283 - DNA, 25 bp, Artificial
  Probe
cactcccaagcctggcctgggaaag

SEQ ID NO: 282284 - DNA, 25 bp, Artificial
  Probe
gagtatagagccactttgactgcag

SEQ ID NO: 282285 - DNA, 25 bp, Artificial
  Probe
ccagcccgttgctgcaaagatgggg

SEQ ID NO: 282286 - DNA, 25 bp, Artificial
  Probe
ctgaacacagatagccacagaagca

SEQ ID NO: 282287 - DNA, 25 bp, Artificial
  Probe
tgccctgggtcgtcttcatctcact

SEQ ID NO: 282288 - DNA, 25 bp, Artificial
  Probe
ccacagaaccctagtcctacgagga

SEQ ID NO: 282289 - DNA, 25 bp, Artificial
  Probe
ggaggacatctctgaggactcctag

SEQ ID NO: 282290 - DNA, 25 bp, Artificial
  Probe
ctaagtgcttggacataggcttggg

SEQ ID NO: 282291 - DNA, 25 bp, Artificial
  Probe
tccccaggacccacagtctaggagg

SEQ ID NO: 282292 - DNA, 25 bp, Artificial
  Probe
gtagccaaagggagcactcccaagc

SEQ ID NO: 282293 - DNA, 25 bp, Artificial
  Probe
acaccctgagttctgagggcagtgc

SEQ ID NO: 282294 - DNA, 25 bp, Artificial
  Probe
gaactctgttaacaaggctgccctc

SEQ ID NO: 282295 - DNA, 25 bp, Artificial
  Probe
tgctgacagacactaactctgtacc

SEQ ID NO: 282296 - DNA, 25 bp, Artificial
  Probe
aggaagatgcttcctgttaggctta

SEQ ID NO: 282297 - DNA, 25 bp, Artificial
  Probe
tgcttcagcagaggaagatgcttcc

SEQ ID NO: 282298 - DNA, 25 bp, Artificial
  Probe
ccatccctctagttctcttgagaag

SEQ ID NO: 282299 - DNA, 25 bp, Artificial
  Probe
gtgtgtgtgcgtgatacatatcttc

SEQ ID NO: 282300 - DNA, 25 bp, Artificial
  Probe
ggactcctgccctgggtcgtcttca

SEQ ID NO: 282301 - DNA, 25 bp, Artificial
  Probe
ctagttctcttgagaagtgaattct

SEQ ID NO: 282302 - DNA, 25 bp, Artificial
  Probe
ttaggtgctccctgcctcagttcta

SEQ ID NO: 282303 - DNA, 25 bp, Artificial
  Probe
agagccactttgactgcagtcccca

SEQ ID NO: 282304 - DNA, 25 bp, Artificial
  Probe
ccaagcctggcctgggaaagcagga

SEQ ID NO: 282305 - DNA, 25 bp, Artificial
  Probe
cccaccagcggtggtgaggacacct

SEQ ID NO: 282306 - DNA, 25 bp, Artificial
  Probe
gtaccggttcaccaagcatttcata

SEQ ID NO: 282307 - DNA, 25 bp, Artificial
  Probe
ccacagtctaggaggagaaaacagt

SEQ ID NO: 282308 - DNA, 25 bp, Artificial
  Probe
tgggccctatcgtgcctggatcctt

SEQ ID NO: 282309 - DNA, 25 bp, Artificial
  Probe
gcttaacaacttgagttcgatcccc

SEQ ID NO: 282310 - DNA, 25 bp, Artificial
  Probe
ctttacttgagaagtagccaaaggg

SEQ ID NO: 282311 - DNA, 25 bp, Artificial
  Probe
gcagcttctgagttcattcacctaa

SEQ ID NO: 282312 - DNA, 25 bp, Artificial
  Probe
aactctgttaacaaggctgccctcg

SEQ ID NO: 282313 - DNA, 25 bp, Artificial
  Probe
atggatgttgtcttaggtgctccct

SEQ ID NO: 282314 - DNA, 25 bp, Artificial
  Probe
ttagaaaactgctgaacacagatag

SEQ ID NO: 282315 - DNA, 25 bp, Artificial
  Probe
gttgatttccaaatagagtttctct

SEQ ID NO: 282316 - DNA, 25 bp, Artificial
  Probe
gcagtgccctttgatccttggggag

SEQ ID NO: 282317 - DNA, 25 bp, Artificial
  Probe
gggtcgtcttcatctcactcttcct

SEQ ID NO: 282318 - DNA, 25 bp, Artificial
  Probe
ctttcttctgcttgcatctctgtgc

SEQ ID NO: 282319 - DNA, 25 bp, Artificial
  Probe
gagatgcttcagcagaggaagatgc

SEQ ID NO: 282320 - DNA, 25 bp, Artificial
  Probe
ttattccaggaaaagggactcctgc

SEQ ID NO: 282321 - DNA, 25 bp, Artificial
  Probe
ttgcatctctgtgcttgcttgcccc

SEQ ID NO: 282322 - DNA, 25 bp, Artificial
  Probe
tgtgtgtgcgtgatacatatcttca

SEQ ID NO: 282323 - DNA, 25 bp, Artificial
  Probe
gttctagagaggtttgccttcttgt

SEQ ID NO: 282324 - DNA, 25 bp, Artificial
  Probe
ctcctgaagatctgggctaattctg

SEQ ID NO: 282325 - DNA, 25 bp, Artificial
  Probe
acagaccatggcattcctgtgtgtg

SEQ ID NO: 282326 - DNA, 25 bp, Artificial
  Probe
cagctttcggtaaggcttggatgca

SEQ ID NO: 282327 - DNA, 25 bp, Artificial
  Probe
gacttggcgcctagggaagttgtca

SEQ ID NO: 282328 - DNA, 25 bp, Artificial
  Probe
agacttggcgcctagggaagttgtc

SEQ ID NO: 282329 - DNA, 25 bp, Artificial
  Probe
gctcaagctgagaggaaggaacaga

SEQ ID NO: 282330 - DNA, 25 bp, Artificial
  Probe
ccccagagcagagagtccagctgag

SEQ ID NO: 282331 - DNA, 25 bp, Artificial
  Probe
ccggctagggtcgtccgggcctcat

SEQ ID NO: 282332 - DNA, 25 bp, Artificial
  Probe
agagctcaagctgagaggaaggaac

SEQ ID NO: 282333 - DNA, 25 bp, Artificial
  Probe
gcaagatcaggcaggctgagcgtcc

SEQ ID NO: 282334 - DNA, 25 bp, Artificial
  Probe
accagctttcggtaaggcttggatg

SEQ ID NO: 282335 - DNA, 25 bp, Artificial
  Probe
agaattcaggactaggtctctcacg

SEQ ID NO: 282336 - DNA, 25 bp, Artificial
  Probe
cgccggctggtggtcgttctcgtct

SEQ ID NO: 282337 - DNA, 25 bp, Artificial
  Probe
tttcggtaaggcttggatgcactcc

SEQ ID NO: 282338 - DNA, 25 bp, Artificial
  Probe
gaaagattcgggtaccccagagcag

SEQ ID NO: 282339 - DNA, 25 bp, Artificial
  Probe
ctgaagacagacttggcgcctaggg

SEQ ID NO: 282340 - DNA, 25 bp, Artificial
  Probe
gacccaccagctttcggtaaggctt

SEQ ID NO: 282341 - DNA, 25 bp, Artificial
  Probe
ttcgggtaccccagagcagagagtc

SEQ ID NO: 282342 - DNA, 25 bp, Artificial
  Probe
actggcaagatcaggcaggctgagc

SEQ ID NO: 282343 - DNA, 25 bp, Artificial
  Probe
tgaagacagacttggcgcctaggga

SEQ ID NO: 282344 - DNA, 25 bp, Artificial
  Probe
cttctgagtagtgttggctgaagac

SEQ ID NO: 282345 - DNA, 25 bp, Artificial
  Probe
ccacgtggcttcctgggccggctag

SEQ ID NO: 282346 - DNA, 25 bp, Artificial
  Probe
atctggaaagccacgtgtcctccgc

SEQ ID NO: 282347 - DNA, 25 bp, Artificial
  Probe
atggagcagcaaagagctggccgac

SEQ ID NO: 282348 - DNA, 25 bp, Artificial
  Probe
gaaatatctggaaagccacgtgtcc

SEQ ID NO: 282349 - DNA, 25 bp, Artificial
  Probe
aggctcccgcggtctcctttctggg

SEQ ID NO: 282350 - DNA, 25 bp, Artificial
  Probe
agacataagagctcaagctgagagg

SEQ ID NO: 282351 - DNA, 25 bp, Artificial
  Probe
ttgaagcatggagcagcaaagagct

SEQ ID NO: 282352 - DNA, 25 bp, Artificial
  Probe
agacgactggcaagatcaggcaggc

SEQ ID NO: 282353 - DNA, 25 bp, Artificial
  Probe
ttcggtaaggcttggatgcactccc

SEQ ID NO: 282354 - DNA, 25 bp, Artificial
  Probe
ggacagagacgactggcaagatcag

SEQ ID NO: 282355 - DNA, 25 bp, Artificial
  Probe
cgactggcaagatcaggcaggctga

SEQ ID NO: 282356 - DNA, 25 bp, Artificial
  Probe
aagcatggagcagcaaagagctggc

SEQ ID NO: 282357 - DNA, 25 bp, Artificial
  Probe
cataagagctcaagctgagaggaag

SEQ ID NO: 282358 - DNA, 25 bp, Artificial
  Probe
agcagcaaagagctggccgacttgg

SEQ ID NO: 282359 - DNA, 25 bp, Artificial
  Probe
ggcgcctagggaagttgtcattttg

SEQ ID NO: 282360 - DNA, 25 bp, Artificial
  Probe
cagagggctgcatttcagagatagg

SEQ ID NO: 282361 - DNA, 25 bp, Artificial
  Probe
gacagagacgactggcaagatcagg

SEQ ID NO: 282362 - DNA, 25 bp, Artificial
  Probe
gaaagccacgtgtcctccgcagcgg

SEQ ID NO: 282363 - DNA, 25 bp, Artificial
  Probe
agagtccagctgagcgcggaagtcc

SEQ ID NO: 282364 - DNA, 25 bp, Artificial
  Probe
gggagaaatcacttcctgcctcaca

SEQ ID NO: 282365 - DNA, 25 bp, Artificial
  Probe
gagaaatcacttcctgcctcacagc

SEQ ID NO: 282366 - DNA, 25 bp, Artificial
  Probe
tggcgcctagggaagttgtcatttt

SEQ ID NO: 282367 - DNA, 25 bp, Artificial
  Probe
cagagcagagagtccagctgagcgc

SEQ ID NO: 282368 - DNA, 25 bp, Artificial
  Probe
ttggctgaagacagacttggcgcct

SEQ ID NO: 282369 - DNA, 25 bp, Artificial
  Probe
acccaccagctttcggtaaggcttg

SEQ ID NO: 282370 - DNA, 25 bp, Artificial
  Probe
gtcgttctcgtctctgctctcttcg

SEQ ID NO: 282371 - DNA, 25 bp, Artificial
  Probe
gaacagagggctgcatttcagagat

SEQ ID NO: 282372 - DNA, 25 bp, Artificial
  Probe
tttcatcaaaccagggctgtctgtg

SEQ ID NO: 282373 - DNA, 25 bp, Artificial
  Probe
gcggctggtctcatccgatccttct

SEQ ID NO: 282374 - DNA, 25 bp, Artificial
  Probe
ttcgtgtattaccttttatagccag

SEQ ID NO: 282375 - DNA, 25 bp, Artificial
  Probe
tggtctcatccgatccttctgtgaa

SEQ ID NO: 282376 - DNA, 25 bp, Artificial
  Probe
cagagccagggctcaaagcattctc

SEQ ID NO: 282377 - DNA, 25 bp, Artificial
  Probe
gactttggtgctacctcagctgagg

SEQ ID NO: 282378 - DNA, 25 bp, Artificial
  Probe
cagggtgcctagtctggttttccaa

SEQ ID NO: 282379 - DNA, 25 bp, Artificial
  Probe
ggcctcagcggctggtctcatccga

SEQ ID NO: 282380 - DNA, 25 bp, Artificial
  Probe
ccctttcatcaaaccagggctgtct

SEQ ID NO: 282381 - DNA, 25 bp, Artificial
  Probe
ttctagatccagcaggtggcatgtg

SEQ ID NO: 282382 - DNA, 25 bp, Artificial
  Probe
gtctgtggccctgaattgtgtttag

SEQ ID NO: 282383 - DNA, 25 bp, Artificial
  Probe
aaatccagtgctcttcgtgtattac

SEQ ID NO: 282384 - DNA, 25 bp, Artificial
  Probe
cagcaggtggcatgtgacagagcca

SEQ ID NO: 282385 - DNA, 25 bp, Artificial
  Probe
ccagcaggtggcatgtgacagagcc

SEQ ID NO: 282386 - DNA, 25 bp, Artificial
  Probe
cggctggtctcatccgatccttctg

SEQ ID NO: 282387 - DNA, 25 bp, Artificial
  Probe
gctcttcgtgtattaccttttatag

SEQ ID NO: 282388 - DNA, 25 bp, Artificial
  Probe
agatccagcaggtggcatgtgacag

SEQ ID NO: 282389 - DNA, 25 bp, Artificial
  Probe
tcctggatctgcactgccatctgtg

SEQ ID NO: 282390 - DNA, 25 bp, Artificial
  Probe
tcagcggctggtctcatccgatcct

SEQ ID NO: 282391 - DNA, 25 bp, Artificial
  Probe
gggtgcctagtctggttttccaaat

SEQ ID NO: 282392 - DNA, 25 bp, Artificial
  Probe
agtgcaacttgtagagtatgaggcc

SEQ ID NO: 282393 - DNA, 25 bp, Artificial
  Probe
ctagatccagcaggtggcatgtgac

SEQ ID NO: 282394 - DNA, 25 bp, Artificial
  Probe
caacagggtgcctagtctggttttc

SEQ ID NO: 282395 - DNA, 25 bp, Artificial
  Probe
caggaggccccatctggccaggctt

SEQ ID NO: 282396 - DNA, 25 bp, Artificial
  Probe
tccagtgctcttcgtgtattacctt

SEQ ID NO: 282397 - DNA, 25 bp, Artificial
  Probe
tgtctgtggccctgaattgtgttta

SEQ ID NO: 282398 - DNA, 25 bp, Artificial
  Probe
ttctgtgaacggtttccggaggatg

SEQ ID NO: 282399 - DNA, 25 bp, Artificial
  Probe
tcccctttcatcaaaccagggctgt

SEQ ID NO: 282400 - DNA, 25 bp, Artificial
  Probe
tgtgacagagccagggctcaaagca

SEQ ID NO: 282401 - DNA, 25 bp, Artificial
  Probe
tcatttcctggatctgcactgccat

SEQ ID NO: 282402 - DNA, 25 bp, Artificial
  Probe
ggcatgtgacagagccagggctcaa

SEQ ID NO: 282403 - DNA, 25 bp, Artificial
  Probe
gggctcaaagcattctcaccaaatc

SEQ ID NO: 282404 - DNA, 25 bp, Artificial
  Probe
atccttctgtgaacggtttccggag

SEQ ID NO: 282405 - DNA, 25 bp, Artificial
  Probe
gcctagtctggttttccaaatggga

SEQ ID NO: 282406 - DNA, 25 bp, Artificial
  Probe
gcaacttgtagagtatgaggcctca

SEQ ID NO: 282407 - DNA, 25 bp, Artificial
  Probe
agtgctcttcgtgtattacctttta

SEQ ID NO: 282408 - DNA, 25 bp, Artificial
  Probe
ctcaccaaatccagtgctcttcgtg

SEQ ID NO: 282409 - DNA, 25 bp, Artificial
  Probe
gtatgaggcctcagcggctggtctc

SEQ ID NO: 282410 - DNA, 25 bp, Artificial
  Probe
acagggtgcctagtctggttttcca

SEQ ID NO: 282411 - DNA, 25 bp, Artificial
  Probe
cacagcagatgctcaattctggagg

SEQ ID NO: 282412 - DNA, 25 bp, Artificial
  Probe
agtatgaggcctcagcggctggtct

SEQ ID NO: 282413 - DNA, 25 bp, Artificial
  Probe
gcctcagcggctggtctcatccgat

SEQ ID NO: 282414 - DNA, 25 bp, Artificial
  Probe
tttggtgctacctcagctgagggtg

SEQ ID NO: 282415 - DNA, 25 bp, Artificial
  Probe
attatgtcctcatttcctggatctg

SEQ ID NO: 282416 - DNA, 25 bp, Artificial
  Probe
tggcatgtgacagagccagggctca

SEQ ID NO: 282417 - DNA, 25 bp, Artificial
  Probe
catttcctggatctgcactgccatc

SEQ ID NO: 282418 - DNA, 25 bp, Artificial
  Probe
aggattggccatctaaacatcaaga

SEQ ID NO: 282419 - DNA, 25 bp, Artificial
  Probe
caggcatttaaatcagccaaagaat

SEQ ID NO: 282420 - DNA, 25 bp, Artificial
  Probe
ctaaacatcaagagcaagaagggtt

SEQ ID NO: 282421 - DNA, 25 bp, Artificial
  Probe
acaatctcatgaggattggccatct

SEQ ID NO: 282422 - DNA, 25 bp, Artificial
  Probe
ttggattctttcctacaaaaatggg

SEQ ID NO: 282423 - DNA, 25 bp, Artificial
  Probe
ccacaaacaatctcatgaggattgg

SEQ ID NO: 282424 - DNA, 25 bp, Artificial
  Probe
caaacaatctcatgaggattggcca

SEQ ID NO: 282425 - DNA, 25 bp, Artificial
  Probe
aacaggaccaagagaacacatcgtg

SEQ ID NO: 282426 - DNA, 25 bp, Artificial
  Probe
ttggccatctaaacatcaagagcaa

SEQ ID NO: 282427 - DNA, 25 bp, Artificial
  Probe
atctaaacatcaagagcaagaaggg

SEQ ID NO: 282428 - DNA, 25 bp, Artificial
  Probe
caagcaatgatactgttctgtggtg

SEQ ID NO: 282429 - DNA, 25 bp, Artificial
  Probe
aatctcatgaggattggccatctaa

SEQ ID NO: 282430 - DNA, 25 bp, Artificial
  Probe
caatctcatgaggattggccatcta

SEQ ID NO: 282431 - DNA, 25 bp, Artificial
  Probe
attcttcttgaagagagctaagcat

SEQ ID NO: 282432 - DNA, 25 bp, Artificial
  Probe
ttcttcttgaagagagctaagcata

SEQ ID NO: 282433 - DNA, 25 bp, Artificial
  Probe
tggccatctaaacatcaagagcaag

SEQ ID NO: 282434 - DNA, 25 bp, Artificial
  Probe
ggccatctaaacatcaagagcaaga

SEQ ID NO: 282435 - DNA, 25 bp, Artificial
  Probe
tccacaaacaatctcatgaggattg

SEQ ID NO: 282436 - DNA, 25 bp, Artificial
  Probe
tctaaacatcaagagcaagaagggt

SEQ ID NO: 282437 - DNA, 25 bp, Artificial
  Probe
ggattggccatctaaacatcaagag

SEQ ID NO: 282438 - DNA, 25 bp, Artificial
  Probe
atctcatgaggattggccatctaaa

SEQ ID NO: 282439 - DNA, 25 bp, Artificial
  Probe
attggccatctaaacatcaagagca

SEQ ID NO: 282440 - DNA, 25 bp, Artificial
  Probe
tcttcttgaagagagctaagcatat

SEQ ID NO: 282441 - DNA, 25 bp, Artificial
  Probe
tctcatgaggattggccatctaaac

SEQ ID NO: 282442 - DNA, 25 bp, Artificial
  Probe
ggcatttaaatcagccaaagaatat

SEQ ID NO: 282443 - DNA, 25 bp, Artificial
  Probe
catctaaacatcaagagcaagaagg

SEQ ID NO: 282444 - DNA, 25 bp, Artificial
  Probe
gccatctaaacatcaagagcaagaa

SEQ ID NO: 282445 - DNA, 25 bp, Artificial
  Probe
ccatctaaacatcaagagcaagaag

SEQ ID NO: 282446 - DNA, 25 bp, Artificial
  Probe
gattggccatctaaacatcaagagc

SEQ ID NO: 282447 - DNA, 25 bp, Artificial
  Probe
cacaaacaatctcatgaggattggc

SEQ ID NO: 282448 - DNA, 25 bp, Artificial
  Probe
gaatgacctggatgggccatgctca

SEQ ID NO: 282449 - DNA, 25 bp, Artificial
  Probe
gtggctcctgcgttgagccagcaac

SEQ ID NO: 282450 - DNA, 25 bp, Artificial
  Probe
aaatgaacagcatttcactttgccg

SEQ ID NO: 282451 - DNA, 25 bp, Artificial
  Probe
ttggccacatttgacctatttgagc

SEQ ID NO: 282452 - DNA, 25 bp, Artificial
  Probe
agcatttcactttgccgcgagtctt

SEQ ID NO: 282453 - DNA, 25 bp, Artificial
  Probe
tgccgcgagtcttggccacatttga

SEQ ID NO: 282454 - DNA, 25 bp, Artificial
  Probe
cccattcttcccaggggttatgaga

SEQ ID NO: 282455 - DNA, 25 bp, Artificial
  Probe
gctcctgcgttgagccagcaacttg

SEQ ID NO: 282456 - DNA, 25 bp, Artificial
  Probe
agccactgttgttggctgtgtgaca

SEQ ID NO: 282457 - DNA, 25 bp, Artificial
  Probe
cgagtcttggccacatttgacctat

SEQ ID NO: 282458 - DNA, 25 bp, Artificial
  Probe
cctggatgggccatgctcaactgtg

SEQ ID NO: 282459 - DNA, 25 bp, Artificial
  Probe
agcacaactgggtttgcactaaaga

SEQ ID NO: 282460 - DNA, 25 bp, Artificial
  Probe
cttcagaagtatctaggcagttggt

SEQ ID NO: 282461 - DNA, 25 bp, Artificial
  Probe
ttcccaggggttatgagaaaccctg

SEQ ID NO: 282462 - DNA, 25 bp, Artificial
  Probe
agactctgcagtgaagatggtgttc

SEQ ID NO: 282463 - DNA, 25 bp, Artificial
  Probe
acatttgaagccactgttgttggct

SEQ ID NO: 282464 - DNA, 25 bp, Artificial
  Probe
caacttgcaggctcacacagatgtc

SEQ ID NO: 282465 - DNA, 25 bp, Artificial
  Probe
actgggtttgcactaaagaatcatc

SEQ ID NO: 282466 - DNA, 25 bp, Artificial
  Probe
agtcacctgtgttgtagcccatgat

SEQ ID NO: 282467 - DNA, 25 bp, Artificial
  Probe
ctagcaaatgctaatgtggtgatca

SEQ ID NO: 282468 - DNA, 25 bp, Artificial
  Probe
ggaacccataaaagtgctaagttat

SEQ ID NO: 282469 - DNA, 25 bp, Artificial
  Probe
gtttatacatttgaagccactgttg

SEQ ID NO: 282470 - DNA, 25 bp, Artificial
  Probe
ttatacatttgaagccactgttgtt

SEQ ID NO: 282471 - DNA, 25 bp, Artificial
  Probe
aactcaggcacagcatgtcttcaga

SEQ ID NO: 282472 - DNA, 25 bp, Artificial
  Probe
ctcccagttaaactcaggcacagca

SEQ ID NO: 282473 - DNA, 25 bp, Artificial
  Probe
tgcgttgagccagcaacttgcaggc

SEQ ID NO: 282474 - DNA, 25 bp, Artificial
  Probe
ttaactgcacaggaagtcgataatt

SEQ ID NO: 282475 - DNA, 25 bp, Artificial
  Probe
ccagcaacttgcaggctcacacaga

SEQ ID NO: 282476 - DNA, 25 bp, Artificial
  Probe
ttgaagcacaactgggtttgcacta

SEQ ID NO: 282477 - DNA, 25 bp, Artificial
  Probe
ttaaactcaggcacagcatgtcttc

SEQ ID NO: 282478 - DNA, 25 bp, Artificial
  Probe
tcttgaagcacaactgggtttgcac

SEQ ID NO: 282479 - DNA, 25 bp, Artificial
  Probe
ccagttaaactcaggcacagcatgt

SEQ ID NO: 282480 - DNA, 25 bp, Artificial
  Probe
gaaaccctgccttagactctgcagt

SEQ ID NO: 282481 - DNA, 25 bp, Artificial
  Probe
tatgagaaaccctgccttagactct

SEQ ID NO: 282482 - DNA, 25 bp, Artificial
  Probe
cgttgagccagcaacttgcaggctc

SEQ ID NO: 282483 - DNA, 25 bp, Artificial
  Probe
gagccagcaacttgcaggctcacac

SEQ ID NO: 282484 - DNA, 25 bp, Artificial
  Probe
gaacccataaaagtgctaagttatt

SEQ ID NO: 282485 - DNA, 25 bp, Artificial
  Probe
catatcctgggatcaacttcccaag

SEQ ID NO: 282486 - DNA, 25 bp, Artificial
  Probe
ggctcacacagatgtcctcagactc

SEQ ID NO: 282487 - DNA, 25 bp, Artificial
  Probe
gatggtgttccgaagaatgacctgg

SEQ ID NO: 282488 - DNA, 25 bp, Artificial
  Probe
ggccatgctcaactgtgattcctcc

SEQ ID NO: 282489 - DNA, 25 bp, Artificial
  Probe
tatcctgggatcaacttcccaaggt

SEQ ID NO: 282490 - DNA, 25 bp, Artificial
  Probe
ctctgcagtgaagatggtgttccga

SEQ ID NO: 282491 - DNA, 25 bp, Artificial
  Probe
aaaggtggctcctgcgttgagccag

SEQ ID NO: 282492 - DNA, 25 bp, Artificial
  Probe
gtgttccgaagaatgacctggatgg

SEQ ID NO: 282493 - DNA, 25 bp, Artificial
  Probe
cactttgccgcgagtcttggccaca

SEQ ID NO: 282494 - DNA, 25 bp, Artificial
  Probe
acctccaacgcaatgtggcttttac

SEQ ID NO: 282495 - DNA, 25 bp, Artificial
  Probe
ccagctagctgtaaaaacattgctg

SEQ ID NO: 282496 - DNA, 25 bp, Artificial
  Probe
gactgacaaaaccagctagctgtaa

SEQ ID NO: 282497 - DNA, 25 bp, Artificial
  Probe
cgacttgatgacaagggacggtttt

SEQ ID NO: 282498 - DNA, 25 bp, Artificial
  Probe
ggtcatccttggtcatcagcctcca

SEQ ID NO: 282499 - DNA, 25 bp, Artificial
  Probe
atccttggtcatcagcctccagcat

SEQ ID NO: 282500 - DNA, 25 bp, Artificial
  Probe
attttttcctcctggtactggcaat

SEQ ID NO: 282501 - DNA, 25 bp, Artificial
  Probe
aaaccagctagctgtaaaaacattg

SEQ ID NO: 282502 - DNA, 25 bp, Artificial
  Probe
gccaaccattgtaatgtttttgtcc

SEQ ID NO: 282503 - DNA, 25 bp, Artificial
  Probe
gtcatccttggtcatcagcctccag

SEQ ID NO: 282504 - DNA, 25 bp, Artificial
  Probe
ccacaccgacttgatgacaagggac

SEQ ID NO: 282505 - DNA, 25 bp, Artificial
  Probe
tgaggtcatccttggtcatcagcct

SEQ ID NO: 282506 - DNA, 25 bp, Artificial
  Probe
ggcaatacacaacaccagctgtttt

SEQ ID NO: 282507 - DNA, 25 bp, Artificial
  Probe
tccaacgcaatgtggcttttacatt

SEQ ID NO: 282508 - DNA, 25 bp, Artificial
  Probe
atgaaagaagccaaccattgtaatg

SEQ ID NO: 282509 - DNA, 25 bp, Artificial
  Probe
cactgaggtcatccttggtcatcag

SEQ ID NO: 282510 - DNA, 25 bp, Artificial
  Probe
tctggaaacacctccaacgcaatgt

SEQ ID NO: 282511 - DNA, 25 bp, Artificial
  Probe
aaagtgactgacaaaaccagctagc

SEQ ID NO: 282512 - DNA, 25 bp, Artificial
  Probe
gacaaaaccagctagctgtaaaaac

SEQ ID NO: 282513 - DNA, 25 bp, Artificial
  Probe
acgcaatgtggcttttacatttctt

SEQ ID NO: 282514 - DNA, 25 bp, Artificial
  Probe
gaagccaaccattgtaatgtttttg

SEQ ID NO: 282515 - DNA, 25 bp, Artificial
  Probe
cgcaatgtggcttttacatttcttt

SEQ ID NO: 282516 - DNA, 25 bp, Artificial
  Probe
tctgggatgttagtgcagcgacccc

SEQ ID NO: 282517 - DNA, 25 bp, Artificial
  Probe
actgtgcactgaggtcatccttggt

SEQ ID NO: 282518 - DNA, 25 bp, Artificial
  Probe
tggtcatcagcctccagcatctgga

SEQ ID NO: 282519 - DNA, 25 bp, Artificial
  Probe
cctggtactggcaatacacaacacc

SEQ ID NO: 282520 - DNA, 25 bp, Artificial
  Probe
agtgactgacaaaaccagctagctg

SEQ ID NO: 282521 - DNA, 25 bp, Artificial
  Probe
caccgacttgatgacaagggacggt

SEQ ID NO: 282522 - DNA, 25 bp, Artificial
  Probe
tcctcctggtactggcaatacacaa

SEQ ID NO: 282523 - DNA, 25 bp, Artificial
  Probe
atcagcctccagcatctggaaacac

SEQ ID NO: 282524 - DNA, 25 bp, Artificial
  Probe
agcatctggaaacacctccaacgca

SEQ ID NO: 282525 - DNA, 25 bp, Artificial
  Probe
tgactgacaaaaccagctagctgta

SEQ ID NO: 282526 - DNA, 25 bp, Artificial
  Probe
catcagcctccagcatctggaaaca

SEQ ID NO: 282527 - DNA, 25 bp, Artificial
  Probe
gtcatcagcctccagcatctggaaa

SEQ ID NO: 282528 - DNA, 25 bp, Artificial
  Probe
gtctgggatgttagtgcagcgaccc

SEQ ID NO: 282529 - DNA, 25 bp, Artificial
  Probe
accgacttgatgacaagggacggtt

SEQ ID NO: 282530 - DNA, 25 bp, Artificial
  Probe
tccatgagcggtctgggatgttagt

SEQ ID NO: 282531 - DNA, 25 bp, Artificial
  Probe
ctggaaacacctccaacgcaatgtg

SEQ ID NO: 282532 - DNA, 25 bp, Artificial
  Probe
ctgcactgtgcactgaggtcatcct

SEQ ID NO: 282533 - DNA, 25 bp, Artificial
  Probe
gaaagaagccaaccattgtaatgtt

SEQ ID NO: 282534 - DNA, 25 bp, Artificial
  Probe
gcatctggaaacacctccaacgcaa

SEQ ID NO: 282535 - DNA, 25 bp, Artificial
  Probe
atctggaaacacctccaacgcaatg

SEQ ID NO: 282536 - DNA, 25 bp, Artificial
  Probe
tggtactggcaatacacaacaccag

SEQ ID NO: 282537 - DNA, 25 bp, Artificial
  Probe
aggtcatccttggtcatcagcctcc

SEQ ID NO: 282538 - DNA, 25 bp, Artificial
  Probe
cacctccaacgcaatgtggctttta

SEQ ID NO: 282539 - DNA, 25 bp, Artificial
  Probe
cggattgggaactgcactgtgcact

SEQ ID NO: 282540 - DNA, 25 bp, Artificial
  Probe
tggtcagcaatgttaccagcacaag

SEQ ID NO: 282541 - DNA, 25 bp, Artificial
  Probe
gtgagcgggccctcaaggatgcaga

SEQ ID NO: 282542 - DNA, 25 bp, Artificial
  Probe
gaacaccaacctgcaggcgtccatt

SEQ ID NO: 282543 - DNA, 25 bp, Artificial
  Probe
tgcaggcgtccattgcagaggctga

SEQ ID NO: 282544 - DNA, 25 bp, Artificial
  Probe
tgcagaggctgagcagcgtggtgag

SEQ ID NO: 282545 - DNA, 25 bp, Artificial
  Probe
caacctgcaggcgtccattgcagag

SEQ ID NO: 282546 - DNA, 25 bp, Artificial
  Probe
agaacaccaacctgcaggcgtccat

SEQ ID NO: 282547 - DNA, 25 bp, Artificial
  Probe
caaattccaagacttgcaggctgct

SEQ ID NO: 282548 - DNA, 25 bp, Artificial
  Probe
cgtggtgagcgggccctcaaggatg

SEQ ID NO: 282549 - DNA, 25 bp, Artificial
  Probe
tgcagatgccaaattccaagacttg

SEQ ID NO: 282550 - DNA, 25 bp, Artificial
  Probe
cagatgccaaattccaagacttgca

SEQ ID NO: 282551 - DNA, 25 bp, Artificial
  Probe
cctgcaggcgtccattgcagaggct

SEQ ID NO: 282552 - DNA, 25 bp, Artificial
  Probe
aacaccaacctgcaggcgtccattg

SEQ ID NO: 282553 - DNA, 25 bp, Artificial
  Probe
ggtcagcaatgttaccagcacaagc

SEQ ID NO: 282554 - DNA, 25 bp, Artificial
  Probe
cctcaaggatgcagatgccaaattc

SEQ ID NO: 282555 - DNA, 25 bp, Artificial
  Probe
tctctgccccagaacaccaacctgc

SEQ ID NO: 282556 - DNA, 25 bp, Artificial
  Probe
caggcgtccattgcagaggctgagc

SEQ ID NO: 282557 - DNA, 25 bp, Artificial
  Probe
gggccctcaaggatgcagatgccaa

SEQ ID NO: 282558 - DNA, 25 bp, Artificial
  Probe
agatgccaaattccaagacttgcag

SEQ ID NO: 282559 - DNA, 25 bp, Artificial
  Probe
ggccctcaaggatgcagatgccaaa

SEQ ID NO: 282560 - DNA, 25 bp, Artificial
  Probe
ctcaaggatgcagatgccaaattcc

SEQ ID NO: 282561 - DNA, 25 bp, Artificial
  Probe
gtggtcagcaatgttaccagcacaa

SEQ ID NO: 282562 - DNA, 25 bp, Artificial
  Probe
acctgcaggcgtccattgcagaggc

SEQ ID NO: 282563 - DNA, 25 bp, Artificial
  Probe
gagcgggccctcaaggatgcagatg

SEQ ID NO: 282564 - DNA, 25 bp, Artificial
  Probe
gatgcagatgccaaattccaagact

SEQ ID NO: 282565 - DNA, 25 bp, Artificial
  Probe
ctgcaggcgtccattgcagaggctg

SEQ ID NO: 282566 - DNA, 25 bp, Artificial
  Probe
cgggccctcaaggatgcagatgcca

SEQ ID NO: 282567 - DNA, 25 bp, Artificial
  Probe
tgagcgggccctcaaggatgcagat

SEQ ID NO: 282568 - DNA, 25 bp, Artificial
  Probe
gtcagcaatgttaccagcacaagca

SEQ ID NO: 282569 - DNA, 25 bp, Artificial
  Probe
tcagcaatgttaccagcacaagcag

SEQ ID NO: 282570 - DNA, 25 bp, Artificial
  Probe
agcgggccctcaaggatgcagatgc

SEQ ID NO: 282571 - DNA, 25 bp, Artificial
  Probe
gccctcaaggatgcagatgccaaat

SEQ ID NO: 282572 - DNA, 25 bp, Artificial
  Probe
gcagatgccaaattccaagacttgc

SEQ ID NO: 282573 - DNA, 25 bp, Artificial
  Probe
ccctcaaggatgcagatgccaaatt

SEQ ID NO: 282574 - DNA, 25 bp, Artificial
  Probe
cttgcaggctgctctgcagaaggcc

SEQ ID NO: 282575 - DNA, 25 bp, Artificial
  Probe
ttttactctctgccccagaacacca

SEQ ID NO: 282576 - DNA, 25 bp, Artificial
  Probe
gcgggccctcaaggatgcagatgcc

SEQ ID NO: 282577 - DNA, 25 bp, Artificial
  Probe
atgcagatgccaaattccaagactt

SEQ ID NO: 282578 - DNA, 25 bp, Artificial
  Probe
acaccaacctgcaggcgtccattgc

SEQ ID NO: 282579 - DNA, 25 bp, Artificial
  Probe
cagaacaccaacctgcaggcgtcca

SEQ ID NO: 282580 - DNA, 25 bp, Artificial
  Probe
atgccaaattccaagacttgcaggc

SEQ ID NO: 282581 - DNA, 25 bp, Artificial
  Probe
caggctgctctgcagaaggccaagg

SEQ ID NO: 282582 - DNA, 25 bp, Artificial
  Probe
gatgccaaattccaagacttgcagg

SEQ ID NO: 282583 - DNA, 25 bp, Artificial
  Probe
aacctgcaggcgtccattgcagagg

SEQ ID NO: 282584 - DNA, 25 bp, Artificial
  Probe
gcaggcgtccattgcagaggctgag

SEQ ID NO: 282585 - DNA, 25 bp, Artificial
  Probe
ccaaattccaagacttgcaggctgc

SEQ ID NO: 282586 - DNA, 25 bp, Artificial
  Probe
atctcagaccattggatccgcatgc

SEQ ID NO: 282587 - DNA, 25 bp, Artificial
  Probe
ctttgagctgctgtctcacaccgtg

SEQ ID NO: 282588 - DNA, 25 bp, Artificial
  Probe
agtccccagcgtgatggcctccgga

SEQ ID NO: 282589 - DNA, 25 bp, Artificial
  Probe
atgaactcctttgagctgctgtctc

SEQ ID NO: 282590 - DNA, 25 bp, Artificial
  Probe
aagtgatgaactcctttgagctgct

SEQ ID NO: 282591 - DNA, 25 bp, Artificial
  Probe
gcagcagtccccagcgtgatggcct

SEQ ID NO: 282592 - DNA, 25 bp, Artificial
  Probe
tttgagctgctgtctcacaccgtgg

SEQ ID NO: 282593 - DNA, 25 bp, Artificial
  Probe
actgggagtgtttccgtcgctcttc

SEQ ID NO: 282594 - DNA, 25 bp, Artificial
  Probe
gagctgctgtctcacaccgtgggaa

SEQ ID NO: 282595 - DNA, 25 bp, Artificial
  Probe
agtgactgggagtgtttccgtcgct

SEQ ID NO: 282596 - DNA, 25 bp, Artificial
  Probe
tggatgcagcagtccccagcgtgat

SEQ ID NO: 282597 - DNA, 25 bp, Artificial
  Probe
tcagaccattggatccgcatgcgct

SEQ ID NO: 282598 - DNA, 25 bp, Artificial
  Probe
agtgatgaactcctttgagctgctg

SEQ ID NO: 282599 - DNA, 25 bp, Artificial
  Probe
actcctttgagctgctgtctcacac

SEQ ID NO: 282600 - DNA, 25 bp, Artificial
  Probe
tatgcaggtgattggggctctgatc

SEQ ID NO: 282601 - DNA, 25 bp, Artificial
  Probe
tccccagcgtgatggcctccggagt

SEQ ID NO: 282602 - DNA, 25 bp, Artificial
  Probe
cctatgcaggtgattggggctctga

SEQ ID NO: 282603 - DNA, 25 bp, Artificial
  Probe
catctcagaccattggatccgcatg

SEQ ID NO: 282604 - DNA, 25 bp, Artificial
  Probe
tgatgaactcctttgagctgctgtc

SEQ ID NO: 282605 - DNA, 25 bp, Artificial
  Probe
cattggatccgcatgcgctcccagg

SEQ ID NO: 282606 - DNA, 25 bp, Artificial
  Probe
gactgggagtgtttccgtcgctctt

SEQ ID NO: 282607 - DNA, 25 bp, Artificial
  Probe
agctgctgtctcacaccgtgggaaa

SEQ ID NO: 282608 - DNA, 25 bp, Artificial
  Probe
attggatccgcatgcgctcccagga

SEQ ID NO: 282609 - DNA, 25 bp, Artificial
  Probe
ctcagaccattggatccgcatgcgc

SEQ ID NO: 282610 - DNA, 25 bp, Artificial
  Probe
tcctttgagctgctgtctcacaccg

SEQ ID NO: 282611 - DNA, 25 bp, Artificial
  Probe
cgaagtgatgaactcctttgagctg

SEQ ID NO: 282612 - DNA, 25 bp, Artificial
  Probe
caacatctcagaccattggatccgc

SEQ ID NO: 282613 - DNA, 25 bp, Artificial
  Probe
cctccggagtgactgggagtgtttc

SEQ ID NO: 282614 - DNA, 25 bp, Artificial
  Probe
aactcctttgagctgctgtctcaca

SEQ ID NO: 282615 - DNA, 25 bp, Artificial
  Probe
tcaacatctcagaccattggatccg

SEQ ID NO: 282616 - DNA, 25 bp, Artificial
  Probe
cctttgagctgctgtctcacaccgt

SEQ ID NO: 282617 - DNA, 25 bp, Artificial
  Probe
ctccggagtgactgggagtgtttcc

SEQ ID NO: 282618 - DNA, 25 bp, Artificial
  Probe
cagaccattggatccgcatgcgctc

SEQ ID NO: 282619 - DNA, 25 bp, Artificial
  Probe
ctgctgtctcacaccgtgggaaaag

SEQ ID NO: 282620 - DNA, 25 bp, Artificial
  Probe
acatctcagaccattggatccgcat

SEQ ID NO: 282621 - DNA, 25 bp, Artificial
  Probe
tacaccaaggaggagcaagtttaaa

SEQ ID NO: 282622 - DNA, 25 bp, Artificial
  Probe
ggagtgtttccgtcgctcttcatcc

SEQ ID NO: 282623 - DNA, 25 bp, Artificial
  Probe
tgactgggagtgtttccgtcgctct

SEQ ID NO: 282624 - DNA, 25 bp, Artificial
  Probe
gaactcctttgagctgctgtctcac

SEQ ID NO: 282625 - DNA, 25 bp, Artificial
  Probe
gtccccagcgtgatggcctccggag

SEQ ID NO: 282626 - DNA, 25 bp, Artificial
  Probe
tgtctcacaccgtgggaaaagaaga

SEQ ID NO: 282627 - DNA, 25 bp, Artificial
  Probe
gtgactgggagtgtttccgtcgctc

SEQ ID NO: 282628 - DNA, 25 bp, Artificial
  Probe
ttgagctgctgtctcacaccgtggg

SEQ ID NO: 282629 - DNA, 25 bp, Artificial
  Probe
tgaactcctttgagctgctgtctca

SEQ ID NO: 282630 - DNA, 25 bp, Artificial
  Probe
gctgctgtctcacaccgtgggaaaa

SEQ ID NO: 282631 - DNA, 25 bp, Artificial
  Probe
attacaccaaggaggagcaagttta

SEQ ID NO: 282632 - DNA, 25 bp, Artificial
  Probe
actggctctgggtagcactgctgat

SEQ ID NO: 282633 - DNA, 25 bp, Artificial
  Probe
gaacactggaatctttggttgctac

SEQ ID NO: 282634 - DNA, 25 bp, Artificial
  Probe
catgttcagttgtaagacggtaact

SEQ ID NO: 282635 - DNA, 25 bp, Artificial
  Probe
taagtcttcactttagatgctgtta

SEQ ID NO: 282636 - DNA, 25 bp, Artificial
  Probe
tataaactggctctgggtagcactg

SEQ ID NO: 282637 - DNA, 25 bp, Artificial
  Probe
agccgctgtaattgtgaatattaac

SEQ ID NO: 282638 - DNA, 25 bp, Artificial
  Probe
catatgtacactagccagtggttgt

SEQ ID NO: 282639 - DNA, 25 bp, Artificial
  Probe
tgaaacatggtgtccggttttctat

SEQ ID NO: 282640 - DNA, 25 bp, Artificial
  Probe
gttgtggacaaccatttacttggtg

SEQ ID NO: 282641 - DNA, 25 bp, Artificial
  Probe
agtaagcaggcagagtctttcaaat

SEQ ID NO: 282642 - DNA, 25 bp, Artificial
  Probe
agatctagaccttttagttcatatg

SEQ ID NO: 282643 - DNA, 25 bp, Artificial
  Probe
aagtcttcactttagatgctgttat

SEQ ID NO: 282644 - DNA, 25 bp, Artificial
  Probe
agctgtagccgctgtaattgtgaat

SEQ ID NO: 282645 - DNA, 25 bp, Artificial
  Probe
gtataaactggctctgggtagcact

SEQ ID NO: 282646 - DNA, 25 bp, Artificial
  Probe
tcactttagatgctgttatttctag

SEQ ID NO: 282647 - DNA, 25 bp, Artificial
  Probe
tttccgtataaactggctctgggta

SEQ ID NO: 282648 - DNA, 25 bp, Artificial
  Probe
agcacagtaagcaggcagagtcttt

SEQ ID NO: 282649 - DNA, 25 bp, Artificial
  Probe
tactttccgtataaactggctctgg

SEQ ID NO: 282650 - DNA, 25 bp, Artificial
  Probe
taagcaggcagagtctttcaaatgc

SEQ ID NO: 282651 - DNA, 25 bp, Artificial
  Probe
gagtcctaaagataatctagtagtc

SEQ ID NO: 282652 - DNA, 25 bp, Artificial
  Probe
tgtacactagccagtggttgtggac

SEQ ID NO: 282653 - DNA, 25 bp, Artificial
  Probe
ctgtagccgctgtaattgtgaatat

SEQ ID NO: 282654 - DNA, 25 bp, Artificial
  Probe
tgttatttctagcacagtaagcagg

SEQ ID NO: 282655 - DNA, 25 bp, Artificial
  Probe
cgtaagtcttcactttagatgctgt

SEQ ID NO: 282656 - DNA, 25 bp, Artificial
  Probe
ttttcgtaagtcttcactttagatg

SEQ ID NO: 282657 - DNA, 25 bp, Artificial
  Probe
tagtgaaacatggtgtccggttttc

SEQ ID NO: 282658 - DNA, 25 bp, Artificial
  Probe
gctgttatttctagcacagtaagca

SEQ ID NO: 282659 - DNA, 25 bp, Artificial
  Probe
aatgcagagtcctaaagataatcta

SEQ ID NO: 282660 - DNA, 25 bp, Artificial
  Probe
gtggacaaccatttacttggtgtaa

SEQ ID NO: 282661 - DNA, 25 bp, Artificial
  Probe
cagtaagcaggcagagtctttcaaa

SEQ ID NO: 282662 - DNA, 25 bp, Artificial
  Probe
ggacaaccatttacttggtgtaaag

SEQ ID NO: 282663 - DNA, 25 bp, Artificial
  Probe
gagcaacatttgtttctccccagat

SEQ ID NO: 282664 - DNA, 25 bp, Artificial
  Probe
gatctagaccttttagttcatatgt

SEQ ID NO: 282665 - DNA, 25 bp, Artificial
  Probe
gcaacacacatacatgttcagttgt

SEQ ID NO: 282666 - DNA, 25 bp, Artificial
  Probe
catggtgtccggttttctattgcat

SEQ ID NO: 282667 - DNA, 25 bp, Artificial
  Probe
gacaaccatttacttggtgtaaagg

SEQ ID NO: 282668 - DNA, 25 bp, Artificial
  Probe
ttactttccgtataaactggctctg

SEQ ID NO: 282669 - DNA, 25 bp, Artificial
  Probe
ggagcaacatttgtttctccccaga

SEQ ID NO: 282670 - DNA, 25 bp, Artificial
  Probe
caggcagagtctttcaaatgctcga

SEQ ID NO: 282671 - DNA, 25 bp, Artificial
  Probe
agcaggcagagtctttcaaatgctc

SEQ ID NO: 282672 - DNA, 25 bp, Artificial
  Probe
ttaatgcagagtcctaaagataatc

SEQ ID NO: 282673 - DNA, 25 bp, Artificial
  Probe
agccagtggttgtggacaaccattt

SEQ ID NO: 282674 - DNA, 25 bp, Artificial
  Probe
ttccgtataaactggctctgggtag

SEQ ID NO: 282675 - DNA, 25 bp, Artificial
  Probe
gcagagtctttcaaatgctcgaaca

SEQ ID NO: 282676 - DNA, 25 bp, Artificial
  Probe
tttagttcatatgtacactagccag

SEQ ID NO: 282677 - DNA, 25 bp, Artificial
  Probe
atcctgagctgtagccgctgtaatt

SEQ ID NO: 282678 - DNA, 25 bp, Artificial
  Probe
ttcgtgtacaacctgtccccagaag

SEQ ID NO: 282679 - DNA, 25 bp, Artificial
  Probe
catcgatggcatgagtggcctggca

SEQ ID NO: 282680 - DNA, 25 bp, Artificial
  Probe
caacccaagtcagaagacagggcag

SEQ ID NO: 282681 - DNA, 25 bp, Artificial
  Probe
acccaagtcagaagacagggcaggc

SEQ ID NO: 282682 - DNA, 25 bp, Artificial
  Probe
tcgtgtacaacctgtccccagaagc

SEQ ID NO: 282683 - DNA, 25 bp, Artificial
  Probe
ggtttcgtcaaccatgacccaatta

SEQ ID NO: 282684 - DNA, 25 bp, Artificial
  Probe
tgcaaacaacccaagtcagaagaca

SEQ ID NO: 282685 - DNA, 25 bp, Artificial
  Probe
tcgtcaaccatgacccaattacggt

SEQ ID NO: 282686 - DNA, 25 bp, Artificial
  Probe
aagtcagaagacagggcaggccctg

SEQ ID NO: 282687 - DNA, 25 bp, Artificial
  Probe
atcatcagacacagcgcttccggct

SEQ ID NO: 282688 - DNA, 25 bp, Artificial
  Probe
cgggtttcgtcaaccatgacccaat

SEQ ID NO: 282689 - DNA, 25 bp, Artificial
  Probe
gagtcaagaggttctccccaatcgc

SEQ ID NO: 282690 - DNA, 25 bp, Artificial
  Probe
tgctgtggcagcttttcggaccctt

SEQ ID NO: 282691 - DNA, 25 bp, Artificial
  Probe
ttcgtcaaccatgacccaattacgg

SEQ ID NO: 282692 - DNA, 25 bp, Artificial
  Probe
tcaacatggcctacggagtcaagag

SEQ ID NO: 282693 - DNA, 25 bp, Artificial
  Probe
tggtcccctgcatcatcagacacag

SEQ ID NO: 282694 - DNA, 25 bp, Artificial
  Probe
gcctacggagtcaagaggttctccc

SEQ ID NO: 282695 - DNA, 25 bp, Artificial
  Probe
ccccaatcgccatcgatggcatgag

SEQ ID NO: 282696 - DNA, 25 bp, Artificial
  Probe
accctttggggcagtcaccaatgtc

SEQ ID NO: 282697 - DNA, 25 bp, Artificial
  Probe
ccatcgatggcatgagtggcctggc

SEQ ID NO: 282698 - DNA, 25 bp, Artificial
  Probe
gcatcatcagacacagcgcttccgg

SEQ ID NO: 282699 - DNA, 25 bp, Artificial
  Probe
aaccatgacccaattacggttgagg

SEQ ID NO: 282700 - DNA, 25 bp, Artificial
  Probe
aatcgccatcgatggcatgagtggc

SEQ ID NO: 282701 - DNA, 25 bp, Artificial
  Probe
acccaattacggttgaggccgccat

SEQ ID NO: 282702 - DNA, 25 bp, Artificial
  Probe
tgtaccagtcctctgccaggcgcta

SEQ ID NO: 282703 - DNA, 25 bp, Artificial
  Probe
gctgtggcagcttttcggacccttt

SEQ ID NO: 282704 - DNA, 25 bp, Artificial
  Probe
tgcatcatcagacacagcgcttccg

SEQ ID NO: 282705 - DNA, 25 bp, Artificial
  Probe
gtgtacaacctgtccccagaagcgg

SEQ ID NO: 282706 - DNA, 25 bp, Artificial
  Probe
caaccatgacccaattacggttgag

SEQ ID NO: 282707 - DNA, 25 bp, Artificial
  Probe
caacctgtccccagaagcggatgag

SEQ ID NO: 282708 - DNA, 25 bp, Artificial
  Probe
caccaatgtcaaggtcatccgagat

SEQ ID NO: 282709 - DNA, 25 bp, Artificial
  Probe
ggcctacggagtcaagaggttctcc

SEQ ID NO: 282710 - DNA, 25 bp, Artificial
  Probe
gtcaagaggttctccccaatcgcca

SEQ ID NO: 282711 - DNA, 25 bp, Artificial
  Probe
acaacccaagtcagaagacagggca

SEQ ID NO: 282712 - DNA, 25 bp, Artificial
  Probe
cagacacagcgcttccggctggaca

SEQ ID NO: 282713 - DNA, 25 bp, Artificial
  Probe
caaacaacccaagtcagaagacagg

SEQ ID NO: 282714 - DNA, 25 bp, Artificial
  Probe
agtcaagaggttctccccaatcgcc

SEQ ID NO: 282715 - DNA, 25 bp, Artificial
  Probe
ctcaacatggcctacggagtcaaga

SEQ ID NO: 282716 - DNA, 25 bp, Artificial
  Probe
agacacagcgcttccggctggacaa

SEQ ID NO: 282717 - DNA, 25 bp, Artificial
  Probe
gcgcttccggctggacaatttgctc

SEQ ID NO: 282718 - DNA, 25 bp, Artificial
  Probe
ccatgacccaattacggttgaggcc

SEQ ID NO: 282719 - DNA, 25 bp, Artificial
  Probe
atggcctacggagtcaagaggttct

SEQ ID NO: 282720 - DNA, 25 bp, Artificial
  Probe
catggcctacggagtcaagaggttc

SEQ ID NO: 282721 - DNA, 25 bp, Artificial
  Probe
tgtgctgtggcagcttttcggaccc

SEQ ID NO: 282722 - DNA, 25 bp, Artificial
  Probe
catgacccaattacggttgaggccg

SEQ ID NO: 282723 - DNA, 25 bp, Artificial
  Probe
ccccagaagcggatgagagtgtgct

SEQ ID NO: 282724 - DNA, 25 bp, Artificial
  Probe
catctgtgctgtcctgcggctctct

SEQ ID NO: 282725 - DNA, 25 bp, Artificial
  Probe
cgctcgggagcatggcttggacttc

SEQ ID NO: 282726 - DNA, 25 bp, Artificial
  Probe
ttccagaaacttctggacgcaagca

SEQ ID NO: 282727 - DNA, 25 bp, Artificial
  Probe
cgggagcatggcttggacttccaga

SEQ ID NO: 282728 - DNA, 25 bp, Artificial
  Probe
cctggtgaagcttggtggccccatg

SEQ ID NO: 282729 - DNA, 25 bp, Artificial
  Probe
tctggacgcaagcacttacaaggag

SEQ ID NO: 282730 - DNA, 25 bp, Artificial
  Probe
ttggacttccagaaacttctggacg

SEQ ID NO: 282731 - DNA, 25 bp, Artificial
  Probe
ggtccgaagtgtcagctgtaggcct

SEQ ID NO: 282732 - DNA, 25 bp, Artificial
  Probe
gctgcagagcagacttggaggtaac

SEQ ID NO: 282733 - DNA, 25 bp, Artificial
  Probe
ctgcggctctctggtccactcaagg

SEQ ID NO: 282734 - DNA, 25 bp, Artificial
  Probe
gacgcaagcacttacaaggagacct

SEQ ID NO: 282735 - DNA, 25 bp, Artificial
  Probe
tacaaggagacctatcggagggaca

SEQ ID NO: 282736 - DNA, 25 bp, Artificial
  Probe
cactcaaggagcagtacgctcggga

SEQ ID NO: 282737 - DNA, 25 bp, Artificial
  Probe
gcctggtgaagcttggtggccccat

SEQ ID NO: 282738 - DNA, 25 bp, Artificial
  Probe
acttctggacgcaagcacttacaag

SEQ ID NO: 282739 - DNA, 25 bp, Artificial
  Probe
tcaggggtccgaagtgtcagctgta

SEQ ID NO: 282740 - DNA, 25 bp, Artificial
  Probe
gcggctctctggtccactcaaggag

SEQ ID NO: 282741 - DNA, 25 bp, Artificial
  Probe
gggagcatggcttggacttccagaa

SEQ ID NO: 282742 - DNA, 25 bp, Artificial
  Probe
acttacaaggagacctatcggaggg

SEQ ID NO: 282743 - DNA, 25 bp, Artificial
  Probe
tcaaggagcagtacgctcgggagca

SEQ ID NO: 282744 - DNA, 25 bp, Artificial
  Probe
ccacttcgtgcctggctggagttca

SEQ ID NO: 282745 - DNA, 25 bp, Artificial
  Probe
cacttacaaggagacctatcggagg

SEQ ID NO: 282746 - DNA, 25 bp, Artificial
  Probe
tccgaagtgtcagctgtaggcctgg

SEQ ID NO: 282747 - DNA, 25 bp, Artificial
  Probe
ccgcgtctggtgttgctgtttagcg

SEQ ID NO: 282748 - DNA, 25 bp, Artificial
  Probe
taacatctgtgctgtcctgcggctc

SEQ ID NO: 282749 - DNA, 25 bp, Artificial
  Probe
gcaagcacttacaaggagacctatc

SEQ ID NO: 282750 - DNA, 25 bp, Artificial
  Probe
gagacctatcggagggacatgatct

SEQ ID NO: 282751 - DNA, 25 bp, Artificial
  Probe
tacgctcgggagcatggcttggact

SEQ ID NO: 282752 - DNA, 25 bp, Artificial
  Probe
ccgaagtgtcagctgtaggcctggt

SEQ ID NO: 282753 - DNA, 25 bp, Artificial
  Probe
caaggagacctatcggagggacatg

SEQ ID NO: 282754 - DNA, 25 bp, Artificial
  Probe
ttcaggggtccgaagtgtcagctgt

SEQ ID NO: 282755 - DNA, 25 bp, Artificial
  Probe
aagtgtcagctgtaggcctggtgaa

SEQ ID NO: 282756 - DNA, 25 bp, Artificial
  Probe
tctctggtccactcaaggagcagta

SEQ ID NO: 282757 - DNA, 25 bp, Artificial
  Probe
ctcaaggagcagtacgctcgggagc

SEQ ID NO: 282758 - DNA, 25 bp, Artificial
  Probe
gcagagcagacttggaggtaacatc

SEQ ID NO: 282759 - DNA, 25 bp, Artificial
  Probe
catggcttggacttccagaaacttc

SEQ ID NO: 282760 - DNA, 25 bp, Artificial
  Probe
tggcttggacttccagaaacttctg

SEQ ID NO: 282761 - DNA, 25 bp, Artificial
  Probe
gggcgagtccacttcgtgcctggct

SEQ ID NO: 282762 - DNA, 25 bp, Artificial
  Probe
gagtccacttcgtgcctggctggag

SEQ ID NO: 282763 - DNA, 25 bp, Artificial
  Probe
ggaggtaacatctgtgctgtcctgc

SEQ ID NO: 282764 - DNA, 25 bp, Artificial
  Probe
cccgcgtctggtgttgctgtttagc

SEQ ID NO: 282765 - DNA, 25 bp, Artificial
  Probe
cagagcagacttggaggtaacatct

SEQ ID NO: 282766 - DNA, 25 bp, Artificial
  Probe
tctgtgctgtcctgcggctctctgg

SEQ ID NO: 282767 - DNA, 25 bp, Artificial
  Probe
tggaggtaacatctgtgctgtcctg

SEQ ID NO: 282768 - DNA, 25 bp, Artificial
  Probe
agcatggcttggacttccagaaact

SEQ ID NO: 282769 - DNA, 25 bp, Artificial
  Probe
cagaaacttctggacgcaagcactt

SEQ ID NO: 282770 - DNA, 25 bp, Artificial
  Probe
gaatcgcacgtgcaatgtcatttga

SEQ ID NO: 282771 - DNA, 25 bp, Artificial
  Probe
ggcggctcttggaggctcgactcaa

SEQ ID NO: 282772 - DNA, 25 bp, Artificial
  Probe
gctcttggaggctcgactcaagaag

SEQ ID NO: 282773 - DNA, 25 bp, Artificial
  Probe
ggctctgcgtcagtacgtggacgcc

SEQ ID NO: 282774 - DNA, 25 bp, Artificial
  Probe
tcggcggttgcaactacccactaga

SEQ ID NO: 282775 - DNA, 25 bp, Artificial
  Probe
tcgcacgtgcaatgtcatttgaatt

SEQ ID NO: 282776 - DNA, 25 bp, Artificial
  Probe
gaggctcgactcaagaagggactgc

SEQ ID NO: 282777 - DNA, 25 bp, Artificial
  Probe
gtcttgcccaagtctctgcgagcgc

SEQ ID NO: 282778 - DNA, 25 bp, Artificial
  Probe
actagaatcgcacgtgcaatgtcat

SEQ ID NO: 282779 - DNA, 25 bp, Artificial
  Probe
cacgtgcaatgtcatttgaatttgt

SEQ ID NO: 282780 - DNA, 25 bp, Artificial
  Probe
cgcgtcttgcccaagtctctgcgag

SEQ ID NO: 282781 - DNA, 25 bp, Artificial
  Probe
gggtcggcggttgcaactacccact

SEQ ID NO: 282782 - DNA, 25 bp, Artificial
  Probe
acggcggctcttggaggctcgactc

SEQ ID NO: 282783 - DNA, 25 bp, Artificial
  Probe
ctctgcgtcagtacgtggacgcctt

SEQ ID NO: 282784 - DNA, 25 bp, Artificial
  Probe
ccctcttggctctgcgtcagtacgt

SEQ ID NO: 282785 - DNA, 25 bp, Artificial
  Probe
gcaactacccactagaatcgcacgt

SEQ ID NO: 282786 - DNA, 25 bp, Artificial
  Probe
tgcgtcagtacgtggacgccttctt

SEQ ID NO: 282787 - DNA, 25 bp, Artificial
  Probe
atcgcacgtgcaatgtcatttgaat

SEQ ID NO: 282788 - DNA, 25 bp, Artificial
  Probe
ctgcgtcagtacgtggacgccttct

SEQ ID NO: 282789 - DNA, 25 bp, Artificial
  Probe
gctctgcgtcagtacgtggacgcct

SEQ ID NO: 282790 - DNA, 25 bp, Artificial
  Probe
ctcttggaggctcgactcaagaagg

SEQ ID NO: 282791 - DNA, 25 bp, Artificial
  Probe
ctacccactagaatcgcacgtgcaa

SEQ ID NO: 282792 - DNA, 25 bp, Artificial
  Probe
cactagaatcgcacgtgcaatgtca

SEQ ID NO: 282793 - DNA, 25 bp, Artificial
  Probe
ttggaggctcgactcaagaagggac

SEQ ID NO: 282794 - DNA, 25 bp, Artificial
  Probe
aactacccactagaatcgcacgtgc

SEQ ID NO: 282795 - DNA, 25 bp, Artificial
  Probe
aatcgcacgtgcaatgtcatttgaa

SEQ ID NO: 282796 - DNA, 25 bp, Artificial
  Probe
tgcaactacccactagaatcgcacg

SEQ ID NO: 282797 - DNA, 25 bp, Artificial
  Probe
tagaatcgcacgtgcaatgtcattt

SEQ ID NO: 282798 - DNA, 25 bp, Artificial
  Probe
gcggttgcaactacccactagaatc

SEQ ID NO: 282799 - DNA, 25 bp, Artificial
  Probe
caactacccactagaatcgcacgtg

SEQ ID NO: 282800 - DNA, 25 bp, Artificial
  Probe
tggctctgcgtcagtacgtggacgc

SEQ ID NO: 282801 - DNA, 25 bp, Artificial
  Probe
cttggctctgcgtcagtacgtggac

SEQ ID NO: 282802 - DNA, 25 bp, Artificial
  Probe
agaatcgcacgtgcaatgtcatttg

SEQ ID NO: 282803 - DNA, 25 bp, Artificial
  Probe
tacccactagaatcgcacgtgcaat

SEQ ID NO: 282804 - DNA, 25 bp, Artificial
  Probe
aagggactgcagaagcccaagcccc

SEQ ID NO: 282805 - DNA, 25 bp, Artificial
  Probe
actcaagaagggactgcagaagccc

SEQ ID NO: 282806 - DNA, 25 bp, Artificial
  Probe
aggctcgactcaagaagggactgca

SEQ ID NO: 282807 - DNA, 25 bp, Artificial
  Probe
actacccactagaatcgcacgtgca

SEQ ID NO: 282808 - DNA, 25 bp, Artificial
  Probe
ctcgactcaagaagggactgcagaa

SEQ ID NO: 282809 - DNA, 25 bp, Artificial
  Probe
ggtcggcggttgcaactacccacta

SEQ ID NO: 282810 - DNA, 25 bp, Artificial
  Probe
gctcgactcaagaagggactgcaga

SEQ ID NO: 282811 - DNA, 25 bp, Artificial
  Probe
tggaggctcgactcaagaagggact

SEQ ID NO: 282812 - DNA, 25 bp, Artificial
  Probe
ggcggttgcaactacccactagaat

SEQ ID NO: 282813 - DNA, 25 bp, Artificial
  Probe
gcgtcttgcccaagtctctgcgagc

SEQ ID NO: 282814 - DNA, 25 bp, Artificial
  Probe
tcttggaggctcgactcaagaaggg

SEQ ID NO: 282815 - DNA, 25 bp, Artificial
  Probe
cttggaggctcgactcaagaaggga

SEQ ID NO: 282816 - DNA, 25 bp, Artificial
  Probe
gatggtggccacaggagctggcttg

SEQ ID NO: 282817 - DNA, 25 bp, Artificial
  Probe
tgggcctccctacaggcttgcatcc

SEQ ID NO: 282818 - DNA, 25 bp, Artificial
  Probe
cctcgaggcataaactggcaccact

SEQ ID NO: 282819 - DNA, 25 bp, Artificial
  Probe
cttggctcacacattgggcctccct

SEQ ID NO: 282820 - DNA, 25 bp, Artificial
  Probe
tggcttggctcacacattgggcctc

SEQ ID NO: 282821 - DNA, 25 bp, Artificial
  Probe
gggcctccctacaggcttgcatccg

SEQ ID NO: 282822 - DNA, 25 bp, Artificial
  Probe
attgggcctccctacaggcttgcat

SEQ ID NO: 282823 - DNA, 25 bp, Artificial
  Probe
gcttggctcacacattgggcctccc

SEQ ID NO: 282824 - DNA, 25 bp, Artificial
  Probe
ggcctcgaggcataaactggcacca

SEQ ID NO: 282825 - DNA, 25 bp, Artificial
  Probe
tggcctcgaggcataaactggcacc

SEQ ID NO: 282826 - DNA, 25 bp, Artificial
  Probe
accactagagggcagggatggtggc

SEQ ID NO: 282827 - DNA, 25 bp, Artificial
  Probe
cacattgggcctccctacaggcttg

SEQ ID NO: 282828 - DNA, 25 bp, Artificial
  Probe
agggatggtggccacaggagctggc

SEQ ID NO: 282829 - DNA, 25 bp, Artificial
  Probe
gcctcgaggcataaactggcaccac

SEQ ID NO: 282830 - DNA, 25 bp, Artificial
  Probe
cacacattgggcctccctacaggct

SEQ ID NO: 282831 - DNA, 25 bp, Artificial
  Probe
caggagctggcttggctcacacatt

SEQ ID NO: 282832 - DNA, 25 bp, Artificial
  Probe
gcctccctacaggcttgcatccggg

SEQ ID NO: 282833 - DNA, 25 bp, Artificial
  Probe
ggcttggctcacacattgggcctcc

SEQ ID NO: 282834 - DNA, 25 bp, Artificial
  Probe
ggcataaactggcaccactagaggg

SEQ ID NO: 282835 - DNA, 25 bp, Artificial
  Probe
aaactggcaccactagagggcaggg

SEQ ID NO: 282836 - DNA, 25 bp, Artificial
  Probe
acaggagctggcttggctcacacat

SEQ ID NO: 282837 - DNA, 25 bp, Artificial
  Probe
ttggctcacacattgggcctcccta

SEQ ID NO: 282838 - DNA, 25 bp, Artificial
  Probe
gcagggatggtggccacaggagctg

SEQ ID NO: 282839 - DNA, 25 bp, Artificial
  Probe
ggccacaggagctggcttggctcac

SEQ ID NO: 282840 - DNA, 25 bp, Artificial
  Probe
gctggcttggctcacacattgggcc

SEQ ID NO: 282841 - DNA, 25 bp, Artificial
  Probe
gcataaactggcaccactagagggc

SEQ ID NO: 282842 - DNA, 25 bp, Artificial
  Probe
aggagctggcttggctcacacattg

SEQ ID NO: 282843 - DNA, 25 bp, Artificial
  Probe
ttgggcctccctacaggcttgcatc

SEQ ID NO: 282844 - DNA, 25 bp, Artificial
  Probe
ctggcaccactagagggcagggatg

SEQ ID NO: 282845 - DNA, 25 bp, Artificial
  Probe
acacattgggcctccctacaggctt

SEQ ID NO: 282846 - DNA, 25 bp, Artificial
  Probe
cattgggcctccctacaggcttgca

SEQ ID NO: 282847 - DNA, 25 bp, Artificial
  Probe
ggcagggatggtggccacaggagct

SEQ ID NO: 282848 - DNA, 25 bp, Artificial
  Probe
tagagggcagggatggtggccacag

SEQ ID NO: 282849 - DNA, 25 bp, Artificial
  Probe
tggtggccacaggagctggcttggc

SEQ ID NO: 282850 - DNA, 25 bp, Artificial
  Probe
ataaactggcaccactagagggcag

SEQ ID NO: 282851 - DNA, 25 bp, Artificial
  Probe
tggccacaggagctggcttggctca

SEQ ID NO: 282852 - DNA, 25 bp, Artificial
  Probe
cactagagggcagggatggtggcca

SEQ ID NO: 282853 - DNA, 25 bp, Artificial
  Probe
cataaactggcaccactagagggca

SEQ ID NO: 282854 - DNA, 25 bp, Artificial
  Probe
ctcacacattgggcctccctacagg

SEQ ID NO: 282855 - DNA, 25 bp, Artificial
  Probe
cacaggagctggcttggctcacaca

SEQ ID NO: 282856 - DNA, 25 bp, Artificial
  Probe
tggctcacacattgggcctccctac

SEQ ID NO: 282857 - DNA, 25 bp, Artificial
  Probe
aactggcaccactagagggcaggga

SEQ ID NO: 282858 - DNA, 25 bp, Artificial
  Probe
agctggcttggctcacacattgggc

SEQ ID NO: 282859 - DNA, 25 bp, Artificial
  Probe
ctggcttggctcacacattgggcct

SEQ ID NO: 282860 - DNA, 25 bp, Artificial
  Probe
gagctggcttggctcacacattggg

SEQ ID NO: 282861 - DNA, 25 bp, Artificial
  Probe
taaactggcaccactagagggcagg

SEQ ID NO: 282862 - DNA, 25 bp, Artificial
  Probe
cctgtcagccactctggggctcggg

SEQ ID NO: 282863 - DNA, 25 bp, Artificial
  Probe
aggctggaccctgaacagcgctggc

SEQ ID NO: 282864 - DNA, 25 bp, Artificial
  Probe
agccaacactttgttctctgctttg

SEQ ID NO: 282865 - DNA, 25 bp, Artificial
  Probe
cctggctcctgttggttgcaaccct

SEQ ID NO: 282866 - DNA, 25 bp, Artificial
  Probe
ataatggagtttctcagtttcttgc

SEQ ID NO: 282867 - DNA, 25 bp, Artificial
  Probe
tgcaaccctgtcagccactctgggg

SEQ ID NO: 282868 - DNA, 25 bp, Artificial
  Probe
aacagcgctggctaccttctgggcc

SEQ ID NO: 282869 - DNA, 25 bp, Artificial
  Probe
cactgctcaagatggccaggggcag

SEQ ID NO: 282870 - DNA, 25 bp, Artificial
  Probe
ctttgttctctgctttgatgctgag

SEQ ID NO: 282871 - DNA, 25 bp, Artificial
  Probe
gcacctgtgtcctctgctataattt

SEQ ID NO: 282872 - DNA, 25 bp, Artificial
  Probe
acaagcatggcctcacaggcaagag

SEQ ID NO: 282873 - DNA, 25 bp, Artificial
  Probe
ctgttggttgcaaccctgtcagcca

SEQ ID NO: 282874 - DNA, 25 bp, Artificial
  Probe
ctcacaggcaagagggagttaccac

SEQ ID NO: 282875 - DNA, 25 bp, Artificial
  Probe
acctagagcagtcctgagaccacac

SEQ ID NO: 282876 - DNA, 25 bp, Artificial
  Probe
caggggcagcgttatcctgctagcc

SEQ ID NO: 282877 - DNA, 25 bp, Artificial
  Probe
accactgctcaagatggccaggggc

SEQ ID NO: 282878 - DNA, 25 bp, Artificial
  Probe
tctgggcccacatgccattgacaac

SEQ ID NO: 282879 - DNA, 25 bp, Artificial
  Probe
tggaccctgaacagcgctggctacc

SEQ ID NO: 282880 - DNA, 25 bp, Artificial
  Probe
cacctcctcagaagacctagagcag

SEQ ID NO: 282881 - DNA, 25 bp, Artificial
  Probe
gagtttctcagtttcttgcacctta

SEQ ID NO: 282882 - DNA, 25 bp, Artificial
  Probe
cactataatggagtttctcagtttc

SEQ ID NO: 282883 - DNA, 25 bp, Artificial
  Probe
cactgtgcacctgtgtcctctgcta

SEQ ID NO: 282884 - DNA, 25 bp, Artificial
  Probe
ccaggggcagcgttatcctgctagc

SEQ ID NO: 282885 - DNA, 25 bp, Artificial
  Probe
tgttctctgctttgatgctgagtta

SEQ ID NO: 282886 - DNA, 25 bp, Artificial
  Probe
tctctgctttgatgctgagttatta

SEQ ID NO: 282887 - DNA, 25 bp, Artificial
  Probe
ccaccactgctcaagatggccaggg

SEQ ID NO: 282888 - DNA, 25 bp, Artificial
  Probe
gttctctgctttgatgctgagttat

SEQ ID NO: 282889 - DNA, 25 bp, Artificial
  Probe
ctataatggagtttctcagtttctt

SEQ ID NO: 282890 - DNA, 25 bp, Artificial
  Probe
cttctgggcccacatgccattgaca

SEQ ID NO: 282891 - DNA, 25 bp, Artificial
  Probe
tggttgcaaccctgtcagccactct

SEQ ID NO: 282892 - DNA, 25 bp, Artificial
  Probe
gctggctaccttctgggcccacatg

SEQ ID NO: 282893 - DNA, 25 bp, Artificial
  Probe
ggcctcacaggcaagagggagttac

SEQ ID NO: 282894 - DNA, 25 bp, Artificial
  Probe
tggctcctgttggttgcaaccctgt

SEQ ID NO: 282895 - DNA, 25 bp, Artificial
  Probe
cctcacaggcaagagggagttacca

SEQ ID NO: 282896 - DNA, 25 bp, Artificial
  Probe
atggccaggggcagcgttatcctgc

SEQ ID NO: 282897 - DNA, 25 bp, Artificial
  Probe
tgctagcctggctcctgttggttgc

SEQ ID NO: 282898 - DNA, 25 bp, Artificial
  Probe
cgttatcctgctagcctggctcctg

SEQ ID NO: 282899 - DNA, 25 bp, Artificial
  Probe
cctgaacagcgctggctaccttctg

SEQ ID NO: 282900 - DNA, 25 bp, Artificial
  Probe
ctggaccctgaacagcgctggctac

SEQ ID NO: 282901 - DNA, 25 bp, Artificial
  Probe
atcctgctagcctggctcctgttgg

SEQ ID NO: 282902 - DNA, 25 bp, Artificial
  Probe
cctcctcagaagacctagagcagtc

SEQ ID NO: 282903 - DNA, 25 bp, Artificial
  Probe
caagcatggcctcacaggcaagagg

SEQ ID NO: 282904 - DNA, 25 bp, Artificial
  Probe
tgtcagccactctggggctcgggat

SEQ ID NO: 282905 - DNA, 25 bp, Artificial
  Probe
caacactttgttctctgctttgatg

SEQ ID NO: 282906 - DNA, 25 bp, Artificial
  Probe
ctcaagatggccaggggcagcgtta

SEQ ID NO: 282907 - DNA, 25 bp, Artificial
  Probe
gccaacactttgttctctgctttga

SEQ ID NO: 282908 - DNA, 25 bp, Artificial
  Probe
gcgtacatccggtcgttgcctcaag

SEQ ID NO: 282909 - DNA, 25 bp, Artificial
  Probe
aagcgctgggcactagcccggtcct

SEQ ID NO: 282910 - DNA, 25 bp, Artificial
  Probe
tgtgcgtgtgcacacatgtgcgtac

SEQ ID NO: 282911 - DNA, 25 bp, Artificial
  Probe
agggtcattcagagcgctgtaaaga

SEQ ID NO: 282912 - DNA, 25 bp, Artificial
  Probe
ttcagaatggccttcgagaaactca

SEQ ID NO: 282913 - DNA, 25 bp, Artificial
  Probe
taagcgctgggcactagcccggtcc

SEQ ID NO: 282914 - DNA, 25 bp, Artificial
  Probe
gacgaaccaggctgtagcaaccgtg

SEQ ID NO: 282915 - DNA, 25 bp, Artificial
  Probe
acggtaggcattcagaatggccttc

SEQ ID NO: 282916 - DNA, 25 bp, Artificial
  Probe
ttccagtcaaggagaacacgctcat

SEQ ID NO: 282917 - DNA, 25 bp, Artificial
  Probe
gcaaccgacatgtgcgtgtgcacac

SEQ ID NO: 282918 - DNA, 25 bp, Artificial
  Probe
ccgacatgtgcgtgtgcacacatgt

SEQ ID NO: 282919 - DNA, 25 bp, Artificial
  Probe
tcgagaaactcattttatgcactag

SEQ ID NO: 282920 - DNA, 25 bp, Artificial
  Probe
aagattaagcgctgggcactagccc

SEQ ID NO: 282921 - DNA, 25 bp, Artificial
  Probe
ctctgtagaggctcacctttcaggg

SEQ ID NO: 282922 - DNA, 25 bp, Artificial
  Probe
tgagggatttgctcccaatgttttt

SEQ ID NO: 282923 - DNA, 25 bp, Artificial
  Probe
tgtgcacatgcaaccgacatgtgcg

SEQ ID NO: 282924 - DNA, 25 bp, Artificial
  Probe
tgcacttcagttaaaatgtgcagaa

SEQ ID NO: 282925 - DNA, 25 bp, Artificial
  Probe
tggggagactttccagtcaaggaga

SEQ ID NO: 282926 - DNA, 25 bp, Artificial
  Probe
aggctcacctttcagggacgaacca

SEQ ID NO: 282927 - DNA, 25 bp, Artificial
  Probe
tgcgtgtgcacacatgtgcgtacat

SEQ ID NO: 282928 - DNA, 25 bp, Artificial
  Probe
cattcagagcgctgtaaagattaag

SEQ ID NO: 282929 - DNA, 25 bp, Artificial
  Probe
tcatgaacgagaaggctgtgcacat

SEQ ID NO: 282930 - DNA, 25 bp, Artificial
  Probe
ctcattttatgcactagattgtgag

SEQ ID NO: 282931 - DNA, 25 bp, Artificial
  Probe
aacacgctcatcctgctggggcact

SEQ ID NO: 282932 - DNA, 25 bp, Artificial
  Probe
catgtgcgtacatccggtcgttgcc

SEQ ID NO: 282933 - DNA, 25 bp, Artificial
  Probe
agaacggtaggcattcagaatggcc

SEQ ID NO: 282934 - DNA, 25 bp, Artificial
  Probe
acatgcaaccgacatgtgcgtgtgc

SEQ ID NO: 282935 - DNA, 25 bp, Artificial
  Probe
cacacatgtgcgtacatccggtcgt

SEQ ID NO: 282936 - DNA, 25 bp, Artificial
  Probe
ccggtcgttgcctcaagtgtacttt

SEQ ID NO: 282937 - DNA, 25 bp, Artificial
  Probe
taggcattcagaatggccttcgaga

SEQ ID NO: 282938 - DNA, 25 bp, Artificial
  Probe
cagggacgaaccaggctgtagcaac

SEQ ID NO: 282939 - DNA, 25 bp, Artificial
  Probe
tcctgctggggcactcactgacaaa

SEQ ID NO: 282940 - DNA, 25 bp, Artificial
  Probe
gaaactcattttatgcactagattg

SEQ ID NO: 282941 - DNA, 25 bp, Artificial
  Probe
tattcatgaacgagaaggctgtgca

SEQ ID NO: 282942 - DNA, 25 bp, Artificial
  Probe
gtgacaagaacctttacacctgctc

SEQ ID NO: 282943 - DNA, 25 bp, Artificial
  Probe
cctttcagggacgaaccaggctgta

SEQ ID NO: 282944 - DNA, 25 bp, Artificial
  Probe
aggcattcagaatggccttcgagaa

SEQ ID NO: 282945 - DNA, 25 bp, Artificial
  Probe
ctcactgacaaatggtattcatgaa

SEQ ID NO: 282946 - DNA, 25 bp, Artificial
  Probe
ttcagagcgctgtaaagattaagcg

SEQ ID NO: 282947 - DNA, 25 bp, Artificial
  Probe
acatccggtcgttgcctcaagtgta

SEQ ID NO: 282948 - DNA, 25 bp, Artificial
  Probe
tgtgcacacatgtgcgtacatccgg

SEQ ID NO: 282949 - DNA, 25 bp, Artificial
  Probe
aggagaacacgctcatcctgctggg

SEQ ID NO: 282950 - DNA, 25 bp, Artificial
  Probe
aaatgtgcagaacttccagaaactg

SEQ ID NO: 282951 - DNA, 25 bp, Artificial
  Probe
cacatgcaaccgacatgtgcgtgtg

SEQ ID NO: 282952 - DNA, 25 bp, Artificial
  Probe
caggctgtagcaaccgtggagactg

SEQ ID NO: 282953 - DNA, 25 bp, Artificial
  Probe
ttgtgagggatttgctcccaatgtt

SEQ ID NO: 282954 - DNA, 25 bp, Artificial
  Probe
aatgtcataccgtgtctaagagaat

SEQ ID NO: 282955 - DNA, 25 bp, Artificial
  Probe
tagaaatgtcataccgtgtctaaga

SEQ ID NO: 282956 - DNA, 25 bp, Artificial
  Probe
ctcctccaggactgtcagggagtgt

SEQ ID NO: 282957 - DNA, 25 bp, Artificial
  Probe
tcaagtagtgccaagccctgatgac

SEQ ID NO: 282958 - DNA, 25 bp, Artificial
  Probe
agatagaactggttttcacagagtc

SEQ ID NO: 282959 - DNA, 25 bp, Artificial
  Probe
tactaggatacaggaacctaggggg

SEQ ID NO: 282960 - DNA, 25 bp, Artificial
  Probe
gtgtctatcagattgactttgctgc

SEQ ID NO: 282961 - DNA, 25 bp, Artificial
  Probe
gtgccaagccctgatgactaagtac

SEQ ID NO: 282962 - DNA, 25 bp, Artificial
  Probe
tcttagaaatgtcataccgtgtcta

SEQ ID NO: 282963 - DNA, 25 bp, Artificial
  Probe
ttatttcagacatggttcttctaag

SEQ ID NO: 282964 - DNA, 25 bp, Artificial
  Probe
tcttctaagcagtttatccctgaga

SEQ ID NO: 282965 - DNA, 25 bp, Artificial
  Probe
gctattgagtctttcctgggttttg

SEQ ID NO: 282966 - DNA, 25 bp, Artificial
  Probe
gccaagccctgatgactaagtacta

SEQ ID NO: 282967 - DNA, 25 bp, Artificial
  Probe
gtcagggagtgtctatcagattgac

SEQ ID NO: 282968 - DNA, 25 bp, Artificial
  Probe
tcataccgtgtctaagagaatgaca
